United States Patent Application Publication US 2005/0244851 A1 - sequence listing, part 133

SEQ ID NO: 5191354 - DNA, 25 bp, Homo sapien
ttccagtttgctgaccagaggtctc

SEQ ID NO: 5191355 - DNA, 25 bp, Homo sapien
tccactagtctacctgatgccatat

SEQ ID NO: 5191356 - DNA, 25 bp, Homo sapien
ggagaaaagatgcacaacttaaaat

SEQ ID NO: 5191357 - DNA, 25 bp, Homo sapien
ttaaagtagttatccaatacactct

SEQ ID NO: 5191358 - DNA, 25 bp, Homo sapien
gatgccatatctagctttttggcca

SEQ ID NO: 5191359 - DNA, 25 bp, Homo sapien
taaatacgcagatactatgtgcact

SEQ ID NO: 5191360 - DNA, 25 bp, Homo sapien
tatatattatgaaaagttgcagtct

SEQ ID NO: 5191361 - DNA, 25 bp, Homo sapien
gacagcaaattttagggatctaaat

SEQ ID NO: 5191362 - DNA, 25 bp, Homo sapien
tgatctataggctgtaataaacaag

SEQ ID NO: 5191363 - DNA, 25 bp, Homo sapien
taggctattagcaggaagtgtcaca

SEQ ID NO: 5191364 - DNA, 25 bp, Homo sapien
actaccagattcagcagctacagat

SEQ ID NO: 5191365 - DNA, 25 bp, Homo sapien
aattccaaactctagcatggctttc

SEQ ID NO: 5191366 - DNA, 25 bp, Homo sapien
gcagcatagccttattactaccaga

SEQ ID NO: 5191367 - DNA, 25 bp, Homo sapien
cagtctctgaagctactcctgtcca

SEQ ID NO: 5191368 - DNA, 25 bp, Homo sapien
cccagtactgtttgttgagtccaca

SEQ ID NO: 5191369 - DNA, 25 bp, Homo sapien
aacctccagatggttgttacaacgt

SEQ ID NO: 5191370 - DNA, 25 bp, Homo sapien
tgagtccacattgctctggcagggt

SEQ ID NO: 5191371 - DNA, 25 bp, Homo sapien
gaagtagggtgtccatggaagcagt

SEQ ID NO: 5191372 - DNA, 25 bp, Homo sapien
agtagggtgtccatggaagcagtgt

SEQ ID NO: 5191373 - DNA, 25 bp, Homo sapien
atggtctggaatcaactccatgttt

SEQ ID NO: 5191374 - DNA, 25 bp, Homo sapien
ctggaatcaactccatgtttattgg

SEQ ID NO: 5191375 - DNA, 25 bp, Homo sapien
cttctacaagcgtcttccctctgct

SEQ ID NO: 5191376 - DNA, 25 bp, Homo sapien
agccatacttccctctgcagatttt

SEQ ID NO: 5191377 - DNA, 25 bp, Homo sapien
ttctgaaacaaggagcgatgcctgc

SEQ ID NO: 5191378 - DNA, 25 bp, Homo sapien
ctggatcatcggaatataaaatctc

SEQ ID NO: 5191379 - DNA, 25 bp, Homo sapien
gagcgatgcctgctggatcatcgga

SEQ ID NO: 5191380 - DNA, 25 bp, Homo sapien
attggttgttcttcatgagatcttg

SEQ ID NO: 5191381 - DNA, 25 bp, Homo sapien
gttgttcttcatgagatcttgattc

SEQ ID NO: 5191382 - DNA, 25 bp, Homo sapien
cagcatggcaatatgggactgagat

SEQ ID NO: 5191383 - DNA, 25 bp, Homo sapien
gattctggatatcctggaatgcatt

SEQ ID NO: 5191384 - DNA, 25 bp, Homo sapien
ctgttggtcctctttgcttttgaca

SEQ ID NO: 5191385 - DNA, 25 bp, Homo sapien
gttggtcctctttgcttttgacata

SEQ ID NO: 5191386 - DNA, 25 bp, Homo sapien
tcctctttgcttttgacatactcat

SEQ ID NO: 5191387 - DNA, 25 bp, Homo sapien
ggtcctctttgcttttgacatactc

SEQ ID NO: 5191388 - DNA, 25 bp, Homo sapien
gcctggatggcaagtttatctatat

SEQ ID NO: 5191389 - DNA, 25 bp, Homo sapien
gatggcaagtttatctatatgagat

SEQ ID NO: 5191390 - DNA, 25 bp, Homo sapien
tggatggcaagtttatctatatgag

SEQ ID NO: 5191391 - DNA, 25 bp, Homo sapien
agtttatctatatgagatatttcca

SEQ ID NO: 5191392 - DNA, 25 bp, Homo sapien
gaaacatgcaatgagcctctaagat

SEQ ID NO: 5191393 - DNA, 25 bp, Homo sapien
catctgccacccatggataaagccg

SEQ ID NO: 5191394 - DNA, 25 bp, Homo sapien
gataaagccgtagtgccatgtgggt

SEQ ID NO: 5191395 - DNA, 25 bp, Homo sapien
tactaaagtgtgagttggctttccc

SEQ ID NO: 5191396 - DNA, 25 bp, Homo sapien
ggctccgtcagaacacactgaagag

SEQ ID NO: 5191397 - DNA, 25 bp, Homo sapien
tgaagagagtacactcctccctcgt

SEQ ID NO: 5191398 - DNA, 25 bp, Homo sapien
cactcttttagaggacgaatccctg

SEQ ID NO: 5191399 - DNA, 25 bp, Homo sapien
tggtttctgtacttcggctccgtca

SEQ ID NO: 5191400 - DNA, 25 bp, Homo sapien
tgcctatgcaggacttctaacctac

SEQ ID NO: 5191401 - DNA, 25 bp, Homo sapien
cctacagtaatataagctgattaat

SEQ ID NO: 5191402 - DNA, 25 bp, Homo sapien
tcccaaagtgcctatgcaggacttc

SEQ ID NO: 5191403 - DNA, 25 bp, Homo sapien
gggaatttgttacatgttaatagaa

SEQ ID NO: 5191404 - DNA, 25 bp, Homo sapien
ttttaaaatagatctcctgtaatcc

SEQ ID NO: 5191405 - DNA, 25 bp, Homo sapien
ttgatgctaaaattccttggggcat

SEQ ID NO: 5191406 - DNA, 25 bp, Homo sapien
tgatgctaaaattccttggggcata

SEQ ID NO: 5191407 - DNA, 25 bp, Homo sapien
gtgccactcatggacatcatgctca

SEQ ID NO: 5191408 - DNA, 25 bp, Homo sapien
ttgtgccactcatggacatcatgct

SEQ ID NO: 5191409 - DNA, 25 bp, Homo sapien
tgtgccactcatggacatcatgctc

SEQ ID NO: 5191410 - DNA, 25 bp, Homo sapien
ctgcagaatttagatgctttgtcat

SEQ ID NO: 5191411 - DNA, 25 bp, Homo sapien
tcaacactctcagtactgtcacagc

SEQ ID NO: 5191412 - DNA, 25 bp, Homo sapien
cactcatagctgcaacgctgtcaca

SEQ ID NO: 5191413 - DNA, 25 bp, Homo sapien
ttaaaactgaacgattgacactatc

SEQ ID NO: 5191414 - DNA, 25 bp, Homo sapien
gaacgattgacactatcaacactct

SEQ ID NO: 5191415 - DNA, 25 bp, Homo sapien
tcatttagctcattgaatttgttca

SEQ ID NO: 5191416 - DNA, 25 bp, Homo sapien
tcaaattgaattctcggcccactat

SEQ ID NO: 5191417 - DNA, 25 bp, Homo sapien
gttcataaactcatcactagcactg

SEQ ID NO: 5191418 - DNA, 25 bp, Homo sapien
aatgttctttcacactcaaattgaa

SEQ ID NO: 5191419 - DNA, 25 bp, Homo sapien
tgaagattctatgcctctgaaaaca

SEQ ID NO: 5191420 - DNA, 25 bp, Homo sapien
cctgaagattctatgcctctgaaaa

SEQ ID NO: 5191421 - DNA, 25 bp, Homo sapien
ttcctgaagattctatgcctctgaa

SEQ ID NO: 5191422 - DNA, 25 bp, Homo sapien
gattctatgcctctgaaaacatatt

SEQ ID NO: 5191423 - DNA, 25 bp, Homo sapien
ttctctgatgagcttagtaaggaaa

SEQ ID NO: 5191424 - DNA, 25 bp, Homo sapien
tcattggggagacgatttaattctc

SEQ ID NO: 5191425 - DNA, 25 bp, Homo sapien
tacctactatttgcatatgatccct

SEQ ID NO: 5191426 - DNA, 25 bp, Homo sapien
ctacaagtctttctaggtcattggg

SEQ ID NO: 5191427 - DNA, 25 bp, Homo sapien
tagtgggtactatgtgaacagaagt

SEQ ID NO: 5191428 - DNA, 25 bp, Homo sapien
catcaggtgttgtatttcatcatcc

SEQ ID NO: 5191429 - DNA, 25 bp, Homo sapien
tccatggtacttacaagcatcaaac

SEQ ID NO: 5191430 - DNA, 25 bp, Homo sapien
gaatgtaatttccactcaggcaaga

SEQ ID NO: 5191431 - DNA, 25 bp, Homo sapien
tacagagctgaccatcaattctttc

SEQ ID NO: 5191432 - DNA, 25 bp, Homo sapien
aattctttccacaatacggcatgta

SEQ ID NO: 5191433 - DNA, 25 bp, Homo sapien
ttgtggttaaacttacagagctgac

SEQ ID NO: 5191434 - DNA, 25 bp, Homo sapien
tctttccacaatacggcatgtaata

SEQ ID NO: 5191435 - DNA, 25 bp, Homo sapien
tatgttgtttatgattgtccatccc

SEQ ID NO: 5191436 - DNA, 25 bp, Homo sapien
tagccaaccatccagacataccgat

SEQ ID NO: 5191437 - DNA, 25 bp, Homo sapien
taataaggctactcaaactccactg

SEQ ID NO: 5191438 - DNA, 25 bp, Homo sapien
tatataattatcctttcttacatgc

SEQ ID NO: 5191439 - DNA, 25 bp, Homo sapien
gacctgaaacagtaactgcactaga

SEQ ID NO: 5191440 - DNA, 25 bp, Homo sapien
tttgcaatcaaaacatctgataggg

SEQ ID NO: 5191441 - DNA, 25 bp, Homo sapien
cataggaaaacaccacatgacactg

SEQ ID NO: 5191442 - DNA, 25 bp, Homo sapien
aagataggcaaaggactcaacattt

SEQ ID NO: 5191443 - DNA, 25 bp, Homo sapien
tatatgtcaggtaaaaagtcagctc

SEQ ID NO: 5191444 - DNA, 25 bp, Homo sapien
tcagacgaggcatattggacttaca

SEQ ID NO: 5191445 - DNA, 25 bp, Homo sapien
aagtcagctcattctggcgtgaggg

SEQ ID NO: 5191446 - DNA, 25 bp, Homo sapien
tatacatcagctgttcaagacacac

SEQ ID NO: 5191447 - DNA, 25 bp, Homo sapien
cattagtatggttaattttgtagtc

SEQ ID NO: 5191448 - DNA, 25 bp, Homo sapien
agtatggttaattttgtagtcaaga

SEQ ID NO: 5191449 - DNA, 25 bp, Homo sapien
ttagtatggttaattttgtagtcaa

SEQ ID NO: 5191450 - DNA, 25 bp, Homo sapien
tatggttaattttgtagtcaagaaa

SEQ ID NO: 5191451 - DNA, 25 bp, Homo sapien
gaacacgtgacagtatgtcagccta

SEQ ID NO: 5191452 - DNA, 25 bp, Homo sapien
gcctagggctctgaattgagatgaa

SEQ ID NO: 5191453 - DNA, 25 bp, Homo sapien
tcaacactccatgtgggaacaacct

SEQ ID NO: 5191454 - DNA, 25 bp, Homo sapien
taagaaggaggcataaaagctgtcc

SEQ ID NO: 5191455 - DNA, 25 bp, Homo sapien
gtataaaacaatatgcacactgtga

SEQ ID NO: 5191456 - DNA, 25 bp, Homo sapien
aaataattgcaactgctgttatgtt

SEQ ID NO: 5191457 - DNA, 25 bp, Homo sapien
tgtttaagcttttagatatcaagga

SEQ ID NO: 5191458 - DNA, 25 bp, Homo sapien
caaggaaattgatctttgctaccac

SEQ ID NO: 5191459 - DNA, 25 bp, Homo sapien
ttctgatacgttagggagatggcag

SEQ ID NO: 5191460 - DNA, 25 bp, Homo sapien
gaaccaagttcattgttctgatacg

SEQ ID NO: 5191461 - DNA, 25 bp, Homo sapien
attcactgagttctatactcttgga

SEQ ID NO: 5191462 - DNA, 25 bp, Homo sapien
gagttctatactcttggaaccaagt

SEQ ID NO: 5191463 - DNA, 25 bp, Homo sapien
taattcatacattcatccattttac

SEQ ID NO: 5191464 - DNA, 25 bp, Homo sapien
ttggcatattattcatctgggttca

SEQ ID NO: 5191465 - DNA, 25 bp, Homo sapien
catattattcatctgggttcattta

SEQ ID NO: 5191466 - DNA, 25 bp, Homo sapien
gatttatgcattaattcatacattc

SEQ ID NO: 5191467 - DNA, 25 bp, Homo sapien
tatttgtatcacagagatatacaga

SEQ ID NO: 5191468 - DNA, 25 bp, Homo sapien
tagaatgagcatatgtttatttgta

SEQ ID NO: 5191469 - DNA, 25 bp, Homo sapien
tttgtatcacagagatatacagaaa

SEQ ID NO: 5191470 - DNA, 25 bp, Homo sapien
aatagaatgagcatatgtttatttg

SEQ ID NO: 5191471 - DNA, 25 bp, Homo sapien
agtgaacaagcctactggagtttta

SEQ ID NO: 5191472 - DNA, 25 bp, Homo sapien
ctattgaagtgaacaagcctactgg

SEQ ID NO: 5191473 - DNA, 25 bp, Homo sapien
tgaagtgaacaagcctactggagtt

SEQ ID NO: 5191474 - DNA, 25 bp, Homo sapien
tgaacaagcctactggagttttacc

SEQ ID NO: 5191475 - DNA, 25 bp, Homo sapien
gtcagcatcaccgaagacacagttc

SEQ ID NO: 5191476 - DNA, 25 bp, Homo sapien
aacaagagcttcactctgcacaaag

SEQ ID NO: 5191477 - DNA, 25 bp, Homo sapien
taactgtagtcttagtccttgcact

SEQ ID NO: 5191478 - DNA, 25 bp, Homo sapien
tgtaccatatgctttattgttcagc

SEQ ID NO: 5191479 - DNA, 25 bp, Homo sapien
tgttttagagtcctattctcactgc

SEQ ID NO: 5191480 - DNA, 25 bp, Homo sapien
atggataaacgattttaacgctttg

SEQ ID NO: 5191481 - DNA, 25 bp, Homo sapien
gctttgttttagagtcctattctca

SEQ ID NO: 5191482 - DNA, 25 bp, Homo sapien
gagtcctattctcactgcttactcc

SEQ ID NO: 5191483 - DNA, 25 bp, Homo sapien
ctgaatcacgggagagcaggaatac

SEQ ID NO: 5191484 - DNA, 25 bp, Homo sapien
tcatttgcataaggctcaggcagtc

SEQ ID NO: 5191485 - DNA, 25 bp, Homo sapien
ctgaaacggaatgctgggtaaggaa

SEQ ID NO: 5191486 - DNA, 25 bp, Homo sapien
tggaactgcggttctgccaggctac

SEQ ID NO: 5191487 - DNA, 25 bp, Homo sapien
tcaaagcctccgagctggtctcatt

SEQ ID NO: 5191488 - DNA, 25 bp, Homo sapien
ggccctgaataaccactaagtgaat

SEQ ID NO: 5191489 - DNA, 25 bp, Homo sapien
gtgataaagggtgagaatctggccc

SEQ ID NO: 5191490 - DNA, 25 bp, Homo sapien
aatattgtttggaccagaggacagc

SEQ ID NO: 5191491 - DNA, 25 bp, Homo sapien
taatgtccccatagagtgataaagg

SEQ ID NO: 5191492 - DNA, 25 bp, Homo sapien
ctgctgagatttgtatggaagtagt

SEQ ID NO: 5191493 - DNA, 25 bp, Homo sapien
tggctcgagctattgcaaaagactt

SEQ ID NO: 5191494 - DNA, 25 bp, Homo sapien
atctgcatagagacataaattatcc

SEQ ID NO: 5191495 - DNA, 25 bp, Homo sapien
gacttcaaagttttgagtgaatctg

SEQ ID NO: 5191496 - DNA, 25 bp, Homo sapien
cacctgaggaattgaagacattgtc

SEQ ID NO: 5191497 - DNA, 25 bp, Homo sapien
gacccttaacactattctgagaccc

SEQ ID NO: 5191498 - DNA, 25 bp, Homo sapien
ttttccgccagagtatagtcaatcc

SEQ ID NO: 5191499 - DNA, 25 bp, Homo sapien
gttgattctaactcacacctgagga

SEQ ID NO: 5191500 - DNA, 25 bp, Homo sapien
gactagaagtggatggattgacact

SEQ ID NO: 5191501 - DNA, 25 bp, Homo sapien
gaaagattagcccatgatgagtgag

SEQ ID NO: 5191502 - DNA, 25 bp, Homo sapien
gtgcttataaaacactgggtacatg

SEQ ID NO: 5191503 - DNA, 25 bp, Homo sapien
gagatttaaataagggcaaccacac

SEQ ID NO: 5191504 - DNA, 25 bp, Homo sapien
taccatagctgttgacacataccaa

SEQ ID NO: 5191505 - DNA, 25 bp, Homo sapien
gatgactggtaagtatgcttgttgc

SEQ ID NO: 5191506 - DNA, 25 bp, Homo sapien
gttgatgactggtaagtatgcttgt

SEQ ID NO: 5191507 - DNA, 25 bp, Homo sapien
actggtaagtatgcttgttgcctag

SEQ ID NO: 5191508 - DNA, 25 bp, Homo sapien
tgactggtaagtatgcttgttgcct

SEQ ID NO: 5191509 - DNA, 25 bp, Homo sapien
gtgagaatattctggctccttggct

SEQ ID NO: 5191510 - DNA, 25 bp, Homo sapien
taaataactcaagcagaagggacta

SEQ ID NO: 5191511 - DNA, 25 bp, Homo sapien
caaagggatcacattaatggtggga

SEQ ID NO: 5191512 - DNA, 25 bp, Homo sapien
caactgatgcactagggaaagaaac

SEQ ID NO: 5191513 - DNA, 25 bp, Homo sapien
aaagcctgatgcggtcaatcaaggg

SEQ ID NO: 5191514 - DNA, 25 bp, Homo sapien
gatgcggtcaatcaagggggaggca

SEQ ID NO: 5191515 - DNA, 25 bp, Homo sapien
ttaaagcctgatgcggtcaatcaag

SEQ ID NO: 5191516 - DNA, 25 bp, Homo sapien
ctgatgcggtcaatcaagggggagg

SEQ ID NO: 5191517 - DNA, 25 bp, Homo sapien
aattacagagaattggctgcctaat

SEQ ID NO: 5191518 - DNA, 25 bp, Homo sapien
ttttgatgcctacaaaaatgtatat

SEQ ID NO: 5191519 - DNA, 25 bp, Homo sapien
tataaagccaaacgaaaattacaga

SEQ ID NO: 5191520 - DNA, 25 bp, Homo sapien
gcatgatgaacaatacatttatgaa

SEQ ID NO: 5191521 - DNA, 25 bp, Homo sapien
ggtggcagaacacgaggtagcagca

SEQ ID NO: 5191522 - DNA, 25 bp, Homo sapien
tggcagaacacgaggtagcagcaac

SEQ ID NO: 5191523 - DNA, 25 bp, Homo sapien
ctggggtgaagtcatttggccactg

SEQ ID NO: 5191524 - DNA, 25 bp, Homo sapien
acactggggtgaagtcatttggcca

SEQ ID NO: 5191525 - DNA, 25 bp, Homo sapien
ctgatttatagaacaggtatggcta

SEQ ID NO: 5191526 - DNA, 25 bp, Homo sapien
gattgtttacttactgatctgtgta

SEQ ID NO: 5191527 - DNA, 25 bp, Homo sapien
atagtgacatgttctgattgtttac

SEQ ID NO: 5191528 - DNA, 25 bp, Homo sapien
cttaatatccacagtacattaaagg

SEQ ID NO: 5191529 - DNA, 25 bp, Homo sapien
tattttccacacaggttcataagaa

SEQ ID NO: 5191530 - DNA, 25 bp, Homo sapien
gatctagcaataccttctgccatac

SEQ ID NO: 5191531 - DNA, 25 bp, Homo sapien
gcaataccttctgccatactttgtg

SEQ ID NO: 5191532 - DNA, 25 bp, Homo sapien
tgccttgatctagcaataccttctg

SEQ ID NO: 5191533 - DNA, 25 bp, Homo sapien
ctgttgccttgatctagcaatacct

SEQ ID NO: 5191534 - DNA, 25 bp, Homo sapien
gaatcagtataaagctctttggaat

SEQ ID NO: 5191535 - DNA, 25 bp, Homo sapien
gagagaatcagtataaagctctttg

SEQ ID NO: 5191536 - DNA, 25 bp, Homo sapien
cttgccagaggagagaatcagtata

SEQ ID NO: 5191537 - DNA, 25 bp, Homo sapien
agaggagagaatcagtataaagctc

SEQ ID NO: 5191538 - DNA, 25 bp, Homo sapien
gctgcagtccaaggtgtaagcactt

SEQ ID NO: 5191539 - DNA, 25 bp, Homo sapien
tgcaattcattaccaccatcggaga

SEQ ID NO: 5191540 - DNA, 25 bp, Homo sapien
gggacatggaatatctcagtgcaaa

SEQ ID NO: 5191541 - DNA, 25 bp, Homo sapien
agaatacccgcgctgttgcaaccaa

SEQ ID NO: 5191542 - DNA, 25 bp, Homo sapien
aaagtagcctccacttaggtgatgc

SEQ ID NO: 5191543 - DNA, 25 bp, Homo sapien
tattcacaatggattaccctcaaga

SEQ ID NO: 5191544 - DNA, 25 bp, Homo sapien
aaaattgtagtgcatgtctctcctc

SEQ ID NO: 5191545 - DNA, 25 bp, Homo sapien
gatagacacatataagaaccagttg

SEQ ID NO: 5191546 - DNA, 25 bp, Homo sapien
gacttaaaagttctgatccatttca

SEQ ID NO: 5191547 - DNA, 25 bp, Homo sapien
tgtactccaggcagtaaagaaaact

SEQ ID NO: 5191548 - DNA, 25 bp, Homo sapien
attttgacttaaaagttctgatcca

SEQ ID NO: 5191549 - DNA, 25 bp, Homo sapien
ttgacttaaaagttctgatccattt

SEQ ID NO: 5191550 - DNA, 25 bp, Homo sapien
tactggcgcacgctgttatggcggc

SEQ ID NO: 5191551 - DNA, 25 bp, Homo sapien
ccttgcctcctggtgaagtagtaca

SEQ ID NO: 5191552 - DNA, 25 bp, Homo sapien
tgcaaactcgccaagagtgtactgg

SEQ ID NO: 5191553 - DNA, 25 bp, Homo sapien
gactgggcacacttgtgaagccttg

SEQ ID NO: 5191554 - DNA, 25 bp, Homo sapien
tggatcacagaacactcggcagtca

SEQ ID NO: 5191555 - DNA, 25 bp, Homo sapien
tttttcactccagaggcacgcagca

SEQ ID NO: 5191556 - DNA, 25 bp, Homo sapien
tgcaggtgcacgtgtctggatcaca

SEQ ID NO: 5191557 - DNA, 25 bp, Homo sapien
caaaggttgtaggaagaagtactca

SEQ ID NO: 5191558 - DNA, 25 bp, Homo sapien
tacatccttctttagtgcagccgca

SEQ ID NO: 5191559 - DNA, 25 bp, Homo sapien
ccgaacacggataggattaaattca

SEQ ID NO: 5191560 - DNA, 25 bp, Homo sapien
tattgtgtgcaaaaagtgagtccga

SEQ ID NO: 5191561 - DNA, 25 bp, Homo sapien
cgcatgggaaagacatacgatccac

SEQ ID NO: 5191562 - DNA, 25 bp, Homo sapien
agcgacagggcccatagaactactg

SEQ ID NO: 5191563 - DNA, 25 bp, Homo sapien
gcgacagggcccatagaactactgt

SEQ ID NO: 5191564 - DNA, 25 bp, Homo sapien
gagcgacagggcccatagaactact

SEQ ID NO: 5191565 - DNA, 25 bp, Homo sapien
tctgtgactccgctgcaaaagctgc

SEQ ID NO: 5191566 - DNA, 25 bp, Homo sapien
ggcaatctaattcttcagccgactg

SEQ ID NO: 5191567 - DNA, 25 bp, Homo sapien
tctcaaaactgtctgcgattgaata

SEQ ID NO: 5191568 - DNA, 25 bp, Homo sapien
taggtgccaagctttgcgtgctaga

SEQ ID NO: 5191569 - DNA, 25 bp, Homo sapien
ctttgtcatcatcgtcatcctcctc

SEQ ID NO: 5191570 - DNA, 25 bp, Homo sapien
cttcctcttcttcttcctcctcctc

SEQ ID NO: 5191571 - DNA, 25 bp, Homo sapien
tcctcctcctcctcgtctgactcac

SEQ ID NO: 5191572 - DNA, 25 bp, Homo sapien
tcctcttcttcttcctcctcctcct

SEQ ID NO: 5191573 - DNA, 25 bp, Homo sapien
acttcggcatgggtgcccaaacctt

SEQ ID NO: 5191574 - DNA, 25 bp, Homo sapien
gcccaaaccttccacgaagccatct

SEQ ID NO: 5191575 - DNA, 25 bp, Homo sapien
ggacaacttcggcatgggtgcccaa

SEQ ID NO: 5191576 - DNA, 25 bp, Homo sapien
gaaggaagagggacaacttcggcat

SEQ ID NO: 5191577 - DNA, 25 bp, Homo sapien
tctttgcatggctttcgtgaacggc

SEQ ID NO: 5191578 - DNA, 25 bp, Homo sapien
tggctttcgtgaacggcggtgccat

SEQ ID NO: 5191579 - DNA, 25 bp, Homo sapien
catggctttcgtgaacggcggtgcc

SEQ ID NO: 5191580 - DNA, 25 bp, Homo sapien
ttgcatggctttcgtgaacggcggt

SEQ ID NO: 5191581 - DNA, 25 bp, Homo sapien
ggcatagtcaacgaattgctccggg

SEQ ID NO: 5191582 - DNA, 25 bp, Homo sapien
cataggcctcttctgcttgtcgggc

SEQ ID NO: 5191583 - DNA, 25 bp, Homo sapien
gaggagcagcaaacgattacagagg

SEQ ID NO: 5191584 - DNA, 25 bp, Homo sapien
tgtaaggcaccagcgaaagggtacc

SEQ ID NO: 5191585 - DNA, 25 bp, Homo sapien
caaccacgggtgatttgatgcactc

SEQ ID NO: 5191586 - DNA, 25 bp, Homo sapien
tataaactattgcagggcacaccgc

SEQ ID NO: 5191587 - DNA, 25 bp, Homo sapien
ttccacttgagggtgattggacctg

SEQ ID NO: 5191588 - DNA, 25 bp, Homo sapien
taaacagggactgtctcaaccacgg

SEQ ID NO: 5191589 - DNA, 25 bp, Homo sapien
gcagtgaactagactctccccagag

SEQ ID NO: 5191590 - DNA, 25 bp, Homo sapien
tctacacagattggcaggtttcaca

SEQ ID NO: 5191591 - DNA, 25 bp, Homo sapien
tcttcagcttgaatgaacatgcggc

SEQ ID NO: 5191592 - DNA, 25 bp, Homo sapien
tagttaacaatcttgcacaggcccg

SEQ ID NO: 5191593 - DNA, 25 bp, Homo sapien
ctcattctgattagcccaaagggcc

SEQ ID NO: 5191594 - DNA, 25 bp, Homo sapien
cactgaatagcaagtcatgtccgca

SEQ ID NO: 5191595 - DNA, 25 bp, Homo sapien
caagtgcaggtaatctaaaggtggg

SEQ ID NO: 5191596 - DNA, 25 bp, Homo sapien
gggatcctagaagtcctccgacgaa

SEQ ID NO: 5191597 - DNA, 25 bp, Homo sapien
ttcacaagcagatccttcaagagct

SEQ ID NO: 5191598 - DNA, 25 bp, Homo sapien
tgtgttccaagaataacctcagagt

SEQ ID NO: 5191599 - DNA, 25 bp, Homo sapien
aatactgactattggccattgcctg

SEQ ID NO: 5191600 - DNA, 25 bp, Homo sapien
ggaagggtaattcttctcacagggc

SEQ ID NO: 5191601 - DNA, 25 bp, Homo sapien
cagctgcaggtcaggttattgtgtc

SEQ ID NO: 5191602 - DNA, 25 bp, Homo sapien
gactttcaaatcaattcggccagga

SEQ ID NO: 5191603 - DNA, 25 bp, Homo sapien
aactggctgcatgtagcttgatccc

SEQ ID NO: 5191604 - DNA, 25 bp, Homo sapien
tggtactagaatagccagggctgga

SEQ ID NO: 5191605 - DNA, 25 bp, Homo sapien
gatggtttgtaactccagctgaaag

SEQ ID NO: 5191606 - DNA, 25 bp, Homo sapien
cagctgaaagtgatggagtctaaca

SEQ ID NO: 5191607 - DNA, 25 bp, Homo sapien
aatacactggctataatggcactgc

SEQ ID NO: 5191608 - DNA, 25 bp, Homo sapien
tgttattccagcactagttagcaga

SEQ ID NO: 5191609 - DNA, 25 bp, Homo sapien
gaattgtgttgccaaggaaactgcc

SEQ ID NO: 5191610 - DNA, 25 bp, Homo sapien
ttccctggtggtagatcgatgagcc

SEQ ID NO: 5191611 - DNA, 25 bp, Homo sapien
gaatcccctagtacaatggcccaaa

SEQ ID NO: 5191612 - DNA, 25 bp, Homo sapien
agtttgggagatatgcagctgtacc

SEQ ID NO: 5191613 - DNA, 25 bp, Homo sapien
tctatggcagttggaaagtgagaca

SEQ ID NO: 5191614 - DNA, 25 bp, Homo sapien
aagtgccattttctgcgtaaacagg

SEQ ID NO: 5191615 - DNA, 25 bp, Homo sapien
ggataacacccaagtcctttggatc

SEQ ID NO: 5191616 - DNA, 25 bp, Homo sapien
aattgatataccctgtgacactgag

SEQ ID NO: 5191617 - DNA, 25 bp, Homo sapien
tacagaagactacagctaatatgaa

SEQ ID NO: 5191618 - DNA, 25 bp, Homo sapien
gtacagcataatacaagtgccacta

SEQ ID NO: 5191619 - DNA, 25 bp, Homo sapien
tatgtgtggactggagttgattttc

SEQ ID NO: 5191620 - DNA, 25 bp, Homo sapien
caacataaggtccaggttaagttct

SEQ ID NO: 5191621 - DNA, 25 bp, Homo sapien
tactgacagggtgctggtaatcacg

SEQ ID NO: 5191622 - DNA, 25 bp, Homo sapien
cagcaggtatgccactaggaacaaa

SEQ ID NO: 5191623 - DNA, 25 bp, Homo sapien
gcttagttcagacaaccgttggtac

SEQ ID NO: 5191624 - DNA, 25 bp, Homo sapien
gaaacaggctgttctatactgacag

SEQ ID NO: 5191625 - DNA, 25 bp, Homo sapien
taggaagtatccacaagcctcagag

SEQ ID NO: 5191626 - DNA, 25 bp, Homo sapien
tgctgacaccataagagttccaagg

SEQ ID NO: 5191627 - DNA, 25 bp, Homo sapien
cattcgagaatggaaggacttcagg

SEQ ID NO: 5191628 - DNA, 25 bp, Homo sapien
gaggcaggacccgacctttagtgaa

SEQ ID NO: 5191629 - DNA, 25 bp, Homo sapien
tcgatggactcacaggtccgcgtgg

SEQ ID NO: 5191630 - DNA, 25 bp, Homo sapien
ggttcgatggactcacaggtccgcg

SEQ ID NO: 5191631 - DNA, 25 bp, Homo sapien
ataggttcgatggactcacaggtcc

SEQ ID NO: 5191632 - DNA, 25 bp, Homo sapien
gatggactcacaggtccgcgtggct

SEQ ID NO: 5191633 - DNA, 25 bp, Homo sapien
ctcagctgtacgaaaaagagcatat

SEQ ID NO: 5191634 - DNA, 25 bp, Homo sapien
tttaaatctggcagagcctcagctg

SEQ ID NO: 5191635 - DNA, 25 bp, Homo sapien
gacgcttgcttaggagatttaccac

SEQ ID NO: 5191636 - DNA, 25 bp, Homo sapien
aagagcatatactggttattgaccc

SEQ ID NO: 5191637 - DNA, 25 bp, Homo sapien
cagcattggcctctgtgtacaaacc

SEQ ID NO: 5191638 - DNA, 25 bp, Homo sapien
tttcaaatgcagaatacttgactca

SEQ ID NO: 5191639 - DNA, 25 bp, Homo sapien
taatacactccacttgaagcactta

SEQ ID NO: 5191640 - DNA, 25 bp, Homo sapien
tattagtttaaaatgcaggtgaact

SEQ ID NO: 5191641 - DNA, 25 bp, Homo sapien
gtctcgttcagctgaaggcatgtac

SEQ ID NO: 5191642 - DNA, 25 bp, Homo sapien
ttcatgctgctcaaggtctcgttca

SEQ ID NO: 5191643 - DNA, 25 bp, Homo sapien
tactctgctcaacatgaaattcggc

SEQ ID NO: 5191644 - DNA, 25 bp, Homo sapien
gaaattcggcacaacatccagaagg

SEQ ID NO: 5191645 - DNA, 25 bp, Homo sapien
tctactgagccgcaactgtggcgac

SEQ ID NO: 5191646 - DNA, 25 bp, Homo sapien
gagctctactgagccgcaactgtgg

SEQ ID NO: 5191647 - DNA, 25 bp, Homo sapien
tgagccgcaactgtggcgacagcaa

SEQ ID NO: 5191648 - DNA, 25 bp, Homo sapien
tggcgacagcaaccggagtcgcagc

SEQ ID NO: 5191649 - DNA, 25 bp, Homo sapien
cacctgggagactccaagtggaagc

SEQ ID NO: 5191650 - DNA, 25 bp, Homo sapien
gtcgcaggctggagctcacctggga

SEQ ID NO: 5191651 - DNA, 25 bp, Homo sapien
gctggagctcacctgggagactcca

SEQ ID NO: 5191652 - DNA, 25 bp, Homo sapien
ctgggagactccaagtggaagccga

SEQ ID NO: 5191653 - DNA, 25 bp, Homo sapien
ggagcgctcaggtagggctggggcg

SEQ ID NO: 5191654 - DNA, 25 bp, Homo sapien
tggagcgctcaggtagggctggggc

SEQ ID NO: 5191655 - DNA, 25 bp, Homo sapien
ggaagctcacgaaacctaactggtg

SEQ ID NO: 5191656 - DNA, 25 bp, Homo sapien
tcattttggcgaaccgaggaggaag

SEQ ID NO: 5191657 - DNA, 25 bp, Homo sapien
gattcctccaatgtagatgggccgg

SEQ ID NO: 5191658 - DNA, 25 bp, Homo sapien
aagactacacgggaaggaagctcac

SEQ ID NO: 5191659 - DNA, 25 bp, Homo sapien
ccaggaaatcccaatctctttccaa

SEQ ID NO: 5191660 - DNA, 25 bp, Homo sapien
cctggagtctgcgttgttctcttcc

SEQ ID NO: 5191661 - DNA, 25 bp, Homo sapien
aacctgcagtagaagcaagccctct

SEQ ID NO: 5191662 - DNA, 25 bp, Homo sapien
tcttccagaatagatgttgagcttt

SEQ ID NO: 5191663 - DNA, 25 bp, Homo sapien
ttttcttgggcctgcagcattttaa

SEQ ID NO: 5191664 - DNA, 25 bp, Homo sapien
ttgaaatagtacaagcaacgttgtg

SEQ ID NO: 5191665 - DNA, 25 bp, Homo sapien
taattttgaataggatggtactttc

SEQ ID NO: 5191666 - DNA, 25 bp, Homo sapien
aaacctgcatctgattagatttggg

SEQ ID NO: 5191667 - DNA, 25 bp, Homo sapien
gatgattgttctgagattctacagg

SEQ ID NO: 5191668 - DNA, 25 bp, Homo sapien
gataccacctctattctctgcttga

SEQ ID NO: 5191669 - DNA, 25 bp, Homo sapien
tgtaatctaagtcaacccctcatag

SEQ ID NO: 5191670 - DNA, 25 bp, Homo sapien
aaaatacccacgtgtttgtggctct

SEQ ID NO: 5191671 - DNA, 25 bp, Homo sapien
aagaaagttgcacagctactctagg

SEQ ID NO: 5191672 - DNA, 25 bp, Homo sapien
gtatttgcttgggtccatcaccagg

SEQ ID NO: 5191673 - DNA, 25 bp, Homo sapien
gtgatctcagggcaacattccaaga

SEQ ID NO: 5191674 - DNA, 25 bp, Homo sapien
tatatctggaagtcacgcaacatca

SEQ ID NO: 5191675 - DNA, 25 bp, Homo sapien
gcatgggtttttgagtctggcagac

SEQ ID NO: 5191676 - DNA, 25 bp, Homo sapien
tgccaaagggcaagctaaccatgac

SEQ ID NO: 5191677 - DNA, 25 bp, Homo sapien
ggttttccggagactaaatgagata

SEQ ID NO: 5191678 - DNA, 25 bp, Homo sapien
catgttactcctatatgaatggaac

SEQ ID NO: 5191679 - DNA, 25 bp, Homo sapien
caccgcaccagccctaagaagcttt

SEQ ID NO: 5191680 - DNA, 25 bp, Homo sapien
ccaccgcaccagccctaagaagctt

SEQ ID NO: 5191681 - DNA, 25 bp, Homo sapien
aggacacaatttatgtgagcaaata

SEQ ID NO: 5191682 - DNA, 25 bp, Homo sapien
taaggacacaatttatgtgagcaaa

SEQ ID NO: 5191683 - DNA, 25 bp, Homo sapien
tcaagctcggatgatgctgacttga

SEQ ID NO: 5191684 - DNA, 25 bp, Homo sapien
agctcggatgatgctgacttgaggc

SEQ ID NO: 5191685 - DNA, 25 bp, Homo sapien
caagctcggatgatgctgacttgag

SEQ ID NO: 5191686 - DNA, 25 bp, Homo sapien
cttgaggctgaaacatttcaggagg

SEQ ID NO: 5191687 - DNA, 25 bp, Homo sapien
caagaagctcactgtataagataga

SEQ ID NO: 5191688 - DNA, 25 bp, Homo sapien
gaagtgaaattgctcggtcaaagtc

SEQ ID NO: 5191689 - DNA, 25 bp, Homo sapien
tcagcatatcgatgcagctaaacca

SEQ ID NO: 5191690 - DNA, 25 bp, Homo sapien
tcattttgaaagctccctgggtaat

SEQ ID NO: 5191691 - DNA, 25 bp, Homo sapien
tggactcagcgaggcggttcttatt

SEQ ID NO: 5191692 - DNA, 25 bp, Homo sapien
tcatggttttgggtgctgactggac

SEQ ID NO: 5191693 - DNA, 25 bp, Homo sapien
tgatcaccactctctatcatgaggt

SEQ ID NO: 5191694 - DNA, 25 bp, Homo sapien
ttattggggtatctgatatggctgc

SEQ ID NO: 5191695 - DNA, 25 bp, Homo sapien
ttcaacgctcaacaagaagacatgg

SEQ ID NO: 5191696 - DNA, 25 bp, Homo sapien
tctagtttctcagtgtcaggcattg

SEQ ID NO: 5191697 - DNA, 25 bp, Homo sapien
attgtcatggtttggctcccactcg

SEQ ID NO: 5191698 - DNA, 25 bp, Homo sapien
cactcgttttctgcttcaacgctca

SEQ ID NO: 5191699 - DNA, 25 bp, Homo sapien
ctgttcttcagtccgtgctttggat

SEQ ID NO: 5191700 - DNA, 25 bp, Homo sapien
gatccttcaatgactaatgcttgtg

SEQ ID NO: 5191701 - DNA, 25 bp, Homo sapien
cattggccaaattgggtggaagaac

SEQ ID NO: 5191702 - DNA, 25 bp, Homo sapien
gagaagggacttgtatcagcaggtt

SEQ ID NO: 5191703 - DNA, 25 bp, Homo sapien
tggccactgacgaaacctcaggcat

SEQ ID NO: 5191704 - DNA, 25 bp, Homo sapien
ttgttgctcggtgtataagtcttcg

SEQ ID NO: 5191705 - DNA, 25 bp, Homo sapien
tatacagtatcttcattgttgctcg

SEQ ID NO: 5191706 - DNA, 25 bp, Homo sapien
gatgagcttcaaccatggccactga

SEQ ID NO: 5191707 - DNA, 25 bp, Homo sapien
cagtgaatgatactccttgtgggtc

SEQ ID NO: 5191708 - DNA, 25 bp, Homo sapien
gatactccttgtgggtctgtcttca

SEQ ID NO: 5191709 - DNA, 25 bp, Homo sapien
caatgttctatccatagtgacagtg

SEQ ID NO: 5191710 - DNA, 25 bp, Homo sapien
tagtgacagtgaatgatactccttg

SEQ ID NO: 5191711 - DNA, 25 bp, Homo sapien
cagaaaggtttggtatgtcatcctc

SEQ ID NO: 5191712 - DNA, 25 bp, Homo sapien
gaaaggtttggtatgtcatcctcac

SEQ ID NO: 5191713 - DNA, 25 bp, Homo sapien
ctttctgatgcttcagaaaggtttg

SEQ ID NO: 5191714 - DNA, 25 bp, Homo sapien
tctgatgcttcagaaaggtttggta

SEQ ID NO: 5191715 - DNA, 25 bp, Homo sapien
tgcaactgcctgctgagcatcagtt

SEQ ID NO: 5191716 - DNA, 25 bp, Homo sapien
caactgcctgctgagcatcagttgc

SEQ ID NO: 5191717 - DNA, 25 bp, Homo sapien
gactgaaatgtgttcaaccagggga

SEQ ID NO: 5191718 - DNA, 25 bp, Homo sapien
accaggggattcaagcagcctgctg

SEQ ID NO: 5191719 - DNA, 25 bp, Homo sapien
gaatacgtaccatgtgaagagtcaa

SEQ ID NO: 5191720 - DNA, 25 bp, Homo sapien
caaattgcagaggatagattgaggg

SEQ ID NO: 5191721 - DNA, 25 bp, Homo sapien
caggatattgagaaatcgcaagggc

SEQ ID NO: 5191722 - DNA, 25 bp, Homo sapien
tgaggaaacgggacaaacgacatgt

SEQ ID NO: 5191723 - DNA, 25 bp, Homo sapien
cccttatgctaattggctccagtag

SEQ ID NO: 5191724 - DNA, 25 bp, Homo sapien
cgaatgaactgcagaaagactcact

SEQ ID NO: 5191725 - DNA, 25 bp, Homo sapien
gactcacttgatataaaggcggctt

SEQ ID NO: 5191726 - DNA, 25 bp, Homo sapien
agtctttgagctaagggcaatacca

SEQ ID NO: 5191727 - DNA, 25 bp, Homo sapien
caaatcagggtaagctccccctgca

SEQ ID NO: 5191728 - DNA, 25 bp, Homo sapien
ttctgtaatgttaatgggtggtggt

SEQ ID NO: 5191729 - DNA, 25 bp, Homo sapien
tggtggtatagtacagaaaatgtaa

SEQ ID NO: 5191730 - DNA, 25 bp, Homo sapien
ggtaagctccccctgcattctgtaa

SEQ ID NO: 5191731 - DNA, 25 bp, Homo sapien
tcagaacccgaaagatggaacattg

SEQ ID NO: 5191732 - DNA, 25 bp, Homo sapien
ttagcctgaagaagccatagtagca

SEQ ID NO: 5191733 - DNA, 25 bp, Homo sapien
tatcataccctgtcctcgagaagct

SEQ ID NO: 5191734 - DNA, 25 bp, Homo sapien
gaagcttcagcgagcaccatttgca

SEQ ID NO: 5191735 - DNA, 25 bp, Homo sapien
tcttgtactgatagcaagtgccaga

SEQ ID NO: 5191736 - DNA, 25 bp, Homo sapien
ccctgcttcagttcagatgcagctg

SEQ ID NO: 5191737 - DNA, 25 bp, Homo sapien
tttttgtgggtcatcgagggtctgc

SEQ ID NO: 5191738 - DNA, 25 bp, Homo sapien
gcagtttggactcttgtcacctcca

SEQ ID NO: 5191739 - DNA, 25 bp, Homo sapien
gattctgattccatccagggtttgg

SEQ ID NO: 5191740 - DNA, 25 bp, Homo sapien
gttggaatcacaggccgcaacttac

SEQ ID NO: 5191741 - DNA, 25 bp, Homo sapien
cagggtttgggtgtaattgacttct

SEQ ID NO: 5191742 - DNA, 25 bp, Homo sapien
ttgacttctgtgtcctaagcagata

SEQ ID NO: 5191743 - DNA, 25 bp, Homo sapien
gattctgttggacactgtgatttgc

SEQ ID NO: 5191744 - DNA, 25 bp, Homo sapien
cagtgttgattctgttggacactgt

SEQ ID NO: 5191745 - DNA, 25 bp, Homo sapien
tgttgattctgttggacactgtgat

SEQ ID NO: 5191746 - DNA, 25 bp, Homo sapien
tctgttggacactgtgatttgcagg

SEQ ID NO: 5191747 - DNA, 25 bp, Homo sapien
caggttttatcatgcctatggcaca

SEQ ID NO: 5191748 - DNA, 25 bp, Homo sapien
cctttatgagggctagctcttggga

SEQ ID NO: 5191749 - DNA, 25 bp, Homo sapien
ctctggcagaggtttcattagtaca

SEQ ID NO: 5191750 - DNA, 25 bp, Homo sapien
cactattcagctgtaagagtaggct

SEQ ID NO: 5191751 - DNA, 25 bp, Homo sapien
tgacaatttatttgtcgcagaactc

SEQ ID NO: 5191752 - DNA, 25 bp, Homo sapien
aagccgagtaagataacatttgatg

SEQ ID NO: 5191753 - DNA, 25 bp, Homo sapien
aatttgtcattactttgtaatgctg

SEQ ID NO: 5191754 - DNA, 25 bp, Homo sapien
tatttgtcgcagaactcaaagccga

SEQ ID NO: 5191755 - DNA, 25 bp, Homo sapien
cctcgcagccctcacctccgggtcc

SEQ ID NO: 5191756 - DNA, 25 bp, Homo sapien
tgcactctccggcggaggccctttt

SEQ ID NO: 5191757 - DNA, 25 bp, Homo sapien
cagacagccgtttcccagtgtgacc

SEQ ID NO: 5191758 - DNA, 25 bp, Homo sapien
gacagccgtttcccagtgtgacctc

SEQ ID NO: 5191759 - DNA, 25 bp, Homo sapien
gcctcggtgtccactctggcagtgc

SEQ ID NO: 5191760 - DNA, 25 bp, Homo sapien
ggtgtccactctggcagtgcttgag

SEQ ID NO: 5191761 - DNA, 25 bp, Homo sapien
ctcggtgtccactctggcagtgctt

SEQ ID NO: 5191762 - DNA, 25 bp, Homo sapien
cgtctcctcggcctcggtgtccact

SEQ ID NO: 5191763 - DNA, 25 bp, Homo sapien
gcactgtggacatcggcgcacctgt

SEQ ID NO: 5191764 - DNA, 25 bp, Homo sapien
gtagctcatcagaaggtagcactgt

SEQ ID NO: 5191765 - DNA, 25 bp, Homo sapien
gaacagcccgtagtggaacctgaag

SEQ ID NO: 5191766 - DNA, 25 bp, Homo sapien
ggacatcggcgcacctgtagaagaa

SEQ ID NO: 5191767 - DNA, 25 bp, Homo sapien
gcattctgtcagctcacatattaag

SEQ ID NO: 5191768 - DNA, 25 bp, Homo sapien
tcatatacaacgtggtctctgcatt

SEQ ID NO: 5191769 - DNA, 25 bp, Homo sapien
ctgtcagctcacatattaagtcagc

SEQ ID NO: 5191770 - DNA, 25 bp, Homo sapien
tggtgtacaaggcaaagtggatgct

SEQ ID NO: 5191771 - DNA, 25 bp, Homo sapien
caagtttctctgatcctctgaacag

SEQ ID NO: 5191772 - DNA, 25 bp, Homo sapien
tatcaaataagcatacgccaaacgt

SEQ ID NO: 5191773 - DNA, 25 bp, Homo sapien
cctaaagcctaaggaggtcagaata

SEQ ID NO: 5191774 - DNA, 25 bp, Homo sapien
tacagtttatttgcccagtagacac

SEQ ID NO: 5191775 - DNA, 25 bp, Homo sapien
caagtggtataggaactggcagcag

SEQ ID NO: 5191776 - DNA, 25 bp, Homo sapien
caacaagaaagacagttgtatgtcc

SEQ ID NO: 5191777 - DNA, 25 bp, Homo sapien
cacggaagactttagtagtgaatcg

SEQ ID NO: 5191778 - DNA, 25 bp, Homo sapien
ccaattgctgtaggagaatctgact

SEQ ID NO: 5191779 - DNA, 25 bp, Homo sapien
gagattccttgtttgtgccccgacg

SEQ ID NO: 5191780 - DNA, 25 bp, Homo sapien
tgtgggatctgagaacgacttcgca

SEQ ID NO: 5191781 - DNA, 25 bp, Homo sapien
cgacttcgcagatgatgagcacagc

SEQ ID NO: 5191782 - DNA, 25 bp, Homo sapien
cacctttgaggataacgagagccgt

SEQ ID NO: 5191783 - DNA, 25 bp, Homo sapien
tattttccttatccacggaggtaca

SEQ ID NO: 5191784 - DNA, 25 bp, Homo sapien
tgtctccttaggatgagcctggtta

SEQ ID NO: 5191785 - DNA, 25 bp, Homo sapien
agtactcagggcagaaatatttccc

SEQ ID NO: 5191786 - DNA, 25 bp, Homo sapien
cctctggtcatggtttgggctgaac

SEQ ID NO: 5191787 - DNA, 25 bp, Homo sapien
tacaaggaggtaagatacagacagt

SEQ ID NO: 5191788 - DNA, 25 bp, Homo sapien
gctatacaagtctgggtactgttgc

SEQ ID NO: 5191789 - DNA, 25 bp, Homo sapien
cttactctgacatgaaagtgctatc

SEQ ID NO: 5191790 - DNA, 25 bp, Homo sapien
cacttataaactgaatgatcggctt

SEQ ID NO: 5191791 - DNA, 25 bp, Homo sapien
aaacagatctaaccacagaggccca

SEQ ID NO: 5191792 - DNA, 25 bp, Homo sapien
tgtgtgaaagcccaaaagcccgtta

SEQ ID NO: 5191793 - DNA, 25 bp, Homo sapien
caatggcatcagagtgtgaagttgt

SEQ ID NO: 5191794 - DNA, 25 bp, Homo sapien
tcttgcataaatacacaatggcatc

SEQ ID NO: 5191795 - DNA, 25 bp, Homo sapien
tccagaggtcaaggtaaactaggtc

SEQ ID NO: 5191796 - DNA, 25 bp, Homo sapien
tctcaccaggttgtagggagagacg

SEQ ID NO: 5191797 - DNA, 25 bp, Homo sapien
cacttctagggtcagataaggcaaa

SEQ ID NO: 5191798 - DNA, 25 bp, Homo sapien
aactaggtcttgtctgcctgaaagc

SEQ ID NO: 5191799 - DNA, 25 bp, Homo sapien
ccagtgactcccgatgctgaggcag

SEQ ID NO: 5191800 - DNA, 25 bp, Homo sapien
gcctttaatcccagtgactcccgat

SEQ ID NO: 5191801 - DNA, 25 bp, Homo sapien
tttaatcccagtgactcccgatgct

SEQ ID NO: 5191802 - DNA, 25 bp, Homo sapien
atcccagtgactcccgatgctgagg

SEQ ID NO: 5191803 - DNA, 25 bp, Homo sapien
gagcttctgcacgttcgcggggcat

SEQ ID NO: 5191804 - DNA, 25 bp, Homo sapien
ctttcctatttgctgcaatacctgg

SEQ ID NO: 5191805 - DNA, 25 bp, Homo sapien
cctggcacgccagggtgatgcaact

SEQ ID NO: 5191806 - DNA, 25 bp, Homo sapien
agggtgatgcaactgggagcttctg

SEQ ID NO: 5191807 - DNA, 25 bp, Homo sapien
gctatttcagtatcctggtccacct

SEQ ID NO: 5191808 - DNA, 25 bp, Homo sapien
atctgtgtggctggctgctatttca

SEQ ID NO: 5191809 - DNA, 25 bp, Homo sapien
tggctggctgctatttcagtatcct

SEQ ID NO: 5191810 - DNA, 25 bp, Homo sapien
tggtccacctggtcctgagtcccca

SEQ ID NO: 5191811 - DNA, 25 bp, Homo sapien
gaaaccaagttcacttaagcaaaca

SEQ ID NO: 5191812 - DNA, 25 bp, Homo sapien
gatcttgagtagactggagatggaa

SEQ ID NO: 5191813 - DNA, 25 bp, Homo sapien
taagcaaacatggagtttgagttta

SEQ ID NO: 5191814 - DNA, 25 bp, Homo sapien
tgagtttatcatgggactcaacatc

SEQ ID NO: 5191815 - DNA, 25 bp, Homo sapien
tcagaccgtggagaggtgcaccgat

SEQ ID NO: 5191816 - DNA, 25 bp, Homo sapien
ggtgcaccgatagagggtggaggaa

SEQ ID NO: 5191817 - DNA, 25 bp, Homo sapien
ccgtggagaggtgcaccgatagagg

SEQ ID NO: 5191818 - DNA, 25 bp, Homo sapien
tggagaggtgcaccgatagagggtg

SEQ ID NO: 5191819 - DNA, 25 bp, Homo sapien
gactgtctttgagttattactttgc

SEQ ID NO: 5191820 - DNA, 25 bp, Homo sapien
gacaaaagccctcggtgactgtctt

SEQ ID NO: 5191821 - DNA, 25 bp, Homo sapien
aggtggacaaaagccctcggtgact

SEQ ID NO: 5191822 - DNA, 25 bp, Homo sapien
gccctcggtgactgtctttgagtta

SEQ ID NO: 5191823 - DNA, 25 bp, Homo sapien
ctttgtcgctggtggctagagtccc

SEQ ID NO: 5191824 - DNA, 25 bp, Homo sapien
gggaccatcactcagtctcagttgt

SEQ ID NO: 5191825 - DNA, 25 bp, Homo sapien
agtgcttcctagagaccgcagtctc

SEQ ID NO: 5191826 - DNA, 25 bp, Homo sapien
agattccaaatcctaggcagggacc

SEQ ID NO: 5191827 - DNA, 25 bp, Homo sapien
tcagaactcccagttgcacctagca

SEQ ID NO: 5191828 - DNA, 25 bp, Homo sapien
taaagggctttacgtgatctgttcc

SEQ ID NO: 5191829 - DNA, 25 bp, Homo sapien
taaaaagccgacttcactctctaaa

SEQ ID NO: 5191830 - DNA, 25 bp, Homo sapien
ttgcacctagcataaaaagccgact

SEQ ID NO: 5191831 - DNA, 25 bp, Homo sapien
catgttcatctacgccatctttgga

SEQ ID NO: 5191832 - DNA, 25 bp, Homo sapien
cctgttccgagtgatccgtcttgcc

SEQ ID NO: 5191833 - DNA, 25 bp, Homo sapien
cgtcttgccaggattggccgaatcc

SEQ ID NO: 5191834 - DNA, 25 bp, Homo sapien
gttcatctacgccatctttggaatg

SEQ ID NO: 5191835 - DNA, 25 bp, Homo sapien
tattttcctccacatacaggtatgt

SEQ ID NO: 5191836 - DNA, 25 bp, Homo sapien
tgatttgattgaaacgtattttgtg

SEQ ID NO: 5191837 - DNA, 25 bp, Homo sapien
tgattgaaacgtattttgtgtcccc

SEQ ID NO: 5191838 - DNA, 25 bp, Homo sapien
attattttcctccacatacaggtat

SEQ ID NO: 5191839 - DNA, 25 bp, Homo sapien
gtttatgattccttgtatttatgtg

SEQ ID NO: 5191840 - DNA, 25 bp, Homo sapien
taaagattagttcattccttctagg

SEQ ID NO: 5191841 - DNA, 25 bp, Homo sapien
ctttatccagtattggtttgttcag

SEQ ID NO: 5191842 - DNA, 25 bp, Homo sapien
tatgtgttatcagtgttagtctccc

SEQ ID NO: 5191843 - DNA, 25 bp, Homo sapien
taactaatctttccctccagacagg

SEQ ID NO: 5191844 - DNA, 25 bp, Homo sapien
tgcaatttgcgtatctcgttccctg

SEQ ID NO: 5191845 - DNA, 25 bp, Homo sapien
catgtaccgtggagacatctattta

SEQ ID NO: 5191846 - DNA, 25 bp, Homo sapien
tctaggaagcctctactgatctctc

SEQ ID NO: 5191847 - DNA, 25 bp, Homo sapien
gggctagaatcaatgccagttcaga

SEQ ID NO: 5191848 - DNA, 25 bp, Homo sapien
tgggctagaatcaatgccagttcag

SEQ ID NO: 5191849 - DNA, 25 bp, Homo sapien
caagttggtaattggtctacaagag

SEQ ID NO: 5191850 - DNA, 25 bp, Homo sapien
gttggtaattggtctacaagagctg

SEQ ID NO: 5191851 - DNA, 25 bp, Homo sapien
gtgtgccaggtccagttccaggcac

SEQ ID NO: 5191852 - DNA, 25 bp, Homo sapien
cagttccaggcactggagggagatg

SEQ ID NO: 5191853 - DNA, 25 bp, Homo sapien
ctgtgtgccaggtccagttccaggc

SEQ ID NO: 5191854 - DNA, 25 bp, Homo sapien
gttccaggcactggagggagatgga

SEQ ID NO: 5191855 - DNA, 25 bp, Homo sapien
tttctagagattaaaccggtcaagc

SEQ ID NO: 5191856 - DNA, 25 bp, Homo sapien
agttgataaccctttgcctggagaa

SEQ ID NO: 5191857 - DNA, 25 bp, Homo sapien
ctatgaattccgatgagccagaggc

SEQ ID NO: 5191858 - DNA, 25 bp, Homo sapien
gcagaggctgaacctatgaattccg

SEQ ID NO: 5191859 - DNA, 25 bp, Homo sapien
aatggaaaactcaaacagaccaata

SEQ ID NO: 5191860 - DNA, 25 bp, Homo sapien
cttgccaagactgtatcatgaagaa

SEQ ID NO: 5191861 - DNA, 25 bp, Homo sapien
catacaacttgccaagactgtatca

SEQ ID NO: 5191862 - DNA, 25 bp, Homo sapien
caacacatacaacttgccaagactg

SEQ ID NO: 5191863 - DNA, 25 bp, Homo sapien
cccacggtggcacatgaacgacttc

SEQ ID NO: 5191864 - DNA, 25 bp, Homo sapien
tggtaagagctacaaagaatgtgtc

SEQ ID NO: 5191865 - DNA, 25 bp, Homo sapien
tagtgttggccatcatcgtcttcat

SEQ ID NO: 5191866 - DNA, 25 bp, Homo sapien
ctgtggtcggcatgcagctctttgg

SEQ ID NO: 5191867 - DNA, 25 bp, Homo sapien
tgaacgggaaaatgcacagtgctgt

SEQ ID NO: 5191868 - DNA, 25 bp, Homo sapien
tctccctggttgatggacgctcagc

SEQ ID NO: 5191869 - DNA, 25 bp, Homo sapien
tgttttctgcaaggcgaagcagcag

SEQ ID NO: 5191870 - DNA, 25 bp, Homo sapien
gagactgaatttgccgatgatgagc

SEQ ID NO: 5191871 - DNA, 25 bp, Homo sapien
tacatatcattctatggtaaagaca

SEQ ID NO: 5191872 - DNA, 25 bp, Homo sapien
catatcattctatggtaaagacaca

SEQ ID NO: 5191873 - DNA, 25 bp, Homo sapien
acatatcattctatggtaaagacac

SEQ ID NO: 5191874 - DNA, 25 bp, Homo sapien
attacatatcattctatggtaaaga

SEQ ID NO: 5191875 - DNA, 25 bp, Homo sapien
tcacaatcacagattaaagtctgtg

SEQ ID NO: 5191876 - DNA, 25 bp, Homo sapien
ggtttcagcacagattcagggtatg

SEQ ID NO: 5191877 - DNA, 25 bp, Homo sapien
cagattcagggtatgtaatatttgt

SEQ ID NO: 5191878 - DNA, 25 bp, Homo sapien
cttggaaggatccaaagatgctctc

SEQ ID NO: 5191879 - DNA, 25 bp, Homo sapien
tactatacaaggatagatctgcccc

SEQ ID NO: 5191880 - DNA, 25 bp, Homo sapien
ctgagtaaaataggaagtcaggttc

SEQ ID NO: 5191881 - DNA, 25 bp, Homo sapien
tcaggttcttatagtagaatagata

SEQ ID NO: 5191882 - DNA, 25 bp, Homo sapien
catttactatacaaggatagatctg

SEQ ID NO: 5191883 - DNA, 25 bp, Homo sapien
tagaagcaacattcaaatccaagaa

SEQ ID NO: 5191884 - DNA, 25 bp, Homo sapien
tcatagtctttcttccatgattact

SEQ ID NO: 5191885 - DNA, 25 bp, Homo sapien
tccaagaatatctgatttcatagtc

SEQ ID NO: 5191886 - DNA, 25 bp, Homo sapien
ccaaaagtctcccaataatcagatt

SEQ ID NO: 5191887 - DNA, 25 bp, Homo sapien
tagcagtgtgctaatagacagctcc

SEQ ID NO: 5191888 - DNA, 25 bp, Homo sapien
cgtattttacagatgcagcagctaa

SEQ ID NO: 5191889 - DNA, 25 bp, Homo sapien
aggcccatccttcccgaggttcagg

SEQ ID NO: 5191890 - DNA, 25 bp, Homo sapien
ctacaaacctagagtgagctacctg

SEQ ID NO: 5191891 - DNA, 25 bp, Homo sapien
atggaaaagacagatgccagattat

SEQ ID NO: 5191892 - DNA, 25 bp, Homo sapien
cactgatgataatgaatgcccatgg

SEQ ID NO: 5191893 - DNA, 25 bp, Homo sapien
tatgtgtagactgtggttctgccag

SEQ ID NO: 5191894 - DNA, 25 bp, Homo sapien
cagccatttggtagccagcatggaa

SEQ ID NO: 5191895 - DNA, 25 bp, Homo sapien
ggctgagacagctacttgttacaag

SEQ ID NO: 5191896 - DNA, 25 bp, Homo sapien
taataatgatttaggcagcactcag

SEQ ID NO: 5191897 - DNA, 25 bp, Homo sapien
tcggagagctcaactcagcaacatg

SEQ ID NO: 5191898 - DNA, 25 bp, Homo sapien
ggagtgacgcacaaaaacagcttga

SEQ ID NO: 5191899 - DNA, 25 bp, Homo sapien
tgttagcagagaagctggaagaacc

SEQ ID NO: 5191900 - DNA, 25 bp, Homo sapien
tagcagagaagctggaagaacctac

SEQ ID NO: 5191901 - DNA, 25 bp, Homo sapien
ggagccacagattgttagcagagaa

SEQ ID NO: 5191902 - DNA, 25 bp, Homo sapien
ttgttagcagagaagctggaagaac

SEQ ID NO: 5191903 - DNA, 25 bp, Homo sapien
tgagatggataatatatcaatgtca

SEQ ID NO: 5191904 - DNA, 25 bp, Homo sapien
gagatggataatatatcaatgtcat

SEQ ID NO: 5191905 - DNA, 25 bp, Homo sapien
agatggataatatatcaatgtcatt

SEQ ID NO: 5191906 - DNA, 25 bp, Homo sapien
gcgtcgagggctgcgtgataaacca

SEQ ID NO: 5191907 - DNA, 25 bp, Homo sapien
cgagggctgcgtgataaaccaatgc

SEQ ID NO: 5191908 - DNA, 25 bp, Homo sapien
ctgcgtcgagggctgcgtgataaac

SEQ ID NO: 5191909 - DNA, 25 bp, Homo sapien
gctgcgtgataaaccaatgctaaaa

SEQ ID NO: 5191910 - DNA, 25 bp, Homo sapien
gcagaaccagcttagcagatacaac

SEQ ID NO: 5191911 - DNA, 25 bp, Homo sapien
tttacgagcaaaaagcatgtgctgt

SEQ ID NO: 5191912 - DNA, 25 bp, Homo sapien
ccatctgcaaagctgagcgtgcaga

SEQ ID NO: 5191913 - DNA, 25 bp, Homo sapien
ttttttacgagcaaaaagcatgtgc

SEQ ID NO: 5191914 - DNA, 25 bp, Homo sapien
gctcctgtgcggttttgactctgtg

SEQ ID NO: 5191915 - DNA, 25 bp, Homo sapien
tagttatttcgatagctgggcagct

SEQ ID NO: 5191916 - DNA, 25 bp, Homo sapien
tgactctgtgggtttgctgccaggt

SEQ ID NO: 5191917 - DNA, 25 bp, Homo sapien
agggctggaagcgtagttatttcga

SEQ ID NO: 5191918 - DNA, 25 bp, Homo sapien
ggttctggaaccctgtattacgcca

SEQ ID NO: 5191919 - DNA, 25 bp, Homo sapien
tcggttctggaaccctgtattacgc

SEQ ID NO: 5191920 - DNA, 25 bp, Homo sapien
cacatctcggttctggaaccctgta

SEQ ID NO: 5191921 - DNA, 25 bp, Homo sapien
ctattttcacatctcggttctggaa

SEQ ID NO: 5191922 - DNA, 25 bp, Homo sapien
tggagccagattctgcaggtgcact

SEQ ID NO: 5191923 - DNA, 25 bp, Homo sapien
ttccaattccgccagctcggctgag

SEQ ID NO: 5191924 - DNA, 25 bp, Homo sapien
agcggcggctgtcggctttccaatt

SEQ ID NO: 5191925 - DNA, 25 bp, Homo sapien
gcagtctgcttgcaggcggtcgcca

SEQ ID NO: 5191926 - DNA, 25 bp, Homo sapien
gcctggcggtgttgtctggctcccc

SEQ ID NO: 5191927 - DNA, 25 bp, Homo sapien
gactcagggctttgccattggtccc

SEQ ID NO: 5191928 - DNA, 25 bp, Homo sapien
tcctctgctccggagtttttctcca

SEQ ID NO: 5191929 - DNA, 25 bp, Homo sapien
tgctccggagtttttctccagctcc

SEQ ID NO: 5191930 - DNA, 25 bp, Homo sapien
ctctcctcaacttctgacttttcca

SEQ ID NO: 5191931 - DNA, 25 bp, Homo sapien
tctcctcaacttctgacttttccat

SEQ ID NO: 5191932 - DNA, 25 bp, Homo sapien
ccttctccagatcccatgaggctga

SEQ ID NO: 5191933 - DNA, 25 bp, Homo sapien
gatgacatcccttaatgccaatggc

SEQ ID NO: 5191934 - DNA, 25 bp, Homo sapien
ggctgatgcttgtgatgacatccct

SEQ ID NO: 5191935 - DNA, 25 bp, Homo sapien
gatcccatgaggctgatgcttgtga

SEQ ID NO: 5191936 - DNA, 25 bp, Homo sapien
ggtgacaatgtgacagctggtgctt

SEQ ID NO: 5191937 - DNA, 25 bp, Homo sapien
gaataacctaaccaagatgccttta

SEQ ID NO: 5191938 - DNA, 25 bp, Homo sapien
tttgccagttaccttccgaaagctg

SEQ ID NO: 5191939 - DNA, 25 bp, Homo sapien
catcatgttatggagaccagtgagg

SEQ ID NO: 5191940 - DNA, 25 bp, Homo sapien
taacttagagagagacaatggtcac

SEQ ID NO: 5191941 - DNA, 25 bp, Homo sapien
tctttataacttagagagagacaat

SEQ ID NO: 5191942 - DNA, 25 bp, Homo sapien
ctaccattatgtatagggattctca

SEQ ID NO: 5191943 - DNA, 25 bp, Homo sapien
gagttgagaactaccattatgtata

SEQ ID NO: 5191944 - DNA, 25 bp, Homo sapien
gaatttgtctgccacatagacaaag

SEQ ID NO: 5191945 - DNA, 25 bp, Homo sapien
gaagctgtttggtaagaattatgaa

SEQ ID NO: 5191946 - DNA, 25 bp, Homo sapien
agacttggtcctgttgttgttcaca

SEQ ID NO: 5191947 - DNA, 25 bp, Homo sapien
ttttctgctgcattcggcatgaagc

SEQ ID NO: 5191948 - DNA, 25 bp, Homo sapien
ccatcgattgtatgcagaaagttct

SEQ ID NO: 5191949 - DNA, 25 bp, Homo sapien
aaacatctggaacttaacgtctaat

SEQ ID NO: 5191950 - DNA, 25 bp, Homo sapien
gccaaaaagctattgccatcgattg

SEQ ID NO: 5191951 - DNA, 25 bp, Homo sapien
cgtctaattttgaccctcactatga

SEQ ID NO: 5191952 - DNA, 25 bp, Homo sapien
tcttttcttcgaagtagtcattaac

SEQ ID NO: 5191953 - DNA, 25 bp, Homo sapien
tttcttcgaagtagtcattaaccat

SEQ ID NO: 5191954 - DNA, 25 bp, Homo sapien
gagaatcactttcttgcagactact

SEQ ID NO: 5191955 - DNA, 25 bp, Homo sapien
gcagactactccagaatttatgttt

SEQ ID NO: 5191956 - DNA, 25 bp, Homo sapien
gctaaattctaccaatagggtcaca

SEQ ID NO: 5191957 - DNA, 25 bp, Homo sapien
gaaaacccagttctatgacttgata

SEQ ID NO: 5191958 - DNA, 25 bp, Homo sapien
gggtcacattccttcagggaagcat

SEQ ID NO: 5191959 - DNA, 25 bp, Homo sapien
ccataaaatatgagtacagggctaa

SEQ ID NO: 5191960 - DNA, 25 bp, Homo sapien
tcgtgttatttcagcatggttgtag

SEQ ID NO: 5191961 - DNA, 25 bp, Homo sapien
cgtgttatttcagcatggttgtagt

SEQ ID NO: 5191962 - DNA, 25 bp, Homo sapien
ttcgtgttatttcagcatggttgta

SEQ ID NO: 5191963 - DNA, 25 bp, Homo sapien
tgcttgttgctgcataggcttggag

SEQ ID NO: 5191964 - DNA, 25 bp, Homo sapien
ggcttggagtttagctcaatgctct

SEQ ID NO: 5191965 - DNA, 25 bp, Homo sapien
ggagtttagctcaatgctcttatct

SEQ ID NO: 5191966 - DNA, 25 bp, Homo sapien
tcagtgccttaatacatccaatgga

SEQ ID NO: 5191967 - DNA, 25 bp, Homo sapien
gtgcttggttcatcccatgagtcca

SEQ ID NO: 5191968 - DNA, 25 bp, Homo sapien
gagaaacatgtttgtgctcaaggca

SEQ ID NO: 5191969 - DNA, 25 bp, Homo sapien
tgtttgtgctcaaggcaatagtggc

SEQ ID NO: 5191970 - DNA, 25 bp, Homo sapien
caatagtggctagagttagtgcttg

SEQ ID NO: 5191971 - DNA, 25 bp, Homo sapien
ttccagaatgctgtgtttgtggagg

SEQ ID NO: 5191972 - DNA, 25 bp, Homo sapien
cagaatgctgtgtttgtggaggttt

SEQ ID NO: 5191973 - DNA, 25 bp, Homo sapien
ttactgttcaggtgttatagcgctg

SEQ ID NO: 5191974 - DNA, 25 bp, Homo sapien
tgttatagcgctggcaaaattcagc

SEQ ID NO: 5191975 - DNA, 25 bp, Homo sapien
aaattactttctttgcaaggaagct

SEQ ID NO: 5191976 - DNA, 25 bp, Homo sapien
tcttgacttttccactcctgactag

SEQ ID NO: 5191977 - DNA, 25 bp, Homo sapien
tctttgcaaggaagctcatttaaaa

SEQ ID NO: 5191978 - DNA, 25 bp, Homo sapien
aggacaaaatgccaattcttgcaaa

SEQ ID NO: 5191979 - DNA, 25 bp, Homo sapien
gatgcaggccttagtcatttagaaa

SEQ ID NO: 5191980 - DNA, 25 bp, Homo sapien
gaaaaagagccagtacaagtgagtg

SEQ ID NO: 5191981 - DNA, 25 bp, Homo sapien
gaggccaggcatacaaatactttgc

SEQ ID NO: 5191982 - DNA, 25 bp, Homo sapien
gactggtcacaacttcttgctgcta

SEQ ID NO: 5191983 - DNA, 25 bp, Homo sapien
ggatacacccacatagaaacaggtc

SEQ ID NO: 5191984 - DNA, 25 bp, Homo sapien
cacccacatagaaacaggtcgggtt

SEQ ID NO: 5191985 - DNA, 25 bp, Homo sapien
gatacacccacatagaaacaggtcg

SEQ ID NO: 5191986 - DNA, 25 bp, Homo sapien
tacacccacatagaaacaggtcggg

SEQ ID NO: 5191987 - DNA, 25 bp, Homo sapien
cttttttctacatgtcccagtccct

SEQ ID NO: 5191988 - DNA, 25 bp, Homo sapien
tttttctacatgtcccagtccctac

SEQ ID NO: 5191989 - DNA, 25 bp, Homo sapien
ttttttctacatgtcccagtcccta

SEQ ID NO: 5191990 - DNA, 25 bp, Homo sapien
tggcacagaaattgtttagggaggt

SEQ ID NO: 5191991 - DNA, 25 bp, Homo sapien
tcatcttggcacagaaattgtttag

SEQ ID NO: 5191992 - DNA, 25 bp, Homo sapien
cacagaaattgtttagggaggtgtc

SEQ ID NO: 5191993 - DNA, 25 bp, Homo sapien
tcttggcacagaaattgtttaggga

SEQ ID NO: 5191994 - DNA, 25 bp, Homo sapien
tgggaacatggatgggtccaggttg

SEQ ID NO: 5191995 - DNA, 25 bp, Homo sapien
gggaacatggatgggtccaggttgt

SEQ ID NO: 5191996 - DNA, 25 bp, Homo sapien
ggaacatggatgggtccaggttgtc

SEQ ID NO: 5191997 - DNA, 25 bp, Homo sapien
ctcaggaggttgagggagcccttct

SEQ ID NO: 5191998 - DNA, 25 bp, Homo sapien
ccatttctgcctcaggaggttgagg

SEQ ID NO: 5191999 - DNA, 25 bp, Homo sapien
ggaggttgagggagcccttctgcat

SEQ ID NO: 5192000 - DNA, 25 bp, Homo sapien
tcaggaggttgagggagcccttctg

SEQ ID NO: 5192001 - DNA, 25 bp, Homo sapien
actgtagggcagacttgtgggatcc

SEQ ID NO: 5192002 - DNA, 25 bp, Homo sapien
agaatccttctcttccggcttcgaa

SEQ ID NO: 5192003 - DNA, 25 bp, Homo sapien
caaagattgaggtgctgatactacc

SEQ ID NO: 5192004 - DNA, 25 bp, Homo sapien
tccttcaggcgcaagcaatttgctt

SEQ ID NO: 5192005 - DNA, 25 bp, Homo sapien
aaagcgttcaatcctgcgccgactg

SEQ ID NO: 5192006 - DNA, 25 bp, Homo sapien
tcaagggcaatggaaaagcgttcaa

SEQ ID NO: 5192007 - DNA, 25 bp, Homo sapien
tgtttccactcttaggagcctcaaa

SEQ ID NO: 5192008 - DNA, 25 bp, Homo sapien
tttccaccgtactcagctggtttgt

SEQ ID NO: 5192009 - DNA, 25 bp, Homo sapien
atacagaaacatcaacataagaggg

SEQ ID NO: 5192010 - DNA, 25 bp, Homo sapien
gaagtcaagtccacattgaagcaga

SEQ ID NO: 5192011 - DNA, 25 bp, Homo sapien
cataagagggcatatcaatattgtt

SEQ ID NO: 5192012 - DNA, 25 bp, Homo sapien
aagtcaagtccacattgaagcagac

SEQ ID NO: 5192013 - DNA, 25 bp, Homo sapien
catactctatcattttcttttcgag

SEQ ID NO: 5192014 - DNA, 25 bp, Homo sapien
ttttcttttcgagaatcttctcaca

SEQ ID NO: 5192015 - DNA, 25 bp, Homo sapien
ctctatcattttcttttcgagaatc

SEQ ID NO: 5192016 - DNA, 25 bp, Homo sapien
attttcttttcgagaatcttctcac

SEQ ID NO: 5192017 - DNA, 25 bp, Homo sapien
caacttttggtacagacacctgtca

SEQ ID NO: 5192018 - DNA, 25 bp, Homo sapien
ctacaacttttggtacagacacctg

SEQ ID NO: 5192019 - DNA, 25 bp, Homo sapien
acaacttttggtacagacacctgtc

SEQ ID NO: 5192020 - DNA, 25 bp, Homo sapien
tacaacttttggtacagacacctgt

SEQ ID NO: 5192021 - DNA, 25 bp, Homo sapien
tctttgggctttcaacaggaaggat

SEQ ID NO: 5192022 - DNA, 25 bp, Homo sapien
ctacacggagcaaggtagagctgtg

SEQ ID NO: 5192023 - DNA, 25 bp, Homo sapien
aacacgtagatttagaaacttctgg

SEQ ID NO: 5192024 - DNA, 25 bp, Homo sapien
gggtccagagccttgataaaactct

SEQ ID NO: 5192025 - DNA, 25 bp, Homo sapien
tcccatgaggagaaagtgactacac

SEQ ID NO: 5192026 - DNA, 25 bp, Homo sapien
tgttaatggattagattatccaatt

SEQ ID NO: 5192027 - DNA, 25 bp, Homo sapien
tttaaaaagcatgacccaactactc

SEQ ID NO: 5192028 - DNA, 25 bp, Homo sapien
ttaccaatactaggttcaaaagtga

SEQ ID NO: 5192029 - DNA, 25 bp, Homo sapien
caaaagtgagcttctttattgaaaa

SEQ ID NO: 5192030 - DNA, 25 bp, Homo sapien
tattattggggtcgctattctttgt

SEQ ID NO: 5192031 - DNA, 25 bp, Homo sapien
ggggtcgctattctttgtaatcaga

SEQ ID NO: 5192032 - DNA, 25 bp, Homo sapien
ttcatggtattattattggggtcgc

SEQ ID NO: 5192033 - DNA, 25 bp, Homo sapien
catggtattattattggggtcgcta

SEQ ID NO: 5192034 - DNA, 25 bp, Homo sapien
tcgttttgaattttggccataaaca

SEQ ID NO: 5192035 - DNA, 25 bp, Homo sapien
tttgaattttggccataaacaacca

SEQ ID NO: 5192036 - DNA, 25 bp, Homo sapien
atgttctttaatcctggtttctctt

SEQ ID NO: 5192037 - DNA, 25 bp, Homo sapien
ttgaattttggccataaacaaccat

SEQ ID NO: 5192038 - DNA, 25 bp, Homo sapien
taacagctgaaaggtaacggcttct

SEQ ID NO: 5192039 - DNA, 25 bp, Homo sapien
taacggcttctttaacacagcaggc

SEQ ID NO: 5192040 - DNA, 25 bp, Homo sapien
ccagggttgtggcagttacactgtc

SEQ ID NO: 5192041 - DNA, 25 bp, Homo sapien
tattcagagctatatgtaacagctg

SEQ ID NO: 5192042 - DNA, 25 bp, Homo sapien
gaagaaatgatatttggattgggat

SEQ ID NO: 5192043 - DNA, 25 bp, Homo sapien
gaagacactgcagatggcttcgtga

SEQ ID NO: 5192044 - DNA, 25 bp, Homo sapien
ttcgtgaaattctcacagtagcggg

SEQ ID NO: 5192045 - DNA, 25 bp, Homo sapien
tcacagtagcgggtagaagaaatga

SEQ ID NO: 5192046 - DNA, 25 bp, Homo sapien
ttaccagagcctggcaacagccatg

SEQ ID NO: 5192047 - DNA, 25 bp, Homo sapien
cataatactttccccgttttcatag

SEQ ID NO: 5192048 - DNA, 25 bp, Homo sapien
tgttaccagagcctggcaacagcca

SEQ ID NO: 5192049 - DNA, 25 bp, Homo sapien
tcatgagagccaccactgttaccag

SEQ ID NO: 5192050 - DNA, 25 bp, Homo sapien
gggtgatgctagctgctgggtgttt

SEQ ID NO: 5192051 - DNA, 25 bp, Homo sapien
gtgatgctagctgctgggtgtttcc

SEQ ID NO: 5192052 - DNA, 25 bp, Homo sapien
tgtttcccctctacggtcttgattc

SEQ ID NO: 5192053 - DNA, 25 bp, Homo sapien
gatgctagctgctgggtgtttcccc

SEQ ID NO: 5192054 - DNA, 25 bp, Homo sapien
ctattcccaaagggacagcagcatt

SEQ ID NO: 5192055 - DNA, 25 bp, Homo sapien
tattcccaaagggacagcagcattt

SEQ ID NO: 5192056 - DNA, 25 bp, Homo sapien
ggacagcagcatttaatgaatgcat

SEQ ID NO: 5192057 - DNA, 25 bp, Homo sapien
tagactggtggctcctgtgggttcc

SEQ ID NO: 5192058 - DNA, 25 bp, Homo sapien
ggtggctcctgtgggttccaccagt

SEQ ID NO: 5192059 - DNA, 25 bp, Homo sapien
ctttagactggtggctcctgtgggt

SEQ ID NO: 5192060 - DNA, 25 bp, Homo sapien
gactggtggctcctgtgggttccac

SEQ ID NO: 5192061 - DNA, 25 bp, Homo sapien
ggcgagcacaaacttcgctcaattt

SEQ ID NO: 5192062 - DNA, 25 bp, Homo sapien
gctcccagggtgactcttaaaagct

SEQ ID NO: 5192063 - DNA, 25 bp, Homo sapien
tgaccactttcaggtgacatcttgt

SEQ ID NO: 5192064 - DNA, 25 bp, Homo sapien
cttcaaagatgcggctgtgaccact

SEQ ID NO: 5192065 - DNA, 25 bp, Homo sapien
tcagccctgcggttctacctgaact

SEQ ID NO: 5192066 - DNA, 25 bp, Homo sapien
cttcaagtctgggttatattgggta

SEQ ID NO: 5192067 - DNA, 25 bp, Homo sapien
ttcttcaagtctgggttatattggg

SEQ ID NO: 5192068 - DNA, 25 bp, Homo sapien
ttgttcttcaagtctgggttatatt

SEQ ID NO: 5192069 - DNA, 25 bp, Homo sapien
tcaagtctgggttatattgggtaaa

SEQ ID NO: 5192070 - DNA, 25 bp, Homo sapien
tcctgacagccttctgcagtgcact

SEQ ID NO: 5192071 - DNA, 25 bp, Homo sapien
tgcagccagcagcatgtggaatctc

SEQ ID NO: 5192072 - DNA, 25 bp, Homo sapien
agccagcagcatgtggaatctctcc

SEQ ID NO: 5192073 - DNA, 25 bp, Homo sapien
tgacagccttctgcagtgcactgca

SEQ ID NO: 5192074 - DNA, 25 bp, Homo sapien
cctttggcaattccatgggactgga

SEQ ID NO: 5192075 - DNA, 25 bp, Homo sapien
acctttggcaattccatgggactgg

SEQ ID NO: 5192076 - DNA, 25 bp, Homo sapien
aacctttggcaattccatgggactg

SEQ ID NO: 5192077 - DNA, 25 bp, Homo sapien
tgcaggtggagcctgagaatctggg

SEQ ID NO: 5192078 - DNA, 25 bp, Homo sapien
gcttggtccgtggagaacactgctg

SEQ ID NO: 5192079 - DNA, 25 bp, Homo sapien
tctgggcttggtccgtggagaacac

SEQ ID NO: 5192080 - DNA, 25 bp, Homo sapien
atctgggcttggtccgtggagaaca

SEQ ID NO: 5192081 - DNA, 25 bp, Homo sapien
gtgggatgatgctagtaattagcat

SEQ ID NO: 5192082 - DNA, 25 bp, Homo sapien
aagttcttctagtgggatgatgcta

SEQ ID NO: 5192083 - DNA, 25 bp, Homo sapien
gatgctagtaattagcatcaggcca

SEQ ID NO: 5192084 - DNA, 25 bp, Homo sapien
gatgatgctagtaattagcatcagg

SEQ ID NO: 5192085 - DNA, 25 bp, Homo sapien
gcatggctctaacacatgtgcagtc

SEQ ID NO: 5192086 - DNA, 25 bp, Homo sapien
cacatgtgcagtcaatcaaactccc

SEQ ID NO: 5192087 - DNA, 25 bp, Homo sapien
cagtaatgtatgcatggctctaaca

SEQ ID NO: 5192088 - DNA, 25 bp, Homo sapien
gccctcagtaatgtatgcatggctc

SEQ ID NO: 5192089 - DNA, 25 bp, Homo sapien
tcacagactagcttcctcccttgtt

SEQ ID NO: 5192090 - DNA, 25 bp, Homo sapien
caagtttgtggaaatatcatatatc

SEQ ID NO: 5192091 - DNA, 25 bp, Homo sapien
gcccgctccactgaagggtctatca

SEQ ID NO: 5192092 - DNA, 25 bp, Homo sapien
agtcccctgaaagcaatgggtgcag

SEQ ID NO: 5192093 - DNA, 25 bp, Homo sapien
ctgctgtcacttctttttctataga

SEQ ID NO: 5192094 - DNA, 25 bp, Homo sapien
tgctgtcacttctttttctatagac

SEQ ID NO: 5192095 - DNA, 25 bp, Homo sapien
ctgtcacttctttttctatagacat

SEQ ID NO: 5192096 - DNA, 25 bp, Homo sapien
gctgtcacttctttttctatagaca

SEQ ID NO: 5192097 - DNA, 25 bp, Homo sapien
ctgataagactctaagtgtccattt

SEQ ID NO: 5192098 - DNA, 25 bp, Homo sapien
gtccatttagattcaaatctctctg

SEQ ID NO: 5192099 - DNA, 25 bp, Homo sapien
atctctctgaataataggactgtta

SEQ ID NO: 5192100 - DNA, 25 bp, Homo sapien
ctctgaataataggactgttatttc

SEQ ID NO: 5192101 - DNA, 25 bp, Homo sapien
ctggaagagattctttaaatccagt

SEQ ID NO: 5192102 - DNA, 25 bp, Homo sapien
cagatactggaagagattctttaaa

SEQ ID NO: 5192103 - DNA, 25 bp, Homo sapien
tggaagagattctttaaatccagtt

SEQ ID NO: 5192104 - DNA, 25 bp, Homo sapien
atactggaagagattctttaaatcc

SEQ ID NO: 5192105 - DNA, 25 bp, Homo sapien
taatccacctgggtatgttagtgag

SEQ ID NO: 5192106 - DNA, 25 bp, Homo sapien
tagctgcgggtgactttaacatatc

SEQ ID NO: 5192107 - DNA, 25 bp, Homo sapien
taccagttgagttgggagcctatag

SEQ ID NO: 5192108 - DNA, 25 bp, Homo sapien
gatacattcactatctttcagggct

SEQ ID NO: 5192109 - DNA, 25 bp, Homo sapien
cagggagaccacttcgtggaggtct

SEQ ID NO: 5192110 - DNA, 25 bp, Homo sapien
gaagctgcggcagtcacccctggaa

SEQ ID NO: 5192111 - DNA, 25 bp, Homo sapien
gaccacttcgtggaggtctgacaca

SEQ ID NO: 5192112 - DNA, 25 bp, Homo sapien
ctcgccatccgctccttcagggaga

SEQ ID NO: 5192113 - DNA, 25 bp, Homo sapien
ccgggagtaatgcttccttgctcag

SEQ ID NO: 5192114 - DNA, 25 bp, Homo sapien
taaaaccttgggctacagctcttga

SEQ ID NO: 5192115 - DNA, 25 bp, Homo sapien
cagtctgtggtcataaccgggagta

SEQ ID NO: 5192116 - DNA, 25 bp, Homo sapien
tggctcagcaataaggtttggaatc

SEQ ID NO: 5192117 - DNA, 25 bp, Homo sapien
agaagtaatttcgtcctcaaattgt

SEQ ID NO: 5192118 - DNA, 25 bp, Homo sapien
tgagcaaaggtattacgggaagaag

SEQ ID NO: 5192119 - DNA, 25 bp, Homo sapien
gctcagatctgttctgatgttgata

SEQ ID NO: 5192120 - DNA, 25 bp, Homo sapien
tgttgatattggtattgagcaaagg

SEQ ID NO: 5192121 - DNA, 25 bp, Homo sapien
cttttgttgttatatctttccttga

SEQ ID NO: 5192122 - DNA, 25 bp, Homo sapien
gaagcagaaagagctaattatacct

SEQ ID NO: 5192123 - DNA, 25 bp, Homo sapien
gggcttgccatttcattatagcaat

SEQ ID NO: 5192124 - DNA, 25 bp, Homo sapien
ataccttctgtcaagtctaacaaaa

SEQ ID NO: 5192125 - DNA, 25 bp, Homo sapien
tctgtactttggacccttcttgttc

SEQ ID NO: 5192126 - DNA, 25 bp, Homo sapien
cttcttgaagtgccaacctggctgc

SEQ ID NO: 5192127 - DNA, 25 bp, Homo sapien
gcttcttgaagtgccaacctggctg

SEQ ID NO: 5192128 - DNA, 25 bp, Homo sapien
tgcttcttgaagtgccaacctggct

SEQ ID NO: 5192129 - DNA, 25 bp, Homo sapien
gcttggtttacttcctcggtgtgct

SEQ ID NO: 5192130 - DNA, 25 bp, Homo sapien
tacttcctcggtgtgcttttcaaga

SEQ ID NO: 5192131 - DNA, 25 bp, Homo sapien
tgagatgcttggtttacttcctcgg

SEQ ID NO: 5192132 - DNA, 25 bp, Homo sapien
cctcggtgtgcttttcaagatgaga

SEQ ID NO: 5192133 - DNA, 25 bp, Homo sapien
ttgtcagaataaaggatcttttcct

SEQ ID NO: 5192134 - DNA, 25 bp, Homo sapien
taatctgcttggctggggttgtcat

SEQ ID NO: 5192135 - DNA, 25 bp, Homo sapien
ctttgtcagaataaaggatcttttc

SEQ ID NO: 5192136 - DNA, 25 bp, Homo sapien
gcttggctggggttgtcatctcttt

SEQ ID NO: 5192137 - DNA, 25 bp, Homo sapien
aagtctcttcatattcactttcagt

SEQ ID NO: 5192138 - DNA, 25 bp, Homo sapien
gccagagttgaggaagtgacactgt

SEQ ID NO: 5192139 - DNA, 25 bp, Homo sapien
gaagaggtactcacaactgatgatg

SEQ ID NO: 5192140 - DNA, 25 bp, Homo sapien
ctgatgatggcttgaaagtctcttc

SEQ ID NO: 5192141 - DNA, 25 bp, Homo sapien
tctgaggctcggtcataaaaacctt

SEQ ID NO: 5192142 - DNA, 25 bp, Homo sapien
taccgggcttgttgcacatctgctg

SEQ ID NO: 5192143 - DNA, 25 bp, Homo sapien
tcagaagaataagccccaagtgtgt

SEQ ID NO: 5192144 - DNA, 25 bp, Homo sapien
tcataaagagactccattggctggg

SEQ ID NO: 5192145 - DNA, 25 bp, Homo sapien
cgaggatcctgccatcacagcttta

SEQ ID NO: 5192146 - DNA, 25 bp, Homo sapien
gttcctctggacagcaacctgatga

SEQ ID NO: 5192147 - DNA, 25 bp, Homo sapien
aatatcaccagggatggcatcaggc

SEQ ID NO: 5192148 - DNA, 25 bp, Homo sapien
tccaggtcatctttgagaagctcct

SEQ ID NO: 5192149 - DNA, 25 bp, Homo sapien
ttatggtgtgaattagatagtcttc

SEQ ID NO: 5192150 - DNA, 25 bp, Homo sapien
tatgacaatctttacagtgcctttg

SEQ ID NO: 5192151 - DNA, 25 bp, Homo sapien
ccagagcatcattgttttgttcacg

SEQ ID NO: 5192152 - DNA, 25 bp, Homo sapien
gttttgttcacgatctatgacaatc

SEQ ID NO: 5192153 - DNA, 25 bp, Homo sapien
aagatgctgttctcctgtagtatca

SEQ ID NO: 5192154 - DNA, 25 bp, Homo sapien
gctttccaacggttttaccagcaga

SEQ ID NO: 5192155 - DNA, 25 bp, Homo sapien
gccctgtctgattctttagttgtta

SEQ ID NO: 5192156 - DNA, 25 bp, Homo sapien
acagttgaagttaattgtctgctca

SEQ ID NO: 5192157 - DNA, 25 bp, Homo sapien
gaaagtcctggcttttcaagtgaac

SEQ ID NO: 5192158 - DNA, 25 bp, Homo sapien
tggatgtgtcttgctctacaggcaa

SEQ ID NO: 5192159 - DNA, 25 bp, Homo sapien
tctgaaagtcccctgaaaggtcgta

SEQ ID NO: 5192160 - DNA, 25 bp, Homo sapien
aggtcgtaagttcctccaactggca

SEQ ID NO: 5192161 - DNA, 25 bp, Homo sapien
gaatattgttgcatgaagtctccac

SEQ ID NO: 5192162 - DNA, 25 bp, Homo sapien
gacagggaggttgccagttcaactt

SEQ ID NO: 5192163 - DNA, 25 bp, Homo sapien
gaggcggcagaaacatcgatgaact

SEQ ID NO: 5192164 - DNA, 25 bp, Homo sapien
ttacattccatatctgacagggagg

SEQ ID NO: 5192165 - DNA, 25 bp, Homo sapien
tgtagtaagaactctcctgtttctg

SEQ ID NO: 5192166 - DNA, 25 bp, Homo sapien
tgttgtagtaagaactctcctgttt

SEQ ID NO: 5192167 - DNA, 25 bp, Homo sapien
gttgtagtaagaactctcctgtttc

SEQ ID NO: 5192168 - DNA, 25 bp, Homo sapien
atgttgtagtaagaactctcctgtt

SEQ ID NO: 5192169 - DNA, 25 bp, Homo sapien
ttttccacctctgttatgtgttgat

SEQ ID NO: 5192170 - DNA, 25 bp, Homo sapien
cttttccacctctgttatgtgttga

SEQ ID NO: 5192171 - DNA, 25 bp, Homo sapien
ccttttccacctctgttatgtgttg

SEQ ID NO: 5192172 - DNA, 25 bp, Homo sapien
ttccacctctgttatgtgttgattt

SEQ ID NO: 5192173 - DNA, 25 bp, Homo sapien
acctcctcattggttttttgtaatg

SEQ ID NO: 5192174 - DNA, 25 bp, Homo sapien
tatccgagcattactttgagagcct

SEQ ID NO: 5192175 - DNA, 25 bp, Homo sapien
tcttggcagcgactgtttctggcga

SEQ ID NO: 5192176 - DNA, 25 bp, Homo sapien
tggagagttggttatcagaacacac

SEQ ID NO: 5192177 - DNA, 25 bp, Homo sapien
tgaagctgctaaaacatggtggagc

SEQ ID NO: 5192178 - DNA, 25 bp, Homo sapien
tcataggacacaagcatatcttccg

SEQ ID NO: 5192179 - DNA, 25 bp, Homo sapien
gatgggttttcacgtgactacgaac

SEQ ID NO: 5192180 - DNA, 25 bp, Homo sapien
cctgggaaccatcttgagcttatct

SEQ ID NO: 5192181 - DNA, 25 bp, Homo sapien
tgaaggaaccactagcagcatgatt

SEQ ID NO: 5192182 - DNA, 25 bp, Homo sapien
tcagatttttgcgacatgggccttc

SEQ ID NO: 5192183 - DNA, 25 bp, Homo sapien
tcataactttcagtgtcgggcacca

SEQ ID NO: 5192184 - DNA, 25 bp, Homo sapien
ggagagtccctaccacgagtttcta

SEQ ID NO: 5192185 - DNA, 25 bp, Homo sapien
gcggttgcatatcccaggcctttaa

SEQ ID NO: 5192186 - DNA, 25 bp, Homo sapien
cagttgcagaagcatctgcggttgc

SEQ ID NO: 5192187 - DNA, 25 bp, Homo sapien
aaggtggttctcatctcagttgcag

SEQ ID NO: 5192188 - DNA, 25 bp, Homo sapien
acagccagatttgccagcttctgag

SEQ ID NO: 5192189 - DNA, 25 bp, Homo sapien
ctgccactaggcactccattggata

SEQ ID NO: 5192190 - DNA, 25 bp, Homo sapien
taggcactccattggataaactgtc

SEQ ID NO: 5192191 - DNA, 25 bp, Homo sapien
cactaggcactccattggataaact

SEQ ID NO: 5192192 - DNA, 25 bp, Homo sapien
gccactaggcactccattggataaa

SEQ ID NO: 5192193 - DNA, 25 bp, Homo sapien
cttagtttactgttgcaatggtggc

SEQ ID NO: 5192194 - DNA, 25 bp, Homo sapien
gtttactgttgcaatggtggcatcg

SEQ ID NO: 5192195 - DNA, 25 bp, Homo sapien
tgttgcaatggtggcatcggaagca

SEQ ID NO: 5192196 - DNA, 25 bp, Homo sapien
tagtttactgttgcaatggtggcat

SEQ ID NO: 5192197 - DNA, 25 bp, Homo sapien
gaggtttacagtatatttgtccatg

SEQ ID NO: 5192198 - DNA, 25 bp, Homo sapien
ccatgaagtgatgcataatttccca

SEQ ID NO: 5192199 - DNA, 25 bp, Homo sapien
agtatatttgtccatgaagtgatgc

SEQ ID NO: 5192200 - DNA, 25 bp, Homo sapien
catgaagtgatgcataatttcccaa

SEQ ID NO: 5192201 - DNA, 25 bp, Homo sapien
tcattacgatctccaggtacaaggg

SEQ ID NO: 5192202 - DNA, 25 bp, Homo sapien
tatgctgcttatgtccaaaaccttc

SEQ ID NO: 5192203 - DNA, 25 bp, Homo sapien
gtttttgcagttccatctatcttta

SEQ ID NO: 5192204 - DNA, 25 bp, Homo sapien
ggtacaagggtgttttctgcaatat

SEQ ID NO: 5192205 - DNA, 25 bp, Homo sapien
gatagcagggttgtcatttcaggtg

SEQ ID NO: 5192206 - DNA, 25 bp, Homo sapien
tcaggtggccacttaggtttactca

SEQ ID NO: 5192207 - DNA, 25 bp, Homo sapien
aggtttactcattttgagctcttcc

SEQ ID NO: 5192208 - DNA, 25 bp, Homo sapien
tttcttagggatctccttggaagga

SEQ ID NO: 5192209 - DNA, 25 bp, Homo sapien
gattcctataacatcctctttctga

SEQ ID NO: 5192210 - DNA, 25 bp, Homo sapien
aatggaaagtgatcttgtctttgtc

SEQ ID NO: 5192211 - DNA, 25 bp, Homo sapien
ggtggactgtagataaggctgcaaa

SEQ ID NO: 5192212 - DNA, 25 bp, Homo sapien
gagttctaacatcttctagcagaga

SEQ ID NO: 5192213 - DNA, 25 bp, Homo sapien
cttttcatcttttcttccttcaggc

SEQ ID NO: 5192214 - DNA, 25 bp, Homo sapien
ttcttttcatcttttcttccttcag

SEQ ID NO: 5192215 - DNA, 25 bp, Homo sapien
ttttcatcttttcttccttcaggca

SEQ ID NO: 5192216 - DNA, 25 bp, Homo sapien
tttcatcttttcttccttcaggcat

SEQ ID NO: 5192217 - DNA, 25 bp, Homo sapien
ttcctgttactctttgtgtcttcag

SEQ ID NO: 5192218 - DNA, 25 bp, Homo sapien
gcacttttcctgttactctttgtgt

SEQ ID NO: 5192219 - DNA, 25 bp, Homo sapien
cttttcctgttactctttgtgtctt

SEQ ID NO: 5192220 - DNA, 25 bp, Homo sapien
cctgttactctttgtgtcttcagct

SEQ ID NO: 5192221 - DNA, 25 bp, Homo sapien
tgtgttttcattattgcgggcagct

SEQ ID NO: 5192222 - DNA, 25 bp, Homo sapien
tcttccaccgtgagttgttctgact

SEQ ID NO: 5192223 - DNA, 25 bp, Homo sapien
catttgcttcactcgacaagggtaa

SEQ ID NO: 5192224 - DNA, 25 bp, Homo sapien
gagccattgctagtacattcctcga

SEQ ID NO: 5192225 - DNA, 25 bp, Homo sapien
tagacacgagatttctgaacaccat

SEQ ID NO: 5192226 - DNA, 25 bp, Homo sapien
aatatcccattgagatagacacgag

SEQ ID NO: 5192227 - DNA, 25 bp, Homo sapien
gaacatcaatatctctcagtgccta

SEQ ID NO: 5192228 - DNA, 25 bp, Homo sapien
agtgcctaagtgtggactgtcagtg

SEQ ID NO: 5192229 - DNA, 25 bp, Homo sapien
aagttataataattgtgacaagcag

SEQ ID NO: 5192230 - DNA, 25 bp, Homo sapien
agttataataattgtgacaagcagc

SEQ ID NO: 5192231 - DNA, 25 bp, Homo sapien
gttataataattgtgacaagcagca

SEQ ID NO: 5192232 - DNA, 25 bp, Homo sapien
gaagttataataattgtgacaagca

SEQ ID NO: 5192233 - DNA, 25 bp, Homo sapien
caataaccctcgtatctttaaaatg

SEQ ID NO: 5192234 - DNA, 25 bp, Homo sapien
gtgtgggtggtaaatacttgcctca

SEQ ID NO: 5192235 - DNA, 25 bp, Homo sapien
tccagcattattttagtgtgggtgg

SEQ ID NO: 5192236 - DNA, 25 bp, Homo sapien
cccaagtcacaaggagtatatgtac

SEQ ID NO: 5192237 - DNA, 25 bp, Homo sapien
tctttgccacgttcaattgcttttg

SEQ ID NO: 5192238 - DNA, 25 bp, Homo sapien
catcttctctttgccacgttcaatt

SEQ ID NO: 5192239 - DNA, 25 bp, Homo sapien
gcttttgttaatttcatcgatttga

SEQ ID NO: 5192240 - DNA, 25 bp, Homo sapien
aaaagagcagctctactttctgctt

SEQ ID NO: 5192241 - DNA, 25 bp, Homo sapien
gtatttctagcttaaatatttcaaa

SEQ ID NO: 5192242 - DNA, 25 bp, Homo sapien
agtatttctagcttaaatatttcaa

SEQ ID NO: 5192243 - DNA, 25 bp, Homo sapien
tcatccagtgttggaagtatttcta

SEQ ID NO: 5192244 - DNA, 25 bp, Homo sapien
acatcatccagtgttggaagtattt

SEQ ID NO: 5192245 - DNA, 25 bp, Homo sapien
ccagccccacgaacatccaagcctt

SEQ ID NO: 5192246 - DNA, 25 bp, Homo sapien
cacactcaaagtgagtttccaccat

SEQ ID NO: 5192247 - DNA, 25 bp, Homo sapien
agccccacgaacatccaagcctttg

SEQ ID NO: 5192248 - DNA, 25 bp, Homo sapien
caacacactcaaagtgagtttccac

SEQ ID NO: 5192249 - DNA, 25 bp, Homo sapien
gcgaatcccaggaggtggtcgccgc

SEQ ID NO: 5192250 - DNA, 25 bp, Homo sapien
ccgagtacgaacggcgcggctggag

SEQ ID NO: 5192251 - DNA, 25 bp, Homo sapien
agagcgaatcccaggaggtggtcgc

SEQ ID NO: 5192252 - DNA, 25 bp, Homo sapien
cgagtacgaacggcgcggctggaga

SEQ ID NO: 5192253 - DNA, 25 bp, Homo sapien
aggagcccgcggcttggcaggaaag

SEQ ID NO: 5192254 - DNA, 25 bp, Homo sapien
agagcctcgtccctgcggttcagcg

SEQ ID NO: 5192255 - DNA, 25 bp, Homo sapien
tgcggttcagcgtcttggcatcgct

SEQ ID NO: 5192256 - DNA, 25 bp, Homo sapien
gggtgactttgtccccagagcctcg

SEQ ID NO: 5192257 - DNA, 25 bp, Homo sapien
ggcggggggagaccaatcagagcgg

SEQ ID NO: 5192258 - DNA, 25 bp, Homo sapien
ggagaccaatcagagcggaaggccc

SEQ ID NO: 5192259 - DNA, 25 bp, Homo sapien
ggcagccaatcgctgcctcgccccg

SEQ ID NO: 5192260 - DNA, 25 bp, Homo sapien
cgcccggcagccaatcgctgcctcg

SEQ ID NO: 5192261 - DNA, 25 bp, Homo sapien
tcgtgctccgctctctcggccgccc

SEQ ID NO: 5192262 - DNA, 25 bp, Homo sapien
gctccgctctctcggccgcccctcc

SEQ ID NO: 5192263 - DNA, 25 bp, Homo sapien
cgctctctcggccgcccctccccgg

SEQ ID NO: 5192264 - DNA, 25 bp, Homo sapien
ctctctcggccgcccctccccggcg

SEQ ID NO: 5192265 - DNA, 25 bp, Homo sapien
cgtggtctccggccgctgggctggc

SEQ ID NO: 5192266 - DNA, 25 bp, Homo sapien
cgcgcgggccacagggacgctgcag

SEQ ID NO: 5192267 - DNA, 25 bp, Homo sapien
gcgcgcgggccacagggacgctgca

SEQ ID NO: 5192268 - DNA, 25 bp, Homo sapien
gcggggcgcgtggtctccggccgct

SEQ ID NO: 5192269 - DNA, 25 bp, Homo sapien
tggagccgcacgggcgcgggcagta

SEQ ID NO: 5192270 - DNA, 25 bp, Homo sapien
ggtcccaacaccttcgtcgggatgc

SEQ ID NO: 5192271 - DNA, 25 bp, Homo sapien
gggacacgcagtccgggtcccaaca

SEQ ID NO: 5192272 - DNA, 25 bp, Homo sapien
agtagcacagcccagcgtcgggaca

SEQ ID NO: 5192273 - DNA, 25 bp, Homo sapien
ggacccactgttctcgctgcaaagt

SEQ ID NO: 5192274 - DNA, 25 bp, Homo sapien
aatgccatccccgcgctgtcaaagt

SEQ ID NO: 5192275 - DNA, 25 bp, Homo sapien
tgttctcgctgcaaagtgccccaag

SEQ ID NO: 5192276 - DNA, 25 bp, Homo sapien
gtccttgaaggacgtcgggccacgc

SEQ ID NO: 5192277 - DNA, 25 bp, Homo sapien
tctttacgagccacggtggactttc

SEQ ID NO: 5192278 - DNA, 25 bp, Homo sapien
caataaagttcaatttgctcggctc

SEQ ID NO: 5192279 - DNA, 25 bp, Homo sapien
gggagcctcgtggaacgcgcctctc

SEQ ID NO: 5192280 - DNA, 25 bp, Homo sapien
cagctccttttaatcaccgcaataa

SEQ ID NO: 5192281 - DNA, 25 bp, Homo sapien
accccagcgggcctgaactttgtcg

SEQ ID NO: 5192282 - DNA, 25 bp, Homo sapien
agaggcgcaccaggccgggtctcaa

SEQ ID NO: 5192283 - DNA, 25 bp, Homo sapien
aagcggagccgccaggcatttggca

SEQ ID NO: 5192284 - DNA, 25 bp, Homo sapien
gcctgaactttgtcggaaagcggag

SEQ ID NO: 5192285 - DNA, 25 bp, Homo sapien
gcacgggtggaactctcaacagctt

SEQ ID NO: 5192286 - DNA, 25 bp, Homo sapien
caaagaattcgccttctgcggaagg

SEQ ID NO: 5192287 - DNA, 25 bp, Homo sapien
aactacggagattcggatctggccc

SEQ ID NO: 5192288 - DNA, 25 bp, Homo sapien
tcctaagcagatactcccacggaga

SEQ ID NO: 5192289 - DNA, 25 bp, Homo sapien
aatgttgtcctctagttcctctgaa

SEQ ID NO: 5192290 - DNA, 25 bp, Homo sapien
aaattcactcatcccttttgaatga

SEQ ID NO: 5192291 - DNA, 25 bp, Homo sapien
gtagatttgactttgcacagtcata

SEQ ID NO: 5192292 - DNA, 25 bp, Homo sapien
tgtgataccttcaatgtggaagaga

SEQ ID NO: 5192293 - DNA, 25 bp, Homo sapien
acaagaggctcgctgagccccattt

SEQ ID NO: 5192294 - DNA, 25 bp, Homo sapien
ggagcccacaagaggctcgctgagc

SEQ ID NO: 5192295 - DNA, 25 bp, Homo sapien
aagaggctcgctgagccccatttgc

SEQ ID NO: 5192296 - DNA, 25 bp, Homo sapien
gaggctcgctgagccccatttgcac

SEQ ID NO: 5192297 - DNA, 25 bp, Homo sapien
cagaccgccttggtatgggtgctca

SEQ ID NO: 5192298 - DNA, 25 bp, Homo sapien
tcggaaattacctccaggaacaatg

SEQ ID NO: 5192299 - DNA, 25 bp, Homo sapien
aacaatgtgactgggctgtgttggc

SEQ ID NO: 5192300 - DNA, 25 bp, Homo sapien
tgctcaggaagctcacatgttttta

SEQ ID NO: 5192301 - DNA, 25 bp, Homo sapien
ggaagaaatcctatttacatctaga

SEQ ID NO: 5192302 - DNA, 25 bp, Homo sapien
ttagggaatggaacttcagtaaaca

SEQ ID NO: 5192303 - DNA, 25 bp, Homo sapien
aagagcctgactgcagaaagtttca

SEQ ID NO: 5192304 - DNA, 25 bp, Homo sapien
catctagacttgtttagggaatgga

SEQ ID NO: 5192305 - DNA, 25 bp, Homo sapien
tctgtatagcaggagtctataggcc

SEQ ID NO: 5192306 - DNA, 25 bp, Homo sapien
atttctgggcttctgtatagcagga

SEQ ID NO: 5192307 - DNA, 25 bp, Homo sapien
tctgggcttctgtatagcaggagtc

SEQ ID NO: 5192308 - DNA, 25 bp, Homo sapien
caggagtctataggccacagcagct

SEQ ID NO: 5192309 - DNA, 25 bp, Homo sapien
gggatcctactatcctgtacacagc

SEQ ID NO: 5192310 - DNA, 25 bp, Homo sapien
tcctctgagagcaaaggtaacaaga

SEQ ID NO: 5192311 - DNA, 25 bp, Homo sapien
ccctgcaggctctgataggcttgat

SEQ ID NO: 5192312 - DNA, 25 bp, Homo sapien
ggcttgatcctctgggttgctggga

SEQ ID NO: 5192313 - DNA, 25 bp, Homo sapien
gtgcattgacaggagatgttataag

SEQ ID NO: 5192314 - DNA, 25 bp, Homo sapien
tgtgcattgacaggagatgttataa

SEQ ID NO: 5192315 - DNA, 25 bp, Homo sapien
agggagatcctctgttctctggttt

SEQ ID NO: 5192316 - DNA, 25 bp, Homo sapien
taaggctacattctaccgtgattaa

SEQ ID NO: 5192317 - DNA, 25 bp, Homo sapien
tttcatatgagtagcactgggtctc

SEQ ID NO: 5192318 - DNA, 25 bp, Homo sapien
tagtgatccagataggtaaggctac

SEQ ID NO: 5192319 - DNA, 25 bp, Homo sapien
gatcatgtatctaatatctgccaag

SEQ ID NO: 5192320 - DNA, 25 bp, Homo sapien
gagggaacactgcagattctcagct

SEQ ID NO: 5192321 - DNA, 25 bp, Homo sapien
tcttccctcaaggtgcaagcctggt

SEQ ID NO: 5192322 - DNA, 25 bp, Homo sapien
tgcaacttgtaacctgtgtggagat

SEQ ID NO: 5192323 - DNA, 25 bp, Homo sapien
ccaatagggttataaaaagctctgc

SEQ ID NO: 5192324 - DNA, 25 bp, Homo sapien
ttgagtagcttcagattttgactaa

SEQ ID NO: 5192325 - DNA, 25 bp, Homo sapien
tctgctttgagtagcttcagatttt

SEQ ID NO: 5192326 - DNA, 25 bp, Homo sapien
ctaatgtcttcaggggtagactgca

SEQ ID NO: 5192327 - DNA, 25 bp, Homo sapien
ctttgagtagcttcagattttgact

SEQ ID NO: 5192328 - DNA, 25 bp, Homo sapien
tctaagttatctgcatgcaatgcaa

SEQ ID NO: 5192329 - DNA, 25 bp, Homo sapien
tgtgctctaagttatctgcatgcaa

SEQ ID NO: 5192330 - DNA, 25 bp, Homo sapien
ctgcatgcaatgcaatctgtgagct

SEQ ID NO: 5192331 - DNA, 25 bp, Homo sapien
tctaacacatccacgctgagcacaa

SEQ ID NO: 5192332 - DNA, 25 bp, Homo sapien
gaggtgagccactccttgtgaaata

SEQ ID NO: 5192333 - DNA, 25 bp, Homo sapien
gatacattttagaggcgtgcgtcag

SEQ ID NO: 5192334 - DNA, 25 bp, Homo sapien
gatgtttaagttcctctcgtgagcc

SEQ ID NO: 5192335 - DNA, 25 bp, Homo sapien
tatgcaacttgagatgtactggacg

SEQ ID NO: 5192336 - DNA, 25 bp, Homo sapien
gagctgaaaaatacgatccctgatc

SEQ ID NO: 5192337 - DNA, 25 bp, Homo sapien
catagaattgtcaacagccagagct

SEQ ID NO: 5192338 - DNA, 25 bp, Homo sapien
gggaacagtcaaggcctacttcatg

SEQ ID NO: 5192339 - DNA, 25 bp, Homo sapien
caagcatatcttaaacagtgggaac

SEQ ID NO: 5192340 - DNA, 25 bp, Homo sapien
cagcggtagcatcagcaagttgggt

SEQ ID NO: 5192341 - DNA, 25 bp, Homo sapien
catttcggaggcctgttcatggaac

SEQ ID NO: 5192342 - DNA, 25 bp, Homo sapien
gatattcctggtacttaggctgccc

SEQ ID NO: 5192343 - DNA, 25 bp, Homo sapien
tggttgatctccctaacagcggtag

SEQ ID NO: 5192344 - DNA, 25 bp, Homo sapien
ggttcgtcctgagatcctgtgtagc

SEQ ID NO: 5192345 - DNA, 25 bp, Homo sapien
gatttaaccccacttgcacatggct

SEQ ID NO: 5192346 - DNA, 25 bp, Homo sapien
tgaagagtagtagaccacagttgac

SEQ ID NO: 5192347 - DNA, 25 bp, Homo sapien
aatagagtgcagtgaagggttcgtc

SEQ ID NO: 5192348 - DNA, 25 bp, Homo sapien
cgggagattcctgcgttttgtccag

SEQ ID NO: 5192349 - DNA, 25 bp, Homo sapien
acgggagattcctgcgttttgtcca

SEQ ID NO: 5192350 - DNA, 25 bp, Homo sapien
gagattcctgcgttttgtccaggat

SEQ ID NO: 5192351 - DNA, 25 bp, Homo sapien
ggagattcctgcgttttgtccagga

SEQ ID NO: 5192352 - DNA, 25 bp, Homo sapien
ttgtatgggtatctttataaaatta

SEQ ID NO: 5192353 - DNA, 25 bp, Homo sapien
ttttttgtaacacttgtgtagacat

SEQ ID NO: 5192354 - DNA, 25 bp, Homo sapien
tgttgttgttatacagaagattttt

SEQ ID NO: 5192355 - DNA, 25 bp, Homo sapien
gccttctcagatggatagtttacaa

SEQ ID NO: 5192356 - DNA, 25 bp, Homo sapien
tacaggcatgaatcaggtatccata

SEQ ID NO: 5192357 - DNA, 25 bp, Homo sapien
gaatcaggtatccataaccactctc

SEQ ID NO: 5192358 - DNA, 25 bp, Homo sapien
gccaccaagctttacacttttacag

SEQ ID NO: 5192359 - DNA, 25 bp, Homo sapien
gtagactcaagtcaagtacactcat

SEQ ID NO: 5192360 - DNA, 25 bp, Homo sapien
aaaaactgatcagccaaaggcagcc

SEQ ID NO: 5192361 - DNA, 25 bp, Homo sapien
aaaactgatcagccaaaggcagccc

SEQ ID NO: 5192362 - DNA, 25 bp, Homo sapien
tcaaaaaactgatcagccaaaggca

SEQ ID NO: 5192363 - DNA, 25 bp, Homo sapien
aaaaaactgatcagccaaaggcagc

SEQ ID NO: 5192364 - DNA, 25 bp, Homo sapien
gatagacaatagcatcccctatttg

SEQ ID NO: 5192365 - DNA, 25 bp, Homo sapien
tcactcatgtggtcaccttcttcca

SEQ ID NO: 5192366 - DNA, 25 bp, Homo sapien
tattcttctgatagacaatagcatc

SEQ ID NO: 5192367 - DNA, 25 bp, Homo sapien
agcatcccctatttgtcctcctaaa

SEQ ID NO: 5192368 - DNA, 25 bp, Homo sapien
ttatgcataggtcattatctacaga

SEQ ID NO: 5192369 - DNA, 25 bp, Homo sapien
taaaatgtgcccctcttgatctgct

SEQ ID NO: 5192370 - DNA, 25 bp, Homo sapien
tttacaaactgttatgcataggtca

SEQ ID NO: 5192371 - DNA, 25 bp, Homo sapien
cgccaatggtgtagtgatgtataac

SEQ ID NO: 5192372 - DNA, 25 bp, Homo sapien
agctcttgaagcgtttctaatgggt

SEQ ID NO: 5192373 - DNA, 25 bp, Homo sapien
gcagctcttgaagcgtttctaatgg

SEQ ID NO: 5192374 - DNA, 25 bp, Homo sapien
tgagcagctcttgaagcgtttctaa

SEQ ID NO: 5192375 - DNA, 25 bp, Homo sapien
ccactcctggactgagcagctcttg

SEQ ID NO: 5192376 - DNA, 25 bp, Homo sapien
ctatgatgaaaatttctgcactcct

SEQ ID NO: 5192377 - DNA, 25 bp, Homo sapien
tatgatgaaaatttctgcactcctt

SEQ ID NO: 5192378 - DNA, 25 bp, Homo sapien
cctatgatgaaaatttctgcactcc

SEQ ID NO: 5192379 - DNA, 25 bp, Homo sapien
ggcaagcaagctggcgaaaaaagca

SEQ ID NO: 5192380 - DNA, 25 bp, Homo sapien
agcaaaatggcacctcttcttcatc

SEQ ID NO: 5192381 - DNA, 25 bp, Homo sapien
tacgtctgccaccaatgcttatgag

SEQ ID NO: 5192382 - DNA, 25 bp, Homo sapien
tcatcacttcccatcaacatgaagg

SEQ ID NO: 5192383 - DNA, 25 bp, Homo sapien
gttagattcctctgtaaacatgcca

SEQ ID NO: 5192384 - DNA, 25 bp, Homo sapien
taaactgtgcaaaattgagctccta

SEQ ID NO: 5192385 - DNA, 25 bp, Homo sapien
tatacttctactccacgggaattgc

SEQ ID NO: 5192386 - DNA, 25 bp, Homo sapien
gattatcccatagagcaaattactg

SEQ ID NO: 5192387 - DNA, 25 bp, Homo sapien
gaaaacctaccattcagtgacaatt

SEQ ID NO: 5192388 - DNA, 25 bp, Homo sapien
gctaacatttggaagactttcctaa

SEQ ID NO: 5192389 - DNA, 25 bp, Homo sapien
cagtgacaatttcttgctaacattt

SEQ ID NO: 5192390 - DNA, 25 bp, Homo sapien
accattcagtgacaatttcttgcta

SEQ ID NO: 5192391 - DNA, 25 bp, Homo sapien
gaatttgacaatttgccctctatca

SEQ ID NO: 5192392 - DNA, 25 bp, Homo sapien
tcctgttgtcagaatgtgagcccca

SEQ ID NO: 5192393 - DNA, 25 bp, Homo sapien
ggtggatgcccaataataaatgtat

SEQ ID NO: 5192394 - DNA, 25 bp, Homo sapien
tattcataactcatagcagcctagg

SEQ ID NO: 5192395 - DNA, 25 bp, Homo sapien
caggcagatcacacgagctcataag

SEQ ID NO: 5192396 - DNA, 25 bp, Homo sapien
catgaataccccatatatagtgttg

SEQ ID NO: 5192397 - DNA, 25 bp, Homo sapien
catatatagtgttgtgaattctgtc

SEQ ID NO: 5192398 - DNA, 25 bp, Homo sapien
cacacgagctcataagtttgagacc

SEQ ID NO: 5192399 - DNA, 25 bp, Homo sapien
aaaactgaagagtgtacatctgtaa

SEQ ID NO: 5192400 - DNA, 25 bp, Homo sapien
agcaaagtagataagtttatagcag

SEQ ID NO: 5192401 - DNA, 25 bp, Homo sapien
tgtaaactctttttatgatgggtgt

SEQ ID NO: 5192402 - DNA, 25 bp, Homo sapien
atatgtaaactctttttatgatggg

SEQ ID NO: 5192403 - DNA, 25 bp, Homo sapien
atcgagatcctctttaaaatgtggt

SEQ ID NO: 5192404 - DNA, 25 bp, Homo sapien
gataatcgagatcctctttaaaatg

SEQ ID NO: 5192405 - DNA, 25 bp, Homo sapien
taatcgagatcctctttaaaatgtg

SEQ ID NO: 5192406 - DNA, 25 bp, Homo sapien
gagatcctctttaaaatgtggttta

SEQ ID NO: 5192407 - DNA, 25 bp, Homo sapien
tctgtatcctcccattactccacag

SEQ ID NO: 5192408 - DNA, 25 bp, Homo sapien
ttctgtatcctcccattactccaca

SEQ ID NO: 5192409 - DNA, 25 bp, Homo sapien
cacacctggtggttgatcatttggg

SEQ ID NO: 5192410 - DNA, 25 bp, Homo sapien
cacagcaggttcaatcttcacacct

SEQ ID NO: 5192411 - DNA, 25 bp, Homo sapien
tcttcacacctggtggttgatcatt

SEQ ID NO: 5192412 - DNA, 25 bp, Homo sapien
acagcaggttcaatcttcacacctg

SEQ ID NO: 5192413 - DNA, 25 bp, Homo sapien
gacgtgaatcagaggaagccaccac

SEQ ID NO: 5192414 - DNA, 25 bp, Homo sapien
gactttagaacaaggatccagggcc

SEQ ID NO: 5192415 - DNA, 25 bp, Homo sapien
gcttcagagttagttggcccaggga

SEQ ID NO: 5192416 - DNA, 25 bp, Homo sapien
tcattttgagccaccagtaggagca

SEQ ID NO: 5192417 - DNA, 25 bp, Homo sapien
caacgtcggcggagttggcaatcta

SEQ ID NO: 5192418 - DNA, 25 bp, Homo sapien
caggttggtgtcagacaacgtcggc

SEQ ID NO: 5192419 - DNA, 25 bp, Homo sapien
gctgtttgacaactagctgcaggtt

SEQ ID NO: 5192420 - DNA, 25 bp, Homo sapien
caatctagaaggctgtgccttgaac

SEQ ID NO: 5192421 - DNA, 25 bp, Homo sapien
aatcataatcaacttcaaggttctc

SEQ ID NO: 5192422 - DNA, 25 bp, Homo sapien
ataatcaacttcaaggttctctgaa

SEQ ID NO: 5192423 - DNA, 25 bp, Homo sapien
aaatcataatcaacttcaaggttct

SEQ ID NO: 5192424 - DNA, 25 bp, Homo sapien
tcataatcaacttcaaggttctctg

SEQ ID NO: 5192425 - DNA, 25 bp, Homo sapien
gcagaatctccttagtttaattaca

SEQ ID NO: 5192426 - DNA, 25 bp, Homo sapien
tgcagaatctccttagtttaattac

SEQ ID NO: 5192427 - DNA, 25 bp, Homo sapien
ttgatagggatggcatggaatctac

SEQ ID NO: 5192428 - DNA, 25 bp, Homo sapien
atagggatggcatggaatctacaaa

SEQ ID NO: 5192429 - DNA, 25 bp, Homo sapien
cacatcaagggcagtattaacaaca

SEQ ID NO: 5192430 - DNA, 25 bp, Homo sapien
ggtagtgacctcaatcggcagatgt

SEQ ID NO: 5192431 - DNA, 25 bp, Homo sapien
tcagtgcaaagtggaggtagtgacc

SEQ ID NO: 5192432 - DNA, 25 bp, Homo sapien
cttcaaaagtcattggagggctcct

SEQ ID NO: 5192433 - DNA, 25 bp, Homo sapien
caatatggcaggaatgctgagctgt

SEQ ID NO: 5192434 - DNA, 25 bp, Homo sapien
gcccagtgtgtagcccatggctctt

SEQ ID NO: 5192435 - DNA, 25 bp, Homo sapien
catggctctttcagtgccaatatgg

SEQ ID NO: 5192436 - DNA, 25 bp, Homo sapien
gagctgttcaaccaagtcactaggg

SEQ ID NO: 5192437 - DNA, 25 bp, Homo sapien
catcaaatgagcctgtgtgatataa

SEQ ID NO: 5192438 - DNA, 25 bp, Homo sapien
tttctctgtctccacaagctacgga

SEQ ID NO: 5192439 - DNA, 25 bp, Homo sapien
cacaagctacggaacctgaattctg

SEQ ID NO: 5192440 - DNA, 25 bp, Homo sapien
cctgtgtgatataacatggcagcaa

SEQ ID NO: 5192441 - DNA, 25 bp, Homo sapien
gggccgttagacatatcagcatgta

SEQ ID NO: 5192442 - DNA, 25 bp, Homo sapien
cgttagacatatcagcatgtaggaa

SEQ ID NO: 5192443 - DNA, 25 bp, Homo sapien
tagacatatcagcatgtaggaatgc

SEQ ID NO: 5192444 - DNA, 25 bp, Homo sapien
tatcagcatgtaggaatgccttctt

SEQ ID NO: 5192445 - DNA, 25 bp, Homo sapien
gcactttagtctgtagaactccaat

SEQ ID NO: 5192446 - DNA, 25 bp, Homo sapien
ctgcactttagtctgtagaactcca

SEQ ID NO: 5192447 - DNA, 25 bp, Homo sapien
ttccaggcacctccatgacaagtta

SEQ ID NO: 5192448 - DNA, 25 bp, Homo sapien
cctccatgacaagttatttgtagaa

SEQ ID NO: 5192449 - DNA, 25 bp, Homo sapien
ggcaggagtagaaccagtgatggtt

SEQ ID NO: 5192450 - DNA, 25 bp, Homo sapien
aaagttaatattgctctgagagtct

SEQ ID NO: 5192451 - DNA, 25 bp, Homo sapien
gttaaagttaatattgctctgagag

SEQ ID NO: 5192452 - DNA, 25 bp, Homo sapien
gaaccagtgatggttaaagttaata

SEQ ID NO: 5192453 - DNA, 25 bp, Homo sapien
atttcaccattatcagaggtgctct

SEQ ID NO: 5192454 - DNA, 25 bp, Homo sapien
ttcaccattatcagaggtgctctgc

SEQ ID NO: 5192455 - DNA, 25 bp, Homo sapien
caccattatcagaggtgctctgctc

SEQ ID NO: 5192456 - DNA, 25 bp, Homo sapien
tcaccattatcagaggtgctctgct

SEQ ID NO: 5192457 - DNA, 25 bp, Homo sapien
gacatgggtgagagccaaaatatct

SEQ ID NO: 5192458 - DNA, 25 bp, Homo sapien
cagacatgggtgagagccaaaatat

SEQ ID NO: 5192459 - DNA, 25 bp, Homo sapien
tgcagacatgggtgagagccaaaat

SEQ ID NO: 5192460 - DNA, 25 bp, Homo sapien
acatgggtgagagccaaaatatcta

SEQ ID NO: 5192461 - DNA, 25 bp, Homo sapien
gtgcaccacaaagtcgaagtgaaag

SEQ ID NO: 5192462 - DNA, 25 bp, Homo sapien
cttgattcagaacaggagttggtgt

SEQ ID NO: 5192463 - DNA, 25 bp, Homo sapien
tggtgtctgaatttgctccccatac

SEQ ID NO: 5192464 - DNA, 25 bp, Homo sapien
cacaaagtcgaagtgaaagcaacag

SEQ ID NO: 5192465 - DNA, 25 bp, Homo sapien
tgctgcggccgtcagaacattggtg

SEQ ID NO: 5192466 - DNA, 25 bp, Homo sapien
tcctaaagagtagcagagtgatttc

SEQ ID NO: 5192467 - DNA, 25 bp, Homo sapien
ttagtataacggtgctggtgctgcg

SEQ ID NO: 5192468 - DNA, 25 bp, Homo sapien
gagtgatttcaagcccttctatttc

SEQ ID NO: 5192469 - DNA, 25 bp, Homo sapien
gctaatcccacccaatttacagaca

SEQ ID NO: 5192470 - DNA, 25 bp, Homo sapien
actgctaatcccacccaatttacag

SEQ ID NO: 5192471 - DNA, 25 bp, Homo sapien
tgcactgctaatcccacccaattta

SEQ ID NO: 5192472 - DNA, 25 bp, Homo sapien
ttgtctgcactgctaatcccaccca

SEQ ID NO: 5192473 - DNA, 25 bp, Homo sapien
ctcatacaaaggtgctgcagaattt

SEQ ID NO: 5192474 - DNA, 25 bp, Homo sapien
ctcttccaggaatatatctggatac

SEQ ID NO: 5192475 - DNA, 25 bp, Homo sapien
tatctggatactcatacaaaggtgc

SEQ ID NO: 5192476 - DNA, 25 bp, Homo sapien
ggatactcatacaaaggtgctgcag

SEQ ID NO: 5192477 - DNA, 25 bp, Homo sapien
gctaatccagtgtaagtcacaactt

SEQ ID NO: 5192478 - DNA, 25 bp, Homo sapien
gtcattactgtcatttttgatgcct

SEQ ID NO: 5192479 - DNA, 25 bp, Homo sapien
caaatatgccaattcaatgcctgaa

SEQ ID NO: 5192480 - DNA, 25 bp, Homo sapien
cctttgcttcaccaacaataagctg

SEQ ID NO: 5192481 - DNA, 25 bp, Homo sapien
cacactcattggcatctggtgcaac

SEQ ID NO: 5192482 - DNA, 25 bp, Homo sapien
tctgtaaagggtattgcaccgggac

SEQ ID NO: 5192483 - DNA, 25 bp, Homo sapien
gaccttgggcactcttgtgttgtga

SEQ ID NO: 5192484 - DNA, 25 bp, Homo sapien
gaagattcaatcacgagttcagcaa

SEQ ID NO: 5192485 - DNA, 25 bp, Homo sapien
ctttggccgctctaagcttcagtgc

SEQ ID NO: 5192486 - DNA, 25 bp, Homo sapien
gagtaaactttacgaccatcatagg

SEQ ID NO: 5192487 - DNA, 25 bp, Homo sapien
gaaacgttatgccaaatttgaaagc

SEQ ID NO: 5192488 - DNA, 25 bp, Homo sapien
gaaagacgcttgatgtagcatgttg

SEQ ID NO: 5192489 - DNA, 25 bp, Homo sapien
cgggccctgagttaccttttcagag

SEQ ID NO: 5192490 - DNA, 25 bp, Homo sapien
tcagtaggagtcttttagggttcag

SEQ ID NO: 5192491 - DNA, 25 bp, Homo sapien
gctctagtttcaattgaggtttccc

SEQ ID NO: 5192492 - DNA, 25 bp, Homo sapien
tatctcttactctgaaatgatctgc

SEQ ID NO: 5192493 - DNA, 25 bp, Homo sapien
gatcaacccaaaatagtgactgctg

SEQ ID NO: 5192494 - DNA, 25 bp, Homo sapien
gaaaactttgagactatcttcacag

SEQ ID NO: 5192495 - DNA, 25 bp, Homo sapien
tgacagtggagtagagatagaagcc

SEQ ID NO: 5192496 - DNA, 25 bp, Homo sapien
gaaattcatcacaaccttagaaaag

SEQ ID NO: 5192497 - DNA, 25 bp, Homo sapien
aagagagtgttgcacaaccaggcat

SEQ ID NO: 5192498 - DNA, 25 bp, Homo sapien
caaagagagtgttgcacaaccaggc

SEQ ID NO: 5192499 - DNA, 25 bp, Homo sapien
aaagagagtgttgcacaaccaggca

SEQ ID NO: 5192500 - DNA, 25 bp, Homo sapien
gttgttctgcagcagtttccgtccc

SEQ ID NO: 5192501 - DNA, 25 bp, Homo sapien
tatccactgcatgttggctccggtg

SEQ ID NO: 5192502 - DNA, 25 bp, Homo sapien
cccactagcttatttccaggtgaag

SEQ ID NO: 5192503 - DNA, 25 bp, Homo sapien
aaatctgtgccagtggcatatccac

SEQ ID NO: 5192504 - DNA, 25 bp, Homo sapien
gctattgccttacagcaaaagtggc

SEQ ID NO: 5192505 - DNA, 25 bp, Homo sapien
tctctgagtaatctctgtgttccca

SEQ ID NO: 5192506 - DNA, 25 bp, Homo sapien
actcagaccacgtccacagaaactg

SEQ ID NO: 5192507 - DNA, 25 bp, Homo sapien
catttttggctctctgagtaatctc

SEQ ID NO: 5192508 - DNA, 25 bp, Homo sapien
cactgatatagtaaagtgaccttcc

SEQ ID NO: 5192509 - DNA, 25 bp, Homo sapien
gtgaccttccggtaaggactcctca

SEQ ID NO: 5192510 - DNA, 25 bp, Homo sapien
tccggtaaggactcctcaattacac

SEQ ID NO: 5192511 - DNA, 25 bp, Homo sapien
actgatatagtaaagtgaccttccg

SEQ ID NO: 5192512 - DNA, 25 bp, Homo sapien
tttgtggtccattaagttttgcctg

SEQ ID NO: 5192513 - DNA, 25 bp, Homo sapien
ctgacattccgagtcatgcacttcc

SEQ ID NO: 5192514 - DNA, 25 bp, Homo sapien
ccattaagttttgcctgacattccg

SEQ ID NO: 5192515 - DNA, 25 bp, Homo sapien
ctctggcttcttctaatttgtggtc

SEQ ID NO: 5192516 - DNA, 25 bp, Homo sapien
caaaagttccctgagtgttacctgg

SEQ ID NO: 5192517 - DNA, 25 bp, Homo sapien
gatccctcagggcattagcgtctga

SEQ ID NO: 5192518 - DNA, 25 bp, Homo sapien
catttaatctggacatggcacccct

SEQ ID NO: 5192519 - DNA, 25 bp, Homo sapien
caggaagatcggacacataggtacc

SEQ ID NO: 5192520 - DNA, 25 bp, Homo sapien
caggtaccaacctggttgaactcca

SEQ ID NO: 5192521 - DNA, 25 bp, Homo sapien
tgaaccgtgaaccaaaggactttca

SEQ ID NO: 5192522 - DNA, 25 bp, Homo sapien
tacggtctatttactctggccacac

SEQ ID NO: 5192523 - DNA, 25 bp, Homo sapien
aaatgccactaagagaggagcaagc

SEQ ID NO: 5192524 - DNA, 25 bp, Homo sapien
tgcagtaccccaggaattgtctgag

SEQ ID NO: 5192525 - DNA, 25 bp, Homo sapien
ccagaggtgccttaactaaatcttg

SEQ ID NO: 5192526 - DNA, 25 bp, Homo sapien
agaggtgccttaactaaatcttgca

SEQ ID NO: 5192527 - DNA, 25 bp, Homo sapien
cagtaccccaggaattgtctgagaa

SEQ ID NO: 5192528 - DNA, 25 bp, Homo sapien
tggctttagtcccatggctagcgca

SEQ ID NO: 5192529 - DNA, 25 bp, Homo sapien
ccatggctagcgcagattgacgggc

SEQ ID NO: 5192530 - DNA, 25 bp, Homo sapien
tagcgcagattgacgggcctgtctc

SEQ ID NO: 5192531 - DNA, 25 bp, Homo sapien
tagtcccatggctagcgcagattga

SEQ ID NO: 5192532 - DNA, 25 bp, Homo sapien
tttggtccgcaagtaaagcaatgca

SEQ ID NO: 5192533 - DNA, 25 bp, Homo sapien
gaagcttagccattcactagtttgg

SEQ ID NO: 5192534 - DNA, 25 bp, Homo sapien
tccccgggtagctacagtctgctgt

SEQ ID NO: 5192535 - DNA, 25 bp, Homo sapien
tgatgtgagatgaattatccacccc

SEQ ID NO: 5192536 - DNA, 25 bp, Homo sapien
ctcagtatgttgcaggtagtggctt

SEQ ID NO: 5192537 - DNA, 25 bp, Homo sapien
tacagaggacgattgctgctgtgac

SEQ ID NO: 5192538 - DNA, 25 bp, Homo sapien
tagtggcttggcctgattattacag

SEQ ID NO: 5192539 - DNA, 25 bp, Homo sapien
catccggcgtcttcattcatcaaaa

SEQ ID NO: 5192540 - DNA, 25 bp, Homo sapien
cagtggcgactaatgttggtaaccc

SEQ ID NO: 5192541 - DNA, 25 bp, Homo sapien
taggctacagtgctatttggagctc

SEQ ID NO: 5192542 - DNA, 25 bp, Homo sapien
cacttgatgcttaatgtaggctaca

SEQ ID NO: 5192543 - DNA, 25 bp, Homo sapien
cagtgactcgaatgaaccagaaaac

SEQ ID NO: 5192544 - DNA, 25 bp, Homo sapien
aaggcagtccggtctcaggcagtaa

SEQ ID NO: 5192545 - DNA, 25 bp, Homo sapien
tctccaggctgcgtttatacttaag

SEQ ID NO: 5192546 - DNA, 25 bp, Homo sapien
tccttccaaaatgccagcgtgaacg

SEQ ID NO: 5192547 - DNA, 25 bp, Homo sapien
aaatagtgaccttagaactggacgg

SEQ ID NO: 5192548 - DNA, 25 bp, Homo sapien
tggaagatccttagccaggtatgag

SEQ ID NO: 5192549 - DNA, 25 bp, Homo sapien
ggtattttgtcagaccaagccatgt

SEQ ID NO: 5192550 - DNA, 25 bp, Homo sapien
tgacagctcggtaaaggaagtatgc

SEQ ID NO: 5192551 - DNA, 25 bp, Homo sapien
tgtttagaaaactagctgacagctc

SEQ ID NO: 5192552 - DNA, 25 bp, Homo sapien
gatctggtaagcaaacatgagcaga

SEQ ID NO: 5192553 - DNA, 25 bp, Homo sapien
aatggtaatgatctggtaagcaaac

SEQ ID NO: 5192554 - DNA, 25 bp, Homo sapien
ggtaatgatctggtaagcaaacatg

SEQ ID NO: 5192555 - DNA, 25 bp, Homo sapien
atgagcagaaccattctcccccagt

SEQ ID NO: 5192556 - DNA, 25 bp, Homo sapien
gaatctccgttagtgtactccaccc

SEQ ID NO: 5192557 - DNA, 25 bp, Homo sapien
aagcatggaatctccgttagtgtac

SEQ ID NO: 5192558 - DNA, 25 bp, Homo sapien
tccgttagtgtactccacccaggtc

SEQ ID NO: 5192559 - DNA, 25 bp, Homo sapien
tcttccttaagcatggaatctccgt

SEQ ID NO: 5192560 - DNA, 25 bp, Homo sapien
gggtgcacatctcctggtaatcgga

SEQ ID NO: 5192561 - DNA, 25 bp, Homo sapien
gtaatcggaagccagcaatctgcag

SEQ ID NO: 5192562 - DNA, 25 bp, Homo sapien
ggtggctgggtattctgatgattca

SEQ ID NO: 5192563 - DNA, 25 bp, Homo sapien
tcagcagccaagcatggtcacagga

SEQ ID NO: 5192564 - DNA, 25 bp, Homo sapien
agatcctttaaagatggctctggtt

SEQ ID NO: 5192565 - DNA, 25 bp, Homo sapien
caagggagtcgtcttgggaaagatc

SEQ ID NO: 5192566 - DNA, 25 bp, Homo sapien
gttaaggctgctccaccctcaaggg

SEQ ID NO: 5192567 - DNA, 25 bp, Homo sapien
gaaagatcctttaaagatggctctg

SEQ ID NO: 5192568 - DNA, 25 bp, Homo sapien
gggcacgttcaaggtctcctctctg

SEQ ID NO: 5192569 - DNA, 25 bp, Homo sapien
taccaccacccactcgattctgcat

SEQ ID NO: 5192570 - DNA, 25 bp, Homo sapien
cgtaatctggtatcaacatttttgg

SEQ ID NO: 5192571 - DNA, 25 bp, Homo sapien
tggaagttgcccaaatgctggctct

SEQ ID NO: 5192572 - DNA, 25 bp, Homo sapien
tgtgggggaggaggaaaggtggaga

SEQ ID NO: 5192573 - DNA, 25 bp, Homo sapien
ctgtgggggaggaggaaaggtggag

SEQ ID NO: 5192574 - DNA, 25 bp, Homo sapien
actgggcataagtgactgctgatcc

SEQ ID NO: 5192575 - DNA, 25 bp, Homo sapien
tgaagacactgttccaaggggcccg

SEQ ID NO: 5192576 - DNA, 25 bp, Homo sapien
aggggcccgtgtctataatttccag

SEQ ID NO: 5192577 - DNA, 25 bp, Homo sapien
taatttccagactgtaaccactggg

SEQ ID NO: 5192578 - DNA, 25 bp, Homo sapien
agatgaaaccagactcacagtgccc

SEQ ID NO: 5192579 - DNA, 25 bp, Homo sapien
gccagcagatgtagattaccaaagc

SEQ ID NO: 5192580 - DNA, 25 bp, Homo sapien
gtaattctagagtgaacaacccagg

SEQ ID NO: 5192581 - DNA, 25 bp, Homo sapien
ccaggtggagacatctcagatgaaa

SEQ ID NO: 5192582 - DNA, 25 bp, Homo sapien
gctttccaagccttgactctgggaa

SEQ ID NO: 5192583 - DNA, 25 bp, Homo sapien
aaagcgtgtggttgtgtgtcgagag

SEQ ID NO: 5192584 - DNA, 25 bp, Homo sapien
gatgatggtagagacggacagtcca

SEQ ID NO: 5192585 - DNA, 25 bp, Homo sapien
ttagtttgtgcatggaaagcgtgtg

SEQ ID NO: 5192586 - DNA, 25 bp, Homo sapien
ccacataagtgagtagtcatcttcc

SEQ ID NO: 5192587 - DNA, 25 bp, Homo sapien
catctccccaatcctatccatttga

SEQ ID NO: 5192588 - DNA, 25 bp, Homo sapien
ataaattctgtcctaagctcagaga

SEQ ID NO: 5192589 - DNA, 25 bp, Homo sapien
gcaccttaactgataaattctgtcc

SEQ ID NO: 5192590 - DNA, 25 bp, Homo sapien
aaccttggagagctagttttctata

SEQ ID NO: 5192591 - DNA, 25 bp, Homo sapien
tatctgcattgctgaccattcaaag

SEQ ID NO: 5192592 - DNA, 25 bp, Homo sapien
tcaaccagtggtaggacagtcagtt

SEQ ID NO: 5192593 - DNA, 25 bp, Homo sapien
ttatctggcgctataaatatctgca

SEQ ID NO: 5192594 - DNA, 25 bp, Homo sapien
cattttaacaggacagataggagga

SEQ ID NO: 5192595 - DNA, 25 bp, Homo sapien
agcaactatttttctgccgagataa

SEQ ID NO: 5192596 - DNA, 25 bp, Homo sapien
tgaatgagctacatcctcctgcttt

SEQ ID NO: 5192597 - DNA, 25 bp, Homo sapien
ggtactgagaacacagtgaatgagc

SEQ ID NO: 5192598 - DNA, 25 bp, Homo sapien
ctctttgttgccttgaacttctctg

SEQ ID NO: 5192599 - DNA, 25 bp, Homo sapien
agcttgccactctttgttgccttga

SEQ ID NO: 5192600 - DNA, 25 bp, Homo sapien
cttctctgatgtttaggcagcccat

SEQ ID NO: 5192601 - DNA, 25 bp, Homo sapien
gccactctttgttgccttgaacttc

SEQ ID NO: 5192602 - DNA, 25 bp, Homo sapien
ctaagcatataggatgccacttctt

SEQ ID NO: 5192603 - DNA, 25 bp, Homo sapien
taagcatataggatgccacttcttg

SEQ ID NO: 5192604 - DNA, 25 bp, Homo sapien
agcatataggatgccacttcttgct

SEQ ID NO: 5192605 - DNA, 25 bp, Homo sapien
catataggatgccacttcttgctac

SEQ ID NO: 5192606 - DNA, 25 bp, Homo sapien
caggaaatcaagcatggtctccatc

SEQ ID NO: 5192607 - DNA, 25 bp, Homo sapien
tcttactacaagttcaggaaatcaa

SEQ ID NO: 5192608 - DNA, 25 bp, Homo sapien
aggagattcaaggtgcccgtgccag

SEQ ID NO: 5192609 - DNA, 25 bp, Homo sapien
ccagcgtgctgtgttttccttcttc

SEQ ID NO: 5192610 - DNA, 25 bp, Homo sapien
agaaacgtgtttctcgcctacctgg

SEQ ID NO: 5192611 - DNA, 25 bp, Homo sapien
tctgctcattagtccttagacgctg

SEQ ID NO: 5192612 - DNA, 25 bp, Homo sapien
tttttcctgcacgtcctacacatgt

SEQ ID NO: 5192613 - DNA, 25 bp, Homo sapien
tatttttcctcgacgctgggctgca

SEQ ID NO: 5192614 - DNA, 25 bp, Homo sapien
ggttcagttgcttggggagctgtcc

SEQ ID NO: 5192615 - DNA, 25 bp, Homo sapien
agagagatcagggaccaaatgacac

SEQ ID NO: 5192616 - DNA, 25 bp, Homo sapien
accaaatgacactggtccctgtcct

SEQ ID NO: 5192617 - DNA, 25 bp, Homo sapien
tcagttgcttggggagctgtcccaa

SEQ ID NO: 5192618 - DNA, 25 bp, Homo sapien
tggagttctgcctctgaacaggaag

SEQ ID NO: 5192619 - DNA, 25 bp, Homo sapien
gagcctggagttctgcctctgaaca

SEQ ID NO: 5192620 - DNA, 25 bp, Homo sapien
ctgtcccactggtgttcttggagcc

SEQ ID NO: 5192621 - DNA, 25 bp, Homo sapien
ttctgtcccactggtgttcttggag

SEQ ID NO: 5192622 - DNA, 25 bp, Homo sapien
tcagtggctgaagcacagcttgcga

SEQ ID NO: 5192623 - DNA, 25 bp, Homo sapien
tgaagcacagcttgcgaaggacttt

SEQ ID NO: 5192624 - DNA, 25 bp, Homo sapien
tttggatatagagcatccgaggcca

SEQ ID NO: 5192625 - DNA, 25 bp, Homo sapien
ggccatatgcaaacacgccatcaga

SEQ ID NO: 5192626 - DNA, 25 bp, Homo sapien
caggaattgtgtaatgctctggttt

SEQ ID NO: 5192627 - DNA, 25 bp, Homo sapien
tcaaagtctgtaaacccaggaattg

SEQ ID NO: 5192628 - DNA, 25 bp, Homo sapien
gaattgtgtaatgctctggtttcca

SEQ ID NO: 5192629 - DNA, 25 bp, Homo sapien
caaagtctgtaaacccaggaattgt

SEQ ID NO: 5192630 - DNA, 25 bp, Homo sapien
gatgcagtggtcaacaggacttcca

SEQ ID NO: 5192631 - DNA, 25 bp, Homo sapien
ctgtgaaaaagacccggccttagtg

SEQ ID NO: 5192632 - DNA, 25 bp, Homo sapien
tccagactctggtgggcattggcga

SEQ ID NO: 5192633 - DNA, 25 bp, Homo sapien
gacaatggtatgtttgccgcacagc

SEQ ID NO: 5192634 - DNA, 25 bp, Homo sapien
tttatgtctgccttcatttgttatg

SEQ ID NO: 5192635 - DNA, 25 bp, Homo sapien
tctttatgtctgccttcatttgtta

SEQ ID NO: 5192636 - DNA, 25 bp, Homo sapien
ctttatgtctgccttcatttgttat

SEQ ID NO: 5192637 - DNA, 25 bp, Homo sapien
ttatgtctgccttcatttgttatgt

SEQ ID NO: 5192638 - DNA, 25 bp, Homo sapien
ccatttttgcagaggtaaggtagta

SEQ ID NO: 5192639 - DNA, 25 bp, Homo sapien
tggccatttttgcagaggtaaggta

SEQ ID NO: 5192640 - DNA, 25 bp, Homo sapien
ttgattatggccatttttgcagagg

SEQ ID NO: 5192641 - DNA, 25 bp, Homo sapien
tttgcagaggtaaggtagtatgaca

SEQ ID NO: 5192642 - DNA, 25 bp, Homo sapien
tagcactagataatggtccttgaag

SEQ ID NO: 5192643 - DNA, 25 bp, Homo sapien
tagatgttgaaatccctgaacgctc

SEQ ID NO: 5192644 - DNA, 25 bp, Homo sapien
taattgataaacaagccccaagggc

SEQ ID NO: 5192645 - DNA, 25 bp, Homo sapien
gactcctctgccttagatagataaa

SEQ ID NO: 5192646 - DNA, 25 bp, Homo sapien
tccagcttcgtgagtacaggttttt

SEQ ID NO: 5192647 - DNA, 25 bp, Homo sapien
atccagcttcgtgagtacaggtttt

SEQ ID NO: 5192648 - DNA, 25 bp, Homo sapien
tcatccagcttcgtgagtacaggtt

SEQ ID NO: 5192649 - DNA, 25 bp, Homo sapien
catccagcttcgtgagtacaggttt

SEQ ID NO: 5192650 - DNA, 25 bp, Homo sapien
cagcttgactctaggcatagttagg

SEQ ID NO: 5192651 - DNA, 25 bp, Homo sapien
tcttcctgtctcgttagggcagaat

SEQ ID NO: 5192652 - DNA, 25 bp, Homo sapien
tgagaccagcaataactcagtgtgg

SEQ ID NO: 5192653 - DNA, 25 bp, Homo sapien
tcctatatgcctggttatgaagtcc

SEQ ID NO: 5192654 - DNA, 25 bp, Homo sapien
caagtttgatagagaagcgtgaggt

SEQ ID NO: 5192655 - DNA, 25 bp, Homo sapien
ttccaaatctgatggagggttccat

SEQ ID NO: 5192656 - DNA, 25 bp, Homo sapien
aggtggagattgtccatgggcctca

SEQ ID NO: 5192657 - DNA, 25 bp, Homo sapien
tgcgctcattctactttcttccaaa

SEQ ID NO: 5192658 - DNA, 25 bp, Homo sapien
gagaacacgtctattccaaatattg

SEQ ID NO: 5192659 - DNA, 25 bp, Homo sapien
aatattgaagaatacgcctccttgg

SEQ ID NO: 5192660 - DNA, 25 bp, Homo sapien
agaacacgtctattccaaatattga

SEQ ID NO: 5192661 - DNA, 25 bp, Homo sapien
tattgaagaatacgcctccttggca

SEQ ID NO: 5192662 - DNA, 25 bp, Homo sapien
tataccacttactgcggacatcccg

SEQ ID NO: 5192663 - DNA, 25 bp, Homo sapien
tgcacagtgataactcggcgatacc

SEQ ID NO: 5192664 - DNA, 25 bp, Homo sapien
gtatgcccagctttcgaagacacag

SEQ ID NO: 5192665 - DNA, 25 bp, Homo sapien
tatactcaagtaccagagagcgctg

SEQ ID NO: 5192666 - DNA, 25 bp, Homo sapien
taagtatggtggcatcaacgggacc

SEQ ID NO: 5192667 - DNA, 25 bp, Homo sapien
tttatctcagatgcacggtacgtca

SEQ ID NO: 5192668 - DNA, 25 bp, Homo sapien
tttcagatgttagcaagtagggcca

SEQ ID NO: 5192669 - DNA, 25 bp, Homo sapien
cttggtggaactgcaaagactgtac

SEQ ID NO: 5192670 - DNA, 25 bp, Homo sapien
tgtctaatcaaaaccagcagtcctg

SEQ ID NO: 5192671 - DNA, 25 bp, Homo sapien
tcagctgcacaactcgaaggtaaac

SEQ ID NO: 5192672 - DNA, 25 bp, Homo sapien
tctgtttgctatcaactcctacggg

SEQ ID NO: 5192673 - DNA, 25 bp, Homo sapien
gaagtcttgtctcatatcaggtcct

SEQ ID NO: 5192674 - DNA, 25 bp, Homo sapien
cagggctgtatcataatgtatgcac

SEQ ID NO: 5192675 - DNA, 25 bp, Homo sapien
cacatgggcattacctagcataaaa

SEQ ID NO: 5192676 - DNA, 25 bp, Homo sapien
gctccttttaaagatcagggctgta

SEQ ID NO: 5192677 - DNA, 25 bp, Homo sapien
caagcagattctagctatacataca

SEQ ID NO: 5192678 - DNA, 25 bp, Homo sapien
taaatagtactacaaacctggagag

SEQ ID NO: 5192679 - DNA, 25 bp, Homo sapien
tgggcctgtacataagcattgcgct

SEQ ID NO: 5192680 - DNA, 25 bp, Homo sapien
tattttccccatatcgtgtcacgca

SEQ ID NO: 5192681 - DNA, 25 bp, Homo sapien
tgattggcaacccatgtaaccctaa

SEQ ID NO: 5192682 - DNA, 25 bp, Homo sapien
accaccatctggttgttgtcaaatt

SEQ ID NO: 5192683 - DNA, 25 bp, Homo sapien
tttccacgcagctggcttgattggc

SEQ ID NO: 5192684 - DNA, 25 bp, Homo sapien
tacttccaagtagacctggccgcca

SEQ ID NO: 5192685 - DNA, 25 bp, Homo sapien
ttgattggctgctcgagggcctact

SEQ ID NO: 5192686 - DNA, 25 bp, Homo sapien
caagataggtttgtctaagtgcttc

SEQ ID NO: 5192687 - DNA, 25 bp, Homo sapien
taggtttgtctaagtgcttcttatt

SEQ ID NO: 5192688 - DNA, 25 bp, Homo sapien
ccaagataggtttgtctaagtgctt

SEQ ID NO: 5192689 - DNA, 25 bp, Homo sapien
tcctctaaggatttcaggtagagag

SEQ ID NO: 5192690 - DNA, 25 bp, Homo sapien
tctaaggatttcaggtagagagaca

SEQ ID NO: 5192691 - DNA, 25 bp, Homo sapien
aggatttcaggtagagagacatcat

SEQ ID NO: 5192692 - DNA, 25 bp, Homo sapien
ttcctcctctaaggatttcaggtag

SEQ ID NO: 5192693 - DNA, 25 bp, Homo sapien
ctactttagtttccgggctgctgag

SEQ ID NO: 5192694 - DNA, 25 bp, Homo sapien
actttagtttccgggctgctgagca

SEQ ID NO: 5192695 - DNA, 25 bp, Homo sapien
ctttagtttccgggctgctgagcat

SEQ ID NO: 5192696 - DNA, 25 bp, Homo sapien
ttagtttccgggctgctgagcattg

SEQ ID NO: 5192697 - DNA, 25 bp, Homo sapien
tatttccatataggtttgggcaatt

SEQ ID NO: 5192698 - DNA, 25 bp, Homo sapien
ccatataggtttgggcaattacgta

SEQ ID NO: 5192699 - DNA, 25 bp, Homo sapien
gctatttccatataggtttgggcaa

SEQ ID NO: 5192700 - DNA, 25 bp, Homo sapien
tttccatataggtttgggcaattac

SEQ ID NO: 5192701 - DNA, 25 bp, Homo sapien
cccaattgcctccagctatgtacaa

SEQ ID NO: 5192702 - DNA, 25 bp, Homo sapien
tctcccccttggcggctttagcttc

SEQ ID NO: 5192703 - DNA, 25 bp, Homo sapien
caattgcctccagctatgtacaaac

SEQ ID NO: 5192704 - DNA, 25 bp, Homo sapien
tcccccttggcggctttagcttcta

SEQ ID NO: 5192705 - DNA, 25 bp, Homo sapien
ttgtgatacctgctggccccagtag

SEQ ID NO: 5192706 - DNA, 25 bp, Homo sapien
gccccagtaggtacatgaaccagtt

SEQ ID NO: 5192707 - DNA, 25 bp, Homo sapien
tatagaagttacacgtttcctggct

SEQ ID NO: 5192708 - DNA, 25 bp, Homo sapien
gctttcagatcccaagggtgcctgt

SEQ ID NO: 5192709 - DNA, 25 bp, Homo sapien
caactgaataggactggctgccatc

SEQ ID NO: 5192710 - DNA, 25 bp, Homo sapien
ctcagcaactgaataggactggctg

SEQ ID NO: 5192711 - DNA, 25 bp, Homo sapien
actgaataggactggctgccatcaa

SEQ ID NO: 5192712 - DNA, 25 bp, Homo sapien
agcaactgaataggactggctgcca

SEQ ID NO: 5192713 - DNA, 25 bp, Homo sapien
accaaggcgggatactgaggtctct

SEQ ID NO: 5192714 - DNA, 25 bp, Homo sapien
tatgagttacccatatgctctacca

SEQ ID NO: 5192715 - DNA, 25 bp, Homo sapien
cccattgggtaacttcccatatgag

SEQ ID NO: 5192716 - DNA, 25 bp, Homo sapien
gtggctatgataacacccaggtcct

SEQ ID NO: 5192717 - DNA, 25 bp, Homo sapien
gaagtggggtggagagctgaggatc

SEQ ID NO: 5192718 - DNA, 25 bp, Homo sapien
ggaagtggggtggagagctgaggat

SEQ ID NO: 5192719 - DNA, 25 bp, Homo sapien
ctggaagtggggtggagagctgagg

SEQ ID NO: 5192720 - DNA, 25 bp, Homo sapien
tggaagtggggtggagagctgagga

SEQ ID NO: 5192721 - DNA, 25 bp, Homo sapien
tcctgtgtcccctttcgctccttgt

SEQ ID NO: 5192722 - DNA, 25 bp, Homo sapien
catgtaagtcgaatcctgtgtcccc

SEQ ID NO: 5192723 - DNA, 25 bp, Homo sapien
taaaaagctcttgcatgtaagtcga

SEQ ID NO: 5192724 - DNA, 25 bp, Homo sapien
ccatctgtagcctctaaaaagctct

SEQ ID NO: 5192725 - DNA, 25 bp, Homo sapien
gcaaatatgagatcagacagctttc

SEQ ID NO: 5192726 - DNA, 25 bp, Homo sapien
gggaactcatgcttctaaccctcag

SEQ ID NO: 5192727 - DNA, 25 bp, Homo sapien
tcttacgctctgcacagaaagaaat

SEQ ID NO: 5192728 - DNA, 25 bp, Homo sapien
gatcatccgatctaatctcctggca

SEQ ID NO: 5192729 - DNA, 25 bp, Homo sapien
gatattattggtggcaccatccctc

SEQ ID NO: 5192730 - DNA, 25 bp, Homo sapien
ctgtgaatcggggcatgaatggcca

SEQ ID NO: 5192731 - DNA, 25 bp, Homo sapien
gcatgaatggccagaacagacagtg

SEQ ID NO: 5192732 - DNA, 25 bp, Homo sapien
aaggccttctctcaggatctgggct

SEQ ID NO: 5192733 - DNA, 25 bp, Homo sapien
taattgttaaggtgttctagagcca

SEQ ID NO: 5192734 - DNA, 25 bp, Homo sapien
acattaagaatgtgcctgaggctgc

SEQ ID NO: 5192735 - DNA, 25 bp, Homo sapien
tacaatctgactgtctcttgggaga

SEQ ID NO: 5192736 - DNA, 25 bp, Homo sapien
caacgattactcgaagatgactgca

SEQ ID NO: 5192737 - DNA, 25 bp, Homo sapien
aagattgtgaagaggccggcttcaa

SEQ ID NO: 5192738 - DNA, 25 bp, Homo sapien
tgaagaggccggcttcaacaaaatg

SEQ ID NO: 5192739 - DNA, 25 bp, Homo sapien
aagaggccggcttcaacaaaatggg

SEQ ID NO: 5192740 - DNA, 25 bp, Homo sapien
tcactcccatttcctagcaaaatca

SEQ ID NO: 5192741 - DNA, 25 bp, Homo sapien
cagctgatgtatgtcccttgatgtc

SEQ ID NO: 5192742 - DNA, 25 bp, Homo sapien
gcagcaaaccagcattgaggctttc

SEQ ID NO: 5192743 - DNA, 25 bp, Homo sapien
ggaacaagactttaacaaccagcag

SEQ ID NO: 5192744 - DNA, 25 bp, Homo sapien
tgatgggtcggagattcctgatgaa

SEQ ID NO: 5192745 - DNA, 25 bp, Homo sapien
tttcagcagcgtttttcctcgtaag

SEQ ID NO: 5192746 - DNA, 25 bp, Homo sapien
cagcgtttttcctcgtaagctgctg

SEQ ID NO: 5192747 - DNA, 25 bp, Homo sapien
tcagcagcgtttttcctcgtaagct

SEQ ID NO: 5192748 - DNA, 25 bp, Homo sapien
cagcagcgtttttcctcgtaagctg

SEQ ID NO: 5192749 - DNA, 25 bp, Homo sapien
tttgttggtatcagctgccagccgg

SEQ ID NO: 5192750 - DNA, 25 bp, Homo sapien
gagctaatttgaactggtttttggc

SEQ ID NO: 5192751 - DNA, 25 bp, Homo sapien
tgccagccggtttgagatccacttg

SEQ ID NO: 5192752 - DNA, 25 bp, Homo sapien
ttttggcctgatcttgcataggaca

SEQ ID NO: 5192753 - DNA, 25 bp, Homo sapien
taggtggccacagagatacagagtg

SEQ ID NO: 5192754 - DNA, 25 bp, Homo sapien
agagatacagagtgccggacattct

SEQ ID NO: 5192755 - DNA, 25 bp, Homo sapien
ctaggtggccacagagatacagagt

SEQ ID NO: 5192756 - DNA, 25 bp, Homo sapien
tatctgtatgagagtaatttggtca

SEQ ID NO: 5192757 - DNA, 25 bp, Homo sapien
tagagaagccaagtggcggaaacac

SEQ ID NO: 5192758 - DNA, 25 bp, Homo sapien
tttgttttgtactgccctctcctgg

SEQ ID NO: 5192759 - DNA, 25 bp, Homo sapien
tgcagagttgacatacagtgattaa

SEQ ID NO: 5192760 - DNA, 25 bp, Homo sapien
gacaggattttacagcagagctttg

SEQ ID NO: 5192761 - DNA, 25 bp, Homo sapien
ggtgtacccgatatgtgtgtgcttg

SEQ ID NO: 5192762 - DNA, 25 bp, Homo sapien
gctttgcgatgataactattctgga

SEQ ID NO: 5192763 - DNA, 25 bp, Homo sapien
taatttgcatgtagtcagagtgccc

SEQ ID NO: 5192764 - DNA, 25 bp, Homo sapien
ttttagaaagtcacgttcatggctc

SEQ ID NO: 5192765 - DNA, 25 bp, Homo sapien
tttttagaaagtcacgttcatggct

SEQ ID NO: 5192766 - DNA, 25 bp, Homo sapien
gatttttagaaagtcacgttcatgg

SEQ ID NO: 5192767 - DNA, 25 bp, Homo sapien
tttagaaagtcacgttcatggctca

SEQ ID NO: 5192768 - DNA, 25 bp, Homo sapien
ctatactgcataacccacggtaacc

SEQ ID NO: 5192769 - DNA, 25 bp, Homo sapien
agaaaattttcttgccagattctgt

SEQ ID NO: 5192770 - DNA, 25 bp, Homo sapien
gcataacccacggtaaccattccat

SEQ ID NO: 5192771 - DNA, 25 bp, Homo sapien
aaagaaaattttcttgccagattct

SEQ ID NO: 5192772 - DNA, 25 bp, Homo sapien
tctagaatgccagagaaccatgttt

SEQ ID NO: 5192773 - DNA, 25 bp, Homo sapien
caccccactccttgcacagtttgga

SEQ ID NO: 5192774 - DNA, 25 bp, Homo sapien
ccacctcaagacgtatggctttcat

SEQ ID NO: 5192775 - DNA, 25 bp, Homo sapien
tttttaccacctcaagacgtatggc

SEQ ID NO: 5192776 - DNA, 25 bp, Homo sapien
gctgatgggagcaagcaaccaccca

SEQ ID NO: 5192777 - DNA, 25 bp, Homo sapien
tcctttagaatcataagatagctgc

SEQ ID NO: 5192778 - DNA, 25 bp, Homo sapien
gcctgctcaacataggcctgctgat

SEQ ID NO: 5192779 - DNA, 25 bp, Homo sapien
cataagatagctgcacggagatagg

SEQ ID NO: 5192780 - DNA, 25 bp, Homo sapien
gcacgcacgcagatatggaatattt

SEQ ID NO: 5192781 - DNA, 25 bp, Homo sapien
ccatttggatcagccagcggtacct

SEQ ID NO: 5192782 - DNA, 25 bp, Homo sapien
cattttggtatgactcatctggtgc

SEQ ID NO: 5192783 - DNA, 25 bp, Homo sapien
caaaataattgcctaatggcacgca

SEQ ID NO: 5192784 - DNA, 25 bp, Homo sapien
gctgcctcgtttgattgttcgttgt

SEQ ID NO: 5192785 - DNA, 25 bp, Homo sapien
gatgggtgtccgttcgtgttctgca

SEQ ID NO: 5192786 - DNA, 25 bp, Homo sapien
tgcattaccagcctcttagccagct

SEQ ID NO: 5192787 - DNA, 25 bp, Homo sapien
tgttcgttgtgtcacttgaagatga

SEQ ID NO: 5192788 - DNA, 25 bp, Homo sapien
cctgcctgcagtttgagagccatca

SEQ ID NO: 5192789 - DNA, 25 bp, Homo sapien
tgcctgcagtttgagagccatcagt

SEQ ID NO: 5192790 - DNA, 25 bp, Homo sapien
ctgcctgcagtttgagagccatcag

SEQ ID NO: 5192791 - DNA, 25 bp, Homo sapien
agtcgcaggggcactgttttttagg

SEQ ID NO: 5192792 - DNA, 25 bp, Homo sapien
tttcctctctccagtcgcaggggca

SEQ ID NO: 5192793 - DNA, 25 bp, Homo sapien
tctttcctctctccagtcgcagggg

SEQ ID NO: 5192794 - DNA, 25 bp, Homo sapien
cagtcgcaggggcactgttttttag

SEQ ID NO: 5192795 - DNA, 25 bp, Homo sapien
catcaacaggctgaaggaggtcact

SEQ ID NO: 5192796 - DNA, 25 bp, Homo sapien
gcatgaacaacccttctggatacag

SEQ ID NO: 5192797 - DNA, 25 bp, Homo sapien
aatacatggcggtttggcagtcaga

SEQ ID NO: 5192798 - DNA, 25 bp, Homo sapien
caggccaacctcaaatcattaacga

SEQ ID NO: 5192799 - DNA, 25 bp, Homo sapien
tcagatgtcgtggttggggctagca

SEQ ID NO: 5192800 - DNA, 25 bp, Homo sapien
ggaggagtcagatgtcgtggttggg

SEQ ID NO: 5192801 - DNA, 25 bp, Homo sapien
tcgtggttggggctagcatagccat

SEQ ID NO: 5192802 - DNA, 25 bp, Homo sapien
ttggaggagtcagatgtcgtggttg

SEQ ID NO: 5192803 - DNA, 25 bp, Homo sapien
gtggatgctgaacggctgctccttc

SEQ ID NO: 5192804 - DNA, 25 bp, Homo sapien
tgcgtggatgctgaacggctgctcc

SEQ ID NO: 5192805 - DNA, 25 bp, Homo sapien
tcaccacaccaagacacgggggtag

SEQ ID NO: 5192806 - DNA, 25 bp, Homo sapien
ggccaccttccaggtgaccccttca

SEQ ID NO: 5192807 - DNA, 25 bp, Homo sapien
gggactctctgaagagatataggcc

SEQ ID NO: 5192808 - DNA, 25 bp, Homo sapien
tggttgccactgcttctctaaaact

SEQ ID NO: 5192809 - DNA, 25 bp, Homo sapien
tgaagagatataggccagctctgct

SEQ ID NO: 5192810 - DNA, 25 bp, Homo sapien
aaaactaactggctgccagtgtcct

SEQ ID NO: 5192811 - DNA, 25 bp, Homo sapien
tctggaactcgttctagagttcttg

SEQ ID NO: 5192812 - DNA, 25 bp, Homo sapien
ttgtacgtttgtctggaactcgttc

SEQ ID NO: 5192813 - DNA, 25 bp, Homo sapien
actttgtacgtttgtctggaactcg

SEQ ID NO: 5192814 - DNA, 25 bp, Homo sapien
cgtttgtctggaactcgttctagag

SEQ ID NO: 5192815 - DNA, 25 bp, Homo sapien
tgtaagagggttccattttgaagct

SEQ ID NO: 5192816 - DNA, 25 bp, Homo sapien
gacaccgcttcctcgctctgtgttg

SEQ ID NO: 5192817 - DNA, 25 bp, Homo sapien
tgcagcagggttttaacgaggtccc

SEQ ID NO: 5192818 - DNA, 25 bp, Homo sapien
tctgtgttggtgctgagttcttgca

SEQ ID NO: 5192819 - DNA, 25 bp, Homo sapien
aaatacagtccctctctgtgcacga

SEQ ID NO: 5192820 - DNA, 25 bp, Homo sapien
tcgtaacagattgcagtgagtgcca

SEQ ID NO: 5192821 - DNA, 25 bp, Homo sapien
tgtgcacgactctcaggtatgtttc

SEQ ID NO: 5192822 - DNA, 25 bp, Homo sapien
ctttcttgaatgctgtaacggtggc

SEQ ID NO: 5192823 - DNA, 25 bp, Homo sapien
tgcatggggacggtacaactgtatt

SEQ ID NO: 5192824 - DNA, 25 bp, Homo sapien
tggggacggtacaactgtatttgca

SEQ ID NO: 5192825 - DNA, 25 bp, Homo sapien
ggacggtacaactgtatttgcagat

SEQ ID NO: 5192826 - DNA, 25 bp, Homo sapien
ttgagttgcatggggacggtacaac

SEQ ID NO: 5192827 - DNA, 25 bp, Homo sapien
agtgtagcatctagagtcagctgtg

SEQ ID NO: 5192828 - DNA, 25 bp, Homo sapien
tcaagtgtggattggataggaaggt

SEQ ID NO: 5192829 - DNA, 25 bp, Homo sapien
gataggaaggttcatctggccaggg

SEQ ID NO: 5192830 - DNA, 25 bp, Homo sapien
gggacattgagtactagtaagtgta

SEQ ID NO: 5192831 - DNA, 25 bp, Homo sapien
aacaagtgataaaccagctgcctgc

SEQ ID NO: 5192832 - DNA, 25 bp, Homo sapien
tcagccattcatgcggtgccaggtg

SEQ ID NO: 5192833 - DNA, 25 bp, Homo sapien
cttgttatgaggtccgatgtcagcc

SEQ ID NO: 5192834 - DNA, 25 bp, Homo sapien
ttcttggacacagaccgagtgtgca

SEQ ID NO: 5192835 - DNA, 25 bp, Homo sapien
tgtagcctactatcaattcttgtgg

SEQ ID NO: 5192836 - DNA, 25 bp, Homo sapien
caagcaagatggtgatgaggatcgt

SEQ ID NO: 5192837 - DNA, 25 bp, Homo sapien
tgtgttctcagtacccaacatagta

SEQ ID NO: 5192838 - DNA, 25 bp, Homo sapien
actttgttagcaccaacttgttgag

SEQ ID NO: 5192839 - DNA, 25 bp, Homo sapien
cttgagcttaaatatgttgttgcac

SEQ ID NO: 5192840 - DNA, 25 bp, Homo sapien
gagcttaaatatgttgttgcacttg

SEQ ID NO: 5192841 - DNA, 25 bp, Homo sapien
taaatatgttgttgcacttggtgtc

SEQ ID NO: 5192842 - DNA, 25 bp, Homo sapien
aaatatgttgttgcacttggtgtca

SEQ ID NO: 5192843 - DNA, 25 bp, Homo sapien
gttcccgccacttataagatgaggt

SEQ ID NO: 5192844 - DNA, 25 bp, Homo sapien
aggtgctgaccttccctacggtagg

SEQ ID NO: 5192845 - DNA, 25 bp, Homo sapien
ggtaggtggcctttattcagcctct

SEQ ID NO: 5192846 - DNA, 25 bp, Homo sapien
taggataagatacaagttcccgcca

SEQ ID NO: 5192847 - DNA, 25 bp, Homo sapien
gagagaagctcccgactgcctcctc

SEQ ID NO: 5192848 - DNA, 25 bp, Homo sapien
ctgagagaagctcccgactgcctcc

SEQ ID NO: 5192849 - DNA, 25 bp, Homo sapien
tcctccatctgtccatgcagtgctc

SEQ ID NO: 5192850 - DNA, 25 bp, Homo sapien
tgagagaagctcccgactgcctcct

SEQ ID NO: 5192851 - DNA, 25 bp, Homo sapien
gtaatttgctgatccccatttaggg

SEQ ID NO: 5192852 - DNA, 25 bp, Homo sapien
gacagtgagctgtgtaaactttcac

SEQ ID NO: 5192853 - DNA, 25 bp, Homo sapien
tgtgaggtctggatagtcttcaaac

SEQ ID NO: 5192854 - DNA, 25 bp, Homo sapien
ttctggaactgaagtggcgtgttac

SEQ ID NO: 5192855 - DNA, 25 bp, Homo sapien
aaaagccttgcagccgtagattttt

SEQ ID NO: 5192856 - DNA, 25 bp, Homo sapien
ccttgcagccgtagattttttcctt

SEQ ID NO: 5192857 - DNA, 25 bp, Homo sapien
agccttgcagccgtagattttttcc

SEQ ID NO: 5192858 - DNA, 25 bp, Homo sapien
gtaaaaagccttgcagccgtagatt

SEQ ID NO: 5192859 - DNA, 25 bp, Homo sapien
agtagagggcagcaatgggttttaa

SEQ ID NO: 5192860 - DNA, 25 bp, Homo sapien
aagctaactgagcaaaagttttggc

SEQ ID NO: 5192861 - DNA, 25 bp, Homo sapien
agttttggctttgtcgaaggcctca

SEQ ID NO: 5192862 - DNA, 25 bp, Homo sapien
tgtgccattgtggaaagctaactga

SEQ ID NO: 5192863 - DNA, 25 bp, Homo sapien
tttgctagcacgagtctcattttca

SEQ ID NO: 5192864 - DNA, 25 bp, Homo sapien
aatctagctccaggagttgtagtgc

SEQ ID NO: 5192865 - DNA, 25 bp, Homo sapien
gctgtattgaacagatgcatagatt

SEQ ID NO: 5192866 - DNA, 25 bp, Homo sapien
ttttggtgctaactgaatctagctc

SEQ ID NO: 5192867 - DNA, 25 bp, Homo sapien
gaattgtttgatgtttgctagtggc

SEQ ID NO: 5192868 - DNA, 25 bp, Homo sapien
atgtttgctagtggccatgtaagac

SEQ ID NO: 5192869 - DNA, 25 bp, Homo sapien
tttgatgtttgctagtggccatgta

SEQ ID NO: 5192870 - DNA, 25 bp, Homo sapien
tgtttgatgtttgctagtggccatg

SEQ ID NO: 5192871 - DNA, 25 bp, Homo sapien
tcaacgatgagagctcatgggactt

SEQ ID NO: 5192872 - DNA, 25 bp, Homo sapien
tgttgcagacctttggttcgtctga

SEQ ID NO: 5192873 - DNA, 25 bp, Homo sapien
gctcatgggactttcctcataaaag

SEQ ID NO: 5192874 - DNA, 25 bp, Homo sapien
gacctttggttcgtctgagtctgtg

SEQ ID NO: 5192875 - DNA, 25 bp, Homo sapien
caggtgttccgtgcccttcatgagg

SEQ ID NO: 5192876 - DNA, 25 bp, Homo sapien
caagactaaaggagggaacattctc

SEQ ID NO: 5192877 - DNA, 25 bp, Homo sapien
tggcctcacttaggagaaactctgg

SEQ ID NO: 5192878 - DNA, 25 bp, Homo sapien
gactcatggtattgtgggatctgca

SEQ ID NO: 5192879 - DNA, 25 bp, Homo sapien
tcaaattgacatctggagcatgcag

SEQ ID NO: 5192880 - DNA, 25 bp, Homo sapien
ttgaacaatatgtggcagcccaagg

SEQ ID NO: 5192881 - DNA, 25 bp, Homo sapien
tcctgatgttggaggttcattgaac

SEQ ID NO: 5192882 - DNA, 25 bp, Homo sapien
cagaacatattctggtggatgggcc

SEQ ID NO: 5192883 - DNA, 25 bp, Homo sapien
gagttttcatagagaggctgctgct

SEQ ID NO: 5192884 - DNA, 25 bp, Homo sapien
ttgagagttttcatagagaggctgc

SEQ ID NO: 5192885 - DNA, 25 bp, Homo sapien
agagttttcatagagaggctgctgc

SEQ ID NO: 5192886 - DNA, 25 bp, Homo sapien
tgagagttttcatagagaggctgct

SEQ ID NO: 5192887 - DNA, 25 bp, Homo sapien
tccagtttctcctgtgatggtgtct

SEQ ID NO: 5192888 - DNA, 25 bp, Homo sapien
ggtgtctgatctgtagatagccact

SEQ ID NO: 5192889 - DNA, 25 bp, Homo sapien
gtctgatctgtagatagccacttct

SEQ ID NO: 5192890 - DNA, 25 bp, Homo sapien
tttctcctgtgatggtgtctgatct

SEQ ID NO: 5192891 - DNA, 25 bp, Homo sapien
taatttatcatggaattccttgaag

SEQ ID NO: 5192892 - DNA, 25 bp, Homo sapien
tatcatggaattccttgaagtggca

SEQ ID NO: 5192893 - DNA, 25 bp, Homo sapien
tttacaaagtaatttatcatggaat

SEQ ID NO: 5192894 - DNA, 25 bp, Homo sapien
agtaatttatcatggaattccttga

SEQ ID NO: 5192895 - DNA, 25 bp, Homo sapien
tctgaagttgtagtgatccaatcca

SEQ ID NO: 5192896 - DNA, 25 bp, Homo sapien
tgtttctgaagttgtagtgatccaa

SEQ ID NO: 5192897 - DNA, 25 bp, Homo sapien
aatgagggaagtcgttatctttggg

SEQ ID NO: 5192898 - DNA, 25 bp, Homo sapien
gcagtttggtcgctgctgcaaatga

SEQ ID NO: 5192899 - DNA, 25 bp, Homo sapien
tatatctgacttgagtcctgcatgc

SEQ ID NO: 5192900 - DNA, 25 bp, Homo sapien
tccatggcagcattgcactcatcag

SEQ ID NO: 5192901 - DNA, 25 bp, Homo sapien
gagtcctgcatgcttccgtttgttg

SEQ ID NO: 5192902 - DNA, 25 bp, Homo sapien
gcattgcactcatcagtatatctga

SEQ ID NO: 5192903 - DNA, 25 bp, Homo sapien
taagtttcagtagcttccttacgca

SEQ ID NO: 5192904 - DNA, 25 bp, Homo sapien
cgtctggtctgtttgttaagcacaa

SEQ ID NO: 5192905 - DNA, 25 bp, Homo sapien
gaaggtcttcaatttacgactcaag

SEQ ID NO: 5192906 - DNA, 25 bp, Homo sapien
cagataatctttgcctgacaagctg

SEQ ID NO: 5192907 - DNA, 25 bp, Homo sapien
agtttccacacacagcgttgcaggg

SEQ ID NO: 5192908 - DNA, 25 bp, Homo sapien
ggcagattctcctccataatggcta

SEQ ID NO: 5192909 - DNA, 25 bp, Homo sapien
gatgatcggaggacccttaggctgt

SEQ ID NO: 5192910 - DNA, 25 bp, Homo sapien
catgcactcatggatctgtgggtcg

SEQ ID NO: 5192911 - DNA, 25 bp, Homo sapien
tctggtcaggtcaccttgcccattt

SEQ ID NO: 5192912 - DNA, 25 bp, Homo sapien
gtacctctggtcaggtcaccttgcc

SEQ ID NO: 5192913 - DNA, 25 bp, Homo sapien
ccatgtacctctggtcaggtcacct

SEQ ID NO: 5192914 - DNA, 25 bp, Homo sapien
ggtcaggtcaccttgcccatttctc

SEQ ID NO: 5192915 - DNA, 25 bp, Homo sapien
ctcaagtcgattgacagaagatgat

SEQ ID NO: 5192916 - DNA, 25 bp, Homo sapien
caagtcgattgacagaagatgattc

SEQ ID NO: 5192917 - DNA, 25 bp, Homo sapien
gaggacgtaccttctctgggagaca

SEQ ID NO: 5192918 - DNA, 25 bp, Homo sapien
tgcctttgccaagagtgaggacgta

SEQ ID NO: 5192919 - DNA, 25 bp, Homo sapien
caggtatgcaggtagtcaccaagct

SEQ ID NO: 5192920 - DNA, 25 bp, Homo sapien
gtatgcaggtagtcaccaagctggg

SEQ ID NO: 5192921 - DNA, 25 bp, Homo sapien
aggtagtcaccaagctggggagtgc

SEQ ID NO: 5192922 - DNA, 25 bp, Homo sapien
caggtagtcaccaagctggggagtg

SEQ ID NO: 5192923 - DNA, 25 bp, Homo sapien
agccttgttcctagcgggttggttg

SEQ ID NO: 5192924 - DNA, 25 bp, Homo sapien
gttgtactgttgatcctaaaggaag

SEQ ID NO: 5192925 - DNA, 25 bp, Homo sapien
gtggaggtgtggtaactaatcgttc

SEQ ID NO: 5192926 - DNA, 25 bp, Homo sapien
ggaaatgattataccctttgaggta

SEQ ID NO: 5192927 - DNA, 25 bp, Homo sapien
tcatcagtagcatgttatatagttg

SEQ ID NO: 5192928 - DNA, 25 bp, Homo sapien
tctttattcggtctttgttgcgccc

SEQ ID NO: 5192929 - DNA, 25 bp, Homo sapien
gaagaagtgccctttacggtctgac

SEQ ID NO: 5192930 - DNA, 25 bp, Homo sapien
ttgcgccccggtgagtgccagcgtt

SEQ ID NO: 5192931 - DNA, 25 bp, Homo sapien
cgttgctacatcttggtgatccaaa

SEQ ID NO: 5192932 - DNA, 25 bp, Homo sapien
gagggtgcctctgacagactgaaag

SEQ ID NO: 5192933 - DNA, 25 bp, Homo sapien
atttttccaaggatgattcagcagc

SEQ ID NO: 5192934 - DNA, 25 bp, Homo sapien
tacaatttgcaggacttgacaaggg

SEQ ID NO: 5192935 - DNA, 25 bp, Homo sapien
tcttttgaagttttgccagcgaggg

SEQ ID NO: 5192936 - DNA, 25 bp, Homo sapien
taacttttagttaccactggagcta

SEQ ID NO: 5192937 - DNA, 25 bp, Homo sapien
ggagccagtgacctgtgacagttgt

SEQ ID NO: 5192938 - DNA, 25 bp, Homo sapien
ggtgcctattgacctatcctgtgta

SEQ ID NO: 5192939 - DNA, 25 bp, Homo sapien
catcagtttgaaccagagtttgtac

SEQ ID NO: 5192940 - DNA, 25 bp, Homo sapien
ccaaaacagctcttagttgaagtga

SEQ ID NO: 5192941 - DNA, 25 bp, Homo sapien
tcagacttggcttaactgaaaagca

SEQ ID NO: 5192942 - DNA, 25 bp, Homo sapien
tcatgtgaagtcatacgttttcctc

SEQ ID NO: 5192943 - DNA, 25 bp, Homo sapien
taagaaacttcttggacattgagga

SEQ ID NO: 5192944 - DNA, 25 bp, Homo sapien
cctcttcctgtgtaggaatcagggc

SEQ ID NO: 5192945 - DNA, 25 bp, Homo sapien
ggagcctcttcctgtgtaggaatca

SEQ ID NO: 5192946 - DNA, 25 bp, Homo sapien
cttgaagttctgtggagcctcttcc

SEQ ID NO: 5192947 - DNA, 25 bp, Homo sapien
tgaagttctgtggagcctcttcctg

SEQ ID NO: 5192948 - DNA, 25 bp, Homo sapien
gacagctcaggggtttaggtgccaa

SEQ ID NO: 5192949 - DNA, 25 bp, Homo sapien
ctgtggagctcctggcaatttggac

SEQ ID NO: 5192950 - DNA, 25 bp, Homo sapien
ccctctgacaagtgatgagagcatc

SEQ ID NO: 5192951 - DNA, 25 bp, Homo sapien
ttccccttgcacctccactgctgtg

SEQ ID NO: 5192952 - DNA, 25 bp, Homo sapien
atatgatatgactccagcagtgtga

SEQ ID NO: 5192953 - DNA, 25 bp, Homo sapien
gtcatatgatatgactccagcagtg

SEQ ID NO: 5192954 - DNA, 25 bp, Homo sapien
ccgccatacggcaggtgtcatatga

SEQ ID NO: 5192955 - DNA, 25 bp, Homo sapien
catacggcaggtgtcatatgatatg

SEQ ID NO: 5192956 - DNA, 25 bp, Homo sapien
gcagggatgggatgttgcctttcca

SEQ ID NO: 5192957 - DNA, 25 bp, Homo sapien
acgcagggatgggatgttgcctttc

SEQ ID NO: 5192958 - DNA, 25 bp, Homo sapien
gggatgggatgttgcctttccagaa

SEQ ID NO: 5192959 - DNA, 25 bp, Homo sapien
ctgacgcagggatgggatgttgcct

SEQ ID NO: 5192960 - DNA, 25 bp, Homo sapien
tgagagtcttgtcacttagggaagc

SEQ ID NO: 5192961 - DNA, 25 bp, Homo sapien
caagcacttgaagggccaggagatt

SEQ ID NO: 5192962 - DNA, 25 bp, Homo sapien
gaaccttccctattggatcatccag

SEQ ID NO: 5192963 - DNA, 25 bp, Homo sapien
gagtcgcagggctcggcgttacttt

SEQ ID NO: 5192964 - DNA, 25 bp, Homo sapien
cgcatgctgcaaacttttatctcag

SEQ ID NO: 5192965 - DNA, 25 bp, Homo sapien
tgcaaacttttatctcagggatcgc

SEQ ID NO: 5192966 - DNA, 25 bp, Homo sapien
tgcagacgagccgcatgctgcaaac

SEQ ID NO: 5192967 - DNA, 25 bp, Homo sapien
aacttttatctcagggatcgccggg

SEQ ID NO: 5192968 - DNA, 25 bp, Homo sapien
cacaaagcggcctgactcctttggt

SEQ ID NO: 5192969 - DNA, 25 bp, Homo sapien
cagggccggtggccccgaaagcaca

SEQ ID NO: 5192970 - DNA, 25 bp, Homo sapien
gggccaaggcgcagggcgagcaggg

SEQ ID NO: 5192971 - DNA, 25 bp, Homo sapien
ttcccctcgccgaggcggagaacag

SEQ ID NO: 5192972 - DNA, 25 bp, Homo sapien
aatgtgagaacctggcggccgttca

SEQ ID NO: 5192973 - DNA, 25 bp, Homo sapien
ggtatcccgctcgtcaacttgtaaa

SEQ ID NO: 5192974 - DNA, 25 bp, Homo sapien
gcgtcttgcaaagggacaccatgta

SEQ ID NO: 5192975 - DNA, 25 bp, Homo sapien
ggttattttctaactggcgtcttgc

SEQ ID NO: 5192976 - DNA, 25 bp, Homo sapien
ggataccggcaagtaaagcgccgga

SEQ ID NO: 5192977 - DNA, 25 bp, Homo sapien
agggataccggcaagtaaagcgccg

SEQ ID NO: 5192978 - DNA, 25 bp, Homo sapien
gataccggcaagtaaagcgccggaa

SEQ ID NO: 5192979 - DNA, 25 bp, Homo sapien
catggcttggtataaagagctcccc

SEQ ID NO: 5192980 - DNA, 25 bp, Homo sapien
gaagtcctccgcatcaaagaatgta

SEQ ID NO: 5192981 - DNA, 25 bp, Homo sapien
ttcaagaccagagcgaggtagctgc

SEQ ID NO: 5192982 - DNA, 25 bp, Homo sapien
caatactattggtttactgccccgt

SEQ ID NO: 5192983 - DNA, 25 bp, Homo sapien
atgatgccaaagagcaatgccaggg

SEQ ID NO: 5192984 - DNA, 25 bp, Homo sapien
tggtagccatttggaaagcggttga

SEQ ID NO: 5192985 - DNA, 25 bp, Homo sapien
cattcttctttaaaccgatttactg

SEQ ID NO: 5192986 - DNA, 25 bp, Homo sapien
agtcttcatcctggtagccatttgg

SEQ ID NO: 5192987 - DNA, 25 bp, Homo sapien
tggcccctgatactgaacttccttc

SEQ ID NO: 5192988 - DNA, 25 bp, Homo sapien
gtgtctcctttgatgcggatctggc

SEQ ID NO: 5192989 - DNA, 25 bp, Homo sapien
ttgatgcggatctggcccctgatac

SEQ ID NO: 5192990 - DNA, 25 bp, Homo sapien
tcctttgatgcggatctggcccctg

SEQ ID NO: 5192991 - DNA, 25 bp, Homo sapien
tatgcccattaaaacatgctgtgca

SEQ ID NO: 5192992 - DNA, 25 bp, Homo sapien
ctggatcacctgcgccttactctgg

SEQ ID NO: 5192993 - DNA, 25 bp, Homo sapien
gctgttcttcctggtctgatgtaag

SEQ ID NO: 5192994 - DNA, 25 bp, Homo sapien
tgatgtaagtatgggctctatgccc

SEQ ID NO: 5192995 - DNA, 25 bp, Homo sapien
catcaagtttacgaaagagctaggg

SEQ ID NO: 5192996 - DNA, 25 bp, Homo sapien
tctgtagcattccattagccaaggc

SEQ ID NO: 5192997 - DNA, 25 bp, Homo sapien
tctggtctcagctgggctaatttac

SEQ ID NO: 5192998 - DNA, 25 bp, Homo sapien
gactagtccagatcccagtagtagg

SEQ ID NO: 5192999 - DNA, 25 bp, Homo sapien
tgggtactgaacgggggtggctata

SEQ ID NO: 5193000 - DNA, 25 bp, Homo sapien
ctgctgtttacagccgggttcagcc

SEQ ID NO: 5193001 - DNA, 25 bp, Homo sapien
gctgtttacagccgggttcagccag

SEQ ID NO: 5193002 - DNA, 25 bp, Homo sapien
gtttacagccgggttcagccagtgg

SEQ ID NO: 5193003 - DNA, 25 bp, Homo sapien
ccatcgttcataataaattagcttc

SEQ ID NO: 5193004 - DNA, 25 bp, Homo sapien
ggagctctgtccatcgttcataata

SEQ ID NO: 5193005 - DNA, 25 bp, Homo sapien
gagggcacccggaaatgggagctct

SEQ ID NO: 5193006 - DNA, 25 bp, Homo sapien
aatgggagctctgtccatcgttcat

SEQ ID NO: 5193007 - DNA, 25 bp, Homo sapien
tattgctggagttgagccagcctga

SEQ ID NO: 5193008 - DNA, 25 bp, Homo sapien
gcagcactgtccgaccatttatgtt

SEQ ID NO: 5193009 - DNA, 25 bp, Homo sapien
gaatgggactttttgtgctgcgacc

SEQ ID NO: 5193010 - DNA, 25 bp, Homo sapien
tgcgacctcatcttagcagcactgt

SEQ ID NO: 5193011 - DNA, 25 bp, Homo sapien
tcttccaaatagagtaagggtgatg

SEQ ID NO: 5193012 - DNA, 25 bp, Homo sapien
gtcccagagggccacctggttctct

SEQ ID NO: 5193013 - DNA, 25 bp, Homo sapien
tcctgcatcatgtcccagagggcca

SEQ ID NO: 5193014 - DNA, 25 bp, Homo sapien
tgttgccagaatgttgtgatgatgt

SEQ ID NO: 5193015 - DNA, 25 bp, Homo sapien
taattccagatacatctgattttga

SEQ ID NO: 5193016 - DNA, 25 bp, Homo sapien
gcagcctgagaatcataattccagt

SEQ ID NO: 5193017 - DNA, 25 bp, Homo sapien
gccaggtgtcaacttgctgcattcc

SEQ ID NO: 5193018 - DNA, 25 bp, Homo sapien
aggtgtcaacttgctgcattccagc

SEQ ID NO: 5193019 - DNA, 25 bp, Homo sapien
tgggccaggtgtcaacttgctgcat

SEQ ID NO: 5193020 - DNA, 25 bp, Homo sapien
catttatatcgctttaaggctctcc

SEQ ID NO: 5193021 - DNA, 25 bp, Homo sapien
tgctgttgatggagagtattctgcc

SEQ ID NO: 5193022 - DNA, 25 bp, Homo sapien
tggggagctgtctgattcaaagcca

SEQ ID NO: 5193023 - DNA, 25 bp, Homo sapien
caagtttggagttgtacaaaggagg

SEQ ID NO: 5193024 - DNA, 25 bp, Homo sapien
caggtgaggaactgttagagactga

SEQ ID NO: 5193025 - DNA, 25 bp, Homo sapien
aaggtagaaccaatcaggatgccag

SEQ ID NO: 5193026 - DNA, 25 bp, Homo sapien
ggaactgttagagactgagctcagc

SEQ ID NO: 5193027 - DNA, 25 bp, Homo sapien
gctcagctcaaggtagaaccaatca

SEQ ID NO: 5193028 - DNA, 25 bp, Homo sapien
tggggctaagccagttgctgcactt

SEQ ID NO: 5193029 - DNA, 25 bp, Homo sapien
cagactctggatatgcagttaacac

SEQ ID NO: 5193030 - DNA, 25 bp, Homo sapien
gcactcgcatttcctcagactctgg

SEQ ID NO: 5193031 - DNA, 25 bp, Homo sapien
tatgcagttaacacaagccggccag

SEQ ID NO: 5193032 - DNA, 25 bp, Homo sapien
tgaactgccaggtaccaagtggtac

SEQ ID NO: 5193033 - DNA, 25 bp, Homo sapien
caggtgccacgaggctgccaaaggc

SEQ ID NO: 5193034 - DNA, 25 bp, Homo sapien
gagatgagccaagccatcaacttca

SEQ ID NO: 5193035 - DNA, 25 bp, Homo sapien
ctgaggttgagacatggcatccata

SEQ ID NO: 5193036 - DNA, 25 bp, Homo sapien
cactctccttgcactacctcttccc

SEQ ID NO: 5193037 - DNA, 25 bp, Homo sapien
tccttgcactacctcttcccttgct

SEQ ID NO: 5193038 - DNA, 25 bp, Homo sapien
catctgcttgagaggctgtctgttc

SEQ ID NO: 5193039 - DNA, 25 bp, Homo sapien
gagtcctgaggatggtgggttgttg

SEQ ID NO: 5193040 - DNA, 25 bp, Homo sapien
ctgcatagggagtttctgcatagcc

SEQ ID NO: 5193041 - DNA, 25 bp, Homo sapien
catagggagtttctgcatagccttc

SEQ ID NO: 5193042 - DNA, 25 bp, Homo sapien
tgcatagggagtttctgcatagcct

SEQ ID NO: 5193043 - DNA, 25 bp, Homo sapien
gcatagggagtttctgcatagcctt

SEQ ID NO: 5193044 - DNA, 25 bp, Homo sapien
tccccagtaaggcccttccttgcag

SEQ ID NO: 5193045 - DNA, 25 bp, Homo sapien
atctcttttcaaaactgcaacacct

SEQ ID NO: 5193046 - DNA, 25 bp, Homo sapien
tgtggcatttgcacccgagactcag

SEQ ID NO: 5193047 - DNA, 25 bp, Homo sapien
ccaatctgtaatgtggcccactgga

SEQ ID NO: 5193048 - DNA, 25 bp, Homo sapien
gatgctcctggatgtggcatttgca

SEQ ID NO: 5193049 - DNA, 25 bp, Homo sapien
taaattgctgttctcaacaacgccc

SEQ ID NO: 5193050 - DNA, 25 bp, Homo sapien
cttcaaataatgcaagaagtgatct

SEQ ID NO: 5193051 - DNA, 25 bp, Homo sapien
taccgccttctgaaaagcaggcaag

SEQ ID NO: 5193052 - DNA, 25 bp, Homo sapien
aagcaggcaagtctctcatgtgaca

SEQ ID NO: 5193053 - DNA, 25 bp, Homo sapien
tctttcggccccaaatatgcaatac

SEQ ID NO: 5193054 - DNA, 25 bp, Homo sapien
caatttacttctagatgtctcccct

SEQ ID NO: 5193055 - DNA, 25 bp, Homo sapien
tccctgcctgcaactggcaaagtct

SEQ ID NO: 5193056 - DNA, 25 bp, Homo sapien
tctctctgtcccttgtgtaccaatt

SEQ ID NO: 5193057 - DNA, 25 bp, Homo sapien
ctgcctgcaactggcaaagtcttct

SEQ ID NO: 5193058 - DNA, 25 bp, Homo sapien
caccaacaatcatagaaaagtggag

SEQ ID NO: 5193059 - DNA, 25 bp, Homo sapien
tgctctaggaaggtccaagcactgc

SEQ ID NO: 5193060 - DNA, 25 bp, Homo sapien
ctttcatcatcgctgctgtgtgtgc

SEQ ID NO: 5193061 - DNA, 25 bp, Homo sapien
ggtttccgtacactatgatctcagg

SEQ ID NO: 5193062 - DNA, 25 bp, Homo sapien
ctgctttacgtcatcctctctgaac

SEQ ID NO: 5193063 - DNA, 25 bp, Homo sapien
ttccctgctttacgtcatcctctct

SEQ ID NO: 5193064 - DNA, 25 bp, Homo sapien
tcatggcatcttcctacccttccct

SEQ ID NO: 5193065 - DNA, 25 bp, Homo sapien
gcccgaactcatggcatcttcctac

SEQ ID NO: 5193066 - DNA, 25 bp, Homo sapien
tttatctactccagaaggtctccac

SEQ ID NO: 5193067 - DNA, 25 bp, Homo sapien
cacagcatgctcaaaacctgacata

SEQ ID NO: 5193068 - DNA, 25 bp, Homo sapien
cagcacagcatgctcaaaacctgac

SEQ ID NO: 5193069 - DNA, 25 bp, Homo sapien
ccattttatctactccagaaggtct

SEQ ID NO: 5193070 - DNA, 25 bp, Homo sapien
ctgagcagagacacataggagagaa

SEQ ID NO: 5193071 - DNA, 25 bp, Homo sapien
gagagaagacgtgaatgctgagtca

SEQ ID NO: 5193072 - DNA, 25 bp, Homo sapien
gacacataggagagaagacgtgaat

SEQ ID NO: 5193073 - DNA, 25 bp, Homo sapien
cgtgaatgctgagtcatcaatcagc

SEQ ID NO: 5193074 - DNA, 25 bp, Homo sapien
aatatagagtcttcgcagatgcagc

SEQ ID NO: 5193075 - DNA, 25 bp, Homo sapien
tctgactagcttccctgaccagagg

SEQ ID NO: 5193076 - DNA, 25 bp, Homo sapien
tgaccagaggtcgttttgagtttcc

SEQ ID NO: 5193077 - DNA, 25 bp, Homo sapien
gctttctccagaccaacaatgtggt

SEQ ID NO: 5193078 - DNA, 25 bp, Homo sapien
cccttggtatagacttgttgaagag

SEQ ID NO: 5193079 - DNA, 25 bp, Homo sapien
aatatttcagcccaggacgtcactg

SEQ ID NO: 5193080 - DNA, 25 bp, Homo sapien
caggacgtcactgtgcacaattgct

SEQ ID NO: 5193081 - DNA, 25 bp, Homo sapien
gagtaagccttcatgtactgtttcc

SEQ ID NO: 5193082 - DNA, 25 bp, Homo sapien
gcctctggttgagaatgtaagcaca

SEQ ID NO: 5193083 - DNA, 25 bp, Homo sapien
gaatgtaagcacagatctcagcctt

SEQ ID NO: 5193084 - DNA, 25 bp, Homo sapien
tctggcctctggttgagaatgtaag

SEQ ID NO: 5193085 - DNA, 25 bp, Homo sapien
agaatgtaagcacagatctcagcct

SEQ ID NO: 5193086 - DNA, 25 bp, Homo sapien
ttcaggactgtagtggatttgctct

SEQ ID NO: 5193087 - DNA, 25 bp, Homo sapien
tcaggactgtagtggatttgctctt

SEQ ID NO: 5193088 - DNA, 25 bp, Homo sapien
tttcaggactgtagtggatttgctc

SEQ ID NO: 5193089 - DNA, 25 bp, Homo sapien
caggactgtagtggatttgctcttc

SEQ ID NO: 5193090 - DNA, 25 bp, Homo sapien
acattgatactaagtcagcagccac

SEQ ID NO: 5193091 - DNA, 25 bp, Homo sapien
ccctgcatctttaagtaccagtggg

SEQ ID NO: 5193092 - DNA, 25 bp, Homo sapien
ccacacattgatactaagtcagcag

SEQ ID NO: 5193093 - DNA, 25 bp, Homo sapien
tctttaagtaccagtgggccacaca

SEQ ID NO: 5193094 - DNA, 25 bp, Homo sapien
ttattctagggatgcttttctcatc

SEQ ID NO: 5193095 - DNA, 25 bp, Homo sapien
cttttcattaaccatctcaaaaggg

SEQ ID NO: 5193096 - DNA, 25 bp, Homo sapien
taaccatctcaaaagggaggagatt

SEQ ID NO: 5193097 - DNA, 25 bp, Homo sapien
cattaaccatctcaaaagggaggag

SEQ ID NO: 5193098 - DNA, 25 bp, Homo sapien
atgggagctttgacctgatcagttt

SEQ ID NO: 5193099 - DNA, 25 bp, Homo sapien
gagctttgacctgatcagtttccag

SEQ ID NO: 5193100 - DNA, 25 bp, Homo sapien
gacctgatcagtttccagtctgggt

SEQ ID NO: 5193101 - DNA, 25 bp, Homo sapien
gatcagtttccagtctgggtcagtt

SEQ ID NO: 5193102 - DNA, 25 bp, Homo sapien
cttgcccgtcacatggcagctcggg

SEQ ID NO: 5193103 - DNA, 25 bp, Homo sapien
cctgattggctcgtcttcgcgtcaa

SEQ ID NO: 5193104 - DNA, 25 bp, Homo sapien
ttcgcgtcaaacagcgaggcacaca

SEQ ID NO: 5193105 - DNA, 25 bp, Homo sapien
accgctctttcgctttgcgcttagg

SEQ ID NO: 5193106 - DNA, 25 bp, Homo sapien
tgctctcgaaggctcgcggcgagcc

SEQ ID NO: 5193107 - DNA, 25 bp, Homo sapien
aaggctcgcggcgagccccggttct

SEQ ID NO: 5193108 - DNA, 25 bp, Homo sapien
cctccgcggccgctgctctcgaagg

SEQ ID NO: 5193109 - DNA, 25 bp, Homo sapien
cggccgctgctctcgaaggctcgcg

SEQ ID NO: 5193110 - DNA, 25 bp, Homo sapien
actcctgtcctgcggcacccgcagc

SEQ ID NO: 5193111 - DNA, 25 bp, Homo sapien
tccactcctgtcctgcggcacccgc

SEQ ID NO: 5193112 - DNA, 25 bp, Homo sapien
cactcctgtcctgcggcacccgcag

SEQ ID NO: 5193113 - DNA, 25 bp, Homo sapien
tgtccactcctgtcctgcggcaccc

SEQ ID NO: 5193114 - DNA, 25 bp, Homo sapien
gacattgtgcgggagccaaaacctc

SEQ ID NO: 5193115 - DNA, 25 bp, Homo sapien
gaagatgagccgcaccatgaagata

SEQ ID NO: 5193116 - DNA, 25 bp, Homo sapien
aaaagcgagatagaggtcctcagcc

SEQ ID NO: 5193117 - DNA, 25 bp, Homo sapien
tcaggtccgcccaggtgacattgtg

SEQ ID NO: 5193118 - DNA, 25 bp, Homo sapien
ccgaacacaaaggttgggaggcgtg

SEQ ID NO: 5193119 - DNA, 25 bp, Homo sapien
ggcgtgcgccagagagcgcgcgagt

SEQ ID NO: 5193120 - DNA, 25 bp, Homo sapien
ggaggaaatccgtggcaagccagac

SEQ ID NO: 5193121 - DNA, 25 bp, Homo sapien
tgggaggcgtgaacgcgagcgttgg

SEQ ID NO: 5193122 - DNA, 25 bp, Homo sapien
tagcacccagagaatgcatggcagg

SEQ ID NO: 5193123 - DNA, 25 bp, Homo sapien
tggagatatccaaccaaaccgagga

SEQ ID NO: 5193124 - DNA, 25 bp, Homo sapien
taaagattgaagtgtgcgcggttcc

SEQ ID NO: 5193125 - DNA, 25 bp, Homo sapien
cattttgcaggatgtggacccgtcc

SEQ ID NO: 5193126 - DNA, 25 bp, Homo sapien
agagataaattaggaggctgcccca

SEQ ID NO: 5193127 - DNA, 25 bp, Homo sapien
caattggtcgctacagtggtcctgg

SEQ ID NO: 5193128 - DNA, 25 bp, Homo sapien
ttttcaagcacagatgatccacagg

SEQ ID NO: 5193129 - DNA, 25 bp, Homo sapien
ttctaagagaatcagcccagttggg

SEQ ID NO: 5193130 - DNA, 25 bp, Homo sapien
ggtgagctattaaaacaagatctac

SEQ ID NO: 5193131 - DNA, 25 bp, Homo sapien
ccactgacatacaaagcccttttag

SEQ ID NO: 5193132 - DNA, 25 bp, Homo sapien
caagctattgtgtgcaaaactgcca

SEQ ID NO: 5193133 - DNA, 25 bp, Homo sapien
tctacagagccacttagactagctg

SEQ ID NO: 5193134 - DNA, 25 bp, Homo sapien
ggttcgtcacattcacaccaatgga

SEQ ID NO: 5193135 - DNA, 25 bp, Homo sapien
aatttagtcagcctaggttcgtcac

SEQ ID NO: 5193136 - DNA, 25 bp, Homo sapien
tctatgaccctaaatgatgactgaa

SEQ ID NO: 5193137 - DNA, 25 bp, Homo sapien
tgcgtgtacccaaagcagatcactc

SEQ ID NO: 5193138 - DNA, 25 bp, Homo sapien
gatgcagttcattcctggaagtcac

SEQ ID NO: 5193139 - DNA, 25 bp, Homo sapien
tatgatgcagttcattcctggaagt

SEQ ID NO: 5193140 - DNA, 25 bp, Homo sapien
tgatgcagttcattcctggaagtca

SEQ ID NO: 5193141 - DNA, 25 bp, Homo sapien
ctttatgatgcagttcattcctgga

SEQ ID NO: 5193142 - DNA, 25 bp, Homo sapien
caaagcagtttacttacacttgaga

SEQ ID NO: 5193143 - DNA, 25 bp, Homo sapien
catagtttactaactgcctgaagca

SEQ ID NO: 5193144 - DNA, 25 bp, Homo sapien
caagttaattccttctagtcggact

SEQ ID NO: 5193145 - DNA, 25 bp, Homo sapien
tgtttctaacacataactcagtcac

SEQ ID NO: 5193146 - DNA, 25 bp, Homo sapien
tctgcgggcggccaaaatactacct

SEQ ID NO: 5193147 - DNA, 25 bp, Homo sapien
tataaggatcaaccaccacaaggtg

SEQ ID NO: 5193148 - DNA, 25 bp, Homo sapien
gcccaagtgtcgtgtctcaggtata

SEQ ID NO: 5193149 - DNA, 25 bp, Homo sapien
caaacttcgcaatgtgttggcccag

SEQ ID NO: 5193150 - DNA, 25 bp, Homo sapien
tctccagggatacagattgcctcac

SEQ ID NO: 5193151 - DNA, 25 bp, Homo sapien
taagagaaccgcctgatacacttgg

SEQ ID NO: 5193152 - DNA, 25 bp, Homo sapien
cattagggagataccattctgcagg

SEQ ID NO: 5193153 - DNA, 25 bp, Homo sapien
gcatgcccatactgcctgtccagaa

SEQ ID NO: 5193154 - DNA, 25 bp, Homo sapien
tgcacagatttgtgaaagagccaga

SEQ ID NO: 5193155 - DNA, 25 bp, Homo sapien
tatgggaagagcataagatgcacag

SEQ ID NO: 5193156 - DNA, 25 bp, Homo sapien
gacttttaatgggaaacatgttatg

SEQ ID NO: 5193157 - DNA, 25 bp, Homo sapien
cagcttactatgtcatttggtccaa

SEQ ID NO: 5193158 - DNA, 25 bp, Homo sapien
gaccaggccttaacgaagtccacat

SEQ ID NO: 5193159 - DNA, 25 bp, Homo sapien
agagcaggaccaggccttaacgaag

SEQ ID NO: 5193160 - DNA, 25 bp, Homo sapien
taacaggtgcatccctctcctgtgt

SEQ ID NO: 5193161 - DNA, 25 bp, Homo sapien
gagttggtgtaacaggtgcatccct

SEQ ID NO: 5193162 - DNA, 25 bp, Homo sapien
attgtgttcacattcccttccgact

SEQ ID NO: 5193163 - DNA, 25 bp, Homo sapien
cattcccttccgactttgtcatcat

SEQ ID NO: 5193164 - DNA, 25 bp, Homo sapien
tcatcatccttgtaacagcctgctg

SEQ ID NO: 5193165 - DNA, 25 bp, Homo sapien
gctgttccagtacagtcttctttct

SEQ ID NO: 5193166 - DNA, 25 bp, Homo sapien
tcctaacgactctggcccttctcta

SEQ ID NO: 5193167 - DNA, 25 bp, Homo sapien
tttcctaacgactctggcccttctc

SEQ ID NO: 5193168 - DNA, 25 bp, Homo sapien
ctggcccttctctataaatgataat

SEQ ID NO: 5193169 - DNA, 25 bp, Homo sapien
ggcccttctctataaatgataatca

SEQ ID NO: 5193170 - DNA, 25 bp, Homo sapien
atgtaaagtaccacataatatccta

SEQ ID NO: 5193171 - DNA, 25 bp, Homo sapien
tgtaaagtaccacataatatcctac

SEQ ID NO: 5193172 - DNA, 25 bp, Homo sapien
ctttctggtcgcatttgctgtgtga

SEQ ID NO: 5193173 - DNA, 25 bp, Homo sapien
tggtcgcatttgctgtgtgaatgag

SEQ ID NO: 5193174 - DNA, 25 bp, Homo sapien
tttgctgtgtgaatgaggtgctgaa

SEQ ID NO: 5193175 - DNA, 25 bp, Homo sapien
gccttctttctggtcgcatttgctg

SEQ ID NO: 5193176 - DNA, 25 bp, Homo sapien
ctatggcgcacggtttggctacaaa

SEQ ID NO: 5193177 - DNA, 25 bp, Homo sapien
tatggcgcacggtttggctacaaat

SEQ ID NO: 5193178 - DNA, 25 bp, Homo sapien
cagaatggcattgggcggagcaatt

SEQ ID NO: 5193179 - DNA, 25 bp, Homo sapien
tgtaattgcagtgaagaccttttcc

SEQ ID NO: 5193180 - DNA, 25 bp, Homo sapien
ggagcaatttgtggtccattggcct

SEQ ID NO: 5193181 - DNA, 25 bp, Homo sapien
ctttgtaattgcagtgaagaccttt

SEQ ID NO: 5193182 - DNA, 25 bp, Homo sapien
tcaaatcacatcttggaagcctggg

SEQ ID NO: 5193183 - DNA, 25 bp, Homo sapien
cagagatatgaaaaacacctggtac

SEQ ID NO: 5193184 - DNA, 25 bp, Homo sapien
gaagcctgggtaattctcccagaaa

SEQ ID NO: 5193185 - DNA, 25 bp, Homo sapien
gacgagatagctagtacaaatggct

SEQ ID NO: 5193186 - DNA, 25 bp, Homo sapien
tccttaagggattcctattacagag

SEQ ID NO: 5193187 - DNA, 25 bp, Homo sapien
gctggatctgcttggcctatatatc

SEQ ID NO: 5193188 - DNA, 25 bp, Homo sapien
gaaagactcatggaataatatccct

SEQ ID NO: 5193189 - DNA, 25 bp, Homo sapien
tctgcagtgactagtgtttcctgcc

SEQ ID NO: 5193190 - DNA, 25 bp, Homo sapien
gaatgcttcgaacatcccagtccag

SEQ ID NO: 5193191 - DNA, 25 bp, Homo sapien
acagaacctcgtcagcgtgcttggc

SEQ ID NO: 5193192 - DNA, 25 bp, Homo sapien
gattgcgtctttgtcgaaaccagcg

SEQ ID NO: 5193193 - DNA, 25 bp, Homo sapien
tgcttggcttctcctgattgcgtct

SEQ ID NO: 5193194 - DNA, 25 bp, Homo sapien
cgtcttcaggcactctgatgaggct

SEQ ID NO: 5193195 - DNA, 25 bp, Homo sapien
aaacataacctttctacagccgtct

SEQ ID NO: 5193196 - DNA, 25 bp, Homo sapien
tttctacagccgtcttcaggcactc

SEQ ID NO: 5193197 - DNA, 25 bp, Homo sapien
cagccgtcttcaggcactctgatga

SEQ ID NO: 5193198 - DNA, 25 bp, Homo sapien
tccacagaatcagagcttcgtccta

SEQ ID NO: 5193199 - DNA, 25 bp, Homo sapien
tcagagccacctctcttaggtagca

SEQ ID NO: 5193200 - DNA, 25 bp, Homo sapien
cagagcttcgtcctaaattgagaat

SEQ ID NO: 5193201 - DNA, 25 bp, Homo sapien
gatctctcctcctcaaaatgatcga

SEQ ID NO: 5193202 - DNA, 25 bp, Homo sapien
tacacagtagcaagccaaaggtgct

SEQ ID NO: 5193203 - DNA, 25 bp, Homo sapien
tgaggctctgaactcgcgttggttt

SEQ ID NO: 5193204 - DNA, 25 bp, Homo sapien
tgcgtgagtaatgcccaagttgata

SEQ ID NO: 5193205 - DNA, 25 bp, Homo sapien
tcatctttttcttgtgcgtgagtaa

SEQ ID NO: 5193206 - DNA, 25 bp, Homo sapien
ctttcttcatccacttctgtcacat

SEQ ID NO: 5193207 - DNA, 25 bp, Homo sapien
tttcttcatccacttctgtcacatc

SEQ ID NO: 5193208 - DNA, 25 bp, Homo sapien
ttcttcatccacttctgtcacatcg

SEQ ID NO: 5193209 - DNA, 25 bp, Homo sapien
ctggaggcacagtgggcatcactcc

SEQ ID NO: 5193210 - DNA, 25 bp, Homo sapien
atcactccctactgaagtaggacac

SEQ ID NO: 5193211 - DNA, 25 bp, Homo sapien
tgggcatcactccctactgaagtag

SEQ ID NO: 5193212 - DNA, 25 bp, Homo sapien
ggcatcactccctactgaagtagga

SEQ ID NO: 5193213 - DNA, 25 bp, Homo sapien
caagccagacgggattcccaagagg

SEQ ID NO: 5193214 - DNA, 25 bp, Homo sapien
gagtattacaattgatggctccctg

SEQ ID NO: 5193215 - DNA, 25 bp, Homo sapien
cccaagaggaagtaacagagtgctt

SEQ ID NO: 5193216 - DNA, 25 bp, Homo sapien
tggcaaagtaagacacaaggcccag

SEQ ID NO: 5193217 - DNA, 25 bp, Homo sapien
tcaaaagctacagactgactgaggg

SEQ ID NO: 5193218 - DNA, 25 bp, Homo sapien
tgactgagggacataagagacttgc

SEQ ID NO: 5193219 - DNA, 25 bp, Homo sapien
caaggtggtcatatgcaaagtaggc

SEQ ID NO: 5193220 - DNA, 25 bp, Homo sapien
caaagtaggctccataggttggttt

SEQ ID NO: 5193221 - DNA, 25 bp, Homo sapien
cactacctatcgtgggtaaactgct

SEQ ID NO: 5193222 - DNA, 25 bp, Homo sapien
gcataggcattagggccagtcacac

SEQ ID NO: 5193223 - DNA, 25 bp, Homo sapien
ctaaggaagcgatcttggtacattc

SEQ ID NO: 5193224 - DNA, 25 bp, Homo sapien
ggaaattacttaggaagcataggca

SEQ ID NO: 5193225 - DNA, 25 bp, Homo sapien
gcttctctagcctcacctccctttc

SEQ ID NO: 5193226 - DNA, 25 bp, Homo sapien
ctccccacttggccccatctgcttc

SEQ ID NO: 5193227 - DNA, 25 bp, Homo sapien
ttgctgccccggttaaggttctgct

SEQ ID NO: 5193228 - DNA, 25 bp, Homo sapien
acctccctttcccacgtcctgagct

SEQ ID NO: 5193229 - DNA, 25 bp, Homo sapien
ccttacacggtcaaagaggctttgc

SEQ ID NO: 5193230 - DNA, 25 bp, Homo sapien
gaaagactactatctcaacagggag

SEQ ID NO: 5193231 - DNA, 25 bp, Homo sapien
aaaactgcggtttccaaattgagag

SEQ ID NO: 5193232 - DNA, 25 bp, Homo sapien
tacgggattaatcaagaaaactgcg

SEQ ID NO: 5193233 - DNA, 25 bp, Homo sapien
ttttaacgtcttgccaatttgggca

SEQ ID NO: 5193234 - DNA, 25 bp, Homo sapien
taagtctacttacattgaacaataa

SEQ ID NO: 5193235 - DNA, 25 bp, Homo sapien
tgaacaataaggtctgccaaaaaga

SEQ ID NO: 5193236 - DNA, 25 bp, Homo sapien
gaaaatatgaagtccgcttaagtct

SEQ ID NO: 5193237 - DNA, 25 bp, Homo sapien
caagtagctatctaagtcactcagg

SEQ ID NO: 5193238 - DNA, 25 bp, Homo sapien
aagtcactcagggttattccatggg

SEQ ID NO: 5193239 - DNA, 25 bp, Homo sapien
tatctaagtcactcagggttattcc

SEQ ID NO: 5193240 - DNA, 25 bp, Homo sapien
tccctcactgcacaagtagctatct

SEQ ID NO: 5193241 - DNA, 25 bp, Homo sapien
catgtatgtcaaggatctcccatcc

SEQ ID NO: 5193242 - DNA, 25 bp, Homo sapien
gggccataatcagcctaacaatctg

SEQ ID NO: 5193243 - DNA, 25 bp, Homo sapien
aaatgccagtgaacttgcactcctg

SEQ ID NO: 5193244 - DNA, 25 bp, Homo sapien
caatgaagttcttagctgactggct

SEQ ID NO: 5193245 - DNA, 25 bp, Homo sapien
tcttgtcttcagctactagagtgag

SEQ ID NO: 5193246 - DNA, 25 bp, Homo sapien
aactcccaagagtatatgcctcttg

SEQ ID NO: 5193247 - DNA, 25 bp, Homo sapien
ggcaaggctaggcacgtctgagctc

SEQ ID NO: 5193248 - DNA, 25 bp, Homo sapien
tggtaatatagggagcatcaggcag

SEQ ID NO: 5193249 - DNA, 25 bp, Homo sapien
tgagagccaagttgtagtgactgtc

SEQ ID NO: 5193250 - DNA, 25 bp, Homo sapien
tctcatttgagtgggctatgtcagg

SEQ ID NO: 5193251 - DNA, 25 bp, Homo sapien
tgattagcttaattactgactttct

SEQ ID NO: 5193252 - DNA, 25 bp, Homo sapien
agattctttgtcccatgaggtgttc

SEQ ID NO: 5193253 - DNA, 25 bp, Homo sapien
tcaggatttatgtcaaattctagtt

SEQ ID NO: 5193254 - DNA, 25 bp, Homo sapien
caggatttatgtcaaattctagttg

SEQ ID NO: 5193255 - DNA, 25 bp, Homo sapien
cttcaggatttatgtcaaattctag

SEQ ID NO: 5193256 - DNA, 25 bp, Homo sapien
aggatttatgtcaaattctagttgt

SEQ ID NO: 5193257 - DNA, 25 bp, Homo sapien
gaatctgactccgtaggtaaataca

SEQ ID NO: 5193258 - DNA, 25 bp, Homo sapien
tctgactccgtaggtaaatacataa

SEQ ID NO: 5193259 - DNA, 25 bp, Homo sapien
tgactccgtaggtaaatacataaag

SEQ ID NO: 5193260 - DNA, 25 bp, Homo sapien
caggaatctgactccgtaggtaaat

SEQ ID NO: 5193261 - DNA, 25 bp, Homo sapien
ccgcattgccgtatgagagctagag

SEQ ID NO: 5193262 - DNA, 25 bp, Homo sapien
gataaccgcattgccgtatgagagc

SEQ ID NO: 5193263 - DNA, 25 bp, Homo sapien
gacagataaccgcattgccgtatga

SEQ ID NO: 5193264 - DNA, 25 bp, Homo sapien
ctgatgacagataaccgcattgccg

SEQ ID NO: 5193265 - DNA, 25 bp, Homo sapien
aacacaatgcagcaacaacatgagg

SEQ ID NO: 5193266 - DNA, 25 bp, Homo sapien
aagtctgtatacctcacagcctgaa

SEQ ID NO: 5193267 - DNA, 25 bp, Homo sapien
gctcttggagttcaaggaatcccca

SEQ ID NO: 5193268 - DNA, 25 bp, Homo sapien
tatggcataccactaaacaagaagc

SEQ ID NO: 5193269 - DNA, 25 bp, Homo sapien
ctgctgggaaagaacactggcttca

SEQ ID NO: 5193270 - DNA, 25 bp, Homo sapien
tcatggtatgtgaacgccattagct

SEQ ID NO: 5193271 - DNA, 25 bp, Homo sapien
tccaatcggaattcctgctgctctg

SEQ ID NO: 5193272 - DNA, 25 bp, Homo sapien
tgacagcagacccagtaccagatac

SEQ ID NO: 5193273 - DNA, 25 bp, Homo sapien
gacaacaaggagcatggctgctgca

SEQ ID NO: 5193274 - DNA, 25 bp, Homo sapien
gacttttcttgggtatgcctaacaa

SEQ ID NO: 5193275 - DNA, 25 bp, Homo sapien
aagctgtttcacctgcatgtggacc

SEQ ID NO: 5193276 - DNA, 25 bp, Homo sapien
tccaagtgatacacaagaagctgtt

SEQ ID NO: 5193277 - DNA, 25 bp, Homo sapien
ttaagttcagtcttacctcttcagt

SEQ ID NO: 5193278 - DNA, 25 bp, Homo sapien
tggtaagtcttcctaacaaggagga

SEQ ID NO: 5193279 - DNA, 25 bp, Homo sapien
ttacttttaatacgttgagaacatg

SEQ ID NO: 5193280 - DNA, 25 bp, Homo sapien
tttaatacgttgagaacatgttgct

SEQ ID NO: 5193281 - DNA, 25 bp, Homo sapien
agaagagttggtaccgttcctacag

SEQ ID NO: 5193282 - DNA, 25 bp, Homo sapien
gaagagttggtaccgttcctacaga

SEQ ID NO: 5193283 - DNA, 25 bp, Homo sapien
actttttcagatttgtctgttaaca

SEQ ID NO: 5193284 - DNA, 25 bp, Homo sapien
tactttttcagatttgtctgttaac

SEQ ID NO: 5193285 - DNA, 25 bp, Homo sapien
gatctgccctccacctactttttca

SEQ ID NO: 5193286 - DNA, 25 bp, Homo sapien
tgccctccacctactttttcagatt

SEQ ID NO: 5193287 - DNA, 25 bp, Homo sapien
tctgctctataagatagccatggtg

SEQ ID NO: 5193288 - DNA, 25 bp, Homo sapien
tatgcagtggttgttattcccggga

SEQ ID NO: 5193289 - DNA, 25 bp, Homo sapien
tagatcaccccaattgcaacatgtt

SEQ ID NO: 5193290 - DNA, 25 bp, Homo sapien
ttcctgggtatctgagacatgagac

SEQ ID NO: 5193291 - DNA, 25 bp, Homo sapien
ccatttttctaggttgtgtcttcct

SEQ ID NO: 5193292 - DNA, 25 bp, Homo sapien
ccccattgtgagagttgtagtatta

SEQ ID NO: 5193293 - DNA, 25 bp, Homo sapien
gtgagagttgtagtattaactcccc

SEQ ID NO: 5193294 - DNA, 25 bp, Homo sapien
catttttctaggttgtgtcttcctg

SEQ ID NO: 5193295 - DNA, 25 bp, Homo sapien
aactcctgattagtggtgagcagcc

SEQ ID NO: 5193296 - DNA, 25 bp, Homo sapien
ccctggcattacataaagagtcctt

SEQ ID NO: 5193297 - DNA, 25 bp, Homo sapien
catgtgactataaatctaccaagca

SEQ ID NO: 5193298 - DNA, 25 bp, Homo sapien
tcccagaatgcaagaggtgtccctt

SEQ ID NO: 5193299 - DNA, 25 bp, Homo sapien
ggagtcaaggaatatagtctaacag

SEQ ID NO: 5193300 - DNA, 25 bp, Homo sapien
tctccctccaagaaccagtaggcat

SEQ ID NO: 5193301 - DNA, 25 bp, Homo sapien
tactcgaaatcagcatcttgaggca

SEQ ID NO: 5193302 - DNA, 25 bp, Homo sapien
ccagctgatgcaactaggagtcaag

SEQ ID NO: 5193303 - DNA, 25 bp, Homo sapien
cagaaaccagatataaatcctccat

SEQ ID NO: 5193304 - DNA, 25 bp, Homo sapien
gcaggggtctcacagaaaccagata

SEQ ID NO: 5193305 - DNA, 25 bp, Homo sapien
cctgcaggggtctcacagaaaccag

SEQ ID NO: 5193306 - DNA, 25 bp, Homo sapien
acagaaaccagatataaatcctcca

SEQ ID NO: 5193307 - DNA, 25 bp, Homo sapien
taccagcaatgcctcgtattccaca

SEQ ID NO: 5193308 - DNA, 25 bp, Homo sapien
ttgtaccagcaatgcctcgtattcc

SEQ ID NO: 5193309 - DNA, 25 bp, Homo sapien
accagcaatgcctcgtattccacaa

SEQ ID NO: 5193310 - DNA, 25 bp, Homo sapien
gcaatgcctcgtattccacaaccag

SEQ ID NO: 5193311 - DNA, 25 bp, Homo sapien
tagattatgtccagcactgatcagc

SEQ ID NO: 5193312 - DNA, 25 bp, Homo sapien
tatgtccagcactgatcagcgggag

SEQ ID NO: 5193313 - DNA, 25 bp, Homo sapien
tggttgtccaacctgttggggcctg

SEQ ID NO: 5193314 - DNA, 25 bp, Homo sapien
tgtccagcactgatcagcgggagtg

SEQ ID NO: 5193315 - DNA, 25 bp, Homo sapien
ttcccacttgctgttgaggcaggtc

SEQ ID NO: 5193316 - DNA, 25 bp, Homo sapien
tcccacttgctgttgaggcaggtct

SEQ ID NO: 5193317 - DNA, 25 bp, Homo sapien
ccacttgctgttgaggcaggtctgc

SEQ ID NO: 5193318 - DNA, 25 bp, Homo sapien
cacttgctgttgaggcaggtctgca

SEQ ID NO: 5193319 - DNA, 25 bp, Homo sapien
gaccaataaaacgacagctccagga

SEQ ID NO: 5193320 - DNA, 25 bp, Homo sapien
caaagaccaataaaacgacagctcc

SEQ ID NO: 5193321 - DNA, 25 bp, Homo sapien
acagctccaggatgtaatagtagtg

SEQ ID NO: 5193322 - DNA, 25 bp, Homo sapien
ccaggatgtaatagtagtgaaggtc

SEQ ID NO: 5193323 - DNA, 25 bp, Homo sapien
ttttcacaaggaggcctcatagagc

SEQ ID NO: 5193324 - DNA, 25 bp, Homo sapien
caaaggaaaacgtcctggctgacat

SEQ ID NO: 5193325 - DNA, 25 bp, Homo sapien
gaagaaggtatacggagtggcaaaa

SEQ ID NO: 5193326 - DNA, 25 bp, Homo sapien
gacattgcattttatcctccacgta

SEQ ID NO: 5193327 - DNA, 25 bp, Homo sapien
tgccaatgggtgtcttcaaacatcc

SEQ ID NO: 5193328 - DNA, 25 bp, Homo sapien
tagagggttcagttaatagttccaa

SEQ ID NO: 5193329 - DNA, 25 bp, Homo sapien
catccctatcccatcataaggaagc

SEQ ID NO: 5193330 - DNA, 25 bp, Homo sapien
tcatgaacgtcttctgaagttgatt

SEQ ID NO: 5193331 - DNA, 25 bp, Homo sapien
caggtaatagcaccaggtttattca

SEQ ID NO: 5193332 - DNA, 25 bp, Homo sapien
tttcagactgtctaggaaacagaag

SEQ ID NO: 5193333 - DNA, 25 bp, Homo sapien
taagtctgtaatctaactaatatga

SEQ ID NO: 5193334 - DNA, 25 bp, Homo sapien
ggtttattcaatgaactgattttca

SEQ ID NO: 5193335 - DNA, 25 bp, Homo sapien
tttgagtaggcactgaatctggtcc

SEQ ID NO: 5193336 - DNA, 25 bp, Homo sapien
caactgctgaaagtgattagtgcac

SEQ ID NO: 5193337 - DNA, 25 bp, Homo sapien
tatcaatgcagggtggaaaacttcc

SEQ ID NO: 5193338 - DNA, 25 bp, Homo sapien
acttccatccttatatttgcaactg

SEQ ID NO: 5193339 - DNA, 25 bp, Homo sapien
taactggaccacttctctgactact

SEQ ID NO: 5193340 - DNA, 25 bp, Homo sapien
ttggggcttcggcaggtattggctg

SEQ ID NO: 5193341 - DNA, 25 bp, Homo sapien
tctgactactaatgattggggcttc

SEQ ID NO: 5193342 - DNA, 25 bp, Homo sapien
gggcaactgtacaggtttaactgga

SEQ ID NO: 5193343 - DNA, 25 bp, Homo sapien
tgacatatgaaaaggtaatcaagaa

SEQ ID NO: 5193344 - DNA, 25 bp, Homo sapien
caaggtggtgcaggaacataatgcc

SEQ ID NO: 5193345 - DNA, 25 bp, Homo sapien
ggtgcaggaacataatgccaaagtc

SEQ ID NO: 5193346 - DNA, 25 bp, Homo sapien
aaatagatacaaggtggtgcaggaa

SEQ ID NO: 5193347 - DNA, 25 bp, Homo sapien
ggaccagcgttcctactcgggccat

SEQ ID NO: 5193348 - DNA, 25 bp, Homo sapien
aatcatgaagacaaaggaccagcgt

SEQ ID NO: 5193349 - DNA, 25 bp, Homo sapien
gaagacaaaggaccagcgttcctac

SEQ ID NO: 5193350 - DNA, 25 bp, Homo sapien
caaaggaccagcgttcctactcggg

SEQ ID NO: 5193351 - DNA, 25 bp, Homo sapien
ggaaatatacccagtcgtgtggtga

SEQ ID NO: 5193352 - DNA, 25 bp, Homo sapien
aaaccacggcaaacataacaaacag

SEQ ID NO: 5193353 - DNA, 25 bp, Homo sapien
cccagtcgtgtggtgataaaaacca

SEQ ID NO: 5193354 - DNA, 25 bp, Homo sapien
gagaggaaatatacccagtcgtgtg

SEQ ID NO: 5193355 - DNA, 25 bp, Homo sapien
gtagctgaccagtaaaggtacgtat

SEQ ID NO: 5193356 - DNA, 25 bp, Homo sapien
caaatccacagataattcccctact

SEQ ID NO: 5193357 - DNA, 25 bp, Homo sapien
gcttctgtctgaacagtagctgacc

SEQ ID NO: 5193358 - DNA, 25 bp, Homo sapien
tgactctaaccctcctgtagccaag

SEQ ID NO: 5193359 - DNA, 25 bp, Homo sapien
cactgcgactggccggcgacaatgc

SEQ ID NO: 5193360 - DNA, 25 bp, Homo sapien
actggccggcgacaatgcatttttt

SEQ ID NO: 5193361 - DNA, 25 bp, Homo sapien
tgcgactggccggcgacaatgcatt

SEQ ID NO: 5193362 - DNA, 25 bp, Homo sapien
tttttgttgattcaagtcacaaaag

SEQ ID NO: 5193363 - DNA, 25 bp, Homo sapien
ttttttctcttcctccagcaaagcc

SEQ ID NO: 5193364 - DNA, 25 bp, Homo sapien
cttgagcaaacaatctttttatttt

SEQ ID NO: 5193365 - DNA, 25 bp, Homo sapien
ttttctcttcctccagcaaagcctt

SEQ ID NO: 5193366 - DNA, 25 bp, Homo sapien
tccagcaaagccttctctgcaggga

SEQ ID NO: 5193367 - DNA, 25 bp, Homo sapien
aaaggacaggcacatggcagtccaa

SEQ ID NO: 5193368 - DNA, 25 bp, Homo sapien
aaggacaggcacatggcagtccaag

SEQ ID NO: 5193369 - DNA, 25 bp, Homo sapien
caaaggacaggcacatggcagtcca

SEQ ID NO: 5193370 - DNA, 25 bp, Homo sapien
aggacaggcacatggcagtccaagg

SEQ ID NO: 5193371 - DNA, 25 bp, Homo sapien
catcagaggcatggaagaggttctg

SEQ ID NO: 5193372 - DNA, 25 bp, Homo sapien
tgatcctgtggttccgtctccttgg

SEQ ID NO: 5193373 - DNA, 25 bp, Homo sapien
tggcctgctctgatagcaccacaga

SEQ ID NO: 5193374 - DNA, 25 bp, Homo sapien
gaggttctgccaactaaaggacaca

SEQ ID NO: 5193375 - DNA, 25 bp, Homo sapien
tagaagcaataaggagcagcaagtt

SEQ ID NO: 5193376 - DNA, 25 bp, Homo sapien
ttcagatgtagaagcaataaggagc

SEQ ID NO: 5193377 - DNA, 25 bp, Homo sapien
cattactttgtactgccaagaagtt

SEQ ID NO: 5193378 - DNA, 25 bp, Homo sapien
agcaagttgtcattgcatactggga

SEQ ID NO: 5193379 - DNA, 25 bp, Homo sapien
tataccaaggacatgtgccgctcag

SEQ ID NO: 5193380 - DNA, 25 bp, Homo sapien
gaaactttcctgacgataagccacg

SEQ ID NO: 5193381 - DNA, 25 bp, Homo sapien
taagccacgttacgcatgggaagtg

SEQ ID NO: 5193382 - DNA, 25 bp, Homo sapien
ccctaatgggttcaagagaaggcct

SEQ ID NO: 5193383 - DNA, 25 bp, Homo sapien
cattaaccttaattgatcagttgct

SEQ ID NO: 5193384 - DNA, 25 bp, Homo sapien
aacagaattagggtgtcaatcacac

SEQ ID NO: 5193385 - DNA, 25 bp, Homo sapien
aatgactaagatgggtacaatttat

SEQ ID NO: 5193386 - DNA, 25 bp, Homo sapien
caatttataggcctaaatctaccat

SEQ ID NO: 5193387 - DNA, 25 bp, Homo sapien
ggatcacactcatagagccctgaaa

SEQ ID NO: 5193388 - DNA, 25 bp, Homo sapien
tccaaggatcacactcatagagccc

SEQ ID NO: 5193389 - DNA, 25 bp, Homo sapien
gccctgaaacggtctgattatattt

SEQ ID NO: 5193390 - DNA, 25 bp, Homo sapien
actcatagagccctgaaacggtctg

SEQ ID NO: 5193391 - DNA, 25 bp, Homo sapien
tgttggtgacaaaagctcaccagca

SEQ ID NO: 5193392 - DNA, 25 bp, Homo sapien
tcatactctgtactcggaaactgtt

SEQ ID NO: 5193393 - DNA, 25 bp, Homo sapien
ggccaaaatacttcttaagtgctgt

SEQ ID NO: 5193394 - DNA, 25 bp, Homo sapien
cacttcatactctgtactcggaaac

SEQ ID NO: 5193395 - DNA, 25 bp, Homo sapien
caaggaaggccttattacacttact

SEQ ID NO: 5193396 - DNA, 25 bp, Homo sapien
taaaccttgagatactttcatgtgc

SEQ ID NO: 5193397 - DNA, 25 bp, Homo sapien
gcccacttgggtctgataaggtcct

SEQ ID NO: 5193398 - DNA, 25 bp, Homo sapien
gacacagtgctatacagtgctttaa

SEQ ID NO: 5193399 - DNA, 25 bp, Homo sapien
gaagggcaggcatgagtgacatgct

SEQ ID NO: 5193400 - DNA, 25 bp, Homo sapien
ctgtgagggcgaggtagcatgagag

SEQ ID NO: 5193401 - DNA, 25 bp, Homo sapien
ggcgaggtagcatgagagtaaaggg

SEQ ID NO: 5193402 - DNA, 25 bp, Homo sapien
agggctgtccttacacatgcatcag

SEQ ID NO: 5193403 - DNA, 25 bp, Homo sapien
tcatcatagctccagagatacactg

SEQ ID NO: 5193404 - DNA, 25 bp, Homo sapien
tatccagagtccacgttgttaacca

SEQ ID NO: 5193405 - DNA, 25 bp, Homo sapien
gccctcactgagttacttaagtcaa

SEQ ID NO: 5193406 - DNA, 25 bp, Homo sapien
taccacagttcatggcttcagccct

SEQ ID NO: 5193407 - DNA, 25 bp, Homo sapien
ttaggataagttttgaggtaacatg

SEQ ID NO: 5193408 - DNA, 25 bp, Homo sapien
gtaacatggcttttgatcaaagtca

SEQ ID NO: 5193409 - DNA, 25 bp, Homo sapien
gataagttttgaggtaacatggctt

SEQ ID NO: 5193410 - DNA, 25 bp, Homo sapien
tgctatcatcaatatttagctcagt

SEQ ID NO: 5193411 - DNA, 25 bp, Homo sapien
ttatattcctgttcaatccagcaaa

SEQ ID NO: 5193412 - DNA, 25 bp, Homo sapien
tattcctgttcaatccagcaaagct

SEQ ID NO: 5193413 - DNA, 25 bp, Homo sapien
tcctgttcaatccagcaaagctgaa

SEQ ID NO: 5193414 - DNA, 25 bp, Homo sapien
ttcctgttcaatccagcaaagctga

SEQ ID NO: 5193415 - DNA, 25 bp, Homo sapien
catggataaaataccccatttgtat

SEQ ID NO: 5193416 - DNA, 25 bp, Homo sapien
tagatgcattcttctctggtgagtc

SEQ ID NO: 5193417 - DNA, 25 bp, Homo sapien
tttgtatagatgcattcttctctgg

SEQ ID NO: 5193418 - DNA, 25 bp, Homo sapien
ctccatggataaaataccccatttg

SEQ ID NO: 5193419 - DNA, 25 bp, Homo sapien
tactggtgttgatatcaagttccca

SEQ ID NO: 5193420 - DNA, 25 bp, Homo sapien
cacaatactggtgttgatatcaagt

SEQ ID NO: 5193421 - DNA, 25 bp, Homo sapien
ctccacaatactggtgttgatatca

SEQ ID NO: 5193422 - DNA, 25 bp, Homo sapien
aatactggtgttgatatcaagttcc

SEQ ID NO: 5193423 - DNA, 25 bp, Homo sapien
tgtgtaaccatcactgccatacatg

SEQ ID NO: 5193424 - DNA, 25 bp, Homo sapien
aagtgtacggttcactggctttaag

SEQ ID NO: 5193425 - DNA, 25 bp, Homo sapien
tgctcagcacacttttcatctttca

SEQ ID NO: 5193426 - DNA, 25 bp, Homo sapien
tctttcaaaaccaagattcggcacc

SEQ ID NO: 5193427 - DNA, 25 bp, Homo sapien
tagcaatagcagtaggttaaaaacc

SEQ ID NO: 5193428 - DNA, 25 bp, Homo sapien
gaagcagttcaacccttgtactagc

SEQ ID NO: 5193429 - DNA, 25 bp, Homo sapien
gtaaggtccaacgatctcccagctt

SEQ ID NO: 5193430 - DNA, 25 bp, Homo sapien
caggaagggtaaggtccaacgatct

SEQ ID NO: 5193431 - DNA, 25 bp, Homo sapien
gctagactcaatatcacttcgatca

SEQ ID NO: 5193432 - DNA, 25 bp, Homo sapien
tctgagctagactcaatatcacttc

SEQ ID NO: 5193433 - DNA, 25 bp, Homo sapien
ttgtcgcagtgtggggattctttcc

SEQ ID NO: 5193434 - DNA, 25 bp, Homo sapien
tcatctgagctagactcaatatcac

SEQ ID NO: 5193435 - DNA, 25 bp, Homo sapien
taatcatccatggagcaggagccag

SEQ ID NO: 5193436 - DNA, 25 bp, Homo sapien
ttaatcatccatggagcaggagcca

SEQ ID NO: 5193437 - DNA, 25 bp, Homo sapien
taaaatgtggccagtgaaccagtca

SEQ ID NO: 5193438 - DNA, 25 bp, Homo sapien
tgccatcagttagagagaccccaag

SEQ ID NO: 5193439 - DNA, 25 bp, Homo sapien
ttaccttgactagatgcctgtggca

SEQ ID NO: 5193440 - DNA, 25 bp, Homo sapien
taattagccccaaagaactgtgccc

SEQ ID NO: 5193441 - DNA, 25 bp, Homo sapien
tatttattggaggggttccaacagc

SEQ ID NO: 5193442 - DNA, 25 bp, Homo sapien
gttccaacagcctcgtggacaggcc

SEQ ID NO: 5193443 - DNA, 25 bp, Homo sapien
cttttatcaggaactccaggaggct

SEQ ID NO: 5193444 - DNA, 25 bp, Homo sapien
catctcaatagttgctgctccctgg

SEQ ID NO: 5193445 - DNA, 25 bp, Homo sapien
cttctatgacaacaaacggctgtgg

SEQ ID NO: 5193446 - DNA, 25 bp, Homo sapien
gaatgcctagttttgtggagacacc

SEQ ID NO: 5193447 - DNA, 25 bp, Homo sapien
gcatttacagtaaagggcacttaca

SEQ ID NO: 5193448 - DNA, 25 bp, Homo sapien
cacacgagctggttagcatttacag

SEQ ID NO: 5193449 - DNA, 25 bp, Homo sapien
gatgatgtgagcctttattaacctc

SEQ ID NO: 5193450 - DNA, 25 bp, Homo sapien
tgtgatgttttacccacacgagctg

SEQ ID NO: 5193451 - DNA, 25 bp, Homo sapien
acagtctatccaagttaacgtaaca

SEQ ID NO: 5193452 - DNA, 25 bp, Homo sapien
taacgtaacattactttctcaatga

SEQ ID NO: 5193453 - DNA, 25 bp, Homo sapien
caatgatactgggagttgacgaggc

SEQ ID NO: 5193454 - DNA, 25 bp, Homo sapien
gttgacgaggcttgtaacaatctac

SEQ ID NO: 5193455 - DNA, 25 bp, Homo sapien
tctcgaacgattggtgctcaataca

SEQ ID NO: 5193456 - DNA, 25 bp, Homo sapien
taatgtctcgaacgattggtgctca

SEQ ID NO: 5193457 - DNA, 25 bp, Homo sapien
tcctcatactcctcacaaagcctaa

SEQ ID NO: 5193458 - DNA, 25 bp, Homo sapien
caaagcctaacataatgtctcgaac

SEQ ID NO: 5193459 - DNA, 25 bp, Homo sapien
ccccttcaatgcagcagctttgccc

SEQ ID NO: 5193460 - DNA, 25 bp, Homo sapien
tcaatgcagcagctttgcccctgac

SEQ ID NO: 5193461 - DNA, 25 bp, Homo sapien
ccttcaatgcagcagctttgcccct

SEQ ID NO: 5193462 - DNA, 25 bp, Homo sapien
ttcaatgcagcagctttgcccctga

SEQ ID NO: 5193463 - DNA, 25 bp, Homo sapien
agtgccctaccagtgcttgggaagg

SEQ ID NO: 5193464 - DNA, 25 bp, Homo sapien
cccagtgccctaccagtgcttggga

SEQ ID NO: 5193465 - DNA, 25 bp, Homo sapien
ccagtgccctaccagtgcttgggaa

SEQ ID NO: 5193466 - DNA, 25 bp, Homo sapien
atgcccagtgccctaccagtgcttg

SEQ ID NO: 5193467 - DNA, 25 bp, Homo sapien
gtgcagaacagatcaaagcttggac

SEQ ID NO: 5193468 - DNA, 25 bp, Homo sapien
cagatcaaagcttggactaagttct

SEQ ID NO: 5193469 - DNA, 25 bp, Homo sapien
tggctgtaagaccaaggacaaagtt

SEQ ID NO: 5193470 - DNA, 25 bp, Homo sapien
catgggtatttctcaaggttctgct

SEQ ID NO: 5193471 - DNA, 25 bp, Homo sapien
ccaccttgggctacgattctgccag

SEQ ID NO: 5193472 - DNA, 25 bp, Homo sapien
ggctacgattctgccagctgcactg

SEQ ID NO: 5193473 - DNA, 25 bp, Homo sapien
ctcactcccaccttgtgtggattcc

SEQ ID NO: 5193474 - DNA, 25 bp, Homo sapien
tccctcacctagcagagatatctgc

SEQ ID NO: 5193475 - DNA, 25 bp, Homo sapien
aatacaattggctctccatatccct

SEQ ID NO: 5193476 - DNA, 25 bp, Homo sapien
atacaattggctctccatatccctg

SEQ ID NO: 5193477 - DNA, 25 bp, Homo sapien
gtagctaccacagggctagaattag

SEQ ID NO: 5193478 - DNA, 25 bp, Homo sapien
cactggaggttacaacaatcttggg

SEQ ID NO: 5193479 - DNA, 25 bp, Homo sapien
tccaaagaacttgatcactggaggt

SEQ ID NO: 5193480 - DNA, 25 bp, Homo sapien
tacaacaatcttgggtagctaccac

SEQ ID NO: 5193481 - DNA, 25 bp, Homo sapien
caagacggccagtgtgagatagtga

SEQ ID NO: 5193482 - DNA, 25 bp, Homo sapien
gacttctgtaaaccctcagagggca

SEQ ID NO: 5193483 - DNA, 25 bp, Homo sapien
tcatcccgtttgtgtcccgagaaag

SEQ ID NO: 5193484 - DNA, 25 bp, Homo sapien
tcaaagggcctagagtacgtcagtc

SEQ ID NO: 5193485 - DNA, 25 bp, Homo sapien
ccatccctgtcctggcctgccgccc

SEQ ID NO: 5193486 - DNA, 25 bp, Homo sapien
cccatccctgtcctggcctgccgcc

SEQ ID NO: 5193487 - DNA, 25 bp, Homo sapien
tctacctggatatgaaagacccagg

SEQ ID NO: 5193488 - DNA, 25 bp, Homo sapien
ctcttctacctggatatgaaagacc

SEQ ID NO: 5193489 - DNA, 25 bp, Homo sapien
ataaagatgaagtctcttctacctg

SEQ ID NO: 5193490 - DNA, 25 bp, Homo sapien
ggatatgaaagacccaggagaactt

SEQ ID NO: 5193491 - DNA, 25 bp, Homo sapien
cagatgtgacctgtttgcagaaatt

SEQ ID NO: 5193492 - DNA, 25 bp, Homo sapien
acagatgtgacctgtttgcagaaat

SEQ ID NO: 5193493 - DNA, 25 bp, Homo sapien
ccacaaaccccttgagctataaggt

SEQ ID NO: 5193494 - DNA, 25 bp, Homo sapien
catagaggaccctaagactctgcaa

SEQ ID NO: 5193495 - DNA, 25 bp, Homo sapien
gagctataaggtttgaaagccactg

SEQ ID NO: 5193496 - DNA, 25 bp, Homo sapien
gaggctgaaccaggactccctgagc

SEQ ID NO: 5193497 - DNA, 25 bp, Homo sapien
taatatgctaaaaaaggttctggac

SEQ ID NO: 5193498 - DNA, 25 bp, Homo sapien
taatgaaggccaattgataagtcaa

SEQ ID NO: 5193499 - DNA, 25 bp, Homo sapien
gataagtcaaagaccaatgtttgac

SEQ ID NO: 5193500 - DNA, 25 bp, Homo sapien
ctggaccctgccctgtaaatatata

SEQ ID NO: 5193501 - DNA, 25 bp, Homo sapien
tctggaaccccaggagatctctacc

SEQ ID NO: 5193502 - DNA, 25 bp, Homo sapien
tcattgcaggatgtatgctaaggcc

SEQ ID NO: 5193503 - DNA, 25 bp, Homo sapien
ctagctgcagaaaacaaccatttgg

SEQ ID NO: 5193504 - DNA, 25 bp, Homo sapien
ggtgtcagaatttgcccaggcataa

SEQ ID NO: 5193505 - DNA, 25 bp, Homo sapien
gcttgcttgccagtttctgaagtcc

SEQ ID NO: 5193506 - DNA, 25 bp, Homo sapien
tctgaagtcctttggcatagctaat

SEQ ID NO: 5193507 - DNA, 25 bp, Homo sapien
ttttctcgtgttctgtaatgctttg

SEQ ID NO: 5193508 - DNA, 25 bp, Homo sapien
aatgctttgctcagcttgcttgcca

SEQ ID NO: 5193509 - DNA, 25 bp, Homo sapien
tggcactgtcagttcaagggcacgt

SEQ ID NO: 5193510 - DNA, 25 bp, Homo sapien
tcacagcaaccataagagataggct

SEQ ID NO: 5193511 - DNA, 25 bp, Homo sapien
gtggaaatttgagctccagaagcct

SEQ ID NO: 5193512 - DNA, 25 bp, Homo sapien
aaacctgggcagtgtatctatactc

SEQ ID NO: 5193513 - DNA, 25 bp, Homo sapien
cctctgaggcccaggcccaggcact

SEQ ID NO: 5193514 - DNA, 25 bp, Homo sapien
ccctctgaggcccaggcccaggcac

SEQ ID NO: 5193515 - DNA, 25 bp, Homo sapien
ctctgaggcccaggcccaggcactg

SEQ ID NO: 5193516 - DNA, 25 bp, Homo sapien
tccctctgaggcccaggcccaggca

SEQ ID NO: 5193517 - DNA, 25 bp, Homo sapien
tgatgcaggtccgctgtggatttca

SEQ ID NO: 5193518 - DNA, 25 bp, Homo sapien
gatgcaggtccgctgtggatttcat

SEQ ID NO: 5193519 - DNA, 25 bp, Homo sapien
agcataatatcagcgtttacatcta

SEQ ID NO: 5193520 - DNA, 25 bp, Homo sapien
aatatcagcgtttacatctactttc

SEQ ID NO: 5193521 - DNA, 25 bp, Homo sapien
taagcataatatcagcgtttacatc

SEQ ID NO: 5193522 - DNA, 25 bp, Homo sapien
cataatatcagcgtttacatctact

SEQ ID NO: 5193523 - DNA, 25 bp, Homo sapien
gataagtcggttttattgcttccaa

SEQ ID NO: 5193524 - DNA, 25 bp, Homo sapien
ccaattcaattgctttgccaagttt

SEQ ID NO: 5193525 - DNA, 25 bp, Homo sapien
ggacttgataagtcggttttattgc

SEQ ID NO: 5193526 - DNA, 25 bp, Homo sapien
ttgataagtcggttttattgcttcc

SEQ ID NO: 5193527 - DNA, 25 bp, Homo sapien
gacaagatttgctgtcttttcaact

SEQ ID NO: 5193528 - DNA, 25 bp, Homo sapien
gattccagttgctaatgacaagatt

SEQ ID NO: 5193529 - DNA, 25 bp, Homo sapien
cagttgctaatgacaagatttgctg

SEQ ID NO: 5193530 - DNA, 25 bp, Homo sapien
tgctgattccagttgctaatgacaa

SEQ ID NO: 5193531 - DNA, 25 bp, Homo sapien
taatgatgtagagatcactaacacc

SEQ ID NO: 5193532 - DNA, 25 bp, Homo sapien
actaatgatgtagagatcactaaca

SEQ ID NO: 5193533 - DNA, 25 bp, Homo sapien
tgatgtagagatcactaacaccttt

SEQ ID NO: 5193534 - DNA, 25 bp, Homo sapien
aatgatgtagagatcactaacacct

SEQ ID NO: 5193535 - DNA, 25 bp, Homo sapien
tccttctcagtcatagattgcttgg

SEQ ID NO: 5193536 - DNA, 25 bp, Homo sapien
tcatagattgcttggagctttctac

SEQ ID NO: 5193537 - DNA, 25 bp, Homo sapien
catgtttcttggtactaaccattaa

SEQ ID NO: 5193538 - DNA, 25 bp, Homo sapien
ctttctacaagctggaaaagtgctt

SEQ ID NO: 5193539 - DNA, 25 bp, Homo sapien
tcttgtgttcgtagctaagggcagc

SEQ ID NO: 5193540 - DNA, 25 bp, Homo sapien
tagctaagggcagcaagtccatccc

SEQ ID NO: 5193541 - DNA, 25 bp, Homo sapien
tcaacccgttctcttgtgttcgtag

SEQ ID NO: 5193542 - DNA, 25 bp, Homo sapien
agtccatccctctctatggcacatg

SEQ ID NO: 5193543 - DNA, 25 bp, Homo sapien
cagttgattttgtcagtttattgag

SEQ ID NO: 5193544 - DNA, 25 bp, Homo sapien
caacttttcagttgattttgtcagt

SEQ ID NO: 5193545 - DNA, 25 bp, Homo sapien
ttcagttgattttgtcagtttattg

SEQ ID NO: 5193546 - DNA, 25 bp, Homo sapien
ttgattttgtcagtttattgaggag

SEQ ID NO: 5193547 - DNA, 25 bp, Homo sapien
tcagtctggtagaataacccgccat

SEQ ID NO: 5193548 - DNA, 25 bp, Homo sapien
gtgttttcccatttcagtctggtag

SEQ ID NO: 5193549 - DNA, 25 bp, Homo sapien
cccatttcagtctggtagaataacc

SEQ ID NO: 5193550 - DNA, 25 bp, Homo sapien
ctggtagcagttctctagtgtgttt

SEQ ID NO: 5193551 - DNA, 25 bp, Homo sapien
tcaccaggggccgtgcataagctgc

SEQ ID NO: 5193552 - DNA, 25 bp, Homo sapien
taagctgcgtggctgtttctggcag

SEQ ID NO: 5193553 - DNA, 25 bp, Homo sapien
gcagttctgttgtattcccaccatg

SEQ ID NO: 5193554 - DNA, 25 bp, Homo sapien
catatttatgtagagcctggggttg

SEQ ID NO: 5193555 - DNA, 25 bp, Homo sapien
tagcctcttgactatgtcatatcca

SEQ ID NO: 5193556 - DNA, 25 bp, Homo sapien
tatccaaaccatagtggagggagat

SEQ ID NO: 5193557 - DNA, 25 bp, Homo sapien
tgtcttggtatcttaaatcactcac

SEQ ID NO: 5193558 - DNA, 25 bp, Homo sapien
tgacccaaaaggcatataggcagat

SEQ ID NO: 5193559 - DNA, 25 bp, Homo sapien
gaaatatgttggctgtactggttta

SEQ ID NO: 5193560 - DNA, 25 bp, Homo sapien
agagaaatatgttggctgtactggt

SEQ ID NO: 5193561 - DNA, 25 bp, Homo sapien
tgttggctgtactggtttaagttat

SEQ ID NO: 5193562 - DNA, 25 bp, Homo sapien
aatatgttggctgtactggtttaag

SEQ ID NO: 5193563 - DNA, 25 bp, Homo sapien
tgccccttcttaccaggcataccag

SEQ ID NO: 5193564 - DNA, 25 bp, Homo sapien
cttaccaggcataccagaaatggag

SEQ ID NO: 5193565 - DNA, 25 bp, Homo sapien
aacagaataaggttgtcgaagaaag

SEQ ID NO: 5193566 - DNA, 25 bp, Homo sapien
cagaataaggttgtcgaagaaaggt

SEQ ID NO: 5193567 - DNA, 25 bp, Homo sapien
agtttcttccattacagcctggata

SEQ ID NO: 5193568 - DNA, 25 bp, Homo sapien
tccgttaacaggaactcagatttgt

SEQ ID NO: 5193569 - DNA, 25 bp, Homo sapien
aagtaatccgttaacaggaactcag

SEQ ID NO: 5193570 - DNA, 25 bp, Homo sapien
tggcacagtgaatctgcgtgtggca

SEQ ID NO: 5193571 - DNA, 25 bp, Homo sapien
tcagtactggaggaggcgtataaaa

SEQ ID NO: 5193572 - DNA, 25 bp, Homo sapien
acatagctcccataccagtccaagg

SEQ ID NO: 5193573 - DNA, 25 bp, Homo sapien
aagccctccaagttttgcactcaga

SEQ ID NO: 5193574 - DNA, 25 bp, Homo sapien
tacactttggtagaaccctagtcaa

SEQ ID NO: 5193575 - DNA, 25 bp, Homo sapien
caagttagagtcctttaatggccca

SEQ ID NO: 5193576 - DNA, 25 bp, Homo sapien
cagattgttctttgaggatggaccc

SEQ ID NO: 5193577 - DNA, 25 bp, Homo sapien
caacttttaagtcacatggccgagc

SEQ ID NO: 5193578 - DNA, 25 bp, Homo sapien
ttcgaggaggcaagaagacgtaact

SEQ ID NO: 5193579 - DNA, 25 bp, Homo sapien
ccattgcactgttaggatcttcttc

SEQ ID NO: 5193580 - DNA, 25 bp, Homo sapien
tagtaaagactttcgtctctcttta

SEQ ID NO: 5193581 - DNA, 25 bp, Homo sapien
atccattgcactgttaggatcttct

SEQ ID NO: 5193582 - DNA, 25 bp, Homo sapien
aaagactttcgtctctctttatcca

SEQ ID NO: 5193583 - DNA, 25 bp, Homo sapien
caatcctaactctgaatgaaacctc

SEQ ID NO: 5193584 - DNA, 25 bp, Homo sapien
gccattcaaagagatggttacacac

SEQ ID NO: 5193585 - DNA, 25 bp, Homo sapien
cctctgagcatcatatggtcccttt

SEQ ID NO: 5193586 - DNA, 25 bp, Homo sapien
tatatggttctttaaatgagaagac

SEQ ID NO: 5193587 - DNA, 25 bp, Homo sapien
gctacatttctgaaaatagtagtat

SEQ ID NO: 5193588 - DNA, 25 bp, Homo sapien
ctctcatgcacagttggttgaccat

SEQ ID NO: 5193589 - DNA, 25 bp, Homo sapien
gaaacacagttaaaatgctacattt

SEQ ID NO: 5193590 - DNA, 25 bp, Homo sapien
ctacgtacagaatttaatttgaaag

SEQ ID NO: 5193591 - DNA, 25 bp, Homo sapien
caagttactaggtagacatcagagt

SEQ ID NO: 5193592 - DNA, 25 bp, Homo sapien
cattgcaatgagttatcgtggtcca

SEQ ID NO: 5193593 - DNA, 25 bp, Homo sapien
tcagtcgacccattctagcaattgc

SEQ ID NO: 5193594 - DNA, 25 bp, Homo sapien
tgctaacagttacccaacgttggct

SEQ ID NO: 5193595 - DNA, 25 bp, Homo sapien
cctttcacactgtctcagtgggaca

SEQ ID NO: 5193596 - DNA, 25 bp, Homo sapien
gagtcggtcgctctcaaagggagcc

SEQ ID NO: 5193597 - DNA, 25 bp, Homo sapien
aggtagttcttaataaatttgactg

SEQ ID NO: 5193598 - DNA, 25 bp, Homo sapien
gcctagaagtgataccagtgagatt

SEQ ID NO: 5193599 - DNA, 25 bp, Homo sapien
ctcatccattaacgctgctgtgtct

SEQ ID NO: 5193600 - DNA, 25 bp, Homo sapien
tccattaacgctgctgtgtctttct

SEQ ID NO: 5193601 - DNA, 25 bp, Homo sapien
gaggtgctggagtacgttttaagca

SEQ ID NO: 5193602 - DNA, 25 bp, Homo sapien
tacgttttaagcattcgttccaggc

SEQ ID NO: 5193603 - DNA, 25 bp, Homo sapien
ttccctctgcaaccacgtctttcct

SEQ ID NO: 5193604 - DNA, 25 bp, Homo sapien
ccctctgcaaccacgtctttccttt

SEQ ID NO: 5193605 - DNA, 25 bp, Homo sapien
tcctttcccctgttattctccgata

SEQ ID NO: 5193606 - DNA, 25 bp, Homo sapien
cagactgccctattccctctgcaac

SEQ ID NO: 5193607 - DNA, 25 bp, Homo sapien
tgtgcggtcacagaaaatgtcctac

SEQ ID NO: 5193608 - DNA, 25 bp, Homo sapien
aaaactgtagccacgggtcattgca

SEQ ID NO: 5193609 - DNA, 25 bp, Homo sapien
ggtctgcgaagaaggtgagccatca

SEQ ID NO: 5193610 - DNA, 25 bp, Homo sapien
tagaaaccttccgtgggtgacacaa

SEQ ID NO: 5193611 - DNA, 25 bp, Homo sapien
aggagttcgcttccaaaaggtctag

SEQ ID NO: 5193612 - DNA, 25 bp, Homo sapien
gacagtttgtaggagttcgcttcca

SEQ ID NO: 5193613 - DNA, 25 bp, Homo sapien
gatggaattactacaaggatggctg

SEQ ID NO: 5193614 - DNA, 25 bp, Homo sapien
gttctgctaacattgatgacagttt

SEQ ID NO: 5193615 - DNA, 25 bp, Homo sapien
cagatgagactaatacataccacaa

SEQ ID NO: 5193616 - DNA, 25 bp, Homo sapien
ttaggcaccatcttaaacagatgag

SEQ ID NO: 5193617 - DNA, 25 bp, Homo sapien
tttgccctgatgctactttaagcca

SEQ ID NO: 5193618 - DNA, 25 bp, Homo sapien
gaatgtattcggttttgtctagctc

SEQ ID NO: 5193619 - DNA, 25 bp, Homo sapien
cacaattactatactttatagcctg

SEQ ID NO: 5193620 - DNA, 25 bp, Homo sapien
ttacacaattactatactttatagc

SEQ ID NO: 5193621 - DNA, 25 bp, Homo sapien
caattactatactttatagcctgtg

SEQ ID NO: 5193622 - DNA, 25 bp, Homo sapien
cagttttgagttgaagccttaatat

SEQ ID NO: 5193623 - DNA, 25 bp, Homo sapien
gaagaacctggattgctctgcccac

SEQ ID NO: 5193624 - DNA, 25 bp, Homo sapien
ggccgagatattttcacatagctat

SEQ ID NO: 5193625 - DNA, 25 bp, Homo sapien
gttgaagaacctggattgctctgcc

SEQ ID NO: 5193626 - DNA, 25 bp, Homo sapien
cttcattaaaaaaggccgagatatt

SEQ ID NO: 5193627 - DNA, 25 bp, Homo sapien
gaatacaaggccttgcaaagtctgc

SEQ ID NO: 5193628 - DNA, 25 bp, Homo sapien
cttgaaaagaatacaaggccttgca

SEQ ID NO: 5193629 - DNA, 25 bp, Homo sapien
aaggccttgcaaagtctgctgctga

SEQ ID NO: 5193630 - DNA, 25 bp, Homo sapien
tacaaggccttgcaaagtctgctgc

SEQ ID NO: 5193631 - DNA, 25 bp, Homo sapien
ccttttccaaattcaactcatcatc

SEQ ID NO: 5193632 - DNA, 25 bp, Homo sapien
caaattcaactcatcatcttgcctg

SEQ ID NO: 5193633 - DNA, 25 bp, Homo sapien
aaattcaactcatcatcttgcctgg

SEQ ID NO: 5193634 - DNA, 25 bp, Homo sapien
ttccaaattcaactcatcatcttgc

SEQ ID NO: 5193635 - DNA, 25 bp, Homo sapien
gataagagttttaaggaggttctgc

SEQ ID NO: 5193636 - DNA, 25 bp, Homo sapien
tgcctcagcccgattgataagagtt

SEQ ID NO: 5193637 - DNA, 25 bp, Homo sapien
gtgaaaatacagttagacaaatggg

SEQ ID NO: 5193638 - DNA, 25 bp, Homo sapien
tgtgatgtgaacacatgcctcagcc

SEQ ID NO: 5193639 - DNA, 25 bp, Homo sapien
tcctccacataagcggcaggaaaat

SEQ ID NO: 5193640 - DNA, 25 bp, Homo sapien
ttctcgtgtataatcacaatgtcac

SEQ ID NO: 5193641 - DNA, 25 bp, Homo sapien
gcatttgaaggtaactcctccacat

SEQ ID NO: 5193642 - DNA, 25 bp, Homo sapien
attcaaagatccaaaccaccatcct

SEQ ID NO: 5193643 - DNA, 25 bp, Homo sapien
tgttgattaccgagtgtgaaggtag

SEQ ID NO: 5193644 - DNA, 25 bp, Homo sapien
ttattcttatttgaaccacactgta

SEQ ID NO: 5193645 - DNA, 25 bp, Homo sapien
tattcttatttgaaccacactgtat

SEQ ID NO: 5193646 - DNA, 25 bp, Homo sapien
actgtattgttgattaccgagtgtg

SEQ ID NO: 5193647 - DNA, 25 bp, Homo sapien
tgctgtgacatgcaggtagaactcc

SEQ ID NO: 5193648 - DNA, 25 bp, Homo sapien
tggaaactcctctaggaaccaagga

SEQ ID NO: 5193649 - DNA, 25 bp, Homo sapien
gataactctgacttcaggcaagcag

SEQ ID NO: 5193650 - DNA, 25 bp, Homo sapien
gaaaaagacatctaagtcccactgc

SEQ ID NO: 5193651 - DNA, 25 bp, Homo sapien
agatggttgtagatatgtgggatta

SEQ ID NO: 5193652 - DNA, 25 bp, Homo sapien
cagatggttgtagatatgtgggatt

SEQ ID NO: 5193653 - DNA, 25 bp, Homo sapien
tggttgtagatatgtgggattattt

SEQ ID NO: 5193654 - DNA, 25 bp, Homo sapien
gatggttgtagatatgtgggattat

SEQ ID NO: 5193655 - DNA, 25 bp, Homo sapien
acccacaacagtccccgttgtgtga

SEQ ID NO: 5193656 - DNA, 25 bp, Homo sapien
aacccacaacagtccccgttgtgtg

SEQ ID NO: 5193657 - DNA, 25 bp, Homo sapien
ttttcttctctattacatatctctt

SEQ ID NO: 5193658 - DNA, 25 bp, Homo sapien
tcttctctattacatatctcttttt

SEQ ID NO: 5193659 - DNA, 25 bp, Homo sapien
ctaaaaagtgtttgatctacgtaat

SEQ ID NO: 5193660 - DNA, 25 bp, Homo sapien
gcatattcaggttctgtaatttcca

SEQ ID NO: 5193661 - DNA, 25 bp, Homo sapien
ttccataatctctttaatgagccat

SEQ ID NO: 5193662 - DNA, 25 bp, Homo sapien
tgatctacgtaattcataatactca

SEQ ID NO: 5193663 - DNA, 25 bp, Homo sapien
tctaaacatagagcaattggagctg

SEQ ID NO: 5193664 - DNA, 25 bp, Homo sapien
tagagcaattggagctgaagtgctc

SEQ ID NO: 5193665 - DNA, 25 bp, Homo sapien
ttggagctgaagtgctctgattccc

SEQ ID NO: 5193666 - DNA, 25 bp, Homo sapien
ggcaattctaaacatagagcaattg

SEQ ID NO: 5193667 - DNA, 25 bp, Homo sapien
aagctcggtagtccttctgcaaatg

SEQ ID NO: 5193668 - DNA, 25 bp, Homo sapien
aaagatattcctggggtctccaaca

SEQ ID NO: 5193669 - DNA, 25 bp, Homo sapien
aatttagaaaagtgtagtaagctcg

SEQ ID NO: 5193670 - DNA, 25 bp, Homo sapien
ctccaacattggacataaaatttag

SEQ ID NO: 5193671 - DNA, 25 bp, Homo sapien
ccccaatgactgctacccatatcat

SEQ ID NO: 5193672 - DNA, 25 bp, Homo sapien
caatccccaatgactgctacccata

SEQ ID NO: 5193673 - DNA, 25 bp, Homo sapien
aatccccaatgactgctacccatat

SEQ ID NO: 5193674 - DNA, 25 bp, Homo sapien
tccccaatgactgctacccatatca

SEQ ID NO: 5193675 - DNA, 25 bp, Homo sapien
tatgccgaagtcacaaatttaagga

SEQ ID NO: 5193676 - DNA, 25 bp, Homo sapien
gttctacttatgaatctggtgtttc

SEQ ID NO: 5193677 - DNA, 25 bp, Homo sapien
gaatctggtgtttcaagttacctgg

SEQ ID NO: 5193678 - DNA, 25 bp, Homo sapien
ttccaagtaaaacgatatacatctg

SEQ ID NO: 5193679 - DNA, 25 bp, Homo sapien
caccagtaaggtcgatgaccaaata

SEQ ID NO: 5193680 - DNA, 25 bp, Homo sapien
ctgtttcacatgtagtagggaactg

SEQ ID NO: 5193681 - DNA, 25 bp, Homo sapien
aactgttcaaggcatggacttgagt

SEQ ID NO: 5193682 - DNA, 25 bp, Homo sapien
tcttggacccaccagtaaggtcgat

SEQ ID NO: 5193683 - DNA, 25 bp, Homo sapien
agaagacttgtctactcctccctca

SEQ ID NO: 5193684 - DNA, 25 bp, Homo sapien
tcctccctcattcgtgagatactcg

SEQ ID NO: 5193685 - DNA, 25 bp, Homo sapien
gagatactcggaagacctatagtaa

SEQ ID NO: 5193686 - DNA, 25 bp, Homo sapien
taactttgaaagttgcttagcagca

SEQ ID NO: 5193687 - DNA, 25 bp, Homo sapien
ctgcaacaacaaagtgtccgtccat

SEQ ID NO: 5193688 - DNA, 25 bp, Homo sapien
agtgtccgtccatttgaaaagtggt

SEQ ID NO: 5193689 - DNA, 25 bp, Homo sapien
tgtccgtccatttgaaaagtggtta

SEQ ID NO: 5193690 - DNA, 25 bp, Homo sapien
acaacaaagtgtccgtccatttgaa

SEQ ID NO: 5193691 - DNA, 25 bp, Homo sapien
catgacataccagacacaggatgcg

SEQ ID NO: 5193692 - DNA, 25 bp, Homo sapien
gatgcgcccattgcatggccagatg

SEQ ID NO: 5193693 - DNA, 25 bp, Homo sapien
acaggatgcgcccattgcatggcca

SEQ ID NO: 5193694 - DNA, 25 bp, Homo sapien
tgacataccagacacaggatgcgcc

SEQ ID NO: 5193695 - DNA, 25 bp, Homo sapien
gaacttatccatcccacagacagtg

SEQ ID NO: 5193696 - DNA, 25 bp, Homo sapien
gagtgatagagaacttatccatccc

SEQ ID NO: 5193697 - DNA, 25 bp, Homo sapien
acagtgtggctcagggcagcggtta

SEQ ID NO: 5193698 - DNA, 25 bp, Homo sapien
ctgtgcagagtgatagagaacttat

SEQ ID NO: 5193699 - DNA, 25 bp, Homo sapien
taatgtaaaggtaagaagcacacac

SEQ ID NO: 5193700 - DNA, 25 bp, Homo sapien
tatccaatactactctaacaagtgg

SEQ ID NO: 5193701 - DNA, 25 bp, Homo sapien
cattaaggcatacaggtcacagtct

SEQ ID NO: 5193702 - DNA, 25 bp, Homo sapien
tagcagtattgagttctaggaatcc

SEQ ID NO: 5193703 - DNA, 25 bp, Homo sapien
gtgttgctatgaatactctggagat

SEQ ID NO: 5193704 - DNA, 25 bp, Homo sapien
atgtgttgctatgaatactctggag

SEQ ID NO: 5193705 - DNA, 25 bp, Homo sapien
tgtgttgctatgaatactctggaga

SEQ ID NO: 5193706 - DNA, 25 bp, Homo sapien
tgttgctatgaatactctggagatg

SEQ ID NO: 5193707 - DNA, 25 bp, Homo sapien
cactgacaatgactgtgtgcccttg

SEQ ID NO: 5193708 - DNA, 25 bp, Homo sapien
gcccttgagcccctcgaggatcatt

SEQ ID NO: 5193709 - DNA, 25 bp, Homo sapien
tgagcccctcgaggatcattcctct

SEQ ID NO: 5193710 - DNA, 25 bp, Homo sapien
ctgacaatgactgtgtgcccttgag

SEQ ID NO: 5193711 - DNA, 25 bp, Homo sapien
tgcctggagtgtgttcaaaggcctc

SEQ ID NO: 5193712 - DNA, 25 bp, Homo sapien
tggtcttcaggtatgtgcccagact

SEQ ID NO: 5193713 - DNA, 25 bp, Homo sapien
cagactggccgtttggatgcctgga

SEQ ID NO: 5193714 - DNA, 25 bp, Homo sapien
tcttcaggtatgtgcccagactggc

SEQ ID NO: 5193715 - DNA, 25 bp, Homo sapien
tggtgtcaatgtggatccagtcggg

SEQ ID NO: 5193716 - DNA, 25 bp, Homo sapien
accacagcaggtcaatgttgagcac

SEQ ID NO: 5193717 - DNA, 25 bp, Homo sapien
actttttggctatgggcacggacca

SEQ ID NO: 5193718 - DNA, 25 bp, Homo sapien
cagtcggggttagcacaccactttt

SEQ ID NO: 5193719 - DNA, 25 bp, Homo sapien
tcggcagctcaggaggaacatctct

SEQ ID NO: 5193720 - DNA, 25 bp, Homo sapien
taaatgctcttcgtgagtcgggatc

SEQ ID NO: 5193721 - DNA, 25 bp, Homo sapien
caaccggaagctcagtgtgtagtta

SEQ ID NO: 5193722 - DNA, 25 bp, Homo sapien
tctgagttgattgcaaagcccaagc

SEQ ID NO: 5193723 - DNA, 25 bp, Homo sapien
tgcagcctggccttaagaagataaa

SEQ ID NO: 5193724 - DNA, 25 bp, Homo sapien
gctgacatgggtggaacatcctcaa

SEQ ID NO: 5193725 - DNA, 25 bp, Homo sapien
aaagaccagtgcgaaggccaaacta

SEQ ID NO: 5193726 - DNA, 25 bp, Homo sapien
ctgaaggtggcgtgactccaggcaa

SEQ ID NO: 5193727 - DNA, 25 bp, Homo sapien
tccatggaaacggagaacggattta

SEQ ID NO: 5193728 - DNA, 25 bp, Homo sapien
gcctaaggcgtttcaattgcaaaaa

SEQ ID NO: 5193729 - DNA, 25 bp, Homo sapien
taaagagggaaatctactcccatgg

SEQ ID NO: 5193730 - DNA, 25 bp, Homo sapien
ccctctgagggtaatgtgttgccca

SEQ ID NO: 5193731 - DNA, 25 bp, Homo sapien
gaaacagaagagtcttttccatcat

SEQ ID NO: 5193732 - DNA, 25 bp, Homo sapien
ttccatcattattaagggcaggcat

SEQ ID NO: 5193733 - DNA, 25 bp, Homo sapien
ggaaacagaagagtcttttccatca

SEQ ID NO: 5193734 - DNA, 25 bp, Homo sapien
ttggaaacagaagagtcttttccat

SEQ ID NO: 5193735 - DNA, 25 bp, Homo sapien
aacagtatttaatgagctcaattcc

SEQ ID NO: 5193736 - DNA, 25 bp, Homo sapien
taacagtatttaatgagctcaattc

SEQ ID NO: 5193737 - DNA, 25 bp, Homo sapien
gctcatggtattgacatttttctcc

SEQ ID NO: 5193738 - DNA, 25 bp, Homo sapien
gtctagattttctcatcctaaaagc

SEQ ID NO: 5193739 - DNA, 25 bp, Homo sapien
catcctaaaagctcatggtattgac

SEQ ID NO: 5193740 - DNA, 25 bp, Homo sapien
cctgaatatgtagataggtagacat

SEQ ID NO: 5193741 - DNA, 25 bp, Homo sapien
gaaatatcatggtttttgaactgag

SEQ ID NO: 5193742 - DNA, 25 bp, Homo sapien
tttggggaaatatcatggtttttga

SEQ ID NO: 5193743 - DNA, 25 bp, Homo sapien
gggaaatatcatggtttttgaactg

SEQ ID NO: 5193744 - DNA, 25 bp, Homo sapien
atatcatggtttttgaactgaggac

SEQ ID NO: 5193745 - DNA, 25 bp, Homo sapien
gtcctggcagctccttcagaacata

SEQ ID NO: 5193746 - DNA, 25 bp, Homo sapien
cctggcagctccttcagaacatatt

SEQ ID NO: 5193747 - DNA, 25 bp, Homo sapien
tggcagctccttcagaacatattgt

SEQ ID NO: 5193748 - DNA, 25 bp, Homo sapien
ggcagctccttcagaacatattgtt

SEQ ID NO: 5193749 - DNA, 25 bp, Homo sapien
cgttcggcgggaccgcagctgctgc

SEQ ID NO: 5193750 - DNA, 25 bp, Homo sapien
tgcgccaggagtcccgttcggcggg

SEQ ID NO: 5193751 - DNA, 25 bp, Homo sapien
agtcccgttcggcgggaccgcagct

SEQ ID NO: 5193752 - DNA, 25 bp, Homo sapien
ctgcgccaggagtcccgttcggcgg

SEQ ID NO: 5193753 - DNA, 25 bp, Homo sapien
cttggccagcgccagaaacgggctg

SEQ ID NO: 5193754 - DNA, 25 bp, Homo sapien
tcagtttccacttggccagcgccag

SEQ ID NO: 5193755 - DNA, 25 bp, Homo sapien
tgctgccagcgcctacgttcctccc

SEQ ID NO: 5193756 - DNA, 25 bp, Homo sapien
cagaaacgggctgctgtgctgccag

SEQ ID NO: 5193757 - DNA, 25 bp, Homo sapien
gatagtgcccatcttctattagcag

SEQ ID NO: 5193758 - DNA, 25 bp, Homo sapien
gagcacagatgacaatccggtccat

SEQ ID NO: 5193759 - DNA, 25 bp, Homo sapien
tattagcagcaggatgtatgagcac

SEQ ID NO: 5193760 - DNA, 25 bp, Homo sapien
tgatcggctcagttgacgtacaggg

SEQ ID NO: 5193761 - DNA, 25 bp, Homo sapien
aagtagtcagctagattgaggcagg

SEQ ID NO: 5193762 - DNA, 25 bp, Homo sapien
caagaatgaggtgctgggaatctcc

SEQ ID NO: 5193763 - DNA, 25 bp, Homo sapien
aaaaacatggtgctgctagaatgcc

SEQ ID NO: 5193764 - DNA, 25 bp, Homo sapien
ggaatctccaggatgattaggaagg

SEQ ID NO: 5193765 - DNA, 25 bp, Homo sapien
tatattggcgtggttcgtggtgctc

SEQ ID NO: 5193766 - DNA, 25 bp, Homo sapien
tgctctgcatatacagggttgccac

SEQ ID NO: 5193767 - DNA, 25 bp, Homo sapien
tggcaccaatagaattgctctgcat

SEQ ID NO: 5193768 - DNA, 25 bp, Homo sapien
cgtggtgctctaaaacgatggcaat

SEQ ID NO: 5193769 - DNA, 25 bp, Homo sapien
tcacactcgtcagcatccagacgct

SEQ ID NO: 5193770 - DNA, 25 bp, Homo sapien
ttctgtgctctgcttactcttcggt

SEQ ID NO: 5193771 - DNA, 25 bp, Homo sapien
agtcctctcgccagctaaactctca

SEQ ID NO: 5193772 - DNA, 25 bp, Homo sapien
ctgcttactcttcggtacttctctg

SEQ ID NO: 5193773 - DNA, 25 bp, Homo sapien
cacagggctggtctgtgttaggata

SEQ ID NO: 5193774 - DNA, 25 bp, Homo sapien
ggttcaggacattcagggcacacca

SEQ ID NO: 5193775 - DNA, 25 bp, Homo sapien
ctccaggttcaggacattcagggca

SEQ ID NO: 5193776 - DNA, 25 bp, Homo sapien
gagcatcaggtaccatgacacaggg

SEQ ID NO: 5193777 - DNA, 25 bp, Homo sapien
tcagtgatagccagcttttgggaga

SEQ ID NO: 5193778 - DNA, 25 bp, Homo sapien
cagtgatagccagcttttgggagag

SEQ ID NO: 5193779 - DNA, 25 bp, Homo sapien
tagaagtccaatatcccccattaca

SEQ ID NO: 5193780 - DNA, 25 bp, Homo sapien
tgggtgatgagtacactagaagtcc

SEQ ID NO: 5193781 - DNA, 25 bp, Homo sapien
caaacaagcataagtaacctctgaa

SEQ ID NO: 5193782 - DNA, 25 bp, Homo sapien
tacagtgttcagtatatgggtgatg

SEQ ID NO: 5193783 - DNA, 25 bp, Homo sapien
gagagaagataggtgagaatgaaag

SEQ ID NO: 5193784 - DNA, 25 bp, Homo sapien
ggtgctccttctggtatgaccatca

SEQ ID NO: 5193785 - DNA, 25 bp, Homo sapien
gtcctgcgttgaaaagtgaagtgag

SEQ ID NO: 5193786 - DNA, 25 bp, Homo sapien
caacaagaggtcctgcgttgaaaag

SEQ ID NO: 5193787 - DNA, 25 bp, Homo sapien
tggtgatagagcatgcacagtggct

SEQ ID NO: 5193788 - DNA, 25 bp, Homo sapien
tatccagtgtcactcttgtaaggct

SEQ ID NO: 5193789 - DNA, 25 bp, Homo sapien
gtttctctgaacgactataagctgc

SEQ ID NO: 5193790 - DNA, 25 bp, Homo sapien
tctcaagtcattctcagtggaacat

SEQ ID NO: 5193791 - DNA, 25 bp, Homo sapien
caatggtcccacataggcgatcagt

SEQ ID NO: 5193792 - DNA, 25 bp, Homo sapien
tctccttgtccaatggtcccacata

SEQ ID NO: 5193793 - DNA, 25 bp, Homo sapien
cccacataggcgatcagttaatgaa

SEQ ID NO: 5193794 - DNA, 25 bp, Homo sapien
ttgtccaatggtcccacataggcga

SEQ ID NO: 5193795 - DNA, 25 bp, Homo sapien
ccattgtgacacaacgtgatgacta

SEQ ID NO: 5193796 - DNA, 25 bp, Homo sapien
tactacatgtgtgaggaatcctcag

SEQ ID NO: 5193797 - DNA, 25 bp, Homo sapien
gaaggaagagttgtgccaccctggc

SEQ ID NO: 5193798 - DNA, 25 bp, Homo sapien
cagaaactgttggtggacttgctca

SEQ ID NO: 5193799 - DNA, 25 bp, Homo sapien
tgtgcccttggtctaacagtgtagt

SEQ ID NO: 5193800 - DNA, 25 bp, Homo sapien
tgatttgatgcagcgtgtagccaag

SEQ ID NO: 5193801 - DNA, 25 bp, Homo sapien
catcaagtcattgcgaaaggagcca

SEQ ID NO: 5193802 - DNA, 25 bp, Homo sapien
taaagcaggcttattgctgccaccc

SEQ ID NO: 5193803 - DNA, 25 bp, Homo sapien
ttctcttattcaccttcctctgttt

SEQ ID NO: 5193804 - DNA, 25 bp, Homo sapien
tctcttattcaccttcctctgtttc

SEQ ID NO: 5193805 - DNA, 25 bp, Homo sapien
tatttaatttcacttctcttattca

SEQ ID NO: 5193806 - DNA, 25 bp, Homo sapien
taatttcacttctcttattcacctt

SEQ ID NO: 5193807 - DNA, 25 bp, Homo sapien
gcacaatgctttatagtaactgcct

SEQ ID NO: 5193808 - DNA, 25 bp, Homo sapien
aggaaaatattgcaactcgagcgct

SEQ ID NO: 5193809 - DNA, 25 bp, Homo sapien
tttatagtaactgcctgtcagcagc

SEQ ID NO: 5193810 - DNA, 25 bp, Homo sapien
actcgagcgctctccttgatcactt

SEQ ID NO: 5193811 - DNA, 25 bp, Homo sapien
tatcaaactttctctaccatatcac

SEQ ID NO: 5193812 - DNA, 25 bp, Homo sapien
caagaaaggagaactagttttgtct

SEQ ID NO: 5193813 - DNA, 25 bp, Homo sapien
tatcacaaagattcaaaagaaacca

SEQ ID NO: 5193814 - DNA, 25 bp, Homo sapien
aaggagaactagttttgtctttcat

SEQ ID NO: 5193815 - DNA, 25 bp, Homo sapien
gtcttccaatttatcgcacaacaaa

SEQ ID NO: 5193816 - DNA, 25 bp, Homo sapien
aattgcttaatagggcgtaaatctc

SEQ ID NO: 5193817 - DNA, 25 bp, Homo sapien
cagaggttccatcccagtttcacta

SEQ ID NO: 5193818 - DNA, 25 bp, Homo sapien
cgtaaatctcttggctcgaggcagt

SEQ ID NO: 5193819 - DNA, 25 bp, Homo sapien
ttaggtacagctctggactgagggt

SEQ ID NO: 5193820 - DNA, 25 bp, Homo sapien
tgtattgtcctcattaggtacagct

SEQ ID NO: 5193821 - DNA, 25 bp, Homo sapien
tgtcctcattaggtacagctctgga

SEQ ID NO: 5193822 - DNA, 25 bp, Homo sapien
aaaatgtattgtcctcattaggtac

SEQ ID NO: 5193823 - DNA, 25 bp, Homo sapien
tgaggtttatgcctgggtgccaagg

SEQ ID NO: 5193824 - DNA, 25 bp, Homo sapien
ctgcctcaggtctgagtaccatggg

SEQ ID NO: 5193825 - DNA, 25 bp, Homo sapien
tgtatggccagctgcctcaggtctg

SEQ ID NO: 5193826 - DNA, 25 bp, Homo sapien
ggctgtatggccagctgcctcaggt

SEQ ID NO: 5193827 - DNA, 25 bp, Homo sapien
agaatgggcttaaaatctattagaa

SEQ ID NO: 5193828 - DNA, 25 bp, Homo sapien
tgggcttaaaatctattagaaacaa

SEQ ID NO: 5193829 - DNA, 25 bp, Homo sapien
ttaattgttctgtcagactcccaat

SEQ ID NO: 5193830 - DNA, 25 bp, Homo sapien
gaatgggcttaaaatctattagaaa

SEQ ID NO: 5193831 - DNA, 25 bp, Homo sapien
cccctgtgtgtgataggtacactcc

SEQ ID NO: 5193832 - DNA, 25 bp, Homo sapien
tgtgataggtacactcctttcttgt

SEQ ID NO: 5193833 - DNA, 25 bp, Homo sapien
ttgtataatacaagaagatggtgtc

SEQ ID NO: 5193834 - DNA, 25 bp, Homo sapien
ggtacactcctttcttgtataatac

SEQ ID NO: 5193835 - DNA, 25 bp, Homo sapien
ctttacgagtccacagaaaaccaca

SEQ ID NO: 5193836 - DNA, 25 bp, Homo sapien
ttacgagtccacagaaaaccacaga

SEQ ID NO: 5193837 - DNA, 25 bp, Homo sapien
tttacgagtccacagaaaaccacag

SEQ ID NO: 5193838 - DNA, 25 bp, Homo sapien
tacgagtccacagaaaaccacagag

SEQ ID NO: 5193839 - DNA, 25 bp, Homo sapien
tgtacttatcagtgatgtcttcaat

SEQ ID NO: 5193840 - DNA, 25 bp, Homo sapien
tacttatcagtgatgtcttcaatct

SEQ ID NO: 5193841 - DNA, 25 bp, Homo sapien
aaatgtacttatcagtgatgtcttc

SEQ ID NO: 5193842 - DNA, 25 bp, Homo sapien
aatgtacttatcagtgatgtcttca

SEQ ID NO: 5193843 - DNA, 25 bp, Homo sapien
agtcagacaggcagcgattacatga

SEQ ID NO: 5193844 - DNA, 25 bp, Homo sapien
tccagaagcacagtacgaagtctct

SEQ ID NO: 5193845 - DNA, 25 bp, Homo sapien
taaagctgttgatcctgattcagtc

SEQ ID NO: 5193846 - DNA, 25 bp, Homo sapien
tatcaaaagttctggctgccaagtt

SEQ ID NO: 5193847 - DNA, 25 bp, Homo sapien
ctgggcagtcctcttgacattctct

SEQ ID NO: 5193848 - DNA, 25 bp, Homo sapien
cactgggcagtcctcttgacattct

SEQ ID NO: 5193849 - DNA, 25 bp, Homo sapien
actgggcagtcctcttgacattctc

SEQ ID NO: 5193850 - DNA, 25 bp, Homo sapien
cagagaggaaggaaaagaggtgtgg

SEQ ID NO: 5193851 - DNA, 25 bp, Homo sapien
gagaggaaggaaaagaggtgtggta

SEQ ID NO: 5193852 - DNA, 25 bp, Homo sapien
ctagaacagagaggaaggaaaagag

SEQ ID NO: 5193853 - DNA, 25 bp, Homo sapien
aacagagaggaaggaaaagaggtgt

SEQ ID NO: 5193854 - DNA, 25 bp, Homo sapien
tgtcacactgatgagtccaaacagg

SEQ ID NO: 5193855 - DNA, 25 bp, Homo sapien
tgtagtcctctagtgtcagccagtc

SEQ ID NO: 5193856 - DNA, 25 bp, Homo sapien
tccaaacaggttcacttcaataggt

SEQ ID NO: 5193857 - DNA, 25 bp, Homo sapien
gcattattgatcagaccccagagac

SEQ ID NO: 5193858 - DNA, 25 bp, Homo sapien
attgcaaggcgacctccaacactgg

SEQ ID NO: 5193859 - DNA, 25 bp, Homo sapien
gtcattgaaaccttccactgcatat

SEQ ID NO: 5193860 - DNA, 25 bp, Homo sapien
tcccttgagctttcttgaccaaagg

SEQ ID NO: 5193861 - DNA, 25 bp, Homo sapien
tatttggatggagtatagccccctc

SEQ ID NO: 5193862 - DNA, 25 bp, Homo sapien
cgtgcacaccaaaagctttcatgtc

SEQ ID NO: 5193863 - DNA, 25 bp, Homo sapien
gcacaccaaaagctttcatgtcccg

SEQ ID NO: 5193864 - DNA, 25 bp, Homo sapien
tgagacgtgcacaccaaaagctttc

SEQ ID NO: 5193865 - DNA, 25 bp, Homo sapien
gacgtgcacaccaaaagctttcatg

SEQ ID NO: 5193866 - DNA, 25 bp, Homo sapien
tactggatctgccaagtttgttttg

SEQ ID NO: 5193867 - DNA, 25 bp, Homo sapien
gatctgccaagtttgttttgaacaa

SEQ ID NO: 5193868 - DNA, 25 bp, Homo sapien
ctttactggatctgccaagtttgtt

SEQ ID NO: 5193869 - DNA, 25 bp, Homo sapien
tggatctgccaagtttgttttgaac

SEQ ID NO: 5193870 - DNA, 25 bp, Homo sapien
catattgttgtttgatgtctggaga

SEQ ID NO: 5193871 - DNA, 25 bp, Homo sapien
ccatattgttgtttgatgtctggag

SEQ ID NO: 5193872 - DNA, 25 bp, Homo sapien
ctccatattgttgtttgatgtctgg

SEQ ID NO: 5193873 - DNA, 25 bp, Homo sapien
cttctccatattgttgtttgatgtc

SEQ ID NO: 5193874 - DNA, 25 bp, Homo sapien
gacttgaaaactctagtgagaacaa

SEQ ID NO: 5193875 - DNA, 25 bp, Homo sapien
ttcaatttgtggtctactttgggac

SEQ ID NO: 5193876 - DNA, 25 bp, Homo sapien
ctctagtgagaacaaccagtgtaaa

SEQ ID NO: 5193877 - DNA, 25 bp, Homo sapien
gggaccgtgactttggctgatctcc

SEQ ID NO: 5193878 - DNA, 25 bp, Homo sapien
aagagacttgttagagcgtggtcca

SEQ ID NO: 5193879 - DNA, 25 bp, Homo sapien
tgccttgggattagccagctctgct

SEQ ID NO: 5193880 - DNA, 25 bp, Homo sapien
gtccatgcactctaccaccggagag

SEQ ID NO: 5193881 - DNA, 25 bp, Homo sapien
caccggagagaggtccatgttcaca

SEQ ID NO: 5193882 - DNA, 25 bp, Homo sapien
gaaatcggccaatttcatagcctgg

SEQ ID NO: 5193883 - DNA, 25 bp, Homo sapien
gggcaggccacggtaaagatcattt

SEQ ID NO: 5193884 - DNA, 25 bp, Homo sapien
tcaaagaaaacttgagcagggaccc

SEQ ID NO: 5193885 - DNA, 25 bp, Homo sapien
taagcacgatctaaatgagtccagg

SEQ ID NO: 5193886 - DNA, 25 bp, Homo sapien
tcagagtcatcctcagcaaggtaac

SEQ ID NO: 5193887 - DNA, 25 bp, Homo sapien
tgctgcctttagcttatacccgtgt

SEQ ID NO: 5193888 - DNA, 25 bp, Homo sapien
tctatctagtgttttactgctgcct

SEQ ID NO: 5193889 - DNA, 25 bp, Homo sapien
ggtaacagaacatgtctatccactc

SEQ ID NO: 5193890 - DNA, 25 bp, Homo sapien
ctttctttgcaatatgttaagcatg

SEQ ID NO: 5193891 - DNA, 25 bp, Homo sapien
ctttgcaatatgttaagcatgtgtg

SEQ ID NO: 5193892 - DNA, 25 bp, Homo sapien
agactttctttgcaatatgttaagc

SEQ ID NO: 5193893 - DNA, 25 bp, Homo sapien
ttctttgcaatatgttaagcatgtg

SEQ ID NO: 5193894 - DNA, 25 bp, Homo sapien
gaaagaacacaatcaggtaggccca

SEQ ID NO: 5193895 - DNA, 25 bp, Homo sapien
gactgaaatggttagaagcttggca

SEQ ID NO: 5193896 - DNA, 25 bp, Homo sapien
cagagtctaaacatcttggtagccc

SEQ ID NO: 5193897 - DNA, 25 bp, Homo sapien
tagttggatgaaacagggagttacc

SEQ ID NO: 5193898 - DNA, 25 bp, Homo sapien
tgacagcacaactattgggatcagc

SEQ ID NO: 5193899 - DNA, 25 bp, Homo sapien
caactattgggatcagcaagcttga

SEQ ID NO: 5193900 - DNA, 25 bp, Homo sapien
tctggaactgattctcccgcgttgg

SEQ ID NO: 5193901 - DNA, 25 bp, Homo sapien
gactttgactgaactggcacactga

SEQ ID NO: 5193902 - DNA, 25 bp, Homo sapien
ggctgagagcagagccagagctggg

SEQ ID NO: 5193903 - DNA, 25 bp, Homo sapien
tttagttctgtgcctactgggccca

SEQ ID NO: 5193904 - DNA, 25 bp, Homo sapien
ttagttctgtgcctactgggcccag

SEQ ID NO: 5193905 - DNA, 25 bp, Homo sapien
ttctgtgcctactgggcccaggatg

SEQ ID NO: 5193906 - DNA, 25 bp, Homo sapien
gttctgtgcctactgggcccaggat

SEQ ID NO: 5193907 - DNA, 25 bp, Homo sapien
gattctaactagaagagattctctt

SEQ ID NO: 5193908 - DNA, 25 bp, Homo sapien
ttagacatgtcctgcctgtaagcag

SEQ ID NO: 5193909 - DNA, 25 bp, Homo sapien
agttatagagtttctggagagattc

SEQ ID NO: 5193910 - DNA, 25 bp, Homo sapien
ccctaagataacagaagttatagag

SEQ ID NO: 5193911 - DNA, 25 bp, Homo sapien
cctccacattgatgggactgtgatg

SEQ ID NO: 5193912 - DNA, 25 bp, Homo sapien
tgcaaagactcacaaaactcttggt

SEQ ID NO: 5193913 - DNA, 25 bp, Homo sapien
tgcagagttgaggaagaatgttagc

SEQ ID NO: 5193914 - DNA, 25 bp, Homo sapien
ggattaatagtgtgcagaagagcca

SEQ ID NO: 5193915 - DNA, 25 bp, Homo sapien
tagtgttcccaggactggccctagc

SEQ ID NO: 5193916 - DNA, 25 bp, Homo sapien
gaaacatagtatgtgtgggacccca

SEQ ID NO: 5193917 - DNA, 25 bp, Homo sapien
cagaacagttgatctaaggccttta

SEQ ID NO: 5193918 - DNA, 25 bp, Homo sapien
tagccacaaggaccagcatagtttg

SEQ ID NO: 5193919 - DNA, 25 bp, Homo sapien
actatgtatagtaacatccttctgg

SEQ ID NO: 5193920 - DNA, 25 bp, Homo sapien
tgtagccatgggtaggactccccac

SEQ ID NO: 5193921 - DNA, 25 bp, Homo sapien
gtgttggcgacctgaagggccttgc

SEQ ID NO: 5193922 - DNA, 25 bp, Homo sapien
ccttgcaactttgccactatgtata

SEQ ID NO: 5193923 - DNA, 25 bp, Homo sapien
gggtgtcatgcccttagttctctat

SEQ ID NO: 5193924 - DNA, 25 bp, Homo sapien
tatctttcccgcaatagaggaagcc

SEQ ID NO: 5193925 - DNA, 25 bp, Homo sapien
ttctacaactttacagggctgaggg

SEQ ID NO: 5193926 - DNA, 25 bp, Homo sapien
cctgctgtgtaactgaactctctta

SEQ ID NO: 5193927 - DNA, 25 bp, Homo sapien
aatcttacaaagtggggtccttctg

SEQ ID NO: 5193928 - DNA, 25 bp, Homo sapien
agttaccatctctgtccatcttgta

SEQ ID NO: 5193929 - DNA, 25 bp, Homo sapien
tgatatggctcttggtctaccactc

SEQ ID NO: 5193930 - DNA, 25 bp, Homo sapien
ttggaggcccagttaccatctctgt

SEQ ID NO: 5193931 - DNA, 25 bp, Homo sapien
cagctgccagattccaaacgagacc

SEQ ID NO: 5193932 - DNA, 25 bp, Homo sapien
tgaggattttgagacgcagcaccac

SEQ ID NO: 5193933 - DNA, 25 bp, Homo sapien
aaaaccaaaggatgcgctgaattca

SEQ ID NO: 5193934 - DNA, 25 bp, Homo sapien
ccaggatctgctgcgcacactgagt

SEQ ID NO: 5193935 - DNA, 25 bp, Homo sapien
tccttggctgctgaatggtcagtct

SEQ ID NO: 5193936 - DNA, 25 bp, Homo sapien
gacggtgccactggattgcttaaga

SEQ ID NO: 5193937 - DNA, 25 bp, Homo sapien
caatactgacatgtcgaagtcgctc

SEQ ID NO: 5193938 - DNA, 25 bp, Homo sapien
gaagtcgctcctcttggtgaggtga

SEQ ID NO: 5193939 - DNA, 25 bp, Homo sapien
ggaaccatggcaggaatatacactt

SEQ ID NO: 5193940 - DNA, 25 bp, Homo sapien
gcaaatagcatacctgactctctgt

SEQ ID NO: 5193941 - DNA, 25 bp, Homo sapien
tagtgggtatagtctgcacaacagg

SEQ ID NO: 5193942 - DNA, 25 bp, Homo sapien
cagctctcctcttaaatagtgggta

SEQ ID NO: 5193943 - DNA, 25 bp, Homo sapien
tcctgatctcctgaattgcttgaga

SEQ ID NO: 5193944 - DNA, 25 bp, Homo sapien
tgtccttcaggatggagtctgtctc

SEQ ID NO: 5193945 - DNA, 25 bp, Homo sapien
tcatgcagccgtgaatccatgtgcc

SEQ ID NO: 5193946 - DNA, 25 bp, Homo sapien
tgcttgagaggtatagtatgctcct

SEQ ID NO: 5193947 - DNA, 25 bp, Homo sapien
tacaagttccagattactcagtggc

SEQ ID NO: 5193948 - DNA, 25 bp, Homo sapien
agtggctgtttgttcgtaatccagt

SEQ ID NO: 5193949 - DNA, 25 bp, Homo sapien
gactggattgatctgtaaccttgag

SEQ ID NO: 5193950 - DNA, 25 bp, Homo sapien
tctctcgtgtctcttatgaattcta

SEQ ID NO: 5193951 - DNA, 25 bp, Homo sapien
ttaatttaattcttagcacagtatc

SEQ ID NO: 5193952 - DNA, 25 bp, Homo sapien
tctatgaagtcagatttcaataaat

SEQ ID NO: 5193953 - DNA, 25 bp, Homo sapien
agcacagtatctatgaagtcagatt

SEQ ID NO: 5193954 - DNA, 25 bp, Homo sapien
cttagcacagtatctatgaagtcag

SEQ ID NO: 5193955 - DNA, 25 bp, Homo sapien
agatcctaagatccctcttagctgt

SEQ ID NO: 5193956 - DNA, 25 bp, Homo sapien
catacaaggatgttataaatatccc

SEQ ID NO: 5193957 - DNA, 25 bp, Homo sapien
caattactctgctcccttttacaac

SEQ ID NO: 5193958 - DNA, 25 bp, Homo sapien
caacagagtttcctagcattaacgt

SEQ ID NO: 5193959 - DNA, 25 bp, Homo sapien
tttagcattctcacaattgagatag

SEQ ID NO: 5193960 - DNA, 25 bp, Homo sapien
acaattgagataggattcagagccc

SEQ ID NO: 5193961 - DNA, 25 bp, Homo sapien
tttttagcattctcacaattgagat

SEQ ID NO: 5193962 - DNA, 25 bp, Homo sapien
caattgagataggattcagagccct

SEQ ID NO: 5193963 - DNA, 25 bp, Homo sapien
aagaagcaggcgactctccaaagga

SEQ ID NO: 5193964 - DNA, 25 bp, Homo sapien
gccagaaagaagaagcaggcgactc

SEQ ID NO: 5193965 - DNA, 25 bp, Homo sapien
agaagcaggcgactctccaaaggac

SEQ ID NO: 5193966 - DNA, 25 bp, Homo sapien
aaagaagaagcaggcgactctccaa

SEQ ID NO: 5193967 - DNA, 25 bp, Homo sapien
gcgagccttgcccttgctattctct

SEQ ID NO: 5193968 - DNA, 25 bp, Homo sapien
cgagccttgcccttgctattctctc

SEQ ID NO: 5193969 - DNA, 25 bp, Homo sapien
gaaactccagctgagggaacagtgg

SEQ ID NO: 5193970 - DNA, 25 bp, Homo sapien
gactttctgctctttagaatttaaa

SEQ ID NO: 5193971 - DNA, 25 bp, Homo sapien
tttatatctttaactgctgaaactc

SEQ ID NO: 5193972 - DNA, 25 bp, Homo sapien
tattgactttctgctctttagaatt

SEQ ID NO: 5193973 - DNA, 25 bp, Homo sapien
ccaatatggtgctgtgactagggta

SEQ ID NO: 5193974 - DNA, 25 bp, Homo sapien
gactagggtaggagctaacatacat

SEQ ID NO: 5193975 - DNA, 25 bp, Homo sapien
tagcagagttcctagtacagttctg

SEQ ID NO: 5193976 - DNA, 25 bp, Homo sapien
gcaagcaaattgtttctagtcactg

SEQ ID NO: 5193977 - DNA, 25 bp, Homo sapien
cccagatgggatggctgccgggaag

SEQ ID NO: 5193978 - DNA, 25 bp, Homo sapien
ctagatgggatggcggccgggcaga

SEQ ID NO: 5193979 - DNA, 25 bp, Homo sapien
ttcccagatgggatggctgccggga

SEQ ID NO: 5193980 - DNA, 25 bp, Homo sapien
acggggtcgccgccgggcagaggca

SEQ ID NO: 5193981 - DNA, 25 bp, Homo sapien
gaaactctggccatgtcatggggat

SEQ ID NO: 5193982 - DNA, 25 bp, Homo sapien
tcaaaccttcccgtgaataagttca

SEQ ID NO: 5193983 - DNA, 25 bp, Homo sapien
gaataagttcacctgggagcagatt

SEQ ID NO: 5193984 - DNA, 25 bp, Homo sapien
tcagggtcgtgagccatggaaactc

SEQ ID NO: 5193985 - DNA, 25 bp, Homo sapien
gaaagtgcaaacacccgtagaaggc

SEQ ID NO: 5193986 - DNA, 25 bp, Homo sapien
tgcaaacacccgtagaaggctttaa

SEQ ID NO: 5193987 - DNA, 25 bp, Homo sapien
aaagtgcaaacacccgtagaaggct

SEQ ID NO: 5193988 - DNA, 25 bp, Homo sapien
agtgcaaacacccgtagaaggcttt

SEQ ID NO: 5193989 - DNA, 25 bp, Homo sapien
gcttggaatggaagtattgaaaaac

SEQ ID NO: 5193990 - DNA, 25 bp, Homo sapien
taatcttttctcacctgaatctgaa

SEQ ID NO: 5193991 - DNA, 25 bp, Homo sapien
aataactgttgcaggtcttctaatc

SEQ ID NO: 5193992 - DNA, 25 bp, Homo sapien
cagaccctcctaagaacgttggatt

SEQ ID NO: 5193993 - DNA, 25 bp, Homo sapien
gcttctagagaagctgtctgttcca

SEQ ID NO: 5193994 - DNA, 25 bp, Homo sapien
gctgccagggcaaatggggctacgt

SEQ ID NO: 5193995 - DNA, 25 bp, Homo sapien
tatgattctgatatggctgccaggg

SEQ ID NO: 5193996 - DNA, 25 bp, Homo sapien
cagggcaaatggggctacgtgtttc

SEQ ID NO: 5193997 - DNA, 25 bp, Homo sapien
gtctggcttcccatatgattctgat

SEQ ID NO: 5193998 - DNA, 25 bp, Homo sapien
agtaagagcatgtgtacttttgaag

SEQ ID NO: 5193999 - DNA, 25 bp, Homo sapien
tgtacttttgaaggtgttgaggaaa

SEQ ID NO: 5194000 - DNA, 25 bp, Homo sapien
catgtgtacttttgaaggtgttgag

SEQ ID NO: 5194001 - DNA, 25 bp, Homo sapien
aagagcatgtgtacttttgaaggtg

SEQ ID NO: 5194002 - DNA, 25 bp, Homo sapien
agcagtggcgtgcacgctgctcctg

SEQ ID NO: 5194003 - DNA, 25 bp, Homo sapien
gcagcagtggcgtgcacgctgctcc

SEQ ID NO: 5194004 - DNA, 25 bp, Homo sapien
ccgtcgcggagatggatcgcgggcc

SEQ ID NO: 5194005 - DNA, 25 bp, Homo sapien
cgaggccggggaccgtcgcggagat

SEQ ID NO: 5194006 - DNA, 25 bp, Homo sapien
tataccattattaggcagacccatg

SEQ ID NO: 5194007 - DNA, 25 bp, Homo sapien
tggctttggctttcagactgttgtg

SEQ ID NO: 5194008 - DNA, 25 bp, Homo sapien
ggttgtgacaccaaaactgcgtcag

SEQ ID NO: 5194009 - DNA, 25 bp, Homo sapien
cactggtctccctttggttaacaag

SEQ ID NO: 5194010 - DNA, 25 bp, Homo sapien
tttttcactggatttatatgtgtgg

SEQ ID NO: 5194011 - DNA, 25 bp, Homo sapien
ttcaggttcgtcctttttcactgga

SEQ ID NO: 5194012 - DNA, 25 bp, Homo sapien
gcaacttcaggttcgtcctttttca

SEQ ID NO: 5194013 - DNA, 25 bp, Homo sapien
acactggcaacttcaggttcgtcct

SEQ ID NO: 5194014 - DNA, 25 bp, Homo sapien
ttcctgctgtggctttcggtgagag

SEQ ID NO: 5194015 - DNA, 25 bp, Homo sapien
aactcttcctcggttgactttccag

SEQ ID NO: 5194016 - DNA, 25 bp, Homo sapien
gagccctggcttgcgtttccacaga

SEQ ID NO: 5194017 - DNA, 25 bp, Homo sapien
ggaaataccgccaagcctttcagca

SEQ ID NO: 5194018 - DNA, 25 bp, Homo sapien
tgcggggggtgtccggggccagaca

SEQ ID NO: 5194019 - DNA, 25 bp, Homo sapien
cctgagcccggcagtcggatgcggg

SEQ ID NO: 5194020 - DNA, 25 bp, Homo sapien
gtccggggccagacacgagactgac

SEQ ID NO: 5194021 - DNA, 25 bp, Homo sapien
ttccctgagcccggcagtcggatgc

SEQ ID NO: 5194022 - DNA, 25 bp, Homo sapien
cattgctaccttagagcatgtttct

SEQ ID NO: 5194023 - DNA, 25 bp, Homo sapien
tggttccccggactctcacaatcct

SEQ ID NO: 5194024 - DNA, 25 bp, Homo sapien
gaaacgagctcttgtttttataaca

SEQ ID NO: 5194025 - DNA, 25 bp, Homo sapien
acaatgccgttatgatagactttgg

SEQ ID NO: 5194026 - DNA, 25 bp, Homo sapien
gccgtgcaggcctagctgcgtctct

SEQ ID NO: 5194027 - DNA, 25 bp, Homo sapien
acagccgtgcaggcctagctgcgtc

SEQ ID NO: 5194028 - DNA, 25 bp, Homo sapien
tctggctccaaggcaacgggccgcc

SEQ ID NO: 5194029 - DNA, 25 bp, Homo sapien
ctggctccaaggcaacgggccgcct

SEQ ID NO: 5194030 - DNA, 25 bp, Homo sapien
ggtcgaaacggacatcccgatcctc

SEQ ID NO: 5194031 - DNA, 25 bp, Homo sapien
gacaggtcgaaacggacatcccgat

SEQ ID NO: 5194032 - DNA, 25 bp, Homo sapien
tgcgcggacaggtcgaaacggacat

SEQ ID NO: 5194033 - DNA, 25 bp, Homo sapien
cccaaagcgcatccagcaccgacat

SEQ ID NO: 5194034 - DNA, 25 bp, Homo sapien
cagtggcccaaccagcctgaggtct

SEQ ID NO: 5194035 - DNA, 25 bp, Homo sapien
cgagagggccacagtggcccaacca

SEQ ID NO: 5194036 - DNA, 25 bp, Homo sapien
ctcgagagggccacagtggcccaac

SEQ ID NO: 5194037 - DNA, 25 bp, Homo sapien
gccacagtggcccaaccagcctgag

SEQ ID NO: 5194038 - DNA, 25 bp, Homo sapien
ccggaggtcgcatgggaccaaaact

SEQ ID NO: 5194039 - DNA, 25 bp, Homo sapien
tgggtgtatacgggacgctaagccc

SEQ ID NO: 5194040 - DNA, 25 bp, Homo sapien
tgtaatgccgatgcgctcttgccgc

SEQ ID NO: 5194041 - DNA, 25 bp, Homo sapien
gccccggtcgtgctcaggttcacat

SEQ ID NO: 5194042 - DNA, 25 bp, Homo sapien
caataaggacttctccaggtcttgt

SEQ ID NO: 5194043 - DNA, 25 bp, Homo sapien
tggaatctaaacaatcaataaggac

SEQ ID NO: 5194044 - DNA, 25 bp, Homo sapien
aatcaataaggacttctccaggtct

SEQ ID NO: 5194045 - DNA, 25 bp, Homo sapien
ggaatctaaacaatcaataaggact

SEQ ID NO: 5194046 - DNA, 25 bp, Homo sapien
caataaagacatcgccaggtcttgt

SEQ ID NO: 5194047 - DNA, 25 bp, Homo sapien
ataaagacatcgccaggtcttgttt

SEQ ID NO: 5194048 - DNA, 25 bp, Homo sapien
atcaataaagacatcgccaggtctt

SEQ ID NO: 5194049 - DNA, 25 bp, Homo sapien
aaagacatcgccaggtcttgttttc

SEQ ID NO: 5194050 - DNA, 25 bp, Homo sapien
ttatttcctctggtgtcttcaaccg

SEQ ID NO: 5194051 - DNA, 25 bp, Homo sapien
tatctccattatttcctctggtgtc

SEQ ID NO: 5194052 - DNA, 25 bp, Homo sapien
tttcctctggtgtcttcaaccgaat

SEQ ID NO: 5194053 - DNA, 25 bp, Homo sapien
ctctatctccattatttcctctggt

SEQ ID NO: 5194054 - DNA, 25 bp, Homo sapien
tcttgataatgccaaagagtgccag

SEQ ID NO: 5194055 - DNA, 25 bp, Homo sapien
tgataatgccaaagagtgccagaga

SEQ ID NO: 5194056 - DNA, 25 bp, Homo sapien
ttgataatgccaaagagtgccagag

SEQ ID NO: 5194057 - DNA, 25 bp, Homo sapien
cttgataatgccaaagagtgccaga

SEQ ID NO: 5194058 - DNA, 25 bp, Homo sapien
ttcaatatgcaattgtaaccgacag

SEQ ID NO: 5194059 - DNA, 25 bp, Homo sapien
gagttagcagtccttgttgtaatat

SEQ ID NO: 5194060 - DNA, 25 bp, Homo sapien
taatattcaatatgcaattgtaacc

SEQ ID NO: 5194061 - DNA, 25 bp, Homo sapien
agagttagcagtccttgttgtaata

SEQ ID NO: 5194062 - DNA, 25 bp, Homo sapien
caaaacgagtactgttacattttgt

SEQ ID NO: 5194063 - DNA, 25 bp, Homo sapien
aaattcaaaacgagtactgttacat

SEQ ID NO: 5194064 - DNA, 25 bp, Homo sapien
tcaaaacgagtactgttacattttg

SEQ ID NO: 5194065 - DNA, 25 bp, Homo sapien
atataaattcaaaacgagtactgtt

SEQ ID NO: 5194066 - DNA, 25 bp, Homo sapien
tgctcatgtctacctctatacagaa

SEQ ID NO: 5194067 - DNA, 25 bp, Homo sapien
tatacagaaaactagaatgaatctg

SEQ ID NO: 5194068 - DNA, 25 bp, Homo sapien
atctgtactgattccaaaagggacc

SEQ ID NO: 5194069 - DNA, 25 bp, Homo sapien
gctcatgtctacctctatacagaaa

SEQ ID NO: 5194070 - DNA, 25 bp, Homo sapien
gatcactggataaattccaaactcc

SEQ ID NO: 5194071 - DNA, 25 bp, Homo sapien
tctgaattagtgcacttcttaattt

SEQ ID NO: 5194072 - DNA, 25 bp, Homo sapien
taaaatcacgatacattttagaagt

SEQ ID NO: 5194073 - DNA, 25 bp, Homo sapien
caacagtcttagttgcttgttctga

SEQ ID NO: 5194074 - DNA, 25 bp, Homo sapien
cattcatatttgcatgccacacaat

SEQ ID NO: 5194075 - DNA, 25 bp, Homo sapien
cacaattctcacattggtaataaaa

SEQ ID NO: 5194076 - DNA, 25 bp, Homo sapien
tttgcatgccacacaattctcacat

SEQ ID NO: 5194077 - DNA, 25 bp, Homo sapien
aatttgcagatatggtatactgaca

SEQ ID NO: 5194078 - DNA, 25 bp, Homo sapien
gcagaaaatgacaagagagccaaga

SEQ ID NO: 5194079 - DNA, 25 bp, Homo sapien
cactaaacctgtggtatgaatccag

SEQ ID NO: 5194080 - DNA, 25 bp, Homo sapien
tacctgcctcatgaaaaagttacag

SEQ ID NO: 5194081 - DNA, 25 bp, Homo sapien
cagtgtgctaaatctatgccaagga

SEQ ID NO: 5194082 - DNA, 25 bp, Homo sapien
ctgctgagagctttctatgacaaga

SEQ ID NO: 5194083 - DNA, 25 bp, Homo sapien
ctatgacaagagctaaaccaaattt

SEQ ID NO: 5194084 - DNA, 25 bp, Homo sapien
gacaagagctaaaccaaattttgaa

SEQ ID NO: 5194085 - DNA, 25 bp, Homo sapien
aaccaaattttgaatctctaatctt

SEQ ID NO: 5194086 - DNA, 25 bp, Homo sapien
tctgtgtgtgagaatataagacctc

SEQ ID NO: 5194087 - DNA, 25 bp, Homo sapien
tactagttgtgagatcatggtcaag

SEQ ID NO: 5194088 - DNA, 25 bp, Homo sapien
aaagccctcggcacaatgacttgat

SEQ ID NO: 5194089 - DNA, 25 bp, Homo sapien
caaagacagtcttggtaaatcagtc

SEQ ID NO: 5194090 - DNA, 25 bp, Homo sapien
gcaacatgtggacaaccctgtttca

SEQ ID NO: 5194091 - DNA, 25 bp, Homo sapien
ggaacagactacacgaaaagaagaa

SEQ ID NO: 5194092 - DNA, 25 bp, Homo sapien
tacactgtagactgtgaaggccaag

SEQ ID NO: 5194093 - DNA, 25 bp, Homo sapien
tgtttcatctgtaacctcgccctca

SEQ ID NO: 5194094 - DNA, 25 bp, Homo sapien
gcagaatagactttgtgaagtgaat

SEQ ID NO: 5194095 - DNA, 25 bp, Homo sapien
tatgggactggcagaatagactttg

SEQ ID NO: 5194096 - DNA, 25 bp, Homo sapien
tgatttccttaactgattcttgtag

SEQ ID NO: 5194097 - DNA, 25 bp, Homo sapien
gaagtgaattgatttccttaactga

SEQ ID NO: 5194098 - DNA, 25 bp, Homo sapien
tggtgcacagtggtatctacatctg

SEQ ID NO: 5194099 - DNA, 25 bp, Homo sapien
ggagctatgcccacttgagcagaat

SEQ ID NO: 5194100 - DNA, 25 bp, Homo sapien
catggaaatttactcaggtggctgc

SEQ ID NO: 5194101 - DNA, 25 bp, Homo sapien
cagaagacggtattcatgaggacta

SEQ ID NO: 5194102 - DNA, 25 bp, Homo sapien
tgtgaccatcagagtctatttctac

SEQ ID NO: 5194103 - DNA, 25 bp, Homo sapien
aaaagcatccgtgtgaccatcagag

SEQ ID NO: 5194104 - DNA, 25 bp, Homo sapien
gttcgactgtcagagcttcgagcgg

SEQ ID NO: 5194105 - DNA, 25 bp, Homo sapien
tcttgaatttgttcgactgtcagag

SEQ ID NO: 5194106 - DNA, 25 bp, Homo sapien
tattttattaaacaagactgagata

SEQ ID NO: 5194107 - DNA, 25 bp, Homo sapien
taagaaatttaatgctgtcctttgt

SEQ ID NO: 5194108 - DNA, 25 bp, Homo sapien
tttaatgctgtcctttgtgatgctc

SEQ ID NO: 5194109 - DNA, 25 bp, Homo sapien
agactgagataaaatccttaagaaa

SEQ ID NO: 5194110 - DNA, 25 bp, Homo sapien
gtccctgtagggtgaatccatcctt

SEQ ID NO: 5194111 - DNA, 25 bp, Homo sapien
tctgaaaatacaggttcacgatctt

SEQ ID NO: 5194112 - DNA, 25 bp, Homo sapien
aatttctctattgcaagccccagtt

SEQ ID NO: 5194113 - DNA, 25 bp, Homo sapien
tcccaaagtccctgtagggtgaatc

SEQ ID NO: 5194114 - DNA, 25 bp, Homo sapien
taatagaaatccatctcaactcaag

SEQ ID NO: 5194115 - DNA, 25 bp, Homo sapien
tctttaatagaaatccatctcaact

SEQ ID NO: 5194116 - DNA, 25 bp, Homo sapien
gaaatccatctcaactcaaggtcaa

SEQ ID NO: 5194117 - DNA, 25 bp, Homo sapien
tagaaatccatctcaactcaaggtc

SEQ ID NO: 5194118 - DNA, 25 bp, Homo sapien
cgcgctggccgaaaactgaagtttt

SEQ ID NO: 5194119 - DNA, 25 bp, Homo sapien
tataaaaactattccatgacttatg

SEQ ID NO: 5194120 - DNA, 25 bp, Homo sapien
aaactattccatgacttatggcagg

SEQ ID NO: 5194121 - DNA, 25 bp, Homo sapien
cctcgacgcgctggccgaaaactga

SEQ ID NO: 5194122 - DNA, 25 bp, Homo sapien
tagatcaccagtcctctttggacct

SEQ ID NO: 5194123 - DNA, 25 bp, Homo sapien
gaggaatccagctaccctcagccat

SEQ ID NO: 5194124 - DNA, 25 bp, Homo sapien
cattggctgggcgaatttgcagccg

SEQ ID NO: 5194125 - DNA, 25 bp, Homo sapien
tgggccgcaacgtccccattggctg

SEQ ID NO: 5194126 - DNA, 25 bp, Homo sapien
tccagcttcggccattttgggaaga

SEQ ID NO: 5194127 - DNA, 25 bp, Homo sapien
ccagcttcggccattttgggaagaa

SEQ ID NO: 5194128 - DNA, 25 bp, Homo sapien
gtggctggcggggcagaggggctcc

SEQ ID NO: 5194129 - DNA, 25 bp, Homo sapien
ccggacggggtggctggcggggcag

SEQ ID NO: 5194130 - DNA, 25 bp, Homo sapien
ggtggctggcggggcagaggggctc

SEQ ID NO: 5194131 - DNA, 25 bp, Homo sapien
acggggtggctggcggggcagaggg

SEQ ID NO: 5194132 - DNA, 25 bp, Homo sapien
acagtcacttaatgtctgaaaacta

SEQ ID NO: 5194133 - DNA, 25 bp, Homo sapien
actaggtacattttgattacaattt

SEQ ID NO: 5194134 - DNA, 25 bp, Homo sapien
tattaaaccgaacatgatacagtca

SEQ ID NO: 5194135 - DNA, 25 bp, Homo sapien
ttctttattaaaccgaacatgatac

SEQ ID NO: 5194136 - DNA, 25 bp, Homo sapien
agatttttacaattaagaaagcaga

SEQ ID NO: 5194137 - DNA, 25 bp, Homo sapien
gccatgggatatttaaaccagattt

SEQ ID NO: 5194138 - DNA, 25 bp, Homo sapien
tgattattccgtaagaatagtcttt

SEQ ID NO: 5194139 - DNA, 25 bp, Homo sapien
gcagaattttgattattccgtaaga

SEQ ID NO: 5194140 - DNA, 25 bp, Homo sapien
acatttggagctatgtgattattta

SEQ ID NO: 5194141 - DNA, 25 bp, Homo sapien
tgtattccagagttagttgtaattt

SEQ ID NO: 5194142 - DNA, 25 bp, Homo sapien
aaatgacaggtttaaggattacaat

SEQ ID NO: 5194143 - DNA, 25 bp, Homo sapien
cttacaaaatagcatccaaagcact

SEQ ID NO: 5194144 - DNA, 25 bp, Homo sapien
tacaatggtcatagagaacagcccc

SEQ ID NO: 5194145 - DNA, 25 bp, Homo sapien
tagaacagatataaccccatgagaa

SEQ ID NO: 5194146 - DNA, 25 bp, Homo sapien
caaatgatctaatgtggcaaacgat

SEQ ID NO: 5194147 - DNA, 25 bp, Homo sapien
tcaatctagggaacgaaaaagtcca

SEQ ID NO: 5194148 - DNA, 25 bp, Homo sapien
ggccttagctccttgcagcacacag

SEQ ID NO: 5194149 - DNA, 25 bp, Homo sapien
aaggccttagctccttgcagcacac

SEQ ID NO: 5194150 - DNA, 25 bp, Homo sapien
ccttagctccttgcagcacacaggt

SEQ ID NO: 5194151 - DNA, 25 bp, Homo sapien
gccttagctccttgcagcacacagg

SEQ ID NO: 5194152 - DNA, 25 bp, Homo sapien
ctgcaagttcccgctgggaatccat

SEQ ID NO: 5194153 - DNA, 25 bp, Homo sapien
gcggctggccaatgcaaaaatatct

SEQ ID NO: 5194154 - DNA, 25 bp, Homo sapien
tctcgggcagtcaagaagaagtcct

SEQ ID NO: 5194155 - DNA, 25 bp, Homo sapien
gatcagacacaaattcacgggcaga

SEQ ID NO: 5194156 - DNA, 25 bp, Homo sapien
ggaatgtcattcaggtaaccaggaa

SEQ ID NO: 5194157 - DNA, 25 bp, Homo sapien
tatacagaacattaagtaggtttct

SEQ ID NO: 5194158 - DNA, 25 bp, Homo sapien
catttgctttgctgaccttccaact

SEQ ID NO: 5194159 - DNA, 25 bp, Homo sapien
taggtttcttgaaccaaaaatgaga

SEQ ID NO: 5194160 - DNA, 25 bp, Homo sapien
gttctattagtgccttttaaaagca

SEQ ID NO: 5194161 - DNA, 25 bp, Homo sapien
aacaggagatcctcatacttttagg

SEQ ID NO: 5194162 - DNA, 25 bp, Homo sapien
ttttctcccatattgccttgttcag

SEQ ID NO: 5194163 - DNA, 25 bp, Homo sapien
cagaggttaattacaactgtgaggt

SEQ ID NO: 5194164 - DNA, 25 bp, Homo sapien
ttcagctttgaaacaggagatcctc

SEQ ID NO: 5194165 - DNA, 25 bp, Homo sapien
tcatagcataatactgaatccagcg

SEQ ID NO: 5194166 - DNA, 25 bp, Homo sapien
gaatccagcgaagcctctgtttgaa

SEQ ID NO: 5194167 - DNA, 25 bp, Homo sapien
tcccagaccgaagagacacctggct

SEQ ID NO: 5194168 - DNA, 25 bp, Homo sapien
cccattcagatgctatgctatcgag

SEQ ID NO: 5194169 - DNA, 25 bp, Homo sapien
cattatggccatagactttgatagg

SEQ ID NO: 5194170 - DNA, 25 bp, Homo sapien
ttttacttcgttccattttgcagcc

SEQ ID NO: 5194171 - DNA, 25 bp, Homo sapien
gacaatatatcatccctttatgtga

SEQ ID NO: 5194172 - DNA, 25 bp, Homo sapien
ctttatgtgaaatcacattatggcc

SEQ ID NO: 5194173 - DNA, 25 bp, Homo sapien
tctgagctgatgaatcatgacaaca

SEQ ID NO: 5194174 - DNA, 25 bp, Homo sapien
catgccccgcccttagtatgttttt

SEQ ID NO: 5194175 - DNA, 25 bp, Homo sapien
tctgggactatggattagacaacaa

SEQ ID NO: 5194176 - DNA, 25 bp, Homo sapien
gaccagttatctggagtagaagcat

SEQ ID NO: 5194177 - DNA, 25 bp, Homo sapien
gaatatcctaggaacgaatcagtta

SEQ ID NO: 5194178 - DNA, 25 bp, Homo sapien
tctgaatatcctaggaacgaatcag

SEQ ID NO: 5194179 - DNA, 25 bp, Homo sapien
tatcctaggaacgaatcagttaact

SEQ ID NO: 5194180 - DNA, 25 bp, Homo sapien
tcctaggaacgaatcagttaactta

SEQ ID NO: 5194181 - DNA, 25 bp, Homo sapien
tcttcagtgacacctcctgcaatca

SEQ ID NO: 5194182 - DNA, 25 bp, Homo sapien
caattttgcctttatggactgctac

SEQ ID NO: 5194183 - DNA, 25 bp, Homo sapien
ggaacgaggaattttcattggagcc

SEQ ID NO: 5194184 - DNA, 25 bp, Homo sapien
tatttgttgtaaggtcaaaagcttc

SEQ ID NO: 5194185 - DNA, 25 bp, Homo sapien
caattgcatacagagatccagccag

SEQ ID NO: 5194186 - DNA, 25 bp, Homo sapien
gactccagttgaatcatagcaaaac

SEQ ID NO: 5194187 - DNA, 25 bp, Homo sapien
gacttcagtgggtgcaaattcttta

SEQ ID NO: 5194188 - DNA, 25 bp, Homo sapien
tatgtcattgacttcagtgggtgca

SEQ ID NO: 5194189 - DNA, 25 bp, Homo sapien
tcagggccacttttatagcaggaga

SEQ ID NO: 5194190 - DNA, 25 bp, Homo sapien
caatgtcagggccacttttatagca

SEQ ID NO: 5194191 - DNA, 25 bp, Homo sapien
gccacttttatagcaggagattctg

SEQ ID NO: 5194192 - DNA, 25 bp, Homo sapien
ttccctaaacaatgtcagggccact

SEQ ID NO: 5194193 - DNA, 25 bp, Homo sapien
tgttgctaggcaactagctcctgaa

SEQ ID NO: 5194194 - DNA, 25 bp, Homo sapien
gctcctgaagcataacgtatttcct

SEQ ID NO: 5194195 - DNA, 25 bp, Homo sapien
cacagtttagacagtttgaagagat

SEQ ID NO: 5194196 - DNA, 25 bp, Homo sapien
gagatttaaacgtgttgctaggcaa

SEQ ID NO: 5194197 - DNA, 25 bp, Homo sapien
tgactgaggttttcttacctactgc

SEQ ID NO: 5194198 - DNA, 25 bp, Homo sapien
ataatttctacatgagtgtctgtac

SEQ ID NO: 5194199 - DNA, 25 bp, Homo sapien
catgagtgtctgtacaagcttttaa

SEQ ID NO: 5194200 - DNA, 25 bp, Homo sapien
tacctactgctcatctcttagacaa

SEQ ID NO: 5194201 - DNA, 25 bp, Homo sapien
ctgaagtcatcttatggcatgtaat

SEQ ID NO: 5194202 - DNA, 25 bp, Homo sapien
cagtttaaggataccctaatgatgc

SEQ ID NO: 5194203 - DNA, 25 bp, Homo sapien
tgtcattttgaagcacgaggagagg

SEQ ID NO: 5194204 - DNA, 25 bp, Homo sapien
tagtgtagatgcacatattctccac

SEQ ID NO: 5194205 - DNA, 25 bp, Homo sapien
ggtttaactgagtctgtcttcaagg

SEQ ID NO: 5194206 - DNA, 25 bp, Homo sapien
taacattactgcactactttggata

SEQ ID NO: 5194207 - DNA, 25 bp, Homo sapien
tcatagtcaaaatggaccagctttg

SEQ ID NO: 5194208 - DNA, 25 bp, Homo sapien
tatcagatgtcacgtttcgagcttg

SEQ ID NO: 5194209 - DNA, 25 bp, Homo sapien
ctcttcctaggccatgtgactggat

SEQ ID NO: 5194210 - DNA, 25 bp, Homo sapien
tgggcacggcgttgcacgcctttaa

SEQ ID NO: 5194211 - DNA, 25 bp, Homo sapien
tttagaattacaagctgggcacggc

SEQ ID NO: 5194212 - DNA, 25 bp, Homo sapien
ccccacccagcataattgtatgaaa

SEQ ID NO: 5194213 - DNA, 25 bp, Homo sapien
ggcaaggtctcatgggaaaggtcat

SEQ ID NO: 5194214 - DNA, 25 bp, Homo sapien
gttgggcgagacatccgagcctgtt

SEQ ID NO: 5194215 - DNA, 25 bp, Homo sapien
gatcctccagaaaatttgcggcgcg

SEQ ID NO: 5194216 - DNA, 25 bp, Homo sapien
gttcagttgagatacggaggcttcc

SEQ ID NO: 5194217 - DNA, 25 bp, Homo sapien
gtgacttccgcagtgcacgctgcgc

SEQ ID NO: 5194218 - DNA, 25 bp, Homo sapien
caccctgggatatgtagtgcgtgac

SEQ ID NO: 5194219 - DNA, 25 bp, Homo sapien
gatatgtagtgcgtgacttccgcag

SEQ ID NO: 5194220 - DNA, 25 bp, Homo sapien
ccgcgacccaccctgggatatgtag

SEQ ID NO: 5194221 - DNA, 25 bp, Homo sapien
taatgtcccgtgaagacagtgcctt

SEQ ID NO: 5194222 - DNA, 25 bp, Homo sapien
ttaatgtcccgtgaagacagtgcct

SEQ ID NO: 5194223 - DNA, 25 bp, Homo sapien
cagttaagcttccacttaacgctag

SEQ ID NO: 5194224 - DNA, 25 bp, Homo sapien
taagcttccacttaacgctaggata

SEQ ID NO: 5194225 - DNA, 25 bp, Homo sapien
tccacttaacgctaggatataagtt

SEQ ID NO: 5194226 - DNA, 25 bp, Homo sapien
cttccagttaagcttccacttaacg

SEQ ID NO: 5194227 - DNA, 25 bp, Homo sapien
ggagagacagcgtcgcaccggaagc

SEQ ID NO: 5194228 - DNA, 25 bp, Homo sapien
gagagacagcgtcgcaccggaagcg

SEQ ID NO: 5194229 - DNA, 25 bp, Homo sapien
agagacagcgtcgcaccggaagcgc

SEQ ID NO: 5194230 - DNA, 25 bp, Homo sapien
gccgccagaaaaggcgctaaagccc

SEQ ID NO: 5194231 - DNA, 25 bp, Homo sapien
ccagaaaaggcgctaaagcccgcta

SEQ ID NO: 5194232 - DNA, 25 bp, Homo sapien
ctaccgccgccagaaaaggcgctaa

SEQ ID NO: 5194233 - DNA, 25 bp, Homo sapien
cagaaaaggcgctaaagcccgctaa

SEQ ID NO: 5194234 - DNA, 25 bp, Homo sapien
tctctgggtccggtcctttgaagcg

SEQ ID NO: 5194235 - DNA, 25 bp, Homo sapien
tctgggtccggtcctttgaagcgct

SEQ ID NO: 5194236 - DNA, 25 bp, Homo sapien
ggtccggtcctttgaagcgcttcaa

SEQ ID NO: 5194237 - DNA, 25 bp, Homo sapien
tgggtccggtcctttgaagcgcttc

SEQ ID NO: 5194238 - DNA, 25 bp, Homo sapien
aaatgacgccgccagaacaacttga

SEQ ID NO: 5194239 - DNA, 25 bp, Homo sapien
ctgaaatgacgccgccagaacaact

SEQ ID NO: 5194240 - DNA, 25 bp, Homo sapien
gacgccgccagaacaacttgagcct

SEQ ID NO: 5194241 - DNA, 25 bp, Homo sapien
atgacgccgccagaacaacttgagc

SEQ ID NO: 5194242 - DNA, 25 bp, Homo sapien
agcagccccgatacctcgagggaaa

SEQ ID NO: 5194243 - DNA, 25 bp, Homo sapien
ctgcaacagcggcaaaggcactgct

SEQ ID NO: 5194244 - DNA, 25 bp, Homo sapien
ccatgttacagcttgtgcggcaaaa

SEQ ID NO: 5194245 - DNA, 25 bp, Homo sapien
ttcccgctttcgtacgcagggactg

SEQ ID NO: 5194246 - DNA, 25 bp, Homo sapien
tgctgagtcttaggattttgaagct

SEQ ID NO: 5194247 - DNA, 25 bp, Homo sapien
gagtcttaggattttgaagctttaa

SEQ ID NO: 5194248 - DNA, 25 bp, Homo sapien
gtgctgagtcttaggattttgaagc

SEQ ID NO: 5194249 - DNA, 25 bp, Homo sapien
ctgagtcttaggattttgaagcttt

SEQ ID NO: 5194250 - DNA, 25 bp, Homo sapien
aaaatgttggttacacacagaaagg

SEQ ID NO: 5194251 - DNA, 25 bp, Homo sapien
gttggttacacacagaaagggctat

SEQ ID NO: 5194252 - DNA, 25 bp, Homo sapien
atgttggttacacacagaaagggct

SEQ ID NO: 5194253 - DNA, 25 bp, Homo sapien
ttggttacacacagaaagggctatc

SEQ ID NO: 5194254 - DNA, 25 bp, Homo sapien
ggacaactatgttagtaccaaacta

SEQ ID NO: 5194255 - DNA, 25 bp, Homo sapien
caactatgttagtaccaaactataa

SEQ ID NO: 5194256 - DNA, 25 bp, Homo sapien
ttggacaactatgttagtaccaaac

SEQ ID NO: 5194257 - DNA, 25 bp, Homo sapien
tctttggacaactatgttagtacca

SEQ ID NO: 5194258 - DNA, 25 bp, Homo sapien
atacttatacactcctgacagcagg

SEQ ID NO: 5194259 - DNA, 25 bp, Homo sapien
cactcctgacaactgactgcctaga

SEQ ID NO: 5194260 - DNA, 25 bp, Homo sapien
tttcaagcccacagttgatggaagg

SEQ ID NO: 5194261 - DNA, 25 bp, Homo sapien
gaccctataggatctcagagcatca

SEQ ID NO: 5194262 - DNA, 25 bp, Homo sapien
gattcccgtgtgtccttttaagatg

SEQ ID NO: 5194263 - DNA, 25 bp, Homo sapien
tctgggaacttcacgctgactctct

SEQ ID NO: 5194264 - DNA, 25 bp, Homo sapien
gcctggaacgcagtggctcaagcaa

SEQ ID NO: 5194265 - DNA, 25 bp, Homo sapien
cgattaagatgccaagcaagtctct

SEQ ID NO: 5194266 - DNA, 25 bp, Homo sapien
gcttggcatatgacaagaaatcagt

SEQ ID NO: 5194267 - DNA, 25 bp, Homo sapien
tactacatcatgattgagcatccta

SEQ ID NO: 5194268 - DNA, 25 bp, Homo sapien
gaatctctgcaaaagggactgagtc

SEQ ID NO: 5194269 - DNA, 25 bp, Homo sapien
gcatttcctaggttgtatacagcag

SEQ ID NO: 5194270 - DNA, 25 bp, Homo sapien
aaaaaacaaggacaactgatccctg

SEQ ID NO: 5194271 - DNA, 25 bp, Homo sapien
catcgaggacgttgaacctttattc

SEQ ID NO: 5194272 - DNA, 25 bp, Homo sapien
tgtcaaaaaaacatcgaggacgttg

SEQ ID NO: 5194273 - DNA, 25 bp, Homo sapien
ggttgattgttaatggcaatgtcaa

SEQ ID NO: 5194274 - DNA, 25 bp, Homo sapien
caggttgattgttaatggcaatgtc

SEQ ID NO: 5194275 - DNA, 25 bp, Homo sapien
tttggggcacacatcagaaaataat

SEQ ID NO: 5194276 - DNA, 25 bp, Homo sapien
caaagacaacgaaagttctcgcatg

SEQ ID NO: 5194277 - DNA, 25 bp, Homo sapien
ctgtacaaagacaacgaaagttctc

SEQ ID NO: 5194278 - DNA, 25 bp, Homo sapien
aacgaaagttctcgcatgttttggg

SEQ ID NO: 5194279 - DNA, 25 bp, Homo sapien
agagacaactcttataatgtaatgg

SEQ ID NO: 5194280 - DNA, 25 bp, Homo sapien
gagacaactcttataatgtaatggt

SEQ ID NO: 5194281 - DNA, 25 bp, Homo sapien
aagagacaactcttataatgtaatg

SEQ ID NO: 5194282 - DNA, 25 bp, Homo sapien
gacaactcttataatgtaatggttt

SEQ ID NO: 5194283 - DNA, 25 bp, Homo sapien
caaaaaatcctccatagatagattc

SEQ ID NO: 5194284 - DNA, 25 bp, Homo sapien
ttagtgccacacacaacttacttag

SEQ ID NO: 5194285 - DNA, 25 bp, Homo sapien
gaatcaaatatgaatcaatttcccc

SEQ ID NO: 5194286 - DNA, 25 bp, Homo sapien
tgtattatttagtgccacacacaac

SEQ ID NO: 5194287 - DNA, 25 bp, Homo sapien
cagttacattatagatataacctcc

SEQ ID NO: 5194288 - DNA, 25 bp, Homo sapien
ttgtgtttaacagcgaaactctcgt

SEQ ID NO: 5194289 - DNA, 25 bp, Homo sapien
gttgtgtttaacagcgaaactctcg

SEQ ID NO: 5194290 - DNA, 25 bp, Homo sapien
ttaaatcatcagataataaatactt

SEQ ID NO: 5194291 - DNA, 25 bp, Homo sapien
taaatcatcagataataaatactta

SEQ ID NO: 5194292 - DNA, 25 bp, Homo sapien
aaatcatcagataataaatacttac

SEQ ID NO: 5194293 - DNA, 25 bp, Homo sapien
attacatgcgcccgcaagcacaccc

SEQ ID NO: 5194294 - DNA, 25 bp, Homo sapien
ttacatgcgcccgcaagcacaccca

SEQ ID NO: 5194295 - DNA, 25 bp, Homo sapien
tacatgcgcccgcaagcacacccag

SEQ ID NO: 5194296 - DNA, 25 bp, Homo sapien
aaactcaaatgccaatgctcactgc

SEQ ID NO: 5194297 - DNA, 25 bp, Homo sapien
cgggaatgtagaatggtgcaaccac

SEQ ID NO: 5194298 - DNA, 25 bp, Homo sapien
taaacagagtattagcatataaccc

SEQ ID NO: 5194299 - DNA, 25 bp, Homo sapien
aaaaatggacttcatgccaggtgca

SEQ ID NO: 5194300 - DNA, 25 bp, Homo sapien
cattgccccgctgagagtttacaag

SEQ ID NO: 5194301 - DNA, 25 bp, Homo sapien
ttaattagctgcaagagatctggat

SEQ ID NO: 5194302 - DNA, 25 bp, Homo sapien
tacaagtatgagtcattgccccgct

SEQ ID NO: 5194303 - DNA, 25 bp, Homo sapien
ataagcattttttggcaaacgaaat

SEQ ID NO: 5194304 - DNA, 25 bp, Homo sapien
ccatctaaatgaggagttggtttcg

SEQ ID NO: 5194305 - DNA, 25 bp, Homo sapien
tctaaatgaggagttggtttcgttg

SEQ ID NO: 5194306 - DNA, 25 bp, Homo sapien
ctaaatgaggagttggtttcgttgt

SEQ ID NO: 5194307 - DNA, 25 bp, Homo sapien
catctaaatgaggagttggtttcgt

SEQ ID NO: 5194308 - DNA, 25 bp, Homo sapien
tctctcttacaacttcttgaccaga

SEQ ID NO: 5194309 - DNA, 25 bp, Homo sapien
caaacggtttgctagctgcatctgt

SEQ ID NO: 5194310 - DNA, 25 bp, Homo sapien
tgaccagagattacttgtccaaaaa

SEQ ID NO: 5194311 - DNA, 25 bp, Homo sapien
tgagtatccgtacctccgcaaacgg

SEQ ID NO: 5194312 - DNA, 25 bp, Homo sapien
gcttattttgtatgtgtaagtattc

SEQ ID NO: 5194313 - DNA, 25 bp, Homo sapien
caactatttagagtatctctgctta

SEQ ID NO: 5194314 - DNA, 25 bp, Homo sapien
tcaactatttagagtatctctgctt

SEQ ID NO: 5194315 - DNA, 25 bp, Homo sapien
ttttgtatgtgtaagtattctcaga

SEQ ID NO: 5194316 - DNA, 25 bp, Homo sapien
gaaatcccatgagctgaagcataca

SEQ ID NO: 5194317 - DNA, 25 bp, Homo sapien
cttttataaggaggcaacagatcct

SEQ ID NO: 5194318 - DNA, 25 bp, Homo sapien
tagccagtctcatgtacatcaagaa

SEQ ID NO: 5194319 - DNA, 25 bp, Homo sapien
cttgggaagaataatgccttaacct

SEQ ID NO: 5194320 - DNA, 25 bp, Homo sapien
actataagaggaaaataggccaggc

SEQ ID NO: 5194321 - DNA, 25 bp, Homo sapien
gactccgtcctgatttaacaaataa

SEQ ID NO: 5194322 - DNA, 25 bp, Homo sapien
gtgagactccgtcctgatttaacaa

SEQ ID NO: 5194323 - DNA, 25 bp, Homo sapien
cagaaaacattaactataagaggaa

SEQ ID NO: 5194324 - DNA, 25 bp, Homo sapien
taataaacctgagggatatgcaggg

SEQ ID NO: 5194325 - DNA, 25 bp, Homo sapien
gcactgagattctttcctatgagaa

SEQ ID NO: 5194326 - DNA, 25 bp, Homo sapien
aatacatcacagttgatttacttta

SEQ ID NO: 5194327 - DNA, 25 bp, Homo sapien
atatggtaactctttaccccacaat

SEQ ID NO: 5194328 - DNA, 25 bp, Homo sapien
gagaccgtagatgtaatggcttcac

SEQ ID NO: 5194329 - DNA, 25 bp, Homo sapien
gggatatacgcaagctgtgcctgga

SEQ ID NO: 5194330 - DNA, 25 bp, Homo sapien
tgctgctgtgcctgaatcatccttg

SEQ ID NO: 5194331 - DNA, 25 bp, Homo sapien
tacttgtacttgaccaaggacttct

SEQ ID NO: 5194332 - DNA, 25 bp, Homo sapien
ggttttgatcaacaatttttagaca

SEQ ID NO: 5194333 - DNA, 25 bp, Homo sapien
ttttgatcaacaatttttagacaaa

SEQ ID NO: 5194334 - DNA, 25 bp, Homo sapien
gttttgatcaacaatttttagacaa

SEQ ID NO: 5194335 - DNA, 25 bp, Homo sapien
tgagctatctgagtcactagatgag

SEQ ID NO: 5194336 - DNA, 25 bp, Homo sapien
cagaagaggactgagaatcacttga

SEQ ID NO: 5194337 - DNA, 25 bp, Homo sapien
agctatctgagtcactagatgagga

SEQ ID NO: 5194338 - DNA, 25 bp, Homo sapien
cttgagctatctgagtcactagatg

SEQ ID NO: 5194339 - DNA, 25 bp, Homo sapien
ctcttcttgcttttctttcgctttt

SEQ ID NO: 5194340 - DNA, 25 bp, Homo sapien
tcaaaagtcctacgctccatgctat

SEQ ID NO: 5194341 - DNA, 25 bp, Homo sapien
ggaaatcagaatataaagctagcat

SEQ ID NO: 5194342 - DNA, 25 bp, Homo sapien
catttgagccataggcagatgaaga

SEQ ID NO: 5194343 - DNA, 25 bp, Homo sapien
tctatccttatgctatcgtaagagc

SEQ ID NO: 5194344 - DNA, 25 bp, Homo sapien
tatgaaactatgtgagcaatgcact

SEQ ID NO: 5194345 - DNA, 25 bp, Homo sapien
tgtccttacggaagtatccaattgt

SEQ ID NO: 5194346 - DNA, 25 bp, Homo sapien
taccaaagatgtgatcgcatgggaa

SEQ ID NO: 5194347 - DNA, 25 bp, Homo sapien
caagttacagttggttattatgtcc

SEQ ID NO: 5194348 - DNA, 25 bp, Homo sapien
ctattttcaggtataggagggatct

SEQ ID NO: 5194349 - DNA, 25 bp, Homo sapien
caatgtatttctgatcataactaag

SEQ ID NO: 5194350 - DNA, 25 bp, Homo sapien
ttattacttgtattatgacaatgta

SEQ ID NO: 5194351 - DNA, 25 bp, Homo sapien
aaacttttgttggccagacatgtta

SEQ ID NO: 5194352 - DNA, 25 bp, Homo sapien
cttttgttggccagacatgttactt

SEQ ID NO: 5194353 - DNA, 25 bp, Homo sapien
aaaagtcgtctctggtatgaagcag

SEQ ID NO: 5194354 - DNA, 25 bp, Homo sapien
agtcgtctctggtatgaagcaggct

SEQ ID NO: 5194355 - DNA, 25 bp, Homo sapien
tcctgccagatctagtaactaaaag

SEQ ID NO: 5194356 - DNA, 25 bp, Homo sapien
ctagtaactaaaagtcgtctctggt

SEQ ID NO: 5194357 - DNA, 25 bp, Homo sapien
aatgcaatattgtgaagatctctgg

SEQ ID NO: 5194358 - DNA, 25 bp, Homo sapien
taaggaagacaaatgcaatattgtg

SEQ ID NO: 5194359 - DNA, 25 bp, Homo sapien
gacaaatgcaatattgtgaagatct

SEQ ID NO: 5194360 - DNA, 25 bp, Homo sapien
ttatttaaggaagacaaatgcaata

SEQ ID NO: 5194361 - DNA, 25 bp, Homo sapien
tgggaagtaccaacatacagaagct

SEQ ID NO: 5194362 - DNA, 25 bp, Homo sapien
caagaatagagatacagtgattgcc

SEQ ID NO: 5194363 - DNA, 25 bp, Homo sapien
tgattgccaagaaacacgggagaca

SEQ ID NO: 5194364 - DNA, 25 bp, Homo sapien
gacctcgatcccattttataccatg

SEQ ID NO: 5194365 - DNA, 25 bp, Homo sapien
aaacgatcccttgatctggatctgg

SEQ ID NO: 5194366 - DNA, 25 bp, Homo sapien
tgcatctcttgcctccaatgtggag

SEQ ID NO: 5194367 - DNA, 25 bp, Homo sapien
gtctcactacgtctgaaacgatccc

SEQ ID NO: 5194368 - DNA, 25 bp, Homo sapien
tctttcaccacttgataccctcatt

SEQ ID NO: 5194369 - DNA, 25 bp, Homo sapien
tatttttcaacatggaggactttaa

SEQ ID NO: 5194370 - DNA, 25 bp, Homo sapien
ttatttgagctattatgatcacgac

SEQ ID NO: 5194371 - DNA, 25 bp, Homo sapien
gaagggactttgatctctatcagcc

SEQ ID NO: 5194372 - DNA, 25 bp, Homo sapien
tgatcacgacttttagagtacattc

SEQ ID NO: 5194373 - DNA, 25 bp, Homo sapien
cagaatggaagtaagtttatataac

SEQ ID NO: 5194374 - DNA, 25 bp, Homo sapien
gattcattagcaagtctctcaaact

SEQ ID NO: 5194375 - DNA, 25 bp, Homo sapien
caaattatccagattgcagattatc

SEQ ID NO: 5194376 - DNA, 25 bp, Homo sapien
tctcaaacttaaaatccgaaacaga

SEQ ID NO: 5194377 - DNA, 25 bp, Homo sapien
tgcacttgcccgaatccactgaagg

SEQ ID NO: 5194378 - DNA, 25 bp, Homo sapien
tatcaaaggtcattccgcaaagccg

SEQ ID NO: 5194379 - DNA, 25 bp, Homo sapien
tgcatgcgcagatcctgaggtacag

SEQ ID NO: 5194380 - DNA, 25 bp, Homo sapien
taacgttatatagcttgggcactca

SEQ ID NO: 5194381 - DNA, 25 bp, Homo sapien
ggctttttcagcagtaaggtacaca

SEQ ID NO: 5194382 - DNA, 25 bp, Homo sapien
ggacttccacaatgccctctaatag

SEQ ID NO: 5194383 - DNA, 25 bp, Homo sapien
ggcagattctgtaggcaaccatcat

SEQ ID NO: 5194384 - DNA, 25 bp, Homo sapien
tgacatctgtaagactagcttgagg

SEQ ID NO: 5194385 - DNA, 25 bp, Homo sapien
tttagtgtacggtcctcaaggttca

SEQ ID NO: 5194386 - DNA, 25 bp, Homo sapien
ccctcagctactgggaaacaccatt

SEQ ID NO: 5194387 - DNA, 25 bp, Homo sapien
ttaaacatggacgtacaaatagctc

SEQ ID NO: 5194388 - DNA, 25 bp, Homo sapien
tcatattgctgaacaatctgcagaa

SEQ ID NO: 5194389 - DNA, 25 bp, Homo sapien
tatacatctccagggtttttcatca

SEQ ID NO: 5194390 - DNA, 25 bp, Homo sapien
ttttctccagtctgagtaacctctg

SEQ ID NO: 5194391 - DNA, 25 bp, Homo sapien
gcatgatacccactctcggctcagt

SEQ ID NO: 5194392 - DNA, 25 bp, Homo sapien
tcacattgatcatggccactataca

SEQ ID NO: 5194393 - DNA, 25 bp, Homo sapien
gaaagaatacataacttcctgagtg

SEQ ID NO: 5194394 - DNA, 25 bp, Homo sapien
gattattgctagagatattgcagaa

SEQ ID NO: 5194395 - DNA, 25 bp, Homo sapien
gctgaggctgaatgggaaaaaagag

SEQ ID NO: 5194396 - DNA, 25 bp, Homo sapien
tcctgagtgaactgttgaaagagaa

SEQ ID NO: 5194397 - DNA, 25 bp, Homo sapien
ctacaggtccgtgccactgcgcttg

SEQ ID NO: 5194398 - DNA, 25 bp, Homo sapien
ttgccatatgatgccctgcattact

SEQ ID NO: 5194399 - DNA, 25 bp, Homo sapien
tgaatggattaatggcttatgctgg

SEQ ID NO: 5194400 - DNA, 25 bp, Homo sapien
gctgggagatttagtattgttaaga

SEQ ID NO: 5194401 - DNA, 25 bp, Homo sapien
tgagactgttggcttcataagaaga

SEQ ID NO: 5194402 - DNA, 25 bp, Homo sapien
tcacaagcccagctcgcaagcgcag

SEQ ID NO: 5194403 - DNA, 25 bp, Homo sapien
gcccgtgacgctcctgcgggttcag

SEQ ID NO: 5194404 - DNA, 25 bp, Homo sapien
acgctcctgcgggttcagtcctttg

SEQ ID NO: 5194405 - DNA, 25 bp, Homo sapien
gctcgcaagcgcaggcgcctctctt

SEQ ID NO: 5194406 - DNA, 25 bp, Homo sapien
ggctccaccccgagggtaggcatcg

SEQ ID NO: 5194407 - DNA, 25 bp, Homo sapien
cccgagggtaggcatcggacccaat

SEQ ID NO: 5194408 - DNA, 25 bp, Homo sapien
cgagggtaggcatcggacccaatcg

SEQ ID NO: 5194409 - DNA, 25 bp, Homo sapien
tccaccccgagggtaggcatcggac

SEQ ID NO: 5194410 - DNA, 25 bp, Homo sapien
agcattattacgtggaacatctgat

SEQ ID NO: 5194411 - DNA, 25 bp, Homo sapien
gcattattacgtggaacatctgata

SEQ ID NO: 5194412 - DNA, 25 bp, Homo sapien
cagcattattacgtggaacatctga

SEQ ID NO: 5194413 - DNA, 25 bp, Homo sapien
cattattacgtggaacatctgatag

SEQ ID NO: 5194414 - DNA, 25 bp, Homo sapien
tccaaaaacctaccagcgctgtatg

SEQ ID NO: 5194415 - DNA, 25 bp, Homo sapien
acctaccagcgctgtatgtgcacaa

SEQ ID NO: 5194416 - DNA, 25 bp, Homo sapien
aaaaacctaccagcgctgtatgtgc

SEQ ID NO: 5194417 - DNA, 25 bp, Homo sapien
aacctaccagcgctgtatgtgcaca

SEQ ID NO: 5194418 - DNA, 25 bp, Homo sapien
catttgtattttcaggccgggcgca

SEQ ID NO: 5194419 - DNA, 25 bp, Homo sapien
acatttgtattttcaggccgggcgc

SEQ ID NO: 5194420 - DNA, 25 bp, Homo sapien
tcctattctatatacagggaacaga

SEQ ID NO: 5194421 - DNA, 25 bp, Homo sapien
cttcagcattgggattaggataaac

SEQ ID NO: 5194422 - DNA, 25 bp, Homo sapien
ttctggtttggagcaaaataatgga

SEQ ID NO: 5194423 - DNA, 25 bp, Homo sapien
tatttccaagacaatcttacttcag

SEQ ID NO: 5194424 - DNA, 25 bp, Homo sapien
ctcaccactcaacataaacctttaa

SEQ ID NO: 5194425 - DNA, 25 bp, Homo sapien
tcaccactcaacataaacctttaaa

SEQ ID NO: 5194426 - DNA, 25 bp, Homo sapien
tctgttagtattttctcaccactca

SEQ ID NO: 5194427 - DNA, 25 bp, Homo sapien
tctcaccactcaacataaaccttta

SEQ ID NO: 5194428 - DNA, 25 bp, Homo sapien
tcaaacctaaacttaattagccaca

SEQ ID NO: 5194429 - DNA, 25 bp, Homo sapien
cacagtagtactgtaactaggcaca

SEQ ID NO: 5194430 - DNA, 25 bp, Homo sapien
aataaggcataattgacaatcacag

SEQ ID NO: 5194431 - DNA, 25 bp, Homo sapien
taactcactgttgtttgaaaactgc

SEQ ID NO: 5194432 - DNA, 25 bp, Homo sapien
gaaatttaaatgcagaattcacttt

SEQ ID NO: 5194433 - DNA, 25 bp, Homo sapien
aaatttaaatgcagaattcactttc

SEQ ID NO: 5194434 - DNA, 25 bp, Homo sapien
tgaaatttaaatgcagaattcactt

SEQ ID NO: 5194435 - DNA, 25 bp, Homo sapien
ctgaaatttaaatgcagaattcact

SEQ ID NO: 5194436 - DNA, 25 bp, Homo sapien
gttattctggatccttgtatcacta

SEQ ID NO: 5194437 - DNA, 25 bp, Homo sapien
gatccttgtatcactaaatgcctaa

SEQ ID NO: 5194438 - DNA, 25 bp, Homo sapien
aatccagatgcttctgactggttcc

SEQ ID NO: 5194439 - DNA, 25 bp, Homo sapien
tcactaaatgcctaatccagatgct

SEQ ID NO: 5194440 - DNA, 25 bp, Homo sapien
gacagaatagagctcttgactcaca

SEQ ID NO: 5194441 - DNA, 25 bp, Homo sapien
aggcaaagaaccacagcaataagaa

SEQ ID NO: 5194442 - DNA, 25 bp, Homo sapien
ggcatttaaccacacatattctcca

SEQ ID NO: 5194443 - DNA, 25 bp, Homo sapien
ctccagtttataacagtagacaccc

SEQ ID NO: 5194444 - DNA, 25 bp, Homo sapien
cactaaccataacaccacatctgtg

SEQ ID NO: 5194445 - DNA, 25 bp, Homo sapien
tcaaagtacacactaaccataacac

SEQ ID NO: 5194446 - DNA, 25 bp, Homo sapien
gtacacactaaccataacaccacat

SEQ ID NO: 5194447 - DNA, 25 bp, Homo sapien
cattactttcaaagtacacactaac

SEQ ID NO: 5194448 - DNA, 25 bp, Homo sapien
gaatatttaatgactactcattagt

SEQ ID NO: 5194449 - DNA, 25 bp, Homo sapien
aatagaatatttaatgactactcat

SEQ ID NO: 5194450 - DNA, 25 bp, Homo sapien
taatgactactcattagtttaaaaa

SEQ ID NO: 5194451 - DNA, 25 bp, Homo sapien
tatttaatgactactcattagttta

SEQ ID NO: 5194452 - DNA, 25 bp, Homo sapien
gttccagaaatagatttggattacc

SEQ ID NO: 5194453 - DNA, 25 bp, Homo sapien
ggttccagaaatagatttggattac

SEQ ID NO: 5194454 - DNA, 25 bp, Homo sapien
tgttgggagcacattgtacaatcca

SEQ ID NO: 5194455 - DNA, 25 bp, Homo sapien
gaatcacgtagttcaataggaagct

SEQ ID NO: 5194456 - DNA, 25 bp, Homo sapien
ccatccctggagtgaaaggcaatga

SEQ ID NO: 5194457 - DNA, 25 bp, Homo sapien
taaagttgaagagttccaccatccc

SEQ ID NO: 5194458 - DNA, 25 bp, Homo sapien
tatatcctttccgtggcatggcaac

SEQ ID NO: 5194459 - DNA, 25 bp, Homo sapien
aggtatatcctttccgtggcatggc

SEQ ID NO: 5194460 - DNA, 25 bp, Homo sapien
tcctttccgtggcatggcaacatca

SEQ ID NO: 5194461 - DNA, 25 bp, Homo sapien
tttccgtggcatggcaacatcatca

SEQ ID NO: 5194462 - DNA, 25 bp, Homo sapien
ctacaacagaatattccataggctc

SEQ ID NO: 5194463 - DNA, 25 bp, Homo sapien
caaactacaacagaatattccatag

SEQ ID NO: 5194464 - DNA, 25 bp, Homo sapien
tacaacagaatattccataggctca

SEQ ID NO: 5194465 - DNA, 25 bp, Homo sapien
aactacaacagaatattccataggc

SEQ ID NO: 5194466 - DNA, 25 bp, Homo sapien
aaattgtaaatgagaaattatatca

SEQ ID NO: 5194467 - DNA, 25 bp, Homo sapien
attgtaaatgagaaattatatcaac

SEQ ID NO: 5194468 - DNA, 25 bp, Homo sapien
tgtaaatgagaaattatatcaacac

SEQ ID NO: 5194469 - DNA, 25 bp, Homo sapien
aatcctttattagaaattgtaaatg

SEQ ID NO: 5194470 - DNA, 25 bp, Homo sapien
caaaggctggtttacatcatggcag

SEQ ID NO: 5194471 - DNA, 25 bp, Homo sapien
gacagggatcatagtggccacctta

SEQ ID NO: 5194472 - DNA, 25 bp, Homo sapien
cacagaattggccaacacaagggaa

SEQ ID NO: 5194473 - DNA, 25 bp, Homo sapien
taaggtctcagctagggctccactg

SEQ ID NO: 5194474 - DNA, 25 bp, Homo sapien
aacctttcaacagagaaaactccag

SEQ ID NO: 5194475 - DNA, 25 bp, Homo sapien
caagtcctgcctcaggatctatctt

SEQ ID NO: 5194476 - DNA, 25 bp, Homo sapien
tcctctcttgggacataaatttcct

SEQ ID NO: 5194477 - DNA, 25 bp, Homo sapien
ggtttataagcgttcttgaatctga

SEQ ID NO: 5194478 - DNA, 25 bp, Homo sapien
tacttgatcagcactatggagaggc

SEQ ID NO: 5194479 - DNA, 25 bp, Homo sapien
ccttgagcctttctatcagtgagaa

SEQ ID NO: 5194480 - DNA, 25 bp, Homo sapien
gaagcagatactctagccccagtca

SEQ ID NO: 5194481 - DNA, 25 bp, Homo sapien
gcttcttgccaaaaaccacgagtgg

SEQ ID NO: 5194482 - DNA, 25 bp, Homo sapien
tatacttgtgtaggatgaaacccag

SEQ ID NO: 5194483 - DNA, 25 bp, Homo sapien
ggaagacacttgagtcccaatcagc

SEQ ID NO: 5194484 - DNA, 25 bp, Homo sapien
gctggaatttgcagggcagagtacc

SEQ ID NO: 5194485 - DNA, 25 bp, Homo sapien
gaatgaccctcggaactataagcta

SEQ ID NO: 5194486 - DNA, 25 bp, Homo sapien
cagaactgtggtccctgagagagaa

SEQ ID NO: 5194487 - DNA, 25 bp, Homo sapien
ggcatatggcaagtacagggctgct

SEQ ID NO: 5194488 - DNA, 25 bp, Homo sapien
gatgcagccataagccaaaggcctg

SEQ ID NO: 5194489 - DNA, 25 bp, Homo sapien
tctgggcgggtcctaaatgcaatcc

SEQ ID NO: 5194490 - DNA, 25 bp, Homo sapien
aactgtgccataaaacgtaacctag

SEQ ID NO: 5194491 - DNA, 25 bp, Homo sapien
gaacaatccacctgtgtcaaagaga

SEQ ID NO: 5194492 - DNA, 25 bp, Homo sapien
taaggccataatgtgactgggctct

SEQ ID NO: 5194493 - DNA, 25 bp, Homo sapien
cctggataattaggtcaactgtgcc

SEQ ID NO: 5194494 - DNA, 25 bp, Homo sapien
ggtgctaggtgaaaatggtatataa

SEQ ID NO: 5194495 - DNA, 25 bp, Homo sapien
gcccggccacattgaggccctttgt

SEQ ID NO: 5194496 - DNA, 25 bp, Homo sapien
agggtgctaggtgaaaatggtatat

SEQ ID NO: 5194497 - DNA, 25 bp, Homo sapien
gggagggtgctaggtgaaaatggta

SEQ ID NO: 5194498 - DNA, 25 bp, Homo sapien
cgactatagcctcgggcgattttcc

SEQ ID NO: 5194499 - DNA, 25 bp, Homo sapien
gctaacttcagcctcgactatagcc

SEQ ID NO: 5194500 - DNA, 25 bp, Homo sapien
tagcctcgggcgattttccctgatt

SEQ ID NO: 5194501 - DNA, 25 bp, Homo sapien
tgtaccaattaaacatccccacagt

SEQ ID NO: 5194502 - DNA, 25 bp, Homo sapien
gtaagaacacagaccatggtaagta

SEQ ID NO: 5194503 - DNA, 25 bp, Homo sapien
acaatacagacgcagcacagggcct

SEQ ID NO: 5194504 - DNA, 25 bp, Homo sapien
tatgtggggtcggtttactctgcct

SEQ ID NO: 5194505 - DNA, 25 bp, Homo sapien
agaacacagaccatggtaagtacta

SEQ ID NO: 5194506 - DNA, 25 bp, Homo sapien
attggaggcgccgttgaaatgccag

SEQ ID NO: 5194507 - DNA, 25 bp, Homo sapien
cagactcaatcgtgaggacagagaa

SEQ ID NO: 5194508 - DNA, 25 bp, Homo sapien
gggcacaactaaaggtcagggattg

SEQ ID NO: 5194509 - DNA, 25 bp, Homo sapien
agtaggcttcgccagcccagactca

SEQ ID NO: 5194510 - DNA, 25 bp, Homo sapien
ttggaagaggcgctcggaagccgcc

SEQ ID NO: 5194511 - DNA, 25 bp, Homo sapien
ctggcccgcgggctagtagcgagcg

SEQ ID NO: 5194512 - DNA, 25 bp, Homo sapien
cgcgggctagtagcgagcgggagcg

SEQ ID NO: 5194513 - DNA, 25 bp, Homo sapien
tcggaagccgccagctagtgccgct

SEQ ID NO: 5194514 - DNA, 25 bp, Homo sapien
ccactggatgtgttgaatccttgaa

SEQ ID NO: 5194515 - DNA, 25 bp, Homo sapien
acggctcggtgacaatggaaaatta

SEQ ID NO: 5194516 - DNA, 25 bp, Homo sapien
gaagagtaatatcagtaaataatcc

SEQ ID NO: 5194517 - DNA, 25 bp, Homo sapien
tgctgcaagcagctaaaacggctcg

SEQ ID NO: 5194518 - DNA, 25 bp, Homo sapien
gcataatttacaaggccttccagaa

SEQ ID NO: 5194519 - DNA, 25 bp, Homo sapien
tagcagatccgctgcctcaagcagg

SEQ ID NO: 5194520 - DNA, 25 bp, Homo sapien
tgccttaccaaaaaccgctcacaag

SEQ ID NO: 5194521 - DNA, 25 bp, Homo sapien
ccagaatatcatggtggatgccaga

SEQ ID NO: 5194522 - DNA, 25 bp, Homo sapien
catagctctccctggtataatctgg

SEQ ID NO: 5194523 - DNA, 25 bp, Homo sapien
taaaggatgccagtaatagcctcca

SEQ ID NO: 5194524 - DNA, 25 bp, Homo sapien
tcaaggcattgtatattagggagcg

SEQ ID NO: 5194525 - DNA, 25 bp, Homo sapien
tcttattttcggtgagcaggcagct

SEQ ID NO: 5194526 - DNA, 25 bp, Homo sapien
taaattctcataactctcagacaag

SEQ ID NO: 5194527 - DNA, 25 bp, Homo sapien
catctagcccttgacttgaatataa

SEQ ID NO: 5194528 - DNA, 25 bp, Homo sapien
gctgatcagcgtattttgagaggaa

SEQ ID NO: 5194529 - DNA, 25 bp, Homo sapien
taatgaaggacctcttgagagctga

SEQ ID NO: 5194530 - DNA, 25 bp, Homo sapien
tgtatgctagtttacaatagctcct

SEQ ID NO: 5194531 - DNA, 25 bp, Homo sapien
tgaaccacaaaaccattgaaactgt

SEQ ID NO: 5194532 - DNA, 25 bp, Homo sapien
aatcggcaagtagtggtgagactca

SEQ ID NO: 5194533 - DNA, 25 bp, Homo sapien
agcaccgggctttctgctaccttct

SEQ ID NO: 5194534 - DNA, 25 bp, Homo sapien
gaggtgatgaggctccattcgttga

SEQ ID NO: 5194535 - DNA, 25 bp, Homo sapien
cattcgttgatatcggaattgtagc

SEQ ID NO: 5194536 - DNA, 25 bp, Homo sapien
atcggaattgtagctctgaactttg

SEQ ID NO: 5194537 - DNA, 25 bp, Homo sapien
tgaactttgtcataggtgcagcttc

SEQ ID NO: 5194538 - DNA, 25 bp, Homo sapien
catctcctgtatgctgtcagccaag

SEQ ID NO: 5194539 - DNA, 25 bp, Homo sapien
gaatctatgacattcctcacatcgg

SEQ ID NO: 5194540 - DNA, 25 bp, Homo sapien
gaagcaatcagctgttgaatctatg

SEQ ID NO: 5194541 - DNA, 25 bp, Homo sapien
ccagagaccctgagacgactgtcaa

SEQ ID NO: 5194542 - DNA, 25 bp, Homo sapien
tccacaggtcctcctttatcacata

SEQ ID NO: 5194543 - DNA, 25 bp, Homo sapien
caactctgcccgtttcctaggattc

SEQ ID NO: 5194544 - DNA, 25 bp, Homo sapien
taggattctgcccatagctgtattg

SEQ ID NO: 5194545 - DNA, 25 bp, Homo sapien
ttatcacatactgcttcctctcggc

SEQ ID NO: 5194546 - DNA, 25 bp, Homo sapien
tccattcatgatgacggcaccgcac

SEQ ID NO: 5194547 - DNA, 25 bp, Homo sapien
accgcatggcactgggaagattacc

SEQ ID NO: 5194548 - DNA, 25 bp, Homo sapien
tgtccgccgactagatagagcttat

SEQ ID NO: 5194549 - DNA, 25 bp, Homo sapien
tcaatgctctgaagatacgttccct

SEQ ID NO: 5194550 - DNA, 25 bp, Homo sapien
cacaattatcaggtaaggaacttca

SEQ ID NO: 5194551 - DNA, 25 bp, Homo sapien
caccatgtttgggagtacagtaggg

SEQ ID NO: 5194552 - DNA, 25 bp, Homo sapien
ttactgatcccctatcatgtgccag

SEQ ID NO: 5194553 - DNA, 25 bp, Homo sapien
aagatttttcttgaccatgaatcac

SEQ ID NO: 5194554 - DNA, 25 bp, Homo sapien
acatatatgtatacatacgtatata

SEQ ID NO: 5194555 - DNA, 25 bp, Homo sapien
acatatatatgaacacatatatgtg

SEQ ID NO: 5194556 - DNA, 25 bp, Homo sapien
acacatatatgtatacatacgtata

SEQ ID NO: 5194557 - DNA, 25 bp, Homo sapien
atatatgaacacatatatgtgtgtg

SEQ ID NO: 5194558 - DNA, 25 bp, Homo sapien
gtatacatacatactatatatacac

SEQ ID NO: 5194559 - DNA, 25 bp, Homo sapien
atgtatacatacatactatatatac

SEQ ID NO: 5194560 - DNA, 25 bp, Homo sapien
tgtatacatacatactatatataca

SEQ ID NO: 5194561 - DNA, 25 bp, Homo sapien
catgtatacatacatactatatata

SEQ ID NO: 5194562 - DNA, 25 bp, Homo sapien
ttaatcccactgattcaactgtgta

SEQ ID NO: 5194563 - DNA, 25 bp, Homo sapien
gaatggttctgatttatccccagtg

SEQ ID NO: 5194564 - DNA, 25 bp, Homo sapien
gattcactacaaaggtagttcacct

SEQ ID NO: 5194565 - DNA, 25 bp, Homo sapien
acagggtctcgccaggttagtctcc

SEQ ID NO: 5194566 - DNA, 25 bp, Homo sapien
aaatgtcaaattcctgctagctaaa

SEQ ID NO: 5194567 - DNA, 25 bp, Homo sapien
catggaaagcgatgctgtaggcaca

SEQ ID NO: 5194568 - DNA, 25 bp, Homo sapien
tattcccaagttatggcacacatgg

SEQ ID NO: 5194569 - DNA, 25 bp, Homo sapien
gatctgtatctaggcctgtctgtga

SEQ ID NO: 5194570 - DNA, 25 bp, Homo sapien
aatggacaaaggtggttctggccca

SEQ ID NO: 5194571 - DNA, 25 bp, Homo sapien
tgaaatactagatcttgagaaggcc

SEQ ID NO: 5194572 - DNA, 25 bp, Homo sapien
tgactcaggagttcataggacctac

SEQ ID NO: 5194573 - DNA, 25 bp, Homo sapien
taggacctacataaactggcaaagg

SEQ ID NO: 5194574 - DNA, 25 bp, Homo sapien
ggatctctaaagcactactgagcag

SEQ ID NO: 5194575 - DNA, 25 bp, Homo sapien
cataccgcagtgacttcaaatttga

SEQ ID NO: 5194576 - DNA, 25 bp, Homo sapien
aagttgacaaacctgtacacctttg

SEQ ID NO: 5194577 - DNA, 25 bp, Homo sapien
acctttgtaatcctttttgctgtgc

SEQ ID NO: 5194578 - DNA, 25 bp, Homo sapien
taccgcagtgacttcaaatttgaaa

SEQ ID NO: 5194579 - DNA, 25 bp, Homo sapien
tgcctttgagcaagtaccctagatg

SEQ ID NO: 5194580 - DNA, 25 bp, Homo sapien
ggctgcccagcggaaatttcgattt

SEQ ID NO: 5194581 - DNA, 25 bp, Homo sapien
gacacttatgttaaatcagggccct

SEQ ID NO: 5194582 - DNA, 25 bp, Homo sapien
cagacgtctggacaggcattaccca

SEQ ID NO: 5194583 - DNA, 25 bp, Homo sapien
tccaccaaacactggcaaggaggat

SEQ ID NO: 5194584 - DNA, 25 bp, Homo sapien
ttaagattcaagttacatggcctcc

SEQ ID NO: 5194585 - DNA, 25 bp, Homo sapien
tccatgattggcttagggtaattaa

SEQ ID NO: 5194586 - DNA, 25 bp, Homo sapien
tcttagaggttagaactgcttcaca

SEQ ID NO: 5194587 - DNA, 25 bp, Homo sapien
gatccctttgtttcacctggcatac

SEQ ID NO: 5194588 - DNA, 25 bp, Homo sapien
ccactctcaagaagatgagggtctt

SEQ ID NO: 5194589 - DNA, 25 bp, Homo sapien
tttccagacaactgcaatttgaggc

SEQ ID NO: 5194590 - DNA, 25 bp, Homo sapien
tttgaggcaacttctatgacagtga

SEQ ID NO: 5194591 - DNA, 25 bp, Homo sapien
caatattaacaacagtctggtcatg

SEQ ID NO: 5194592 - DNA, 25 bp, Homo sapien
tttaacaatattaacaacagtctgg

SEQ ID NO: 5194593 - DNA, 25 bp, Homo sapien
taacaacagtctggtcatgaagaaa

SEQ ID NO: 5194594 - DNA, 25 bp, Homo sapien
caacagtctggtcatgaagaaaatt

SEQ ID NO: 5194595 - DNA, 25 bp, Homo sapien
cctgaccggcttctttggaagacac

SEQ ID NO: 5194596 - DNA, 25 bp, Homo sapien
tcctgaccggcttctttggaagaca

SEQ ID NO: 5194597 - DNA, 25 bp, Homo sapien
cttcctgaccggcttctttggaaga

SEQ ID NO: 5194598 - DNA, 25 bp, Homo sapien
gtcttcctgaccggcttctttggaa

SEQ ID NO: 5194599 - DNA, 25 bp, Homo sapien
ccccatctacaaccacagcgggcat

SEQ ID NO: 5194600 - DNA, 25 bp, Homo sapien
ttccccatctacaaccacagcgggc

SEQ ID NO: 5194601 - DNA, 25 bp, Homo sapien
tccccatctacaaccacagcgggca

SEQ ID NO: 5194602 - DNA, 25 bp, Homo sapien
cttccccatctacaaccacagcggg

SEQ ID NO: 5194603 - DNA, 25 bp, Homo sapien
gaagttggtaaattgggcagcctga

SEQ ID NO: 5194604 - DNA, 25 bp, Homo sapien
gatgcaggatctgcaggtcccaagg

SEQ ID NO: 5194605 - DNA, 25 bp, Homo sapien
aaggggaaacggaagccacatccag

SEQ ID NO: 5194606 - DNA, 25 bp, Homo sapien
cctgaggcaccagacgctctgtgtg

SEQ ID NO: 5194607 - DNA, 25 bp, Homo sapien
ctgctggggcgaaaccccgaatccg

SEQ ID NO: 5194608 - DNA, 25 bp, Homo sapien
tggtggtgggcaccccgatcttcct

SEQ ID NO: 5194609 - DNA, 25 bp, Homo sapien
ctgtcccgcgccttccagtggctgg

SEQ ID NO: 5194610 - DNA, 25 bp, Homo sapien
gccgaccgcctgaaagggccgctgt

SEQ ID NO: 5194611 - DNA, 25 bp, Homo sapien
gcagccctcggagcggcgatcgttg

SEQ ID NO: 5194612 - DNA, 25 bp, Homo sapien
tgggaccaaggaccgaatcgaggcc

SEQ ID NO: 5194613 - DNA, 25 bp, Homo sapien
cgaggccggtctgggcgtcagggca

SEQ ID NO: 5194614 - DNA, 25 bp, Homo sapien
gcagctcgaggtctgggtccgggtc

SEQ ID NO: 5194615 - DNA, 25 bp, Homo sapien
agagtcggaggggaagccggagccg

SEQ ID NO: 5194616 - DNA, 25 bp, Homo sapien
agtcagagtcggaggggaagccgga

SEQ ID NO: 5194617 - DNA, 25 bp, Homo sapien
tcagagtcggaggggaagccggagc

SEQ ID NO: 5194618 - DNA, 25 bp, Homo sapien
tcagtcagagtcggaggggaagccg

SEQ ID NO: 5194619 - DNA, 25 bp, Homo sapien
gcgaaacgggagctgaagttggcgc

SEQ ID NO: 5194620 - DNA, 25 bp, Homo sapien
gggcgaaacgggagctgaagttggc

SEQ ID NO: 5194621 - DNA, 25 bp, Homo sapien
ctggggcgaaacgggagctgaagtt

SEQ ID NO: 5194622 - DNA, 25 bp, Homo sapien
tggggcgaaacgggagctgaagttg

SEQ ID NO: 5194623 - DNA, 25 bp, Homo sapien
ttaagatttgttgggcatccgggcc

SEQ ID NO: 5194624 - DNA, 25 bp, Homo sapien
tagaatgcctccaggaaaccgtcgg

SEQ ID NO: 5194625 - DNA, 25 bp, Homo sapien
caataaattgcgagtcccgtaggat

SEQ ID NO: 5194626 - DNA, 25 bp, Homo sapien
tgtgtttgctgaacccctgagagcc

SEQ ID NO: 5194627 - DNA, 25 bp, Homo sapien
cagggcctaggaatttttcacctca

SEQ ID NO: 5194628 - DNA, 25 bp, Homo sapien
tgaaccatgctatccaggttccagg

SEQ ID NO: 5194629 - DNA, 25 bp, Homo sapien
aactatctactaggtcaaagaggca

SEQ ID NO: 5194630 - DNA, 25 bp, Homo sapien
attgcctcccttgtatgtcccagaa

SEQ ID NO: 5194631 - DNA, 25 bp, Homo sapien
tgtcatccagatgaaaccccaatga

SEQ ID NO: 5194632 - DNA, 25 bp, Homo sapien
agcagcgtgcgcctctcatcaagct

SEQ ID NO: 5194633 - DNA, 25 bp, Homo sapien
gtcaaatcgtacacccaggtgcttt

SEQ ID NO: 5194634 - DNA, 25 bp, Homo sapien
gaaggcttagttaactttatctgtc

SEQ ID NO: 5194635 - DNA, 25 bp, Homo sapien
tctttctccctaatccgaagcagtc

SEQ ID NO: 5194636 - DNA, 25 bp, Homo sapien
tctgaaaagctatttagtctcctgc

SEQ ID NO: 5194637 - DNA, 25 bp, Homo sapien
tacatgtagaggtaacacaggaagg

SEQ ID NO: 5194638 - DNA, 25 bp, Homo sapien
ggctgggatcactcaactagtccac

SEQ ID NO: 5194639 - DNA, 25 bp, Homo sapien
ataagtacatgcttacaataagtac

SEQ ID NO: 5194640 - DNA, 25 bp, Homo sapien
acaataagtaaactacgtagcgaag

SEQ ID NO: 5194641 - DNA, 25 bp, Homo sapien
caataagtaaactacgtagcgaaga

SEQ ID NO: 5194642 - DNA, 25 bp, Homo sapien
ctacgtagcgaagagacaaaataag

SEQ ID NO: 5194643 - DNA, 25 bp, Homo sapien
ggaactacaaacagtccacaacatg

SEQ ID NO: 5194644 - DNA, 25 bp, Homo sapien
cagaaaggaagtaaactctccagtc

SEQ ID NO: 5194645 - DNA, 25 bp, Homo sapien
tatacgcacataccacaactgattt

SEQ ID NO: 5194646 - DNA, 25 bp, Homo sapien
cactggaggttaggatgtcaatgta

SEQ ID NO: 5194647 - DNA, 25 bp, Homo sapien
gatctggtgtctcatgatgacctgc

SEQ ID NO: 5194648 - DNA, 25 bp, Homo sapien
caagatgctgttagatctggtgtct

SEQ ID NO: 5194649 - DNA, 25 bp, Homo sapien
tggtgtctcatgatgacctgcttcc

SEQ ID NO: 5194650 - DNA, 25 bp, Homo sapien
agatgctgttagatctggtgtctca

SEQ ID NO: 5194651 - DNA, 25 bp, Homo sapien
gaagccaagtcccaacatcctgtag

SEQ ID NO: 5194652 - DNA, 25 bp, Homo sapien
tatttggcaagtggacgagatcagc

SEQ ID NO: 5194653 - DNA, 25 bp, Homo sapien
ctctgatggcttcgtagaatggact

SEQ ID NO: 5194654 - DNA, 25 bp, Homo sapien
cgcgcgcgcgcaagatgaatatcag

SEQ ID NO: 5194655 - DNA, 25 bp, Homo sapien
ggagctcttggtcctgtgatgccaa

SEQ ID NO: 5194656 - DNA, 25 bp, Homo sapien
ggtcacccattggacactcatgcag

SEQ ID NO: 5194657 - DNA, 25 bp, Homo sapien
cagttgaagagttgttggtctcagc

SEQ ID NO: 5194658 - DNA, 25 bp, Homo sapien
taagaaacagtgaggcaactggtgc

SEQ ID NO: 5194659 - DNA, 25 bp, Homo sapien
aagatggggaccgtcccggcagctc

SEQ ID NO: 5194660 - DNA, 25 bp, Homo sapien
aaggttccggcccacagaagccgcg

SEQ ID NO: 5194661 - DNA, 25 bp, Homo sapien
ccggcagctcttgcggcctgggtgg

SEQ ID NO: 5194662 - DNA, 25 bp, Homo sapien
cggccagcctaaagcgctccaagaa

SEQ ID NO: 5194663 - DNA, 25 bp, Homo sapien
ttctcattagccaccgagagttact

SEQ ID NO: 5194664 - DNA, 25 bp, Homo sapien
cttctcattagccaccgagagttac

SEQ ID NO: 5194665 - DNA, 25 bp, Homo sapien
tctcattagccaccgagagttactc

SEQ ID NO: 5194666 - DNA, 25 bp, Homo sapien
tcattagccaccgagagttactcac

SEQ ID NO: 5194667 - DNA, 25 bp, Homo sapien
taacagaccaaaagagtgacgctgg

SEQ ID NO: 5194668 - DNA, 25 bp, Homo sapien
tgatgtgagcgatgaaggccctaac

SEQ ID NO: 5194669 - DNA, 25 bp, Homo sapien
gaaactttacagagatggccacaag

SEQ ID NO: 5194670 - DNA, 25 bp, Homo sapien
gacgctggtgtacatctgcggccca

SEQ ID NO: 5194671 - DNA, 25 bp, Homo sapien
gatgacagattttggcctccagggc

SEQ ID NO: 5194672 - DNA, 25 bp, Homo sapien
aatttgatgacagattttggcctcc

SEQ ID NO: 5194673 - DNA, 25 bp, Homo sapien
ctcaatttgatgacagattttggcc

SEQ ID NO: 5194674 - DNA, 25 bp, Homo sapien
tttcattatcaccattttcagccat

SEQ ID NO: 5194675 - DNA, 25 bp, Homo sapien
tgtcccgtggcaaattgaagtcgcc

SEQ ID NO: 5194676 - DNA, 25 bp, Homo sapien
cttgtcccgtggcaaattgaagtcg

SEQ ID NO: 5194677 - DNA, 25 bp, Homo sapien
gtcccgtggcaaattgaagtcgcca

SEQ ID NO: 5194678 - DNA, 25 bp, Homo sapien
ttgtcccgtggcaaattgaagtcgc

SEQ ID NO: 5194679 - DNA, 25 bp, Homo sapien
tcacttcaggtaggggtttgcttgg

SEQ ID NO: 5194680 - DNA, 25 bp, Homo sapien
atttgctcaatgcttccacaattac

SEQ ID NO: 5194681 - DNA, 25 bp, Homo sapien
tccacaattacattaaagtctgttg

SEQ ID NO: 5194682 - DNA, 25 bp, Homo sapien
ggtttgcttggagaccttctgattt

SEQ ID NO: 5194683 - DNA, 25 bp, Homo sapien
ttaaatgcattacaggcccacttac

SEQ ID NO: 5194684 - DNA, 25 bp, Homo sapien
ttaagaatattacgaaaggacatac

SEQ ID NO: 5194685 - DNA, 25 bp, Homo sapien
gctgtgattcctgagcccttattct

SEQ ID NO: 5194686 - DNA, 25 bp, Homo sapien
aaggacatacagtaattagtgaggc

SEQ ID NO: 5194687 - DNA, 25 bp, Homo sapien
ctccaacgtgagcaacaggatgaga

SEQ ID NO: 5194688 - DNA, 25 bp, Homo sapien
tgcactccaacgtgagcaacaggat

SEQ ID NO: 5194689 - DNA, 25 bp, Homo sapien
cactccaacgtgagcaacaggatga

SEQ ID NO: 5194690 - DNA, 25 bp, Homo sapien
ctgcactccaacgtgagcaacagga

SEQ ID NO: 5194691 - DNA, 25 bp, Homo sapien
gaacagctaataggcaataggtgct

SEQ ID NO: 5194692 - DNA, 25 bp, Homo sapien
gataaaacttaggactaggcatggt

SEQ ID NO: 5194693 - DNA, 25 bp, Homo sapien
taacagccttgtttaggagccacta

SEQ ID NO: 5194694 - DNA, 25 bp, Homo sapien
tcttgaaatgaacccaggatatacc

SEQ ID NO: 5194695 - DNA, 25 bp, Homo sapien
catctgaatatttagtacttgacct

SEQ ID NO: 5194696 - DNA, 25 bp, Homo sapien
accattcttttatgtcatcaagagt

SEQ ID NO: 5194697 - DNA, 25 bp, Homo sapien
gtacttgacctttatcttctaacca

SEQ ID NO: 5194698 - DNA, 25 bp, Homo sapien
tcaagagttgcatcagttgggaagc

SEQ ID NO: 5194699 - DNA, 25 bp, Homo sapien
ctagaaaaagtctgtattatcatac

SEQ ID NO: 5194700 - DNA, 25 bp, Homo sapien
tttaagttatgtcccatatatttta

SEQ ID NO: 5194701 - DNA, 25 bp, Homo sapien
ttaagttatgtcccatatattttaa

SEQ ID NO: 5194702 - DNA, 25 bp, Homo sapien
aaactagaaaaagtctgtattatca

SEQ ID NO: 5194703 - DNA, 25 bp, Homo sapien
gattcaatgctatcaaacacaacaa

SEQ ID NO: 5194704 - DNA, 25 bp, Homo sapien
aaaagtattagcaggtctgtttctt

SEQ ID NO: 5194705 - DNA, 25 bp, Homo sapien
tctgtttctttgtacttctggccag

SEQ ID NO: 5194706 - DNA, 25 bp, Homo sapien
gccaggggtctctacaaatttctta

SEQ ID NO: 5194707 - DNA, 25 bp, Homo sapien
aagactgcagattattttgaataac

SEQ ID NO: 5194708 - DNA, 25 bp, Homo sapien
cagcaatgaatgttgcacacgctta

SEQ ID NO: 5194709 - DNA, 25 bp, Homo sapien
cacgagaacaaagttaagactgcag

SEQ ID NO: 5194710 - DNA, 25 bp, Homo sapien
caaggaatttactctctcatgtttt

SEQ ID NO: 5194711 - DNA, 25 bp, Homo sapien
gctcttaatttagcttccactttat

SEQ ID NO: 5194712 - DNA, 25 bp, Homo sapien
tttagctcttaatttagcttccact

SEQ ID NO: 5194713 - DNA, 25 bp, Homo sapien
tgtttagctcttaatttagcttcca

SEQ ID NO: 5194714 - DNA, 25 bp, Homo sapien
tagctcttaatttagcttccacttt

SEQ ID NO: 5194715 - DNA, 25 bp, Homo sapien
tcaaggcagcttaagatctcagtgt

SEQ ID NO: 5194716 - DNA, 25 bp, Homo sapien
tcactagcaaagagaaaggtctact

SEQ ID NO: 5194717 - DNA, 25 bp, Homo sapien
gatcgtccaatgctagactgcaatg

SEQ ID NO: 5194718 - DNA, 25 bp, Homo sapien
tttggccctgagattgtcaaggcag

SEQ ID NO: 5194719 - DNA, 25 bp, Homo sapien
tttcagcatcttcttctaacttttg

SEQ ID NO: 5194720 - DNA, 25 bp, Homo sapien
catttcagcatcttcttctaacttt

SEQ ID NO: 5194721 - DNA, 25 bp, Homo sapien
tcagcatcttcttctaacttttgtt

SEQ ID NO: 5194722 - DNA, 25 bp, Homo sapien
taacttttgttttgcttcttgctcc

SEQ ID NO: 5194723 - DNA, 25 bp, Homo sapien
tcttttgctcctctgacgaagtcta

SEQ ID NO: 5194724 - DNA, 25 bp, Homo sapien
aagtatgtgtaaatcttctctacag

SEQ ID NO: 5194725 - DNA, 25 bp, Homo sapien
gctcctctgacgaagtctatccatt

SEQ ID NO: 5194726 - DNA, 25 bp, Homo sapien
tctgatcatctaaatcacccgaaaa

SEQ ID NO: 5194727 - DNA, 25 bp, Homo sapien
tacagattttcaaactgattgctaa

SEQ ID NO: 5194728 - DNA, 25 bp, Homo sapien
cagattttcaaactgattgctaaaa

SEQ ID NO: 5194729 - DNA, 25 bp, Homo sapien
actgattgctaaaaaggatagggat

SEQ ID NO: 5194730 - DNA, 25 bp, Homo sapien
ctaaaaaggatagggatgtatccaa

SEQ ID NO: 5194731 - DNA, 25 bp, Homo sapien
acttccatttgtttagggattcttg

SEQ ID NO: 5194732 - DNA, 25 bp, Homo sapien
agtacttcccaagtcacttctttgt

SEQ ID NO: 5194733 - DNA, 25 bp, Homo sapien
ggctttacccaatgcttccttggct

SEQ ID NO: 5194734 - DNA, 25 bp, Homo sapien
tgtaggttaccattatttgcatctt

SEQ ID NO: 5194735 - DNA, 25 bp, Homo sapien
actttttttaagtctcttgtcaatg

SEQ ID NO: 5194736 - DNA, 25 bp, Homo sapien
cttttcctttaccagacccaggctg

SEQ ID NO: 5194737 - DNA, 25 bp, Homo sapien
agcaaatttcgttttcttgccctga

SEQ ID NO: 5194738 - DNA, 25 bp, Homo sapien
tcactagcaaatttcgttttcttgc

SEQ ID NO: 5194739 - DNA, 25 bp, Homo sapien
ctagcaaatttcgttttcttgccct

SEQ ID NO: 5194740 - DNA, 25 bp, Homo sapien
tcttctcttgctcttttcacaggtc

SEQ ID NO: 5194741 - DNA, 25 bp, Homo sapien
ctactggtctccagcaccattttct

SEQ ID NO: 5194742 - DNA, 25 bp, Homo sapien
gttgtttggatgcaggttcttcttt

SEQ ID NO: 5194743 - DNA, 25 bp, Homo sapien
tttctgttgtttggatgcaggttct

SEQ ID NO: 5194744 - DNA, 25 bp, Homo sapien
tcctttctcacaggtggacattgaa

SEQ ID NO: 5194745 - DNA, 25 bp, Homo sapien
ttcctttctcacaggtggacattga

SEQ ID NO: 5194746 - DNA, 25 bp, Homo sapien
accataaatggcctgtgggaaaggc

SEQ ID NO: 5194747 - DNA, 25 bp, Homo sapien
tgggaaaggcccatcgtcaatagct

SEQ ID NO: 5194748 - DNA, 25 bp, Homo sapien
ctagtgttaccaactttcctgtgta

SEQ ID NO: 5194749 - DNA, 25 bp, Homo sapien
aagccagcctaggagacaccataaa

SEQ ID NO: 5194750 - DNA, 25 bp, Homo sapien
gacctgccagcatcatacaagtttc

SEQ ID NO: 5194751 - DNA, 25 bp, Homo sapien
tttggctggtctacattcggtattg

SEQ ID NO: 5194752 - DNA, 25 bp, Homo sapien
ttacagaacttcgatatgacctgcc

SEQ ID NO: 5194753 - DNA, 25 bp, Homo sapien
cagtaagtctcttgattttggctgg

SEQ ID NO: 5194754 - DNA, 25 bp, Homo sapien
aatgatccctgaaagtatagtcttg

SEQ ID NO: 5194755 - DNA, 25 bp, Homo sapien
cttctctagtaacgaactatagaaa

SEQ ID NO: 5194756 - DNA, 25 bp, Homo sapien
tctagtaacgaactatagaaatgat

SEQ ID NO: 5194757 - DNA, 25 bp, Homo sapien
tacagtgctctacactttcggagaa

SEQ ID NO: 5194758 - DNA, 25 bp, Homo sapien
gatcgctactttttgagccgagact

SEQ ID NO: 5194759 - DNA, 25 bp, Homo sapien
cactcctgtgagaattgcaagtgac

SEQ ID NO: 5194760 - DNA, 25 bp, Homo sapien
ctctgggccatacaacaaagtgact

SEQ ID NO: 5194761 - DNA, 25 bp, Homo sapien
cttgggaaacaagaagagtcactct

SEQ ID NO: 5194762 - DNA, 25 bp, Homo sapien
tatcaaagtccagcgggcgacagaa

SEQ ID NO: 5194763 - DNA, 25 bp, Homo sapien
tactgttatcaaagtccagcgggcg

SEQ ID NO: 5194764 - DNA, 25 bp, Homo sapien
cattcctactgttatcaaagtccag

SEQ ID NO: 5194765 - DNA, 25 bp, Homo sapien
gagatgtacattcctactgttatca

SEQ ID NO: 5194766 - DNA, 25 bp, Homo sapien
ttctttatttgcatagactacagga

SEQ ID NO: 5194767 - DNA, 25 bp, Homo sapien
ctttatttgcatagactacaggaat

SEQ ID NO: 5194768 - DNA, 25 bp, Homo sapien
tctttatttgcatagactacaggaa

SEQ ID NO: 5194769 - DNA, 25 bp, Homo sapien
ctgctggcccccgacggccgccgcg

SEQ ID NO: 5194770 - DNA, 25 bp, Homo sapien
gcggccgccgccgccatgatgagag

SEQ ID NO: 5194771 - DNA, 25 bp, Homo sapien
cgccgcggccgccgccgccatgatg

SEQ ID NO: 5194772 - DNA, 25 bp, Homo sapien
ccgcggccgccgccgccatgatgag

SEQ ID NO: 5194773 - DNA, 25 bp, Homo sapien
agctcctcagcacctgcgcggttgt

SEQ ID NO: 5194774 - DNA, 25 bp, Homo sapien
gtggccgccttgtctagggccagcc

SEQ ID NO: 5194775 - DNA, 25 bp, Homo sapien
ccgccttgaggtgcgcggcggtggc

SEQ ID NO: 5194776 - DNA, 25 bp, Homo sapien
ctgcgcggttgtccggccggctgag

SEQ ID NO: 5194777 - DNA, 25 bp, Homo sapien
gcggccagcggccgctcggcgctca

SEQ ID NO: 5194778 - DNA, 25 bp, Homo sapien
cgcggccagcggccgctcggcgctc

SEQ ID NO: 5194779 - DNA, 25 bp, Homo sapien
ccgcggccagcggccgctcggcgct

SEQ ID NO: 5194780 - DNA, 25 bp, Homo sapien
cggccagcggccgctcggcgctcag

SEQ ID NO: 5194781 - DNA, 25 bp, Homo sapien
gccgcgcagaactcgtcgtagccgc

SEQ ID NO: 5194782 - DNA, 25 bp, Homo sapien
agatgccgcacgtccggcagcggta

SEQ ID NO: 5194783 - DNA, 25 bp, Homo sapien
agagcgccgcgggatcgtaggcccg

SEQ ID NO: 5194784 - DNA, 25 bp, Homo sapien
acgaagttggctgtccagaccaggc

SEQ ID NO: 5194785 - DNA, 25 bp, Homo sapien
gcctggctgcggaacatgttgaagt

SEQ ID NO: 5194786 - DNA, 25 bp, Homo sapien
tgtggtcgccctggtggaagcactc

SEQ ID NO: 5194787 - DNA, 25 bp, Homo sapien
gctctcccgcatcacgttgctgtcc

SEQ ID NO: 5194788 - DNA, 25 bp, Homo sapien
aagtcgtgtccggtgtggtcgccct

SEQ ID NO: 5194789 - DNA, 25 bp, Homo sapien
ttaacaccaagtttcaataagcaga

SEQ ID NO: 5194790 - DNA, 25 bp, Homo sapien
cattaacaccaagtttcaataagca

SEQ ID NO: 5194791 - DNA, 25 bp, Homo sapien
attaacaccaagtttcaataagcag

SEQ ID NO: 5194792 - DNA, 25 bp, Homo sapien
taacaccaagtttcaataagcagaa

SEQ ID NO: 5194793 - DNA, 25 bp, Homo sapien
gagggctctgccttaagcaagtgct

SEQ ID NO: 5194794 - DNA, 25 bp, Homo sapien
cagtctgaacgtgtgtcccctacaa

SEQ ID NO: 5194795 - DNA, 25 bp, Homo sapien
gagctggtgctagaacaagttaaga

SEQ ID NO: 5194796 - DNA, 25 bp, Homo sapien
gccacaggatgaagcgtatctttga

SEQ ID NO: 5194797 - DNA, 25 bp, Homo sapien
ttttataaagatgaggtcttaacat

SEQ ID NO: 5194798 - DNA, 25 bp, Homo sapien
cctctatatcccagactcaagtaac

SEQ ID NO: 5194799 - DNA, 25 bp, Homo sapien
tcaagtgattcaccaccctcaccct

SEQ ID NO: 5194800 - DNA, 25 bp, Homo sapien
ttctagtttttataaagatgaggtc

SEQ ID NO: 5194801 - DNA, 25 bp, Homo sapien
tcccagaaatctacacagagtgctc

SEQ ID NO: 5194802 - DNA, 25 bp, Homo sapien
gggccaaactctatgaagctgagaa

SEQ ID NO: 5194803 - DNA, 25 bp, Homo sapien
tgggttaaccccttcatccaaagca

SEQ ID NO: 5194804 - DNA, 25 bp, Homo sapien
tccaggccacagtaaaggaaggaga

SEQ ID NO: 5194805 - DNA, 25 bp, Homo sapien
ctcaatttgccttaaagagccagat

SEQ ID NO: 5194806 - DNA, 25 bp, Homo sapien
tcaatttgccttaaagagccagata

SEQ ID NO: 5194807 - DNA, 25 bp, Homo sapien
gcctcaatttgccttaaagagccag

SEQ ID NO: 5194808 - DNA, 25 bp, Homo sapien
cctcaatttgccttaaagagccaga

SEQ ID NO: 5194809 - DNA, 25 bp, Homo sapien
taagaaagaacctatacatctttct

SEQ ID NO: 5194810 - DNA, 25 bp, Homo sapien
ctaattgcctgacaaaaagatcctg

SEQ ID NO: 5194811 - DNA, 25 bp, Homo sapien
aaagataaaccagtcattactagac

SEQ ID NO: 5194812 - DNA, 25 bp, Homo sapien
tccgtattgcagctaaggacagcac

SEQ ID NO: 5194813 - DNA, 25 bp, Homo sapien
tcgctaataggaaggactaaagtac

SEQ ID NO: 5194814 - DNA, 25 bp, Homo sapien
ggactaaagtacagctccatcccat

SEQ ID NO: 5194815 - DNA, 25 bp, Homo sapien
cccatgtctaaaactgttagataaa

SEQ ID NO: 5194816 - DNA, 25 bp, Homo sapien
atttctacatcgctaataggaagga

SEQ ID NO: 5194817 - DNA, 25 bp, Homo sapien
ttggataattcatggagattcctgg

SEQ ID NO: 5194818 - DNA, 25 bp, Homo sapien
gccctgatgatataatctgtgccct

SEQ ID NO: 5194819 - DNA, 25 bp, Homo sapien
ccgccccatgttaaaagccctgatg

SEQ ID NO: 5194820 - DNA, 25 bp, Homo sapien
aattcacctatacatattcctgggc

SEQ ID NO: 5194821 - DNA, 25 bp, Homo sapien
tttaaagatgaatgctgaagcatgt

SEQ ID NO: 5194822 - DNA, 25 bp, Homo sapien
tctttaaagatgaatgctgaagcat

SEQ ID NO: 5194823 - DNA, 25 bp, Homo sapien
ctttaaagatgaatgctgaagcatg

SEQ ID NO: 5194824 - DNA, 25 bp, Homo sapien
tcaagcaaggtcatgaacaattcac

SEQ ID NO: 5194825 - DNA, 25 bp, Homo sapien
tagtgaaataactgacccatgcaat

SEQ ID NO: 5194826 - DNA, 25 bp, Homo sapien
tgcaattgagccattagaggaaagc

SEQ ID NO: 5194827 - DNA, 25 bp, Homo sapien
caaaacaagtaccaaacagccaata

SEQ ID NO: 5194828 - DNA, 25 bp, Homo sapien
tcaatatagtggaaagaagacttaa

SEQ ID NO: 5194829 - DNA, 25 bp, Homo sapien
taatgaactggaccttaaagcacag

SEQ ID NO: 5194830 - DNA, 25 bp, Homo sapien
aaatggagcctggaagataattaac

SEQ ID NO: 5194831 - DNA, 25 bp, Homo sapien
gtgctaacatcaatggaccacaatg

SEQ ID NO: 5194832 - DNA, 25 bp, Homo sapien
ccttctcttaagtactgaataagac

SEQ ID NO: 5194833 - DNA, 25 bp, Homo sapien
ctggttcattatagccttctcttaa

SEQ ID NO: 5194834 - DNA, 25 bp, Homo sapien
aatcttggaagaacaaattcagaca

SEQ ID NO: 5194835 - DNA, 25 bp, Homo sapien
cagtaagtctttagggacacaggga

SEQ ID NO: 5194836 - DNA, 25 bp, Homo sapien
ctcccattttagtcaggtcttctaa

SEQ ID NO: 5194837 - DNA, 25 bp, Homo sapien
tgctcctcccattttagtcaggtct

SEQ ID NO: 5194838 - DNA, 25 bp, Homo sapien
tcctcccattttagtcaggtcttct

SEQ ID NO: 5194839 - DNA, 25 bp, Homo sapien
ggaaatttgaggttccaaaagctga

SEQ ID NO: 5194840 - DNA, 25 bp, Homo sapien
aagtcagatctttgtagttttgttg

SEQ ID NO: 5194841 - DNA, 25 bp, Homo sapien
ttgttggtttgtcaaaacctgagta

SEQ ID NO: 5194842 - DNA, 25 bp, Homo sapien
cagaagtcagatctttgtagttttg

SEQ ID NO: 5194843 - DNA, 25 bp, Homo sapien
tggtttgtcaaaacctgagtaagaa

SEQ ID NO: 5194844 - DNA, 25 bp, Homo sapien
aataagacatgatccgaactttaaa

SEQ ID NO: 5194845 - DNA, 25 bp, Homo sapien
ataagacatgatccgaactttaaag

SEQ ID NO: 5194846 - DNA, 25 bp, Homo sapien
ctaacaatccgagaatacacagcat

SEQ ID NO: 5194847 - DNA, 25 bp, Homo sapien
cacagcatgtttataccaaataatg

SEQ ID NO: 5194848 - DNA, 25 bp, Homo sapien
tgcttatgtttagcactaacaatcc

SEQ ID NO: 5194849 - DNA, 25 bp, Homo sapien
gaatacacagcatgtttataccaaa

SEQ ID NO: 5194850 - DNA, 25 bp, Homo sapien
ggctcctgcacaccatatacaagct

SEQ ID NO: 5194851 - DNA, 25 bp, Homo sapien
gatatgtaagtccagagctctttaa

SEQ ID NO: 5194852 - DNA, 25 bp, Homo sapien
gagctctttaaagctataaggtact

SEQ ID NO: 5194853 - DNA, 25 bp, Homo sapien
aagcttatcctcaggatatgtaagt

SEQ ID NO: 5194854 - DNA, 25 bp, Homo sapien
tctgaagaatccacttgtcccaaag

SEQ ID NO: 5194855 - DNA, 25 bp, Homo sapien
gaatccacttgtcccaaagttcctg

SEQ ID NO: 5194856 - DNA, 25 bp, Homo sapien
cacttgtcccaaagttcctgttgcg

SEQ ID NO: 5194857 - DNA, 25 bp, Homo sapien
ctcatctgaagaatccacttgtccc

SEQ ID NO: 5194858 - DNA, 25 bp, Homo sapien
cccagaccttgactaccatcctgat

SEQ ID NO: 5194859 - DNA, 25 bp, Homo sapien
gcccagaccttgactaccatcctga

SEQ ID NO: 5194860 - DNA, 25 bp, Homo sapien
ccagaccttgactaccatcctgatc

SEQ ID NO: 5194861 - DNA, 25 bp, Homo sapien
tataactaataacccataaaccata

SEQ ID NO: 5194862 - DNA, 25 bp, Homo sapien
atttatcagttaatgattgaagttg

SEQ ID NO: 5194863 - DNA, 25 bp, Homo sapien
tatcagttaatgattgaagttgctc

SEQ ID NO: 5194864 - DNA, 25 bp, Homo sapien
gaaatttatcagttaatgattgaag

SEQ ID NO: 5194865 - DNA, 25 bp, Homo sapien
ctgcacatgaaaaatgaaatttatc

SEQ ID NO: 5194866 - DNA, 25 bp, Homo sapien
tctaggaagcttttatgcttcaaaa

SEQ ID NO: 5194867 - DNA, 25 bp, Homo sapien
catgttgagtaagaaagttaccatc

SEQ ID NO: 5194868 - DNA, 25 bp, Homo sapien
atctggaagcatgttgagtaagaaa

SEQ ID NO: 5194869 - DNA, 25 bp, Homo sapien
tagttcttctaggaagcttttatgc

SEQ ID NO: 5194870 - DNA, 25 bp, Homo sapien
gaaagcataatgctgaacaaaagtt

SEQ ID NO: 5194871 - DNA, 25 bp, Homo sapien
gcataatgctgaacaaaagtttttg

SEQ ID NO: 5194872 - DNA, 25 bp, Homo sapien
aagcataatgctgaacaaaagtttt

SEQ ID NO: 5194873 - DNA, 25 bp, Homo sapien
tgaaagcataatgctgaacaaaagt

SEQ ID NO: 5194874 - DNA, 25 bp, Homo sapien
tgtgtctgattcatgacttttcttc

SEQ ID NO: 5194875 - DNA, 25 bp, Homo sapien
tcatgacttttcttcagtgttttca

SEQ ID NO: 5194876 - DNA, 25 bp, Homo sapien
gtctgattcatgacttttcttcagt

SEQ ID NO: 5194877 - DNA, 25 bp, Homo sapien
catgacttttcttcagtgttttcat

SEQ ID NO: 5194878 - DNA, 25 bp, Homo sapien
gaacaactgaacactaatatgcaca

SEQ ID NO: 5194879 - DNA, 25 bp, Homo sapien
tgttacctgtctggctagctcctca

SEQ ID NO: 5194880 - DNA, 25 bp, Homo sapien
tgtagctcacttttaataaggcaac

SEQ ID NO: 5194881 - DNA, 25 bp, Homo sapien
gcacagtgaccataatatccagcag

SEQ ID NO: 5194882 - DNA, 25 bp, Homo sapien
tgacatgtacactatggcaactttt

SEQ ID NO: 5194883 - DNA, 25 bp, Homo sapien
tcaagactagttatacaaagttcac

SEQ ID NO: 5194884 - DNA, 25 bp, Homo sapien
ttttcaaagatgtccgtaacaaaca

SEQ ID NO: 5194885 - DNA, 25 bp, Homo sapien
tgaataacaaaactacaagtgcttt

SEQ ID NO: 5194886 - DNA, 25 bp, Homo sapien
acagttcactaccacatgtaaacta

SEQ ID NO: 5194887 - DNA, 25 bp, Homo sapien
gaggccagtaagtgttattcttcag

SEQ ID NO: 5194888 - DNA, 25 bp, Homo sapien
aagtgttattcttcagtaatgcttc

SEQ ID NO: 5194889 - DNA, 25 bp, Homo sapien
aataaaatcactaacaagaggccag

SEQ ID NO: 5194890 - DNA, 25 bp, Homo sapien
tgaaagaaagatacaaagttcatcc

SEQ ID NO: 5194891 - DNA, 25 bp, Homo sapien
aagttcatccatgtaactaacaaac

SEQ ID NO: 5194892 - DNA, 25 bp, Homo sapien
aagaaagatacaaagttcatccatg

SEQ ID NO: 5194893 - DNA, 25 bp, Homo sapien
aaagttcatccatgtaactaacaaa

SEQ ID NO: 5194894 - DNA, 25 bp, Homo sapien
catagtaggtctgagactcaaattc

SEQ ID NO: 5194895 - DNA, 25 bp, Homo sapien
taaaagcccccacattggctgtgca

SEQ ID NO: 5194896 - DNA, 25 bp, Homo sapien
tccacatgctcgtttagttctcgct

SEQ ID NO: 5194897 - DNA, 25 bp, Homo sapien
gcagcaaaggcagcatagtaggtct

SEQ ID NO: 5194898 - DNA, 25 bp, Homo sapien
gaatgtcttatctaggaaccagacg

SEQ ID NO: 5194899 - DNA, 25 bp, Homo sapien
gaaccagacgctcctataactgaga

SEQ ID NO: 5194900 - DNA, 25 bp, Homo sapien
aagttactctctcagatactgccag

SEQ ID NO: 5194901 - DNA, 25 bp, Homo sapien
gaatgatgccatgtactttatagga

SEQ ID NO: 5194902 - DNA, 25 bp, Homo sapien
tatctaacaacatttcgggtatact

SEQ ID NO: 5194903 - DNA, 25 bp, Homo sapien
ctcgtctacgaagttaatagcatca

SEQ ID NO: 5194904 - DNA, 25 bp, Homo sapien
tcgtctacgaagttaatagcatcaa

SEQ ID NO: 5194905 - DNA, 25 bp, Homo sapien
gaagagcttcaaggcaatatctaac

SEQ ID NO: 5194906 - DNA, 25 bp, Homo sapien
taatgctgtccctctcccctccctc

SEQ ID NO: 5194907 - DNA, 25 bp, Homo sapien
gctgtccctctcccctccctccacc

SEQ ID NO: 5194908 - DNA, 25 bp, Homo sapien
atgctgtccctctcccctccctcca

SEQ ID NO: 5194909 - DNA, 25 bp, Homo sapien
ctaatgctgtccctctcccctccct

SEQ ID NO: 5194910 - DNA, 25 bp, Homo sapien
tggcccagggtggagtatggtggca

SEQ ID NO: 5194911 - DNA, 25 bp, Homo sapien
agtatggtggcacgatcacagttcg

SEQ ID NO: 5194912 - DNA, 25 bp, Homo sapien
atggtggcacgatcacagttcgctg

SEQ ID NO: 5194913 - DNA, 25 bp, Homo sapien
ggagtatggtggcacgatcacagtt

SEQ ID NO: 5194914 - DNA, 25 bp, Homo sapien
acatagcatagtaacgatgtagtgg

SEQ ID NO: 5194915 - DNA, 25 bp, Homo sapien
aaacatagcatagtaacgatgtagt

SEQ ID NO: 5194916 - DNA, 25 bp, Homo sapien
catagcatagtaacgatgtagtggc

SEQ ID NO: 5194917 - DNA, 25 bp, Homo sapien
aacatagcatagtaacgatgtagtg

SEQ ID NO: 5194918 - DNA, 25 bp, Homo sapien
acatttcctgatctggtaaaacaga

SEQ ID NO: 5194919 - DNA, 25 bp, Homo sapien
catttcctgatctggtaaaacagaa

SEQ ID NO: 5194920 - DNA, 25 bp, Homo sapien
gactggacatacgtcatggcttgtc

SEQ ID NO: 5194921 - DNA, 25 bp, Homo sapien
tgctgtggatttctgcaagacttgc

SEQ ID NO: 5194922 - DNA, 25 bp, Homo sapien
taaatgtcaggatcaatcatggaat

SEQ ID NO: 5194923 - DNA, 25 bp, Homo sapien
caggatcaatcatggaattacagaa

SEQ ID NO: 5194924 - DNA, 25 bp, Homo sapien
acagacctgaagacagatagtccct

SEQ ID NO: 5194925 - DNA, 25 bp, Homo sapien
tgaagacagatagtccctcccagag

SEQ ID NO: 5194926 - DNA, 25 bp, Homo sapien
tttgacatcttgaggggcattacag

SEQ ID NO: 5194927 - DNA, 25 bp, Homo sapien
tctcacccaagctggtgcaacctca

SEQ ID NO: 5194928 - DNA, 25 bp, Homo sapien
aatctgggtcaagtctagaagcaca

SEQ ID NO: 5194929 - DNA, 25 bp, Homo sapien
ataatctgggtcaagtctagaagca

SEQ ID NO: 5194930 - DNA, 25 bp, Homo sapien
ctgggtcaagtctagaagcacaaac

SEQ ID NO: 5194931 - DNA, 25 bp, Homo sapien
tctgggtcaagtctagaagcacaaa

SEQ ID NO: 5194932 - DNA, 25 bp, Homo sapien
ctaaatgtaaacgaagactcaaaag

SEQ ID NO: 5194933 - DNA, 25 bp, Homo sapien
cacaagaaatgtaagagcgccttct

SEQ ID NO: 5194934 - DNA, 25 bp, Homo sapien
tctaacatcgacctctcatgctctg

SEQ ID NO: 5194935 - DNA, 25 bp, Homo sapien
gatgccattgtcaacaaatccacta

SEQ ID NO: 5194936 - DNA, 25 bp, Homo sapien
gccttgttgcatagaacctccaggt

SEQ ID NO: 5194937 - DNA, 25 bp, Homo sapien
gataaaactgattcaaagctgtaac

SEQ ID NO: 5194938 - DNA, 25 bp, Homo sapien
ggaataatgccacttttgggattag

SEQ ID NO: 5194939 - DNA, 25 bp, Homo sapien
ggagccttaaaatcagctacagctg

SEQ ID NO: 5194940 - DNA, 25 bp, Homo sapien
gaagcacgtaactgctacttccttc

SEQ ID NO: 5194941 - DNA, 25 bp, Homo sapien
ttttcatttagacaacgtgttgagg

SEQ ID NO: 5194942 - DNA, 25 bp, Homo sapien
cttcaaaatgggcattggtttttca

SEQ ID NO: 5194943 - DNA, 25 bp, Homo sapien
tgttgagggagtcaagaagcacgta

SEQ ID NO: 5194944 - DNA, 25 bp, Homo sapien
tcaaactcttgatcccagacttcag

SEQ ID NO: 5194945 - DNA, 25 bp, Homo sapien
gggtcaaactcttgatcccagactt

SEQ ID NO: 5194946 - DNA, 25 bp, Homo sapien
gacggggtcaaactcttgatcccag

SEQ ID NO: 5194947 - DNA, 25 bp, Homo sapien
ggggtcaaactcttgatcccagact

SEQ ID NO: 5194948 - DNA, 25 bp, Homo sapien
tatctgtccattgcagactgcacat

SEQ ID NO: 5194949 - DNA, 25 bp, Homo sapien
ggtaaactgttcgaagaatgaccat

SEQ ID NO: 5194950 - DNA, 25 bp, Homo sapien
aatgcagtatatctgtccattgcag

SEQ ID NO: 5194951 - DNA, 25 bp, Homo sapien
tctctacggtaaactgttcgaagaa

SEQ ID NO: 5194952 - DNA, 25 bp, Homo sapien
taagcatcacataaagcaaacggct

SEQ ID NO: 5194953 - DNA, 25 bp, Homo sapien
aactctgtcttccagtgatggccca

SEQ ID NO: 5194954 - DNA, 25 bp, Homo sapien
gatggcccacaagacgcttttataa

SEQ ID NO: 5194955 - DNA, 25 bp, Homo sapien
gaagcaggatgagccactttcactc

SEQ ID NO: 5194956 - DNA, 25 bp, Homo sapien
ttcttatatggaggccagggatttc

SEQ ID NO: 5194957 - DNA, 25 bp, Homo sapien
ttacagtgcaaaagtctcataagac

SEQ ID NO: 5194958 - DNA, 25 bp, Homo sapien
gctaggatggagtgatgtccttttc

SEQ ID NO: 5194959 - DNA, 25 bp, Homo sapien
gcagagtgaatagcacaatgtgtaa

SEQ ID NO: 5194960 - DNA, 25 bp, Homo sapien
acagattttgatgatccatcaaaat

SEQ ID NO: 5194961 - DNA, 25 bp, Homo sapien
ctgacagattttgatgatccatcaa

SEQ ID NO: 5194962 - DNA, 25 bp, Homo sapien
cagagtacatgttctgacagatttt

SEQ ID NO: 5194963 - DNA, 25 bp, Homo sapien
agagtacatgttctgacagattttg

SEQ ID NO: 5194964 - DNA, 25 bp, Homo sapien
caagtcctaattcaatcagatataa

SEQ ID NO: 5194965 - DNA, 25 bp, Homo sapien
ttcaagtcctaattcaatcagatat

SEQ ID NO: 5194966 - DNA, 25 bp, Homo sapien
gaattttcaagtcctaattcaatca

SEQ ID NO: 5194967 - DNA, 25 bp, Homo sapien
ttttcaagtcctaattcaatcagat

SEQ ID NO: 5194968 - DNA, 25 bp, Homo sapien
ccactgcctatcataatcctgaatc

SEQ ID NO: 5194969 - DNA, 25 bp, Homo sapien
gaatatcaagtcttgccacatcacg

SEQ ID NO: 5194970 - DNA, 25 bp, Homo sapien
ccaaggtacaatggagatgtaacaa

SEQ ID NO: 5194971 - DNA, 25 bp, Homo sapien
caaaatcatccactgcctatcataa

SEQ ID NO: 5194972 - DNA, 25 bp, Homo sapien
actgccaggaaaccaactgtcatga

SEQ ID NO: 5194973 - DNA, 25 bp, Homo sapien
ggaactcttactctaacatagttta

SEQ ID NO: 5194974 - DNA, 25 bp, Homo sapien
catagtttataaagtgtcgcatgtt

SEQ ID NO: 5194975 - DNA, 25 bp, Homo sapien
tgtttgacactaagttactgccagg

SEQ ID NO: 5194976 - DNA, 25 bp, Homo sapien
gtaaagaacccaagttatcagagct

SEQ ID NO: 5194977 - DNA, 25 bp, Homo sapien
cagagctagtacttgcaggtgagtc

SEQ ID NO: 5194978 - DNA, 25 bp, Homo sapien
agttatcagagctagtacttgcagg

SEQ ID NO: 5194979 - DNA, 25 bp, Homo sapien
gaacccaagttatcagagctagtac

SEQ ID NO: 5194980 - DNA, 25 bp, Homo sapien
catacataacataaagctttttctt

SEQ ID NO: 5194981 - DNA, 25 bp, Homo sapien
aacatacataacataaagctttttc

SEQ ID NO: 5194982 - DNA, 25 bp, Homo sapien
tcccaacataacatacataacataa

SEQ ID NO: 5194983 - DNA, 25 bp, Homo sapien
tacataacataaagctttttcttat

SEQ ID NO: 5194984 - DNA, 25 bp, Homo sapien
tgcttacagtgaaaacacgttgtca

SEQ ID NO: 5194985 - DNA, 25 bp, Homo sapien
cacgaaaatctaggttgtggagact

SEQ ID NO: 5194986 - DNA, 25 bp, Homo sapien
taacttacatgcaatgagagcgctg

SEQ ID NO: 5194987 - DNA, 25 bp, Homo sapien
gattcaatgttctctactcacgaaa

SEQ ID NO: 5194988 - DNA, 25 bp, Homo sapien
tgaagttttgggacgaaccacctga

SEQ ID NO: 5194989 - DNA, 25 bp, Homo sapien
gaaccaggagcagaccatttacttg

SEQ ID NO: 5194990 - DNA, 25 bp, Homo sapien
tagttaactgtggagctgaaccagg

SEQ ID NO: 5194991 - DNA, 25 bp, Homo sapien
gctactgcgattgatgatttcctga

SEQ ID NO: 5194992 - DNA, 25 bp, Homo sapien
taccatctccatgactgtatttagg

SEQ ID NO: 5194993 - DNA, 25 bp, Homo sapien
ctatgtcatcaagccaaggaggata

SEQ ID NO: 5194994 - DNA, 25 bp, Homo sapien
tactttgcgatgcagcttttagtaa

SEQ ID NO: 5194995 - DNA, 25 bp, Homo sapien
tctttccacggcagttataccatct

SEQ ID NO: 5194996 - DNA, 25 bp, Homo sapien
acatatctcttcaatgatgcgtttg

SEQ ID NO: 5194997 - DNA, 25 bp, Homo sapien
acaggaggggtcacttttctacata

SEQ ID NO: 5194998 - DNA, 25 bp, Homo sapien
ttctacatatctcttcaatgatgcg

SEQ ID NO: 5194999 - DNA, 25 bp, Homo sapien
tctcttcaatgatgcgtttgttcat

SEQ ID NO: 5195000 - DNA, 25 bp, Homo sapien
gatctgaccactaagagagaccact

SEQ ID NO: 5195001 - DNA, 25 bp, Homo sapien
gctgtctgctacaaaattagtttca

SEQ ID NO: 5195002 - DNA, 25 bp, Homo sapien
gagtcatcttaatccttagctgtct

SEQ ID NO: 5195003 - DNA, 25 bp, Homo sapien
gaagcacggtgagatccaaatagag

SEQ ID NO: 5195004 - DNA, 25 bp, Homo sapien
aactccgcaagcaatttctgctgcc

SEQ ID NO: 5195005 - DNA, 25 bp, Homo sapien
tcgtgaagcaaactccgcaagcaat

SEQ ID NO: 5195006 - DNA, 25 bp, Homo sapien
acatccattgcagtttccataaagc

SEQ ID NO: 5195007 - DNA, 25 bp, Homo sapien
taaagcttttctgtcgtgaagcaaa

SEQ ID NO: 5195008 - DNA, 25 bp, Homo sapien
acttgtggcatcatgccacaactat

SEQ ID NO: 5195009 - DNA, 25 bp, Homo sapien
tcacaagaggtcaagtgtgaaactt

SEQ ID NO: 5195010 - DNA, 25 bp, Homo sapien
gcatcatgccacaactatatgccaa

SEQ ID NO: 5195011 - DNA, 25 bp, Homo sapien
tatatgccaaccagttggaaaacct

SEQ ID NO: 5195012 - DNA, 25 bp, Homo sapien
tatgggtttagcaatcaagggactg

SEQ ID NO: 5195013 - DNA, 25 bp, Homo sapien
taaaggcacattggttcttgctaca

SEQ ID NO: 5195014 - DNA, 25 bp, Homo sapien
gaaaagaggctacgtactaaagata

SEQ ID NO: 5195015 - DNA, 25 bp, Homo sapien
tcaaaaacagtcgatgtagaaccat

SEQ ID NO: 5195016 - DNA, 25 bp, Homo sapien
ggcaataccacccaatctgctctgg

SEQ ID NO: 5195017 - DNA, 25 bp, Homo sapien
aatctgctctgggtacgttgcttaa

SEQ ID NO: 5195018 - DNA, 25 bp, Homo sapien
tctcttattcaaggcaataccaccc

SEQ ID NO: 5195019 - DNA, 25 bp, Homo sapien
ttgattcctcagaaaattgtttttg

SEQ ID NO: 5195020 - DNA, 25 bp, Homo sapien
ccctccagtttcctcagaggataag

SEQ ID NO: 5195021 - DNA, 25 bp, Homo sapien
tccctccagtttcctcagaggataa

SEQ ID NO: 5195022 - DNA, 25 bp, Homo sapien
cttccctccagtttcctcagaggat

SEQ ID NO: 5195023 - DNA, 25 bp, Homo sapien
tccttccctccagtttcctcagagg

SEQ ID NO: 5195024 - DNA, 25 bp, Homo sapien
caagaaccgagactgggagaaagta

SEQ ID NO: 5195025 - DNA, 25 bp, Homo sapien
gaactgcctctgtttgctagcaatc

SEQ ID NO: 5195026 - DNA, 25 bp, Homo sapien
tcaccactgcagcatacaagaaccg

SEQ ID NO: 5195027 - DNA, 25 bp, Homo sapien
ttgcctgatccctcaattgttcttc

SEQ ID NO: 5195028 - DNA, 25 bp, Homo sapien
gaaacctgtggttctgccgtggtga

SEQ ID NO: 5195029 - DNA, 25 bp, Homo sapien
cacagtcatatactgcctcggaaac

SEQ ID NO: 5195030 - DNA, 25 bp, Homo sapien
cgtggtgatctccataggaatatca

SEQ ID NO: 5195031 - DNA, 25 bp, Homo sapien
tactgcctcggaaacctgtggttct

SEQ ID NO: 5195032 - DNA, 25 bp, Homo sapien
gtaacagtacaactaatccagtagg

SEQ ID NO: 5195033 - DNA, 25 bp, Homo sapien
tacaactaatccagtaggtcgatct

SEQ ID NO: 5195034 - DNA, 25 bp, Homo sapien
ccagtaggtcgatcttcagaggagg

SEQ ID NO: 5195035 - DNA, 25 bp, Homo sapien
ggatgcttgtaacagtacaactaat

SEQ ID NO: 5195036 - DNA, 25 bp, Homo sapien
ttcactgatcggcaacttttttggc

SEQ ID NO: 5195037 - DNA, 25 bp, Homo sapien
tatcccaagggtaaatctgctcctc

SEQ ID NO: 5195038 - DNA, 25 bp, Homo sapien
tggctcaacattgtcacggcactgc

SEQ ID NO: 5195039 - DNA, 25 bp, Homo sapien
ctcacatcatgaacggctgcacagg

SEQ ID NO: 5195040 - DNA, 25 bp, Homo sapien
gacagtggccccagtagggaattta

SEQ ID NO: 5195041 - DNA, 25 bp, Homo sapien
acaaggtagggatcgaccctgggca

SEQ ID NO: 5195042 - DNA, 25 bp, Homo sapien
tatttaaggacctgctgtactcttc

SEQ ID NO: 5195043 - DNA, 25 bp, Homo sapien
ggagaacacataaattccccactga

SEQ ID NO: 5195044 - DNA, 25 bp, Homo sapien
taacaggactggcaacatatgatga

SEQ ID NO: 5195045 - DNA, 25 bp, Homo sapien
tgagagccatcaaacaagcatgtac

SEQ ID NO: 5195046 - DNA, 25 bp, Homo sapien
tctgtagtaaatagatgggtgggcc

SEQ ID NO: 5195047 - DNA, 25 bp, Homo sapien
tgggccagagcaatatgaaggcaca

SEQ ID NO: 5195048 - DNA, 25 bp, Homo sapien
gatacaagtactcatgccactcaga

SEQ ID NO: 5195049 - DNA, 25 bp, Homo sapien
tatttagtcaccaagtcagaaagcc

SEQ ID NO: 5195050 - DNA, 25 bp, Homo sapien
caaggttctattctcagtgcaagtc

SEQ ID NO: 5195051 - DNA, 25 bp, Homo sapien
tcaagtctatatcccacggagtggg

SEQ ID NO: 5195052 - DNA, 25 bp, Homo sapien
ccatgtaagatttatgacaatctat

SEQ ID NO: 5195053 - DNA, 25 bp, Homo sapien
ttcccagccaattgatactgccaag

SEQ ID NO: 5195054 - DNA, 25 bp, Homo sapien
ttgatactgccaagagacatgaact

SEQ ID NO: 5195055 - DNA, 25 bp, Homo sapien
tgtgaccacaggtttgtacataaac

SEQ ID NO: 5195056 - DNA, 25 bp, Homo sapien
cacaccaccatgctcggctaatttt

SEQ ID NO: 5195057 - DNA, 25 bp, Homo sapien
gcaacctctgcctcacagagtcaag

SEQ ID NO: 5195058 - DNA, 25 bp, Homo sapien
gcacaccaccatgctcggctaattt

SEQ ID NO: 5195059 - DNA, 25 bp, Homo sapien
ctctgcctcacagagtcaagtgatt

SEQ ID NO: 5195060 - DNA, 25 bp, Homo sapien
gaagaacactgttagcaaactgcct

SEQ ID NO: 5195061 - DNA, 25 bp, Homo sapien
tacagagtggacacgtgaattctcc

SEQ ID NO: 5195062 - DNA, 25 bp, Homo sapien
cgttgccaagggttattttccacat

SEQ ID NO: 5195063 - DNA, 25 bp, Homo sapien
tgcttttgttgctaggacgttgcca

SEQ ID NO: 5195064 - DNA, 25 bp, Homo sapien
gtgagcccggggtcttgctatagtc

SEQ ID NO: 5195065 - DNA, 25 bp, Homo sapien
gggtcttgctatagtctctatattt

SEQ ID NO: 5195066 - DNA, 25 bp, Homo sapien
gctatagtctctatatttcttctga

SEQ ID NO: 5195067 - DNA, 25 bp, Homo sapien
agagaaaatcattgtctggtgagcc

SEQ ID NO: 5195068 - DNA, 25 bp, Homo sapien
ttcatcaagggaatataaatgagat

SEQ ID NO: 5195069 - DNA, 25 bp, Homo sapien
cttcatcaagggaatataaatgaga

SEQ ID NO: 5195070 - DNA, 25 bp, Homo sapien
acagaaagcgagcggagaccagcat

SEQ ID NO: 5195071 - DNA, 25 bp, Homo sapien
aaggaagcagggacaaggatttcat

SEQ ID NO: 5195072 - DNA, 25 bp, Homo sapien
gcaaggaagcagggacaaggatttc

SEQ ID NO: 5195073 - DNA, 25 bp, Homo sapien
ggaagcagggacaaggatttcatac

SEQ ID NO: 5195074 - DNA, 25 bp, Homo sapien
cagcaaggaagcagggacaaggatt

SEQ ID NO: 5195075 - DNA, 25 bp, Homo sapien
cacccttcaggcgatttgcattgct

SEQ ID NO: 5195076 - DNA, 25 bp, Homo sapien
tgctgctgataagggcatctgtgtg

SEQ ID NO: 5195077 - DNA, 25 bp, Homo sapien
ggcgatttgcattgctcactgaact

SEQ ID NO: 5195078 - DNA, 25 bp, Homo sapien
tcagagctccatctggttgctgctg

SEQ ID NO: 5195079 - DNA, 25 bp, Homo sapien
caatttaacaccgataacgttccag

SEQ ID NO: 5195080 - DNA, 25 bp, Homo sapien
cctaagtctgtacatttgccaccca

SEQ ID NO: 5195081 - DNA, 25 bp, Homo sapien
taatcctctctactcagggtgggag

SEQ ID NO: 5195082 - DNA, 25 bp, Homo sapien
aacattttgcactgatttggctgaa

SEQ ID NO: 5195083 - DNA, 25 bp, Homo sapien
caatttttctatcagagaaatggtt

SEQ ID NO: 5195084 - DNA, 25 bp, Homo sapien
gttatcattcattggaggttagatg

SEQ ID NO: 5195085 - DNA, 25 bp, Homo sapien
gaaatggttatcattcattggaggt

SEQ ID NO: 5195086 - DNA, 25 bp, Homo sapien
tcattcattggaggttagatggtat

SEQ ID NO: 5195087 - DNA, 25 bp, Homo sapien
catggtgtaattgttgcaaagtccc

SEQ ID NO: 5195088 - DNA, 25 bp, Homo sapien
ttttactccaacgtcagccactgtg

SEQ ID NO: 5195089 - DNA, 25 bp, Homo sapien
tacaaagggaacaatttatccatcc

SEQ ID NO: 5195090 - DNA, 25 bp, Homo sapien
gccactgtgtaggtggttattgcca

SEQ ID NO: 5195091 - DNA, 25 bp, Homo sapien
gctgtgcttgcaccacctgaacaca

SEQ ID NO: 5195092 - DNA, 25 bp, Homo sapien
acctgaacacaaattgcctcctcga

SEQ ID NO: 5195093 - DNA, 25 bp, Homo sapien
tgaacacaaattgcctcctcgatga

SEQ ID NO: 5195094 - DNA, 25 bp, Homo sapien
tgtgcttgcaccacctgaacacaaa

SEQ ID NO: 5195095 - DNA, 25 bp, Homo sapien
gctttggaatcaattcaaaattaca

SEQ ID NO: 5195096 - DNA, 25 bp, Homo sapien
aataatattattcctactatgcaca

SEQ ID NO: 5195097 - DNA, 25 bp, Homo sapien
cattaattctctaaacaatgactaa

SEQ ID NO: 5195098 - DNA, 25 bp, Homo sapien
tatttcctacaccaatcacattagg

SEQ ID NO: 5195099 - DNA, 25 bp, Homo sapien
taccactgaagttgcactggaagat

SEQ ID NO: 5195100 - DNA, 25 bp, Homo sapien
gatatttgcagtgagatcccatgaa

SEQ ID NO: 5195101 - DNA, 25 bp, Homo sapien
ggcattacgcaatcctctctagaca

SEQ ID NO: 5195102 - DNA, 25 bp, Homo sapien
tcaagaagtcgtaacagaacagtat

SEQ ID NO: 5195103 - DNA, 25 bp, Homo sapien
gacatggcattggaacaagtctcat

SEQ ID NO: 5195104 - DNA, 25 bp, Homo sapien
caagtccagcagatgagaaccagtc

SEQ ID NO: 5195105 - DNA, 25 bp, Homo sapien
ctctagaaccagtatcatgtgctga

SEQ ID NO: 5195106 - DNA, 25 bp, Homo sapien
tagaacttctaggaaattcactgct

SEQ ID NO: 5195107 - DNA, 25 bp, Homo sapien
tgacttagttacttattacgtgcca

SEQ ID NO: 5195108 - DNA, 25 bp, Homo sapien
tctctataacgaacagaggaatcta

SEQ ID NO: 5195109 - DNA, 25 bp, Homo sapien
tctactaggcgggtaatattattaa

SEQ ID NO: 5195110 - DNA, 25 bp, Homo sapien
tgtgtagcctacatcttccttaaat

SEQ ID NO: 5195111 - DNA, 25 bp, Homo sapien
tagactcaatcttaatacaggaatg

SEQ ID NO: 5195112 - DNA, 25 bp, Homo sapien
gaatctggactgtccttagactcaa

SEQ ID NO: 5195113 - DNA, 25 bp, Homo sapien
tcatctcctatcacagacatacttg

SEQ ID NO: 5195114 - DNA, 25 bp, Homo sapien
catacttgtccttgactttacgctg

SEQ ID NO: 5195115 - DNA, 25 bp, Homo sapien
catgtgcaaggctaatacatgaaac

SEQ ID NO: 5195116 - DNA, 25 bp, Homo sapien
tactcagagtcaatgctataaagcc

SEQ ID NO: 5195117 - DNA, 25 bp, Homo sapien
tgtggattcatctcttctaactggg

SEQ ID NO: 5195118 - DNA, 25 bp, Homo sapien
tctaactgggtgagctttctccagg

SEQ ID NO: 5195119 - DNA, 25 bp, Homo sapien
gggttgtggcatcattaagatctgg

SEQ ID NO: 5195120 - DNA, 25 bp, Homo sapien
ctttgcgtaagggttgtggcatcat

SEQ ID NO: 5195121 - DNA, 25 bp, Homo sapien
tgagcaaaagggatgttacatcatg

SEQ ID NO: 5195122 - DNA, 25 bp, Homo sapien
catgataaagaattggaacctcagg

SEQ ID NO: 5195123 - DNA, 25 bp, Homo sapien
caccaacatcttttagggacctaca

SEQ ID NO: 5195124 - DNA, 25 bp, Homo sapien
caggctgctaactaccaacattaaa

SEQ ID NO: 5195125 - DNA, 25 bp, Homo sapien
gaaacaaggaatctctcacatgagg

SEQ ID NO: 5195126 - DNA, 25 bp, Homo sapien
tttatattaggtcaacaggctgcta

SEQ ID NO: 5195127 - DNA, 25 bp, Homo sapien
tctcaacaggataactgagcttcag

SEQ ID NO: 5195128 - DNA, 25 bp, Homo sapien
cagttgctggagtcaaaaacttgca

SEQ ID NO: 5195129 - DNA, 25 bp, Homo sapien
gcctggtagcttctggcacatatta

SEQ ID NO: 5195130 - DNA, 25 bp, Homo sapien
tatactcctcccctagtaaatggat

SEQ ID NO: 5195131 - DNA, 25 bp, Homo sapien
ggtaaaaagtaccttcacaatgcag

SEQ ID NO: 5195132 - DNA, 25 bp, Homo sapien
agagctcccgcgtgtttccaggctg

SEQ ID NO: 5195133 - DNA, 25 bp, Homo sapien
ttaactgagagtgctgcaagagcct

SEQ ID NO: 5195134 - DNA, 25 bp, Homo sapien
aggctgacctatcttcttcgctgca

SEQ ID NO: 5195135 - DNA, 25 bp, Homo sapien
atgacaaatttagaaagagcctaac

SEQ ID NO: 5195136 - DNA, 25 bp, Homo sapien
aaatgacaaatttagaaagagccta

SEQ ID NO: 5195137 - DNA, 25 bp, Homo sapien
ctgctaaatgacaaatttagaaaga

SEQ ID NO: 5195138 - DNA, 25 bp, Homo sapien
ctaaatgacaaatttagaaagagcc

SEQ ID NO: 5195139 - DNA, 25 bp, Homo sapien
cctaaaatcgagataagaagaatcc

SEQ ID NO: 5195140 - DNA, 25 bp, Homo sapien
tcaatgtggcatagttaagtttctc

SEQ ID NO: 5195141 - DNA, 25 bp, Homo sapien
gattcaaagagtacaacagaagagt

SEQ ID NO: 5195142 - DNA, 25 bp, Homo sapien
gatcagctaagtaagtcactgagtg

SEQ ID NO: 5195143 - DNA, 25 bp, Homo sapien
cacttatcacaaagctcagtaatac

SEQ ID NO: 5195144 - DNA, 25 bp, Homo sapien
agctcagtaatacttcgtaagactt

SEQ ID NO: 5195145 - DNA, 25 bp, Homo sapien
tatcacaaagctcagtaatacttcg

SEQ ID NO: 5195146 - DNA, 25 bp, Homo sapien
caaagctcagtaatacttcgtaaga

SEQ ID NO: 5195147 - DNA, 25 bp, Homo sapien
aaaggtaagcagaagtcctgtaagc

SEQ ID NO: 5195148 - DNA, 25 bp, Homo sapien
caggagaccaagcaatagggttaac

SEQ ID NO: 5195149 - DNA, 25 bp, Homo sapien
ggcagctaggtaaatcttccccaaa

SEQ ID NO: 5195150 - DNA, 25 bp, Homo sapien
tttccatggattcaggagaccaagc

SEQ ID NO: 5195151 - DNA, 25 bp, Homo sapien
catatgacagttacatatgtactac

SEQ ID NO: 5195152 - DNA, 25 bp, Homo sapien
tgtactacactacataccagtatat

SEQ ID NO: 5195153 - DNA, 25 bp, Homo sapien
aaaacaaggcttggctagtgcggtg

SEQ ID NO: 5195154 - DNA, 25 bp, Homo sapien
tcctttaagctagattaacatatag

SEQ ID NO: 5195155 - DNA, 25 bp, Homo sapien
tttgtgtggcaaggaacagcatagc

SEQ ID NO: 5195156 - DNA, 25 bp, Homo sapien
tacttcatctctgtgcgcctgcttc

SEQ ID NO: 5195157 - DNA, 25 bp, Homo sapien
gcctgctttacttacgaggtgtgaa

SEQ ID NO: 5195158 - DNA, 25 bp, Homo sapien
gcctgggtccagatgttaacagtgt

SEQ ID NO: 5195159 - DNA, 25 bp, Homo sapien
cacatggtttattctaatgaacgat

SEQ ID NO: 5195160 - DNA, 25 bp, Homo sapien
gatactttacggcttgacacatggt

SEQ ID NO: 5195161 - DNA, 25 bp, Homo sapien
gaacgatattccatgtgtagttgta

SEQ ID NO: 5195162 - DNA, 25 bp, Homo sapien
tatgatgcttatcacagatttgatg

SEQ ID NO: 5195163 - DNA, 25 bp, Homo sapien
gaactggccaatccagacaggaggc

SEQ ID NO: 5195164 - DNA, 25 bp, Homo sapien
tggtaaaacgttggcagaagtccca

SEQ ID NO: 5195165 - DNA, 25 bp, Homo sapien
taatatcaaatgctggaactggcca

SEQ ID NO: 5195166 - DNA, 25 bp, Homo sapien
caggaggcactgatgaatggatgtt

SEQ ID NO: 5195167 - DNA, 25 bp, Homo sapien
taaagtcatgtacatctggtcacca

SEQ ID NO: 5195168 - DNA, 25 bp, Homo sapien
gagtgccatgcaaggagtccatacc

SEQ ID NO: 5195169 - DNA, 25 bp, Homo sapien
catcagcaatggtgtttaagcagcc

SEQ ID NO: 5195170 - DNA, 25 bp, Homo sapien
tagctgagctggtagcataggccca

SEQ ID NO: 5195171 - DNA, 25 bp, Homo sapien
agtccctcattcccaatgtatataa

SEQ ID NO: 5195172 - DNA, 25 bp, Homo sapien
actgttactgaggtgaatgtgagtt

SEQ ID NO: 5195173 - DNA, 25 bp, Homo sapien
caatgtatataactttggatgttat

SEQ ID NO: 5195174 - DNA, 25 bp, Homo sapien
tggtgtaaagaagagtccctcattc

SEQ ID NO: 5195175 - DNA, 25 bp, Homo sapien
tcagtggagtaactaagctagcttg

SEQ ID NO: 5195176 - DNA, 25 bp, Homo sapien
caaccctggactccaaggatggcat

SEQ ID NO: 5195177 - DNA, 25 bp, Homo sapien
caacaagttcatggattaagtgtcc

SEQ ID NO: 5195178 - DNA, 25 bp, Homo sapien
tatatccataagtgctgggctacaa

SEQ ID NO: 5195179 - DNA, 25 bp, Homo sapien
tggtgcagacactacaggtttttct

SEQ ID NO: 5195180 - DNA, 25 bp, Homo sapien
ttctcaggcaactgtagtaggtgtg

SEQ ID NO: 5195181 - DNA, 25 bp, Homo sapien
aacagcaggatctttaggaaccttg

SEQ ID NO: 5195182 - DNA, 25 bp, Homo sapien
tcacagtaactttgttgcttgcagc

SEQ ID NO: 5195183 - DNA, 25 bp, Homo sapien
gtatcttcaacagcacagatgactt

SEQ ID NO: 5195184 - DNA, 25 bp, Homo sapien
tgtttcacagcacattccaaagtac

SEQ ID NO: 5195185 - DNA, 25 bp, Homo sapien
tgtacttaaggaaggatttactcac

SEQ ID NO: 5195186 - DNA, 25 bp, Homo sapien
ttaagagccaacctaattcagagtc

SEQ ID NO: 5195187 - DNA, 25 bp, Homo sapien
ccgatgcattgatcaaaaggaaaat

SEQ ID NO: 5195188 - DNA, 25 bp, Homo sapien
tgacctcgaatgatgataattaccg

SEQ ID NO: 5195189 - DNA, 25 bp, Homo sapien
caaatacacggaaccccagaggcag

SEQ ID NO: 5195190 - DNA, 25 bp, Homo sapien
tccatgagcatccaaatacacggaa

SEQ ID NO: 5195191 - DNA, 25 bp, Homo sapien
aacacctggatatatccatgaacat

SEQ ID NO: 5195192 - DNA, 25 bp, Homo sapien
acctggatatatccatgaacatcta

SEQ ID NO: 5195193 - DNA, 25 bp, Homo sapien
cacctggatatatccatgaacatct

SEQ ID NO: 5195194 - DNA, 25 bp, Homo sapien
acacctggatatatccatgaacatc

SEQ ID NO: 5195195 - DNA, 25 bp, Homo sapien
cccattgtaatgtggaccccatctt

SEQ ID NO: 5195196 - DNA, 25 bp, Homo sapien
tacaaatgtagagaggtttgcctcg

SEQ ID NO: 5195197 - DNA, 25 bp, Homo sapien
tattgatgtgatcaaaagtatgaga

SEQ ID NO: 5195198 - DNA, 25 bp, Homo sapien
gagaaatccactgttgctcaagaac

SEQ ID NO: 5195199 - DNA, 25 bp, Homo sapien
taagaagaatgcagaagcgtggctc

SEQ ID NO: 5195200 - DNA, 25 bp, Homo sapien
taaaaggtgggcatgcacggaatca

SEQ ID NO: 5195201 - DNA, 25 bp, Homo sapien
catggaagtccaaagtaccagggat

SEQ ID NO: 5195202 - DNA, 25 bp, Homo sapien
tgagggtcatcaccactgcgccttt

SEQ ID NO: 5195203 - DNA, 25 bp, Homo sapien
cacacatcactctaacttggacctg

SEQ ID NO: 5195204 - DNA, 25 bp, Homo sapien
aaaggacagctatttagtcgaacag

SEQ ID NO: 5195205 - DNA, 25 bp, Homo sapien
caatgcaaaaagtatgacaggctga

SEQ ID NO: 5195206 - DNA, 25 bp, Homo sapien
gacaggctgaacttatgatacagta

SEQ ID NO: 5195207 - DNA, 25 bp, Homo sapien
gctttcatcctcatagcagcctgga

SEQ ID NO: 5195208 - DNA, 25 bp, Homo sapien
tatcctgcctggaaaatgaggtgag

SEQ ID NO: 5195209 - DNA, 25 bp, Homo sapien
atattgattcccttgagccgcagcc

SEQ ID NO: 5195210 - DNA, 25 bp, Homo sapien
tatgtacaagtgcaccaggaaaggg

SEQ ID NO: 5195211 - DNA, 25 bp, Homo sapien
caggaagcggcgatcaggcagtaat

SEQ ID NO: 5195212 - DNA, 25 bp, Homo sapien
tctcataagcagcaagcaacctaaa

SEQ ID NO: 5195213 - DNA, 25 bp, Homo sapien
cctaaatccctcacatgctagttca

SEQ ID NO: 5195214 - DNA, 25 bp, Homo sapien
cttgtgttttgtagattagtggttc

SEQ ID NO: 5195215 - DNA, 25 bp, Homo sapien
agaatgttttcaactcaccacaaag

SEQ ID NO: 5195216 - DNA, 25 bp, Homo sapien
gcataactgactggtgtttatcaca

SEQ ID NO: 5195217 - DNA, 25 bp, Homo sapien
tctgtataaagatgcctatcctgga

SEQ ID NO: 5195218 - DNA, 25 bp, Homo sapien
caccatgcagatataccaccctttg

SEQ ID NO: 5195219 - DNA, 25 bp, Homo sapien
agatctgatcctgctcttgatacag

SEQ ID NO: 5195220 - DNA, 25 bp, Homo sapien
ttgatacagtgcgtccaagagagtg

SEQ ID NO: 5195221 - DNA, 25 bp, Homo sapien
taatcacagcattagcaacctcaga

SEQ ID NO: 5195222 - DNA, 25 bp, Homo sapien
agcccttcgagtctgtttctccctt

SEQ ID NO: 5195223 - DNA, 25 bp, Homo sapien
gctacccaggcttgtttgaacttca

SEQ ID NO: 5195224 - DNA, 25 bp, Homo sapien
tcacactgaaaacctgctacccagg

SEQ ID NO: 5195225 - DNA, 25 bp, Homo sapien
tgtgttcacactgaaaacctgctac

SEQ ID NO: 5195226 - DNA, 25 bp, Homo sapien
tgaaaacctgctacccaggcttgtt

SEQ ID NO: 5195227 - DNA, 25 bp, Homo sapien
cgcattctttccgtgctaggagaga

SEQ ID NO: 5195228 - DNA, 25 bp, Homo sapien
tcttggcagccaaagactagtggct

SEQ ID NO: 5195229 - DNA, 25 bp, Homo sapien
tctgtagggagaagtacagcccatc

SEQ ID NO: 5195230 - DNA, 25 bp, Homo sapien
taggagagatacttgggcccctctg

SEQ ID NO: 5195231 - DNA, 25 bp, Homo sapien
ggcacgttcgctgctcacatccaat

SEQ ID NO: 5195232 - DNA, 25 bp, Homo sapien
gcacgttcgctgctcacatccaatg

SEQ ID NO: 5195233 - DNA, 25 bp, Homo sapien
tcttcggcacgttcgctgctcacat

SEQ ID NO: 5195234 - DNA, 25 bp, Homo sapien
ttgtcctcttcggcacgttcgctgc

SEQ ID NO: 5195235 - DNA, 25 bp, Homo sapien
agtgacccgctcagcaacgatctgt

SEQ ID NO: 5195236 - DNA, 25 bp, Homo sapien
tgcttccaaagtgacccgctcagca

SEQ ID NO: 5195237 - DNA, 25 bp, Homo sapien
gctcagcaacgatctgtccgtggct

SEQ ID NO: 5195238 - DNA, 25 bp, Homo sapien
cgatctgtccgtggctccatctgca

SEQ ID NO: 5195239 - DNA, 25 bp, Homo sapien
gtcacaggactgattgcatggtaaa

SEQ ID NO: 5195240 - DNA, 25 bp, Homo sapien
tgtcacaggactgattgcatggtaa

SEQ ID NO: 5195241 - DNA, 25 bp, Homo sapien
atgtcacaggactgattgcatggta

SEQ ID NO: 5195242 - DNA, 25 bp, Homo sapien
cttgtcatcttattatctgataaca

SEQ ID NO: 5195243 - DNA, 25 bp, Homo sapien
tatctgataacactggcatggcctt

SEQ ID NO: 5195244 - DNA, 25 bp, Homo sapien
ttattatctgataacactggcatgg

SEQ ID NO: 5195245 - DNA, 25 bp, Homo sapien
catcttattatctgataacactggc

SEQ ID NO: 5195246 - DNA, 25 bp, Homo sapien
agcccattgccaccgaagaaaatgt

SEQ ID NO: 5195247 - DNA, 25 bp, Homo sapien
acaaagcccattgccaccgaagaaa

SEQ ID NO: 5195248 - DNA, 25 bp, Homo sapien
gagagtcttccaacagctagccttt

SEQ ID NO: 5195249 - DNA, 25 bp, Homo sapien
ccattgccaccgaagaaaatgtgct

SEQ ID NO: 5195250 - DNA, 25 bp, Homo sapien
cagtgaaaccctcaagagatctgtc

SEQ ID NO: 5195251 - DNA, 25 bp, Homo sapien
tgcgctgataaccacccggaaagca

SEQ ID NO: 5195252 - DNA, 25 bp, Homo sapien
acaccaagtatttactcccaaagca

SEQ ID NO: 5195253 - DNA, 25 bp, Homo sapien
tcatgtttccatccgaggacttgac

SEQ ID NO: 5195254 - DNA, 25 bp, Homo sapien
tggtagccatgagtgccaggcttct

SEQ ID NO: 5195255 - DNA, 25 bp, Homo sapien
actgtcctcaatggtaaagtggatt

SEQ ID NO: 5195256 - DNA, 25 bp, Homo sapien
atggaatttccccacacggtcacca

SEQ ID NO: 5195257 - DNA, 25 bp, Homo sapien
tgtgttcaacattgtcccaaggatt

SEQ ID NO: 5195258 - DNA, 25 bp, Homo sapien
ctgctggtcattgagcttttcctga

SEQ ID NO: 5195259 - DNA, 25 bp, Homo sapien
ctcctgcagcccagtaagcctccat

SEQ ID NO: 5195260 - DNA, 25 bp, Homo sapien
gaaggagccaccacttcttgtccca

SEQ ID NO: 5195261 - DNA, 25 bp, Homo sapien
ttgagcttttcctgagaaggagcca

SEQ ID NO: 5195262 - DNA, 25 bp, Homo sapien
gcaggaatgtgaggcttaaatcaag

SEQ ID NO: 5195263 - DNA, 25 bp, Homo sapien
agtcctgaaggggtcctgcaagctg

SEQ ID NO: 5195264 - DNA, 25 bp, Homo sapien
ggtcctgcaagctgactgagagtca

SEQ ID NO: 5195265 - DNA, 25 bp, Homo sapien
ggaatgtgaggcttaaatcaagaat

SEQ ID NO: 5195266 - DNA, 25 bp, Homo sapien
aattctcgtataattcagctttaca

SEQ ID NO: 5195267 - DNA, 25 bp, Homo sapien
taattctcgtataattcagctttac

SEQ ID NO: 5195268 - DNA, 25 bp, Homo sapien
ttaattctcgtataattcagcttta

SEQ ID NO: 5195269 - DNA, 25 bp, Homo sapien
cataacagaggcttactttcactat

SEQ ID NO: 5195270 - DNA, 25 bp, Homo sapien
cacttcaggcccagaaaatggtgtc

SEQ ID NO: 5195271 - DNA, 25 bp, Homo sapien
tccaaaaaccagcagaacacttcag

SEQ ID NO: 5195272 - DNA, 25 bp, Homo sapien
ctagaatgtatgacacatcattacc

SEQ ID NO: 5195273 - DNA, 25 bp, Homo sapien
ccggcttatgagagattggattctc

SEQ ID NO: 5195274 - DNA, 25 bp, Homo sapien
tgcccttcaatttggcctcaagctg

SEQ ID NO: 5195275 - DNA, 25 bp, Homo sapien
tctggatgctgctagatagggcctg

SEQ ID NO: 5195276 - DNA, 25 bp, Homo sapien
taggaactggcttcttcacaaacca

SEQ ID NO: 5195277 - DNA, 25 bp, Homo sapien
taggagccgtctcccacaataacag

SEQ ID NO: 5195278 - DNA, 25 bp, Homo sapien
tagggcctgttcaagtatagctcaa

SEQ ID NO: 5195279 - DNA, 25 bp, Homo sapien
ggtctgactccacatagtctcaatg

SEQ ID NO: 5195280 - DNA, 25 bp, Homo sapien
agatcttatctaagaccaccatggt

SEQ ID NO: 5195281 - DNA, 25 bp, Homo sapien
catggtggtacctatatgagtctgc

SEQ ID NO: 5195282 - DNA, 25 bp, Homo sapien
gaacaggaatctctacctggcaatc

SEQ ID NO: 5195283 - DNA, 25 bp, Homo sapien
cataggattatagtgaaataatcca

SEQ ID NO: 5195284 - DNA, 25 bp, Homo sapien
tatagtgaaataatccatacagatg

SEQ ID NO: 5195285 - DNA, 25 bp, Homo sapien
gtgaaataatccatacagatgtttc

SEQ ID NO: 5195286 - DNA, 25 bp, Homo sapien
tagtgaaataatccatacagatgtt

SEQ ID NO: 5195287 - DNA, 25 bp, Homo sapien
tctggaagtgattcaagtccaagca

SEQ ID NO: 5195288 - DNA, 25 bp, Homo sapien
tgccataggtgcctttaccaatggt

SEQ ID NO: 5195289 - DNA, 25 bp, Homo sapien
caatggtctctataatttcccaggt

SEQ ID NO: 5195290 - DNA, 25 bp, Homo sapien
ggtgcctttaccaatggtctctata

SEQ ID NO: 5195291 - DNA, 25 bp, Homo sapien
actgactggatccagaattttcact

SEQ ID NO: 5195292 - DNA, 25 bp, Homo sapien
cagaattttcactgcagccaggctc

SEQ ID NO: 5195293 - DNA, 25 bp, Homo sapien
ggctcccatctctcttgttagttac

SEQ ID NO: 5195294 - DNA, 25 bp, Homo sapien
gccaggctcccatctctcttgttag

SEQ ID NO: 5195295 - DNA, 25 bp, Homo sapien
agtgatccgctttgtaaaacatccc

SEQ ID NO: 5195296 - DNA, 25 bp, Homo sapien
aaatgttgtattctgcctcaatttc

SEQ ID NO: 5195297 - DNA, 25 bp, Homo sapien
ctttacaacattgggatgattagga

SEQ ID NO: 5195298 - DNA, 25 bp, Homo sapien
cccctacacagtgatccgctttgta

SEQ ID NO: 5195299 - DNA, 25 bp, Homo sapien
ttgacaagctcagtgactgagcccc

SEQ ID NO: 5195300 - DNA, 25 bp, Homo sapien
aaccgctggccacatctgagtagac

SEQ ID NO: 5195301 - DNA, 25 bp, Homo sapien
gtatgagatcattgcttcatccaac

SEQ ID NO: 5195302 - DNA, 25 bp, Homo sapien
caagagggccccgtacaagatgtat

SEQ ID NO: 5195303 - DNA, 25 bp, Homo sapien
actcctccttctgttgtcagaagaa

SEQ ID NO: 5195304 - DNA, 25 bp, Homo sapien
ttcacatcacggtggatgattcggt

SEQ ID NO: 5195305 - DNA, 25 bp, Homo sapien
caaagtcaacgagcttaactcctcc

SEQ ID NO: 5195306 - DNA, 25 bp, Homo sapien
cagaagaatgttattccccttcaca

SEQ ID NO: 5195307 - DNA, 25 bp, Homo sapien
gtactggtgagttgagctgaaacac

SEQ ID NO: 5195308 - DNA, 25 bp, Homo sapien
ccagaacggggtgccaacagatgtg

SEQ ID NO: 5195309 - DNA, 25 bp, Homo sapien
aacagatgtgtttctccgcagacgt

SEQ ID NO: 5195310 - DNA, 25 bp, Homo sapien
tgtgtttctccgcagacgtgtactg

SEQ ID NO: 5195311 - DNA, 25 bp, Homo sapien
gttctaatacactaagggcatccca

SEQ ID NO: 5195312 - DNA, 25 bp, Homo sapien
ttcatgctgcagctttgaggtgccc

SEQ ID NO: 5195313 - DNA, 25 bp, Homo sapien
cattccattagctacccggtttgta

SEQ ID NO: 5195314 - DNA, 25 bp, Homo sapien
tgctgagttgatactactctgccag

SEQ ID NO: 5195315 - DNA, 25 bp, Homo sapien
cacctgtggctattggcatgttgga

SEQ ID NO: 5195316 - DNA, 25 bp, Homo sapien
atgttggagccactactgcccctca

SEQ ID NO: 5195317 - DNA, 25 bp, Homo sapien
gcccctcagatattcacaggcactg

SEQ ID NO: 5195318 - DNA, 25 bp, Homo sapien
tgtttggttgcaccatgagtgcctt

SEQ ID NO: 5195319 - DNA, 25 bp, Homo sapien
ctggaacactgagcgtctgggttgt

SEQ ID NO: 5195320 - DNA, 25 bp, Homo sapien
caccttgggccgtttgcctgctgga

SEQ ID NO: 5195321 - DNA, 25 bp, Homo sapien
tgcctgctggaacactgagcgtctg

SEQ ID NO: 5195322 - DNA, 25 bp, Homo sapien
tgtgcctcagggccttagaagacag

SEQ ID NO: 5195323 - DNA, 25 bp, Homo sapien
ctgcaggttacacatacgatgagag

SEQ ID NO: 5195324 - DNA, 25 bp, Homo sapien
tgcaggttacacatacgatgagagt

SEQ ID NO: 5195325 - DNA, 25 bp, Homo sapien
tctgcaggttacacatacgatgaga

SEQ ID NO: 5195326 - DNA, 25 bp, Homo sapien
ttcacaggatgcatgtcaaagaggg

SEQ ID NO: 5195327 - DNA, 25 bp, Homo sapien
cgagcgtcataggaagagtcatact

SEQ ID NO: 5195328 - DNA, 25 bp, Homo sapien
aatagctgtgatccccaaggaccag

SEQ ID NO: 5195329 - DNA, 25 bp, Homo sapien
gagtcatactgctgctcacaggcaa

SEQ ID NO: 5195330 - DNA, 25 bp, Homo sapien
tatgatgatgaacatcagagagcct

SEQ ID NO: 5195331 - DNA, 25 bp, Homo sapien
ctggattaggtataaaatgataaaa

SEQ ID NO: 5195332 - DNA, 25 bp, Homo sapien
tgatgatgaacatcagagagcctca

SEQ ID NO: 5195333 - DNA, 25 bp, Homo sapien
atgatgatgaacatcagagagcctc

SEQ ID NO: 5195334 - DNA, 25 bp, Homo sapien
aaaaagccaggtgcttcgtctgctc

SEQ ID NO: 5195335 - DNA, 25 bp, Homo sapien
tctgctcctctaatcgctgtgacct

SEQ ID NO: 5195336 - DNA, 25 bp, Homo sapien
gctgtgacctgtttttgtgattcga

SEQ ID NO: 5195337 - DNA, 25 bp, Homo sapien
ggcaaaaagactaactctggcttgg

SEQ ID NO: 5195338 - DNA, 25 bp, Homo sapien
tatctctgcctatcttgatgctcct

SEQ ID NO: 5195339 - DNA, 25 bp, Homo sapien
tgatatccctctgacctgacaacaa

SEQ ID NO: 5195340 - DNA, 25 bp, Homo sapien
gacaacaactttgtgtcttggccca

SEQ ID NO: 5195341 - DNA, 25 bp, Homo sapien
tggactgtaatgcaaccagggacta

SEQ ID NO: 5195342 - DNA, 25 bp, Homo sapien
aaaactgcaagtttggtcattttca

SEQ ID NO: 5195343 - DNA, 25 bp, Homo sapien
gaaaactgcaagtttggtcattttc

SEQ ID NO: 5195344 - DNA, 25 bp, Homo sapien
aacaataaaatctatataccagttt

SEQ ID NO: 5195345 - DNA, 25 bp, Homo sapien
aaacaataaaatctatataccagtt

SEQ ID NO: 5195346 - DNA, 25 bp, Homo sapien
taaactaccattccaacagccttgc

SEQ ID NO: 5195347 - DNA, 25 bp, Homo sapien
caacagccttgccacgttggaggaa

SEQ ID NO: 5195348 - DNA, 25 bp, Homo sapien
tgctacgtcctctcctaaactacca

SEQ ID NO: 5195349 - DNA, 25 bp, Homo sapien
tagccatcggttgtagctcccttgt

SEQ ID NO: 5195350 - DNA, 25 bp, Homo sapien
ccagcactgaccttgtcagcatgac

SEQ ID NO: 5195351 - DNA, 25 bp, Homo sapien
cactgaccttgtcagcatgacattt

SEQ ID NO: 5195352 - DNA, 25 bp, Homo sapien
taaacctggacttctaggtgctgct

SEQ ID NO: 5195353 - DNA, 25 bp, Homo sapien
ctggcactcatttgaccaacagcaa

SEQ ID NO: 5195354 - DNA, 25 bp, Homo sapien
cagcagtgctatccttaaattacca

SEQ ID NO: 5195355 - DNA, 25 bp, Homo sapien
gatttaatgacttattgcgccagcc

SEQ ID NO: 5195356 - DNA, 25 bp, Homo sapien
caaattcctagtcctcagcagtgct

SEQ ID NO: 5195357 - DNA, 25 bp, Homo sapien
caagagattgccacaagacagctgt

SEQ ID NO: 5195358 - DNA, 25 bp, Homo sapien
tacacataattgctactgatgtcac

SEQ ID NO: 5195359 - DNA, 25 bp, Homo sapien
ttacacataattgctactgatgtca

SEQ ID NO: 5195360 - DNA, 25 bp, Homo sapien
caaaggcaaagacttagagagttga

SEQ ID NO: 5195361 - DNA, 25 bp, Homo sapien
gattactcaaagactctgaaagaac

SEQ ID NO: 5195362 - DNA, 25 bp, Homo sapien
ggttgtactttgatcctaaatgaaa

SEQ ID NO: 5195363 - DNA, 25 bp, Homo sapien
acagttggctcaacatggatacatc

SEQ ID NO: 5195364 - DNA, 25 bp, Homo sapien
actctgcagctttagactaccactg

SEQ ID NO: 5195365 - DNA, 25 bp, Homo sapien
ttcccctctatcagtcagtaaatta

SEQ ID NO: 5195366 - DNA, 25 bp, Homo sapien
ggataatcgcaatcacattaaaatg

SEQ ID NO: 5195367 - DNA, 25 bp, Homo sapien
gggagctataatttagctcaactct

SEQ ID NO: 5195368 - DNA, 25 bp, Homo sapien
gaaggtgactgtgatatcagacaag

SEQ ID NO: 5195369 - DNA, 25 bp, Homo sapien
caaggatcatggcagcagtgaaggt

SEQ ID NO: 5195370 - DNA, 25 bp, Homo sapien
aggtgactgtgatatcagacaagcc

SEQ ID NO: 5195371 - DNA, 25 bp, Homo sapien
aaattctatcaaggatcatggcagc

SEQ ID NO: 5195372 - DNA, 25 bp, Homo sapien
tttccatgagtgactggctttgatg

SEQ ID NO: 5195373 - DNA, 25 bp, Homo sapien
tccatgagtgactggctttgatgtt

SEQ ID NO: 5195374 - DNA, 25 bp, Homo sapien
catgagtgactggctttgatgttgt

SEQ ID NO: 5195375 - DNA, 25 bp, Homo sapien
ttttccatgagtgactggctttgat

SEQ ID NO: 5195376 - DNA, 25 bp, Homo sapien
tgaaatacgtggatactgatggacc

SEQ ID NO: 5195377 - DNA, 25 bp, Homo sapien
agtcttgagtagcatagtgggcaca

SEQ ID NO: 5195378 - DNA, 25 bp, Homo sapien
cgtaatcacccagtacaaagtccat

SEQ ID NO: 5195379 - DNA, 25 bp, Homo sapien
ccaagaatgactgttgccaaatgaa

SEQ ID NO: 5195380 - DNA, 25 bp, Homo sapien
tatcagatctgaaatcttcccaaaa

SEQ ID NO: 5195381 - DNA, 25 bp, Homo sapien
tgaaatcttcccaaaatggccctaa

SEQ ID NO: 5195382 - DNA, 25 bp, Homo sapien
tcagatctgaaatcttcccaaaatg

SEQ ID NO: 5195383 - DNA, 25 bp, Homo sapien
cttcccaaaatggccctaactccat

SEQ ID NO: 5195384 - DNA, 25 bp, Homo sapien
ctcttagcaacctccggtctttcac

SEQ ID NO: 5195385 - DNA, 25 bp, Homo sapien
gcaacctccggtctttcaccaaaca

SEQ ID NO: 5195386 - DNA, 25 bp, Homo sapien
tagcaacctccggtctttcaccaaa

SEQ ID NO: 5195387 - DNA, 25 bp, Homo sapien
ttagcaacctccggtctttcaccaa

SEQ ID NO: 5195388 - DNA, 25 bp, Homo sapien
aaagaacatagctctggagacaagc

SEQ ID NO: 5195389 - DNA, 25 bp, Homo sapien
tggaggcagcctaaaatggtgaaaa

SEQ ID NO: 5195390 - DNA, 25 bp, Homo sapien
gcagtttgagaattgagctactaca

SEQ ID NO: 5195391 - DNA, 25 bp, Homo sapien
tggtcatcctagcagacatgatctg

SEQ ID NO: 5195392 - DNA, 25 bp, Homo sapien
tcagatcctaccacattgtctctaa

SEQ ID NO: 5195393 - DNA, 25 bp, Homo sapien
aaagggcagattgtgcatctatttc

SEQ ID NO: 5195394 - DNA, 25 bp, Homo sapien
ggcagacctcagatgaacagattgt

SEQ ID NO: 5195395 - DNA, 25 bp, Homo sapien
gggaaattagcagctgaacatcaac

SEQ ID NO: 5195396 - DNA, 25 bp, Homo sapien
tctttatgggtttccgttcctatga

SEQ ID NO: 5195397 - DNA, 25 bp, Homo sapien
ggaaagggccacaaatacagactta

SEQ ID NO: 5195398 - DNA, 25 bp, Homo sapien
gaatgttctgtgaggcatccttttg

SEQ ID NO: 5195399 - DNA, 25 bp, Homo sapien
tcctatgattccaatgttgtatgag

SEQ ID NO: 5195400 - DNA, 25 bp, Homo sapien
tctggatgaagtaaagtaggtggag

SEQ ID NO: 5195401 - DNA, 25 bp, Homo sapien
tttctggatgaagtaaagtaggtgg

SEQ ID NO: 5195402 - DNA, 25 bp, Homo sapien
ttctggatgaagtaaagtaggtgga

SEQ ID NO: 5195403 - DNA, 25 bp, Homo sapien
ttttctggatgaagtaaagtaggtg

SEQ ID NO: 5195404 - DNA, 25 bp, Homo sapien
ttccaacacagtctttcttagcagg

SEQ ID NO: 5195405 - DNA, 25 bp, Homo sapien
catgttccaacacagtctttcttag

SEQ ID NO: 5195406 - DNA, 25 bp, Homo sapien
catggtcatgttccaacacagtctt

SEQ ID NO: 5195407 - DNA, 25 bp, Homo sapien
acttcatggtcatgttccaacacag

SEQ ID NO: 5195408 - DNA, 25 bp, Homo sapien
catctctgctctagacaggccactg

SEQ ID NO: 5195409 - DNA, 25 bp, Homo sapien
ccacccatctctgctctagacaggc

SEQ ID NO: 5195410 - DNA, 25 bp, Homo sapien
tctgctctagacaggccactgtgct

SEQ ID NO: 5195411 - DNA, 25 bp, Homo sapien
acccatctctgctctagacaggcca

SEQ ID NO: 5195412 - DNA, 25 bp, Homo sapien
gatgtgtgacggaaggtcgcctttc

SEQ ID NO: 5195413 - DNA, 25 bp, Homo sapien
gattttgatgcttctggtcttggag

SEQ ID NO: 5195414 - DNA, 25 bp, Homo sapien
gttttagcaacaggattttgatgct

SEQ ID NO: 5195415 - DNA, 25 bp, Homo sapien
taataaatgggtggtcaaggagatg

SEQ ID NO: 5195416 - DNA, 25 bp, Homo sapien
cactcatcatgtccactgaagtcag

SEQ ID NO: 5195417 - DNA, 25 bp, Homo sapien
ctcatcatgtccactgaagtcagtc

SEQ ID NO: 5195418 - DNA, 25 bp, Homo sapien
ccactcatcatgtccactgaagtca

SEQ ID NO: 5195419 - DNA, 25 bp, Homo sapien
gcccactcatcatgtccactgaagt

SEQ ID NO: 5195420 - DNA, 25 bp, Homo sapien
atcttccacatgataaggtcttctg

SEQ ID NO: 5195421 - DNA, 25 bp, Homo sapien
gaacctctaggttgaccaaatcatc

SEQ ID NO: 5195422 - DNA, 25 bp, Homo sapien
cagcatcttccacatgataaggtct

SEQ ID NO: 5195423 - DNA, 25 bp, Homo sapien
taggttgaccaaatcatcctcaagg

SEQ ID NO: 5195424 - DNA, 25 bp, Homo sapien
tactgatagagcaccgacagaatgg

SEQ ID NO: 5195425 - DNA, 25 bp, Homo sapien
cactgcacttaaaacctaggtggca

SEQ ID NO: 5195426 - DNA, 25 bp, Homo sapien
cagcacaggatcatagtcacagcaa

SEQ ID NO: 5195427 - DNA, 25 bp, Homo sapien
acaggtccagtgcaattaacagctc

SEQ ID NO: 5195428 - DNA, 25 bp, Homo sapien
catatgtgtaaattagcaagtctgc

SEQ ID NO: 5195429 - DNA, 25 bp, Homo sapien
ggagagtatatgcttagattctgga

SEQ ID NO: 5195430 - DNA, 25 bp, Homo sapien
cataacgtttctgcaactgatggat

SEQ ID NO: 5195431 - DNA, 25 bp, Homo sapien
ctgtggagagtatatgcttagattc

SEQ ID NO: 5195432 - DNA, 25 bp, Homo sapien
tcaccccatgataaagtctggaaaa

SEQ ID NO: 5195433 - DNA, 25 bp, Homo sapien
taaccatgcactggtaagcagcatc

SEQ ID NO: 5195434 - DNA, 25 bp, Homo sapien
ggtctttgctgagagtaaccatgca

SEQ ID NO: 5195435 - DNA, 25 bp, Homo sapien
gcagcatctgctgatgcaaatatgt

SEQ ID NO: 5195436 - DNA, 25 bp, Homo sapien
taaagtgggaacagtcttgtggcac

SEQ ID NO: 5195437 - DNA, 25 bp, Homo sapien
tgagaagcctaggtactccatttgc

SEQ ID NO: 5195438 - DNA, 25 bp, Homo sapien
tatcaaacctaaagagagtcacaag

SEQ ID NO: 5195439 - DNA, 25 bp, Homo sapien
gaacccctggactggtattcggctg

SEQ ID NO: 5195440 - DNA, 25 bp, Homo sapien
gaacaatcaggtgggcgctttctgt

SEQ ID NO: 5195441 - DNA, 25 bp, Homo sapien
tgctgaacaatcaggtgggcgcttt

SEQ ID NO: 5195442 - DNA, 25 bp, Homo sapien
caatcaggtgggcgctttctgtctt

SEQ ID NO: 5195443 - DNA, 25 bp, Homo sapien
tgaacaatcaggtgggcgctttctg

SEQ ID NO: 5195444 - DNA, 25 bp, Homo sapien
cattgatggcagtgcatgagttccc

SEQ ID NO: 5195445 - DNA, 25 bp, Homo sapien
cccaaaggcttccaccagggagttg

SEQ ID NO: 5195446 - DNA, 25 bp, Homo sapien
tctctctcaaggtctgattattggc

SEQ ID NO: 5195447 - DNA, 25 bp, Homo sapien
ggagatattcagagattcttgcccc

SEQ ID NO: 5195448 - DNA, 25 bp, Homo sapien
tcagaaagcttcttttggtgatgaa

SEQ ID NO: 5195449 - DNA, 25 bp, Homo sapien
cagaaagcttcttttggtgatgaag

SEQ ID NO: 5195450 - DNA, 25 bp, Homo sapien
atgaagaccagcataaatatagtaa

SEQ ID NO: 5195451 - DNA, 25 bp, Homo sapien
gtgatgaagaccagcataaatatag

SEQ ID NO: 5195452 - DNA, 25 bp, Homo sapien
caatgctgaattgcttcgaattgtc

SEQ ID NO: 5195453 - DNA, 25 bp, Homo sapien
cctataatcctgaagcaatgctgaa

SEQ ID NO: 5195454 - DNA, 25 bp, Homo sapien
gaattgtcttctgtaagactccttg

SEQ ID NO: 5195455 - DNA, 25 bp, Homo sapien
cttggaagttatgtcgtgcatcacc

SEQ ID NO: 5195456 - DNA, 25 bp, Homo sapien
cccaatattcaaaatcccagccaaa

SEQ ID NO: 5195457 - DNA, 25 bp, Homo sapien
gggcacctcacttttatcagtctga

SEQ ID NO: 5195458 - DNA, 25 bp, Homo sapien
gagaggaaatagctgcgaactcaat

SEQ ID NO: 5195459 - DNA, 25 bp, Homo sapien
gctgcgaactcaatgttcccaatat

SEQ ID NO: 5195460 - DNA, 25 bp, Homo sapien
agcctaaagaagcacgtgctttggc

SEQ ID NO: 5195461 - DNA, 25 bp, Homo sapien
acaacacagcccacaaatatcaaat

SEQ ID NO: 5195462 - DNA, 25 bp, Homo sapien
tacagagcctaaagaagcacgtgct

SEQ ID NO: 5195463 - DNA, 25 bp, Homo sapien
aacacagcccacaaatatcaaataa

SEQ ID NO: 5195464 - DNA, 25 bp, Homo sapien
gaacactggtgttccacaggacatc

SEQ ID NO: 5195465 - DNA, 25 bp, Homo sapien
tgttggcacggatgatggtctcgcc

SEQ ID NO: 5195466 - DNA, 25 bp, Homo sapien
ttggacatggcgtctcgaacgtccg

SEQ ID NO: 5195467 - DNA, 25 bp, Homo sapien
ggacatggcgtctcgaacgtccgca

SEQ ID NO: 5195468 - DNA, 25 bp, Homo sapien
cagccctgtctacagtgttggcacg

SEQ ID NO: 5195469 - DNA, 25 bp, Homo sapien
taatgcgattcacaatccagctgaa

SEQ ID NO: 5195470 - DNA, 25 bp, Homo sapien
caggagtgtattaatgcgattcaca

SEQ ID NO: 5195471 - DNA, 25 bp, Homo sapien
tggctgcaggagtgtattaatgcga

SEQ ID NO: 5195472 - DNA, 25 bp, Homo sapien
tgtattaatgcgattcacaatccag

SEQ ID NO: 5195473 - DNA, 25 bp, Homo sapien
ctgcatgagagagaagaacaaaact

SEQ ID NO: 5195474 - DNA, 25 bp, Homo sapien
tgagagagaagaacaaaactcttta

SEQ ID NO: 5195475 - DNA, 25 bp, Homo sapien
agagagaagaacaaaactctttagg

SEQ ID NO: 5195476 - DNA, 25 bp, Homo sapien
catgagagagaagaacaaaactctt

SEQ ID NO: 5195477 - DNA, 25 bp, Homo sapien
ctgaaaattctcgaatccaaagata

SEQ ID NO: 5195478 - DNA, 25 bp, Homo sapien
tccaaagatatccaagatccccaca

SEQ ID NO: 5195479 - DNA, 25 bp, Homo sapien
gaaatagtactggatttgctcattg

SEQ ID NO: 5195480 - DNA, 25 bp, Homo sapien
ttgctcattggcgatgtttatgcag

SEQ ID NO: 5195481 - DNA, 25 bp, Homo sapien
ggcggttgtcctcatattccacggg

SEQ ID NO: 5195482 - DNA, 25 bp, Homo sapien
gggtttctggaggaacatgtccaag

SEQ ID NO: 5195483 - DNA, 25 bp, Homo sapien
tattccacgggtacagcatcaatgc

SEQ ID NO: 5195484 - DNA, 25 bp, Homo sapien
tccaaaagtgcaagcagtcccaggg

SEQ ID NO: 5195485 - DNA, 25 bp, Homo sapien
gccaaagcacagttccactcctttg

SEQ ID NO: 5195486 - DNA, 25 bp, Homo sapien
aagcacagttccactcctttgggcc

SEQ ID NO: 5195487 - DNA, 25 bp, Homo sapien
tatttgcatcgtagattatcttcaa

SEQ ID NO: 5195488 - DNA, 25 bp, Homo sapien
ctccagaagtatttgcatcgtagat

SEQ ID NO: 5195489 - DNA, 25 bp, Homo sapien
gaaccccagaagcatcatataatac

SEQ ID NO: 5195490 - DNA, 25 bp, Homo sapien
ccacaaccacatcggcagggagagt

SEQ ID NO: 5195491 - DNA, 25 bp, Homo sapien
ttctgacgttctcaggaccacaacc

SEQ ID NO: 5195492 - DNA, 25 bp, Homo sapien
ggagagtgtctctatttttctcaag

SEQ ID NO: 5195493 - DNA, 25 bp, Homo sapien
aaaagctttaagagcagggctatca

SEQ ID NO: 5195494 - DNA, 25 bp, Homo sapien
aagctttaagagcagggctatcaga

SEQ ID NO: 5195495 - DNA, 25 bp, Homo sapien
ttaagagcagggctatcagagggtt

SEQ ID NO: 5195496 - DNA, 25 bp, Homo sapien
gctttaagagcagggctatcagagg

SEQ ID NO: 5195497 - DNA, 25 bp, Homo sapien
taaagaagttcaatgttagcggtgc

SEQ ID NO: 5195498 - DNA, 25 bp, Homo sapien
caatgttagcggtgcagccctggca

SEQ ID NO: 5195499 - DNA, 25 bp, Homo sapien
tcagacactaactggaaaatttcac

SEQ ID NO: 5195500 - DNA, 25 bp, Homo sapien
gcagccctggcagtattcagacact

SEQ ID NO: 5195501 - DNA, 25 bp, Homo sapien
cagagagcatgtcccctatcaataa

SEQ ID NO: 5195502 - DNA, 25 bp, Homo sapien
gaggagtctacatccctgggtctct

SEQ ID NO: 5195503 - DNA, 25 bp, Homo sapien
catattgaattaaaccccggctgct

SEQ ID NO: 5195504 - DNA, 25 bp, Homo sapien
tcacctctgtgctgaagtcgcctga

SEQ ID NO: 5195505 - DNA, 25 bp, Homo sapien
tattctgacattcaacacaggatgc

SEQ ID NO: 5195506 - DNA, 25 bp, Homo sapien
tagaatcgaggtttgagggcaacta

SEQ ID NO: 5195507 - DNA, 25 bp, Homo sapien
tactcaagcttaggatctcaaagga

SEQ ID NO: 5195508 - DNA, 25 bp, Homo sapien
tctagttggtgtacggcaaagccgt

SEQ ID NO: 5195509 - DNA, 25 bp, Homo sapien
gaaccttgcagtgagagtgtgcctc

SEQ ID NO: 5195510 - DNA, 25 bp, Homo sapien
tctcttcaatagtctggaaagtggg

SEQ ID NO: 5195511 - DNA, 25 bp, Homo sapien
caggcaaaaggctggctgcataagc

SEQ ID NO: 5195512 - DNA, 25 bp, Homo sapien
tagttgcaagtggaacattacccaa

SEQ ID NO: 5195513 - DNA, 25 bp, Homo sapien
caccactcacggcagttcagatcag

SEQ ID NO: 5195514 - DNA, 25 bp, Homo sapien
ctcacggcagttcagatcagcatca

SEQ ID NO: 5195515 - DNA, 25 bp, Homo sapien
cactcacggcagttcagatcagcat

SEQ ID NO: 5195516 - DNA, 25 bp, Homo sapien
agccccaccactcacggcagttcag

SEQ ID NO: 5195517 - DNA, 25 bp, Homo sapien
gctcaactctcacagtacattcatc

SEQ ID NO: 5195518 - DNA, 25 bp, Homo sapien
tcaactctcacagtacattcatcta

SEQ ID NO: 5195519 - DNA, 25 bp, Homo sapien
ctcaactctcacagtacattcatct

SEQ ID NO: 5195520 - DNA, 25 bp, Homo sapien
ggtctgcaaaagctctgtggttctc

SEQ ID NO: 5195521 - DNA, 25 bp, Homo sapien
ctctgcttgtgccttaggcatgaaa

SEQ ID NO: 5195522 - DNA, 25 bp, Homo sapien
gctctgtggttctctgcttgtgcct

SEQ ID NO: 5195523 - DNA, 25 bp, Homo sapien
gcatgaaatcagcatactgagacat

SEQ ID NO: 5195524 - DNA, 25 bp, Homo sapien
cttagcaggtcccacatgattcttg

SEQ ID NO: 5195525 - DNA, 25 bp, Homo sapien
gcaggtcccacatgattcttgaccc

SEQ ID NO: 5195526 - DNA, 25 bp, Homo sapien
tagcaggtcccacatgattcttgac

SEQ ID NO: 5195527 - DNA, 25 bp, Homo sapien
aggtcccacatgattcttgaccctc

SEQ ID NO: 5195528 - DNA, 25 bp, Homo sapien
cactcccttccagtgaaaataccac

SEQ ID NO: 5195529 - DNA, 25 bp, Homo sapien
gcattgcaaaggctaggacatcact

SEQ ID NO: 5195530 - DNA, 25 bp, Homo sapien
tcctcccatcggttttattgaagaa

SEQ ID NO: 5195531 - DNA, 25 bp, Homo sapien
aagcagtaggcttattatatcagca

SEQ ID NO: 5195532 - DNA, 25 bp, Homo sapien
ggtatgcacagataacaaattcact

SEQ ID NO: 5195533 - DNA, 25 bp, Homo sapien
acagtttcaggataatcaatatcac

SEQ ID NO: 5195534 - DNA, 25 bp, Homo sapien
tagctgaagcctacacagtttcagg

SEQ ID NO: 5195535 - DNA, 25 bp, Homo sapien
cttatcccactgtaaggtctatggg

SEQ ID NO: 5195536 - DNA, 25 bp, Homo sapien
aaacaaagacactaacacccatact

SEQ ID NO: 5195537 - DNA, 25 bp, Homo sapien
cactgaaatgtggaggcaaagaact

SEQ ID NO: 5195538 - DNA, 25 bp, Homo sapien
ctgttatcctagctcttgtctgggc

SEQ ID NO: 5195539 - DNA, 25 bp, Homo sapien
cagcactgaaatgtggaggcaaaga

SEQ ID NO: 5195540 - DNA, 25 bp, Homo sapien
aggccactgttatcctagctcttgt

SEQ ID NO: 5195541 - DNA, 25 bp, Homo sapien
tatatttggtgcaaatctgttactc

SEQ ID NO: 5195542 - DNA, 25 bp, Homo sapien
ctgccagtccatactatatttggtg

SEQ ID NO: 5195543 - DNA, 25 bp, Homo sapien
cagtccatactatatttggtgcaaa

SEQ ID NO: 5195544 - DNA, 25 bp, Homo sapien
tatttggtgcaaatctgttactcac

SEQ ID NO: 5195545 - DNA, 25 bp, Homo sapien
atgtcttccaaaatccgaaagcctg

SEQ ID NO: 5195546 - DNA, 25 bp, Homo sapien
tccaaaatccgaaagcctgtttggc

SEQ ID NO: 5195547 - DNA, 25 bp, Homo sapien
tccgaaagcctgtttggccaaatac

SEQ ID NO: 5195548 - DNA, 25 bp, Homo sapien
caaaatccgaaagcctgtttggcca

SEQ ID NO: 5195549 - DNA, 25 bp, Homo sapien
tgttggtggtttcttccggatgccg

SEQ ID NO: 5195550 - DNA, 25 bp, Homo sapien
cggatgccgtatcacctccagagtg

SEQ ID NO: 5195551 - DNA, 25 bp, Homo sapien
tggtttcttccggatgccgtatcac

SEQ ID NO: 5195552 - DNA, 25 bp, Homo sapien
ccacagtttgcctcttcatgttggt

SEQ ID NO: 5195553 - DNA, 25 bp, Homo sapien
ggcttagacagtcctttttggaagc

SEQ ID NO: 5195554 - DNA, 25 bp, Homo sapien
aagaaggcttagacagtcctttttg

SEQ ID NO: 5195555 - DNA, 25 bp, Homo sapien
ctgggcatctcataagaaggcttag

SEQ ID NO: 5195556 - DNA, 25 bp, Homo sapien
aatagagatcaagaagactccatac

SEQ ID NO: 5195557 - DNA, 25 bp, Homo sapien
tttggagagcaggtccatcagagaa

SEQ ID NO: 5195558 - DNA, 25 bp, Homo sapien
aattcttcaaaaaggatgcggtggg

SEQ ID NO: 5195559 - DNA, 25 bp, Homo sapien
tgggtttaatgcagcgcacaaagtg

SEQ ID NO: 5195560 - DNA, 25 bp, Homo sapien
tgcagggcctctcggtcatcattgg

SEQ ID NO: 5195561 - DNA, 25 bp, Homo sapien
tccagaatccctgtggagcggagct

SEQ ID NO: 5195562 - DNA, 25 bp, Homo sapien
aggagagcacgcaggaggaacaatc

SEQ ID NO: 5195563 - DNA, 25 bp, Homo sapien
gcattcccgtagatgacggtctgac

SEQ ID NO: 5195564 - DNA, 25 bp, Homo sapien
agggatggccagagtagagctacat

SEQ ID NO: 5195565 - DNA, 25 bp, Homo sapien
atttataagaatgcattcccgtaga

SEQ ID NO: 5195566 - DNA, 25 bp, Homo sapien
ataaggaagggcacttccaagtcat

SEQ ID NO: 5195567 - DNA, 25 bp, Homo sapien
tcctcaaaggctccatgagtagagg

SEQ ID NO: 5195568 - DNA, 25 bp, Homo sapien
ctggccctattgatgagaggatgtt

SEQ ID NO: 5195569 - DNA, 25 bp, Homo sapien
ctccatgagtagaggataaggaagg

SEQ ID NO: 5195570 - DNA, 25 bp, Homo sapien
cagcacctttcacctcattggaact

SEQ ID NO: 5195571 - DNA, 25 bp, Homo sapien
gcacctttcacctcattggaactca

SEQ ID NO: 5195572 - DNA, 25 bp, Homo sapien
cacctttcacctcattggaactcat

SEQ ID NO: 5195573 - DNA, 25 bp, Homo sapien
ccagcacctttcacctcattggaac

SEQ ID NO: 5195574 - DNA, 25 bp, Homo sapien
gaaacaaagtctatcaggtctccat

SEQ ID NO: 5195575 - DNA, 25 bp, Homo sapien
cattgcttttccaggatacagccag

SEQ ID NO: 5195576 - DNA, 25 bp, Homo sapien
gagaaactgtaacgaccaaacattg

SEQ ID NO: 5195577 - DNA, 25 bp, Homo sapien
ctactcagaagattgcgaaggacat

SEQ ID NO: 5195578 - DNA, 25 bp, Homo sapien
tttctttagaaaacttgcaaggcat

SEQ ID NO: 5195579 - DNA, 25 bp, Homo sapien
ttttctttagaaaacttgcaaggca

SEQ ID NO: 5195580 - DNA, 25 bp, Homo sapien
ctaatctggacttttccaagatagc

SEQ ID NO: 5195581 - DNA, 25 bp, Homo sapien
cccagtacccagtgatctaatctgg

SEQ ID NO: 5195582 - DNA, 25 bp, Homo sapien
tctttgctagcaagaggtgtttgat

SEQ ID NO: 5195583 - DNA, 25 bp, Homo sapien
cagctctctttgctagcaagaggtg

SEQ ID NO: 5195584 - DNA, 25 bp, Homo sapien
gaaatcatacgggacaatttgaaca

SEQ ID NO: 5195585 - DNA, 25 bp, Homo sapien
agagacaaagaaatcatacgggaca

SEQ ID NO: 5195586 - DNA, 25 bp, Homo sapien
caatttgaacaataaagaacgaact

SEQ ID NO: 5195587 - DNA, 25 bp, Homo sapien
tacgggacaatttgaacaataaaga

SEQ ID NO: 5195588 - DNA, 25 bp, Homo sapien
gacccttttgtatctcctggctcca

SEQ ID NO: 5195589 - DNA, 25 bp, Homo sapien
gacttctcgaagcagcaaatttaat

SEQ ID NO: 5195590 - DNA, 25 bp, Homo sapien
agcacaaccactctgcctatgactt

SEQ ID NO: 5195591 - DNA, 25 bp, Homo sapien
cttggtatatgcctgcagcacaacc

SEQ ID NO: 5195592 - DNA, 25 bp, Homo sapien
taaatttcctccgagcatcatatcc

SEQ ID NO: 5195593 - DNA, 25 bp, Homo sapien
ttcttaaatttcctccgagcatcat

SEQ ID NO: 5195594 - DNA, 25 bp, Homo sapien
cttaaatttcctccgagcatcatat

SEQ ID NO: 5195595 - DNA, 25 bp, Homo sapien
atttcctccgagcatcatatcctct

SEQ ID NO: 5195596 - DNA, 25 bp, Homo sapien
cttaatgtgttttctaaagtcctgc

SEQ ID NO: 5195597 - DNA, 25 bp, Homo sapien
ttctaaagtcctgctgggtgcttgc

SEQ ID NO: 5195598 - DNA, 25 bp, Homo sapien
tgtgttttctaaagtcctgctgggt

SEQ ID NO: 5195599 - DNA, 25 bp, Homo sapien
taaagtcctgctgggtgcttgcaag

SEQ ID NO: 5195600 - DNA, 25 bp, Homo sapien
actgtatctgggtctggttctacta

SEQ ID NO: 5195601 - DNA, 25 bp, Homo sapien
tatctgggtctggttctactaggaa

SEQ ID NO: 5195602 - DNA, 25 bp, Homo sapien
gggtctggttctactaggaaatgtc

SEQ ID NO: 5195603 - DNA, 25 bp, Homo sapien
tgcaggctcctaaagcggggagcca

SEQ ID NO: 5195604 - DNA, 25 bp, Homo sapien
ggcataccagcaagaattaatttac

SEQ ID NO: 5195605 - DNA, 25 bp, Homo sapien
tcaaggcataccagcaagaattaat

SEQ ID NO: 5195606 - DNA, 25 bp, Homo sapien
tctggtatgtgaatgtgccgtaata

SEQ ID NO: 5195607 - DNA, 25 bp, Homo sapien
gtaatagatcgggaattctgaaagg

SEQ ID NO: 5195608 - DNA, 25 bp, Homo sapien
gggaggtctgacaggcaaatgccac

SEQ ID NO: 5195609 - DNA, 25 bp, Homo sapien
gccatcttatcagaatataaaggat

SEQ ID NO: 5195610 - DNA, 25 bp, Homo sapien
taaagaggccaacttgtgggaggtc

SEQ ID NO: 5195611 - DNA, 25 bp, Homo sapien
tgggaggtctgacaggcaaatgcca

SEQ ID NO: 5195612 - DNA, 25 bp, Homo sapien
cggatgaggcacaaaagcccaggct

SEQ ID NO: 5195613 - DNA, 25 bp, Homo sapien
ggcagattttacaaggagccagtgt

SEQ ID NO: 5195614 - DNA, 25 bp, Homo sapien
ctggcttggactgacagctggtcat

SEQ ID NO: 5195615 - DNA, 25 bp, Homo sapien
gagaaggctcatacggatgaggcac

SEQ ID NO: 5195616 - DNA, 25 bp, Homo sapien
gactgcccctcctcacggaggagat

SEQ ID NO: 5195617 - DNA, 25 bp, Homo sapien
tcctgccccgaggcaataaccctgt

SEQ ID NO: 5195618 - DNA, 25 bp, Homo sapien
gtcctgccccgaggcaataaccctg

SEQ ID NO: 5195619 - DNA, 25 bp, Homo sapien
actgcccctcctcacggaggagatt

SEQ ID NO: 5195620 - DNA, 25 bp, Homo sapien
aggttctttccattggatctcctga

SEQ ID NO: 5195621 - DNA, 25 bp, Homo sapien
ctggagaaggcaggttctttccatt

SEQ ID NO: 5195622 - DNA, 25 bp, Homo sapien
gagaaggcaggttctttccattgga

SEQ ID NO: 5195623 - DNA, 25 bp, Homo sapien
caggttctttccattggatctcctg

SEQ ID NO: 5195624 - DNA, 25 bp, Homo sapien
tgacctcaaggtcacgagcggctga

SEQ ID NO: 5195625 - DNA, 25 bp, Homo sapien
caacataatggctctaccagggatt

SEQ ID NO: 5195626 - DNA, 25 bp, Homo sapien
cacgagcggctgaagatgttccaac

SEQ ID NO: 5195627 - DNA, 25 bp, Homo sapien
tgttccaacatcttttacctcagat

SEQ ID NO: 5195628 - DNA, 25 bp, Homo sapien
gggaatgtggcccactgctttggtt

SEQ ID NO: 5195629 - DNA, 25 bp, Homo sapien
ctcgtacctgctgcgacgggggaat

SEQ ID NO: 5195630 - DNA, 25 bp, Homo sapien
ctttatggtcaccaggctcgctgca

SEQ ID NO: 5195631 - DNA, 25 bp, Homo sapien
tgcagtcttgaacctcggcacttcc

SEQ ID NO: 5195632 - DNA, 25 bp, Homo sapien
tggcttctctctggcaaatgaattg

SEQ ID NO: 5195633 - DNA, 25 bp, Homo sapien
ctggcttctctctggcaaatgaatt

SEQ ID NO: 5195634 - DNA, 25 bp, Homo sapien
aataaagcttagaaggaatctgctc

SEQ ID NO: 5195635 - DNA, 25 bp, Homo sapien
tgaataaagcttagaaggaatctgc

SEQ ID NO: 5195636 - DNA, 25 bp, Homo sapien
aaagcttagaaggaatctgctcctc

SEQ ID NO: 5195637 - DNA, 25 bp, Homo sapien
tattctgaataaagcttagaaggaa

SEQ ID NO: 5195638 - DNA, 25 bp, Homo sapien
gattctgcttgtgaatggctcctac

SEQ ID NO: 5195639 - DNA, 25 bp, Homo sapien
cctacgatgtacagagcccctgaga

SEQ ID NO: 5195640 - DNA, 25 bp, Homo sapien
tacggccattgttggattctgcttg

SEQ ID NO: 5195641 - DNA, 25 bp, Homo sapien
gcttgaagtctgtgtacggccattg

SEQ ID NO: 5195642 - DNA, 25 bp, Homo sapien
tttcattatccattagaatggagca

SEQ ID NO: 5195643 - DNA, 25 bp, Homo sapien
cctgagtttacaacagggaactctt

SEQ ID NO: 5195644 - DNA, 25 bp, Homo sapien
gaatggagcacctgagtttacaaca

SEQ ID NO: 5195645 - DNA, 25 bp, Homo sapien
acagggaactcttagcagataatgc

SEQ ID NO: 5195646 - DNA, 25 bp, Homo sapien
aaatacttgttgcattatccattac

SEQ ID NO: 5195647 - DNA, 25 bp, Homo sapien
gaaatacttgttgcattatccatta

SEQ ID NO: 5195648 - DNA, 25 bp, Homo sapien
accaaaataccatagtggtagaaat

SEQ ID NO: 5195649 - DNA, 25 bp, Homo sapien
aaaataccatagtggtagaaatact

SEQ ID NO: 5195650 - DNA, 25 bp, Homo sapien
ggaaggaaggacagccgaagataag

SEQ ID NO: 5195651 - DNA, 25 bp, Homo sapien
ggacagccgaagataaggagagatt

SEQ ID NO: 5195652 - DNA, 25 bp, Homo sapien
ggcaggaacactgcacaaggcagag

SEQ ID NO: 5195653 - DNA, 25 bp, Homo sapien
ctgatagtggtagggcctggatggc

SEQ ID NO: 5195654 - DNA, 25 bp, Homo sapien
tagggacattgtagggacacaaatc

SEQ ID NO: 5195655 - DNA, 25 bp, Homo sapien
ggcccatggaactaaatgctgcaga

SEQ ID NO: 5195656 - DNA, 25 bp, Homo sapien
tgaacataaagctctagcaactggg

SEQ ID NO: 5195657 - DNA, 25 bp, Homo sapien
ggagctgtgcttcccaagaatagtt

SEQ ID NO: 5195658 - DNA, 25 bp, Homo sapien
acccagagggcggaggttgcagtca

SEQ ID NO: 5195659 - DNA, 25 bp, Homo sapien
agtcagctgagatcatgctattgca

SEQ ID NO: 5195660 - DNA, 25 bp, Homo sapien
ctccagcctgagcaacagagtgaaa

SEQ ID NO: 5195661 - DNA, 25 bp, Homo sapien
cctgagcaacagagtgaaactccat

SEQ ID NO: 5195662 - DNA, 25 bp, Homo sapien
tcacagcccacatgaaaatctggcc

SEQ ID NO: 5195663 - DNA, 25 bp, Homo sapien
cacaatgttcgtcaagatatgtgac

SEQ ID NO: 5195664 - DNA, 25 bp, Homo sapien
ttctctggctcatcaattctgaggt

SEQ ID NO: 5195665 - DNA, 25 bp, Homo sapien
aggtcagcccaattggctccaagcc

SEQ ID NO: 5195666 - DNA, 25 bp, Homo sapien
tgcccttgtctgtatgtcacacgaa

SEQ ID NO: 5195667 - DNA, 25 bp, Homo sapien
tgtctgtatgtcacacgaatgagac

SEQ ID NO: 5195668 - DNA, 25 bp, Homo sapien
ccttgtctgtatgtcacacgaatga

SEQ ID NO: 5195669 - DNA, 25 bp, Homo sapien
cttgcccttgtctgtatgtcacacg

SEQ ID NO: 5195670 - DNA, 25 bp, Homo sapien
caagaatggctctgcatatcctgcc

SEQ ID NO: 5195671 - DNA, 25 bp, Homo sapien
tctggctatggcccactcttgtttc

SEQ ID NO: 5195672 - DNA, 25 bp, Homo sapien
gaatggctctgcatatcctgcctct

SEQ ID NO: 5195673 - DNA, 25 bp, Homo sapien
ttccaagaatggctctgcatatcct

SEQ ID NO: 5195674 - DNA, 25 bp, Homo sapien
atgggtcaagataagacaagtgaaa

SEQ ID NO: 5195675 - DNA, 25 bp, Homo sapien
ggtcaagataagacaagtgaaagcc

SEQ ID NO: 5195676 - DNA, 25 bp, Homo sapien
ctatgggtcaagataagacaagtga

SEQ ID NO: 5195677 - DNA, 25 bp, Homo sapien
tcaagataagacaagtgaaagccat

SEQ ID NO: 5195678 - DNA, 25 bp, Homo sapien
gcatgacttggttgtgtcgcccagg

SEQ ID NO: 5195679 - DNA, 25 bp, Homo sapien
cagaaaggcatgacttggttgtgtc

SEQ ID NO: 5195680 - DNA, 25 bp, Homo sapien
gatccagaaaggcatgacttggttg

SEQ ID NO: 5195681 - DNA, 25 bp, Homo sapien
ggttgtgtcgcccagggaaacattc

SEQ ID NO: 5195682 - DNA, 25 bp, Homo sapien
tatgaccagaatacaatgatcaaaa

SEQ ID NO: 5195683 - DNA, 25 bp, Homo sapien
tacctgatactcttttatccctaaa

SEQ ID NO: 5195684 - DNA, 25 bp, Homo sapien
agggcattttcttatatgaccagaa

SEQ ID NO: 5195685 - DNA, 25 bp, Homo sapien
cagcctacctgatactcttttatcc

SEQ ID NO: 5195686 - DNA, 25 bp, Homo sapien
tgaaggctctaatctggtgcaagtc

SEQ ID NO: 5195687 - DNA, 25 bp, Homo sapien
cactgaaggctctaatctggtgcaa

SEQ ID NO: 5195688 - DNA, 25 bp, Homo sapien
cacactgaaggctctaatctggtgc

SEQ ID NO: 5195689 - DNA, 25 bp, Homo sapien
aggctctaatctggtgcaagtctcc

SEQ ID NO: 5195690 - DNA, 25 bp, Homo sapien
tgtctatggactattactaagatta

SEQ ID NO: 5195691 - DNA, 25 bp, Homo sapien
tgtgtctatggactattactaagat

SEQ ID NO: 5195692 - DNA, 25 bp, Homo sapien
atcttgtgtctatggactattacta

SEQ ID NO: 5195693 - DNA, 25 bp, Homo sapien
ctatggactattactaagattatac

SEQ ID NO: 5195694 - DNA, 25 bp, Homo sapien
gctgtcactgtgtaaaagtctaagg

SEQ ID NO: 5195695 - DNA, 25 bp, Homo sapien
tgtcactgtgtaaaagtctaaggta

SEQ ID NO: 5195696 - DNA, 25 bp, Homo sapien
tccctccttcactactttactgcag

SEQ ID NO: 5195697 - DNA, 25 bp, Homo sapien
cactgtgtaaaagtctaaggtagga

SEQ ID NO: 5195698 - DNA, 25 bp, Homo sapien
tccttcttcttaaatccggatccca

SEQ ID NO: 5195699 - DNA, 25 bp, Homo sapien
ttcttcttaaatccggatcccagtg

SEQ ID NO: 5195700 - DNA, 25 bp, Homo sapien
gatcccagtgtgagtggatgagggg

SEQ ID NO: 5195701 - DNA, 25 bp, Homo sapien
cccagtgtgagtggatgaggggcaa

SEQ ID NO: 5195702 - DNA, 25 bp, Homo sapien
agggctcgaccgcttcgctgaagtc

SEQ ID NO: 5195703 - DNA, 25 bp, Homo sapien
tagggctccattggcgtcttggaag

SEQ ID NO: 5195704 - DNA, 25 bp, Homo sapien
tcgctgaagtcagttcattgaactg

SEQ ID NO: 5195705 - DNA, 25 bp, Homo sapien
actaaagtctcaaacagattgcctc

SEQ ID NO: 5195706 - DNA, 25 bp, Homo sapien
cctgcgaagatatcgcacccttttg

SEQ ID NO: 5195707 - DNA, 25 bp, Homo sapien
cttgtttgcatgtcctgcgaagata

SEQ ID NO: 5195708 - DNA, 25 bp, Homo sapien
cgaagatatcgcacccttttggaga

SEQ ID NO: 5195709 - DNA, 25 bp, Homo sapien
catgtcctgcgaagatatcgcaccc

SEQ ID NO: 5195710 - DNA, 25 bp, Homo sapien
tcaagtttggatggtccaaccacgc

SEQ ID NO: 5195711 - DNA, 25 bp, Homo sapien
gccgcagacaagcttcatgcctatg

SEQ ID NO: 5195712 - DNA, 25 bp, Homo sapien
gcctatgaacttggatgagtctgaa

SEQ ID NO: 5195713 - DNA, 25 bp, Homo sapien
tgagtctgaaggagtgatacacatt

SEQ ID NO: 5195714 - DNA, 25 bp, Homo sapien
aggatggcatatccgagaagacagc

SEQ ID NO: 5195715 - DNA, 25 bp, Homo sapien
cgagaagacagcaaatcagtcccag

SEQ ID NO: 5195716 - DNA, 25 bp, Homo sapien
gatggcatatccgagaagacagcaa

SEQ ID NO: 5195717 - DNA, 25 bp, Homo sapien
gagaagacagcaaatcagtcccaga

SEQ ID NO: 5195718 - DNA, 25 bp, Homo sapien
aggcttttgaggggctccccagaga

SEQ ID NO: 5195719 - DNA, 25 bp, Homo sapien
caggcttttgaggggctccccagag

SEQ ID NO: 5195720 - DNA, 25 bp, Homo sapien
ggcttttgaggggctccccagagac

SEQ ID NO: 5195721 - DNA, 25 bp, Homo sapien
gggcctctacctgaagcgacagctt

SEQ ID NO: 5195722 - DNA, 25 bp, Homo sapien
tggtaacagtcaaacagggaccacc

SEQ ID NO: 5195723 - DNA, 25 bp, Homo sapien
cacctaccaggtaagggactcacgg

SEQ ID NO: 5195724 - DNA, 25 bp, Homo sapien
ggtttacgttgtactctgaggccca

SEQ ID NO: 5195725 - DNA, 25 bp, Homo sapien
tccatggtggctccgtagtgggaga

SEQ ID NO: 5195726 - DNA, 25 bp, Homo sapien
gttccatggtggctccgtagtggga

SEQ ID NO: 5195727 - DNA, 25 bp, Homo sapien
gtctctttcaagggtttgttccatg

SEQ ID NO: 5195728 - DNA, 25 bp, Homo sapien
catggtggctccgtagtgggagaga

SEQ ID NO: 5195729 - DNA, 25 bp, Homo sapien
tgggatctgttcgttgccaaaagac

SEQ ID NO: 5195730 - DNA, 25 bp, Homo sapien
gttcgttgccaaaagacccatatga

SEQ ID NO: 5195731 - DNA, 25 bp, Homo sapien
gttttgggatctgttcgttgccaaa

SEQ ID NO: 5195732 - DNA, 25 bp, Homo sapien
gatctgttcgttgccaaaagaccca

SEQ ID NO: 5195733 - DNA, 25 bp, Homo sapien
ttctgaatgcttcgaagtaaataca

SEQ ID NO: 5195734 - DNA, 25 bp, Homo sapien
tattgttgtcgttttcataggtctg

SEQ ID NO: 5195735 - DNA, 25 bp, Homo sapien
tcttgaggggaagcttttgcccatt

SEQ ID NO: 5195736 - DNA, 25 bp, Homo sapien
gcccattttgaatcacatgaattat

SEQ ID NO: 5195737 - DNA, 25 bp, Homo sapien
tgtacagttaacacactaccaaatg

SEQ ID NO: 5195738 - DNA, 25 bp, Homo sapien
tggtagtttttcatctttagttgtc

SEQ ID NO: 5195739 - DNA, 25 bp, Homo sapien
tagtttttcatctttagttgtctct

SEQ ID NO: 5195740 - DNA, 25 bp, Homo sapien
gatggtagtttttcatctttagttg

SEQ ID NO: 5195741 - DNA, 25 bp, Homo sapien
gcctgcctattagcgatgttgcaaa

SEQ ID NO: 5195742 - DNA, 25 bp, Homo sapien
cctggcctgcctattagcgatgttg

SEQ ID NO: 5195743 - DNA, 25 bp, Homo sapien
atcctggcctgcctattagcgatgt

SEQ ID NO: 5195744 - DNA, 25 bp, Homo sapien
gcctattagcgatgttgcaaagaaa

SEQ ID NO: 5195745 - DNA, 25 bp, Homo sapien
actgggtgactgtgtgcctcgctga

SEQ ID NO: 5195746 - DNA, 25 bp, Homo sapien
acattgagctccacagagacagtgc

SEQ ID NO: 5195747 - DNA, 25 bp, Homo sapien
cacagccactgcagtacattgagct

SEQ ID NO: 5195748 - DNA, 25 bp, Homo sapien
gtgaggaggctatgcccggctccca

SEQ ID NO: 5195749 - DNA, 25 bp, Homo sapien
tatcgattgggcctatgtacgacat

SEQ ID NO: 5195750 - DNA, 25 bp, Homo sapien
ggttctcaagcgctaatatatcgat

SEQ ID NO: 5195751 - DNA, 25 bp, Homo sapien
tgtacgacatagctaacagcctggg

SEQ ID NO: 5195752 - DNA, 25 bp, Homo sapien
tattccaagggactttggttctcaa

SEQ ID NO: 5195753 - DNA, 25 bp, Homo sapien
atgtggttacgaacttggtttacat

SEQ ID NO: 5195754 - DNA, 25 bp, Homo sapien
ttacgaacttggtttacattattga

SEQ ID NO: 5195755 - DNA, 25 bp, Homo sapien
gaacttggtttacattattgattaa

SEQ ID NO: 5195756 - DNA, 25 bp, Homo sapien
cgaacttggtttacattattgatta

SEQ ID NO: 5195757 - DNA, 25 bp, Homo sapien
acttccagctctcgtggccgctcat

SEQ ID NO: 5195758 - DNA, 25 bp, Homo sapien
cacttccagctctcgtggccgctca

SEQ ID NO: 5195759 - DNA, 25 bp, Homo sapien
atccatgatggcaccgggaaacgcg

SEQ ID NO: 5195760 - DNA, 25 bp, Homo sapien
cgggaaacgcgccaccagctctgga

SEQ ID NO: 5195761 - DNA, 25 bp, Homo sapien
ttggacatccatgatggcaccggga

SEQ ID NO: 5195762 - DNA, 25 bp, Homo sapien
attaacatgagctcttcactggaat

SEQ ID NO: 5195763 - DNA, 25 bp, Homo sapien
cataaaagttacatccgtaatgtgg

SEQ ID NO: 5195764 - DNA, 25 bp, Homo sapien
taaaagttacatccgtaatgtggaa

SEQ ID NO: 5195765 - DNA, 25 bp, Homo sapien
aagttacatccgtaatgtggaaagg

SEQ ID NO: 5195766 - DNA, 25 bp, Homo sapien
ccataaaagttacatccgtaatgtg

SEQ ID NO: 5195767 - DNA, 25 bp, Homo sapien
tgaagtccatactctgcaatatggt

SEQ ID NO: 5195768 - DNA, 25 bp, Homo sapien
ggtagaatgtgaagctgtgagtccc

SEQ ID NO: 5195769 - DNA, 25 bp, Homo sapien
tactctgcaatatggtagaatgtga

SEQ ID NO: 5195770 - DNA, 25 bp, Homo sapien
gtccatactctgcaatatggtagaa

SEQ ID NO: 5195771 - DNA, 25 bp, Homo sapien
ttccacattggtgaagtataagttg

SEQ ID NO: 5195772 - DNA, 25 bp, Homo sapien
tgaaaaaagagcaaaactttgctgt

SEQ ID NO: 5195773 - DNA, 25 bp, Homo sapien
gaaaaaagagcaaaactttgctgta

SEQ ID NO: 5195774 - DNA, 25 bp, Homo sapien
ctgaaaaaagagcaaaactttgctg

SEQ ID NO: 5195775 - DNA, 25 bp, Homo sapien
gttcgatgcttctgtgcaagaccat

SEQ ID NO: 5195776 - DNA, 25 bp, Homo sapien
cgaggtgttcgatgcttctgtgcaa

SEQ ID NO: 5195777 - DNA, 25 bp, Homo sapien
ttttgggctgctgacatcgtcggcg

SEQ ID NO: 5195778 - DNA, 25 bp, Homo sapien
tgctgacatcgtcggcgaggtgttc

SEQ ID NO: 5195779 - DNA, 25 bp, Homo sapien
gttatagtacatggtgtcctcaggg

SEQ ID NO: 5195780 - DNA, 25 bp, Homo sapien
tggttatagtacatggtgtcctcag

SEQ ID NO: 5195781 - DNA, 25 bp, Homo sapien
ctggttatagtacatggtgtcctca

SEQ ID NO: 5195782 - DNA, 25 bp, Homo sapien
ggttatagtacatggtgtcctcagg

SEQ ID NO: 5195783 - DNA, 25 bp, Homo sapien
aagcagcaagtcgttaatttttaat

SEQ ID NO: 5195784 - DNA, 25 bp, Homo sapien
ttgtgttgaatgcaagcagatgctg

SEQ ID NO: 5195785 - DNA, 25 bp, Homo sapien
gatgctgataatatcagaagtcaca

SEQ ID NO: 5195786 - DNA, 25 bp, Homo sapien
cctgatgaagcatgcatcttgctcg

SEQ ID NO: 5195787 - DNA, 25 bp, Homo sapien
tcctcttgctcccttgatattctag

SEQ ID NO: 5195788 - DNA, 25 bp, Homo sapien
tggcttcctcttgctcccttgatat

SEQ ID NO: 5195789 - DNA, 25 bp, Homo sapien
ttgctcccttgatattctagagttc

SEQ ID NO: 5195790 - DNA, 25 bp, Homo sapien
tcttgctcccttgatattctagagt

SEQ ID NO: 5195791 - DNA, 25 bp, Homo sapien
gttgcttagaactaagaagacagat

SEQ ID NO: 5195792 - DNA, 25 bp, Homo sapien
tgcttagaactaagaagacagatat

SEQ ID NO: 5195793 - DNA, 25 bp, Homo sapien
cttagaactaagaagacagatattt

SEQ ID NO: 5195794 - DNA, 25 bp, Homo sapien
agttgcttagaactaagaagacaga

SEQ ID NO: 5195795 - DNA, 25 bp, Homo sapien
gtaccagggtctgatctacaaagcc

SEQ ID NO: 5195796 - DNA, 25 bp, Homo sapien
caacttgctttatgggattgaactc

SEQ ID NO: 5195797 - DNA, 25 bp, Homo sapien
tcacctttgggtcgtgcactgatag

SEQ ID NO: 5195798 - DNA, 25 bp, Homo sapien
gtctcccagtacagaggtaccaggg

SEQ ID NO: 5195799 - DNA, 25 bp, Homo sapien
gttctcctcagggatacagtccact

SEQ ID NO: 5195800 - DNA, 25 bp, Homo sapien
cctcagggatacagtccactggtga

SEQ ID NO: 5195801 - DNA, 25 bp, Homo sapien
ttccccatcaagtactttgatttgg

SEQ ID NO: 5195802 - DNA, 25 bp, Homo sapien
gaagggtgggctgagttgttctcct

SEQ ID NO: 5195803 - DNA, 25 bp, Homo sapien
tttcttacgcaatgacagacagtcg

SEQ ID NO: 5195804 - DNA, 25 bp, Homo sapien
gacagtcgattaccatgaatgttcc

SEQ ID NO: 5195805 - DNA, 25 bp, Homo sapien
ctcaggctgcacaacacatgtggga

SEQ ID NO: 5195806 - DNA, 25 bp, Homo sapien
catatgtccaaagaagctgacccca

SEQ ID NO: 5195807 - DNA, 25 bp, Homo sapien
gatggagaagagtgcaggaaaggaa

SEQ ID NO: 5195808 - DNA, 25 bp, Homo sapien
aaatcaagcaatattatcagggtcc

SEQ ID NO: 5195809 - DNA, 25 bp, Homo sapien
tatcttcctagacactgggggcatg

SEQ ID NO: 5195810 - DNA, 25 bp, Homo sapien
gcagattctgaatggattgaaaagt

SEQ ID NO: 5195811 - DNA, 25 bp, Homo sapien
gggcactcagcaatggagccctgac

SEQ ID NO: 5195812 - DNA, 25 bp, Homo sapien
taaacacaggcaattatcctgttct

SEQ ID NO: 5195813 - DNA, 25 bp, Homo sapien
tcttggggccaatcctccaggatgg

SEQ ID NO: 5195814 - DNA, 25 bp, Homo sapien
tccaggatggggcactcagcaatgg

SEQ ID NO: 5195815 - DNA, 25 bp, Homo sapien
cacggacaagcagggagttatgaac

SEQ ID NO: 5195816 - DNA, 25 bp, Homo sapien
agatcaggtccttccactgtagcca

SEQ ID NO: 5195817 - DNA, 25 bp, Homo sapien
tagatataccctctaccaagccctg

SEQ ID NO: 5195818 - DNA, 25 bp, Homo sapien
taaaaggcctattaatgtgctccct

SEQ ID NO: 5195819 - DNA, 25 bp, Homo sapien
tcaggtcccaagaacctcctctcat

SEQ ID NO: 5195820 - DNA, 25 bp, Homo sapien
ccaaagctgagagggacgatcaggt

SEQ ID NO: 5195821 - DNA, 25 bp, Homo sapien
gggacgatcaggtttctgtgaccag

SEQ ID NO: 5195822 - DNA, 25 bp, Homo sapien
tgccctccaaagctgagagggacga

SEQ ID NO: 5195823 - DNA, 25 bp, Homo sapien
tgaactgtaaggattttcccatctg

SEQ ID NO: 5195824 - DNA, 25 bp, Homo sapien
acttctttcatcttagccttgtctg

SEQ ID NO: 5195825 - DNA, 25 bp, Homo sapien
tcttagccttgtctgttcttactcc

SEQ ID NO: 5195826 - DNA, 25 bp, Homo sapien
tttcaccttgatctctctgtccaag

SEQ ID NO: 5195827 - DNA, 25 bp, Homo sapien
cagcccccctcactcagctgggatt

SEQ ID NO: 5195828 - DNA, 25 bp, Homo sapien
caccatctcccgggctggagcgatt

SEQ ID NO: 5195829 - DNA, 25 bp, Homo sapien
tcactcagcccccctcactcagctg

SEQ ID NO: 5195830 - DNA, 25 bp, Homo sapien
accaccatctcccgggctggagcga

SEQ ID NO: 5195831 - DNA, 25 bp, Homo sapien
gaagtttgcattgccgtttctttgc

SEQ ID NO: 5195832 - DNA, 25 bp, Homo sapien
ttgcattgccgtttctttgcgggcg

SEQ ID NO: 5195833 - DNA, 25 bp, Homo sapien
ggctgggaagtttgcattgccgttt

SEQ ID NO: 5195834 - DNA, 25 bp, Homo sapien
cattgccgtttctttgcgggcgggc

SEQ ID NO: 5195835 - DNA, 25 bp, Homo sapien
gatgcagcgtcagaggttagcctaa

SEQ ID NO: 5195836 - DNA, 25 bp, Homo sapien
caacggactcggaatctggactgta

SEQ ID NO: 5195837 - DNA, 25 bp, Homo sapien
ggtgacctatctcccgatgcagcgt

SEQ ID NO: 5195838 - DNA, 25 bp, Homo sapien
tggactgtataaggatgccctccgc

SEQ ID NO: 5195839 - DNA, 25 bp, Homo sapien
tctgggcagggtcgcgcttgcaggg

SEQ ID NO: 5195840 - DNA, 25 bp, Homo sapien
gggtcgcgcttgcaggggcttgggt

SEQ ID NO: 5195841 - DNA, 25 bp, Homo sapien
cagggtcgcgcttgcaggggcttgg

SEQ ID NO: 5195842 - DNA, 25 bp, Homo sapien
tgctctgggcagggtcgcgcttgca

SEQ ID NO: 5195843 - DNA, 25 bp, Homo sapien
tggattttcctgatcaaagggggcc

SEQ ID NO: 5195844 - DNA, 25 bp, Homo sapien
attttcctgatcaaagggggccttg

SEQ ID NO: 5195845 - DNA, 25 bp, Homo sapien
tcctgatcaaagggggccttgccgc

SEQ ID NO: 5195846 - DNA, 25 bp, Homo sapien
tttcctgatcaaagggggccttgcc

SEQ ID NO: 5195847 - DNA, 25 bp, Homo sapien
ggctttgaagtttgccgctacccaa

SEQ ID NO: 5195848 - DNA, 25 bp, Homo sapien
gaatagcggctctttcagaagcgaa

SEQ ID NO: 5195849 - DNA, 25 bp, Homo sapien
tacccaatcatcaaagaatagcggc

SEQ ID NO: 5195850 - DNA, 25 bp, Homo sapien
tgataaggactttgctgggccgcca

SEQ ID NO: 5195851 - DNA, 25 bp, Homo sapien
gccccgcgcgcggtctgagcgcttc

SEQ ID NO: 5195852 - DNA, 25 bp, Homo sapien
cgcgcgcggtctgagcgcttcagga

SEQ ID NO: 5195853 - DNA, 25 bp, Homo sapien
ccctggcgcctgctctgagcgccgg

SEQ ID NO: 5195854 - DNA, 25 bp, Homo sapien
cgcgcggtctgagcgcttcaggatc

SEQ ID NO: 5195855 - DNA, 25 bp, Homo sapien
gacgccgccgccgaggcatggacac

SEQ ID NO: 5195856 - DNA, 25 bp, Homo sapien
ggcgaggacgaagggccgcccagcc

SEQ ID NO: 5195857 - DNA, 25 bp, Homo sapien
cgccgaggcatggacacccgaaggc

SEQ ID NO: 5195858 - DNA, 25 bp, Homo sapien
atggacacccgaaggcgaggacgaa

SEQ ID NO: 5195859 - DNA, 25 bp, Homo sapien
ccgcggccatggctacggcttgcag

SEQ ID NO: 5195860 - DNA, 25 bp, Homo sapien
cctgcagcgagtcgttccggaggac

SEQ ID NO: 5195861 - DNA, 25 bp, Homo sapien
ctggagaaaggcctgcagcgagtcg

SEQ ID NO: 5195862 - DNA, 25 bp, Homo sapien
atggctacggcttgcaggcccctgg

SEQ ID NO: 5195863 - DNA, 25 bp, Homo sapien
agcgcggggtcgtagggcacctgca

SEQ ID NO: 5195864 - DNA, 25 bp, Homo sapien
cgagtgcttgcccaggtccggggag

SEQ ID NO: 5195865 - DNA, 25 bp, Homo sapien
ccagcaatgccaggggcgagtgctt

SEQ ID NO: 5195866 - DNA, 25 bp, Homo sapien
gcccggctggccgatgcggctacag

SEQ ID NO: 5195867 - DNA, 25 bp, Homo sapien
aaggacggctgcaggtgcgtcttct

SEQ ID NO: 5195868 - DNA, 25 bp, Homo sapien
catgctcgagggcagcatcttgacc

SEQ ID NO: 5195869 - DNA, 25 bp, Homo sapien
taaggggaagctcgtgcgcagcccc

SEQ ID NO: 5195870 - DNA, 25 bp, Homo sapien
tcttgaccggcgagaactcgtaggg

SEQ ID NO: 5195871 - DNA, 25 bp, Homo sapien
caggttggagtagcctggcggcagc

SEQ ID NO: 5195872 - DNA, 25 bp, Homo sapien
ccgggttgggtgacaactggcggca

SEQ ID NO: 5195873 - DNA, 25 bp, Homo sapien
agcgcggcctgcgccgcgtagggca

SEQ ID NO: 5195874 - DNA, 25 bp, Homo sapien
tgggtgacaactggcggcaggtggg

SEQ ID NO: 5195875 - DNA, 25 bp, Homo sapien
caaagtccgacgggcccaacaccag

SEQ ID NO: 5195876 - DNA, 25 bp, Homo sapien
gcgcaaagtccgacgggcccaacac

SEQ ID NO: 5195877 - DNA, 25 bp, Homo sapien
ctgcgcaaagtccgacgggcccaac

SEQ ID NO: 5195878 - DNA, 25 bp, Homo sapien
gcaaagtccgacgggcccaacacca

SEQ ID NO: 5195879 - DNA, 25 bp, Homo sapien
tcttgacgtgcttcgcgaggtggtc

SEQ ID NO: 5195880 - DNA, 25 bp, Homo sapien
ttaaccccggcctcagcgactttga

SEQ ID NO: 5195881 - DNA, 25 bp, Homo sapien
actcgggacaggcaaagcgcttctc

SEQ ID NO: 5195882 - DNA, 25 bp, Homo sapien
cacgtggcacacgtgctgcttcttc

SEQ ID NO: 5195883 - DNA, 25 bp, Homo sapien
gtcctagcgaaaacccgagcactgt

SEQ ID NO: 5195884 - DNA, 25 bp, Homo sapien
gaactgggtccctatgtccgaaggc

SEQ ID NO: 5195885 - DNA, 25 bp, Homo sapien
gaaactgtaggtctccctgacggtg

SEQ ID NO: 5195886 - DNA, 25 bp, Homo sapien
tcctatatacaaggccagaccaggg

SEQ ID NO: 5195887 - DNA, 25 bp, Homo sapien
tctaccaaggtcattctttcagatg

SEQ ID NO: 5195888 - DNA, 25 bp, Homo sapien
gaaaattttcactctctaacaagga

SEQ ID NO: 5195889 - DNA, 25 bp, Homo sapien
tactaaataaatgattggctctgtc

SEQ ID NO: 5195890 - DNA, 25 bp, Homo sapien
tctgtcaataatagctagtagactc

SEQ ID NO: 5195891 - DNA, 25 bp, Homo sapien
tgtctgcagtactatcaagagatga

SEQ ID NO: 5195892 - DNA, 25 bp, Homo sapien
ctgcagtactatcaagagatgacat

SEQ ID NO: 5195893 - DNA, 25 bp, Homo sapien
tctgcagtactatcaagagatgaca

SEQ ID NO: 5195894 - DNA, 25 bp, Homo sapien
gctgtctgcagtactatcaagagat

SEQ ID NO: 5195895 - DNA, 25 bp, Homo sapien
gaagacacccttaagctagtgagaa

SEQ ID NO: 5195896 - DNA, 25 bp, Homo sapien
tgagaagagcccctaaaatagtgaa

SEQ ID NO: 5195897 - DNA, 25 bp, Homo sapien
ctagtgagaacgcattttgaggaca

SEQ ID NO: 5195898 - DNA, 25 bp, Homo sapien
gagtgaaatcctcttggtacctgag

SEQ ID NO: 5195899 - DNA, 25 bp, Homo sapien
cagatcacggttagttttcaacaaa

SEQ ID NO: 5195900 - DNA, 25 bp, Homo sapien
gtgcccggacctgcttgaattttta

SEQ ID NO: 5195901 - DNA, 25 bp, Homo sapien
gagcatgttggcagatcacggttag

SEQ ID NO: 5195902 - DNA, 25 bp, Homo sapien
gaatttttatgatgagcatgttggc

SEQ ID NO: 5195903 - DNA, 25 bp, Homo sapien
cttgtctaatcccagaattgtgaaa

SEQ ID NO: 5195904 - DNA, 25 bp, Homo sapien
gaattgtgaaatccagcgtccacat

SEQ ID NO: 5195905 - DNA, 25 bp, Homo sapien
tttcgcaatcaccttttccgcaacg

SEQ ID NO: 5195906 - DNA, 25 bp, Homo sapien
tctgcatattgtgcaatgtgcgcca

SEQ ID NO: 5195907 - DNA, 25 bp, Homo sapien
cctgcagcttttacgacatccttcc

SEQ ID NO: 5195908 - DNA, 25 bp, Homo sapien
gcctgcagcttttacgacatccttc

SEQ ID NO: 5195909 - DNA, 25 bp, Homo sapien
cagcttttacgacatccttccttcc

SEQ ID NO: 5195910 - DNA, 25 bp, Homo sapien
cacggacgggaagtcagacgggtca

SEQ ID NO: 5195911 - DNA, 25 bp, Homo sapien
gcacggacgggaagtcagacgggtc

SEQ ID NO: 5195912 - DNA, 25 bp, Homo sapien
caaaaatcatctcgtccccagacat

SEQ ID NO: 5195913 - DNA, 25 bp, Homo sapien
ttttcttcttgctcatagtaggatc

SEQ ID NO: 5195914 - DNA, 25 bp, Homo sapien
tcttcttgctcatagtaggatcaaa

SEQ ID NO: 5195915 - DNA, 25 bp, Homo sapien
tagtaggatcaaaaatcatctcgtc

SEQ ID NO: 5195916 - DNA, 25 bp, Homo sapien
tcctctggttcagttggttcttgaa

SEQ ID NO: 5195917 - DNA, 25 bp, Homo sapien
ctctgtttgggtatccccttcctca

SEQ ID NO: 5195918 - DNA, 25 bp, Homo sapien
ctgaaggccgggtttcctctgtttg

SEQ ID NO: 5195919 - DNA, 25 bp, Homo sapien
tcatcagaagcatcttttttcctag

SEQ ID NO: 5195920 - DNA, 25 bp, Homo sapien
gcttcatcctcatctgggaacttaa

SEQ ID NO: 5195921 - DNA, 25 bp, Homo sapien
cttcatcttctagagcttcatcctc

SEQ ID NO: 5195922 - DNA, 25 bp, Homo sapien
cttctagagcttcatcctcatctgg

SEQ ID NO: 5195923 - DNA, 25 bp, Homo sapien
aagcagggcctgtctgattactgaa

SEQ ID NO: 5195924 - DNA, 25 bp, Homo sapien
cctggaagccaattttgataatggc

SEQ ID NO: 5195925 - DNA, 25 bp, Homo sapien
gcctggaagccaattttgataatgg

SEQ ID NO: 5195926 - DNA, 25 bp, Homo sapien
caaccactcgccaaaaatcttggca

SEQ ID NO: 5195927 - DNA, 25 bp, Homo sapien
aaccactcgccaaaaatcttggcag

SEQ ID NO: 5195928 - DNA, 25 bp, Homo sapien
tgtccctggtagtggatgaacaagt

SEQ ID NO: 5195929 - DNA, 25 bp, Homo sapien
ccagttttcccagaagtcagattca

SEQ ID NO: 5195930 - DNA, 25 bp, Homo sapien
gtgattagaaccagagacccggctc

SEQ ID NO: 5195931 - DNA, 25 bp, Homo sapien
ctgaggtcgccccaagaagattatg

SEQ ID NO: 5195932 - DNA, 25 bp, Homo sapien
aggaaagaaggttggaatgtcggtg

SEQ ID NO: 5195933 - DNA, 25 bp, Homo sapien
cttcaggagcgccgaagaaggaaag

SEQ ID NO: 5195934 - DNA, 25 bp, Homo sapien
agaaggttggaatgtcggtgtccat

SEQ ID NO: 5195935 - DNA, 25 bp, Homo sapien
tcaggagcgccgaagaaggaaagaa

SEQ ID NO: 5195936 - DNA, 25 bp, Homo sapien
ctcggattgacgtgcgcacgcgcac

SEQ ID NO: 5195937 - DNA, 25 bp, Homo sapien
cctcggattgacgtgcgcacgcgca

SEQ ID NO: 5195938 - DNA, 25 bp, Homo sapien
gacagccccgcggttgtgggtgtcc

SEQ ID NO: 5195939 - DNA, 25 bp, Homo sapien
gcgggcggccgagctgagggacagc

SEQ ID NO: 5195940 - DNA, 25 bp, Homo sapien
agcccggggaaccacggagaggcag

SEQ ID NO: 5195941 - DNA, 25 bp, Homo sapien
ttgtgggtgtcccgcggcgccggaa

SEQ ID NO: 5195942 - DNA, 25 bp, Homo sapien
ctgcacggcgcgtggaggaagctcg

SEQ ID NO: 5195943 - DNA, 25 bp, Homo sapien
gtggaggaagctcgggcagcagccg

SEQ ID NO: 5195944 - DNA, 25 bp, Homo sapien
cctcttcagcagaccatccgaaggg

SEQ ID NO: 5195945 - DNA, 25 bp, Homo sapien
ctccgagtcgggaacgcagcgtcgc

SEQ ID NO: 5195946 - DNA, 25 bp, Homo sapien
agaccatccgaagggcacacaccga

SEQ ID NO: 5195947 - DNA, 25 bp, Homo sapien
cggctagctgctcgcgcggagctgg

SEQ ID NO: 5195948 - DNA, 25 bp, Homo sapien
cggtcgttgcctcggagtgtcttac

SEQ ID NO: 5195949 - DNA, 25 bp, Homo sapien
ccagaaccaggtgcggtagagcggt

SEQ ID NO: 5195950 - DNA, 25 bp, Homo sapien
tgggtcagactgcacaccgggctag

SEQ ID NO: 5195951 - DNA, 25 bp, Homo sapien
tgcgggaggagggtgccgcaagcca

SEQ ID NO: 5195952 - DNA, 25 bp, Homo sapien
cgtgtagacacgaacggcgcttcct

SEQ ID NO: 5195953 - DNA, 25 bp, Homo sapien
ccagttatctccacacccgtgtaga

SEQ ID NO: 5195954 - DNA, 25 bp, Homo sapien
tgcaccggccggtcaaagaatggta

SEQ ID NO: 5195955 - DNA, 25 bp, Homo sapien
tagacaagcctgtcagaatcgccca

SEQ ID NO: 5195956 - DNA, 25 bp, Homo sapien
taagatgagaataaggcccgggaat

SEQ ID NO: 5195957 - DNA, 25 bp, Homo sapien
ggctagcaagttatatctagctagt

SEQ ID NO: 5195958 - DNA, 25 bp, Homo sapien
tctagctagtagtgatgtcttaact

SEQ ID NO: 5195959 - DNA, 25 bp, Homo sapien
catcgaaatttgtatggctagcaag

SEQ ID NO: 5195960 - DNA, 25 bp, Homo sapien
tcgtgcacataattctcctcccatt

SEQ ID NO: 5195961 - DNA, 25 bp, Homo sapien
atcttcagggattgcaacattcaac

SEQ ID NO: 5195962 - DNA, 25 bp, Homo sapien
tcttcacctagatgaaacattcgtg

SEQ ID NO: 5195963 - DNA, 25 bp, Homo sapien
ctctaggatcttcagggattgcaac

SEQ ID NO: 5195964 - DNA, 25 bp, Homo sapien
gcacggcatcttttggggaaacaca

SEQ ID NO: 5195965 - DNA, 25 bp, Homo sapien
gactaaagtctatcagaacagcacg

SEQ ID NO: 5195966 - DNA, 25 bp, Homo sapien
tatcagaacagcacggcatcttttg

SEQ ID NO: 5195967 - DNA, 25 bp, Homo sapien
gaaacacagttgtggaagaccaaac

SEQ ID NO: 5195968 - DNA, 25 bp, Homo sapien
gagggatttctggaatataaaattc

SEQ ID NO: 5195969 - DNA, 25 bp, Homo sapien
tgagggatttctggaatataaaatt

SEQ ID NO: 5195970 - DNA, 25 bp, Homo sapien
tctggaatataaaattcagggccaa

SEQ ID NO: 5195971 - DNA, 25 bp, Homo sapien
atttctggaatataaaattcagggc

SEQ ID NO: 5195972 - DNA, 25 bp, Homo sapien
cacagtatctcaagctatggtattt

SEQ ID NO: 5195973 - DNA, 25 bp, Homo sapien
tacatgtgaccagaacaagaagaaa

SEQ ID NO: 5195974 - DNA, 25 bp, Homo sapien
caacaaaacaccttttagagtacat

SEQ ID NO: 5195975 - DNA, 25 bp, Homo sapien
ttagagtacatgtgaccagaacaag

SEQ ID NO: 5195976 - DNA, 25 bp, Homo sapien
cagtatctgtcttgtctacagaagt

SEQ ID NO: 5195977 - DNA, 25 bp, Homo sapien
agtatctgtcttgtctacagaagtc

SEQ ID NO: 5195978 - DNA, 25 bp, Homo sapien
ctttacagtatctgtcttgtctaca

SEQ ID NO: 5195979 - DNA, 25 bp, Homo sapien
tacagtatctgtcttgtctacagaa

SEQ ID NO: 5195980 - DNA, 25 bp, Homo sapien
tagcaatctgccattctgtttgttc

SEQ ID NO: 5195981 - DNA, 25 bp, Homo sapien
cgtttggatcaaacattagcaatct

SEQ ID NO: 5195982 - DNA, 25 bp, Homo sapien
caaacattagcaatctgccattctg

SEQ ID NO: 5195983 - DNA, 25 bp, Homo sapien
ggatcaaacattagcaatctgccat

SEQ ID NO: 5195984 - DNA, 25 bp, Homo sapien
ggagagatcagctgcacaatcaaag

SEQ ID NO: 5195985 - DNA, 25 bp, Homo sapien
gaagtgctaatccatgcatttctgg

SEQ ID NO: 5195986 - DNA, 25 bp, Homo sapien
tttaattgggtgacaaatggctgca

SEQ ID NO: 5195987 - DNA, 25 bp, Homo sapien
cagaatacagggtgtttaagcatta

SEQ ID NO: 5195988 - DNA, 25 bp, Homo sapien
aataaataaggtcctctgtcactga

SEQ ID NO: 5195989 - DNA, 25 bp, Homo sapien
taatagattatcagaatcagagcct

SEQ ID NO: 5195990 - DNA, 25 bp, Homo sapien
tagaagaatcccaccagaatagtac

SEQ ID NO: 5195991 - DNA, 25 bp, Homo sapien
gagatgactacaggaagggctttaa

SEQ ID NO: 5195992 - DNA, 25 bp, Homo sapien
tcttggtctgcgtccaaagaggcat

SEQ ID NO: 5195993 - DNA, 25 bp, Homo sapien
gaggtattaagtttgcttgtcaatc

SEQ ID NO: 5195994 - DNA, 25 bp, Homo sapien
catttacagagacctgtgttggtga

SEQ ID NO: 5195995 - DNA, 25 bp, Homo sapien
taagtttgcttgtcaatcttggtct

SEQ ID NO: 5195996 - DNA, 25 bp, Homo sapien
ctttcttttaagcaggaagatgaca

SEQ ID NO: 5195997 - DNA, 25 bp, Homo sapien
tgcaatattcttagaagggacttcc

SEQ ID NO: 5195998 - DNA, 25 bp, Homo sapien
tctttactttcgatactccttgaag

SEQ ID NO: 5195999 - DNA, 25 bp, Homo sapien
agatgacaataggtcagactgtaga

SEQ ID NO: 5196000 - DNA, 25 bp, Homo sapien
atcaacttggataactatctttgca

SEQ ID NO: 5196001 - DNA, 25 bp, Homo sapien
gaacaatcaacttggataactatct

SEQ ID NO: 5196002 - DNA, 25 bp, Homo sapien
tgaacaatcaacttggataactatc

SEQ ID NO: 5196003 - DNA, 25 bp, Homo sapien
caatcaacttggataactatctttg

SEQ ID NO: 5196004 - DNA, 25 bp, Homo sapien
catttacagtctccatcagctcaca

SEQ ID NO: 5196005 - DNA, 25 bp, Homo sapien
gtttctggttcatttacagtctcca

SEQ ID NO: 5196006 - DNA, 25 bp, Homo sapien
tctccatcagctcacaaccaccctg

SEQ ID NO: 5196007 - DNA, 25 bp, Homo sapien
ctgtttctggttcatttacagtctc

SEQ ID NO: 5196008 - DNA, 25 bp, Homo sapien
ctgctttacaatgactgcatctttg

SEQ ID NO: 5196009 - DNA, 25 bp, Homo sapien
ttttctcctgctttacaatgactgc

SEQ ID NO: 5196010 - DNA, 25 bp, Homo sapien
tttatcatcaatatcctgaaggcaa

SEQ ID NO: 5196011 - DNA, 25 bp, Homo sapien
tatttttctcctgctttacaatgac

SEQ ID NO: 5196012 - DNA, 25 bp, Homo sapien
cattaactctagtggggcctgagta

SEQ ID NO: 5196013 - DNA, 25 bp, Homo sapien
ttctgccattaactctagtggggcc

SEQ ID NO: 5196014 - DNA, 25 bp, Homo sapien
ctttttagggttactatcttcatca

SEQ ID NO: 5196015 - DNA, 25 bp, Homo sapien
tctttttagggttactatcttcatc

SEQ ID NO: 5196016 - DNA, 25 bp, Homo sapien
tctcttctggctaaagtatacaata

SEQ ID NO: 5196017 - DNA, 25 bp, Homo sapien
tgtgccccttaatggacttctcttt

SEQ ID NO: 5196018 - DNA, 25 bp, Homo sapien
tacttttttagttctcacagtagtg

SEQ ID NO: 5196019 - DNA, 25 bp, Homo sapien
caaggcaattggattatccatcatc

SEQ ID NO: 5196020 - DNA, 25 bp, Homo sapien
ttgccagctggtactctcgggccat

SEQ ID NO: 5196021 - DNA, 25 bp, Homo sapien
tcatctgacataatttttttgccag

SEQ ID NO: 5196022 - DNA, 25 bp, Homo sapien
tctgacataatttttttgccagctg

SEQ ID NO: 5196023 - DNA, 25 bp, Homo sapien
tgacataatttttttgccagctggt

SEQ ID NO: 5196024 - DNA, 25 bp, Homo sapien
tggctggcatgtgtaggcactcaat

SEQ ID NO: 5196025 - DNA, 25 bp, Homo sapien
gacactatcagggaattcactagac

SEQ ID NO: 5196026 - DNA, 25 bp, Homo sapien
gagcctatgcaatctgacaacccct

SEQ ID NO: 5196027 - DNA, 25 bp, Homo sapien
tccagtgatggtaattagccgatgc

SEQ ID NO: 5196028 - DNA, 25 bp, Homo sapien
ataagtgtgaaaaactccttggcct

SEQ ID NO: 5196029 - DNA, 25 bp, Homo sapien
catttcttcaataagtgtgaaaaac

SEQ ID NO: 5196030 - DNA, 25 bp, Homo sapien
tggcctcaggattttctggttcata

SEQ ID NO: 5196031 - DNA, 25 bp, Homo sapien
ggattttctggttcatagattagga

SEQ ID NO: 5196032 - DNA, 25 bp, Homo sapien
gcccagggagcctgctctgctcggg

SEQ ID NO: 5196033 - DNA, 25 bp, Homo sapien
ctgatgcctggtgcccagggagcct

SEQ ID NO: 5196034 - DNA, 25 bp, Homo sapien
gggagcctgctctgctcgggcagtt

SEQ ID NO: 5196035 - DNA, 25 bp, Homo sapien
ccagggagcctgctctgctcgggca

SEQ ID NO: 5196036 - DNA, 25 bp, Homo sapien
cttcgtcagagctctcgtcactcag

SEQ ID NO: 5196037 - DNA, 25 bp, Homo sapien
gttttcaccgtcttgctcatgattc

SEQ ID NO: 5196038 - DNA, 25 bp, Homo sapien
tcatcactgttttcaccgtcttgct

SEQ ID NO: 5196039 - DNA, 25 bp, Homo sapien
tcagctcctcatcgctttctccttt

SEQ ID NO: 5196040 - DNA, 25 bp, Homo sapien
atacatgaagcttcaagtattgcag

SEQ ID NO: 5196041 - DNA, 25 bp, Homo sapien
gaagcttcaagtattgcagcaacac

SEQ ID NO: 5196042 - DNA, 25 bp, Homo sapien
catgaagcttcaagtattgcagcaa

SEQ ID NO: 5196043 - DNA, 25 bp, Homo sapien
tatttgcatggtatacattaatgaa

SEQ ID NO: 5196044 - DNA, 25 bp, Homo sapien
aagaaatgggaacgcggcgctcaaa

SEQ ID NO: 5196045 - DNA, 25 bp, Homo sapien
tcgattgtatttgaagcgctttgaa

SEQ ID NO: 5196046 - DNA, 25 bp, Homo sapien
acgcggcgctcaaaggcagaagaag

SEQ ID NO: 5196047 - DNA, 25 bp, Homo sapien
agggagtggtgtccgcccagctgtt

SEQ ID NO: 5196048 - DNA, 25 bp, Homo sapien
aggattcttgggataatgggggtgg

SEQ ID NO: 5196049 - DNA, 25 bp, Homo sapien
ttttatcattcctgggggaggattc

SEQ ID NO: 5196050 - DNA, 25 bp, Homo sapien
gaggattcttgggataatgggggtg

SEQ ID NO: 5196051 - DNA, 25 bp, Homo sapien
tgctctgcgctgcttgaagtgggcg

SEQ ID NO: 5196052 - DNA, 25 bp, Homo sapien
tgacgatgaaatccccggcactttt

SEQ ID NO: 5196053 - DNA, 25 bp, Homo sapien
agtgggcggcatacaaccaggtgaa

SEQ ID NO: 5196054 - DNA, 25 bp, Homo sapien
tgaagctcggaattccatccaccgg

SEQ ID NO: 5196055 - DNA, 25 bp, Homo sapien
tcctttggaaataggcaggctgtcg

SEQ ID NO: 5196056 - DNA, 25 bp, Homo sapien
taaatccagctcacggttttgcgcc

SEQ ID NO: 5196057 - DNA, 25 bp, Homo sapien
gaaagcgcgctttgggtcgtgtcct

SEQ ID NO: 5196058 - DNA, 25 bp, Homo sapien
tgttgtaaccgcaaaggaggcagaa

SEQ ID NO: 5196059 - DNA, 25 bp, Homo sapien
tctcgcacgcgagcgccaggagaag

SEQ ID NO: 5196060 - DNA, 25 bp, Homo sapien
gggaaatcacgaggccgttgctcgc

SEQ ID NO: 5196061 - DNA, 25 bp, Homo sapien
aagagagagattcggagaggcggct

SEQ ID NO: 5196062 - DNA, 25 bp, Homo sapien
cagctgcttcctcgttctcgctagt

SEQ ID NO: 5196063 - DNA, 25 bp, Homo sapien
tcggctctgcgacagcgagccgggc

SEQ ID NO: 5196064 - DNA, 25 bp, Homo sapien
gctcggccctgacaggcgtaatctg

SEQ ID NO: 5196065 - DNA, 25 bp, Homo sapien
gcactcccgcctttcctctgcacag

SEQ ID NO: 5196066 - DNA, 25 bp, Homo sapien
ctcggctcggccctgacaggcgtaa

SEQ ID NO: 5196067 - DNA, 25 bp, Homo sapien
cagcgggtcgactacggcccctgga

SEQ ID NO: 5196068 - DNA, 25 bp, Homo sapien
caggttaccgttcctagtagcgcct

SEQ ID NO: 5196069 - DNA, 25 bp, Homo sapien
ccgttcctagtagcgccttcggctg

SEQ ID NO: 5196070 - DNA, 25 bp, Homo sapien
ctcgggcagcgggtcgactacggcc

SEQ ID NO: 5196071 - DNA, 25 bp, Homo sapien
tagccatcgctaagcctagggcgag

SEQ ID NO: 5196072 - DNA, 25 bp, Homo sapien
gatttctcgcggtacagatccagag

SEQ ID NO: 5196073 - DNA, 25 bp, Homo sapien
tatcccagccggtttttagccatcg

SEQ ID NO: 5196074 - DNA, 25 bp, Homo sapien
tctccctcggacttggccagagaag

SEQ ID NO: 5196075 - DNA, 25 bp, Homo sapien
aaagaggctaactgctccggggact

SEQ ID NO: 5196076 - DNA, 25 bp, Homo sapien
gaaagaggctaactgctccggggac

SEQ ID NO: 5196077 - DNA, 25 bp, Homo sapien
aagaaagaggctaactgctccgggg

SEQ ID NO: 5196078 - DNA, 25 bp, Homo sapien
agaggctaactgctccggggactag

SEQ ID NO: 5196079 - DNA, 25 bp, Homo sapien
ggttcccgttgttgtgtctggctaa

SEQ ID NO: 5196080 - DNA, 25 bp, Homo sapien
gcatgtctggttcggtgtctggttc

SEQ ID NO: 5196081 - DNA, 25 bp, Homo sapien
cggtgtctggttcccgttgttgtgt

SEQ ID NO: 5196082 - DNA, 25 bp, Homo sapien
gggcatgtctggttcggtgtctggt

SEQ ID NO: 5196083 - DNA, 25 bp, Homo sapien
caaggccagtacaagacgcaagggt

SEQ ID NO: 5196084 - DNA, 25 bp, Homo sapien
agcgctcagtgagcgattttccagc

SEQ ID NO: 5196085 - DNA, 25 bp, Homo sapien
attttccagccgagccgctacaagc

SEQ ID NO: 5196086 - DNA, 25 bp, Homo sapien
tacaagccccattgggcactcagca

SEQ ID NO: 5196087 - DNA, 25 bp, Homo sapien
aggaaaggcagcgagcctgcctggt

SEQ ID NO: 5196088 - DNA, 25 bp, Homo sapien
acgtgcgcgctagctccggtactgg

SEQ ID NO: 5196089 - DNA, 25 bp, Homo sapien
tcgagtctggcggtgcatcggcgcg

SEQ ID NO: 5196090 - DNA, 25 bp, Homo sapien
agccctgggccgctctcgagtctgg

SEQ ID NO: 5196091 - DNA, 25 bp, Homo sapien
aaagagaagcgagagctgtgcgggg

SEQ ID NO: 5196092 - DNA, 25 bp, Homo sapien
ctactgtccagagtcctcgactggt

SEQ ID NO: 5196093 - DNA, 25 bp, Homo sapien
tgtccagagtcctcgactggtccgg

SEQ ID NO: 5196094 - DNA, 25 bp, Homo sapien
gtcctcgactggtccggcgcagaaa

SEQ ID NO: 5196095 - DNA, 25 bp, Homo sapien
agagtcctcgactggtccggcgcag

SEQ ID NO: 5196096 - DNA, 25 bp, Homo sapien
tccgctcccgcgttcgaggaggttg

SEQ ID NO: 5196097 - DNA, 25 bp, Homo sapien
caggttagtggtattggggtccgct

SEQ ID NO: 5196098 - DNA, 25 bp, Homo sapien
ttgtggggcgcaggttagtggtatt

SEQ ID NO: 5196099 - DNA, 25 bp, Homo sapien
tgcggacgaagatggggtcgaagac

SEQ ID NO: 5196100 - DNA, 25 bp, Homo sapien
gcgaagccctcaacgatcgccgctg

SEQ ID NO: 5196101 - DNA, 25 bp, Homo sapien
agcgtccctgacagccgaatgacct

SEQ ID NO: 5196102 - DNA, 25 bp, Homo sapien
ctcgctttccggtgccctgggagtc

SEQ ID NO: 5196103 - DNA, 25 bp, Homo sapien
gccgctgctcggaccttgcgtggtc

SEQ ID NO: 5196104 - DNA, 25 bp, Homo sapien
tgtcgtcccacggagcaaagaaacc

SEQ ID NO: 5196105 - DNA, 25 bp, Homo sapien
ccctgtcgtcccacggagcaaagaa

SEQ ID NO: 5196106 - DNA, 25 bp, Homo sapien
tcgtcccacggagcaaagaaaccac

SEQ ID NO: 5196107 - DNA, 25 bp, Homo sapien
cgctgacccctgtcgtcccacggag

SEQ ID NO: 5196108 - DNA, 25 bp, Homo sapien
acagcctgacgtcggtaagacatgt

SEQ ID NO: 5196109 - DNA, 25 bp, Homo sapien
gaaatcagtgcaaaagcgaaaccct

SEQ ID NO: 5196110 - DNA, 25 bp, Homo sapien
tgcaaaagcgaaaccctaataatac

SEQ ID NO: 5196111 - DNA, 25 bp, Homo sapien
gtcggtaagacatgtcacagatgga

SEQ ID NO: 5196112 - DNA, 25 bp, Homo sapien
tgcctccagcttcgcacaggtgttg

SEQ ID NO: 5196113 - DNA, 25 bp, Homo sapien
gttggaggcgataaggagagtgaca

SEQ ID NO: 5196114 - DNA, 25 bp, Homo sapien
cacaggtgttggaggcgataaggag

SEQ ID NO: 5196115 - DNA, 25 bp, Homo sapien
ctccagcttcgcacaggtgttggag

SEQ ID NO: 5196116 - DNA, 25 bp, Homo sapien
gggccacgccgcaccaggtatcgta

SEQ ID NO: 5196117 - DNA, 25 bp, Homo sapien
atccatgggccacgccgcaccaggt

SEQ ID NO: 5196118 - DNA, 25 bp, Homo sapien
ccatgggccacgccgcaccaggtat

SEQ ID NO: 5196119 - DNA, 25 bp, Homo sapien
atgggccacgccgcaccaggtatcg

SEQ ID NO: 5196120 - DNA, 25 bp, Homo sapien
gaatggagcgcctgttcctccctaa

SEQ ID NO: 5196121 - DNA, 25 bp, Homo sapien
cgcaggagctgacggatggctcttt

SEQ ID NO: 5196122 - DNA, 25 bp, Homo sapien
ccagggtctagaggacagagcccca

SEQ ID NO: 5196123 - DNA, 25 bp, Homo sapien
gagtagttccccaaagcggccactc

SEQ ID NO: 5196124 - DNA, 25 bp, Homo sapien
gacggctgcagaagccgagcgctgc

SEQ ID NO: 5196125 - DNA, 25 bp, Homo sapien
tgacggctgcagaagccgagcgctg

SEQ ID NO: 5196126 - DNA, 25 bp, Homo sapien
ttctgaactcgtcgggtatgtcccc

SEQ ID NO: 5196127 - DNA, 25 bp, Homo sapien
cgctggtaaggagccgtcgcccaga

SEQ ID NO: 5196128 - DNA, 25 bp, Homo sapien
tccccataagaagcacttagacctt

SEQ ID NO: 5196129 - DNA, 25 bp, Homo sapien
tccctcctagcttcggctgacagtg

SEQ ID NO: 5196130 - DNA, 25 bp, Homo sapien
ctaggactgcagctatgtggccacc

SEQ ID NO: 5196131 - DNA, 25 bp, Homo sapien
acctgccatgtttccctccccattg

SEQ ID NO: 5196132 - DNA, 25 bp, Homo sapien
ttgggctaacagcacctgccatgtt

SEQ ID NO: 5196133 - DNA, 25 bp, Homo sapien
tagctaggactgcagctatgtggcc

SEQ ID NO: 5196134 - DNA, 25 bp, Homo sapien
aactcggcttgaggttttgacacag

SEQ ID NO: 5196135 - DNA, 25 bp, Homo sapien
aaactcggcttgaggttttgacaca

SEQ ID NO: 5196136 - DNA, 25 bp, Homo sapien
ctgtaaataccaagaaacttgcgga

SEQ ID NO: 5196137 - DNA, 25 bp, Homo sapien
accaagaaacttgcggagtcacacg

SEQ ID NO: 5196138 - DNA, 25 bp, Homo sapien
tgcggagtcacacgtgtcacaaggc

SEQ ID NO: 5196139 - DNA, 25 bp, Homo sapien
aaacttgcggagtcacacgtgtcac

SEQ ID NO: 5196140 - DNA, 25 bp, Homo sapien
tcagtcttagcccaaaatgcagcac

SEQ ID NO: 5196141 - DNA, 25 bp, Homo sapien
ggttctaagcttcttggtgacccca

SEQ ID NO: 5196142 - DNA, 25 bp, Homo sapien
ctccttcaattcagcctcagtctta

SEQ ID NO: 5196143 - DNA, 25 bp, Homo sapien
aatgcagcacactgaaaagaggaaa

SEQ ID NO: 5196144 - DNA, 25 bp, Homo sapien
gaggggagagaacagcagaggtagg

SEQ ID NO: 5196145 - DNA, 25 bp, Homo sapien
aggaggagaggtgaggacagctgag

SEQ ID NO: 5196146 - DNA, 25 bp, Homo sapien
agaggtgaggacagctgagggagga

SEQ ID NO: 5196147 - DNA, 25 bp, Homo sapien
ctgtataagcagaaggaggagggga

SEQ ID NO: 5196148 - DNA, 25 bp, Homo sapien
ttaaaggaggagacacaatcagaga

SEQ ID NO: 5196149 - DNA, 25 bp, Homo sapien
ctttaaaggaggagacacaatcaga

SEQ ID NO: 5196150 - DNA, 25 bp, Homo sapien
aggagacacaatcagagaagatgct

SEQ ID NO: 5196151 - DNA, 25 bp, Homo sapien
agatgctgccagcactgtttatggg

SEQ ID NO: 5196152 - DNA, 25 bp, Homo sapien
aattaagtaagttggacagcttcca

SEQ ID NO: 5196153 - DNA, 25 bp, Homo sapien
taagtaagttggacagcttccactc

SEQ ID NO: 5196154 - DNA, 25 bp, Homo sapien
ttaagtaagttggacagcttccact

SEQ ID NO: 5196155 - DNA, 25 bp, Homo sapien
aagtaagttggacagcttccactcc

SEQ ID NO: 5196156 - DNA, 25 bp, Homo sapien
agtgaatcaactctccaagcagggc

SEQ ID NO: 5196157 - DNA, 25 bp, Homo sapien
ccctgagggtcagctgcagagtgaa

SEQ ID NO: 5196158 - DNA, 25 bp, Homo sapien
aacagtaagtgaagcccgttctcct

SEQ ID NO: 5196159 - DNA, 25 bp, Homo sapien
cagaggcccagtcatgcaagagaga

SEQ ID NO: 5196160 - DNA, 25 bp, Homo sapien
gaagtcagtctctgtgcgccggaag

SEQ ID NO: 5196161 - DNA, 25 bp, Homo sapien
tgaaggcactcacaaggcgactctt

SEQ ID NO: 5196162 - DNA, 25 bp, Homo sapien
gggcatcccggtcgctgttttcaca

SEQ ID NO: 5196163 - DNA, 25 bp, Homo sapien
tagcaaacagattagagaagtcagt

SEQ ID NO: 5196164 - DNA, 25 bp, Homo sapien
taagaaatctactggctagcatggg

SEQ ID NO: 5196165 - DNA, 25 bp, Homo sapien
caaaatgatggagacctggccagca

SEQ ID NO: 5196166 - DNA, 25 bp, Homo sapien
caaaagcagtttcatgtgggttcag

SEQ ID NO: 5196167 - DNA, 25 bp, Homo sapien
ggagggagggagtcaattatattcc

SEQ ID NO: 5196168 - DNA, 25 bp, Homo sapien
gtgatgaaagtccagcaccttggtg

SEQ ID NO: 5196169 - DNA, 25 bp, Homo sapien
tcaccgttcttagccggaagcagat

SEQ ID NO: 5196170 - DNA, 25 bp, Homo sapien
caccttggtggagcgatcaaatgtc

SEQ ID NO: 5196171 - DNA, 25 bp, Homo sapien
ccacttccaggaggaattgcacggt

SEQ ID NO: 5196172 - DNA, 25 bp, Homo sapien
caagcttgttcttgtggtcactggg

SEQ ID NO: 5196173 - DNA, 25 bp, Homo sapien
gatatcctcacaactggcaagggtg

SEQ ID NO: 5196174 - DNA, 25 bp, Homo sapien
tgccgccttatctcaccagggctgt

SEQ ID NO: 5196175 - DNA, 25 bp, Homo sapien
ctgatgaacttttgcctgggtcggg

SEQ ID NO: 5196176 - DNA, 25 bp, Homo sapien
tgctctctttaggttgtgaatagcc

SEQ ID NO: 5196177 - DNA, 25 bp, Homo sapien
taatggcattcctaggaaactaata

SEQ ID NO: 5196178 - DNA, 25 bp, Homo sapien
ttataatggcattcctaggaaacta

SEQ ID NO: 5196179 - DNA, 25 bp, Homo sapien
tatcagaatgaaatagacctgaaaa

SEQ ID NO: 5196180 - DNA, 25 bp, Homo sapien
tggtaaagacaagggtggatcctct

SEQ ID NO: 5196181 - DNA, 25 bp, Homo sapien
tctttgcggatgtaatcatgttaag

SEQ ID NO: 5196182 - DNA, 25 bp, Homo sapien
tgggccttaatccaacgactggcat

SEQ ID NO: 5196183 - DNA, 25 bp, Homo sapien
gaatatccacaacacctggaagctg

SEQ ID NO: 5196184 - DNA, 25 bp, Homo sapien
tgcgcgcgcgcgcgcatgtgtgcct

SEQ ID NO: 5196185 - DNA, 25 bp, Homo sapien
gcgcgcgcatgtgtgcctgtgtctt

SEQ ID NO: 5196186 - DNA, 25 bp, Homo sapien
gcgcgcgcgcgcatgtgtgcctgtg

SEQ ID NO: 5196187 - DNA, 25 bp, Homo sapien
cgcgcgcatgtgtgcctgtgtcttt

SEQ ID NO: 5196188 - DNA, 25 bp, Homo sapien
gaactggaggcaattggaaagcaac

SEQ ID NO: 5196189 - DNA, 25 bp, Homo sapien
gattgctgattagagagagctcctg

SEQ ID NO: 5196190 - DNA, 25 bp, Homo sapien
aagaaaccactgtgtcactcctggg

SEQ ID NO: 5196191 - DNA, 25 bp, Homo sapien
ggcaactaagctagggactgtcaat

SEQ ID NO: 5196192 - DNA, 25 bp, Homo sapien
atttgagggacaacgccattctggg

SEQ ID NO: 5196193 - DNA, 25 bp, Homo sapien
tatttgagggacaacgccattctgg

SEQ ID NO: 5196194 - DNA, 25 bp, Homo sapien
tttgagggacaacgccattctgggc

SEQ ID NO: 5196195 - DNA, 25 bp, Homo sapien
ttgagggacaacgccattctgggct

SEQ ID NO: 5196196 - DNA, 25 bp, Homo sapien
caggctaagtacctaagtgggttca

SEQ ID NO: 5196197 - DNA, 25 bp, Homo sapien
gactggtgcctgttagttcatggga

SEQ ID NO: 5196198 - DNA, 25 bp, Homo sapien
aaagaacaacgaagggagtccagca

SEQ ID NO: 5196199 - DNA, 25 bp, Homo sapien
caggagctgttttgacacggcagca

SEQ ID NO: 5196200 - DNA, 25 bp, Homo sapien
taaaagcatttatgacgttcatgat

SEQ ID NO: 5196201 - DNA, 25 bp, Homo sapien
tatgacgttcatgatacaattggaa

SEQ ID NO: 5196202 - DNA, 25 bp, Homo sapien
tttcttttcaggtatgacaatgaca

SEQ ID NO: 5196203 - DNA, 25 bp, Homo sapien
caatgacattgtggacttttttaaa

SEQ ID NO: 5196204 - DNA, 25 bp, Homo sapien
tgctgggccgctcatggcctaaatt

SEQ ID NO: 5196205 - DNA, 25 bp, Homo sapien
gccgctcatggcctaaattcaggta

SEQ ID NO: 5196206 - DNA, 25 bp, Homo sapien
gctcatggcctaaattcaggtaggg

SEQ ID NO: 5196207 - DNA, 25 bp, Homo sapien
gggccgctcatggcctaaattcagg

SEQ ID NO: 5196208 - DNA, 25 bp, Homo sapien
agctggttgaaaaatcgaggatgac

SEQ ID NO: 5196209 - DNA, 25 bp, Homo sapien
gctaggccaataatatccaatccag

SEQ ID NO: 5196210 - DNA, 25 bp, Homo sapien
agccattctccagctaggccaataa

SEQ ID NO: 5196211 - DNA, 25 bp, Homo sapien
tgttggtattggccgttgatgtcag

SEQ ID NO: 5196212 - DNA, 25 bp, Homo sapien
ccaacatggacagtctgtgaagcta

SEQ ID NO: 5196213 - DNA, 25 bp, Homo sapien
taaattcaatgagagtacaggacca

SEQ ID NO: 5196214 - DNA, 25 bp, Homo sapien
tgtcacaagggagcaaattttgcct

SEQ ID NO: 5196215 - DNA, 25 bp, Homo sapien
ttgaacactgttcccgactggagaa

SEQ ID NO: 5196216 - DNA, 25 bp, Homo sapien
tgcactgccatagaaagatcctttt

SEQ ID NO: 5196217 - DNA, 25 bp, Homo sapien
agctgtatgtgccttggataactac

SEQ ID NO: 5196218 - DNA, 25 bp, Homo sapien
tcttcactgggtcgttgcttagaag

SEQ ID NO: 5196219 - DNA, 25 bp, Homo sapien
gccttggataactacatatttgtga

SEQ ID NO: 5196220 - DNA, 25 bp, Homo sapien
gggtcgttgcttagaagaagaatat

SEQ ID NO: 5196221 - DNA, 25 bp, Homo sapien
ctgcgcaattgtgcttggtggccct

SEQ ID NO: 5196222 - DNA, 25 bp, Homo sapien
tgcgcaattgtgcttggtggccctg

SEQ ID NO: 5196223 - DNA, 25 bp, Homo sapien
aagaagaagagaaggattcctggtt

SEQ ID NO: 5196224 - DNA, 25 bp, Homo sapien
ctgataaaggaagaagaagagaagg

SEQ ID NO: 5196225 - DNA, 25 bp, Homo sapien
gaagaagagaaggattcctggttta

SEQ ID NO: 5196226 - DNA, 25 bp, Homo sapien
agaagagaaggattcctggtttagc

SEQ ID NO: 5196227 - DNA, 25 bp, Homo sapien
accaacactccctcatgtctgatgg

SEQ ID NO: 5196228 - DNA, 25 bp, Homo sapien
gcaaccaacactccctcatgtctga

SEQ ID NO: 5196229 - DNA, 25 bp, Homo sapien
gtagcaaccaacactccctcatgtc

SEQ ID NO: 5196230 - DNA, 25 bp, Homo sapien
tcaccgtagcaaccaacactccctc

SEQ ID NO: 5196231 - DNA, 25 bp, Homo sapien
ctggaggtcacaatcatgctttggt

SEQ ID NO: 5196232 - DNA, 25 bp, Homo sapien
ctctggaggtcacaatcatgctttg

SEQ ID NO: 5196233 - DNA, 25 bp, Homo sapien
tctggaggtcacaatcatgctttgg

SEQ ID NO: 5196234 - DNA, 25 bp, Homo sapien
ggaaaccatgtgtgcagttaccatc

SEQ ID NO: 5196235 - DNA, 25 bp, Homo sapien
tggaaaccatgtgtgcagttaccat

SEQ ID NO: 5196236 - DNA, 25 bp, Homo sapien
gaggaagacccttggaaaccatgtg

SEQ ID NO: 5196237 - DNA, 25 bp, Homo sapien
taatcacatggaggtaaaagaagac

SEQ ID NO: 5196238 - DNA, 25 bp, Homo sapien
ccgaaaagagatgcctagactgact

SEQ ID NO: 5196239 - DNA, 25 bp, Homo sapien
gctcagatcatcctcaccgaaaaga

SEQ ID NO: 5196240 - DNA, 25 bp, Homo sapien
tcattgaaacaagatcgtgagacca

SEQ ID NO: 5196241 - DNA, 25 bp, Homo sapien
ttgttccatgaggacaaacactggt

SEQ ID NO: 5196242 - DNA, 25 bp, Homo sapien
catgaggacaaacactggtgcaatt

SEQ ID NO: 5196243 - DNA, 25 bp, Homo sapien
tacttgaccatccaactatctctct

SEQ ID NO: 5196244 - DNA, 25 bp, Homo sapien
tcttaagtgttatttgttccatgag

SEQ ID NO: 5196245 - DNA, 25 bp, Homo sapien
taactatgtatgtttggccaacaca

SEQ ID NO: 5196246 - DNA, 25 bp, Homo sapien
cagagaaagaaagagtaacggagct

SEQ ID NO: 5196247 - DNA, 25 bp, Homo sapien
catttcttggttacctgcctaggtg

SEQ ID NO: 5196248 - DNA, 25 bp, Homo sapien
catcagtggctgcaaagggataggt

SEQ ID NO: 5196249 - DNA, 25 bp, Homo sapien
cctgggaatacaagtagtcacactt

SEQ ID NO: 5196250 - DNA, 25 bp, Homo sapien
taggcaatttggctggaggtgattc

SEQ ID NO: 5196251 - DNA, 25 bp, Homo sapien
gattcgtgtacttcagtgcgctttc

SEQ ID NO: 5196252 - DNA, 25 bp, Homo sapien
ttaccaaagctatctaggcaatttg

SEQ ID NO: 5196253 - DNA, 25 bp, Homo sapien
tcagcaagcggacatattgggaggt

SEQ ID NO: 5196254 - DNA, 25 bp, Homo sapien
tgagctggtgtctcaagagacaagg

SEQ ID NO: 5196255 - DNA, 25 bp, Homo sapien
tctaaaaacgaacgctgagctggtg

SEQ ID NO: 5196256 - DNA, 25 bp, Homo sapien
gtcaggaagcgaaaggataatatcc

SEQ ID NO: 5196257 - DNA, 25 bp, Homo sapien
aagaggaccagtttaggcacagccg

SEQ ID NO: 5196258 - DNA, 25 bp, Homo sapien
ctgtacatgttggatatggcgcccc

SEQ ID NO: 5196259 - DNA, 25 bp, Homo sapien
gccatgccctttgtcttaacttccg

SEQ ID NO: 5196260 - DNA, 25 bp, Homo sapien
acttccgggaagtacttgtagcgag

SEQ ID NO: 5196261 - DNA, 25 bp, Homo sapien
aacaccactatccatgagaaagcat

SEQ ID NO: 5196262 - DNA, 25 bp, Homo sapien
aaacaccactatccatgagaaagca

SEQ ID NO: 5196263 - DNA, 25 bp, Homo sapien
accactatccatgagaaagcatccc

SEQ ID NO: 5196264 - DNA, 25 bp, Homo sapien
aaaaacaccactatccatgagaaag

SEQ ID NO: 5196265 - DNA, 25 bp, Homo sapien
tccaaagccaagtgcagccccagct

SEQ ID NO: 5196266 - DNA, 25 bp, Homo sapien
atcacattgtcagttccaaagccaa

SEQ ID NO: 5196267 - DNA, 25 bp, Homo sapien
tcacattgtcagttccaaagccaag

SEQ ID NO: 5196268 - DNA, 25 bp, Homo sapien
aatcacattgtcagttccaaagcca

SEQ ID NO: 5196269 - DNA, 25 bp, Homo sapien
tcaagaatttttgcctcaaaatcag

SEQ ID NO: 5196270 - DNA, 25 bp, Homo sapien
aatttttgcctcaaaatcagctgga

SEQ ID NO: 5196271 - DNA, 25 bp, Homo sapien
aagaatttttgcctcaaaatcagct

SEQ ID NO: 5196272 - DNA, 25 bp, Homo sapien
ggcttcaagaatttttgcctcaaaa

SEQ ID NO: 5196273 - DNA, 25 bp, Homo sapien
gctcagtctttacaacacttagatc

SEQ ID NO: 5196274 - DNA, 25 bp, Homo sapien
acttagatccacttcctgtgccaag

SEQ ID NO: 5196275 - DNA, 25 bp, Homo sapien
caacacttagatccacttcctgtgc

SEQ ID NO: 5196276 - DNA, 25 bp, Homo sapien
tagatccacttcctgtgccaagacc

SEQ ID NO: 5196277 - DNA, 25 bp, Homo sapien
ccatagatgctagggactcagcagt

SEQ ID NO: 5196278 - DNA, 25 bp, Homo sapien
agtagtgttttgttggctcattcac

SEQ ID NO: 5196279 - DNA, 25 bp, Homo sapien
gataaagaattctgtcattgcggag

SEQ ID NO: 5196280 - DNA, 25 bp, Homo sapien
gtttacattttagtggcaggtgaca

SEQ ID NO: 5196281 - DNA, 25 bp, Homo sapien
tcttgtatcggatcaaaagctccat

SEQ ID NO: 5196282 - DNA, 25 bp, Homo sapien
caaccaaaggttatatttctcacat

SEQ ID NO: 5196283 - DNA, 25 bp, Homo sapien
gcagttgcattgacataaaagggaa

SEQ ID NO: 5196284 - DNA, 25 bp, Homo sapien
aaagctccataaacagtcgtgccag

SEQ ID NO: 5196285 - DNA, 25 bp, Homo sapien
gaagacagcaatcgactagtaagga

SEQ ID NO: 5196286 - DNA, 25 bp, Homo sapien
tggctagggtccagacaagaactgg

SEQ ID NO: 5196287 - DNA, 25 bp, Homo sapien
taagagacgtgtcatagacggctgg

SEQ ID NO: 5196288 - DNA, 25 bp, Homo sapien
tagctgagggttcacattcatggcc

SEQ ID NO: 5196289 - DNA, 25 bp, Homo sapien
tttactgaatagttgggatgccacg

SEQ ID NO: 5196290 - DNA, 25 bp, Homo sapien
tggccaattgtgagaagttaaatcc

SEQ ID NO: 5196291 - DNA, 25 bp, Homo sapien
tagtcattagttcagtagcaaggca

SEQ ID NO: 5196292 - DNA, 25 bp, Homo sapien
tagcaaggcagatgatcctattggc

SEQ ID NO: 5196293 - DNA, 25 bp, Homo sapien
cgttgagtttatggcggtgcttcct

SEQ ID NO: 5196294 - DNA, 25 bp, Homo sapien
ctttctatgccgttgagtttatggc

SEQ ID NO: 5196295 - DNA, 25 bp, Homo sapien
tatgccgttgagtttatggcggtgc

SEQ ID NO: 5196296 - DNA, 25 bp, Homo sapien
ttatggcggtgcttcctggacatga

SEQ ID NO: 5196297 - DNA, 25 bp, Homo sapien
cggactatatcttagaagtaactgc

SEQ ID NO: 5196298 - DNA, 25 bp, Homo sapien
acatgagacttcgagaaggtgcagg

SEQ ID NO: 5196299 - DNA, 25 bp, Homo sapien
gcagtctcggagtattacattacgg

SEQ ID NO: 5196300 - DNA, 25 bp, Homo sapien
agacgcaactgttctcttgaggaaa

SEQ ID NO: 5196301 - DNA, 25 bp, Homo sapien
caacagcacgcccatcatcttgtga

SEQ ID NO: 5196302 - DNA, 25 bp, Homo sapien
aatggcagagcactgcaacagcacg

SEQ ID NO: 5196303 - DNA, 25 bp, Homo sapien
cccatcatcttgtgagggttccagg

SEQ ID NO: 5196304 - DNA, 25 bp, Homo sapien
gacgagaatggcagagcactgcaac

SEQ ID NO: 5196305 - DNA, 25 bp, Homo sapien
gggccccagtgtagctttggaggga

SEQ ID NO: 5196306 - DNA, 25 bp, Homo sapien
cccagtgtagctttggagggagtac

SEQ ID NO: 5196307 - DNA, 25 bp, Homo sapien
gccccagtgtagctttggagggagt

SEQ ID NO: 5196308 - DNA, 25 bp, Homo sapien
ccagtgtagctttggagggagtaca

SEQ ID NO: 5196309 - DNA, 25 bp, Homo sapien
ttatttcagttcttgggaccacacg

SEQ ID NO: 5196310 - DNA, 25 bp, Homo sapien
agtactgcaaagagaccccacgtgt

SEQ ID NO: 5196311 - DNA, 25 bp, Homo sapien
tatgagtggactaaagacgctgtgc

SEQ ID NO: 5196312 - DNA, 25 bp, Homo sapien
tgatcaaagaagaagcacagtagcc

SEQ ID NO: 5196313 - DNA, 25 bp, Homo sapien
aaagcgctctggcaaaagtcttcca

SEQ ID NO: 5196314 - DNA, 25 bp, Homo sapien
ctcagtgggtgggatagtttcatgc

SEQ ID NO: 5196315 - DNA, 25 bp, Homo sapien
aagtgctacggcattcagtgggcca

SEQ ID NO: 5196316 - DNA, 25 bp, Homo sapien
gatctttccgtctcagatgccatcc

SEQ ID NO: 5196317 - DNA, 25 bp, Homo sapien
catcagagatgtgggtggctttaaa

SEQ ID NO: 5196318 - DNA, 25 bp, Homo sapien
gcttggggtcatatgcaatctttct

SEQ ID NO: 5196319 - DNA, 25 bp, Homo sapien
gcatctgcatttacacatcagagat

SEQ ID NO: 5196320 - DNA, 25 bp, Homo sapien
tatcatggaaattaagatgggtgca

SEQ ID NO: 5196321 - DNA, 25 bp, Homo sapien
aacttgaagatatccacgtggcggc

SEQ ID NO: 5196322 - DNA, 25 bp, Homo sapien
gaggtatcctgcacacatctggttg

SEQ ID NO: 5196323 - DNA, 25 bp, Homo sapien
gaattgccttgtccccggtgtcgta

SEQ ID NO: 5196324 - DNA, 25 bp, Homo sapien
cgtggcggccacactgaattgcctt

SEQ ID NO: 5196325 - DNA, 25 bp, Homo sapien
ttttaatcttggcatagaggtattc

SEQ ID NO: 5196326 - DNA, 25 bp, Homo sapien
gcatagaggtattcagccagttcca

SEQ ID NO: 5196327 - DNA, 25 bp, Homo sapien
gttccaggcatttgttgatctggtt

SEQ ID NO: 5196328 - DNA, 25 bp, Homo sapien
gaaaaccatctcaaattcttctctg

SEQ ID NO: 5196329 - DNA, 25 bp, Homo sapien
tctggcacacccctgaggctttgtg

SEQ ID NO: 5196330 - DNA, 25 bp, Homo sapien
cttgtgtagcttttcccgtcgttga

SEQ ID NO: 5196331 - DNA, 25 bp, Homo sapien
aaaaacagacgtttgtgtgctcagg

SEQ ID NO: 5196332 - DNA, 25 bp, Homo sapien
aatataccaaaaacagacgtttgtg

SEQ ID NO: 5196333 - DNA, 25 bp, Homo sapien
caaccatggtcgtacctgactccat

SEQ ID NO: 5196334 - DNA, 25 bp, Homo sapien
ccagtctttctatctcctcaatgag

SEQ ID NO: 5196335 - DNA, 25 bp, Homo sapien
caatgtcagactgggtagcggctgg

SEQ ID NO: 5196336 - DNA, 25 bp, Homo sapien
gaccatccggaagaagttggccttg

SEQ ID NO: 5196337 - DNA, 25 bp, Homo sapien
aattctcttggagcgggaaacatgc

SEQ ID NO: 5196338 - DNA, 25 bp, Homo sapien
tgggaagaaaatacaagacgcctct

SEQ ID NO: 5196339 - DNA, 25 bp, Homo sapien
aacatgccgtgatctattactaagc

SEQ ID NO: 5196340 - DNA, 25 bp, Homo sapien
tcggcccctaggacatggcgttttg

SEQ ID NO: 5196341 - DNA, 25 bp, Homo sapien
gcattgagaacaccagacgtacagc

SEQ ID NO: 5196342 - DNA, 25 bp, Homo sapien
gagcagatgctatttaagtaacagg

SEQ ID NO: 5196343 - DNA, 25 bp, Homo sapien
cagccagacagagagcgtaagagaa

SEQ ID NO: 5196344 - DNA, 25 bp, Homo sapien
ttgagaacaccagacgtacagccag

SEQ ID NO: 5196345 - DNA, 25 bp, Homo sapien
tcagaaggtcttcggaaatgttgcc

SEQ ID NO: 5196346 - DNA, 25 bp, Homo sapien
cgagtcacagagattggtcatcaac

SEQ ID NO: 5196347 - DNA, 25 bp, Homo sapien
taggtttcagctaagcgagtcacag

SEQ ID NO: 5196348 - DNA, 25 bp, Homo sapien
tcttgcatactctaaaacgcacagt

SEQ ID NO: 5196349 - DNA, 25 bp, Homo sapien
ttccaggggttcgatgacatctttc

SEQ ID NO: 5196350 - DNA, 25 bp, Homo sapien
ccaggggttcgatgacatctttcat

SEQ ID NO: 5196351 - DNA, 25 bp, Homo sapien
ttccttttccaggggttcgatgaca

SEQ ID NO: 5196352 - DNA, 25 bp, Homo sapien
ccttttccaggggttcgatgacatc

SEQ ID NO: 5196353 - DNA, 25 bp, Homo sapien
ctccataactgagaaagaatttggc

SEQ ID NO: 5196354 - DNA, 25 bp, Homo sapien
cataactgagaaagaatttggctcc

SEQ ID NO: 5196355 - DNA, 25 bp, Homo sapien
tgagaaagaatttggctccagcaat

SEQ ID NO: 5196356 - DNA, 25 bp, Homo sapien
taactgagaaagaatttggctccag

SEQ ID NO: 5196357 - DNA, 25 bp, Homo sapien
cctcttgtgtgcaagctaagggtta

SEQ ID NO: 5196358 - DNA, 25 bp, Homo sapien
taagtccgtacctgattttgaccat

SEQ ID NO: 5196359 - DNA, 25 bp, Homo sapien
gactcagaactcaggcgtcctcttg

SEQ ID NO: 5196360 - DNA, 25 bp, Homo sapien
gagatgatacttggaatttagtgag

SEQ ID NO: 5196361 - DNA, 25 bp, Homo sapien
ttggtaagaattcatggcaaagtct

SEQ ID NO: 5196362 - DNA, 25 bp, Homo sapien
tgttggtaagaattcatggcaaagt

SEQ ID NO: 5196363 - DNA, 25 bp, Homo sapien
aaatgttggtaagaattcatggcaa

SEQ ID NO: 5196364 - DNA, 25 bp, Homo sapien
gaattcatggcaaagtcttccatga

SEQ ID NO: 5196365 - DNA, 25 bp, Homo sapien
agtttgaagagtcttagacccactc

SEQ ID NO: 5196366 - DNA, 25 bp, Homo sapien
tgaagagtcttagacccactctgaa

SEQ ID NO: 5196367 - DNA, 25 bp, Homo sapien
tttgaagagtcttagacccactctg

SEQ ID NO: 5196368 - DNA, 25 bp, Homo sapien
tccagtttgaagagtcttagaccca

SEQ ID NO: 5196369 - DNA, 25 bp, Homo sapien
gaaggaacggagcatgctcggttcc

SEQ ID NO: 5196370 - DNA, 25 bp, Homo sapien
catgctcggttccagtcctcttggc

SEQ ID NO: 5196371 - DNA, 25 bp, Homo sapien
tgtggtaaacatcccgtgctggctc

SEQ ID NO: 5196372 - DNA, 25 bp, Homo sapien
caggtttgttgttcactctgtggta

SEQ ID NO: 5196373 - DNA, 25 bp, Homo sapien
aataagttagggagtatcccttcag

SEQ ID NO: 5196374 - DNA, 25 bp, Homo sapien
gatttccacacgcttgccacaaaaa

SEQ ID NO: 5196375 - DNA, 25 bp, Homo sapien
caagcttctacagggaggtgatttc

SEQ ID NO: 5196376 - DNA, 25 bp, Homo sapien
agttagggagtatcccttcagcttc

SEQ ID NO: 5196377 - DNA, 25 bp, Homo sapien
taaccaagagacacattgcaagggc

SEQ ID NO: 5196378 - DNA, 25 bp, Homo sapien
taaagtacgtgctatcgcccatgaa

SEQ ID NO: 5196379 - DNA, 25 bp, Homo sapien
tgaagtattctagcccaaggtggtt

SEQ ID NO: 5196380 - DNA, 25 bp, Homo sapien
cagctggccagttctctttgtcgag

SEQ ID NO: 5196381 - DNA, 25 bp, Homo sapien
ggtcataatcagagcgatgccagcg

SEQ ID NO: 5196382 - DNA, 25 bp, Homo sapien
tagatttatgcagacgcgttcccgc

SEQ ID NO: 5196383 - DNA, 25 bp, Homo sapien
gctcgcctgaaagaacacatacttg

SEQ ID NO: 5196384 - DNA, 25 bp, Homo sapien
tcgtgctcgcgagagaacagaaatg

SEQ ID NO: 5196385 - DNA, 25 bp, Homo sapien
acagcccgccgggagatcgtctctg

SEQ ID NO: 5196386 - DNA, 25 bp, Homo sapien
ttgggacgtggcactcgctgccgcc

SEQ ID NO: 5196387 - DNA, 25 bp, Homo sapien
gccgggagatcgtctctgctgcagc

SEQ ID NO: 5196388 - DNA, 25 bp, Homo sapien
tgctctaatcctccgcgtagcactt

SEQ ID NO: 5196389 - DNA, 25 bp, Homo sapien
cgggcgatcggtgtggccgagccgg

SEQ ID NO: 5196390 - DNA, 25 bp, Homo sapien
cggtgtggccgagccgggctccgcg

SEQ ID NO: 5196391 - DNA, 25 bp, Homo sapien
atcggtgtggccgagccgggctccg

SEQ ID NO: 5196392 - DNA, 25 bp, Homo sapien
ggcggcgggcgatcggtgtggccga

SEQ ID NO: 5196393 - DNA, 25 bp, Homo sapien
ccgcagaacgtggtagccctcggtg

SEQ ID NO: 5196394 - DNA, 25 bp, Homo sapien
gcagaacgtggtagccctcggtgcc

SEQ ID NO: 5196395 - DNA, 25 bp, Homo sapien
tctcgacgctttgcgaggagcccat

SEQ ID NO: 5196396 - DNA, 25 bp, Homo sapien
cgcccgggatctcgacgctttgcga

SEQ ID NO: 5196397 - DNA, 25 bp, Homo sapien
tgcggaaaaagagcaaggttgtccc

SEQ ID NO: 5196398 - DNA, 25 bp, Homo sapien
ggaaccagcctcgaccaaggcagcg

SEQ ID NO: 5196399 - DNA, 25 bp, Homo sapien
cgctccgcggaggtgggatgcgagc

SEQ ID NO: 5196400 - DNA, 25 bp, Homo sapien
tggctgccccgtgaaggagcccatg

SEQ ID NO: 5196401 - DNA, 25 bp, Homo sapien
actttggagacgttgcctccgcgcc

SEQ ID NO: 5196402 - DNA, 25 bp, Homo sapien
tgcgggtccggatccctctcctagg

SEQ ID NO: 5196403 - DNA, 25 bp, Homo sapien
tctcctaggaaagcgcaaaggctgc

SEQ ID NO: 5196404 - DNA, 25 bp, Homo sapien
aaagcgcaaaggctgccttcacagt

SEQ ID NO: 5196405 - DNA, 25 bp, Homo sapien
ggccggcgccgaggtgatttaacac

SEQ ID NO: 5196406 - DNA, 25 bp, Homo sapien
tctgcgtcctggaagttaagctagg

SEQ ID NO: 5196407 - DNA, 25 bp, Homo sapien
aaatcaagtctgtttaagtccgtcg

SEQ ID NO: 5196408 - DNA, 25 bp, Homo sapien
tcagcaatcggaacagaacggaagt

SEQ ID NO: 5196409 - DNA, 25 bp, Homo sapien
ttacacccctaaatggcgctacacg

SEQ ID NO: 5196410 - DNA, 25 bp, Homo sapien
gaaaagaccacatgctttgtaccac

SEQ ID NO: 5196411 - DNA, 25 bp, Homo sapien
cctgtgaggagctaatattgagtga

SEQ ID NO: 5196412 - DNA, 25 bp, Homo sapien
taaagtcgcccggttccatgaggaa

SEQ ID NO: 5196413 - DNA, 25 bp, Homo sapien
aaggcaatagacacgataatccgga

SEQ ID NO: 5196414 - DNA, 25 bp, Homo sapien
cagctggtaatactgggtaacatcc

SEQ ID NO: 5196415 - DNA, 25 bp, Homo sapien
cctatcacatagacagctgggcaat

SEQ ID NO: 5196416 - DNA, 25 bp, Homo sapien
caaggattcatgaccacaatcggtc

SEQ ID NO: 5196417 - DNA, 25 bp, Homo sapien
tattttagctagtattgccacgata

SEQ ID NO: 5196418 - DNA, 25 bp, Homo sapien
catttaacccacaggataatcaagg

SEQ ID NO: 5196419 - DNA, 25 bp, Homo sapien
gccacgatactggttctacacaata

SEQ ID NO: 5196420 - DNA, 25 bp, Homo sapien
taataaaggcatcagctaacatttg

SEQ ID NO: 5196421 - DNA, 25 bp, Homo sapien
ctctgtgtcctggggaattttcttg

SEQ ID NO: 5196422 - DNA, 25 bp, Homo sapien
agctctgtgtcctggggaattttct

SEQ ID NO: 5196423 - DNA, 25 bp, Homo sapien
ctgtgtcctggggaattttcttgta

SEQ ID NO: 5196424 - DNA, 25 bp, Homo sapien
tgtgtcctggggaattttcttgtac

SEQ ID NO: 5196425 - DNA, 25 bp, Homo sapien
taatcttgaaccattaatagaaaca

SEQ ID NO: 5196426 - DNA, 25 bp, Homo sapien
atagaaacaataaaatcaaagaaag

SEQ ID NO: 5196427 - DNA, 25 bp, Homo sapien
ttaatagaaacaataaaatcaaaga

SEQ ID NO: 5196428 - DNA, 25 bp, Homo sapien
caataaaatcaaagaaaggctccaa

SEQ ID NO: 5196429 - DNA, 25 bp, Homo sapien
gaaatcacattccttagtaaataaa

SEQ ID NO: 5196430 - DNA, 25 bp, Homo sapien
agcagatccttaagagtgtcattgt

SEQ ID NO: 5196431 - DNA, 25 bp, Homo sapien
ctttacaggcttttcaacgtttgct

SEQ ID NO: 5196432 - DNA, 25 bp, Homo sapien
gcttttcaacgtttgctttcagcag

SEQ ID NO: 5196433 - DNA, 25 bp, Homo sapien
tccttaagagtgtcattgtctttat

SEQ ID NO: 5196434 - DNA, 25 bp, Homo sapien
aagctgcagaaacgaatgctcactc

SEQ ID NO: 5196435 - DNA, 25 bp, Homo sapien
ctctcgcagttccaatgttttgctg

SEQ ID NO: 5196436 - DNA, 25 bp, Homo sapien
gcagaaacgaatgctcactcccaat

SEQ ID NO: 5196437 - DNA, 25 bp, Homo sapien
ggttacttggtgtgactgaggtctc

SEQ ID NO: 5196438 - DNA, 25 bp, Homo sapien
atgactgtatctgctccaattatat

SEQ ID NO: 5196439 - DNA, 25 bp, Homo sapien
gtgtggtctaagacctgccagtgct

SEQ ID NO: 5196440 - DNA, 25 bp, Homo sapien
tctgctccaattatataatcactgt

SEQ ID NO: 5196441 - DNA, 25 bp, Homo sapien
actgtgtggtctaagacctgccagt

SEQ ID NO: 5196442 - DNA, 25 bp, Homo sapien
gcttcatgtgtttcgataaggctga

SEQ ID NO: 5196443 - DNA, 25 bp, Homo sapien
cacatacagtttcaatggttttgct

SEQ ID NO: 5196444 - DNA, 25 bp, Homo sapien
tcagtgtctgtgttgtacacataca

SEQ ID NO: 5196445 - DNA, 25 bp, Homo sapien
acttctcgacagttatcagtgtctg

SEQ ID NO: 5196446 - DNA, 25 bp, Homo sapien
caaaatgttaaggtcctgaagggca

SEQ ID NO: 5196447 - DNA, 25 bp, Homo sapien
tgtcaatcagagtgtctgccctgcc

SEQ ID NO: 5196448 - DNA, 25 bp, Homo sapien
tgtcatctaagcagaggtctcccag

SEQ ID NO: 5196449 - DNA, 25 bp, Homo sapien
cactgaagagctctaagcacgtctg

SEQ ID NO: 5196450 - DNA, 25 bp, Homo sapien
cagccatttgtcctggaagagaaat

SEQ ID NO: 5196451 - DNA, 25 bp, Homo sapien
agaggtgtaataggtgtaccagcca

SEQ ID NO: 5196452 - DNA, 25 bp, Homo sapien
gatgcaaataaccatatccaatgcc

SEQ ID NO: 5196453 - DNA, 25 bp, Homo sapien
tccttcctcaaatgggcgtgtaggt

SEQ ID NO: 5196454 - DNA, 25 bp, Homo sapien
tttcaagatggcgacccacccagac

SEQ ID NO: 5196455 - DNA, 25 bp, Homo sapien
gattttcaagatggcgacccaccca

SEQ ID NO: 5196456 - DNA, 25 bp, Homo sapien
cagattttcaagatggcgacccacc

SEQ ID NO: 5196457 - DNA, 25 bp, Homo sapien
tccagattttcaagatggcgaccca

SEQ ID NO: 5196458 - DNA, 25 bp, Homo sapien
tctgcactacctgacatggctgact

SEQ ID NO: 5196459 - DNA, 25 bp, Homo sapien
tgacttctctgcactacctgacatg

SEQ ID NO: 5196460 - DNA, 25 bp, Homo sapien
gctgactgtgttcgatttcttgaag

SEQ ID NO: 5196461 - DNA, 25 bp, Homo sapien
tgaaattgctctcgcccaggacatg

SEQ ID NO: 5196462 - DNA, 25 bp, Homo sapien
tgacaaagacgggggattaactgag

SEQ ID NO: 5196463 - DNA, 25 bp, Homo sapien
gtgacaaagacgggggattaactga

SEQ ID NO: 5196464 - DNA, 25 bp, Homo sapien
aagacgggggattaactgaggacag

SEQ ID NO: 5196465 - DNA, 25 bp, Homo sapien
gacgggggattaactgaggacagct

SEQ ID NO: 5196466 - DNA, 25 bp, Homo sapien
acactactgacagctggtggagttg

SEQ ID NO: 5196467 - DNA, 25 bp, Homo sapien
ggagttgagctaatagaaagtccag

SEQ ID NO: 5196468 - DNA, 25 bp, Homo sapien
ggtggagttgagctaatagaaagtc

SEQ ID NO: 5196469 - DNA, 25 bp, Homo sapien
tgtactgagaacactactgacagct

SEQ ID NO: 5196470 - DNA, 25 bp, Homo sapien
caggtcacaatgatcgatgccactt

SEQ ID NO: 5196471 - DNA, 25 bp, Homo sapien
caagtataactacaacgtaatgagg

SEQ ID NO: 5196472 - DNA, 25 bp, Homo sapien
caatgtataggctactttgcaagca

SEQ ID NO: 5196473 - DNA, 25 bp, Homo sapien
ccagggagctccgtgcatgtgttta

SEQ ID NO: 5196474 - DNA, 25 bp, Homo sapien
gttcctcacgtacaagtaagcctca

SEQ ID NO: 5196475 - DNA, 25 bp, Homo sapien
gagcagatgaacctctaggatggag

SEQ ID NO: 5196476 - DNA, 25 bp, Homo sapien
aactaagatgccacgtaagccaggg

SEQ ID NO: 5196477 - DNA, 25 bp, Homo sapien
cattagcttgaggaggttacgttcc

SEQ ID NO: 5196478 - DNA, 25 bp, Homo sapien
cttgccccgtggtcaggtcttcatt

SEQ ID NO: 5196479 - DNA, 25 bp, Homo sapien
tcatttggtcccgatttccagctgc

SEQ ID NO: 5196480 - DNA, 25 bp, Homo sapien
gactgtccatcaccctttacggcag

SEQ ID NO: 5196481 - DNA, 25 bp, Homo sapien
gaggtttacacctgacccaagcagg

SEQ ID NO: 5196482 - DNA, 25 bp, Homo sapien
ttgtggtggcaataacggtactgtt

SEQ ID NO: 5196483 - DNA, 25 bp, Homo sapien
ggcaataacggtactgttggtacac

SEQ ID NO: 5196484 - DNA, 25 bp, Homo sapien
ggactggtttacttgtggtggcaat

SEQ ID NO: 5196485 - DNA, 25 bp, Homo sapien
ctggtaatgtagtagctggattcat

SEQ ID NO: 5196486 - DNA, 25 bp, Homo sapien
tcctggccgatgctgcactgtagag

SEQ ID NO: 5196487 - DNA, 25 bp, Homo sapien
tctgcagattccttattcctggccg

SEQ ID NO: 5196488 - DNA, 25 bp, Homo sapien
tgcaggggcagtaggtggccgctgg

SEQ ID NO: 5196489 - DNA, 25 bp, Homo sapien
cagtggagaatggacttctgcagat

SEQ ID NO: 5196490 - DNA, 25 bp, Homo sapien
gccaacccctggcatgatgtgtggt

SEQ ID NO: 5196491 - DNA, 25 bp, Homo sapien
gtaagccaacccctggcatgatgtg

SEQ ID NO: 5196492 - DNA, 25 bp, Homo sapien
aagccaacccctggcatgatgtgtg

SEQ ID NO: 5196493 - DNA, 25 bp, Homo sapien
ccaacccctggcatgatgtgtggtg

SEQ ID NO: 5196494 - DNA, 25 bp, Homo sapien
cctaggagggtgagatctgcaacat

SEQ ID NO: 5196495 - DNA, 25 bp, Homo sapien
cttttattagagagagtcctaggag

SEQ ID NO: 5196496 - DNA, 25 bp, Homo sapien
ttattagagagagtcctaggagggt

SEQ ID NO: 5196497 - DNA, 25 bp, Homo sapien
taggagggtgagatctgcaacatac

SEQ ID NO: 5196498 - DNA, 25 bp, Homo sapien
tcactgacgggcctataaaactact

SEQ ID NO: 5196499 - DNA, 25 bp, Homo sapien
catcactgacgggcctataaaacta

SEQ ID NO: 5196500 - DNA, 25 bp, Homo sapien
tgacatcactgacgggcctataaaa

SEQ ID NO: 5196501 - DNA, 25 bp, Homo sapien
ctgacatcactgacgggcctataaa

SEQ ID NO: 5196502 - DNA, 25 bp, Homo sapien
aaaacctgtgattgataactattta

SEQ ID NO: 5196503 - DNA, 25 bp, Homo sapien
ctgtcctcaccaggagtactcagca

SEQ ID NO: 5196504 - DNA, 25 bp, Homo sapien
ggcctggattctcgccctttccact

SEQ ID NO: 5196505 - DNA, 25 bp, Homo sapien
ccaggagtactcagcatttgcttaa

SEQ ID NO: 5196506 - DNA, 25 bp, Homo sapien
cagctgcattcttgacagacaacag

SEQ ID NO: 5196507 - DNA, 25 bp, Homo sapien
agctgcaagctgagttacagctgca

SEQ ID NO: 5196508 - DNA, 25 bp, Homo sapien
gcaagctgagttacagctgcattct

SEQ ID NO: 5196509 - DNA, 25 bp, Homo sapien
aagctgagttacagctgcattcttg

SEQ ID NO: 5196510 - DNA, 25 bp, Homo sapien
cctacaatcgcagctgcctgaagga

SEQ ID NO: 5196511 - DNA, 25 bp, Homo sapien
gaggtaacacaaatcacaaccttgg

SEQ ID NO: 5196512 - DNA, 25 bp, Homo sapien
tctaggctccatgtaacctggccca

SEQ ID NO: 5196513 - DNA, 25 bp, Homo sapien
gacagcaggcattgtcaaagggcta

SEQ ID NO: 5196514 - DNA, 25 bp, Homo sapien
aaaacggcatagatcatacatcctc

SEQ ID NO: 5196515 - DNA, 25 bp, Homo sapien
caaaaacggcatagatcatacatcc

SEQ ID NO: 5196516 - DNA, 25 bp, Homo sapien
ggacaaaaacggcatagatcataca

SEQ ID NO: 5196517 - DNA, 25 bp, Homo sapien
ctaggacaaaaacggcatagatcat

SEQ ID NO: 5196518 - DNA, 25 bp, Homo sapien
gaggtgcaatgccaggtaagtttcg

SEQ ID NO: 5196519 - DNA, 25 bp, Homo sapien
agaagcattggcatccacagccgca

SEQ ID NO: 5196520 - DNA, 25 bp, Homo sapien
cacagccgcagaaacaggcttctcg

SEQ ID NO: 5196521 - DNA, 25 bp, Homo sapien
gtcgccgactctgtcctcaacggtg

SEQ ID NO: 5196522 - DNA, 25 bp, Homo sapien
caaggatccgcgtataggctgaaga

SEQ ID NO: 5196523 - DNA, 25 bp, Homo sapien
cagtgcgcgctgtagaactttaaca

SEQ ID NO: 5196524 - DNA, 25 bp, Homo sapien
aagacgttcagttaacagtgcgcgc

SEQ ID NO: 5196525 - DNA, 25 bp, Homo sapien
tagagatgcgactcacggagaccaa

SEQ ID NO: 5196526 - DNA, 25 bp, Homo sapien
tactggagagtagtaagtgcacacg

SEQ ID NO: 5196527 - DNA, 25 bp, Homo sapien
gttaaagatgcgtgacatactggag

SEQ ID NO: 5196528 - DNA, 25 bp, Homo sapien
tgggagaaagcaaacataggacgtg

SEQ ID NO: 5196529 - DNA, 25 bp, Homo sapien
catactggagagtaataagacatac

SEQ ID NO: 5196530 - DNA, 25 bp, Homo sapien
acggatctactcccaaaactggctg

SEQ ID NO: 5196531 - DNA, 25 bp, Homo sapien
tgggctggcgttgacctcgagtgtc

SEQ ID NO: 5196532 - DNA, 25 bp, Homo sapien
gttgacctcgagtgtccagcagggc

SEQ ID NO: 5196533 - DNA, 25 bp, Homo sapien
tggcgttgacctcgagtgtccagca

SEQ ID NO: 5196534 - DNA, 25 bp, Homo sapien
taccactgttaaagactgaaactgg

SEQ ID NO: 5196535 - DNA, 25 bp, Homo sapien
tggaacctggtaccaaatctaccac

SEQ ID NO: 5196536 - DNA, 25 bp, Homo sapien
gccacggagagtggcccactgtcag

SEQ ID NO: 5196537 - DNA, 25 bp, Homo sapien
cagggaaactctctcttacatcgtg

SEQ ID NO: 5196538 - DNA, 25 bp, Homo sapien
ggcggggcgcggctttcccaggctc

SEQ ID NO: 5196539 - DNA, 25 bp, Homo sapien
cggccgctggcggggcgcggctttc

SEQ ID NO: 5196540 - DNA, 25 bp, Homo sapien
cgctggcggggcgcggctttcccag

SEQ ID NO: 5196541 - DNA, 25 bp, Homo sapien
tggcggggcgcggctttcccaggct

SEQ ID NO: 5196542 - DNA, 25 bp, Homo sapien
tagccatataccaacaaagtttgtg

SEQ ID NO: 5196543 - DNA, 25 bp, Homo sapien
gccatataccaacaaagtttgtgta

SEQ ID NO: 5196544 - DNA, 25 bp, Homo sapien
ttagccatataccaacaaagtttgt

SEQ ID NO: 5196545 - DNA, 25 bp, Homo sapien
attagccatataccaacaaagtttg

SEQ ID NO: 5196546 - DNA, 25 bp, Homo sapien
gcctaactgcttagtctgagccctg

SEQ ID NO: 5196547 - DNA, 25 bp, Homo sapien
ttgacggtggcacgctcttcactgc

SEQ ID NO: 5196548 - DNA, 25 bp, Homo sapien
cactccagtacaaacagctattgtg

SEQ ID NO: 5196549 - DNA, 25 bp, Homo sapien
tattgtggaagtgtgtgcgtccacc

SEQ ID NO: 5196550 - DNA, 25 bp, Homo sapien
gtgatccatgttggacataattgag

SEQ ID NO: 5196551 - DNA, 25 bp, Homo sapien
aaaattaaatgacctagaaggtgca

SEQ ID NO: 5196552 - DNA, 25 bp, Homo sapien
gcaagttgactgtacatcatagata

SEQ ID NO: 5196553 - DNA, 25 bp, Homo sapien
gacagtcattaacaatcaagatgta

SEQ ID NO: 5196554 - DNA, 25 bp, Homo sapien
gttgtacctcgagatcacatgtccg

SEQ ID NO: 5196555 - DNA, 25 bp, Homo sapien
tcttgaaggcactctaattgctgct

SEQ ID NO: 5196556 - DNA, 25 bp, Homo sapien
aaggatgactgcctgttacacagaa

SEQ ID NO: 5196557 - DNA, 25 bp, Homo sapien
catacgaactatagtgcctggatac

SEQ ID NO: 5196558 - DNA, 25 bp, Homo sapien
tcagttacacacatagacacctgcg

SEQ ID NO: 5196559 - DNA, 25 bp, Homo sapien
tgcctggagagagtatagcttaatc

SEQ ID NO: 5196560 - DNA, 25 bp, Homo sapien
ggtcagtgcctccaacccctatatt

SEQ ID NO: 5196561 - DNA, 25 bp, Homo sapien
tgcatacatacaccttgtgcctgga

SEQ ID NO: 5196562 - DNA, 25 bp, Homo sapien
aaacactgtgatgctaatctccgag

SEQ ID NO: 5196563 - DNA, 25 bp, Homo sapien
caccagtaatgatggaagtgctctc

SEQ ID NO: 5196564 - DNA, 25 bp, Homo sapien
caaacacagactgtacctggtgcta

SEQ ID NO: 5196565 - DNA, 25 bp, Homo sapien
ggcctatcgcagtaaaaagtaatct

SEQ ID NO: 5196566 - DNA, 25 bp, Homo sapien
tgggagataaatttggcatattctt

SEQ ID NO: 5196567 - DNA, 25 bp, Homo sapien
ttttgttggctgtgaatgggagata

SEQ ID NO: 5196568 - DNA, 25 bp, Homo sapien
gcgatctgcccacttactcttgagt

SEQ ID NO: 5196569 - DNA, 25 bp, Homo sapien
gatataaatctaaatgactgtcatc

SEQ ID NO: 5196570 - DNA, 25 bp, Homo sapien
caaatgtatctttgcagaccgaagg

SEQ ID NO: 5196571 - DNA, 25 bp, Homo sapien
gcctccgttctgaagagataacagt

SEQ ID NO: 5196572 - DNA, 25 bp, Homo sapien
cctgttctctgaccgatattggcac

SEQ ID NO: 5196573 - DNA, 25 bp, Homo sapien
gataacagtatagcaacaactctgc

SEQ ID NO: 5196574 - DNA, 25 bp, Homo sapien
ctgtcccctgcccagttccaaagcc

SEQ ID NO: 5196575 - DNA, 25 bp, Homo sapien
ttcttaaaattctagcctctgtccc

SEQ ID NO: 5196576 - DNA, 25 bp, Homo sapien
ctgtgtccagccttcagaaattatg

SEQ ID NO: 5196577 - DNA, 25 bp, Homo sapien
tgtgtccagccttcagaaattatgc

SEQ ID NO: 5196578 - DNA, 25 bp, Homo sapien
tgatctgtgactaaaactcttagca

SEQ ID NO: 5196579 - DNA, 25 bp, Homo sapien
aaacaagcagaagatacttccttaa

SEQ ID NO: 5196580 - DNA, 25 bp, Homo sapien
tacttccttaatctgcagtttgctt

SEQ ID NO: 5196581 - DNA, 25 bp, Homo sapien
tgtactcttgggtcatcatgcctct

SEQ ID NO: 5196582 - DNA, 25 bp, Homo sapien
tggttgtatctgttagacttacatg

SEQ ID NO: 5196583 - DNA, 25 bp, Homo sapien
ttacatgttgcatgtttcacagagg

SEQ ID NO: 5196584 - DNA, 25 bp, Homo sapien
tctctagataaagtctgttgacact

SEQ ID NO: 5196585 - DNA, 25 bp, Homo sapien
cacagagggtgactgcaaagttaag

SEQ ID NO: 5196586 - DNA, 25 bp, Homo sapien
tgttgacctaaaactaactctgtgg

SEQ ID NO: 5196587 - DNA, 25 bp, Homo sapien
tttaaatagggcaaaaggccacaga

SEQ ID NO: 5196588 - DNA, 25 bp, Homo sapien
tgaagtgatgggtactacatggcaa

SEQ ID NO: 5196589 - DNA, 25 bp, Homo sapien
gatgctaacagctttaattatagtc

SEQ ID NO: 5196590 - DNA, 25 bp, Homo sapien
gcagttcttcttgtagcactttcac

SEQ ID NO: 5196591 - DNA, 25 bp, Homo sapien
accacgtcctgctcagtgttttcta

SEQ ID NO: 5196592 - DNA, 25 bp, Homo sapien
cacaatgatcttgtgtctcagttca

SEQ ID NO: 5196593 - DNA, 25 bp, Homo sapien
ttaaaacctgccttgatccacccat

SEQ ID NO: 5196594 - DNA, 25 bp, Homo sapien
tattctgtttttactggtggtggaa

SEQ ID NO: 5196595 - DNA, 25 bp, Homo sapien
tacgaagcagaggatagaattggat

SEQ ID NO: 5196596 - DNA, 25 bp, Homo sapien
tatgaaattcgaagatacgaagcag

SEQ ID NO: 5196597 - DNA, 25 bp, Homo sapien
tgtcttgtacttagattctgcctac

SEQ ID NO: 5196598 - DNA, 25 bp, Homo sapien
agcattcttgaatacatgctgccat

SEQ ID NO: 5196599 - DNA, 25 bp, Homo sapien
aagcattcttgaatacatgctgcca

SEQ ID NO: 5196600 - DNA, 25 bp, Homo sapien
ttccatggcagggtcaattgaggat

SEQ ID NO: 5196601 - DNA, 25 bp, Homo sapien
ttactagaatctggtacgtactcac

SEQ ID NO: 5196602 - DNA, 25 bp, Homo sapien
caattgaggatttactagaatctgg

SEQ ID NO: 5196603 - DNA, 25 bp, Homo sapien
cagggtcaattgaggatttactaga

SEQ ID NO: 5196604 - DNA, 25 bp, Homo sapien
cacggtcggcctattttgagcattt

SEQ ID NO: 5196605 - DNA, 25 bp, Homo sapien
gagtactgtgatgtgtcctttgagc

SEQ ID NO: 5196606 - DNA, 25 bp, Homo sapien
tgagcataatgaggtggtccagaat

SEQ ID NO: 5196607 - DNA, 25 bp, Homo sapien
aatttgttgtaatcagtctcaccag

SEQ ID NO: 5196608 - DNA, 25 bp, Homo sapien
cctctgccttatctagtataatatg

SEQ ID NO: 5196609 - DNA, 25 bp, Homo sapien
gctttaactgttctctataaatcag

SEQ ID NO: 5196610 - DNA, 25 bp, Homo sapien
caaactgtggaataaataatgcaac

SEQ ID NO: 5196611 - DNA, 25 bp, Homo sapien
tttgctttcgatacttttgagtgca

SEQ ID NO: 5196612 - DNA, 25 bp, Homo sapien
gcaagaatgaggagaacagtaaggg

SEQ ID NO: 5196613 - DNA, 25 bp, Homo sapien
aaatgccagtctaatagagaagctg

SEQ ID NO: 5196614 - DNA, 25 bp, Homo sapien
gtttttaaagtacatgaacagcaat

SEQ ID NO: 5196615 - DNA, 25 bp, Homo sapien
aaaggtaatatattgcaagaatgag

SEQ ID NO: 5196616 - DNA, 25 bp, Homo sapien
ggtataccagactcacttctgggaa

SEQ ID NO: 5196617 - DNA, 25 bp, Homo sapien
atcagcagatgcctgtaggggagaa

SEQ ID NO: 5196618 - DNA, 25 bp, Homo sapien
acctggtataccagactcacttctg

SEQ ID NO: 5196619 - DNA, 25 bp, Homo sapien
agtcactacttaaatcagcagatgc

SEQ ID NO: 5196620 - DNA, 25 bp, Homo sapien
tgtttgtttgtagtctgtgtcttgc

SEQ ID NO: 5196621 - DNA, 25 bp, Homo sapien
gactacatgcgtgcatctccacgcc

SEQ ID NO: 5196622 - DNA, 25 bp, Homo sapien
cttgctctgtcgcagtggtgcgatc

SEQ ID NO: 5196623 - DNA, 25 bp, Homo sapien
tacatgcgtgcatctccacgcctgg

SEQ ID NO: 5196624 - DNA, 25 bp, Homo sapien
taggccttaaggaggcctactgagg

SEQ ID NO: 5196625 - DNA, 25 bp, Homo sapien
caggaatcacagtagcattgttctc

SEQ ID NO: 5196626 - DNA, 25 bp, Homo sapien
tgtggatcattgagcaactgtttcc

SEQ ID NO: 5196627 - DNA, 25 bp, Homo sapien
tagaaaccggaaattcaggaatcac

SEQ ID NO: 5196628 - DNA, 25 bp, Homo sapien
caggcactaagatgatgaaagcagc

SEQ ID NO: 5196629 - DNA, 25 bp, Homo sapien
ggaatgactgcataccaatacaaag

SEQ ID NO: 5196630 - DNA, 25 bp, Homo sapien
gcttaaatggtataactgcgtctca

SEQ ID NO: 5196631 - DNA, 25 bp, Homo sapien
tctaagtcaagcatgctgtggctat

SEQ ID NO: 5196632 - DNA, 25 bp, Homo sapien
aaacatgtacaaatgacggaacatt

SEQ ID NO: 5196633 - DNA, 25 bp, Homo sapien
gcccagccttgtatacattcactta

SEQ ID NO: 5196634 - DNA, 25 bp, Homo sapien
gcaatgactccataatattagcttg

SEQ ID NO: 5196635 - DNA, 25 bp, Homo sapien
tgacggaacattgcctaaaagttac

SEQ ID NO: 5196636 - DNA, 25 bp, Homo sapien
tgatacagtgaggtagtggttctgc

SEQ ID NO: 5196637 - DNA, 25 bp, Homo sapien
gcaacactcccatagttagctaatt

SEQ ID NO: 5196638 - DNA, 25 bp, Homo sapien
tttgtgaattgttgtatctattgac

SEQ ID NO: 5196639 - DNA, 25 bp, Homo sapien
tactacatatttacctatccttttc

SEQ ID NO: 5196640 - DNA, 25 bp, Homo sapien
gacataagggatgagtgaatttcac

SEQ ID NO: 5196641 - DNA, 25 bp, Homo sapien
gagtgaatttcacttgacccttgaa

SEQ ID NO: 5196642 - DNA, 25 bp, Homo sapien
cctagatctgacataagggatgagt

SEQ ID NO: 5196643 - DNA, 25 bp, Homo sapien
ttcttcacctagatctgacataagg

SEQ ID NO: 5196644 - DNA, 25 bp, Homo sapien
cacatctttaaggttgagggcttga

SEQ ID NO: 5196645 - DNA, 25 bp, Homo sapien
agtatacgaaaatgcatatcagaga

SEQ ID NO: 5196646 - DNA, 25 bp, Homo sapien
tgacagcaagtatacgaaaatgcat

SEQ ID NO: 5196647 - DNA, 25 bp, Homo sapien
cttgaaggatttcactagttgaatc

SEQ ID NO: 5196648 - DNA, 25 bp, Homo sapien
taaactgtgttacaggcactaacat

SEQ ID NO: 5196649 - DNA, 25 bp, Homo sapien
acattcttgtaggattcgaggtctc

SEQ ID NO: 5196650 - DNA, 25 bp, Homo sapien
ggctctacagcaatgtaaactgtgt

SEQ ID NO: 5196651 - DNA, 25 bp, Homo sapien
ttttgtcgcatgaaaggctctacag

SEQ ID NO: 5196652 - DNA, 25 bp, Homo sapien
gatatacgggtacacttgatagtgg

SEQ ID NO: 5196653 - DNA, 25 bp, Homo sapien
gggtacacttgatagtggaaactga

SEQ ID NO: 5196654 - DNA, 25 bp, Homo sapien
ggctccagatatacgggtacacttg

SEQ ID NO: 5196655 - DNA, 25 bp, Homo sapien
cttttggctccagatatacgggtac

SEQ ID NO: 5196656 - DNA, 25 bp, Homo sapien
gaggaagaggtttgcaggtgcaaac

SEQ ID NO: 5196657 - DNA, 25 bp, Homo sapien
ccgaggaagaggtttgcaggtgcaa

SEQ ID NO: 5196658 - DNA, 25 bp, Homo sapien
cgaggaagaggtttgcaggtgcaaa

SEQ ID NO: 5196659 - DNA, 25 bp, Homo sapien
gggaagaccaaaccagcatgtcggc

SEQ ID NO: 5196660 - DNA, 25 bp, Homo sapien
caagtccagggtcaataaatacaga

SEQ ID NO: 5196661 - DNA, 25 bp, Homo sapien
tctgcaagaatctcaagtccagggt

SEQ ID NO: 5196662 - DNA, 25 bp, Homo sapien
cctatgagataggtgctgagtggca

SEQ ID NO: 5196663 - DNA, 25 bp, Homo sapien
gaaatgcattatagccttcacagtc

SEQ ID NO: 5196664 - DNA, 25 bp, Homo sapien
tccatgtgggcatctctcatttgga

SEQ ID NO: 5196665 - DNA, 25 bp, Homo sapien
aactgagctcgacaggtaattctat

SEQ ID NO: 5196666 - DNA, 25 bp, Homo sapien
tccaaaactgagctcgacaggtaat

SEQ ID NO: 5196667 - DNA, 25 bp, Homo sapien
gcactgagctcaatctgcgatccat

SEQ ID NO: 5196668 - DNA, 25 bp, Homo sapien
actctgcactgagctcaatctgcga

SEQ ID NO: 5196669 - DNA, 25 bp, Homo sapien
cagtcttccacaaacaaccagatat

SEQ ID NO: 5196670 - DNA, 25 bp, Homo sapien
tctgcactgagctcaatctgcgatc

SEQ ID NO: 5196671 - DNA, 25 bp, Homo sapien
gactctgtccctttttacccaggca

SEQ ID NO: 5196672 - DNA, 25 bp, Homo sapien
caatgacatttagactctgtccctt

SEQ ID NO: 5196673 - DNA, 25 bp, Homo sapien
gtcaatgacatttagactctgtccc

SEQ ID NO: 5196674 - DNA, 25 bp, Homo sapien
gacatttagactctgtcccttttta

SEQ ID NO: 5196675 - DNA, 25 bp, Homo sapien
tatttccatgcaatggcacttacat

SEQ ID NO: 5196676 - DNA, 25 bp, Homo sapien
atccaatggcacaatacatccagtg

SEQ ID NO: 5196677 - DNA, 25 bp, Homo sapien
ctctagaagtttggtttgggtatct

SEQ ID NO: 5196678 - DNA, 25 bp, Homo sapien
acttacattcccatccaatggcaca

SEQ ID NO: 5196679 - DNA, 25 bp, Homo sapien
ggcgagggcctcgattctcacaggc

SEQ ID NO: 5196680 - DNA, 25 bp, Homo sapien
ggtacactggcgagggcctcgattc

SEQ ID NO: 5196681 - DNA, 25 bp, Homo sapien
actggcgagggcctcgattctcaca

SEQ ID NO: 5196682 - DNA, 25 bp, Homo sapien
atacatgggtacactggcgagggcc

SEQ ID NO: 5196683 - DNA, 25 bp, Homo sapien
gagaccgggtgccaatcccatagat

SEQ ID NO: 5196684 - DNA, 25 bp, Homo sapien
aaagtaaaccattgagcccaccaga

SEQ ID NO: 5196685 - DNA, 25 bp, Homo sapien
aacatccactggtaccgggccgtga

SEQ ID NO: 5196686 - DNA, 25 bp, Homo sapien
aactgatcccatagaccaccaacat

SEQ ID NO: 5196687 - DNA, 25 bp, Homo sapien
cttcatcacctgacaacttcgccat

SEQ ID NO: 5196688 - DNA, 25 bp, Homo sapien
tacttcatcacctgacaacttcgcc

SEQ ID NO: 5196689 - DNA, 25 bp, Homo sapien
gtacttcatcacctgacaacttcgc

SEQ ID NO: 5196690 - DNA, 25 bp, Homo sapien
acttcatcacctgacaacttcgcca

SEQ ID NO: 5196691 - DNA, 25 bp, Homo sapien
acacaaaatgggaatcaaggcatct

SEQ ID NO: 5196692 - DNA, 25 bp, Homo sapien
gcatctatcaaatttaaatgttgaa

SEQ ID NO: 5196693 - DNA, 25 bp, Homo sapien
ttagttttcagaattcagtagccag

SEQ ID NO: 5196694 - DNA, 25 bp, Homo sapien
aatatatatgcgtttcacaaacaca

SEQ ID NO: 5196695 - DNA, 25 bp, Homo sapien
caacctgaatagaataaggtagagg

SEQ ID NO: 5196696 - DNA, 25 bp, Homo sapien
cctttggactccaggttatctggcc

SEQ ID NO: 5196697 - DNA, 25 bp, Homo sapien
tttctggagattggtatgtgagtca

SEQ ID NO: 5196698 - DNA, 25 bp, Homo sapien
agatacctgaatagctggtaaagca

SEQ ID NO: 5196699 - DNA, 25 bp, Homo sapien
cagtcctgctaaacagaatgcttgg

SEQ ID NO: 5196700 - DNA, 25 bp, Homo sapien
ccctaagcagcatttggcactcgca

SEQ ID NO: 5196701 - DNA, 25 bp, Homo sapien
gaatgcgatcgctctccttacatct

SEQ ID NO: 5196702 - DNA, 25 bp, Homo sapien
tgcttggcgtaaagaatgcgatcgc

SEQ ID NO: 5196703 - DNA, 25 bp, Homo sapien
aaccaaatttggactgtgagacaca

SEQ ID NO: 5196704 - DNA, 25 bp, Homo sapien
tattacatacagcaagggcagttta

SEQ ID NO: 5196705 - DNA, 25 bp, Homo sapien
taaatagcggattcaagccagcctc

SEQ ID NO: 5196706 - DNA, 25 bp, Homo sapien
gactggcacagtaaaattcggcttc

SEQ ID NO: 5196707 - DNA, 25 bp, Homo sapien
catgttaaggtacaaagccagagga

SEQ ID NO: 5196708 - DNA, 25 bp, Homo sapien
tgtaagtggttcagcacagtatgcc

SEQ ID NO: 5196709 - DNA, 25 bp, Homo sapien
cagactcagaatagctccaatatgg

SEQ ID NO: 5196710 - DNA, 25 bp, Homo sapien
cagaaaccattgcaccagactcaga

SEQ ID NO: 5196711 - DNA, 25 bp, Homo sapien
tttaccctcatacccagatgaaggt

SEQ ID NO: 5196712 - DNA, 25 bp, Homo sapien
ccctcatacccagatgaaggtgaag

SEQ ID NO: 5196713 - DNA, 25 bp, Homo sapien
gttttaccctcatacccagatgaag

SEQ ID NO: 5196714 - DNA, 25 bp, Homo sapien
taccctcatacccagatgaaggtga

SEQ ID NO: 5196715 - DNA, 25 bp, Homo sapien
aggatcgtaattggctgttgaggga

SEQ ID NO: 5196716 - DNA, 25 bp, Homo sapien
tcaaggatcgtaattggctgttgag

SEQ ID NO: 5196717 - DNA, 25 bp, Homo sapien
caaggatcgtaattggctgttgagg

SEQ ID NO: 5196718 - DNA, 25 bp, Homo sapien
aaggatcgtaattggctgttgaggg

SEQ ID NO: 5196719 - DNA, 25 bp, Homo sapien
gaatcgatctcgtgaagcccacaaa

SEQ ID NO: 5196720 - DNA, 25 bp, Homo sapien
tctcgtgaagcccacaaagaccgaa

SEQ ID NO: 5196721 - DNA, 25 bp, Homo sapien
tcgtgaagcccacaaagaccgaaca

SEQ ID NO: 5196722 - DNA, 25 bp, Homo sapien
cgatctcgtgaagcccacaaagacc

SEQ ID NO: 5196723 - DNA, 25 bp, Homo sapien
tatgctcattgtggtggtagtctgc

SEQ ID NO: 5196724 - DNA, 25 bp, Homo sapien
tgctccccataagttggccttctgt

SEQ ID NO: 5196725 - DNA, 25 bp, Homo sapien
caaaatttgtagctggggagagatc

SEQ ID NO: 5196726 - DNA, 25 bp, Homo sapien
tgcttttgccactatgctcattgtg

SEQ ID NO: 5196727 - DNA, 25 bp, Homo sapien
cgagctttcctaggagctgactcca

SEQ ID NO: 5196728 - DNA, 25 bp, Homo sapien
cagcagagggtgcacgagctttcct

SEQ ID NO: 5196729 - DNA, 25 bp, Homo sapien
tcttgtcctggtgtagagatgacca

SEQ ID NO: 5196730 - DNA, 25 bp, Homo sapien
cctcttgtcctggtgtagagatgac

SEQ ID NO: 5196731 - DNA, 25 bp, Homo sapien
gggcgctgtgtcgagggcgatcccc

SEQ ID NO: 5196732 - DNA, 25 bp, Homo sapien
tgtgcgccctgcacttagggatccc

SEQ ID NO: 5196733 - DNA, 25 bp, Homo sapien
tcacaagcttctcggccccgacctt

SEQ ID NO: 5196734 - DNA, 25 bp, Homo sapien
cgtgctaaaggtacgccccgcggct

SEQ ID NO: 5196735 - DNA, 25 bp, Homo sapien
gttcctagtgcctcgtgaggcagcc

SEQ ID NO: 5196736 - DNA, 25 bp, Homo sapien
aatgtagttcctagtgcctcgtgag

SEQ ID NO: 5196737 - DNA, 25 bp, Homo sapien
tgcctcgtgaggcagcccggcttct

SEQ ID NO: 5196738 - DNA, 25 bp, Homo sapien
tagtgcctcgtgaggcagcccggct

SEQ ID NO: 5196739 - DNA, 25 bp, Homo sapien
agaagcactcccttttcgatctgcc

SEQ ID NO: 5196740 - DNA, 25 bp, Homo sapien
gacagtgcgacgctccggtaccgcg

SEQ ID NO: 5196741 - DNA, 25 bp, Homo sapien
ctctggccgctgacagtgcgacgct

SEQ ID NO: 5196742 - DNA, 25 bp, Homo sapien
gccagagcgcggagagaagggaaga

SEQ ID NO: 5196743 - DNA, 25 bp, Homo sapien
gccgccgagtggcgcgccccacact

SEQ ID NO: 5196744 - DNA, 25 bp, Homo sapien
gctgcacacgttgggcttccgggtc

SEQ ID NO: 5196745 - DNA, 25 bp, Homo sapien
ctgcgtcgcgcgagaagcagcccag

SEQ ID NO: 5196746 - DNA, 25 bp, Homo sapien
tgcaccacgcctgcgtcgcgcgaga

SEQ ID NO: 5196747 - DNA, 25 bp, Homo sapien
gcccggcgactcagccggctgcaca

SEQ ID NO: 5196748 - DNA, 25 bp, Homo sapien
tcttcctctctcataggctataggt

SEQ ID NO: 5196749 - DNA, 25 bp, Homo sapien
gacctggaatgagttgtccagacat

SEQ ID NO: 5196750 - DNA, 25 bp, Homo sapien
tgacacagcgccgataattgtcaaa

SEQ ID NO: 5196751 - DNA, 25 bp, Homo sapien
cacagcgccgataattgtcaaaata

SEQ ID NO: 5196752 - DNA, 25 bp, Homo sapien
gagctgggaaaagtggacaccatgc

SEQ ID NO: 5196753 - DNA, 25 bp, Homo sapien
aatagctgattaacaggatcagagc

SEQ ID NO: 5196754 - DNA, 25 bp, Homo sapien
cagaatattcaagtattacaggaaa

SEQ ID NO: 5196755 - DNA, 25 bp, Homo sapien
taacatccacataatgggaatacca

SEQ ID NO: 5196756 - DNA, 25 bp, Homo sapien
tgcagccaagagtacgaggctccct

SEQ ID NO: 5196757 - DNA, 25 bp, Homo sapien
tattgggtcagtatagtcaagaggt

SEQ ID NO: 5196758 - DNA, 25 bp, Homo sapien
tggtgtctgaaccagggcatagtcc

SEQ ID NO: 5196759 - DNA, 25 bp, Homo sapien
tattcatgggatggaggatctacct

SEQ ID NO: 5196760 - DNA, 25 bp, Homo sapien
catatgcgattataacctgtggata

SEQ ID NO: 5196761 - DNA, 25 bp, Homo sapien
taaaacaccattggacattaaataa

SEQ ID NO: 5196762 - DNA, 25 bp, Homo sapien
tgaaggcaacttcatatgcgattat

SEQ ID NO: 5196763 - DNA, 25 bp, Homo sapien
taaaccaaacagtttcacaagaatg

SEQ ID NO: 5196764 - DNA, 25 bp, Homo sapien
ccaagacagtatttgttcaggtttg

SEQ ID NO: 5196765 - DNA, 25 bp, Homo sapien
tattattcttgataaccaagacagt

SEQ ID NO: 5196766 - DNA, 25 bp, Homo sapien
tatacatatacgtacctggacgttg

SEQ ID NO: 5196767 - DNA, 25 bp, Homo sapien
ctctgttgaattccatcaagatcaa

SEQ ID NO: 5196768 - DNA, 25 bp, Homo sapien
taataaagcatcctctattttttct

SEQ ID NO: 5196769 - DNA, 25 bp, Homo sapien
aacattttggcatttcataaagttt

SEQ ID NO: 5196770 - DNA, 25 bp, Homo sapien
tcccataataaagcatcctctattt

SEQ ID NO: 5196771 - DNA, 25 bp, Homo sapien
ccataataaagcatcctctattttt

SEQ ID NO: 5196772 - DNA, 25 bp, Homo sapien
agttcgatatcagcctaggcaacac

SEQ ID NO: 5196773 - DNA, 25 bp, Homo sapien
taggcaacacagcaagactctgttt

SEQ ID NO: 5196774 - DNA, 25 bp, Homo sapien
ggagttcgatatcagcctaggcaac

SEQ ID NO: 5196775 - DNA, 25 bp, Homo sapien
caggagttcgatatcagcctaggca

SEQ ID NO: 5196776 - DNA, 25 bp, Homo sapien
agcagtcagtgctatgagtgaggac

SEQ ID NO: 5196777 - DNA, 25 bp, Homo sapien
tctcaaggatttttcccgtagttgc

SEQ ID NO: 5196778 - DNA, 25 bp, Homo sapien
tagttgctgatatacgaagtagcca

SEQ ID NO: 5196779 - DNA, 25 bp, Homo sapien
tacgaagtagccaattatgagcagt

SEQ ID NO: 5196780 - DNA, 25 bp, Homo sapien
ttcttgaggagtgtcccagctcaag

SEQ ID NO: 5196781 - DNA, 25 bp, Homo sapien
cctctgttctgagctgacttaactg

SEQ ID NO: 5196782 - DNA, 25 bp, Homo sapien
ctgagctgacttaactgcaatgact

SEQ ID NO: 5196783 - DNA, 25 bp, Homo sapien
cttgaggagtgtcccagctcaagta

SEQ ID NO: 5196784 - DNA, 25 bp, Homo sapien
aaatctgcagacaaattcctatgaa

SEQ ID NO: 5196785 - DNA, 25 bp, Homo sapien
ctgcagacaaattcctatgaaaaag

SEQ ID NO: 5196786 - DNA, 25 bp, Homo sapien
cagacaaattcctatgaaaaagagt

SEQ ID NO: 5196787 - DNA, 25 bp, Homo sapien
aatctgcagacaaattcctatgaaa

SEQ ID NO: 5196788 - DNA, 25 bp, Homo sapien
atctcttgtacttctccaatacagt

SEQ ID NO: 5196789 - DNA, 25 bp, Homo sapien
gaagaacaaggtccaatttcttgcc

SEQ ID NO: 5196790 - DNA, 25 bp, Homo sapien
caatctcttgtacttctccaataca

SEQ ID NO: 5196791 - DNA, 25 bp, Homo sapien
ttgaagaacaaggtccaatttcttg

SEQ ID NO: 5196792 - DNA, 25 bp, Homo sapien
ctgcaaggtacagcaaaacatgttg

SEQ ID NO: 5196793 - DNA, 25 bp, Homo sapien
ggtagaactcggaacactgcaaggt

SEQ ID NO: 5196794 - DNA, 25 bp, Homo sapien
aacactgcaaggtacagcaaaacat

SEQ ID NO: 5196795 - DNA, 25 bp, Homo sapien
ctacaagtgaaaaaggtagaactcg

SEQ ID NO: 5196796 - DNA, 25 bp, Homo sapien
cagtattccatgagacaaggtagca

SEQ ID NO: 5196797 - DNA, 25 bp, Homo sapien
caaggtagcatctgtaacgttccca

SEQ ID NO: 5196798 - DNA, 25 bp, Homo sapien
tttggaagctatagagtctgaccag

SEQ ID NO: 5196799 - DNA, 25 bp, Homo sapien
tcctgagctgtacatcacaatcagt

SEQ ID NO: 5196800 - DNA, 25 bp, Homo sapien
tctgcatgcacaccctaagtcaagt

SEQ ID NO: 5196801 - DNA, 25 bp, Homo sapien
tctcctacagttccagtagtcccac

SEQ ID NO: 5196802 - DNA, 25 bp, Homo sapien
aaggaatgccaaaaggagcctctcc

SEQ ID NO: 5196803 - DNA, 25 bp, Homo sapien
ccagtagtcccaccccatctgcatg

SEQ ID NO: 5196804 - DNA, 25 bp, Homo sapien
tcttgactgtagtggtgatttcatg

SEQ ID NO: 5196805 - DNA, 25 bp, Homo sapien
taaaagagcacttatggtatgattc

SEQ ID NO: 5196806 - DNA, 25 bp, Homo sapien
gagataacagttaaccccatgtaag

SEQ ID NO: 5196807 - DNA, 25 bp, Homo sapien
aaaattacacatcaaggagataaca

SEQ ID NO: 5196808 - DNA, 25 bp, Homo sapien
tgatacagctatatggtgatataat

SEQ ID NO: 5196809 - DNA, 25 bp, Homo sapien
actatgcccagttaaaactcctcct

SEQ ID NO: 5196810 - DNA, 25 bp, Homo sapien
gtgatacagctatatggtgatataa

SEQ ID NO: 5196811 - DNA, 25 bp, Homo sapien
gatacagctatatggtgatataata

SEQ ID NO: 5196812 - DNA, 25 bp, Homo sapien
tacttagaaaatttgcccaggtgtg

SEQ ID NO: 5196813 - DNA, 25 bp, Homo sapien
cttagaaaatttgcccaggtgtggt

SEQ ID NO: 5196814 - DNA, 25 bp, Homo sapien
ggctacacctgtaatacaatatgat

SEQ ID NO: 5196815 - DNA, 25 bp, Homo sapien
aatgtaggggataattaacttgata

SEQ ID NO: 5196816 - DNA, 25 bp, Homo sapien
gatgtagtgccaaggatggcctcca

SEQ ID NO: 5196817 - DNA, 25 bp, Homo sapien
cagggatgacacctcaaagagcagt

SEQ ID NO: 5196818 - DNA, 25 bp, Homo sapien
tggcctccaatctgaaaagcattct

SEQ ID NO: 5196819 - DNA, 25 bp, Homo sapien
tgtttcttcttattaggtgtgacga

SEQ ID NO: 5196820 - DNA, 25 bp, Homo sapien
tctactcttctgactaacaggtggg

SEQ ID NO: 5196821 - DNA, 25 bp, Homo sapien
gagagtatgtgacaagcatgcttga

SEQ ID NO: 5196822 - DNA, 25 bp, Homo sapien
ggagttaataggcatacaaatcatt

SEQ ID NO: 5196823 - DNA, 25 bp, Homo sapien
tctgaaatcttaagttcggctgctt

SEQ ID NO: 5196824 - DNA, 25 bp, Homo sapien
acttggatatattaacttcactggc

SEQ ID NO: 5196825 - DNA, 25 bp, Homo sapien
agaagcactgggaacgaacatcaac

SEQ ID NO: 5196826 - DNA, 25 bp, Homo sapien
tgggaacgaacatcaacttggatat

SEQ ID NO: 5196827 - DNA, 25 bp, Homo sapien
tattaacttcactggctttacagaa

SEQ ID NO: 5196828 - DNA, 25 bp, Homo sapien
ttgacttgatttggaccaacatgta

SEQ ID NO: 5196829 - DNA, 25 bp, Homo sapien
tgtattattctaccagaagcatcag

SEQ ID NO: 5196830 - DNA, 25 bp, Homo sapien
tcagattctagagaacaacaatcca

SEQ ID NO: 5196831 - DNA, 25 bp, Homo sapien
caggatggaaatagatccagtcaga

SEQ ID NO: 5196832 - DNA, 25 bp, Homo sapien
agagatctgatgctgagaactatta

SEQ ID NO: 5196833 - DNA, 25 bp, Homo sapien
tctgatgctgagaactattattttc

SEQ ID NO: 5196834 - DNA, 25 bp, Homo sapien
tccctgttggccaaaatgacaaaat

SEQ ID NO: 5196835 - DNA, 25 bp, Homo sapien
ttctatttcagttagcttcaaaact

SEQ ID NO: 5196836 - DNA, 25 bp, Homo sapien
tttaccacccgtccagaagctgtaa

SEQ ID NO: 5196837 - DNA, 25 bp, Homo sapien
tcttgttctgggtcatcatccagaa

SEQ ID NO: 5196838 - DNA, 25 bp, Homo sapien
ctcttgttctgggtcatcatccaga

SEQ ID NO: 5196839 - DNA, 25 bp, Homo sapien
ccacccgtccagaagctgtaacagt

SEQ ID NO: 5196840 - DNA, 25 bp, Homo sapien
gaatgcctggcatcaactttaaaga

SEQ ID NO: 5196841 - DNA, 25 bp, Homo sapien
tcagtgcccaagcatccaggaatag

SEQ ID NO: 5196842 - DNA, 25 bp, Homo sapien
ggtcaaactgctctctaatccactg

SEQ ID NO: 5196843 - DNA, 25 bp, Homo sapien
tgagactccagaaaccttgcacgga

SEQ ID NO: 5196844 - DNA, 25 bp, Homo sapien
tgctgcctctcacaagtgtgtttgc

SEQ ID NO: 5196845 - DNA, 25 bp, Homo sapien
taaaagagtattcaactgctgcctc

SEQ ID NO: 5196846 - DNA, 25 bp, Homo sapien
tgcctagtaaaacatcagctccaag

SEQ ID NO: 5196847 - DNA, 25 bp, Homo sapien
gggcaaaatccagttattcaggtag

SEQ ID NO: 5196848 - DNA, 25 bp, Homo sapien
ttaagtaaagttccatattcattac

SEQ ID NO: 5196849 - DNA, 25 bp, Homo sapien
tttaagtaaagttccatattcatta

SEQ ID NO: 5196850 - DNA, 25 bp, Homo sapien
ccatgactccactagtggaatgctt

SEQ ID NO: 5196851 - DNA, 25 bp, Homo sapien
tgactccactagtggaatgctttta

SEQ ID NO: 5196852 - DNA, 25 bp, Homo sapien
cattggcataggtgagtctggactg

SEQ ID NO: 5196853 - DNA, 25 bp, Homo sapien
taacatctgttctaataaatggcac

SEQ ID NO: 5196854 - DNA, 25 bp, Homo sapien
cctgtatataggacaaaacctcttt

SEQ ID NO: 5196855 - DNA, 25 bp, Homo sapien
cactggtaaggatcccctagtgccc

SEQ ID NO: 5196856 - DNA, 25 bp, Homo sapien
cagctgaagactctgttgggtttct

SEQ ID NO: 5196857 - DNA, 25 bp, Homo sapien
tctgctctatgtgtagcaccaagtc

SEQ ID NO: 5196858 - DNA, 25 bp, Homo sapien
catctggtaaacatagcagctgaag

SEQ ID NO: 5196859 - DNA, 25 bp, Homo sapien
gcaccaagtctctgtcaaagtagac

SEQ ID NO: 5196860 - DNA, 25 bp, Homo sapien
ggcaatgtctagcaccagggcagaa

SEQ ID NO: 5196861 - DNA, 25 bp, Homo sapien
aataaaatggattggacgcagctgc

SEQ ID NO: 5196862 - DNA, 25 bp, Homo sapien
tctctcgctatgtgtggtatccaaa

SEQ ID NO: 5196863 - DNA, 25 bp, Homo sapien
gacactctggcgagctgggaagcat

SEQ ID NO: 5196864 - DNA, 25 bp, Homo sapien
tctcgaattaaaatatcaggtaaag

SEQ ID NO: 5196865 - DNA, 25 bp, Homo sapien
cctgttaagtaggtgggcatgtagc

SEQ ID NO: 5196866 - DNA, 25 bp, Homo sapien
aatgttttgtacctgtcactagtac

SEQ ID NO: 5196867 - DNA, 25 bp, Homo sapien
gctagagtctcgaattaaaatatca

SEQ ID NO: 5196868 - DNA, 25 bp, Homo sapien
ctgctgatggaagctaccctgcttc

SEQ ID NO: 5196869 - DNA, 25 bp, Homo sapien
tgctgatggaagctaccctgcttca

SEQ ID NO: 5196870 - DNA, 25 bp, Homo sapien
ttaaacactcagaattgttacccat

SEQ ID NO: 5196871 - DNA, 25 bp, Homo sapien
tgtctaaacagagcggtatctcctc

SEQ ID NO: 5196872 - DNA, 25 bp, Homo sapien
ttagatccaggagtgcaatgcagaa

SEQ ID NO: 5196873 - DNA, 25 bp, Homo sapien
gaatgcacctcttttcagcgtaacg

SEQ ID NO: 5196874 - DNA, 25 bp, Homo sapien
taagatgtagaatccccgtggtcag

SEQ ID NO: 5196875 - DNA, 25 bp, Homo sapien
tgtaaatggcttgtagataaaaatg

SEQ ID NO: 5196876 - DNA, 25 bp, Homo sapien
aaattgtttcaatggactatgtcca

SEQ ID NO: 5196877 - DNA, 25 bp, Homo sapien
cagggtagcaataggaccacccttg

SEQ ID NO: 5196878 - DNA, 25 bp, Homo sapien
ggactatgtccattacccccttgat

SEQ ID NO: 5196879 - DNA, 25 bp, Homo sapien
ttggcccttgctagggatacagccc

SEQ ID NO: 5196880 - DNA, 25 bp, Homo sapien
tggcccttgctagggatacagccca

SEQ ID NO: 5196881 - DNA, 25 bp, Homo sapien
ggcccttgctagggatacagcccat

SEQ ID NO: 5196882 - DNA, 25 bp, Homo sapien
tctgaactccctgctggcacaacct

SEQ ID NO: 5196883 - DNA, 25 bp, Homo sapien
tgaactccctgctggcacaacctgc

SEQ ID NO: 5196884 - DNA, 25 bp, Homo sapien
tgccaagccaacagtacttcatgta

SEQ ID NO: 5196885 - DNA, 25 bp, Homo sapien
gccaacagtacttcatgtacgtcat

SEQ ID NO: 5196886 - DNA, 25 bp, Homo sapien
aagaactttgcctctttagctcttt

SEQ ID NO: 5196887 - DNA, 25 bp, Homo sapien
ccaaagaactttgcctctttagctc

SEQ ID NO: 5196888 - DNA, 25 bp, Homo sapien
cccaaagaactttgcctctttagct

SEQ ID NO: 5196889 - DNA, 25 bp, Homo sapien
ctctttagctctttcagcacaattc

SEQ ID NO: 5196890 - DNA, 25 bp, Homo sapien
ggcaatcgggcatttatcttctctt

SEQ ID NO: 5196891 - DNA, 25 bp, Homo sapien
ggggcaatcgggcatttatcttctc

SEQ ID NO: 5196892 - DNA, 25 bp, Homo sapien
ctggggcaatcgggcatttatcttc

SEQ ID NO: 5196893 - DNA, 25 bp, Homo sapien
ctctggggcaatcgggcatttatct

SEQ ID NO: 5196894 - DNA, 25 bp, Homo sapien
ccagcaactcctggagcagataggc

SEQ ID NO: 5196895 - DNA, 25 bp, Homo sapien
gacccagtctggttcaaagtcaaca

SEQ ID NO: 5196896 - DNA, 25 bp, Homo sapien
ccaaacaatactgaatacgactttc

SEQ ID NO: 5196897 - DNA, 25 bp, Homo sapien
tttcctcaggttgtgaacaagtgct

SEQ ID NO: 5196898 - DNA, 25 bp, Homo sapien
caagggaatatctcgtcacatgttc

SEQ ID NO: 5196899 - DNA, 25 bp, Homo sapien
ggtttgcgttatttaagaacagcag

SEQ ID NO: 5196900 - DNA, 25 bp, Homo sapien
tcatctcactgggttcagcctaaag

SEQ ID NO: 5196901 - DNA, 25 bp, Homo sapien
cgatataagtttctggaacaaggga

SEQ ID NO: 5196902 - DNA, 25 bp, Homo sapien
cgcaggtcggacgtcagagtgatct

SEQ ID NO: 5196903 - DNA, 25 bp, Homo sapien
ccgcaggtcggacgtcagagtgatc

SEQ ID NO: 5196904 - DNA, 25 bp, Homo sapien
aggtcggacgtcagagtgatcttaa

SEQ ID NO: 5196905 - DNA, 25 bp, Homo sapien
agcagccgcaggtcggacgtcagag

SEQ ID NO: 5196906 - DNA, 25 bp, Homo sapien
gagatacaggcccaactttaggaat

SEQ ID NO: 5196907 - DNA, 25 bp, Homo sapien
tccagtcccaagtggggcatttcca

SEQ ID NO: 5196908 - DNA, 25 bp, Homo sapien
caaggagctccaccgaactgtgatc

SEQ ID NO: 5196909 - DNA, 25 bp, Homo sapien
atgctgatcgtgaggccaaggagct

SEQ ID NO: 5196910 - DNA, 25 bp, Homo sapien
acaacagccctgtgcgactgtcaaa

SEQ ID NO: 5196911 - DNA, 25 bp, Homo sapien
cagccctgtgcgactgtcaaaagtt

SEQ ID NO: 5196912 - DNA, 25 bp, Homo sapien
ccttcttctactagcgtctttctgc

SEQ ID NO: 5196913 - DNA, 25 bp, Homo sapien
cctgtgcgactgtcaaaagttctac

SEQ ID NO: 5196914 - DNA, 25 bp, Homo sapien
tctacaacggcaagaccttcaacca

SEQ ID NO: 5196915 - DNA, 25 bp, Homo sapien
cggcaagaccttcaaccaggtggag

SEQ ID NO: 5196916 - DNA, 25 bp, Homo sapien
tgggcgtctacaacggcaagacctt

SEQ ID NO: 5196917 - DNA, 25 bp, Homo sapien
ggtgggcgtctacaacggcaagacc

SEQ ID NO: 5196918 - DNA, 25 bp, Homo sapien
ccggggcgtcgacttcttggggctg

SEQ ID NO: 5196919 - DNA, 25 bp, Homo sapien
agcgccccatactccgcaccgcggg

SEQ ID NO: 5196920 - DNA, 25 bp, Homo sapien
cctgcggggagggactttctgggct

SEQ ID NO: 5196921 - DNA, 25 bp, Homo sapien
ccacaagaacttggagaggcggcgg

SEQ ID NO: 5196922 - DNA, 25 bp, Homo sapien
cctggatgaagacgaagccggtgac

SEQ ID NO: 5196923 - DNA, 25 bp, Homo sapien
aggacccagacgagggcgaagatca

SEQ ID NO: 5196924 - DNA, 25 bp, Homo sapien
gttaaactctagtgcgctcccatcc

SEQ ID NO: 5196925 - DNA, 25 bp, Homo sapien
agggcgaagatcaccgacaggaagc

SEQ ID NO: 5196926 - DNA, 25 bp, Homo sapien
tacaaatacgggcaaattctcgctc

SEQ ID NO: 5196927 - DNA, 25 bp, Homo sapien
caagttcagcaaaaggctgaggcga

SEQ ID NO: 5196928 - DNA, 25 bp, Homo sapien
ccagggccgaggatgttacaaatac

SEQ ID NO: 5196929 - DNA, 25 bp, Homo sapien
tcgcgcccgggctcaagtttctggg

SEQ ID NO: 5196930 - DNA, 25 bp, Homo sapien
cctgatgccgatctcacaccaggga

SEQ ID NO: 5196931 - DNA, 25 bp, Homo sapien
atgccgatctcacaccagggaagcc

SEQ ID NO: 5196932 - DNA, 25 bp, Homo sapien
cctgatgccgatctcacaccctgat

SEQ ID NO: 5196933 - DNA, 25 bp, Homo sapien
caccctgatgccgatctcacaccag

SEQ ID NO: 5196934 - DNA, 25 bp, Homo sapien
gatagcttactgagggctatgatga

SEQ ID NO: 5196935 - DNA, 25 bp, Homo sapien
aagctctgacttctgtcctacatcc

SEQ ID NO: 5196936 - DNA, 25 bp, Homo sapien
tactgagggctatgatgactgctgc

SEQ ID NO: 5196937 - DNA, 25 bp, Homo sapien
aaaggatagcttactgagggctatg

SEQ ID NO: 5196938 - DNA, 25 bp, Homo sapien
cagtgcagatctcatctcctggtgc

SEQ ID NO: 5196939 - DNA, 25 bp, Homo sapien
tcccttgcagggatcatagaagtag

SEQ ID NO: 5196940 - DNA, 25 bp, Homo sapien
tagagcccagtctaaatccagggtg

SEQ ID NO: 5196941 - DNA, 25 bp, Homo sapien
cattcatggatacctgggattagga

SEQ ID NO: 5196942 - DNA, 25 bp, Homo sapien
gatgccaatactttgggcttcccag

SEQ ID NO: 5196943 - DNA, 25 bp, Homo sapien
aggcttgtctccctacttggcttcc

SEQ ID NO: 5196944 - DNA, 25 bp, Homo sapien
caggcttgtctccctacttggcttc

SEQ ID NO: 5196945 - DNA, 25 bp, Homo sapien
tagctttccctgtccagcagtagaa

SEQ ID NO: 5196946 - DNA, 25 bp, Homo sapien
tacatttacgcaaattggctgcacg

SEQ ID NO: 5196947 - DNA, 25 bp, Homo sapien
gaagacttcttactctttctaatgc

SEQ ID NO: 5196948 - DNA, 25 bp, Homo sapien
taatgctatgaagcatcacagagaa

SEQ ID NO: 5196949 - DNA, 25 bp, Homo sapien
cacaagggattttgaagactcctac

SEQ ID NO: 5196950 - DNA, 25 bp, Homo sapien
attaagttttttatggcctggcgcg

SEQ ID NO: 5196951 - DNA, 25 bp, Homo sapien
caatctaggtgctggtttcacaggt

SEQ ID NO: 5196952 - DNA, 25 bp, Homo sapien
gcaattacaatggaacacacaaggg

SEQ ID NO: 5196953 - DNA, 25 bp, Homo sapien
tcatcaggagcttgctgcatttcca

SEQ ID NO: 5196954 - DNA, 25 bp, Homo sapien
gcatttaaccctgcatggatggatt

SEQ ID NO: 5196955 - DNA, 25 bp, Homo sapien
tatgacagctatcagtccaacccag

SEQ ID NO: 5196956 - DNA, 25 bp, Homo sapien
caggtccacggcagtctgtagacga

SEQ ID NO: 5196957 - DNA, 25 bp, Homo sapien
aaacatttacagtcactgggcgcgg

SEQ ID NO: 5196958 - DNA, 25 bp, Homo sapien
cagattaaaagtcatatccagtata

SEQ ID NO: 5196959 - DNA, 25 bp, Homo sapien
gaatccagattaaaagtcatatcca

SEQ ID NO: 5196960 - DNA, 25 bp, Homo sapien
acatttacagtcactgggcgcggtg

SEQ ID NO: 5196961 - DNA, 25 bp, Homo sapien
tactggccttgttagacccagagca

SEQ ID NO: 5196962 - DNA, 25 bp, Homo sapien
aaggacctggactctgccatcaagc

SEQ ID NO: 5196963 - DNA, 25 bp, Homo sapien
agagaggactccaaggttcagggca

SEQ ID NO: 5196964 - DNA, 25 bp, Homo sapien
gccaatctggacttctgatgtacag

SEQ ID NO: 5196965 - DNA, 25 bp, Homo sapien
ttagcacaaagacaacaacgcgaga

SEQ ID NO: 5196966 - DNA, 25 bp, Homo sapien
tgcaagctttacaagggcagagagc

SEQ ID NO: 5196967 - DNA, 25 bp, Homo sapien
aacgggtattcggttcactgctgaa

SEQ ID NO: 5196968 - DNA, 25 bp, Homo sapien
caaggtatctggcatataacgggta

SEQ ID NO: 5196969 - DNA, 25 bp, Homo sapien
aatccattgcagtctggctcctagg

SEQ ID NO: 5196970 - DNA, 25 bp, Homo sapien
gggtcattagtgacttccaggttac

SEQ ID NO: 5196971 - DNA, 25 bp, Homo sapien
tcagtagcatctaacactcctccag

SEQ ID NO: 5196972 - DNA, 25 bp, Homo sapien
ccaggttactaagcctaatgatcag

SEQ ID NO: 5196973 - DNA, 25 bp, Homo sapien
tacgttttgcccctcttatgaccca

SEQ ID NO: 5196974 - DNA, 25 bp, Homo sapien
aatgctgctgttctagggaccaaac

SEQ ID NO: 5196975 - DNA, 25 bp, Homo sapien
gacagacaagctcccaatgttaaag

SEQ ID NO: 5196976 - DNA, 25 bp, Homo sapien
caaacgctgtcttaggtcattgcca

SEQ ID NO: 5196977 - DNA, 25 bp, Homo sapien
gtggcttacccatagaaacatatat

SEQ ID NO: 5196978 - DNA, 25 bp, Homo sapien
tgtagggctcaacagtctaagcagg

SEQ ID NO: 5196979 - DNA, 25 bp, Homo sapien
gagcaacttaactaccctaaatctg

SEQ ID NO: 5196980 - DNA, 25 bp, Homo sapien
tctaagcaggtaggaggtcagaaat

SEQ ID NO: 5196981 - DNA, 25 bp, Homo sapien
cttcttcagtgaacttcagtgattc

SEQ ID NO: 5196982 - DNA, 25 bp, Homo sapien
agttaataaccaaaatgcctgaata

SEQ ID NO: 5196983 - DNA, 25 bp, Homo sapien
tccctcttggtggttcagaatattc

SEQ ID NO: 5196984 - DNA, 25 bp, Homo sapien
gaacttcagtgattctattagtatc

SEQ ID NO: 5196985 - DNA, 25 bp, Homo sapien
cataagtgctgttgcaatcactgtt

SEQ ID NO: 5196986 - DNA, 25 bp, Homo sapien
gtgctgttgcaatcactgttccaaa

SEQ ID NO: 5196987 - DNA, 25 bp, Homo sapien
tgctcggagagaaagcggagcccat

SEQ ID NO: 5196988 - DNA, 25 bp, Homo sapien
tgacaattccagaataaacatgtat

SEQ ID NO: 5196989 - DNA, 25 bp, Homo sapien
gaaaacaccttctggcgggaatgta

SEQ ID NO: 5196990 - DNA, 25 bp, Homo sapien
ccaggatcagaaggccaagcgtatt

SEQ ID NO: 5196991 - DNA, 25 bp, Homo sapien
taggctggcatggaacctcttgctc

SEQ ID NO: 5196992 - DNA, 25 bp, Homo sapien
tccattgcggtctggtgactatcca

SEQ ID NO: 5196993 - DNA, 25 bp, Homo sapien
gactgcatgacaacaggccagggat

SEQ ID NO: 5196994 - DNA, 25 bp, Homo sapien
tcagtcccaccatgtatgagccgtg

SEQ ID NO: 5196995 - DNA, 25 bp, Homo sapien
caaggcaccgtgctaatgttgtggt

SEQ ID NO: 5196996 - DNA, 25 bp, Homo sapien
tccaattcaggtcagttcataggcc

SEQ ID NO: 5196997 - DNA, 25 bp, Homo sapien
tgaaagttgttcagcagctaaaatc

SEQ ID NO: 5196998 - DNA, 25 bp, Homo sapien
caggaagccgtacacttttgatgac

SEQ ID NO: 5196999 - DNA, 25 bp, Homo sapien
caacagtgctattctagtgccaaag

SEQ ID NO: 5197000 - DNA, 25 bp, Homo sapien
gaaagaccctagctattgccccagg

SEQ ID NO: 5197001 - DNA, 25 bp, Homo sapien
gatcccagacagagatgatactcca

SEQ ID NO: 5197002 - DNA, 25 bp, Homo sapien
aatggctggccttacgggttgtgcc

SEQ ID NO: 5197003 - DNA, 25 bp, Homo sapien
caaattggcctgtccttagaatggc

SEQ ID NO: 5197004 - DNA, 25 bp, Homo sapien
tggaccgctcccgtatcgagcatcc

SEQ ID NO: 5197005 - DNA, 25 bp, Homo sapien
aaaggtcggcagacatgtgctcctg

SEQ ID NO: 5197006 - DNA, 25 bp, Homo sapien
ggtgatataaatgagcactgccctg

SEQ ID NO: 5197007 - DNA, 25 bp, Homo sapien
tggtgatataaatgagcactgccct

SEQ ID NO: 5197008 - DNA, 25 bp, Homo sapien
tgggccagaacctcctacaatctgc

SEQ ID NO: 5197009 - DNA, 25 bp, Homo sapien
tgagtgttccaggtgagttcactgg

SEQ ID NO: 5197010 - DNA, 25 bp, Homo sapien
tacaatctgctcaagacctagaggt

SEQ ID NO: 5197011 - DNA, 25 bp, Homo sapien
cactagtggctactctagggcctgc

SEQ ID NO: 5197012 - DNA, 25 bp, Homo sapien
cttgctacatggctttcacagttga

SEQ ID NO: 5197013 - DNA, 25 bp, Homo sapien
ttttcttcttgctacatggctttca

SEQ ID NO: 5197014 - DNA, 25 bp, Homo sapien
ttcttgctacatggctttcacagtt

SEQ ID NO: 5197015 - DNA, 25 bp, Homo sapien
tcttcttgctacatggctttcacag

SEQ ID NO: 5197016 - DNA, 25 bp, Homo sapien
tgttgagatccagttagttcttcca

SEQ ID NO: 5197017 - DNA, 25 bp, Homo sapien
tggtttcggtctttggatctgtcct

SEQ ID NO: 5197018 - DNA, 25 bp, Homo sapien
taagaagatttcctatggggatggg

SEQ ID NO: 5197019 - DNA, 25 bp, Homo sapien
cttgagcaagtgaccctttatcccc

SEQ ID NO: 5197020 - DNA, 25 bp, Homo sapien
cccgtgttcatcattttggcgaatt

SEQ ID NO: 5197021 - DNA, 25 bp, Homo sapien
cctcttttcccgtgttcatcatttt

SEQ ID NO: 5197022 - DNA, 25 bp, Homo sapien
tttcccgtgttcatcattttggcga

SEQ ID NO: 5197023 - DNA, 25 bp, Homo sapien
ctcttttcccgtgttcatcattttg

SEQ ID NO: 5197024 - DNA, 25 bp, Homo sapien
tgaacagtatccattttcttgatgt

SEQ ID NO: 5197025 - DNA, 25 bp, Homo sapien
ctttttgaacagtatccattttctt

SEQ ID NO: 5197026 - DNA, 25 bp, Homo sapien
ttgaacagtatccattttcttgatg

SEQ ID NO: 5197027 - DNA, 25 bp, Homo sapien
gccatggttaacatttgtggggcat

SEQ ID NO: 5197028 - DNA, 25 bp, Homo sapien
cagttttgccatggttaacatttgt

SEQ ID NO: 5197029 - DNA, 25 bp, Homo sapien
gttttgccatggttaacatttgtgg

SEQ ID NO: 5197030 - DNA, 25 bp, Homo sapien
catggttaacatttgtggggcattc

SEQ ID NO: 5197031 - DNA, 25 bp, Homo sapien
ggcacttcagctgaacccgggtagc

SEQ ID NO: 5197032 - DNA, 25 bp, Homo sapien
gaaactatcagggatcttagaatgt

SEQ ID NO: 5197033 - DNA, 25 bp, Homo sapien
acttcagctgaacccgggtagcttt

SEQ ID NO: 5197034 - DNA, 25 bp, Homo sapien
gatcttagaatgtttaacatgctca

SEQ ID NO: 5197035 - DNA, 25 bp, Homo sapien
ctcttggagggtcaagggctcttgg

SEQ ID NO: 5197036 - DNA, 25 bp, Homo sapien
cttggagggtcaagggctcttggtt

SEQ ID NO: 5197037 - DNA, 25 bp, Homo sapien
tctcttggagggtcaagggctcttg

SEQ ID NO: 5197038 - DNA, 25 bp, Homo sapien
tcttggagggtcaagggctcttggt

SEQ ID NO: 5197039 - DNA, 25 bp, Homo sapien
ctccttctgtggcctaaatagtcac

SEQ ID NO: 5197040 - DNA, 25 bp, Homo sapien
cctccataggcacctgtgtcactgt

SEQ ID NO: 5197041 - DNA, 25 bp, Homo sapien
gtttctcttgggaccgcattgtgct

SEQ ID NO: 5197042 - DNA, 25 bp, Homo sapien
tcctccataggcacctgtgtcactg

SEQ ID NO: 5197043 - DNA, 25 bp, Homo sapien
tgtgctttaggggttctagcctaac

SEQ ID NO: 5197044 - DNA, 25 bp, Homo sapien
tacataaacacgaaactgacgcttt

SEQ ID NO: 5197045 - DNA, 25 bp, Homo sapien
atgacctctaagttggaaaacgtct

SEQ ID NO: 5197046 - DNA, 25 bp, Homo sapien
ttccctttaagcttcccacaaatga

SEQ ID NO: 5197047 - DNA, 25 bp, Homo sapien
taagttggaaaacgtcttggcataa

SEQ ID NO: 5197048 - DNA, 25 bp, Homo sapien
tcaggaagcagctttagcttacccc

SEQ ID NO: 5197049 - DNA, 25 bp, Homo sapien
tagcttacccccatcaagggcaaaa

SEQ ID NO: 5197050 - DNA, 25 bp, Homo sapien
tttgggccactctcaccatcgttct

SEQ ID NO: 5197051 - DNA, 25 bp, Homo sapien
ctctacaacagggaagctcttaacc

SEQ ID NO: 5197052 - DNA, 25 bp, Homo sapien
tcaaatgtccaagaagctcagctcc

SEQ ID NO: 5197053 - DNA, 25 bp, Homo sapien
gaatagttttgtccaagatcagtcc

SEQ ID NO: 5197054 - DNA, 25 bp, Homo sapien
aatagttttgtccaagatcagtcct

SEQ ID NO: 5197055 - DNA, 25 bp, Homo sapien
agttttgtccaagatcagtcctagc

SEQ ID NO: 5197056 - DNA, 25 bp, Homo sapien
tagttttgtccaagatcagtcctag

SEQ ID NO: 5197057 - DNA, 25 bp, Homo sapien
cttccagtctaactgtgatgagcac

SEQ ID NO: 5197058 - DNA, 25 bp, Homo sapien
ttccagtctaactgtgatgagcaca

SEQ ID NO: 5197059 - DNA, 25 bp, Homo sapien
cttcagtatgacttagccaattaat

SEQ ID NO: 5197060 - DNA, 25 bp, Homo sapien
ggttccagaagttgaaagacttcag

SEQ ID NO: 5197061 - DNA, 25 bp, Homo sapien
tgttgttctttggttccagaagttg

SEQ ID NO: 5197062 - DNA, 25 bp, Homo sapien
ttagccaattaataaacacgactag

SEQ ID NO: 5197063 - DNA, 25 bp, Homo sapien
tacgtaagcctcttatacaaaggca

SEQ ID NO: 5197064 - DNA, 25 bp, Homo sapien
gatgagtacgtaagcctcttataca

SEQ ID NO: 5197065 - DNA, 25 bp, Homo sapien
ctgatgagtacgtaagcctcttata

SEQ ID NO: 5197066 - DNA, 25 bp, Homo sapien
gagtacgtaagcctcttatacaaag

SEQ ID NO: 5197067 - DNA, 25 bp, Homo sapien
cacaagtgatactgcgggaacgagc

SEQ ID NO: 5197068 - DNA, 25 bp, Homo sapien
ctgcaggggcgtcaacacccacaag

SEQ ID NO: 5197069 - DNA, 25 bp, Homo sapien
tcagagcccatagctgcaggggcgt

SEQ ID NO: 5197070 - DNA, 25 bp, Homo sapien
ctgcgggaacgagctcagagcccat

SEQ ID NO: 5197071 - DNA, 25 bp, Homo sapien
cacttaagagtgattcgccactgag

SEQ ID NO: 5197072 - DNA, 25 bp, Homo sapien
tggtgaattatgagtcccttctgag

SEQ ID NO: 5197073 - DNA, 25 bp, Homo sapien
aatctggtaacctttggcatgaagc

SEQ ID NO: 5197074 - DNA, 25 bp, Homo sapien
catatcctagtgaatgatggagcac

SEQ ID NO: 5197075 - DNA, 25 bp, Homo sapien
cctaatattctcaggccaggaatcc

SEQ ID NO: 5197076 - DNA, 25 bp, Homo sapien
gccttaagtatttccgctttgccaa

SEQ ID NO: 5197077 - DNA, 25 bp, Homo sapien
gccttacaaactgacacgatcgaga

SEQ ID NO: 5197078 - DNA, 25 bp, Homo sapien
ctgtcgtaaagcagaagccggtaga

SEQ ID NO: 5197079 - DNA, 25 bp, Homo sapien
cacaaagagggatgggcggcggctg

SEQ ID NO: 5197080 - DNA, 25 bp, Homo sapien
ggctttccaaagcacacaaagaggg

SEQ ID NO: 5197081 - DNA, 25 bp, Homo sapien
cagctccgcggctttccaaagcaca

SEQ ID NO: 5197082 - DNA, 25 bp, Homo sapien
tccgcggctttccaaagcacacaaa

SEQ ID NO: 5197083 - DNA, 25 bp, Homo sapien
cgagttgcgacgtggaacacaggca

SEQ ID NO: 5197084 - DNA, 25 bp, Homo sapien
gggatgtcagcaggaactgccaagc

SEQ ID NO: 5197085 - DNA, 25 bp, Homo sapien
gatgtcagcaggaactgccaagccg

SEQ ID NO: 5197086 - DNA, 25 bp, Homo sapien
tgccaagccgcccttcgagttgcga

SEQ ID NO: 5197087 - DNA, 25 bp, Homo sapien
ggcaaggcgaaaacgaatcactttc

SEQ ID NO: 5197088 - DNA, 25 bp, Homo sapien
tcacggccaagagggcgcggtccac

SEQ ID NO: 5197089 - DNA, 25 bp, Homo sapien
actatcaaggcaagtagagatggcc

SEQ ID NO: 5197090 - DNA, 25 bp, Homo sapien
gggctttccatcacacataaggtga

SEQ ID NO: 5197091 - DNA, 25 bp, Homo sapien
tccaactcagcctttaattcacttt

SEQ ID NO: 5197092 - DNA, 25 bp, Homo sapien
tcttacgttccaactcagcctttaa

SEQ ID NO: 5197093 - DNA, 25 bp, Homo sapien
tacgttccaactcagcctttaattc

SEQ ID NO: 5197094 - DNA, 25 bp, Homo sapien
gctgcttcttacgttccaactcagc

SEQ ID NO: 5197095 - DNA, 25 bp, Homo sapien
ggggattctggagttagccccatgc

SEQ ID NO: 5197096 - DNA, 25 bp, Homo sapien
cttcttgcacaggagcaacagcttc

SEQ ID NO: 5197097 - DNA, 25 bp, Homo sapien
attctggagttagccccatgctttg

SEQ ID NO: 5197098 - DNA, 25 bp, Homo sapien
ggattctggagttagccccatgctt

SEQ ID NO: 5197099 - DNA, 25 bp, Homo sapien
cacacagttcgaattagatcaaaat

SEQ ID NO: 5197100 - DNA, 25 bp, Homo sapien
gataaaagctaaatgtgagaatgcc

SEQ ID NO: 5197101 - DNA, 25 bp, Homo sapien
tgtgagaatgccatcagacaaaccc

SEQ ID NO: 5197102 - DNA, 25 bp, Homo sapien
gaccttgcaaactcaattgatcctc

SEQ ID NO: 5197103 - DNA, 25 bp, Homo sapien
aaggagtacattctatattgaaaag

SEQ ID NO: 5197104 - DNA, 25 bp, Homo sapien
tatccatcctaagtcatgatacaaa

SEQ ID NO: 5197105 - DNA, 25 bp, Homo sapien
catggccttcatccgtatcctgtat

SEQ ID NO: 5197106 - DNA, 25 bp, Homo sapien
taaatactggacttgtaggcatatg

SEQ ID NO: 5197107 - DNA, 25 bp, Homo sapien
tttgggtgaaaaatgcaaacaggca

SEQ ID NO: 5197108 - DNA, 25 bp, Homo sapien
aacagcatgccttctagacattatg

SEQ ID NO: 5197109 - DNA, 25 bp, Homo sapien
gttcattagtttccagcaatttggg

SEQ ID NO: 5197110 - DNA, 25 bp, Homo sapien
caatttagagaaatgactgcagcta

SEQ ID NO: 5197111 - DNA, 25 bp, Homo sapien
acggagaggttgctcagcttatgac

SEQ ID NO: 5197112 - DNA, 25 bp, Homo sapien
ggttgctcagcttatgacgtttcaa

SEQ ID NO: 5197113 - DNA, 25 bp, Homo sapien
ggagaggttgctcagcttatgacgt

SEQ ID NO: 5197114 - DNA, 25 bp, Homo sapien
agaggttgctcagcttatgacgttt

SEQ ID NO: 5197115 - DNA, 25 bp, Homo sapien
ctaaatagtgaaatagacaggtatc

SEQ ID NO: 5197116 - DNA, 25 bp, Homo sapien
taaatagtgaaatagacaggtatcc

SEQ ID NO: 5197117 - DNA, 25 bp, Homo sapien
aaatagtgaaatagacaggtatccg

SEQ ID NO: 5197118 - DNA, 25 bp, Homo sapien
acttggagtgctcacagatttggag

SEQ ID NO: 5197119 - DNA, 25 bp, Homo sapien
tccagcttcacttggagtgctcaca

SEQ ID NO: 5197120 - DNA, 25 bp, Homo sapien
tagatcccacggcgccatctccaga

SEQ ID NO: 5197121 - DNA, 25 bp, Homo sapien
ttcacttggagtgctcacagatttg

SEQ ID NO: 5197122 - DNA, 25 bp, Homo sapien
gcatcttcaggcacatagagtacaa

SEQ ID NO: 5197123 - DNA, 25 bp, Homo sapien
tacaattccaagtacaaagcttgag

SEQ ID NO: 5197124 - DNA, 25 bp, Homo sapien
aaatcaaaaagtagctggaaaccat

SEQ ID NO: 5197125 - DNA, 25 bp, Homo sapien
gagaagtaaactgatcaaaaatgga

SEQ ID NO: 5197126 - DNA, 25 bp, Homo sapien
taggcttcctatggttaaagatgca

SEQ ID NO: 5197127 - DNA, 25 bp, Homo sapien
gatgcaagcatacaacccagaatag

SEQ ID NO: 5197128 - DNA, 25 bp, Homo sapien
tgtaggacaaccatgaagcattagc

SEQ ID NO: 5197129 - DNA, 25 bp, Homo sapien
aaaaaggccataagttagtcaagca

SEQ ID NO: 5197130 - DNA, 25 bp, Homo sapien
caaatcggaatctgagtgaagctga

SEQ ID NO: 5197131 - DNA, 25 bp, Homo sapien
aaatcggaatctgagtgaagctgaa

SEQ ID NO: 5197132 - DNA, 25 bp, Homo sapien
cctttgtatacgtgacaatttctcg

SEQ ID NO: 5197133 - DNA, 25 bp, Homo sapien
tctcgaggaggaaagtcgacttgcg

SEQ ID NO: 5197134 - DNA, 25 bp, Homo sapien
tgggttgagccataactggagtctg

SEQ ID NO: 5197135 - DNA, 25 bp, Homo sapien
aagtcgacttgcgtgattttagcca

SEQ ID NO: 5197136 - DNA, 25 bp, Homo sapien
gctactagctctgtgatgctcgata

SEQ ID NO: 5197137 - DNA, 25 bp, Homo sapien
tggtttacaatcatagctactagct

SEQ ID NO: 5197138 - DNA, 25 bp, Homo sapien
cacactatgcctgataagtggtagg

SEQ ID NO: 5197139 - DNA, 25 bp, Homo sapien
gagaaagcacatcgtagaatcagtc

SEQ ID NO: 5197140 - DNA, 25 bp, Homo sapien
tgggaaccaaccaggcaaagtttga

SEQ ID NO: 5197141 - DNA, 25 bp, Homo sapien
taagtcacggatttctgtaggcatg

SEQ ID NO: 5197142 - DNA, 25 bp, Homo sapien
gctgtctgttacactccaactgtga

SEQ ID NO: 5197143 - DNA, 25 bp, Homo sapien
cactgtattaacgtgatgggtaagc

SEQ ID NO: 5197144 - DNA, 25 bp, Homo sapien
tagcacccttacataggtcttgtta

SEQ ID NO: 5197145 - DNA, 25 bp, Homo sapien
tcagatatgctgattagtctttcaa

SEQ ID NO: 5197146 - DNA, 25 bp, Homo sapien
gggttttattttcgcagtattagca

SEQ ID NO: 5197147 - DNA, 25 bp, Homo sapien
tatattcttataggtcctctgaggg

SEQ ID NO: 5197148 - DNA, 25 bp, Homo sapien
agcatgccaattatagcttttgtgc

SEQ ID NO: 5197149 - DNA, 25 bp, Homo sapien
gaacacgtaaaagaattcttagtga

SEQ ID NO: 5197150 - DNA, 25 bp, Homo sapien
gacacttccttacaaagcatgccaa

SEQ ID NO: 5197151 - DNA, 25 bp, Homo sapien
ttagtgatcgccactctcttgcaca

SEQ ID NO: 5197152 - DNA, 25 bp, Homo sapien
aacgcagccagagcaatcaacctgc

SEQ ID NO: 5197153 - DNA, 25 bp, Homo sapien
gccagagcaatcaacctgccaaaca

SEQ ID NO: 5197154 - DNA, 25 bp, Homo sapien
gagcaatcaacctgccaaacattca

SEQ ID NO: 5197155 - DNA, 25 bp, Homo sapien
agccctttctccgtcaacgcagcca

SEQ ID NO: 5197156 - DNA, 25 bp, Homo sapien
atacgacgtacacaaaagaatggtc

SEQ ID NO: 5197157 - DNA, 25 bp, Homo sapien
tggtcaagaatgggaaccagctgcc

SEQ ID NO: 5197158 - DNA, 25 bp, Homo sapien
atggtcaagaatgggaaccagctgc

SEQ ID NO: 5197159 - DNA, 25 bp, Homo sapien
tcttcaggttcaataggtggtttag

SEQ ID NO: 5197160 - DNA, 25 bp, Homo sapien
caggttcaataggtggtttaggagc

SEQ ID NO: 5197161 - DNA, 25 bp, Homo sapien
tcaataggtggtttaggagccacta

SEQ ID NO: 5197162 - DNA, 25 bp, Homo sapien
tttaggagccactacatcatcatct

SEQ ID NO: 5197163 - DNA, 25 bp, Homo sapien
caattcttgtagaatggtcaaagaa

SEQ ID NO: 5197164 - DNA, 25 bp, Homo sapien
gttaatctgctcagaaagagctctt

SEQ ID NO: 5197165 - DNA, 25 bp, Homo sapien
acttaaaaattcctcagagtgcaag

SEQ ID NO: 5197166 - DNA, 25 bp, Homo sapien
aaaattcctcagagtgcaagatttg

SEQ ID NO: 5197167 - DNA, 25 bp, Homo sapien
gagatgaccaatccaaacaactaac

SEQ ID NO: 5197168 - DNA, 25 bp, Homo sapien
tgctttgaccaacgttcgtcaaaaa

SEQ ID NO: 5197169 - DNA, 25 bp, Homo sapien
cgatgctttgaccaacgttcgtcaa

SEQ ID NO: 5197170 - DNA, 25 bp, Homo sapien
ctgagatgaccaatccaaacaacta

SEQ ID NO: 5197171 - DNA, 25 bp, Homo sapien
ctcagaagaatcaagaagaaaagaa

SEQ ID NO: 5197172 - DNA, 25 bp, Homo sapien
tgctcagaagaatcaagaagaaaag

SEQ ID NO: 5197173 - DNA, 25 bp, Homo sapien
agaagaatcaagaagaaaagaaatg

SEQ ID NO: 5197174 - DNA, 25 bp, Homo sapien
ctgctcagaagaatcaagaagaaaa

SEQ ID NO: 5197175 - DNA, 25 bp, Homo sapien
catattccatacaagggccacacca

SEQ ID NO: 5197176 - DNA, 25 bp, Homo sapien
ggccacaccatcaggctcatgaggg

SEQ ID NO: 5197177 - DNA, 25 bp, Homo sapien
attgttgttataggaagccacgagt

SEQ ID NO: 5197178 - DNA, 25 bp, Homo sapien
taggaagccacgagtaactccggat

SEQ ID NO: 5197179 - DNA, 25 bp, Homo sapien
taactagccctgcattagactctga

SEQ ID NO: 5197180 - DNA, 25 bp, Homo sapien
gagtacacgctagtttaattcaagt

SEQ ID NO: 5197181 - DNA, 25 bp, Homo sapien
tgcctgacaagttctaaaaatcaat

SEQ ID NO: 5197182 - DNA, 25 bp, Homo sapien
gactctgacagtaatctaacagtag

SEQ ID NO: 5197183 - DNA, 25 bp, Homo sapien
ttcttttattgctacggttatccca

SEQ ID NO: 5197184 - DNA, 25 bp, Homo sapien
ggcctgaatatgtaccaccaacaac

SEQ ID NO: 5197185 - DNA, 25 bp, Homo sapien
tattgctacggttatcccaaagcac

SEQ ID NO: 5197186 - DNA, 25 bp, Homo sapien
acaagatttggatgaaattttgcaa

SEQ ID NO: 5197187 - DNA, 25 bp, Homo sapien
ggatgggaaagcatgtccagactcc

SEQ ID NO: 5197188 - DNA, 25 bp, Homo sapien
tgggaaagcatgtccagactccatg

SEQ ID NO: 5197189 - DNA, 25 bp, Homo sapien
ccatcagtagagatgctaatcagat

SEQ ID NO: 5197190 - DNA, 25 bp, Homo sapien
tgtgagcattttgtgttccaacaac

SEQ ID NO: 5197191 - DNA, 25 bp, Homo sapien
catgctgtgtacacagaaccttctt

SEQ ID NO: 5197192 - DNA, 25 bp, Homo sapien
gcttttgactgtttatgaaccaact

SEQ ID NO: 5197193 - DNA, 25 bp, Homo sapien
tgtttatgaaccaactccatgctat

SEQ ID NO: 5197194 - DNA, 25 bp, Homo sapien
tgctgtgtacacagaaccttcttca

SEQ ID NO: 5197195 - DNA, 25 bp, Homo sapien
ggcatgtgcatattgtatttgtaac

SEQ ID NO: 5197196 - DNA, 25 bp, Homo sapien
actgaatgttcctgcctatcactaa

SEQ ID NO: 5197197 - DNA, 25 bp, Homo sapien
taacttacgtgagtacatgcacaca

SEQ ID NO: 5197198 - DNA, 25 bp, Homo sapien
taggtcaatattggcatgtgcatat

SEQ ID NO: 5197199 - DNA, 25 bp, Homo sapien
cttagttgtccaaagctttactgtc

SEQ ID NO: 5197200 - DNA, 25 bp, Homo sapien
gttgtccaaagctttactgtccagt

SEQ ID NO: 5197201 - DNA, 25 bp, Homo sapien
ttggtccttgatgcccctcaaacat

SEQ ID NO: 5197202 - DNA, 25 bp, Homo sapien
gtccaaagctttactgtccagtcaa

SEQ ID NO: 5197203 - DNA, 25 bp, Homo sapien
tgctatgcgagatactcagggcttt

SEQ ID NO: 5197204 - DNA, 25 bp, Homo sapien
tacatgctcgaaaagactgaagtgg

SEQ ID NO: 5197205 - DNA, 25 bp, Homo sapien
tgacaactgtatgaggtgctatgcg

SEQ ID NO: 5197206 - DNA, 25 bp, Homo sapien
tctatcacaggaggtaatgttgcct

SEQ ID NO: 5197207 - DNA, 25 bp, Homo sapien
tctttgtgaccttgaactcagcaat

SEQ ID NO: 5197208 - DNA, 25 bp, Homo sapien
caacatcattagtcgtgagaggaat

SEQ ID NO: 5197209 - DNA, 25 bp, Homo sapien
tgtgtccacagtgcttacaatagcc

SEQ ID NO: 5197210 - DNA, 25 bp, Homo sapien
tgtatctgatacatcactgtgtcca

SEQ ID NO: 5197211 - DNA, 25 bp, Homo sapien
caagaaaattagataggaaaggaat

SEQ ID NO: 5197212 - DNA, 25 bp, Homo sapien
tgtggtgggctaatctgagaacagc

SEQ ID NO: 5197213 - DNA, 25 bp, Homo sapien
catagcagatgctcactggacagtg

SEQ ID NO: 5197214 - DNA, 25 bp, Homo sapien
cacgagaacttctgacaggtggaga

SEQ ID NO: 5197215 - DNA, 25 bp, Homo sapien
gaaaagttgattcttagcacagtcc

SEQ ID NO: 5197216 - DNA, 25 bp, Homo sapien
gattccacaaatccaatctccccat

SEQ ID NO: 5197217 - DNA, 25 bp, Homo sapien
taacatcataaacatagtctgcatt

SEQ ID NO: 5197218 - DNA, 25 bp, Homo sapien
ctctgtgtcattattgagattccac

SEQ ID NO: 5197219 - DNA, 25 bp, Homo sapien
gtgggtaggtgaccacataacatca

SEQ ID NO: 5197220 - DNA, 25 bp, Homo sapien
gattaagagcaggattaccctccac

SEQ ID NO: 5197221 - DNA, 25 bp, Homo sapien
gattaccctccacagaaatgctggc

SEQ ID NO: 5197222 - DNA, 25 bp, Homo sapien
attaagagcaggattaccctccaca

SEQ ID NO: 5197223 - DNA, 25 bp, Homo sapien
ttaccctccacagaaatgctggcag

SEQ ID NO: 5197224 - DNA, 25 bp, Homo sapien
cctctgcatcagctcggtttgcatt

SEQ ID NO: 5197225 - DNA, 25 bp, Homo sapien
cccattcatcattgcggggaacagc

SEQ ID NO: 5197226 - DNA, 25 bp, Homo sapien
catcagctcggtttgcattaatttc

SEQ ID NO: 5197227 - DNA, 25 bp, Homo sapien
caggtattcgggtagctgcttcctc

SEQ ID NO: 5197228 - DNA, 25 bp, Homo sapien
caaaggatgtcagaatgaacatgga

SEQ ID NO: 5197229 - DNA, 25 bp, Homo sapien
tgtatgcatactacggctaaggaga

SEQ ID NO: 5197230 - DNA, 25 bp, Homo sapien
tccttgctgcattaaacccatggtt

SEQ ID NO: 5197231 - DNA, 25 bp, Homo sapien
gcatgcaaatagtctcaggatctac

SEQ ID NO: 5197232 - DNA, 25 bp, Homo sapien
cctacatataaagaatgcggcacag

SEQ ID NO: 5197233 - DNA, 25 bp, Homo sapien
gatgcttcagcaagaatcagagttt

SEQ ID NO: 5197234 - DNA, 25 bp, Homo sapien
gataccccttaattgagtagagctg

SEQ ID NO: 5197235 - DNA, 25 bp, Homo sapien
gacttgtagacaatgctgtggcaac

SEQ ID NO: 5197236 - DNA, 25 bp, Homo sapien
gaactgtgatgcacttctagtcaac

SEQ ID NO: 5197237 - DNA, 25 bp, Homo sapien
tgaatgggcaaaggtatacatcgca

SEQ ID NO: 5197238 - DNA, 25 bp, Homo sapien
gaagctttatcaacactgacagtct

SEQ ID NO: 5197239 - DNA, 25 bp, Homo sapien
tagtcaacctaatcttgctagaagc

SEQ ID NO: 5197240 - DNA, 25 bp, Homo sapien
ctgatttcaggagtcacagtgtcag

SEQ ID NO: 5197241 - DNA, 25 bp, Homo sapien
ctgaatttctaggagcctgttttta

SEQ ID NO: 5197242 - DNA, 25 bp, Homo sapien
tgaatttctaggagcctgtttttaa

SEQ ID NO: 5197243 - DNA, 25 bp, Homo sapien
tatctgaatttctaggagcctgttt

SEQ ID NO: 5197244 - DNA, 25 bp, Homo sapien
tctgaatttctaggagcctgttttt

SEQ ID NO: 5197245 - DNA, 25 bp, Homo sapien
gcccattatgtgtgtatcttcccaa

SEQ ID NO: 5197246 - DNA, 25 bp, Homo sapien
gacctggcttgtaccagcccaatga

SEQ ID NO: 5197247 - DNA, 25 bp, Homo sapien
tgttgtttgcaattggccatggtgg

SEQ ID NO: 5197248 - DNA, 25 bp, Homo sapien
gcaaattggctacaaaccagtttcc

SEQ ID NO: 5197249 - DNA, 25 bp, Homo sapien
cacctggaagatcgaactgggcaga

SEQ ID NO: 5197250 - DNA, 25 bp, Homo sapien
cagtgcccagcaacctaagattcac

SEQ ID NO: 5197251 - DNA, 25 bp, Homo sapien
ccacctggaagatcgaactgggcag

SEQ ID NO: 5197252 - DNA, 25 bp, Homo sapien
cacagtgcccagcaacctaagattc

SEQ ID NO: 5197253 - DNA, 25 bp, Homo sapien
gatgtcataaagtagtcctgctgag

SEQ ID NO: 5197254 - DNA, 25 bp, Homo sapien
gagtgattcctaagtgggtccaggc

SEQ ID NO: 5197255 - DNA, 25 bp, Homo sapien
gcagcatacctgcaaacggtgatgt

SEQ ID NO: 5197256 - DNA, 25 bp, Homo sapien
tacacaagtgttcctgtgaagccct

SEQ ID NO: 5197257 - DNA, 25 bp, Homo sapien
agttgtctcatcttcggccagtggg

SEQ ID NO: 5197258 - DNA, 25 bp, Homo sapien
ttggctctgggtacagtagtcctcc

SEQ ID NO: 5197259 - DNA, 25 bp, Homo sapien
gactacggatacatgctactgcacc

SEQ ID NO: 5197260 - DNA, 25 bp, Homo sapien
tctgcagggagtatattccaagacc

SEQ ID NO: 5197261 - DNA, 25 bp, Homo sapien
gggtgggtcacgagatcaggagatt

SEQ ID NO: 5197262 - DNA, 25 bp, Homo sapien
ccatcctggctaacacggtgaaacc

SEQ ID NO: 5197263 - DNA, 25 bp, Homo sapien
gagaccatcctggctaacacggtga

SEQ ID NO: 5197264 - DNA, 25 bp, Homo sapien
gaccatcctggctaacacggtgaaa

SEQ ID NO: 5197265 - DNA, 25 bp, Homo sapien
gcgtggtcgctcgtgcctgtattct

SEQ ID NO: 5197266 - DNA, 25 bp, Homo sapien
tactaaagctctagaaattgtgcct

SEQ ID NO: 5197267 - DNA, 25 bp, Homo sapien
tacaatttttactcatcacgcagct

SEQ ID NO: 5197268 - DNA, 25 bp, Homo sapien
catgtctggtttggtgtccactgca

SEQ ID NO: 5197269 - DNA, 25 bp, Homo sapien
cacacatggcattatttggtcaagt

SEQ ID NO: 5197270 - DNA, 25 bp, Homo sapien
taaatgctcaccttactgctctagg

SEQ ID NO: 5197271 - DNA, 25 bp, Homo sapien
cataattgcattgtggtctaaggac

SEQ ID NO: 5197272 - DNA, 25 bp, Homo sapien
tattatcctacagtgcaaaagctgc

SEQ ID NO: 5197273 - DNA, 25 bp, Homo sapien
tctctctcagatagggttttcactc

SEQ ID NO: 5197274 - DNA, 25 bp, Homo sapien
catcatatgctagaaactgagaagg

SEQ ID NO: 5197275 - DNA, 25 bp, Homo sapien
taaagaaagctaggacattttcact

SEQ ID NO: 5197276 - DNA, 25 bp, Homo sapien
gaactcttttctaatcatcatatgc

SEQ ID NO: 5197277 - DNA, 25 bp, Homo sapien
ctttttattccgtttgctcactgtc

SEQ ID NO: 5197278 - DNA, 25 bp, Homo sapien
gaattcttgactgacaggttgtttt

SEQ ID NO: 5197279 - DNA, 25 bp, Homo sapien
gccttacggcatccatggtttctga

SEQ ID NO: 5197280 - DNA, 25 bp, Homo sapien
ttatgtgcctaaatgttgatctctt

SEQ ID NO: 5197281 - DNA, 25 bp, Homo sapien
tctaggggttaaaatatatgtctta

SEQ ID NO: 5197282 - DNA, 25 bp, Homo sapien
ttcttagtgatttatctaggggtta

SEQ ID NO: 5197283 - DNA, 25 bp, Homo sapien
ttccagtaagttccagtaaaatata

SEQ ID NO: 5197284 - DNA, 25 bp, Homo sapien
ttatctaggggttaaaatatatgtc

SEQ ID NO: 5197285 - DNA, 25 bp, Homo sapien
tacctcaaaagctccatatatgtcc

SEQ ID NO: 5197286 - DNA, 25 bp, Homo sapien
gcatgtccacaacagatatgtacac

SEQ ID NO: 5197287 - DNA, 25 bp, Homo sapien
tgtgcataccatatgaccaccgggt

SEQ ID NO: 5197288 - DNA, 25 bp, Homo sapien
cacccatgtatatgtctctaaagac

SEQ ID NO: 5197289 - DNA, 25 bp, Homo sapien
taattgataatctttatgagtctac

SEQ ID NO: 5197290 - DNA, 25 bp, Homo sapien
aattactttcatatgtgctaagtgc

SEQ ID NO: 5197291 - DNA, 25 bp, Homo sapien
gataatctttatgagtctactacat

SEQ ID NO: 5197292 - DNA, 25 bp, Homo sapien
catatgtgctaagtgcagaaaattt

SEQ ID NO: 5197293 - DNA, 25 bp, Homo sapien
tatagctttttacctggcactgcgg

SEQ ID NO: 5197294 - DNA, 25 bp, Homo sapien
tctgacaaagctgagggaggtgttc

SEQ ID NO: 5197295 - DNA, 25 bp, Homo sapien
gacggtcaaggctacagcaagctgt

SEQ ID NO: 5197296 - DNA, 25 bp, Homo sapien
ttgggacaagctgcccctgggtaat

SEQ ID NO: 5197297 - DNA, 25 bp, Homo sapien
ttaaatttccccctcgccagagaca

SEQ ID NO: 5197298 - DNA, 25 bp, Homo sapien
tctccatggtatttcactcctattt

SEQ ID NO: 5197299 - DNA, 25 bp, Homo sapien
tcttctgtgtccttcgctttgtatt

SEQ ID NO: 5197300 - DNA, 25 bp, Homo sapien
ctatagaagattagaagctagttct

SEQ ID NO: 5197301 - DNA, 25 bp, Homo sapien
acagctaattaattaagttagatcc

SEQ ID NO: 5197302 - DNA, 25 bp, Homo sapien
gctacaatatttgtagccctaaata

SEQ ID NO: 5197303 - DNA, 25 bp, Homo sapien
cattatataagaattatctaggtag

SEQ ID NO: 5197304 - DNA, 25 bp, Homo sapien
tattttacaacttcgaagtttcaca

SEQ ID NO: 5197305 - DNA, 25 bp, Homo sapien
tctgcaagccatggaacaatactaa

SEQ ID NO: 5197306 - DNA, 25 bp, Homo sapien
gagagacataatctgatctgtgcta

SEQ ID NO: 5197307 - DNA, 25 bp, Homo sapien
tacaaagatacaggtgagggcccgg

SEQ ID NO: 5197308 - DNA, 25 bp, Homo sapien
tttgaatgctaaacagaagagtctg

SEQ ID NO: 5197309 - DNA, 25 bp, Homo sapien
aagtgatatctccaattgaagtagg

SEQ ID NO: 5197310 - DNA, 25 bp, Homo sapien
taaagtaggagtttcacaagaagga

SEQ ID NO: 5197311 - DNA, 25 bp, Homo sapien
gacagatacaaatttgtgcaggtgg

SEQ ID NO: 5197312 - DNA, 25 bp, Homo sapien
caggtggtagatgaattccttgtat

SEQ ID NO: 5197313 - DNA, 25 bp, Homo sapien
gagctacgatcacccgcggctgagg

SEQ ID NO: 5197314 - DNA, 25 bp, Homo sapien
cggaagtgaccgcacagtctgacat

SEQ ID NO: 5197315 - DNA, 25 bp, Homo sapien
ggaaggacgaatcaacccgcgcgct

SEQ ID NO: 5197316 - DNA, 25 bp, Homo sapien
ctgaggaaggacgaatcaacccgcg

SEQ ID NO: 5197317 - DNA, 25 bp, Homo sapien
agaaggcgcagaaccccaagcagtt

SEQ ID NO: 5197318 - DNA, 25 bp, Homo sapien
tggaacccaggctacagcccgaaag

SEQ ID NO: 5197319 - DNA, 25 bp, Homo sapien
agagttccgcgcttccggtcccaag

SEQ ID NO: 5197320 - DNA, 25 bp, Homo sapien
ccgaaagttctaggcgggcattgtc

SEQ ID NO: 5197321 - DNA, 25 bp, Homo sapien
gcagcaatgcgctagctcagaagtt

SEQ ID NO: 5197322 - DNA, 25 bp, Homo sapien
gaagtcagtcgagatccaagtggga

SEQ ID NO: 5197323 - DNA, 25 bp, Homo sapien
taacgagacgactacgaagtcagtc

SEQ ID NO: 5197324 - DNA, 25 bp, Homo sapien
taaagtgtgacagattaacgagacg

SEQ ID NO: 5197325 - DNA, 25 bp, Homo sapien
tgataaaagcaacaaaggccagcga

SEQ ID NO: 5197326 - DNA, 25 bp, Homo sapien
tttagccgaatgttgtggcgcatgc

SEQ ID NO: 5197327 - DNA, 25 bp, Homo sapien
tgccctgtaaagagatgataaaagc

SEQ ID NO: 5197328 - DNA, 25 bp, Homo sapien
tgtagagctcacacaacagcttgtc

SEQ ID NO: 5197329 - DNA, 25 bp, Homo sapien
tagttcaattgctgtgttggtgtta

SEQ ID NO: 5197330 - DNA, 25 bp, Homo sapien
ccactgcactcttatattctaccaa

SEQ ID NO: 5197331 - DNA, 25 bp, Homo sapien
caattgctgtgttggtgttacattt

SEQ ID NO: 5197332 - DNA, 25 bp, Homo sapien
tccactgcactcttatattctacca

SEQ ID NO: 5197333 - DNA, 25 bp, Homo sapien
cccaaagagttgatgggtatactca

SEQ ID NO: 5197334 - DNA, 25 bp, Homo sapien
caaagagttgatgggtatactcagg

SEQ ID NO: 5197335 - DNA, 25 bp, Homo sapien
gttgatgggtatactcaggaaagaa

SEQ ID NO: 5197336 - DNA, 25 bp, Homo sapien
catccccaaagagttgatgggtata

SEQ ID NO: 5197337 - DNA, 25 bp, Homo sapien
tgtcccctacccatcttagaagagt

SEQ ID NO: 5197338 - DNA, 25 bp, Homo sapien
tccaaatttctgtctaggctacgaa

SEQ ID NO: 5197339 - DNA, 25 bp, Homo sapien
gctacgaaaatacggagcactgtcc

SEQ ID NO: 5197340 - DNA, 25 bp, Homo sapien
catgcttgggtcatacagttcaggg

SEQ ID NO: 5197341 - DNA, 25 bp, Homo sapien
atagtataacaggatctttagaccc

SEQ ID NO: 5197342 - DNA, 25 bp, Homo sapien
aatatagtataacaggatctttaga

SEQ ID NO: 5197343 - DNA, 25 bp, Homo sapien
tgacaggctaccagcaatatagtat

SEQ ID NO: 5197344 - DNA, 25 bp, Homo sapien
caggctaccagcaatatagtataac

SEQ ID NO: 5197345 - DNA, 25 bp, Homo sapien
ttagatgcatattcaacacggaaca

SEQ ID NO: 5197346 - DNA, 25 bp, Homo sapien
tttagatgcatattcaacacggaac

SEQ ID NO: 5197347 - DNA, 25 bp, Homo sapien
tagatgcatattcaacacggaacat

SEQ ID NO: 5197348 - DNA, 25 bp, Homo sapien
ctgcacccagcccaaacctttaatt

SEQ ID NO: 5197349 - DNA, 25 bp, Homo sapien
aaaagcactggcattataggcacaa

SEQ ID NO: 5197350 - DNA, 25 bp, Homo sapien
ttcagcctccaaaagcactggcatt

SEQ ID NO: 5197351 - DNA, 25 bp, Homo sapien
cccaagtagctgagggtctcactat

SEQ ID NO: 5197352 - DNA, 25 bp, Homo sapien
gacaggcataggacaacagttatag

SEQ ID NO: 5197353 - DNA, 25 bp, Homo sapien
tcaaaattcagcatggcaaactcca

SEQ ID NO: 5197354 - DNA, 25 bp, Homo sapien
tctcatcataggtaagactgtgggt

SEQ ID NO: 5197355 - DNA, 25 bp, Homo sapien
aatttggagagttcatacagccttc

SEQ ID NO: 5197356 - DNA, 25 bp, Homo sapien
tcaaggacaaccagatgaaaaaatc

SEQ ID NO: 5197357 - DNA, 25 bp, Homo sapien
ggtgcaactagagcattcagcttgg

SEQ ID NO: 5197358 - DNA, 25 bp, Homo sapien
taagcagatgttatggctgctgacc

SEQ ID NO: 5197359 - DNA, 25 bp, Homo sapien
ctggcattacaagcacagagcagga

SEQ ID NO: 5197360 - DNA, 25 bp, Homo sapien
tcatgacagtctgaactggccaagg

SEQ ID NO: 5197361 - DNA, 25 bp, Homo sapien
gacgtaaacacacagcgaattggaa

SEQ ID NO: 5197362 - DNA, 25 bp, Homo sapien
ggcaggtgacctgataccaagtaca

SEQ ID NO: 5197363 - DNA, 25 bp, Homo sapien
tcacaactagatgggtcacaattcc

SEQ ID NO: 5197364 - DNA, 25 bp, Homo sapien
aaatcattcgtgtttgtgcaaaatc

SEQ ID NO: 5197365 - DNA, 25 bp, Homo sapien
tgagtaggtatgaagtaaggttccg

SEQ ID NO: 5197366 - DNA, 25 bp, Homo sapien
gaatgatttgtctaattttgccctc

SEQ ID NO: 5197367 - DNA, 25 bp, Homo sapien
taaggttccgaatggcttgaaatca

SEQ ID NO: 5197368 - DNA, 25 bp, Homo sapien
tgaagcctttcatgatattctcgaa

SEQ ID NO: 5197369 - DNA, 25 bp, Homo sapien
tcatccacgtcaataaagctagcag

SEQ ID NO: 5197370 - DNA, 25 bp, Homo sapien
aataaaccacatcaaaaaggtctga

SEQ ID NO: 5197371 - DNA, 25 bp, Homo sapien
ctcgaaagcctctacatgtcatgtc

SEQ ID NO: 5197372 - DNA, 25 bp, Homo sapien
cagctctattctcaaggtctcccaa

SEQ ID NO: 5197373 - DNA, 25 bp, Homo sapien
gacctctttacatcacttcagtgca

SEQ ID NO: 5197374 - DNA, 25 bp, Homo sapien
gggccctaacggacaacagcattta

SEQ ID NO: 5197375 - DNA, 25 bp, Homo sapien
tgtgcagcaacttggataaatcaga

SEQ ID NO: 5197376 - DNA, 25 bp, Homo sapien
caagctactctgtgagggcccaatg

SEQ ID NO: 5197377 - DNA, 25 bp, Homo sapien
tgtgagggcccaatgggtacacctg

SEQ ID NO: 5197378 - DNA, 25 bp, Homo sapien
tgggtacacctgctatgttctgaat

SEQ ID NO: 5197379 - DNA, 25 bp, Homo sapien
gtgtcagcaagctactctgtgaggg

SEQ ID NO: 5197380 - DNA, 25 bp, Homo sapien
tgcagataaaacagaaagccaagca

SEQ ID NO: 5197381 - DNA, 25 bp, Homo sapien
acagaaagccaagcaggtcaattac

SEQ ID NO: 5197382 - DNA, 25 bp, Homo sapien
agataaaacagaaagccaagcaggt

SEQ ID NO: 5197383 - DNA, 25 bp, Homo sapien
ataaaacagaaagccaagcaggtca

SEQ ID NO: 5197384 - DNA, 25 bp, Homo sapien
tagtaattatagactgtcatgtagc

SEQ ID NO: 5197385 - DNA, 25 bp, Homo sapien
gagcgtagctccatccttattatac

SEQ ID NO: 5197386 - DNA, 25 bp, Homo sapien
tttgtctgggtacacatagtaatta

SEQ ID NO: 5197387 - DNA, 25 bp, Homo sapien
tgtagcctacggtcgcaaagagcgt

SEQ ID NO: 5197388 - DNA, 25 bp, Homo sapien
aaatcagtacatagcccatgaataa

SEQ ID NO: 5197389 - DNA, 25 bp, Homo sapien
taatcttctacactgtttcaaaggg

SEQ ID NO: 5197390 - DNA, 25 bp, Homo sapien
tttaaaacctgcagatcactatagt

SEQ ID NO: 5197391 - DNA, 25 bp, Homo sapien
gacaaggcacgtgttatactgccaa

SEQ ID NO: 5197392 - DNA, 25 bp, Homo sapien
actgtaggaaattcagtgtagtatc

SEQ ID NO: 5197393 - DNA, 25 bp, Homo sapien
tcagtgtagtatctatgaactgttt

SEQ ID NO: 5197394 - DNA, 25 bp, Homo sapien
tagtatctatgaactgtttcaagaa

SEQ ID NO: 5197395 - DNA, 25 bp, Homo sapien
caagaagttgagcaccatggccttg

SEQ ID NO: 5197396 - DNA, 25 bp, Homo sapien
accacaaaggaattgaaatggttca

SEQ ID NO: 5197397 - DNA, 25 bp, Homo sapien
aaaggaattgaaatggttcaataga

SEQ ID NO: 5197398 - DNA, 25 bp, Homo sapien
ctgagcccagcctaagaaaataact

SEQ ID NO: 5197399 - DNA, 25 bp, Homo sapien
taggcattagtcactgagcccagcc

SEQ ID NO: 5197400 - DNA, 25 bp, Homo sapien
caaagtctcgtaatttcacatagct

SEQ ID NO: 5197401 - DNA, 25 bp, Homo sapien
gaacttctgttgtgcctctatcgcc

SEQ ID NO: 5197402 - DNA, 25 bp, Homo sapien
gcctctatcgccatatcttcattga

SEQ ID NO: 5197403 - DNA, 25 bp, Homo sapien
tcttcattgaatccttgcattaatt

SEQ ID NO: 5197404 - DNA, 25 bp, Homo sapien
tttcacagcctaggagagatttggg

SEQ ID NO: 5197405 - DNA, 25 bp, Homo sapien
cgatgagggcatgaactggaacagc

SEQ ID NO: 5197406 - DNA, 25 bp, Homo sapien
gaaaattctagtctaagggcaagga

SEQ ID NO: 5197407 - DNA, 25 bp, Homo sapien
gggtcaaggactctagaaacatatg

SEQ ID NO: 5197408 - DNA, 25 bp, Homo sapien
tattgttcggcatcactcatgtcag

SEQ ID NO: 5197409 - DNA, 25 bp, Homo sapien
tcatgtcagttaccagtagtcgaag

SEQ ID NO: 5197410 - DNA, 25 bp, Homo sapien
taccagtagtcgaagaatttcataa

SEQ ID NO: 5197411 - DNA, 25 bp, Homo sapien
tttaatatccagtctgtagcttctg

SEQ ID NO: 5197412 - DNA, 25 bp, Homo sapien
catggtttcggctatggtaaagtac

SEQ ID NO: 5197413 - DNA, 25 bp, Homo sapien
ccatggtagactatccttgggataa

SEQ ID NO: 5197414 - DNA, 25 bp, Homo sapien
gataaggccaatttgatctaggagg

SEQ ID NO: 5197415 - DNA, 25 bp, Homo sapien
gcaaattttcattcacataaggtgg

SEQ ID NO: 5197416 - DNA, 25 bp, Homo sapien
gaactctgggcagtatagacactca

SEQ ID NO: 5197417 - DNA, 25 bp, Homo sapien
gaagacctggtatttgtgtccaatg

SEQ ID NO: 5197418 - DNA, 25 bp, Homo sapien
tacgggccacatgctaattttaaca

SEQ ID NO: 5197419 - DNA, 25 bp, Homo sapien
cacccagtgaagtacttacgggcca

SEQ ID NO: 5197420 - DNA, 25 bp, Homo sapien
gcttatttctatttggttcatctgg

SEQ ID NO: 5197421 - DNA, 25 bp, Homo sapien
taacacgccggtaatcttccactag

SEQ ID NO: 5197422 - DNA, 25 bp, Homo sapien
cttgagcaagtcgttcaataacacg

SEQ ID NO: 5197423 - DNA, 25 bp, Homo sapien
catctggtttgtcagttcttctggt

SEQ ID NO: 5197424 - DNA, 25 bp, Homo sapien
cttcctgtacagagcagtataatct

SEQ ID NO: 5197425 - DNA, 25 bp, Homo sapien
gaagcaattgcagtagtatttcaga

SEQ ID NO: 5197426 - DNA, 25 bp, Homo sapien
ggaagcaattgcagtagtatttcag

SEQ ID NO: 5197427 - DNA, 25 bp, Homo sapien
agaaaatttgcaagcttcctgtaca

SEQ ID NO: 5197428 - DNA, 25 bp, Homo sapien
gaatgaggtttattgtaagtattta

SEQ ID NO: 5197429 - DNA, 25 bp, Homo sapien
tatttaagaatcatatcatcacaca

SEQ ID NO: 5197430 - DNA, 25 bp, Homo sapien
agaatgaggtttattgtaagtattt

SEQ ID NO: 5197431 - DNA, 25 bp, Homo sapien
gtatttaagaatcatatcatcacac

SEQ ID NO: 5197432 - DNA, 25 bp, Homo sapien
cagcaatctgagtgcagcaaaggag

SEQ ID NO: 5197433 - DNA, 25 bp, Homo sapien
cagggagagcatttttgaatgtggc

SEQ ID NO: 5197434 - DNA, 25 bp, Homo sapien
tgtaactgaggccagcaatctgagt

SEQ ID NO: 5197435 - DNA, 25 bp, Homo sapien
caaaggagcctgagagttagctggc

SEQ ID NO: 5197436 - DNA, 25 bp, Homo sapien
tcacgtggccgcgagcactcgctcg

SEQ ID NO: 5197437 - DNA, 25 bp, Homo sapien
gtggccgcgagcactcgctcgccgc

SEQ ID NO: 5197438 - DNA, 25 bp, Homo sapien
ggtcacgtggccgcgagcactcgct

SEQ ID NO: 5197439 - DNA, 25 bp, Homo sapien
gtcggtcacgtggccgcgagcactc

SEQ ID NO: 5197440 - DNA, 25 bp, Homo sapien
tgcggacgagcaggtggacgccact

SEQ ID NO: 5197441 - DNA, 25 bp, Homo sapien
cggacgagcaggtggacgccactgg

SEQ ID NO: 5197442 - DNA, 25 bp, Homo sapien
ctctgcggacgagcaggtggacgcc

SEQ ID NO: 5197443 - DNA, 25 bp, Homo sapien
gacgagcaggtggacgccactgggc

SEQ ID NO: 5197444 - DNA, 25 bp, Homo sapien
ggctctgagagttgccagttggaca

SEQ ID NO: 5197445 - DNA, 25 bp, Homo sapien
caagccacccggaaatgctctgtgg

SEQ ID NO: 5197446 - DNA, 25 bp, Homo sapien
tgctgctcgacagccggagcgcaca

SEQ ID NO: 5197447 - DNA, 25 bp, Homo sapien
ggccaacgaagccgggaacagaagc

SEQ ID NO: 5197448 - DNA, 25 bp, Homo sapien
atttgatgaaatataggcgccacca

SEQ ID NO: 5197449 - DNA, 25 bp, Homo sapien
aaatataggcgccaccaggtaacag

SEQ ID NO: 5197450 - DNA, 25 bp, Homo sapien
agggagcttgccagaaacctgtaac

SEQ ID NO: 5197451 - DNA, 25 bp, Homo sapien
gccaccaggtaacagtagtggtcag

SEQ ID NO: 5197452 - DNA, 25 bp, Homo sapien
cttggtaatggtctttcagcaggta

SEQ ID NO: 5197453 - DNA, 25 bp, Homo sapien
ttggtaatggtctttcagcaggtaa

SEQ ID NO: 5197454 - DNA, 25 bp, Homo sapien
gcttggtaatggtctttcagcaggt

SEQ ID NO: 5197455 - DNA, 25 bp, Homo sapien
ttctggaggccaatttttatctgcc

SEQ ID NO: 5197456 - DNA, 25 bp, Homo sapien
gaggtcattggttgggctttgtggt

SEQ ID NO: 5197457 - DNA, 25 bp, Homo sapien
tttatctgcctggagaggtcattgg

SEQ ID NO: 5197458 - DNA, 25 bp, Homo sapien
gccattggtgaagattacatgtagg

SEQ ID NO: 5197459 - DNA, 25 bp, Homo sapien
acatggtttctaaaggataacatat

SEQ ID NO: 5197460 - DNA, 25 bp, Homo sapien
tcctaccacatattctcggccattt

SEQ ID NO: 5197461 - DNA, 25 bp, Homo sapien
taccacatattctcggccatttcca

SEQ ID NO: 5197462 - DNA, 25 bp, Homo sapien
catggtttctaaaggataacatatt

SEQ ID NO: 5197463 - DNA, 25 bp, Homo sapien
tgcaggaaatcgtggatatggacac

SEQ ID NO: 5197464 - DNA, 25 bp, Homo sapien
aggaaatcgtggatatggacaccat

SEQ ID NO: 5197465 - DNA, 25 bp, Homo sapien
caggaaatcgtggatatggacacca

SEQ ID NO: 5197466 - DNA, 25 bp, Homo sapien
gcaggaaatcgtggatatggacacc

SEQ ID NO: 5197467 - DNA, 25 bp, Homo sapien
ctagtctgagttgaacgctgaaaat

SEQ ID NO: 5197468 - DNA, 25 bp, Homo sapien
tagtctgagttgaacgctgaaaatt

SEQ ID NO: 5197469 - DNA, 25 bp, Homo sapien
tggtacctttagaagataatggtcc

SEQ ID NO: 5197470 - DNA, 25 bp, Homo sapien
cataagtcatggtacctttagaaga

SEQ ID NO: 5197471 - DNA, 25 bp, Homo sapien
gaaatgggcataagtcatggtacct

SEQ ID NO: 5197472 - DNA, 25 bp, Homo sapien
aataaaatctggtgttttcacaggg

SEQ ID NO: 5197473 - DNA, 25 bp, Homo sapien
gacagcctcactgccgaaaagatgc

SEQ ID NO: 5197474 - DNA, 25 bp, Homo sapien
gatggtaaaattcgaaacgtcagga

SEQ ID NO: 5197475 - DNA, 25 bp, Homo sapien
gatgaacagtgttgccaaggtacct

SEQ ID NO: 5197476 - DNA, 25 bp, Homo sapien
ccactagatatctggatgaggcttt

SEQ ID NO: 5197477 - DNA, 25 bp, Homo sapien
aagctgccttcgctgaccaaacaca

SEQ ID NO: 5197478 - DNA, 25 bp, Homo sapien
tcgctgaccaaacacacgctttggg

SEQ ID NO: 5197479 - DNA, 25 bp, Homo sapien
gctgccagaactattagttggacag

SEQ ID NO: 5197480 - DNA, 25 bp, Homo sapien
aggtggctgccagaactattagttg

SEQ ID NO: 5197481 - DNA, 25 bp, Homo sapien
cttaggaaccggatgagctgaagaa

SEQ ID NO: 5197482 - DNA, 25 bp, Homo sapien
tgcagccggcaaaactatactgtgt

SEQ ID NO: 5197483 - DNA, 25 bp, Homo sapien
gactgcttgactgcttgtgtaagta

SEQ ID NO: 5197484 - DNA, 25 bp, Homo sapien
gaaatatctctttgtctccgaaaaa

SEQ ID NO: 5197485 - DNA, 25 bp, Homo sapien
caatacaattcacctcaccagagat

SEQ ID NO: 5197486 - DNA, 25 bp, Homo sapien
aattcacctcaccagagatttcttt

SEQ ID NO: 5197487 - DNA, 25 bp, Homo sapien
tacaattcacctcaccagagatttc

SEQ ID NO: 5197488 - DNA, 25 bp, Homo sapien
aagcaatacaattcacctcaccaga

SEQ ID NO: 5197489 - DNA, 25 bp, Homo sapien
tctggcaaggttataacttgcaggc

SEQ ID NO: 5197490 - DNA, 25 bp, Homo sapien
gatctggcaaggttataacttgcag

SEQ ID NO: 5197491 - DNA, 25 bp, Homo sapien
gtgatctggcaaggttataacttgc

SEQ ID NO: 5197492 - DNA, 25 bp, Homo sapien
tgtgatctggcaaggttataacttg

SEQ ID NO: 5197493 - DNA, 25 bp, Homo sapien
gatacaggtaacactactgcctggt

SEQ ID NO: 5197494 - DNA, 25 bp, Homo sapien
gctgagggagataacactcttcaat

SEQ ID NO: 5197495 - DNA, 25 bp, Homo sapien
agtccacagttaggctccacagcag

SEQ ID NO: 5197496 - DNA, 25 bp, Homo sapien
tgtcctgcaggagttacgggtcttc

SEQ ID NO: 5197497 - DNA, 25 bp, Homo sapien
gccagctgacaagcctgatgaagcc

SEQ ID NO: 5197498 - DNA, 25 bp, Homo sapien
caatgcctgtcgtcacatagtctgg

SEQ ID NO: 5197499 - DNA, 25 bp, Homo sapien
tccccagtctggtacaatgcctgtc

SEQ ID NO: 5197500 - DNA, 25 bp, Homo sapien
tgatgaagcccttgaatctgatctt

SEQ ID NO: 5197501 - DNA, 25 bp, Homo sapien
taaactcttcccagccaagaggagg

SEQ ID NO: 5197502 - DNA, 25 bp, Homo sapien
aaactcttcccagccaagaggagga

SEQ ID NO: 5197503 - DNA, 25 bp, Homo sapien
ttaaactcttcccagccaagaggag

SEQ ID NO: 5197504 - DNA, 25 bp, Homo sapien
ctttaaactcttcccagccaagagg

SEQ ID NO: 5197505 - DNA, 25 bp, Homo sapien
tatgtaagtcgttctgaggcttggt

SEQ ID NO: 5197506 - DNA, 25 bp, Homo sapien
gttctgaggcttggtgagacgccac

SEQ ID NO: 5197507 - DNA, 25 bp, Homo sapien
aagtcgttctgaggcttggtgagac

SEQ ID NO: 5197508 - DNA, 25 bp, Homo sapien
ttatgtaagtcgttctgaggcttgg

SEQ ID NO: 5197509 - DNA, 25 bp, Homo sapien
gctgtctgccattgatcaacttgga

SEQ ID NO: 5197510 - DNA, 25 bp, Homo sapien
caacttggataggttgactgagacc

SEQ ID NO: 5197511 - DNA, 25 bp, Homo sapien
tagatgtcaacctaaaagaagagtt

SEQ ID NO: 5197512 - DNA, 25 bp, Homo sapien
gactgagaccaaagtatctctagaa

SEQ ID NO: 5197513 - DNA, 25 bp, Homo sapien
tacactgctatattacctacagctt

SEQ ID NO: 5197514 - DNA, 25 bp, Homo sapien
aactaaatcttgtagtaggaagttg

SEQ ID NO: 5197515 - DNA, 25 bp, Homo sapien
gtagtaggaagttgtatgtaattac

SEQ ID NO: 5197516 - DNA, 25 bp, Homo sapien
ctttgcagggcaaatgcaagaaaat

SEQ ID NO: 5197517 - DNA, 25 bp, Homo sapien
ctgggctacccagcgcatgtgaata

SEQ ID NO: 5197518 - DNA, 25 bp, Homo sapien
tcaatgattggtgccctgggctacc

SEQ ID NO: 5197519 - DNA, 25 bp, Homo sapien
caaaattatgttcttcggcaattcc

SEQ ID NO: 5197520 - DNA, 25 bp, Homo sapien
gcttgaaaagtaggtcaactcgcat

SEQ ID NO: 5197521 - DNA, 25 bp, Homo sapien
tgtgcagcaacaattgaagacattt

SEQ ID NO: 5197522 - DNA, 25 bp, Homo sapien
ttagtgttagaatcctcaactgtgc

SEQ ID NO: 5197523 - DNA, 25 bp, Homo sapien
ccttgtggacaatcatttgggcata

SEQ ID NO: 5197524 - DNA, 25 bp, Homo sapien
gctatagcaacagtacttccatgtg

SEQ ID NO: 5197525 - DNA, 25 bp, Homo sapien
gcacgttgtttacagaggtacaaac

SEQ ID NO: 5197526 - DNA, 25 bp, Homo sapien
ttggaaaacctccatagcctagagg

SEQ ID NO: 5197527 - DNA, 25 bp, Homo sapien
tatgactgatgatttcccgatgaac

SEQ ID NO: 5197528 - DNA, 25 bp, Homo sapien
caggaataccatgacagagcacgtt

SEQ ID NO: 5197529 - DNA, 25 bp, Homo sapien
gttgataatatctccatcctgaaga

SEQ ID NO: 5197530 - DNA, 25 bp, Homo sapien
ataatatctccatcctgaagaggtc

SEQ ID NO: 5197531 - DNA, 25 bp, Homo sapien
tgataatatctccatcctgaagagg

SEQ ID NO: 5197532 - DNA, 25 bp, Homo sapien
tgtgacatcaatgttgataatatct

SEQ ID NO: 5197533 - DNA, 25 bp, Homo sapien
gttgctaccagcaattctgaagttg

SEQ ID NO: 5197534 - DNA, 25 bp, Homo sapien
tctgaagttgatcaaagacaatttt

SEQ ID NO: 5197535 - DNA, 25 bp, Homo sapien
ttttcaatccactcttcctgttgct

SEQ ID NO: 5197536 - DNA, 25 bp, Homo sapien
acaattttttatatgatttactcac

SEQ ID NO: 5197537 - DNA, 25 bp, Homo sapien
caaggctctctataccagaaatgga

SEQ ID NO: 5197538 - DNA, 25 bp, Homo sapien
caatgtagcccctaatgacagagta

SEQ ID NO: 5197539 - DNA, 25 bp, Homo sapien
gacagagtaagataatgacaggccc

SEQ ID NO: 5197540 - DNA, 25 bp, Homo sapien
tggaactcaacgttaccttcaggga

SEQ ID NO: 5197541 - DNA, 25 bp, Homo sapien
taatctaggtaatccaaaggtatca

SEQ ID NO: 5197542 - DNA, 25 bp, Homo sapien
aaagcacatataatccaagtctgag

SEQ ID NO: 5197543 - DNA, 25 bp, Homo sapien
ttataatctaggtaatccaaaggta

SEQ ID NO: 5197544 - DNA, 25 bp, Homo sapien
aatccaagtctgagaatggtaaaag

SEQ ID NO: 5197545 - DNA, 25 bp, Homo sapien
ctgttgtgatactgaattaatgtct

SEQ ID NO: 5197546 - DNA, 25 bp, Homo sapien
tgctcataaggtagaatgtagaaac

SEQ ID NO: 5197547 - DNA, 25 bp, Homo sapien
caagaaaggtctttattagatcttc

SEQ ID NO: 5197548 - DNA, 25 bp, Homo sapien
tgctctcatattctgtgaaggaagc

SEQ ID NO: 5197549 - DNA, 25 bp, Homo sapien
ttccagacagccgaacgttaacaga

SEQ ID NO: 5197550 - DNA, 25 bp, Homo sapien
cgttaacagaaagcactatatatgg

SEQ ID NO: 5197551 - DNA, 25 bp, Homo sapien
tataaaaggcagaggcaactgtttg

SEQ ID NO: 5197552 - DNA, 25 bp, Homo sapien
tcctttgatgtagcatggaatttgc

SEQ ID NO: 5197553 - DNA, 25 bp, Homo sapien
aagaagtaagatagacatgtctgta

SEQ ID NO: 5197554 - DNA, 25 bp, Homo sapien
gaagaagtaagatagacatgtctgt

SEQ ID NO: 5197555 - DNA, 25 bp, Homo sapien
agaagaagtaagatagacatgtctg

SEQ ID NO: 5197556 - DNA, 25 bp, Homo sapien
gaagtaagatagacatgtctgtatt

SEQ ID NO: 5197557 - DNA, 25 bp, Homo sapien
aaatagatatattgaaaccttgcag

SEQ ID NO: 5197558 - DNA, 25 bp, Homo sapien
gccaaagaccttgatctacaattac

SEQ ID NO: 5197559 - DNA, 25 bp, Homo sapien
tggttatttcagcattatgatgaac

SEQ ID NO: 5197560 - DNA, 25 bp, Homo sapien
aaaacaactatgttaactagtatgg

SEQ ID NO: 5197561 - DNA, 25 bp, Homo sapien
tatgtatttagtagactcatgtttt

SEQ ID NO: 5197562 - DNA, 25 bp, Homo sapien
atgtatttagtagactcatgtttta

SEQ ID NO: 5197563 - DNA, 25 bp, Homo sapien
tgtatttagtagactcatgttttac

SEQ ID NO: 5197564 - DNA, 25 bp, Homo sapien
tatttagtagactcatgttttaccc

SEQ ID NO: 5197565 - DNA, 25 bp, Homo sapien
gcagaaatttaaaaatatgtccttg

SEQ ID NO: 5197566 - DNA, 25 bp, Homo sapien
taagcagaaatttaaaaatatgtcc

SEQ ID NO: 5197567 - DNA, 25 bp, Homo sapien
cataagcagaaatttaaaaatatgt

SEQ ID NO: 5197568 - DNA, 25 bp, Homo sapien
cagaaatttaaaaatatgtccttgt

SEQ ID NO: 5197569 - DNA, 25 bp, Homo sapien
ctccatggtagccattgtaatagac

SEQ ID NO: 5197570 - DNA, 25 bp, Homo sapien
caattacagagaagggagcccctgc

SEQ ID NO: 5197571 - DNA, 25 bp, Homo sapien
tttcagaggtgtctccatggtagcc

SEQ ID NO: 5197572 - DNA, 25 bp, Homo sapien
ttttaccacattcgtccacattgcc

SEQ ID NO: 5197573 - DNA, 25 bp, Homo sapien
aacatgtcatcaactttataccaag

SEQ ID NO: 5197574 - DNA, 25 bp, Homo sapien
ctttacttgtcaatgtaaggcttac

SEQ ID NO: 5197575 - DNA, 25 bp, Homo sapien
aatattgcagcctggcagttcacat

SEQ ID NO: 5197576 - DNA, 25 bp, Homo sapien
caccaataacctttgtaccatttgc

SEQ ID NO: 5197577 - DNA, 25 bp, Homo sapien
atgtctacttcaaaacagttatggg

SEQ ID NO: 5197578 - DNA, 25 bp, Homo sapien
catatattcggcatgtctacttcaa

SEQ ID NO: 5197579 - DNA, 25 bp, Homo sapien
catgtctacttcaaaacagttatgg

SEQ ID NO: 5197580 - DNA, 25 bp, Homo sapien
gaaaacatatattcggcatgtctac

SEQ ID NO: 5197581 - DNA, 25 bp, Homo sapien
ttctagcggcagacataaaccatct

SEQ ID NO: 5197582 - DNA, 25 bp, Homo sapien
tagtactagctggagttcacctgca

SEQ ID NO: 5197583 - DNA, 25 bp, Homo sapien
gcaagataataggtgtccagaaaca

SEQ ID NO: 5197584 - DNA, 25 bp, Homo sapien
tgtatcagtagagagaggctacgca

SEQ ID NO: 5197585 - DNA, 25 bp, Homo sapien
aatgacttattttgcctgagccact

SEQ ID NO: 5197586 - DNA, 25 bp, Homo sapien
tgaaaagaattctcctggtagtaga

SEQ ID NO: 5197587 - DNA, 25 bp, Homo sapien
tgcccatgaacccaagcacacttgt

SEQ ID NO: 5197588 - DNA, 25 bp, Homo sapien
ttactttcatgtgcagagagaagca

SEQ ID NO: 5197589 - DNA, 25 bp, Homo sapien
ggcaggcagaagcaccgaagtgctc

SEQ ID NO: 5197590 - DNA, 25 bp, Homo sapien
cacaggccataacccttttctgtgc

SEQ ID NO: 5197591 - DNA, 25 bp, Homo sapien
gccctggacatttcacggataaaat

SEQ ID NO: 5197592 - DNA, 25 bp, Homo sapien
gcacaagagttttcttgccctggac

SEQ ID NO: 5197593 - DNA, 25 bp, Homo sapien
gacaatccaagtgaccagtagtagc

SEQ ID NO: 5197594 - DNA, 25 bp, Homo sapien
aatttcactcctctaatttgaaaga

SEQ ID NO: 5197595 - DNA, 25 bp, Homo sapien
tgtagggtttaagtccaaattcaca

SEQ ID NO: 5197596 - DNA, 25 bp, Homo sapien
actggtaaccctaactgtggcatgg

SEQ ID NO: 5197597 - DNA, 25 bp, Homo sapien
gattggcaggcatcacggctacatc

SEQ ID NO: 5197598 - DNA, 25 bp, Homo sapien
cactataaccagcagatgggcagcc

SEQ ID NO: 5197599 - DNA, 25 bp, Homo sapien
catgtggacaaagggcaaaatgccc

SEQ ID NO: 5197600 - DNA, 25 bp, Homo sapien
caacaatttactccgtgggtcctgc

SEQ ID NO: 5197601 - DNA, 25 bp, Homo sapien
gataagctagtattgtgattcccaa

SEQ ID NO: 5197602 - DNA, 25 bp, Homo sapien
tagtattgtgattcccaattcttag

SEQ ID NO: 5197603 - DNA, 25 bp, Homo sapien
tcaagacctgcaccattaacaaaat

SEQ ID NO: 5197604 - DNA, 25 bp, Homo sapien
cactaggatgcttaagataagctag

SEQ ID NO: 5197605 - DNA, 25 bp, Homo sapien
ggtacatatctatccaacacagtcg

SEQ ID NO: 5197606 - DNA, 25 bp, Homo sapien
aatttttgctgttgcctgcaaccac

SEQ ID NO: 5197607 - DNA, 25 bp, Homo sapien
gtcatttacctttgtacagcattca

SEQ ID NO: 5197608 - DNA, 25 bp, Homo sapien
aacacagtcgtttgagtcatttacc

SEQ ID NO: 5197609 - DNA, 25 bp, Homo sapien
tccatgaaagtaagatcctattcca

SEQ ID NO: 5197610 - DNA, 25 bp, Homo sapien
aaaatgtggacagacttgaaaacca

SEQ ID NO: 5197611 - DNA, 25 bp, Homo sapien
atgtccatgaaagtaagatcctatt

SEQ ID NO: 5197612 - DNA, 25 bp, Homo sapien
caaaatgtggacagacttgaaaacc

SEQ ID NO: 5197613 - DNA, 25 bp, Homo sapien
cagctgtcaacgctgtgtaggatgt

SEQ ID NO: 5197614 - DNA, 25 bp, Homo sapien
aatgaagtttaaccacaacagtcag

SEQ ID NO: 5197615 - DNA, 25 bp, Homo sapien
tgaagtttaaccacaacagtcagca

SEQ ID NO: 5197616 - DNA, 25 bp, Homo sapien
caacgctgtgtaggatgtaatgaag

SEQ ID NO: 5197617 - DNA, 25 bp, Homo sapien
caaagagggtttggacctgctgggt

SEQ ID NO: 5197618 - DNA, 25 bp, Homo sapien
gtgtccagcgatcctcgagggcatg

SEQ ID NO: 5197619 - DNA, 25 bp, Homo sapien
gaacctcttgagctgcctaggtggg

SEQ ID NO: 5197620 - DNA, 25 bp, Homo sapien
gcatgggtccgaaagagtagtcctt

SEQ ID NO: 5197621 - DNA, 25 bp, Homo sapien
cctccatgggtagatcactgtcgtt

SEQ ID NO: 5197622 - DNA, 25 bp, Homo sapien
ctccatgggtagatcactgtcgttt

SEQ ID NO: 5197623 - DNA, 25 bp, Homo sapien
tcctccatgggtagatcactgtcgt

SEQ ID NO: 5197624 - DNA, 25 bp, Homo sapien
ctatagtgaatgccatgccctcctc

SEQ ID NO: 5197625 - DNA, 25 bp, Homo sapien
atcctccaggactttaaattcaggg

SEQ ID NO: 5197626 - DNA, 25 bp, Homo sapien
ttaaattcaggggatccctccgtga

SEQ ID NO: 5197627 - DNA, 25 bp, Homo sapien
ggggatccctccgtgatgattggct

SEQ ID NO: 5197628 - DNA, 25 bp, Homo sapien
catcctccaggactttaaattcagg

SEQ ID NO: 5197629 - DNA, 25 bp, Homo sapien
tccggccgggccacaagcgcgccgt

SEQ ID NO: 5197630 - DNA, 25 bp, Homo sapien
tgtaacacagcacccagccgtcaga

SEQ ID NO: 5197631 - DNA, 25 bp, Homo sapien
gcgccgtcggaccaatcttcctttc

SEQ ID NO: 5197632 - DNA, 25 bp, Homo sapien
agaacgcgcacgcaagctccggccg

SEQ ID NO: 5197633 - DNA, 25 bp, Homo sapien
tttggtcaggatctgcgcgcccctc

SEQ ID NO: 5197634 - DNA, 25 bp, Homo sapien
tcagaaccgtgtgctcgaactgcgc

SEQ ID NO: 5197635 - DNA, 25 bp, Homo sapien
tgcgcgcccctcgacgtgatcagaa

SEQ ID NO: 5197636 - DNA, 25 bp, Homo sapien
tcatggggtagtttggtcaggatct

SEQ ID NO: 5197637 - DNA, 25 bp, Homo sapien
caacaggttcggatttttcggcaga

SEQ ID NO: 5197638 - DNA, 25 bp, Homo sapien
aaacgctatcaggagccacgcaggt

SEQ ID NO: 5197639 - DNA, 25 bp, Homo sapien
ggcttcagatccgagttcccagttg

SEQ ID NO: 5197640 - DNA, 25 bp, Homo sapien
cagatgcgttgaccgcgctgggaaa

SEQ ID NO: 5197641 - DNA, 25 bp, Homo sapien
caagctcgaattcctagtgcagcaa

SEQ ID NO: 5197642 - DNA, 25 bp, Homo sapien
gagtggggcccaagctcgaattcct

SEQ ID NO: 5197643 - DNA, 25 bp, Homo sapien
tcctagtgcagcaaacggtctagcg

SEQ ID NO: 5197644 - DNA, 25 bp, Homo sapien
tagtgcagcaaacggtctagcgtgc

SEQ ID NO: 5197645 - DNA, 25 bp, Homo sapien
ggaggggtcattttagagactagac

SEQ ID NO: 5197646 - DNA, 25 bp, Homo sapien
gggtcattttagagactagaccgcc

SEQ ID NO: 5197647 - DNA, 25 bp, Homo sapien
ttagagactagaccgcccactaatc

SEQ ID NO: 5197648 - DNA, 25 bp, Homo sapien
cattttagagactagaccgcccact

SEQ ID NO: 5197649 - DNA, 25 bp, Homo sapien
tctcggtttccagaacagctgacgt

SEQ ID NO: 5197650 - DNA, 25 bp, Homo sapien
tcagtcccggccaagtaggcccttg

SEQ ID NO: 5197651 - DNA, 25 bp, Homo sapien
cttgctctcaaatgcgcccgtatct

SEQ ID NO: 5197652 - DNA, 25 bp, Homo sapien
tttgcggctcctgcagcgtgcaagc

SEQ ID NO: 5197653 - DNA, 25 bp, Homo sapien
cgaactggagctcaactcgcaagct

SEQ ID NO: 5197654 - DNA, 25 bp, Homo sapien
ttcctgaagcgggatggaactgccg

SEQ ID NO: 5197655 - DNA, 25 bp, Homo sapien
caagcgcaagggaaaggagggtgct

SEQ ID NO: 5197656 - DNA, 25 bp, Homo sapien
aatggcccttggcagacagagcgtg

SEQ ID NO: 5197657 - DNA, 25 bp, Homo sapien
tgcaaaacccgcttcagtagaaaca

SEQ ID NO: 5197658 - DNA, 25 bp, Homo sapien
aactgcttgaacaccctcgttggac

SEQ ID NO: 5197659 - DNA, 25 bp, Homo sapien
tacaggtgccatttccttgccgctt

SEQ ID NO: 5197660 - DNA, 25 bp, Homo sapien
tagaaacaagagttagcacaaccat

SEQ ID NO: 5197661 - DNA, 25 bp, Homo sapien
caaaaatctacaaccctggacacaa

SEQ ID NO: 5197662 - DNA, 25 bp, Homo sapien
cctgtgttaggtaaaagctggaact

SEQ ID NO: 5197663 - DNA, 25 bp, Homo sapien
ggacgacgagagaaccctgtgttag

SEQ ID NO: 5197664 - DNA, 25 bp, Homo sapien
ctggacacaaagaagccgagctgga

SEQ ID NO: 5197665 - DNA, 25 bp, Homo sapien
gccagctgaaccctcttgatcttta

SEQ ID NO: 5197666 - DNA, 25 bp, Homo sapien
caatctgattgccttaggagaaaac

SEQ ID NO: 5197667 - DNA, 25 bp, Homo sapien
caagcagcgtgttacctcagtggtt

SEQ ID NO: 5197668 - DNA, 25 bp, Homo sapien
gaacctcggagtaaactgatttgca

SEQ ID NO: 5197669 - DNA, 25 bp, Homo sapien
tcatggagcctactggagtcacctc

SEQ ID NO: 5197670 - DNA, 25 bp, Homo sapien
catttgtcctgagggtccgggattc

SEQ ID NO: 5197671 - DNA, 25 bp, Homo sapien
ctgggtgaggttttcggccagttca

SEQ ID NO: 5197672 - DNA, 25 bp, Homo sapien
ggtgttagccgcagccactcttggc

SEQ ID NO: 5197673 - DNA, 25 bp, Homo sapien
ttaatcaccgaaccacacggtgagg

SEQ ID NO: 5197674 - DNA, 25 bp, Homo sapien
ccgaaccacacggtgaggctttgta

SEQ ID NO: 5197675 - DNA, 25 bp, Homo sapien
cacacggtgaggctttgtagcaaca

SEQ ID NO: 5197676 - DNA, 25 bp, Homo sapien
ggtgaggctttgtagcaacagccag

SEQ ID NO: 5197677 - DNA, 25 bp, Homo sapien
gggcccgctcgcattgctccaggcc

SEQ ID NO: 5197678 - DNA, 25 bp, Homo sapien
agctcgaggctgcacgggtctgatt

SEQ ID NO: 5197679 - DNA, 25 bp, Homo sapien
gtgcgcgtggagagccaggaacccg

SEQ ID NO: 5197680 - DNA, 25 bp, Homo sapien
tctgattaaagcagtgcgcgtggag

SEQ ID NO: 5197681 - DNA, 25 bp, Homo sapien
gcctccctcgcgcgctttcctcccc

SEQ ID NO: 5197682 - DNA, 25 bp, Homo sapien
ggaaccaaccagcggctccgcgccg

SEQ ID NO: 5197683 - DNA, 25 bp, Homo sapien
ctccctcgcgcgctttcctccccag

SEQ ID NO: 5197684 - DNA, 25 bp, Homo sapien
tgcggcccgcggctcatcggcctcc

SEQ ID NO: 5197685 - DNA, 25 bp, Homo sapien
aacagagcgcgccgggcaggaagca

SEQ ID NO: 5197686 - DNA, 25 bp, Homo sapien
ctgcaacagagcgcgccgggcagga

SEQ ID NO: 5197687 - DNA, 25 bp, Homo sapien
gagcgcgccgggcaggaagcacaat

SEQ ID NO: 5197688 - DNA, 25 bp, Homo sapien
gcgcgccgggcaggaagcacaatgg

SEQ ID NO: 5197689 - DNA, 25 bp, Homo sapien
tccgctggactagagcgggcgaggc

SEQ ID NO: 5197690 - DNA, 25 bp, Homo sapien
ggtaagacgcatccacacttcccgg

SEQ ID NO: 5197691 - DNA, 25 bp, Homo sapien
ggattggtccgaggcgctcgggctc

SEQ ID NO: 5197692 - DNA, 25 bp, Homo sapien
cggcctcgggtaagacgcatccaca

SEQ ID NO: 5197693 - DNA, 25 bp, Homo sapien
tgactcagcgaaggtcataaatatt

SEQ ID NO: 5197694 - DNA, 25 bp, Homo sapien
ccaaactcggttcaaagctttgact

SEQ ID NO: 5197695 - DNA, 25 bp, Homo sapien
tgctgagctccccaaactcggttca

SEQ ID NO: 5197696 - DNA, 25 bp, Homo sapien
gagctgattggtccgctgtcttgca

SEQ ID NO: 5197697 - DNA, 25 bp, Homo sapien
gggtgtgggactttctctcctctgc

SEQ ID NO: 5197698 - DNA, 25 bp, Homo sapien
tctgggtgtgggactttctctcctc

SEQ ID NO: 5197699 - DNA, 25 bp, Homo sapien
tcttctcgcggggtctgggtgtggg

SEQ ID NO: 5197700 - DNA, 25 bp, Homo sapien
gggtctgggtgtgggactttctctc

SEQ ID NO: 5197701 - DNA, 25 bp, Homo sapien
cgccttgcccgacacggggctgttg

SEQ ID NO: 5197702 - DNA, 25 bp, Homo sapien
cccgacacggggctgttgagacttt

SEQ ID NO: 5197703 - DNA, 25 bp, Homo sapien
cacggggctgttgagactttctggc

SEQ ID NO: 5197704 - DNA, 25 bp, Homo sapien
ccttgcccgacacggggctgttgag

SEQ ID NO: 5197705 - DNA, 25 bp, Homo sapien
tagtgcccgtgggacatgggagaag

SEQ ID NO: 5197706 - DNA, 25 bp, Homo sapien
gaatggcccgccgagtgtaaacagt

SEQ ID NO: 5197707 - DNA, 25 bp, Homo sapien
ggtaggactgcaccgaactgatgta

SEQ ID NO: 5197708 - DNA, 25 bp, Homo sapien
cgtggctgctgaccgagttgacgta

SEQ ID NO: 5197709 - DNA, 25 bp, Homo sapien
cgagactaatacgtgcacatgtggg

SEQ ID NO: 5197710 - DNA, 25 bp, Homo sapien
ttagtgcgaacagccgagagcgagt

SEQ ID NO: 5197711 - DNA, 25 bp, Homo sapien
gggatagagccgttcccaggagctc

SEQ ID NO: 5197712 - DNA, 25 bp, Homo sapien
cagcaccagggagagaacgttcaag

SEQ ID NO: 5197713 - DNA, 25 bp, Homo sapien
aaagaggccgcgagctccgccctct

SEQ ID NO: 5197714 - DNA, 25 bp, Homo sapien
cttgccattgaagcgcacttcaccg

SEQ ID NO: 5197715 - DNA, 25 bp, Homo sapien
acctccggttcaaagcctgcaactg

SEQ ID NO: 5197716 - DNA, 25 bp, Homo sapien
agagctaggtactgagtttgctgga

SEQ ID NO: 5197717 - DNA, 25 bp, Homo sapien
cccaggccccgagtgattagtcaca

SEQ ID NO: 5197718 - DNA, 25 bp, Homo sapien
tcgggataccgagagcagtgacaga

SEQ ID NO: 5197719 - DNA, 25 bp, Homo sapien
ttaagcccggagtctattgttccag

SEQ ID NO: 5197720 - DNA, 25 bp, Homo sapien
gagtcccagcgagcaacaaatgaag

SEQ ID NO: 5197721 - DNA, 25 bp, Homo sapien
gagtcttacagaaagccgggaagga

SEQ ID NO: 5197722 - DNA, 25 bp, Homo sapien
ggctccccggagtcttacagaaagc

SEQ ID NO: 5197723 - DNA, 25 bp, Homo sapien
ctccccggagtcttacagaaagccg

SEQ ID NO: 5197724 - DNA, 25 bp, Homo sapien
cggagtcttacagaaagccgggaag

SEQ ID NO: 5197725 - DNA, 25 bp, Homo sapien
tctgcccttgagttgggacggacta

SEQ ID NO: 5197726 - DNA, 25 bp, Homo sapien
ggaaatttatttgcaacgcgaccca

SEQ ID NO: 5197727 - DNA, 25 bp, Homo sapien
aaaaccattcttgcactagtgtctg

SEQ ID NO: 5197728 - DNA, 25 bp, Homo sapien
taacaccgagccagcaattccaata

SEQ ID NO: 5197729 - DNA, 25 bp, Homo sapien
gggctcagtccgaccgtggctaccg

SEQ ID NO: 5197730 - DNA, 25 bp, Homo sapien
ctaccgcctgcggaagatacagcgc

SEQ ID NO: 5197731 - DNA, 25 bp, Homo sapien
ccaggggctcagtccgaccgtggct

SEQ ID NO: 5197732 - DNA, 25 bp, Homo sapien
cgaccgtggctaccgcctgcggaag

SEQ ID NO: 5197733 - DNA, 25 bp, Homo sapien
acagcagagataggacctcccaacc

SEQ ID NO: 5197734 - DNA, 25 bp, Homo sapien
gagcctacctaggtcacagggagga

SEQ ID NO: 5197735 - DNA, 25 bp, Homo sapien
ataagagccaaaggctcgaaggccg

SEQ ID NO: 5197736 - DNA, 25 bp, Homo sapien
ggaaaaaagggaccgcagaacagca

SEQ ID NO: 5197737 - DNA, 25 bp, Homo sapien
catcagcttcttgaacttggatcgc

SEQ ID NO: 5197738 - DNA, 25 bp, Homo sapien
tcatcagcttcttgaacttggatcg

SEQ ID NO: 5197739 - DNA, 25 bp, Homo sapien
cttcatcagcttcttgaacttggat

SEQ ID NO: 5197740 - DNA, 25 bp, Homo sapien
atcagcttcttgaacttggatcgct

SEQ ID NO: 5197741 - DNA, 25 bp, Homo sapien
ataggagcccgcgtttcctcctgag

SEQ ID NO: 5197742 - DNA, 25 bp, Homo sapien
tgaagagttagggttccagccgggc

SEQ ID NO: 5197743 - DNA, 25 bp, Homo sapien
cagacagggcccgaccgttggccaa

SEQ ID NO: 5197744 - DNA, 25 bp, Homo sapien
tcctgagcccttcccggatgaagag

SEQ ID NO: 5197745 - DNA, 25 bp, Homo sapien
catagcttcttggtgcgctgaaggg

SEQ ID NO: 5197746 - DNA, 25 bp, Homo sapien
ttcttggtgcgctgaagggtaccac

SEQ ID NO: 5197747 - DNA, 25 bp, Homo sapien
ttgctgcatagcttcttggtgcgct

SEQ ID NO: 5197748 - DNA, 25 bp, Homo sapien
cgctgaagggtaccacgatgtgtag

SEQ ID NO: 5197749 - DNA, 25 bp, Homo sapien
gacaagaaggagacgggcgggcaac

SEQ ID NO: 5197750 - DNA, 25 bp, Homo sapien
ggagacaagaaggagacgggcgggc

SEQ ID NO: 5197751 - DNA, 25 bp, Homo sapien
ctgggccggggagacaagaaggaga

SEQ ID NO: 5197752 - DNA, 25 bp, Homo sapien
cggggagacaagaaggagacgggcg

SEQ ID NO: 5197753 - DNA, 25 bp, Homo sapien
cttcttttccggacgggatggatgg

SEQ ID NO: 5197754 - DNA, 25 bp, Homo sapien
aggagatggagggcgtcccgcctcc

SEQ ID NO: 5197755 - DNA, 25 bp, Homo sapien
gagatggagggcgtcccgcctccac

SEQ ID NO: 5197756 - DNA, 25 bp, Homo sapien
ccttcttttccggacgggatggatg

SEQ ID NO: 5197757 - DNA, 25 bp, Homo sapien
tgcgcccagcagaaccctgaattgg

SEQ ID NO: 5197758 - DNA, 25 bp, Homo sapien
gcattattctgtggtcgagcctcta

SEQ ID NO: 5197759 - DNA, 25 bp, Homo sapien
tgaattggcaaacagcctcaggcga

SEQ ID NO: 5197760 - DNA, 25 bp, Homo sapien
tagtcccacaaagctgaaggtcggc

SEQ ID NO: 5197761 - DNA, 25 bp, Homo sapien
tgaactgtctccagaggcgggaacc

SEQ ID NO: 5197762 - DNA, 25 bp, Homo sapien
tcaccgataagttgataagtcgctg

SEQ ID NO: 5197763 - DNA, 25 bp, Homo sapien
gggtacagggtctccattctatcac

SEQ ID NO: 5197764 - DNA, 25 bp, Homo sapien
ggcctctgacgataccctggtgttt

SEQ ID NO: 5197765 - DNA, 25 bp, Homo sapien
tcccggcctctcaagagctggctgg

SEQ ID NO: 5197766 - DNA, 25 bp, Homo sapien
tctcagccggtcttcaacatccttt

SEQ ID NO: 5197767 - DNA, 25 bp, Homo sapien
tttggttcctgagcgtcagccctgc

SEQ ID NO: 5197768 - DNA, 25 bp, Homo sapien
aaaactgaaatcgtcctggccggct

SEQ ID NO: 5197769 - DNA, 25 bp, Homo sapien
ttttccgcgacggaatccagcgcct

SEQ ID NO: 5197770 - DNA, 25 bp, Homo sapien
ctgattgatagaggggcagtctgac

SEQ ID NO: 5197771 - DNA, 25 bp, Homo sapien
ttggcgtctggctgcgtcttttccg

SEQ ID NO: 5197772 - DNA, 25 bp, Homo sapien
tttccgggcccctgcttggcgtctg

SEQ ID NO: 5197773 - DNA, 25 bp, Homo sapien
cccggatcattaggcaggaacctgc

SEQ ID NO: 5197774 - DNA, 25 bp, Homo sapien
ggagtggtgtgcttgactttggtca

SEQ ID NO: 5197775 - DNA, 25 bp, Homo sapien
ccttgggactttcggactgggatga

SEQ ID NO: 5197776 - DNA, 25 bp, Homo sapien
gttccaaagtgtcagccaccctttc

SEQ ID NO: 5197777 - DNA, 25 bp, Homo sapien
cccttgaagcccgtgttcctctgga

SEQ ID NO: 5197778 - DNA, 25 bp, Homo sapien
accaatctggttctagtcccttgaa

SEQ ID NO: 5197779 - DNA, 25 bp, Homo sapien
agggccacgagaagggaaccaatct

SEQ ID NO: 5197780 - DNA, 25 bp, Homo sapien
gaagcccgtgttcctctggaggaaa

SEQ ID NO: 5197781 - DNA, 25 bp, Homo sapien
agaagtaggaacagcgcttggcagc

SEQ ID NO: 5197782 - DNA, 25 bp, Homo sapien
gactgcctcggctcggctgcgagat

SEQ ID NO: 5197783 - DNA, 25 bp, Homo sapien
ttggcagcctgtctgggcccgcagc

SEQ ID NO: 5197784 - DNA, 25 bp, Homo sapien
gcagctctccgggactgcctcggct

SEQ ID NO: 5197785 - DNA, 25 bp, Homo sapien
tcccaaagggcgtcggaagagcctg

SEQ ID NO: 5197786 - DNA, 25 bp, Homo sapien
gcttgtcacaacacagatcactgcc

SEQ ID NO: 5197787 - DNA, 25 bp, Homo sapien
tgggtgcttgtcacaacacagatca

SEQ ID NO: 5197788 - DNA, 25 bp, Homo sapien
gaaaaatgggtgcttgtcacaacac

SEQ ID NO: 5197789 - DNA, 25 bp, Homo sapien
gggcttggaggtccccggcatcatt

SEQ ID NO: 5197790 - DNA, 25 bp, Homo sapien
agaagtcccaatctcaggcctggaa

SEQ ID NO: 5197791 - DNA, 25 bp, Homo sapien
ctgcggagaagtcccaatctcaggc

SEQ ID NO: 5197792 - DNA, 25 bp, Homo sapien
ggagaagtcccaatctcaggcctgg

SEQ ID NO: 5197793 - DNA, 25 bp, Homo sapien
ggcccatctgactgcccacatcctg

SEQ ID NO: 5197794 - DNA, 25 bp, Homo sapien
ggtctgatctctcccatcagcgctg

SEQ ID NO: 5197795 - DNA, 25 bp, Homo sapien
ccatcagcgctggttcttctaggtg

SEQ ID NO: 5197796 - DNA, 25 bp, Homo sapien
tgatctctcccatcagcgctggttc

SEQ ID NO: 5197797 - DNA, 25 bp, Homo sapien
ggcccggcttgtaatcaagaagaga

SEQ ID NO: 5197798 - DNA, 25 bp, Homo sapien
tcattttgataatcattaagctgtg

SEQ ID NO: 5197799 - DNA, 25 bp, Homo sapien
ttatgttgtgtttgatgggcccggc

SEQ ID NO: 5197800 - DNA, 25 bp, Homo sapien
tttgcagctgtacgcgcactttggg

SEQ ID NO: 5197801 - DNA, 25 bp, Homo sapien
aagcttgctccatacacctgcaagc

SEQ ID NO: 5197802 - DNA, 25 bp, Homo sapien
gctgtgcatttgctaatttggaggc

SEQ ID NO: 5197803 - DNA, 25 bp, Homo sapien
tgcaagcaatttgccggctccggta

SEQ ID NO: 5197804 - DNA, 25 bp, Homo sapien
ccggctccggtaccagagaattgca

SEQ ID NO: 5197805 - DNA, 25 bp, Homo sapien
tttcagtcctattctgcaagcgcag

SEQ ID NO: 5197806 - DNA, 25 bp, Homo sapien
ctgcaaaaagcctgcggcgctctga

SEQ ID NO: 5197807 - DNA, 25 bp, Homo sapien
ctttactctcaagataggaggatgg

SEQ ID NO: 5197808 - DNA, 25 bp, Homo sapien
ggctatatagccgaaaatttcagtc

SEQ ID NO: 5197809 - DNA, 25 bp, Homo sapien
tccggaatcctatagccaacctgaa

SEQ ID NO: 5197810 - DNA, 25 bp, Homo sapien
cctggccaatgctctatttgaggca

SEQ ID NO: 5197811 - DNA, 25 bp, Homo sapien
tctcccctaaagctgcagcaatcat

SEQ ID NO: 5197812 - DNA, 25 bp, Homo sapien
catgtggcattagacacttccggaa

SEQ ID NO: 5197813 - DNA, 25 bp, Homo sapien
cccgggcattcaactggggagagca

SEQ ID NO: 5197814 - DNA, 25 bp, Homo sapien
gaaaaggattctctcctcggcacgt

SEQ ID NO: 5197815 - DNA, 25 bp, Homo sapien
tgaaaatttgccttgggtggccaat

SEQ ID NO: 5197816 - DNA, 25 bp, Homo sapien
gcacgttcacgggaggacagtgaaa

SEQ ID NO: 5197817 - DNA, 25 bp, Homo sapien
tgggcatctcccgagatgctccccg

SEQ ID NO: 5197818 - DNA, 25 bp, Homo sapien
ctgggcccggtctgcccatcccggg

SEQ ID NO: 5197819 - DNA, 25 bp, Homo sapien
cctgggcccggtctgcccatcccgg

SEQ ID NO: 5197820 - DNA, 25 bp, Homo sapien
ctcccgagatgctccccgcctggca

SEQ ID NO: 5197821 - DNA, 25 bp, Homo sapien
cagaggattacaacttcggggcagg

SEQ ID NO: 5197822 - DNA, 25 bp, Homo sapien
tccgtcccgattgtggtccaggagt

SEQ ID NO: 5197823 - DNA, 25 bp, Homo sapien
ccgcacggagcaaacgtggcaggct

SEQ ID NO: 5197824 - DNA, 25 bp, Homo sapien
acttggagcacgctcgggtgacccc

SEQ ID NO: 5197825 - DNA, 25 bp, Homo sapien
aagctgcagtgtcccggcagtttgc

SEQ ID NO: 5197826 - DNA, 25 bp, Homo sapien
ttccgccctgcggcctgatgctggg

SEQ ID NO: 5197827 - DNA, 25 bp, Homo sapien
tccacgccaagaacgcagacagcct

SEQ ID NO: 5197828 - DNA, 25 bp, Homo sapien
tgcgtggcagcgctccgaaagaggc

SEQ ID NO: 5197829 - DNA, 25 bp, Homo sapien
ccggtgcacgctctgcccacagcca

SEQ ID NO: 5197830 - DNA, 25 bp, Homo sapien
gggccaactgcctgccgcccaggta

SEQ ID NO: 5197831 - DNA, 25 bp, Homo sapien
actcaggcagaacgcgggcactgag

SEQ ID NO: 5197832 - DNA, 25 bp, Homo sapien
acctcgccccagcacggcgctccgc

SEQ ID NO: 5197833 - DNA, 25 bp, Homo sapien
cagcttacaactttggaggtgaccc

SEQ ID NO: 5197834 - DNA, 25 bp, Homo sapien
tattctcaggcgcacacacaatgac

SEQ ID NO: 5197835 - DNA, 25 bp, Homo sapien
cactggtatgagagtggcatctttc

SEQ ID NO: 5197836 - DNA, 25 bp, Homo sapien
tgacacacgaagtcatgcacactcg

SEQ ID NO: 5197837 - DNA, 25 bp, Homo sapien
atgcgaccagaggcagctgtcccga

SEQ ID NO: 5197838 - DNA, 25 bp, Homo sapien
gaggccgaaagaggatgcgaccaga

SEQ ID NO: 5197839 - DNA, 25 bp, Homo sapien
gctgggcaaggagccgagcgggccc

SEQ ID NO: 5197840 - DNA, 25 bp, Homo sapien
ccgagcagcgcacggtgatcgcctc

SEQ ID NO: 5197841 - DNA, 25 bp, Homo sapien
gaagtcgtttccgttctcgagcctc

SEQ ID NO: 5197842 - DNA, 25 bp, Homo sapien
gagaggcacccaactcaaaagaagt

SEQ ID NO: 5197843 - DNA, 25 bp, Homo sapien
ttccgttctcgagcctcagtgtcca

SEQ ID NO: 5197844 - DNA, 25 bp, Homo sapien
tacccttgtgatttgtgctatggca

SEQ ID NO: 5197845 - DNA, 25 bp, Homo sapien
aatcccagcgggaacaaaacatcag

SEQ ID NO: 5197846 - DNA, 25 bp, Homo sapien
gataacttggggcggaatcccagcg

SEQ ID NO: 5197847 - DNA, 25 bp, Homo sapien
cagcgggaacaaaacatcaggtcct

SEQ ID NO: 5197848 - DNA, 25 bp, Homo sapien
tcctcaagcttggcttcacgtgcca

SEQ ID NO: 5197849 - DNA, 25 bp, Homo sapien
gcagagtgaacatctcagcggtctg

SEQ ID NO: 5197850 - DNA, 25 bp, Homo sapien
atctcagcggtctgagcttttgttc

SEQ ID NO: 5197851 - DNA, 25 bp, Homo sapien
tctcatatctcaatgtgagtgctgc

SEQ ID NO: 5197852 - DNA, 25 bp, Homo sapien
catatctcaatgtgagtgctgctga

SEQ ID NO: 5197853 - DNA, 25 bp, Homo sapien
tcccacaaggaagagctcagtatca

SEQ ID NO: 5197854 - DNA, 25 bp, Homo sapien
cctcttcacatccaaaggaggtggc

SEQ ID NO: 5197855 - DNA, 25 bp, Homo sapien
acaaagtctggctcccgagcacacg

SEQ ID NO: 5197856 - DNA, 25 bp, Homo sapien
cacagatgcaaacgacgaagcacag

SEQ ID NO: 5197857 - DNA, 25 bp, Homo sapien
cagttccctgtgaataacctgcaag

SEQ ID NO: 5197858 - DNA, 25 bp, Homo sapien
aacaatctgacatgactgcctaggg

SEQ ID NO: 5197859 - DNA, 25 bp, Homo sapien
aaactacagagaggcttgtcaaggc

SEQ ID NO: 5197860 - DNA, 25 bp, Homo sapien
tgaaaacgcgtgcacaagtacatgc

SEQ ID NO: 5197861 - DNA, 25 bp, Homo sapien
tgggcaaagctctccagaagacatt

SEQ ID NO: 5197862 - DNA, 25 bp, Homo sapien
gacattcactcatgtgttgtttgta

SEQ ID NO: 5197863 - DNA, 25 bp, Homo sapien
tgttgtttgtaaatatcggaaatca

SEQ ID NO: 5197864 - DNA, 25 bp, Homo sapien
aagctctccagaagacattcactca

SEQ ID NO: 5197865 - DNA, 25 bp, Homo sapien
cacagataaaggatgttctggactt

SEQ ID NO: 5197866 - DNA, 25 bp, Homo sapien
tgcttggcttcccattcatctggtt

SEQ ID NO: 5197867 - DNA, 25 bp, Homo sapien
ctaggaatcaaatggtttcaggtct

SEQ ID NO: 5197868 - DNA, 25 bp, Homo sapien
ggatgttctggactttttcctgtaa

SEQ ID NO: 5197869 - DNA, 25 bp, Homo sapien
gggtttcacagggtccatgcgtatc

SEQ ID NO: 5197870 - DNA, 25 bp, Homo sapien
tttatgtgcacgtgcatttttctgg

SEQ ID NO: 5197871 - DNA, 25 bp, Homo sapien
cagggtccatgcgtatcttggaaac

SEQ ID NO: 5197872 - DNA, 25 bp, Homo sapien
catgcgtatcttggaaacattctaa

SEQ ID NO: 5197873 - DNA, 25 bp, Homo sapien
cgtgacggagccaaataccagattt

SEQ ID NO: 5197874 - DNA, 25 bp, Homo sapien
taggttcctggttgcaagtattcca

SEQ ID NO: 5197875 - DNA, 25 bp, Homo sapien
gaaacatagtccctctaagcttaga

SEQ ID NO: 5197876 - DNA, 25 bp, Homo sapien
caaacaagttgatcccgtgacggag

SEQ ID NO: 5197877 - DNA, 25 bp, Homo sapien
ttctcctcgcacagtccaacagatg

SEQ ID NO: 5197878 - DNA, 25 bp, Homo sapien
tgtaaggtagggacgaagactgttc

SEQ ID NO: 5197879 - DNA, 25 bp, Homo sapien
tacggacacacatgacactttgctt

SEQ ID NO: 5197880 - DNA, 25 bp, Homo sapien
gctttagcgtagatgagtactgccc

SEQ ID NO: 5197881 - DNA, 25 bp, Homo sapien
atttcaagaatagggaaggtaactg

SEQ ID NO: 5197882 - DNA, 25 bp, Homo sapien
tttcttttccacgatgacccaacca

SEQ ID NO: 5197883 - DNA, 25 bp, Homo sapien
ttcttttccacgatgacccaaccac

SEQ ID NO: 5197884 - DNA, 25 bp, Homo sapien
tcttttccacgatgacccaaccaca

SEQ ID NO: 5197885 - DNA, 25 bp, Homo sapien
ttttccacgatgacccaaccacaag

SEQ ID NO: 5197886 - DNA, 25 bp, Homo sapien
tccggattcttcagtataagaagac

SEQ ID NO: 5197887 - DNA, 25 bp, Homo sapien
tttccggattcttcagtataagaag

SEQ ID NO: 5197888 - DNA, 25 bp, Homo sapien
ttccggattcttcagtataagaaga

SEQ ID NO: 5197889 - DNA, 25 bp, Homo sapien
gactgagcttctagtaataattcca

SEQ ID NO: 5197890 - DNA, 25 bp, Homo sapien
cacatcagataattggccagagaac

SEQ ID NO: 5197891 - DNA, 25 bp, Homo sapien
gcggccccgtgtgaaatgatgccac

SEQ ID NO: 5197892 - DNA, 25 bp, Homo sapien
gatgccacctctgctacaatcaaga

SEQ ID NO: 5197893 - DNA, 25 bp, Homo sapien
cctttagcagaacctacaagctcca

SEQ ID NO: 5197894 - DNA, 25 bp, Homo sapien
attcctaaggccacagtgcgaccca

SEQ ID NO: 5197895 - DNA, 25 bp, Homo sapien
ttcgctgcggtctgaaagagctgtc

SEQ ID NO: 5197896 - DNA, 25 bp, Homo sapien
tgtcgtgtgtgcaaacttcgctgcg

SEQ ID NO: 5197897 - DNA, 25 bp, Homo sapien
tcctaaatggagagggctgatctgt

SEQ ID NO: 5197898 - DNA, 25 bp, Homo sapien
cttggggtccgctcgttcgtgccgt

SEQ ID NO: 5197899 - DNA, 25 bp, Homo sapien
ggtccgctcgttcgtgccgtccgag

SEQ ID NO: 5197900 - DNA, 25 bp, Homo sapien
ttccgtgaccacgactggacccctc

SEQ ID NO: 5197901 - DNA, 25 bp, Homo sapien
actatccttggggtccgctcgttcg

SEQ ID NO: 5197902 - DNA, 25 bp, Homo sapien
tttcagtgcaaatggtagaactaga

SEQ ID NO: 5197903 - DNA, 25 bp, Homo sapien
gcagaatggtagacaagaaacgaaa

SEQ ID NO: 5197904 - DNA, 25 bp, Homo sapien
ctagaaagggaagaactctgtatgt

SEQ ID NO: 5197905 - DNA, 25 bp, Homo sapien
gctttctaagaagtgtgtccctatt

SEQ ID NO: 5197906 - DNA, 25 bp, Homo sapien
ctgcatctgctgcatctaccatcaa

SEQ ID NO: 5197907 - DNA, 25 bp, Homo sapien
gctgcatctaccatcaatgggcaat

SEQ ID NO: 5197908 - DNA, 25 bp, Homo sapien
aggtcctctggtcatgccaggtttg

SEQ ID NO: 5197909 - DNA, 25 bp, Homo sapien
tctgctgcatctaccatcaatgggc

SEQ ID NO: 5197910 - DNA, 25 bp, Homo sapien
tgggggaggtctcaaaaatccacat

SEQ ID NO: 5197911 - DNA, 25 bp, Homo sapien
cattctaactattatcagagccaga

SEQ ID NO: 5197912 - DNA, 25 bp, Homo sapien
taactattatcagagccagagttgg

SEQ ID NO: 5197913 - DNA, 25 bp, Homo sapien
tctaactattatcagagccagagtt

SEQ ID NO: 5197914 - DNA, 25 bp, Homo sapien
aagtcacagaaattttgcgagaggt

SEQ ID NO: 5197915 - DNA, 25 bp, Homo sapien
ttccctaaggggagagctatcataa

SEQ ID NO: 5197916 - DNA, 25 bp, Homo sapien
ggaaaaggccctaaaccacatgatg

SEQ ID NO: 5197917 - DNA, 25 bp, Homo sapien
gcgaaggtcaattagaacttcccta

SEQ ID NO: 5197918 - DNA, 25 bp, Homo sapien
gatttgtcgtaagccattgcactct

SEQ ID NO: 5197919 - DNA, 25 bp, Homo sapien
gaacctgatgaggataggagcaccc

SEQ ID NO: 5197920 - DNA, 25 bp, Homo sapien
tgatgcccacatagatgggaacctg

SEQ ID NO: 5197921 - DNA, 25 bp, Homo sapien
taaatattctagttggcccttccag

SEQ ID NO: 5197922 - DNA, 25 bp, Homo sapien
ttcttttgactgtgcacctaccgag

SEQ ID NO: 5197923 - DNA, 25 bp, Homo sapien
acctaccgagactgcaaaactgcca

SEQ ID NO: 5197924 - DNA, 25 bp, Homo sapien
caggaaggacatgagataatttgaa

SEQ ID NO: 5197925 - DNA, 25 bp, Homo sapien
tagggtgagcatcactcaggaagga

SEQ ID NO: 5197926 - DNA, 25 bp, Homo sapien
gtgaggtttctgtctctaaacgaga

SEQ ID NO: 5197927 - DNA, 25 bp, Homo sapien
tttctgtctctaaacgagagcttcc

SEQ ID NO: 5197928 - DNA, 25 bp, Homo sapien
gaggtttctgtctctaaacgagagc

SEQ ID NO: 5197929 - DNA, 25 bp, Homo sapien
ctgtctctaaacgagagcttcctaa

SEQ ID NO: 5197930 - DNA, 25 bp, Homo sapien
aatccataactaaatgcacgggcaa

SEQ ID NO: 5197931 - DNA, 25 bp, Homo sapien
gcacgggcaacatcaagagcatata

SEQ ID NO: 5197932 - DNA, 25 bp, Homo sapien
ttacgaagactgtgattgtaggctg

SEQ ID NO: 5197933 - DNA, 25 bp, Homo sapien
gcacacaacccagaaggtaatttgg

SEQ ID NO: 5197934 - DNA, 25 bp, Homo sapien
cagaaaacatgtagctgcagtgaat

SEQ ID NO: 5197935 - DNA, 25 bp, Homo sapien
ttttgccccgagaacaatacactgc

SEQ ID NO: 5197936 - DNA, 25 bp, Homo sapien
tgttgtgccgttggattcgaaaccc

SEQ ID NO: 5197937 - DNA, 25 bp, Homo sapien
tctccgacccttggaataataggcc

SEQ ID NO: 5197938 - DNA, 25 bp, Homo sapien
ttccgcacccaccaagaaatagcag

SEQ ID NO: 5197939 - DNA, 25 bp, Homo sapien
tctgctggtaaatgctcctttccta

SEQ ID NO: 5197940 - DNA, 25 bp, Homo sapien
caggtcctgacatgggaatggaacc

SEQ ID NO: 5197941 - DNA, 25 bp, Homo sapien
attgactgaatgcacacaagtgccc

SEQ ID NO: 5197942 - DNA, 25 bp, Homo sapien
cccatcaccagtgagccatgtgaga

SEQ ID NO: 5197943 - DNA, 25 bp, Homo sapien
tgagaaccgtgcagtttgccacaaa

SEQ ID NO: 5197944 - DNA, 25 bp, Homo sapien
tgagccatgtgagaaccgtgcagtt

SEQ ID NO: 5197945 - DNA, 25 bp, Homo sapien
tcaccagtgagccatgtgagaaccg

SEQ ID NO: 5197946 - DNA, 25 bp, Homo sapien
aggttgcacaggcatggccacgtgt

SEQ ID NO: 5197947 - DNA, 25 bp, Homo sapien
cgtgtcgaatgtggcgccagcacga

SEQ ID NO: 5197948 - DNA, 25 bp, Homo sapien
gacgggctggccctttataccgcag

SEQ ID NO: 5197949 - DNA, 25 bp, Homo sapien
gggctggccctttataccgcagttc

SEQ ID NO: 5197950 - DNA, 25 bp, Homo sapien
agatccaatgatgttctcttctcaa

SEQ ID NO: 5197951 - DNA, 25 bp, Homo sapien
ttagctgccagatccaatgatgttc

SEQ ID NO: 5197952 - DNA, 25 bp, Homo sapien
tattttagctgccagatccaatgat

SEQ ID NO: 5197953 - DNA, 25 bp, Homo sapien
gctgccagatccaatgatgttctct

SEQ ID NO: 5197954 - DNA, 25 bp, Homo sapien
gaaatgcgccctgcgggttgactct

SEQ ID NO: 5197955 - DNA, 25 bp, Homo sapien
ctttcaatcccaccactggacatgc

SEQ ID NO: 5197956 - DNA, 25 bp, Homo sapien
ttcactgccggtggcagagtctttt

SEQ ID NO: 5197957 - DNA, 25 bp, Homo sapien
gattgttaggagttggttcactgcc

SEQ ID NO: 5197958 - DNA, 25 bp, Homo sapien
tcgtccagtacctgctggagcggcc

SEQ ID NO: 5197959 - DNA, 25 bp, Homo sapien
aggtctcgtccagtacctgctggag

SEQ ID NO: 5197960 - DNA, 25 bp, Homo sapien
ctgaggtctcgtccagtacctgctg

SEQ ID NO: 5197961 - DNA, 25 bp, Homo sapien
tctcgtccagtacctgctggagcgg

SEQ ID NO: 5197962 - DNA, 25 bp, Homo sapien
atagcaacctgagttccaaagcaag

SEQ ID NO: 5197963 - DNA, 25 bp, Homo sapien
tccagtcaaaggtttctatagcaac

SEQ ID NO: 5197964 - DNA, 25 bp, Homo sapien
aggttcaggccacattttcacaaac

SEQ ID NO: 5197965 - DNA, 25 bp, Homo sapien
aagcaaggttcaggccacattttca

SEQ ID NO: 5197966 - DNA, 25 bp, Homo sapien
ccagagttctgtagggttgattgca

SEQ ID NO: 5197967 - DNA, 25 bp, Homo sapien
gcctgaagaccagagttctgtaggg

SEQ ID NO: 5197968 - DNA, 25 bp, Homo sapien
tgcagagagaatcatcagcttttgt

SEQ ID NO: 5197969 - DNA, 25 bp, Homo sapien
caagtatatgctctcctctgaagcc

SEQ ID NO: 5197970 - DNA, 25 bp, Homo sapien
gagctgcagccaataagatcaagtg

SEQ ID NO: 5197971 - DNA, 25 bp, Homo sapien
gccaataagatcaagtgcagccatt

SEQ ID NO: 5197972 - DNA, 25 bp, Homo sapien
ccccatattggagctgcagccaata

SEQ ID NO: 5197973 - DNA, 25 bp, Homo sapien
tattggagctgcagccaataagatc

SEQ ID NO: 5197974 - DNA, 25 bp, Homo sapien
tggcccagtggtggctcccaagatc

SEQ ID NO: 5197975 - DNA, 25 bp, Homo sapien
caagatctttactcagggacctggg

SEQ ID NO: 5197976 - DNA, 25 bp, Homo sapien
aggctggtcatgctgggtctctcaa

SEQ ID NO: 5197977 - DNA, 25 bp, Homo sapien
ggctttgcagagcaatcatgatgca

SEQ ID NO: 5197978 - DNA, 25 bp, Homo sapien
ctttcttgtaaatgctgacacattc

SEQ ID NO: 5197979 - DNA, 25 bp, Homo sapien
ttcttgtaaatgctgacacattcag

SEQ ID NO: 5197980 - DNA, 25 bp, Homo sapien
cttgtaaatgctgacacattcagaa

SEQ ID NO: 5197981 - DNA, 25 bp, Homo sapien
tcttgtaaatgctgacacattcaga

SEQ ID NO: 5197982 - DNA, 25 bp, Homo sapien
ggctggtattcaggcccaaatacaa

SEQ ID NO: 5197983 - DNA, 25 bp, Homo sapien
gcagtatctcgcctccttggcaggt

SEQ ID NO: 5197984 - DNA, 25 bp, Homo sapien
ggaatgagtaaaagctgttttctcc

SEQ ID NO: 5197985 - DNA, 25 bp, Homo sapien
aggatgatgtatggaatagctggca

SEQ ID NO: 5197986 - DNA, 25 bp, Homo sapien
aatggtcaccgagctgtgtaaatac

SEQ ID NO: 5197987 - DNA, 25 bp, Homo sapien
cagtttggatacacaatccctttct

SEQ ID NO: 5197988 - DNA, 25 bp, Homo sapien
aggcacagatcctcttttctggctg

SEQ ID NO: 5197989 - DNA, 25 bp, Homo sapien
ttcttcaatggtcaccgagctgtgt

SEQ ID NO: 5197990 - DNA, 25 bp, Homo sapien
ggttacacatagagctactcaccag

SEQ ID NO: 5197991 - DNA, 25 bp, Homo sapien
gaggacacctcttgactgacacttt

SEQ ID NO: 5197992 - DNA, 25 bp, Homo sapien
tcccttgtttcacccaggagaagaa

SEQ ID NO: 5197993 - DNA, 25 bp, Homo sapien
tcactgaaaacgagagggtttccac

SEQ ID NO: 5197994 - DNA, 25 bp, Homo sapien
gccggagaccgacaatggattatta

SEQ ID NO: 5197995 - DNA, 25 bp, Homo sapien
aaatgatgtttgttgccgcgaaggt

SEQ ID NO: 5197996 - DNA, 25 bp, Homo sapien
tattgatcgctgattgcaagggagc

SEQ ID NO: 5197997 - DNA, 25 bp, Homo sapien
gataaaagaggtcgcactcgctgcc

SEQ ID NO: 5197998 - DNA, 25 bp, Homo sapien
tagtgaatggaacatcagtagaccc

SEQ ID NO: 5197999 - DNA, 25 bp, Homo sapien
aatagggcttttactcactacagac

SEQ ID NO: 5198000 - DNA, 25 bp, Homo sapien
tttgcacaaacggaaggtactggac

SEQ ID NO: 5198001 - DNA, 25 bp, Homo sapien
cagtagaccccagattcaagttcca

SEQ ID NO: 5198002 - DNA, 25 bp, Homo sapien
cctttccggtaacagaatgagtggg

SEQ ID NO: 5198003 - DNA, 25 bp, Homo sapien
cttgtgcatgagaatggatgcatcc

SEQ ID NO: 5198004 - DNA, 25 bp, Homo sapien
cacatgtaccaaggaacgaatgaac

SEQ ID NO: 5198005 - DNA, 25 bp, Homo sapien
gcaaggaagtagcaaataggacaga

SEQ ID NO: 5198006 - DNA, 25 bp, Homo sapien
tctgtctagagccatggagtagcca

SEQ ID NO: 5198007 - DNA, 25 bp, Homo sapien
gtctagagccatggagtagccattc

SEQ ID NO: 5198008 - DNA, 25 bp, Homo sapien
ctgctctgtctagagccatggagta

SEQ ID NO: 5198009 - DNA, 25 bp, Homo sapien
gggctgctctgtctagagccatgga

SEQ ID NO: 5198010 - DNA, 25 bp, Homo sapien
agcaataaaaaggtactcctgatac

SEQ ID NO: 5198011 - DNA, 25 bp, Homo sapien
cagtcttgcctgaacaacggttggg

SEQ ID NO: 5198012 - DNA, 25 bp, Homo sapien
tataatgacagaaaatagggcagtc

SEQ ID NO: 5198013 - DNA, 25 bp, Homo sapien
gaggaattgtcagaggtatttgaac

SEQ ID NO: 5198014 - DNA, 25 bp, Homo sapien
tgtgagcacagtatatttctctcca

SEQ ID NO: 5198015 - DNA, 25 bp, Homo sapien
tagcagtttcttatgtaggtaaacg

SEQ ID NO: 5198016 - DNA, 25 bp, Homo sapien
ctgaaatagacagttcatagctatc

SEQ ID NO: 5198017 - DNA, 25 bp, Homo sapien
gtcgttttcagtgttcagagcatac

SEQ ID NO: 5198018 - DNA, 25 bp, Homo sapien
tatggtatttatacttctggatctt

SEQ ID NO: 5198019 - DNA, 25 bp, Homo sapien
tatacttctggatcttattatgtcc

SEQ ID NO: 5198020 - DNA, 25 bp, Homo sapien
cttattatgtcctcttgatattccc

SEQ ID NO: 5198021 - DNA, 25 bp, Homo sapien
tcttgatattccctgcccctcaatc

SEQ ID NO: 5198022 - DNA, 25 bp, Homo sapien
ctcagtcaacgtgggctgctgagat

SEQ ID NO: 5198023 - DNA, 25 bp, Homo sapien
gtaaaatgctcgttctcagactcag

SEQ ID NO: 5198024 - DNA, 25 bp, Homo sapien
cacactccataaccttttgtaaaat

SEQ ID NO: 5198025 - DNA, 25 bp, Homo sapien
tctcagactcagtcaacgtgggctg

SEQ ID NO: 5198026 - DNA, 25 bp, Homo sapien
ggtgcccttagagtcattagcagca

SEQ ID NO: 5198027 - DNA, 25 bp, Homo sapien
catgttctgtatctgaggtgccctt

SEQ ID NO: 5198028 - DNA, 25 bp, Homo sapien
tggtccccgccactaaatagagctg

SEQ ID NO: 5198029 - DNA, 25 bp, Homo sapien
tcctcatgggaactagagcttcagc

SEQ ID NO: 5198030 - DNA, 25 bp, Homo sapien
tatcctgtatcctggatagttgctc

SEQ ID NO: 5198031 - DNA, 25 bp, Homo sapien
tcctgtatcctggatagttgctcat

SEQ ID NO: 5198032 - DNA, 25 bp, Homo sapien
atcctgtatcctggatagttgctca

SEQ ID NO: 5198033 - DNA, 25 bp, Homo sapien
tttgacaagtatatcctgtatcctg

SEQ ID NO: 5198034 - DNA, 25 bp, Homo sapien
ggaatgagagctaatgtaattggtt

SEQ ID NO: 5198035 - DNA, 25 bp, Homo sapien
gattcctgtctggtcaaccacatag

SEQ ID NO: 5198036 - DNA, 25 bp, Homo sapien
tatctggattgcacactcaggcagc

SEQ ID NO: 5198037 - DNA, 25 bp, Homo sapien
ggacatatcgagaaggtatctgggt

SEQ ID NO: 5198038 - DNA, 25 bp, Homo sapien
gccacaatatgagctatggcagcca

SEQ ID NO: 5198039 - DNA, 25 bp, Homo sapien
aagccacaatatgagctatggcagc

SEQ ID NO: 5198040 - DNA, 25 bp, Homo sapien
agccacaatatgagctatggcagcc

SEQ ID NO: 5198041 - DNA, 25 bp, Homo sapien
tggccaacatataggcgataaaggc

SEQ ID NO: 5198042 - DNA, 25 bp, Homo sapien
gaagctggtgctaacaaggacagga

SEQ ID NO: 5198043 - DNA, 25 bp, Homo sapien
ccaaagctttgtggaccgtgggaag

SEQ ID NO: 5198044 - DNA, 25 bp, Homo sapien
gatgatttggaaccagaccggagaa

SEQ ID NO: 5198045 - DNA, 25 bp, Homo sapien
gtgggacgcttgctgcagaaacacc

SEQ ID NO: 5198046 - DNA, 25 bp, Homo sapien
ctgtgtagtcagcatgcagatgaga

SEQ ID NO: 5198047 - DNA, 25 bp, Homo sapien
tgtagtcagcatgcagatgagagtg

SEQ ID NO: 5198048 - DNA, 25 bp, Homo sapien
agatgagagtgggacgcttgctgca

SEQ ID NO: 5198049 - DNA, 25 bp, Homo sapien
tgaaatggagtggtagggaaagaat

SEQ ID NO: 5198050 - DNA, 25 bp, Homo sapien
tgtgaaatggagtggtagggaaaga

SEQ ID NO: 5198051 - DNA, 25 bp, Homo sapien
gtgaaatggagtggtagggaaagaa

SEQ ID NO: 5198052 - DNA, 25 bp, Homo sapien
gtgtgaaatggagtggtagggaaag

SEQ ID NO: 5198053 - DNA, 25 bp, Homo sapien
agatcctgaaggtccagggtgctga

SEQ ID NO: 5198054 - DNA, 25 bp, Homo sapien
gtccagggtgctgagctccagtcat

SEQ ID NO: 5198055 - DNA, 25 bp, Homo sapien
gcaccagatcctgaaggtccagggt

SEQ ID NO: 5198056 - DNA, 25 bp, Homo sapien
tcctgaaggtccagggtgctgagct

SEQ ID NO: 5198057 - DNA, 25 bp, Homo sapien
agcacctcagtgtgaggtttcccag

SEQ ID NO: 5198058 - DNA, 25 bp, Homo sapien
gagcacctcagtgtgaggtttccca

SEQ ID NO: 5198059 - DNA, 25 bp, Homo sapien
ggcagatccaggtggctggcagctc

SEQ ID NO: 5198060 - DNA, 25 bp, Homo sapien
tccgggccagcagttgcaggtagtg

SEQ ID NO: 5198061 - DNA, 25 bp, Homo sapien
tcggtatcaaggtaggagccaattt

SEQ ID NO: 5198062 - DNA, 25 bp, Homo sapien
caaggtaggagccaatttgtaggca

SEQ ID NO: 5198063 - DNA, 25 bp, Homo sapien
tctccccctcggtatcaaggtagga

SEQ ID NO: 5198064 - DNA, 25 bp, Homo sapien
cccctcggtatcaaggtaggagcca

SEQ ID NO: 5198065 - DNA, 25 bp, Homo sapien
acattgtaacaagctcccaatcttt

SEQ ID NO: 5198066 - DNA, 25 bp, Homo sapien
gacattgtaacaagctcccaatctt

SEQ ID NO: 5198067 - DNA, 25 bp, Homo sapien
ttgtaacaagctcccaatcttttct

SEQ ID NO: 5198068 - DNA, 25 bp, Homo sapien
cattgtaacaagctcccaatctttt

SEQ ID NO: 5198069 - DNA, 25 bp, Homo sapien
tggctgtaaactgtttctccactgg

SEQ ID NO: 5198070 - DNA, 25 bp, Homo sapien
ctcggaatggctgtaaactgtttct

SEQ ID NO: 5198071 - DNA, 25 bp, Homo sapien
ctaaatccctccacattgttcacat

SEQ ID NO: 5198072 - DNA, 25 bp, Homo sapien
acatttctcggaatggctgtaaact

SEQ ID NO: 5198073 - DNA, 25 bp, Homo sapien
tgccacccagcttgacatcagcagg

SEQ ID NO: 5198074 - DNA, 25 bp, Homo sapien
gggaattcaccaaatgtcagcatgc

SEQ ID NO: 5198075 - DNA, 25 bp, Homo sapien
gaagctccaggatttacccatgtgg

SEQ ID NO: 5198076 - DNA, 25 bp, Homo sapien
gggtcaacaccagtcaacacttagg

SEQ ID NO: 5198077 - DNA, 25 bp, Homo sapien
ggctgaagccagttgtaagggacct

SEQ ID NO: 5198078 - DNA, 25 bp, Homo sapien
ccttcttcaagtaagggagtaactg

SEQ ID NO: 5198079 - DNA, 25 bp, Homo sapien
gaggaatcatcgaagccttcttcaa

SEQ ID NO: 5198080 - DNA, 25 bp, Homo sapien
agggacctctgaatcatgtgcagaa

SEQ ID NO: 5198081 - DNA, 25 bp, Homo sapien
ggaatttcggtgactatagccatgt

SEQ ID NO: 5198082 - DNA, 25 bp, Homo sapien
aaagatgctccctgcaagaacagaa

SEQ ID NO: 5198083 - DNA, 25 bp, Homo sapien
gaaagattctggtggttctctgatg

SEQ ID NO: 5198084 - DNA, 25 bp, Homo sapien
ggcctttatcttctggatgcattgc

SEQ ID NO: 5198085 - DNA, 25 bp, Homo sapien
tagacttgctccacaaagagttgcc

SEQ ID NO: 5198086 - DNA, 25 bp, Homo sapien
caaagagttgcccaaaccgtccatt

SEQ ID NO: 5198087 - DNA, 25 bp, Homo sapien
aaatggcaccgatagacttgctcca

SEQ ID NO: 5198088 - DNA, 25 bp, Homo sapien
gagttgcccaaaccgtccatttgca

SEQ ID NO: 5198089 - DNA, 25 bp, Homo sapien
cattcttgtgtaccattcttgtgtg

SEQ ID NO: 5198090 - DNA, 25 bp, Homo sapien
taccattcttgctgtgcttccaaga

SEQ ID NO: 5198091 - DNA, 25 bp, Homo sapien
tgtacaacacaatagccctgcttgg

SEQ ID NO: 5198092 - DNA, 25 bp, Homo sapien
ttccaagagaaagcccaacttgttc

SEQ ID NO: 5198093 - DNA, 25 bp, Homo sapien
actgtccttgtcacctctccccctt

SEQ ID NO: 5198094 - DNA, 25 bp, Homo sapien
gggttgtgggctttcactgtccttg

SEQ ID NO: 5198095 - DNA, 25 bp, Homo sapien
tctcccccttcaggctgccagatgg

SEQ ID NO: 5198096 - DNA, 25 bp, Homo sapien
tcaggctgccagatgggaacccaca

SEQ ID NO: 5198097 - DNA, 25 bp, Homo sapien
ttcagagactttcgcccttgccact

SEQ ID NO: 5198098 - DNA, 25 bp, Homo sapien
taatatgcagcaaagccatgaagag

SEQ ID NO: 5198099 - DNA, 25 bp, Homo sapien
cagctgcatgactgagtcgaagcca

SEQ ID NO: 5198100 - DNA, 25 bp, Homo sapien
catgggcacatctcggccttcagag

SEQ ID NO: 5198101 - DNA, 25 bp, Homo sapien
ggaaccatcaagtgctgcaagccca

SEQ ID NO: 5198102 - DNA, 25 bp, Homo sapien
gcagaatcttctgttggtagaaatg

SEQ ID NO: 5198103 - DNA, 25 bp, Homo sapien
taataggggcctttgtaagagcagg

SEQ ID NO: 5198104 - DNA, 25 bp, Homo sapien
cttccaggacgcctcggcatcaggg

SEQ ID NO: 5198105 - DNA, 25 bp, Homo sapien
ttaggatgacattatgtgtagatgc

SEQ ID NO: 5198106 - DNA, 25 bp, Homo sapien
caacgtttgtagtaattatggaaga

SEQ ID NO: 5198107 - DNA, 25 bp, Homo sapien
tgtgtagatgcttttacaacttctt

SEQ ID NO: 5198108 - DNA, 25 bp, Homo sapien
gaaacgatctggaatcggagcccaa

SEQ ID NO: 5198109 - DNA, 25 bp, Homo sapien
gagaaacatgtgatacccgcattgg

SEQ ID NO: 5198110 - DNA, 25 bp, Homo sapien
tgctttagacaaatcaggcctcagg

SEQ ID NO: 5198111 - DNA, 25 bp, Homo sapien
tgggcaggaatgtaggcttgacctc

SEQ ID NO: 5198112 - DNA, 25 bp, Homo sapien
gagctgtcaggatccaatgtccagt

SEQ ID NO: 5198113 - DNA, 25 bp, Homo sapien
tgtaaagatccaaagttcccttgct

SEQ ID NO: 5198114 - DNA, 25 bp, Homo sapien
gaagccgttgtttcctgtacacaaa

SEQ ID NO: 5198115 - DNA, 25 bp, Homo sapien
ttctccaccagaaaggacggctctc

SEQ ID NO: 5198116 - DNA, 25 bp, Homo sapien
caatttggagaccataataagcagt

SEQ ID NO: 5198117 - DNA, 25 bp, Homo sapien
gtaattatttatggcttgttatcta

SEQ ID NO: 5198118 - DNA, 25 bp, Homo sapien
tgtaattatttatggcttgttatct

SEQ ID NO: 5198119 - DNA, 25 bp, Homo sapien
ggcagctcgcgaccgctgaatgagc

SEQ ID NO: 5198120 - DNA, 25 bp, Homo sapien
cggccgctccccctcgcgggcagct

SEQ ID NO: 5198121 - DNA, 25 bp, Homo sapien
ccctcgcgggcagctcgcgaccgct

SEQ ID NO: 5198122 - DNA, 25 bp, Homo sapien
ctgcgctccgggctgggtccgaggc

SEQ ID NO: 5198123 - DNA, 25 bp, Homo sapien
catatttccggatcacgttgtcctc

SEQ ID NO: 5198124 - DNA, 25 bp, Homo sapien
tgtcctcgggctgcagttgccagtg

SEQ ID NO: 5198125 - DNA, 25 bp, Homo sapien
tgtccaagttgaaggctgcgccgag

SEQ ID NO: 5198126 - DNA, 25 bp, Homo sapien
cgccgacaggtagagcaagcacagc

SEQ ID NO: 5198127 - DNA, 25 bp, Homo sapien
aaatagccgatcatgtgggaaccaa

SEQ ID NO: 5198128 - DNA, 25 bp, Homo sapien
gcttaaatagccgatcatgtgggaa

SEQ ID NO: 5198129 - DNA, 25 bp, Homo sapien
cctctccggcttaaatagccgatca

SEQ ID NO: 5198130 - DNA, 25 bp, Homo sapien
ccggcttaaatagccgatcatgtgg

SEQ ID NO: 5198131 - DNA, 25 bp, Homo sapien
aattccctctgctggcccacaatca

SEQ ID NO: 5198132 - DNA, 25 bp, Homo sapien
gaattccctctgctggcccacaatc

SEQ ID NO: 5198133 - DNA, 25 bp, Homo sapien
agagagaatgcccaggagaatgaat

SEQ ID NO: 5198134 - DNA, 25 bp, Homo sapien
attccctctgctggcccacaatcat

SEQ ID NO: 5198135 - DNA, 25 bp, Homo sapien
tatttcaaggaagccaccggtttca

SEQ ID NO: 5198136 - DNA, 25 bp, Homo sapien
ttcacgacacagattcctggcaaag

SEQ ID NO: 5198137 - DNA, 25 bp, Homo sapien
gtttcgcaaatctccactgccagga

SEQ ID NO: 5198138 - DNA, 25 bp, Homo sapien
gattcctggcaaagtcacgtttcgc

SEQ ID NO: 5198139 - DNA, 25 bp, Homo sapien
tgcctcagctctaataccagagaag

SEQ ID NO: 5198140 - DNA, 25 bp, Homo sapien
gaagcccagcagcagtaacaagttt

SEQ ID NO: 5198141 - DNA, 25 bp, Homo sapien
tcgggaggagttgcctcagctctaa

SEQ ID NO: 5198142 - DNA, 25 bp, Homo sapien
taacaagttttagcaagcatgctgc

SEQ ID NO: 5198143 - DNA, 25 bp, Homo sapien
attccgtttcctcagaggcagaaga

SEQ ID NO: 5198144 - DNA, 25 bp, Homo sapien
agattccgtttcctcagaggcagaa

SEQ ID NO: 5198145 - DNA, 25 bp, Homo sapien
ttcctcagaggcagaagacaccaag

SEQ ID NO: 5198146 - DNA, 25 bp, Homo sapien
cctcagaggcagaagacaccaaggc

SEQ ID NO: 5198147 - DNA, 25 bp, Homo sapien
ttgtgcgtttctttgctaagcttac

SEQ ID NO: 5198148 - DNA, 25 bp, Homo sapien
cgtcttgtgcgtttctttgctaagc

SEQ ID NO: 5198149 - DNA, 25 bp, Homo sapien
aacgtcttgtgcgtttctttgctaa

SEQ ID NO: 5198150 - DNA, 25 bp, Homo sapien
ttaacgtcttgtgcgtttctttgct

SEQ ID NO: 5198151 - DNA, 25 bp, Homo sapien
caaaggctgttggtgccaggtatac

SEQ ID NO: 5198152 - DNA, 25 bp, Homo sapien
taagaagctcacaaaccaacaggac

SEQ ID NO: 5198153 - DNA, 25 bp, Homo sapien
catagcagtccttaaccggattgga

SEQ ID NO: 5198154 - DNA, 25 bp, Homo sapien
tatgcacgggatttagcaaggccag

SEQ ID NO: 5198155 - DNA, 25 bp, Homo sapien
tcacagttcaggaccctcagtaagc

SEQ ID NO: 5198156 - DNA, 25 bp, Homo sapien
acacagataaatcagacccaaaccc

SEQ ID NO: 5198157 - DNA, 25 bp, Homo sapien
gttaaagctctaggcaaacacagat

SEQ ID NO: 5198158 - DNA, 25 bp, Homo sapien
caagtgtcaggctctgttaaagctc

SEQ ID NO: 5198159 - DNA, 25 bp, Homo sapien
tactaacagcttagccttacagcag

SEQ ID NO: 5198160 - DNA, 25 bp, Homo sapien
gaggcagtgattctaatttccagca

SEQ ID NO: 5198161 - DNA, 25 bp, Homo sapien
ttgagaaaccaaagctagggctgag

SEQ ID NO: 5198162 - DNA, 25 bp, Homo sapien
gactgctctgccctatgctgtgacg

SEQ ID NO: 5198163 - DNA, 25 bp, Homo sapien
tatgcagcacaactcgtgtcaccgg

SEQ ID NO: 5198164 - DNA, 25 bp, Homo sapien
cccacctatgcaatgagacgttgag

SEQ ID NO: 5198165 - DNA, 25 bp, Homo sapien
caccagaggtcgtcactgccaagtg

SEQ ID NO: 5198166 - DNA, 25 bp, Homo sapien
tatctcacagttccttagggccaca

SEQ ID NO: 5198167 - DNA, 25 bp, Homo sapien
tgcggcggctactgcagatgacagc

SEQ ID NO: 5198168 - DNA, 25 bp, Homo sapien
aaggacaacagattcgaaaagagac

SEQ ID NO: 5198169 - DNA, 25 bp, Homo sapien
tggggaaaaaggacaacagattcga

SEQ ID NO: 5198170 - DNA, 25 bp, Homo sapien
tgacagcagaccacatggcaggatg

SEQ ID NO: 5198171 - DNA, 25 bp, Homo sapien
taagagatgacagcgggactggagg

SEQ ID NO: 5198172 - DNA, 25 bp, Homo sapien
ctaagagatgacagcgggactggag

SEQ ID NO: 5198173 - DNA, 25 bp, Homo sapien
actaagagatgacagcgggactgga

SEQ ID NO: 5198174 - DNA, 25 bp, Homo sapien
ggtgccaggatcagaggcccagaac

SEQ ID NO: 5198175 - DNA, 25 bp, Homo sapien
gaaccccaggactttcacactggaa

SEQ ID NO: 5198176 - DNA, 25 bp, Homo sapien
taagtggggtgccaggatcagaggc

SEQ ID NO: 5198177 - DNA, 25 bp, Homo sapien
gagggtgctggaagggataagtggg

SEQ ID NO: 5198178 - DNA, 25 bp, Homo sapien
gaggtgaactgcctagactataagg

SEQ ID NO: 5198179 - DNA, 25 bp, Homo sapien
tactgtacttggcagatgtcagagg

SEQ ID NO: 5198180 - DNA, 25 bp, Homo sapien
ctataaggtgaatgtgttaaattac

SEQ ID NO: 5198181 - DNA, 25 bp, Homo sapien
aaattactgtacttggcagatgtca

SEQ ID NO: 5198182 - DNA, 25 bp, Homo sapien
tgtccttggtgcctgaaccttcttg

SEQ ID NO: 5198183 - DNA, 25 bp, Homo sapien
ccgatcccaggaatgccaacaaaca

SEQ ID NO: 5198184 - DNA, 25 bp, Homo sapien
tgctccactcctattccagtgatgt

SEQ ID NO: 5198185 - DNA, 25 bp, Homo sapien
gtccccgatcccaggaatgccaaca

SEQ ID NO: 5198186 - DNA, 25 bp, Homo sapien
catttgaaggaacaaaacagcacac

SEQ ID NO: 5198187 - DNA, 25 bp, Homo sapien
cagcacacaccaaggtacagaactg

SEQ ID NO: 5198188 - DNA, 25 bp, Homo sapien
caaaacagcacacaccaaggtacag

SEQ ID NO: 5198189 - DNA, 25 bp, Homo sapien
cctacatttgaaggaacaaaacagc

SEQ ID NO: 5198190 - DNA, 25 bp, Homo sapien
aacgcacaaacacaactaaacaggg

SEQ ID NO: 5198191 - DNA, 25 bp, Homo sapien
tatggctggttcatgcaaaacgcac

SEQ ID NO: 5198192 - DNA, 25 bp, Homo sapien
tcttcaacagcttaggcagtgagtg

SEQ ID NO: 5198193 - DNA, 25 bp, Homo sapien
gaacaaatgtagagtcctatggctg

SEQ ID NO: 5198194 - DNA, 25 bp, Homo sapien
tatcaaactcgatccgcgtgcatgg

SEQ ID NO: 5198195 - DNA, 25 bp, Homo sapien
gcggtgatgtcgcagctgtacagcc

SEQ ID NO: 5198196 - DNA, 25 bp, Homo sapien
tctgcagtggaagcgcttctgcccg

SEQ ID NO: 5198197 - DNA, 25 bp, Homo sapien
gctgtacagccctcccgttctgttg

SEQ ID NO: 5198198 - DNA, 25 bp, Homo sapien
ggctgatgaatacaagatacgctca

SEQ ID NO: 5198199 - DNA, 25 bp, Homo sapien
cgcggcatcccagtatgattcagaa

SEQ ID NO: 5198200 - DNA, 25 bp, Homo sapien
tagaaaccacggttaggaggagcag

SEQ ID NO: 5198201 - DNA, 25 bp, Homo sapien
caagctgccggagtgaacgctgagt

SEQ ID NO: 5198202 - DNA, 25 bp, Homo sapien
gaccttggctctggacggtgacccc

SEQ ID NO: 5198203 - DNA, 25 bp, Homo sapien
ttccttgctttctgacgtggggtca

SEQ ID NO: 5198204 - DNA, 25 bp, Homo sapien
ggtgacccccatccactgatcttcc

SEQ ID NO: 5198205 - DNA, 25 bp, Homo sapien
ggaccttggctctggacggtgaccc

SEQ ID NO: 5198206 - DNA, 25 bp, Homo sapien
tcaggacataacaccgcccaaagat

SEQ ID NO: 5198207 - DNA, 25 bp, Homo sapien
gccttttttcatatcggtgagcaca

SEQ ID NO: 5198208 - DNA, 25 bp, Homo sapien
catccatatcgtcttcaatcctgag

SEQ ID NO: 5198209 - DNA, 25 bp, Homo sapien
ccaaagatgtctcgggattcctgct

SEQ ID NO: 5198210 - DNA, 25 bp, Homo sapien
gaatgtcaacaccaaaacatatatt

SEQ ID NO: 5198211 - DNA, 25 bp, Homo sapien
gtccatgttaatacactgttatttg

SEQ ID NO: 5198212 - DNA, 25 bp, Homo sapien
ctacctgaattaaagtaaagtactg

SEQ ID NO: 5198213 - DNA, 25 bp, Homo sapien
tataatatacgaatgtcttctaaca

SEQ ID NO: 5198214 - DNA, 25 bp, Homo sapien
ccaattcgtctgtaatctgcccttc

SEQ ID NO: 5198215 - DNA, 25 bp, Homo sapien
catcatggatgagagttaggttgtc

SEQ ID NO: 5198216 - DNA, 25 bp, Homo sapien
taatcaaacgacttttcctcacata

SEQ ID NO: 5198217 - DNA, 25 bp, Homo sapien
tgcccttctaactctactgaattat

SEQ ID NO: 5198218 - DNA, 25 bp, Homo sapien
caacaaaaaaatgaagatgaaacaa

SEQ ID NO: 5198219 - DNA, 25 bp, Homo sapien
acaacaaaaaaatgaagatgaaaca

SEQ ID NO: 5198220 - DNA, 25 bp, Homo sapien
actttcatcatgctcagtctctcca

SEQ ID NO: 5198221 - DNA, 25 bp, Homo sapien
gaacaggaacgagactttcatcatg

SEQ ID NO: 5198222 - DNA, 25 bp, Homo sapien
agcaggaacaggaacgagactttca

SEQ ID NO: 5198223 - DNA, 25 bp, Homo sapien
ctaagtaactgttagcaggaacagg

SEQ ID NO: 5198224 - DNA, 25 bp, Homo sapien
taggccctgcgagggagtttcacac

SEQ ID NO: 5198225 - DNA, 25 bp, Homo sapien
ctgcgagggagtttcacacaaggta

SEQ ID NO: 5198226 - DNA, 25 bp, Homo sapien
gccataggccctgcgagggagtttc

SEQ ID NO: 5198227 - DNA, 25 bp, Homo sapien
acacaaggtatctgagaaggtgggc

SEQ ID NO: 5198228 - DNA, 25 bp, Homo sapien
gaattggcccttagacacagtctgg

SEQ ID NO: 5198229 - DNA, 25 bp, Homo sapien
cctgtttcaggttacggaggctgcc

SEQ ID NO: 5198230 - DNA, 25 bp, Homo sapien
tgaaagccgttttagcagtcctgct

SEQ ID NO: 5198231 - DNA, 25 bp, Homo sapien
tagtcatgcaaacaagccttaggag

SEQ ID NO: 5198232 - DNA, 25 bp, Homo sapien
aaactgatcaggatctgtataggaa

SEQ ID NO: 5198233 - DNA, 25 bp, Homo sapien
aggatctgtataggaaacgctggtc

SEQ ID NO: 5198234 - DNA, 25 bp, Homo sapien
taggtagctattcatcatcacatca

SEQ ID NO: 5198235 - DNA, 25 bp, Homo sapien
tcagggaatgtgtcaggctgctccc

SEQ ID NO: 5198236 - DNA, 25 bp, Homo sapien
tgtgattggctctgggagcaccaga

SEQ ID NO: 5198237 - DNA, 25 bp, Homo sapien
ggaggagatgtgcagacttcatgtc

SEQ ID NO: 5198238 - DNA, 25 bp, Homo sapien
cttctccatcgaatatgtgctcagg

SEQ ID NO: 5198239 - DNA, 25 bp, Homo sapien
aaatgaagaggccagaccttctcca

SEQ ID NO: 5198240 - DNA, 25 bp, Homo sapien
tactgcaatgccaaacatagaatct

SEQ ID NO: 5198241 - DNA, 25 bp, Homo sapien
tccattaagacgaattggcttcaca

SEQ ID NO: 5198242 - DNA, 25 bp, Homo sapien
tgtagacatacactgcacctccaac

SEQ ID NO: 5198243 - DNA, 25 bp, Homo sapien
tagccatcttgattaatatctccaa

SEQ ID NO: 5198244 - DNA, 25 bp, Homo sapien
gatccatgatagataaaaacctttc

SEQ ID NO: 5198245 - DNA, 25 bp, Homo sapien
ccaagtcatcatacggagctccaac

SEQ ID NO: 5198246 - DNA, 25 bp, Homo sapien
aacctttcccaagtcatcatacgga

SEQ ID NO: 5198247 - DNA, 25 bp, Homo sapien
tcatacggagctccaactgcaatat

SEQ ID NO: 5198248 - DNA, 25 bp, Homo sapien
gcaattgaatatccaaaataaggtg

SEQ ID NO: 5198249 - DNA, 25 bp, Homo sapien
cagggtaggaatttcgatcaaggtc

SEQ ID NO: 5198250 - DNA, 25 bp, Homo sapien
aaatagttactgaatctgagaggga

SEQ ID NO: 5198251 - DNA, 25 bp, Homo sapien
gaaccaacagcaacatcagggtagg

SEQ ID NO: 5198252 - DNA, 25 bp, Homo sapien
gaagcaacgtaaccatccagtgaga

SEQ ID NO: 5198253 - DNA, 25 bp, Homo sapien
gagcaaggcagttggttaaataagc

SEQ ID NO: 5198254 - DNA, 25 bp, Homo sapien
tgaacctgtcagaagatgcctcaca

SEQ ID NO: 5198255 - DNA, 25 bp, Homo sapien
actcagtgacataggaaaagtctac

SEQ ID NO: 5198256 - DNA, 25 bp, Homo sapien
tctgttaggagttactgtgatggtt

SEQ ID NO: 5198257 - DNA, 25 bp, Homo sapien
gttttctggcggaggtcaattctgt

SEQ ID NO: 5198258 - DNA, 25 bp, Homo sapien
tctgaatattaatcacaggccggga

SEQ ID NO: 5198259 - DNA, 25 bp, Homo sapien
gcgccccacacgctgttttctggcg

SEQ ID NO: 5198260 - DNA, 25 bp, Homo sapien
cggggttagcagtatattcaaaaca

SEQ ID NO: 5198261 - DNA, 25 bp, Homo sapien
atattgaaggattataaccagcggg

SEQ ID NO: 5198262 - DNA, 25 bp, Homo sapien
aaccagcggggttagcagtatattc

SEQ ID NO: 5198263 - DNA, 25 bp, Homo sapien
cagcggggttagcagtatattcaaa

SEQ ID NO: 5198264 - DNA, 25 bp, Homo sapien
gttcttgataacctacactaatgga

SEQ ID NO: 5198265 - DNA, 25 bp, Homo sapien
cactgggctagaaggcacagcctgt

SEQ ID NO: 5198266 - DNA, 25 bp, Homo sapien
tacactaatggaacctggagggaag

SEQ ID NO: 5198267 - DNA, 25 bp, Homo sapien
tgggctagaaggcacagcctgttct

SEQ ID NO: 5198268 - DNA, 25 bp, Homo sapien
tgggctcagaaccttggtttcgaaa

SEQ ID NO: 5198269 - DNA, 25 bp, Homo sapien
ctcttgaggatagcccagattttct

SEQ ID NO: 5198270 - DNA, 25 bp, Homo sapien
ccttggtttcgaaactgaactcttg

SEQ ID NO: 5198271 - DNA, 25 bp, Homo sapien
cttgagtatatttgggctcagaacc

SEQ ID NO: 5198272 - DNA, 25 bp, Homo sapien
ggaatgggacgcagtttatctctga

SEQ ID NO: 5198273 - DNA, 25 bp, Homo sapien
caatatgagctgtcttgggttcatc

SEQ ID NO: 5198274 - DNA, 25 bp, Homo sapien
tggatctccactgaggcagttatgg

SEQ ID NO: 5198275 - DNA, 25 bp, Homo sapien
gaagtgaattcactcgcctacgaga

SEQ ID NO: 5198276 - DNA, 25 bp, Homo sapien
ccttctcgggtgcaaaatttatatt

SEQ ID NO: 5198277 - DNA, 25 bp, Homo sapien
tattctagtttaaggttgctgttac

SEQ ID NO: 5198278 - DNA, 25 bp, Homo sapien
tctccacatccctcttttaagaagt

SEQ ID NO: 5198279 - DNA, 25 bp, Homo sapien
tgctgttacatacattgtcgtctcc

SEQ ID NO: 5198280 - DNA, 25 bp, Homo sapien
gccatcttttgtgggattccttggg

SEQ ID NO: 5198281 - DNA, 25 bp, Homo sapien
taaagtgtctggaaacgttgcaatc

SEQ ID NO: 5198282 - DNA, 25 bp, Homo sapien
tgcaatcagtttagcctcatgggcg

SEQ ID NO: 5198283 - DNA, 25 bp, Homo sapien
tatatgcagaataggttaaagtgtc

SEQ ID NO: 5198284 - DNA, 25 bp, Homo sapien
gagccattctggttggcaacacaac

SEQ ID NO: 5198285 - DNA, 25 bp, Homo sapien
tttaaaaggatttccgagctcacag

SEQ ID NO: 5198286 - DNA, 25 bp, Homo sapien
aaggatttccgagctcacagtcagc

SEQ ID NO: 5198287 - DNA, 25 bp, Homo sapien
cagcttgcgagccattctggttggc

SEQ ID NO: 5198288 - DNA, 25 bp, Homo sapien
cttcagattaatatccagatctggg

SEQ ID NO: 5198289 - DNA, 25 bp, Homo sapien
acttcagattaatatccagatctgg

SEQ ID NO: 5198290 - DNA, 25 bp, Homo sapien
gtgtcaaaggtgacttcagttgtac

SEQ ID NO: 5198291 - DNA, 25 bp, Homo sapien
tgacttcagttgtacttaaaaccaa

SEQ ID NO: 5198292 - DNA, 25 bp, Homo sapien
aagcagttcaataaccacttttgct

SEQ ID NO: 5198293 - DNA, 25 bp, Homo sapien
attggagccaaattatcttgattgc

SEQ ID NO: 5198294 - DNA, 25 bp, Homo sapien
cccgagaccgataaaagcagttcaa

SEQ ID NO: 5198295 - DNA, 25 bp, Homo sapien
tagctgtaattggagccaaattatc

SEQ ID NO: 5198296 - DNA, 25 bp, Homo sapien
tgtacctccaaaatacacctgggaa

SEQ ID NO: 5198297 - DNA, 25 bp, Homo sapien
gaattcatactctattaaacttccc

SEQ ID NO: 5198298 - DNA, 25 bp, Homo sapien
gccaacaactgtacctccaaaatac

SEQ ID NO: 5198299 - DNA, 25 bp, Homo sapien
ttcatagcttgctcgccaacaactg

SEQ ID NO: 5198300 - DNA, 25 bp, Homo sapien
ccattgctaatttcttttggccact

SEQ ID NO: 5198301 - DNA, 25 bp, Homo sapien
ctgtgccgaggtttgtaagaggttt

SEQ ID NO: 5198302 - DNA, 25 bp, Homo sapien
cactgaatgttcaaggttgctgtgc

SEQ ID NO: 5198303 - DNA, 25 bp, Homo sapien
tggattctactttcaccaaataaag

SEQ ID NO: 5198304 - DNA, 25 bp, Homo sapien
tttatctccttttgtggctcacaag

SEQ ID NO: 5198305 - DNA, 25 bp, Homo sapien
ttcagggagtttatctccttttgtg

SEQ ID NO: 5198306 - DNA, 25 bp, Homo sapien
atctccttttgtggctcacaagtta

SEQ ID NO: 5198307 - DNA, 25 bp, Homo sapien
ggagtttatctccttttgtggctca

SEQ ID NO: 5198308 - DNA, 25 bp, Homo sapien
ccaaactgtgggcatactgagatca

SEQ ID NO: 5198309 - DNA, 25 bp, Homo sapien
catggtagtcagcacatcttgaagg

SEQ ID NO: 5198310 - DNA, 25 bp, Homo sapien
ttattcctgtatccctagcctccag

SEQ ID NO: 5198311 - DNA, 25 bp, Homo sapien
gacccattatatagctcattcagag

SEQ ID NO: 5198312 - DNA, 25 bp, Homo sapien
tacaagcctcttgagcatatcctcc

SEQ ID NO: 5198313 - DNA, 25 bp, Homo sapien
gattcacataatcaacaatatttgc

SEQ ID NO: 5198314 - DNA, 25 bp, Homo sapien
cagaagtaagtgtaaaaccagcaag

SEQ ID NO: 5198315 - DNA, 25 bp, Homo sapien
ctttgtcattaccatacaagcctct

SEQ ID NO: 5198316 - DNA, 25 bp, Homo sapien
aattttctgttatcatctatctgtt

SEQ ID NO: 5198317 - DNA, 25 bp, Homo sapien
aagaaaattttctgttatcatctat

SEQ ID NO: 5198318 - DNA, 25 bp, Homo sapien
gaaaattttctgttatcatctatct

SEQ ID NO: 5198319 - DNA, 25 bp, Homo sapien
aaaattttctgttatcatctatctg

SEQ ID NO: 5198320 - DNA, 25 bp, Homo sapien
taacctcgagcgcaaaataagagac

SEQ ID NO: 5198321 - DNA, 25 bp, Homo sapien
gcagcgggcatctgatgttcacaca

SEQ ID NO: 5198322 - DNA, 25 bp, Homo sapien
aataagagacgccttgctgtccagc

SEQ ID NO: 5198323 - DNA, 25 bp, Homo sapien
aaatgtgctgttccataacctcgag

SEQ ID NO: 5198324 - DNA, 25 bp, Homo sapien
ggcagcctgatattttcggcagcag

SEQ ID NO: 5198325 - DNA, 25 bp, Homo sapien
gcagcagtcacatcaatgaaggctc

SEQ ID NO: 5198326 - DNA, 25 bp, Homo sapien
aatgaaggctcgcatgagaatgtcc

SEQ ID NO: 5198327 - DNA, 25 bp, Homo sapien
gagtgcctgcatttggcagcctgat

SEQ ID NO: 5198328 - DNA, 25 bp, Homo sapien
cttaagacagttttctccgtaatgg

SEQ ID NO: 5198329 - DNA, 25 bp, Homo sapien
tcaaagactgagaaccaaagtcagg

SEQ ID NO: 5198330 - DNA, 25 bp, Homo sapien
aagactgagaaccaaagtcagggac

SEQ ID NO: 5198331 - DNA, 25 bp, Homo sapien
catcaaagactgagaaccaaagtca

SEQ ID NO: 5198332 - DNA, 25 bp, Homo sapien
caaagactgagaaccaaagtcaggg

SEQ ID NO: 5198333 - DNA, 25 bp, Homo sapien
aatacaaaaatagggatagggctgc

SEQ ID NO: 5198334 - DNA, 25 bp, Homo sapien
gccagtttaggcaaaagtagccaac

SEQ ID NO: 5198335 - DNA, 25 bp, Homo sapien
ggctgcatgactgatggacaccatt

SEQ ID NO: 5198336 - DNA, 25 bp, Homo sapien
cagactttaaagatgttgtgaaata

SEQ ID NO: 5198337 - DNA, 25 bp, Homo sapien
cccacctcagctgcctcccaagtag

SEQ ID NO: 5198338 - DNA, 25 bp, Homo sapien
gagtgcaagtggtgtgaccatgggt

SEQ ID NO: 5198339 - DNA, 25 bp, Homo sapien
gttgagacagggtctatgttgttca

SEQ ID NO: 5198340 - DNA, 25 bp, Homo sapien
ggcgcatgccaccactcacagctaa

SEQ ID NO: 5198341 - DNA, 25 bp, Homo sapien
actgagctacagtctttgagggaaa

SEQ ID NO: 5198342 - DNA, 25 bp, Homo sapien
caccaaggtactcccgaatactgag

SEQ ID NO: 5198343 - DNA, 25 bp, Homo sapien
gaatagccactaggatgatccacca

SEQ ID NO: 5198344 - DNA, 25 bp, Homo sapien
ctaataaagcaagcatcaagatccc

SEQ ID NO: 5198345 - DNA, 25 bp, Homo sapien
gacttcggcagtttattgagacaaa

SEQ ID NO: 5198346 - DNA, 25 bp, Homo sapien
tcttcctgcaggagaatatgaactc

SEQ ID NO: 5198347 - DNA, 25 bp, Homo sapien
ggtagggacccaatgctcctcaggt

SEQ ID NO: 5198348 - DNA, 25 bp, Homo sapien
aagaggcaaaagattgacttcggca

SEQ ID NO: 5198349 - DNA, 25 bp, Homo sapien
gatggctgagcatggatctcagcct

SEQ ID NO: 5198350 - DNA, 25 bp, Homo sapien
cagccttgtgatatgtggcatcata

SEQ ID NO: 5198351 - DNA, 25 bp, Homo sapien
agtaagcctctctttatcagatggc

SEQ ID NO: 5198352 - DNA, 25 bp, Homo sapien
aagcctctctttatcagatggctga

SEQ ID NO: 5198353 - DNA, 25 bp, Homo sapien
agttagccaccacaaccatagcggg

SEQ ID NO: 5198354 - DNA, 25 bp, Homo sapien
taactcacctgcaacgaaagactgt

SEQ ID NO: 5198355 - DNA, 25 bp, Homo sapien
ccctagtggaatgctacataccgaa

SEQ ID NO: 5198356 - DNA, 25 bp, Homo sapien
gcgggtcccacagctagcaattaaa

SEQ ID NO: 5198357 - DNA, 25 bp, Homo sapien
acaggttaattaggcggtcgacaca

SEQ ID NO: 5198358 - DNA, 25 bp, Homo sapien
ttccaacatgcaacaggttaattag

SEQ ID NO: 5198359 - DNA, 25 bp, Homo sapien
taattaggcggtcgacacagcttct

SEQ ID NO: 5198360 - DNA, 25 bp, Homo sapien
catgcaacaggttaattaggcggtc

SEQ ID NO: 5198361 - DNA, 25 bp, Homo sapien
gtaattctgtcctctcatgcccacg

SEQ ID NO: 5198362 - DNA, 25 bp, Homo sapien
gggatcaacggaagagaacagctgt

SEQ ID NO: 5198363 - DNA, 25 bp, Homo sapien
tctgaagttggccataaaagcccat

SEQ ID NO: 5198364 - DNA, 25 bp, Homo sapien
gctatgtctacctctggactaaggg

SEQ ID NO: 5198365 - DNA, 25 bp, Homo sapien
cggatccttacagcatggtatcggg

SEQ ID NO: 5198366 - DNA, 25 bp, Homo sapien
gatctctcgctcttctttccggatc

SEQ ID NO: 5198367 - DNA, 25 bp, Homo sapien
gggaacactgtcatcgtacctagag

SEQ ID NO: 5198368 - DNA, 25 bp, Homo sapien
tacctagagcgtttaaagaatccac

SEQ ID NO: 5198369 - DNA, 25 bp, Homo sapien
ctttcattttcgttccactttgtga

SEQ ID NO: 5198370 - DNA, 25 bp, Homo sapien
gagtagctttcattttcgttccact

SEQ ID NO: 5198371 - DNA, 25 bp, Homo sapien
tagctttcattttcgttccactttg

SEQ ID NO: 5198372 - DNA, 25 bp, Homo sapien
gctttcattttcgttccactttgtg

SEQ ID NO: 5198373 - DNA, 25 bp, Homo sapien
taggacggccactctgttagtgcag

SEQ ID NO: 5198374 - DNA, 25 bp, Homo sapien
taacgtgatggacgtctgcgcagca

SEQ ID NO: 5198375 - DNA, 25 bp, Homo sapien
gatgtcacctgagtgcaactgggca

SEQ ID NO: 5198376 - DNA, 25 bp, Homo sapien
gaaaagacggtaggatggcaacatc

SEQ ID NO: 5198377 - DNA, 25 bp, Homo sapien
gtttggatccaccataggcattcac

SEQ ID NO: 5198378 - DNA, 25 bp, Homo sapien
tttggatccaccataggcattcacc

SEQ ID NO: 5198379 - DNA, 25 bp, Homo sapien
tgattaactgttttggtagcagatt

SEQ ID NO: 5198380 - DNA, 25 bp, Homo sapien
tagcagattcagtagtcttatactg

SEQ ID NO: 5198381 - DNA, 25 bp, Homo sapien
gtatcagctccttagcaatctagca

SEQ ID NO: 5198382 - DNA, 25 bp, Homo sapien
gttccccaagcaagaaactgagact

SEQ ID NO: 5198383 - DNA, 25 bp, Homo sapien
gcaatctaaacacattagggacaca

SEQ ID NO: 5198384 - DNA, 25 bp, Homo sapien
aacagaccagtgacttgacttgaga

SEQ ID NO: 5198385 - DNA, 25 bp, Homo sapien
aatgaaagacttgaggatcacctac

SEQ ID NO: 5198386 - DNA, 25 bp, Homo sapien
tcacctacatagagcgaaaacagaa

SEQ ID NO: 5198387 - DNA, 25 bp, Homo sapien
ggcactagtatctttggctgatctg

SEQ ID NO: 5198388 - DNA, 25 bp, Homo sapien
gctgatctgagattacatgagacac

SEQ ID NO: 5198389 - DNA, 25 bp, Homo sapien
cagctggatgagatgccttttggag

SEQ ID NO: 5198390 - DNA, 25 bp, Homo sapien
tcctagtgtacagctctcccacctt

SEQ ID NO: 5198391 - DNA, 25 bp, Homo sapien
tccaacagctggatgagatgccttt

SEQ ID NO: 5198392 - DNA, 25 bp, Homo sapien
agctcctagtgtacagctctcccac

SEQ ID NO: 5198393 - DNA, 25 bp, Homo sapien
gaccacagtgtgaatctccttcaga

SEQ ID NO: 5198394 - DNA, 25 bp, Homo sapien
caggaccacagtgtgaatctccttc

SEQ ID NO: 5198395 - DNA, 25 bp, Homo sapien
gctctgactcgagaggccccaggac

SEQ ID NO: 5198396 - DNA, 25 bp, Homo sapien
gctgtggctctgactcgagaggccc

SEQ ID NO: 5198397 - DNA, 25 bp, Homo sapien
agctggggtccccatcttccctgat

SEQ ID NO: 5198398 - DNA, 25 bp, Homo sapien
gggctgctctatgagcacctgagct

SEQ ID NO: 5198399 - DNA, 25 bp, Homo sapien
cggctggggctgctctatgagcacc

SEQ ID NO: 5198400 - DNA, 25 bp, Homo sapien
cccatcttccctgatctccccatct

SEQ ID NO: 5198401 - DNA, 25 bp, Homo sapien
tctgtaacacaacttggccatagtt

SEQ ID NO: 5198402 - DNA, 25 bp, Homo sapien
gggatattacccactgacccataag

SEQ ID NO: 5198403 - DNA, 25 bp, Homo sapien
tatcctcgagaagtggaaattttgg

SEQ ID NO: 5198404 - DNA, 25 bp, Homo sapien
ggtggagagcccattggcatgtatc

SEQ ID NO: 5198405 - DNA, 25 bp, Homo sapien
ggtattccaccttatgacagaacta

SEQ ID NO: 5198406 - DNA, 25 bp, Homo sapien
tatgggatcctaagcccaggtttta

SEQ ID NO: 5198407 - DNA, 25 bp, Homo sapien
gagtcctatctggagtcctgtgaag

SEQ ID NO: 5198408 - DNA, 25 bp, Homo sapien
caatgtataccagattagctacagg

SEQ ID NO: 5198409 - DNA, 25 bp, Homo sapien
tcagtatgcgcatctggagtgccca

SEQ ID NO: 5198410 - DNA, 25 bp, Homo sapien
aaacctggtatcagtatgcgcatct

SEQ ID NO: 5198411 - DNA, 25 bp, Homo sapien
tatcagtatgcgcatctggagtgcc

SEQ ID NO: 5198412 - DNA, 25 bp, Homo sapien
tggtatcagtatgcgcatctggagt

SEQ ID NO: 5198413 - DNA, 25 bp, Homo sapien
cagggtcagagagcttcaggagtcc

SEQ ID NO: 5198414 - DNA, 25 bp, Homo sapien
taaatacgaaagctgaacactggga

SEQ ID NO: 5198415 - DNA, 25 bp, Homo sapien
gagtccccgcttgccaaacagtagt

SEQ ID NO: 5198416 - DNA, 25 bp, Homo sapien
aagccacgcattttccagggtcaga

SEQ ID NO: 5198417 - DNA, 25 bp, Homo sapien
gggatcggctgtcaccggcgcggcc

SEQ ID NO: 5198418 - DNA, 25 bp, Homo sapien
ccgagtcccgctagagaagccacag

SEQ ID NO: 5198419 - DNA, 25 bp, Homo sapien
aagccacagccagtacgccaggttt

SEQ ID NO: 5198420 - DNA, 25 bp, Homo sapien
tctgccgagtggtacgtgagggacg

SEQ ID NO: 5198421 - DNA, 25 bp, Homo sapien
gcggctccgcgaagcagccgcgcca

SEQ ID NO: 5198422 - DNA, 25 bp, Homo sapien
ctggagcccgagtccgagctgaagc

SEQ ID NO: 5198423 - DNA, 25 bp, Homo sapien
ctgaagctgcggctgaagccggcgg

SEQ ID NO: 5198424 - DNA, 25 bp, Homo sapien
aagctgcggctgaagccggcggcgc

SEQ ID NO: 5198425 - DNA, 25 bp, Homo sapien
agtccacctggcccggaacgccgcg

SEQ ID NO: 5198426 - DNA, 25 bp, Homo sapien
agaagcgcgcgtagaagtccacctg

SEQ ID NO: 5198427 - DNA, 25 bp, Homo sapien
gggacggcgagaagcgcgcgtagaa

SEQ ID NO: 5198428 - DNA, 25 bp, Homo sapien
gcgagaagcgcgcgtagaagtccac

SEQ ID NO: 5198429 - DNA, 25 bp, Homo sapien
gcccaaggtcccgggccgcactcac

SEQ ID NO: 5198430 - DNA, 25 bp, Homo sapien
ggaaggaagcacctaaggcgctggg

SEQ ID NO: 5198431 - DNA, 25 bp, Homo sapien
gctgggggcggaaacgctgaggagg

SEQ ID NO: 5198432 - DNA, 25 bp, Homo sapien
ggaggaaggaagcacctaaggcgct

SEQ ID NO: 5198433 - DNA, 25 bp, Homo sapien
gcgctgggggcggaaacgctgagga

SEQ ID NO: 5198434 - DNA, 25 bp, Homo sapien
tagcgcgcacctgcacacgtgcgcc

SEQ ID NO: 5198435 - DNA, 25 bp, Homo sapien
agccacacgcccaccgttatttacg

SEQ ID NO: 5198436 - DNA, 25 bp, Homo sapien
tcaacaatacggtcaaagccacacg

SEQ ID NO: 5198437 - DNA, 25 bp, Homo sapien
aaggggcctggcctagcgcgcacct

SEQ ID NO: 5198438 - DNA, 25 bp, Homo sapien
cagctttgtaccaattgaacggatg

SEQ ID NO: 5198439 - DNA, 25 bp, Homo sapien
ggtgtcctgagaagattatctggaa

SEQ ID NO: 5198440 - DNA, 25 bp, Homo sapien
cagtctgacaggcaactcttgccgc

SEQ ID NO: 5198441 - DNA, 25 bp, Homo sapien
aactcttgccgcagaaacataaatg

SEQ ID NO: 5198442 - DNA, 25 bp, Homo sapien
gaagctcctgaagactctggatata

SEQ ID NO: 5198443 - DNA, 25 bp, Homo sapien
aagctcctgaagactctggatatac

SEQ ID NO: 5198444 - DNA, 25 bp, Homo sapien
agaagctcctgaagactctggatat

SEQ ID NO: 5198445 - DNA, 25 bp, Homo sapien
aaactagagacctgcaaccatgttc

SEQ ID NO: 5198446 - DNA, 25 bp, Homo sapien
cataaactagagacctgcaaccatg

SEQ ID NO: 5198447 - DNA, 25 bp, Homo sapien
tacagcataaactagagacctgcaa

SEQ ID NO: 5198448 - DNA, 25 bp, Homo sapien
cagcataaactagagacctgcaacc

SEQ ID NO: 5198449 - DNA, 25 bp, Homo sapien
tgtgtcggtttctgatccgtatcac

SEQ ID NO: 5198450 - DNA, 25 bp, Homo sapien
atgacatcattgtgtcggtttctga

SEQ ID NO: 5198451 - DNA, 25 bp, Homo sapien
tcggtttctgatccgtatcacagta

SEQ ID NO: 5198452 - DNA, 25 bp, Homo sapien
tcattgtgtcggtttctgatccgta

SEQ ID NO: 5198453 - DNA, 25 bp, Homo sapien
tgtagaatcgatccaaaaagtactg

SEQ ID NO: 5198454 - DNA, 25 bp, Homo sapien
aatgcgactcatgtagaatcgatcc

SEQ ID NO: 5198455 - DNA, 25 bp, Homo sapien
tctaattgaaatgcgactcatgtag

SEQ ID NO: 5198456 - DNA, 25 bp, Homo sapien
tgacaggatccaccccaaagctctc

SEQ ID NO: 5198457 - DNA, 25 bp, Homo sapien
taacttcaagtacattgcagtttgg

SEQ ID NO: 5198458 - DNA, 25 bp, Homo sapien
tatgcttccaatgtgttttcgatga

SEQ ID NO: 5198459 - DNA, 25 bp, Homo sapien
cattgcagtttggatttatgcttcc

SEQ ID NO: 5198460 - DNA, 25 bp, Homo sapien
tcgatgagatggacttcctttgcct

SEQ ID NO: 5198461 - DNA, 25 bp, Homo sapien
agttcgggagagttaatataataca

SEQ ID NO: 5198462 - DNA, 25 bp, Homo sapien
gttcttcaagttctagttcgggaga

SEQ ID NO: 5198463 - DNA, 25 bp, Homo sapien
tcacacagacgcctagcattttcat

SEQ ID NO: 5198464 - DNA, 25 bp, Homo sapien
tataatacaaatcacacagacgcct

SEQ ID NO: 5198465 - DNA, 25 bp, Homo sapien
ggaaaaagagactcatcaatccctc

SEQ ID NO: 5198466 - DNA, 25 bp, Homo sapien
tcactctaaggtccagaatacagct

SEQ ID NO: 5198467 - DNA, 25 bp, Homo sapien
ccagtctatgtcctcaacaacagaa

SEQ ID NO: 5198468 - DNA, 25 bp, Homo sapien
tagccttcatatccaacgaagttga

SEQ ID NO: 5198469 - DNA, 25 bp, Homo sapien
aagttcaaacaccatgtgatagaga

SEQ ID NO: 5198470 - DNA, 25 bp, Homo sapien
atagagatgggatggtacataaacc

SEQ ID NO: 5198471 - DNA, 25 bp, Homo sapien
acttgtattggctgtcctggtgatt

SEQ ID NO: 5198472 - DNA, 25 bp, Homo sapien
ttcaaacaccatgtgatagagatgg

SEQ ID NO: 5198473 - DNA, 25 bp, Homo sapien
ctggtaaaggttatgtaatactatt

SEQ ID NO: 5198474 - DNA, 25 bp, Homo sapien
tactggtaaaggttatgtaatacta

SEQ ID NO: 5198475 - DNA, 25 bp, Homo sapien
actggtaaaggttatgtaatactat

SEQ ID NO: 5198476 - DNA, 25 bp, Homo sapien
cagaaaagtactggtaaaggttatg

SEQ ID NO: 5198477 - DNA, 25 bp, Homo sapien
attacccagcgtgacatgaacttga

SEQ ID NO: 5198478 - DNA, 25 bp, Homo sapien
acagtcaaatcctcattacccagcg

SEQ ID NO: 5198479 - DNA, 25 bp, Homo sapien
gtaaacacctctgttggcatggtgt

SEQ ID NO: 5198480 - DNA, 25 bp, Homo sapien
tggcatggtgttccatagtggctct

SEQ ID NO: 5198481 - DNA, 25 bp, Homo sapien
ggcactgcgcgggaggtctcaacac

SEQ ID NO: 5198482 - DNA, 25 bp, Homo sapien
ggaggtctcaacacgaggtcttggt

SEQ ID NO: 5198483 - DNA, 25 bp, Homo sapien
tcaaaggaacgccacctcctcggtc

SEQ ID NO: 5198484 - DNA, 25 bp, Homo sapien
tggtgcagttgaatacatgtagttg

SEQ ID NO: 5198485 - DNA, 25 bp, Homo sapien
tccttggaagtattgtgcgtaaaga

SEQ ID NO: 5198486 - DNA, 25 bp, Homo sapien
ttgtgcgtaaagacgtgatatgggc

SEQ ID NO: 5198487 - DNA, 25 bp, Homo sapien
gcatctgtcccgtaaccctctaggg

SEQ ID NO: 5198488 - DNA, 25 bp, Homo sapien
taaagacgtgatatgggcaatccat

SEQ ID NO: 5198489 - DNA, 25 bp, Homo sapien
cactgggagtctttctattgagtct

SEQ ID NO: 5198490 - DNA, 25 bp, Homo sapien
caggcagctttgttatacactggga

SEQ ID NO: 5198491 - DNA, 25 bp, Homo sapien
ggttggtgttgtaatgcttccaggc

SEQ ID NO: 5198492 - DNA, 25 bp, Homo sapien
catcagcctcgtggttggtgttgta

SEQ ID NO: 5198493 - DNA, 25 bp, Homo sapien
cactgcggaacgtcgtcatgtcttt

SEQ ID NO: 5198494 - DNA, 25 bp, Homo sapien
gcggaacgtcgtcatgtctttgggt

SEQ ID NO: 5198495 - DNA, 25 bp, Homo sapien
ggcactgcggaacgtcgtcatgtct

SEQ ID NO: 5198496 - DNA, 25 bp, Homo sapien
ctaggcactgcggaacgtcgtcatg

SEQ ID NO: 5198497 - DNA, 25 bp, Homo sapien
acatttggattttccgatgtcccaa

SEQ ID NO: 5198498 - DNA, 25 bp, Homo sapien
atttaatacaaaagccacatttgga

SEQ ID NO: 5198499 - DNA, 25 bp, Homo sapien
ggattttccgatgtcccaagtgtgt

SEQ ID NO: 5198500 - DNA, 25 bp, Homo sapien
taatacaaaagccacatttggattt

SEQ ID NO: 5198501 - DNA, 25 bp, Homo sapien
aataacaggaagatggctaaccagc

SEQ ID NO: 5198502 - DNA, 25 bp, Homo sapien
gacaatgcatgtagacgccgaaggg

SEQ ID NO: 5198503 - DNA, 25 bp, Homo sapien
taggctctagccctagggattccga

SEQ ID NO: 5198504 - DNA, 25 bp, Homo sapien
gatccacagagagctagtcattaca

SEQ ID NO: 5198505 - DNA, 25 bp, Homo sapien
caacactagcctgggaacatactga

SEQ ID NO: 5198506 - DNA, 25 bp, Homo sapien
ttgtcaagacttgtgcaataggcca

SEQ ID NO: 5198507 - DNA, 25 bp, Homo sapien
ttaccatacaaatgccaaggactgc

SEQ ID NO: 5198508 - DNA, 25 bp, Homo sapien
gaaagagaatgataccacctacact

SEQ ID NO: 5198509 - DNA, 25 bp, Homo sapien
tgctccaattctgagcaactctggg

SEQ ID NO: 5198510 - DNA, 25 bp, Homo sapien
agctgatgacaggatctgcagatac

SEQ ID NO: 5198511 - DNA, 25 bp, Homo sapien
caattctgagcaactctgggccaca

SEQ ID NO: 5198512 - DNA, 25 bp, Homo sapien
gatctgcagatacgtctcaggctct

SEQ ID NO: 5198513 - DNA, 25 bp, Homo sapien
taaatgagggcactggactaactgc

SEQ ID NO: 5198514 - DNA, 25 bp, Homo sapien
catttggtcagattagctaagcagc

SEQ ID NO: 5198515 - DNA, 25 bp, Homo sapien
tcctgccaccttagaagatgttgag

SEQ ID NO: 5198516 - DNA, 25 bp, Homo sapien
caaagctcccctgtttaagtggcaa

SEQ ID NO: 5198517 - DNA, 25 bp, Homo sapien
aattgactcagtttattttcaaaag

SEQ ID NO: 5198518 - DNA, 25 bp, Homo sapien
ctaaattgactcagtttattttcaa

SEQ ID NO: 5198519 - DNA, 25 bp, Homo sapien
aaaaggctaaattgactcagtttat

SEQ ID NO: 5198520 - DNA, 25 bp, Homo sapien
aaggctaaattgactcagtttattt

SEQ ID NO: 5198521 - DNA, 25 bp, Homo sapien
agttcctctctactgaagatagtga

SEQ ID NO: 5198522 - DNA, 25 bp, Homo sapien
cagaagatcttcatttatgcaacaa

SEQ ID NO: 5198523 - DNA, 25 bp, Homo sapien
gatagtgaaatttagtgcaagcccc

SEQ ID NO: 5198524 - DNA, 25 bp, Homo sapien
cttacaaaatgttgagccttgatgg

SEQ ID NO: 5198525 - DNA, 25 bp, Homo sapien
aaaagttcctccagcaaaagtcatg

SEQ ID NO: 5198526 - DNA, 25 bp, Homo sapien
gagcaacagtgggaccttaaaacta

SEQ ID NO: 5198527 - DNA, 25 bp, Homo sapien
tctgttacggaacttgttggcttca

SEQ ID NO: 5198528 - DNA, 25 bp, Homo sapien
ggaaattgtgctgcctatatcccat

SEQ ID NO: 5198529 - DNA, 25 bp, Homo sapien
cacaactctcacgtggaagtttatt

SEQ ID NO: 5198530 - DNA, 25 bp, Homo sapien
aaataacccttgaatgaacacaact

SEQ ID NO: 5198531 - DNA, 25 bp, Homo sapien
gcaggaaatgtacttccactctcaa

SEQ ID NO: 5198532 - DNA, 25 bp, Homo sapien
tgatattatctgtgacaaatgcagg

SEQ ID NO: 5198533 - DNA, 25 bp, Homo sapien
gatctcgaggtcatggacacatcca

SEQ ID NO: 5198534 - DNA, 25 bp, Homo sapien
aactaatgggttttcgatctcgagg

SEQ ID NO: 5198535 - DNA, 25 bp, Homo sapien
catttgctctgtaactggtctcgtc

SEQ ID NO: 5198536 - DNA, 25 bp, Homo sapien
caagtttgctgtcgtcttccatgac

SEQ ID NO: 5198537 - DNA, 25 bp, Homo sapien
cactgccagagacttcacttattgc

SEQ ID NO: 5198538 - DNA, 25 bp, Homo sapien
tcccactgccagagacttcacttat

SEQ ID NO: 5198539 - DNA, 25 bp, Homo sapien
ccactgccagagacttcacttattg

SEQ ID NO: 5198540 - DNA, 25 bp, Homo sapien
gcttcccactgccagagacttcact

SEQ ID NO: 5198541 - DNA, 25 bp, Homo sapien
tgccagagctttcggtcttgggtcc

SEQ ID NO: 5198542 - DNA, 25 bp, Homo sapien
tataaagtgccagagctttcggtct

SEQ ID NO: 5198543 - DNA, 25 bp, Homo sapien
aagtgccagagctttcggtcttggg

SEQ ID NO: 5198544 - DNA, 25 bp, Homo sapien
ctgctataaagtgccagagctttcg

SEQ ID NO: 5198545 - DNA, 25 bp, Homo sapien
tcacttggaccttgctctttaaggg

SEQ ID NO: 5198546 - DNA, 25 bp, Homo sapien
ctggatctaaccctggagactagat

SEQ ID NO: 5198547 - DNA, 25 bp, Homo sapien
gatccacatcgacattcaccagaga

SEQ ID NO: 5198548 - DNA, 25 bp, Homo sapien
taaggggccacactaagtcctatct

SEQ ID NO: 5198549 - DNA, 25 bp, Homo sapien
gaaaagtagtctggccacatcatat

SEQ ID NO: 5198550 - DNA, 25 bp, Homo sapien
ttaataagccatttactgcctgcca

SEQ ID NO: 5198551 - DNA, 25 bp, Homo sapien
ggtgttgccattggacatactgcca

SEQ ID NO: 5198552 - DNA, 25 bp, Homo sapien
gatcaatgcccctaatgatagttgg

SEQ ID NO: 5198553 - DNA, 25 bp, Homo sapien
taattaccgaagttactgtctgcct

SEQ ID NO: 5198554 - DNA, 25 bp, Homo sapien
taggaatttgactttactgcagcca

SEQ ID NO: 5198555 - DNA, 25 bp, Homo sapien
ggaacttaacctgacaaccatgaaa

SEQ ID NO: 5198556 - DNA, 25 bp, Homo sapien
catgacagcatatggacaactgcac

SEQ ID NO: 5198557 - DNA, 25 bp, Homo sapien
aactggagacatgttgaagccatca

SEQ ID NO: 5198558 - DNA, 25 bp, Homo sapien
cctggagtggcaaaacaactggaga

SEQ ID NO: 5198559 - DNA, 25 bp, Homo sapien
tcttattttggtttgagtcaggccc

SEQ ID NO: 5198560 - DNA, 25 bp, Homo sapien
tatgcctgagagctaatttagacac

SEQ ID NO: 5198561 - DNA, 25 bp, Homo sapien
gctgagcctgttcccctaggaccga

SEQ ID NO: 5198562 - DNA, 25 bp, Homo sapien
gagcctgttcccctaggaccgactc

SEQ ID NO: 5198563 - DNA, 25 bp, Homo sapien
gctgctgagcctgttcccctaggac

SEQ ID NO: 5198564 - DNA, 25 bp, Homo sapien
gcctgttcccctaggaccgactctg

SEQ ID NO: 5198565 - DNA, 25 bp, Homo sapien
tatggtgtactgctctgaactggaa

SEQ ID NO: 5198566 - DNA, 25 bp, Homo sapien
tgtaaattccccacagggtatgatg

SEQ ID NO: 5198567 - DNA, 25 bp, Homo sapien
tatcatttctagatcactgcccagg

SEQ ID NO: 5198568 - DNA, 25 bp, Homo sapien
tctttgatcaatgcccaagtagctg

SEQ ID NO: 5198569 - DNA, 25 bp, Homo sapien
tgagggcagtcagcactatcagatc

SEQ ID NO: 5198570 - DNA, 25 bp, Homo sapien
cagcactatcagatcccaacgtggg

SEQ ID NO: 5198571 - DNA, 25 bp, Homo sapien
cgtggggaccactagctattttgaa

SEQ ID NO: 5198572 - DNA, 25 bp, Homo sapien
gggaaaaggtgcctgagggcagtca

SEQ ID NO: 5198573 - DNA, 25 bp, Homo sapien
gagaaggccctgaaaagagtggctc

SEQ ID NO: 5198574 - DNA, 25 bp, Homo sapien
tctccagttatcagtagagtactcc

SEQ ID NO: 5198575 - DNA, 25 bp, Homo sapien
tgtaggcaattatcccattgggtgt

SEQ ID NO: 5198576 - DNA, 25 bp, Homo sapien
ttctctctgaaggtggtcgcccatc

SEQ ID NO: 5198577 - DNA, 25 bp, Homo sapien
caggccatctgcaagctgaggggca

SEQ ID NO: 5198578 - DNA, 25 bp, Homo sapien
ggcaaggaaagccagtccaagtccc

SEQ ID NO: 5198579 - DNA, 25 bp, Homo sapien
ctgaggggcaaggaaagccagtcca

SEQ ID NO: 5198580 - DNA, 25 bp, Homo sapien
caacaggccatctgcaagctgaggg

SEQ ID NO: 5198581 - DNA, 25 bp, Homo sapien
agcctgagacgcaccccagaggcag

SEQ ID NO: 5198582 - DNA, 25 bp, Homo sapien
aagaacgtgattggccagcctgaga

SEQ ID NO: 5198583 - DNA, 25 bp, Homo sapien
ggccagtcatagtccacgtggatga

SEQ ID NO: 5198584 - DNA, 25 bp, Homo sapien
gatctgatgattggtagctccatca

SEQ ID NO: 5198585 - DNA, 25 bp, Homo sapien
cctcacagtccaaagctgagctggg

SEQ ID NO: 5198586 - DNA, 25 bp, Homo sapien
tcacctcacagtccaaagctgagct

SEQ ID NO: 5198587 - DNA, 25 bp, Homo sapien
ctgtcacctcacagtccaaagctga

SEQ ID NO: 5198588 - DNA, 25 bp, Homo sapien
tgtcacctcacagtccaaagctgag

SEQ ID NO: 5198589 - DNA, 25 bp, Homo sapien
cagaggcgccagattaggattagat

SEQ ID NO: 5198590 - DNA, 25 bp, Homo sapien
tgaacaatcatatggtgggctactg

SEQ ID NO: 5198591 - DNA, 25 bp, Homo sapien
tatgggagctcatagcagaggcgcc

SEQ ID NO: 5198592 - DNA, 25 bp, Homo sapien
gatcagactaaatgttcaaggcagg

SEQ ID NO: 5198593 - DNA, 25 bp, Homo sapien
tctgtagaaattgatgttgtatgtc

SEQ ID NO: 5198594 - DNA, 25 bp, Homo sapien
tcataagtgttcagagctgagaaag

SEQ ID NO: 5198595 - DNA, 25 bp, Homo sapien
gaaagaaagggattggatactgttg

SEQ ID NO: 5198596 - DNA, 25 bp, Homo sapien
gtattttactgtgccttctataaga

SEQ ID NO: 5198597 - DNA, 25 bp, Homo sapien
gtcagagttcaggtcccagatctca

SEQ ID NO: 5198598 - DNA, 25 bp, Homo sapien
cagctcatgggtgtgactttctcca

SEQ ID NO: 5198599 - DNA, 25 bp, Homo sapien
gaaaagaatgttaggtccagctcat

SEQ ID NO: 5198600 - DNA, 25 bp, Homo sapien
ctgaggtctacgtgcaagtggatgt

SEQ ID NO: 5198601 - DNA, 25 bp, Homo sapien
tactcttgcctggtacctactgaca

SEQ ID NO: 5198602 - DNA, 25 bp, Homo sapien
aatgggttctattagcccggcaccg

SEQ ID NO: 5198603 - DNA, 25 bp, Homo sapien
gaaaaggctactgcaaacaggagtg

SEQ ID NO: 5198604 - DNA, 25 bp, Homo sapien
tccacatggtggtttgcaacagaag

SEQ ID NO: 5198605 - DNA, 25 bp, Homo sapien
tatgatcctatgaacacaggtttcc

SEQ ID NO: 5198606 - DNA, 25 bp, Homo sapien
ctggagttcggtcttccccggctga

SEQ ID NO: 5198607 - DNA, 25 bp, Homo sapien
ccccggctgaactcttctctgagat

SEQ ID NO: 5198608 - DNA, 25 bp, Homo sapien
catggcccacaacattaagacagta

SEQ ID NO: 5198609 - DNA, 25 bp, Homo sapien
gatggtgaccaaacagacaagccac

SEQ ID NO: 5198610 - DNA, 25 bp, Homo sapien
gcttctcccaggatgctggacaaga

SEQ ID NO: 5198611 - DNA, 25 bp, Homo sapien
ccatccgtggacagcaaggctaaaa

SEQ ID NO: 5198612 - DNA, 25 bp, Homo sapien
caagtacatgtgtgacccgcttctc

SEQ ID NO: 5198613 - DNA, 25 bp, Homo sapien
tcatcttgtagggtcacatcatcat

SEQ ID NO: 5198614 - DNA, 25 bp, Homo sapien
cccccaacgtcagtatgaatctcat

SEQ ID NO: 5198615 - DNA, 25 bp, Homo sapien
ttgtagggtcacatcatcatcacac

SEQ ID NO: 5198616 - DNA, 25 bp, Homo sapien
cttgtaggtccctcatcttgtaggg

SEQ ID NO: 5198617 - DNA, 25 bp, Homo sapien
aaccttcaagagcttgagaggttag

SEQ ID NO: 5198618 - DNA, 25 bp, Homo sapien
ggacgttcgtgccttttatctcaag

SEQ ID NO: 5198619 - DNA, 25 bp, Homo sapien
ctcaagacctgaatcatggactatc

SEQ ID NO: 5198620 - DNA, 25 bp, Homo sapien
ccttttatctcaagacctgaatcat

SEQ ID NO: 5198621 - DNA, 25 bp, Homo sapien
tcctcccaatgtagctatacagttt

SEQ ID NO: 5198622 - DNA, 25 bp, Homo sapien
ctcccaatgtagctatacagttttg

SEQ ID NO: 5198623 - DNA, 25 bp, Homo sapien
caatgtagctatacagttttggatt

SEQ ID NO: 5198624 - DNA, 25 bp, Homo sapien
cccaatgtagctatacagttttgga

SEQ ID NO: 5198625 - DNA, 25 bp, Homo sapien
gtgggcggcacatcccacacatgca

SEQ ID NO: 5198626 - DNA, 25 bp, Homo sapien
gtttgtgggcggcacatcccacaca

SEQ ID NO: 5198627 - DNA, 25 bp, Homo sapien
ttgtgggcggcacatcccacacatg

SEQ ID NO: 5198628 - DNA, 25 bp, Homo sapien
ggtttgtgggcggcacatcccacac

SEQ ID NO: 5198629 - DNA, 25 bp, Homo sapien
aagagggcagaacacaggacctggt

SEQ ID NO: 5198630 - DNA, 25 bp, Homo sapien
taaaaccaatttcatcataggctag

SEQ ID NO: 5198631 - DNA, 25 bp, Homo sapien
cccttacagtgtgatagagcacagt

SEQ ID NO: 5198632 - DNA, 25 bp, Homo sapien
ggaattgtaatctctaccctataga

SEQ ID NO: 5198633 - DNA, 25 bp, Homo sapien
taactccactccaacaaactttata

SEQ ID NO: 5198634 - DNA, 25 bp, Homo sapien
ctgggcttacaaatcttcaccagtt

SEQ ID NO: 5198635 - DNA, 25 bp, Homo sapien
ggcgactcagggaattcatttgact

SEQ ID NO: 5198636 - DNA, 25 bp, Homo sapien
gattctaactctgactcctgcatca

SEQ ID NO: 5198637 - DNA, 25 bp, Homo sapien
ccaggagccgttggagtgtcccctt

SEQ ID NO: 5198638 - DNA, 25 bp, Homo sapien
tgccaggagccgttggagtgtcccc

SEQ ID NO: 5198639 - DNA, 25 bp, Homo sapien
aggagccgttggagtgtccccttct

SEQ ID NO: 5198640 - DNA, 25 bp, Homo sapien
catcgctgtcgtgccaggagccgtt

SEQ ID NO: 5198641 - DNA, 25 bp, Homo sapien
gtaattgtttagtggcatgagagcc

SEQ ID NO: 5198642 - DNA, 25 bp, Homo sapien
gagcatccttgcttttgcatgggaa

SEQ ID NO: 5198643 - DNA, 25 bp, Homo sapien
cactcgactgagaattagagcatcc

SEQ ID NO: 5198644 - DNA, 25 bp, Homo sapien
gccttctccacaatgtggatataat

SEQ ID NO: 5198645 - DNA, 25 bp, Homo sapien
cccggttgttctggctcgaggtcat

SEQ ID NO: 5198646 - DNA, 25 bp, Homo sapien
gaggtttcagtcaagccaggctgca

SEQ ID NO: 5198647 - DNA, 25 bp, Homo sapien
cacatgcacacaggtttagttcagc

SEQ ID NO: 5198648 - DNA, 25 bp, Homo sapien
gaatctggaagcagtttagcccggt

SEQ ID NO: 5198649 - DNA, 25 bp, Homo sapien
gcacatcacctgtcatcacacagag

SEQ ID NO: 5198650 - DNA, 25 bp, Homo sapien
gaggagaaaggagctgcacatcacc

SEQ ID NO: 5198651 - DNA, 25 bp, Homo sapien
agaaaggagctgcacatcacctgtc

SEQ ID NO: 5198652 - DNA, 25 bp, Homo sapien
catcacctgtcatcacacagaggct

SEQ ID NO: 5198653 - DNA, 25 bp, Homo sapien
ctgagaatgtttcaaggtcaccaaa

SEQ ID NO: 5198654 - DNA, 25 bp, Homo sapien
tcaaggtcaccaaaagctttctgaa

SEQ ID NO: 5198655 - DNA, 25 bp, Homo sapien
tgaaaatgcctttctgcaaagaagg

SEQ ID NO: 5198656 - DNA, 25 bp, Homo sapien
gaaaatgcctttctgcaaagaaggt

SEQ ID NO: 5198657 - DNA, 25 bp, Homo sapien
gagggcgaggaaggcttggcgtggg

SEQ ID NO: 5198658 - DNA, 25 bp, Homo sapien
gcccgtcgagtctctcagtgaggaa

SEQ ID NO: 5198659 - DNA, 25 bp, Homo sapien
tctctcagtgaggaatgagaggcca

SEQ ID NO: 5198660 - DNA, 25 bp, Homo sapien
gggacgcccgtcgagtctctcagtg

SEQ ID NO: 5198661 - DNA, 25 bp, Homo sapien
ctgtcgaaacttgccggcggttgct

SEQ ID NO: 5198662 - DNA, 25 bp, Homo sapien
tcagcagctgtcgaaacttgccggc

SEQ ID NO: 5198663 - DNA, 25 bp, Homo sapien
aacttgccggcggttgcttgctcac

SEQ ID NO: 5198664 - DNA, 25 bp, Homo sapien
ggcggttgcttgctcacctttgctg

SEQ ID NO: 5198665 - DNA, 25 bp, Homo sapien
cgcggctgcgacaggcccgccctcc

SEQ ID NO: 5198666 - DNA, 25 bp, Homo sapien
ggacgcctggcgaccagcgcggctg

SEQ ID NO: 5198667 - DNA, 25 bp, Homo sapien
tcccggacgcctggcgaccagcgcg

SEQ ID NO: 5198668 - DNA, 25 bp, Homo sapien
ccgctcctcccggacgcctggcgac

SEQ ID NO: 5198669 - DNA, 25 bp, Homo sapien
cggcgcgcggtgtccctggctgcgg

SEQ ID NO: 5198670 - DNA, 25 bp, Homo sapien
gcgcggtgtccctggctgcggcgac

SEQ ID NO: 5198671 - DNA, 25 bp, Homo sapien
gcggcggcgcgcggtgtccctggct

SEQ ID NO: 5198672 - DNA, 25 bp, Homo sapien
cgcgcggtgtccctggctgcggcga

SEQ ID NO: 5198673 - DNA, 25 bp, Homo sapien
aatgggcagcgtgcgcagcgaccat

SEQ ID NO: 5198674 - DNA, 25 bp, Homo sapien
cgatccactcggcagaggaggaaga

SEQ ID NO: 5198675 - DNA, 25 bp, Homo sapien
cttttatccaggcaggcgatccact

SEQ ID NO: 5198676 - DNA, 25 bp, Homo sapien
atccaggcaggcgatccactcggca

SEQ ID NO: 5198677 - DNA, 25 bp, Homo sapien
catacgggcaagctgtcagatctgg

SEQ ID NO: 5198678 - DNA, 25 bp, Homo sapien
cattcttagcccacgagacatacgg

SEQ ID NO: 5198679 - DNA, 25 bp, Homo sapien
tgccagcaatgagtcgctatactac

SEQ ID NO: 5198680 - DNA, 25 bp, Homo sapien
gcctgtcccatcatgatgaatgcca

SEQ ID NO: 5198681 - DNA, 25 bp, Homo sapien
cacgctgtcctggacgattcccaga

SEQ ID NO: 5198682 - DNA, 25 bp, Homo sapien
tctcattatcatccaattcccaggc

SEQ ID NO: 5198683 - DNA, 25 bp, Homo sapien
ttacagagtgggaccaaagtgtgct

SEQ ID NO: 5198684 - DNA, 25 bp, Homo sapien
gagcacaggtaatggtgatctgact

SEQ ID NO: 5198685 - DNA, 25 bp, Homo sapien
gaaatcgttggccatggctggatcc

SEQ ID NO: 5198686 - DNA, 25 bp, Homo sapien
gaacccagcaccagcggtagagatg

SEQ ID NO: 5198687 - DNA, 25 bp, Homo sapien
gcacaggcatagtcatgatctcaga

SEQ ID NO: 5198688 - DNA, 25 bp, Homo sapien
ggaaagtccctttgcaatatgcaga

SEQ ID NO: 5198689 - DNA, 25 bp, Homo sapien
ggaactgtctgcacaagcagtgtat

SEQ ID NO: 5198690 - DNA, 25 bp, Homo sapien
tggctcccataaactagtgcagctt

SEQ ID NO: 5198691 - DNA, 25 bp, Homo sapien
gctggtccatacatcctctcaatgg

SEQ ID NO: 5198692 - DNA, 25 bp, Homo sapien
taactctcaagatttcacctggtag

SEQ ID NO: 5198693 - DNA, 25 bp, Homo sapien
agacagggcacaccaagacccctgt

SEQ ID NO: 5198694 - DNA, 25 bp, Homo sapien
gatcctttggaaacatggcctgcac

SEQ ID NO: 5198695 - DNA, 25 bp, Homo sapien
cacgtggagtctgtgaattcctggc

SEQ ID NO: 5198696 - DNA, 25 bp, Homo sapien
gattgatcatcagtcagacagggca

SEQ ID NO: 5198697 - DNA, 25 bp, Homo sapien
tcaactgagctccagaaagaagcac

SEQ ID NO: 5198698 - DNA, 25 bp, Homo sapien
gctccagaaagaagcacctcttatt

SEQ ID NO: 5198699 - DNA, 25 bp, Homo sapien
aactgagctccagaaagaagcacct

SEQ ID NO: 5198700 - DNA, 25 bp, Homo sapien
tgagctccagaaagaagcacctctt

SEQ ID NO: 5198701 - DNA, 25 bp, Homo sapien
cattgatatggcagattctacttag

SEQ ID NO: 5198702 - DNA, 25 bp, Homo sapien
tagatgagctagaaactgactggac

SEQ ID NO: 5198703 - DNA, 25 bp, Homo sapien
tgaccgtgggaggaatcataagaac

SEQ ID NO: 5198704 - DNA, 25 bp, Homo sapien
agtaaagcacacttcccgggaggca

SEQ ID NO: 5198705 - DNA, 25 bp, Homo sapien
catcttcgctggatcgctccagtgg

SEQ ID NO: 5198706 - DNA, 25 bp, Homo sapien
taacttctttcagtcgagtgaagat

SEQ ID NO: 5198707 - DNA, 25 bp, Homo sapien
ttcagtcgagtgaagattatatcca

SEQ ID NO: 5198708 - DNA, 25 bp, Homo sapien
tttccagattctcataataaccaca

SEQ ID NO: 5198709 - DNA, 25 bp, Homo sapien
taacatccaaagaccctgccaggac

SEQ ID NO: 5198710 - DNA, 25 bp, Homo sapien
ctggtgactgctggtctcagatact

SEQ ID NO: 5198711 - DNA, 25 bp, Homo sapien
tgttccaatatcaccctggcgaaat

SEQ ID NO: 5198712 - DNA, 25 bp, Homo sapien
caggacagcataccagtttgttcca

SEQ ID NO: 5198713 - DNA, 25 bp, Homo sapien
tctgaaatccaagagaaagccagcc

SEQ ID NO: 5198714 - DNA, 25 bp, Homo sapien
tgtctctgaaatccaagagaaagcc

SEQ ID NO: 5198715 - DNA, 25 bp, Homo sapien
cttgactgtctctgaaatccaagag

SEQ ID NO: 5198716 - DNA, 25 bp, Homo sapien
tctctgaaatccaagagaaagccag

SEQ ID NO: 5198717 - DNA, 25 bp, Homo sapien
ctcattcaggaaccactcgagctgc

SEQ ID NO: 5198718 - DNA, 25 bp, Homo sapien
ttcaggaaccactcgagctgcagga

SEQ ID NO: 5198719 - DNA, 25 bp, Homo sapien
ggaactgagcagaatgatcctgtgt

SEQ ID NO: 5198720 - DNA, 25 bp, Homo sapien
aatgatcctgtgtaggccctgtccc

SEQ ID NO: 5198721 - DNA, 25 bp, Homo sapien
ctcctacaatggccaacttctggcc

SEQ ID NO: 5198722 - DNA, 25 bp, Homo sapien
gcagcccgatagcttttttctccat

SEQ ID NO: 5198723 - DNA, 25 bp, Homo sapien
cagtcctgcagcccgatagcttttt

SEQ ID NO: 5198724 - DNA, 25 bp, Homo sapien
cctgcagcccgatagcttttttctc

SEQ ID NO: 5198725 - DNA, 25 bp, Homo sapien
gagaagacccatggggtaaggccca

SEQ ID NO: 5198726 - DNA, 25 bp, Homo sapien
ccagagaagacccatggggtaaggc

SEQ ID NO: 5198727 - DNA, 25 bp, Homo sapien
agacccatggggtaaggcccagtca

SEQ ID NO: 5198728 - DNA, 25 bp, Homo sapien
cccatggggtaaggcccagtcagcc

SEQ ID NO: 5198729 - DNA, 25 bp, Homo sapien
agccaggttgggacaccttaggagg

SEQ ID NO: 5198730 - DNA, 25 bp, Homo sapien
ttgggacaccttaggaggatgaagt

SEQ ID NO: 5198731 - DNA, 25 bp, Homo sapien
ttccttgggttaagatgaagaatgg

SEQ ID NO: 5198732 - DNA, 25 bp, Homo sapien
tttccttgggttaagatgaagaatg

SEQ ID NO: 5198733 - DNA, 25 bp, Homo sapien
taataaagatgtcgatgaagccgcc

SEQ ID NO: 5198734 - DNA, 25 bp, Homo sapien
gctgcctgaacatgccctcgagata

SEQ ID NO: 5198735 - DNA, 25 bp, Homo sapien
ttttcagtgggatatgcagggtcca

SEQ ID NO: 5198736 - DNA, 25 bp, Homo sapien
taagtcatgagcactgtcttggcac

SEQ ID NO: 5198737 - DNA, 25 bp, Homo sapien
cacttgcatcagacacactgtaagg

SEQ ID NO: 5198738 - DNA, 25 bp, Homo sapien
aaaacatactgggttacctgagatc

SEQ ID NO: 5198739 - DNA, 25 bp, Homo sapien
tgggtgacacatgggaagacttcat

SEQ ID NO: 5198740 - DNA, 25 bp, Homo sapien
cagacacactgtaagggcagtatgt

SEQ ID NO: 5198741 - DNA, 25 bp, Homo sapien
tctgtgcagtgtgccacctcgagca

SEQ ID NO: 5198742 - DNA, 25 bp, Homo sapien
tagctttctggatggctctgtgcag

SEQ ID NO: 5198743 - DNA, 25 bp, Homo sapien
tggctctgtgcagtgtgccacctcg

SEQ ID NO: 5198744 - DNA, 25 bp, Homo sapien
ccctgatgtcatctgtagctttctg

SEQ ID NO: 5198745 - DNA, 25 bp, Homo sapien
ttggtgtatttctgtgtcaggacca

SEQ ID NO: 5198746 - DNA, 25 bp, Homo sapien
tttcatcacggtagtgctgccgact

SEQ ID NO: 5198747 - DNA, 25 bp, Homo sapien
tagtgctgccgactgtactccttgg

SEQ ID NO: 5198748 - DNA, 25 bp, Homo sapien
gtgtatttctgtgtcaggaccacct

SEQ ID NO: 5198749 - DNA, 25 bp, Homo sapien
tggactctccaaaggccgtcccaat

SEQ ID NO: 5198750 - DNA, 25 bp, Homo sapien
tgtgttgtccagaatggactctcca

SEQ ID NO: 5198751 - DNA, 25 bp, Homo sapien
tgaagtccttctgctcgatgcggag

SEQ ID NO: 5198752 - DNA, 25 bp, Homo sapien
gctctccctggtaacgatggttgca

SEQ ID NO: 5198753 - DNA, 25 bp, Homo sapien
tcattcacctgcaggttggctccct

SEQ ID NO: 5198754 - DNA, 25 bp, Homo sapien
ctcattcacctgcaggttggctccc

SEQ ID NO: 5198755 - DNA, 25 bp, Homo sapien
tcacctgcaggttggctcccttaat

SEQ ID NO: 5198756 - DNA, 25 bp, Homo sapien
gaagcctagaaaacttgctgttgac

SEQ ID NO: 5198757 - DNA, 25 bp, Homo sapien
gttctctgagggcatacctgaggaa

SEQ ID NO: 5198758 - DNA, 25 bp, Homo sapien
gaggaagcctagaaaacttgctgtt

SEQ ID NO: 5198759 - DNA, 25 bp, Homo sapien
tgagggcatacctgaggaagcctag

SEQ ID NO: 5198760 - DNA, 25 bp, Homo sapien
ggatatctgtgttctgagatattaa

SEQ ID NO: 5198761 - DNA, 25 bp, Homo sapien
tctgtgttctgagatattaattttt

SEQ ID NO: 5198762 - DNA, 25 bp, Homo sapien
tgagaacttctgggatatctgtgtt

SEQ ID NO: 5198763 - DNA, 25 bp, Homo sapien
gaacttctgggatatctgtgttctg

SEQ ID NO: 5198764 - DNA, 25 bp, Homo sapien
tatcaggcaggcaaggggctgcctt

SEQ ID NO: 5198765 - DNA, 25 bp, Homo sapien
tcaggcaggcaaggggctgccttgt

SEQ ID NO: 5198766 - DNA, 25 bp, Homo sapien
atcaggcaggcaaggggctgccttg

SEQ ID NO: 5198767 - DNA, 25 bp, Homo sapien
caggccccttggcttggaggctctg

SEQ ID NO: 5198768 - DNA, 25 bp, Homo sapien
tctggttgctcctgatgagggtatg

SEQ ID NO: 5198769 - DNA, 25 bp, Homo sapien
ggtatgggtctcggtccccgtgcat

SEQ ID NO: 5198770 - DNA, 25 bp, Homo sapien
gcaggccccttggcttggaggctct

SEQ ID NO: 5198771 - DNA, 25 bp, Homo sapien
ccaaggttgccaaaagtaagctcgg

SEQ ID NO: 5198772 - DNA, 25 bp, Homo sapien
ggttgccaaaagtaagctcgggctc

SEQ ID NO: 5198773 - DNA, 25 bp, Homo sapien
aggttgccaaaagtaagctcgggct

SEQ ID NO: 5198774 - DNA, 25 bp, Homo sapien
caaggttgccaaaagtaagctcggg

SEQ ID NO: 5198775 - DNA, 25 bp, Homo sapien
gagttcctggcatgaagtcttggct

SEQ ID NO: 5198776 - DNA, 25 bp, Homo sapien
gagagacaagagaaccagccaacag

SEQ ID NO: 5198777 - DNA, 25 bp, Homo sapien
ttcttagtcctttgatgcaaatttc

SEQ ID NO: 5198778 - DNA, 25 bp, Homo sapien
agacaagagaaccagccaacaggat

SEQ ID NO: 5198779 - DNA, 25 bp, Homo sapien
ataagtccaagtcatcgaagcaggc

SEQ ID NO: 5198780 - DNA, 25 bp, Homo sapien
gcaggcttccgcttggtttaaaaga

SEQ ID NO: 5198781 - DNA, 25 bp, Homo sapien
catcgaagcaggcttccgcttggtt

SEQ ID NO: 5198782 - DNA, 25 bp, Homo sapien
tccaagtcatcgaagcaggcttccg

SEQ ID NO: 5198783 - DNA, 25 bp, Homo sapien
tagttagctcctaataacttcactc

SEQ ID NO: 5198784 - DNA, 25 bp, Homo sapien
tagctcctaataacttcactccctt

SEQ ID NO: 5198785 - DNA, 25 bp, Homo sapien
ctccatggaaaagcttgaagacaca

SEQ ID NO: 5198786 - DNA, 25 bp, Homo sapien
gatttgaatcattttgccactccat

SEQ ID NO: 5198787 - DNA, 25 bp, Homo sapien
tgtaccttcattgccgttcattccc

SEQ ID NO: 5198788 - DNA, 25 bp, Homo sapien
tcagacatccagtgagcatctatcc

SEQ ID NO: 5198789 - DNA, 25 bp, Homo sapien
gcatctatcctttatttgatcagca

SEQ ID NO: 5198790 - DNA, 25 bp, Homo sapien
cctgttcgtgtctactactgagtgg

SEQ ID NO: 5198791 - DNA, 25 bp, Homo sapien
gtctttcctagagtcactttctctt

SEQ ID NO: 5198792 - DNA, 25 bp, Homo sapien
actttctctttgatcatctggatcg

SEQ ID NO: 5198793 - DNA, 25 bp, Homo sapien
ctgtctttcctagagtcactttctc

SEQ ID NO: 5198794 - DNA, 25 bp, Homo sapien
tctctttgatcatctggatcgtcat

SEQ ID NO: 5198795 - DNA, 25 bp, Homo sapien
ctcagacgatcatagatctgtttat

SEQ ID NO: 5198796 - DNA, 25 bp, Homo sapien
aggcatcacacctttaacctcaaag

SEQ ID NO: 5198797 - DNA, 25 bp, Homo sapien
cacagagctacaacgaagttgagtt

SEQ ID NO: 5198798 - DNA, 25 bp, Homo sapien
aagcacagagtctttgaggcatttg

SEQ ID NO: 5198799 - DNA, 25 bp, Homo sapien
cgaagttgagttctggtggtgccaa

SEQ ID NO: 5198800 - DNA, 25 bp, Homo sapien
tgtggagtacttatatgtcaattgc

SEQ ID NO: 5198801 - DNA, 25 bp, Homo sapien
tacagcctaatgtggagtacttata

SEQ ID NO: 5198802 - DNA, 25 bp, Homo sapien
tgatcaacccgtaaaatacagccta

SEQ ID NO: 5198803 - DNA, 25 bp, Homo sapien
ctggcagtgtatactgatcaacccg

SEQ ID NO: 5198804 - DNA, 25 bp, Homo sapien
tgcaaccgctaactctggaactaga

SEQ ID NO: 5198805 - DNA, 25 bp, Homo sapien
caaccgctaactctggaactagaga

SEQ ID NO: 5198806 - DNA, 25 bp, Homo sapien
agaggcaaccctgcaaccgctaact

SEQ ID NO: 5198807 - DNA, 25 bp, Homo sapien
cgctaactctggaactagagaagga

SEQ ID NO: 5198808 - DNA, 25 bp, Homo sapien
tcccacaggaatacacacgatgcgt

SEQ ID NO: 5198809 - DNA, 25 bp, Homo sapien
gaatacacacgatgcgtcctgtccc

SEQ ID NO: 5198810 - DNA, 25 bp, Homo sapien
tccacatgaaacaccttgcctgctt

SEQ ID NO: 5198811 - DNA, 25 bp, Homo sapien
cagtgtcccacaggaatacacacga

SEQ ID NO: 5198812 - DNA, 25 bp, Homo sapien
tttggaatataaaaaggtccataga

SEQ ID NO: 5198813 - DNA, 25 bp, Homo sapien
ccatagaaaacaccctttatgatta

SEQ ID NO: 5198814 - DNA, 25 bp, Homo sapien
aggtccatagaaaacaccctttatg

SEQ ID NO: 5198815 - DNA, 25 bp, Homo sapien
tggaatataaaaaggtccatagaaa

SEQ ID NO: 5198816 - DNA, 25 bp, Homo sapien
ctgatcacactgtctgggccataaa

SEQ ID NO: 5198817 - DNA, 25 bp, Homo sapien
cagagcaacaatcagcaggcgcttt

SEQ ID NO: 5198818 - DNA, 25 bp, Homo sapien
ggtgagccggcatgagaatttccct

SEQ ID NO: 5198819 - DNA, 25 bp, Homo sapien
cgctcttgcccatgcattatttaag

SEQ ID NO: 5198820 - DNA, 25 bp, Homo sapien
attagaggccaaacttgacagagca

SEQ ID NO: 5198821 - DNA, 25 bp, Homo sapien
cattttggcaaacaaggacaagttc

SEQ ID NO: 5198822 - DNA, 25 bp, Homo sapien
aattagaggccaaacttgacagagc

SEQ ID NO: 5198823 - DNA, 25 bp, Homo sapien
tcattttggcaaacaaggacaagtt

SEQ ID NO: 5198824 - DNA, 25 bp, Homo sapien
tgtgttcctccttcaatgtccagtg

SEQ ID NO: 5198825 - DNA, 25 bp, Homo sapien
aagccatagccccagtctagtctgg

SEQ ID NO: 5198826 - DNA, 25 bp, Homo sapien
actttgttactgaagccatagcccc

SEQ ID NO: 5198827 - DNA, 25 bp, Homo sapien
tactgaagccatagccccagtctag

SEQ ID NO: 5198828 - DNA, 25 bp, Homo sapien
tgaagccattaccacctataattaa

SEQ ID NO: 5198829 - DNA, 25 bp, Homo sapien
gcatatctctcgtgatagtcatggt

SEQ ID NO: 5198830 - DNA, 25 bp, Homo sapien
cagcagcatatctctcgtgatagtc

SEQ ID NO: 5198831 - DNA, 25 bp, Homo sapien
gatagtcatggtcaaactgaaacat

SEQ ID NO: 5198832 - DNA, 25 bp, Homo sapien
tctcgtgatagtcatggtcaaactg

SEQ ID NO: 5198833 - DNA, 25 bp, Homo sapien
ggtcagtctgaactcttcacagaca

SEQ ID NO: 5198834 - DNA, 25 bp, Homo sapien
tcaataaatggttccggtcagtctg

SEQ ID NO: 5198835 - DNA, 25 bp, Homo sapien
gagaggggatttgtaacaccactac

SEQ ID NO: 5198836 - DNA, 25 bp, Homo sapien
ggttccggtcagtctgaactcttca

SEQ ID NO: 5198837 - DNA, 25 bp, Homo sapien
tatatggtttgttcttttcactaac

SEQ ID NO: 5198838 - DNA, 25 bp, Homo sapien
cgtagatataatttctccccttctc

SEQ ID NO: 5198839 - DNA, 25 bp, Homo sapien
tttatatatggtttgttcttttcac

SEQ ID NO: 5198840 - DNA, 25 bp, Homo sapien
caaaataacttttatatatggtttg

SEQ ID NO: 5198841 - DNA, 25 bp, Homo sapien
ttaacagactaaatgctttcattct

SEQ ID NO: 5198842 - DNA, 25 bp, Homo sapien
tgctttcattctagcaccagcctgt

SEQ ID NO: 5198843 - DNA, 25 bp, Homo sapien
atttccacgggatcttcgttgtact

SEQ ID NO: 5198844 - DNA, 25 bp, Homo sapien
tccacgggatcttcgttgtactctg

SEQ ID NO: 5198845 - DNA, 25 bp, Homo sapien
cacgggatcttcgttgtactctggg

SEQ ID NO: 5198846 - DNA, 25 bp, Homo sapien
tgtactctggggagatttctagcat

SEQ ID NO: 5198847 - DNA, 25 bp, Homo sapien
tcatccacttatcctgtacaactcc

SEQ ID NO: 5198848 - DNA, 25 bp, Homo sapien
acttatcctgtacaactcctcgctg

SEQ ID NO: 5198849 - DNA, 25 bp, Homo sapien
tatcctgtacaactcctcgctgtgg

SEQ ID NO: 5198850 - DNA, 25 bp, Homo sapien
tgtacaactcctcgctgtggaccca

SEQ ID NO: 5198851 - DNA, 25 bp, Homo sapien
gacccagagccttgatgctatcagc

SEQ ID NO: 5198852 - DNA, 25 bp, Homo sapien
ggatacctcttatcctgcatacctc

SEQ ID NO: 5198853 - DNA, 25 bp, Homo sapien
cttgctgggatggagctcggcccta

SEQ ID NO: 5198854 - DNA, 25 bp, Homo sapien
tctccttgccatacctacatacagg

SEQ ID NO: 5198855 - DNA, 25 bp, Homo sapien
gtctggagtgcaagaatcacaactt

SEQ ID NO: 5198856 - DNA, 25 bp, Homo sapien
tccaaacctgaatcacataagagcc

SEQ ID NO: 5198857 - DNA, 25 bp, Homo sapien
tgactaaagcccaactgggatgaca

SEQ ID NO: 5198858 - DNA, 25 bp, Homo sapien
tagtagaagatgctttccaaacctg

SEQ ID NO: 5198859 - DNA, 25 bp, Homo sapien
agctttgggcacaccccttcccaca

SEQ ID NO: 5198860 - DNA, 25 bp, Homo sapien
atgctgcctgagctttgggcacacc

SEQ ID NO: 5198861 - DNA, 25 bp, Homo sapien
tgagctttgggcacaccccttccca

SEQ ID NO: 5198862 - DNA, 25 bp, Homo sapien
cctgagctttgggcacaccccttcc

SEQ ID NO: 5198863 - DNA, 25 bp, Homo sapien
ctctttgattatcccatgcagcggt

SEQ ID NO: 5198864 - DNA, 25 bp, Homo sapien
tttgattatcccatgcagcggtggg

SEQ ID NO: 5198865 - DNA, 25 bp, Homo sapien
tgcagcggtggggtaattcccttcc

SEQ ID NO: 5198866 - DNA, 25 bp, Homo sapien
cctctctctttgattatcccatgca

SEQ ID NO: 5198867 - DNA, 25 bp, Homo sapien
tagtgggaacagaaactagagcagc

SEQ ID NO: 5198868 - DNA, 25 bp, Homo sapien
agtgggaacagaaactagagcagcc

SEQ ID NO: 5198869 - DNA, 25 bp, Homo sapien
ctagtgggaacagaaactagagcag

SEQ ID NO: 5198870 - DNA, 25 bp, Homo sapien
tgagctccacggaagcaccttcctg

SEQ ID NO: 5198871 - DNA, 25 bp, Homo sapien
tgttgctgtcttgtggagcacacca

SEQ ID NO: 5198872 - DNA, 25 bp, Homo sapien
ccttcctgatccctgaatgaatggg

SEQ ID NO: 5198873 - DNA, 25 bp, Homo sapien
ccatagcacctggtctgttgctgtc

SEQ ID NO: 5198874 - DNA, 25 bp, Homo sapien
gaagtcctgccatatactgtcgata

SEQ ID NO: 5198875 - DNA, 25 bp, Homo sapien
gagccagaagtcctgccatatactg

SEQ ID NO: 5198876 - DNA, 25 bp, Homo sapien
cataacaccataaggaggagccaga

SEQ ID NO: 5198877 - DNA, 25 bp, Homo sapien
gtcattgttagagcccgtttccata

SEQ ID NO: 5198878 - DNA, 25 bp, Homo sapien
tctctttgttggtagggttaccatg

SEQ ID NO: 5198879 - DNA, 25 bp, Homo sapien
tgttggtagggttaccatgattatt

SEQ ID NO: 5198880 - DNA, 25 bp, Homo sapien
aagataggcagagagagtagctact

SEQ ID NO: 5198881 - DNA, 25 bp, Homo sapien
gataggcagagagagtagctactca

SEQ ID NO: 5198882 - DNA, 25 bp, Homo sapien
tactactagtattagggagatggcc

SEQ ID NO: 5198883 - DNA, 25 bp, Homo sapien
tgcccagcatgtagttaaagaagct

SEQ ID NO: 5198884 - DNA, 25 bp, Homo sapien
cctaaaggtcactgggtgcccaaga

SEQ ID NO: 5198885 - DNA, 25 bp, Homo sapien
cagctgttagccctctgcttagagc

SEQ ID NO: 5198886 - DNA, 25 bp, Homo sapien
aaataatccagcaagtagctgccca

SEQ ID NO: 5198887 - DNA, 25 bp, Homo sapien
caaacagcacttgttgatgtgtgca

SEQ ID NO: 5198888 - DNA, 25 bp, Homo sapien
catttattcctacaaaggtgcaata

SEQ ID NO: 5198889 - DNA, 25 bp, Homo sapien
tattttgtaggttccagcatcctgt

SEQ ID NO: 5198890 - DNA, 25 bp, Homo sapien
caaaaaatgaggaccccagatgatc

SEQ ID NO: 5198891 - DNA, 25 bp, Homo sapien
cagttgccctttcagaagtatggag

SEQ ID NO: 5198892 - DNA, 25 bp, Homo sapien
catagtcagtcaggtatagcacata

SEQ ID NO: 5198893 - DNA, 25 bp, Homo sapien
gacagggtcattattccaaagggca

SEQ ID NO: 5198894 - DNA, 25 bp, Homo sapien
agtggtttgagatgatctccaggct

SEQ ID NO: 5198895 - DNA, 25 bp, Homo sapien
tgctttaagtaatctccttaagatg

SEQ ID NO: 5198896 - DNA, 25 bp, Homo sapien
ctaattactagcaggaattcttcta

SEQ ID NO: 5198897 - DNA, 25 bp, Homo sapien
gggtcattactaattactagcagga

SEQ ID NO: 5198898 - DNA, 25 bp, Homo sapien
aactcaattgttctgtatggacttg

SEQ ID NO: 5198899 - DNA, 25 bp, Homo sapien
tctgtatggacttgcagaccagacc

SEQ ID NO: 5198900 - DNA, 25 bp, Homo sapien
aggactggaactcaattgttctgta

SEQ ID NO: 5198901 - DNA, 25 bp, Homo sapien
tgtatggacttgcagaccagaccat

SEQ ID NO: 5198902 - DNA, 25 bp, Homo sapien
tattagctattgactgcacccaggt

SEQ ID NO: 5198903 - DNA, 25 bp, Homo sapien
ctattcattaaattaggtccctgag

SEQ ID NO: 5198904 - DNA, 25 bp, Homo sapien
taatgctttgttagcctggttcact

SEQ ID NO: 5198905 - DNA, 25 bp, Homo sapien
caaacctgataaaattcttgctgat

SEQ ID NO: 5198906 - DNA, 25 bp, Homo sapien
tcatttagaaggttagggtatccca

SEQ ID NO: 5198907 - DNA, 25 bp, Homo sapien
tgcatacatggcactagacatctgt

SEQ ID NO: 5198908 - DNA, 25 bp, Homo sapien
aataacttcaacgaagggagtggca

SEQ ID NO: 5198909 - DNA, 25 bp, Homo sapien
tctatggcttcagacacggaagaag

SEQ ID NO: 5198910 - DNA, 25 bp, Homo sapien
agcaccaacccatgaagaatctgcc

SEQ ID NO: 5198911 - DNA, 25 bp, Homo sapien
aactatatcaaatagtcaacacaac

SEQ ID NO: 5198912 - DNA, 25 bp, Homo sapien
cagcaccaacccatgaagaatctgc

SEQ ID NO: 5198913 - DNA, 25 bp, Homo sapien
caaatagtcaacacaacacagaaga

SEQ ID NO: 5198914 - DNA, 25 bp, Homo sapien
tcagacgtggcaataagaactttcc

SEQ ID NO: 5198915 - DNA, 25 bp, Homo sapien
ggtttactcctacgatgtactgccg

SEQ ID NO: 5198916 - DNA, 25 bp, Homo sapien
gcagggccagcattgagctcaagca

SEQ ID NO: 5198917 - DNA, 25 bp, Homo sapien
gttaaaataaatgacgctgcaccag

SEQ ID NO: 5198918 - DNA, 25 bp, Homo sapien
ctgtagcctacagctggagttggga

SEQ ID NO: 5198919 - DNA, 25 bp, Homo sapien
ggcattgtgagtcccctagtctggc

SEQ ID NO: 5198920 - DNA, 25 bp, Homo sapien
tattcagcccctgtttctaagtgtg

SEQ ID NO: 5198921 - DNA, 25 bp, Homo sapien
cagacgggagtttaaggcattgtga

SEQ ID NO: 5198922 - DNA, 25 bp, Homo sapien
cagtaagaatggttctcttttagat

SEQ ID NO: 5198923 - DNA, 25 bp, Homo sapien
tacaagataatatgaatctaataaa

SEQ ID NO: 5198924 - DNA, 25 bp, Homo sapien
taatatgaatctaataaatgctgca

SEQ ID NO: 5198925 - DNA, 25 bp, Homo sapien
taaatgctgcaacattttggatttc

SEQ ID NO: 5198926 - DNA, 25 bp, Homo sapien
gataatatgaatctaataaatgctg

SEQ ID NO: 5198927 - DNA, 25 bp, Homo sapien
aagaatccaaatggggctgtgacaa

SEQ ID NO: 5198928 - DNA, 25 bp, Homo sapien
aatccaaatggggctgtgacaatgt

SEQ ID NO: 5198929 - DNA, 25 bp, Homo sapien
gaaagaatccaaatggggctgtgac

SEQ ID NO: 5198930 - DNA, 25 bp, Homo sapien
tgaaagaatccaaatggggctgtga

SEQ ID NO: 5198931 - DNA, 25 bp, Homo sapien
aagagaaagaatgtcattttaagaa

SEQ ID NO: 5198932 - DNA, 25 bp, Homo sapien
cttagctgcactgtagaaaaataag

SEQ ID NO: 5198933 - DNA, 25 bp, Homo sapien
agaaagaatgtcattttaagaattc

SEQ ID NO: 5198934 - DNA, 25 bp, Homo sapien
tagctgcactgtagaaaaataagag

SEQ ID NO: 5198935 - DNA, 25 bp, Homo sapien
gaaccaaggtcaagaagatgcccat

SEQ ID NO: 5198936 - DNA, 25 bp, Homo sapien
agaaccaaggtcaagaagatgccca

SEQ ID NO: 5198937 - DNA, 25 bp, Homo sapien
aagtagaagaaagtgtacagagttc

SEQ ID NO: 5198938 - DNA, 25 bp, Homo sapien
ggctctagagaaagtgcatatgatt

SEQ ID NO: 5198939 - DNA, 25 bp, Homo sapien
tgtgactgtcagatcagctctaggc

SEQ ID NO: 5198940 - DNA, 25 bp, Homo sapien
gaaagtgtacagagttcaggattct

SEQ ID NO: 5198941 - DNA, 25 bp, Homo sapien
gaacgtgaggttcaatgagaggtgt

SEQ ID NO: 5198942 - DNA, 25 bp, Homo sapien
tgttagcaggacgaagaggaacgtg

SEQ ID NO: 5198943 - DNA, 25 bp, Homo sapien
cttggtaatggtgttagcaggacga

SEQ ID NO: 5198944 - DNA, 25 bp, Homo sapien
ggaacgtgaggttcaatgagaggtg

SEQ ID NO: 5198945 - DNA, 25 bp, Homo sapien
tgtgaggtgctcgagagagaatggc

SEQ ID NO: 5198946 - DNA, 25 bp, Homo sapien
gagagaatggcatttcgtaaaattt

SEQ ID NO: 5198947 - DNA, 25 bp, Homo sapien
atgtctttaggtggtattttctatc

SEQ ID NO: 5198948 - DNA, 25 bp, Homo sapien
ggtgctcgagagagaatggcatttc

SEQ ID NO: 5198949 - DNA, 25 bp, Homo sapien
agtccgggagtgaacacatggtgtc

SEQ ID NO: 5198950 - DNA, 25 bp, Homo sapien
atcatccagtccaccagttcagttc

SEQ ID NO: 5198951 - DNA, 25 bp, Homo sapien
tgagtccgggagtgaacacatggtg

SEQ ID NO: 5198952 - DNA, 25 bp, Homo sapien
cttgagtccgggagtgaacacatgg

SEQ ID NO: 5198953 - DNA, 25 bp, Homo sapien
agtggcagcaaagccgggagcctcc

SEQ ID NO: 5198954 - DNA, 25 bp, Homo sapien
tcacagctccgtttactagaaacaa

SEQ ID NO: 5198955 - DNA, 25 bp, Homo sapien
ggcctcacagctccgtttactagaa

SEQ ID NO: 5198956 - DNA, 25 bp, Homo sapien
cggggctgcagtcatgcacaccaca

SEQ ID NO: 5198957 - DNA, 25 bp, Homo sapien
tgggaaacatggaagcacgtgtcag

SEQ ID NO: 5198958 - DNA, 25 bp, Homo sapien
tatgggaaacatggaagcacgtgtc

SEQ ID NO: 5198959 - DNA, 25 bp, Homo sapien
atgggaaacatggaagcacgtgtca

SEQ ID NO: 5198960 - DNA, 25 bp, Homo sapien
ctatgggaaacatggaagcacgtgt

SEQ ID NO: 5198961 - DNA, 25 bp, Homo sapien
tcttggaaatggtgctcctggtcca

SEQ ID NO: 5198962 - DNA, 25 bp, Homo sapien
ggtttgcgaaggatcatcctcatgt

SEQ ID NO: 5198963 - DNA, 25 bp, Homo sapien
gcatcctcgtgctcatcatccagaa

SEQ ID NO: 5198964 - DNA, 25 bp, Homo sapien
catccagaaatcgatagaataaata

SEQ ID NO: 5198965 - DNA, 25 bp, Homo sapien
ttctttctgagtggatctgattaaa

SEQ ID NO: 5198966 - DNA, 25 bp, Homo sapien
tctttctgagtggatctgattaaac

SEQ ID NO: 5198967 - DNA, 25 bp, Homo sapien
caagtcaccgctaactgaaaaggtt

SEQ ID NO: 5198968 - DNA, 25 bp, Homo sapien
cacaagcctgtgtggtggtttcgga

SEQ ID NO: 5198969 - DNA, 25 bp, Homo sapien
tggtttcggatgcaagggccaagtc

SEQ ID NO: 5198970 - DNA, 25 bp, Homo sapien
cagccaaaaaacacaagcctgtgtg

SEQ ID NO: 5198971 - DNA, 25 bp, Homo sapien
cacccggagaaatcaacattataaa

SEQ ID NO: 5198972 - DNA, 25 bp, Homo sapien
cattataaatatctacataagccat

SEQ ID NO: 5198973 - DNA, 25 bp, Homo sapien
acccggagaaatcaacattataaat

SEQ ID NO: 5198974 - DNA, 25 bp, Homo sapien
aaacacccggagaaatcaacattat

SEQ ID NO: 5198975 - DNA, 25 bp, Homo sapien
acaagataataaatggggatggata

SEQ ID NO: 5198976 - DNA, 25 bp, Homo sapien
caagataataaatggggatggatag

SEQ ID NO: 5198977 - DNA, 25 bp, Homo sapien
agataataaatggggatggataggg

SEQ ID NO: 5198978 - DNA, 25 bp, Homo sapien
gacaagataataaatggggatggat

SEQ ID NO: 5198979 - DNA, 25 bp, Homo sapien
cattgatgtggatttgtcggatccc

SEQ ID NO: 5198980 - DNA, 25 bp, Homo sapien
tctttacaaatctgcgtggtgccac

SEQ ID NO: 5198981 - DNA, 25 bp, Homo sapien
acacagggagagatattaggcatcc

SEQ ID NO: 5198982 - DNA, 25 bp, Homo sapien
tgtccttctccagatgacacaggga

SEQ ID NO: 5198983 - DNA, 25 bp, Homo sapien
agaggtccacaacagctgttcggga

SEQ ID NO: 5198984 - DNA, 25 bp, Homo sapien
tcattcatcaacaacccacgcagag

SEQ ID NO: 5198985 - DNA, 25 bp, Homo sapien
atcaacaacccacgcagagaaagag

SEQ ID NO: 5198986 - DNA, 25 bp, Homo sapien
gtctttcattcatcaacaacccacg

SEQ ID NO: 5198987 - DNA, 25 bp, Homo sapien
caggaggactgagggtgagcactgg

SEQ ID NO: 5198988 - DNA, 25 bp, Homo sapien
tttccacgcctgtcacactcagtag

SEQ ID NO: 5198989 - DNA, 25 bp, Homo sapien
cagatttactgccaggcaagacctt

SEQ ID NO: 5198990 - DNA, 25 bp, Homo sapien
ctctaagacagacgccccaggagga

SEQ ID NO: 5198991 - DNA, 25 bp, Homo sapien
cagctagtcttaggacctgcacaaa

SEQ ID NO: 5198992 - DNA, 25 bp, Homo sapien
taacagctagtcttaggacctgcac

SEQ ID NO: 5198993 - DNA, 25 bp, Homo sapien
gccgtaacagctagtcttaggacct

SEQ ID NO: 5198994 - DNA, 25 bp, Homo sapien
ctttgagccgtaacagctagtctta

SEQ ID NO: 5198995 - DNA, 25 bp, Homo sapien
gggataaggctttaatatgaagaag

SEQ ID NO: 5198996 - DNA, 25 bp, Homo sapien
gtagaaagatgggataaggctttaa

SEQ ID NO: 5198997 - DNA, 25 bp, Homo sapien
tctctaggtcatccacagtcctctg

SEQ ID NO: 5198998 - DNA, 25 bp, Homo sapien
tgaagaagctcctcatagataatct

SEQ ID NO: 5198999 - DNA, 25 bp, Homo sapien
cacaatcctctcaattccactgaga

SEQ ID NO: 5199000 - DNA, 25 bp, Homo sapien
gaagacgagactacccacaatcctc

SEQ ID NO: 5199001 - DNA, 25 bp, Homo sapien
aagtcggatcgggacatgctgggtc

SEQ ID NO: 5199002 - DNA, 25 bp, Homo sapien
ctgagaccagggaagtcggatcggg

SEQ ID NO: 5199003 - DNA, 25 bp, Homo sapien
gaacacctgctaactctcgtttcac

SEQ ID NO: 5199004 - DNA, 25 bp, Homo sapien
ctcaaaaatgagaacacctgctaac

SEQ ID NO: 5199005 - DNA, 25 bp, Homo sapien
cctttggcgtgagactcaaaaatga

SEQ ID NO: 5199006 - DNA, 25 bp, Homo sapien
cagtccctcctttggcgtgagactc

SEQ ID NO: 5199007 - DNA, 25 bp, Homo sapien
gaataatgtaccaggaggtaccttc

SEQ ID NO: 5199008 - DNA, 25 bp, Homo sapien
tagaataatgtaccaggaggtacct

SEQ ID NO: 5199009 - DNA, 25 bp, Homo sapien
taatgtaccaggaggtaccttcttc

SEQ ID NO: 5199010 - DNA, 25 bp, Homo sapien
aataatgtaccaggaggtaccttct

SEQ ID NO: 5199011 - DNA, 25 bp, Homo sapien
gatagagtagagcacacagatgaag

SEQ ID NO: 5199012 - DNA, 25 bp, Homo sapien
tagagcacacagatgaagaagatcc

SEQ ID NO: 5199013 - DNA, 25 bp, Homo sapien
atagagtagagcacacagatgaaga

SEQ ID NO: 5199014 - DNA, 25 bp, Homo sapien
ctggatagagtagagcacacagatg

SEQ ID NO: 5199015 - DNA, 25 bp, Homo sapien
taggatccggttgaaatcctccttg

SEQ ID NO: 5199016 - DNA, 25 bp, Homo sapien
aaatggcagttatcttctcgtaaga

SEQ ID NO: 5199017 - DNA, 25 bp, Homo sapien
tctcgtaagacgatagaggcagctc

SEQ ID NO: 5199018 - DNA, 25 bp, Homo sapien
attcactagtgctaacttgccgaag

SEQ ID NO: 5199019 - DNA, 25 bp, Homo sapien
tctgcagagccaacttttaagtgca

SEQ ID NO: 5199020 - DNA, 25 bp, Homo sapien
tactggaatacaacctctggatccc

SEQ ID NO: 5199021 - DNA, 25 bp, Homo sapien
tatgagacaggctcagatttgggag

SEQ ID NO: 5199022 - DNA, 25 bp, Homo sapien
tctcatggaccagtgcagggatgca

SEQ ID NO: 5199023 - DNA, 25 bp, Homo sapien
aagtctgactgtattcgcctccacg

SEQ ID NO: 5199024 - DNA, 25 bp, Homo sapien
ttgattagaagctctgttccctgct

SEQ ID NO: 5199025 - DNA, 25 bp, Homo sapien
gagtttccttgattagaagctctgt

SEQ ID NO: 5199026 - DNA, 25 bp, Homo sapien
agacatcttggtcatgttctttaag

SEQ ID NO: 5199027 - DNA, 25 bp, Homo sapien
tgtgaaaaggttaatcatagtctgg

SEQ ID NO: 5199028 - DNA, 25 bp, Homo sapien
gagaacatgctattgtagaaatgat

SEQ ID NO: 5199029 - DNA, 25 bp, Homo sapien
tctggcaattacagtgttggatgca

SEQ ID NO: 5199030 - DNA, 25 bp, Homo sapien
gtagaaatgatgataccatgtgaaa

SEQ ID NO: 5199031 - DNA, 25 bp, Homo sapien
cacagcagaaagacatgcgaaacag

SEQ ID NO: 5199032 - DNA, 25 bp, Homo sapien
ctaagggctccatggaatttatcct

SEQ ID NO: 5199033 - DNA, 25 bp, Homo sapien
tgcgaaacagtaaacgactaagggc

SEQ ID NO: 5199034 - DNA, 25 bp, Homo sapien
aaacccgcataaccacacagcagaa

SEQ ID NO: 5199035 - DNA, 25 bp, Homo sapien
tttttcaggtgttcctgacatcaca

SEQ ID NO: 5199036 - DNA, 25 bp, Homo sapien
ttttttcaggtgttcctgacatcac

SEQ ID NO: 5199037 - DNA, 25 bp, Homo sapien
ttgcctcaaggcgtattgtttctag

SEQ ID NO: 5199038 - DNA, 25 bp, Homo sapien
tttaaagttgcctcaaggcgtattg

SEQ ID NO: 5199039 - DNA, 25 bp, Homo sapien
cagtgccgggcaaagctgggtattt

SEQ ID NO: 5199040 - DNA, 25 bp, Homo sapien
aacacagtgcatcataataaagtca

SEQ ID NO: 5199041 - DNA, 25 bp, Homo sapien
caccagtgccgggcaaagctgggta

SEQ ID NO: 5199042 - DNA, 25 bp, Homo sapien
tgggccaccagtgccgggcaaagct

SEQ ID NO: 5199043 - DNA, 25 bp, Homo sapien
tgagataagaatggccctcgatagg

SEQ ID NO: 5199044 - DNA, 25 bp, Homo sapien
ctcgatagggggggttgtcttcgag

SEQ ID NO: 5199045 - DNA, 25 bp, Homo sapien
atgagataagaatggccctcgatag

SEQ ID NO: 5199046 - DNA, 25 bp, Homo sapien
gatgagataagaatggccctcgata

SEQ ID NO: 5199047 - DNA, 25 bp, Homo sapien
tcaactgggccattccaaacactgt

SEQ ID NO: 5199048 - DNA, 25 bp, Homo sapien
actgggccattccaaacactgttga

SEQ ID NO: 5199049 - DNA, 25 bp, Homo sapien
aactgggccattccaaacactgttg

SEQ ID NO: 5199050 - DNA, 25 bp, Homo sapien
gctgtcccaaataaacttggccttc

SEQ ID NO: 5199051 - DNA, 25 bp, Homo sapien
ggcgttgcagaaccagtctttggca

SEQ ID NO: 5199052 - DNA, 25 bp, Homo sapien
caagtgaggctaattactacgagtg

SEQ ID NO: 5199053 - DNA, 25 bp, Homo sapien
tccattggcccagtctagctagagt

SEQ ID NO: 5199054 - DNA, 25 bp, Homo sapien
tagctagagtctggcgttgcagaac

SEQ ID NO: 5199055 - DNA, 25 bp, Homo sapien
aattggagttataggcttcctgttt

SEQ ID NO: 5199056 - DNA, 25 bp, Homo sapien
gctgctgctggcaattggagttata

SEQ ID NO: 5199057 - DNA, 25 bp, Homo sapien
catggttgtaagatagctgctgctg

SEQ ID NO: 5199058 - DNA, 25 bp, Homo sapien
tgctaatgatgttatcacagacccc

SEQ ID NO: 5199059 - DNA, 25 bp, Homo sapien
aattgtaagcaccttgaggcttggg

SEQ ID NO: 5199060 - DNA, 25 bp, Homo sapien
gcacatttatggctaccatcttaat

SEQ ID NO: 5199061 - DNA, 25 bp, Homo sapien
tatggctaccatcttaattgtaagc

SEQ ID NO: 5199062 - DNA, 25 bp, Homo sapien
tcttaattgtaagcaccttgaggct

SEQ ID NO: 5199063 - DNA, 25 bp, Homo sapien
tctcttgtgtagaaccatgacttac

SEQ ID NO: 5199064 - DNA, 25 bp, Homo sapien
ttctcttgtgtagaaccatgactta

SEQ ID NO: 5199065 - DNA, 25 bp, Homo sapien
cctgctgtaccaattctctggtgag

SEQ ID NO: 5199066 - DNA, 25 bp, Homo sapien
tccaggaaggccatagacacgtcat

SEQ ID NO: 5199067 - DNA, 25 bp, Homo sapien
gcaggaggtctccatacatggcagc

SEQ ID NO: 5199068 - DNA, 25 bp, Homo sapien
ggatgactcgcctcttattgttgag

SEQ ID NO: 5199069 - DNA, 25 bp, Homo sapien
ccactgtagaaccaggcggatgact

SEQ ID NO: 5199070 - DNA, 25 bp, Homo sapien
ttggcaaaagtcacaggcttttaac

SEQ ID NO: 5199071 - DNA, 25 bp, Homo sapien
attggcaaaagtcacaggcttttaa

SEQ ID NO: 5199072 - DNA, 25 bp, Homo sapien
ggcagcaatcatccgggcatcatct

SEQ ID NO: 5199073 - DNA, 25 bp, Homo sapien
gggcagcaatcatccgggcatcatc

SEQ ID NO: 5199074 - DNA, 25 bp, Homo sapien
aatcatccgggcatcatctgataca

SEQ ID NO: 5199075 - DNA, 25 bp, Homo sapien
agcaatcatccgggcatcatctgat

SEQ ID NO: 5199076 - DNA, 25 bp, Homo sapien
cttcttttgtggtgcctttgcatct

SEQ ID NO: 5199077 - DNA, 25 bp, Homo sapien
cttttgtggtgcctttgcatcttct

SEQ ID NO: 5199078 - DNA, 25 bp, Homo sapien
tttgtggtgcctttgcatcttctga

SEQ ID NO: 5199079 - DNA, 25 bp, Homo sapien
ttcttttgtggtgcctttgcatctt

SEQ ID NO: 5199080 - DNA, 25 bp, Homo sapien
tgtaaaaacaaccacagcaagtgcc

SEQ ID NO: 5199081 - DNA, 25 bp, Homo sapien
gtgccataagggacagtgaccaatg

SEQ ID NO: 5199082 - DNA, 25 bp, Homo sapien
aatgcatgctagcatctcagagaag

SEQ ID NO: 5199083 - DNA, 25 bp, Homo sapien
ggacagtgaccaatgcatgctagca

SEQ ID NO: 5199084 - DNA, 25 bp, Homo sapien
ctcatcgcccgtattgaactgttgc

SEQ ID NO: 5199085 - DNA, 25 bp, Homo sapien
ctgggctctctcatcgcccgtattg

SEQ ID NO: 5199086 - DNA, 25 bp, Homo sapien
cttcatcagagccgcggataggctg

SEQ ID NO: 5199087 - DNA, 25 bp, Homo sapien
cgcggataggctggcgcttctgggc

SEQ ID NO: 5199088 - DNA, 25 bp, Homo sapien
tgatgacttccttcaccgaagtggc

SEQ ID NO: 5199089 - DNA, 25 bp, Homo sapien
ggagcccagcttgtcggcaactgca

SEQ ID NO: 5199090 - DNA, 25 bp, Homo sapien
ttgactatgatcaggccctccccgg

SEQ ID NO: 5199091 - DNA, 25 bp, Homo sapien
tcctccggaactcatcttgactatg

SEQ ID NO: 5199092 - DNA, 25 bp, Homo sapien
tattagtggaagcatacataagcac

SEQ ID NO: 5199093 - DNA, 25 bp, Homo sapien
gcttggatggaatgtcccattttgc

SEQ ID NO: 5199094 - DNA, 25 bp, Homo sapien
ccttacatagtttctgcttggatgg

SEQ ID NO: 5199095 - DNA, 25 bp, Homo sapien
tgggtgagcctcacatgaccacgct

SEQ ID NO: 5199096 - DNA, 25 bp, Homo sapien
aattgccagcttggtgaattaccgg

SEQ ID NO: 5199097 - DNA, 25 bp, Homo sapien
tgaattaccggaacacgcagagtga

SEQ ID NO: 5199098 - DNA, 25 bp, Homo sapien
caacaaattgccagcttggtgaatt

SEQ ID NO: 5199099 - DNA, 25 bp, Homo sapien
gcttggtgaattaccggaacacgca

SEQ ID NO: 5199100 - DNA, 25 bp, Homo sapien
gagattgcctattaaatacatctga

SEQ ID NO: 5199101 - DNA, 25 bp, Homo sapien
aatacatctgagatttgctgcactg

SEQ ID NO: 5199102 - DNA, 25 bp, Homo sapien
catgagattgcctattaaatacatc

SEQ ID NO: 5199103 - DNA, 25 bp, Homo sapien
tacatctgagatttgctgcactgcc

SEQ ID NO: 5199104 - DNA, 25 bp, Homo sapien
cgtccattaatggtgagcgtcgtaa

SEQ ID NO: 5199105 - DNA, 25 bp, Homo sapien
cgggcaagcaaacaggcgtccatta

SEQ ID NO: 5199106 - DNA, 25 bp, Homo sapien
gaatcgaattgctctcgcgggcaag

SEQ ID NO: 5199107 - DNA, 25 bp, Homo sapien
gagcgtcgtaaatactgaaacatca

SEQ ID NO: 5199108 - DNA, 25 bp, Homo sapien
cacggaagaggcaatgtgagcagca

SEQ ID NO: 5199109 - DNA, 25 bp, Homo sapien
tctctcccggcgtagggcaggttga

SEQ ID NO: 5199110 - DNA, 25 bp, Homo sapien
cattttcttgtacatagccctgtgg

SEQ ID NO: 5199111 - DNA, 25 bp, Homo sapien
ggaatataaatgctcaccctggacc

SEQ ID NO: 5199112 - DNA, 25 bp, Homo sapien
tgctgtaaagcaggtaacggcatgg

SEQ ID NO: 5199113 - DNA, 25 bp, Homo sapien
tttgggacgttcatccacagtgcta

SEQ ID NO: 5199114 - DNA, 25 bp, Homo sapien
acggcatggcagtttgggacgttca

SEQ ID NO: 5199115 - DNA, 25 bp, Homo sapien
ccggtggccatggtaacactgctgc

SEQ ID NO: 5199116 - DNA, 25 bp, Homo sapien
tcccaatcataaattgtcatctggt

SEQ ID NO: 5199117 - DNA, 25 bp, Homo sapien
tcatgcacgcagttgaagagttccc

SEQ ID NO: 5199118 - DNA, 25 bp, Homo sapien
tgttccaacagttgggccttcctgt

SEQ ID NO: 5199119 - DNA, 25 bp, Homo sapien
gagctcatcagttcaaaagttccca

SEQ ID NO: 5199120 - DNA, 25 bp, Homo sapien
cagtgacgacccaaaactgaatttc

SEQ ID NO: 5199121 - DNA, 25 bp, Homo sapien
aatttcattaaatctcctcaggaac

SEQ ID NO: 5199122 - DNA, 25 bp, Homo sapien
taaaattatgccttccaaatgtgtg

SEQ ID NO: 5199123 - DNA, 25 bp, Homo sapien
aggcagatctcagtgacgacccaaa

SEQ ID NO: 5199124 - DNA, 25 bp, Homo sapien
ttttttaatagctgaacacgcttgc

SEQ ID NO: 5199125 - DNA, 25 bp, Homo sapien
ttttaatagctgaacacgcttgctg

SEQ ID NO: 5199126 - DNA, 25 bp, Homo sapien
tttaatagctgaacacgcttgctga

SEQ ID NO: 5199127 - DNA, 25 bp, Homo sapien
ttaatagctgaacacgcttgctgag

SEQ ID NO: 5199128 - DNA, 25 bp, Homo sapien
gcggctcacagcaacgttacttagt

SEQ ID NO: 5199129 - DNA, 25 bp, Homo sapien
catgacgatggcaaaaaaggaattc

SEQ ID NO: 5199130 - DNA, 25 bp, Homo sapien
cacgttagtgccaagcggctcacag

SEQ ID NO: 5199131 - DNA, 25 bp, Homo sapien
gttacttagtcccatgacgatggca

SEQ ID NO: 5199132 - DNA, 25 bp, Homo sapien
cccacatatctacaccaatagatca

SEQ ID NO: 5199133 - DNA, 25 bp, Homo sapien
cctgagtcttcagtaaagctgaacc

SEQ ID NO: 5199134 - DNA, 25 bp, Homo sapien
tacaccaatagatcaatactgaatc

SEQ ID NO: 5199135 - DNA, 25 bp, Homo sapien
ggttcctactttgcttagttcctga

SEQ ID NO: 5199136 - DNA, 25 bp, Homo sapien
ggactgcattccctagactagaaga

SEQ ID NO: 5199137 - DNA, 25 bp, Homo sapien
cccttataaggtaaactacatgaga

SEQ ID NO: 5199138 - DNA, 25 bp, Homo sapien
tagacgatctataaagaggactgca

SEQ ID NO: 5199139 - DNA, 25 bp, Homo sapien
caggccagactgtaatctgtcttgc

SEQ ID NO: 5199140 - DNA, 25 bp, Homo sapien
cattaaactttcaaactccgcatag

SEQ ID NO: 5199141 - DNA, 25 bp, Homo sapien
taaactttcaaactccgcatagaac

SEQ ID NO: 5199142 - DNA, 25 bp, Homo sapien
actccgcatagaacttcttgaactt

SEQ ID NO: 5199143 - DNA, 25 bp, Homo sapien
tttcaaactccgcatagaacttctt

SEQ ID NO: 5199144 - DNA, 25 bp, Homo sapien
tactgtcagcctgtaggccctgtgg

SEQ ID NO: 5199145 - DNA, 25 bp, Homo sapien
tagctactgtcagcctgtaggccct

SEQ ID NO: 5199146 - DNA, 25 bp, Homo sapien
gaggaggttccagcttagctactgt

SEQ ID NO: 5199147 - DNA, 25 bp, Homo sapien
tccagcttagctactgtcagcctgt

SEQ ID NO: 5199148 - DNA, 25 bp, Homo sapien
gtttactagattgtcaatgaacgtc

SEQ ID NO: 5199149 - DNA, 25 bp, Homo sapien
gttcccctcatgagtaaatgtcata

SEQ ID NO: 5199150 - DNA, 25 bp, Homo sapien
cttgttcccctcatgagtaaatgtc

SEQ ID NO: 5199151 - DNA, 25 bp, Homo sapien
gattgtcaatgaacgtcttgttccc

SEQ ID NO: 5199152 - DNA, 25 bp, Homo sapien
ttgtggttaaggttataatactgca

SEQ ID NO: 5199153 - DNA, 25 bp, Homo sapien
aacacattgtggttaaggttataat

SEQ ID NO: 5199154 - DNA, 25 bp, Homo sapien
gtggttaaggttataatactgcaca

SEQ ID NO: 5199155 - DNA, 25 bp, Homo sapien
cacattgtggttaaggttataatac

SEQ ID NO: 5199156 - DNA, 25 bp, Homo sapien
gaatgctgcagatccttacaggctg

SEQ ID NO: 5199157 - DNA, 25 bp, Homo sapien
aatagctgcacttgaccagactggg

SEQ ID NO: 5199158 - DNA, 25 bp, Homo sapien
ttgcaataagcgcattccccgggct

SEQ ID NO: 5199159 - DNA, 25 bp, Homo sapien
gaagcttaagacatagtgcccagca

SEQ ID NO: 5199160 - DNA, 25 bp, Homo sapien
tagtgctaggcatggaggaatccac

SEQ ID NO: 5199161 - DNA, 25 bp, Homo sapien
taccccaacagatggctggctttgc

SEQ ID NO: 5199162 - DNA, 25 bp, Homo sapien
ggcactctcctagtatccactgaat

SEQ ID NO: 5199163 - DNA, 25 bp, Homo sapien
ccttgcaggttacggatgggacacc

SEQ ID NO: 5199164 - DNA, 25 bp, Homo sapien
agcaggtctaccatacctgcttgaa

SEQ ID NO: 5199165 - DNA, 25 bp, Homo sapien
ggccctgatcgcatcctgtagcagg

SEQ ID NO: 5199166 - DNA, 25 bp, Homo sapien
catcttgaaccaagtggatgtaaaa

SEQ ID NO: 5199167 - DNA, 25 bp, Homo sapien
tgaaccaagtggatgtaaaactggc

SEQ ID NO: 5199168 - DNA, 25 bp, Homo sapien
gaacttacagtactcttttgatatc

SEQ ID NO: 5199169 - DNA, 25 bp, Homo sapien
tatggtagaatttctcacatgagat

SEQ ID NO: 5199170 - DNA, 25 bp, Homo sapien
tcaaactttcttatggtagaatttc

SEQ ID NO: 5199171 - DNA, 25 bp, Homo sapien
cagtgggatatatgaatacttcaaa

SEQ ID NO: 5199172 - DNA, 25 bp, Homo sapien
taacatctaacttgtggaaggacaa

SEQ ID NO: 5199173 - DNA, 25 bp, Homo sapien
cctgggccttgacgatggatgactg

SEQ ID NO: 5199174 - DNA, 25 bp, Homo sapien
ccttgacgatggatgactgggaagt

SEQ ID NO: 5199175 - DNA, 25 bp, Homo sapien
ggccttgacgatggatgactgggaa

SEQ ID NO: 5199176 - DNA, 25 bp, Homo sapien
cacctgggccttgacgatggatgac

SEQ ID NO: 5199177 - DNA, 25 bp, Homo sapien
caccaagaaaaggtatctgtattcc

SEQ ID NO: 5199178 - DNA, 25 bp, Homo sapien
ggtggtttgctgtgactctacaatg

SEQ ID NO: 5199179 - DNA, 25 bp, Homo sapien
tgtattcctggctaccctggtgacc

SEQ ID NO: 5199180 - DNA, 25 bp, Homo sapien
tgctgtgactctacaatgctgccac

SEQ ID NO: 5199181 - DNA, 25 bp, Homo sapien
cctggcctgggaaatctatacaaag

SEQ ID NO: 5199182 - DNA, 25 bp, Homo sapien
gaagcataccgtttggaaatctgca

SEQ ID NO: 5199183 - DNA, 25 bp, Homo sapien
tctgggaatagggtggacttgaaca

SEQ ID NO: 5199184 - DNA, 25 bp, Homo sapien
ggtaacaagtgaagtgctctctcca

SEQ ID NO: 5199185 - DNA, 25 bp, Homo sapien
gtttatgttttctcttcccaactgc

SEQ ID NO: 5199186 - DNA, 25 bp, Homo sapien
tgtttatgttttctcttcccaactg

SEQ ID NO: 5199187 - DNA, 25 bp, Homo sapien
tttatgttttctcttcccaactgca

SEQ ID NO: 5199188 - DNA, 25 bp, Homo sapien
caagtaagcgtagagtacaatccaa

SEQ ID NO: 5199189 - DNA, 25 bp, Homo sapien
catgcctgagactgtacattagtgc

SEQ ID NO: 5199190 - DNA, 25 bp, Homo sapien
taactatcctagatgtggagaaggg

SEQ ID NO: 5199191 - DNA, 25 bp, Homo sapien
gaagggttagcttatcaagttcctc

SEQ ID NO: 5199192 - DNA, 25 bp, Homo sapien
tgtagtatctcactgttctggccgt

SEQ ID NO: 5199193 - DNA, 25 bp, Homo sapien
aagggttggctcctgtagtatctca

SEQ ID NO: 5199194 - DNA, 25 bp, Homo sapien
tatctcactgttctggccgtatttg

SEQ ID NO: 5199195 - DNA, 25 bp, Homo sapien
ttctggccgtatttgcaatcatgcg

SEQ ID NO: 5199196 - DNA, 25 bp, Homo sapien
ggcaggatttgttggcagtcgtact

SEQ ID NO: 5199197 - DNA, 25 bp, Homo sapien
actttagttgtctccagctgcactg

SEQ ID NO: 5199198 - DNA, 25 bp, Homo sapien
tgatgcaacttaactcccaacagac

SEQ ID NO: 5199199 - DNA, 25 bp, Homo sapien
caagggctgatgtgagtttctcaac

SEQ ID NO: 5199200 - DNA, 25 bp, Homo sapien
ggttgctcctgctagatccacacag

SEQ ID NO: 5199201 - DNA, 25 bp, Homo sapien
tcaagcatcactgggtagggcctct

SEQ ID NO: 5199202 - DNA, 25 bp, Homo sapien
tagaaataataccacagcgaactgc

SEQ ID NO: 5199203 - DNA, 25 bp, Homo sapien
gagagaagacatacatgcccctgcc

SEQ ID NO: 5199204 - DNA, 25 bp, Homo sapien
aaagaggaaagggcagaattggcat

SEQ ID NO: 5199205 - DNA, 25 bp, Homo sapien
tgttgaaagaggaaagggcagaatt

SEQ ID NO: 5199206 - DNA, 25 bp, Homo sapien
tgaaagaggaaagggcagaattggc

SEQ ID NO: 5199207 - DNA, 25 bp, Homo sapien
ctgttgaaagaggaaagggcagaat

SEQ ID NO: 5199208 - DNA, 25 bp, Homo sapien
taattgccgtacataactccggaca

SEQ ID NO: 5199209 - DNA, 25 bp, Homo sapien
taaagttctctggttgtcaatcaca

SEQ ID NO: 5199210 - DNA, 25 bp, Homo sapien
gacatcctgatggttcttattagct

SEQ ID NO: 5199211 - DNA, 25 bp, Homo sapien
cgacgaggctctaatctgtgtgaca

SEQ ID NO: 5199212 - DNA, 25 bp, Homo sapien
aaatgaaacagggtagccacaaact

SEQ ID NO: 5199213 - DNA, 25 bp, Homo sapien
taccaaactcttcacgtgggcctta

SEQ ID NO: 5199214 - DNA, 25 bp, Homo sapien
cagtcagtagtagcataaatggcat

SEQ ID NO: 5199215 - DNA, 25 bp, Homo sapien
ttcagaaattacagaccagtcctcc

SEQ ID NO: 5199216 - DNA, 25 bp, Homo sapien
ttaaatgtagtctaattgtgaaaac

SEQ ID NO: 5199217 - DNA, 25 bp, Homo sapien
tggcacagtatctattatgtagcaa

SEQ ID NO: 5199218 - DNA, 25 bp, Homo sapien
taaataactccataccattgattga

SEQ ID NO: 5199219 - DNA, 25 bp, Homo sapien
actatttacaatctttgaaagtgca

SEQ ID NO: 5199220 - DNA, 25 bp, Homo sapien
ggctcccacgtttccgctgcagtta

SEQ ID NO: 5199221 - DNA, 25 bp, Homo sapien
gagttgaacattccgcctctctgca

SEQ ID NO: 5199222 - DNA, 25 bp, Homo sapien
cacgtttccgctgcagttaggagtt

SEQ ID NO: 5199223 - DNA, 25 bp, Homo sapien
tgcagttaggagttgaacattccgc

SEQ ID NO: 5199224 - DNA, 25 bp, Homo sapien
tgagggtcgccaaaggagacatccc

SEQ ID NO: 5199225 - DNA, 25 bp, Homo sapien
gccgctgcctgagggtcgccaaagg

SEQ ID NO: 5199226 - DNA, 25 bp, Homo sapien
gtcgccaaaggagacatccccggct

SEQ ID NO: 5199227 - DNA, 25 bp, Homo sapien
caaaggagacatccccggctccggt

SEQ ID NO: 5199228 - DNA, 25 bp, Homo sapien
cagacgaggcgacggcctgggtaag

SEQ ID NO: 5199229 - DNA, 25 bp, Homo sapien
tcatgggcaagcgaggccagacgag

SEQ ID NO: 5199230 - DNA, 25 bp, Homo sapien
aattttttaggcaatcggatgtcat

SEQ ID NO: 5199231 - DNA, 25 bp, Homo sapien
tagccagtcctgaattaaagttttc

SEQ ID NO: 5199232 - DNA, 25 bp, Homo sapien
tgtcaccaggtctcctctcaggaag

SEQ ID NO: 5199233 - DNA, 25 bp, Homo sapien
ttccacagcaagcttgcatagctcc

SEQ ID NO: 5199234 - DNA, 25 bp, Homo sapien
gcttgcatagctcccctggcatctg

SEQ ID NO: 5199235 - DNA, 25 bp, Homo sapien
caggaagccctgacagacgggaagc

SEQ ID NO: 5199236 - DNA, 25 bp, Homo sapien
tcagatatcccccagacaaaacctg

SEQ ID NO: 5199237 - DNA, 25 bp, Homo sapien
cctggcagcccacgcaaaattcaac

SEQ ID NO: 5199238 - DNA, 25 bp, Homo sapien
tggctcagatatcccccagacaaaa

SEQ ID NO: 5199239 - DNA, 25 bp, Homo sapien
gcagcccacgcaaaattcaacaaca

SEQ ID NO: 5199240 - DNA, 25 bp, Homo sapien
ataatgacaaagtattatacttcca

SEQ ID NO: 5199241 - DNA, 25 bp, Homo sapien
taatgacaaagtattatacttccac

SEQ ID NO: 5199242 - DNA, 25 bp, Homo sapien
ctcccaaaacttcctccaccgcagt

SEQ ID NO: 5199243 - DNA, 25 bp, Homo sapien
acaaaggaggcaccgagagacgaca

SEQ ID NO: 5199244 - DNA, 25 bp, Homo sapien
tgtcctgtgatatccatttggctcg

SEQ ID NO: 5199245 - DNA, 25 bp, Homo sapien
tggctcgataaacactcccaaaact

SEQ ID NO: 5199246 - DNA, 25 bp, Homo sapien
aaaaggccggaaagtcagattagca

SEQ ID NO: 5199247 - DNA, 25 bp, Homo sapien
caattcactagattggccgggtgca

SEQ ID NO: 5199248 - DNA, 25 bp, Homo sapien
gagcaccgctttggacgagttatta

SEQ ID NO: 5199249 - DNA, 25 bp, Homo sapien
cagattagcaccactatgagaaggg

SEQ ID NO: 5199250 - DNA, 25 bp, Homo sapien
gatttgttgtatatggccccggagg

SEQ ID NO: 5199251 - DNA, 25 bp, Homo sapien
tcctaaccgggagtatgagtcaagc

SEQ ID NO: 5199252 - DNA, 25 bp, Homo sapien
ttcactgggagcaaagcacaatggc

SEQ ID NO: 5199253 - DNA, 25 bp, Homo sapien
caaggaagacccaagtgaacgatgc

SEQ ID NO: 5199254 - DNA, 25 bp, Homo sapien
tcagtggtatctgcagttctattat

SEQ ID NO: 5199255 - DNA, 25 bp, Homo sapien
ctttcagtggtatctgcagttctat

SEQ ID NO: 5199256 - DNA, 25 bp, Homo sapien
tttcagtggtatctgcagttctatt

SEQ ID NO: 5199257 - DNA, 25 bp, Homo sapien
ttcagtggtatctgcagttctatta

SEQ ID NO: 5199258 - DNA, 25 bp, Homo sapien
tgctctgccctggtaagacatgctt

SEQ ID NO: 5199259 - DNA, 25 bp, Homo sapien
gacctataggcggttcacatcacag

SEQ ID NO: 5199260 - DNA, 25 bp, Homo sapien
ggatccacagctgagagacctatag

SEQ ID NO: 5199261 - DNA, 25 bp, Homo sapien
actaataagaagcaaagcacggacc

SEQ ID NO: 5199262 - DNA, 25 bp, Homo sapien
tggagtagatgtctttataagggga

SEQ ID NO: 5199263 - DNA, 25 bp, Homo sapien
gagtagatgtctttataaggggatg

SEQ ID NO: 5199264 - DNA, 25 bp, Homo sapien
ggagtagatgtctttataaggggat

SEQ ID NO: 5199265 - DNA, 25 bp, Homo sapien
agtagatgtctttataaggggatgc

SEQ ID NO: 5199266 - DNA, 25 bp, Homo sapien
gcagctggattcctgtgaacaagtt

SEQ ID NO: 5199267 - DNA, 25 bp, Homo sapien
ttcagcaagtttcctggacacccca

SEQ ID NO: 5199268 - DNA, 25 bp, Homo sapien
cagctggattcctgtgaacaagttc

SEQ ID NO: 5199269 - DNA, 25 bp, Homo sapien
tcagcaagtttcctggacaccccag

SEQ ID NO: 5199270 - DNA, 25 bp, Homo sapien
caaagaatcagacactcagtcctgg

SEQ ID NO: 5199271 - DNA, 25 bp, Homo sapien
ccagggaccttgtttttgataagag

SEQ ID NO: 5199272 - DNA, 25 bp, Homo sapien
tgaaatcacaccaaaccagttagct

SEQ ID NO: 5199273 - DNA, 25 bp, Homo sapien
ccagaggctgaaaggagtgataagt

SEQ ID NO: 5199274 - DNA, 25 bp, Homo sapien
gaggtgaagccggagagcacattat

SEQ ID NO: 5199275 - DNA, 25 bp, Homo sapien
tgaagccggagagcacattatttag

SEQ ID NO: 5199276 - DNA, 25 bp, Homo sapien
gaacttgcactattcaaaagattgt

SEQ ID NO: 5199277 - DNA, 25 bp, Homo sapien
tttagggattgaacttgcactattc

SEQ ID NO: 5199278 - DNA, 25 bp, Homo sapien
tcaaaggcactctgtgatttgggtc

SEQ ID NO: 5199279 - DNA, 25 bp, Homo sapien
gaatttctcctatcaaaggcactct

SEQ ID NO: 5199280 - DNA, 25 bp, Homo sapien
acagctgaatttctcctatcaaagg

SEQ ID NO: 5199281 - DNA, 25 bp, Homo sapien
aaaggcactctgtgatttgggtcac

SEQ ID NO: 5199282 - DNA, 25 bp, Homo sapien
tctctatgtgagcttttatgcaaac

SEQ ID NO: 5199283 - DNA, 25 bp, Homo sapien
ttcatgtaattagggaaaccacttc

SEQ ID NO: 5199284 - DNA, 25 bp, Homo sapien
gcaaacttctaaagtgcaaggaatc

SEQ ID NO: 5199285 - DNA, 25 bp, Homo sapien
gaagagctattctgagagatttcac

SEQ ID NO: 5199286 - DNA, 25 bp, Homo sapien
gcttttctgacagatctgtactgaa

SEQ ID NO: 5199287 - DNA, 25 bp, Homo sapien
tactgaaacagttaacatggtgtag

SEQ ID NO: 5199288 - DNA, 25 bp, Homo sapien
ggtgtagttatgatctgtacattta

SEQ ID NO: 5199289 - DNA, 25 bp, Homo sapien
cagatctgtactgaaacagttaaca

SEQ ID NO: 5199290 - DNA, 25 bp, Homo sapien
ctggcaggataggagggtggcaaaa

SEQ ID NO: 5199291 - DNA, 25 bp, Homo sapien
tggcaggataggagggtggcaaaaa

SEQ ID NO: 5199292 - DNA, 25 bp, Homo sapien
ggtcatgccctttgagtcactttgg

SEQ ID NO: 5199293 - DNA, 25 bp, Homo sapien
tcagtcacagtcacataaaaagcag

SEQ ID NO: 5199294 - DNA, 25 bp, Homo sapien
tgtatgacaagatggaaaaccagcc

SEQ ID NO: 5199295 - DNA, 25 bp, Homo sapien
cagagagttatacacaggtcatgcc

SEQ ID NO: 5199296 - DNA, 25 bp, Homo sapien
gatggacccctggtactcagtagtg

SEQ ID NO: 5199297 - DNA, 25 bp, Homo sapien
tagtggggccacattgcacacaagc

SEQ ID NO: 5199298 - DNA, 25 bp, Homo sapien
gggccacattgcacacaagctccat

SEQ ID NO: 5199299 - DNA, 25 bp, Homo sapien
aaagctacggtaggtgcttctttgc

SEQ ID NO: 5199300 - DNA, 25 bp, Homo sapien
tggaacaaaccagcgttcattcagg

SEQ ID NO: 5199301 - DNA, 25 bp, Homo sapien
ctgtgattttctcccgatacggctc

SEQ ID NO: 5199302 - DNA, 25 bp, Homo sapien
gatacggctctggaacaaaccagcg

SEQ ID NO: 5199303 - DNA, 25 bp, Homo sapien
attcaggttactcttacagaaggcc

SEQ ID NO: 5199304 - DNA, 25 bp, Homo sapien
tagatgagtcaataataagtgggta

SEQ ID NO: 5199305 - DNA, 25 bp, Homo sapien
tctgtatgcaaggtactataaacat

SEQ ID NO: 5199306 - DNA, 25 bp, Homo sapien
tgagaggctacagccagactgaact

SEQ ID NO: 5199307 - DNA, 25 bp, Homo sapien
ttcagtggtgattcgataggaggcc

SEQ ID NO: 5199308 - DNA, 25 bp, Homo sapien
ttgggaggttcaagaattactccat

SEQ ID NO: 5199309 - DNA, 25 bp, Homo sapien
tgggaggttcaagaattactccata

SEQ ID NO: 5199310 - DNA, 25 bp, Homo sapien
gaggttcaagaattactccataaaa

SEQ ID NO: 5199311 - DNA, 25 bp, Homo sapien
gggaggttcaagaattactccataa

SEQ ID NO: 5199312 - DNA, 25 bp, Homo sapien
gagatcatcagtgacccatctatga

SEQ ID NO: 5199313 - DNA, 25 bp, Homo sapien
gaagctctggcagaatcaagacaag

SEQ ID NO: 5199314 - DNA, 25 bp, Homo sapien
taaatatgataaggttcacagaggg

SEQ ID NO: 5199315 - DNA, 25 bp, Homo sapien
cagtggcagagtaagtgtcgtcatc

SEQ ID NO: 5199316 - DNA, 25 bp, Homo sapien
tccctagtgactaacaaagttgggc

SEQ ID NO: 5199317 - DNA, 25 bp, Homo sapien
tgtgcccagcagtattgtctgtttt

SEQ ID NO: 5199318 - DNA, 25 bp, Homo sapien
ttgattatggccattgtagcgggta

SEQ ID NO: 5199319 - DNA, 25 bp, Homo sapien
gtataacactagtggtatctcacag

SEQ ID NO: 5199320 - DNA, 25 bp, Homo sapien
tactgttaatgtaatcatagagtga

SEQ ID NO: 5199321 - DNA, 25 bp, Homo sapien
taatgtaatcatagagtgatcccag

SEQ ID NO: 5199322 - DNA, 25 bp, Homo sapien
tagagtgatcccagagaagcatatt

SEQ ID NO: 5199323 - DNA, 25 bp, Homo sapien
tcatagagtgatcccagagaagcat

SEQ ID NO: 5199324 - DNA, 25 bp, Homo sapien
gtggcccaggtcataatgtgatcca

SEQ ID NO: 5199325 - DNA, 25 bp, Homo sapien
tggctacatcagtggcccaggtcat

SEQ ID NO: 5199326 - DNA, 25 bp, Homo sapien
ctttggctacatcagtggcccaggt

SEQ ID NO: 5199327 - DNA, 25 bp, Homo sapien
tttggctacatcagtggcccaggtc

SEQ ID NO: 5199328 - DNA, 25 bp, Homo sapien
tcttgacttgaggtctctgtgaatc

SEQ ID NO: 5199329 - DNA, 25 bp, Homo sapien
tttcttgacttgaggtctctgtgaa

SEQ ID NO: 5199330 - DNA, 25 bp, Homo sapien
ttgacttgaggtctctgtgaatcac

SEQ ID NO: 5199331 - DNA, 25 bp, Homo sapien
aatcaccttgacaggagcctccata

SEQ ID NO: 5199332 - DNA, 25 bp, Homo sapien
caatactccatcagcagctataaca

SEQ ID NO: 5199333 - DNA, 25 bp, Homo sapien
tcaatactccatcagcagctataac

SEQ ID NO: 5199334 - DNA, 25 bp, Homo sapien
aatactccatcagcagctataacaa

SEQ ID NO: 5199335 - DNA, 25 bp, Homo sapien
cttcaatactccatcagcagctata

SEQ ID NO: 5199336 - DNA, 25 bp, Homo sapien
ggctaattaagggattatcagttac

SEQ ID NO: 5199337 - DNA, 25 bp, Homo sapien
tctacttattggctaattaagggat

SEQ ID NO: 5199338 - DNA, 25 bp, Homo sapien
tattggctaattaagggattatcag

SEQ ID NO: 5199339 - DNA, 25 bp, Homo sapien
actttctacttattggctaattaag

SEQ ID NO: 5199340 - DNA, 25 bp, Homo sapien
gtcacaagtttctgacacagggaga

SEQ ID NO: 5199341 - DNA, 25 bp, Homo sapien
gggagactctggataacttctggag

SEQ ID NO: 5199342 - DNA, 25 bp, Homo sapien
tatggaaccgagaggcaccaaagtc

SEQ ID NO: 5199343 - DNA, 25 bp, Homo sapien
catgggaaagttccaaccaaggaca

SEQ ID NO: 5199344 - DNA, 25 bp, Homo sapien
cattttggcaactaggaagcgttct

SEQ ID NO: 5199345 - DNA, 25 bp, Homo sapien
gagcccaacactatctcggattcca

SEQ ID NO: 5199346 - DNA, 25 bp, Homo sapien
caaaaaatcattctcacaggcaaag

SEQ ID NO: 5199347 - DNA, 25 bp, Homo sapien
caatggtgctgctttaggcattcca

SEQ ID NO: 5199348 - DNA, 25 bp, Homo sapien
ttttttccactacaagccaagctac

SEQ ID NO: 5199349 - DNA, 25 bp, Homo sapien
ctcccttgttagcatctcccagaga

SEQ ID NO: 5199350 - DNA, 25 bp, Homo sapien
aggggacctcccttgttagcatctc

SEQ ID NO: 5199351 - DNA, 25 bp, Homo sapien
ccactacaagccaagctacttgtaa

SEQ ID NO: 5199352 - DNA, 25 bp, Homo sapien
aatctttccataagcgtgaacttac

SEQ ID NO: 5199353 - DNA, 25 bp, Homo sapien
tttccataagcgtgaacttactttc

SEQ ID NO: 5199354 - DNA, 25 bp, Homo sapien
cataagcgtgaacttactttcaatt

SEQ ID NO: 5199355 - DNA, 25 bp, Homo sapien
ctaatctttccataagcgtgaactt

SEQ ID NO: 5199356 - DNA, 25 bp, Homo sapien
tgatctacagcatcacgacgtgaag

SEQ ID NO: 5199357 - DNA, 25 bp, Homo sapien
cttggacgcaatggcttctttcatc

SEQ ID NO: 5199358 - DNA, 25 bp, Homo sapien
cccctaggttttacaattgagactg

SEQ ID NO: 5199359 - DNA, 25 bp, Homo sapien
ttcatcactaagaacaaacccctag

SEQ ID NO: 5199360 - DNA, 25 bp, Homo sapien
tctgatgtaggctcataggtccaac

SEQ ID NO: 5199361 - DNA, 25 bp, Homo sapien
atccttatgctgagaatttccatgg

SEQ ID NO: 5199362 - DNA, 25 bp, Homo sapien
gaaagcctcaatttgtgggaagaag

SEQ ID NO: 5199363 - DNA, 25 bp, Homo sapien
taggtccaactaactgaaagcctca

SEQ ID NO: 5199364 - DNA, 25 bp, Homo sapien
tctggggcaactgcttggaatggtt

SEQ ID NO: 5199365 - DNA, 25 bp, Homo sapien
gttcagcaaaacttctggggcaact

SEQ ID NO: 5199366 - DNA, 25 bp, Homo sapien
tcccaacactgatgtaacagttcag

SEQ ID NO: 5199367 - DNA, 25 bp, Homo sapien
aacactgatgtaacagttcagcaaa

SEQ ID NO: 5199368 - DNA, 25 bp, Homo sapien
cagattggaacagggtttacattca

SEQ ID NO: 5199369 - DNA, 25 bp, Homo sapien
cactggtcccttgctgccttgttgg

SEQ ID NO: 5199370 - DNA, 25 bp, Homo sapien
gtgttatactaacatagtccccagt

SEQ ID NO: 5199371 - DNA, 25 bp, Homo sapien
tacactttgtgctcagtgcagaaca

SEQ ID NO: 5199372 - DNA, 25 bp, Homo sapien
cacccttataaagcttgccgtccat

SEQ ID NO: 5199373 - DNA, 25 bp, Homo sapien
tctacacccttataaagcttgccgt

SEQ ID NO: 5199374 - DNA, 25 bp, Homo sapien
ctctacacccttataaagcttgccg

SEQ ID NO: 5199375 - DNA, 25 bp, Homo sapien
tacacccttataaagcttgccgtcc

SEQ ID NO: 5199376 - DNA, 25 bp, Homo sapien
taaaaatctccgtgataaagccagt

SEQ ID NO: 5199377 - DNA, 25 bp, Homo sapien
tgttttctatcgtgtggcctaaggt

SEQ ID NO: 5199378 - DNA, 25 bp, Homo sapien
tataacaaacgtggccatgtgcccc

SEQ ID NO: 5199379 - DNA, 25 bp, Homo sapien
cagatcactcaggtttagggagctc

SEQ ID NO: 5199380 - DNA, 25 bp, Homo sapien
ggaaggctcgtgtcatttgacatgg

SEQ ID NO: 5199381 - DNA, 25 bp, Homo sapien
ctccactccgccttgttgtgtagga

SEQ ID NO: 5199382 - DNA, 25 bp, Homo sapien
aatgagttacacttgtcaggaaggc

SEQ ID NO: 5199383 - DNA, 25 bp, Homo sapien
catggactccaggattgaaatgatt

SEQ ID NO: 5199384 - DNA, 25 bp, Homo sapien
cacttcttcattgagacgagtgatg

SEQ ID NO: 5199385 - DNA, 25 bp, Homo sapien
tgtggcctgctgtcggggctaccca

SEQ ID NO: 5199386 - DNA, 25 bp, Homo sapien
tctttgaaagccagacgctgtggcc

SEQ ID NO: 5199387 - DNA, 25 bp, Homo sapien
gacgagtgatggtctttgaaagcca

SEQ ID NO: 5199388 - DNA, 25 bp, Homo sapien
gcatcagcagatggcgtaaggcgtc

SEQ ID NO: 5199389 - DNA, 25 bp, Homo sapien
gtttaacattggacactcgggctgg

SEQ ID NO: 5199390 - DNA, 25 bp, Homo sapien
gaagttacctaaatctccgctgagt

SEQ ID NO: 5199391 - DNA, 25 bp, Homo sapien
tgttactgcccacggctatcgggag

SEQ ID NO: 5199392 - DNA, 25 bp, Homo sapien
caggattggaatcaggctgcactgt

SEQ ID NO: 5199393 - DNA, 25 bp, Homo sapien
taaaaatacaagttgcatctggtct

SEQ ID NO: 5199394 - DNA, 25 bp, Homo sapien
gctgcactgtgatcacggtgactct

SEQ ID NO: 5199395 - DNA, 25 bp, Homo sapien
catctggtctgtatgtagaggaagc

SEQ ID NO: 5199396 - DNA, 25 bp, Homo sapien
aaagtctgacactagattttgttcc

SEQ ID NO: 5199397 - DNA, 25 bp, Homo sapien
cattgccattattgctagtaagtca

SEQ ID NO: 5199398 - DNA, 25 bp, Homo sapien
tgggaggagaaataagctgaagatc

SEQ ID NO: 5199399 - DNA, 25 bp, Homo sapien
caggttgccacaggtctacagtcac

SEQ ID NO: 5199400 - DNA, 25 bp, Homo sapien
ggtgagagtactttggtcaccacgg

SEQ ID NO: 5199401 - DNA, 25 bp, Homo sapien
gagagtactttggtcaccacgggaa

SEQ ID NO: 5199402 - DNA, 25 bp, Homo sapien
cggaacgctcatcacaacactgcat

SEQ ID NO: 5199403 - DNA, 25 bp, Homo sapien
tgttttgccaagagacacagatcgg

SEQ ID NO: 5199404 - DNA, 25 bp, Homo sapien
tgtgcaattgcaaaggttacatttt

SEQ ID NO: 5199405 - DNA, 25 bp, Homo sapien
acatgatttgtgcaattgcaaaggt

SEQ ID NO: 5199406 - DNA, 25 bp, Homo sapien
tgatttgtgcaattgcaaaggttac

SEQ ID NO: 5199407 - DNA, 25 bp, Homo sapien
tttgtgcaattgcaaaggttacatt

SEQ ID NO: 5199408 - DNA, 25 bp, Homo sapien
caaatcgtgtgtgaggttatatgcc

SEQ ID NO: 5199409 - DNA, 25 bp, Homo sapien
ttaaatggacggaaagctgtgacac

SEQ ID NO: 5199410 - DNA, 25 bp, Homo sapien
cattagagatgtaaccccaacctgg

SEQ ID NO: 5199411 - DNA, 25 bp, Homo sapien
tagaccagggtaaatggccactaca

SEQ ID NO: 5199412 - DNA, 25 bp, Homo sapien
gagatcacgctctagtttctttagc

SEQ ID NO: 5199413 - DNA, 25 bp, Homo sapien
ttttgctcccacatctttaaacgtc

SEQ ID NO: 5199414 - DNA, 25 bp, Homo sapien
cctgctccttaaagctgagatcacg

SEQ ID NO: 5199415 - DNA, 25 bp, Homo sapien
gttggactgctctgtcagcttttgc

SEQ ID NO: 5199416 - DNA, 25 bp, Homo sapien
ccctttaatacacgggcgcgaggca

SEQ ID NO: 5199417 - DNA, 25 bp, Homo sapien
tatgaacgctgcttgagtccacacg

SEQ ID NO: 5199418 - DNA, 25 bp, Homo sapien
gcaccgaggtgcatgttctgagact

SEQ ID NO: 5199419 - DNA, 25 bp, Homo sapien
gcctagagccgcatgtggaaagacg

SEQ ID NO: 5199420 - DNA, 25 bp, Homo sapien
caaatattgcccattaaaaaccctg

SEQ ID NO: 5199421 - DNA, 25 bp, Homo sapien
tatcagcatgtaagctcaaggttag

SEQ ID NO: 5199422 - DNA, 25 bp, Homo sapien
ggttagtgtataaccagtgaaatgc

SEQ ID NO: 5199423 - DNA, 25 bp, Homo sapien
catgtaagctcaaggttagtgtata

SEQ ID NO: 5199424 - DNA, 25 bp, Homo sapien
cagcatcatggcctgcagacttggg

SEQ ID NO: 5199425 - DNA, 25 bp, Homo sapien
tctctgcactgtttgactcctctgt

SEQ ID NO: 5199426 - DNA, 25 bp, Homo sapien
gccctccccgttacttgttgctgtg

SEQ ID NO: 5199427 - DNA, 25 bp, Homo sapien
tttgttcattgagaagatatcccca

SEQ ID NO: 5199428 - DNA, 25 bp, Homo sapien
cactgaaccccagagccatgttgac

SEQ ID NO: 5199429 - DNA, 25 bp, Homo sapien
aagtcaaaatcactgaaccccagag

SEQ ID NO: 5199430 - DNA, 25 bp, Homo sapien
tcaaaatcactgaaccccagagcca

SEQ ID NO: 5199431 - DNA, 25 bp, Homo sapien
aatcactgaaccccagagccatgtt

SEQ ID NO: 5199432 - DNA, 25 bp, Homo sapien
cattcactattatccatgtcattat

SEQ ID NO: 5199433 - DNA, 25 bp, Homo sapien
tcattcactattatccatgtcatta

SEQ ID NO: 5199434 - DNA, 25 bp, Homo sapien
tttgtgttttccaaacatttgtgat

SEQ ID NO: 5199435 - DNA, 25 bp, Homo sapien
tgtgattttattactttgctttctg

SEQ ID NO: 5199436 - DNA, 25 bp, Homo sapien
tgttttccaaacatttgtgatttta

SEQ ID NO: 5199437 - DNA, 25 bp, Homo sapien
ttgtgattttattactttgctttct

SEQ ID NO: 5199438 - DNA, 25 bp, Homo sapien
gattggcctaaaaatgcagtgcttg

SEQ ID NO: 5199439 - DNA, 25 bp, Homo sapien
cctaaaaatgcagtgcttggctttc

SEQ ID NO: 5199440 - DNA, 25 bp, Homo sapien
tgataagaaattacggtcatgtaaa

SEQ ID NO: 5199441 - DNA, 25 bp, Homo sapien
aatgtgattggcctaaaaatgcagt

SEQ ID NO: 5199442 - DNA, 25 bp, Homo sapien
acaaatttctataatcaggcaccac

SEQ ID NO: 5199443 - DNA, 25 bp, Homo sapien
atttgctgattcataaatatacttc

SEQ ID NO: 5199444 - DNA, 25 bp, Homo sapien
ttcaaaccactagaaggacattggg

SEQ ID NO: 5199445 - DNA, 25 bp, Homo sapien
caatagtccagttctacgaggagaa

SEQ ID NO: 5199446 - DNA, 25 bp, Homo sapien
taacattagccactttccgtgggcc

SEQ ID NO: 5199447 - DNA, 25 bp, Homo sapien
ctagccaggttttcagagcagtgcc

SEQ ID NO: 5199448 - DNA, 25 bp, Homo sapien
tggaactaaatccaacactgataat

SEQ ID NO: 5199449 - DNA, 25 bp, Homo sapien
ctaaatccaacactgataattgcca

SEQ ID NO: 5199450 - DNA, 25 bp, Homo sapien
actaaatccaacactgataattgcc

SEQ ID NO: 5199451 - DNA, 25 bp, Homo sapien
gaactaaatccaacactgataattg

SEQ ID NO: 5199452 - DNA, 25 bp, Homo sapien
gggagggtctcatcaaattctacaa

SEQ ID NO: 5199453 - DNA, 25 bp, Homo sapien
caaaattcaggtcgtatgctgccgt

SEQ ID NO: 5199454 - DNA, 25 bp, Homo sapien
gatggaagactttactgagcacact

SEQ ID NO: 5199455 - DNA, 25 bp, Homo sapien
cgccccagttgagaatgactaggga

SEQ ID NO: 5199456 - DNA, 25 bp, Homo sapien
tttcatcaagttgccaccagcattt

SEQ ID NO: 5199457 - DNA, 25 bp, Homo sapien
taattctgggaggtcattctggatc

SEQ ID NO: 5199458 - DNA, 25 bp, Homo sapien
gctatgctacaatcgagaggagaga

SEQ ID NO: 5199459 - DNA, 25 bp, Homo sapien
tttccagagcaccaaaaacagtgag

SEQ ID NO: 5199460 - DNA, 25 bp, Homo sapien
caaaaggctgcaataagtctagtac

SEQ ID NO: 5199461 - DNA, 25 bp, Homo sapien
ttctgaatacactgtggactttgtg

SEQ ID NO: 5199462 - DNA, 25 bp, Homo sapien
atacactgtggactttgtgctggaa

SEQ ID NO: 5199463 - DNA, 25 bp, Homo sapien
tctgaatacactgtggactttgtgc

SEQ ID NO: 5199464 - DNA, 25 bp, Homo sapien
gaatacactgtggactttgtgctgg

SEQ ID NO: 5199465 - DNA, 25 bp, Homo sapien
cgtttattgcaaaatggagtcttag

SEQ ID NO: 5199466 - DNA, 25 bp, Homo sapien
tgtcaaaacgtttattgcaaaatgg

SEQ ID NO: 5199467 - DNA, 25 bp, Homo sapien
caaaatggagtcttagaacaaagga

SEQ ID NO: 5199468 - DNA, 25 bp, Homo sapien
tattgcaaaatggagtcttagaaca

SEQ ID NO: 5199469 - DNA, 25 bp, Homo sapien
caccaatctcaaaggaaggcagcag

SEQ ID NO: 5199470 - DNA, 25 bp, Homo sapien
gcaccaatctcaaaggaaggcagca

SEQ ID NO: 5199471 - DNA, 25 bp, Homo sapien
tctgacgagctgctgaacccaacaa

SEQ ID NO: 5199472 - DNA, 25 bp, Homo sapien
ttctgacgagctgctgaacccaaca

SEQ ID NO: 5199473 - DNA, 25 bp, Homo sapien
tgacgagctgctgaacccaacaata

SEQ ID NO: 5199474 - DNA, 25 bp, Homo sapien
tttctgacgagctgctgaacccaac

SEQ ID NO: 5199475 - DNA, 25 bp, Homo sapien
tatgccccttggagacaatgcccat

SEQ ID NO: 5199476 - DNA, 25 bp, Homo sapien
agtgaatgatatgccccttggagac

SEQ ID NO: 5199477 - DNA, 25 bp, Homo sapien
tctttaaacaagcttgcatatacac

SEQ ID NO: 5199478 - DNA, 25 bp, Homo sapien
taaacaagcttgcatatacactcat

SEQ ID NO: 5199479 - DNA, 25 bp, Homo sapien
tctagaattaaactgagtcacctcc

SEQ ID NO: 5199480 - DNA, 25 bp, Homo sapien
ctcctgctattctgggtggatggct

SEQ ID NO: 5199481 - DNA, 25 bp, Homo sapien
cctttaggttactgcattggcttag

SEQ ID NO: 5199482 - DNA, 25 bp, Homo sapien
ccacaatgaacacagaggtttagct

SEQ ID NO: 5199483 - DNA, 25 bp, Homo sapien
cgcaaagggtgctgagagtccgtaa

SEQ ID NO: 5199484 - DNA, 25 bp, Homo sapien
gcctttgggaaatacgctatgcatg

SEQ ID NO: 5199485 - DNA, 25 bp, Homo sapien
tttctctagaaaggtcactgtgggt

SEQ ID NO: 5199486 - DNA, 25 bp, Homo sapien
tttaggatggacttgcccacaccca

SEQ ID NO: 5199487 - DNA, 25 bp, Homo sapien
ttttgcattttttgcagaggcaagg

SEQ ID NO: 5199488 - DNA, 25 bp, Homo sapien
tttgcattttttgcagaggcaaggt

SEQ ID NO: 5199489 - DNA, 25 bp, Homo sapien
cattttttgcagaggcaaggtttcg

SEQ ID NO: 5199490 - DNA, 25 bp, Homo sapien
tgcattttttgcagaggcaaggttt

SEQ ID NO: 5199491 - DNA, 25 bp, Homo sapien
acatttctttggatatgtgtccaac

SEQ ID NO: 5199492 - DNA, 25 bp, Homo sapien
aaaggttgattgcattataagaaca

SEQ ID NO: 5199493 - DNA, 25 bp, Homo sapien
tctttggatatgtgtccaacatccc

SEQ ID NO: 5199494 - DNA, 25 bp, Homo sapien
tggatatgtgtccaacatcccctct

SEQ ID NO: 5199495 - DNA, 25 bp, Homo sapien
tatgtaatcatgggttaatttctca

SEQ ID NO: 5199496 - DNA, 25 bp, Homo sapien
acaaatttatgtaatcatgggttaa

SEQ ID NO: 5199497 - DNA, 25 bp, Homo sapien
gaaacaaatttatgtaatcatgggt

SEQ ID NO: 5199498 - DNA, 25 bp, Homo sapien
atgtaatcatgggttaatttctcaa

SEQ ID NO: 5199499 - DNA, 25 bp, Homo sapien
aaaacgagtctttgagggcttagag

SEQ ID NO: 5199500 - DNA, 25 bp, Homo sapien
caaagacggattacgcagtggatgg

SEQ ID NO: 5199501 - DNA, 25 bp, Homo sapien
gaaatgcacttagcacctagagatg

SEQ ID NO: 5199502 - DNA, 25 bp, Homo sapien
ttcagaggttcacaatacccagggc

SEQ ID NO: 5199503 - DNA, 25 bp, Homo sapien
caaaaaccagttccaggttcactat

SEQ ID NO: 5199504 - DNA, 25 bp, Homo sapien
tcattttcttcaggttcacctcctg

SEQ ID NO: 5199505 - DNA, 25 bp, Homo sapien
tccaggttcactattttttcctcat

SEQ ID NO: 5199506 - DNA, 25 bp, Homo sapien
tgtgggccagttcctggtttcaagt

SEQ ID NO: 5199507 - DNA, 25 bp, Homo sapien
cagtatataaaaacatgacgccagt

SEQ ID NO: 5199508 - DNA, 25 bp, Homo sapien
cgcaggcattatattgtctttgaga

SEQ ID NO: 5199509 - DNA, 25 bp, Homo sapien
gctgcttccatgacactgccagtat

SEQ ID NO: 5199510 - DNA, 25 bp, Homo sapien
cagatggtgtccatgcgaacgcagg

SEQ ID NO: 5199511 - DNA, 25 bp, Homo sapien
tccatatacattttccacttacaat

SEQ ID NO: 5199512 - DNA, 25 bp, Homo sapien
ccatatacattttccacttacaatc

SEQ ID NO: 5199513 - DNA, 25 bp, Homo sapien
ctccatatacattttccacttacaa

SEQ ID NO: 5199514 - DNA, 25 bp, Homo sapien
tgtaggttattgcaatttcatcccc

SEQ ID NO: 5199515 - DNA, 25 bp, Homo sapien
taggttagtgttgaatgtcacatct

SEQ ID NO: 5199516 - DNA, 25 bp, Homo sapien
aaaatctccgcatcaggtaggttag

SEQ ID NO: 5199517 - DNA, 25 bp, Homo sapien
gttattgcaatttcatccccatcca

SEQ ID NO: 5199518 - DNA, 25 bp, Homo sapien
ctcatatgtgacagtgcactccaca

SEQ ID NO: 5199519 - DNA, 25 bp, Homo sapien
attcctacaatccacttctccatta

SEQ ID NO: 5199520 - DNA, 25 bp, Homo sapien
atatgtgacagtgcactccacagtc

SEQ ID NO: 5199521 - DNA, 25 bp, Homo sapien
caatccacttctccattacaaatgg

SEQ ID NO: 5199522 - DNA, 25 bp, Homo sapien
tgtgatcaaactggtgtaagcacct

SEQ ID NO: 5199523 - DNA, 25 bp, Homo sapien
catggtagatccttaataaatgttt

SEQ ID NO: 5199524 - DNA, 25 bp, Homo sapien
atagtgcctggttcatggtagatcc

SEQ ID NO: 5199525 - DNA, 25 bp, Homo sapien
aatgcatgtccctttgatggtgggt

SEQ ID NO: 5199526 - DNA, 25 bp, Homo sapien
ggtgtgctgtctccaaaactgtcta

SEQ ID NO: 5199527 - DNA, 25 bp, Homo sapien
tgtccgattactaacaagagggctt

SEQ ID NO: 5199528 - DNA, 25 bp, Homo sapien
gaggaccagttaacaggctgtagag

SEQ ID NO: 5199529 - DNA, 25 bp, Homo sapien
cagtgtcaattaaagagtctccagg

SEQ ID NO: 5199530 - DNA, 25 bp, Homo sapien
tgttctactccactgaatcgaatgg

SEQ ID NO: 5199531 - DNA, 25 bp, Homo sapien
ggttgccatctgaattggtgaataa

SEQ ID NO: 5199532 - DNA, 25 bp, Homo sapien
gaatggcaagttggactgctttcac

SEQ ID NO: 5199533 - DNA, 25 bp, Homo sapien
acatgtttagtgctttttggagttc

SEQ ID NO: 5199534 - DNA, 25 bp, Homo sapien
tcaaaagtttctccatccacggtgg

SEQ ID NO: 5199535 - DNA, 25 bp, Homo sapien
gagtcagtctcagggtgcaaaggca

SEQ ID NO: 5199536 - DNA, 25 bp, Homo sapien
cggtgaccccagaataggattgctc

SEQ ID NO: 5199537 - DNA, 25 bp, Homo sapien
gaagtgttggatgcaatctgccgca

SEQ ID NO: 5199538 - DNA, 25 bp, Homo sapien
tggccctgctaaccagaatatcagt

SEQ ID NO: 5199539 - DNA, 25 bp, Homo sapien
tactaaatactaaccagcagggctg

SEQ ID NO: 5199540 - DNA, 25 bp, Homo sapien
gagtgaggtacctgccttgggcaca

SEQ ID NO: 5199541 - DNA, 25 bp, Homo sapien
tcaagcctagttatgatcactgggt

SEQ ID NO: 5199542 - DNA, 25 bp, Homo sapien
tatcctctttgctcctttggtgaaa

SEQ ID NO: 5199543 - DNA, 25 bp, Homo sapien
tgctgcaaggctgatatttactgtc

SEQ ID NO: 5199544 - DNA, 25 bp, Homo sapien
gaaagcagtcgctgggaacttagga

SEQ ID NO: 5199545 - DNA, 25 bp, Homo sapien
gaagcatttcacaagttggatccca

SEQ ID NO: 5199546 - DNA, 25 bp, Homo sapien
tcaatgtttaggtgatgacaacttc

SEQ ID NO: 5199547 - DNA, 25 bp, Homo sapien
gaaaacaggctgtgcttgatagctt

SEQ ID NO: 5199548 - DNA, 25 bp, Homo sapien
ccttagaagttggttacacatgatg

SEQ ID NO: 5199549 - DNA, 25 bp, Homo sapien
aaagaggccctcactaactgactac

SEQ ID NO: 5199550 - DNA, 25 bp, Homo sapien
gacttttggtgaataagcatcatta

SEQ ID NO: 5199551 - DNA, 25 bp, Homo sapien
tctgggagcattgatgctgacaagt

SEQ ID NO: 5199552 - DNA, 25 bp, Homo sapien
tggaataacctctttgcagtcactg

SEQ ID NO: 5199553 - DNA, 25 bp, Homo sapien
atctttcaacctggcaagtgacttt

SEQ ID NO: 5199554 - DNA, 25 bp, Homo sapien
tgaaagacccatgctctctttggat

SEQ ID NO: 5199555 - DNA, 25 bp, Homo sapien
tctaggcttccattgacgaccagct

SEQ ID NO: 5199556 - DNA, 25 bp, Homo sapien
cttggtacctgcagcacgtttccat

SEQ ID NO: 5199557 - DNA, 25 bp, Homo sapien
tgtggattgcgttcttctaggcttc

SEQ ID NO: 5199558 - DNA, 25 bp, Homo sapien
ggtcgtgccctgcatgaaagtcttg

SEQ ID NO: 5199559 - DNA, 25 bp, Homo sapien
tgggcaggtcgtgccctgcatgaaa

SEQ ID NO: 5199560 - DNA, 25 bp, Homo sapien
agattgggcaggtcgtgccctgcat

SEQ ID NO: 5199561 - DNA, 25 bp, Homo sapien
gcaggtcgtgccctgcatgaaagtc

SEQ ID NO: 5199562 - DNA, 25 bp, Homo sapien
catcatctggcaactaatgagggtg

SEQ ID NO: 5199563 - DNA, 25 bp, Homo sapien
caaatcttgaattgtccccgcacca

SEQ ID NO: 5199564 - DNA, 25 bp, Homo sapien
gccactaccagctgacaaatcttga

SEQ ID NO: 5199565 - DNA, 25 bp, Homo sapien
gtgtacttttagaagcagtcacagc

SEQ ID NO: 5199566 - DNA, 25 bp, Homo sapien
tgcagattaaaattaggcacaaaat

SEQ ID NO: 5199567 - DNA, 25 bp, Homo sapien
cagattaaaattaggcacaaaatta

SEQ ID NO: 5199568 - DNA, 25 bp, Homo sapien
aattaggcacaaaattaaattgctt

SEQ ID NO: 5199569 - DNA, 25 bp, Homo sapien
agtacactgcagattaaaattaggc

SEQ ID NO: 5199570 - DNA, 25 bp, Homo sapien
gctaaaagttcaggaactagcagca

SEQ ID NO: 5199571 - DNA, 25 bp, Homo sapien
taaaagttcaggaactagcagcaag

SEQ ID NO: 5199572 - DNA, 25 bp, Homo sapien
ttactggttaaaggtgggagctgca

SEQ ID NO: 5199573 - DNA, 25 bp, Homo sapien
ctaaaagttcaggaactagcagcaa

SEQ ID NO: 5199574 - DNA, 25 bp, Homo sapien
gcaggcccttgtagcctaaatagcc

SEQ ID NO: 5199575 - DNA, 25 bp, Homo sapien
caggcccttgtagcctaaatagcca

SEQ ID NO: 5199576 - DNA, 25 bp, Homo sapien
catttgctattctcgtactcttctc

SEQ ID NO: 5199577 - DNA, 25 bp, Homo sapien
tattctcgtactcttctctttatgg

SEQ ID NO: 5199578 - DNA, 25 bp, Homo sapien
cctggtgccggatgccactaccaaa

SEQ ID NO: 5199579 - DNA, 25 bp, Homo sapien
gaatggaacatgtcccctgttggca

SEQ ID NO: 5199580 - DNA, 25 bp, Homo sapien
tctccaagtttgaagcacccagcga

SEQ ID NO: 5199581 - DNA, 25 bp, Homo sapien
taacgctgtatgagctagtgaaacc

SEQ ID NO: 5199582 - DNA, 25 bp, Homo sapien
gcagagtcaccccaaaggaatggag

SEQ ID NO: 5199583 - DNA, 25 bp, Homo sapien
gggctgccattccacctattccagg

SEQ ID NO: 5199584 - DNA, 25 bp, Homo sapien
gcggctcggcattaagacatggaca

SEQ ID NO: 5199585 - DNA, 25 bp, Homo sapien
ggtggctgcgtactccagtttctgc

SEQ ID NO: 5199586 - DNA, 25 bp, Homo sapien
ccaaatgccttgaatggtggctgcg

SEQ ID NO: 5199587 - DNA, 25 bp, Homo sapien
cgcggtcagcggtcccacagcagga

SEQ ID NO: 5199588 - DNA, 25 bp, Homo sapien
gcagcagcgcggctggcaggctggg

SEQ ID NO: 5199589 - DNA, 25 bp, Homo sapien
gtggcgggtgcccagatcggcgctt

SEQ ID NO: 5199590 - DNA, 25 bp, Homo sapien
agcagccgcgcggtcagcggtccca

SEQ ID NO: 5199591 - DNA, 25 bp, Homo sapien
ctcgggttcgcccgcccagccctca

SEQ ID NO: 5199592 - DNA, 25 bp, Homo sapien
ctcaaaggcggcattctattggaag

SEQ ID NO: 5199593 - DNA, 25 bp, Homo sapien
ggaaatagcaatcctattaagcgtg

SEQ ID NO: 5199594 - DNA, 25 bp, Homo sapien
gtttagtaggttcaaacagcacaga

SEQ ID NO: 5199595 - DNA, 25 bp, Homo sapien
caaacagcacagagtagatatgtcc

SEQ ID NO: 5199596 - DNA, 25 bp, Homo sapien
tatcataccctacatagaaaaggaa

SEQ ID NO: 5199597 - DNA, 25 bp, Homo sapien
cgtgtttgcaaaattatcagaagca

SEQ ID NO: 5199598 - DNA, 25 bp, Homo sapien
tcagaagcaaagctgtcacaactgt

SEQ ID NO: 5199599 - DNA, 25 bp, Homo sapien
catcagaggatgacgaggtttccat

SEQ ID NO: 5199600 - DNA, 25 bp, Homo sapien
tcttctttactctgagatctttctg

SEQ ID NO: 5199601 - DNA, 25 bp, Homo sapien
tgaaaagccgcagaaagattcatta

SEQ ID NO: 5199602 - DNA, 25 bp, Homo sapien
ctgaaaagccgcagaaagattcatt

SEQ ID NO: 5199603 - DNA, 25 bp, Homo sapien
aaaaatccacaatggtctaatacat

SEQ ID NO: 5199604 - DNA, 25 bp, Homo sapien
acaatggtctaatacatcttgcacc

SEQ ID NO: 5199605 - DNA, 25 bp, Homo sapien
aaatccacaatggtctaatacatct

SEQ ID NO: 5199606 - DNA, 25 bp, Homo sapien
tccacaatggtctaatacatcttgc

SEQ ID NO: 5199607 - DNA, 25 bp, Homo sapien
tcactctctgagaaaccgcaaaatg

SEQ ID NO: 5199608 - DNA, 25 bp, Homo sapien
tgattcatcgtcagagtcggcatga

SEQ ID NO: 5199609 - DNA, 25 bp, Homo sapien
tcgttagtgacatctggccttggtt

SEQ ID NO: 5199610 - DNA, 25 bp, Homo sapien
tcggcatgaaaaataccggccagtt

SEQ ID NO: 5199611 - DNA, 25 bp, Homo sapien
tttgttggttgctcccctggtactc

SEQ ID NO: 5199612 - DNA, 25 bp, Homo sapien
ttggaatcagtcacagaattctctg

SEQ ID NO: 5199613 - DNA, 25 bp, Homo sapien
gaatcggagttggaatcagtcacag

SEQ ID NO: 5199614 - DNA, 25 bp, Homo sapien
tacagccttcccgaactgactgcag

SEQ ID NO: 5199615 - DNA, 25 bp, Homo sapien
tgctttgttttgctttatatttaaa

SEQ ID NO: 5199616 - DNA, 25 bp, Homo sapien
cattgctttgttttgctttatattt

SEQ ID NO: 5199617 - DNA, 25 bp, Homo sapien
gtaatgagtcgcttagagaggaaaa

SEQ ID NO: 5199618 - DNA, 25 bp, Homo sapien
tttaagtaatgagtcgcttagagag

SEQ ID NO: 5199619 - DNA, 25 bp, Homo sapien
aacttttgcgtgatggaacagattt

SEQ ID NO: 5199620 - DNA, 25 bp, Homo sapien
taacttttgcgtgatggaacagatt

SEQ ID NO: 5199621 - DNA, 25 bp, Homo sapien
gaagctttctaattcagacatgagt

SEQ ID NO: 5199622 - DNA, 25 bp, Homo sapien
ccagggaagctttctaattcagaca

SEQ ID NO: 5199623 - DNA, 25 bp, Homo sapien
tgtcttccacggaacgagccaggga

SEQ ID NO: 5199624 - DNA, 25 bp, Homo sapien
cacggaacgagccagggaagctttc

SEQ ID NO: 5199625 - DNA, 25 bp, Homo sapien
taaatacaacacagatcgaccttag

SEQ ID NO: 5199626 - DNA, 25 bp, Homo sapien
gatcgaccttaggtgtgcccaaaac

SEQ ID NO: 5199627 - DNA, 25 bp, Homo sapien
cttaggtgtgcccaaaacactactg

SEQ ID NO: 5199628 - DNA, 25 bp, Homo sapien
ctagaaggccacacaaataaagaaa

SEQ ID NO: 5199629 - DNA, 25 bp, Homo sapien
gcttagtctagctgggaaggaaaga

SEQ ID NO: 5199630 - DNA, 25 bp, Homo sapien
aaaggagtttagtgccacaggagca

SEQ ID NO: 5199631 - DNA, 25 bp, Homo sapien
cagagatctgtcagggggtttcctc

SEQ ID NO: 5199632 - DNA, 25 bp, Homo sapien
actgcccaggattcaaggaggatca

SEQ ID NO: 5199633 - DNA, 25 bp, Homo sapien
acagaaaaaagttttcaatcttcat

SEQ ID NO: 5199634 - DNA, 25 bp, Homo sapien
cagaaaaaagttttcaatcttcatt

SEQ ID NO: 5199635 - DNA, 25 bp, Homo sapien
gatgtctcttgaccctgtagaaaca

SEQ ID NO: 5199636 - DNA, 25 bp, Homo sapien
tacactgcaaaatagagggatatct

SEQ ID NO: 5199637 - DNA, 25 bp, Homo sapien
tgcataatgcatggcaaaatgagcc

SEQ ID NO: 5199638 - DNA, 25 bp, Homo sapien
caaagcacgtataagggaatccatt

SEQ ID NO: 5199639 - DNA, 25 bp, Homo sapien
agcaacacccgggaatgtacgcctt

SEQ ID NO: 5199640 - DNA, 25 bp, Homo sapien
cacccgggaatgtacgccttcgcgg

SEQ ID NO: 5199641 - DNA, 25 bp, Homo sapien
ctggaagcaacacccgggaatgtac

SEQ ID NO: 5199642 - DNA, 25 bp, Homo sapien
caacacccgggaatgtacgccttcg

SEQ ID NO: 5199643 - DNA, 25 bp, Homo sapien
tccatgggtagagcgtcaagggacc

SEQ ID NO: 5199644 - DNA, 25 bp, Homo sapien
cgaggatccgggaccttgacctggt

SEQ ID NO: 5199645 - DNA, 25 bp, Homo sapien
tgacctggtaagaggacgagctctc

SEQ ID NO: 5199646 - DNA, 25 bp, Homo sapien
gacgagctctccgttcagggtttct

SEQ ID NO: 5199647 - DNA, 25 bp, Homo sapien
tagccatccacggtcttcctctttc

SEQ ID NO: 5199648 - DNA, 25 bp, Homo sapien
tcatgtagccatccacggtcttcct

SEQ ID NO: 5199649 - DNA, 25 bp, Homo sapien
tgtagccatccacggtcttcctctt

SEQ ID NO: 5199650 - DNA, 25 bp, Homo sapien
attcatgtagccatccacggtcttc

SEQ ID NO: 5199651 - DNA, 25 bp, Homo sapien
ctgcattacaaggaatacaaaacac

SEQ ID NO: 5199652 - DNA, 25 bp, Homo sapien
tacaaaacacagaacttcaaaactg

SEQ ID NO: 5199653 - DNA, 25 bp, Homo sapien
gcattacaaggaatacaaaacacag

SEQ ID NO: 5199654 - DNA, 25 bp, Homo sapien
caaggaatacaaaacacagaacttc

SEQ ID NO: 5199655 - DNA, 25 bp, Homo sapien
tcacggatgatctggagcgacggct

SEQ ID NO: 5199656 - DNA, 25 bp, Homo sapien
cttccactgggcgaattatatgcgg

SEQ ID NO: 5199657 - DNA, 25 bp, Homo sapien
gagcgacggcttctgggcaggtcat

SEQ ID NO: 5199658 - DNA, 25 bp, Homo sapien
gaattgctgcagacgttctccaact

SEQ ID NO: 5199659 - DNA, 25 bp, Homo sapien
gttttggtatcaatagtcttctgac

SEQ ID NO: 5199660 - DNA, 25 bp, Homo sapien
tgacctcttcaccataacggtttcg

SEQ ID NO: 5199661 - DNA, 25 bp, Homo sapien
caccataacggtttcgaaggcaggg

SEQ ID NO: 5199662 - DNA, 25 bp, Homo sapien
gacggcattgatgacaagtagagcc

SEQ ID NO: 5199663 - DNA, 25 bp, Homo sapien
cagtcgcacaccgtccatctcgctg

SEQ ID NO: 5199664 - DNA, 25 bp, Homo sapien
taaatacacaaggaccccagtcgca

SEQ ID NO: 5199665 - DNA, 25 bp, Homo sapien
cgtccatctcgctgccggcagaaac

SEQ ID NO: 5199666 - DNA, 25 bp, Homo sapien
agttgcagattcctcgacaaggcgg

SEQ ID NO: 5199667 - DNA, 25 bp, Homo sapien
ttgcatttcaaattcctgtttcagg

SEQ ID NO: 5199668 - DNA, 25 bp, Homo sapien
gcttgcatttcaaattcctgtttca

SEQ ID NO: 5199669 - DNA, 25 bp, Homo sapien
tatgcttgcatttcaaattcctgtt

SEQ ID NO: 5199670 - DNA, 25 bp, Homo sapien
ttatgcttgcatttcaaattcctgt

SEQ ID NO: 5199671 - DNA, 25 bp, Homo sapien
cagagatgtcaggttaacaaactgc

SEQ ID NO: 5199672 - DNA, 25 bp, Homo sapien
tgcaggagggcaaagtgtaactagc

SEQ ID NO: 5199673 - DNA, 25 bp, Homo sapien
tatgattgtgtaagctggacgcacc

SEQ ID NO: 5199674 - DNA, 25 bp, Homo sapien
gcaccacttacccttcgggcagaag

SEQ ID NO: 5199675 - DNA, 25 bp, Homo sapien
ttagaattaagtacagtaagattat

SEQ ID NO: 5199676 - DNA, 25 bp, Homo sapien
attagaattaagtacagtaagatta

SEQ ID NO: 5199677 - DNA, 25 bp, Homo sapien
tagaattaagtacagtaagattatt

SEQ ID NO: 5199678 - DNA, 25 bp, Homo sapien
cttaacctggccgatttaattgcct

SEQ ID NO: 5199679 - DNA, 25 bp, Homo sapien
gtaccccggtacaatcagaatggaa

SEQ ID NO: 5199680 - DNA, 25 bp, Homo sapien
tggccgatttaattgcctgaggatg

SEQ ID NO: 5199681 - DNA, 25 bp, Homo sapien
ttgcctgaggatgtaccccggtaca

SEQ ID NO: 5199682 - DNA, 25 bp, Homo sapien
tcctatctggcataagcatgcttat

SEQ ID NO: 5199683 - DNA, 25 bp, Homo sapien
gaagctgctcccacctgcctagaat

SEQ ID NO: 5199684 - DNA, 25 bp, Homo sapien
gccttgagggatgatcacaagcctc

SEQ ID NO: 5199685 - DNA, 25 bp, Homo sapien
aagcctcagagtaccctgaagctgc

SEQ ID NO: 5199686 - DNA, 25 bp, Homo sapien
acccccagtccttcttcacaggtag

SEQ ID NO: 5199687 - DNA, 25 bp, Homo sapien
tagcaggctttttcaacccccagtc

SEQ ID NO: 5199688 - DNA, 25 bp, Homo sapien
gtggtctgggtacactgatccttcc

SEQ ID NO: 5199689 - DNA, 25 bp, Homo sapien
aaagaatgctgtaatcttgatcctg

SEQ ID NO: 5199690 - DNA, 25 bp, Homo sapien
gcaggaatccccctggttgtgtgtc

SEQ ID NO: 5199691 - DNA, 25 bp, Homo sapien
gtaatcttgatcctgctccgacggc

SEQ ID NO: 5199692 - DNA, 25 bp, Homo sapien
ctatgctgaggcttcagagggtgtt

SEQ ID NO: 5199693 - DNA, 25 bp, Homo sapien
taacctggtttagctagtccctcat

SEQ ID NO: 5199694 - DNA, 25 bp, Homo sapien
ggtgtttcggctggttcccagattc

SEQ ID NO: 5199695 - DNA, 25 bp, Homo sapien
cctcatcagcaggccatggctctat

SEQ ID NO: 5199696 - DNA, 25 bp, Homo sapien
aggactggtgagtctccaccctgtg

SEQ ID NO: 5199697 - DNA, 25 bp, Homo sapien
gactggtgagtctccaccctgtgtc

SEQ ID NO: 5199698 - DNA, 25 bp, Homo sapien
ggcaggactggtgagtctccaccct

SEQ ID NO: 5199699 - DNA, 25 bp, Homo sapien
ctggtgagtctccaccctgtgtctg

SEQ ID NO: 5199700 - DNA, 25 bp, Homo sapien
gctgcgtgagaatgtgcatgtgccc

SEQ ID NO: 5199701 - DNA, 25 bp, Homo sapien
gtgccctctcgtaccagagacagtc

SEQ ID NO: 5199702 - DNA, 25 bp, Homo sapien
cctggcactgtaaaaggagctcggg

SEQ ID NO: 5199703 - DNA, 25 bp, Homo sapien
agagacagtccggaccagacaaagc

SEQ ID NO: 5199704 - DNA, 25 bp, Homo sapien
gagaatgggtgaccctaggaaacca

SEQ ID NO: 5199705 - DNA, 25 bp, Homo sapien
tctgaagccccgttcattacgactg

SEQ ID NO: 5199706 - DNA, 25 bp, Homo sapien
tgtgtgtgtccatccgtctgaagcc

SEQ ID NO: 5199707 - DNA, 25 bp, Homo sapien
aatcttgttagagtggccaaagcca

SEQ ID NO: 5199708 - DNA, 25 bp, Homo sapien
taaagccataaagaccaggatcgtg

SEQ ID NO: 5199709 - DNA, 25 bp, Homo sapien
ggaccaagatgttaagaatgctatc

SEQ ID NO: 5199710 - DNA, 25 bp, Homo sapien
ttccctctgccagactcttttcttg

SEQ ID NO: 5199711 - DNA, 25 bp, Homo sapien
ggtgacttttcctaatcaacataga

SEQ ID NO: 5199712 - DNA, 25 bp, Homo sapien
agaaaaccaggaatatagagccaga

SEQ ID NO: 5199713 - DNA, 25 bp, Homo sapien
ttgggtaaatcagccaagtccaggc

SEQ ID NO: 5199714 - DNA, 25 bp, Homo sapien
taggagaaaaccaggaatatagagc

SEQ ID NO: 5199715 - DNA, 25 bp, Homo sapien
caagtttgggtaaatcagccaagtc

SEQ ID NO: 5199716 - DNA, 25 bp, Homo sapien
gaacctggctccgtggagaggcaca

SEQ ID NO: 5199717 - DNA, 25 bp, Homo sapien
cctttgttagggtgagttgtcaatc

SEQ ID NO: 5199718 - DNA, 25 bp, Homo sapien
catgccgacagtcaatcagtatgga

SEQ ID NO: 5199719 - DNA, 25 bp, Homo sapien
gaaagggaacaactacagacagctc

SEQ ID NO: 5199720 - DNA, 25 bp, Homo sapien
ctgctttcctcaccggggactgtgc

SEQ ID NO: 5199721 - DNA, 25 bp, Homo sapien
cggggactgtgcaaagggagacctc

SEQ ID NO: 5199722 - DNA, 25 bp, Homo sapien
taactgctttcctcaccggggactg

SEQ ID NO: 5199723 - DNA, 25 bp, Homo sapien
cctcaccggggactgtgcaaaggga

SEQ ID NO: 5199724 - DNA, 25 bp, Homo sapien
agttcacaaaagcaataagggtctt

SEQ ID NO: 5199725 - DNA, 25 bp, Homo sapien
ggatgggctagagggttgcagagag

SEQ ID NO: 5199726 - DNA, 25 bp, Homo sapien
ctacagaggatgggctagagggttg

SEQ ID NO: 5199727 - DNA, 25 bp, Homo sapien
ttcacaaaagcaataagggtcttgc

SEQ ID NO: 5199728 - DNA, 25 bp, Homo sapien
ggaatgctgaactcctgccagggca

SEQ ID NO: 5199729 - DNA, 25 bp, Homo sapien
ggaatgtccgtatcttcaaggctac

SEQ ID NO: 5199730 - DNA, 25 bp, Homo sapien
cagcactgaagtaggccaaagagca

SEQ ID NO: 5199731 - DNA, 25 bp, Homo sapien
tgcaagtcccttcacatctggtggg

SEQ ID NO: 5199732 - DNA, 25 bp, Homo sapien
cctctagtatctttgggacacctga

SEQ ID NO: 5199733 - DNA, 25 bp, Homo sapien
cacattggcaggtgccaagtctaga

SEQ ID NO: 5199734 - DNA, 25 bp, Homo sapien
aacagcaggaatagctcccgggttt

SEQ ID NO: 5199735 - DNA, 25 bp, Homo sapien
caagtctagaggtggcggagaagac

SEQ ID NO: 5199736 - DNA, 25 bp, Homo sapien
taactgaatagccatggtgtcccat

SEQ ID NO: 5199737 - DNA, 25 bp, Homo sapien
tgactcaccagcaagggacctaact

SEQ ID NO: 5199738 - DNA, 25 bp, Homo sapien
gaagagattatgtttgaagcccact

SEQ ID NO: 5199739 - DNA, 25 bp, Homo sapien
tcaactgggcacagggacgtcgtgt

SEQ ID NO: 5199740 - DNA, 25 bp, Homo sapien
tctggctagttgcaaaagaggatca

SEQ ID NO: 5199741 - DNA, 25 bp, Homo sapien
cccaggcctccagattagaatacag

SEQ ID NO: 5199742 - DNA, 25 bp, Homo sapien
gaagattatcccagcgggcctgaca

SEQ ID NO: 5199743 - DNA, 25 bp, Homo sapien
gacacagactataagccccttgaag

SEQ ID NO: 5199744 - DNA, 25 bp, Homo sapien
gacataatgaatctgtggcctccag

SEQ ID NO: 5199745 - DNA, 25 bp, Homo sapien
ccagagaacatttacgaggactgtg

SEQ ID NO: 5199746 - DNA, 25 bp, Homo sapien
ctttatatgcgagctcctttgcaag

SEQ ID NO: 5199747 - DNA, 25 bp, Homo sapien
gctttcactttatatgcgagctcct

SEQ ID NO: 5199748 - DNA, 25 bp, Homo sapien
ccgccattgcaactggctcaattag

SEQ ID NO: 5199749 - DNA, 25 bp, Homo sapien
tgagctccaccgccattgcaactgg

SEQ ID NO: 5199750 - DNA, 25 bp, Homo sapien
attctttccacttatccctggtgag

SEQ ID NO: 5199751 - DNA, 25 bp, Homo sapien
ttccacttatccctggtgagctcca

SEQ ID NO: 5199752 - DNA, 25 bp, Homo sapien
ttcataggttctgattgacatgcac

SEQ ID NO: 5199753 - DNA, 25 bp, Homo sapien
caattgccatagtgatgtgacacca

SEQ ID NO: 5199754 - DNA, 25 bp, Homo sapien
ccctgggcagcaattgccatagtga

SEQ ID NO: 5199755 - DNA, 25 bp, Homo sapien
gcaataaggcgttgcacaattacag

SEQ ID NO: 5199756 - DNA, 25 bp, Homo sapien
cacagaccatgctgtccggacagct

SEQ ID NO: 5199757 - DNA, 25 bp, Homo sapien
aagttaactagcctgatggcggcag

SEQ ID NO: 5199758 - DNA, 25 bp, Homo sapien
cagggtgacccatgtgcagcagtgg

SEQ ID NO: 5199759 - DNA, 25 bp, Homo sapien
tgagatcgtgagagccacagaccat

SEQ ID NO: 5199760 - DNA, 25 bp, Homo sapien
gcagggaaagcagcaaccggatctt

SEQ ID NO: 5199761 - DNA, 25 bp, Homo sapien
tgttatccctgtcacagtgccgcag

SEQ ID NO: 5199762 - DNA, 25 bp, Homo sapien
taacggcataaataggtgtgagaaa

SEQ ID NO: 5199763 - DNA, 25 bp, Homo sapien
ccggatctttaattgagtgtgtcgc

SEQ ID NO: 5199764 - DNA, 25 bp, Homo sapien
gaaaaggtttcaggcctctgtgtcc

SEQ ID NO: 5199765 - DNA, 25 bp, Homo sapien
gacatcccagttctgacagatcttg

SEQ ID NO: 5199766 - DNA, 25 bp, Homo sapien
ctgcaggccacgcaggaaaaggttt

SEQ ID NO: 5199767 - DNA, 25 bp, Homo sapien
aaaatgctccgggaggtggcctcag

SEQ ID NO: 5199768 - DNA, 25 bp, Homo sapien
tgcaaagccagcgataaagcaagcc

SEQ ID NO: 5199769 - DNA, 25 bp, Homo sapien
agttgcaaagccagcgataaagcaa

SEQ ID NO: 5199770 - DNA, 25 bp, Homo sapien
caaagccagcgataaagcaagccag

SEQ ID NO: 5199771 - DNA, 25 bp, Homo sapien
aaagccagcgataaagcaagccaga

SEQ ID NO: 5199772 - DNA, 25 bp, Homo sapien
ggagatgcctccttggacgtctgct

SEQ ID NO: 5199773 - DNA, 25 bp, Homo sapien
gatgcctccttggacgtctgcttct

SEQ ID NO: 5199774 - DNA, 25 bp, Homo sapien
cctgcattcctttgatcagtcaacc

SEQ ID NO: 5199775 - DNA, 25 bp, Homo sapien
ctttgatcagtcaacccaggaggtg

SEQ ID NO: 5199776 - DNA, 25 bp, Homo sapien
gcttttctttaactacatgggcgta

SEQ ID NO: 5199777 - DNA, 25 bp, Homo sapien
aatattgtatttatgatctctagaa

SEQ ID NO: 5199778 - DNA, 25 bp, Homo sapien
tacatgggcgtatttataactgatg

SEQ ID NO: 5199779 - DNA, 25 bp, Homo sapien
cttcaagttcaattatcttgtcttc

SEQ ID NO: 5199780 - DNA, 25 bp, Homo sapien
caaatcggtccgagcagaaggaagc

SEQ ID NO: 5199781 - DNA, 25 bp, Homo sapien
taaggagaaccagccttgagaagaa

SEQ ID NO: 5199782 - DNA, 25 bp, Homo sapien
taccctggtgggacctgattgtcct

SEQ ID NO: 5199783 - DNA, 25 bp, Homo sapien
tagttgcgtctcctctgattggctc

SEQ ID NO: 5199784 - DNA, 25 bp, Homo sapien
tttaagaactgcaaatagagcggag

SEQ ID NO: 5199785 - DNA, 25 bp, Homo sapien
agaactgcaaatagagcggaggagc

SEQ ID NO: 5199786 - DNA, 25 bp, Homo sapien
actgcaaatagagcggaggagccaa

SEQ ID NO: 5199787 - DNA, 25 bp, Homo sapien
taagaactgcaaatagagcggagga

SEQ ID NO: 5199788 - DNA, 25 bp, Homo sapien
ccaagcccactgagttccattttga

SEQ ID NO: 5199789 - DNA, 25 bp, Homo sapien
tgacttgtctgatgagtgtcttttc

SEQ ID NO: 5199790 - DNA, 25 bp, Homo sapien
ccccagtttgggtgatataatggct

SEQ ID NO: 5199791 - DNA, 25 bp, Homo sapien
ttctatctgtgacataatgatttcc

SEQ ID NO: 5199792 - DNA, 25 bp, Homo sapien
ttcctgctactcagataccaagtag

SEQ ID NO: 5199793 - DNA, 25 bp, Homo sapien
tacgtgttgaatgctacatgcagat

SEQ ID NO: 5199794 - DNA, 25 bp, Homo sapien
tttcaggcagtgcagttttgcccac

SEQ ID NO: 5199795 - DNA, 25 bp, Homo sapien
tcttttctaaccaccaagagtgcca

SEQ ID NO: 5199796 - DNA, 25 bp, Homo sapien
taagagtctgtagttccgtgtgtgg

SEQ ID NO: 5199797 - DNA, 25 bp, Homo sapien
agagtctgtagttccgtgtgtggcc

SEQ ID NO: 5199798 - DNA, 25 bp, Homo sapien
tgtaagagtctgtagttccgtgtgt

SEQ ID NO: 5199799 - DNA, 25 bp, Homo sapien
aagagtctgtagttccgtgtgtggc

SEQ ID NO: 5199800 - DNA, 25 bp, Homo sapien
tcttgtctttgctagcacaacaaag

SEQ ID NO: 5199801 - DNA, 25 bp, Homo sapien
ctctcttgtctttgctagcacaaca

SEQ ID NO: 5199802 - DNA, 25 bp, Homo sapien
gtctctcttgtctttgctagcacaa

SEQ ID NO: 5199803 - DNA, 25 bp, Homo sapien
tctcttgtctttgctagcacaacaa

SEQ ID NO: 5199804 - DNA, 25 bp, Homo sapien
tcctccgaaggaaggacgtctgatc

SEQ ID NO: 5199805 - DNA, 25 bp, Homo sapien
gtcgggagtatcagaatccaccctg

SEQ ID NO: 5199806 - DNA, 25 bp, Homo sapien
tcttcaaagccgatgacaaagtcgg

SEQ ID NO: 5199807 - DNA, 25 bp, Homo sapien
tccaccctgaacaccagtaaatggg

SEQ ID NO: 5199808 - DNA, 25 bp, Homo sapien
ttataatcatgatgagcagatggcg

SEQ ID NO: 5199809 - DNA, 25 bp, Homo sapien
cagatggcgaagacggtttaaagta

SEQ ID NO: 5199810 - DNA, 25 bp, Homo sapien
cctaaaactggagtttaattgctca

SEQ ID NO: 5199811 - DNA, 25 bp, Homo sapien
tgtatgctgttagcaagtcttccct

SEQ ID NO: 5199812 - DNA, 25 bp, Homo sapien
gagatagagtccctcagatcctcac

SEQ ID NO: 5199813 - DNA, 25 bp, Homo sapien
cacagtctgcatgtggagatccaga

SEQ ID NO: 5199814 - DNA, 25 bp, Homo sapien
gcaggtccctaaaccaacaagcatt

SEQ ID NO: 5199815 - DNA, 25 bp, Homo sapien
atgagggcttgggtcttgatttccg

SEQ ID NO: 5199816 - DNA, 25 bp, Homo sapien
caaacagagattgccgctgggaaga

SEQ ID NO: 5199817 - DNA, 25 bp, Homo sapien
gacaaacagagattgccgctgggaa

SEQ ID NO: 5199818 - DNA, 25 bp, Homo sapien
cgctgggaagacaccaggaggctgt

SEQ ID NO: 5199819 - DNA, 25 bp, Homo sapien
attgccgctgggaagacaccaggag

SEQ ID NO: 5199820 - DNA, 25 bp, Homo sapien
ccgttgctgtatccgcatcccctgc

SEQ ID NO: 5199821 - DNA, 25 bp, Homo sapien
cccgttgctgtatccgcatcccctg

SEQ ID NO: 5199822 - DNA, 25 bp, Homo sapien
gaagactgcattgattagggtccat

SEQ ID NO: 5199823 - DNA, 25 bp, Homo sapien
atttcaaatttggaggcactggaag

SEQ ID NO: 5199824 - DNA, 25 bp, Homo sapien
tatcaagttcatacactggctggca

SEQ ID NO: 5199825 - DNA, 25 bp, Homo sapien
gaggcactgatgtgccactggacat

SEQ ID NO: 5199826 - DNA, 25 bp, Homo sapien
cctctggaaagaagagcggactagt

SEQ ID NO: 5199827 - DNA, 25 bp, Homo sapien
gtaataagtgtgacccgagaccagg

SEQ ID NO: 5199828 - DNA, 25 bp, Homo sapien
tgggatgccctccaaaatgatgaca

SEQ ID NO: 5199829 - DNA, 25 bp, Homo sapien
aatatagccattgcctgggatgccc

SEQ ID NO: 5199830 - DNA, 25 bp, Homo sapien
tgtgtcccttgtatgaatcccacgg

SEQ ID NO: 5199831 - DNA, 25 bp, Homo sapien
aatcccacggctggaagtttttctg

SEQ ID NO: 5199832 - DNA, 25 bp, Homo sapien
tgtaaatcggcatcttcaggtaggg

SEQ ID NO: 5199833 - DNA, 25 bp, Homo sapien
taaaagaatctcacaattgccagtg

SEQ ID NO: 5199834 - DNA, 25 bp, Homo sapien
acaccatatcccatcagcagattca

SEQ ID NO: 5199835 - DNA, 25 bp, Homo sapien
tacctcgggtctctcctaagtctag

SEQ ID NO: 5199836 - DNA, 25 bp, Homo sapien
tccgttccagtcactgtggccttga

SEQ ID NO: 5199837 - DNA, 25 bp, Homo sapien
gccttgatgcctgggcgagctttcc

SEQ ID NO: 5199838 - DNA, 25 bp, Homo sapien
tgcttgtgtccaatgccatcaccct

SEQ ID NO: 5199839 - DNA, 25 bp, Homo sapien
ttctgcttgtgtccaatgccatcac

SEQ ID NO: 5199840 - DNA, 25 bp, Homo sapien
aattcaattggttctgcttgtgtcc

SEQ ID NO: 5199841 - DNA, 25 bp, Homo sapien
aaattcaattggttctgcttgtgtc

SEQ ID NO: 5199842 - DNA, 25 bp, Homo sapien
tgggaggatcagagacggaatatac

SEQ ID NO: 5199843 - DNA, 25 bp, Homo sapien
gaaaaaatcggctcaatgacgaact

SEQ ID NO: 5199844 - DNA, 25 bp, Homo sapien
tgacgaacttttctccttgcggagg

SEQ ID NO: 5199845 - DNA, 25 bp, Homo sapien
tgaggacaagaccaccaagggcctg

SEQ ID NO: 5199846 - DNA, 25 bp, Homo sapien
cactgagccttgcaatggatctgga

SEQ ID NO: 5199847 - DNA, 25 bp, Homo sapien
tctctactgtgagcatccttgaaag

SEQ ID NO: 5199848 - DNA, 25 bp, Homo sapien
tatggctgtttagttctgcaggccc

SEQ ID NO: 5199849 - DNA, 25 bp, Homo sapien
tggtagaattagagctgaagtcctc

SEQ ID NO: 5199850 - DNA, 25 bp, Homo sapien
cacttagcaagtgctgcctggctta

SEQ ID NO: 5199851 - DNA, 25 bp, Homo sapien
cctggcttatgatgaggagcctgac

SEQ ID NO: 5199852 - DNA, 25 bp, Homo sapien
gattgcacgaatatggcacttagca

SEQ ID NO: 5199853 - DNA, 25 bp, Homo sapien
ggagcctgactcctacttctttgta

SEQ ID NO: 5199854 - DNA, 25 bp, Homo sapien
cccaatgcacgagagcgctttaggt

SEQ ID NO: 5199855 - DNA, 25 bp, Homo sapien
cccttccctttaaccaatctgtgct

SEQ ID NO: 5199856 - DNA, 25 bp, Homo sapien
cgagagcgctttaggtcaggctgat

SEQ ID NO: 5199857 - DNA, 25 bp, Homo sapien
taggtcaggctgataggcatttgtg

SEQ ID NO: 5199858 - DNA, 25 bp, Homo sapien
taatatgtttccatgactcaagcag

SEQ ID NO: 5199859 - DNA, 25 bp, Homo sapien
gggtgctccaatcccaatactagtt

SEQ ID NO: 5199860 - DNA, 25 bp, Homo sapien
tgtagatttacacaaggccctggtg

SEQ ID NO: 5199861 - DNA, 25 bp, Homo sapien
tcctaactgacttgtgggtgctcca

SEQ ID NO: 5199862 - DNA, 25 bp, Homo sapien
cttatcctcttttgtattgtttgaa

SEQ ID NO: 5199863 - DNA, 25 bp, Homo sapien
ttgtattgtttgaattttgggccat

SEQ ID NO: 5199864 - DNA, 25 bp, Homo sapien
tttgtattgtttgaattttgggcca

SEQ ID NO: 5199865 - DNA, 25 bp, Homo sapien
tatcctcttttgtattgtttgaatt

SEQ ID NO: 5199866 - DNA, 25 bp, Homo sapien
ctgttcttcctatcctcaagttgtg

SEQ ID NO: 5199867 - DNA, 25 bp, Homo sapien
gagctgttcttcctatcctcaagtt

SEQ ID NO: 5199868 - DNA, 25 bp, Homo sapien
aagttgtgaggtccccgtgtctctc

SEQ ID NO: 5199869 - DNA, 25 bp, Homo sapien
atcctcaagttgtgaggtccccgtg

SEQ ID NO: 5199870 - DNA, 25 bp, Homo sapien
atgttccagatggggcttggctgga

SEQ ID NO: 5199871 - DNA, 25 bp, Homo sapien
ggtatgttccagatggggcttggct

SEQ ID NO: 5199872 - DNA, 25 bp, Homo sapien
gaggtatgttccagatggggcttgg

SEQ ID NO: 5199873 - DNA, 25 bp, Homo sapien
tatgttccagatggggcttggctgg

SEQ ID NO: 5199874 - DNA, 25 bp, Homo sapien
tttggctctttccaacgacagcttt

SEQ ID NO: 5199875 - DNA, 25 bp, Homo sapien
ctttggctctttccaacgacagctt

SEQ ID NO: 5199876 - DNA, 25 bp, Homo sapien
ctattacatgttactagatggctgc

SEQ ID NO: 5199877 - DNA, 25 bp, Homo sapien
tctgcaaatcttcattgcggctggg

SEQ ID NO: 5199878 - DNA, 25 bp, Homo sapien
caactttggcgatttccagaaacag

SEQ ID NO: 5199879 - DNA, 25 bp, Homo sapien
ggaccaagcccctctctattacatg

SEQ ID NO: 5199880 - DNA, 25 bp, Homo sapien
tccactttgggataggactcaggtt

SEQ ID NO: 5199881 - DNA, 25 bp, Homo sapien
gggtgagcctcgtcactgctaaaga

SEQ ID NO: 5199882 - DNA, 25 bp, Homo sapien
gctcaacacacaaaccgtacatgct

SEQ ID NO: 5199883 - DNA, 25 bp, Homo sapien
ttcctttcccatgcggtgacaccgt

SEQ ID NO: 5199884 - DNA, 25 bp, Homo sapien
gatgccacaggtacttgcacaaatt

SEQ ID NO: 5199885 - DNA, 25 bp, Homo sapien
agttgctgatgccacaggtacttgc

SEQ ID NO: 5199886 - DNA, 25 bp, Homo sapien
ttttactcaagaggttctttacaga

SEQ ID NO: 5199887 - DNA, 25 bp, Homo sapien
caagaggttctttacagacaactca

SEQ ID NO: 5199888 - DNA, 25 bp, Homo sapien
taccccgggatctgaaagttctaga

SEQ ID NO: 5199889 - DNA, 25 bp, Homo sapien
taaatcaggcagatcgaagaagtgg

SEQ ID NO: 5199890 - DNA, 25 bp, Homo sapien
tggtatcattctcagtagcagggca

SEQ ID NO: 5199891 - DNA, 25 bp, Homo sapien
cagatgggcccattgacaagtgtgt

SEQ ID NO: 5199892 - DNA, 25 bp, Homo sapien
ttgtacccggccctaggaggtctgc

SEQ ID NO: 5199893 - DNA, 25 bp, Homo sapien
tagactcagtgtgacataatgggaa

SEQ ID NO: 5199894 - DNA, 25 bp, Homo sapien
cagcagccatatgtggaacttcatc

SEQ ID NO: 5199895 - DNA, 25 bp, Homo sapien
tgtgcgcatacatccatagactcag

SEQ ID NO: 5199896 - DNA, 25 bp, Homo sapien
tgtccctggcatgtctactactaga

SEQ ID NO: 5199897 - DNA, 25 bp, Homo sapien
tgtttcaagaactaagactgttgcc

SEQ ID NO: 5199898 - DNA, 25 bp, Homo sapien
gagttatagcctgaaaatatccagc

SEQ ID NO: 5199899 - DNA, 25 bp, Homo sapien
tcctgggcacccagtagatcatgat

SEQ ID NO: 5199900 - DNA, 25 bp, Homo sapien
cttatgctcaaaacccaagattttt

SEQ ID NO: 5199901 - DNA, 25 bp, Homo sapien
tgcagcctcttatgctcaaaaccca

SEQ ID NO: 5199902 - DNA, 25 bp, Homo sapien
tttcaggattaactttaccatggta

SEQ ID NO: 5199903 - DNA, 25 bp, Homo sapien
cttttgcatattattatgggaatga

SEQ ID NO: 5199904 - DNA, 25 bp, Homo sapien
gtttcttatgacaacaatccctgcc

SEQ ID NO: 5199905 - DNA, 25 bp, Homo sapien
ctgggttttcatctaacttgtttct

SEQ ID NO: 5199906 - DNA, 25 bp, Homo sapien
cctggtgcattgtgaggcccagctc

SEQ ID NO: 5199907 - DNA, 25 bp, Homo sapien
tgagtcttggtcctggtgcattgtg

SEQ ID NO: 5199908 - DNA, 25 bp, Homo sapien
agtgaagtggatgacagcagatgac

SEQ ID NO: 5199909 - DNA, 25 bp, Homo sapien
caggagtgaagtggatgacagcaga

SEQ ID NO: 5199910 - DNA, 25 bp, Homo sapien
ttggacaggagtgaagtggatgaca

SEQ ID NO: 5199911 - DNA, 25 bp, Homo sapien
tgaagtggatgacagcagatgacat

SEQ ID NO: 5199912 - DNA, 25 bp, Homo sapien
actgggacgatttcatccttggtca

SEQ ID NO: 5199913 - DNA, 25 bp, Homo sapien
tgttgataaggctcaggatcttgtg

SEQ ID NO: 5199914 - DNA, 25 bp, Homo sapien
gccgcgttgtagcactatgttgata

SEQ ID NO: 5199915 - DNA, 25 bp, Homo sapien
ttgatgtaagatccaactgggacga

SEQ ID NO: 5199916 - DNA, 25 bp, Homo sapien
gttggtcatggttactgctgctact

SEQ ID NO: 5199917 - DNA, 25 bp, Homo sapien
gagttggtcatggttactgctgcta

SEQ ID NO: 5199918 - DNA, 25 bp, Homo sapien
agttggtcatggttactgctgctac

SEQ ID NO: 5199919 - DNA, 25 bp, Homo sapien
caaacttttgacaggctctggatag

SEQ ID NO: 5199920 - DNA, 25 bp, Homo sapien
tctggatagaaagctgcactcttgg

SEQ ID NO: 5199921 - DNA, 25 bp, Homo sapien
tatacagtccttagacaatcttctg

SEQ ID NO: 5199922 - DNA, 25 bp, Homo sapien
taaagactcataatgcagaagctct

SEQ ID NO: 5199923 - DNA, 25 bp, Homo sapien
atggaaatggtgtacatgtgggcct

SEQ ID NO: 5199924 - DNA, 25 bp, Homo sapien
ttcttgtttccggtcagatggaaat

SEQ ID NO: 5199925 - DNA, 25 bp, Homo sapien
ccggtcagatggaaatggtgtacat

SEQ ID NO: 5199926 - DNA, 25 bp, Homo sapien
aaatggtgtacatgtgggcctgcgt

SEQ ID NO: 5199927 - DNA, 25 bp, Homo sapien
aaggattttagggataattccatca

SEQ ID NO: 5199928 - DNA, 25 bp, Homo sapien
gcccgcaccaacacaagaagacatt

SEQ ID NO: 5199929 - DNA, 25 bp, Homo sapien
catcaaagccacttgtattagtcag

SEQ ID NO: 5199930 - DNA, 25 bp, Homo sapien
acagcagaacacagcgtagaggctg

SEQ ID NO: 5199931 - DNA, 25 bp, Homo sapien
gtttcgtccgctgtcctcaaaagtg

SEQ ID NO: 5199932 - DNA, 25 bp, Homo sapien
tcaaaagtgggcgttcaggcttcac

SEQ ID NO: 5199933 - DNA, 25 bp, Homo sapien
tgggaaactaacataggatctccgg

SEQ ID NO: 5199934 - DNA, 25 bp, Homo sapien
ggatctccggctatggcgcttcatt

SEQ ID NO: 5199935 - DNA, 25 bp, Homo sapien
gctgccacactgttaggatggtgac

SEQ ID NO: 5199936 - DNA, 25 bp, Homo sapien
agcgaggcgccgtctgcatttcaga

SEQ ID NO: 5199937 - DNA, 25 bp, Homo sapien
tcttcggagcattgaataggcactt

SEQ ID NO: 5199938 - DNA, 25 bp, Homo sapien
gagccatgtgctctgaaagggtgct

SEQ ID NO: 5199939 - DNA, 25 bp, Homo sapien
taacggcagagtccgaggctgtaac

SEQ ID NO: 5199940 - DNA, 25 bp, Homo sapien
gataattagtccctttcagatggct

SEQ ID NO: 5199941 - DNA, 25 bp, Homo sapien
cttaatgataatgagtgggcagagc

SEQ ID NO: 5199942 - DNA, 25 bp, Homo sapien
tcctttccaagatctgcactgcact

SEQ ID NO: 5199943 - DNA, 25 bp, Homo sapien
taaattgtagtcaaatccattaccc

SEQ ID NO: 5199944 - DNA, 25 bp, Homo sapien
gacaccacacgttggggatctgtag

SEQ ID NO: 5199945 - DNA, 25 bp, Homo sapien
ggacactataattaatcaatgctaa

SEQ ID NO: 5199946 - DNA, 25 bp, Homo sapien
ccttgagtagattatctgtgtgacc

SEQ ID NO: 5199947 - DNA, 25 bp, Homo sapien
tgcactgtccgggtctggccgatgc

SEQ ID NO: 5199948 - DNA, 25 bp, Homo sapien
tatgtgaatggcgtggttgagagat

SEQ ID NO: 5199949 - DNA, 25 bp, Homo sapien
ggtctggccgatgctcacaggtgaa

SEQ ID NO: 5199950 - DNA, 25 bp, Homo sapien
cacaggtgaatctttctctcgtggg

SEQ ID NO: 5199951 - DNA, 25 bp, Homo sapien
cacacatttaatagaggatcctggg

SEQ ID NO: 5199952 - DNA, 25 bp, Homo sapien
aggttatgagctctcaggtcatgct

SEQ ID NO: 5199953 - DNA, 25 bp, Homo sapien
gtagagacgaggttatgagctctca

SEQ ID NO: 5199954 - DNA, 25 bp, Homo sapien
tggaccacacatttaatagaggatc

SEQ ID NO: 5199955 - DNA, 25 bp, Homo sapien
caaaagctaaggttgtgaaggaact

SEQ ID NO: 5199956 - DNA, 25 bp, Homo sapien
gaacagacgccttccaatggagggt

SEQ ID NO: 5199957 - DNA, 25 bp, Homo sapien
cggctccttctcgtaagcttcaaaa

SEQ ID NO: 5199958 - DNA, 25 bp, Homo sapien
tcttgcaggagaactcaagtgtcca

SEQ ID NO: 5199959 - DNA, 25 bp, Homo sapien
ggatgtcccatatctcatccctgct

SEQ ID NO: 5199960 - DNA, 25 bp, Homo sapien
gcctttgctccctcgaccaggatat

SEQ ID NO: 5199961 - DNA, 25 bp, Homo sapien
tcgaccaggatatgacaccaccaac

SEQ ID NO: 5199962 - DNA, 25 bp, Homo sapien
caggatgtcccatatctcatccctg

SEQ ID NO: 5199963 - DNA, 25 bp, Homo sapien
aagaatttggtggataaacctggca

SEQ ID NO: 5199964 - DNA, 25 bp, Homo sapien
ggaaatgatgccatgtggcgagact

SEQ ID NO: 5199965 - DNA, 25 bp, Homo sapien
aaacctggcaggcacccatttctgg

SEQ ID NO: 5199966 - DNA, 25 bp, Homo sapien
ggagccataagtcacagcgattctg

SEQ ID NO: 5199967 - DNA, 25 bp, Homo sapien
ctgaccagacttcctttctcagaac

SEQ ID NO: 5199968 - DNA, 25 bp, Homo sapien
ccacacctgtcccactctgaccaga

SEQ ID NO: 5199969 - DNA, 25 bp, Homo sapien
actctgaccagacttcctttctcag

SEQ ID NO: 5199970 - DNA, 25 bp, Homo sapien
cacacctgtcccactctgaccagac

SEQ ID NO: 5199971 - DNA, 25 bp, Homo sapien
ttaatgggccgcagaaaaccttctc

SEQ ID NO: 5199972 - DNA, 25 bp, Homo sapien
atataggagctttgtgatggctgac

SEQ ID NO: 5199973 - DNA, 25 bp, Homo sapien
ttcccttgatccacattctgcactg

SEQ ID NO: 5199974 - DNA, 25 bp, Homo sapien
tgccactgccttaacccagatcctc

SEQ ID NO: 5199975 - DNA, 25 bp, Homo sapien
tcttccaacatagaatgtcctctgg

SEQ ID NO: 5199976 - DNA, 25 bp, Homo sapien
ctgagtgagaggatgttctccttct

SEQ ID NO: 5199977 - DNA, 25 bp, Homo sapien
cagtcaccgtaaggtggatgctgag

SEQ ID NO: 5199978 - DNA, 25 bp, Homo sapien
cctaaacctgagtactcctgatggg

SEQ ID NO: 5199979 - DNA, 25 bp, Homo sapien
ggcttcacgggccacgcagcactgg

SEQ ID NO: 5199980 - DNA, 25 bp, Homo sapien
cccagttaagcactggtgaggcttc

SEQ ID NO: 5199981 - DNA, 25 bp, Homo sapien
gccatgtgccccagttaagcactgg

SEQ ID NO: 5199982 - DNA, 25 bp, Homo sapien
gggagttcgccatgtgccccagtta

SEQ ID NO: 5199983 - DNA, 25 bp, Homo sapien
acagagacccccacgataactgagg

SEQ ID NO: 5199984 - DNA, 25 bp, Homo sapien
tcagaatactgtagaaacaaacagc

SEQ ID NO: 5199985 - DNA, 25 bp, Homo sapien
gtagaaacaaacagccctacagctg

SEQ ID NO: 5199986 - DNA, 25 bp, Homo sapien
cccattatcttgtagctgcactgtc

SEQ ID NO: 5199987 - DNA, 25 bp, Homo sapien
tctgtctttcttattatttgtctgc

SEQ ID NO: 5199988 - DNA, 25 bp, Homo sapien
ctgtctttcttattatttgtctgca

SEQ ID NO: 5199989 - DNA, 25 bp, Homo sapien
caccatccggaaccaaggtcttgtg

SEQ ID NO: 5199990 - DNA, 25 bp, Homo sapien
tcattatgtgactgatgacgcacag

SEQ ID NO: 5199991 - DNA, 25 bp, Homo sapien
tgacgcacagcaaaagcgacagtag

SEQ ID NO: 5199992 - DNA, 25 bp, Homo sapien
gacagtaggtgtgaacaccatccgg

SEQ ID NO: 5199993 - DNA, 25 bp, Homo sapien
cacttaaaatagagcaagcatcccc

SEQ ID NO: 5199994 - DNA, 25 bp, Homo sapien
ttccataggcctggtagccacctca

SEQ ID NO: 5199995 - DNA, 25 bp, Homo sapien
tgaaacagctgctcaagtggttctg

SEQ ID NO: 5199996 - DNA, 25 bp, Homo sapien
tgcctactcagacccaaaagttttg

SEQ ID NO: 5199997 - DNA, 25 bp, Homo sapien
tttttgtaaaggctagagttagtgc

SEQ ID NO: 5199998 - DNA, 25 bp, Homo sapien
tttgtaaaggctagagttagtgcat

SEQ ID NO: 5199999 - DNA, 25 bp, Homo sapien
ttttgtaaaggctagagttagtgca

SEQ ID NO: 5200000 - DNA, 25 bp, Homo sapien
ggaaacaacatttgaagatttgctc

SEQ ID NO: 5200001 - DNA, 25 bp, Homo sapien
ttaccaaagttatgtaacctcagtg

SEQ ID NO: 5200002 - DNA, 25 bp, Homo sapien
gaatatactctggaaacaacatttg

SEQ ID NO: 5200003 - DNA, 25 bp, Homo sapien
cccctaggaatatattagtgaactt

SEQ ID NO: 5200004 - DNA, 25 bp, Homo sapien
taagacaagcgttggtaaccatggc

SEQ ID NO: 5200005 - DNA, 25 bp, Homo sapien
gactcctgaaaatgataagacaagc

SEQ ID NO: 5200006 - DNA, 25 bp, Homo sapien
tgcattggagaactctagacacgca

SEQ ID NO: 5200007 - DNA, 25 bp, Homo sapien
agtcttagcccttagcccacattga

SEQ ID NO: 5200008 - DNA, 25 bp, Homo sapien
ccatgtctcccagggccttaaaagc

SEQ ID NO: 5200009 - DNA, 25 bp, Homo sapien
tccatagtgacgatactccaaccat

SEQ ID NO: 5200010 - DNA, 25 bp, Homo sapien
gcagcagttcacctatttcaaaaat

SEQ ID NO: 5200011 - DNA, 25 bp, Homo sapien
ttttgtctaggtagtcagtctgcac

SEQ ID NO: 5200012 - DNA, 25 bp, Homo sapien
aaccttgtgccgtttgccatggagt

SEQ ID NO: 5200013 - DNA, 25 bp, Homo sapien
aagaaagtagataaggctgcagggc

SEQ ID NO: 5200014 - DNA, 25 bp, Homo sapien
gagggtataagtaccttcaaggcag

SEQ ID NO: 5200015 - DNA, 25 bp, Homo sapien
aaagacaaagaatagccgggcggat

SEQ ID NO: 5200016 - DNA, 25 bp, Homo sapien
ttctgtgtttcatacctctaccaat

SEQ ID NO: 5200017 - DNA, 25 bp, Homo sapien
tgtgtttcatacctctaccaattct

SEQ ID NO: 5200018 - DNA, 25 bp, Homo sapien
gtttcatacctctaccaattctgta

SEQ ID NO: 5200019 - DNA, 25 bp, Homo sapien
attctgtgtttcatacctctaccaa

SEQ ID NO: 5200020 - DNA, 25 bp, Homo sapien
ctggggaggctaagttgggaggatt

SEQ ID NO: 5200021 - DNA, 25 bp, Homo sapien
agcctggcaggttgaggctacagtg

SEQ ID NO: 5200022 - DNA, 25 bp, Homo sapien
acagtgagctgtgattgtgccactg

SEQ ID NO: 5200023 - DNA, 25 bp, Homo sapien
ggaggattgcttgagcctggcaggt

SEQ ID NO: 5200024 - DNA, 25 bp, Homo sapien
tctggacaggtaacttggcaaacgt

SEQ ID NO: 5200025 - DNA, 25 bp, Homo sapien
taatgtgcctcttggtctgccagga

SEQ ID NO: 5200026 - DNA, 25 bp, Homo sapien
ggactctcgggcagttctcagacaa

SEQ ID NO: 5200027 - DNA, 25 bp, Homo sapien
ttaggaggagcaccaaaccgatggg

SEQ ID NO: 5200028 - DNA, 25 bp, Homo sapien
gtacgtaaagccgagagagcaaccc

SEQ ID NO: 5200029 - DNA, 25 bp, Homo sapien
aacacactatgaccggtacgtaaag

SEQ ID NO: 5200030 - DNA, 25 bp, Homo sapien
tgagaggcagaaagctgcactcccc

SEQ ID NO: 5200031 - DNA, 25 bp, Homo sapien
cccgtgtgtgcgaccgagtgtctgt

SEQ ID NO: 5200032 - DNA, 25 bp, Homo sapien
ctccggccgtgtccgccgccgcttc

SEQ ID NO: 5200033 - DNA, 25 bp, Homo sapien
gctcctcaccatgtgtaaggcggcg

SEQ ID NO: 5200034 - DNA, 25 bp, Homo sapien
tcctcaccatgtgtaaggcggcggg

SEQ ID NO: 5200035 - DNA, 25 bp, Homo sapien
cgccttcgctcctcaccatgtgtaa

SEQ ID NO: 5200036 - DNA, 25 bp, Homo sapien
cacggcggcgaatgagagccaagaa

SEQ ID NO: 5200037 - DNA, 25 bp, Homo sapien
tctggtttgctcagtagcggcagcg

SEQ ID NO: 5200038 - DNA, 25 bp, Homo sapien
aatgcctgccttcagggtacgtgaa

SEQ ID NO: 5200039 - DNA, 25 bp, Homo sapien
atgagcacagccgacaaagagcacg

SEQ ID NO: 5200040 - DNA, 25 bp, Homo sapien
tatctgacttggtaccaagaggata

SEQ ID NO: 5200041 - DNA, 25 bp, Homo sapien
gaggccgggaataatacgtttgtgc

SEQ ID NO: 5200042 - DNA, 25 bp, Homo sapien
tacgtttgtgcagcaaaatggttat

SEQ ID NO: 5200043 - DNA, 25 bp, Homo sapien
ccaagaggataaagaggccgggaat

SEQ ID NO: 5200044 - DNA, 25 bp, Homo sapien
ttgagccagatttctaaaaaacagg

SEQ ID NO: 5200045 - DNA, 25 bp, Homo sapien
acaggtattgtggacagtgtttcca

SEQ ID NO: 5200046 - DNA, 25 bp, Homo sapien
gagtgttaacctaatccagtaagag

SEQ ID NO: 5200047 - DNA, 25 bp, Homo sapien
gcaactatacttgaaggtaacaggg

SEQ ID NO: 5200048 - DNA, 25 bp, Homo sapien
gaaacgaatttaactcctgtggcca

SEQ ID NO: 5200049 - DNA, 25 bp, Homo sapien
tactttgctctcaaggtggctggac

SEQ ID NO: 5200050 - DNA, 25 bp, Homo sapien
cactttgcaaaaagggtatggcgat

SEQ ID NO: 5200051 - DNA, 25 bp, Homo sapien
gccaattggtatcaatgaagaaacg

SEQ ID NO: 5200052 - DNA, 25 bp, Homo sapien
ttaaattgtatttcggccgggctca

SEQ ID NO: 5200053 - DNA, 25 bp, Homo sapien
actatgtaaatgtagcagtaggtgc

SEQ ID NO: 5200054 - DNA, 25 bp, Homo sapien
gagaggcagctttctaataagaaaa

SEQ ID NO: 5200055 - DNA, 25 bp, Homo sapien
gcaactgcaattttgggttactatg

SEQ ID NO: 5200056 - DNA, 25 bp, Homo sapien
gcataggtcttcaggtgtggtaccg

SEQ ID NO: 5200057 - DNA, 25 bp, Homo sapien
tgtggtaccgtcaaccagggccatc

SEQ ID NO: 5200058 - DNA, 25 bp, Homo sapien
tatgtagtagaacaacttaagatcc

SEQ ID NO: 5200059 - DNA, 25 bp, Homo sapien
catatggtccacttgatagacgttc

SEQ ID NO: 5200060 - DNA, 25 bp, Homo sapien
tctgtactgtgaggcacatactcca

SEQ ID NO: 5200061 - DNA, 25 bp, Homo sapien
gatatcggacatgttggttagccct

SEQ ID NO: 5200062 - DNA, 25 bp, Homo sapien
ttcccaagaggcatgtaggtttcca

SEQ ID NO: 5200063 - DNA, 25 bp, Homo sapien
gaaacatttcctcgtggtgtgtctg

SEQ ID NO: 5200064 - DNA, 25 bp, Homo sapien
aatacactcattgtctagtcccgtg

SEQ ID NO: 5200065 - DNA, 25 bp, Homo sapien
tgatcaatacactcattgtctagtc

SEQ ID NO: 5200066 - DNA, 25 bp, Homo sapien
tctagtcccgtggtctctggtccct

SEQ ID NO: 5200067 - DNA, 25 bp, Homo sapien
tcattgtctagtcccgtggtctctg

SEQ ID NO: 5200068 - DNA, 25 bp, Homo sapien
atcagagctccccaggtcctcccag

SEQ ID NO: 5200069 - DNA, 25 bp, Homo sapien
cagagctccccaggtcctcccaggc

SEQ ID NO: 5200070 - DNA, 25 bp, Homo sapien
gagctccccaggtcctcccaggcat

SEQ ID NO: 5200071 - DNA, 25 bp, Homo sapien
caatcagagctccccaggtcctccc

SEQ ID NO: 5200072 - DNA, 25 bp, Homo sapien
gagctgtgttgagcaaagtcagaag

SEQ ID NO: 5200073 - DNA, 25 bp, Homo sapien
caaaggccggagctgtgttgagcaa

SEQ ID NO: 5200074 - DNA, 25 bp, Homo sapien
tcagccacacactctagtcttggca

SEQ ID NO: 5200075 - DNA, 25 bp, Homo sapien
ttggcagctcatgattggcaaaggc

SEQ ID NO: 5200076 - DNA, 25 bp, Homo sapien
cagtgcttaggccacccaagttgtg

SEQ ID NO: 5200077 - DNA, 25 bp, Homo sapien
ttccttccgactggtcagtgcttag

SEQ ID NO: 5200078 - DNA, 25 bp, Homo sapien
gctcctcaatccagcaggaaaccag

SEQ ID NO: 5200079 - DNA, 25 bp, Homo sapien
taagcagggcttccggggattcctc

SEQ ID NO: 5200080 - DNA, 25 bp, Homo sapien
cacagcctggactgcttgtccattt

SEQ ID NO: 5200081 - DNA, 25 bp, Homo sapien
tgtgcatgcggctcatcttcttccc

SEQ ID NO: 5200082 - DNA, 25 bp, Homo sapien
ttcccacagcctggactgcttgtcc

SEQ ID NO: 5200083 - DNA, 25 bp, Homo sapien
ccacagcctggactgcttgtccatt

SEQ ID NO: 5200084 - DNA, 25 bp, Homo sapien
gcagggggcagcttgtcgaagttca

SEQ ID NO: 5200085 - DNA, 25 bp, Homo sapien
gccctgtcttccaacagaacaagtg

SEQ ID NO: 5200086 - DNA, 25 bp, Homo sapien
gaagccctgtcttccaacagaacaa

SEQ ID NO: 5200087 - DNA, 25 bp, Homo sapien
cagcttgtcgaagttcagtggggca

SEQ ID NO: 5200088 - DNA, 25 bp, Homo sapien
tccccaaacctctagcgagtggtgg

SEQ ID NO: 5200089 - DNA, 25 bp, Homo sapien
cagcacccgcgaagggtgaaggtcc

SEQ ID NO: 5200090 - DNA, 25 bp, Homo sapien
tctccccaaacctctagcgagtggt

SEQ ID NO: 5200091 - DNA, 25 bp, Homo sapien
gggtgtgaacgcgagccagcacccg

SEQ ID NO: 5200092 - DNA, 25 bp, Homo sapien
agtgcgtcccagttctgagctcgga

SEQ ID NO: 5200093 - DNA, 25 bp, Homo sapien
gcttcggagcgtggccaagccacgc

SEQ ID NO: 5200094 - DNA, 25 bp, Homo sapien
gctttcggtagacagcacaggccca

SEQ ID NO: 5200095 - DNA, 25 bp, Homo sapien
ggcccagagtgcgtcccagttctga

SEQ ID NO: 5200096 - DNA, 25 bp, Homo sapien
cggggccaggagcggaagtccgagg

SEQ ID NO: 5200097 - DNA, 25 bp, Homo sapien
gccaggagcggaagtccgaggggac

SEQ ID NO: 5200098 - DNA, 25 bp, Homo sapien
tcacctctacggctgacccccttcc

SEQ ID NO: 5200099 - DNA, 25 bp, Homo sapien
ttcacctctacggctgacccccttc

SEQ ID NO: 5200100 - DNA, 25 bp, Homo sapien
aggggccttcacctctacggctgac

SEQ ID NO: 5200101 - DNA, 25 bp, Homo sapien
ggccttcacctctacggctgacccc

SEQ ID NO: 5200102 - DNA, 25 bp, Homo sapien
tcatgtgaaaagatcacgagccgaa

SEQ ID NO: 5200103 - DNA, 25 bp, Homo sapien
tcctgggtccagaagcgccgggaca

SEQ ID NO: 5200104 - DNA, 25 bp, Homo sapien
aaaagatcacgagccgaaaggccct

SEQ ID NO: 5200105 - DNA, 25 bp, Homo sapien
gccacttgctcagctttgcagatcc

SEQ ID NO: 5200106 - DNA, 25 bp, Homo sapien
cactgtggtcttgtcgaaagtcagg

SEQ ID NO: 5200107 - DNA, 25 bp, Homo sapien
ttccctagggtattgctaaaacagc

SEQ ID NO: 5200108 - DNA, 25 bp, Homo sapien
tggctggccatacatctcaagatac

SEQ ID NO: 5200109 - DNA, 25 bp, Homo sapien
ttaaggccctaagctagccagaggc

SEQ ID NO: 5200110 - DNA, 25 bp, Homo sapien
gtttatgactctgcacactttttgg

SEQ ID NO: 5200111 - DNA, 25 bp, Homo sapien
actttttgggcttgctcctgtgtcc

SEQ ID NO: 5200112 - DNA, 25 bp, Homo sapien
cgtgccttctacctttatcattggg

SEQ ID NO: 5200113 - DNA, 25 bp, Homo sapien
tatcattgggaatcctgtaaggaca

SEQ ID NO: 5200114 - DNA, 25 bp, Homo sapien
caagaacagtgcaaatgttccccct

SEQ ID NO: 5200115 - DNA, 25 bp, Homo sapien
aagaacagtgcaaatgttccccctg

SEQ ID NO: 5200116 - DNA, 25 bp, Homo sapien
tgaataaaaaccagaacatgtccgc

SEQ ID NO: 5200117 - DNA, 25 bp, Homo sapien
ccaggattgcataggggctgtttcc

SEQ ID NO: 5200118 - DNA, 25 bp, Homo sapien
ctgaggttgtgcaataggccagctc

SEQ ID NO: 5200119 - DNA, 25 bp, Homo sapien
ggaattgcttccagatgacatgatg

SEQ ID NO: 5200120 - DNA, 25 bp, Homo sapien
cgtccccggccttccattcgcggtg

SEQ ID NO: 5200121 - DNA, 25 bp, Homo sapien
ggaggacgccctcgattttgatgag

SEQ ID NO: 5200122 - DNA, 25 bp, Homo sapien
ggcacccgcgataagcttcagaacg

SEQ ID NO: 5200123 - DNA, 25 bp, Homo sapien
aatgcaatgtgggtcgcctgctgga

SEQ ID NO: 5200124 - DNA, 25 bp, Homo sapien
agaacacgttgaccctcttaagcgg

SEQ ID NO: 5200125 - DNA, 25 bp, Homo sapien
attcatcttccttgacggcccagtc

SEQ ID NO: 5200126 - DNA, 25 bp, Homo sapien
tcatcttccttgacggcccagtcag

SEQ ID NO: 5200127 - DNA, 25 bp, Homo sapien
tcttccttgacggcccagtcagtgc

SEQ ID NO: 5200128 - DNA, 25 bp, Homo sapien
cctgggcctctaggctcagaacgag

SEQ ID NO: 5200129 - DNA, 25 bp, Homo sapien
cagaacgagccgtgttggtgacccc

SEQ ID NO: 5200130 - DNA, 25 bp, Homo sapien
ttcccggttgcatctgcgtggaaac

SEQ ID NO: 5200131 - DNA, 25 bp, Homo sapien
agcctggccggcgttcccggttgca

SEQ ID NO: 5200132 - DNA, 25 bp, Homo sapien
gagttcagccacgtgctcggctggt

SEQ ID NO: 5200133 - DNA, 25 bp, Homo sapien
ctccgagagttcagccacgtgctcg

SEQ ID NO: 5200134 - DNA, 25 bp, Homo sapien
ctccctccgagagttcagccacgtg

SEQ ID NO: 5200135 - DNA, 25 bp, Homo sapien
acgtgctcggctggtttccccacat

SEQ ID NO: 5200136 - DNA, 25 bp, Homo sapien
tctggcccccgacgagaataaagct

SEQ ID NO: 5200137 - DNA, 25 bp, Homo sapien
gcccccgacgagaataaagcttcca

SEQ ID NO: 5200138 - DNA, 25 bp, Homo sapien
ggcaagataacatgacgcacgggaa

SEQ ID NO: 5200139 - DNA, 25 bp, Homo sapien
taacatgacgcacgggaaaatgtat

SEQ ID NO: 5200140 - DNA, 25 bp, Homo sapien
gaatttctccaggtgcgccctgagg

SEQ ID NO: 5200141 - DNA, 25 bp, Homo sapien
cagagtgactaaggtctggaggaat

SEQ ID NO: 5200142 - DNA, 25 bp, Homo sapien
gcccctctctagcagtccaggcagc

SEQ ID NO: 5200143 - DNA, 25 bp, Homo sapien
ctctctagcagtccaggcagccaga

SEQ ID NO: 5200144 - DNA, 25 bp, Homo sapien
gcttcggtctctttaagccagaggg

SEQ ID NO: 5200145 - DNA, 25 bp, Homo sapien
ccagagggccattttgaactattaa

SEQ ID NO: 5200146 - DNA, 25 bp, Homo sapien
tctgctacgcagtcccaattcaaat

SEQ ID NO: 5200147 - DNA, 25 bp, Homo sapien
gcatttggttgttacgtggcttcgg

SEQ ID NO: 5200148 - DNA, 25 bp, Homo sapien
ctgaaaaagtcagggcaggatgaca

SEQ ID NO: 5200149 - DNA, 25 bp, Homo sapien
aaaagtcagggcaggatgacaacgg

SEQ ID NO: 5200150 - DNA, 25 bp, Homo sapien
aagtcagggcaggatgacaacggca

SEQ ID NO: 5200151 - DNA, 25 bp, Homo sapien
gtcagggcaggatgacaacggcaca

SEQ ID NO: 5200152 - DNA, 25 bp, Homo sapien
cctgatggacagtctttatcctgcc

SEQ ID NO: 5200153 - DNA, 25 bp, Homo sapien
gatgaaagttggtgccagggccagg

SEQ ID NO: 5200154 - DNA, 25 bp, Homo sapien
tacctggtgtttagcaaggggactg

SEQ ID NO: 5200155 - DNA, 25 bp, Homo sapien
ggactggcataggattattcctgta

SEQ ID NO: 5200156 - DNA, 25 bp, Homo sapien
tccaagttaagccagaatcagggtc

SEQ ID NO: 5200157 - DNA, 25 bp, Homo sapien
ccaagttaagccagaatcagggtct

SEQ ID NO: 5200158 - DNA, 25 bp, Homo sapien
ggtgtgctgtgcaccttagatttga

SEQ ID NO: 5200159 - DNA, 25 bp, Homo sapien
gtgtgctgtgcaccttagatttgaa

SEQ ID NO: 5200160 - DNA, 25 bp, Homo sapien
aggcatcttttgcagagacctgctg

SEQ ID NO: 5200161 - DNA, 25 bp, Homo sapien
aacattggaggcctttcccttcagt

SEQ ID NO: 5200162 - DNA, 25 bp, Homo sapien
ttcagtgtcaaccttatggatcttc

SEQ ID NO: 5200163 - DNA, 25 bp, Homo sapien
cagtgtcaaccttatggatcttctt

SEQ ID NO: 5200164 - DNA, 25 bp, Homo sapien
ctccttcattggcaggacatcaagg

SEQ ID NO: 5200165 - DNA, 25 bp, Homo sapien
tcattggcaggacatcaagggctct

SEQ ID NO: 5200166 - DNA, 25 bp, Homo sapien
gaggacatcctcctccttcattggc

SEQ ID NO: 5200167 - DNA, 25 bp, Homo sapien
ggaacttgaggacatcctcctcctt

SEQ ID NO: 5200168 - DNA, 25 bp, Homo sapien
gctgagatctggttagagaatgttc

SEQ ID NO: 5200169 - DNA, 25 bp, Homo sapien
gacagcagcaaacaacggcgtggct

SEQ ID NO: 5200170 - DNA, 25 bp, Homo sapien
agaatgttctaggagtaaagcagcc

SEQ ID NO: 5200171 - DNA, 25 bp, Homo sapien
agcagcaaacaacggcgtggctttc

SEQ ID NO: 5200172 - DNA, 25 bp, Homo sapien
tgcctctgtgaggggctggtggtca

SEQ ID NO: 5200173 - DNA, 25 bp, Homo sapien
cctctgtgaggggctggtggtcagc

SEQ ID NO: 5200174 - DNA, 25 bp, Homo sapien
taggttaatgtaagatgcctctgtg

SEQ ID NO: 5200175 - DNA, 25 bp, Homo sapien
aggtaggttaatgtaagatgcctct

SEQ ID NO: 5200176 - DNA, 25 bp, Homo sapien
ttggatggcaaggcccacatagtgc

SEQ ID NO: 5200177 - DNA, 25 bp, Homo sapien
gttgcattggatggcaaggcccaca

SEQ ID NO: 5200178 - DNA, 25 bp, Homo sapien
ttgttgcattggatggcaaggccca

SEQ ID NO: 5200179 - DNA, 25 bp, Homo sapien
tgttgttgcattggatggcaaggcc

SEQ ID NO: 5200180 - DNA, 25 bp, Homo sapien
tgccaggcatgtacaagactttcca

SEQ ID NO: 5200181 - DNA, 25 bp, Homo sapien
gccaggcatgtacaagactttccag

SEQ ID NO: 5200182 - DNA, 25 bp, Homo sapien
ccaggcatgtacaagactttccagg

SEQ ID NO: 5200183 - DNA, 25 bp, Homo sapien
caggcatgtacaagactttccaggc

SEQ ID NO: 5200184 - DNA, 25 bp, Homo sapien
tgccaggatcccagtggtgagccct

SEQ ID NO: 5200185 - DNA, 25 bp, Homo sapien
cacaggctgggttcctccatgtgtc

SEQ ID NO: 5200186 - DNA, 25 bp, Homo sapien
ggaccgggaacctggagttctcagc

SEQ ID NO: 5200187 - DNA, 25 bp, Homo sapien
gaagcttccttctgcgcgtgcacat

SEQ ID NO: 5200188 - DNA, 25 bp, Homo sapien
tctgggatttaactcagcagctaca

SEQ ID NO: 5200189 - DNA, 25 bp, Homo sapien
tgagccgccaacagccaggatcctg

SEQ ID NO: 5200190 - DNA, 25 bp, Homo sapien
gatttaactcagcagctacaagcca

SEQ ID NO: 5200191 - DNA, 25 bp, Homo sapien
acagccaggatcctgtgccaagcca

SEQ ID NO: 5200192 - DNA, 25 bp, Homo sapien
cttcatcccgttcacttgtgtttcc

SEQ ID NO: 5200193 - DNA, 25 bp, Homo sapien
tacaagatcgcatcattcttcatcc

SEQ ID NO: 5200194 - DNA, 25 bp, Homo sapien
gggccgagggccgatgggagaggag

SEQ ID NO: 5200195 - DNA, 25 bp, Homo sapien
tcacttgtgtttccacaggtactgc

SEQ ID NO: 5200196 - DNA, 25 bp, Homo sapien
ggagatgctcgagggaaagggatcc

SEQ ID NO: 5200197 - DNA, 25 bp, Homo sapien
ggttctcacttgttgatccactcag

SEQ ID NO: 5200198 - DNA, 25 bp, Homo sapien
tttctgggagatgctcgagggaaag

SEQ ID NO: 5200199 - DNA, 25 bp, Homo sapien
tcacttgttgatccactcaggcact

SEQ ID NO: 5200200 - DNA, 25 bp, Homo sapien
ggcagggctagatgtgtagcttcca

SEQ ID NO: 5200201 - DNA, 25 bp, Homo sapien
tactggattgtgttgctttcacagg

SEQ ID NO: 5200202 - DNA, 25 bp, Homo sapien
gaaattggagtgaacgccatcagca

SEQ ID NO: 5200203 - DNA, 25 bp, Homo sapien
ggagaaattttgacacagccctctt

SEQ ID NO: 5200204 - DNA, 25 bp, Homo sapien
ctggctgacgtacagaggagaggag

SEQ ID NO: 5200205 - DNA, 25 bp, Homo sapien
tgaggtgctggctgacgtacagagg

SEQ ID NO: 5200206 - DNA, 25 bp, Homo sapien
caagtctttccagccgtgagagtcc

SEQ ID NO: 5200207 - DNA, 25 bp, Homo sapien
agtcccctgtgaggacgaagctgag

SEQ ID NO: 5200208 - DNA, 25 bp, Homo sapien
tccatggagctcatcagtgaatcag

SEQ ID NO: 5200209 - DNA, 25 bp, Homo sapien
cctgtgtttgaagctccatggagct

SEQ ID NO: 5200210 - DNA, 25 bp, Homo sapien
cataaggtgcccgtgtatgtggcct

SEQ ID NO: 5200211 - DNA, 25 bp, Homo sapien
cagtgaatcagtgcgttctgtttcc

SEQ ID NO: 5200212 - DNA, 25 bp, Homo sapien
agtataatttagaagctctccagtg

SEQ ID NO: 5200213 - DNA, 25 bp, Homo sapien
taaattgcatggacttcttaaagaa

SEQ ID NO: 5200214 - DNA, 25 bp, Homo sapien
aactaggctacaggtatagctgacc

SEQ ID NO: 5200215 - DNA, 25 bp, Homo sapien
tagctgaccaagtttgctgtgaaaa

SEQ ID NO: 5200216 - DNA, 25 bp, Homo sapien
tatgcagggcattctgattagcttc

SEQ ID NO: 5200217 - DNA, 25 bp, Homo sapien
ttcttttcctatgcagggcattctg

SEQ ID NO: 5200218 - DNA, 25 bp, Homo sapien
ttagcttcaaacacttccactctgc

SEQ ID NO: 5200219 - DNA, 25 bp, Homo sapien
tctgattagcttcaaacacttccac

SEQ ID NO: 5200220 - DNA, 25 bp, Homo sapien
gtggctaatagagcgtggacgtcca

SEQ ID NO: 5200221 - DNA, 25 bp, Homo sapien
tagtaattgtacctgaattctttgt

SEQ ID NO: 5200222 - DNA, 25 bp, Homo sapien
aattctttgtggctaatagagcgtg

SEQ ID NO: 5200223 - DNA, 25 bp, Homo sapien
caaacagcagttatcttagtaattg

SEQ ID NO: 5200224 - DNA, 25 bp, Homo sapien
ttttgacaaacacgtgtggcacagc

SEQ ID NO: 5200225 - DNA, 25 bp, Homo sapien
caaacagcctgaaagcaagttatca

SEQ ID NO: 5200226 - DNA, 25 bp, Homo sapien
taaatgcaaaccaccattatggtga

SEQ ID NO: 5200227 - DNA, 25 bp, Homo sapien
tactctaagccatttctgatggaag

SEQ ID NO: 5200228 - DNA, 25 bp, Homo sapien
tactggagccagaaagattgccatt

SEQ ID NO: 5200229 - DNA, 25 bp, Homo sapien
tgtgtgatagggaatggcatctact

SEQ ID NO: 5200230 - DNA, 25 bp, Homo sapien
tcagccactctgctacagctttaaa

SEQ ID NO: 5200231 - DNA, 25 bp, Homo sapien
tccctgctcgtaaaaaatgattgag

SEQ ID NO: 5200232 - DNA, 25 bp, Homo sapien
gaaacctgttcgcttctatcatgat

SEQ ID NO: 5200233 - DNA, 25 bp, Homo sapien
tgcaaagtaaaatcctgggttatag

SEQ ID NO: 5200234 - DNA, 25 bp, Homo sapien
ttctcaatcatgtgtaggatataat

SEQ ID NO: 5200235 - DNA, 25 bp, Homo sapien
ttggaatgacaaagaggtaagttgt

SEQ ID NO: 5200236 - DNA, 25 bp, Homo sapien
cagctggttggaggtcaccagtgca

SEQ ID NO: 5200237 - DNA, 25 bp, Homo sapien
gaggtcaccagtgcagggctcttgc

SEQ ID NO: 5200238 - DNA, 25 bp, Homo sapien
gccattgtgtaatggaggctttggc

SEQ ID NO: 5200239 - DNA, 25 bp, Homo sapien
tgttctgaaagtgaatgcagctggt

SEQ ID NO: 5200240 - DNA, 25 bp, Homo sapien
gcgatactcactttattggaactaa

SEQ ID NO: 5200241 - DNA, 25 bp, Homo sapien
ttatagcgatactcactttattgca

SEQ ID NO: 5200242 - DNA, 25 bp, Homo sapien
cataactcatgcttactaggaaaca

SEQ ID NO: 5200243 - DNA, 25 bp, Homo sapien
tgtagacatgctattgtacgcttaa

SEQ ID NO: 5200244 - DNA, 25 bp, Homo sapien
gatagcctgtaactaagtgtagtgg

SEQ ID NO: 5200245 - DNA, 25 bp, Homo sapien
aacaataattctgctgattagcccc

SEQ ID NO: 5200246 - DNA, 25 bp, Homo sapien
aatgaattggttgatgatagcctgt

SEQ ID NO: 5200247 - DNA, 25 bp, Homo sapien
tgaactgtttatgctgttgagtacc

SEQ ID NO: 5200248 - DNA, 25 bp, Homo sapien
tgctgtacctctagctaagttttgt

SEQ ID NO: 5200249 - DNA, 25 bp, Homo sapien
ctttgctgtacctctagctaagttt

SEQ ID NO: 5200250 - DNA, 25 bp, Homo sapien
ttgctgtacctctagctaagttttg

SEQ ID NO: 5200251 - DNA, 25 bp, Homo sapien
cctttgctgtacctctagctaagtt

SEQ ID NO: 5200252 - DNA, 25 bp, Homo sapien
cttcgtagcctggtatgggacaagg

SEQ ID NO: 5200253 - DNA, 25 bp, Homo sapien
gggacaaggacttaaggtccatgag

SEQ ID NO: 5200254 - DNA, 25 bp, Homo sapien
tattgctgttattccataggaccac

SEQ ID NO: 5200255 - DNA, 25 bp, Homo sapien
gtccatgagtattgctgttattcca

SEQ ID NO: 5200256 - DNA, 25 bp, Homo sapien
ctttcatagtgatgaccttcttgtc

SEQ ID NO: 5200257 - DNA, 25 bp, Homo sapien
cttcttgtccctgctggtctatgtt

SEQ ID NO: 5200258 - DNA, 25 bp, Homo sapien
ccaaaactttcatagtgatgacctt

SEQ ID NO: 5200259 - DNA, 25 bp, Homo sapien
cggggccccgctccctgtgccgctg

SEQ ID NO: 5200260 - DNA, 25 bp, Homo sapien
ctgttgatgaatccatatccttttc

SEQ ID NO: 5200261 - DNA, 25 bp, Homo sapien
attcctgttgatgaatccatatcct

SEQ ID NO: 5200262 - DNA, 25 bp, Homo sapien
ggtgtcattcctgttgatgaatcca

SEQ ID NO: 5200263 - DNA, 25 bp, Homo sapien
tcctgttgatgaatccatatccttt

SEQ ID NO: 5200264 - DNA, 25 bp, Homo sapien
aggtagataggagcttataaaggta

SEQ ID NO: 5200265 - DNA, 25 bp, Homo sapien
gccttgaactggaactccaccacgg

SEQ ID NO: 5200266 - DNA, 25 bp, Homo sapien
tagataggagcttataaaggtacag

SEQ ID NO: 5200267 - DNA, 25 bp, Homo sapien
tggaactccaccacggcctgcagta

SEQ ID NO: 5200268 - DNA, 25 bp, Homo sapien
ttacggtaattctgctggcagttgc

SEQ ID NO: 5200269 - DNA, 25 bp, Homo sapien
cggtaattctgctggcagttgcctg

SEQ ID NO: 5200270 - DNA, 25 bp, Homo sapien
tattacggtaattctgctggcagtt

SEQ ID NO: 5200271 - DNA, 25 bp, Homo sapien
tacggtaattctgctggcagttgcc

SEQ ID NO: 5200272 - DNA, 25 bp, Homo sapien
gggagcactcttttcgccactctca

SEQ ID NO: 5200273 - DNA, 25 bp, Homo sapien
cttttccttccgtaggccctgcgtg

SEQ ID NO: 5200274 - DNA, 25 bp, Homo sapien
ttccgtaggccctgcgtgttgggcc

SEQ ID NO: 5200275 - DNA, 25 bp, Homo sapien
tccttgcccacatataggaaggtgg

SEQ ID NO: 5200276 - DNA, 25 bp, Homo sapien
cccactggttgtgggtaccctccag

SEQ ID NO: 5200277 - DNA, 25 bp, Homo sapien
tctccccgcatatagggtctccgca

SEQ ID NO: 5200278 - DNA, 25 bp, Homo sapien
cagcacttctccccgcatatagggt

SEQ ID NO: 5200279 - DNA, 25 bp, Homo sapien
ttgtgggtaccctccagcacttctc

SEQ ID NO: 5200280 - DNA, 25 bp, Homo sapien
ccctgcagaatcatggtctgtatcc

SEQ ID NO: 5200281 - DNA, 25 bp, Homo sapien
cctgcagaatcatggtctgtatccc

SEQ ID NO: 5200282 - DNA, 25 bp, Homo sapien
ggagatctagttccaaactgtgaaa

SEQ ID NO: 5200283 - DNA, 25 bp, Homo sapien
ctgtgaaaagaaccattgggaatgg

SEQ ID NO: 5200284 - DNA, 25 bp, Homo sapien
accctcaaagggaagttgctatgga

SEQ ID NO: 5200285 - DNA, 25 bp, Homo sapien
taataggctgccagatgaattgctt

SEQ ID NO: 5200286 - DNA, 25 bp, Homo sapien
ctttattggactgataatgatatcc

SEQ ID NO: 5200287 - DNA, 25 bp, Homo sapien
taatgatatcccttgatagttggta

SEQ ID NO: 5200288 - DNA, 25 bp, Homo sapien
gactgataatgatatcccttgatag

SEQ ID NO: 5200289 - DNA, 25 bp, Homo sapien
gatatcccttgatagttggtaaaag

SEQ ID NO: 5200290 - DNA, 25 bp, Homo sapien
ctgactgtcctggatttgactgact

SEQ ID NO: 5200291 - DNA, 25 bp, Homo sapien
gactgtcctggatttgactgactca

SEQ ID NO: 5200292 - DNA, 25 bp, Homo sapien
ctgtcctggatttgactgactcagc

SEQ ID NO: 5200293 - DNA, 25 bp, Homo sapien
tcctggatttgactgactcagctct

SEQ ID NO: 5200294 - DNA, 25 bp, Homo sapien
catggtgtccccttgaccggtccat

SEQ ID NO: 5200295 - DNA, 25 bp, Homo sapien
tggtgtccccttgaccggtccatct

SEQ ID NO: 5200296 - DNA, 25 bp, Homo sapien
ggccatggtgtccccttgaccggtc

SEQ ID NO: 5200297 - DNA, 25 bp, Homo sapien
ccatggtgtccccttgaccggtcca

SEQ ID NO: 5200298 - DNA, 25 bp, Homo sapien
tgctgagggaaaaggttgtagaaaa

SEQ ID NO: 5200299 - DNA, 25 bp, Homo sapien
ctgagggaaaaggttgtagaaaatg

SEQ ID NO: 5200300 - DNA, 25 bp, Homo sapien
tgtcttgtttagctgatccttctgg

SEQ ID NO: 5200301 - DNA, 25 bp, Homo sapien
actgccccaggagagtaattgtctt

SEQ ID NO: 5200302 - DNA, 25 bp, Homo sapien
ttggtgtccctgcaaattgccttct

SEQ ID NO: 5200303 - DNA, 25 bp, Homo sapien
cagcgtctgtgaaagccatttacca

SEQ ID NO: 5200304 - DNA, 25 bp, Homo sapien
gatttggaacctcactgaaaattgg

SEQ ID NO: 5200305 - DNA, 25 bp, Homo sapien
ggaagatttggaacctcactgaaaa

SEQ ID NO: 5200306 - DNA, 25 bp, Homo sapien
cctcactgaaaattggtattgttgg

SEQ ID NO: 5200307 - DNA, 25 bp, Homo sapien
ggaacctcactgaaaattggtattg

SEQ ID NO: 5200308 - DNA, 25 bp, Homo sapien
tggcccagtccggagaggaggatgg

SEQ ID NO: 5200309 - DNA, 25 bp, Homo sapien
tctcccgacgccaggacgcccggtg

SEQ ID NO: 5200310 - DNA, 25 bp, Homo sapien
tctgtaggccagaggacccgacagg

SEQ ID NO: 5200311 - DNA, 25 bp, Homo sapien
cccgacaggcgctgttcctgtatct

SEQ ID NO: 5200312 - DNA, 25 bp, Homo sapien
cacccggcaagctttttaagtaatg

SEQ ID NO: 5200313 - DNA, 25 bp, Homo sapien
gccacaaaatttgggctagttagcc

SEQ ID NO: 5200314 - DNA, 25 bp, Homo sapien
cactagagcactgttacagggctaa

SEQ ID NO: 5200315 - DNA, 25 bp, Homo sapien
ggtgacaagggtactagaccaagaa

SEQ ID NO: 5200316 - DNA, 25 bp, Homo sapien
aaatgaggaagttgacagaataagg

SEQ ID NO: 5200317 - DNA, 25 bp, Homo sapien
atgaggaagttgacagaataaggtc

SEQ ID NO: 5200318 - DNA, 25 bp, Homo sapien
ctgagtctataaatgaggaagttga

SEQ ID NO: 5200319 - DNA, 25 bp, Homo sapien
ataaatgaggaagttgacagaataa

SEQ ID NO: 5200320 - DNA, 25 bp, Homo sapien
caatattagctctgtggtgatttca

SEQ ID NO: 5200321 - DNA, 25 bp, Homo sapien
tattagctctgtggtgatttcaaaa

SEQ ID NO: 5200322 - DNA, 25 bp, Homo sapien
cataaggaaacaatattagctctgt

SEQ ID NO: 5200323 - DNA, 25 bp, Homo sapien
gaaacaatattagctctgtggtgat

SEQ ID NO: 5200324 - DNA, 25 bp, Homo sapien
aagaaaggaatgtagccctgaattg

SEQ ID NO: 5200325 - DNA, 25 bp, Homo sapien
aagttgttctgctaatttgatggcc

SEQ ID NO: 5200326 - DNA, 25 bp, Homo sapien
agaagttgttctgctaatttgatgg

SEQ ID NO: 5200327 - DNA, 25 bp, Homo sapien
gttgttctgctaatttgatggcctt

SEQ ID NO: 5200328 - DNA, 25 bp, Homo sapien
tgttctgctaatttgatggccttgt

SEQ ID NO: 5200329 - DNA, 25 bp, Homo sapien
ggagcccagatggtagccctagaat

SEQ ID NO: 5200330 - DNA, 25 bp, Homo sapien
gcccagatggtagccctagaattca

SEQ ID NO: 5200331 - DNA, 25 bp, Homo sapien
gagcccagatggtagccctagaatt

SEQ ID NO: 5200332 - DNA, 25 bp, Homo sapien
cagatggtagccctagaattcagct

SEQ ID NO: 5200333 - DNA, 25 bp, Homo sapien
tgagtatatattgctccctgcacgt

SEQ ID NO: 5200334 - DNA, 25 bp, Homo sapien
gctccctgcacgttctctatttctg

SEQ ID NO: 5200335 - DNA, 25 bp, Homo sapien
tccaggaggcatttgattccagaag

SEQ ID NO: 5200336 - DNA, 25 bp, Homo sapien
cagaagatccatttgaagattggtg

SEQ ID NO: 5200337 - DNA, 25 bp, Homo sapien
tctgctccaagtagacgttttgctt

SEQ ID NO: 5200338 - DNA, 25 bp, Homo sapien
cataaatgagctcaggtctgcctcc

SEQ ID NO: 5200339 - DNA, 25 bp, Homo sapien
ttgtaccatgataggaccttctgct

SEQ ID NO: 5200340 - DNA, 25 bp, Homo sapien
tagcctttttcattagatactttag

SEQ ID NO: 5200341 - DNA, 25 bp, Homo sapien
gacaggaaagccacaggttacaaca

SEQ ID NO: 5200342 - DNA, 25 bp, Homo sapien
tgacaggaaagccacaggttacaac

SEQ ID NO: 5200343 - DNA, 25 bp, Homo sapien
gggcccaagaagctgatcctcaagt

SEQ ID NO: 5200344 - DNA, 25 bp, Homo sapien
aagggttagctgagaatctttcggg

SEQ ID NO: 5200345 - DNA, 25 bp, Homo sapien
tgaggcgccaacacttctctttcgg

SEQ ID NO: 5200346 - DNA, 25 bp, Homo sapien
ctttcggcaactctgttgtcgcgag

SEQ ID NO: 5200347 - DNA, 25 bp, Homo sapien
aagaatcccacgattgggcgcgcag

SEQ ID NO: 5200348 - DNA, 25 bp, Homo sapien
taaatgacttcgtggaggtgacacc

SEQ ID NO: 5200349 - DNA, 25 bp, Homo sapien
acttccgagcggcagaatctggcgc

SEQ ID NO: 5200350 - DNA, 25 bp, Homo sapien
cgggctagaacgtcagggattcgca

SEQ ID NO: 5200351 - DNA, 25 bp, Homo sapien
caggtaccccaaagccagtttcgag

SEQ ID NO: 5200352 - DNA, 25 bp, Homo sapien
tgcataattacagagctcgcggaat

SEQ ID NO: 5200353 - DNA, 25 bp, Homo sapien
taggttccgctacatctgggatgca

SEQ ID NO: 5200354 - DNA, 25 bp, Homo sapien
aagaccttgacgaggctgggcgtcc

SEQ ID NO: 5200355 - DNA, 25 bp, Homo sapien
gcatcagcaagcgagacggccttga

SEQ ID NO: 5200356 - DNA, 25 bp, Homo sapien
aggcatcagcaagcgagacggcctt

SEQ ID NO: 5200357 - DNA, 25 bp, Homo sapien
ccaggcatcagcaagcgagacggcc

SEQ ID NO: 5200358 - DNA, 25 bp, Homo sapien
atcagcaagcgagacggccttgagg

SEQ ID NO: 5200359 - DNA, 25 bp, Homo sapien
tatacataggggtagaggaaggctc

SEQ ID NO: 5200360 - DNA, 25 bp, Homo sapien
gaaggctccgtgcactttagacacg

SEQ ID NO: 5200361 - DNA, 25 bp, Homo sapien
ctgaagggtatatacataggggtag

SEQ ID NO: 5200362 - DNA, 25 bp, Homo sapien
gtgcactttagacacgtgcgcctcc

SEQ ID NO: 5200363 - DNA, 25 bp, Homo sapien
gtgacatatccggaaacaggccagc

SEQ ID NO: 5200364 - DNA, 25 bp, Homo sapien
tgtagagcccaactctgacaggctg

SEQ ID NO: 5200365 - DNA, 25 bp, Homo sapien
cttgatttcggccactgtagagccc

SEQ ID NO: 5200366 - DNA, 25 bp, Homo sapien
agagtccagatggataccctccgcc

SEQ ID NO: 5200367 - DNA, 25 bp, Homo sapien
tcttctcacgacaaggaaattcctg

SEQ ID NO: 5200368 - DNA, 25 bp, Homo sapien
tccatcttctcacgacaaggaaatt

SEQ ID NO: 5200369 - DNA, 25 bp, Homo sapien
tcgtccatcttctcacgacaaggaa

SEQ ID NO: 5200370 - DNA, 25 bp, Homo sapien
cacgacaaggaaattcctgccagtt

SEQ ID NO: 5200371 - DNA, 25 bp, Homo sapien
gaacggaactccaagctagggctgg

SEQ ID NO: 5200372 - DNA, 25 bp, Homo sapien
tcagcccttgaagtttccagcgaga

SEQ ID NO: 5200373 - DNA, 25 bp, Homo sapien
cagagctggagcgatcaaagcaggc

SEQ ID NO: 5200374 - DNA, 25 bp, Homo sapien
gcgtggcctcctaattacgtcaaga

SEQ ID NO: 5200375 - DNA, 25 bp, Homo sapien
ggcggaaggtcacagcgacgccact

SEQ ID NO: 5200376 - DNA, 25 bp, Homo sapien
gggcggcggaaggtcacagcgacgc

SEQ ID NO: 5200377 - DNA, 25 bp, Homo sapien
acaccacccggagcgggcccagctg

SEQ ID NO: 5200378 - DNA, 25 bp, Homo sapien
gacgccactccgctagccaaggaca

SEQ ID NO: 5200379 - DNA, 25 bp, Homo sapien
cacacgctgttctggagaagaaccg

SEQ ID NO: 5200380 - DNA, 25 bp, Homo sapien
cacccgagcgatttatctagaaaac

SEQ ID NO: 5200381 - DNA, 25 bp, Homo sapien
tcgtcatagcttagaaccacccgag

SEQ ID NO: 5200382 - DNA, 25 bp, Homo sapien
cgggcccagcctctagttcgtcata

SEQ ID NO: 5200383 - DNA, 25 bp, Homo sapien
taatggaaccacctttggagacact

SEQ ID NO: 5200384 - DNA, 25 bp, Homo sapien
gcttggagaaggcactacaaccaca

SEQ ID NO: 5200385 - DNA, 25 bp, Homo sapien
cctgtagaactgagaccggagcgac

SEQ ID NO: 5200386 - DNA, 25 bp, Homo sapien
tactgcatcactcggaaactatggg

SEQ ID NO: 5200387 - DNA, 25 bp, Homo sapien
gacaatgtaacaaaggcctggtttg

SEQ ID NO: 5200388 - DNA, 25 bp, Homo sapien
caggagaatagctttcagcaaacgc

SEQ ID NO: 5200389 - DNA, 25 bp, Homo sapien
ctattatagcgcctgaatgctgcca

SEQ ID NO: 5200390 - DNA, 25 bp, Homo sapien
gcctggtttggagtgaatcatcacc

SEQ ID NO: 5200391 - DNA, 25 bp, Homo sapien
cagtgggatgtgctgattatctgcc

SEQ ID NO: 5200392 - DNA, 25 bp, Homo sapien
tcaaatatgactaaacagtgggatg

SEQ ID NO: 5200393 - DNA, 25 bp, Homo sapien
tagataccaggttaacccagttgtc

SEQ ID NO: 5200394 - DNA, 25 bp, Homo sapien
gcaccctttgtacggtttcgccagc

SEQ ID NO: 5200395 - DNA, 25 bp, Homo sapien
ccgctttgaagtgccgctggctgcg

SEQ ID NO: 5200396 - DNA, 25 bp, Homo sapien
gcgcctctcgcccaatgagggcgca

SEQ ID NO: 5200397 - DNA, 25 bp, Homo sapien
cagcctaagtgcgaggagcacccgc

SEQ ID NO: 5200398 - DNA, 25 bp, Homo sapien
cgcagccaatcagacgctccgaggg

SEQ ID NO: 5200399 - DNA, 25 bp, Homo sapien
gctgccgtcgtgtgcaccttggaaa

SEQ ID NO: 5200400 - DNA, 25 bp, Homo sapien
cttgtaccaggactcgtacgggtgc

SEQ ID NO: 5200401 - DNA, 25 bp, Homo sapien
gccagcgtcgaatggaagcccgact

SEQ ID NO: 5200402 - DNA, 25 bp, Homo sapien
accttggaaatgaaggccgactggc

SEQ ID NO: 5200403 - DNA, 25 bp, Homo sapien
ccagcggggttctgcacttccagcc

SEQ ID NO: 5200404 - DNA, 25 bp, Homo sapien
ctgtgcacgtcccaccacgacgacg

SEQ ID NO: 5200405 - DNA, 25 bp, Homo sapien
acgacgacgccgcgccgttggtcac

SEQ ID NO: 5200406 - DNA, 25 bp, Homo sapien
gcccgggctgctgtgcacgtcccac

SEQ ID NO: 5200407 - DNA, 25 bp, Homo sapien
cggagtgcgtgagcgagctgaagtc

SEQ ID NO: 5200408 - DNA, 25 bp, Homo sapien
ctgaagtcggggttgtaggtgccca

SEQ ID NO: 5200409 - DNA, 25 bp, Homo sapien
aggcccgtggagctgaaggcggagt

SEQ ID NO: 5200410 - DNA, 25 bp, Homo sapien
tgaaggcggagtgcgtgagcgagct

SEQ ID NO: 5200411 - DNA, 25 bp, Homo sapien
ggttgctggcgtccgtgtcactgtc

SEQ ID NO: 5200412 - DNA, 25 bp, Homo sapien
caggttgctggcgtccgtgtcactg

SEQ ID NO: 5200413 - DNA, 25 bp, Homo sapien
ccgcccccgttgtgcgtcttaatgt

SEQ ID NO: 5200414 - DNA, 25 bp, Homo sapien
cgccgcccccgttgtgcgtcttaat

SEQ ID NO: 5200415 - DNA, 25 bp, Homo sapien
ctaagagtcgttggggccagacgct

SEQ ID NO: 5200416 - DNA, 25 bp, Homo sapien
tccttgcctcccgcggaggccgccg

SEQ ID NO: 5200417 - DNA, 25 bp, Homo sapien
gtcgttggggccagacgctgcttcc

SEQ ID NO: 5200418 - DNA, 25 bp, Homo sapien
ttccttgcctcccgcggaggccgcc

SEQ ID NO: 5200419 - DNA, 25 bp, Homo sapien
cggcgcggggacctaggcatttcca

SEQ ID NO: 5200420 - DNA, 25 bp, Homo sapien
tttgcatagatcagccgtctttgaa

SEQ ID NO: 5200421 - DNA, 25 bp, Homo sapien
ctgcgagggccatttgacggcgcgg

SEQ ID NO: 5200422 - DNA, 25 bp, Homo sapien
catttccaattcactatttgcatag

SEQ ID NO: 5200423 - DNA, 25 bp, Homo sapien
ggacctgcacgaccgggccctttga

SEQ ID NO: 5200424 - DNA, 25 bp, Homo sapien
tgatctgcctttattatcaacgaga

SEQ ID NO: 5200425 - DNA, 25 bp, Homo sapien
caacgagaaacaaagctccctgggc

SEQ ID NO: 5200426 - DNA, 25 bp, Homo sapien
tattatcaacgagaaacaaagctcc

SEQ ID NO: 5200427 - DNA, 25 bp, Homo sapien
gcgcacacaggccttgatcactggc

SEQ ID NO: 5200428 - DNA, 25 bp, Homo sapien
agcgcacacaggccttgatcactgg

SEQ ID NO: 5200429 - DNA, 25 bp, Homo sapien
tccgcggactgctgtctcccggctg

SEQ ID NO: 5200430 - DNA, 25 bp, Homo sapien
agcctgggtgatggacgtccgctga

SEQ ID NO: 5200431 - DNA, 25 bp, Homo sapien
gcctgggtgatggacgtccgctgac

SEQ ID NO: 5200432 - DNA, 25 bp, Homo sapien
tctcccggctggacgctcggtccgg

SEQ ID NO: 5200433 - DNA, 25 bp, Homo sapien
gaatccaattcattccaagggcaga

SEQ ID NO: 5200434 - DNA, 25 bp, Homo sapien
cttttcgttcctctgttgcgctgga

SEQ ID NO: 5200435 - DNA, 25 bp, Homo sapien
aactggtgtcagaaaaggaaacgct

SEQ ID NO: 5200436 - DNA, 25 bp, Homo sapien
gggactcgaaatcgcactgccctta

SEQ ID NO: 5200437 - DNA, 25 bp, Homo sapien
gagtccccggaaacgcactgcttct

SEQ ID NO: 5200438 - DNA, 25 bp, Homo sapien
ccgcaaaggtggctgcgagtccccg

SEQ ID NO: 5200439 - DNA, 25 bp, Homo sapien
gccgggctctcgcggctgcgggtga

SEQ ID NO: 5200440 - DNA, 25 bp, Homo sapien
tctccccggcgcgagttcagggagc

SEQ ID NO: 5200441 - DNA, 25 bp, Homo sapien
tttgcgccctgctatccaagtagta

SEQ ID NO: 5200442 - DNA, 25 bp, Homo sapien
tcaaattttctagcaacctactttg

SEQ ID NO: 5200443 - DNA, 25 bp, Homo sapien
gaaatggacaaggactttgcgccct

SEQ ID NO: 5200444 - DNA, 25 bp, Homo sapien
tatgacattcaggtaaggcagcttt

SEQ ID NO: 5200445 - DNA, 25 bp, Homo sapien
gctgtattaacagttctagaagtca

SEQ ID NO: 5200446 - DNA, 25 bp, Homo sapien
gtccttctcaaatctaatcattctg

SEQ ID NO: 5200447 - DNA, 25 bp, Homo sapien
cagaagtttgacatgggctaaagtc

SEQ ID NO: 5200448 - DNA, 25 bp, Homo sapien
aagtcaagatgtcaatagaattgtg

SEQ ID NO: 5200449 - DNA, 25 bp, Homo sapien
gaaacgggcacagcgaaatcctggt

SEQ ID NO: 5200450 - DNA, 25 bp, Homo sapien
gactgtatgtgacaattacctggga

SEQ ID NO: 5200451 - DNA, 25 bp, Homo sapien
gaagtcctggtagttacaagcaaag

SEQ ID NO: 5200452 - DNA, 25 bp, Homo sapien
tctagcagtcaccataaccgggaaa

SEQ ID NO: 5200453 - DNA, 25 bp, Homo sapien
gggaatggcaaagtcaactgttgat

SEQ ID NO: 5200454 - DNA, 25 bp, Homo sapien
tgtcacatgatattcttcagaaggc

SEQ ID NO: 5200455 - DNA, 25 bp, Homo sapien
ggcttttcaaacattgactgtcaca

SEQ ID NO: 5200456 - DNA, 25 bp, Homo sapien
tcatgatgagaaataactagccgac

SEQ ID NO: 5200457 - DNA, 25 bp, Homo sapien
agtggaggcatcagttgccggaagc

SEQ ID NO: 5200458 - DNA, 25 bp, Homo sapien
gaggcatcagttgccggaagctgtc

SEQ ID NO: 5200459 - DNA, 25 bp, Homo sapien
gaagtgacaggtggacggagggagg

SEQ ID NO: 5200460 - DNA, 25 bp, Homo sapien
tggaggcatcagttgccggaagctg

SEQ ID NO: 5200461 - DNA, 25 bp, Homo sapien
tggattctcgcaagcatactacggt

SEQ ID NO: 5200462 - DNA, 25 bp, Homo sapien
tcaagcacctttggtcgaagggccg

SEQ ID NO: 5200463 - DNA, 25 bp, Homo sapien
ttttgcagctcgagtcagagtccac

SEQ ID NO: 5200464 - DNA, 25 bp, Homo sapien
taatgggctcgagcttcaagcacct

SEQ ID NO: 5200465 - DNA, 25 bp, Homo sapien
attgaacgtctttcggcgccagtac

SEQ ID NO: 5200466 - DNA, 25 bp, Homo sapien
taacgcgtattcgtcattcaataag

SEQ ID NO: 5200467 - DNA, 25 bp, Homo sapien
agtatttattgaacgtctttcggcg

SEQ ID NO: 5200468 - DNA, 25 bp, Homo sapien
tcctaacgcgtattcgtcattcaat

SEQ ID NO: 5200469 - DNA, 25 bp, Homo sapien
tagagaacttggttggtggatcacc

SEQ ID NO: 5200470 - DNA, 25 bp, Homo sapien
tggttagaattgcacctagcccact

SEQ ID NO: 5200471 - DNA, 25 bp, Homo sapien
gctgcaatagtaacctgagctgcct

SEQ ID NO: 5200472 - DNA, 25 bp, Homo sapien
tcccaagggccatcaagctgcaata

SEQ ID NO: 5200473 - DNA, 25 bp, Homo sapien
ctatcactatataactttggcagac

SEQ ID NO: 5200474 - DNA, 25 bp, Homo sapien
tacacaggcagatgctagcaactta

SEQ ID NO: 5200475 - DNA, 25 bp, Homo sapien
tctcctcagtgacgagaagtctgat

SEQ ID NO: 5200476 - DNA, 25 bp, Homo sapien
ttacctatgccttctgcctcatcag

SEQ ID NO: 5200477 - DNA, 25 bp, Homo sapien
aacttggaaaatcttagatcttcac

SEQ ID NO: 5200478 - DNA, 25 bp, Homo sapien
cttagatcttcacttataatagaac

SEQ ID NO: 5200479 - DNA, 25 bp, Homo sapien
cacttataatagaacacctaaaggt

SEQ ID NO: 5200480 - DNA, 25 bp, Homo sapien
tgtaacttggaaaatcttagatctt

SEQ ID NO: 5200481 - DNA, 25 bp, Homo sapien
gggtcttatttgagctgggaaataa

SEQ ID NO: 5200482 - DNA, 25 bp, Homo sapien
taatttataaatcgcaattatatac

SEQ ID NO: 5200483 - DNA, 25 bp, Homo sapien
tgaaacagactcattgattcagaca

SEQ ID NO: 5200484 - DNA, 25 bp, Homo sapien
tttgagctgggaaataatacacatt

SEQ ID NO: 5200485 - DNA, 25 bp, Homo sapien
catgagtgaccgtgcttggctgttc

SEQ ID NO: 5200486 - DNA, 25 bp, Homo sapien
tttgggaatccgtgtacctagctct

SEQ ID NO: 5200487 - DNA, 25 bp, Homo sapien
ggctagattccattacattcgtgta

SEQ ID NO: 5200488 - DNA, 25 bp, Homo sapien
gacttgggactcaatctggtactac

SEQ ID NO: 5200489 - DNA, 25 bp, Homo sapien
aaataaaccacctcttgtacttcat

SEQ ID NO: 5200490 - DNA, 25 bp, Homo sapien
taatcctgttatcgactgttgctgg

SEQ ID NO: 5200491 - DNA, 25 bp, Homo sapien
taatgccacgaaagtgtcacaggaa

SEQ ID NO: 5200492 - DNA, 25 bp, Homo sapien
cttaagacgttctcccaggttatca

SEQ ID NO: 5200493 - DNA, 25 bp, Homo sapien
gatgtgtcataaaactgtcattcct

SEQ ID NO: 5200494 - DNA, 25 bp, Homo sapien
taaatgttcattctcttccgctgcc

SEQ ID NO: 5200495 - DNA, 25 bp, Homo sapien
tattgatagtgttaacatagggcct

SEQ ID NO: 5200496 - DNA, 25 bp, Homo sapien
tcaagtagaacctaagccaattcag

SEQ ID NO: 5200497 - DNA, 25 bp, Homo sapien
tttcaggaacttgatcaatttctat

SEQ ID NO: 5200498 - DNA, 25 bp, Homo sapien
gctgggcgactcaggacaacagcat

SEQ ID NO: 5200499 - DNA, 25 bp, Homo sapien
caggaacttgatcaatttctatata

SEQ ID NO: 5200500 - DNA, 25 bp, Homo sapien
cacaaccacgctgggcgactcagga

SEQ ID NO: 5200501 - DNA, 25 bp, Homo sapien
gctgtatcagctctttcaaggccaa

SEQ ID NO: 5200502 - DNA, 25 bp, Homo sapien
taagtcaacaatgacattgagggct

SEQ ID NO: 5200503 - DNA, 25 bp, Homo sapien
tccaccctggccatatttttctagt

SEQ ID NO: 5200504 - DNA, 25 bp, Homo sapien
aaataccattctaccctctgtgcaa

SEQ ID NO: 5200505 - DNA, 25 bp, Homo sapien
gttgattagaaatattacgaactcc

SEQ ID NO: 5200506 - DNA, 25 bp, Homo sapien
tgattagaaatattacgaactccct

SEQ ID NO: 5200507 - DNA, 25 bp, Homo sapien
tatggaaagttgattagaaatatta

SEQ ID NO: 5200508 - DNA, 25 bp, Homo sapien
gaaagttgattagaaatattacgaa

SEQ ID NO: 5200509 - DNA, 25 bp, Homo sapien
tttagaagcttgtagccctcacagt

SEQ ID NO: 5200510 - DNA, 25 bp, Homo sapien
caacctttccgcttagcatagtttc

SEQ ID NO: 5200511 - DNA, 25 bp, Homo sapien
tgcagcaaaatcaaactccttttta

SEQ ID NO: 5200512 - DNA, 25 bp, Homo sapien
caagataggaatatgctgcagcaaa

SEQ ID NO: 5200513 - DNA, 25 bp, Homo sapien
tacgcccacggaatctcgctgattg

SEQ ID NO: 5200514 - DNA, 25 bp, Homo sapien
cgcccacggaatctcgctgattgct

SEQ ID NO: 5200515 - DNA, 25 bp, Homo sapien
cctacgcccacggaatctcgctgat

SEQ ID NO: 5200516 - DNA, 25 bp, Homo sapien
aaggcggcagcgaggctgggggagg

SEQ ID NO: 5200517 - DNA, 25 bp, Homo sapien
ggcgcaccacgagactatatcccac

SEQ ID NO: 5200518 - DNA, 25 bp, Homo sapien
cggcgcaccacgagactatatccca

SEQ ID NO: 5200519 - DNA, 25 bp, Homo sapien
cccgaatattgcgcttttcagaccg

SEQ ID NO: 5200520 - DNA, 25 bp, Homo sapien
ttgcgcttttcagaccggcttaaaa

SEQ ID NO: 5200521 - DNA, 25 bp, Homo sapien
taggtttattctggaggagccaaga

SEQ ID NO: 5200522 - DNA, 25 bp, Homo sapien
gccagtgggagcgcgcaccgtgcgc

SEQ ID NO: 5200523 - DNA, 25 bp, Homo sapien
aaataggtttattctggaggagcca

SEQ ID NO: 5200524 - DNA, 25 bp, Homo sapien
ctcaaaaaataggtttattctggag

SEQ ID NO: 5200525 - DNA, 25 bp, Homo sapien
acaagaaactgtattgatccacatc

SEQ ID NO: 5200526 - DNA, 25 bp, Homo sapien
caagaaactgtattgatccacatcc

SEQ ID NO: 5200527 - DNA, 25 bp, Homo sapien
aagaaactgtattgatccacatcct

SEQ ID NO: 5200528 - DNA, 25 bp, Homo sapien
tcaatcaccaacaccttttgggtga

SEQ ID NO: 5200529 - DNA, 25 bp, Homo sapien
caatcaccaacaccttttgggtgaa

SEQ ID NO: 5200530 - DNA, 25 bp, Homo sapien
aatcaccaacaccttttgggtgaag

SEQ ID NO: 5200531 - DNA, 25 bp, Homo sapien
atcaccaacaccttttgggtgaagt

SEQ ID NO: 5200532 - DNA, 25 bp, Homo sapien
gatagtttagataacctatttatta

SEQ ID NO: 5200533 - DNA, 25 bp, Homo sapien
tatttaaatagctgtattagcacca

SEQ ID NO: 5200534 - DNA, 25 bp, Homo sapien
aatccttagtataacatgctttagc

SEQ ID NO: 5200535 - DNA, 25 bp, Homo sapien
ttctataaatattctgtcaaacgtt

SEQ ID NO: 5200536 - DNA, 25 bp, Homo sapien
ttctcttgatttactacagtgggcc

SEQ ID NO: 5200537 - DNA, 25 bp, Homo sapien
taccaattaacgcaagcaggaccca

SEQ ID NO: 5200538 - DNA, 25 bp, Homo sapien
gcaggacccatacagaacttagctc

SEQ ID NO: 5200539 - DNA, 25 bp, Homo sapien
gaagcagatgccacaacatgggatc

SEQ ID NO: 5200540 - DNA, 25 bp, Homo sapien
taatgccacttggtttatctcgaag

SEQ ID NO: 5200541 - DNA, 25 bp, Homo sapien
aaaatagaaaccatgcttgcagtgg

SEQ ID NO: 5200542 - DNA, 25 bp, Homo sapien
gtccctgtaaagaagtgaatgcaag

SEQ ID NO: 5200543 - DNA, 25 bp, Homo sapien
caggaattctccctccatattaatg

SEQ ID NO: 5200544 - DNA, 25 bp, Homo sapien
ttaactagatcttcaagttcaaatg

SEQ ID NO: 5200545 - DNA, 25 bp, Homo sapien
aactggtatccaatagttgtgaaat

SEQ ID NO: 5200546 - DNA, 25 bp, Homo sapien
tcaagttcaaatgttggtgaactgg

SEQ ID NO: 5200547 - DNA, 25 bp, Homo sapien
ccaatagttgtgaaatatgtggcac

SEQ ID NO: 5200548 - DNA, 25 bp, Homo sapien
catcaagatgcttgttttgaaggat

SEQ ID NO: 5200549 - DNA, 25 bp, Homo sapien
gaaggattgattccatctctctgaa

SEQ ID NO: 5200550 - DNA, 25 bp, Homo sapien
gtttcctcatgttgtccaacattat

SEQ ID NO: 5200551 - DNA, 25 bp, Homo sapien
ctaagaactaactttgactgataaa

SEQ ID NO: 5200552 - DNA, 25 bp, Homo sapien
tcactggttagccaagtcttgacaa

SEQ ID NO: 5200553 - DNA, 25 bp, Homo sapien
gactttgaagattactgaccactga

SEQ ID NO: 5200554 - DNA, 25 bp, Homo sapien
aaagcctattaaggagaatgaccct

SEQ ID NO: 5200555 - DNA, 25 bp, Homo sapien
tttaccaaggtgatagattctgact

SEQ ID NO: 5200556 - DNA, 25 bp, Homo sapien
tgaaaacatgctgcccctagagagg

SEQ ID NO: 5200557 - DNA, 25 bp, Homo sapien
caagagcagtatcaggcagacgatg

SEQ ID NO: 5200558 - DNA, 25 bp, Homo sapien
taggagaacagttaacgcaatggtc

SEQ ID NO: 5200559 - DNA, 25 bp, Homo sapien
aagacggtgctagtttaggccaagg

SEQ ID NO: 5200560 - DNA, 25 bp, Homo sapien
tatcgagcatctagcatgtgccaga

SEQ ID NO: 5200561 - DNA, 25 bp, Homo sapien
tctggtgtgaggaaaactcccctga

SEQ ID NO: 5200562 - DNA, 25 bp, Homo sapien
taaacatgattgacctgtgaccagg

SEQ ID NO: 5200563 - DNA, 25 bp, Homo sapien
caagcagacaaatacggccatgagg

SEQ ID NO: 5200564 - DNA, 25 bp, Homo sapien
tgtttgttacgcagcagaatgcggc

SEQ ID NO: 5200565 - DNA, 25 bp, Homo sapien
gaatgcggctcttagtgtttgcccc

SEQ ID NO: 5200566 - DNA, 25 bp, Homo sapien
ggccactgcacataggtagtcctgt

SEQ ID NO: 5200567 - DNA, 25 bp, Homo sapien
tgagtaactccatgcctagcttgtg

SEQ ID NO: 5200568 - DNA, 25 bp, Homo sapien
aagatgttaattcacatgcatgcag

SEQ ID NO: 5200569 - DNA, 25 bp, Homo sapien
gggtaagtctaaggcctcattgctg

SEQ ID NO: 5200570 - DNA, 25 bp, Homo sapien
gaaaaccctggatcagaatgatctg

SEQ ID NO: 5200571 - DNA, 25 bp, Homo sapien
tgactctgaatgctcaagggtaagt

SEQ ID NO: 5200572 - DNA, 25 bp, Homo sapien
gcaaccattgttaagcctgactaca

SEQ ID NO: 5200573 - DNA, 25 bp, Homo sapien
ttatctgcggttgattgaatctatg

SEQ ID NO: 5200574 - DNA, 25 bp, Homo sapien
ctataaataatacgaatatgccaac

SEQ ID NO: 5200575 - DNA, 25 bp, Homo sapien
tattactagcaggagatggacctta

SEQ ID NO: 5200576 - DNA, 25 bp, Homo sapien
tgtatggtgaaacttttactaggac

SEQ ID NO: 5200577 - DNA, 25 bp, Homo sapien
tgtgatgcccctatcctaggctttg

SEQ ID NO: 5200578 - DNA, 25 bp, Homo sapien
tgattggtaaaattagccctgtgat

SEQ ID NO: 5200579 - DNA, 25 bp, Homo sapien
aatgcttaatttcaacacttgaatg

SEQ ID NO: 5200580 - DNA, 25 bp, Homo sapien
tatacgtggaagtgagcagaaacag

SEQ ID NO: 5200581 - DNA, 25 bp, Homo sapien
tagtcttggcatctggttagtgctc

SEQ ID NO: 5200582 - DNA, 25 bp, Homo sapien
tgaagtatgcgtgaattatacgtgg

SEQ ID NO: 5200583 - DNA, 25 bp, Homo sapien
cataaaaacatcttagtgactgaag

SEQ ID NO: 5200584 - DNA, 25 bp, Homo sapien
ttaatttattatgggatctctccat

SEQ ID NO: 5200585 - DNA, 25 bp, Homo sapien
cacgatgcctggccacataagttct

SEQ ID NO: 5200586 - DNA, 25 bp, Homo sapien
cctggccacataagttcttaaagac

SEQ ID NO: 5200587 - DNA, 25 bp, Homo sapien
gggctttgagtagatcacagaactg

SEQ ID NO: 5200588 - DNA, 25 bp, Homo sapien
gatgaagccttatgaaacctgaaag

SEQ ID NO: 5200589 - DNA, 25 bp, Homo sapien
tgtggctggttaggaaaaattctga

SEQ ID NO: 5200590 - DNA, 25 bp, Homo sapien
actgtatagctgtgttgtcaaagga

SEQ ID NO: 5200591 - DNA, 25 bp, Homo sapien
aagaaggtggttgagaaaatccaag

SEQ ID NO: 5200592 - DNA, 25 bp, Homo sapien
tagatttagatggtactgttagctg

SEQ ID NO: 5200593 - DNA, 25 bp, Homo sapien
ggttggtaaacacatgaagtaatct

SEQ ID NO: 5200594 - DNA, 25 bp, Homo sapien
caagagaatgttggttggtaaacac

SEQ ID NO: 5200595 - DNA, 25 bp, Homo sapien
cacacgaggttgaggttaagcggaa

SEQ ID NO: 5200596 - DNA, 25 bp, Homo sapien
tgaggttaagcggaaagacaagtct

SEQ ID NO: 5200597 - DNA, 25 bp, Homo sapien
tgctctgcgtctgtacttgggaaga

SEQ ID NO: 5200598 - DNA, 25 bp, Homo sapien
gagcgaaactggcagatcacacgag

SEQ ID NO: 5200599 - DNA, 25 bp, Homo sapien
taatctcttatgtaggaacgtcaag

SEQ ID NO: 5200600 - DNA, 25 bp, Homo sapien
taaaactctatgctataaaaagtcc

SEQ ID NO: 5200601 - DNA, 25 bp, Homo sapien
gtggaaggcaggattttgacccagg

SEQ ID NO: 5200602 - DNA, 25 bp, Homo sapien
tgtaggaacgtcaaggtcacactgc

SEQ ID NO: 5200603 - DNA, 25 bp, Homo sapien
atgtaaccagtttcagtatactgag

SEQ ID NO: 5200604 - DNA, 25 bp, Homo sapien
tatactgagtggacatgcatgtagt

SEQ ID NO: 5200605 - DNA, 25 bp, Homo sapien
tagaatagaagcagtcatggacggg

SEQ ID NO: 5200606 - DNA, 25 bp, Homo sapien
ccccgtaccgcaatagaatagaagc

SEQ ID NO: 5200607 - DNA, 25 bp, Homo sapien
gaggtttaatcatagggccaccaaa

SEQ ID NO: 5200608 - DNA, 25 bp, Homo sapien
gaaacctcaaattcgtctccaggag

SEQ ID NO: 5200609 - DNA, 25 bp, Homo sapien
caaacacagataggaggaaacctca

SEQ ID NO: 5200610 - DNA, 25 bp, Homo sapien
taattggctgaagagtacagggcga

SEQ ID NO: 5200611 - DNA, 25 bp, Homo sapien
aactcaattgcaggatttcttcagg

SEQ ID NO: 5200612 - DNA, 25 bp, Homo sapien
caggtttcaaagtggagcaccatat

SEQ ID NO: 5200613 - DNA, 25 bp, Homo sapien
caagttaatacactgggacaccagg

SEQ ID NO: 5200614 - DNA, 25 bp, Homo sapien
tctttgcactaagatggccgagatg

SEQ ID NO: 5200615 - DNA, 25 bp, Homo sapien
tcctctttagccctatcagtaactg

SEQ ID NO: 5200616 - DNA, 25 bp, Homo sapien
ttagccctatcagtaactgagtctc

SEQ ID NO: 5200617 - DNA, 25 bp, Homo sapien
ctctttagccctatcagtaactgag

SEQ ID NO: 5200618 - DNA, 25 bp, Homo sapien
ctttagccctatcagtaactgagtc

SEQ ID NO: 5200619 - DNA, 25 bp, Homo sapien
acatgtgctgatgcctttatgagaa

SEQ ID NO: 5200620 - DNA, 25 bp, Homo sapien
atgagaagtttgtttacaggacggg

SEQ ID NO: 5200621 - DNA, 25 bp, Homo sapien
gactagttgagtgttcttagaccaa

SEQ ID NO: 5200622 - DNA, 25 bp, Homo sapien
ccaactgcttaatctcctagagtct

SEQ ID NO: 5200623 - DNA, 25 bp, Homo sapien
catctctgaagggagagtgaagtca

SEQ ID NO: 5200624 - DNA, 25 bp, Homo sapien
tatggttctaaaatggctgtcggca

SEQ ID NO: 5200625 - DNA, 25 bp, Homo sapien
gattggacagcctacattagttaca

SEQ ID NO: 5200626 - DNA, 25 bp, Homo sapien
gaagtcaacttctctggaaacatga

SEQ ID NO: 5200627 - DNA, 25 bp, Homo sapien
ggagtcaacaatttggcggaatatt

SEQ ID NO: 5200628 - DNA, 25 bp, Homo sapien
aatactcagggttttaacttgacag

SEQ ID NO: 5200629 - DNA, 25 bp, Homo sapien
tttacaatcacaaaaaggagtcaac

SEQ ID NO: 5200630 - DNA, 25 bp, Homo sapien
aaagctatcgtatatttatgcacac

SEQ ID NO: 5200631 - DNA, 25 bp, Homo sapien
caagactgcagtagctcaatgcata

SEQ ID NO: 5200632 - DNA, 25 bp, Homo sapien
tgcctggcctagaatgcttgaattg

SEQ ID NO: 5200633 - DNA, 25 bp, Homo sapien
gtgttgcaatacaacaaagtctcta

SEQ ID NO: 5200634 - DNA, 25 bp, Homo sapien
aaaggtttgatgaacgcctgcccac

SEQ ID NO: 5200635 - DNA, 25 bp, Homo sapien
ccatcagtttgatggttccattttt

SEQ ID NO: 5200636 - DNA, 25 bp, Homo sapien
gggttccatcagtttgatggttcca

SEQ ID NO: 5200637 - DNA, 25 bp, Homo sapien
gtgccagcgttgatgcgcaacctgg

SEQ ID NO: 5200638 - DNA, 25 bp, Homo sapien
actgagctagcgtgccagcgttgat

SEQ ID NO: 5200639 - DNA, 25 bp, Homo sapien
ctaggctggaataccttaaaaagag

SEQ ID NO: 5200640 - DNA, 25 bp, Homo sapien
taggctggaataccttaaaaagagc

SEQ ID NO: 5200641 - DNA, 25 bp, Homo sapien
ggctggaataccttaaaaagagcaa

SEQ ID NO: 5200642 - DNA, 25 bp, Homo sapien
ctctaggctggaataccttaaaaag

SEQ ID NO: 5200643 - DNA, 25 bp, Homo sapien
aatgcttgagtcagacatcttttcc

SEQ ID NO: 5200644 - DNA, 25 bp, Homo sapien
cttgagtcagacatcttttcctttg

SEQ ID NO: 5200645 - DNA, 25 bp, Homo sapien
atgcttgagtcagacatcttttcct

SEQ ID NO: 5200646 - DNA, 25 bp, Homo sapien
ttgagtcagacatcttttcctttgt

SEQ ID NO: 5200647 - DNA, 25 bp, Homo sapien
cactcagctgatgcgtgtggttgat

SEQ ID NO: 5200648 - DNA, 25 bp, Homo sapien
ctcagctgatgcgtgtggttgatgg

SEQ ID NO: 5200649 - DNA, 25 bp, Homo sapien
actcagctgatgcgtgtggttgatg

SEQ ID NO: 5200650 - DNA, 25 bp, Homo sapien
ctgagatgtgtacccgtggtctgag

SEQ ID NO: 5200651 - DNA, 25 bp, Homo sapien
tgagatgtgtacccgtggtctgaga

SEQ ID NO: 5200652 - DNA, 25 bp, Homo sapien
agatgtgtacccgtggtctgagaag

SEQ ID NO: 5200653 - DNA, 25 bp, Homo sapien
atgtgtacccgtggtctgagaagca

SEQ ID NO: 5200654 - DNA, 25 bp, Homo sapien
taaaatttctagcatctacaggact

SEQ ID NO: 5200655 - DNA, 25 bp, Homo sapien
ctaaaatttctagcatctacaggac

SEQ ID NO: 5200656 - DNA, 25 bp, Homo sapien
aatttctagcatctacaggacttct

SEQ ID NO: 5200657 - DNA, 25 bp, Homo sapien
ttctaaaatttctagcatctacagg

SEQ ID NO: 5200658 - DNA, 25 bp, Homo sapien
ctgagccccaggtacagaacaacca

SEQ ID NO: 5200659 - DNA, 25 bp, Homo sapien
tgagccccaggtacagaacaaccag

SEQ ID NO: 5200660 - DNA, 25 bp, Homo sapien
gcaggaccacgtggcccacccttct

SEQ ID NO: 5200661 - DNA, 25 bp, Homo sapien
ccattgcagcaggaccacgtggccc

SEQ ID NO: 5200662 - DNA, 25 bp, Homo sapien
gtggcccacccttctgagatgttcc

SEQ ID NO: 5200663 - DNA, 25 bp, Homo sapien
tgccattgcagcaggaccacgtggc

SEQ ID NO: 5200664 - DNA, 25 bp, Homo sapien
ggcttcctggaaccggttgctgtca

SEQ ID NO: 5200665 - DNA, 25 bp, Homo sapien
gagtctctgtgagttgagggaccca

SEQ ID NO: 5200666 - DNA, 25 bp, Homo sapien
cagcagctgttcagagtgaaagccc

SEQ ID NO: 5200667 - DNA, 25 bp, Homo sapien
gaggtcacttatgagccatagcttc

SEQ ID NO: 5200668 - DNA, 25 bp, Homo sapien
tcagacaccagggcaaatgggctga

SEQ ID NO: 5200669 - DNA, 25 bp, Homo sapien
cagacaccagggcaaatgggctgac

SEQ ID NO: 5200670 - DNA, 25 bp, Homo sapien
catgctgtttacagtttgactactt

SEQ ID NO: 5200671 - DNA, 25 bp, Homo sapien
tgctgtttacagtttgactacttca

SEQ ID NO: 5200672 - DNA, 25 bp, Homo sapien
atgctgtttacagtttgactacttc

SEQ ID NO: 5200673 - DNA, 25 bp, Homo sapien
ttttatgttttcaatttgtgcagga

SEQ ID NO: 5200674 - DNA, 25 bp, Homo sapien
cttttatgttttcaatttgtgcagg

SEQ ID NO: 5200675 - DNA, 25 bp, Homo sapien
tttatgttttcaatttgtgcaggac

SEQ ID NO: 5200676 - DNA, 25 bp, Homo sapien
tgcttctcccgctcaagcctgagag

SEQ ID NO: 5200677 - DNA, 25 bp, Homo sapien
tgttgaggttcccttgatcagctct

SEQ ID NO: 5200678 - DNA, 25 bp, Homo sapien
gcttctcccgctcaagcctgagagt

SEQ ID NO: 5200679 - DNA, 25 bp, Homo sapien
ggttcccttgatcagctctgcctca

SEQ ID NO: 5200680 - DNA, 25 bp, Homo sapien
agacacattactagctctctgccgc

SEQ ID NO: 5200681 - DNA, 25 bp, Homo sapien
tctctgccgccattttactaccatg

SEQ ID NO: 5200682 - DNA, 25 bp, Homo sapien
tctgccgccattttactaccatgat

SEQ ID NO: 5200683 - DNA, 25 bp, Homo sapien
cccaccaattgcagacacattacta

SEQ ID NO: 5200684 - DNA, 25 bp, Homo sapien
gcgtttctttcagtgtgttggcaat

SEQ ID NO: 5200685 - DNA, 25 bp, Homo sapien
tccatgccactttctggtgagttct

SEQ ID NO: 5200686 - DNA, 25 bp, Homo sapien
tgttggcaatgtgtggcccctctcc

SEQ ID NO: 5200687 - DNA, 25 bp, Homo sapien
tggtaaacaattttggtccattgtg

SEQ ID NO: 5200688 - DNA, 25 bp, Homo sapien
gtagagactaccctagacatctgca

SEQ ID NO: 5200689 - DNA, 25 bp, Homo sapien
ggcaggtaccgttctaaatctgaaa

SEQ ID NO: 5200690 - DNA, 25 bp, Homo sapien
aacagggtgatagctcaaagttgcc

SEQ ID NO: 5200691 - DNA, 25 bp, Homo sapien
ttgcccttcctagaaaatatgacgg

SEQ ID NO: 5200692 - DNA, 25 bp, Homo sapien
caatctgagtgctaattcaaagcca

SEQ ID NO: 5200693 - DNA, 25 bp, Homo sapien
caatggtgaccacggtaatggaatg

SEQ ID NO: 5200694 - DNA, 25 bp, Homo sapien
tcatcagctgtacaccaatggtgac

SEQ ID NO: 5200695 - DNA, 25 bp, Homo sapien
taaagggcatgtgtccagcaagtcc

SEQ ID NO: 5200696 - DNA, 25 bp, Homo sapien
cctgtgtttatctgcctccccaaag

SEQ ID NO: 5200697 - DNA, 25 bp, Homo sapien
gaaactcttactgctctcaggatga

SEQ ID NO: 5200698 - DNA, 25 bp, Homo sapien
tatagccatggatgttgattagctg

SEQ ID NO: 5200699 - DNA, 25 bp, Homo sapien
tgctctcaggatgactggtatttgg

SEQ ID NO: 5200700 - DNA, 25 bp, Homo sapien
cccttgttgaaccagagcagttatg

SEQ ID NO: 5200701 - DNA, 25 bp, Homo sapien
tgtcctgccaatactgaagcagagg

SEQ ID NO: 5200702 - DNA, 25 bp, Homo sapien
aagcagaggttgacgtggtaccaaa

SEQ ID NO: 5200703 - DNA, 25 bp, Homo sapien
gggactagataagccctcacatttg

SEQ ID NO: 5200704 - DNA, 25 bp, Homo sapien
tacagaacctaaaggagctggtgct

SEQ ID NO: 5200705 - DNA, 25 bp, Homo sapien
tagtctgtcgggtgtctcttcttct

SEQ ID NO: 5200706 - DNA, 25 bp, Homo sapien
gggcatagtctgtcgggtgtctctt

SEQ ID NO: 5200707 - DNA, 25 bp, Homo sapien
ttctacagaacctaaaggagctggt

SEQ ID NO: 5200708 - DNA, 25 bp, Homo sapien
tattgacctcacaagtttgtcatga

SEQ ID NO: 5200709 - DNA, 25 bp, Homo sapien
aaatatggaaagagccctagccttg

SEQ ID NO: 5200710 - DNA, 25 bp, Homo sapien
ttgtcatgagcttcaaatgagataa

SEQ ID NO: 5200711 - DNA, 25 bp, Homo sapien
aaaatatggaaagagccctagcctt

SEQ ID NO: 5200712 - DNA, 25 bp, Homo sapien
tctagaccgcccactttgaatggga

SEQ ID NO: 5200713 - DNA, 25 bp, Homo sapien
tgaatgggactcttccgaactgtct

SEQ ID NO: 5200714 - DNA, 25 bp, Homo sapien
cgatgctggcttccgctgtcttagg

SEQ ID NO: 5200715 - DNA, 25 bp, Homo sapien
tcagagaccacgcaaggatagagcc

SEQ ID NO: 5200716 - DNA, 25 bp, Homo sapien
tagggagtgatttaatttctctgag

SEQ ID NO: 5200717 - DNA, 25 bp, Homo sapien
tcagggtgttttagggagtgattta

SEQ ID NO: 5200718 - DNA, 25 bp, Homo sapien
tttagggagtgatttaatttctctg

SEQ ID NO: 5200719 - DNA, 25 bp, Homo sapien
gggagtgatttaatttctctgagtc

SEQ ID NO: 5200720 - DNA, 25 bp, Homo sapien
agaaccaaatgctgggaggcccagt

SEQ ID NO: 5200721 - DNA, 25 bp, Homo sapien
gaaccaaatgctgggaggcccagtc

SEQ ID NO: 5200722 - DNA, 25 bp, Homo sapien
gtctctcctgcacccgaatcagctg

SEQ ID NO: 5200723 - DNA, 25 bp, Homo sapien
tgcgtctctcctgcacccgaatcag

SEQ ID NO: 5200724 - DNA, 25 bp, Homo sapien
tcttgcgtctctcctgcacccgaat

SEQ ID NO: 5200725 - DNA, 25 bp, Homo sapien
tcctgcacccgaatcagctgccttt

SEQ ID NO: 5200726 - DNA, 25 bp, Homo sapien
tgtatccatggcttattgctctgag

SEQ ID NO: 5200727 - DNA, 25 bp, Homo sapien
tgtttcccctcttgtatccatggct

SEQ ID NO: 5200728 - DNA, 25 bp, Homo sapien
aacgaacctttctgcaaaggtattg

SEQ ID NO: 5200729 - DNA, 25 bp, Homo sapien
tgaaagtttctaaaatggccagacc

SEQ ID NO: 5200730 - DNA, 25 bp, Homo sapien
tatttccctagcagtactcttgcag

SEQ ID NO: 5200731 - DNA, 25 bp, Homo sapien
tgtccaagctcctagccagtcttag

SEQ ID NO: 5200732 - DNA, 25 bp, Homo sapien
gaagcatttctaggttcagcagact

SEQ ID NO: 5200733 - DNA, 25 bp, Homo sapien
tgtgtatggcaagcgtgtgctccac

SEQ ID NO: 5200734 - DNA, 25 bp, Homo sapien
gatttcttgaggtgcttttccggcc

SEQ ID NO: 5200735 - DNA, 25 bp, Homo sapien
tcttcagaggtaaacttggtgacac

SEQ ID NO: 5200736 - DNA, 25 bp, Homo sapien
tcaagtgtgctgacatatatgctgt

SEQ ID NO: 5200737 - DNA, 25 bp, Homo sapien
gaaacagtggcacatcttaatcctc

SEQ ID NO: 5200738 - DNA, 25 bp, Homo sapien
aagtcagtcatctcactattttcta

SEQ ID NO: 5200739 - DNA, 25 bp, Homo sapien
tcgttaaatctgttggcagggcccc

SEQ ID NO: 5200740 - DNA, 25 bp, Homo sapien
ccctgcgtgagaaagagtcgttaaa

SEQ ID NO: 5200741 - DNA, 25 bp, Homo sapien
ctgacactggcaaacagccctgcgt

SEQ ID NO: 5200742 - DNA, 25 bp, Homo sapien
gcccaccatttactgtccacctgca

SEQ ID NO: 5200743 - DNA, 25 bp, Homo sapien
cccaccatttactgtccacctgcag

SEQ ID NO: 5200744 - DNA, 25 bp, Homo sapien
tgcccaccatttactgtccacctgc

SEQ ID NO: 5200745 - DNA, 25 bp, Homo sapien
gacattgtccttgggctcatgattt

SEQ ID NO: 5200746 - DNA, 25 bp, Homo sapien
aaaagtacatggtcaggtgtttgcg

SEQ ID NO: 5200747 - DNA, 25 bp, Homo sapien
gccattgcaggctctcttgagttaa

SEQ ID NO: 5200748 - DNA, 25 bp, Homo sapien
tgtaagtgatcaggtacaactcatc

SEQ ID NO: 5200749 - DNA, 25 bp, Homo sapien
caccacccctgcatacgtatttgga

SEQ ID NO: 5200750 - DNA, 25 bp, Homo sapien
tcctgtggcctgataaggtattgac

SEQ ID NO: 5200751 - DNA, 25 bp, Homo sapien
cccctgcatacgtatttggagttaa

SEQ ID NO: 5200752 - DNA, 25 bp, Homo sapien
gataaggtattgaccccatcgaggc

SEQ ID NO: 5200753 - DNA, 25 bp, Homo sapien
ccctcagttccaggagatggcagat

SEQ ID NO: 5200754 - DNA, 25 bp, Homo sapien
ttgtttccctagtgctaactgcctg

SEQ ID NO: 5200755 - DNA, 25 bp, Homo sapien
gattgactggctcagctgtccattt

SEQ ID NO: 5200756 - DNA, 25 bp, Homo sapien
gaaaagccacagtgcaccctcagtt

SEQ ID NO: 5200757 - DNA, 25 bp, Homo sapien
gatgagtccttgaagtagaaccctg

SEQ ID NO: 5200758 - DNA, 25 bp, Homo sapien
aatttaagaggcatctgttcccagc

SEQ ID NO: 5200759 - DNA, 25 bp, Homo sapien
tagaaccctgtcatagtgcaacaaa

SEQ ID NO: 5200760 - DNA, 25 bp, Homo sapien
ccagggaagggattgcctatgtgcc

SEQ ID NO: 5200761 - DNA, 25 bp, Homo sapien
ctggatgaaaaggttgggcattttg

SEQ ID NO: 5200762 - DNA, 25 bp, Homo sapien
tggatgaaaaggttgggcattttgt

SEQ ID NO: 5200763 - DNA, 25 bp, Homo sapien
tgcagcattctgttggttaaagccc

SEQ ID NO: 5200764 - DNA, 25 bp, Homo sapien
tactggtggctaggatcacaaaagc

SEQ ID NO: 5200765 - DNA, 25 bp, Homo sapien
tgcactttgggaagggtacataacc

SEQ ID NO: 5200766 - DNA, 25 bp, Homo sapien
gaagaacaacatgctcctaggccaa

SEQ ID NO: 5200767 - DNA, 25 bp, Homo sapien
gaccctggtctatggcggcttatag

SEQ ID NO: 5200768 - DNA, 25 bp, Homo sapien
gatgcattgtccagacacgaatgag

SEQ ID NO: 5200769 - DNA, 25 bp, Homo sapien
tttgtcagacatgtagaaaccagtc

SEQ ID NO: 5200770 - DNA, 25 bp, Homo sapien
caagtcttaattctgctcaggcaga

SEQ ID NO: 5200771 - DNA, 25 bp, Homo sapien
gttttgggtccagcattaactttgc

SEQ ID NO: 5200772 - DNA, 25 bp, Homo sapien
aaggctgactgctggtccacccatt

SEQ ID NO: 5200773 - DNA, 25 bp, Homo sapien
ttgttgcatgcatgcttctgggtta

SEQ ID NO: 5200774 - DNA, 25 bp, Homo sapien
tgggttagggccactgatccactgt

SEQ ID NO: 5200775 - DNA, 25 bp, Homo sapien
tctcttgcggcatactgtggttttg

SEQ ID NO: 5200776 - DNA, 25 bp, Homo sapien
cttttctcttgcggcatactgtggt

SEQ ID NO: 5200777 - DNA, 25 bp, Homo sapien
ttgtaaaaacttgcatctttttgag

SEQ ID NO: 5200778 - DNA, 25 bp, Homo sapien
tcttgcggcatactgtggttttggc

SEQ ID NO: 5200779 - DNA, 25 bp, Homo sapien
tctgccaaacgtccaggatagaaac

SEQ ID NO: 5200780 - DNA, 25 bp, Homo sapien
tgtcccctgaaagataagtgcgtac

SEQ ID NO: 5200781 - DNA, 25 bp, Homo sapien
tgggtcccttgaatgagggtgaatt

SEQ ID NO: 5200782 - DNA, 25 bp, Homo sapien
tgagggtgaattgtccagatcagtg

SEQ ID NO: 5200783 - DNA, 25 bp, Homo sapien
tcttcagattgatcatcattgcttg

SEQ ID NO: 5200784 - DNA, 25 bp, Homo sapien
catttgtttgttgaacgctataaga

SEQ ID NO: 5200785 - DNA, 25 bp, Homo sapien
tcctttcgtatgctgttgcattgcc

SEQ ID NO: 5200786 - DNA, 25 bp, Homo sapien
tgttgaacgctataagaatcttcag

SEQ ID NO: 5200787 - DNA, 25 bp, Homo sapien
ttccaaccgacttgtgaggagaggc

SEQ ID NO: 5200788 - DNA, 25 bp, Homo sapien
gactgaggaaactgcggactccagc

SEQ ID NO: 5200789 - DNA, 25 bp, Homo sapien
gtcagatgcgtgtggaccttggccc

SEQ ID NO: 5200790 - DNA, 25 bp, Homo sapien
cgttccttccggctcgaacagaggg

SEQ ID NO: 5200791 - DNA, 25 bp, Homo sapien
gaaccccctgatgagcaggagttag

SEQ ID NO: 5200792 - DNA, 25 bp, Homo sapien
ttctccacatgtttgctgtggatcc

SEQ ID NO: 5200793 - DNA, 25 bp, Homo sapien
tctccacatgtttgctgtggatcct

SEQ ID NO: 5200794 - DNA, 25 bp, Homo sapien
tcagagctggtcagaaccccctgat

SEQ ID NO: 5200795 - DNA, 25 bp, Homo sapien
ggacatgagtcctcctttggctata

SEQ ID NO: 5200796 - DNA, 25 bp, Homo sapien
ccaagttctagacgcagggagttct

SEQ ID NO: 5200797 - DNA, 25 bp, Homo sapien
cagctatcagtcaggcagcaagagg

SEQ ID NO: 5200798 - DNA, 25 bp, Homo sapien
tggctataatggtctgggccctgtc

SEQ ID NO: 5200799 - DNA, 25 bp, Homo sapien
tcatggccaccaccctttactctct

SEQ ID NO: 5200800 - DNA, 25 bp, Homo sapien
ccacatggcttggttgtttgggcag

SEQ ID NO: 5200801 - DNA, 25 bp, Homo sapien
ggccttgtggtgttcgagggaggaa

SEQ ID NO: 5200802 - DNA, 25 bp, Homo sapien
gggggaagagggatcaggcaactga

SEQ ID NO: 5200803 - DNA, 25 bp, Homo sapien
aatagatgtggcataagatatttaa

SEQ ID NO: 5200804 - DNA, 25 bp, Homo sapien
gatatttaaattcaacgctgatttt

SEQ ID NO: 5200805 - DNA, 25 bp, Homo sapien
aactctcaacataaatatctccctc

SEQ ID NO: 5200806 - DNA, 25 bp, Homo sapien
tagggtctattaatagatgtggcat

SEQ ID NO: 5200807 - DNA, 25 bp, Homo sapien
cccagggtcatggagaccaagtcag

SEQ ID NO: 5200808 - DNA, 25 bp, Homo sapien
ccccagggtcatggagaccaagtca

SEQ ID NO: 5200809 - DNA, 25 bp, Homo sapien
agaccaagtcaggcaccagttctag

SEQ ID NO: 5200810 - DNA, 25 bp, Homo sapien
cccccagggtcatggagaccaagtc

SEQ ID NO: 5200811 - DNA, 25 bp, Homo sapien
gcgccgccgtcgctctccaacgcca

SEQ ID NO: 5200812 - DNA, 25 bp, Homo sapien
cgccgtcgctctccaacgccagcgc

SEQ ID NO: 5200813 - DNA, 25 bp, Homo sapien
gccagcgccgcctctcgctcgccga

SEQ ID NO: 5200814 - DNA, 25 bp, Homo sapien
cgccgagctccagccgaaggagaag

SEQ ID NO: 5200815 - DNA, 25 bp, Homo sapien
gccgcgccgccgtcgctctccaacg

SEQ ID NO: 5200816 - DNA, 25 bp, Homo sapien
gctcgccgagctccagccgaaggag

SEQ ID NO: 5200817 - DNA, 25 bp, Homo sapien
ttctccttcggctggagctcggcga

SEQ ID NO: 5200818 - DNA, 25 bp, Homo sapien
tcggcgagcgagaggcggcgctggc

SEQ ID NO: 5200819 - DNA, 25 bp, Homo sapien
gcgctggcgttggagagcgacggcg

SEQ ID NO: 5200820 - DNA, 25 bp, Homo sapien
ggcggcgctggcgttggagagcgac

SEQ ID NO: 5200821 - DNA, 25 bp, Homo sapien
gttggagagcgacggcggcgcggcg

SEQ ID NO: 5200822 - DNA, 25 bp, Homo sapien
ctggcgttggagagcgacggcggcg

SEQ ID NO: 5200823 - DNA, 25 bp, Homo sapien
gctcgtacaaagcagactgcccgca

SEQ ID NO: 5200824 - DNA, 25 bp, Homo sapien
cagactgcccgcaaatcgaccggtg

SEQ ID NO: 5200825 - DNA, 25 bp, Homo sapien
agcagactgcccgcaaatcgaccgg

SEQ ID NO: 5200826 - DNA, 25 bp, Homo sapien
tcgaccggtggtaaagcacccagga

SEQ ID NO: 5200827 - DNA, 25 bp, Homo sapien
aatcgaccggtggtaaagcacccag

SEQ ID NO: 5200828 - DNA, 25 bp, Homo sapien
tggctcgtacaaagcagactgcccg

SEQ ID NO: 5200829 - DNA, 25 bp, Homo sapien
cgggcagtctgctttgtacgagcca

SEQ ID NO: 5200830 - DNA, 25 bp, Homo sapien
tttaccaccggtcgatttgcgggca

SEQ ID NO: 5200831 - DNA, 25 bp, Homo sapien
caccggtcgatttgcgggcagtctg

SEQ ID NO: 5200832 - DNA, 25 bp, Homo sapien
ccggtcgatttgcgggcagtctgct

SEQ ID NO: 5200833 - DNA, 25 bp, Homo sapien
accggtcgatttgcgggcagtctgc

SEQ ID NO: 5200834 - DNA, 25 bp, Homo sapien
cctgggtgctttaccaccggtcgat

SEQ ID NO: 5200835 - DNA, 25 bp, Homo sapien
tatgattgcgagtggaaaaataggg

SEQ ID NO: 5200836 - DNA, 25 bp, Homo sapien
tgattgcgagtggaaaaatagggga

SEQ ID NO: 5200837 - DNA, 25 bp, Homo sapien
atgattgcgagtggaaaaatagggg

SEQ ID NO: 5200838 - DNA, 25 bp, Homo sapien
tcccctatttttccactcgcaatca

SEQ ID NO: 5200839 - DNA, 25 bp, Homo sapien
cccctatttttccactcgcaatcat

SEQ ID NO: 5200840 - DNA, 25 bp, Homo sapien
ccctatttttccactcgcaatcata

SEQ ID NO: 5200841 - DNA, 25 bp, Homo sapien
ttgtagcatttttatcatacagtag

SEQ ID NO: 5200842 - DNA, 25 bp, Homo sapien
tgtagcatttttatcatacagtaga

SEQ ID NO: 5200843 - DNA, 25 bp, Homo sapien
ctactgtatgataaaaatgctacaa

SEQ ID NO: 5200844 - DNA, 25 bp, Homo sapien
tctactgtatgataaaaatgctaca

SEQ ID NO: 5200845 - DNA, 25 bp, Homo sapien
cctgtaagtttgctattaaaataca

SEQ ID NO: 5200846 - DNA, 25 bp, Homo sapien
tgtgctgttcctgtaagtttgctat

SEQ ID NO: 5200847 - DNA, 25 bp, Homo sapien
ttctgtgctgttcctgtaagtttgc

SEQ ID NO: 5200848 - DNA, 25 bp, Homo sapien
ctgtgctgttcctgtaagtttgcta

SEQ ID NO: 5200849 - DNA, 25 bp, Homo sapien
tcctgtaagtttgctattaaaatac

SEQ ID NO: 5200850 - DNA, 25 bp, Homo sapien
tctgtcttctgtgctgttcctgtaa

SEQ ID NO: 5200851 - DNA, 25 bp, Homo sapien
tgtattttaatagcaaacttacagg

SEQ ID NO: 5200852 - DNA, 25 bp, Homo sapien
gtattttaatagcaaacttacagga

SEQ ID NO: 5200853 - DNA, 25 bp, Homo sapien
tagcaaacttacaggaacagcacag

SEQ ID NO: 5200854 - DNA, 25 bp, Homo sapien
taatagcaaacttacaggaacagca

SEQ ID NO: 5200855 - DNA, 25 bp, Homo sapien
gcaaacttacaggaacagcacagaa

SEQ ID NO: 5200856 - DNA, 25 bp, Homo sapien
ttaatagcaaacttacaggaacagc

SEQ ID NO: 5200857 - DNA, 25 bp, Homo sapien
gagcccaacacaataaggctcaaga

SEQ ID NO: 5200858 - DNA, 25 bp, Homo sapien
tctgagcccaacacaataaggctca

SEQ ID NO: 5200859 - DNA, 25 bp, Homo sapien
taaggctcaagaatgtatttccaag

SEQ ID NO: 5200860 - DNA, 25 bp, Homo sapien
agggtctccctcttagcctctgagc

SEQ ID NO: 5200861 - DNA, 25 bp, Homo sapien
gtacaaaacaatgcacctggaatcc

SEQ ID NO: 5200862 - DNA, 25 bp, Homo sapien
cctggaatcccaatctggggttctc

SEQ ID NO: 5200863 - DNA, 25 bp, Homo sapien
ccagagccacgggtacaaaacaatg

SEQ ID NO: 5200864 - DNA, 25 bp, Homo sapien
cacgggtacaaaacaatgcacctgg

SEQ ID NO: 5200865 - DNA, 25 bp, Homo sapien
tcccacaaaggttaacaccaggaca

SEQ ID NO: 5200866 - DNA, 25 bp, Homo sapien
cacaaaggttaacaccaggacaaca

SEQ ID NO: 5200867 - DNA, 25 bp, Homo sapien
caaaggttaacaccaggacaacatt

SEQ ID NO: 5200868 - DNA, 25 bp, Homo sapien
gggaggatggttctcaaggcttcct

SEQ ID NO: 5200869 - DNA, 25 bp, Homo sapien
ttcctggctgggactcgggtgtccc

SEQ ID NO: 5200870 - DNA, 25 bp, Homo sapien
cttcccataggtctggttcattcct

SEQ ID NO: 5200871 - DNA, 25 bp, Homo sapien
gctgggactcgggtgtccccggcat

SEQ ID NO: 5200872 - DNA, 25 bp, Homo sapien
ccttcccataggtctggttcattcc

SEQ ID NO: 5200873 - DNA, 25 bp, Homo sapien
acacaagtacataggaggttaagag

SEQ ID NO: 5200874 - DNA, 25 bp, Homo sapien
tacataggaggttaagagccacgtg

SEQ ID NO: 5200875 - DNA, 25 bp, Homo sapien
taggaggttaagagccacgtgtctt

SEQ ID NO: 5200876 - DNA, 25 bp, Homo sapien
caagtacataggaggttaagagcca

SEQ ID NO: 5200877 - DNA, 25 bp, Homo sapien
cggtgttgacgctggactgtccgaa

SEQ ID NO: 5200878 - DNA, 25 bp, Homo sapien
tcccaagcatgtttactgtggaagg

SEQ ID NO: 5200879 - DNA, 25 bp, Homo sapien
aggcttttggcaaagttgcttccca

SEQ ID NO: 5200880 - DNA, 25 bp, Homo sapien
tttactgtggaagggtgaacagcca

SEQ ID NO: 5200881 - DNA, 25 bp, Homo sapien
gaattcatccatcccagattcgcca

SEQ ID NO: 5200882 - DNA, 25 bp, Homo sapien
cgagcaaatctagcgctcctgccaa

SEQ ID NO: 5200883 - DNA, 25 bp, Homo sapien
agattcgccaccagggtccgacggt

SEQ ID NO: 5200884 - DNA, 25 bp, Homo sapien
acagcaacgaattcatccatcccag

SEQ ID NO: 5200885 - DNA, 25 bp, Homo sapien
cgcgcctcaagtcgctgcagaagct

SEQ ID NO: 5200886 - DNA, 25 bp, Homo sapien
gagggcaccaggaccctctagcagc

SEQ ID NO: 5200887 - DNA, 25 bp, Homo sapien
tctgcatgggctccttcggcggaag

SEQ ID NO: 5200888 - DNA, 25 bp, Homo sapien
gaaggtacatctagccctgtctgca

SEQ ID NO: 5200889 - DNA, 25 bp, Homo sapien
cgcttgaacgcgtaagaaatcctcg

SEQ ID NO: 5200890 - DNA, 25 bp, Homo sapien
ccgggtttcccagcgcgggagctat

SEQ ID NO: 5200891 - DNA, 25 bp, Homo sapien
gctccacactcgcttgaacgcgtaa

SEQ ID NO: 5200892 - DNA, 25 bp, Homo sapien
gtaagaaatcctcgtcagactcagc

SEQ ID NO: 5200893 - DNA, 25 bp, Homo sapien
gaaggcaccaatgcgaggcctgcgt

SEQ ID NO: 5200894 - DNA, 25 bp, Homo sapien
gctgagtggcgtcaccttgcccttc

SEQ ID NO: 5200895 - DNA, 25 bp, Homo sapien
tttaatagccgcgtcctggctaggg

SEQ ID NO: 5200896 - DNA, 25 bp, Homo sapien
tgcccttcccgtgtaatgggaccaa

SEQ ID NO: 5200897 - DNA, 25 bp, Homo sapien
cagcacttgtgggaataaacgggaa

SEQ ID NO: 5200898 - DNA, 25 bp, Homo sapien
taaacgggaaggttcgtgcttgtgc

SEQ ID NO: 5200899 - DNA, 25 bp, Homo sapien
ttcgtgcttgtgctgagtgcggtct

SEQ ID NO: 5200900 - DNA, 25 bp, Homo sapien
tgcggtctggggagtaatagacatt

SEQ ID NO: 5200901 - DNA, 25 bp, Homo sapien
catgagccgagcaaaggatgttggt

SEQ ID NO: 5200902 - DNA, 25 bp, Homo sapien
gcattgatcaagtggttggacccca

SEQ ID NO: 5200903 - DNA, 25 bp, Homo sapien
gtaactatcccagctagacgtgagg

SEQ ID NO: 5200904 - DNA, 25 bp, Homo sapien
gacattactctacacgttttgggac

SEQ ID NO: 5200905 - DNA, 25 bp, Homo sapien
tcatcttcagcgtgttaggaacgaa

SEQ ID NO: 5200906 - DNA, 25 bp, Homo sapien
cactgctgctatgggaactggaact

SEQ ID NO: 5200907 - DNA, 25 bp, Homo sapien
taaatgtgacgcaacgtggtccaac

SEQ ID NO: 5200908 - DNA, 25 bp, Homo sapien
taggaacgaatatgtcaaaataagc

SEQ ID NO: 5200909 - DNA, 25 bp, Homo sapien
ctgagctggatctgggcacatgcga

SEQ ID NO: 5200910 - DNA, 25 bp, Homo sapien
tactgcactctcaaatcgcctactt

SEQ ID NO: 5200911 - DNA, 25 bp, Homo sapien
gctttactgcactctcaaatcgcct

SEQ ID NO: 5200912 - DNA, 25 bp, Homo sapien
aggaaactgagctggatctgggcac

SEQ ID NO: 5200913 - DNA, 25 bp, Homo sapien
gtatttccgtgtttccaggattcat

SEQ ID NO: 5200914 - DNA, 25 bp, Homo sapien
ggtatttccgtgtttccaggattca

SEQ ID NO: 5200915 - DNA, 25 bp, Homo sapien
agctgtagaatgtggtatttccgtg

SEQ ID NO: 5200916 - DNA, 25 bp, Homo sapien
cacttagatgaaccaagcatatcac

SEQ ID NO: 5200917 - DNA, 25 bp, Homo sapien
gtctgaggccagagtagacccacta

SEQ ID NO: 5200918 - DNA, 25 bp, Homo sapien
tctccatatgctttccgcctgtctg

SEQ ID NO: 5200919 - DNA, 25 bp, Homo sapien
taaaagcctccaaatcttgcaccag

SEQ ID NO: 5200920 - DNA, 25 bp, Homo sapien
ggcgagcttgccagatctttctcta

SEQ ID NO: 5200921 - DNA, 25 bp, Homo sapien
ttctgctctgggccccgctctgtgg

SEQ ID NO: 5200922 - DNA, 25 bp, Homo sapien
gccgcagtgccagctggcgagcttg

SEQ ID NO: 5200923 - DNA, 25 bp, Homo sapien
aagctcgctgtgttcagcccagccg

SEQ ID NO: 5200924 - DNA, 25 bp, Homo sapien
ccagacatgttgtccagacccaggc

SEQ ID NO: 5200925 - DNA, 25 bp, Homo sapien
ttctccgccatcaacacagggatcg

SEQ ID NO: 5200926 - DNA, 25 bp, Homo sapien
tggacagcagtatccaaagctttcc

SEQ ID NO: 5200927 - DNA, 25 bp, Homo sapien
caacacagggatcgggaggagacca

SEQ ID NO: 5200928 - DNA, 25 bp, Homo sapien
agaatgcattggcctctgtcatcac

SEQ ID NO: 5200929 - DNA, 25 bp, Homo sapien
gaatgcattggcctctgtcatcaca

SEQ ID NO: 5200930 - DNA, 25 bp, Homo sapien
aatgcattggcctctgtcatcacac

SEQ ID NO: 5200931 - DNA, 25 bp, Homo sapien
ccttgaccttggagatctctaagct

SEQ ID NO: 5200932 - DNA, 25 bp, Homo sapien
ggagatctttccacaggatctcctg

SEQ ID NO: 5200933 - DNA, 25 bp, Homo sapien
gagatctttccacaggatctcctgc

SEQ ID NO: 5200934 - DNA, 25 bp, Homo sapien
tgaccttggagatctctaagctcag

SEQ ID NO: 5200935 - DNA, 25 bp, Homo sapien
cattctgacgggagctgaaaatttc

SEQ ID NO: 5200936 - DNA, 25 bp, Homo sapien
aaagctcagtctgctaggagaggcc

SEQ ID NO: 5200937 - DNA, 25 bp, Homo sapien
tctcacaaggaagaaatgcccagtg

SEQ ID NO: 5200938 - DNA, 25 bp, Homo sapien
ctgcgatcagtcagcaaccctggga

SEQ ID NO: 5200939 - DNA, 25 bp, Homo sapien
tctgatgcttgtacaaacacgcaca

SEQ ID NO: 5200940 - DNA, 25 bp, Homo sapien
tccagcatgtttcacagagtaagcc

SEQ ID NO: 5200941 - DNA, 25 bp, Homo sapien
gcgtcctgggtagtctgtgcttgta

SEQ ID NO: 5200942 - DNA, 25 bp, Homo sapien
gtttttgtagcaccgctcagctgtc

SEQ ID NO: 5200943 - DNA, 25 bp, Homo sapien
gcttaaaatgccaccagaaccctgt

SEQ ID NO: 5200944 - DNA, 25 bp, Homo sapien
tcacatagtagaaaaagtccagcat

SEQ ID NO: 5200945 - DNA, 25 bp, Homo sapien
tgagagacttttactgcaagtgtca

SEQ ID NO: 5200946 - DNA, 25 bp, Homo sapien
catttttaggctccctctggtgaca

SEQ ID NO: 5200947 - DNA, 25 bp, Homo sapien
gaaaaggccagtagcccaacagttg

SEQ ID NO: 5200948 - DNA, 25 bp, Homo sapien
catggtagtcagaggcttgttgtca

SEQ ID NO: 5200949 - DNA, 25 bp, Homo sapien
ggagcaaaaatagaactggcgtgtt

SEQ ID NO: 5200950 - DNA, 25 bp, Homo sapien
tagaggtgacgttttggctatccat

SEQ ID NO: 5200951 - DNA, 25 bp, Homo sapien
ggtatctaaactgctttaaagatac

SEQ ID NO: 5200952 - DNA, 25 bp, Homo sapien
ctgctttaaagatacttgggtgttt

SEQ ID NO: 5200953 - DNA, 25 bp, Homo sapien
ttggtatctaaactgctttaaagat

SEQ ID NO: 5200954 - DNA, 25 bp, Homo sapien
aactgctttaaagatacttgggtgt

SEQ ID NO: 5200955 - DNA, 25 bp, Homo sapien
tctgtgacaatctggcaacctctga

SEQ ID NO: 5200956 - DNA, 25 bp, Homo sapien
gaatttgctggttagtcgacctctg

SEQ ID NO: 5200957 - DNA, 25 bp, Homo sapien
ctgggttctccaaagtcgtctgtga

SEQ ID NO: 5200958 - DNA, 25 bp, Homo sapien
gatttattgatagcagccttgggaa

SEQ ID NO: 5200959 - DNA, 25 bp, Homo sapien
cttttcagtgacataggcaatgtac

SEQ ID NO: 5200960 - DNA, 25 bp, Homo sapien
ttcttttcagtgacataggcaatgt

SEQ ID NO: 5200961 - DNA, 25 bp, Homo sapien
tttcagtgacataggcaatgtacat

SEQ ID NO: 5200962 - DNA, 25 bp, Homo sapien
ttttcttttcagtgacataggcaat

SEQ ID NO: 5200963 - DNA, 25 bp, Homo sapien
cttgtgtgctaaatgagtatgaacc

SEQ ID NO: 5200964 - DNA, 25 bp, Homo sapien
aatctttcagcacatacttgtgtgc

SEQ ID NO: 5200965 - DNA, 25 bp, Homo sapien
tgattgggtaccagccaaaagccca

SEQ ID NO: 5200966 - DNA, 25 bp, Homo sapien
aatttgccagagctaccttctgaag

SEQ ID NO: 5200967 - DNA, 25 bp, Homo sapien
ggagtgttctgtatgtgcctattag

SEQ ID NO: 5200968 - DNA, 25 bp, Homo sapien
ggtataatgctgtttaagtcctcct

SEQ ID NO: 5200969 - DNA, 25 bp, Homo sapien
tactgctattgatatctggtttcac

SEQ ID NO: 5200970 - DNA, 25 bp, Homo sapien
catgatctaacctggagaatattcc

SEQ ID NO: 5200971 - DNA, 25 bp, Homo sapien
aactgcctcttagttctgctcttgc

SEQ ID NO: 5200972 - DNA, 25 bp, Homo sapien
taggtatttaccactataaactgcc

SEQ ID NO: 5200973 - DNA, 25 bp, Homo sapien
tatttcagctctaatcactgctatt

SEQ ID NO: 5200974 - DNA, 25 bp, Homo sapien
cttgctgcatcccaaaagtacgttg

SEQ ID NO: 5200975 - DNA, 25 bp, Homo sapien
cttttctcttagtaacctcttcatg

SEQ ID NO: 5200976 - DNA, 25 bp, Homo sapien
tctcttagtaacctcttcatgtcca

SEQ ID NO: 5200977 - DNA, 25 bp, Homo sapien
ctcttagtaacctcttcatgtccat

SEQ ID NO: 5200978 - DNA, 25 bp, Homo sapien
tttctcttagtaacctcttcatgtc

SEQ ID NO: 5200979 - DNA, 25 bp, Homo sapien
tttgagaactgaagcgttgtgagag

SEQ ID NO: 5200980 - DNA, 25 bp, Homo sapien
ttgagaactgaagcgttgtgagagt

SEQ ID NO: 5200981 - DNA, 25 bp, Homo sapien
tttaattcggaatatacctctgtag

SEQ ID NO: 5200982 - DNA, 25 bp, Homo sapien
tagcctttaattcggaatatacctc

SEQ ID NO: 5200983 - DNA, 25 bp, Homo sapien
cctttaattcggaatatacctctgt

SEQ ID NO: 5200984 - DNA, 25 bp, Homo sapien
gcctttaattcggaatatacctctg

SEQ ID NO: 5200985 - DNA, 25 bp, Homo sapien
tcgcagcctcttgtagatacttacg

SEQ ID NO: 5200986 - DNA, 25 bp, Homo sapien
tgggtagcctaaattttcgcagcct

SEQ ID NO: 5200987 - DNA, 25 bp, Homo sapien
gagatactcggcaaaatccagtctt

SEQ ID NO: 5200988 - DNA, 25 bp, Homo sapien
tggctaccaagcaaggatgaactgt

SEQ ID NO: 5200989 - DNA, 25 bp, Homo sapien
atattgccatagatgcttcccctca

SEQ ID NO: 5200990 - DNA, 25 bp, Homo sapien
ctcaacgctgctagtgcctttttct

SEQ ID NO: 5200991 - DNA, 25 bp, Homo sapien
gttatacgaatgtgtaaaaatgact

SEQ ID NO: 5200992 - DNA, 25 bp, Homo sapien
ggagtatagttatacgaatgtgtaa

SEQ ID NO: 5200993 - DNA, 25 bp, Homo sapien
tctccgggaggccctcacggctcat

SEQ ID NO: 5200994 - DNA, 25 bp, Homo sapien
caaagtcagaatgatctccgggagg

SEQ ID NO: 5200995 - DNA, 25 bp, Homo sapien
aagtcagaatgatctccgggaggcc

SEQ ID NO: 5200996 - DNA, 25 bp, Homo sapien
atctccgggaggccctcacggctca

SEQ ID NO: 5200997 - DNA, 25 bp, Homo sapien
taagtcataggttatctgcttctca

SEQ ID NO: 5200998 - DNA, 25 bp, Homo sapien
ttgacaggttcataagctgggtctg

SEQ ID NO: 5200999 - DNA, 25 bp, Homo sapien
taagcagctattcttaagtcatagg

SEQ ID NO: 5201000 - DNA, 25 bp, Homo sapien
ttctcagtcatattctgctgatgga

SEQ ID NO: 5201001 - DNA, 25 bp, Homo sapien
agaagtgaagtgcccaggcatcctt

SEQ ID NO: 5201002 - DNA, 25 bp, Homo sapien
cagaagtgaagtgcccaggcatcct

SEQ ID NO: 5201003 - DNA, 25 bp, Homo sapien
gaagtgaagtgcccaggcatccttc

SEQ ID NO: 5201004 - DNA, 25 bp, Homo sapien
ccagaagtgaagtgcccaggcatcc

SEQ ID NO: 5201005 - DNA, 25 bp, Homo sapien
aagtatgtttggcattgtcacggta

SEQ ID NO: 5201006 - DNA, 25 bp, Homo sapien
cattttagtaaacctattggactgt

SEQ ID NO: 5201007 - DNA, 25 bp, Homo sapien
ggactgtaacatttcatatgtgaag

SEQ ID NO: 5201008 - DNA, 25 bp, Homo sapien
tatgtgaagtatgtttggcattgtc

SEQ ID NO: 5201009 - DNA, 25 bp, Homo sapien
atatatcaactttagtgaactaatg

SEQ ID NO: 5201010 - DNA, 25 bp, Homo sapien
agtcagatttagcaatggggggtta

SEQ ID NO: 5201011 - DNA, 25 bp, Homo sapien
gtcagatttagcaatggggggttat

SEQ ID NO: 5201012 - DNA, 25 bp, Homo sapien
gggttatatatcaactttagtgaac

SEQ ID NO: 5201013 - DNA, 25 bp, Homo sapien
tctccctcatcctggataaggtaaa

SEQ ID NO: 5201014 - DNA, 25 bp, Homo sapien
tgtcaataaccaggtctaagaagac

SEQ ID NO: 5201015 - DNA, 25 bp, Homo sapien
gataaggtaaaactgactgtcaata

SEQ ID NO: 5201016 - DNA, 25 bp, Homo sapien
taaccaggtctaagaagacaacaca

SEQ ID NO: 5201017 - DNA, 25 bp, Homo sapien
caattaaatagcaatggcatattct

SEQ ID NO: 5201018 - DNA, 25 bp, Homo sapien
gcaattaaatagcaatggcatattc

SEQ ID NO: 5201019 - DNA, 25 bp, Homo sapien
caaacggagaggaatgcagctttca

SEQ ID NO: 5201020 - DNA, 25 bp, Homo sapien
tgcagcttcaggtcaccggctccag

SEQ ID NO: 5201021 - DNA, 25 bp, Homo sapien
ttcagtgcctctgttcctaccagag

SEQ ID NO: 5201022 - DNA, 25 bp, Homo sapien
cagaactactagcagctcctaagtc

SEQ ID NO: 5201023 - DNA, 25 bp, Homo sapien
gcgttgtatggctcctcatggcaga

SEQ ID NO: 5201024 - DNA, 25 bp, Homo sapien
tggctgacaatctcaaggcgttgta

SEQ ID NO: 5201025 - DNA, 25 bp, Homo sapien
gcaaataagtgccagtcagtgacac

SEQ ID NO: 5201026 - DNA, 25 bp, Homo sapien
cagaaaggaggacgttgccagtgat

SEQ ID NO: 5201027 - DNA, 25 bp, Homo sapien
gtaacgaataaacaaatctggctct

SEQ ID NO: 5201028 - DNA, 25 bp, Homo sapien
gggacattagagataccttagtacc

SEQ ID NO: 5201029 - DNA, 25 bp, Homo sapien
gcattgactctgtagctgaaaggct

SEQ ID NO: 5201030 - DNA, 25 bp, Homo sapien
caatgacagataaacctaaaaggga

SEQ ID NO: 5201031 - DNA, 25 bp, Homo sapien
gccacactgtgcattagatatgcct

SEQ ID NO: 5201032 - DNA, 25 bp, Homo sapien
tcaaatagacatttagccacactgt

SEQ ID NO: 5201033 - DNA, 25 bp, Homo sapien
gtcattcttattgtggacacccacg

SEQ ID NO: 5201034 - DNA, 25 bp, Homo sapien
tggcagaaatccaactgctccagtc

SEQ ID NO: 5201035 - DNA, 25 bp, Homo sapien
cattcttgcacaggatcgtgctaat

SEQ ID NO: 5201036 - DNA, 25 bp, Homo sapien
attcttgcacaggatcgtgctaatt

SEQ ID NO: 5201037 - DNA, 25 bp, Homo sapien
ttcttgcacaggatcgtgctaattt

SEQ ID NO: 5201038 - DNA, 25 bp, Homo sapien
caattttagtgtatgcactggcaga

SEQ ID NO: 5201039 - DNA, 25 bp, Homo sapien
cttggggccagtggactgtggccct

SEQ ID NO: 5201040 - DNA, 25 bp, Homo sapien
tcttggggccagtggactgtggccc

SEQ ID NO: 5201041 - DNA, 25 bp, Homo sapien
ttggggccagtggactgtggccctc

SEQ ID NO: 5201042 - DNA, 25 bp, Homo sapien
aatatgcaatgtgtcatgaatttgt

SEQ ID NO: 5201043 - DNA, 25 bp, Homo sapien
atatgcaatgtgtcatgaatttgtg

SEQ ID NO: 5201044 - DNA, 25 bp, Homo sapien
aaaatgggcccagatacaaagccta

SEQ ID NO: 5201045 - DNA, 25 bp, Homo sapien
agatacaaagcctaatgtgagttcc

SEQ ID NO: 5201046 - DNA, 25 bp, Homo sapien
tgggcccagatacaaagcctaatgt

SEQ ID NO: 5201047 - DNA, 25 bp, Homo sapien
gcagttcactgtggatggcccccat

SEQ ID NO: 5201048 - DNA, 25 bp, Homo sapien
tattctaaggagttatctcaaaggc

SEQ ID NO: 5201049 - DNA, 25 bp, Homo sapien
caagcttaccaaggttagcaaaact

SEQ ID NO: 5201050 - DNA, 25 bp, Homo sapien
tttgaatgggttaggaaaagcctca

SEQ ID NO: 5201051 - DNA, 25 bp, Homo sapien
gcagtttgcatgagtaaaccatcag

SEQ ID NO: 5201052 - DNA, 25 bp, Homo sapien
tagtaagcaggccaatacacattct

SEQ ID NO: 5201053 - DNA, 25 bp, Homo sapien
tacatgcctatgtggtaaaactgca

SEQ ID NO: 5201054 - DNA, 25 bp, Homo sapien
gactttcagaatgggcatctggcca

SEQ ID NO: 5201055 - DNA, 25 bp, Homo sapien
taagtcctgcttcataagatgtcca

SEQ ID NO: 5201056 - DNA, 25 bp, Homo sapien
gaccaggtacaatatggccagtggc

SEQ ID NO: 5201057 - DNA, 25 bp, Homo sapien
gactctaattatccacagaccaggt

SEQ ID NO: 5201058 - DNA, 25 bp, Homo sapien
ggccagtggcagtacagatcatttc

SEQ ID NO: 5201059 - DNA, 25 bp, Homo sapien
gaatatattgctcgtgaaaggtgcc

SEQ ID NO: 5201060 - DNA, 25 bp, Homo sapien
gccttagtaacacagatttcccaga

SEQ ID NO: 5201061 - DNA, 25 bp, Homo sapien
taattctggtgagagtggtcaagcc

SEQ ID NO: 5201062 - DNA, 25 bp, Homo sapien
tgaaatgagctattggcccaatggc

SEQ ID NO: 5201063 - DNA, 25 bp, Homo sapien
taagagagattgctacctgctaggc

SEQ ID NO: 5201064 - DNA, 25 bp, Homo sapien
aatgagttctatcagtcccatggga

SEQ ID NO: 5201065 - DNA, 25 bp, Homo sapien
caaaaatgccatactctgggtgctc

SEQ ID NO: 5201066 - DNA, 25 bp, Homo sapien
taagtacacttagctatgacagaca

SEQ ID NO: 5201067 - DNA, 25 bp, Homo sapien
cccatgggatgttctgtgaaaaagt

SEQ ID NO: 5201068 - DNA, 25 bp, Homo sapien
taaagaagtccttatgaatgttagt

SEQ ID NO: 5201069 - DNA, 25 bp, Homo sapien
tgttagtcttggctcctgacaggac

SEQ ID NO: 5201070 - DNA, 25 bp, Homo sapien
tctgctttcgaaaactctctttagt

SEQ ID NO: 5201071 - DNA, 25 bp, Homo sapien
actctctttagtagtttgccaagcc

SEQ ID NO: 5201072 - DNA, 25 bp, Homo sapien
tgtgatccaccctcctaggcctcct

SEQ ID NO: 5201073 - DNA, 25 bp, Homo sapien
gtgctgtgattacgggcgtgagggt

SEQ ID NO: 5201074 - DNA, 25 bp, Homo sapien
ctaaagtgctgtgattacgggcgtg

SEQ ID NO: 5201075 - DNA, 25 bp, Homo sapien
aagtgctgtgattacgggcgtgagg

SEQ ID NO: 5201076 - DNA, 25 bp, Homo sapien
gcctcttacagatccagccttattg

SEQ ID NO: 5201077 - DNA, 25 bp, Homo sapien
caaggtcctattactgctgtttgga

SEQ ID NO: 5201078 - DNA, 25 bp, Homo sapien
tactgctgtttggaaataacttgcc

SEQ ID NO: 5201079 - DNA, 25 bp, Homo sapien
acatcctagtaatggcagatcctgc

SEQ ID NO: 5201080 - DNA, 25 bp, Homo sapien
caccctgcgtggctgtgtagataga

SEQ ID NO: 5201081 - DNA, 25 bp, Homo sapien
tcaccctgcgtggctgtgtagatag

SEQ ID NO: 5201082 - DNA, 25 bp, Homo sapien
ggatctcaagactcctgattggtca

SEQ ID NO: 5201083 - DNA, 25 bp, Homo sapien
aattggtaagagtcgctggcctgac

SEQ ID NO: 5201084 - DNA, 25 bp, Homo sapien
agtttccaatgttcctcccagacgt

SEQ ID NO: 5201085 - DNA, 25 bp, Homo sapien
cacttgggttcctgtagagatggcc

SEQ ID NO: 5201086 - DNA, 25 bp, Homo sapien
tcaccttggctgtgcctacatgatg

SEQ ID NO: 5201087 - DNA, 25 bp, Homo sapien
gcccagcccatgataacagatgttt

SEQ ID NO: 5201088 - DNA, 25 bp, Homo sapien
tatgaccactttgctattcccaagg

SEQ ID NO: 5201089 - DNA, 25 bp, Homo sapien
gagtgttcgtatcctgcttcagttc

SEQ ID NO: 5201090 - DNA, 25 bp, Homo sapien
cttgagcgagtttacactgtcagca

SEQ ID NO: 5201091 - DNA, 25 bp, Homo sapien
catgaatgcgttagctttgccatac

SEQ ID NO: 5201092 - DNA, 25 bp, Homo sapien
tataaatgtttctacagttgccaga

SEQ ID NO: 5201093 - DNA, 25 bp, Homo sapien
tttgacattgaattgaacatctctg

SEQ ID NO: 5201094 - DNA, 25 bp, Homo sapien
ggctttgcctattcacccatatttg

SEQ ID NO: 5201095 - DNA, 25 bp, Homo sapien
tttgctagcagaaccgaaacctttg

SEQ ID NO: 5201096 - DNA, 25 bp, Homo sapien
gattctcaacaagactggtagggaa

SEQ ID NO: 5201097 - DNA, 25 bp, Homo sapien
gttcgggctagtatgtttgcttgca

SEQ ID NO: 5201098 - DNA, 25 bp, Homo sapien
cttgtccaatcatgagcgcccgagt

SEQ ID NO: 5201099 - DNA, 25 bp, Homo sapien
gaggaacgcagcctacttttaccca

SEQ ID NO: 5201100 - DNA, 25 bp, Homo sapien
acagaagtaacgctccttgggccct

SEQ ID NO: 5201101 - DNA, 25 bp, Homo sapien
cacagctccgggtttacagaagtaa

SEQ ID NO: 5201102 - DNA, 25 bp, Homo sapien
taatgtaaattctcacagaggcctc

SEQ ID NO: 5201103 - DNA, 25 bp, Homo sapien
caaagtaacagtcatatgtggtctc

SEQ ID NO: 5201104 - DNA, 25 bp, Homo sapien
tatcttactgtgactccgaaaactg

SEQ ID NO: 5201105 - DNA, 25 bp, Homo sapien
ttagaaacccttcgctgaagcagca

SEQ ID NO: 5201106 - DNA, 25 bp, Homo sapien
tttgccttgtctgaagctatgggtc

SEQ ID NO: 5201107 - DNA, 25 bp, Homo sapien
tggaacagtctttggcagccttatc

SEQ ID NO: 5201108 - DNA, 25 bp, Homo sapien
caaatttattggtgcaggtgctgca

SEQ ID NO: 5201109 - DNA, 25 bp, Homo sapien
ccagtgcaatcagcagagacattga

SEQ ID NO: 5201110 - DNA, 25 bp, Homo sapien
tgtctcagctaatccaaagggagtt

SEQ ID NO: 5201111 - DNA, 25 bp, Homo sapien
ctgcggcgcgaataagagccggacc

SEQ ID NO: 5201112 - DNA, 25 bp, Homo sapien
gcgcgaataagagccggaccgcgct

SEQ ID NO: 5201113 - DNA, 25 bp, Homo sapien
cggaccgcgcttgcgcattgagtcc

SEQ ID NO: 5201114 - DNA, 25 bp, Homo sapien
ataagagccggaccgcgcttgcgca

SEQ ID NO: 5201115 - DNA, 25 bp, Homo sapien
gaccagaagttcagtcagagccatt

SEQ ID NO: 5201116 - DNA, 25 bp, Homo sapien
tagaagaaaagtcgagcaccctcac

SEQ ID NO: 5201117 - DNA, 25 bp, Homo sapien
tgtgccccagatgacaaagctctta

SEQ ID NO: 5201118 - DNA, 25 bp, Homo sapien
gccaaatcttacaaggtgccaacgt

SEQ ID NO: 5201119 - DNA, 25 bp, Homo sapien
aaccagatgatgattttggagcaca

SEQ ID NO: 5201120 - DNA, 25 bp, Homo sapien
ctggggtttgcctcttctttcggca

SEQ ID NO: 5201121 - DNA, 25 bp, Homo sapien
gggtttgcctcttctttcggcattg

SEQ ID NO: 5201122 - DNA, 25 bp, Homo sapien
agtgagaaaccagatgatgattttg

SEQ ID NO: 5201123 - DNA, 25 bp, Homo sapien
caatgtaaccatacttcaccattac

SEQ ID NO: 5201124 - DNA, 25 bp, Homo sapien
atttgccaatgtaaccatacttcac

SEQ ID NO: 5201125 - DNA, 25 bp, Homo sapien
gctctgtaatcatcagtgattcaaa

SEQ ID NO: 5201126 - DNA, 25 bp, Homo sapien
caatttttcccagctctgtaatcat

SEQ ID NO: 5201127 - DNA, 25 bp, Homo sapien
gaagcagttatcactttagtccctg

SEQ ID NO: 5201128 - DNA, 25 bp, Homo sapien
tcacagtctttctatgggggaagca

SEQ ID NO: 5201129 - DNA, 25 bp, Homo sapien
cctgaactccttatacctcgtttct

SEQ ID NO: 5201130 - DNA, 25 bp, Homo sapien
gcatgctgtgtgatcggatgttagc

SEQ ID NO: 5201131 - DNA, 25 bp, Homo sapien
gggagaggcgccggcaggaacccaa

SEQ ID NO: 5201132 - DNA, 25 bp, Homo sapien
ggagaggcgccggcaggaacccaag

SEQ ID NO: 5201133 - DNA, 25 bp, Homo sapien
agcctcgacgcccactctggcagcg

SEQ ID NO: 5201134 - DNA, 25 bp, Homo sapien
cagcctcgacgcccactctggcagc

SEQ ID NO: 5201135 - DNA, 25 bp, Homo sapien
ttatcagtttcaaataatttatgca

SEQ ID NO: 5201136 - DNA, 25 bp, Homo sapien
tcattatcagtttcaaataatttat

SEQ ID NO: 5201137 - DNA, 25 bp, Homo sapien
tatcagtttcaaataatttatgcat

SEQ ID NO: 5201138 - DNA, 25 bp, Homo sapien
ctggttcattatcagtttcaaataa

SEQ ID NO: 5201139 - DNA, 25 bp, Homo sapien
gaagagaggtttctccaacattcat

SEQ ID NO: 5201140 - DNA, 25 bp, Homo sapien
tagggctatccacttccccggaaga

SEQ ID NO: 5201141 - DNA, 25 bp, Homo sapien
cagaaggtgactggacaatcagcgg

SEQ ID NO: 5201142 - DNA, 25 bp, Homo sapien
taggagttctctccacagcaacatg

SEQ ID NO: 5201143 - DNA, 25 bp, Homo sapien
gagacaacatttgcatgcatccttt

SEQ ID NO: 5201144 - DNA, 25 bp, Homo sapien
ctgacatcccgacccctggaagaga

SEQ ID NO: 5201145 - DNA, 25 bp, Homo sapien
tcctcaggggtatcctgctgctttt

SEQ ID NO: 5201146 - DNA, 25 bp, Homo sapien
actggaccaggtagcagacaagccc

SEQ ID NO: 5201147 - DNA, 25 bp, Homo sapien
ccttagactcatggttctccacatc

SEQ ID NO: 5201148 - DNA, 25 bp, Homo sapien
tagactcatggttctccacatctga

SEQ ID NO: 5201149 - DNA, 25 bp, Homo sapien
ttagactcatggttctccacatctg

SEQ ID NO: 5201150 - DNA, 25 bp, Homo sapien
aaccttagactcatggttctccaca

SEQ ID NO: 5201151 - DNA, 25 bp, Homo sapien
gactgctgaattcaagaggccactg

SEQ ID NO: 5201152 - DNA, 25 bp, Homo sapien
tgttactagggctgaagacttgctg

SEQ ID NO: 5201153 - DNA, 25 bp, Homo sapien
cagatgctgatacttgcccaagtgg

SEQ ID NO: 5201154 - DNA, 25 bp, Homo sapien
tatattggcacaaggctgtggtcgc

SEQ ID NO: 5201155 - DNA, 25 bp, Homo sapien
tttgtagggcctttagacatgcctg

SEQ ID NO: 5201156 - DNA, 25 bp, Homo sapien
gacatgcctgctacctacagagaag

SEQ ID NO: 5201157 - DNA, 25 bp, Homo sapien
ttctagaatgcccagcgtcgcctta

SEQ ID NO: 5201158 - DNA, 25 bp, Homo sapien
gcattttggagaaccctgcggtcag

SEQ ID NO: 5201159 - DNA, 25 bp, Homo sapien
ccctcgcaggatagaagaaagacac

SEQ ID NO: 5201160 - DNA, 25 bp, Homo sapien
tctgtgccttcctatgccactggag

SEQ ID NO: 5201161 - DNA, 25 bp, Homo sapien
taataccccatattttgtgagtggc

SEQ ID NO: 5201162 - DNA, 25 bp, Homo sapien
caagggcctactgagagcactgtaa

SEQ ID NO: 5201163 - DNA, 25 bp, Homo sapien
gttgcattccacaagaatccagggt

SEQ ID NO: 5201164 - DNA, 25 bp, Homo sapien
ggaagtcaagactaagaaattgttg

SEQ ID NO: 5201165 - DNA, 25 bp, Homo sapien
agcccttgagttgcattccacaaga

SEQ ID NO: 5201166 - DNA, 25 bp, Homo sapien
aattgttgtccccaaagcgggtcat

SEQ ID NO: 5201167 - DNA, 25 bp, Homo sapien
tactcacacaacatccattgactcg

SEQ ID NO: 5201168 - DNA, 25 bp, Homo sapien
ggaaccaccagtctttagcagagca

SEQ ID NO: 5201169 - DNA, 25 bp, Homo sapien
gcagtaatgctacaacatttgccct

SEQ ID NO: 5201170 - DNA, 25 bp, Homo sapien
tgcaaccccacctacagatgtgtgt

SEQ ID NO: 5201171 - DNA, 25 bp, Homo sapien
gagcagggtagctaagtccagaaac

SEQ ID NO: 5201172 - DNA, 25 bp, Homo sapien
ttcccaaaggtttgatgccttcagg

SEQ ID NO: 5201173 - DNA, 25 bp, Homo sapien
ctttcccaaaggtttgatgccttca

SEQ ID NO: 5201174 - DNA, 25 bp, Homo sapien
cagaaacaacggattctcctctctc

SEQ ID NO: 5201175 - DNA, 25 bp, Homo sapien
gccataactgttggtataccccgtc

SEQ ID NO: 5201176 - DNA, 25 bp, Homo sapien
tttaatgatttcagtgccataactg

SEQ ID NO: 5201177 - DNA, 25 bp, Homo sapien
cataactgttggtataccccgtcat

SEQ ID NO: 5201178 - DNA, 25 bp, Homo sapien
aatgatttcagtgccataactgttg

SEQ ID NO: 5201179 - DNA, 25 bp, Homo sapien
taatgaaactataatctcccaggcc

SEQ ID NO: 5201180 - DNA, 25 bp, Homo sapien
aatgaaactataatctcccaggcct

SEQ ID NO: 5201181 - DNA, 25 bp, Homo sapien
tgaaactataatctcccaggcctac

SEQ ID NO: 5201182 - DNA, 25 bp, Homo sapien
tggaaaccaacagtcctgtgcttta

SEQ ID NO: 5201183 - DNA, 25 bp, Homo sapien
gaaaccaacagtcctgtgctttatt

SEQ ID NO: 5201184 - DNA, 25 bp, Homo sapien
ggaaaccaacagtcctgtgctttat

SEQ ID NO: 5201185 - DNA, 25 bp, Homo sapien
aaccaacagtcctgtgctttattat

SEQ ID NO: 5201186 - DNA, 25 bp, Homo sapien
ctgtgagttggcacaccccactgga

SEQ ID NO: 5201187 - DNA, 25 bp, Homo sapien
taacacgtgacaagggattttcgag

SEQ ID NO: 5201188 - DNA, 25 bp, Homo sapien
agaagctgctgccaataacacgtga

SEQ ID NO: 5201189 - DNA, 25 bp, Homo sapien
tgctgccaataacacgtgacaaggg

SEQ ID NO: 5201190 - DNA, 25 bp, Homo sapien
aaatagttctgtggtacactggaga

SEQ ID NO: 5201191 - DNA, 25 bp, Homo sapien
tctgtcttcatgtacagcatactgt

SEQ ID NO: 5201192 - DNA, 25 bp, Homo sapien
cactggagacccctattggtgagac

SEQ ID NO: 5201193 - DNA, 25 bp, Homo sapien
tgagactcagacagtgaattcgaag

SEQ ID NO: 5201194 - DNA, 25 bp, Homo sapien
tttttgccctgagctaacaagatcc

SEQ ID NO: 5201195 - DNA, 25 bp, Homo sapien
gagctaacaagatccagaaactccc

SEQ ID NO: 5201196 - DNA, 25 bp, Homo sapien
cagaaactccctgttatgtacaaaa

SEQ ID NO: 5201197 - DNA, 25 bp, Homo sapien
tgccctgagctaacaagatccagaa

SEQ ID NO: 5201198 - DNA, 25 bp, Homo sapien
cactggatgggtacttatagtcagc

SEQ ID NO: 5201199 - DNA, 25 bp, Homo sapien
aaactgtgtcaagaatgcatccatc

SEQ ID NO: 5201200 - DNA, 25 bp, Homo sapien
ttcaaccccgtcagcaatttcagca

SEQ ID NO: 5201201 - DNA, 25 bp, Homo sapien
catctttgcatattcccttgccagg

SEQ ID NO: 5201202 - DNA, 25 bp, Homo sapien
ctctccatgaagtaaatttccacat

SEQ ID NO: 5201203 - DNA, 25 bp, Homo sapien
catgaagtaaatttccacatgcaag

SEQ ID NO: 5201204 - DNA, 25 bp, Homo sapien
gaaagctttgaatcctctccatgaa

SEQ ID NO: 5201205 - DNA, 25 bp, Homo sapien
tccatgaagtaaatttccacatgca

SEQ ID NO: 5201206 - DNA, 25 bp, Homo sapien
tgagactttctgtgaggcctgcaat

SEQ ID NO: 5201207 - DNA, 25 bp, Homo sapien
ttctccaagggcctagcaatcacca

SEQ ID NO: 5201208 - DNA, 25 bp, Homo sapien
gactttctgtgaggcctgcaatttg

SEQ ID NO: 5201209 - DNA, 25 bp, Homo sapien
catcacatatgggtggacaggaaag

SEQ ID NO: 5201210 - DNA, 25 bp, Homo sapien
aaacaactcacttttacataaagca

SEQ ID NO: 5201211 - DNA, 25 bp, Homo sapien
tagcgccaaacaactcacttttaca

SEQ ID NO: 5201212 - DNA, 25 bp, Homo sapien
ctgtggggcagttagtgctcatcac

SEQ ID NO: 5201213 - DNA, 25 bp, Homo sapien
gctcatcactgacaccaagagacaa

SEQ ID NO: 5201214 - DNA, 25 bp, Homo sapien
cagcagctccaagataagggtaaag

SEQ ID NO: 5201215 - DNA, 25 bp, Homo sapien
aagatagtctggtgtacgcacggtg

SEQ ID NO: 5201216 - DNA, 25 bp, Homo sapien
aaagatagtctggtgtacgcacggt

SEQ ID NO: 5201217 - DNA, 25 bp, Homo sapien
taaaggggcatctaaatcagacact

SEQ ID NO: 5201218 - DNA, 25 bp, Homo sapien
ggcggaggcacaggaagctatggaa

SEQ ID NO: 5201219 - DNA, 25 bp, Homo sapien
taaatcagacactcgttgtgctgtc

SEQ ID NO: 5201220 - DNA, 25 bp, Homo sapien
tgtgacaggcggaggcacaggaagc

SEQ ID NO: 5201221 - DNA, 25 bp, Homo sapien
ctggcggtctccaacctaaatgcat

SEQ ID NO: 5201222 - DNA, 25 bp, Homo sapien
cacctgatttaaactggtgaactgg

SEQ ID NO: 5201223 - DNA, 25 bp, Homo sapien
ttaaactggtgaactggcggtctcc

SEQ ID NO: 5201224 - DNA, 25 bp, Homo sapien
ggtgaactggcggtctccaacctaa

SEQ ID NO: 5201225 - DNA, 25 bp, Homo sapien
tattgctcatgattgacaccaagag

SEQ ID NO: 5201226 - DNA, 25 bp, Homo sapien
ttattgctcatgattgacaccaaga

SEQ ID NO: 5201227 - DNA, 25 bp, Homo sapien
agaatatgaacattagtgatatttt

SEQ ID NO: 5201228 - DNA, 25 bp, Homo sapien
ctgtgcagaatatgaacattagtga

SEQ ID NO: 5201229 - DNA, 25 bp, Homo sapien
tgcagaatatgaacattagtgatat

SEQ ID NO: 5201230 - DNA, 25 bp, Homo sapien
gaatatgaacattagtgatattttc

SEQ ID NO: 5201231 - DNA, 25 bp, Homo sapien
gaaggtaagcactacagcaggcagc

SEQ ID NO: 5201232 - DNA, 25 bp, Homo sapien
cacagagggttccacagtcaataca

SEQ ID NO: 5201233 - DNA, 25 bp, Homo sapien
tcaactgactcgacaatagccaggc

SEQ ID NO: 5201234 - DNA, 25 bp, Homo sapien
ccagacttttgggataatcaaggac

SEQ ID NO: 5201235 - DNA, 25 bp, Homo sapien
tgtctgtccgagcagtaaagctgac

SEQ ID NO: 5201236 - DNA, 25 bp, Homo sapien
gagcctcagggaaaacgactccact

SEQ ID NO: 5201237 - DNA, 25 bp, Homo sapien
aatcagtctggccaggctaggcgct

SEQ ID NO: 5201238 - DNA, 25 bp, Homo sapien
ggtccttcatttagacggctgcaga

SEQ ID NO: 5201239 - DNA, 25 bp, Homo sapien
ctaacaacaattttatgaggtaact

SEQ ID NO: 5201240 - DNA, 25 bp, Homo sapien
tgagccaccaaacccggcccctcta

SEQ ID NO: 5201241 - DNA, 25 bp, Homo sapien
cggcccctctaacaacaattttatg

SEQ ID NO: 5201242 - DNA, 25 bp, Homo sapien
tgtgagccaccaaacccggcccctc

SEQ ID NO: 5201243 - DNA, 25 bp, Homo sapien
cagagatgtggacgtaagaaacgtg

SEQ ID NO: 5201244 - DNA, 25 bp, Homo sapien
gagctacagagatgtggacgtaaga

SEQ ID NO: 5201245 - DNA, 25 bp, Homo sapien
tacagagatgtggacgtaagaaacg

SEQ ID NO: 5201246 - DNA, 25 bp, Homo sapien
agatgtggacgtaagaaacgtgcat

SEQ ID NO: 5201247 - DNA, 25 bp, Homo sapien
aactctgggtggtaatggtctgcca

SEQ ID NO: 5201248 - DNA, 25 bp, Homo sapien
tcaggtgtgatgcaaggcttggcca

SEQ ID NO: 5201249 - DNA, 25 bp, Homo sapien
gagcctttcgtgtttgctcttgagc

SEQ ID NO: 5201250 - DNA, 25 bp, Homo sapien
agtcgctgcggccttgagcctttcg

SEQ ID NO: 5201251 - DNA, 25 bp, Homo sapien
aggaccctacaccacagaccagagc

SEQ ID NO: 5201252 - DNA, 25 bp, Homo sapien
caggcagcatatccccatttggtga

SEQ ID NO: 5201253 - DNA, 25 bp, Homo sapien
gggtctggcctttccagcagaattt

SEQ ID NO: 5201254 - DNA, 25 bp, Homo sapien
catggccactgcggcagcatgaggc

SEQ ID NO: 5201255 - DNA, 25 bp, Homo sapien
atctggtgcttttagaccaacggca

SEQ ID NO: 5201256 - DNA, 25 bp, Homo sapien
taaattctgtgcataccaaaaacag

SEQ ID NO: 5201257 - DNA, 25 bp, Homo sapien
ttcccatcttcttaagcaccttaaa

SEQ ID NO: 5201258 - DNA, 25 bp, Homo sapien
cggcataatgttgtagggcttccca

SEQ ID NO: 5201259 - DNA, 25 bp, Homo sapien
tcattcttcagctatttcctgtccc

SEQ ID NO: 5201260 - DNA, 25 bp, Homo sapien
cattcttcagctatttcctgtccct

SEQ ID NO: 5201261 - DNA, 25 bp, Homo sapien
ttcttcagctatttcctgtccctct

SEQ ID NO: 5201262 - DNA, 25 bp, Homo sapien
tcttcagctatttcctgtccctctt

SEQ ID NO: 5201263 - DNA, 25 bp, Homo sapien
cagacaccttatgatcatcagtcct

SEQ ID NO: 5201264 - DNA, 25 bp, Homo sapien
agacaccttatgatcatcagtcctg

SEQ ID NO: 5201265 - DNA, 25 bp, Homo sapien
cacagacaccttatgatcatcagtc

SEQ ID NO: 5201266 - DNA, 25 bp, Homo sapien
ccacagacaccttatgatcatcagt

SEQ ID NO: 5201267 - DNA, 25 bp, Homo sapien
tggtggctgaacctttacatgttct

SEQ ID NO: 5201268 - DNA, 25 bp, Homo sapien
cagaagtgagcagtttttggtggct

SEQ ID NO: 5201269 - DNA, 25 bp, Homo sapien
ctagagggtctcagacaaatcaaat

SEQ ID NO: 5201270 - DNA, 25 bp, Homo sapien
caaatccacctgttaatctgcccag

SEQ ID NO: 5201271 - DNA, 25 bp, Homo sapien
aagtcctcagtgacctacaaagaga

SEQ ID NO: 5201272 - DNA, 25 bp, Homo sapien
cataaagcaagtcctcagtgaccta

SEQ ID NO: 5201273 - DNA, 25 bp, Homo sapien
agtcctcagtgacctacaaagagac

SEQ ID NO: 5201274 - DNA, 25 bp, Homo sapien
aagcaagtcctcagtgacctacaaa

SEQ ID NO: 5201275 - DNA, 25 bp, Homo sapien
cgggttttgatgtgaaacaagcaac

SEQ ID NO: 5201276 - DNA, 25 bp, Homo sapien
ggttttgatgtgaaacaagcaacat

SEQ ID NO: 5201277 - DNA, 25 bp, Homo sapien
gtaaatgacgggttttgatgtgaaa

SEQ ID NO: 5201278 - DNA, 25 bp, Homo sapien
tgacgggttttgatgtgaaacaagc

SEQ ID NO: 5201279 - DNA, 25 bp, Homo sapien
gtttccatgggtgtctgagtagcag

SEQ ID NO: 5201280 - DNA, 25 bp, Homo sapien
ggtttccatgggtgtctgagtagca

SEQ ID NO: 5201281 - DNA, 25 bp, Homo sapien
ctatgaataggagagccctgcacct

SEQ ID NO: 5201282 - DNA, 25 bp, Homo sapien
tgaaagcaacaaggagcaaaaggat

SEQ ID NO: 5201283 - DNA, 25 bp, Homo sapien
tcattcttcagaggagcccatcgtc

SEQ ID NO: 5201284 - DNA, 25 bp, Homo sapien
aggaggccccggttctagcttcatc

SEQ ID NO: 5201285 - DNA, 25 bp, Homo sapien
aactgtagatcagctggccccacag

SEQ ID NO: 5201286 - DNA, 25 bp, Homo sapien
agcatacataggagacaaggatttg

SEQ ID NO: 5201287 - DNA, 25 bp, Homo sapien
cagcatacataggagacaaggattt

SEQ ID NO: 5201288 - DNA, 25 bp, Homo sapien
aagtttacgcgatttagtttcacag

SEQ ID NO: 5201289 - DNA, 25 bp, Homo sapien
taagtttacgcgatttagtttcaca

SEQ ID NO: 5201290 - DNA, 25 bp, Homo sapien
gctatgcccagcacaatttacgtct

SEQ ID NO: 5201291 - DNA, 25 bp, Homo sapien
gcccagcacaatttacgtctatgaa

SEQ ID NO: 5201292 - DNA, 25 bp, Homo sapien
cagcacaatttacgtctatgaactg

SEQ ID NO: 5201293 - DNA, 25 bp, Homo sapien
gaattacatcctaatatgtatagct

SEQ ID NO: 5201294 - DNA, 25 bp, Homo sapien
agttggtttctataatggttatagt

SEQ ID NO: 5201295 - DNA, 25 bp, Homo sapien
tgaagttggtttctataatggttat

SEQ ID NO: 5201296 - DNA, 25 bp, Homo sapien
aatgaagttggtttctataatggtt

SEQ ID NO: 5201297 - DNA, 25 bp, Homo sapien
gaagttggtttctataatggttata

SEQ ID NO: 5201298 - DNA, 25 bp, Homo sapien
gcagagatttgccctgaatggtttg

SEQ ID NO: 5201299 - DNA, 25 bp, Homo sapien
gcactttttacaggctcaagtgaca

SEQ ID NO: 5201300 - DNA, 25 bp, Homo sapien
aggagcaggcactttttacaggctc

SEQ ID NO: 5201301 - DNA, 25 bp, Homo sapien
gacatccagtctattaaggctgaca

SEQ ID NO: 5201302 - DNA, 25 bp, Homo sapien
gctgtgaacttttgtacacgggtat

SEQ ID NO: 5201303 - DNA, 25 bp, Homo sapien
gaacttttgtacacgggtatagtca

SEQ ID NO: 5201304 - DNA, 25 bp, Homo sapien
tttgtacacgggtatagtcacattc

SEQ ID NO: 5201305 - DNA, 25 bp, Homo sapien
gcagctgtgaacttttgtacacggg

SEQ ID NO: 5201306 - DNA, 25 bp, Homo sapien
tagagacaccgggtctttgggtgcc

SEQ ID NO: 5201307 - DNA, 25 bp, Homo sapien
ggaagcatagaagctgtttagagac

SEQ ID NO: 5201308 - DNA, 25 bp, Homo sapien
ggttccaggcagctcgtcactcctg

SEQ ID NO: 5201309 - DNA, 25 bp, Homo sapien
gatatcacagatgtctctcttgctg

SEQ ID NO: 5201310 - DNA, 25 bp, Homo sapien
tagttcatgctgatccacggtggat

SEQ ID NO: 5201311 - DNA, 25 bp, Homo sapien
cagacacggcctctcattattttta

SEQ ID NO: 5201312 - DNA, 25 bp, Homo sapien
cttattacagcggtatagttcatgc

SEQ ID NO: 5201313 - DNA, 25 bp, Homo sapien
aatttacctccagaccaaagattgg

SEQ ID NO: 5201314 - DNA, 25 bp, Homo sapien
ccaaaacgagggaagtggagttatg

SEQ ID NO: 5201315 - DNA, 25 bp, Homo sapien
tgacgataccaaaacgagggaagtg

SEQ ID NO: 5201316 - DNA, 25 bp, Homo sapien
gagttatggaagtataaatgtgcat

SEQ ID NO: 5201317 - DNA, 25 bp, Homo sapien
ggaagtggagttatggaagtataaa

SEQ ID NO: 5201318 - DNA, 25 bp, Homo sapien
tctgctgacagctgtatgatgcaca

SEQ ID NO: 5201319 - DNA, 25 bp, Homo sapien
gatgcacactcagtgcggcaggttg

SEQ ID NO: 5201320 - DNA, 25 bp, Homo sapien
gggagctgagggtttcatcaataaa

SEQ ID NO: 5201321 - DNA, 25 bp, Homo sapien
caataaatatgactctgatcgcttc

SEQ ID NO: 5201322 - DNA, 25 bp, Homo sapien
actcaggtccaaaatgctcttcttc

SEQ ID NO: 5201323 - DNA, 25 bp, Homo sapien
catcttcttccaggtgggtgttggt

SEQ ID NO: 5201324 - DNA, 25 bp, Homo sapien
caggtccaaaatgctcttcttcatt

SEQ ID NO: 5201325 - DNA, 25 bp, Homo sapien
gcatcttcttccaggtgggtgttgg

SEQ ID NO: 5201326 - DNA, 25 bp, Homo sapien
attgggattggtgccccagtttgga

SEQ ID NO: 5201327 - DNA, 25 bp, Homo sapien
tattgggattggtgccccagtttgg

SEQ ID NO: 5201328 - DNA, 25 bp, Homo sapien
tgggattggtgccccagtttggagg

SEQ ID NO: 5201329 - DNA, 25 bp, Homo sapien
ctattgggattggtgccccagtttg

SEQ ID NO: 5201330 - DNA, 25 bp, Homo sapien
aggcttcatctcaacccccgtgcta

SEQ ID NO: 5201331 - DNA, 25 bp, Homo sapien
gcttcatctcaacccccgtgctaca

SEQ ID NO: 5201332 - DNA, 25 bp, Homo sapien
cccccgtgctacactgctcctctgg

SEQ ID NO: 5201333 - DNA, 25 bp, Homo sapien
atctcaacccccgtgctacactgct

SEQ ID NO: 5201334 - DNA, 25 bp, Homo sapien
gaaagggaaacagggctttgcagct

SEQ ID NO: 5201335 - DNA, 25 bp, Homo sapien
cagggctttgcagcttttttaacct

SEQ ID NO: 5201336 - DNA, 25 bp, Homo sapien
ttggaaagggaaacagggctttgca

SEQ ID NO: 5201337 - DNA, 25 bp, Homo sapien
agggaaacagggctttgcagctttt

SEQ ID NO: 5201338 - DNA, 25 bp, Homo sapien
ctgcaaaggagatcgtttcctatgt

SEQ ID NO: 5201339 - DNA, 25 bp, Homo sapien
tgcaaaggagatcgtttcctatgtt

SEQ ID NO: 5201340 - DNA, 25 bp, Homo sapien
gcaaaggagatcgtttcctatgttc

SEQ ID NO: 5201341 - DNA, 25 bp, Homo sapien
tatattagtgtgaccgtcggtaagt

SEQ ID NO: 5201342 - DNA, 25 bp, Homo sapien
tattagtgtgaccgtcggtaagtac

SEQ ID NO: 5201343 - DNA, 25 bp, Homo sapien
tgaccgtcggtaagtaccaacttca

SEQ ID NO: 5201344 - DNA, 25 bp, Homo sapien
tagtgtgaccgtcggtaagtaccaa

SEQ ID NO: 5201345 - DNA, 25 bp, Homo sapien
taatggctgtgaatacggttatcgc

SEQ ID NO: 5201346 - DNA, 25 bp, Homo sapien
aatgtgcgctcccataaagagcagc

SEQ ID NO: 5201347 - DNA, 25 bp, Homo sapien
cataaggccagcattactgcgagct

SEQ ID NO: 5201348 - DNA, 25 bp, Homo sapien
taggaagatgtgaggccgtgcacca

SEQ ID NO: 5201349 - DNA, 25 bp, Homo sapien
tggtaatgtcagtataccatcagct

SEQ ID NO: 5201350 - DNA, 25 bp, Homo sapien
tttggtaatgtcagtataccatcag

SEQ ID NO: 5201351 - DNA, 25 bp, Homo sapien
cgtttggtaatgtcagtataccatc

SEQ ID NO: 5201352 - DNA, 25 bp, Homo sapien
gtaatgtcagtataccatcagcttc

SEQ ID NO: 5201353 - DNA, 25 bp, Homo sapien
gtctatggcacattcactagaaaag

SEQ ID NO: 5201354 - DNA, 25 bp, Homo sapien
tgtggagcagaaacttggccataac

SEQ ID NO: 5201355 - DNA, 25 bp, Homo sapien
tgcacattgacttgcctgcctggaa

SEQ ID NO: 5201356 - DNA, 25 bp, Homo sapien
tggaacaagttatcgggcaccattc

SEQ ID NO: 5201357 - DNA, 25 bp, Homo sapien
tttttgctcttaggttgcttgttga

SEQ ID NO: 5201358 - DNA, 25 bp, Homo sapien
acagagctagatgatatcaagtgcc

SEQ ID NO: 5201359 - DNA, 25 bp, Homo sapien
ccccagacttgggactcacagagct

SEQ ID NO: 5201360 - DNA, 25 bp, Homo sapien
tatcaagtgcctcttagccataaaa

SEQ ID NO: 5201361 - DNA, 25 bp, Homo sapien
aaagatgagggccatttattcccac

SEQ ID NO: 5201362 - DNA, 25 bp, Homo sapien
aagcctgaaagatgagggccattta

SEQ ID NO: 5201363 - DNA, 25 bp, Homo sapien
tttattcccacttcctggcgtggga

SEQ ID NO: 5201364 - DNA, 25 bp, Homo sapien
cttcctggcgtgggacttctccttt

SEQ ID NO: 5201365 - DNA, 25 bp, Homo sapien
tggaggtatagaaggattggcatta

SEQ ID NO: 5201366 - DNA, 25 bp, Homo sapien
ggttggaggtatagaaggattggca

SEQ ID NO: 5201367 - DNA, 25 bp, Homo sapien
ttggaggtatagaaggattggcatt

SEQ ID NO: 5201368 - DNA, 25 bp, Homo sapien
gaggtatagaaggattggcattatt

SEQ ID NO: 5201369 - DNA, 25 bp, Homo sapien
tgatgggccataactgtactcgcac

SEQ ID NO: 5201370 - DNA, 25 bp, Homo sapien
gtgatgaagtgcctcttccgcccaa

SEQ ID NO: 5201371 - DNA, 25 bp, Homo sapien
tcggcaagtgctgatgaatggctgc

SEQ ID NO: 5201372 - DNA, 25 bp, Homo sapien
tctgctgctaaactgggtagttggc

SEQ ID NO: 5201373 - DNA, 25 bp, Homo sapien
cttatatcttgggagccaagatggc

SEQ ID NO: 5201374 - DNA, 25 bp, Homo sapien
tcccacacccacagagtcttcctga

SEQ ID NO: 5201375 - DNA, 25 bp, Homo sapien
gggtcccacacccacagagtcttcc

SEQ ID NO: 5201376 - DNA, 25 bp, Homo sapien
ccacacccacagagtcttcctgatt

SEQ ID NO: 5201377 - DNA, 25 bp, Homo sapien
tgaaaaatgaactgctcctagaggt

SEQ ID NO: 5201378 - DNA, 25 bp, Homo sapien
tatcacctgctgtaaattggctctg

SEQ ID NO: 5201379 - DNA, 25 bp, Homo sapien
tggtactcagattcgatatgtgctc

SEQ ID NO: 5201380 - DNA, 25 bp, Homo sapien
tagaaaggccattagcaacacgtgt

SEQ ID NO: 5201381 - DNA, 25 bp, Homo sapien
ccagtggtgcctgaggcagtgcttg

SEQ ID NO: 5201382 - DNA, 25 bp, Homo sapien
ttcttctaagtaattaattccagtg

SEQ ID NO: 5201383 - DNA, 25 bp, Homo sapien
gaggcagtgcttggtcgctgccact

SEQ ID NO: 5201384 - DNA, 25 bp, Homo sapien
tggtcgctgccactggtgtggcaat

SEQ ID NO: 5201385 - DNA, 25 bp, Homo sapien
ctttttgtgaaggcatcactagcaa

SEQ ID NO: 5201386 - DNA, 25 bp, Homo sapien
ctctttttgtgaaggcatcactagc

SEQ ID NO: 5201387 - DNA, 25 bp, Homo sapien
tctttttgtgaaggcatcactagca

SEQ ID NO: 5201388 - DNA, 25 bp, Homo sapien
gaaatgtgacatttggattgaccaa

SEQ ID NO: 5201389 - DNA, 25 bp, Homo sapien
tttattgggtcattagaaatgtgac

SEQ ID NO: 5201390 - DNA, 25 bp, Homo sapien
catggagctagactagggtatttta

SEQ ID NO: 5201391 - DNA, 25 bp, Homo sapien
ggctcagaaattccccaaattgtag

SEQ ID NO: 5201392 - DNA, 25 bp, Homo sapien
tttagtaagagcagacagcccgtct

SEQ ID NO: 5201393 - DNA, 25 bp, Homo sapien
tctattagaagctgccccctagttt

SEQ ID NO: 5201394 - DNA, 25 bp, Homo sapien
gacagcccgtctattagaagctgcc

SEQ ID NO: 5201395 - DNA, 25 bp, Homo sapien
taagagcagacagcccgtctattag

SEQ ID NO: 5201396 - DNA, 25 bp, Homo sapien
tcttggcagcatgagcaaaagttgg

SEQ ID NO: 5201397 - DNA, 25 bp, Homo sapien
ggtttatccacgatgacatgcaggc

SEQ ID NO: 5201398 - DNA, 25 bp, Homo sapien
ttactgtcgtagtgccaggttgtgg

SEQ ID NO: 5201399 - DNA, 25 bp, Homo sapien
gctgaatttgtacgcagagcaccga

SEQ ID NO: 5201400 - DNA, 25 bp, Homo sapien
taatctcctacagttcagctttcat

SEQ ID NO: 5201401 - DNA, 25 bp, Homo sapien
gatttcttgtgtcttaatctcctac

SEQ ID NO: 5201402 - DNA, 25 bp, Homo sapien
tattcctgcttgcttatggtgtcca

SEQ ID NO: 5201403 - DNA, 25 bp, Homo sapien
ctatctcatttttaggtaggtctag

SEQ ID NO: 5201404 - DNA, 25 bp, Homo sapien
tgccggcaaaatcatggccctgctc

SEQ ID NO: 5201405 - DNA, 25 bp, Homo sapien
gtgtgacggtcaggcggtccctgaa

SEQ ID NO: 5201406 - DNA, 25 bp, Homo sapien
ggatgtgaagcctgccggcaaaatc

SEQ ID NO: 5201407 - DNA, 25 bp, Homo sapien
tacgcagtgtgacggtcaggcggtc

SEQ ID NO: 5201408 - DNA, 25 bp, Homo sapien
ggctcctccaggataggcttatgta

SEQ ID NO: 5201409 - DNA, 25 bp, Homo sapien
ctcatataacaatccagtgctggtg

SEQ ID NO: 5201410 - DNA, 25 bp, Homo sapien
gaactggagtgaagcacttactgcc

SEQ ID NO: 5201411 - DNA, 25 bp, Homo sapien
taaatacaacgcagtgagacactct

SEQ ID NO: 5201412 - DNA, 25 bp, Homo sapien
tattcaaggagctggtaggaagtgt

SEQ ID NO: 5201413 - DNA, 25 bp, Homo sapien
gcaaatagttcattaatgctagtag

SEQ ID NO: 5201414 - DNA, 25 bp, Homo sapien
taatacatgcagaactgaagcatga

SEQ ID NO: 5201415 - DNA, 25 bp, Homo sapien
taaatggatgcataattcaggcaat

SEQ ID NO: 5201416 - DNA, 25 bp, Homo sapien
tctagctggcgagttggaaaggcaa

SEQ ID NO: 5201417 - DNA, 25 bp, Homo sapien
cactttgcaaatcagcatgtggctt

SEQ ID NO: 5201418 - DNA, 25 bp, Homo sapien
gcaagatcaaactgcctggttgtga

SEQ ID NO: 5201419 - DNA, 25 bp, Homo sapien
tttgcaagccggagggaactgaagc

SEQ ID NO: 5201420 - DNA, 25 bp, Homo sapien
tctgagcaatgctgacgaggcctgt

SEQ ID NO: 5201421 - DNA, 25 bp, Homo sapien
caagagtggaggcaaacaagagctt

SEQ ID NO: 5201422 - DNA, 25 bp, Homo sapien
gaagcaagcttcacctaagtgtagt

SEQ ID NO: 5201423 - DNA, 25 bp, Homo sapien
aaataatagtatcccagtctggctg

SEQ ID NO: 5201424 - DNA, 25 bp, Homo sapien
atctctgaatagaccaataacagga

SEQ ID NO: 5201425 - DNA, 25 bp, Homo sapien
tctctgaatagaccaataacaggat

SEQ ID NO: 5201426 - DNA, 25 bp, Homo sapien
aagaagttgaatctctgaatagacc

SEQ ID NO: 5201427 - DNA, 25 bp, Homo sapien
ccaggaagaagttgaatctctgaat

SEQ ID NO: 5201428 - DNA, 25 bp, Homo sapien
ggcccttttggcatctattcagata

SEQ ID NO: 5201429 - DNA, 25 bp, Homo sapien
aaggcccttttggcatctattcaga

SEQ ID NO: 5201430 - DNA, 25 bp, Homo sapien
attgttgttagcatggcggagtgtt

SEQ ID NO: 5201431 - DNA, 25 bp, Homo sapien
tagcatggcggagtgttgaatttta

SEQ ID NO: 5201432 - DNA, 25 bp, Homo sapien
ctagttagccgttcgtctaatcttt

SEQ ID NO: 5201433 - DNA, 25 bp, Homo sapien
gttgatcgaatggctactgaagctt

SEQ ID NO: 5201434 - DNA, 25 bp, Homo sapien
ttctagttagccgttcgtctaatct

SEQ ID NO: 5201435 - DNA, 25 bp, Homo sapien
tcttccagttgatcgaatggctact

SEQ ID NO: 5201436 - DNA, 25 bp, Homo sapien
tattctgttactaggtggagtggtg

SEQ ID NO: 5201437 - DNA, 25 bp, Homo sapien
gataaatgatctgtatacacatgaa

SEQ ID NO: 5201438 - DNA, 25 bp, Homo sapien
gaatctgaggtaattgatctgagaa

SEQ ID NO: 5201439 - DNA, 25 bp, Homo sapien
tatccttcctgactttcggtctact

SEQ ID NO: 5201440 - DNA, 25 bp, Homo sapien
tcagaacatatctgagggtactcat

SEQ ID NO: 5201441 - DNA, 25 bp, Homo sapien
tatctgagggtactcatgcctctcc

SEQ ID NO: 5201442 - DNA, 25 bp, Homo sapien
aagcacttggcataggctcagaaca

SEQ ID NO: 5201443 - DNA, 25 bp, Homo sapien
ttggcataggctcagaacatatctg

SEQ ID NO: 5201444 - DNA, 25 bp, Homo sapien
ttccacacgggtttggaaggatagc

SEQ ID NO: 5201445 - DNA, 25 bp, Homo sapien
gcttccacacgggtttggaaggata

SEQ ID NO: 5201446 - DNA, 25 bp, Homo sapien
gaaagatggcttccggcttccacac

SEQ ID NO: 5201447 - DNA, 25 bp, Homo sapien
atggcttccggcttccacacgggtt

SEQ ID NO: 5201448 - DNA, 25 bp, Homo sapien
tgataactcatttcctaacgctggc

SEQ ID NO: 5201449 - DNA, 25 bp, Homo sapien
taacgctggccacttaagtagaagc

SEQ ID NO: 5201450 - DNA, 25 bp, Homo sapien
gcatgtgatacattgcaggtgtcct

SEQ ID NO: 5201451 - DNA, 25 bp, Homo sapien
ggatataatctagtggtgcgcctta

SEQ ID NO: 5201452 - DNA, 25 bp, Homo sapien
gtctgtctattgtctgtaaagtcca

SEQ ID NO: 5201453 - DNA, 25 bp, Homo sapien
tctgtctattgtctgtaaagtccat

SEQ ID NO: 5201454 - DNA, 25 bp, Homo sapien
ggtctgtctattgtctgtaaagtcc

SEQ ID NO: 5201455 - DNA, 25 bp, Homo sapien
aaggtctgtctattgtctgtaaagt

SEQ ID NO: 5201456 - DNA, 25 bp, Homo sapien
tctccccagtgagtgttttctgagt

SEQ ID NO: 5201457 - DNA, 25 bp, Homo sapien
ttttctgagttcctgggtagatttg

SEQ ID NO: 5201458 - DNA, 25 bp, Homo sapien
agttcctgggtagatttggcctcct

SEQ ID NO: 5201459 - DNA, 25 bp, Homo sapien
ctccaccctggactcgcttccagca

SEQ ID NO: 5201460 - DNA, 25 bp, Homo sapien
gggccctccctgaagcaaaacatgg

SEQ ID NO: 5201461 - DNA, 25 bp, Homo sapien
tgaaatggccttgatacctaaagat

SEQ ID NO: 5201462 - DNA, 25 bp, Homo sapien
aaacatggacgtccctttgtagagg

SEQ ID NO: 5201463 - DNA, 25 bp, Homo sapien
taaagatagtgcttcaccagagtgc

SEQ ID NO: 5201464 - DNA, 25 bp, Homo sapien
tccacatagttgaaacagccagcat

SEQ ID NO: 5201465 - DNA, 25 bp, Homo sapien
ggtccacatagttgaaacagccagc

SEQ ID NO: 5201466 - DNA, 25 bp, Homo sapien
catggtccacatagttgaaacagcc

SEQ ID NO: 5201467 - DNA, 25 bp, Homo sapien
tggtccacatagttgaaacagccag

SEQ ID NO: 5201468 - DNA, 25 bp, Homo sapien
tcatgattttcatgtagcttattta

SEQ ID NO: 5201469 - DNA, 25 bp, Homo sapien
attttcatgtagcttatttactgaa

SEQ ID NO: 5201470 - DNA, 25 bp, Homo sapien
catgattttcatgtagcttatttac

SEQ ID NO: 5201471 - DNA, 25 bp, Homo sapien
tgattttcatgtagcttatttactg

SEQ ID NO: 5201472 - DNA, 25 bp, Homo sapien
tggtacctgaaggcacgcaccccat

SEQ ID NO: 5201473 - DNA, 25 bp, Homo sapien
gctttgtccagctgtgttgtccaaa

SEQ ID NO: 5201474 - DNA, 25 bp, Homo sapien
aaggctgaaagcattaggaaaagca

SEQ ID NO: 5201475 - DNA, 25 bp, Homo sapien
gaaagcattaggaaaagcatgggtc

SEQ ID NO: 5201476 - DNA, 25 bp, Homo sapien
cctgtactatggcactgactctctg

SEQ ID NO: 5201477 - DNA, 25 bp, Homo sapien
cacggtaagagatgtggcataaggc

SEQ ID NO: 5201478 - DNA, 25 bp, Homo sapien
ttttaaggcgtgtggccgtgaccag

SEQ ID NO: 5201479 - DNA, 25 bp, Homo sapien
gaccaggtgcactcaaagaaatgta

SEQ ID NO: 5201480 - DNA, 25 bp, Homo sapien
cagaactctgtagccttgaataaga

SEQ ID NO: 5201481 - DNA, 25 bp, Homo sapien
gcctaaggccacagaactctgtagc

SEQ ID NO: 5201482 - DNA, 25 bp, Homo sapien
gatgcagaaggagaaatccaggcct

SEQ ID NO: 5201483 - DNA, 25 bp, Homo sapien
tcagagaggataaaatagggcaacc

SEQ ID NO: 5201484 - DNA, 25 bp, Homo sapien
cttcaattatttcaggcttgtttgc

SEQ ID NO: 5201485 - DNA, 25 bp, Homo sapien
aattatttcaggcttgtttgcatta

SEQ ID NO: 5201486 - DNA, 25 bp, Homo sapien
gagtttggcaaaagtgaattggtct

SEQ ID NO: 5201487 - DNA, 25 bp, Homo sapien
ggtctatttgagttatcctcctttg

SEQ ID NO: 5201488 - DNA, 25 bp, Homo sapien
aattagaataatggtgtcagtttct

SEQ ID NO: 5201489 - DNA, 25 bp, Homo sapien
tagaataatggtgtcagtttctgag

SEQ ID NO: 5201490 - DNA, 25 bp, Homo sapien
ttagaataatggtgtcagtttctga

SEQ ID NO: 5201491 - DNA, 25 bp, Homo sapien
cttatgggtaaaattagaataatgg

SEQ ID NO: 5201492 - DNA, 25 bp, Homo sapien
ggcatttctatagtgacgtttcctg

SEQ ID NO: 5201493 - DNA, 25 bp, Homo sapien
catttctatagtgacgtttcctgga

SEQ ID NO: 5201494 - DNA, 25 bp, Homo sapien
ttggcatttctatagtgacgtttcc

SEQ ID NO: 5201495 - DNA, 25 bp, Homo sapien
gcttggcatttctatagtgacgttt

SEQ ID NO: 5201496 - DNA, 25 bp, Homo sapien
taagcctcaagttattgcacaccag

SEQ ID NO: 5201497 - DNA, 25 bp, Homo sapien
tccaagttgcctagtggtataccag

SEQ ID NO: 5201498 - DNA, 25 bp, Homo sapien
tatttcaagaacacccactaatggg

SEQ ID NO: 5201499 - DNA, 25 bp, Homo sapien
caagggtcttagcaaacatgggtta

SEQ ID NO: 5201500 - DNA, 25 bp, Homo sapien
caggctaaatgatgctctttgaggc

SEQ ID NO: 5201501 - DNA, 25 bp, Homo sapien
caagcaattttagctgcaggctaaa

SEQ ID NO: 5201502 - DNA, 25 bp, Homo sapien
gctgtgattactcacccatgagcag

SEQ ID NO: 5201503 - DNA, 25 bp, Homo sapien
aattgccagtggaatgaaagagagt

SEQ ID NO: 5201504 - DNA, 25 bp, Homo sapien
aggaactgacgccccagtgtccaca

SEQ ID NO: 5201505 - DNA, 25 bp, Homo sapien
tttcttcttccctgggactagcttc

SEQ ID NO: 5201506 - DNA, 25 bp, Homo sapien
tccaaatagcccctaggaactgacg

SEQ ID NO: 5201507 - DNA, 25 bp, Homo sapien
tccctgggactagcttccaaatagc

SEQ ID NO: 5201508 - DNA, 25 bp, Homo sapien
ggaaagcttcaagccattcaggtag

SEQ ID NO: 5201509 - DNA, 25 bp, Homo sapien
ttcaagccattcaggtagtgctcat

SEQ ID NO: 5201510 - DNA, 25 bp, Homo sapien
aagcttcaagccattcaggtagtgc

SEQ ID NO: 5201511 - DNA, 25 bp, Homo sapien
aagccattcaggtagtgctcatcac

SEQ ID NO: 5201512 - DNA, 25 bp, Homo sapien
ccttctagagctgagaatgcccttt

SEQ ID NO: 5201513 - DNA, 25 bp, Homo sapien
gtgtcccttctagagctgagaatgc

SEQ ID NO: 5201514 - DNA, 25 bp, Homo sapien
cctgggaagtgtcccttctagagct

SEQ ID NO: 5201515 - DNA, 25 bp, Homo sapien
gggaagtgtcccttctagagctgag

SEQ ID NO: 5201516 - DNA, 25 bp, Homo sapien
tccagtttgggtggtatttatgcca

SEQ ID NO: 5201517 - DNA, 25 bp, Homo sapien
atttatgccagtgagcttgggctgc

SEQ ID NO: 5201518 - DNA, 25 bp, Homo sapien
gataacgtggaggaagctggattcc

SEQ ID NO: 5201519 - DNA, 25 bp, Homo sapien
taatgggataacgtggaggaagctg

SEQ ID NO: 5201520 - DNA, 25 bp, Homo sapien
gcaataatgaatgggttcttctgca

SEQ ID NO: 5201521 - DNA, 25 bp, Homo sapien
caataatgaatgggttcttctgcat

SEQ ID NO: 5201522 - DNA, 25 bp, Homo sapien
tcttccagggcgatttaggagaaaa

SEQ ID NO: 5201523 - DNA, 25 bp, Homo sapien
tccctttagataaaatcaatattgc

SEQ ID NO: 5201524 - DNA, 25 bp, Homo sapien
gctgtattagtcagaggttctgtga

SEQ ID NO: 5201525 - DNA, 25 bp, Homo sapien
tctgtgaaatcttggtaaggtgtac

SEQ ID NO: 5201526 - DNA, 25 bp, Homo sapien
taggagcagctgctagcccacatct

SEQ ID NO: 5201527 - DNA, 25 bp, Homo sapien
catcctaatggagttgtatacttgc

SEQ ID NO: 5201528 - DNA, 25 bp, Homo sapien
ccagcttctatgcaagccaggagca

SEQ ID NO: 5201529 - DNA, 25 bp, Homo sapien
ggagcagacaatagatccatcctaa

SEQ ID NO: 5201530 - DNA, 25 bp, Homo sapien
catgaggcactacttgcagttgtgc

SEQ ID NO: 5201531 - DNA, 25 bp, Homo sapien
gcatcccctattctcctcagctatg

SEQ ID NO: 5201532 - DNA, 25 bp, Homo sapien
gggagaatgaattttttggccatga

SEQ ID NO: 5201533 - DNA, 25 bp, Homo sapien
tggtgtgtatcctctgcctgcatcc

SEQ ID NO: 5201534 - DNA, 25 bp, Homo sapien
tgagcctctaatcagtaccatagag

SEQ ID NO: 5201535 - DNA, 25 bp, Homo sapien
attgaagaatgagcctctaatcagt

SEQ ID NO: 5201536 - DNA, 25 bp, Homo sapien
cctctaatcagtaccatagagtact

SEQ ID NO: 5201537 - DNA, 25 bp, Homo sapien
gaagaatgagcctctaatcagtacc

SEQ ID NO: 5201538 - DNA, 25 bp, Homo sapien
ttttcaaaatcgtccatgtttacat

SEQ ID NO: 5201539 - DNA, 25 bp, Homo sapien
ttcaaaatcgtccatgtttacatgc

SEQ ID NO: 5201540 - DNA, 25 bp, Homo sapien
agtcttctccgtatgcttggcaatg

SEQ ID NO: 5201541 - DNA, 25 bp, Homo sapien
cctgaagtcttctccgtatgcttgg

SEQ ID NO: 5201542 - DNA, 25 bp, Homo sapien
ttttgcatagtgatttctgtttgga

SEQ ID NO: 5201543 - DNA, 25 bp, Homo sapien
ttgtccaaagctttctccaaggcag

SEQ ID NO: 5201544 - DNA, 25 bp, Homo sapien
gagagagcttgtttcaaggcaggat

SEQ ID NO: 5201545 - DNA, 25 bp, Homo sapien
ctgtttggaaattgatttacagcaa

SEQ ID NO: 5201546 - DNA, 25 bp, Homo sapien
ttagatgcatcgactgtgcgaggtc

SEQ ID NO: 5201547 - DNA, 25 bp, Homo sapien
ttttggcaaatcctctttttgcctg

SEQ ID NO: 5201548 - DNA, 25 bp, Homo sapien
ttgtgaggaaagatttcccactgtt

SEQ ID NO: 5201549 - DNA, 25 bp, Homo sapien
agctccaggcagattgtgaggaaag

SEQ ID NO: 5201550 - DNA, 25 bp, Homo sapien
gcagattgtgaggaaagatttccca

SEQ ID NO: 5201551 - DNA, 25 bp, Homo sapien
tttctttcttaaaggctacaggcat

SEQ ID NO: 5201552 - DNA, 25 bp, Homo sapien
tcctctttcacctctagactgttat

SEQ ID NO: 5201553 - DNA, 25 bp, Homo sapien
tcttggagtattcctctttctcctc

SEQ ID NO: 5201554 - DNA, 25 bp, Homo sapien
cacctctagactgttatctgctgtc

SEQ ID NO: 5201555 - DNA, 25 bp, Homo sapien
tctttcacctctagactgttatctg

SEQ ID NO: 5201556 - DNA, 25 bp, Homo sapien
cccctgtcctggcataatcctggga

SEQ ID NO: 5201557 - DNA, 25 bp, Homo sapien
acaagtcatggtgcacaggaaaaac

SEQ ID NO: 5201558 - DNA, 25 bp, Homo sapien
acaatgttggaataccggggttgat

SEQ ID NO: 5201559 - DNA, 25 bp, Homo sapien
tgccaacctctatggggagttcttt

SEQ ID NO: 5201560 - DNA, 25 bp, Homo sapien
catacaagtcatggtgcacaggaaa

SEQ ID NO: 5201561 - DNA, 25 bp, Homo sapien
gatgcctcctggtccaaatatgttc

SEQ ID NO: 5201562 - DNA, 25 bp, Homo sapien
agatgcctcctggtccaaatatgtt

SEQ ID NO: 5201563 - DNA, 25 bp, Homo sapien
atgcctcctggtccaaatatgttca

SEQ ID NO: 5201564 - DNA, 25 bp, Homo sapien
aaaacaaggactgagcctccaccat

SEQ ID NO: 5201565 - DNA, 25 bp, Homo sapien
gaaaacaaggactgagcctccacca

SEQ ID NO: 5201566 - DNA, 25 bp, Homo sapien
cgaaaacaaggactgagcctccacc

SEQ ID NO: 5201567 - DNA, 25 bp, Homo sapien
tgatgaggtgaccagacccaggatg

SEQ ID NO: 5201568 - DNA, 25 bp, Homo sapien
taggaaagcggaattcaggccactg

SEQ ID NO: 5201569 - DNA, 25 bp, Homo sapien
caggccactgaactctggtgagacc

SEQ ID NO: 5201570 - DNA, 25 bp, Homo sapien
gcgtctgtcctctagtgcaggtaca

SEQ ID NO: 5201571 - DNA, 25 bp, Homo sapien
ggtcacatgactgccatttgctcag

SEQ ID NO: 5201572 - DNA, 25 bp, Homo sapien
cccgcacatcaggcagtcatcagaa

SEQ ID NO: 5201573 - DNA, 25 bp, Homo sapien
tggctgtgtatgcaacccctcaggc

SEQ ID NO: 5201574 - DNA, 25 bp, Homo sapien
gctggctgtgtatgcaacccctcag

SEQ ID NO: 5201575 - DNA, 25 bp, Homo sapien
gctagggagcgtggcagcctgcatg

SEQ ID NO: 5201576 - DNA, 25 bp, Homo sapien
cataaactggcttgcctttgggtcc

SEQ ID NO: 5201577 - DNA, 25 bp, Homo sapien
ttcatcataaactggcttgcctttg

SEQ ID NO: 5201578 - DNA, 25 bp, Homo sapien
gctgtactcgatgctagggagcgtg

SEQ ID NO: 5201579 - DNA, 25 bp, Homo sapien
tcatcgcgtggtaagagtttgccct

SEQ ID NO: 5201580 - DNA, 25 bp, Homo sapien
tgttgacagctttgtagttgtcagt

SEQ ID NO: 5201581 - DNA, 25 bp, Homo sapien
tctgaagctgctgacaggacggagt

SEQ ID NO: 5201582 - DNA, 25 bp, Homo sapien
tatgcctgctcattctcatcgcgtg

SEQ ID NO: 5201583 - DNA, 25 bp, Homo sapien
tgctggaggtttatgaccaaaggct

SEQ ID NO: 5201584 - DNA, 25 bp, Homo sapien
gctggaggtttatgaccaaaggctc

SEQ ID NO: 5201585 - DNA, 25 bp, Homo sapien
tggaggtttatgaccaaaggctcct

SEQ ID NO: 5201586 - DNA, 25 bp, Homo sapien
ctggaggtttatgaccaaaggctcc

SEQ ID NO: 5201587 - DNA, 25 bp, Homo sapien
ttcccccactctctcctgtctccca

SEQ ID NO: 5201588 - DNA, 25 bp, Homo sapien
tcccccactctctcctgtctcccat

SEQ ID NO: 5201589 - DNA, 25 bp, Homo sapien
tctcgtgggagttattgctgagcac

SEQ ID NO: 5201590 - DNA, 25 bp, Homo sapien
tgagcacatttccttatgtctttcc

SEQ ID NO: 5201591 - DNA, 25 bp, Homo sapien
ggcaatttacatgagggtgatcgca

SEQ ID NO: 5201592 - DNA, 25 bp, Homo sapien
gctcccagggctagttgtacaagga

SEQ ID NO: 5201593 - DNA, 25 bp, Homo sapien
gagtctactaggtccgatgtggcaa

SEQ ID NO: 5201594 - DNA, 25 bp, Homo sapien
gactcaaaagtgagggccctgtgtg

SEQ ID NO: 5201595 - DNA, 25 bp, Homo sapien
ggatgctaggctcatcacatcttgg

SEQ ID NO: 5201596 - DNA, 25 bp, Homo sapien
cactgtaatcctggtcttcagcata

SEQ ID NO: 5201597 - DNA, 25 bp, Homo sapien
tcaagcgcttgtcagttatgaagct

SEQ ID NO: 5201598 - DNA, 25 bp, Homo sapien
cacggagtccctgattggaagagac

SEQ ID NO: 5201599 - DNA, 25 bp, Homo sapien
gacatgggatgctctcgagtggctt

SEQ ID NO: 5201600 - DNA, 25 bp, Homo sapien
tcttcaaactagggaaagccacgga

SEQ ID NO: 5201601 - DNA, 25 bp, Homo sapien
caagtgtgatggcagttattctgtg

SEQ ID NO: 5201602 - DNA, 25 bp, Homo sapien
gcttagtactagattgcctccatac

SEQ ID NO: 5201603 - DNA, 25 bp, Homo sapien
tttactagactggagacaattatcc

SEQ ID NO: 5201604 - DNA, 25 bp, Homo sapien
tctgtgttttactagactggagaca

SEQ ID NO: 5201605 - DNA, 25 bp, Homo sapien
gcagctatctgagcaatctttgcaa

SEQ ID NO: 5201606 - DNA, 25 bp, Homo sapien
aacagggtttctgcctttgacatca

SEQ ID NO: 5201607 - DNA, 25 bp, Homo sapien
tggatgaaattgctgtatcatggta

SEQ ID NO: 5201608 - DNA, 25 bp, Homo sapien
atctgtgatacaagtgacataacct

SEQ ID NO: 5201609 - DNA, 25 bp, Homo sapien
ctggtgtctgctgcggaactgattt

SEQ ID NO: 5201610 - DNA, 25 bp, Homo sapien
ttatggaactgagccctgtgggatc

SEQ ID NO: 5201611 - DNA, 25 bp, Homo sapien
ctccaggtagatggtagccgaattg

SEQ ID NO: 5201612 - DNA, 25 bp, Homo sapien
gaattgaatcggaggacttccagct

SEQ ID NO: 5201613 - DNA, 25 bp, Homo sapien
aaattgtttctcgggatttcaatct

SEQ ID NO: 5201614 - DNA, 25 bp, Homo sapien
tcagaaaattgtttctcgggatttc

SEQ ID NO: 5201615 - DNA, 25 bp, Homo sapien
caaacagagaggctattttccccca

SEQ ID NO: 5201616 - DNA, 25 bp, Homo sapien
gcaaacagagaggctattttccccc

SEQ ID NO: 5201617 - DNA, 25 bp, Homo sapien
agtcccaagatgaaaccgtagtaag

SEQ ID NO: 5201618 - DNA, 25 bp, Homo sapien
tatagagggaataagacatggaccc

SEQ ID NO: 5201619 - DNA, 25 bp, Homo sapien
tcagggagttcacagtagatgcatt

SEQ ID NO: 5201620 - DNA, 25 bp, Homo sapien
taatagttcagtcttgagaagtccc

SEQ ID NO: 5201621 - DNA, 25 bp, Homo sapien
gaaccatgaattttacactgcctct

SEQ ID NO: 5201622 - DNA, 25 bp, Homo sapien
gcaggatgatttgtattgaaccatg

SEQ ID NO: 5201623 - DNA, 25 bp, Homo sapien
gatctcaactgttaatgcaggatga

SEQ ID NO: 5201624 - DNA, 25 bp, Homo sapien
caagccagaacttagatctcaactg

SEQ ID NO: 5201625 - DNA, 25 bp, Homo sapien
gaaattttgctacttcttgttaagc

SEQ ID NO: 5201626 - DNA, 25 bp, Homo sapien
gagaacatagttgtatcagaagagg

SEQ ID NO: 5201627 - DNA, 25 bp, Homo sapien
tcttgttaagctaggccttttattc

SEQ ID NO: 5201628 - DNA, 25 bp, Homo sapien
gtcactattgttatggagaacatag

SEQ ID NO: 5201629 - DNA, 25 bp, Homo sapien
ggccatgctggtcactacttgatat

SEQ ID NO: 5201630 - DNA, 25 bp, Homo sapien
ctagtttgtgatcttgactgttcaa

SEQ ID NO: 5201631 - DNA, 25 bp, Homo sapien
gtgatcttgactgttcaagccttta

SEQ ID NO: 5201632 - DNA, 25 bp, Homo sapien
ctgctttgtttgagtagttttacac

SEQ ID NO: 5201633 - DNA, 25 bp, Homo sapien
aaatgtttacgctgtcctctgtgtg

SEQ ID NO: 5201634 - DNA, 25 bp, Homo sapien
cacgcccagctcatcgttagattta

SEQ ID NO: 5201635 - DNA, 25 bp, Homo sapien
caccattgggcattattctgacttt

SEQ ID NO: 5201636 - DNA, 25 bp, Homo sapien
tatgttagctaataccttcaggaca

SEQ ID NO: 5201637 - DNA, 25 bp, Homo sapien
tgcttactgtctttgggatgttact

SEQ ID NO: 5201638 - DNA, 25 bp, Homo sapien
tgttacttagcacactacttcactt

SEQ ID NO: 5201639 - DNA, 25 bp, Homo sapien
cactacttcacttctcttgccttag

SEQ ID NO: 5201640 - DNA, 25 bp, Homo sapien
gcacccggcctgcttactgtctttg

SEQ ID NO: 5201641 - DNA, 25 bp, Homo sapien
gaaggagttggcccggcttgtctct

SEQ ID NO: 5201642 - DNA, 25 bp, Homo sapien
gaccgcggcgccaattggcgagcgg

SEQ ID NO: 5201643 - DNA, 25 bp, Homo sapien
gtctctctgtcagtggcggctgctg

SEQ ID NO: 5201644 - DNA, 25 bp, Homo sapien
ggcccggcttgtctctctgtcagtg

SEQ ID NO: 5201645 - DNA, 25 bp, Homo sapien
aggacggactcccttccagatgcac

SEQ ID NO: 5201646 - DNA, 25 bp, Homo sapien
tgggaactggcttcttcggagctgt

SEQ ID NO: 5201647 - DNA, 25 bp, Homo sapien
tcgcgcggcggtctgagaccaccag

SEQ ID NO: 5201648 - DNA, 25 bp, Homo sapien
tcggagctgtgtagtcttaatttgc

SEQ ID NO: 5201649 - DNA, 25 bp, Homo sapien
cctttttgacgtccaagagtgacag

SEQ ID NO: 5201650 - DNA, 25 bp, Homo sapien
gtgacagagcctcaagcactcctgg

SEQ ID NO: 5201651 - DNA, 25 bp, Homo sapien
cagagcctcaagcactcctggggac

SEQ ID NO: 5201652 - DNA, 25 bp, Homo sapien
tttttgacgtccaagagtgacagag

SEQ ID NO: 5201653 - DNA, 25 bp, Homo sapien
tgaagagtgttcttggggttaagag

SEQ ID NO: 5201654 - DNA, 25 bp, Homo sapien
ctgtgaagagtgttcttggggttaa

SEQ ID NO: 5201655 - DNA, 25 bp, Homo sapien
tgtgaagagtgttcttggggttaag

SEQ ID NO: 5201656 - DNA, 25 bp, Homo sapien
gtgaagagtgttcttggggttaaga

SEQ ID NO: 5201657 - DNA, 25 bp, Homo sapien
cagttgaggaggacacttaataccg

SEQ ID NO: 5201658 - DNA, 25 bp, Homo sapien
tttttgtgggtccacctatcagggc

SEQ ID NO: 5201659 - DNA, 25 bp, Homo sapien
taccgtttcggcagcgtttcaaatc

SEQ ID NO: 5201660 - DNA, 25 bp, Homo sapien
aaatccgagtcaaatatagcctgag

SEQ ID NO: 5201661 - DNA, 25 bp, Homo sapien
taagttctcataacacctaggtaaa

SEQ ID NO: 5201662 - DNA, 25 bp, Homo sapien
cccagaacaatttcagggttagtag

SEQ ID NO: 5201663 - DNA, 25 bp, Homo sapien
tctttgaccataccaatgaatgcca

SEQ ID NO: 5201664 - DNA, 25 bp, Homo sapien
taactcttgacatttggactctgct

SEQ ID NO: 5201665 - DNA, 25 bp, Homo sapien
cactgggtctgctagaaattctgag

SEQ ID NO: 5201666 - DNA, 25 bp, Homo sapien
tgctgcagacctaaagattccaatg

SEQ ID NO: 5201667 - DNA, 25 bp, Homo sapien
ccagtgtcctccatatctcaatgat

SEQ ID NO: 5201668 - DNA, 25 bp, Homo sapien
tggcattactatccacccactgggt

SEQ ID NO: 5201669 - DNA, 25 bp, Homo sapien
gaaatagcctatatgtccatcagca

SEQ ID NO: 5201670 - DNA, 25 bp, Homo sapien
tatatacatgctctacaaaccagga

SEQ ID NO: 5201671 - DNA, 25 bp, Homo sapien
ggaaaattttggcacgatcttgtaa

SEQ ID NO: 5201672 - DNA, 25 bp, Homo sapien
ccaggaattacataccaaggtaaag

SEQ ID NO: 5201673 - DNA, 25 bp, Homo sapien
tcatgatcaagatggcactgcaggg

SEQ ID NO: 5201674 - DNA, 25 bp, Homo sapien
taagaacattaattgcaggtctgcc

SEQ ID NO: 5201675 - DNA, 25 bp, Homo sapien
tgtgagatcccctgaaatcttaaac

SEQ ID NO: 5201676 - DNA, 25 bp, Homo sapien
ctcatttaatgaaggtagctagcat

SEQ ID NO: 5201677 - DNA, 25 bp, Homo sapien
tcattctacttaaaggcctacctga

SEQ ID NO: 5201678 - DNA, 25 bp, Homo sapien
cctgatgagctacccaaaatatttt

SEQ ID NO: 5201679 - DNA, 25 bp, Homo sapien
tatacagcgtatgcatttttagtca

SEQ ID NO: 5201680 - DNA, 25 bp, Homo sapien
caggatttgagtagtgtgaccttca

SEQ ID NO: 5201681 - DNA, 25 bp, Homo sapien
ctaccaagcccactttcaggaggta

SEQ ID NO: 5201682 - DNA, 25 bp, Homo sapien
ttgtctaccaagcccactttcagga

SEQ ID NO: 5201683 - DNA, 25 bp, Homo sapien
tctaccaagcccactttcaggaggt

SEQ ID NO: 5201684 - DNA, 25 bp, Homo sapien
gtctaccaagcccactttcaggagg

SEQ ID NO: 5201685 - DNA, 25 bp, Homo sapien
cacaaacggtctctggatttatgca

SEQ ID NO: 5201686 - DNA, 25 bp, Homo sapien
aggtatacatgccaggacaccttgt

SEQ ID NO: 5201687 - DNA, 25 bp, Homo sapien
tctttttaagtggaacatgtgaacc

SEQ ID NO: 5201688 - DNA, 25 bp, Homo sapien
gagttacttcacagagatctagact

SEQ ID NO: 5201689 - DNA, 25 bp, Homo sapien
ataaggcatcttcttgtactcggtc

SEQ ID NO: 5201690 - DNA, 25 bp, Homo sapien
tactcggtcttccattggtgaccac

SEQ ID NO: 5201691 - DNA, 25 bp, Homo sapien
cattggtgaccactttgtaaatcac

SEQ ID NO: 5201692 - DNA, 25 bp, Homo sapien
gaccactttgtaaatcaccatgact

SEQ ID NO: 5201693 - DNA, 25 bp, Homo sapien
tctccacctctcccttcagtttttc

SEQ ID NO: 5201694 - DNA, 25 bp, Homo sapien
agcagcctgagcctttttctccacc

SEQ ID NO: 5201695 - DNA, 25 bp, Homo sapien
cacctctcccttcagtttttcctct

SEQ ID NO: 5201696 - DNA, 25 bp, Homo sapien
ccttcagtttttcctctttcatcat

SEQ ID NO: 5201697 - DNA, 25 bp, Homo sapien
gacatataatatggcttgaacaaga

SEQ ID NO: 5201698 - DNA, 25 bp, Homo sapien
ggtctagtgcctattatttgagaaa

SEQ ID NO: 5201699 - DNA, 25 bp, Homo sapien
tttcagaggtttgtcaaatcagtcc

SEQ ID NO: 5201700 - DNA, 25 bp, Homo sapien
tgagatgtatagttagaatttccgg

SEQ ID NO: 5201701 - DNA, 25 bp, Homo sapien
atttttgacatcaaatttcttgatc

SEQ ID NO: 5201702 - DNA, 25 bp, Homo sapien
tcagacatgatatgtcttgacatat

SEQ ID NO: 5201703 - DNA, 25 bp, Homo sapien
tatgtcttgacatatcatgtgtcat

SEQ ID NO: 5201704 - DNA, 25 bp, Homo sapien
ggtttgtcagacatgatatgtcttg

SEQ ID NO: 5201705 - DNA, 25 bp, Homo sapien
gacagccagacaagcagatgggaga

SEQ ID NO: 5201706 - DNA, 25 bp, Homo sapien
agaggtaggtgtggccttcatcgtc

SEQ ID NO: 5201707 - DNA, 25 bp, Homo sapien
cttgacagccagacaagcagatggg

SEQ ID NO: 5201708 - DNA, 25 bp, Homo sapien
ttccttgacagccagacaagcagat

SEQ ID NO: 5201709 - DNA, 25 bp, Homo sapien
actccattgactagcctgactgtgg

SEQ ID NO: 5201710 - DNA, 25 bp, Homo sapien
gactgtggcatctcttatcagtacc

SEQ ID NO: 5201711 - DNA, 25 bp, Homo sapien
agagagttatttctctggatgaggc

SEQ ID NO: 5201712 - DNA, 25 bp, Homo sapien
taaatgactccttaagctagctccg

SEQ ID NO: 5201713 - DNA, 25 bp, Homo sapien
ttcataggcagctgggttattcttg

SEQ ID NO: 5201714 - DNA, 25 bp, Homo sapien
cttggatttctcagactcccagttc

SEQ ID NO: 5201715 - DNA, 25 bp, Homo sapien
taggcagctgggttattcttggatt

SEQ ID NO: 5201716 - DNA, 25 bp, Homo sapien
cagctgggttattcttggatttctc

SEQ ID NO: 5201717 - DNA, 25 bp, Homo sapien
tggctttattcactttggctttgag

SEQ ID NO: 5201718 - DNA, 25 bp, Homo sapien
caagggaattgctttggctttattc

SEQ ID NO: 5201719 - DNA, 25 bp, Homo sapien
tttattcactttggctttgagcacc

SEQ ID NO: 5201720 - DNA, 25 bp, Homo sapien
ttgcagtggaggatacaagggaatt

SEQ ID NO: 5201721 - DNA, 25 bp, Homo sapien
ggaatacagaggctgcgatcacaag

SEQ ID NO: 5201722 - DNA, 25 bp, Homo sapien
cgatgaggacactactgggaataca

SEQ ID NO: 5201723 - DNA, 25 bp, Homo sapien
tggcattaattacaacgatgaggac

SEQ ID NO: 5201724 - DNA, 25 bp, Homo sapien
tacagaggctgcgatcacaagccat

SEQ ID NO: 5201725 - DNA, 25 bp, Homo sapien
ggcttcgtcgcccttcgctacttcc

SEQ ID NO: 5201726 - DNA, 25 bp, Homo sapien
tcgctacttccatccggccactgga

SEQ ID NO: 5201727 - DNA, 25 bp, Homo sapien
ggccgcggcttcgtcgcccttcgct

SEQ ID NO: 5201728 - DNA, 25 bp, Homo sapien
gtcgcccttcgctacttccatccgg

SEQ ID NO: 5201729 - DNA, 25 bp, Homo sapien
acaatggcaaaggtaaccgcgccgg

SEQ ID NO: 5201730 - DNA, 25 bp, Homo sapien
tcggcgccgctcagcttaaggaaaa

SEQ ID NO: 5201731 - DNA, 25 bp, Homo sapien
tcgctcctgagtccgagaaaatgtt

SEQ ID NO: 5201732 - DNA, 25 bp, Homo sapien
cagcagccgagttgcttttgggaaa

SEQ ID NO: 5201733 - DNA, 25 bp, Homo sapien
ttgtgcactggtacccggcaaaggc

SEQ ID NO: 5201734 - DNA, 25 bp, Homo sapien
gaaaatgcccatgaagcgcccttgg

SEQ ID NO: 5201735 - DNA, 25 bp, Homo sapien
taagaggcattggagcagacccttc

SEQ ID NO: 5201736 - DNA, 25 bp, Homo sapien
tatacacacacgctgtccgttcgga

SEQ ID NO: 5201737 - DNA, 25 bp, Homo sapien
gacccaggcgtacgcgctgcagcca

SEQ ID NO: 5201738 - DNA, 25 bp, Homo sapien
cacgagttgattgcgcgacggccca

SEQ ID NO: 5201739 - DNA, 25 bp, Homo sapien
acccccacgagttgattgcgcgacg

SEQ ID NO: 5201740 - DNA, 25 bp, Homo sapien
tgcagccacccccacgagttgattg

SEQ ID NO: 5201741 - DNA, 25 bp, Homo sapien
ttctctctggttcgctcgctcccgc

SEQ ID NO: 5201742 - DNA, 25 bp, Homo sapien
ctttctctctggttcgctcgctccc

SEQ ID NO: 5201743 - DNA, 25 bp, Homo sapien
gcgcaggacaccatggcgcggcgcg

SEQ ID NO: 5201744 - DNA, 25 bp, Homo sapien
cccgcgcaggacaccatggcgcggc

SEQ ID NO: 5201745 - DNA, 25 bp, Homo sapien
aacacaggcgcggagagaaagccgc

SEQ ID NO: 5201746 - DNA, 25 bp, Homo sapien
tcagaggtcccggggtacgcaaagc

SEQ ID NO: 5201747 - DNA, 25 bp, Homo sapien
cggggtacgcaaagccggaggctgc

SEQ ID NO: 5201748 - DNA, 25 bp, Homo sapien
gcccgccccgaatgcgtcccggcga

SEQ ID NO: 5201749 - DNA, 25 bp, Homo sapien
gaggacgacgacgaggaagagcccg

SEQ ID NO: 5201750 - DNA, 25 bp, Homo sapien
ctacaacggcagaagaggacgacga

SEQ ID NO: 5201751 - DNA, 25 bp, Homo sapien
ggacgacgacgaggaagagcccgtg

SEQ ID NO: 5201752 - DNA, 25 bp, Homo sapien
acgacgacgaggaagagcccgtgcg

SEQ ID NO: 5201753 - DNA, 25 bp, Homo sapien
gacaccatgtcgatatagccgggca

SEQ ID NO: 5201754 - DNA, 25 bp, Homo sapien
gagcgcattctgctgtaagcccacg

SEQ ID NO: 5201755 - DNA, 25 bp, Homo sapien
gtccatgtacttctccacgggaaag

SEQ ID NO: 5201756 - DNA, 25 bp, Homo sapien
tagccgttgccgaagtggtagccgt

SEQ ID NO: 5201757 - DNA, 25 bp, Homo sapien
aaattaggctgggatattcggagca

SEQ ID NO: 5201758 - DNA, 25 bp, Homo sapien
ttaggctgggatattcggagcacct

SEQ ID NO: 5201759 - DNA, 25 bp, Homo sapien
attaggctgggatattcggagcacc

SEQ ID NO: 5201760 - DNA, 25 bp, Homo sapien
aggctgggatattcggagcacctag

SEQ ID NO: 5201761 - DNA, 25 bp, Homo sapien
ttcggtagacgcacatgtccggctg

SEQ ID NO: 5201762 - DNA, 25 bp, Homo sapien
gacagtatctttgagcttggagaca

SEQ ID NO: 5201763 - DNA, 25 bp, Homo sapien
tcagataggttcgtagcagccgaga

SEQ ID NO: 5201764 - DNA, 25 bp, Homo sapien
gccgccgcttgtccttgttaatgaa

SEQ ID NO: 5201765 - DNA, 25 bp, Homo sapien
tttagactttctcggtgaccccaga

SEQ ID NO: 5201766 - DNA, 25 bp, Homo sapien
tgcatttatgccatccgcgggtcac

SEQ ID NO: 5201767 - DNA, 25 bp, Homo sapien
gatgctttacagctccatgcgaggc

SEQ ID NO: 5201768 - DNA, 25 bp, Homo sapien
gaaggcatccacgatccatgaggac

SEQ ID NO: 5201769 - DNA, 25 bp, Homo sapien
tgtgttcaagataccaagattttgt

SEQ ID NO: 5201770 - DNA, 25 bp, Homo sapien
cactacttatgttaaagtcatgggc

SEQ ID NO: 5201771 - DNA, 25 bp, Homo sapien
aaccagaattagtgttgagtttcct

SEQ ID NO: 5201772 - DNA, 25 bp, Homo sapien
tgtcttttgagctggcctggtataa

SEQ ID NO: 5201773 - DNA, 25 bp, Homo sapien
agttgattgtgtggggagctaacca

SEQ ID NO: 5201774 - DNA, 25 bp, Homo sapien
agctaaccatgaggagtcatccagt

SEQ ID NO: 5201775 - DNA, 25 bp, Homo sapien
ttagcaaccactgagttgattgtgt

SEQ ID NO: 5201776 - DNA, 25 bp, Homo sapien
gggagctaaccatgaggagtcatcc

SEQ ID NO: 5201777 - DNA, 25 bp, Homo sapien
cctcaatccaaattcctccagagag

SEQ ID NO: 5201778 - DNA, 25 bp, Homo sapien
ctgcaatttggaatataaagggaat

SEQ ID NO: 5201779 - DNA, 25 bp, Homo sapien
cagagagcgtttgagcacagtttta

SEQ ID NO: 5201780 - DNA, 25 bp, Homo sapien
tctgttattgatttagccctcaatc

SEQ ID NO: 5201781 - DNA, 25 bp, Homo sapien
tggctctggggaacgcaatcggcct

SEQ ID NO: 5201782 - DNA, 25 bp, Homo sapien
gagttatggcgaccaattgggtggc

SEQ ID NO: 5201783 - DNA, 25 bp, Homo sapien
tggggaacgcaatcggcctcttcct

SEQ ID NO: 5201784 - DNA, 25 bp, Homo sapien
tgtgagttatggcgaccaattgggt

SEQ ID NO: 5201785 - DNA, 25 bp, Homo sapien
ggcgccgccggagggcaagactgac

SEQ ID NO: 5201786 - DNA, 25 bp, Homo sapien
aggcgccgccggagggcaagactga

SEQ ID NO: 5201787 - DNA, 25 bp, Homo sapien
gaggtgtccccatccaccaagtgga

SEQ ID NO: 5201788 - DNA, 25 bp, Homo sapien
tccatggagaatgtccgccagggaa

SEQ ID NO: 5201789 - DNA, 25 bp, Homo sapien
gaggcagctggctagcagagttcct

SEQ ID NO: 5201790 - DNA, 25 bp, Homo sapien
tgcaaaccagaactccgaggtgtcc

SEQ ID NO: 5201791 - DNA, 25 bp, Homo sapien
gaactctgatcatagggaaattgcc

SEQ ID NO: 5201792 - DNA, 25 bp, Homo sapien
actctgatcatagggaaattgccat

SEQ ID NO: 5201793 - DNA, 25 bp, Homo sapien
agaactctgatcatagggaaattgc

SEQ ID NO: 5201794 - DNA, 25 bp, Homo sapien
tctgatcatagggaaattgccatac

SEQ ID NO: 5201795 - DNA, 25 bp, Homo sapien
tctgggcccggcttgcttctaccgg

SEQ ID NO: 5201796 - DNA, 25 bp, Homo sapien
ggtcgtgattggctttgcgattcgt

SEQ ID NO: 5201797 - DNA, 25 bp, Homo sapien
tcttcttggtcgtgattggctttgc

SEQ ID NO: 5201798 - DNA, 25 bp, Homo sapien
gattggctttgcgattcgttttccg

SEQ ID NO: 5201799 - DNA, 25 bp, Homo sapien
taacacccgcaatgttcgatggcga

SEQ ID NO: 5201800 - DNA, 25 bp, Homo sapien
tgcctgcaggttcttcaaagccggt

SEQ ID NO: 5201801 - DNA, 25 bp, Homo sapien
gactaactgtctgcgggtttccagg

SEQ ID NO: 5201802 - DNA, 25 bp, Homo sapien
caaatcaggttgagcgaagactaac

SEQ ID NO: 5201803 - DNA, 25 bp, Homo sapien
cacatagcccgctctgtagagactg

SEQ ID NO: 5201804 - DNA, 25 bp, Homo sapien
agattcagaagcgagcccacatagc

SEQ ID NO: 5201805 - DNA, 25 bp, Homo sapien
aactggccgccattcggcctcaggt

SEQ ID NO: 5201806 - DNA, 25 bp, Homo sapien
gaagtagaaagagtctggcgactgc

SEQ ID NO: 5201807 - DNA, 25 bp, Homo sapien
gaacttagcctgctcttcgggtccg

SEQ ID NO: 5201808 - DNA, 25 bp, Homo sapien
cgcttcgggcgcatagaacttagcc

SEQ ID NO: 5201809 - DNA, 25 bp, Homo sapien
tcatgttcaagttgagcgggccctt

SEQ ID NO: 5201810 - DNA, 25 bp, Homo sapien
catacttggccgctttgagagcagc

SEQ ID NO: 5201811 - DNA, 25 bp, Homo sapien
gcccggggagcatgggcaccgttta

SEQ ID NO: 5201812 - DNA, 25 bp, Homo sapien
cggcccggggagcatgggcaccgtt

SEQ ID NO: 5201813 - DNA, 25 bp, Homo sapien
gaggaattcgttctccaactccgca

SEQ ID NO: 5201814 - DNA, 25 bp, Homo sapien
tctgcctgttgatgaattcgttgac

SEQ ID NO: 5201815 - DNA, 25 bp, Homo sapien
gaggttcagcctattggacaattcc

SEQ ID NO: 5201816 - DNA, 25 bp, Homo sapien
tctgctgcttcgtgtagggtttccg

SEQ ID NO: 5201817 - DNA, 25 bp, Homo sapien
gatcctggccttgccacaaagggct

SEQ ID NO: 5201818 - DNA, 25 bp, Homo sapien
aacaaggcctctgtccaaaagggca

SEQ ID NO: 5201819 - DNA, 25 bp, Homo sapien
gtttctcacgggcttctcagggact

SEQ ID NO: 5201820 - DNA, 25 bp, Homo sapien
gcagagacctaattgtacccacagt

SEQ ID NO: 5201821 - DNA, 25 bp, Homo sapien
tatttacagttggagtgcagcaccc

SEQ ID NO: 5201822 - DNA, 25 bp, Homo sapien
tcagttgggctaaggctcagggctc

SEQ ID NO: 5201823 - DNA, 25 bp, Homo sapien
ttcactgagattaaggcgggacact

SEQ ID NO: 5201824 - DNA, 25 bp, Homo sapien
gagatggcacttgtctggagtccca

SEQ ID NO: 5201825 - DNA, 25 bp, Homo sapien
atgaatatttacaacggttccagat

SEQ ID NO: 5201826 - DNA, 25 bp, Homo sapien
ccagatttctcttccacccgccggc

SEQ ID NO: 5201827 - DNA, 25 bp, Homo sapien
agatttctcttccacccgccggcat

SEQ ID NO: 5201828 - DNA, 25 bp, Homo sapien
tatttacaacggttccagatttctc

SEQ ID NO: 5201829 - DNA, 25 bp, Homo sapien
cttaactttgtcagggcgcccctgg

SEQ ID NO: 5201830 - DNA, 25 bp, Homo sapien
tattgccactacagttctgcaagaa

SEQ ID NO: 5201831 - DNA, 25 bp, Homo sapien
tgtctggcagctctcgtaaaagctg

SEQ ID NO: 5201832 - DNA, 25 bp, Homo sapien
ggtatctggagaacgtgaacagaca

SEQ ID NO: 5201833 - DNA, 25 bp, Homo sapien
ttgagtcacccaagataagacacta

SEQ ID NO: 5201834 - DNA, 25 bp, Homo sapien
cgccaggacgcgatgcggtgatttt

SEQ ID NO: 5201835 - DNA, 25 bp, Homo sapien
cagccgctccgcgagaaagagcttt

SEQ ID NO: 5201836 - DNA, 25 bp, Homo sapien
aagagctttccgcacagcgccagga

SEQ ID NO: 5201837 - DNA, 25 bp, Homo sapien
ccccgactctgtggccttgtccttg

SEQ ID NO: 5201838 - DNA, 25 bp, Homo sapien
cccgactctgtggccttgtccttgc

SEQ ID NO: 5201839 - DNA, 25 bp, Homo sapien
cgtgaagaccccgactctgtggcct

SEQ ID NO: 5201840 - DNA, 25 bp, Homo sapien
aagaccccgactctgtggccttgtc

SEQ ID NO: 5201841 - DNA, 25 bp, Homo sapien
tcaagttcaacgacatggcgacggc

SEQ ID NO: 5201842 - DNA, 25 bp, Homo sapien
ttcaagttcaacgacatggcgacgg

SEQ ID NO: 5201843 - DNA, 25 bp, Homo sapien
aagttcaacgacatggcgacggcag

SEQ ID NO: 5201844 - DNA, 25 bp, Homo sapien
cattcaagttcaacgacatggcgac

SEQ ID NO: 5201845 - DNA, 25 bp, Homo sapien
ctgctgaccgccgaagagggaaaag

SEQ ID NO: 5201846 - DNA, 25 bp, Homo sapien
cccagtatggagcctgctgaccgcc

SEQ ID NO: 5201847 - DNA, 25 bp, Homo sapien
ttctctctactggcggcacggggtg

SEQ ID NO: 5201848 - DNA, 25 bp, Homo sapien
ccagtatggagcctgctgaccgccg

SEQ ID NO: 5201849 - DNA, 25 bp, Homo sapien
gagtctggtgaacaaaaggatctgg

SEQ ID NO: 5201850 - DNA, 25 bp, Homo sapien
ggcctagcctgggtgtccgccttat

SEQ ID NO: 5201851 - DNA, 25 bp, Homo sapien
cctactcttagggtgcttggcttcc

SEQ ID NO: 5201852 - DNA, 25 bp, Homo sapien
acctagacccttcactgcttcggag

SEQ ID NO: 5201853 - DNA, 25 bp, Homo sapien
tctgcccagcgcgttcagagtggag

SEQ ID NO: 5201854 - DNA, 25 bp, Homo sapien
gagtaatttcgccactctccagggc

SEQ ID NO: 5201855 - DNA, 25 bp, Homo sapien
tgcttcttgttcaccgggcgggagt

SEQ ID NO: 5201856 - DNA, 25 bp, Homo sapien
agtggagtgacttggctctttccgg

SEQ ID NO: 5201857 - DNA, 25 bp, Homo sapien
gccggtcacctgcgcgccgctggcc

SEQ ID NO: 5201858 - DNA, 25 bp, Homo sapien
tcaggccggtcacctgcgcgccgct

SEQ ID NO: 5201859 - DNA, 25 bp, Homo sapien
aggccggtcacctgcgcgccgctgg

SEQ ID NO: 5201860 - DNA, 25 bp, Homo sapien
ctcaggccggtcacctgcgcgccgc

SEQ ID NO: 5201861 - DNA, 25 bp, Homo sapien
caacctgagccatcgattgcacaag

SEQ ID NO: 5201862 - DNA, 25 bp, Homo sapien
gcgcagccaacctgagccatcgatt

SEQ ID NO: 5201863 - DNA, 25 bp, Homo sapien
cacaagaggcttgggccaggatcaa

SEQ ID NO: 5201864 - DNA, 25 bp, Homo sapien
ccatcgattgcacaagaggcttggg

SEQ ID NO: 5201865 - DNA, 25 bp, Homo sapien
aaagtcatctggcaggacgacggtt

SEQ ID NO: 5201866 - DNA, 25 bp, Homo sapien
gaaggcttgctagcgaagtcagacg

SEQ ID NO: 5201867 - DNA, 25 bp, Homo sapien
gcagcccggcaggtacatgctggct

SEQ ID NO: 5201868 - DNA, 25 bp, Homo sapien
tctggccgcactcgtcaaagtcgtt

SEQ ID NO: 5201869 - DNA, 25 bp, Homo sapien
cgccgcgtagtagggagcgtagccc

SEQ ID NO: 5201870 - DNA, 25 bp, Homo sapien
cgccttgaagagcacgtccggccgg

SEQ ID NO: 5201871 - DNA, 25 bp, Homo sapien
cggctcaggcgccttgaagagcacg

SEQ ID NO: 5201872 - DNA, 25 bp, Homo sapien
agaagctcgcgttgcatggccgcct

SEQ ID NO: 5201873 - DNA, 25 bp, Homo sapien
gctgcctcgtagaactggtcgaagc

SEQ ID NO: 5201874 - DNA, 25 bp, Homo sapien
ggcccgggcgctgcctcgtagaact

SEQ ID NO: 5201875 - DNA, 25 bp, Homo sapien
ctggtcgaagccctgtggcaagatg

SEQ ID NO: 5201876 - DNA, 25 bp, Homo sapien
ggtcgaagccctgtggcaagatgcc

SEQ ID NO: 5201877 - DNA, 25 bp, Homo sapien
cgcccttgtcggctgcgccctcggg

SEQ ID NO: 5201878 - DNA, 25 bp, Homo sapien
ggtcgcccttgtcggctgcgccctc

SEQ ID NO: 5201879 - DNA, 25 bp, Homo sapien
gtcgcccttgtcggctgcgccctcg

SEQ ID NO: 5201880 - DNA, 25 bp, Homo sapien
gggtcgcccttgtcggctgcgccct

SEQ ID NO: 5201881 - DNA, 25 bp, Homo sapien
ggctccgagccaggggtcgccttgg

SEQ ID NO: 5201882 - DNA, 25 bp, Homo sapien
cgccgtcgccaccgctgccttctgc

SEQ ID NO: 5201883 - DNA, 25 bp, Homo sapien
gccgtcgccaccgctgccttctgct

SEQ ID NO: 5201884 - DNA, 25 bp, Homo sapien
ccgagccaggggtcgccttggtgca

SEQ ID NO: 5201885 - DNA, 25 bp, Homo sapien
gaccagggggtgagagaggccgctg

SEQ ID NO: 5201886 - DNA, 25 bp, Homo sapien
ccgcccgcccgggccactgagcgag

SEQ ID NO: 5201887 - DNA, 25 bp, Homo sapien
agaaaaactcgcgttccagttcgcg

SEQ ID NO: 5201888 - DNA, 25 bp, Homo sapien
tctctttgtttatgtacacgttaaa

SEQ ID NO: 5201889 - DNA, 25 bp, Homo sapien
cgcgttccagttcgcggatctggta

SEQ ID NO: 5201890 - DNA, 25 bp, Homo sapien
gagcatccgagagagttgaagtctt

SEQ ID NO: 5201891 - DNA, 25 bp, Homo sapien
tttcttttctttcatcctgcgattc

SEQ ID NO: 5201892 - DNA, 25 bp, Homo sapien
tgcagacggtctctgttcagtttct

SEQ ID NO: 5201893 - DNA, 25 bp, Homo sapien
tcttttctttcatcctgcgattctg

SEQ ID NO: 5201894 - DNA, 25 bp, Homo sapien
ttttctttcatcctgcgattctgga

SEQ ID NO: 5201895 - DNA, 25 bp, Homo sapien
ctggggtgagggcgcttcctggagc

SEQ ID NO: 5201896 - DNA, 25 bp, Homo sapien
gctggggtgagggcgcttcctggag

SEQ ID NO: 5201897 - DNA, 25 bp, Homo sapien
tattaggatccgctcggccaagtcc

SEQ ID NO: 5201898 - DNA, 25 bp, Homo sapien
tgaccgtgggaaggaatcgtgaagt

SEQ ID NO: 5201899 - DNA, 25 bp, Homo sapien
acagagaagagacgtcattaaaccc

SEQ ID NO: 5201900 - DNA, 25 bp, Homo sapien
taaacccaaggacagtgggcctgcg

SEQ ID NO: 5201901 - DNA, 25 bp, Homo sapien
cacactggcggtaaaattgtaacgg

SEQ ID NO: 5201902 - DNA, 25 bp, Homo sapien
agcacactggcggtaaaattgtaac

SEQ ID NO: 5201903 - DNA, 25 bp, Homo sapien
cgacagcacactggcggtaaaattg

SEQ ID NO: 5201904 - DNA, 25 bp, Homo sapien
gggaacgacagcacactggcggtaa

SEQ ID NO: 5201905 - DNA, 25 bp, Homo sapien
tgcattcaccgaagaggaaggaagg

SEQ ID NO: 5201906 - DNA, 25 bp, Homo sapien
tcagagcaaaacaccagcgccttct

SEQ ID NO: 5201907 - DNA, 25 bp, Homo sapien
gaagggatctcttaaaactcagagc

SEQ ID NO: 5201908 - DNA, 25 bp, Homo sapien
gactcatgccttgatatgacagact

SEQ ID NO: 5201909 - DNA, 25 bp, Homo sapien
gggttctggccactaaaatatccta

SEQ ID NO: 5201910 - DNA, 25 bp, Homo sapien
gcttggtcacatcgtcaattcagaa

SEQ ID NO: 5201911 - DNA, 25 bp, Homo sapien
gattttcagttgcatgggttctggc

SEQ ID NO: 5201912 - DNA, 25 bp, Homo sapien
gactgtgactccttgttagcttgta

SEQ ID NO: 5201913 - DNA, 25 bp, Homo sapien
cttgaagcgataaatgccgtgagag

SEQ ID NO: 5201914 - DNA, 25 bp, Homo sapien
ttgaagcgataaatgccgtgagagg

SEQ ID NO: 5201915 - DNA, 25 bp, Homo sapien
gataaatgccgtgagagggtctgca

SEQ ID NO: 5201916 - DNA, 25 bp, Homo sapien
aagcgataaatgccgtgagagggtc

SEQ ID NO: 5201917 - DNA, 25 bp, Homo sapien
tcttagatttatggtgagctcctgg

SEQ ID NO: 5201918 - DNA, 25 bp, Homo sapien
tgcacattgcggaaatctcttttgg

SEQ ID NO: 5201919 - DNA, 25 bp, Homo sapien
tcttttgggcccaccagaaggtgta

SEQ ID NO: 5201920 - DNA, 25 bp, Homo sapien
tgcaacataaagtgcagtagagccc

SEQ ID NO: 5201921 - DNA, 25 bp, Homo sapien
caaacgcggcttctggaacgtgagc

SEQ ID NO: 5201922 - DNA, 25 bp, Homo sapien
tgaggtcgcctattagaatccagtg

SEQ ID NO: 5201923 - DNA, 25 bp, Homo sapien
ttggacagacaaggtaccgcggcct

SEQ ID NO: 5201924 - DNA, 25 bp, Homo sapien
catggaacgatcacactattagggc

SEQ ID NO: 5201925 - DNA, 25 bp, Homo sapien
ccttttaatcatcccaggaggtctg

SEQ ID NO: 5201926 - DNA, 25 bp, Homo sapien
tctgagagggggtaaaaccgatgaa

SEQ ID NO: 5201927 - DNA, 25 bp, Homo sapien
ctaagtggcccgctccctgatctgt

SEQ ID NO: 5201928 - DNA, 25 bp, Homo sapien
cctgatctgttataaacaaaagcct

SEQ ID NO: 5201929 - DNA, 25 bp, Homo sapien
cgcgggctcccagaacgattctccc

SEQ ID NO: 5201930 - DNA, 25 bp, Homo sapien
ccgcgggctcccagaacgattctcc

SEQ ID NO: 5201931 - DNA, 25 bp, Homo sapien
tcggtcgccactggtagccgcgcac

SEQ ID NO: 5201932 - DNA, 25 bp, Homo sapien
tcctgccggcgccactcggtcgcca

SEQ ID NO: 5201933 - DNA, 25 bp, Homo sapien
gccaacaaggccagcgctaattctg

SEQ ID NO: 5201934 - DNA, 25 bp, Homo sapien
aggctcttcacaatgaacttcgggg

SEQ ID NO: 5201935 - DNA, 25 bp, Homo sapien
cacaatgaacttcggggagggaaag

SEQ ID NO: 5201936 - DNA, 25 bp, Homo sapien
gccagcgctaattctgggggttgca

SEQ ID NO: 5201937 - DNA, 25 bp, Homo sapien
tgagaagcggtgtttcgcaggcggc

SEQ ID NO: 5201938 - DNA, 25 bp, Homo sapien
ttctggtctgatcccgggcccttgt

SEQ ID NO: 5201939 - DNA, 25 bp, Homo sapien
aggaaaggaactgcagaccgctgag

SEQ ID NO: 5201940 - DNA, 25 bp, Homo sapien
ttgtcaggcccatcttgggcgcagg

SEQ ID NO: 5201941 - DNA, 25 bp, Homo sapien
gcaagccccacacactttgtaagat

SEQ ID NO: 5201942 - DNA, 25 bp, Homo sapien
ttaggatccaaggccactctccgca

SEQ ID NO: 5201943 - DNA, 25 bp, Homo sapien
agccccacacactttgtaagatggg

SEQ ID NO: 5201944 - DNA, 25 bp, Homo sapien
taggatccaaggccactctccgcaa

SEQ ID NO: 5201945 - DNA, 25 bp, Homo sapien
ttaaagagttatgcccgctgttgcc

SEQ ID NO: 5201946 - DNA, 25 bp, Homo sapien
caatcgagactttgtaaaggataag

SEQ ID NO: 5201947 - DNA, 25 bp, Homo sapien
cacacgggaagatactttattaaca

SEQ ID NO: 5201948 - DNA, 25 bp, Homo sapien
cgctgttgccacacacgggaagata

SEQ ID NO: 5201949 - DNA, 25 bp, Homo sapien
cccgtgtaattgtggatgcctctgc

SEQ ID NO: 5201950 - DNA, 25 bp, Homo sapien
gacatctctaggaaaacattccccg

SEQ ID NO: 5201951 - DNA, 25 bp, Homo sapien
cacatgacaaccaagccaatgagat

SEQ ID NO: 5201952 - DNA, 25 bp, Homo sapien
gggtaagcacggacaacagcgacat

SEQ ID NO: 5201953 - DNA, 25 bp, Homo sapien
tgatcaaggaatctactaaaaaagt

SEQ ID NO: 5201954 - DNA, 25 bp, Homo sapien
gatcaaggaatctactaaaaaagta

SEQ ID NO: 5201955 - DNA, 25 bp, Homo sapien
ggcactgatcaaggaatctactaaa

SEQ ID NO: 5201956 - DNA, 25 bp, Homo sapien
aggcactgatcaaggaatctactaa

SEQ ID NO: 5201957 - DNA, 25 bp, Homo sapien
ctgcgctaggtggtggcatgtacat

SEQ ID NO: 5201958 - DNA, 25 bp, Homo sapien
tctgcgctaggtggtggcatgtaca

SEQ ID NO: 5201959 - DNA, 25 bp, Homo sapien
gtctgcgctaggtggtggcatgtac

SEQ ID NO: 5201960 - DNA, 25 bp, Homo sapien
ttttggccagagacgggagcagtcc

SEQ ID NO: 5201961 - DNA, 25 bp, Homo sapien
cctcagggttctcaacgggacaaga

SEQ ID NO: 5201962 - DNA, 25 bp, Homo sapien
aaatatccagggacgggaacctcag

SEQ ID NO: 5201963 - DNA, 25 bp, Homo sapien
caggtttgcattccataggtcccca

SEQ ID NO: 5201964 - DNA, 25 bp, Homo sapien
gctggggtggcaactctgctcatac

SEQ ID NO: 5201965 - DNA, 25 bp, Homo sapien
gggtggcaactctgctcataccgac

SEQ ID NO: 5201966 - DNA, 25 bp, Homo sapien
ccgctggggtggcaactctgctcat

SEQ ID NO: 5201967 - DNA, 25 bp, Homo sapien
tggggtggcaactctgctcataccg

SEQ ID NO: 5201968 - DNA, 25 bp, Homo sapien
ctgccaagtcgggctccggctcggc

SEQ ID NO: 5201969 - DNA, 25 bp, Homo sapien
gtcgggctccggctcggcgctgggc

SEQ ID NO: 5201970 - DNA, 25 bp, Homo sapien
cgggctccggctcggcgctgggcac

SEQ ID NO: 5201971 - DNA, 25 bp, Homo sapien
ccaagtcgggctccggctcggcgct

SEQ ID NO: 5201972 - DNA, 25 bp, Homo sapien
tctcagggctgagatcacccctcta

SEQ ID NO: 5201973 - DNA, 25 bp, Homo sapien
gagatcacccctctaaaaccaggcg

SEQ ID NO: 5201974 - DNA, 25 bp, Homo sapien
cctctaaaaccaggcggagcagcac

SEQ ID NO: 5201975 - DNA, 25 bp, Homo sapien
gggctgagatcacccctctaaaacc

SEQ ID NO: 5201976 - DNA, 25 bp, Homo sapien
tctgtggtcgtgtttatgagccgca

SEQ ID NO: 5201977 - DNA, 25 bp, Homo sapien
taacatgatcattgggctcaaggca

SEQ ID NO: 5201978 - DNA, 25 bp, Homo sapien
tgcatacacttgaacacgaacacgg

SEQ ID NO: 5201979 - DNA, 25 bp, Homo sapien
tgttgtgttcaggtctagctcagga

SEQ ID NO: 5201980 - DNA, 25 bp, Homo sapien
taagggttcagctcctaacagggac

SEQ ID NO: 5201981 - DNA, 25 bp, Homo sapien
gactgttcaaatgtacccttggccg

SEQ ID NO: 5201982 - DNA, 25 bp, Homo sapien
cagtcaggtttataggtgcccattc

SEQ ID NO: 5201983 - DNA, 25 bp, Homo sapien
gacagtctgcatttgggttctcgct

SEQ ID NO: 5201984 - DNA, 25 bp, Homo sapien
ttactgatctctaggcggcgctcgc

SEQ ID NO: 5201985 - DNA, 25 bp, Homo sapien
tgcctgtcggtgaggttaacgctct

SEQ ID NO: 5201986 - DNA, 25 bp, Homo sapien
tccagcgtttggtgcttagtgtaag

SEQ ID NO: 5201987 - DNA, 25 bp, Homo sapien
tgcagtgagccaattgctggttggt

SEQ ID NO: 5201988 - DNA, 25 bp, Homo sapien
gcggtcagttctcggatccggttct

SEQ ID NO: 5201989 - DNA, 25 bp, Homo sapien
ttctcggatccggttctctcggctc

SEQ ID NO: 5201990 - DNA, 25 bp, Homo sapien
gatccggttctctcggctcatcttc

SEQ ID NO: 5201991 - DNA, 25 bp, Homo sapien
ttggcggtcagttctcggatccggt

SEQ ID NO: 5201992 - DNA, 25 bp, Homo sapien
aatagttaccctgcattacgatgaa

SEQ ID NO: 5201993 - DNA, 25 bp, Homo sapien
catgagttcatggactaaccacaca

SEQ ID NO: 5201994 - DNA, 25 bp, Homo sapien
gaaaggctacaaggcataaatcgcc

SEQ ID NO: 5201995 - DNA, 25 bp, Homo sapien
cttgcagcacgaacataatgacccc

SEQ ID NO: 5201996 - DNA, 25 bp, Homo sapien
tcctgtaatggaggccggcaacttc

SEQ ID NO: 5201997 - DNA, 25 bp, Homo sapien
ccaggtgggcaagactagcttcaac

SEQ ID NO: 5201998 - DNA, 25 bp, Homo sapien
cctgatgattgctcgccagccagaa

SEQ ID NO: 5201999 - DNA, 25 bp, Homo sapien
gaattggatccgctgcagtgctaca

SEQ ID NO: 5202000 - DNA, 25 bp, Homo sapien
cttctctggggtctggctgtcttgc

SEQ ID NO: 5202001 - DNA, 25 bp, Homo sapien
tcctcggcttctctggggtctggct

SEQ ID NO: 5202002 - DNA, 25 bp, Homo sapien
ttctctggggtctggctgtcttgcg

SEQ ID NO: 5202003 - DNA, 25 bp, Homo sapien
ccatcctcggcttctctggggtctg

SEQ ID NO: 5202004 - DNA, 25 bp, Homo sapien
ctcctcctgcccaaccggtgttaag

SEQ ID NO: 5202005 - DNA, 25 bp, Homo sapien
ctcctgcccaaccggtgttaagtct

SEQ ID NO: 5202006 - DNA, 25 bp, Homo sapien
ctgcccaaccggtgttaagtctggg

SEQ ID NO: 5202007 - DNA, 25 bp, Homo sapien
cctgcccaaccggtgttaagtctgg

SEQ ID NO: 5202008 - DNA, 25 bp, Homo sapien
ttgtagctcaggctttcctcggata

SEQ ID NO: 5202009 - DNA, 25 bp, Homo sapien
gctcaggctttcctcggatacatgg

SEQ ID NO: 5202010 - DNA, 25 bp, Homo sapien
tcctcggatacatggcccgctatca

SEQ ID NO: 5202011 - DNA, 25 bp, Homo sapien
atggcccgctatcaacagctaatgg

SEQ ID NO: 5202012 - DNA, 25 bp, Homo sapien
cttctccgatgatgctggaaaggcc

SEQ ID NO: 5202013 - DNA, 25 bp, Homo sapien
ggccagggtgcttcgtcttctccga

SEQ ID NO: 5202014 - DNA, 25 bp, Homo sapien
taaaacaggtggaagacctctgtaa

SEQ ID NO: 5202015 - DNA, 25 bp, Homo sapien
taaaacggacggatggagcagatcg

SEQ ID NO: 5202016 - DNA, 25 bp, Homo sapien
cataagcgccgcaattagagcccgc

SEQ ID NO: 5202017 - DNA, 25 bp, Homo sapien
cgcgcggcccacgtgatcatattta

SEQ ID NO: 5202018 - DNA, 25 bp, Homo sapien
caataccgggagtaaatcagtccgc

SEQ ID NO: 5202019 - DNA, 25 bp, Homo sapien
gagccaccgactagttcgcaggctg

SEQ ID NO: 5202020 - DNA, 25 bp, Homo sapien
tcgtcgccctcatggcctataagcg

SEQ ID NO: 5202021 - DNA, 25 bp, Homo sapien
gcgaacacctcgtcgccctcatggc

SEQ ID NO: 5202022 - DNA, 25 bp, Homo sapien
catggcctataagcgagtccacgta

SEQ ID NO: 5202023 - DNA, 25 bp, Homo sapien
cgccctcatggcctataagcgagtc

SEQ ID NO: 5202024 - DNA, 25 bp, Homo sapien
gggcaaaactacacgaggcgaactc

SEQ ID NO: 5202025 - DNA, 25 bp, Homo sapien
caaaactacacgaggcgaactcggc

SEQ ID NO: 5202026 - DNA, 25 bp, Homo sapien
ctgggggcaaaactacacgaggcga

SEQ ID NO: 5202027 - DNA, 25 bp, Homo sapien
actacacgaggcgaactcggcggcg

SEQ ID NO: 5202028 - DNA, 25 bp, Homo sapien
gagggcaccgcggaccacgaggcag

SEQ ID NO: 5202029 - DNA, 25 bp, Homo sapien
cgcggaccacgaggcagagaacacg

SEQ ID NO: 5202030 - DNA, 25 bp, Homo sapien
gcaccgcggaccacgaggcagagaa

SEQ ID NO: 5202031 - DNA, 25 bp, Homo sapien
ccacgaggcagagaacacggccgat

SEQ ID NO: 5202032 - DNA, 25 bp, Homo sapien
ggtggtagaggccgctcatcgccgc

SEQ ID NO: 5202033 - DNA, 25 bp, Homo sapien
gggtggtagaggccgctcatcgccg

SEQ ID NO: 5202034 - DNA, 25 bp, Homo sapien
tggtagaggccgctcatcgccgccg

SEQ ID NO: 5202035 - DNA, 25 bp, Homo sapien
gtggtagaggccgctcatcgccgcc

SEQ ID NO: 5202036 - DNA, 25 bp, Homo sapien
cagaggcggccaggggcggcggggg

SEQ ID NO: 5202037 - DNA, 25 bp, Homo sapien
tagcggccgggctcggaggcagagg

SEQ ID NO: 5202038 - DNA, 25 bp, Homo sapien
gtagcggccgggctcggaggcagag

SEQ ID NO: 5202039 - DNA, 25 bp, Homo sapien
gaggcagaggcggccaggggcggcg

SEQ ID NO: 5202040 - DNA, 25 bp, Homo sapien
cccgggaagccgggcagcggctcca

SEQ ID NO: 5202041 - DNA, 25 bp, Homo sapien
gcagcggctccatccaggagcgcac

SEQ ID NO: 5202042 - DNA, 25 bp, Homo sapien
gggaagccgggcagcggctccatcc

SEQ ID NO: 5202043 - DNA, 25 bp, Homo sapien
cgcccgggaagccgggcagcggctc

SEQ ID NO: 5202044 - DNA, 25 bp, Homo sapien
gccgcctccaccaccaccgccaccg

SEQ ID NO: 5202045 - DNA, 25 bp, Homo sapien
cgccgcctccaccaccaccgccacc

SEQ ID NO: 5202046 - DNA, 25 bp, Homo sapien
tccaccaccaccgccaccgcccgca

SEQ ID NO: 5202047 - DNA, 25 bp, Homo sapien
gcctccaccaccaccgccaccgccc

SEQ ID NO: 5202048 - DNA, 25 bp, Homo sapien
taatcccgtagtggcgcccgttggc

SEQ ID NO: 5202049 - DNA, 25 bp, Homo sapien
cggagcactcagtccgtttggagga

SEQ ID NO: 5202050 - DNA, 25 bp, Homo sapien
cgggccacggagcactcagtccgtt

SEQ ID NO: 5202051 - DNA, 25 bp, Homo sapien
ttcaggcttaatcccgtagtggcgc

SEQ ID NO: 5202052 - DNA, 25 bp, Homo sapien
aggaacgagttgcacgagaactcgg

SEQ ID NO: 5202053 - DNA, 25 bp, Homo sapien
caggaacgagttgcacgagaactcg

SEQ ID NO: 5202054 - DNA, 25 bp, Homo sapien
ggaacgagttgcacgagaactcggg

SEQ ID NO: 5202055 - DNA, 25 bp, Homo sapien
caagctgagggctccgacgagccgc

SEQ ID NO: 5202056 - DNA, 25 bp, Homo sapien
gctgcggctgcgaatgctgcttctc

SEQ ID NO: 5202057 - DNA, 25 bp, Homo sapien
cttcagcgaacagcctgggatcggg

SEQ ID NO: 5202058 - DNA, 25 bp, Homo sapien
tgggatcgggtggtcgctgcaagct

SEQ ID NO: 5202059 - DNA, 25 bp, Homo sapien
agaatcctggccacctcgtagcgcc

SEQ ID NO: 5202060 - DNA, 25 bp, Homo sapien
ggtggagcgagcgtggatccagttc

SEQ ID NO: 5202061 - DNA, 25 bp, Homo sapien
gagcgtggatccagttcgcggcggg

SEQ ID NO: 5202062 - DNA, 25 bp, Homo sapien
cctcgtagcgccggtcccgggtgag

SEQ ID NO: 5202063 - DNA, 25 bp, Homo sapien
tctcctttggggcatttctccttgc

SEQ ID NO: 5202064 - DNA, 25 bp, Homo sapien
tttggggcatttctccttgctcatc

SEQ ID NO: 5202065 - DNA, 25 bp, Homo sapien
tcagtctcctttggggcatttctcc

SEQ ID NO: 5202066 - DNA, 25 bp, Homo sapien
gggcatttctccttgctcatctttt

SEQ ID NO: 5202067 - DNA, 25 bp, Homo sapien
gaagaagtccaagtcgctggagagt

SEQ ID NO: 5202068 - DNA, 25 bp, Homo sapien
aaaagaagaagaagtccaagtcgct

SEQ ID NO: 5202069 - DNA, 25 bp, Homo sapien
gtttctggaaatcaagcaccaaaca

SEQ ID NO: 5202070 - DNA, 25 bp, Homo sapien
tccaagtcgctggagagtttctgga

SEQ ID NO: 5202071 - DNA, 25 bp, Homo sapien
ctcagagaccaaccacacagtcact

SEQ ID NO: 5202072 - DNA, 25 bp, Homo sapien
agagaccaaccacacagtcacttct

SEQ ID NO: 5202073 - DNA, 25 bp, Homo sapien
agaccaaccacacagtcacttctat

SEQ ID NO: 5202074 - DNA, 25 bp, Homo sapien
tcagagaccaaccacacagtcactt

SEQ ID NO: 5202075 - DNA, 25 bp, Homo sapien
catttcttaaggaaccaatggagca

SEQ ID NO: 5202076 - DNA, 25 bp, Homo sapien
tgtcgctctgccttcattcttggaa

SEQ ID NO: 5202077 - DNA, 25 bp, Homo sapien
gtaaacgagcaaatacagagtcccc

SEQ ID NO: 5202078 - DNA, 25 bp, Homo sapien
gggtgtccgcactgttgtcgctctg

SEQ ID NO: 5202079 - DNA, 25 bp, Homo sapien
ccgccgggcttcaccgtgggctagc

SEQ ID NO: 5202080 - DNA, 25 bp, Homo sapien
tcactggagatctccaccgaggtcc

SEQ ID NO: 5202081 - DNA, 25 bp, Homo sapien
tgctccctgaggaaagggggctttc

SEQ ID NO: 5202082 - DNA, 25 bp, Homo sapien
gggctttcgcaactggtgggcaacc

SEQ ID NO: 5202083 - DNA, 25 bp, Homo sapien
agcagcgcgtccaatgcactgagga

SEQ ID NO: 5202084 - DNA, 25 bp, Homo sapien
gatcaggtcagcatttattagtagg

SEQ ID NO: 5202085 - DNA, 25 bp, Homo sapien
catttattagtaggaagcagtaaca

SEQ ID NO: 5202086 - DNA, 25 bp, Homo sapien
tctgggctccatttgatcaggtcag

SEQ ID NO: 5202087 - DNA, 25 bp, Homo sapien
tctgggcgcttctgcaaggctaaca

SEQ ID NO: 5202088 - DNA, 25 bp, Homo sapien
ctggctcttctgggcgcttctgcaa

SEQ ID NO: 5202089 - DNA, 25 bp, Homo sapien
ggcgcttctgcaaggctaacactgg

SEQ ID NO: 5202090 - DNA, 25 bp, Homo sapien
tagggtgctgtgtacccaagcccca

SEQ ID NO: 5202091 - DNA, 25 bp, Homo sapien
tccgaaggcgaacgaattgattctg

SEQ ID NO: 5202092 - DNA, 25 bp, Homo sapien
tcgagatggacagacatagcaaggt

SEQ ID NO: 5202093 - DNA, 25 bp, Homo sapien
cgatcctgacttgtgtccgggtgga

SEQ ID NO: 5202094 - DNA, 25 bp, Homo sapien
taggtacaatgtcgtgagggcgcca

SEQ ID NO: 5202095 - DNA, 25 bp, Homo sapien
tgtgaaattactgccgagagagcgc

SEQ ID NO: 5202096 - DNA, 25 bp, Homo sapien
gaaaagttgcccgagtcatgtggcc

SEQ ID NO: 5202097 - DNA, 25 bp, Homo sapien
catgtggcccagtcgagtgtgaatc

SEQ ID NO: 5202098 - DNA, 25 bp, Homo sapien
attaaaagccgcgagtgtggcccca

SEQ ID NO: 5202099 - DNA, 25 bp, Homo sapien
gagccttagacttgggggagccaag

SEQ ID NO: 5202100 - DNA, 25 bp, Homo sapien
aggaggctgcggagcaaatgactgc

SEQ ID NO: 5202101 - DNA, 25 bp, Homo sapien
gggccgcgggaatgcggatcgcagc

SEQ ID NO: 5202102 - DNA, 25 bp, Homo sapien
gaatgcggatcgcagccggcaggga

SEQ ID NO: 5202103 - DNA, 25 bp, Homo sapien
gcgcagttcagtcgctacggccgac

SEQ ID NO: 5202104 - DNA, 25 bp, Homo sapien
gggatccgcgcgcagttcagtcgct

SEQ ID NO: 5202105 - DNA, 25 bp, Homo sapien
agttcagtcgctacggccgacggac

SEQ ID NO: 5202106 - DNA, 25 bp, Homo sapien
ctgcacggaaagtcagcgtgacggg

SEQ ID NO: 5202107 - DNA, 25 bp, Homo sapien
ggcgaggcattttcgcaccacagca

SEQ ID NO: 5202108 - DNA, 25 bp, Homo sapien
cggcgaggcattttcgcaccacagc

SEQ ID NO: 5202109 - DNA, 25 bp, Homo sapien
cggctcggccgcaatataatcgccg

SEQ ID NO: 5202110 - DNA, 25 bp, Homo sapien
agtgactgagcgcacccggacaaga

SEQ ID NO: 5202111 - DNA, 25 bp, Homo sapien
gacaagaaaaaagtgcgctcggccc

SEQ ID NO: 5202112 - DNA, 25 bp, Homo sapien
ggacactctggcctcggtttacaaa

SEQ ID NO: 5202113 - DNA, 25 bp, Homo sapien
gagtacagcgggttcacgaagtacg

SEQ ID NO: 5202114 - DNA, 25 bp, Homo sapien
tacttggagtacagcgggttcacga

SEQ ID NO: 5202115 - DNA, 25 bp, Homo sapien
gcgggttcacgaagtacgaactcat

SEQ ID NO: 5202116 - DNA, 25 bp, Homo sapien
ttgtacttggagtacagcgggttca

SEQ ID NO: 5202117 - DNA, 25 bp, Homo sapien
acagtcgtagtaagtgggattgatg

SEQ ID NO: 5202118 - DNA, 25 bp, Homo sapien
gcgcgaagtgacagtcgtagtaagt

SEQ ID NO: 5202119 - DNA, 25 bp, Homo sapien
ctcgggcgcgaagtgacagtcgtag

SEQ ID NO: 5202120 - DNA, 25 bp, Homo sapien
agtgacagtcgtagtaagtgggatt

SEQ ID NO: 5202121 - DNA, 25 bp, Homo sapien
cgctgttgccatagagctgcagggc

SEQ ID NO: 5202122 - DNA, 25 bp, Homo sapien
cggcggcggcgtgacggccgccgac

SEQ ID NO: 5202123 - DNA, 25 bp, Homo sapien
gccgcacccagtcccggagggcggc

SEQ ID NO: 5202124 - DNA, 25 bp, Homo sapien
ctgcgggggcgcgtgcgggaagccg

SEQ ID NO: 5202125 - DNA, 25 bp, Homo sapien
agggggggcggcctggtaggcagcg

SEQ ID NO: 5202126 - DNA, 25 bp, Homo sapien
gcctggtaggcagcggccgggctgc

SEQ ID NO: 5202127 - DNA, 25 bp, Homo sapien
gtgacaggcaatcccgccgcagggg

SEQ ID NO: 5202128 - DNA, 25 bp, Homo sapien
ggggcggcctggtaggcagcggccg

SEQ ID NO: 5202129 - DNA, 25 bp, Homo sapien
tcaggatattgtaccagctcggcct

SEQ ID NO: 5202130 - DNA, 25 bp, Homo sapien
catttgagaaggagacgagctctga

SEQ ID NO: 5202131 - DNA, 25 bp, Homo sapien
gatttaagtggtctgggtcctcgcc

SEQ ID NO: 5202132 - DNA, 25 bp, Homo sapien
tcttgctgggtcgtaaaaatcggct

SEQ ID NO: 5202133 - DNA, 25 bp, Homo sapien
aatttgtcaggccttcggctctgtc

SEQ ID NO: 5202134 - DNA, 25 bp, Homo sapien
aagcgactgtaggtttgtcttcctc

SEQ ID NO: 5202135 - DNA, 25 bp, Homo sapien
gctagggcgtgggaaacctcgattc

SEQ ID NO: 5202136 - DNA, 25 bp, Homo sapien
tgtctctcggtgagggctagggcgt

SEQ ID NO: 5202137 - DNA, 25 bp, Homo sapien
tacccttccataggacagctcaagg

SEQ ID NO: 5202138 - DNA, 25 bp, Homo sapien
tcaaagcacagaaaacctcaagagc

SEQ ID NO: 5202139 - DNA, 25 bp, Homo sapien
tcaagagcagtgacatgaaggtagc

SEQ ID NO: 5202140 - DNA, 25 bp, Homo sapien
tagcttgaaacacaggtaaggtcct

SEQ ID NO: 5202141 - DNA, 25 bp, Homo sapien
taaattcttgtcactggcccaatct

SEQ ID NO: 5202142 - DNA, 25 bp, Homo sapien
gttacattcttcagctaatacgtgc

SEQ ID NO: 5202143 - DNA, 25 bp, Homo sapien
gcagagctggactacaagttacatt

SEQ ID NO: 5202144 - DNA, 25 bp, Homo sapien
gcacccgaactattcattataaagg

SEQ ID NO: 5202145 - DNA, 25 bp, Homo sapien
tcaggcgattacaagggcggttcaa

SEQ ID NO: 5202146 - DNA, 25 bp, Homo sapien
taaagaactagcgatttcaggcgat

SEQ ID NO: 5202147 - DNA, 25 bp, Homo sapien
tggtttaaaaccagcggcgaacaga

SEQ ID NO: 5202148 - DNA, 25 bp, Homo sapien
gaaaataacggaacacagcggcagc

SEQ ID NO: 5202149 - DNA, 25 bp, Homo sapien
tactaaggagctagcgacattccgg

SEQ ID NO: 5202150 - DNA, 25 bp, Homo sapien
gacattccggagttgtttacactca

SEQ ID NO: 5202151 - DNA, 25 bp, Homo sapien
taggtgaggctatcgctttcctgaa

SEQ ID NO: 5202152 - DNA, 25 bp, Homo sapien
tcctgaagaacagcggaggacgtac

SEQ ID NO: 5202153 - DNA, 25 bp, Homo sapien
aaactccttgctctacgtcctcctc

SEQ ID NO: 5202154 - DNA, 25 bp, Homo sapien
ctttctggacagacagggttatggt

SEQ ID NO: 5202155 - DNA, 25 bp, Homo sapien
tctacgtcctcctctaagagcaatt

SEQ ID NO: 5202156 - DNA, 25 bp, Homo sapien
atctttctggacagacagggttatg

SEQ ID NO: 5202157 - DNA, 25 bp, Homo sapien
gaggtggcggcgatgcggaccgagt

SEQ ID NO: 5202158 - DNA, 25 bp, Homo sapien
tgcggaccgagtgagcggcggtggg

SEQ ID NO: 5202159 - DNA, 25 bp, Homo sapien
tccccaccagctccggaggtggcgg

SEQ ID NO: 5202160 - DNA, 25 bp, Homo sapien
tccgcaatcccgcagccggtgactg

SEQ ID NO: 5202161 - DNA, 25 bp, Homo sapien
aagaagccgcgccagaaccgcgcgg

SEQ ID NO: 5202162 - DNA, 25 bp, Homo sapien
ctgcagtcacctcgagcaggccggc

SEQ ID NO: 5202163 - DNA, 25 bp, Homo sapien
agaaccgcgcggctgcagtcacctc

SEQ ID NO: 5202164 - DNA, 25 bp, Homo sapien
agtcacctcgagcaggccggctgct

SEQ ID NO: 5202165 - DNA, 25 bp, Homo sapien
tgtaatccactaggcgctgcccggc

SEQ ID NO: 5202166 - DNA, 25 bp, Homo sapien
ctacaggcggcggtcggtccgggcg

SEQ ID NO: 5202167 - DNA, 25 bp, Homo sapien
gtcggtccgggcgtctgctgtaatc

SEQ ID NO: 5202168 - DNA, 25 bp, Homo sapien
gctgcgctcactctcggacgcagag

SEQ ID NO: 5202169 - DNA, 25 bp, Homo sapien
tccccgggaaatgtaggggagcagc

SEQ ID NO: 5202170 - DNA, 25 bp, Homo sapien
tgagctgcccaagggggtcggcgcc

SEQ ID NO: 5202171 - DNA, 25 bp, Homo sapien
gggagcagccggactgagctgccca

SEQ ID NO: 5202172 - DNA, 25 bp, Homo sapien
cccgggaaatgtaggggagcagccg

SEQ ID NO: 5202173 - DNA, 25 bp, Homo sapien
cagctctcgtgcttggccacattta

SEQ ID NO: 5202174 - DNA, 25 bp, Homo sapien
catctgacgggaaaatacgctttgt

SEQ ID NO: 5202175 - DNA, 25 bp, Homo sapien
ccaaggcccggacatgctatcggct

SEQ ID NO: 5202176 - DNA, 25 bp, Homo sapien
ggccgtaaatacctctaacagctgc

SEQ ID NO: 5202177 - DNA, 25 bp, Homo sapien
gaaatgtcacatcttgggcaccgct

SEQ ID NO: 5202178 - DNA, 25 bp, Homo sapien
gggaaaaccatcctacatccagaga

SEQ ID NO: 5202179 - DNA, 25 bp, Homo sapien
gatttgcaaaccctattccgccgaa

SEQ ID NO: 5202180 - DNA, 25 bp, Homo sapien
gcagcatctcctcgttgccaatgaa

SEQ ID NO: 5202181 - DNA, 25 bp, Homo sapien
gggtgtatcttcctgctcgagtcca

SEQ ID NO: 5202182 - DNA, 25 bp, Homo sapien
tgctttgccgatcgaattcccgggc

SEQ ID NO: 5202183 - DNA, 25 bp, Homo sapien
cctcgaatgtgctgtgctggcataa

SEQ ID NO: 5202184 - DNA, 25 bp, Homo sapien
ccttttcccaaagtagtagcagcag

SEQ ID NO: 5202185 - DNA, 25 bp, Homo sapien
gatccgcggattgggcccagcttgc

SEQ ID NO: 5202186 - DNA, 25 bp, Homo sapien
caaggtaaatgacgagacccacggc

SEQ ID NO: 5202187 - DNA, 25 bp, Homo sapien
aaggatgtgcttttcaaggctgtcc

SEQ ID NO: 5202188 - DNA, 25 bp, Homo sapien
ttctaagtgagcaagggcaaggccc

SEQ ID NO: 5202189 - DNA, 25 bp, Homo sapien
cttgaacctggtgcgaggagtgccc

SEQ ID NO: 5202190 - DNA, 25 bp, Homo sapien
gagcattatttaagtaaggtgtcgc

SEQ ID NO: 5202191 - DNA, 25 bp, Homo sapien
gtaaggtgtcgctggctcttgaacc

SEQ ID NO: 5202192 - DNA, 25 bp, Homo sapien
tgggattgggtcagagcattattta

SEQ ID NO: 5202193 - DNA, 25 bp, Homo sapien
caagcctaggaagtcagatgtcccc

SEQ ID NO: 5202194 - DNA, 25 bp, Homo sapien
gactctcaaggaatccaagcctagg

SEQ ID NO: 5202195 - DNA, 25 bp, Homo sapien
gccacatgcctagaggtttctgtaa

SEQ ID NO: 5202196 - DNA, 25 bp, Homo sapien
acaaagttgaaggtagccacatgcc

SEQ ID NO: 5202197 - DNA, 25 bp, Homo sapien
tggagcctctcacgttcctattgct

SEQ ID NO: 5202198 - DNA, 25 bp, Homo sapien
gaaccgtctccttcttagcctggag

SEQ ID NO: 5202199 - DNA, 25 bp, Homo sapien
tattttggcttgtcaactctcaagc

SEQ ID NO: 5202200 - DNA, 25 bp, Homo sapien
cacttgtatgctcttaacctaattt

SEQ ID NO: 5202201 - DNA, 25 bp, Homo sapien
gaagacaatcttactaagcagtggt

SEQ ID NO: 5202202 - DNA, 25 bp, Homo sapien
agagcccagaagacaatcttactaa

SEQ ID NO: 5202203 - DNA, 25 bp, Homo sapien
ccagaggctggtgtccagttttaag

SEQ ID NO: 5202204 - DNA, 25 bp, Homo sapien
ctaagcagtggtcctcccagaggct

SEQ ID NO: 5202205 - DNA, 25 bp, Homo sapien
agcggcgctctctcatggtcctgaa

SEQ ID NO: 5202206 - DNA, 25 bp, Homo sapien
gcggcgctctctcatggtcctgaac

SEQ ID NO: 5202207 - DNA, 25 bp, Homo sapien
aaaggaacaaatgccctcagcggca

SEQ ID NO: 5202208 - DNA, 25 bp, Homo sapien
tcagggttaccaagcaggcgaacaa

SEQ ID NO: 5202209 - DNA, 25 bp, Homo sapien
cctaatgggcttggcgacaatttga

SEQ ID NO: 5202210 - DNA, 25 bp, Homo sapien
tctccaagaagtcgcgcatttacct

SEQ ID NO: 5202211 - DNA, 25 bp, Homo sapien
tatatagacaacgttacaacctctg

SEQ ID NO: 5202212 - DNA, 25 bp, Homo sapien
tatacggataccacacaaattcggt

SEQ ID NO: 5202213 - DNA, 25 bp, Homo sapien
cggttctacagggtatatatagaca

SEQ ID NO: 5202214 - DNA, 25 bp, Homo sapien
tattcccctagaatcgaatctgtga

SEQ ID NO: 5202215 - DNA, 25 bp, Homo sapien
ccaagtaggcacagctcaagggaga

SEQ ID NO: 5202216 - DNA, 25 bp, Homo sapien
gattctgccatacaaaggccgccgt

SEQ ID NO: 5202217 - DNA, 25 bp, Homo sapien
ccaatggcgagggagcaagtttatc

SEQ ID NO: 5202218 - DNA, 25 bp, Homo sapien
tagggccctcctacttgctgtcaac

SEQ ID NO: 5202219 - DNA, 25 bp, Homo sapien
gggctggaagtctgcgccctgcgcg

SEQ ID NO: 5202220 - DNA, 25 bp, Homo sapien
gggtccacatacttggagttcacca

SEQ ID NO: 5202221 - DNA, 25 bp, Homo sapien
tgcaaatactcctcgcacggaggga

SEQ ID NO: 5202222 - DNA, 25 bp, Homo sapien
gccgtagtagtcggcgccctgctcg

SEQ ID NO: 5202223 - DNA, 25 bp, Homo sapien
cccgcgcaggcagcgccgagccagg

SEQ ID NO: 5202224 - DNA, 25 bp, Homo sapien
ccgctgcctccgaaaggctgctcac

SEQ ID NO: 5202225 - DNA, 25 bp, Homo sapien
gcaggcagcgccgagccaggcccgg

SEQ ID NO: 5202226 - DNA, 25 bp, Homo sapien
gggccgctgcctccgaaaggctgct

SEQ ID NO: 5202227 - DNA, 25 bp, Homo sapien
tcctggagcggcgtagtgaccgccg

SEQ ID NO: 5202228 - DNA, 25 bp, Homo sapien
caaggctctcctggagcggcgtagt

SEQ ID NO: 5202229 - DNA, 25 bp, Homo sapien
ggtcggactgactgtaggcccgggc

SEQ ID NO: 5202230 - DNA, 25 bp, Homo sapien
cgccgggggagctgggcaaggctct

SEQ ID NO: 5202231 - DNA, 25 bp, Homo sapien
tcatccaggggtagaccacggccgg

SEQ ID NO: 5202232 - DNA, 25 bp, Homo sapien
gtagaccacggccggctgcttgagt

SEQ ID NO: 5202233 - DNA, 25 bp, Homo sapien
ccggctgcttgagtgccgtcccgga

SEQ ID NO: 5202234 - DNA, 25 bp, Homo sapien
cacggccggctgcttgagtgccgtc

SEQ ID NO: 5202235 - DNA, 25 bp, Homo sapien
agcattttggaaatcccccgctcct

SEQ ID NO: 5202236 - DNA, 25 bp, Homo sapien
ggcttgcgggatccccaaatgtgct

SEQ ID NO: 5202237 - DNA, 25 bp, Homo sapien
ccaggtccggaaccctcaagcattt

SEQ ID NO: 5202238 - DNA, 25 bp, Homo sapien
ttctgggcccaccaccaggtccgga

SEQ ID NO: 5202239 - DNA, 25 bp, Homo sapien
cagggtgtgagcgatttcaatccga

SEQ ID NO: 5202240 - DNA, 25 bp, Homo sapien
ttgatctggcgctccgacagacaca

SEQ ID NO: 5202241 - DNA, 25 bp, Homo sapien
ggcgccttgtcagatacctgttaaa

SEQ ID NO: 5202242 - DNA, 25 bp, Homo sapien
gagcgatttcaatccgacggcgcct

SEQ ID NO: 5202243 - DNA, 25 bp, Homo sapien
gtgttgggcagcttatgatcttttt

SEQ ID NO: 5202244 - DNA, 25 bp, Homo sapien
tagtgttgggcagcttatgatcttt

SEQ ID NO: 5202245 - DNA, 25 bp, Homo sapien
tttagtgttgggcagcttatgatct

SEQ ID NO: 5202246 - DNA, 25 bp, Homo sapien
cctttagtgttgggcagcttatgat

SEQ ID NO: 5202247 - DNA, 25 bp, Homo sapien
agatgaggaggaagatgaggacgat

SEQ ID NO: 5202248 - DNA, 25 bp, Homo sapien
tgaggaggaagatgaggacgatgac

SEQ ID NO: 5202249 - DNA, 25 bp, Homo sapien
ctgaggaggagcaagatgaggagga

SEQ ID NO: 5202250 - DNA, 25 bp, Homo sapien
tgaggaggagcaagatgaggaggaa

SEQ ID NO: 5202251 - DNA, 25 bp, Homo sapien
ctataaggtcgtcaggtccgtgtgg

SEQ ID NO: 5202252 - DNA, 25 bp, Homo sapien
tcgtcaggtccgtgtggtggtcttt

SEQ ID NO: 5202253 - DNA, 25 bp, Homo sapien
gccatcggctgtaaatgctggctgg

SEQ ID NO: 5202254 - DNA, 25 bp, Homo sapien
caggtccgtgtggtggtctttggcc

SEQ ID NO: 5202255 - DNA, 25 bp, Homo sapien
agcttcggctcagcctggtgcgcag

SEQ ID NO: 5202256 - DNA, 25 bp, Homo sapien
cgcagcttcggctcagcctggtgcg

SEQ ID NO: 5202257 - DNA, 25 bp, Homo sapien
agcctggtgcgcagggagagatggg

SEQ ID NO: 5202258 - DNA, 25 bp, Homo sapien
gaggtgacagcaggcccggcctgcc

SEQ ID NO: 5202259 - DNA, 25 bp, Homo sapien
gatgctaacctagtccgagggcggc

SEQ ID NO: 5202260 - DNA, 25 bp, Homo sapien
tacttagagagagaatcccgccccc

SEQ ID NO: 5202261 - DNA, 25 bp, Homo sapien
tatgttctcagtagctcctgccata

SEQ ID NO: 5202262 - DNA, 25 bp, Homo sapien
tcataagtttaatgactcgccaaga

SEQ ID NO: 5202263 - DNA, 25 bp, Homo sapien
agtgggggagaatgtccaaattcac

SEQ ID NO: 5202264 - DNA, 25 bp, Homo sapien
cagaaagtccagaaatcctgaccca

SEQ ID NO: 5202265 - DNA, 25 bp, Homo sapien
tcaactcccccacattattaagcca

SEQ ID NO: 5202266 - DNA, 25 bp, Homo sapien
cacagtgggataaagcatccaacct

SEQ ID NO: 5202267 - DNA, 25 bp, Homo sapien
tcttagacccatttctttggaggtg

SEQ ID NO: 5202268 - DNA, 25 bp, Homo sapien
cttagacccatttctttggaggtgg

SEQ ID NO: 5202269 - DNA, 25 bp, Homo sapien
catgaaggtgtcagttatttctgta

SEQ ID NO: 5202270 - DNA, 25 bp, Homo sapien
tttttggcatgaaggtgtcagttat

SEQ ID NO: 5202271 - DNA, 25 bp, Homo sapien
caagaatgcaactttgagtgaatcc

SEQ ID NO: 5202272 - DNA, 25 bp, Homo sapien
taaggcccccctatatacatttcca

SEQ ID NO: 5202273 - DNA, 25 bp, Homo sapien
tgcttccttctggaagggttaaggc

SEQ ID NO: 5202274 - DNA, 25 bp, Homo sapien
ggagttcagaagtaagtgcacatat

SEQ ID NO: 5202275 - DNA, 25 bp, Homo sapien
atgacccagtgcatagaggttttgt

SEQ ID NO: 5202276 - DNA, 25 bp, Homo sapien
aggaaaatgttggaccatttgttgg

SEQ ID NO: 5202277 - DNA, 25 bp, Homo sapien
tcagtcattatctaatgacccagtg

SEQ ID NO: 5202278 - DNA, 25 bp, Homo sapien
tatctaatgacccagtgcatagagg

SEQ ID NO: 5202279 - DNA, 25 bp, Homo sapien
tattctcaaggcaaagacgagtgct

SEQ ID NO: 5202280 - DNA, 25 bp, Homo sapien
tagaggtcagtcctcccggctgaaa

SEQ ID NO: 5202281 - DNA, 25 bp, Homo sapien
gaagcggaatttcagcctagggact

SEQ ID NO: 5202282 - DNA, 25 bp, Homo sapien
caccccaaggagaaacaaagagcag

SEQ ID NO: 5202283 - DNA, 25 bp, Homo sapien
tgtgaacagacatcatgggctgact

SEQ ID NO: 5202284 - DNA, 25 bp, Homo sapien
ctattaaaaaagcatctcgtgtgaa

SEQ ID NO: 5202285 - DNA, 25 bp, Homo sapien
agtggcagcaaaacattggtcaatt

SEQ ID NO: 5202286 - DNA, 25 bp, Homo sapien
taaataatactttaatcagtggcag

SEQ ID NO: 5202287 - DNA, 25 bp, Homo sapien
tgaattacatcaaaactacaagcaa

SEQ ID NO: 5202288 - DNA, 25 bp, Homo sapien
gaattacatcaaaactacaagcaac

SEQ ID NO: 5202289 - DNA, 25 bp, Homo sapien
aattacatcaaaactacaagcaaca

SEQ ID NO: 5202290 - DNA, 25 bp, Homo sapien
atcttcctcgcacttagaaaattct

SEQ ID NO: 5202291 - DNA, 25 bp, Homo sapien
cttgtagaaatctattcttatcatc

SEQ ID NO: 5202292 - DNA, 25 bp, Homo sapien
tcatcttcctcgcacttagaaaatt

SEQ ID NO: 5202293 - DNA, 25 bp, Homo sapien
ttatcatcttcctcgcacttagaaa

SEQ ID NO: 5202294 - DNA, 25 bp, Homo sapien
gatgccgtgacagcgaccattgttc

SEQ ID NO: 5202295 - DNA, 25 bp, Homo sapien
aataggcggcagatgccgtgacagc

SEQ ID NO: 5202296 - DNA, 25 bp, Homo sapien
ggcagatgccgtgacagcgaccatt

SEQ ID NO: 5202297 - DNA, 25 bp, Homo sapien
cggtttaagaataggcggcagatgc

SEQ ID NO: 5202298 - DNA, 25 bp, Homo sapien
acactgataaaatagcccgggccag

SEQ ID NO: 5202299 - DNA, 25 bp, Homo sapien
cagtgcccgccaagccggggccttg

SEQ ID NO: 5202300 - DNA, 25 bp, Homo sapien
actgataaaatagcccgggccagtg

SEQ ID NO: 5202301 - DNA, 25 bp, Homo sapien
acaccaacccgggcaattgtcacac

SEQ ID NO: 5202302 - DNA, 25 bp, Homo sapien
gaagcttgtactgattgaggctgaa

SEQ ID NO: 5202303 - DNA, 25 bp, Homo sapien
cctcatagtcgggaaatacagacgc

SEQ ID NO: 5202304 - DNA, 25 bp, Homo sapien
caagcatatttgttcacgtgacccc

SEQ ID NO: 5202305 - DNA, 25 bp, Homo sapien
ggctgaaactttcacgccacccagt

SEQ ID NO: 5202306 - DNA, 25 bp, Homo sapien
tgttttgcttgcggaacgtggtcgt

SEQ ID NO: 5202307 - DNA, 25 bp, Homo sapien
atttgttttgcttgcggaacgtggt

SEQ ID NO: 5202308 - DNA, 25 bp, Homo sapien
gatttgttttgcttgcggaacgtgg

SEQ ID NO: 5202309 - DNA, 25 bp, Homo sapien
ggatttgttttgcttgcggaacgtg

SEQ ID NO: 5202310 - DNA, 25 bp, Homo sapien
ccgagctggcttcgcctgcgctgcg

SEQ ID NO: 5202311 - DNA, 25 bp, Homo sapien
cgcccgtccgctctcgggcccagag

SEQ ID NO: 5202312 - DNA, 25 bp, Homo sapien
caataaacgcaggaggaacgagttc

SEQ ID NO: 5202313 - DNA, 25 bp, Homo sapien
aacgagttcgtagtccccgagctgg

SEQ ID NO: 5202314 - DNA, 25 bp, Homo sapien
gcgctcgcagacacggccatatact

SEQ ID NO: 5202315 - DNA, 25 bp, Homo sapien
tcgagcacacggaattcccggtaga

SEQ ID NO: 5202316 - DNA, 25 bp, Homo sapien
tggtcttgcgcgctcgcagacacgg

SEQ ID NO: 5202317 - DNA, 25 bp, Homo sapien
cggccatatactcgagcacacggaa

SEQ ID NO: 5202318 - DNA, 25 bp, Homo sapien
tcagagtgggcgccagtggggggca

SEQ ID NO: 5202319 - DNA, 25 bp, Homo sapien
agtggggggcagagctagccttccc

SEQ ID NO: 5202320 - DNA, 25 bp, Homo sapien
ggcagagctagccttccccctttgt

SEQ ID NO: 5202321 - DNA, 25 bp, Homo sapien
cagagtgggcgccagtggggggcag

SEQ ID NO: 5202322 - DNA, 25 bp, Homo sapien
tcatatttaatatcccgctcagggc

SEQ ID NO: 5202323 - DNA, 25 bp, Homo sapien
agccccgtgcccaaagatttccatt

SEQ ID NO: 5202324 - DNA, 25 bp, Homo sapien
aattggcaataatcaagatcacaga

SEQ ID NO: 5202325 - DNA, 25 bp, Homo sapien
tgtcatgcaattgcttacctggatc

SEQ ID NO: 5202326 - DNA, 25 bp, Homo sapien
cgcgcagcttcaaggcagctagcaa

SEQ ID NO: 5202327 - DNA, 25 bp, Homo sapien
tcagctgactaagctggcaggcgcg

SEQ ID NO: 5202328 - DNA, 25 bp, Homo sapien
gaagttataagtgaatgctccatgg

SEQ ID NO: 5202329 - DNA, 25 bp, Homo sapien
tactcgcggtaattggattcagctg

SEQ ID NO: 5202330 - DNA, 25 bp, Homo sapien
atcccacgcgggtccaactttggct

SEQ ID NO: 5202331 - DNA, 25 bp, Homo sapien
tgtttgcccagattctcagccttaa

SEQ ID NO: 5202332 - DNA, 25 bp, Homo sapien
ttctggagccaaaaacgggaagagc

SEQ ID NO: 5202333 - DNA, 25 bp, Homo sapien
tggctttggaccaccagcactggtg

SEQ ID NO: 5202334 - DNA, 25 bp, Homo sapien
tatggtacccgtgaccatccagacg

SEQ ID NO: 5202335 - DNA, 25 bp, Homo sapien
gaaggacgtcatagtcaatgtgact

SEQ ID NO: 5202336 - DNA, 25 bp, Homo sapien
tttcccacttgaaggacgtcatagt

SEQ ID NO: 5202337 - DNA, 25 bp, Homo sapien
ctattgtatatggtacccgtgacca

SEQ ID NO: 5202338 - DNA, 25 bp, Homo sapien
ttgtaggctcttcaggtttcttttg

SEQ ID NO: 5202339 - DNA, 25 bp, Homo sapien
caggtttcttttgatatctgtggag

SEQ ID NO: 5202340 - DNA, 25 bp, Homo sapien
ggtttcttttgatatctgtggaggc

SEQ ID NO: 5202341 - DNA, 25 bp, Homo sapien
tgttttcttgaattttgtctttatc

SEQ ID NO: 5202342 - DNA, 25 bp, Homo sapien
ctgcgagcagcaggattatataaag

SEQ ID NO: 5202343 - DNA, 25 bp, Homo sapien
gcagcaggattatataaagtgaccg

SEQ ID NO: 5202344 - DNA, 25 bp, Homo sapien
caggattatataaagtgaccggcgc

SEQ ID NO: 5202345 - DNA, 25 bp, Homo sapien
tatataaagtgaccggcgcctgctt

SEQ ID NO: 5202346 - DNA, 25 bp, Homo sapien
caaggcccggcacttttcagcagtg

SEQ ID NO: 5202347 - DNA, 25 bp, Homo sapien
cagcaaaagaattccctactccgca

SEQ ID NO: 5202348 - DNA, 25 bp, Homo sapien
tactccgcacttttcccgctcttgc

SEQ ID NO: 5202349 - DNA, 25 bp, Homo sapien
ctccgcgtaggaggcagcgcagcaa

SEQ ID NO: 5202350 - DNA, 25 bp, Homo sapien
ggagctctcacggtgcatatcaatg

SEQ ID NO: 5202351 - DNA, 25 bp, Homo sapien
aataaaaggcgctcacagcgaccag

SEQ ID NO: 5202352 - DNA, 25 bp, Homo sapien
gggttattaagcagctggagctctc

SEQ ID NO: 5202353 - DNA, 25 bp, Homo sapien
aaatttatgactgcgaccacggcgg

SEQ ID NO: 5202354 - DNA, 25 bp, Homo sapien
ctaccactgtatccttcactgccac

SEQ ID NO: 5202355 - DNA, 25 bp, Homo sapien
ctgctgaatcctgagagagctgggc

SEQ ID NO: 5202356 - DNA, 25 bp, Homo sapien
ccaatgtctgctgaatcctgagaga

SEQ ID NO: 5202357 - DNA, 25 bp, Homo sapien
actgccacctccaatgtctgctgaa

SEQ ID NO: 5202358 - DNA, 25 bp, Homo sapien
catagcctccaaacagtcctgggtt

SEQ ID NO: 5202359 - DNA, 25 bp, Homo sapien
ggtgctgtagccgtaagtgtccgta

SEQ ID NO: 5202360 - DNA, 25 bp, Homo sapien
tagttttgctgtagccatagcctcc

SEQ ID NO: 5202361 - DNA, 25 bp, Homo sapien
tgcagctgccattgagttcagctcc

SEQ ID NO: 5202362 - DNA, 25 bp, Homo sapien
aggaggctggctgccaccaccccca

SEQ ID NO: 5202363 - DNA, 25 bp, Homo sapien
ggaggctggctgccaccacccccac

SEQ ID NO: 5202364 - DNA, 25 bp, Homo sapien
caggaggctggctgccaccaccccc

SEQ ID NO: 5202365 - DNA, 25 bp, Homo sapien
ctccaggattggtgggtgaagatgg

SEQ ID NO: 5202366 - DNA, 25 bp, Homo sapien
gatgggggcagggtcggtggtggag

SEQ ID NO: 5202367 - DNA, 25 bp, Homo sapien
ggtgaagatgggggcagggtcggtg

SEQ ID NO: 5202368 - DNA, 25 bp, Homo sapien
tccaggattggtgggtgaagatggg

SEQ ID NO: 5202369 - DNA, 25 bp, Homo sapien
cttggagttctgtcgagactctttc

SEQ ID NO: 5202370 - DNA, 25 bp, Homo sapien
acagctgttcttctgcttggagttc

SEQ ID NO: 5202371 - DNA, 25 bp, Homo sapien
gctagaagcattgggcccacctttg

SEQ ID NO: 5202372 - DNA, 25 bp, Homo sapien
gaggagctagaagcattgggcccac

SEQ ID NO: 5202373 - DNA, 25 bp, Homo sapien
agaggggtgcttccctggttctctt

SEQ ID NO: 5202374 - DNA, 25 bp, Homo sapien
ctgagcgagtgggtggggaccctca

SEQ ID NO: 5202375 - DNA, 25 bp, Homo sapien
ggtggggaccctcaggactggagag

SEQ ID NO: 5202376 - DNA, 25 bp, Homo sapien
tggagaggggtgcttccctggttct

SEQ ID NO: 5202377 - DNA, 25 bp, Homo sapien
ttccgtgagattcagcaggttggcc

SEQ ID NO: 5202378 - DNA, 25 bp, Homo sapien
tatgccgtgcgtacccgcttggatg

SEQ ID NO: 5202379 - DNA, 25 bp, Homo sapien
agatgcgtcagtttgggagcctccg

SEQ ID NO: 5202380 - DNA, 25 bp, Homo sapien
cgtagcgcttctgttgtggcaggca

SEQ ID NO: 5202381 - DNA, 25 bp, Homo sapien
taatcagggaacgaaatgactcgct

SEQ ID NO: 5202382 - DNA, 25 bp, Homo sapien
gaccaaagtgtgttgtgccacgcca

SEQ ID NO: 5202383 - DNA, 25 bp, Homo sapien
ttatggcgagtcacccaaaggacgc

SEQ ID NO: 5202384 - DNA, 25 bp, Homo sapien
tctgaaactaagctagacgcgggcc

SEQ ID NO: 5202385 - DNA, 25 bp, Homo sapien
gaaaaagcttaggtacgcgtctcca

SEQ ID NO: 5202386 - DNA, 25 bp, Homo sapien
tctgaaggcgttttctaagtggccc

SEQ ID NO: 5202387 - DNA, 25 bp, Homo sapien
catagaagccgggaagttgtccacc

SEQ ID NO: 5202388 - DNA, 25 bp, Homo sapien
tagaaacgattgttgttccaccaga

SEQ ID NO: 5202389 - DNA, 25 bp, Homo sapien
tgtgagaggaagctaatgtcagccg

SEQ ID NO: 5202390 - DNA, 25 bp, Homo sapien
ggtggttgtaatccctgcaaggcag

SEQ ID NO: 5202391 - DNA, 25 bp, Homo sapien
gatactcctgcggtaacacactgtg

SEQ ID NO: 5202392 - DNA, 25 bp, Homo sapien
tattagaagtctcgggaacctccag

SEQ ID NO: 5202393 - DNA, 25 bp, Homo sapien
tctgtcaggtccctggataaggtgg

SEQ ID NO: 5202394 - DNA, 25 bp, Homo sapien
cctctctctcgtttgaaagcctgta

SEQ ID NO: 5202395 - DNA, 25 bp, Homo sapien
tgttagcagcctgtgagcctcggaa

SEQ ID NO: 5202396 - DNA, 25 bp, Homo sapien
aatcttgttcagcaatgttagcagc

SEQ ID NO: 5202397 - DNA, 25 bp, Homo sapien
tgttccaggtggatcaggagcgcca

SEQ ID NO: 5202398 - DNA, 25 bp, Homo sapien
gatatggtatttgtagggcagcgct

SEQ ID NO: 5202399 - DNA, 25 bp, Homo sapien
tccgctcgacccttgcagaggaggt

SEQ ID NO: 5202400 - DNA, 25 bp, Homo sapien
gcagcgctgtgaacaatggagccat

SEQ ID NO: 5202401 - DNA, 25 bp, Homo sapien
ctgtcttcagaggtgtattcgtccc

SEQ ID NO: 5202402 - DNA, 25 bp, Homo sapien
gcttgcgatttctggtcggatccca

SEQ ID NO: 5202403 - DNA, 25 bp, Homo sapien
tatttaagggtgacactcgggcacg

SEQ ID NO: 5202404 - DNA, 25 bp, Homo sapien
gaaattagtcttgccctgtcttcag

SEQ ID NO: 5202405 - DNA, 25 bp, Homo sapien
gtgaagaatcccctcattatcgttg

SEQ ID NO: 5202406 - DNA, 25 bp, Homo sapien
ccctcattatcgttgaggttgatca

SEQ ID NO: 5202407 - DNA, 25 bp, Homo sapien
gaagaatcccctcattatcgttgag

SEQ ID NO: 5202408 - DNA, 25 bp, Homo sapien
tatcgttgaggttgatcagcatcag

SEQ ID NO: 5202409 - DNA, 25 bp, Homo sapien
gaaagagatttgtctctcccagtct

SEQ ID NO: 5202410 - DNA, 25 bp, Homo sapien
aagagatttgtctctcccagtctct

SEQ ID NO: 5202411 - DNA, 25 bp, Homo sapien
ttggctttgatgatgccagtggggt

SEQ ID NO: 5202412 - DNA, 25 bp, Homo sapien
aaagagatttgtctctcccagtctc

SEQ ID NO: 5202413 - DNA, 25 bp, Homo sapien
tggtcatctcatactcaaattcaac

SEQ ID NO: 5202414 - DNA, 25 bp, Homo sapien
actctggtcatctcatactcaaatt

SEQ ID NO: 5202415 - DNA, 25 bp, Homo sapien
tcaacagatgtttgccaaggattta

SEQ ID NO: 5202416 - DNA, 25 bp, Homo sapien
catactcaaattcaacagatgtttg

SEQ ID NO: 5202417 - DNA, 25 bp, Homo sapien
ttggactggttcttgacttgctcag

SEQ ID NO: 5202418 - DNA, 25 bp, Homo sapien
tcagagttagcatctccattcttgg

SEQ ID NO: 5202419 - DNA, 25 bp, Homo sapien
ctggttcttgacttgctcaggttgg

SEQ ID NO: 5202420 - DNA, 25 bp, Homo sapien
ggctcagagttagcatctccattct

SEQ ID NO: 5202421 - DNA, 25 bp, Homo sapien
tgccccgcagccaagttagccaaag

SEQ ID NO: 5202422 - DNA, 25 bp, Homo sapien
cgcagccaagttagccaaagcagcc

SEQ ID NO: 5202423 - DNA, 25 bp, Homo sapien
gagccccgaggagagccgtcgcgac

SEQ ID NO: 5202424 - DNA, 25 bp, Homo sapien
ccccgagccccgaggagagccgtcg

SEQ ID NO: 5202425 - DNA, 25 bp, Homo sapien
ccctctccaacccatggcgagtgag

SEQ ID NO: 5202426 - DNA, 25 bp, Homo sapien
ggccggagtacggagccgggcagag

SEQ ID NO: 5202427 - DNA, 25 bp, Homo sapien
cgagtgagccggaggtaaatagtgg

SEQ ID NO: 5202428 - DNA, 25 bp, Homo sapien
gctgagcaggactgccgccgtctgc

SEQ ID NO: 5202429 - DNA, 25 bp, Homo sapien
agcggcagaacttgggtgccaagct

SEQ ID NO: 5202430 - DNA, 25 bp, Homo sapien
gcatgacacgtactccaggtaggag

SEQ ID NO: 5202431 - DNA, 25 bp, Homo sapien
gccgggcgtcggagcggcagaactt

SEQ ID NO: 5202432 - DNA, 25 bp, Homo sapien
ctgctgctgcatgacacgtactcca

SEQ ID NO: 5202433 - DNA, 25 bp, Homo sapien
cgccgtcgccgttgcccagagggaa

SEQ ID NO: 5202434 - DNA, 25 bp, Homo sapien
gaaggcgccgtcgccgttgcccaga

SEQ ID NO: 5202435 - DNA, 25 bp, Homo sapien
gccgtcgccgttgcccagagggaag

SEQ ID NO: 5202436 - DNA, 25 bp, Homo sapien
ggcgccgtcgccgttgcccagaggg

SEQ ID NO: 5202437 - DNA, 25 bp, Homo sapien
ctgcgcgtactggggcgcggccgga

SEQ ID NO: 5202438 - DNA, 25 bp, Homo sapien
tgcgcgtactggggcgcggccggag

SEQ ID NO: 5202439 - DNA, 25 bp, Homo sapien
gtgcggcaccaggttcgtaggcccc

SEQ ID NO: 5202440 - DNA, 25 bp, Homo sapien
aggtgcggcaccaggttcgtaggcc

SEQ ID NO: 5202441 - DNA, 25 bp, Homo sapien
gcaggtgcggcaccaggttcgtagg

SEQ ID NO: 5202442 - DNA, 25 bp, Homo sapien
cggcaggtgcggcaccaggttcgta

SEQ ID NO: 5202443 - DNA, 25 bp, Homo sapien
aggaagccgtagtccgcgcccccag

SEQ ID NO: 5202444 - DNA, 25 bp, Homo sapien
gaccccaggaagccgtagtccgcgc

SEQ ID NO: 5202445 - DNA, 25 bp, Homo sapien
ccagcacgcccgggaagtcgtacgc

SEQ ID NO: 5202446 - DNA, 25 bp, Homo sapien
agcacgcccgggaagtcgtacgccg

SEQ ID NO: 5202447 - DNA, 25 bp, Homo sapien
gagaagacggccgaggtggcgtagt

SEQ ID NO: 5202448 - DNA, 25 bp, Homo sapien
cgaggtggcgtagtggacgtgagac

SEQ ID NO: 5202449 - DNA, 25 bp, Homo sapien
aaagagccgccgcccgagaagacgg

SEQ ID NO: 5202450 - DNA, 25 bp, Homo sapien
gacggccgaggtggcgtagtggacg

SEQ ID NO: 5202451 - DNA, 25 bp, Homo sapien
ggttcgccgaaggccgcgtaatcca

SEQ ID NO: 5202452 - DNA, 25 bp, Homo sapien
gttcgccgaaggccgcgtaatccac

SEQ ID NO: 5202453 - DNA, 25 bp, Homo sapien
ccactcgaacgtgctgaaggcggca

SEQ ID NO: 5202454 - DNA, 25 bp, Homo sapien
gccggaggcgggagagacggacttg

SEQ ID NO: 5202455 - DNA, 25 bp, Homo sapien
gctgacgctttgagacaagccggaa

SEQ ID NO: 5202456 - DNA, 25 bp, Homo sapien
gatgcggtctggaaagcaccagggt

SEQ ID NO: 5202457 - DNA, 25 bp, Homo sapien
accacgctcccagcgcatttccgcg

SEQ ID NO: 5202458 - DNA, 25 bp, Homo sapien
gcgacaccacgctcccagcgcattt

SEQ ID NO: 5202459 - DNA, 25 bp, Homo sapien
ctggaaaggcagcgacaccacgctc

SEQ ID NO: 5202460 - DNA, 25 bp, Homo sapien
cccagcgcatttccgcgggggaggc

SEQ ID NO: 5202461 - DNA, 25 bp, Homo sapien
cctggcacattttccgaatctgtac

SEQ ID NO: 5202462 - DNA, 25 bp, Homo sapien
ctgtactcgaggcagactccatgga

SEQ ID NO: 5202463 - DNA, 25 bp, Homo sapien
gactccatggaattcgcccgggaac

SEQ ID NO: 5202464 - DNA, 25 bp, Homo sapien
ggagaagttccacggagagctcctt

SEQ ID NO: 5202465 - DNA, 25 bp, Homo sapien
tgcgccgggctcgagttaagtactt

SEQ ID NO: 5202466 - DNA, 25 bp, Homo sapien
tcacgaaggctcttgggactgagaa

SEQ ID NO: 5202467 - DNA, 25 bp, Homo sapien
caagcagttggctatctcgatgcgc

SEQ ID NO: 5202468 - DNA, 25 bp, Homo sapien
gctgaaattcgtgcggatcgcgctg

SEQ ID NO: 5202469 - DNA, 25 bp, Homo sapien
gaactcagcaactaatggtctgcca

SEQ ID NO: 5202470 - DNA, 25 bp, Homo sapien
cagcttagctacatcaaggagaccc

SEQ ID NO: 5202471 - DNA, 25 bp, Homo sapien
tcaggcacatagagaggtagaaacc

SEQ ID NO: 5202472 - DNA, 25 bp, Homo sapien
catatagtctggaactcggaagcca

SEQ ID NO: 5202473 - DNA, 25 bp, Homo sapien
aagagtgtaagaaaagcagagagca

SEQ ID NO: 5202474 - DNA, 25 bp, Homo sapien
attaaagagtgtaagaaaagcagag

SEQ ID NO: 5202475 - DNA, 25 bp, Homo sapien
taaagagtgtaagaaaagcagagag

SEQ ID NO: 5202476 - DNA, 25 bp, Homo sapien
cattattaaagagtgtaagaaaagc

SEQ ID NO: 5202477 - DNA, 25 bp, Homo sapien
catcaagttattaaagggcagccgg

SEQ ID NO: 5202478 - DNA, 25 bp, Homo sapien
tagattaaggaaatgacccagcatg

SEQ ID NO: 5202479 - DNA, 25 bp, Homo sapien
tgtcatgtcaaagaccactgcaggg

SEQ ID NO: 5202480 - DNA, 25 bp, Homo sapien
tcaaatagcagtagagctcagaggg

SEQ ID NO: 5202481 - DNA, 25 bp, Homo sapien
gagtctgatgatgacatgggccttg

SEQ ID NO: 5202482 - DNA, 25 bp, Homo sapien
tccaaggagtctgatgatgacatgg

SEQ ID NO: 5202483 - DNA, 25 bp, Homo sapien
tggtgctgcaccagcaggacgtcct

SEQ ID NO: 5202484 - DNA, 25 bp, Homo sapien
catgggccttggtctttttgactaa

SEQ ID NO: 5202485 - DNA, 25 bp, Homo sapien
tccagcagcagagtaagcgctggtg

SEQ ID NO: 5202486 - DNA, 25 bp, Homo sapien
ggggcattaccgagtgccttccaga

SEQ ID NO: 5202487 - DNA, 25 bp, Homo sapien
ggagggggcattaccgagtgccttc

SEQ ID NO: 5202488 - DNA, 25 bp, Homo sapien
ggcattaccgagtgccttccagaca

SEQ ID NO: 5202489 - DNA, 25 bp, Homo sapien
ttgaggacgtcctcctccttcattg

SEQ ID NO: 5202490 - DNA, 25 bp, Homo sapien
cctgctgaaaggaacttgaggacgt

SEQ ID NO: 5202491 - DNA, 25 bp, Homo sapien
gaggacgtcctcctccttcattggc

SEQ ID NO: 5202492 - DNA, 25 bp, Homo sapien
tgaaaggaacttgaggacgtcctcc

SEQ ID NO: 5202493 - DNA, 25 bp, Homo sapien
gccaatatcggcgtgcctttctggc

SEQ ID NO: 5202494 - DNA, 25 bp, Homo sapien
gtgacagcagccaatatcggcgtgc

SEQ ID NO: 5202495 - DNA, 25 bp, Homo sapien
tatcggcgtgcctttctggccagtt

SEQ ID NO: 5202496 - DNA, 25 bp, Homo sapien
cagcagccaatatcggcgtgccttt

SEQ ID NO: 5202497 - DNA, 25 bp, Homo sapien
gggatgacaacttccacatagcaca

SEQ ID NO: 5202498 - DNA, 25 bp, Homo sapien
tgcatgggatgacaacttccacata

SEQ ID NO: 5202499 - DNA, 25 bp, Homo sapien
tgggccagcatccaccatgtcaaac

SEQ ID NO: 5202500 - DNA, 25 bp, Homo sapien
ttgttgcatgggatgacaacttcca

SEQ ID NO: 5202501 - DNA, 25 bp, Homo sapien
catgacatcccacggatgtttgtgg

SEQ ID NO: 5202502 - DNA, 25 bp, Homo sapien
tgacatcccacggatgtttgtggga

SEQ ID NO: 5202503 - DNA, 25 bp, Homo sapien
aggcatgacatcccacggatgtttg

SEQ ID NO: 5202504 - DNA, 25 bp, Homo sapien
gcatgacatcccacggatgtttgtg

SEQ ID NO: 5202505 - DNA, 25 bp, Homo sapien
ggagctggcatagtccgttcatcct

SEQ ID NO: 5202506 - DNA, 25 bp, Homo sapien
agctggcatagtccgttcatcctga

SEQ ID NO: 5202507 - DNA, 25 bp, Homo sapien
ctggcatagtccgttcatcctgaaa

SEQ ID NO: 5202508 - DNA, 25 bp, Homo sapien
ggcatagtccgttcatcctgaaatt

SEQ ID NO: 5202509 - DNA, 25 bp, Homo sapien
gctaagcactccaggcttcagtagg

SEQ ID NO: 5202510 - DNA, 25 bp, Homo sapien
agcctcccgtggcaggctaagcact

SEQ ID NO: 5202511 - DNA, 25 bp, Homo sapien
cagtagggaactgctgaataagcac

SEQ ID NO: 5202512 - DNA, 25 bp, Homo sapien
ctaagcactccaggcttcagtaggg

SEQ ID NO: 5202513 - DNA, 25 bp, Homo sapien
gtggccggagcagtgggagctgcac

SEQ ID NO: 5202514 - DNA, 25 bp, Homo sapien
attcagtggccggagcagtgggagc

SEQ ID NO: 5202515 - DNA, 25 bp, Homo sapien
ggccggagcagtgggagctgcacac

SEQ ID NO: 5202516 - DNA, 25 bp, Homo sapien
ctacccattcagtggccggagcagt

SEQ ID NO: 5202517 - DNA, 25 bp, Homo sapien
aatgtgcataccctattcagccaac

SEQ ID NO: 5202518 - DNA, 25 bp, Homo sapien
ctattgttatatctccagggactaa

SEQ ID NO: 5202519 - DNA, 25 bp, Homo sapien
tactggcaacccaattggcatcttg

SEQ ID NO: 5202520 - DNA, 25 bp, Homo sapien
caagacagtattctgaggtttctgc

SEQ ID NO: 5202521 - DNA, 25 bp, Homo sapien
caagaatctgtggatcaaactttat

SEQ ID NO: 5202522 - DNA, 25 bp, Homo sapien
ttcaagaatctgtggatcaaacttt

SEQ ID NO: 5202523 - DNA, 25 bp, Homo sapien
tcaagaatctgtggatcaaacttta

SEQ ID NO: 5202524 - DNA, 25 bp, Homo sapien
aagaatctgtggatcaaactttatg

SEQ ID NO: 5202525 - DNA, 25 bp, Homo sapien
tctggaagattgctggtactcctgg

SEQ ID NO: 5202526 - DNA, 25 bp, Homo sapien
tgaaaatcctctaaagcaggaactg

SEQ ID NO: 5202527 - DNA, 25 bp, Homo sapien
cagcaagaggatgcgctgaggagga

SEQ ID NO: 5202528 - DNA, 25 bp, Homo sapien
aacagcactttctaactctggaaga

SEQ ID NO: 5202529 - DNA, 25 bp, Homo sapien
cgcaaacccggaggctctcggcagt

SEQ ID NO: 5202530 - DNA, 25 bp, Homo sapien
tagggacttccggcgcagccgacaa

SEQ ID NO: 5202531 - DNA, 25 bp, Homo sapien
gcctagccccgccaacgttcagact

SEQ ID NO: 5202532 - DNA, 25 bp, Homo sapien
tctcggcagttaacgagcctagccc

SEQ ID NO: 5202533 - DNA, 25 bp, Homo sapien
cgaaggcttccgccactagagacat

SEQ ID NO: 5202534 - DNA, 25 bp, Homo sapien
caatctgggagacgaaggcttccgc

SEQ ID NO: 5202535 - DNA, 25 bp, Homo sapien
ctgcaatctgggagacgaaggcttc

SEQ ID NO: 5202536 - DNA, 25 bp, Homo sapien
ctgggagacgaaggcttccgccact

SEQ ID NO: 5202537 - DNA, 25 bp, Homo sapien
agatgcttgcccctgtggtaacgcc

SEQ ID NO: 5202538 - DNA, 25 bp, Homo sapien
cgtataatgccgcaaggctggagga

SEQ ID NO: 5202539 - DNA, 25 bp, Homo sapien
tccgggccgggttcagcgtataatg

SEQ ID NO: 5202540 - DNA, 25 bp, Homo sapien
gataaggttggtagtccgtgcccgc

SEQ ID NO: 5202541 - DNA, 25 bp, Homo sapien
aattttccatgaatccgcgcgggcg

SEQ ID NO: 5202542 - DNA, 25 bp, Homo sapien
taaaaattttccatgaatccgcgcg

SEQ ID NO: 5202543 - DNA, 25 bp, Homo sapien
ttttccatgaatccgcgcgggcgtg

SEQ ID NO: 5202544 - DNA, 25 bp, Homo sapien
aaaattttccatgaatccgcgcggg

SEQ ID NO: 5202545 - DNA, 25 bp, Homo sapien
cctatttaggaacgataactgagaa

SEQ ID NO: 5202546 - DNA, 25 bp, Homo sapien
tagtaaggagatagaagcagttcac

SEQ ID NO: 5202547 - DNA, 25 bp, Homo sapien
cactgaggcttgcagtgtatggact

SEQ ID NO: 5202548 - DNA, 25 bp, Homo sapien
ggtaacagcagtagaaatggacaga

SEQ ID NO: 5202549 - DNA, 25 bp, Homo sapien
gtcattcatgtactctagagcaagg

SEQ ID NO: 5202550 - DNA, 25 bp, Homo sapien
tacatctcatcccacattggagaat

SEQ ID NO: 5202551 - DNA, 25 bp, Homo sapien
agcttgcggggggaacacacatgaa

SEQ ID NO: 5202552 - DNA, 25 bp, Homo sapien
gaatgccgttctaattaaataacta

SEQ ID NO: 5202553 - DNA, 25 bp, Homo sapien
gcattttcaggccaaggttctgcag

SEQ ID NO: 5202554 - DNA, 25 bp, Homo sapien
ctttcaattgctgatataatgtagc

SEQ ID NO: 5202555 - DNA, 25 bp, Homo sapien
taatgtagcattttcaggccaaggt

SEQ ID NO: 5202556 - DNA, 25 bp, Homo sapien
gatataatgtagcattttcaggcca

SEQ ID NO: 5202557 - DNA, 25 bp, Homo sapien
gaagctgcattgtcagaaagtaaaa

SEQ ID NO: 5202558 - DNA, 25 bp, Homo sapien
gagaagctgcattgtcagaaagtaa

SEQ ID NO: 5202559 - DNA, 25 bp, Homo sapien
tatttcacactgcagaagtactctg

SEQ ID NO: 5202560 - DNA, 25 bp, Homo sapien
gaagtactctggtataacagtataa

SEQ ID NO: 5202561 - DNA, 25 bp, Homo sapien
tgtagaatgttcaaagaatagattc

SEQ ID NO: 5202562 - DNA, 25 bp, Homo sapien
gaatgtaatttatagcaaagccagg

SEQ ID NO: 5202563 - DNA, 25 bp, Homo sapien
gacacctcacatagttcggtgctcc

SEQ ID NO: 5202564 - DNA, 25 bp, Homo sapien
gaaagacacctcacatagttcggtg

SEQ ID NO: 5202565 - DNA, 25 bp, Homo sapien
cagtaagggccgaaagacacctcac

SEQ ID NO: 5202566 - DNA, 25 bp, Homo sapien
gggccgaaagacacctcacatagtt

SEQ ID NO: 5202567 - DNA, 25 bp, Homo sapien
acaactgcaagagggccgaacagga

SEQ ID NO: 5202568 - DNA, 25 bp, Homo sapien
aattttatgggttcagagctcactg

SEQ ID NO: 5202569 - DNA, 25 bp, Homo sapien
cagactgcctggataaacgggacac

SEQ ID NO: 5202570 - DNA, 25 bp, Homo sapien
gaacaggaatggctccagtctgcag

SEQ ID NO: 5202571 - DNA, 25 bp, Homo sapien
tgagggcactttggtaaggtctacc

SEQ ID NO: 5202572 - DNA, 25 bp, Homo sapien
tgtaaggatattcacacttaagccc

SEQ ID NO: 5202573 - DNA, 25 bp, Homo sapien
caaattgtgacgcatccatcaacgg

SEQ ID NO: 5202574 - DNA, 25 bp, Homo sapien
aaaagaataaggttggctgggcaag

SEQ ID NO: 5202575 - DNA, 25 bp, Homo sapien
gacagcatggatatataacaacagt

SEQ ID NO: 5202576 - DNA, 25 bp, Homo sapien
ggatgtctatcagacagcatggata

SEQ ID NO: 5202577 - DNA, 25 bp, Homo sapien
tgctcaacaggcacgtgtggctagt

SEQ ID NO: 5202578 - DNA, 25 bp, Homo sapien
agtgtgatgtgatgatgtctactgg

SEQ ID NO: 5202579 - DNA, 25 bp, Homo sapien
tcaccttccgctttgactttcaata

SEQ ID NO: 5202580 - DNA, 25 bp, Homo sapien
gtcaccttccgctttgactttcaat

SEQ ID NO: 5202581 - DNA, 25 bp, Homo sapien
tgtcaccttccgctttgactttcaa

SEQ ID NO: 5202582 - DNA, 25 bp, Homo sapien
tagtcaattaatctgtagttcacaa

SEQ ID NO: 5202583 - DNA, 25 bp, Homo sapien
gatagcataattctagttagtcaat

SEQ ID NO: 5202584 - DNA, 25 bp, Homo sapien
acactcaacttactacagacctcaa

SEQ ID NO: 5202585 - DNA, 25 bp, Homo sapien
gacctcaactgatagcataattcta

SEQ ID NO: 5202586 - DNA, 25 bp, Homo sapien
gggtttctgtcactcactgccaaat

SEQ ID NO: 5202587 - DNA, 25 bp, Homo sapien
taatcatgtagtcaccaaacctgga

SEQ ID NO: 5202588 - DNA, 25 bp, Homo sapien
tacaagatccatgtggccagaagca

SEQ ID NO: 5202589 - DNA, 25 bp, Homo sapien
tacccgtgtttgtccgagaagtgaa

SEQ ID NO: 5202590 - DNA, 25 bp, Homo sapien
acaactgggtatggccaactggact

SEQ ID NO: 5202591 - DNA, 25 bp, Homo sapien
tagaaactatctgcacacaaggctg

SEQ ID NO: 5202592 - DNA, 25 bp, Homo sapien
tcctccctgttgactagaatgtaaa

SEQ ID NO: 5202593 - DNA, 25 bp, Homo sapien
caagagcttatcctggtagaggctg

SEQ ID NO: 5202594 - DNA, 25 bp, Homo sapien
tccaaactatggaatgctatacaca

SEQ ID NO: 5202595 - DNA, 25 bp, Homo sapien
tactcaacagagatttctcataggt

SEQ ID NO: 5202596 - DNA, 25 bp, Homo sapien
tttacaatactcaaagtccactccc

SEQ ID NO: 5202597 - DNA, 25 bp, Homo sapien
gggaggtcataagttacaatggttc

SEQ ID NO: 5202598 - DNA, 25 bp, Homo sapien
aagcccagtaaaaagcatatgcata

SEQ ID NO: 5202599 - DNA, 25 bp, Homo sapien
tgtcatgtcactacttaaaaatcag

SEQ ID NO: 5202600 - DNA, 25 bp, Homo sapien
gtttcatactacaaaactctaatag

SEQ ID NO: 5202601 - DNA, 25 bp, Homo sapien
gtttatgtaaaccagcaatactata

SEQ ID NO: 5202602 - DNA, 25 bp, Homo sapien
tttgataggcaagttacacatttgc

SEQ ID NO: 5202603 - DNA, 25 bp, Homo sapien
gcatttgccctacaaactactttga

SEQ ID NO: 5202604 - DNA, 25 bp, Homo sapien
gatggagacatatattctgcatttg

SEQ ID NO: 5202605 - DNA, 25 bp, Homo sapien
caaactactttgataggcaagttac

SEQ ID NO: 5202606 - DNA, 25 bp, Homo sapien
tacagaggcctaacaaaagcttcaa

SEQ ID NO: 5202607 - DNA, 25 bp, Homo sapien
ggtaatggatgaagtacagaggcct

SEQ ID NO: 5202608 - DNA, 25 bp, Homo sapien
tggatgaagtacagaggcctaacaa

SEQ ID NO: 5202609 - DNA, 25 bp, Homo sapien
ctccgtcagcctgggggtaatggat

SEQ ID NO: 5202610 - DNA, 25 bp, Homo sapien
gccaggacactggtacatgaccact

SEQ ID NO: 5202611 - DNA, 25 bp, Homo sapien
caaattacatgaaccaagccaggac

SEQ ID NO: 5202612 - DNA, 25 bp, Homo sapien
tctttgaaggcatgctagttggtga

SEQ ID NO: 5202613 - DNA, 25 bp, Homo sapien
tacagagtatgttcccaacatgtgg

SEQ ID NO: 5202614 - DNA, 25 bp, Homo sapien
ctgatactacttgatttcccacatg

SEQ ID NO: 5202615 - DNA, 25 bp, Homo sapien
agttctgatactacttgatttccca

SEQ ID NO: 5202616 - DNA, 25 bp, Homo sapien
tggctttaacaaattggactattgg

SEQ ID NO: 5202617 - DNA, 25 bp, Homo sapien
ggactattggaccaagttctgatac

SEQ ID NO: 5202618 - DNA, 25 bp, Homo sapien
ttgactaattccatgtaagctttca

SEQ ID NO: 5202619 - DNA, 25 bp, Homo sapien
tgactaattccatgtaagctttcat

SEQ ID NO: 5202620 - DNA, 25 bp, Homo sapien
tgttgactaattccatgtaagcttt

SEQ ID NO: 5202621 - DNA, 25 bp, Homo sapien
gttgactaattccatgtaagctttc

SEQ ID NO: 5202622 - DNA, 25 bp, Homo sapien
tcccctactgtagcttcatcacacc

SEQ ID NO: 5202623 - DNA, 25 bp, Homo sapien
acttcccactgtttttgataggcca

SEQ ID NO: 5202624 - DNA, 25 bp, Homo sapien
cttcccactgtttttgataggccaa

SEQ ID NO: 5202625 - DNA, 25 bp, Homo sapien
gacttcccactgtttttgataggcc

SEQ ID NO: 5202626 - DNA, 25 bp, Homo sapien
cccagtctttgagagagagcttgac

SEQ ID NO: 5202627 - DNA, 25 bp, Homo sapien
tcccagtctttgagagagagcttga

SEQ ID NO: 5202628 - DNA, 25 bp, Homo sapien
gagttgtagaagctttacccaccag

SEQ ID NO: 5202629 - DNA, 25 bp, Homo sapien
catttctcttgtgttagggactgaa

SEQ ID NO: 5202630 - DNA, 25 bp, Homo sapien
tggcctcctctaaagacagtgtgca

SEQ ID NO: 5202631 - DNA, 25 bp, Homo sapien
tagagcaaacatcactagaaacagg

SEQ ID NO: 5202632 - DNA, 25 bp, Homo sapien
tgagcaactccttacactgactctg

SEQ ID NO: 5202633 - DNA, 25 bp, Homo sapien
tgattccaacaagtctttttaagaa

SEQ ID NO: 5202634 - DNA, 25 bp, Homo sapien
tttagttgataggtgacagttacac

SEQ ID NO: 5202635 - DNA, 25 bp, Homo sapien
tagaactacacgcataaaagtgcca

SEQ ID NO: 5202636 - DNA, 25 bp, Homo sapien
tgaaagccttccactcttttgacat

SEQ ID NO: 5202637 - DNA, 25 bp, Homo sapien
tctttgaaagccttccactcttttg

SEQ ID NO: 5202638 - DNA, 25 bp, Homo sapien
gaaagccttccactcttttgacatt

SEQ ID NO: 5202639 - DNA, 25 bp, Homo sapien
tttgaaagccttccactcttttgac

SEQ ID NO: 5202640 - DNA, 25 bp, Homo sapien
tcgctgtggtgataggaccaaaaaa

SEQ ID NO: 5202641 - DNA, 25 bp, Homo sapien
caaagcacaaaggatttcgctgtgg

SEQ ID NO: 5202642 - DNA, 25 bp, Homo sapien
tgtcctgtggatacttgaaagaccc

SEQ ID NO: 5202643 - DNA, 25 bp, Homo sapien
tatagcagatctccaatgtgccaga

SEQ ID NO: 5202644 - DNA, 25 bp, Homo sapien
tgttcaattctcctacagaaagcaa

SEQ ID NO: 5202645 - DNA, 25 bp, Homo sapien
taccagtgcgtcaagttcagtaggc

SEQ ID NO: 5202646 - DNA, 25 bp, Homo sapien
tttgtcaattgtgtggtaagaatgg

SEQ ID NO: 5202647 - DNA, 25 bp, Homo sapien
caaaatagtgctgttcaattctcct

SEQ ID NO: 5202648 - DNA, 25 bp, Homo sapien
taacaatataaagcacatacataag

SEQ ID NO: 5202649 - DNA, 25 bp, Homo sapien
ttcaaaagttaagactcctgagact

SEQ ID NO: 5202650 - DNA, 25 bp, Homo sapien
agttaagactcctgagactaacaca

SEQ ID NO: 5202651 - DNA, 25 bp, Homo sapien
aatataaagcacatacataagatac

SEQ ID NO: 5202652 - DNA, 25 bp, Homo sapien
tcaagatacagaatacaacatatca

SEQ ID NO: 5202653 - DNA, 25 bp, Homo sapien
aatgcatgcatgtttcaaggaaaca

SEQ ID NO: 5202654 - DNA, 25 bp, Homo sapien
aaatttcaagatacagaatacaaca

SEQ ID NO: 5202655 - DNA, 25 bp, Homo sapien
tttaaatgcatgcatgtttcaagga

SEQ ID NO: 5202656 - DNA, 25 bp, Homo sapien
tattccacatgtgtaaaattcagtg

SEQ ID NO: 5202657 - DNA, 25 bp, Homo sapien
agtgaatgactttcagaaaaatcaa

SEQ ID NO: 5202658 - DNA, 25 bp, Homo sapien
ttgccttagaaaagacactgtttat

SEQ ID NO: 5202659 - DNA, 25 bp, Homo sapien
tagaaaagacactgtttattccaca

SEQ ID NO: 5202660 - DNA, 25 bp, Homo sapien
acatcatcggatttttccccacaga

SEQ ID NO: 5202661 - DNA, 25 bp, Homo sapien
acatgcctactatctaagccttcag

SEQ ID NO: 5202662 - DNA, 25 bp, Homo sapien
ccaagaccacatgcctactatctaa

SEQ ID NO: 5202663 - DNA, 25 bp, Homo sapien
tcttggcactacagataaaaaattg

SEQ ID NO: 5202664 - DNA, 25 bp, Homo sapien
ttccatgacactcataccctctctc

SEQ ID NO: 5202665 - DNA, 25 bp, Homo sapien
atggcttccatgacactcataccct

SEQ ID NO: 5202666 - DNA, 25 bp, Homo sapien
catggcttccatgacactcataccc

SEQ ID NO: 5202667 - DNA, 25 bp, Homo sapien
ggcttccatgacactcataccctct

SEQ ID NO: 5202668 - DNA, 25 bp, Homo sapien
cttcaggggcggctgtcttttacgg

SEQ ID NO: 5202669 - DNA, 25 bp, Homo sapien
cttttacggttgcagctgtagggat

SEQ ID NO: 5202670 - DNA, 25 bp, Homo sapien
agaaagagaacgcatccctgagggt

SEQ ID NO: 5202671 - DNA, 25 bp, Homo sapien
ggtgagccgggtgggacagagccat

SEQ ID NO: 5202672 - DNA, 25 bp, Homo sapien
aagttccttagtggtcattctgaga

SEQ ID NO: 5202673 - DNA, 25 bp, Homo sapien
acctaagcaatgtacactgtagcca

SEQ ID NO: 5202674 - DNA, 25 bp, Homo sapien
tcacctaagcaatgtacactgtagc

SEQ ID NO: 5202675 - DNA, 25 bp, Homo sapien
gttccttagtggtcattctgagatt

SEQ ID NO: 5202676 - DNA, 25 bp, Homo sapien
caaccagttgaatattgcctacaga

SEQ ID NO: 5202677 - DNA, 25 bp, Homo sapien
ccagtggtcctcaattaggcagatg

SEQ ID NO: 5202678 - DNA, 25 bp, Homo sapien
agaattttcgcccatgtactagaca

SEQ ID NO: 5202679 - DNA, 25 bp, Homo sapien
taatgccttaaggtacagggatgca

SEQ ID NO: 5202680 - DNA, 25 bp, Homo sapien
acaacttcagttgtgattaatacca

SEQ ID NO: 5202681 - DNA, 25 bp, Homo sapien
ccagcaggtgataaataacaacttc

SEQ ID NO: 5202682 - DNA, 25 bp, Homo sapien
aacaacttcagttgtgattaatacc

SEQ ID NO: 5202683 - DNA, 25 bp, Homo sapien
ggtgataaataacaacttcagttgt

SEQ ID NO: 5202684 - DNA, 25 bp, Homo sapien
tggaagagaatgtagtgtaaggcat

SEQ ID NO: 5202685 - DNA, 25 bp, Homo sapien
ttggaagagaatgtagtgtaaggca

SEQ ID NO: 5202686 - DNA, 25 bp, Homo sapien
tttggaagagaatgtagtgtaaggc

SEQ ID NO: 5202687 - DNA, 25 bp, Homo sapien
gatttaggactcaaaaacagcaatt

SEQ ID NO: 5202688 - DNA, 25 bp, Homo sapien
attagtgtgggtagagatttaggac

SEQ ID NO: 5202689 - DNA, 25 bp, Homo sapien
tagagatttaggactcaaaaacagc

SEQ ID NO: 5202690 - DNA, 25 bp, Homo sapien
tgtgggtagagatttaggactcaaa

SEQ ID NO: 5202691 - DNA, 25 bp, Homo sapien
gaggcgttccggtgtgaatatctga

SEQ ID NO: 5202692 - DNA, 25 bp, Homo sapien
tatggcttctgacacgcagggaggt

SEQ ID NO: 5202693 - DNA, 25 bp, Homo sapien
tgtgaagcatttgcagcgatatggc

SEQ ID NO: 5202694 - DNA, 25 bp, Homo sapien
gattttgttccaatcagggtcaaag

SEQ ID NO: 5202695 - DNA, 25 bp, Homo sapien
ctcatcagttccacaagccgcactc

SEQ ID NO: 5202696 - DNA, 25 bp, Homo sapien
gcagaggacataaactatgtcacta

SEQ ID NO: 5202697 - DNA, 25 bp, Homo sapien
tgcagaggacataaactatgtcact

SEQ ID NO: 5202698 - DNA, 25 bp, Homo sapien
ttgcagaggacataaactatgtcac

SEQ ID NO: 5202699 - DNA, 25 bp, Homo sapien
agaggacataaactatgtcactaat

SEQ ID NO: 5202700 - DNA, 25 bp, Homo sapien
tggctcttaatgagcttaagacctc

SEQ ID NO: 5202701 - DNA, 25 bp, Homo sapien
gcttaagacctctattcttcaaagc

SEQ ID NO: 5202702 - DNA, 25 bp, Homo sapien
gcctgttgttttatcaaagaaagag

SEQ ID NO: 5202703 - DNA, 25 bp, Homo sapien
taatgagcttaagacctctattctt

SEQ ID NO: 5202704 - DNA, 25 bp, Homo sapien
cacttgagacgtttggtggcgacct

SEQ ID NO: 5202705 - DNA, 25 bp, Homo sapien
ccaagggccccttgagggcgtctga

SEQ ID NO: 5202706 - DNA, 25 bp, Homo sapien
taacttggttgtgggcttggtacac

SEQ ID NO: 5202707 - DNA, 25 bp, Homo sapien
agggcgtctgatggcacagtctgca

SEQ ID NO: 5202708 - DNA, 25 bp, Homo sapien
aaagctaagtacttcagagcagcac

SEQ ID NO: 5202709 - DNA, 25 bp, Homo sapien
tcctggccagtagtgggacccttga

SEQ ID NO: 5202710 - DNA, 25 bp, Homo sapien
tagtgggacccttgaatattcttca

SEQ ID NO: 5202711 - DNA, 25 bp, Homo sapien
gcaagtgactccctgctgaacaggg

SEQ ID NO: 5202712 - DNA, 25 bp, Homo sapien
tctgcggctgttcctgtttgtagtt

SEQ ID NO: 5202713 - DNA, 25 bp, Homo sapien
agtgggacacaagggacccaattct

SEQ ID NO: 5202714 - DNA, 25 bp, Homo sapien
atgccaccaagaatctgagtgggac

SEQ ID NO: 5202715 - DNA, 25 bp, Homo sapien
gtttgtagttatgctgtttattcca

SEQ ID NO: 5202716 - DNA, 25 bp, Homo sapien
caacctggggcacaatcagaggact

SEQ ID NO: 5202717 - DNA, 25 bp, Homo sapien
acaatcagaggactctgtggctctg

SEQ ID NO: 5202718 - DNA, 25 bp, Homo sapien
tcaacctggggcacaatcagaggac

SEQ ID NO: 5202719 - DNA, 25 bp, Homo sapien
gaggctctctggtggctcacacatt

SEQ ID NO: 5202720 - DNA, 25 bp, Homo sapien
gaagagtgctagagtgaggctctct

SEQ ID NO: 5202721 - DNA, 25 bp, Homo sapien
ccctcttggaagagtgctagagtga

SEQ ID NO: 5202722 - DNA, 25 bp, Homo sapien
ggctcacacattgctacaattgggt

SEQ ID NO: 5202723 - DNA, 25 bp, Homo sapien
gtgcttaatattggcaatgccactg

SEQ ID NO: 5202724 - DNA, 25 bp, Homo sapien
cttaatattggcaatgccactgttc

SEQ ID NO: 5202725 - DNA, 25 bp, Homo sapien
ctcgtgcttaatattggcaatgcca

SEQ ID NO: 5202726 - DNA, 25 bp, Homo sapien
tcgtgcttaatattggcaatgccac

SEQ ID NO: 5202727 - DNA, 25 bp, Homo sapien
tgaatggtgaaagagcacagtgagc

SEQ ID NO: 5202728 - DNA, 25 bp, Homo sapien
tctggcctgactcctccttaccaca

SEQ ID NO: 5202729 - DNA, 25 bp, Homo sapien
ctggagcagctgttgaatggtgaaa

SEQ ID NO: 5202730 - DNA, 25 bp, Homo sapien
gcacagtgagctgcctttgctgcca

SEQ ID NO: 5202731 - DNA, 25 bp, Homo sapien
ggcaactgatcctctatccactgag

SEQ ID NO: 5202732 - DNA, 25 bp, Homo sapien
gaatcccgtcttacaatccaaacag

SEQ ID NO: 5202733 - DNA, 25 bp, Homo sapien
tccaaacagtccttaggaggaatgt

SEQ ID NO: 5202734 - DNA, 25 bp, Homo sapien
aactgctgaaggtttggttgccatg

SEQ ID NO: 5202735 - DNA, 25 bp, Homo sapien
cctgcaatgggctattggaaactcc

SEQ ID NO: 5202736 - DNA, 25 bp, Homo sapien
ggtgtcttccataagaatgatgtca

SEQ ID NO: 5202737 - DNA, 25 bp, Homo sapien
caatttggcagtccctgtgtttccc

SEQ ID NO: 5202738 - DNA, 25 bp, Homo sapien
gatcatcattgaatacattggtgtc

SEQ ID NO: 5202739 - DNA, 25 bp, Homo sapien
tttctgcagtacctactctgtcagg

SEQ ID NO: 5202740 - DNA, 25 bp, Homo sapien
atcatttctgcagtacctactctgt

SEQ ID NO: 5202741 - DNA, 25 bp, Homo sapien
agtacctactctgtcagggttgatg

SEQ ID NO: 5202742 - DNA, 25 bp, Homo sapien
gcagtacctactctgtcagggttga

SEQ ID NO: 5202743 - DNA, 25 bp, Homo sapien
ctgttcccccagcttaagtgtttgg

SEQ ID NO: 5202744 - DNA, 25 bp, Homo sapien
tcccccagcttaagtgtttgggcat

SEQ ID NO: 5202745 - DNA, 25 bp, Homo sapien
tctgttcccccagcttaagtgtttg

SEQ ID NO: 5202746 - DNA, 25 bp, Homo sapien
tatttttaagtgcttctcctcttct

SEQ ID NO: 5202747 - DNA, 25 bp, Homo sapien
acactcactctcatcggactctgag

SEQ ID NO: 5202748 - DNA, 25 bp, Homo sapien
gggacaggtagcaataactcctaca

SEQ ID NO: 5202749 - DNA, 25 bp, Homo sapien
ataacggtgctgagtccatgttcgc

SEQ ID NO: 5202750 - DNA, 25 bp, Homo sapien
tgtctacgaaaatgagtcccagatg

SEQ ID NO: 5202751 - DNA, 25 bp, Homo sapien
gtgcatttgctctcaattgtgtgac

SEQ ID NO: 5202752 - DNA, 25 bp, Homo sapien
ggtgcatttgctctcaattgtgtga

SEQ ID NO: 5202753 - DNA, 25 bp, Homo sapien
gaagagagagtaaaccacgaatttc

SEQ ID NO: 5202754 - DNA, 25 bp, Homo sapien
atttcaatagaagaccgaataggtc

SEQ ID NO: 5202755 - DNA, 25 bp, Homo sapien
aagagagagtaaaccacgaatttca

SEQ ID NO: 5202756 - DNA, 25 bp, Homo sapien
aatttcaatagaagaccgaataggt

SEQ ID NO: 5202757 - DNA, 25 bp, Homo sapien
cacaggctcctgagcgcccggttgg

SEQ ID NO: 5202758 - DNA, 25 bp, Homo sapien
gagggccaaagaggacggagaagga

SEQ ID NO: 5202759 - DNA, 25 bp, Homo sapien
aaaacaaaggttgcggagagtgtca

SEQ ID NO: 5202760 - DNA, 25 bp, Homo sapien
tgagcgcccggttggccacagacgt

SEQ ID NO: 5202761 - DNA, 25 bp, Homo sapien
ctgggccaatccccaggaggggagc

SEQ ID NO: 5202762 - DNA, 25 bp, Homo sapien
tgggccaatccccaggaggggagca

SEQ ID NO: 5202763 - DNA, 25 bp, Homo sapien
gggccaatccccaggaggggagcag

SEQ ID NO: 5202764 - DNA, 25 bp, Homo sapien
gccagagagaacacccgccaccggg

SEQ ID NO: 5202765 - DNA, 25 bp, Homo sapien
agcctgcgctgggcggctgctgtgg

SEQ ID NO: 5202766 - DNA, 25 bp, Homo sapien
gggcaggccgtgtcccggccatcgg

SEQ ID NO: 5202767 - DNA, 25 bp, Homo sapien
ctgctgtggacagaagcgccgctgt

SEQ ID NO: 5202768 - DNA, 25 bp, Homo sapien
gatgctacccaagattcacctgctg

SEQ ID NO: 5202769 - DNA, 25 bp, Homo sapien
ggctgattgggtgaaagcatctcca

SEQ ID NO: 5202770 - DNA, 25 bp, Homo sapien
tttataccagttccaggcaagccag

SEQ ID NO: 5202771 - DNA, 25 bp, Homo sapien
caaggtatgtgagcttccatgagcc

SEQ ID NO: 5202772 - DNA, 25 bp, Homo sapien
cccctggagtcttggacaaccgaag

SEQ ID NO: 5202773 - DNA, 25 bp, Homo sapien
ctggagtcttggacaaccgaaggca

SEQ ID NO: 5202774 - DNA, 25 bp, Homo sapien
cctggagtcttggacaaccgaaggc

SEQ ID NO: 5202775 - DNA, 25 bp, Homo sapien
tggagtcttggacaaccgaaggcat

SEQ ID NO: 5202776 - DNA, 25 bp, Homo sapien
aagggaaagctctccagccagcctc

SEQ ID NO: 5202777 - DNA, 25 bp, Homo sapien
agcgctgcaagggaaagctctccag

SEQ ID NO: 5202778 - DNA, 25 bp, Homo sapien
gctggcgttgacaacagtccaggag

SEQ ID NO: 5202779 - DNA, 25 bp, Homo sapien
tgctctgctggcgttgacaacagtc

SEQ ID NO: 5202780 - DNA, 25 bp, Homo sapien
ccatatttgatgatctggaaacttc

SEQ ID NO: 5202781 - DNA, 25 bp, Homo sapien
catttgggactgctaatttatcatt

SEQ ID NO: 5202782 - DNA, 25 bp, Homo sapien
gcatttggctagaaaacgatgtcca

SEQ ID NO: 5202783 - DNA, 25 bp, Homo sapien
tatcattaataaagcatttggctag

SEQ ID NO: 5202784 - DNA, 25 bp, Homo sapien
aaatgtctttgaacgtgtgctccca

SEQ ID NO: 5202785 - DNA, 25 bp, Homo sapien
gagtaaaaagtatttgagctttgac

SEQ ID NO: 5202786 - DNA, 25 bp, Homo sapien
ctggttacgcttgcaactctcagca

SEQ ID NO: 5202787 - DNA, 25 bp, Homo sapien
gctatgattaattactggctgttgc

SEQ ID NO: 5202788 - DNA, 25 bp, Homo sapien
catgaactttccgggagacggaaag

SEQ ID NO: 5202789 - DNA, 25 bp, Homo sapien
actttccgggagacggaaagatcat

SEQ ID NO: 5202790 - DNA, 25 bp, Homo sapien
catttaattgggagttatgaccaag

SEQ ID NO: 5202791 - DNA, 25 bp, Homo sapien
gaatttgacatgaaggaatccataa

SEQ ID NO: 5202792 - DNA, 25 bp, Homo sapien
agggaaaactgcgagtcactcatga

SEQ ID NO: 5202793 - DNA, 25 bp, Homo sapien
cctcgatgatgccaagatgatctaa

SEQ ID NO: 5202794 - DNA, 25 bp, Homo sapien
tgctaccgcaccaagatgcctaggt

SEQ ID NO: 5202795 - DNA, 25 bp, Homo sapien
gatatacggcagtgacaagccttgg

SEQ ID NO: 5202796 - DNA, 25 bp, Homo sapien
tcaatgctacgagcctaacagctag

SEQ ID NO: 5202797 - DNA, 25 bp, Homo sapien
tgttattaatgactggtggcgcccc

SEQ ID NO: 5202798 - DNA, 25 bp, Homo sapien
ccagaacccttggatagtgaccaaa

SEQ ID NO: 5202799 - DNA, 25 bp, Homo sapien
caaatgagccctgaatgcttgggtt

SEQ ID NO: 5202800 - DNA, 25 bp, Homo sapien
ctcacctgaggtccccaccgctttt

SEQ ID NO: 5202801 - DNA, 25 bp, Homo sapien
gcccagaacccttggatagtgacca

SEQ ID NO: 5202802 - DNA, 25 bp, Homo sapien
aagggatacataagcagcgaattcc

SEQ ID NO: 5202803 - DNA, 25 bp, Homo sapien
tattgaggatcatggacacactgaa

SEQ ID NO: 5202804 - DNA, 25 bp, Homo sapien
acactgaatctcagttactgacagg

SEQ ID NO: 5202805 - DNA, 25 bp, Homo sapien
ggttggcgtcaagaagggatacata

SEQ ID NO: 5202806 - DNA, 25 bp, Homo sapien
tgtggtagacgctgtgatgaagccc

SEQ ID NO: 5202807 - DNA, 25 bp, Homo sapien
agtgtagcaaaatacgctgtggtag

SEQ ID NO: 5202808 - DNA, 25 bp, Homo sapien
tctttggcatataaatcagtacaca

SEQ ID NO: 5202809 - DNA, 25 bp, Homo sapien
acacataagtgatggtaatgctgtc

SEQ ID NO: 5202810 - DNA, 25 bp, Homo sapien
gggtggatcatagtaccagctacaa

SEQ ID NO: 5202811 - DNA, 25 bp, Homo sapien
ttgcaaacactgaatgagatacagc

SEQ ID NO: 5202812 - DNA, 25 bp, Homo sapien
tattgtttagctaaagcagcagtca

SEQ ID NO: 5202813 - DNA, 25 bp, Homo sapien
agatacagcaaatgatgtgccaggc

SEQ ID NO: 5202814 - DNA, 25 bp, Homo sapien
aatatgtcatcacatgaagaatatg

SEQ ID NO: 5202815 - DNA, 25 bp, Homo sapien
ctaaatatgtcatcacatgaagaat

SEQ ID NO: 5202816 - DNA, 25 bp, Homo sapien
tgtcatcacatgaagaatatgaagt

SEQ ID NO: 5202817 - DNA, 25 bp, Homo sapien
tatgtcatcacatgaagaatatgaa

SEQ ID NO: 5202818 - DNA, 25 bp, Homo sapien
gcagaaaaccacacagaggatctga

SEQ ID NO: 5202819 - DNA, 25 bp, Homo sapien
ctgcagaaaaccacacagaggatct

SEQ ID NO: 5202820 - DNA, 25 bp, Homo sapien
aaaaccacacagaggatctgaacac

SEQ ID NO: 5202821 - DNA, 25 bp, Homo sapien
agaaaaccacacagaggatctgaac

SEQ ID NO: 5202822 - DNA, 25 bp, Homo sapien
tgctgggagagttatcttctcaaac

SEQ ID NO: 5202823 - DNA, 25 bp, Homo sapien
gggagagttatcttctcaaactcat

SEQ ID NO: 5202824 - DNA, 25 bp, Homo sapien
gctgggagagttatcttctcaaact

SEQ ID NO: 5202825 - DNA, 25 bp, Homo sapien
agtgctgggagagttatcttctcaa

SEQ ID NO: 5202826 - DNA, 25 bp, Homo sapien
ggagtctggataagagtcacttttt

SEQ ID NO: 5202827 - DNA, 25 bp, Homo sapien
taagagtcactttttcagagtcatc

SEQ ID NO: 5202828 - DNA, 25 bp, Homo sapien
gagtcatcacctacatgcctttgct

SEQ ID NO: 5202829 - DNA, 25 bp, Homo sapien
ccagtccacgtgtgatcttgcaata

SEQ ID NO: 5202830 - DNA, 25 bp, Homo sapien
gatgcttattgtgatcttgtgtacc

SEQ ID NO: 5202831 - DNA, 25 bp, Homo sapien
aatttgaaaggtattctctgatacc

SEQ ID NO: 5202832 - DNA, 25 bp, Homo sapien
tgtgatcttgtgtaccataatttga

SEQ ID NO: 5202833 - DNA, 25 bp, Homo sapien
ctctgggtattgatgcttattgtga

SEQ ID NO: 5202834 - DNA, 25 bp, Homo sapien
gttatcccagatacgcttccaagag

SEQ ID NO: 5202835 - DNA, 25 bp, Homo sapien
ccaagagtggcaatcagttttccta

SEQ ID NO: 5202836 - DNA, 25 bp, Homo sapien
caggaagtggttcaaggaacttagg

SEQ ID NO: 5202837 - DNA, 25 bp, Homo sapien
tagaaggacagactcatttggaaac

SEQ ID NO: 5202838 - DNA, 25 bp, Homo sapien
tgtcatagaaccatgctgtttatct

SEQ ID NO: 5202839 - DNA, 25 bp, Homo sapien
tgccatgaggttagcacttcctctg

SEQ ID NO: 5202840 - DNA, 25 bp, Homo sapien
cagtgcctttgccacgaactgtcat

SEQ ID NO: 5202841 - DNA, 25 bp, Homo sapien
cacgaactgtcatagaaccatgctg

SEQ ID NO: 5202842 - DNA, 25 bp, Homo sapien
agagagctgaaccattgccaacatc

SEQ ID NO: 5202843 - DNA, 25 bp, Homo sapien
aagagagctgaaccattgccaacat

SEQ ID NO: 5202844 - DNA, 25 bp, Homo sapien
gagcattagcaattgcatagctggt

SEQ ID NO: 5202845 - DNA, 25 bp, Homo sapien
caagagcattagcaattgcatagct

SEQ ID NO: 5202846 - DNA, 25 bp, Homo sapien
agagcattagcaattgcatagctgg

SEQ ID NO: 5202847 - DNA, 25 bp, Homo sapien
gcattagcaattgcatagctggtgc

SEQ ID NO: 5202848 - DNA, 25 bp, Homo sapien
gctcgtcagttgctccatcgggaag

SEQ ID NO: 5202849 - DNA, 25 bp, Homo sapien
ggctcgtcagttgctccatcgggaa

SEQ ID NO: 5202850 - DNA, 25 bp, Homo sapien
tcgtcagttgctccatcgggaaggg

SEQ ID NO: 5202851 - DNA, 25 bp, Homo sapien
agggctcgtcagttgctccatcggg

SEQ ID NO: 5202852 - DNA, 25 bp, Homo sapien
cgacagaacagatccatccaagcag

SEQ ID NO: 5202853 - DNA, 25 bp, Homo sapien
gctgatgggcaaagtgatagagctt

SEQ ID NO: 5202854 - DNA, 25 bp, Homo sapien
gcaaagtgatagagcttccactcac

SEQ ID NO: 5202855 - DNA, 25 bp, Homo sapien
tttctgagtttgtgagctgatgggc

SEQ ID NO: 5202856 - DNA, 25 bp, Homo sapien
ctacggaatgatacagggtaaccac

SEQ ID NO: 5202857 - DNA, 25 bp, Homo sapien
acggaatgatacagggtaaccaccg

SEQ ID NO: 5202858 - DNA, 25 bp, Homo sapien
tacggaatgatacagggtaaccacc

SEQ ID NO: 5202859 - DNA, 25 bp, Homo sapien
gcacagaagtcaccctaaaggagat

SEQ ID NO: 5202860 - DNA, 25 bp, Homo sapien
caggcctccgctagactggctgtga

SEQ ID NO: 5202861 - DNA, 25 bp, Homo sapien
tgcagcgtcacatttgcccaaggac

SEQ ID NO: 5202862 - DNA, 25 bp, Homo sapien
taaataatgctggtcggcatccacg

SEQ ID NO: 5202863 - DNA, 25 bp, Homo sapien
tcaacaaggccttatggtcaaacat

SEQ ID NO: 5202864 - DNA, 25 bp, Homo sapien
tgtcactctcaacaaggccttatgg

SEQ ID NO: 5202865 - DNA, 25 bp, Homo sapien
tgttgtcactctcaacaaggcctta

SEQ ID NO: 5202866 - DNA, 25 bp, Homo sapien
cactctcaacaaggccttatggtca

SEQ ID NO: 5202867 - DNA, 25 bp, Homo sapien
tgtgagcatactgtaacatctgaca

SEQ ID NO: 5202868 - DNA, 25 bp, Homo sapien
tgccgcatagtgtaactttaatgtg

SEQ ID NO: 5202869 - DNA, 25 bp, Homo sapien
caagcttcttgatctagatcagcaa

SEQ ID NO: 5202870 - DNA, 25 bp, Homo sapien
cccatcatgctgtaactgacacaaa

SEQ ID NO: 5202871 - DNA, 25 bp, Homo sapien
ggccctgaagtacacagttttcttg

SEQ ID NO: 5202872 - DNA, 25 bp, Homo sapien
gataaccttttccagacaagtcagc

SEQ ID NO: 5202873 - DNA, 25 bp, Homo sapien
gggacctagaatagaaatgctaacc

SEQ ID NO: 5202874 - DNA, 25 bp, Homo sapien
acatcagaatggcaaagcacttggg

SEQ ID NO: 5202875 - DNA, 25 bp, Homo sapien
tgtatgtcgagctttgccgcaggca

SEQ ID NO: 5202876 - DNA, 25 bp, Homo sapien
tccaaatcggaagaaaatcaagtgt

SEQ ID NO: 5202877 - DNA, 25 bp, Homo sapien
cctcgctgcgggttcaagtgcgtcc

SEQ ID NO: 5202878 - DNA, 25 bp, Homo sapien
cttggtctccgctttcagattcggg

SEQ ID NO: 5202879 - DNA, 25 bp, Homo sapien
caggaggtacaatggccttcttttg

SEQ ID NO: 5202880 - DNA, 25 bp, Homo sapien
aggtacaatggccttcttttgcagc

SEQ ID NO: 5202881 - DNA, 25 bp, Homo sapien
gcagcaagaatgaacttaacacccg

SEQ ID NO: 5202882 - DNA, 25 bp, Homo sapien
cagcaagaatgaacttaacacccgt

SEQ ID NO: 5202883 - DNA, 25 bp, Homo sapien
gaataactcacaggctccttagctt

SEQ ID NO: 5202884 - DNA, 25 bp, Homo sapien
caaggctttccttatggtctcaggc

SEQ ID NO: 5202885 - DNA, 25 bp, Homo sapien
ggctacagcagagcactcttgcatg

SEQ ID NO: 5202886 - DNA, 25 bp, Homo sapien
tcagaacacccatcaagtatcttgg

SEQ ID NO: 5202887 - DNA, 25 bp, Homo sapien
agatataggtaggttcgccaggtgc

SEQ ID NO: 5202888 - DNA, 25 bp, Homo sapien
tattcctttggtggttacgctctgc

SEQ ID NO: 5202889 - DNA, 25 bp, Homo sapien
acgctctgctggctatggactatga

SEQ ID NO: 5202890 - DNA, 25 bp, Homo sapien
gacccttggtctgagcacattcaaa

SEQ ID NO: 5202891 - DNA, 25 bp, Homo sapien
cagtgtaccctcctattgttgtcgg

SEQ ID NO: 5202892 - DNA, 25 bp, Homo sapien
tgagaacgtcaaaactggaggcctt

SEQ ID NO: 5202893 - DNA, 25 bp, Homo sapien
cattaagattagtgtccccgaagtc

SEQ ID NO: 5202894 - DNA, 25 bp, Homo sapien
gacttgcttcacatggatacacaga

SEQ ID NO: 5202895 - DNA, 25 bp, Homo sapien
aatgccagaagtcagcgctggctgg

SEQ ID NO: 5202896 - DNA, 25 bp, Homo sapien
tttacaaatgccagaagtcagcgct

SEQ ID NO: 5202897 - DNA, 25 bp, Homo sapien
agacactttacaaatgccagaagtc

SEQ ID NO: 5202898 - DNA, 25 bp, Homo sapien
cagacactttacaaatgccagaagt

SEQ ID NO: 5202899 - DNA, 25 bp, Homo sapien
taaacttgatgagaaatcccttcat

SEQ ID NO: 5202900 - DNA, 25 bp, Homo sapien
catctcgctgtatcgtgcttgaagg

SEQ ID NO: 5202901 - DNA, 25 bp, Homo sapien
gattaacattcatctcgctgtatcg

SEQ ID NO: 5202902 - DNA, 25 bp, Homo sapien
atcgtgcttgaaggttaataatatc

SEQ ID NO: 5202903 - DNA, 25 bp, Homo sapien
attaacctttggtgtctcagtgact

SEQ ID NO: 5202904 - DNA, 25 bp, Homo sapien
ttaacctttggtgtctcagtgactt

SEQ ID NO: 5202905 - DNA, 25 bp, Homo sapien
taacctttggtgtctcagtgacttc

SEQ ID NO: 5202906 - DNA, 25 bp, Homo sapien
actattgattttgcgaaaagcacat

SEQ ID NO: 5202907 - DNA, 25 bp, Homo sapien
tctcttcgtttgcatggggtgacta

SEQ ID NO: 5202908 - DNA, 25 bp, Homo sapien
catctctaattaccatctcttcgtt

SEQ ID NO: 5202909 - DNA, 25 bp, Homo sapien
taattaggtatcttgctgaatttat

SEQ ID NO: 5202910 - DNA, 25 bp, Homo sapien
aatactacaactggttacaagcagt

SEQ ID NO: 5202911 - DNA, 25 bp, Homo sapien
ttggaaggatataagggtcactctc

SEQ ID NO: 5202912 - DNA, 25 bp, Homo sapien
tctaagcatcacagtcagtaaaata

SEQ ID NO: 5202913 - DNA, 25 bp, Homo sapien
gtttacctgttatttgagtcctgga

SEQ ID NO: 5202914 - DNA, 25 bp, Homo sapien
caattctgccatcatcaagcagttt

SEQ ID NO: 5202915 - DNA, 25 bp, Homo sapien
cattggtaaactggtggacagggtt

SEQ ID NO: 5202916 - DNA, 25 bp, Homo sapien
taagagtagacttaacaattctgcc

SEQ ID NO: 5202917 - DNA, 25 bp, Homo sapien
cttttcattggtaaactggtggaca

SEQ ID NO: 5202918 - DNA, 25 bp, Homo sapien
cacttgatccccagattcaaacagc

SEQ ID NO: 5202919 - DNA, 25 bp, Homo sapien
acttgatccccagattcaaacagca

SEQ ID NO: 5202920 - DNA, 25 bp, Homo sapien
tagagaagtgatttcccaaaggcag

SEQ ID NO: 5202921 - DNA, 25 bp, Homo sapien
ggaaactgccaggttatgaaaagcc

SEQ ID NO: 5202922 - DNA, 25 bp, Homo sapien
caaggtaagataatcaacggaccac

SEQ ID NO: 5202923 - DNA, 25 bp, Homo sapien
ggaccacagaacttagcctctcagc

SEQ ID NO: 5202924 - DNA, 25 bp, Homo sapien
ggtggtactacctgatgaacctggc

SEQ ID NO: 5202925 - DNA, 25 bp, Homo sapien
tcaaacagcccattagttttgtaac

SEQ ID NO: 5202926 - DNA, 25 bp, Homo sapien
agttttgtaacagccaagagaggag

SEQ ID NO: 5202927 - DNA, 25 bp, Homo sapien
gcttcttgttagatgctcaaacagc

SEQ ID NO: 5202928 - DNA, 25 bp, Homo sapien
tcaatctagtgctatcttttagcaa

SEQ ID NO: 5202929 - DNA, 25 bp, Homo sapien
caatctagtgctatcttttagcaag

SEQ ID NO: 5202930 - DNA, 25 bp, Homo sapien
cattcaatctagtgctatcttttag

SEQ ID NO: 5202931 - DNA, 25 bp, Homo sapien
atctagtgctatcttttagcaagta

SEQ ID NO: 5202932 - DNA, 25 bp, Homo sapien
cagagcacgggctgtttgcatccca

SEQ ID NO: 5202933 - DNA, 25 bp, Homo sapien
aagagcccagttcaactgcctttct

SEQ ID NO: 5202934 - DNA, 25 bp, Homo sapien
aaggtggcacgacacctctgaaagc

SEQ ID NO: 5202935 - DNA, 25 bp, Homo sapien
gtttctccccataggagatccctcg

SEQ ID NO: 5202936 - DNA, 25 bp, Homo sapien
tgagcatagagtagtgttacaggca

SEQ ID NO: 5202937 - DNA, 25 bp, Homo sapien
caaggttgtgtgaatggttagtaga

SEQ ID NO: 5202938 - DNA, 25 bp, Homo sapien
ctgtggtttccggataaatgtagag

SEQ ID NO: 5202939 - DNA, 25 bp, Homo sapien
gagtggatatgtaaataatgccttc

SEQ ID NO: 5202940 - DNA, 25 bp, Homo sapien
tttgattgcatgcactctaacagga

SEQ ID NO: 5202941 - DNA, 25 bp, Homo sapien
ttggctttgggtcattatctgatgc

SEQ ID NO: 5202942 - DNA, 25 bp, Homo sapien
gactatgactatgaacatgtgttgg

SEQ ID NO: 5202943 - DNA, 25 bp, Homo sapien
tgatgcatagatcaaaagcagggct

SEQ ID NO: 5202944 - DNA, 25 bp, Homo sapien
attggattacgagatttttgcacag

SEQ ID NO: 5202945 - DNA, 25 bp, Homo sapien
cgagatttttgcacagtggatccct

SEQ ID NO: 5202946 - DNA, 25 bp, Homo sapien
ccctggtgcataaacaagggatgga

SEQ ID NO: 5202947 - DNA, 25 bp, Homo sapien
gatccctggtgcataaacaagggat

SEQ ID NO: 5202948 - DNA, 25 bp, Homo sapien
aacagggtcatgaggttcaaacaca

SEQ ID NO: 5202949 - DNA, 25 bp, Homo sapien
ggtgaccactttgatccaatcaact

SEQ ID NO: 5202950 - DNA, 25 bp, Homo sapien
gccagactaagtaaggtgaccactt

SEQ ID NO: 5202951 - DNA, 25 bp, Homo sapien
cagaaagagccagactaagccagac

SEQ ID NO: 5202952 - DNA, 25 bp, Homo sapien
ggtgaacagttatactgccattgcc

SEQ ID NO: 5202953 - DNA, 25 bp, Homo sapien
tatgccaaggtgaaaggtgaacagt

SEQ ID NO: 5202954 - DNA, 25 bp, Homo sapien
ctgcttatgccaaggtgaaaggtga

SEQ ID NO: 5202955 - DNA, 25 bp, Homo sapien
caaggtgaaaggtgaacagttatac

SEQ ID NO: 5202956 - DNA, 25 bp, Homo sapien
cagcaccaaatgtcctccgatgagg

SEQ ID NO: 5202957 - DNA, 25 bp, Homo sapien
ggctgttactgttgggtcaagctgc

SEQ ID NO: 5202958 - DNA, 25 bp, Homo sapien
cctgagagcttagggttccatagaa

SEQ ID NO: 5202959 - DNA, 25 bp, Homo sapien
gtcaagctgctcctcatgagtatgt

SEQ ID NO: 5202960 - DNA, 25 bp, Homo sapien
ctgtgggccagaaggaatatcttcc

SEQ ID NO: 5202961 - DNA, 25 bp, Homo sapien
cctcagtagatttaaagagacacag

SEQ ID NO: 5202962 - DNA, 25 bp, Homo sapien
ggccagaaggaatatcttcctcagt

SEQ ID NO: 5202963 - DNA, 25 bp, Homo sapien
ttcctcagtagatttaaagagacac

SEQ ID NO: 5202964 - DNA, 25 bp, Homo sapien
cacaatctggactataggctgccaa

SEQ ID NO: 5202965 - DNA, 25 bp, Homo sapien
ccacaatctggactataggctgcca

SEQ ID NO: 5202966 - DNA, 25 bp, Homo sapien
atctggactataggctgccaagtgc

SEQ ID NO: 5202967 - DNA, 25 bp, Homo sapien
caatctggactataggctgccaagt

SEQ ID NO: 5202968 - DNA, 25 bp, Homo sapien
taattccttagtcctatcaccgtcg

SEQ ID NO: 5202969 - DNA, 25 bp, Homo sapien
taaaatagccgttgagtgaccagat

SEQ ID NO: 5202970 - DNA, 25 bp, Homo sapien
gggccaaacatgactgaggttttca

SEQ ID NO: 5202971 - DNA, 25 bp, Homo sapien
aattgctacaaataggaaaggtcac

SEQ ID NO: 5202972 - DNA, 25 bp, Homo sapien
gatgccaaactacaagctgctcctg

SEQ ID NO: 5202973 - DNA, 25 bp, Homo sapien
tcaggctttgtaaacttgggcctcc

SEQ ID NO: 5202974 - DNA, 25 bp, Homo sapien
aactacattgcctgaccaccttggt

SEQ ID NO: 5202975 - DNA, 25 bp, Homo sapien
tgtaaagtttaaacgcacgatgcca

SEQ ID NO: 5202976 - DNA, 25 bp, Homo sapien
tcaagagtatgaggtttgaccacac

SEQ ID NO: 5202977 - DNA, 25 bp, Homo sapien
tgagccttgactgaagtagagcagg

SEQ ID NO: 5202978 - DNA, 25 bp, Homo sapien
taccagtcggttcagcatagcgtgt

SEQ ID NO: 5202979 - DNA, 25 bp, Homo sapien
cctgaaagggcaccttgagccttga

SEQ ID NO: 5202980 - DNA, 25 bp, Homo sapien
gccagagtgggctttatagaacaca

SEQ ID NO: 5202981 - DNA, 25 bp, Homo sapien
gatacctacggcaatgtttgctgcc

SEQ ID NO: 5202982 - DNA, 25 bp, Homo sapien
tggtccccatggcttacccaattaa

SEQ ID NO: 5202983 - DNA, 25 bp, Homo sapien
gcttagtggtcttagctggtcccca

SEQ ID NO: 5202984 - DNA, 25 bp, Homo sapien
aatttcagtggccacttcacaatct

SEQ ID NO: 5202985 - DNA, 25 bp, Homo sapien
tactgcaaagattgcaccaaccatt

SEQ ID NO: 5202986 - DNA, 25 bp, Homo sapien
gagcaagtactaactcattactgca

SEQ ID NO: 5202987 - DNA, 25 bp, Homo sapien
ccagttgtgcagaaataacaggtga

SEQ ID NO: 5202988 - DNA, 25 bp, Homo sapien
ggtgagagcttcaagctgttcccac

SEQ ID NO: 5202989 - DNA, 25 bp, Homo sapien
catattcaacagtcgagagcagaac

SEQ ID NO: 5202990 - DNA, 25 bp, Homo sapien
tacattccaacatgactgcccattg

SEQ ID NO: 5202991 - DNA, 25 bp, Homo sapien
gaagccacggcatagtagttccctt

SEQ ID NO: 5202992 - DNA, 25 bp, Homo sapien
gcattgatgatatggcctgtgttca

SEQ ID NO: 5202993 - DNA, 25 bp, Homo sapien
tctgtacttgcagtagcagtgccct

SEQ ID NO: 5202994 - DNA, 25 bp, Homo sapien
ttatggagtccatacaaacagcagg

SEQ ID NO: 5202995 - DNA, 25 bp, Homo sapien
catacaaacagcagggcaagagctc

SEQ ID NO: 5202996 - DNA, 25 bp, Homo sapien
tagcagtgccctttttatggagtcc

SEQ ID NO: 5202997 - DNA, 25 bp, Homo sapien
tccagcttgttgtgctggctcaact

SEQ ID NO: 5202998 - DNA, 25 bp, Homo sapien
tgcccaaggtgcattccagtgtgtc

SEQ ID NO: 5202999 - DNA, 25 bp, Homo sapien
tggctccagcttgttgtgctggctc

SEQ ID NO: 5203000 - DNA, 25 bp, Homo sapien
tggggaaaatgatccacgggctgcc

SEQ ID NO: 5203001 - DNA, 25 bp, Homo sapien
gcatagccatggagagttgaagcca

SEQ ID NO: 5203002 - DNA, 25 bp, Homo sapien
tgatctaacctccatctgcaactga

SEQ ID NO: 5203003 - DNA, 25 bp, Homo sapien
actgatcccctggactgggttatca

SEQ ID NO: 5203004 - DNA, 25 bp, Homo sapien
caactttgtataatctgatatccac

SEQ ID NO: 5203005 - DNA, 25 bp, Homo sapien
caagggtgtgcagaacatggaaagt

SEQ ID NO: 5203006 - DNA, 25 bp, Homo sapien
gggctaccatgtagagcacagtagc

SEQ ID NO: 5203007 - DNA, 25 bp, Homo sapien
tgagtaagcgaatggcggagtctcc

SEQ ID NO: 5203008 - DNA, 25 bp, Homo sapien
catgtagagcacagtagcgtgaggc

SEQ ID NO: 5203009 - DNA, 25 bp, Homo sapien
gcatcacaaactggctgagtctcat

SEQ ID NO: 5203010 - DNA, 25 bp, Homo sapien
aaagcatcacaaactggctgagtct

SEQ ID NO: 5203011 - DNA, 25 bp, Homo sapien
gatacaaagcatcacaaactggctg

SEQ ID NO: 5203012 - DNA, 25 bp, Homo sapien
caaagcatcacaaactggctgagtc

SEQ ID NO: 5203013 - DNA, 25 bp, Homo sapien
ggacaagtgggccaatctcttccag

SEQ ID NO: 5203014 - DNA, 25 bp, Homo sapien
gacaagtgggccaatctcttccagg

SEQ ID NO: 5203015 - DNA, 25 bp, Homo sapien
tggacaagtgggccaatctcttcca

SEQ ID NO: 5203016 - DNA, 25 bp, Homo sapien
tgaagacagattcactaccagcgtt

SEQ ID NO: 5203017 - DNA, 25 bp, Homo sapien
cttcagccatgcagattttagccag

SEQ ID NO: 5203018 - DNA, 25 bp, Homo sapien
gcgtttcatgtatcaccactaccca

SEQ ID NO: 5203019 - DNA, 25 bp, Homo sapien
catgcagattttagccagcagttca

SEQ ID NO: 5203020 - DNA, 25 bp, Homo sapien
ctgctggcgcatggagccgtcatgt

SEQ ID NO: 5203021 - DNA, 25 bp, Homo sapien
ggtacactttggactggctgaggct

SEQ ID NO: 5203022 - DNA, 25 bp, Homo sapien
tgatgaggccagtttcagtatgttc

SEQ ID NO: 5203023 - DNA, 25 bp, Homo sapien
ggccagtttcagtatgttcgtgcac

SEQ ID NO: 5203024 - DNA, 25 bp, Homo sapien
cctgcagaattaaagggagaggtga

SEQ ID NO: 5203025 - DNA, 25 bp, Homo sapien
aaatcatccagtcagggttccaggg

SEQ ID NO: 5203026 - DNA, 25 bp, Homo sapien
gttccagggagcacaagataaaagc

SEQ ID NO: 5203027 - DNA, 25 bp, Homo sapien
tgggctccagctcgacttcagaaat

SEQ ID NO: 5203028 - DNA, 25 bp, Homo sapien
agaactgttattaacgacactgatt

SEQ ID NO: 5203029 - DNA, 25 bp, Homo sapien
cataacctttgttaagtaaggagat

SEQ ID NO: 5203030 - DNA, 25 bp, Homo sapien
tcataacctttgttaagtaaggaga

SEQ ID NO: 5203031 - DNA, 25 bp, Homo sapien
taacgacactgattgtttaatttct

SEQ ID NO: 5203032 - DNA, 25 bp, Homo sapien
gacaagatatgactgagaccccagg

SEQ ID NO: 5203033 - DNA, 25 bp, Homo sapien
caattgctaggaactgacaccggag

SEQ ID NO: 5203034 - DNA, 25 bp, Homo sapien
ttagtgcagccctcagttaccatgg

SEQ ID NO: 5203035 - DNA, 25 bp, Homo sapien
tagtttctagatcccggtacgccca

SEQ ID NO: 5203036 - DNA, 25 bp, Homo sapien
tgggatctggcatgaaataaaatgc

SEQ ID NO: 5203037 - DNA, 25 bp, Homo sapien
ggtaggggtaattgccttaatgtca

SEQ ID NO: 5203038 - DNA, 25 bp, Homo sapien
gtatctaatgtcaaagctgggatct

SEQ ID NO: 5203039 - DNA, 25 bp, Homo sapien
tgtatccttgggtagctctagggaa

SEQ ID NO: 5203040 - DNA, 25 bp, Homo sapien
tgacctatccaactgcaaaggagcc

SEQ ID NO: 5203041 - DNA, 25 bp, Homo sapien
catggacctgtggaggactcagctc

SEQ ID NO: 5203042 - DNA, 25 bp, Homo sapien
caaatgtccggctgatgtgcttgaa

SEQ ID NO: 5203043 - DNA, 25 bp, Homo sapien
gcaatgcaccgtttatatacctgga

SEQ ID NO: 5203044 - DNA, 25 bp, Homo sapien
catgccgagagataagcgctggcag

SEQ ID NO: 5203045 - DNA, 25 bp, Homo sapien
agtgatgaagccaaagccgtttcgc

SEQ ID NO: 5203046 - DNA, 25 bp, Homo sapien
gaagccaaagccgtttcgctgacat

SEQ ID NO: 5203047 - DNA, 25 bp, Homo sapien
attcggcccatcagaccatgccgag

SEQ ID NO: 5203048 - DNA, 25 bp, Homo sapien
ttcctaatgtgcaggacatgtttct

SEQ ID NO: 5203049 - DNA, 25 bp, Homo sapien
tgttctacctccaaaagtctgtcat

SEQ ID NO: 5203050 - DNA, 25 bp, Homo sapien
tcgttccttccataagctgctgtgg

SEQ ID NO: 5203051 - DNA, 25 bp, Homo sapien
caaggcacacttcctaatgtgcagg

SEQ ID NO: 5203052 - DNA, 25 bp, Homo sapien
ggtacatccgttcagtattcagaaa

SEQ ID NO: 5203053 - DNA, 25 bp, Homo sapien
tgacagtgatagaatggtacatccg

SEQ ID NO: 5203054 - DNA, 25 bp, Homo sapien
ttatggcactggcttaaggctgctg

SEQ ID NO: 5203055 - DNA, 25 bp, Homo sapien
gctgctgccaaactccgctgtcatt

SEQ ID NO: 5203056 - DNA, 25 bp, Homo sapien
ttccagcaatatatttgtctgccat

SEQ ID NO: 5203057 - DNA, 25 bp, Homo sapien
gaatatctggcatatgacatatttg

SEQ ID NO: 5203058 - DNA, 25 bp, Homo sapien
catatttgcaggtaagctgtttagt

SEQ ID NO: 5203059 - DNA, 25 bp, Homo sapien
gcaggtaagctgtttagtattaaaa

SEQ ID NO: 5203060 - DNA, 25 bp, Homo sapien
ggcatatgacatatttgcaggtaag

SEQ ID NO: 5203061 - DNA, 25 bp, Homo sapien
cccagagggatagttcgggtgctct

SEQ ID NO: 5203062 - DNA, 25 bp, Homo sapien
ggtgctctggttgagttgcagctga

SEQ ID NO: 5203063 - DNA, 25 bp, Homo sapien
tctggggcattctatcctgtggaca

SEQ ID NO: 5203064 - DNA, 25 bp, Homo sapien
tggggcattctatcctgtggacaca

SEQ ID NO: 5203065 - DNA, 25 bp, Homo sapien
cgggcctggtctcgctgtaattgcg

SEQ ID NO: 5203066 - DNA, 25 bp, Homo sapien
gtaattgcgataagacataaaacag

SEQ ID NO: 5203067 - DNA, 25 bp, Homo sapien
aagacataaaacagaggtcctgact

SEQ ID NO: 5203068 - DNA, 25 bp, Homo sapien
aaaacagaggtcctgactatctggg

SEQ ID NO: 5203069 - DNA, 25 bp, Homo sapien
tggtccagaggaccctggcatttga

SEQ ID NO: 5203070 - DNA, 25 bp, Homo sapien
tccagaggaccctggcatttgacgg

SEQ ID NO: 5203071 - DNA, 25 bp, Homo sapien
cctggcatttgacggccaatatggg

SEQ ID NO: 5203072 - DNA, 25 bp, Homo sapien
gaggaccctggcatttgacggccaa

SEQ ID NO: 5203073 - DNA, 25 bp, Homo sapien
tgttttggaccatcaggtgtatata

SEQ ID NO: 5203074 - DNA, 25 bp, Homo sapien
ggtgtatatatgagcaagtggtctt

SEQ ID NO: 5203075 - DNA, 25 bp, Homo sapien
ccatcaggtgtatatatgagcaagt

SEQ ID NO: 5203076 - DNA, 25 bp, Homo sapien
tggaccatcaggtgtatatatgagc

SEQ ID NO: 5203077 - DNA, 25 bp, Homo sapien
gatgtgcaaagacgatatggtggta

SEQ ID NO: 5203078 - DNA, 25 bp, Homo sapien
ttactgctctgcacctaacactcag

SEQ ID NO: 5203079 - DNA, 25 bp, Homo sapien
ctttggatgtgcaaagacgatatgg

SEQ ID NO: 5203080 - DNA, 25 bp, Homo sapien
tatggtggtaagttaaggttactgc

SEQ ID NO: 5203081 - DNA, 25 bp, Homo sapien
cgtcctgcttgttgattttaggtgg

SEQ ID NO: 5203082 - DNA, 25 bp, Homo sapien
tctgctggtaattcagcaaaggaag

SEQ ID NO: 5203083 - DNA, 25 bp, Homo sapien
gcactccctacgtcctgcttgttga

SEQ ID NO: 5203084 - DNA, 25 bp, Homo sapien
ggttctggtatagtaaaacatgcac

SEQ ID NO: 5203085 - DNA, 25 bp, Homo sapien
ttccccttcaaattccactatggcc

SEQ ID NO: 5203086 - DNA, 25 bp, Homo sapien
gctcttcggcactgttaacaaagtc

SEQ ID NO: 5203087 - DNA, 25 bp, Homo sapien
tgttttcattgaaaggcagggcctg

SEQ ID NO: 5203088 - DNA, 25 bp, Homo sapien
ttattcatggccctaggacaatcat

SEQ ID NO: 5203089 - DNA, 25 bp, Homo sapien
tcatggccctaggacaatcatgtag

SEQ ID NO: 5203090 - DNA, 25 bp, Homo sapien
tcaagactcatgtgcagcatctctt

SEQ ID NO: 5203091 - DNA, 25 bp, Homo sapien
tctctttggaaatagccaggtaatc

SEQ ID NO: 5203092 - DNA, 25 bp, Homo sapien
atgaaacttctcaggtcctatgtca

SEQ ID NO: 5203093 - DNA, 25 bp, Homo sapien
ttctcaggtcctatgtcatctttgt

SEQ ID NO: 5203094 - DNA, 25 bp, Homo sapien
ctctgaaatagtgttggccctagtt

SEQ ID NO: 5203095 - DNA, 25 bp, Homo sapien
gatcaatactcaattcaaagcagtg

SEQ ID NO: 5203096 - DNA, 25 bp, Homo sapien
tgtaactgtctgctaaattggttcc

SEQ ID NO: 5203097 - DNA, 25 bp, Homo sapien
tatgagttcctatcgtaaattgcca

SEQ ID NO: 5203098 - DNA, 25 bp, Homo sapien
tggttctgacatgtaaccctgagga

SEQ ID NO: 5203099 - DNA, 25 bp, Homo sapien
tctgacatgtaaccctgaggaggaa

SEQ ID NO: 5203100 - DNA, 25 bp, Homo sapien
gtatggttctgacatgtaaccctga

SEQ ID NO: 5203101 - DNA, 25 bp, Homo sapien
tgacatgtaaccctgaggaggaaac

SEQ ID NO: 5203102 - DNA, 25 bp, Homo sapien
ggtttgggacataggatgttcatgt

SEQ ID NO: 5203103 - DNA, 25 bp, Homo sapien
ggacataggatgttcatgtccaccc

SEQ ID NO: 5203104 - DNA, 25 bp, Homo sapien
aggatgagggtttgggacataggat

SEQ ID NO: 5203105 - DNA, 25 bp, Homo sapien
tgggacataggatgttcatgtccac

SEQ ID NO: 5203106 - DNA, 25 bp, Homo sapien
aataaaggtgtatgctatgtccgcg

SEQ ID NO: 5203107 - DNA, 25 bp, Homo sapien
tatgtccgcgttgggaaatacggct

SEQ ID NO: 5203108 - DNA, 25 bp, Homo sapien
gagagaactcgtgggaatagctaag

SEQ ID NO: 5203109 - DNA, 25 bp, Homo sapien
tacctctgacttctggagagaactc

SEQ ID NO: 5203110 - DNA, 25 bp, Homo sapien
caagcccgaaagatgcatgtctgat

SEQ ID NO: 5203111 - DNA, 25 bp, Homo sapien
ggttaagatgctgtgaatcccctga

SEQ ID NO: 5203112 - DNA, 25 bp, Homo sapien
ccctggaatacaacagtaggaggtt

SEQ ID NO: 5203113 - DNA, 25 bp, Homo sapien
gaatcccctgaatataaactagttg

SEQ ID NO: 5203114 - DNA, 25 bp, Homo sapien
ccttttatagggaccagtgtgtcag

SEQ ID NO: 5203115 - DNA, 25 bp, Homo sapien
cctcatttaggtggcaattacaggt

SEQ ID NO: 5203116 - DNA, 25 bp, Homo sapien
tgtagattcaagactgaccctgctt

SEQ ID NO: 5203117 - DNA, 25 bp, Homo sapien
tacaggtaacagatggaggaatggc

SEQ ID NO: 5203118 - DNA, 25 bp, Homo sapien
aacaagatccatctagattggtgtt

SEQ ID NO: 5203119 - DNA, 25 bp, Homo sapien
tccactgaatactggttcaattctc

SEQ ID NO: 5203120 - DNA, 25 bp, Homo sapien
caacaagatccatctagattggtgt

SEQ ID NO: 5203121 - DNA, 25 bp, Homo sapien
ccactgaatactggttcaattctct

SEQ ID NO: 5203122 - DNA, 25 bp, Homo sapien
tgtggagttatagtgcttgaggacc

SEQ ID NO: 5203123 - DNA, 25 bp, Homo sapien
gggttccagcgctgccttcactcat

SEQ ID NO: 5203124 - DNA, 25 bp, Homo sapien
tgtggcttcacacttggtatgtgga

SEQ ID NO: 5203125 - DNA, 25 bp, Homo sapien
gaggacctgcagtccgcagtgaaat

SEQ ID NO: 5203126 - DNA, 25 bp, Homo sapien
ctcgagcaccgggaaggagcttagt

SEQ ID NO: 5203127 - DNA, 25 bp, Homo sapien
cttttgcttcctggctcgagcaccg

SEQ ID NO: 5203128 - DNA, 25 bp, Homo sapien
gacccaatacctgtctgcccataaa

SEQ ID NO: 5203129 - DNA, 25 bp, Homo sapien
tgcccataaatgacacagcctgttc

SEQ ID NO: 5203130 - DNA, 25 bp, Homo sapien
gaagagcgatatgatcaccacggag

SEQ ID NO: 5203131 - DNA, 25 bp, Homo sapien
agccgatgaagagcgatatgatcac

SEQ ID NO: 5203132 - DNA, 25 bp, Homo sapien
gcgatatgatcaccacggagatggg

SEQ ID NO: 5203133 - DNA, 25 bp, Homo sapien
gatgaagagcgatatgatcaccacg

SEQ ID NO: 5203134 - DNA, 25 bp, Homo sapien
gtgggggctttgctgactgattggc

SEQ ID NO: 5203135 - DNA, 25 bp, Homo sapien
gggggctttgctgactgattggctg

SEQ ID NO: 5203136 - DNA, 25 bp, Homo sapien
tgggggctttgctgactgattggct

SEQ ID NO: 5203137 - DNA, 25 bp, Homo sapien
ggggctttgctgactgattggctgt

SEQ ID NO: 5203138 - DNA, 25 bp, Homo sapien
ggagcacatgagcatgtgactagat

SEQ ID NO: 5203139 - DNA, 25 bp, Homo sapien
gagcatgtgactagattaagtttaa

SEQ ID NO: 5203140 - DNA, 25 bp, Homo sapien
aattatggactttctcattagcatt

SEQ ID NO: 5203141 - DNA, 25 bp, Homo sapien
taattggactacagctggtgctgat

SEQ ID NO: 5203142 - DNA, 25 bp, Homo sapien
ttaaaatgctaagccttgttgtgtc

SEQ ID NO: 5203143 - DNA, 25 bp, Homo sapien
ctttaaaatgctaagccttgttgtg

SEQ ID NO: 5203144 - DNA, 25 bp, Homo sapien
aaatgctaagccttgttgtgtccat

SEQ ID NO: 5203145 - DNA, 25 bp, Homo sapien
aaaatgctaagccttgttgtgtcca

SEQ ID NO: 5203146 - DNA, 25 bp, Homo sapien
gcattaacggtgttaacacagcaga

SEQ ID NO: 5203147 - DNA, 25 bp, Homo sapien
cattaatctgagtgtcggtgtctgc

SEQ ID NO: 5203148 - DNA, 25 bp, Homo sapien
aggagcgcagctaatgacatctaca

SEQ ID NO: 5203149 - DNA, 25 bp, Homo sapien
gatgcagttgctccaaaggagcgca

SEQ ID NO: 5203150 - DNA, 25 bp, Homo sapien
gaaaaagcagttaaatgattttcta

SEQ ID NO: 5203151 - DNA, 25 bp, Homo sapien
aattcatagggggttggcatcacat

SEQ ID NO: 5203152 - DNA, 25 bp, Homo sapien
agaaccaattcaacaattcataggg

SEQ ID NO: 5203153 - DNA, 25 bp, Homo sapien
ttggcatcacataaacagctgggaa

SEQ ID NO: 5203154 - DNA, 25 bp, Homo sapien
ctccacagtccacatgggtatccaa

SEQ ID NO: 5203155 - DNA, 25 bp, Homo sapien
tgtggactccacagtccacatgggt

SEQ ID NO: 5203156 - DNA, 25 bp, Homo sapien
atgggtatccaagtggtttctgggc

SEQ ID NO: 5203157 - DNA, 25 bp, Homo sapien
tgggtatccaagtggtttctgggca

SEQ ID NO: 5203158 - DNA, 25 bp, Homo sapien
aaaatggcttagtcagatctttcaa

SEQ ID NO: 5203159 - DNA, 25 bp, Homo sapien
ccttggttcgattgctgtagaagtg

SEQ ID NO: 5203160 - DNA, 25 bp, Homo sapien
aacatctaaaaatggcttagtcaga

SEQ ID NO: 5203161 - DNA, 25 bp, Homo sapien
atttttgccttggttcgattgctgt

SEQ ID NO: 5203162 - DNA, 25 bp, Homo sapien
tctgacgaaccaacttgggcttagg

SEQ ID NO: 5203163 - DNA, 25 bp, Homo sapien
tcatttctgacgaaccaacttgggc

SEQ ID NO: 5203164 - DNA, 25 bp, Homo sapien
tttctgacgaaccaacttgggctta

SEQ ID NO: 5203165 - DNA, 25 bp, Homo sapien
tgacgaaccaacttgggcttaggag

SEQ ID NO: 5203166 - DNA, 25 bp, Homo sapien
atgttagcagcttcagatgttccca

SEQ ID NO: 5203167 - DNA, 25 bp, Homo sapien
tgtgggccttggtaagagcgtctca

SEQ ID NO: 5203168 - DNA, 25 bp, Homo sapien
caaagtcactcttccaagcagcttg

SEQ ID NO: 5203169 - DNA, 25 bp, Homo sapien
cagacggcctagctttgctgtgtgg

SEQ ID NO: 5203170 - DNA, 25 bp, Homo sapien
ttactgctactgcctctaccgtcat

SEQ ID NO: 5203171 - DNA, 25 bp, Homo sapien
ggcataactagtttctggcgatgga

SEQ ID NO: 5203172 - DNA, 25 bp, Homo sapien
ccggagtctgttatcatggcataac

SEQ ID NO: 5203173 - DNA, 25 bp, Homo sapien
ctggcgatggaattactgctactgc

SEQ ID NO: 5203174 - DNA, 25 bp, Homo sapien
cctggttgttgtccccatcccagat

SEQ ID NO: 5203175 - DNA, 25 bp, Homo sapien
tgtctgggctccatagctcttgggc

SEQ ID NO: 5203176 - DNA, 25 bp, Homo sapien
tagaaagagagtgaccattgttaga

SEQ ID NO: 5203177 - DNA, 25 bp, Homo sapien
gatgtcgttgtcagaacgatcctgg

SEQ ID NO: 5203178 - DNA, 25 bp, Homo sapien
cctggaggtgtgcagaacctttgat

SEQ ID NO: 5203179 - DNA, 25 bp, Homo sapien
cagaacctttgattgttcccggttg

SEQ ID NO: 5203180 - DNA, 25 bp, Homo sapien
tgattgttcccggttgaaccctcac

SEQ ID NO: 5203181 - DNA, 25 bp, Homo sapien
gcctggaggtgtgcagaacctttga

SEQ ID NO: 5203182 - DNA, 25 bp, Homo sapien
caaatcagtggtagaggctaaagtc

SEQ ID NO: 5203183 - DNA, 25 bp, Homo sapien
aagtcaaaagcctctggtttttcag

SEQ ID NO: 5203184 - DNA, 25 bp, Homo sapien
ctgtgcaaatcagtggtagaggcta

SEQ ID NO: 5203185 - DNA, 25 bp, Homo sapien
atcagtggtagaggctaaagtcaaa

SEQ ID NO: 5203186 - DNA, 25 bp, Homo sapien
acatgttggagatgggccagtgagt

SEQ ID NO: 5203187 - DNA, 25 bp, Homo sapien
tgcatttggccagtaagtcctcttt

SEQ ID NO: 5203188 - DNA, 25 bp, Homo sapien
agctgctcagagtacatgttggaga

SEQ ID NO: 5203189 - DNA, 25 bp, Homo sapien
gtcctctttgcatttggccagtaag

SEQ ID NO: 5203190 - DNA, 25 bp, Homo sapien
attgagcatattcagcagtcctaaa

SEQ ID NO: 5203191 - DNA, 25 bp, Homo sapien
agatacacagtaattgagcatattc

SEQ ID NO: 5203192 - DNA, 25 bp, Homo sapien
aattgagcatattcagcagtcctaa

SEQ ID NO: 5203193 - DNA, 25 bp, Homo sapien
aaagcagatacacagtaattgagca

SEQ ID NO: 5203194 - DNA, 25 bp, Homo sapien
gtccagattgaagtgttaaatgcaa

SEQ ID NO: 5203195 - DNA, 25 bp, Homo sapien
gattgaagtgttaaatgcaattatt

SEQ ID NO: 5203196 - DNA, 25 bp, Homo sapien
tccagattgaagtgttaaatgcaat

SEQ ID NO: 5203197 - DNA, 25 bp, Homo sapien
cagattgaagtgttaaatgcaatta

SEQ ID NO: 5203198 - DNA, 25 bp, Homo sapien
ccaggatcgttgtggtggcgtccat

SEQ ID NO: 5203199 - DNA, 25 bp, Homo sapien
catcctctgcaggtgtagcatcctc

SEQ ID NO: 5203200 - DNA, 25 bp, Homo sapien
tctgcaggtgaattagccaggatcg

SEQ ID NO: 5203201 - DNA, 25 bp, Homo sapien
tgaattagccaggatcgttgtggtg

SEQ ID NO: 5203202 - DNA, 25 bp, Homo sapien
ttcattttccatcacgtcagcgaaa

SEQ ID NO: 5203203 - DNA, 25 bp, Homo sapien
ttaactgagtaatatcactggtcac

SEQ ID NO: 5203204 - DNA, 25 bp, Homo sapien
ctgagagagcatgtcgcatgtctgc

SEQ ID NO: 5203205 - DNA, 25 bp, Homo sapien
cacgtcagcgaaagatctgagaaat

SEQ ID NO: 5203206 - DNA, 25 bp, Homo sapien
ggaacagagattagtttaccgtcga

SEQ ID NO: 5203207 - DNA, 25 bp, Homo sapien
tacaaaaggtgtccatgacaaggct

SEQ ID NO: 5203208 - DNA, 25 bp, Homo sapien
tcaggatgtcatggctgttttacaa

SEQ ID NO: 5203209 - DNA, 25 bp, Homo sapien
tgttgccttgggcaactggcatcat

SEQ ID NO: 5203210 - DNA, 25 bp, Homo sapien
tggaaaggtgccctgagaaccaagt

SEQ ID NO: 5203211 - DNA, 25 bp, Homo sapien
agagttccgatgagcgccagtacct

SEQ ID NO: 5203212 - DNA, 25 bp, Homo sapien
tgagatttgcatacgtgcagagacg

SEQ ID NO: 5203213 - DNA, 25 bp, Homo sapien
tgcagagacgactcctgcctgagag

SEQ ID NO: 5203214 - DNA, 25 bp, Homo sapien
taggcaggagagagttgagatgctt

SEQ ID NO: 5203215 - DNA, 25 bp, Homo sapien
agagagttgagatgcttgggcttca

SEQ ID NO: 5203216 - DNA, 25 bp, Homo sapien
tctaggcaggagagagttgagatgc

SEQ ID NO: 5203217 - DNA, 25 bp, Homo sapien
ggagagagttgagatgcttgggctt

SEQ ID NO: 5203218 - DNA, 25 bp, Homo sapien
agcgcctggtggagaaggaatttac

SEQ ID NO: 5203219 - DNA, 25 bp, Homo sapien
aatcttcagagagcgcctggtggag

SEQ ID NO: 5203220 - DNA, 25 bp, Homo sapien
ttcagagagcgcctggtggagaagg

SEQ ID NO: 5203221 - DNA, 25 bp, Homo sapien
gagagcgcctggtggagaaggaatt

SEQ ID NO: 5203222 - DNA, 25 bp, Homo sapien
ccttctgtatggcctttagtgtgtg

SEQ ID NO: 5203223 - DNA, 25 bp, Homo sapien
tgtatggcctttagtgtgtggaagc

SEQ ID NO: 5203224 - DNA, 25 bp, Homo sapien
ctttagtgtgtggaagcttttccca

SEQ ID NO: 5203225 - DNA, 25 bp, Homo sapien
gacatcagtagttgcccttctgtat

SEQ ID NO: 5203226 - DNA, 25 bp, Homo sapien
caatcaagcttgctttcagggacat

SEQ ID NO: 5203227 - DNA, 25 bp, Homo sapien
tcaggggccccatgtcttttgtttc

SEQ ID NO: 5203228 - DNA, 25 bp, Homo sapien
cttcaggggccccatgtcttttgtt

SEQ ID NO: 5203229 - DNA, 25 bp, Homo sapien
tttgtttctcccacaatcaagcttg

SEQ ID NO: 5203230 - DNA, 25 bp, Homo sapien
cttgaataacatatttatttcttac

SEQ ID NO: 5203231 - DNA, 25 bp, Homo sapien
ccaaaggctgcgatggcaactgact

SEQ ID NO: 5203232 - DNA, 25 bp, Homo sapien
aggctgcgatggcaactgacttgta

SEQ ID NO: 5203233 - DNA, 25 bp, Homo sapien
aaaggctgcgatggcaactgacttg

SEQ ID NO: 5203234 - DNA, 25 bp, Homo sapien
tttctgttttccaccccacgatgga

SEQ ID NO: 5203235 - DNA, 25 bp, Homo sapien
ccacttgagattttctggccttcac

SEQ ID NO: 5203236 - DNA, 25 bp, Homo sapien
gatgcctcttgtgtgccacttgaga

SEQ ID NO: 5203237 - DNA, 25 bp, Homo sapien
cagatgcctcttgtgtgccacttga

SEQ ID NO: 5203238 - DNA, 25 bp, Homo sapien
tgcctcttgtgtgccacttgagatt

SEQ ID NO: 5203239 - DNA, 25 bp, Homo sapien
tggagaatagactgatagtgtagga

SEQ ID NO: 5203240 - DNA, 25 bp, Homo sapien
aaatggagaatagactgatagtgta

SEQ ID NO: 5203241 - DNA, 25 bp, Homo sapien
actgaaaatggagaatagactgata

SEQ ID NO: 5203242 - DNA, 25 bp, Homo sapien
atagactgatagtgtaggagactcc

SEQ ID NO: 5203243 - DNA, 25 bp, Homo sapien
tgctggagagagtcataggagatgc

SEQ ID NO: 5203244 - DNA, 25 bp, Homo sapien
gacatggatgctggagagagtcata

SEQ ID NO: 5203245 - DNA, 25 bp, Homo sapien
ggatgctggagagagtcataggaga

SEQ ID NO: 5203246 - DNA, 25 bp, Homo sapien
gtgacatggatgctggagagagtca

SEQ ID NO: 5203247 - DNA, 25 bp, Homo sapien
tgttagtcaacattaggcagagctc

SEQ ID NO: 5203248 - DNA, 25 bp, Homo sapien
agctcaggcaatgtctctatcccac

SEQ ID NO: 5203249 - DNA, 25 bp, Homo sapien
gcagagctcaggcaatgtctctatc

SEQ ID NO: 5203250 - DNA, 25 bp, Homo sapien
ctttgagtgggttgtcatgtccatg

SEQ ID NO: 5203251 - DNA, 25 bp, Homo sapien
gttttcatttgagatagcccctgga

SEQ ID NO: 5203252 - DNA, 25 bp, Homo sapien
taaagcactctaagccactccttgg

SEQ ID NO: 5203253 - DNA, 25 bp, Homo sapien
ggaagaggtgttcaaggacttgtac

SEQ ID NO: 5203254 - DNA, 25 bp, Homo sapien
gtattacagaggagctaaagcactc

SEQ ID NO: 5203255 - DNA, 25 bp, Homo sapien
ggtgaatgtgccacgctagagtcaa

SEQ ID NO: 5203256 - DNA, 25 bp, Homo sapien
ccacgctagagtcaagcgccttcat

SEQ ID NO: 5203257 - DNA, 25 bp, Homo sapien
cagacagaggtgcaatggaggtgaa

SEQ ID NO: 5203258 - DNA, 25 bp, Homo sapien
tgcaatggaggtgaatgtgccacgc

SEQ ID NO: 5203259 - DNA, 25 bp, Homo sapien
catcaggaccaggatcgaggaccag

SEQ ID NO: 5203260 - DNA, 25 bp, Homo sapien
ggcactgggcagtacggactgagtc

SEQ ID NO: 5203261 - DNA, 25 bp, Homo sapien
ctgggcagtacggactgagtcacca

SEQ ID NO: 5203262 - DNA, 25 bp, Homo sapien
tcatcaggaccaggatcgaggacca

SEQ ID NO: 5203263 - DNA, 25 bp, Homo sapien
cctatacatggcattttcaggtggt

SEQ ID NO: 5203264 - DNA, 25 bp, Homo sapien
tcccatccaatattaactggaccat

SEQ ID NO: 5203265 - DNA, 25 bp, Homo sapien
aaagcctatacatggcattttcagg

SEQ ID NO: 5203266 - DNA, 25 bp, Homo sapien
atattaactggaccattcctgctta

SEQ ID NO: 5203267 - DNA, 25 bp, Homo sapien
cataatgtcaattgccaatagattg

SEQ ID NO: 5203268 - DNA, 25 bp, Homo sapien
caatagattgataagatctttctgc

SEQ ID NO: 5203269 - DNA, 25 bp, Homo sapien
caattgccaatagattgataagatc

SEQ ID NO: 5203270 - DNA, 25 bp, Homo sapien
tgtcaattgccaatagattgataag

SEQ ID NO: 5203271 - DNA, 25 bp, Homo sapien
actgccgcgtctcgtctccgctggg

SEQ ID NO: 5203272 - DNA, 25 bp, Homo sapien
ggtcaatagaatccactaggtggcg

SEQ ID NO: 5203273 - DNA, 25 bp, Homo sapien
gtggcgcccaggtctactgccgcgt

SEQ ID NO: 5203274 - DNA, 25 bp, Homo sapien
ccgctgggcgcaaatcttggaacag

SEQ ID NO: 5203275 - DNA, 25 bp, Homo sapien
ttgtaaaaacgaggacccactgcca

SEQ ID NO: 5203276 - DNA, 25 bp, Homo sapien
tggctcacaaaattttgatgataaa

SEQ ID NO: 5203277 - DNA, 25 bp, Homo sapien
gaattaggatttataggaatttgta

SEQ ID NO: 5203278 - DNA, 25 bp, Homo sapien
taagattagaattaggatttatagg

SEQ ID NO: 5203279 - DNA, 25 bp, Homo sapien
ctgtggtcggaagaagaaagctgaa

SEQ ID NO: 5203280 - DNA, 25 bp, Homo sapien
cagtgttcgcttgtacaagaagagg

SEQ ID NO: 5203281 - DNA, 25 bp, Homo sapien
ggacagtgttcgcttgtacaagaag

SEQ ID NO: 5203282 - DNA, 25 bp, Homo sapien
ggaaggacagtgttcgcttgtacaa

SEQ ID NO: 5203283 - DNA, 25 bp, Homo sapien
aaggacagtgttcgcttgtacaaga

SEQ ID NO: 5203284 - DNA, 25 bp, Homo sapien
tgagcaatattacgtgcattttgtc

SEQ ID NO: 5203285 - DNA, 25 bp, Homo sapien
cttttcctaaagtgagcaatattac

SEQ ID NO: 5203286 - DNA, 25 bp, Homo sapien
caatattacgtgcattttgtctggc

SEQ ID NO: 5203287 - DNA, 25 bp, Homo sapien
ctaaagtgagcaatattacgtgcat

SEQ ID NO: 5203288 - DNA, 25 bp, Homo sapien
ttgctgctcgtttgtccaggagcca

SEQ ID NO: 5203289 - DNA, 25 bp, Homo sapien
tgtttgctgctcgtttgtccaggag

SEQ ID NO: 5203290 - DNA, 25 bp, Homo sapien
gtttgctgctcgtttgtccaggagc

SEQ ID NO: 5203291 - DNA, 25 bp, Homo sapien
tttgctgctcgtttgtccaggagcc

SEQ ID NO: 5203292 - DNA, 25 bp, Homo sapien
ataatgataattcatgtcgtcaaac

SEQ ID NO: 5203293 - DNA, 25 bp, Homo sapien
taattcatgtcgtcaaaccaaacgc

SEQ ID NO: 5203294 - DNA, 25 bp, Homo sapien
attcatgtcgtcaaaccaaacgcac

SEQ ID NO: 5203295 - DNA, 25 bp, Homo sapien
tgataattcatgtcgtcaaaccaaa

SEQ ID NO: 5203296 - DNA, 25 bp, Homo sapien
ttcagtagcacctgatgccgtccat

SEQ ID NO: 5203297 - DNA, 25 bp, Homo sapien
ctgcatatgactcaggcctgcacta

SEQ ID NO: 5203298 - DNA, 25 bp, Homo sapien
aaataaaacgggcatgttgagtgga

SEQ ID NO: 5203299 - DNA, 25 bp, Homo sapien
cctagcataaagaacgcagcctggg

SEQ ID NO: 5203300 - DNA, 25 bp, Homo sapien
actgcaacctcctccaagtgattct

SEQ ID NO: 5203301 - DNA, 25 bp, Homo sapien
cacctggctaatttttgtatattta

SEQ ID NO: 5203302 - DNA, 25 bp, Homo sapien
acctggctaatttttgtatatttag

SEQ ID NO: 5203303 - DNA, 25 bp, Homo sapien
cactgcaacctcctccaagtgattc

SEQ ID NO: 5203304 - DNA, 25 bp, Homo sapien
gtccattgtcaagggcccctcgagg

SEQ ID NO: 5203305 - DNA, 25 bp, Homo sapien
tccagcaatggacaacagattttcc

SEQ ID NO: 5203306 - DNA, 25 bp, Homo sapien
cctgccctgccagtttgacaaacat

SEQ ID NO: 5203307 - DNA, 25 bp, Homo sapien
ccagtctgagtccattgtcaagggc

SEQ ID NO: 5203308 - DNA, 25 bp, Homo sapien
gaacggattccaaatcttacaagtg

SEQ ID NO: 5203309 - DNA, 25 bp, Homo sapien
tcccattagatacgcagattctgac

SEQ ID NO: 5203310 - DNA, 25 bp, Homo sapien
aacgtatacaaaggcttgtttctgg

SEQ ID NO: 5203311 - DNA, 25 bp, Homo sapien
gtgtaacagtaacgatcccattaga

SEQ ID NO: 5203312 - DNA, 25 bp, Homo sapien
cacccttatggttccgttggcactc

SEQ ID NO: 5203313 - DNA, 25 bp, Homo sapien
catcacccttatggttccgttggca

SEQ ID NO: 5203314 - DNA, 25 bp, Homo sapien
gttccgttggcactcttcgagctcc

SEQ ID NO: 5203315 - DNA, 25 bp, Homo sapien
tatggttccgttggcactcttcgag

SEQ ID NO: 5203316 - DNA, 25 bp, Homo sapien
tcagctcaaaactgatcttacagca

SEQ ID NO: 5203317 - DNA, 25 bp, Homo sapien
ctgatcttacagcacaggtatttgg

SEQ ID NO: 5203318 - DNA, 25 bp, Homo sapien
cagtgggcgtgatgcatagctcccg

SEQ ID NO: 5203319 - DNA, 25 bp, Homo sapien
cataggagatgccagtgggcgtgat

SEQ ID NO: 5203320 - DNA, 25 bp, Homo sapien
ccaggtcacagggtcaaaatgatcc

SEQ ID NO: 5203321 - DNA, 25 bp, Homo sapien
ccaggttggggatgaactgtttctg

SEQ ID NO: 5203322 - DNA, 25 bp, Homo sapien
gggctccaggtcacagggtcaaaat

SEQ ID NO: 5203323 - DNA, 25 bp, Homo sapien
tcacagggtcaaaatgatccacgcg

SEQ ID NO: 5203324 - DNA, 25 bp, Homo sapien
tctcagagatgaatgcgtcaatgac

SEQ ID NO: 5203325 - DNA, 25 bp, Homo sapien
tcagtagtcctcaacccagccgttc

SEQ ID NO: 5203326 - DNA, 25 bp, Homo sapien
gtcctcaacccagccgttctcagag

SEQ ID NO: 5203327 - DNA, 25 bp, Homo sapien
caacccagccgttctcagagatgaa

SEQ ID NO: 5203328 - DNA, 25 bp, Homo sapien
catgactcaaactgccccaggcttt

SEQ ID NO: 5203329 - DNA, 25 bp, Homo sapien
tgccttaggttactttgtgtttcca

SEQ ID NO: 5203330 - DNA, 25 bp, Homo sapien
caggaatcaaaatgggggatccatg

SEQ ID NO: 5203331 - DNA, 25 bp, Homo sapien
aaaatgggggatccatgactcaaac

SEQ ID NO: 5203332 - DNA, 25 bp, Homo sapien
aaatacaatagtcagatgaggggaa

SEQ ID NO: 5203333 - DNA, 25 bp, Homo sapien
aatacaatagtcagatgaggggaaa

SEQ ID NO: 5203334 - DNA, 25 bp, Homo sapien
ggaagccttctggcctttgagaccc

SEQ ID NO: 5203335 - DNA, 25 bp, Homo sapien
tgctcagcatctgcgacggcggcct

SEQ ID NO: 5203336 - DNA, 25 bp, Homo sapien
ctgctcagcatctgcgacggcggcc

SEQ ID NO: 5203337 - DNA, 25 bp, Homo sapien
gccttctggcctttgagaccctcaa

SEQ ID NO: 5203338 - DNA, 25 bp, Homo sapien
gctcctggtactcatgcaactgcca

SEQ ID NO: 5203339 - DNA, 25 bp, Homo sapien
ctcatgcaactgccatgccatgtct

SEQ ID NO: 5203340 - DNA, 25 bp, Homo sapien
cctggtactcatgcaactgccatgc

SEQ ID NO: 5203341 - DNA, 25 bp, Homo sapien
tcatgcaactgccatgccatgtctt

SEQ ID NO: 5203342 - DNA, 25 bp, Homo sapien
gcttcccattgcgggtctgtatctt

SEQ ID NO: 5203343 - DNA, 25 bp, Homo sapien
cagcttcccattgcgggtctgtatc

SEQ ID NO: 5203344 - DNA, 25 bp, Homo sapien
ttcccattgcgggtctgtatcttct

SEQ ID NO: 5203345 - DNA, 25 bp, Homo sapien
cttgcgcaggacgtcagaagactcg

SEQ ID NO: 5203346 - DNA, 25 bp, Homo sapien
atatataagcactgtaaaaacaatg

SEQ ID NO: 5203347 - DNA, 25 bp, Homo sapien
gaaaagagataataatactagtacc

SEQ ID NO: 5203348 - DNA, 25 bp, Homo sapien
cttagtcactatgtatgaaaagaga

SEQ ID NO: 5203349 - DNA, 25 bp, Homo sapien
tagtaccttcctcatactacaagac

SEQ ID NO: 5203350 - DNA, 25 bp, Homo sapien
cgagttcaatatgggaccgagagga

SEQ ID NO: 5203351 - DNA, 25 bp, Homo sapien
ctcgagttcaatatgggaccgagag

SEQ ID NO: 5203352 - DNA, 25 bp, Homo sapien
gttcaatatgggaccgagaggaaga

SEQ ID NO: 5203353 - DNA, 25 bp, Homo sapien
agttcaatatgggaccgagaggaag

SEQ ID NO: 5203354 - DNA, 25 bp, Homo sapien
ttgagaccggactcgcctcttccaa

SEQ ID NO: 5203355 - DNA, 25 bp, Homo sapien
tttgagaccggactcgcctcttcca

SEQ ID NO: 5203356 - DNA, 25 bp, Homo sapien
cggcgacggccggagtcgggctggg

SEQ ID NO: 5203357 - DNA, 25 bp, Homo sapien
gcggcgacggcgacggccggagtcg

SEQ ID NO: 5203358 - DNA, 25 bp, Homo sapien
gacggcgacggccggagtcgggctg

SEQ ID NO: 5203359 - DNA, 25 bp, Homo sapien
gcgacggcgacggccggagtcgggc

SEQ ID NO: 5203360 - DNA, 25 bp, Homo sapien
gctcgcccggatgtgcctgctcgtc

SEQ ID NO: 5203361 - DNA, 25 bp, Homo sapien
ttgctcgctcgcccggatgtgcctg

SEQ ID NO: 5203362 - DNA, 25 bp, Homo sapien
gcggcggcggatcaatgtcaatgtg

SEQ ID NO: 5203363 - DNA, 25 bp, Homo sapien
ggatcaatgtcaatgtggccgccgc

SEQ ID NO: 5203364 - DNA, 25 bp, Homo sapien
atgcttcgaggccatttgcggcttt

SEQ ID NO: 5203365 - DNA, 25 bp, Homo sapien
caggctcgctttcccggcggcagag

SEQ ID NO: 5203366 - DNA, 25 bp, Homo sapien
catttgcggctttttctgccgggcc

SEQ ID NO: 5203367 - DNA, 25 bp, Homo sapien
gaggcggcggccattgcgggccaat

SEQ ID NO: 5203368 - DNA, 25 bp, Homo sapien
cacttcaactaaattgaaatccaag

SEQ ID NO: 5203369 - DNA, 25 bp, Homo sapien
aatgttctcgtaaactatcatctgt

SEQ ID NO: 5203370 - DNA, 25 bp, Homo sapien
gttctcgtaaactatcatctgtagt

SEQ ID NO: 5203371 - DNA, 25 bp, Homo sapien
caaaatgttctcgtaaactatcatc

SEQ ID NO: 5203372 - DNA, 25 bp, Homo sapien
caactgctctggttcctttggatca

SEQ ID NO: 5203373 - DNA, 25 bp, Homo sapien
catcaaccttgtgtggtcgagcaca

SEQ ID NO: 5203374 - DNA, 25 bp, Homo sapien
tgtggtcgagcacacattgctgcat

SEQ ID NO: 5203375 - DNA, 25 bp, Homo sapien
tacacgcccatcaaccttgtgtggt

SEQ ID NO: 5203376 - DNA, 25 bp, Homo sapien
accttgtgtggtcgagcacacattg

SEQ ID NO: 5203377 - DNA, 25 bp, Homo sapien
tttcttcactgttagatgggcacca

SEQ ID NO: 5203378 - DNA, 25 bp, Homo sapien
aacaattttatcaactgtatcatga

SEQ ID NO: 5203379 - DNA, 25 bp, Homo sapien
caatcttgccatacttttcaaagta

SEQ ID NO: 5203380 - DNA, 25 bp, Homo sapien
cttcactgttagatgggcaccaggc

SEQ ID NO: 5203381 - DNA, 25 bp, Homo sapien
ggcagacactatgaaaattgactat

SEQ ID NO: 5203382 - DNA, 25 bp, Homo sapien
caggcagacactatgaaaattgact

SEQ ID NO: 5203383 - DNA, 25 bp, Homo sapien
tataaatgccattacacgcaacaga

SEQ ID NO: 5203384 - DNA, 25 bp, Homo sapien
actataaatgccattacacgcaaca

SEQ ID NO: 5203385 - DNA, 25 bp, Homo sapien
tagaaagggcctttttcacttcaca

SEQ ID NO: 5203386 - DNA, 25 bp, Homo sapien
cagcagactgcatctcttgtttaga

SEQ ID NO: 5203387 - DNA, 25 bp, Homo sapien
tccagcagactgcatctcttgttta

SEQ ID NO: 5203388 - DNA, 25 bp, Homo sapien
ctctctgtgatccagcagactgcat

SEQ ID NO: 5203389 - DNA, 25 bp, Homo sapien
taaaattgccagatccacctccacg

SEQ ID NO: 5203390 - DNA, 25 bp, Homo sapien
ttccctccgcgacccataaaattgc

SEQ ID NO: 5203391 - DNA, 25 bp, Homo sapien
aaattgccagatccacctccacgac

SEQ ID NO: 5203392 - DNA, 25 bp, Homo sapien
cataaaattgccagatccacctcca

SEQ ID NO: 5203393 - DNA, 25 bp, Homo sapien
catcacctcctccataactacctct

SEQ ID NO: 5203394 - DNA, 25 bp, Homo sapien
atcacctccaaatccattatatcca

SEQ ID NO: 5203395 - DNA, 25 bp, Homo sapien
catcacctccaaatccattatatcc

SEQ ID NO: 5203396 - DNA, 25 bp, Homo sapien
cctcctccataactacctctgctgc

SEQ ID NO: 5203397 - DNA, 25 bp, Homo sapien
ttaagccactggcaaataagccaat

SEQ ID NO: 5203398 - DNA, 25 bp, Homo sapien
caacccctactacttgctgaaaaag

SEQ ID NO: 5203399 - DNA, 25 bp, Homo sapien
tacaccttaaccatttagccactga

SEQ ID NO: 5203400 - DNA, 25 bp, Homo sapien
aagagcagctaatgtctctccaggg

SEQ ID NO: 5203401 - DNA, 25 bp, Homo sapien
tactataaccaggaccaccgccata

SEQ ID NO: 5203402 - DNA, 25 bp, Homo sapien
ctataaccaggaccaccgccatagt

SEQ ID NO: 5203403 - DNA, 25 bp, Homo sapien
tctactactataaccaggaccaccg

SEQ ID NO: 5203404 - DNA, 25 bp, Homo sapien
taaccaggaccaccgccatagttgc

SEQ ID NO: 5203405 - DNA, 25 bp, Homo sapien
ctccttcattgtaaccatcatatcc

SEQ ID NO: 5203406 - DNA, 25 bp, Homo sapien
taaccatcatatcctccacctccac

SEQ ID NO: 5203407 - DNA, 25 bp, Homo sapien
aaatttcctccttcattgtaaccat

SEQ ID NO: 5203408 - DNA, 25 bp, Homo sapien
attgtaaccatcatatcctccacct

SEQ ID NO: 5203409 - DNA, 25 bp, Homo sapien
tatattaaatgctgtcctctaggcg

SEQ ID NO: 5203410 - DNA, 25 bp, Homo sapien
aacctgctcacttcaacacgtctgg

SEQ ID NO: 5203411 - DNA, 25 bp, Homo sapien
taacctgggccctagatggcaacct

SEQ ID NO: 5203412 - DNA, 25 bp, Homo sapien
tgcttaaacgcttcaactacctgtg

SEQ ID NO: 5203413 - DNA, 25 bp, Homo sapien
aaatcattatagttcccaccaccac

SEQ ID NO: 5203414 - DNA, 25 bp, Homo sapien
gctgttgtccactataatttccaaa

SEQ ID NO: 5203415 - DNA, 25 bp, Homo sapien
accatagggactgcccgagcttctt

SEQ ID NO: 5203416 - DNA, 25 bp, Homo sapien
tcatgggtccataatttgattgctg

SEQ ID NO: 5203417 - DNA, 25 bp, Homo sapien
gctctaaagaattgatttaagaaag

SEQ ID NO: 5203418 - DNA, 25 bp, Homo sapien
ggctctaaagaattgatttaagaaa

SEQ ID NO: 5203419 - DNA, 25 bp, Homo sapien
aaggctctaaagaattgatttaaga

SEQ ID NO: 5203420 - DNA, 25 bp, Homo sapien
aaaggctctaaagaattgatttaag

SEQ ID NO: 5203421 - DNA, 25 bp, Homo sapien
ccacttccaccaccagatccataac

SEQ ID NO: 5203422 - DNA, 25 bp, Homo sapien
accttctgctaccatatccaccact

SEQ ID NO: 5203423 - DNA, 25 bp, Homo sapien
tccaccacttccaccaccagatcca

SEQ ID NO: 5203424 - DNA, 25 bp, Homo sapien
cttctgctaccatatccaccacttc

SEQ ID NO: 5203425 - DNA, 25 bp, Homo sapien
tattacactcagtgaacagttccac

SEQ ID NO: 5203426 - DNA, 25 bp, Homo sapien
attacactcagtgaacagttccaca

SEQ ID NO: 5203427 - DNA, 25 bp, Homo sapien
ccacaatttacagggcaatatacct

SEQ ID NO: 5203428 - DNA, 25 bp, Homo sapien
gcaatatacctgatgtaatgaaaag

SEQ ID NO: 5203429 - DNA, 25 bp, Homo sapien
cagggcaatatacctgatgtaatga

SEQ ID NO: 5203430 - DNA, 25 bp, Homo sapien
taccacaatttacagggcaatatac

SEQ ID NO: 5203431 - DNA, 25 bp, Homo sapien
tctttacttgttaactcacaaggaa

SEQ ID NO: 5203432 - DNA, 25 bp, Homo sapien
aaaggtacccactaatttgctcaga

SEQ ID NO: 5203433 - DNA, 25 bp, Homo sapien
ttacacccaaaacctatggcagcag

SEQ ID NO: 5203434 - DNA, 25 bp, Homo sapien
ttctaaacacagctaggactcagca

SEQ ID NO: 5203435 - DNA, 25 bp, Homo sapien
gcagcagttcaaatttgaccaaggt

SEQ ID NO: 5203436 - DNA, 25 bp, Homo sapien
aactatccttggtttcatccagcaa

SEQ ID NO: 5203437 - DNA, 25 bp, Homo sapien
gcagttaggttattttggacaatta

SEQ ID NO: 5203438 - DNA, 25 bp, Homo sapien
gaagtgagaagcctgtactaagcaa

SEQ ID NO: 5203439 - DNA, 25 bp, Homo sapien
atgttgaaatatacacaagaaataa

SEQ ID NO: 5203440 - DNA, 25 bp, Homo sapien
acatactcagggctcgaatgaaact

SEQ ID NO: 5203441 - DNA, 25 bp, Homo sapien
catactcagggctcgaatgaaactg

SEQ ID NO: 5203442 - DNA, 25 bp, Homo sapien
ctcagggctcgaatgaaactgtaag

SEQ ID NO: 5203443 - DNA, 25 bp, Homo sapien
tactcagggctcgaatgaaactgta

SEQ ID NO: 5203444 - DNA, 25 bp, Homo sapien
tgctggcattgcatgcatccaaata

SEQ ID NO: 5203445 - DNA, 25 bp, Homo sapien
tgcatgcatccaaatattaatgcac

SEQ ID NO: 5203446 - DNA, 25 bp, Homo sapien
tgcttgtttgcttagtacttcttaa

SEQ ID NO: 5203447 - DNA, 25 bp, Homo sapien
caagagagcatattcaaacactagc

SEQ ID NO: 5203448 - DNA, 25 bp, Homo sapien
tgacagtgtccattatataaccaca

SEQ ID NO: 5203449 - DNA, 25 bp, Homo sapien
taaccacacttgaagttatttagga

SEQ ID NO: 5203450 - DNA, 25 bp, Homo sapien
cccaggtttaagttatgaacattga

SEQ ID NO: 5203451 - DNA, 25 bp, Homo sapien
cccaagcattattttgaccaggtac

SEQ ID NO: 5203452 - DNA, 25 bp, Homo sapien
cattcctttaaactttatttatatg

SEQ ID NO: 5203453 - DNA, 25 bp, Homo sapien
ccttccttgcaggtctaaatgctag

SEQ ID NO: 5203454 - DNA, 25 bp, Homo sapien
tggttaaatcgctctcctcatggct

SEQ ID NO: 5203455 - DNA, 25 bp, Homo sapien
tgagtttctgtgatccacactgtgc

SEQ ID NO: 5203456 - DNA, 25 bp, Homo sapien
gatgttccaaaaggcgaagagctcc

SEQ ID NO: 5203457 - DNA, 25 bp, Homo sapien
ctgcaaatcaaaaagattactctta

SEQ ID NO: 5203458 - DNA, 25 bp, Homo sapien
aatcaaaaagattactcttaccttg

SEQ ID NO: 5203459 - DNA, 25 bp, Homo sapien
gcaaatcaaaaagattactcttacc

SEQ ID NO: 5203460 - DNA, 25 bp, Homo sapien
atcaaaaagattactcttaccttgc

SEQ ID NO: 5203461 - DNA, 25 bp, Homo sapien
attcctcatttaggcaagtagggtt

SEQ ID NO: 5203462 - DNA, 25 bp, Homo sapien
tcgtattttagatggtaggaaagac

SEQ ID NO: 5203463 - DNA, 25 bp, Homo sapien
taggcaagtagggttctcattcaac

SEQ ID NO: 5203464 - DNA, 25 bp, Homo sapien
ttttagatggtaggaaagacattcc

SEQ ID NO: 5203465 - DNA, 25 bp, Homo sapien
taaaacgtgtaggacatggtaccaa

SEQ ID NO: 5203466 - DNA, 25 bp, Homo sapien
tccaatgtgcctactagagagggac

SEQ ID NO: 5203467 - DNA, 25 bp, Homo sapien
gaatacttatggctatttcgcaggg

SEQ ID NO: 5203468 - DNA, 25 bp, Homo sapien
cctagtatgaggatgggcagcttac

SEQ ID NO: 5203469 - DNA, 25 bp, Homo sapien
catcaacaaccagtttgaacggtaa

SEQ ID NO: 5203470 - DNA, 25 bp, Homo sapien
gcctgatatcaaggcagcctcccaa

SEQ ID NO: 5203471 - DNA, 25 bp, Homo sapien
tcaacacgcgtagaaattgggttct

SEQ ID NO: 5203472 - DNA, 25 bp, Homo sapien
gaccaacctttacccatgacatctg

SEQ ID NO: 5203473 - DNA, 25 bp, Homo sapien
gctgctacaacttctgagaatactg

SEQ ID NO: 5203474 - DNA, 25 bp, Homo sapien
actcccaagatactgtcaggtttca

SEQ ID NO: 5203475 - DNA, 25 bp, Homo sapien
tgtgacattactggaactcccaaga

SEQ ID NO: 5203476 - DNA, 25 bp, Homo sapien
tagttttcagaaacgacaatggaac

SEQ ID NO: 5203477 - DNA, 25 bp, Homo sapien
aatattcacctatagtgtttaagtc

SEQ ID NO: 5203478 - DNA, 25 bp, Homo sapien
tattcacctatagtgtttaagtcac

SEQ ID NO: 5203479 - DNA, 25 bp, Homo sapien
cacctatagtgtttaagtcacatga

SEQ ID NO: 5203480 - DNA, 25 bp, Homo sapien
gtcaaaatattcacctatagtgttt

SEQ ID NO: 5203481 - DNA, 25 bp, Homo sapien
tagctagctttcagaactgtgcaca

SEQ ID NO: 5203482 - DNA, 25 bp, Homo sapien
tccttaatgtacgatgacaagtgct

SEQ ID NO: 5203483 - DNA, 25 bp, Homo sapien
tacgtctgtgacatgcacatgcaga

SEQ ID NO: 5203484 - DNA, 25 bp, Homo sapien
aattaagttacctggagcctacaga

SEQ ID NO: 5203485 - DNA, 25 bp, Homo sapien
tatctggagcacctaacattgactg

SEQ ID NO: 5203486 - DNA, 25 bp, Homo sapien
tacgagggaactggccatagaaact

SEQ ID NO: 5203487 - DNA, 25 bp, Homo sapien
tattctgaccaattcatacgaggga

SEQ ID NO: 5203488 - DNA, 25 bp, Homo sapien
gtgggtcaccccacaaaaagcactg

SEQ ID NO: 5203489 - DNA, 25 bp, Homo sapien
gctgtaccaatccagatggaggtga

SEQ ID NO: 5203490 - DNA, 25 bp, Homo sapien
ctttctggtaaaggagtgtagttag

SEQ ID NO: 5203491 - DNA, 25 bp, Homo sapien
cacggtcagtacagtggtggcagct

SEQ ID NO: 5203492 - DNA, 25 bp, Homo sapien
taaaggagtgtagttagtggcaggt

SEQ ID NO: 5203493 - DNA, 25 bp, Homo sapien
tatatgatgatatgacatctggcta

SEQ ID NO: 5203494 - DNA, 25 bp, Homo sapien
tgaatcagtagtttcactttaactg

SEQ ID NO: 5203495 - DNA, 25 bp, Homo sapien
ttaggacaccatttgggctagtttc

SEQ ID NO: 5203496 - DNA, 25 bp, Homo sapien
ggagtgtcagtatgttgaatcagta

SEQ ID NO: 5203497 - DNA, 25 bp, Homo sapien
gctatggagacacactacttggcct

SEQ ID NO: 5203498 - DNA, 25 bp, Homo sapien
tctgaacttctaaatgggcccattg

SEQ ID NO: 5203499 - DNA, 25 bp, Homo sapien
gaagagctagatagtgcccctggaa

SEQ ID NO: 5203500 - DNA, 25 bp, Homo sapien
tgtggcatcaccagaacactcagtg

SEQ ID NO: 5203501 - DNA, 25 bp, Homo sapien
ccacagagataagagtagcaagcag

SEQ ID NO: 5203502 - DNA, 25 bp, Homo sapien
gatttgattgacatactttggaggc

SEQ ID NO: 5203503 - DNA, 25 bp, Homo sapien
tacaggcatataggtaagccacaga

SEQ ID NO: 5203504 - DNA, 25 bp, Homo sapien
tatttgacttcagtcagcgacggaa

SEQ ID NO: 5203505 - DNA, 25 bp, Homo sapien
cattaaggccataacaataaaccta

SEQ ID NO: 5203506 - DNA, 25 bp, Homo sapien
tagcacagagtatgacattaaggcc

SEQ ID NO: 5203507 - DNA, 25 bp, Homo sapien
ttttgcctgctgaaacagatgtgaa

SEQ ID NO: 5203508 - DNA, 25 bp, Homo sapien
ttgttttgagacctctcatagcaag

SEQ ID NO: 5203509 - DNA, 25 bp, Homo sapien
gacgattatttcctcttagatgatg

SEQ ID NO: 5203510 - DNA, 25 bp, Homo sapien
cctcaaagccctggatttctgtgca

SEQ ID NO: 5203511 - DNA, 25 bp, Homo sapien
tgtcatgttcttgtttgttatgggc

SEQ ID NO: 5203512 - DNA, 25 bp, Homo sapien
tagatgatgtgtgagccttgcagag

SEQ ID NO: 5203513 - DNA, 25 bp, Homo sapien
tttggagcaaggctcagtttcgctt

SEQ ID NO: 5203514 - DNA, 25 bp, Homo sapien
cgctttctgttgagagttagtagtg

SEQ ID NO: 5203515 - DNA, 25 bp, Homo sapien
tgggaggtgcaagccttaattagac

SEQ ID NO: 5203516 - DNA, 25 bp, Homo sapien
caaatactttgtctcagtttactga

SEQ ID NO: 5203517 - DNA, 25 bp, Homo sapien
agtctctagttattcaagataaggg

SEQ ID NO: 5203518 - DNA, 25 bp, Homo sapien
gatgtatacaacatgttgctaggcc

SEQ ID NO: 5203519 - DNA, 25 bp, Homo sapien
cttggattcgtggtaactgttgcta

SEQ ID NO: 5203520 - DNA, 25 bp, Homo sapien
gctacctcttaaatgtctctgctga

SEQ ID NO: 5203521 - DNA, 25 bp, Homo sapien
ttctgtgcagatttagtggcacctc

SEQ ID NO: 5203522 - DNA, 25 bp, Homo sapien
caacttacaactctgtgccctgatg

SEQ ID NO: 5203523 - DNA, 25 bp, Homo sapien
aaaagggacaacttacaactctgtg

SEQ ID NO: 5203524 - DNA, 25 bp, Homo sapien
ctatgcttatatgcgattgtgtgta

SEQ ID NO: 5203525 - DNA, 25 bp, Homo sapien
tattaaatgagtgtgggatactatg

SEQ ID NO: 5203526 - DNA, 25 bp, Homo sapien
gaagattgcttgagcccaggaggtt

SEQ ID NO: 5203527 - DNA, 25 bp, Homo sapien
tggcacatgcctgtaatctcagcta

SEQ ID NO: 5203528 - DNA, 25 bp, Homo sapien
ttcaggaggctgaggtgggaagatt

SEQ ID NO: 5203529 - DNA, 25 bp, Homo sapien
aaagtaaaatattagccaggcatag

SEQ ID NO: 5203530 - DNA, 25 bp, Homo sapien
tctcggcttggagcgatcttgggtc

SEQ ID NO: 5203531 - DNA, 25 bp, Homo sapien
cacgatctcggcttggagcgatctt

SEQ ID NO: 5203532 - DNA, 25 bp, Homo sapien
gcttggagcgatcttgggtcaccat

SEQ ID NO: 5203533 - DNA, 25 bp, Homo sapien
ttggagcgatcttgggtcaccataa

SEQ ID NO: 5203534 - DNA, 25 bp, Homo sapien
gagcttactgattttgcctgtcacg

SEQ ID NO: 5203535 - DNA, 25 bp, Homo sapien
cagctctccttagtcagttggttgt

SEQ ID NO: 5203536 - DNA, 25 bp, Homo sapien
caagtctgccttgtctattagaaag

SEQ ID NO: 5203537 - DNA, 25 bp, Homo sapien
tttagtggccagtaaacacctgttc

SEQ ID NO: 5203538 - DNA, 25 bp, Homo sapien
aatgatcatactactacccacctgg

SEQ ID NO: 5203539 - DNA, 25 bp, Homo sapien
tgggcttagaatcttgacactgaga

SEQ ID NO: 5203540 - DNA, 25 bp, Homo sapien
gcatctgcaccataacattgttgaa

SEQ ID NO: 5203541 - DNA, 25 bp, Homo sapien
tggaacaggtagtaccctcccagca

SEQ ID NO: 5203542 - DNA, 25 bp, Homo sapien
ggtggctaggccacagttacccacg

SEQ ID NO: 5203543 - DNA, 25 bp, Homo sapien
aacagcacagggaggttcggtggct

SEQ ID NO: 5203544 - DNA, 25 bp, Homo sapien
cgtaagggctggtatcatcttggcc

SEQ ID NO: 5203545 - DNA, 25 bp, Homo sapien
gacatccttgggttgtccgatattt

SEQ ID NO: 5203546 - DNA, 25 bp, Homo sapien
tgaggttctgggcctagaaacccag

SEQ ID NO: 5203547 - DNA, 25 bp, Homo sapien
tgaggtcctggttgttgtggagact

SEQ ID NO: 5203548 - DNA, 25 bp, Homo sapien
tttgctgtttgctataaacctctca

SEQ ID NO: 5203549 - DNA, 25 bp, Homo sapien
aaccccatagcaggcctggtgtgtg

SEQ ID NO: 5203550 - DNA, 25 bp, Homo sapien
tccttgtgtgaggtcctggttgttg

SEQ ID NO: 5203551 - DNA, 25 bp, Homo sapien
aggtggcagcttgtttatacctttt

SEQ ID NO: 5203552 - DNA, 25 bp, Homo sapien
cagcttgtttataccttttatccta

SEQ ID NO: 5203553 - DNA, 25 bp, Homo sapien
gtggcagcttgtttataccttttat

SEQ ID NO: 5203554 - DNA, 25 bp, Homo sapien
ggcagcttgtttataccttttatcc

SEQ ID NO: 5203555 - DNA, 25 bp, Homo sapien
gagatgcgggtagacatgactcgcc

SEQ ID NO: 5203556 - DNA, 25 bp, Homo sapien
ttctcgttgatcctgagaagtaaag

SEQ ID NO: 5203557 - DNA, 25 bp, Homo sapien
ctgggtccccgggagtatgcggctc

SEQ ID NO: 5203558 - DNA, 25 bp, Homo sapien
tcgcctagatagaagctcattcatc

SEQ ID NO: 5203559 - DNA, 25 bp, Homo sapien
tatttcagacctgacaatctcttgt

SEQ ID NO: 5203560 - DNA, 25 bp, Homo sapien
caatgtctgtgtgaaagaaatgacc

SEQ ID NO: 5203561 - DNA, 25 bp, Homo sapien
gggcccactgttaaggcatatagaa

SEQ ID NO: 5203562 - DNA, 25 bp, Homo sapien
gctgacattcagagtagattagtac

SEQ ID NO: 5203563 - DNA, 25 bp, Homo sapien
ctgtgcagaggatgtgttgataaac

SEQ ID NO: 5203564 - DNA, 25 bp, Homo sapien
gtatctccattaggtggaaggaacc

SEQ ID NO: 5203565 - DNA, 25 bp, Homo sapien
gagagccttagattcagtatctcca

SEQ ID NO: 5203566 - DNA, 25 bp, Homo sapien
ggaaccatccattactcttttcaag

SEQ ID NO: 5203567 - DNA, 25 bp, Homo sapien
tcagaagccccgacgtgtggcggct

SEQ ID NO: 5203568 - DNA, 25 bp, Homo sapien
cgggacgagggaggagcgccttaag

SEQ ID NO: 5203569 - DNA, 25 bp, Homo sapien
gagcgccttaagtgcccagcgggct

SEQ ID NO: 5203570 - DNA, 25 bp, Homo sapien
ctcagaagccccgacgtgtggcggc

SEQ ID NO: 5203571 - DNA, 25 bp, Homo sapien
aactgaggtcgccttcgggctggga

SEQ ID NO: 5203572 - DNA, 25 bp, Homo sapien
gacctccttgagtgcgggctgcgac

SEQ ID NO: 5203573 - DNA, 25 bp, Homo sapien
gggcgcggctttgcgaagtcatcca

SEQ ID NO: 5203574 - DNA, 25 bp, Homo sapien
gctgggccgtctgtgggcgcggctt

SEQ ID NO: 5203575 - DNA, 25 bp, Homo sapien
agctgggactccggagcccctaagt

SEQ ID NO: 5203576 - DNA, 25 bp, Homo sapien
tccggagcccctaagtttgagcggc

SEQ ID NO: 5203577 - DNA, 25 bp, Homo sapien
actgagcccgctcgcgtgggccttg

SEQ ID NO: 5203578 - DNA, 25 bp, Homo sapien
cctcggtgccggcaaaaatgtgcct

SEQ ID NO: 5203579 - DNA, 25 bp, Homo sapien
cacagctcatcatgatggacttgga

SEQ ID NO: 5203580 - DNA, 25 bp, Homo sapien
ggaccgcggcgctgggtagagccgc

SEQ ID NO: 5203581 - DNA, 25 bp, Homo sapien
gggactcccgtcccagcaggtgctg

SEQ ID NO: 5203582 - DNA, 25 bp, Homo sapien
ctgggccctgcggtggtgccgggac

SEQ ID NO: 5203583 - DNA, 25 bp, Homo sapien
gggattttcggaagctcagcccgcg

SEQ ID NO: 5203584 - DNA, 25 bp, Homo sapien
ggaccgcgagcttcttgcgtcagcc

SEQ ID NO: 5203585 - DNA, 25 bp, Homo sapien
ggcccgccggcgtgtagccgattac

SEQ ID NO: 5203586 - DNA, 25 bp, Homo sapien
cggactcttgccccgcccttgtggg

SEQ ID NO: 5203587 - DNA, 25 bp, Homo sapien
ggcgagagcgctgcccttatttgcg

SEQ ID NO: 5203588 - DNA, 25 bp, Homo sapien
ggagctaacggagacctcctctagg

SEQ ID NO: 5203589 - DNA, 25 bp, Homo sapien
tgtttcaaagcgtccgaactccagc

SEQ ID NO: 5203590 - DNA, 25 bp, Homo sapien
aacaactctttatctcgcgggcgag

SEQ ID NO: 5203591 - DNA, 25 bp, Homo sapien
gcagtggcacggtctgggtccaaat

SEQ ID NO: 5203592 - DNA, 25 bp, Homo sapien
caaggttctgcaactccaaatcagg

SEQ ID NO: 5203593 - DNA, 25 bp, Homo sapien
atcagggaggcgcagctcctacacc

SEQ ID NO: 5203594 - DNA, 25 bp, Homo sapien
gctggcgccattctcgggcggtaaa

SEQ ID NO: 5203595 - DNA, 25 bp, Homo sapien
cagaggagggcgttcagggtgactg

SEQ ID NO: 5203596 - DNA, 25 bp, Homo sapien
ttcagggtgactgcgaacacgagct

SEQ ID NO: 5203597 - DNA, 25 bp, Homo sapien
gtgactgcgaacacgagctgccgga

SEQ ID NO: 5203598 - DNA, 25 bp, Homo sapien
gcgttcagggtgactgcgaacacga

SEQ ID NO: 5203599 - DNA, 25 bp, Homo sapien
cttaggagaatggagacacgtggga

SEQ ID NO: 5203600 - DNA, 25 bp, Homo sapien
taggagaatggagacacgtgggagt

SEQ ID NO: 5203601 - DNA, 25 bp, Homo sapien
ttaggagaatggagacacgtgggag

SEQ ID NO: 5203602 - DNA, 25 bp, Homo sapien
tctgggtgggcaatactgaccactc

SEQ ID NO: 5203603 - DNA, 25 bp, Homo sapien
tattacacactgttgaagggcgcca

SEQ ID NO: 5203604 - DNA, 25 bp, Homo sapien
gggcttctccgtttgcctttgacga

SEQ ID NO: 5203605 - DNA, 25 bp, Homo sapien
tacagcatgttgtggtattacacac

SEQ ID NO: 5203606 - DNA, 25 bp, Homo sapien
taaacagtacaaacctccaagacat

SEQ ID NO: 5203607 - DNA, 25 bp, Homo sapien
gaaccatatgcactgtttgctacct

SEQ ID NO: 5203608 - DNA, 25 bp, Homo sapien
cacatagtatattgataaacagtac

SEQ ID NO: 5203609 - DNA, 25 bp, Homo sapien
tacatagagagtgaagatgtaccac

SEQ ID NO: 5203610 - DNA, 25 bp, Homo sapien
gggttccccgtgctatcatcatttc

SEQ ID NO: 5203611 - DNA, 25 bp, Homo sapien
tgaatcttgcaataagcggtcatcc

SEQ ID NO: 5203612 - DNA, 25 bp, Homo sapien
cagagataggaccactgtgtcagcc

SEQ ID NO: 5203613 - DNA, 25 bp, Homo sapien
ttgggcagggagatggatcagcagg

SEQ ID NO: 5203614 - DNA, 25 bp, Homo sapien
tgcatggcccatttgtgcccagcat

SEQ ID NO: 5203615 - DNA, 25 bp, Homo sapien
tggccttcctttaccgatactgatg

SEQ ID NO: 5203616 - DNA, 25 bp, Homo sapien
tttaccgatactgatgcacctgtgc

SEQ ID NO: 5203617 - DNA, 25 bp, Homo sapien
tgggccaaggtattgggaaatccat

SEQ ID NO: 5203618 - DNA, 25 bp, Homo sapien
tccagtggagagcaacccagttgaa

SEQ ID NO: 5203619 - DNA, 25 bp, Homo sapien
catgtctgcatgaaccaagcttgcc

SEQ ID NO: 5203620 - DNA, 25 bp, Homo sapien
gagcatttaataggcatccagtgga

SEQ ID NO: 5203621 - DNA, 25 bp, Homo sapien
aacattagtgcctcatgtctgcatg

SEQ ID NO: 5203622 - DNA, 25 bp, Homo sapien
atactgatgatgaatccatgcttct

SEQ ID NO: 5203623 - DNA, 25 bp, Homo sapien
ctgatgatgaatccatgcttctggc

SEQ ID NO: 5203624 - DNA, 25 bp, Homo sapien
tgatgatgaatccatgcttctggct

SEQ ID NO: 5203625 - DNA, 25 bp, Homo sapien
tactgatgatgaatccatgcttctg

SEQ ID NO: 5203626 - DNA, 25 bp, Homo sapien
ttacaggtgagtgcccggcctctta

SEQ ID NO: 5203627 - DNA, 25 bp, Homo sapien
gagtgcccggcctcttatcttgaat

SEQ ID NO: 5203628 - DNA, 25 bp, Homo sapien
gtgcccggcctcttatcttgaattg

SEQ ID NO: 5203629 - DNA, 25 bp, Homo sapien
gtgagtgcccggcctcttatcttga

SEQ ID NO: 5203630 - DNA, 25 bp, Homo sapien
acaaacgttagggagaggcctggct

SEQ ID NO: 5203631 - DNA, 25 bp, Homo sapien
cctccgtttgtactcttgcccttgg

SEQ ID NO: 5203632 - DNA, 25 bp, Homo sapien
tcattagacacatggaatatgggcc

SEQ ID NO: 5203633 - DNA, 25 bp, Homo sapien
cccacaaacgttagggagaggcctg

SEQ ID NO: 5203634 - DNA, 25 bp, Homo sapien
ctttacctaggctgttgggcactgt

SEQ ID NO: 5203635 - DNA, 25 bp, Homo sapien
cttatctactgaggaaggactccat

SEQ ID NO: 5203636 - DNA, 25 bp, Homo sapien
gactcataacattggcctctgaccg

SEQ ID NO: 5203637 - DNA, 25 bp, Homo sapien
tctgaccggtgttctcaactccatt

SEQ ID NO: 5203638 - DNA, 25 bp, Homo sapien
ctgtgacaacagcaattctctcccc

SEQ ID NO: 5203639 - DNA, 25 bp, Homo sapien
ccagctcttgaattcctcatttcct

SEQ ID NO: 5203640 - DNA, 25 bp, Homo sapien
tcctcatttccttcatactgttctg

SEQ ID NO: 5203641 - DNA, 25 bp, Homo sapien
tcatactgttctgtgacaacagcaa

SEQ ID NO: 5203642 - DNA, 25 bp, Homo sapien
tcctgagaaatttcttgcaccaggt

SEQ ID NO: 5203643 - DNA, 25 bp, Homo sapien
gacacataggttgttatcttcaaaa

SEQ ID NO: 5203644 - DNA, 25 bp, Homo sapien
gaggacacataggttgttatcttca

SEQ ID NO: 5203645 - DNA, 25 bp, Homo sapien
tcacatatgtggtgtgctagctgga

SEQ ID NO: 5203646 - DNA, 25 bp, Homo sapien
gcacagaatcgactgtattatcaaa

SEQ ID NO: 5203647 - DNA, 25 bp, Homo sapien
cacagaatcgactgtattatcaaat

SEQ ID NO: 5203648 - DNA, 25 bp, Homo sapien
tgcacagaatcgactgtattatcaa

SEQ ID NO: 5203649 - DNA, 25 bp, Homo sapien
gaaagcgttgcaagaggtagggagg

SEQ ID NO: 5203650 - DNA, 25 bp, Homo sapien
cgtggaaggaaagcgttgcaagagg

SEQ ID NO: 5203651 - DNA, 25 bp, Homo sapien
cattactaatacttagcaaatgttc

SEQ ID NO: 5203652 - DNA, 25 bp, Homo sapien
cttagcaaatgttcgtggaaggaaa

SEQ ID NO: 5203653 - DNA, 25 bp, Homo sapien
caacctgggtcagtatgatgcagga

SEQ ID NO: 5203654 - DNA, 25 bp, Homo sapien
tcaacctgggtcagtatgatgcagg

SEQ ID NO: 5203655 - DNA, 25 bp, Homo sapien
aagcaacacactttattccttcaag

SEQ ID NO: 5203656 - DNA, 25 bp, Homo sapien
tgtgctaccattctggcagtttttt

SEQ ID NO: 5203657 - DNA, 25 bp, Homo sapien
tcttgtttgggagtatagagttcca

SEQ ID NO: 5203658 - DNA, 25 bp, Homo sapien
tatctctatggggtataaatttctc

SEQ ID NO: 5203659 - DNA, 25 bp, Homo sapien
gcccggaaccgctgggcgcgggtga

SEQ ID NO: 5203660 - DNA, 25 bp, Homo sapien
ggcgcgaccattcgctgcggcgcat

SEQ ID NO: 5203661 - DNA, 25 bp, Homo sapien
gtgaaaggtcactcagagcggcgcc

SEQ ID NO: 5203662 - DNA, 25 bp, Homo sapien
taccgccttgtgctgccgcccggaa

SEQ ID NO: 5203663 - DNA, 25 bp, Homo sapien
gatggccagagagaacccgcagcct

SEQ ID NO: 5203664 - DNA, 25 bp, Homo sapien
tggccgtgggcgctgccgtggccgc

SEQ ID NO: 5203665 - DNA, 25 bp, Homo sapien
cgcttctttgggatggtgcccgact

SEQ ID NO: 5203666 - DNA, 25 bp, Homo sapien
actcattggtactcagagcctcccg

SEQ ID NO: 5203667 - DNA, 25 bp, Homo sapien
gggtctagtccactctctcgaaaga

SEQ ID NO: 5203668 - DNA, 25 bp, Homo sapien
tctcgaaagagaggtgggtccctac

SEQ ID NO: 5203669 - DNA, 25 bp, Homo sapien
ctttcgcgaatgagagagattccta

SEQ ID NO: 5203670 - DNA, 25 bp, Homo sapien
tccaacgagagttcttcaagcctgt

SEQ ID NO: 5203671 - DNA, 25 bp, Homo sapien
cacattgacagaatactctgggcag

SEQ ID NO: 5203672 - DNA, 25 bp, Homo sapien
acattgacagaatactctgggcagt

SEQ ID NO: 5203673 - DNA, 25 bp, Homo sapien
gacagaatactctgggcagtcacta

SEQ ID NO: 5203674 - DNA, 25 bp, Homo sapien
ctcacattgacagaatactctgggc

SEQ ID NO: 5203675 - DNA, 25 bp, Homo sapien
taccttcatctgataatattgtgat

SEQ ID NO: 5203676 - DNA, 25 bp, Homo sapien
gctaccttcatctgataatattgtg

SEQ ID NO: 5203677 - DNA, 25 bp, Homo sapien
aagctaccttcatctgataatattg

SEQ ID NO: 5203678 - DNA, 25 bp, Homo sapien
aaagctaccttcatctgataatatt

SEQ ID NO: 5203679 - DNA, 25 bp, Homo sapien
tggcccttcttattgaagatgaatt

SEQ ID NO: 5203680 - DNA, 25 bp, Homo sapien
tagaatcattatatccccatccatt

SEQ ID NO: 5203681 - DNA, 25 bp, Homo sapien
atttagaatcattatatccccatcc

SEQ ID NO: 5203682 - DNA, 25 bp, Homo sapien
gtcaattcaatttggcccttcttat

SEQ ID NO: 5203683 - DNA, 25 bp, Homo sapien
tatgctccacatttactccaagggt

SEQ ID NO: 5203684 - DNA, 25 bp, Homo sapien
ctccaagggtattttggatccattc

SEQ ID NO: 5203685 - DNA, 25 bp, Homo sapien
tttggatccattctttaaatgttgg

SEQ ID NO: 5203686 - DNA, 25 bp, Homo sapien
taaacccatgccactaagagggtac

SEQ ID NO: 5203687 - DNA, 25 bp, Homo sapien
ttcatttacaacagaaggaggtgta

SEQ ID NO: 5203688 - DNA, 25 bp, Homo sapien
gatcatctgcctcttgtgaatatga

SEQ ID NO: 5203689 - DNA, 25 bp, Homo sapien
tgagctctaaatactcgatcatctg

SEQ ID NO: 5203690 - DNA, 25 bp, Homo sapien
gtgtatcactaggatttaaggatgc

SEQ ID NO: 5203691 - DNA, 25 bp, Homo sapien
ttccctgagcaaaaatatctcatga

SEQ ID NO: 5203692 - DNA, 25 bp, Homo sapien
tatatcaggaattcgctcaaacatt

SEQ ID NO: 5203693 - DNA, 25 bp, Homo sapien
aaactatatcaggaattcgctcaaa

SEQ ID NO: 5203694 - DNA, 25 bp, Homo sapien
aattcgctcaaacattccttccctg

SEQ ID NO: 5203695 - DNA, 25 bp, Homo sapien
aaaccttctccaaatcttggtagag

SEQ ID NO: 5203696 - DNA, 25 bp, Homo sapien
aaaatgcctagaaggtacacttgga

SEQ ID NO: 5203697 - DNA, 25 bp, Homo sapien
tggcctattaggtttcttgtgggaa

SEQ ID NO: 5203698 - DNA, 25 bp, Homo sapien
ggctagactcgaacttcaggcaagt

SEQ ID NO: 5203699 - DNA, 25 bp, Homo sapien
caccaattggtatgatacaaagatt

SEQ ID NO: 5203700 - DNA, 25 bp, Homo sapien
cacaatcttaactacatcatcatgg

SEQ ID NO: 5203701 - DNA, 25 bp, Homo sapien
tatttgcaagctagattcacaatct

SEQ ID NO: 5203702 - DNA, 25 bp, Homo sapien
gattatatttgcaagctagattcac

SEQ ID NO: 5203703 - DNA, 25 bp, Homo sapien
taaattcttgactgatacttccata

SEQ ID NO: 5203704 - DNA, 25 bp, Homo sapien
ttcttgactgatacttccataagtt

SEQ ID NO: 5203705 - DNA, 25 bp, Homo sapien
aattcttgactgatacttccataag

SEQ ID NO: 5203706 - DNA, 25 bp, Homo sapien
ataaattcttgactgatacttccat

SEQ ID NO: 5203707 - DNA, 25 bp, Homo sapien
aagaaataattgttcttgtctcatc

SEQ ID NO: 5203708 - DNA, 25 bp, Homo sapien
tctgcaggacacatcaggccatatg

SEQ ID NO: 5203709 - DNA, 25 bp, Homo sapien
caggacacatcaggccatatgaaac

SEQ ID NO: 5203710 - DNA, 25 bp, Homo sapien
tgcaggacacatcaggccatatgaa

SEQ ID NO: 5203711 - DNA, 25 bp, Homo sapien
aaattgttctcatcaacccagagaa

SEQ ID NO: 5203712 - DNA, 25 bp, Homo sapien
tctcatcaacccagagaattcgatt

SEQ ID NO: 5203713 - DNA, 25 bp, Homo sapien
cagcctctacatgagctgtcaaatt

SEQ ID NO: 5203714 - DNA, 25 bp, Homo sapien
ccaactcttgtcctgttatgccagc

SEQ ID NO: 5203715 - DNA, 25 bp, Homo sapien
agatacccatcctcctacagtactg

SEQ ID NO: 5203716 - DNA, 25 bp, Homo sapien
caggtcctcgatattgccatagata

SEQ ID NO: 5203717 - DNA, 25 bp, Homo sapien
gggaatctggttcatgacctgtaca

SEQ ID NO: 5203718 - DNA, 25 bp, Homo sapien
tgcctgatgcgcgagtagataccca

SEQ ID NO: 5203719 - DNA, 25 bp, Homo sapien
ataaaaattgccaatgaggacccct

SEQ ID NO: 5203720 - DNA, 25 bp, Homo sapien
agggcaatttggctgtaaggatcca

SEQ ID NO: 5203721 - DNA, 25 bp, Homo sapien
caatggtgcaaacctgttcatttac

SEQ ID NO: 5203722 - DNA, 25 bp, Homo sapien
caaagattctcatggtgttagtgag

SEQ ID NO: 5203723 - DNA, 25 bp, Homo sapien
cagggcctgttgacatacgaggtcc

SEQ ID NO: 5203724 - DNA, 25 bp, Homo sapien
ggatatcagggcctgttgacatacg

SEQ ID NO: 5203725 - DNA, 25 bp, Homo sapien
tctattatacctctaggtgttacca

SEQ ID NO: 5203726 - DNA, 25 bp, Homo sapien
ttgacatacgaggtccttgacagct

SEQ ID NO: 5203727 - DNA, 25 bp, Homo sapien
tctataatggacacaacaactaggc

SEQ ID NO: 5203728 - DNA, 25 bp, Homo sapien
acacaacaactaggcacaagaccaa

SEQ ID NO: 5203729 - DNA, 25 bp, Homo sapien
caactaggcacaagaccaagaaggc

SEQ ID NO: 5203730 - DNA, 25 bp, Homo sapien
tttctataatggacacaacaactag

SEQ ID NO: 5203731 - DNA, 25 bp, Homo sapien
gtagcttctgttattacaccaagag

SEQ ID NO: 5203732 - DNA, 25 bp, Homo sapien
tattcagggactggtctgattttta

SEQ ID NO: 5203733 - DNA, 25 bp, Homo sapien
gcaatttctcttaaacaggctactc

SEQ ID NO: 5203734 - DNA, 25 bp, Homo sapien
tagggaaagctactgagccatactt

SEQ ID NO: 5203735 - DNA, 25 bp, Homo sapien
catgaggcgaatagatgccggagca

SEQ ID NO: 5203736 - DNA, 25 bp, Homo sapien
aactgcttgttgtccatgaggcgaa

SEQ ID NO: 5203737 - DNA, 25 bp, Homo sapien
aggcgaatagatgccggagcacatc

SEQ ID NO: 5203738 - DNA, 25 bp, Homo sapien
gtccatgaggcgaatagatgccgga

SEQ ID NO: 5203739 - DNA, 25 bp, Homo sapien
gaaacctgaggtttaagagcatgac

SEQ ID NO: 5203740 - DNA, 25 bp, Homo sapien
aatgatgtaaaaatagaggaaacct

SEQ ID NO: 5203741 - DNA, 25 bp, Homo sapien
ttttaatccgtccaaaaatgatgta

SEQ ID NO: 5203742 - DNA, 25 bp, Homo sapien
atgtaaaaatagaggaaacctgagg

SEQ ID NO: 5203743 - DNA, 25 bp, Homo sapien
agcaatatcatacacttgtttttca

SEQ ID NO: 5203744 - DNA, 25 bp, Homo sapien
gttgaagaaccttctcacgatcccc

SEQ ID NO: 5203745 - DNA, 25 bp, Homo sapien
tcaaacagtaatgtggctacactta

SEQ ID NO: 5203746 - DNA, 25 bp, Homo sapien
tcacgatccccctcaaacagtaatg

SEQ ID NO: 5203747 - DNA, 25 bp, Homo sapien
ctcttggcattatgaacttgaagcc

SEQ ID NO: 5203748 - DNA, 25 bp, Homo sapien
ttctcttggcattatgaacttgaag

SEQ ID NO: 5203749 - DNA, 25 bp, Homo sapien
tctcttggcattatgaacttgaagc

SEQ ID NO: 5203750 - DNA, 25 bp, Homo sapien
ctttctcttggcattatgaacttga

SEQ ID NO: 5203751 - DNA, 25 bp, Homo sapien
taaaaacacactagtagcacgcttt

SEQ ID NO: 5203752 - DNA, 25 bp, Homo sapien
ttataccagcacaaaacagtaagtg

SEQ ID NO: 5203753 - DNA, 25 bp, Homo sapien
cacatgggtccaaattaagtgttca

SEQ ID NO: 5203754 - DNA, 25 bp, Homo sapien
tattatcaccacagagtaagaggac

SEQ ID NO: 5203755 - DNA, 25 bp, Homo sapien
gttaaaatatcagcaattcccaaaa

SEQ ID NO: 5203756 - DNA, 25 bp, Homo sapien
agttaaaatatcagcaattcccaaa

SEQ ID NO: 5203757 - DNA, 25 bp, Homo sapien
atgtatgcaataacataggtcagca

SEQ ID NO: 5203758 - DNA, 25 bp, Homo sapien
taacataggtcagcaaataacctct

SEQ ID NO: 5203759 - DNA, 25 bp, Homo sapien
gcaataacataggtcagcaaataac

SEQ ID NO: 5203760 - DNA, 25 bp, Homo sapien
taggtcagcaaataacctctctgtc

SEQ ID NO: 5203761 - DNA, 25 bp, Homo sapien
caaaagattctcctaatacatagta

SEQ ID NO: 5203762 - DNA, 25 bp, Homo sapien
catctatcttatttgggccatttcc

SEQ ID NO: 5203763 - DNA, 25 bp, Homo sapien
gaaatgctgcagtgatttccagtga

SEQ ID NO: 5203764 - DNA, 25 bp, Homo sapien
tatgctccagtatcaacattttgct

SEQ ID NO: 5203765 - DNA, 25 bp, Homo sapien
gattcacagggaattgttccgtcct

SEQ ID NO: 5203766 - DNA, 25 bp, Homo sapien
ctttgcattcccttgttattctttc

SEQ ID NO: 5203767 - DNA, 25 bp, Homo sapien
tttgcattcccttgttattctttct

SEQ ID NO: 5203768 - DNA, 25 bp, Homo sapien
ttgcattcccttgttattctttctt

SEQ ID NO: 5203769 - DNA, 25 bp, Homo sapien
gcctctactccatggaaggaataca

SEQ ID NO: 5203770 - DNA, 25 bp, Homo sapien
aacaggtgaactgaggacgcagtgc

SEQ ID NO: 5203771 - DNA, 25 bp, Homo sapien
tgaaagtcaagacgacccaaatgat

SEQ ID NO: 5203772 - DNA, 25 bp, Homo sapien
agagttgtccgccaaaacaggtgaa

SEQ ID NO: 5203773 - DNA, 25 bp, Homo sapien
cacctgcatcgtaagtctgcgtcac

SEQ ID NO: 5203774 - DNA, 25 bp, Homo sapien
acctgcatcgtaagtctgcgtcacc

SEQ ID NO: 5203775 - DNA, 25 bp, Homo sapien
gtagatacaagcacctgcatcgtaa

SEQ ID NO: 5203776 - DNA, 25 bp, Homo sapien
aaatagaagtagatacaagcacctg

SEQ ID NO: 5203777 - DNA, 25 bp, Homo sapien
gttcaaatacggtcagtgggtcact

SEQ ID NO: 5203778 - DNA, 25 bp, Homo sapien
tttgttcaaatacggtcagtgggtc

SEQ ID NO: 5203779 - DNA, 25 bp, Homo sapien
ctcagtttgttcaaatacggtcagt

SEQ ID NO: 5203780 - DNA, 25 bp, Homo sapien
cagtttgttcaaatacggtcagtgg

SEQ ID NO: 5203781 - DNA, 25 bp, Homo sapien
tgaaattaatcaacagctgtaaaag

SEQ ID NO: 5203782 - DNA, 25 bp, Homo sapien
catggtgatgtgacaggctccctcc

SEQ ID NO: 5203783 - DNA, 25 bp, Homo sapien
ctccatggtgatgtgacaggctccc

SEQ ID NO: 5203784 - DNA, 25 bp, Homo sapien
aggctccctccattagcaaggattt

SEQ ID NO: 5203785 - DNA, 25 bp, Homo sapien
tccatggtgatgtgacaggctccct

SEQ ID NO: 5203786 - DNA, 25 bp, Homo sapien
cagttccagactacatctgttttct

SEQ ID NO: 5203787 - DNA, 25 bp, Homo sapien
tatatttcctatagcctccagttcc

SEQ ID NO: 5203788 - DNA, 25 bp, Homo sapien
catgattgtaggcagacaaaccagc

SEQ ID NO: 5203789 - DNA, 25 bp, Homo sapien
caaaaccagagttaacatagctcca

SEQ ID NO: 5203790 - DNA, 25 bp, Homo sapien
gacgagcagtgaataccagtctcca

SEQ ID NO: 5203791 - DNA, 25 bp, Homo sapien
tgtggttatggatgtaattgtcctg

SEQ ID NO: 5203792 - DNA, 25 bp, Homo sapien
gatgtaattgtcctgaaaagactgc

SEQ ID NO: 5203793 - DNA, 25 bp, Homo sapien
gggtgacgagcagtgaataccagtc

SEQ ID NO: 5203794 - DNA, 25 bp, Homo sapien
catactactataagctgcccacact

SEQ ID NO: 5203795 - DNA, 25 bp, Homo sapien
accatactactataagctgcccaca

SEQ ID NO: 5203796 - DNA, 25 bp, Homo sapien
ttaccatactactataagctgccca

SEQ ID NO: 5203797 - DNA, 25 bp, Homo sapien
taccatactactataagctgcccac

SEQ ID NO: 5203798 - DNA, 25 bp, Homo sapien
gattagactttataaggtctcttca

SEQ ID NO: 5203799 - DNA, 25 bp, Homo sapien
caactactctgtgaatggtaaaagg

SEQ ID NO: 5203800 - DNA, 25 bp, Homo sapien
ttataaggtctcttcaactctaata

SEQ ID NO: 5203801 - DNA, 25 bp, Homo sapien
tttttcacttgcaaatggattagac

SEQ ID NO: 5203802 - DNA, 25 bp, Homo sapien
gcccaatgtattcccaggggaagtc

SEQ ID NO: 5203803 - DNA, 25 bp, Homo sapien
taagcccaatgtattcccaggggaa

SEQ ID NO: 5203804 - DNA, 25 bp, Homo sapien
atcaagctcattaagcccaatgtat

SEQ ID NO: 5203805 - DNA, 25 bp, Homo sapien
tatcaagctcattaagcccaatgta

SEQ ID NO: 5203806 - DNA, 25 bp, Homo sapien
tcttgtgaccatgagtgaacaaaca

SEQ ID NO: 5203807 - DNA, 25 bp, Homo sapien
atttgatttattgagcccaccagac

SEQ ID NO: 5203808 - DNA, 25 bp, Homo sapien
tatttgatttattgagcccaccaga

SEQ ID NO: 5203809 - DNA, 25 bp, Homo sapien
ttatttgatttattgagcccaccag

SEQ ID NO: 5203810 - DNA, 25 bp, Homo sapien
tagccattgcttccgtaacttgccc

SEQ ID NO: 5203811 - DNA, 25 bp, Homo sapien
tattggggtccacatattccttgac

SEQ ID NO: 5203812 - DNA, 25 bp, Homo sapien
tattccttgacagacttcagcatcc

SEQ ID NO: 5203813 - DNA, 25 bp, Homo sapien
tcccaaagccgacatcagagatact

SEQ ID NO: 5203814 - DNA, 25 bp, Homo sapien
cttttaaaaagaggctagctgagca

SEQ ID NO: 5203815 - DNA, 25 bp, Homo sapien
aatggcctactcacactagactatg

SEQ ID NO: 5203816 - DNA, 25 bp, Homo sapien
gacaaccgctgaatgtaaaatgatg

SEQ ID NO: 5203817 - DNA, 25 bp, Homo sapien
aaaaagtaggccaagcaccttacag

SEQ ID NO: 5203818 - DNA, 25 bp, Homo sapien
tgctacatacacagacaatgcatcc

SEQ ID NO: 5203819 - DNA, 25 bp, Homo sapien
tacttccagtgagacattagtacct

SEQ ID NO: 5203820 - DNA, 25 bp, Homo sapien
tataaaaggtatcaaactgcccaaa

SEQ ID NO: 5203821 - DNA, 25 bp, Homo sapien
tccaactaggtcaaatatcaagggc

SEQ ID NO: 5203822 - DNA, 25 bp, Homo sapien
tttaaaaattactcagaaacatata

SEQ ID NO: 5203823 - DNA, 25 bp, Homo sapien
ttaaaaattactcagaaacatatac

SEQ ID NO: 5203824 - DNA, 25 bp, Homo sapien
taccaagtctatactgaggcacctc

SEQ ID NO: 5203825 - DNA, 25 bp, Homo sapien
caaaggaaagtctgggtgctaacat

SEQ ID NO: 5203826 - DNA, 25 bp, Homo sapien
gctgaaattgaactccctgggaaag

SEQ ID NO: 5203827 - DNA, 25 bp, Homo sapien
cacaggcaaactagaaggctcccaa

SEQ ID NO: 5203828 - DNA, 25 bp, Homo sapien
cagccccatatgaacagccaaggga

SEQ ID NO: 5203829 - DNA, 25 bp, Homo sapien
aagctgtccttaactcctgtctgag

SEQ ID NO: 5203830 - DNA, 25 bp, Homo sapien
gaacatgaagcctagagcaaagcca

SEQ ID NO: 5203831 - DNA, 25 bp, Homo sapien
tctggattcttcaaacctaaatggg

SEQ ID NO: 5203832 - DNA, 25 bp, Homo sapien
ccaaggttcaaaagggagtgcttca

SEQ ID NO: 5203833 - DNA, 25 bp, Homo sapien
tgtgtatcagagtacaggtccacca

SEQ ID NO: 5203834 - DNA, 25 bp, Homo sapien
gagtgcttcaggttcataggagtct

SEQ ID NO: 5203835 - DNA, 25 bp, Homo sapien
aaaatcccaacaaggcactgtgagc

SEQ ID NO: 5203836 - DNA, 25 bp, Homo sapien
tactgccttggaggaagactcagga

SEQ ID NO: 5203837 - DNA, 25 bp, Homo sapien
gaaggcaccatcacacgaaaaagga

SEQ ID NO: 5203838 - DNA, 25 bp, Homo sapien
tcagtcggaattgacaaagctatgc

SEQ ID NO: 5203839 - DNA, 25 bp, Homo sapien
aaggattactacagtcctggcagga

SEQ ID NO: 5203840 - DNA, 25 bp, Homo sapien
aaagcacggaatactgactatgtgt

SEQ ID NO: 5203841 - DNA, 25 bp, Homo sapien
tacagtctaagaaaaccagtaagag

SEQ ID NO: 5203842 - DNA, 25 bp, Homo sapien
gactatgtgttgagcccttgtggaa

SEQ ID NO: 5203843 - DNA, 25 bp, Homo sapien
ccagtaagaggagaatctgaacaca

SEQ ID NO: 5203844 - DNA, 25 bp, Homo sapien
tccttgaatattgagcagcactagc

SEQ ID NO: 5203845 - DNA, 25 bp, Homo sapien
gcagcactagccagcatctttcaat

SEQ ID NO: 5203846 - DNA, 25 bp, Homo sapien
tgaaaactggataaggctgtagctg

SEQ ID NO: 5203847 - DNA, 25 bp, Homo sapien
tgtcaatcaggcaggcagtaagcag

SEQ ID NO: 5203848 - DNA, 25 bp, Homo sapien
acaggtgaggtcaccgagcatggca

SEQ ID NO: 5203849 - DNA, 25 bp, Homo sapien
ccatccagaattggcctgggtccac

SEQ ID NO: 5203850 - DNA, 25 bp, Homo sapien
caggtgaggtcaccgagcatggcat

SEQ ID NO: 5203851 - DNA, 25 bp, Homo sapien
gcccacaggtcccaaggcacattcc

SEQ ID NO: 5203852 - DNA, 25 bp, Homo sapien
ccacaggtcccaaggcacattccat

SEQ ID NO: 5203853 - DNA, 25 bp, Homo sapien
cccacaggtcccaaggcacattcca

SEQ ID NO: 5203854 - DNA, 25 bp, Homo sapien
gacatcaggcctttcacattcgaag

SEQ ID NO: 5203855 - DNA, 25 bp, Homo sapien
gagactcagtgatcctgagtcaggg

SEQ ID NO: 5203856 - DNA, 25 bp, Homo sapien
tccgttgaaggtcacatcagtgagg

SEQ ID NO: 5203857 - DNA, 25 bp, Homo sapien
cattcgaaggatccgttgaaggtca

SEQ ID NO: 5203858 - DNA, 25 bp, Homo sapien
gagttggatccactgaagtgctgcc

SEQ ID NO: 5203859 - DNA, 25 bp, Homo sapien
tgtggtctggatgagaacttgagaa

SEQ ID NO: 5203860 - DNA, 25 bp, Homo sapien
gagaatgggctgtgagtttctacca

SEQ ID NO: 5203861 - DNA, 25 bp, Homo sapien
tgaggtagtggttttctggatccca

SEQ ID NO: 5203862 - DNA, 25 bp, Homo sapien
acagagaactggtgcatgagaagct

SEQ ID NO: 5203863 - DNA, 25 bp, Homo sapien
ctgttgaagacaggcactctcagtg

SEQ ID NO: 5203864 - DNA, 25 bp, Homo sapien
gctgttgaagacaggcactctcagt

SEQ ID NO: 5203865 - DNA, 25 bp, Homo sapien
gagaactggtgcatgagaagctgtt

SEQ ID NO: 5203866 - DNA, 25 bp, Homo sapien
agccccagtgtgctaacactttgaa

SEQ ID NO: 5203867 - DNA, 25 bp, Homo sapien
ccccagtgtgctaacactttgaaac

SEQ ID NO: 5203868 - DNA, 25 bp, Homo sapien
cagccccagtgtgctaacactttga

SEQ ID NO: 5203869 - DNA, 25 bp, Homo sapien
gccccagtgtgctaacactttgaaa

SEQ ID NO: 5203870 - DNA, 25 bp, Homo sapien
agtccatacccatgttcagaactgg

SEQ ID NO: 5203871 - DNA, 25 bp, Homo sapien
ttttatgctgacattgctcgtcctg

SEQ ID NO: 5203872 - DNA, 25 bp, Homo sapien
tcgtcctgtaagtccatacccatgt

SEQ ID NO: 5203873 - DNA, 25 bp, Homo sapien
cattgctcgtcctgtaagtccatac

SEQ ID NO: 5203874 - DNA, 25 bp, Homo sapien
ggctggtgtagtacattcgcaaaca

SEQ ID NO: 5203875 - DNA, 25 bp, Homo sapien
tccaaggctggtgtagtacattcgc

SEQ ID NO: 5203876 - DNA, 25 bp, Homo sapien
ggtgtagtacattcgcaaacacatt

SEQ ID NO: 5203877 - DNA, 25 bp, Homo sapien
agtacattcgcaaacacattccaga

SEQ ID NO: 5203878 - DNA, 25 bp, Homo sapien
tgcactggcgtagttggacagaacc

SEQ ID NO: 5203879 - DNA, 25 bp, Homo sapien
ttcatagcggacttcatggccacca

SEQ ID NO: 5203880 - DNA, 25 bp, Homo sapien
aacatgcatgttggtgagtagtccc

SEQ ID NO: 5203881 - DNA, 25 bp, Homo sapien
ggagtcacagcatagttctcagcaa

SEQ ID NO: 5203882 - DNA, 25 bp, Homo sapien
gaagtaatttccatagggttgtcaa

SEQ ID NO: 5203883 - DNA, 25 bp, Homo sapien
aatttccatagggttgtcaactgag

SEQ ID NO: 5203884 - DNA, 25 bp, Homo sapien
cctccgtacagtgtgacagctgggc

SEQ ID NO: 5203885 - DNA, 25 bp, Homo sapien
actccctcctccgtacagtgtgaca

SEQ ID NO: 5203886 - DNA, 25 bp, Homo sapien
tccatctgtcgttccctccctttat

SEQ ID NO: 5203887 - DNA, 25 bp, Homo sapien
gtcgttccctccctttatgattctc

SEQ ID NO: 5203888 - DNA, 25 bp, Homo sapien
gttccctccctttatgattctccat

SEQ ID NO: 5203889 - DNA, 25 bp, Homo sapien
aggccacctccatctgtcgttccct

SEQ ID NO: 5203890 - DNA, 25 bp, Homo sapien
ctggaagattaccttgatggccaca

SEQ ID NO: 5203891 - DNA, 25 bp, Homo sapien
agaggcctggaagattaccttgatg

SEQ ID NO: 5203892 - DNA, 25 bp, Homo sapien
gaaatgagaaggcacggggctatcc

SEQ ID NO: 5203893 - DNA, 25 bp, Homo sapien
gaaggcacggggctatccagcaagc

SEQ ID NO: 5203894 - DNA, 25 bp, Homo sapien
gaagtgagtcctgatccaactactg

SEQ ID NO: 5203895 - DNA, 25 bp, Homo sapien
gacagatgttctgcaatcactcctg

SEQ ID NO: 5203896 - DNA, 25 bp, Homo sapien
gagacagaagtgagtcctgatccaa

SEQ ID NO: 5203897 - DNA, 25 bp, Homo sapien
cctgatccaactactgacagatgtt

SEQ ID NO: 5203898 - DNA, 25 bp, Homo sapien
tctgaaaggagttcaattccactag

SEQ ID NO: 5203899 - DNA, 25 bp, Homo sapien
tgtcttctgaaaggagttcaattcc

SEQ ID NO: 5203900 - DNA, 25 bp, Homo sapien
ccctggtaggctcaactgcaggttc

SEQ ID NO: 5203901 - DNA, 25 bp, Homo sapien
tccctggaacgcaacctgagtaagt

SEQ ID NO: 5203902 - DNA, 25 bp, Homo sapien
tggtaagaccctggtaggctcaact

SEQ ID NO: 5203903 - DNA, 25 bp, Homo sapien
ggctttgcctagatacaaatttgag

SEQ ID NO: 5203904 - DNA, 25 bp, Homo sapien
aaaacccaatggcttcgctggattt

SEQ ID NO: 5203905 - DNA, 25 bp, Homo sapien
cctctttaccactcagcttttgtaa

SEQ ID NO: 5203906 - DNA, 25 bp, Homo sapien
cagcttttgtaattccttggcttcc

SEQ ID NO: 5203907 - DNA, 25 bp, Homo sapien
caatggcttcgctggatttggtggt

SEQ ID NO: 5203908 - DNA, 25 bp, Homo sapien
taatctttccaggacccaaatgaga

SEQ ID NO: 5203909 - DNA, 25 bp, Homo sapien
cagaggaactcaatttggaagtaaa

SEQ ID NO: 5203910 - DNA, 25 bp, Homo sapien
agaggaactcaatttggaagtaaag

SEQ ID NO: 5203911 - DNA, 25 bp, Homo sapien
tccaggacccaaatgagatttcctc

SEQ ID NO: 5203912 - DNA, 25 bp, Homo sapien
gctgggtgacggtgctcaatctttc

SEQ ID NO: 5203913 - DNA, 25 bp, Homo sapien
cacagggcagtgttatagataacca

SEQ ID NO: 5203914 - DNA, 25 bp, Homo sapien
tctgcacaaatatctgcacagggca

SEQ ID NO: 5203915 - DNA, 25 bp, Homo sapien
agtgcacagatagactggaccagcg

SEQ ID NO: 5203916 - DNA, 25 bp, Homo sapien
tataaaactactggctggaactgct

SEQ ID NO: 5203917 - DNA, 25 bp, Homo sapien
tggaactgctgtaaggggaatccct

SEQ ID NO: 5203918 - DNA, 25 bp, Homo sapien
ggacttgggtttgcctccttgccag

SEQ ID NO: 5203919 - DNA, 25 bp, Homo sapien
ccaggaattggattcctggcagcag

SEQ ID NO: 5203920 - DNA, 25 bp, Homo sapien
caggtcagcgcctgtgtcttgcaca

SEQ ID NO: 5203921 - DNA, 25 bp, Homo sapien
tgtgggtcccttccatgcagattag

SEQ ID NO: 5203922 - DNA, 25 bp, Homo sapien
tgctgtgggcaacatgtggcttgct

SEQ ID NO: 5203923 - DNA, 25 bp, Homo sapien
acatacttagcctgttggcctgctg

SEQ ID NO: 5203924 - DNA, 25 bp, Homo sapien
gaatttttgcttacagccgtagcta

SEQ ID NO: 5203925 - DNA, 25 bp, Homo sapien
tatgaatatatatagggtggtcccc

SEQ ID NO: 5203926 - DNA, 25 bp, Homo sapien
gatgaaccaccgttccattcagtag

SEQ ID NO: 5203927 - DNA, 25 bp, Homo sapien
taacatgaaggcctttagatgccag

SEQ ID NO: 5203928 - DNA, 25 bp, Homo sapien
gaaggcgagtgaccgtgcgtccaca

SEQ ID NO: 5203929 - DNA, 25 bp, Homo sapien
atgcagtgcggccacgcctgcgcag

SEQ ID NO: 5203930 - DNA, 25 bp, Homo sapien
ggtcggtgcaacagggactacgcct

SEQ ID NO: 5203931 - DNA, 25 bp, Homo sapien
cagcggcgccacaggaacgatgcat

SEQ ID NO: 5203932 - DNA, 25 bp, Homo sapien
ccacacccaccttatatgtcctttt

SEQ ID NO: 5203933 - DNA, 25 bp, Homo sapien
aaatggtagtcattaatttagaagt

SEQ ID NO: 5203934 - DNA, 25 bp, Homo sapien
gattatctgatatcacacatatccc

SEQ ID NO: 5203935 - DNA, 25 bp, Homo sapien
gagatgtctatgcatttccaggtat

SEQ ID NO: 5203936 - DNA, 25 bp, Homo sapien
ttcttgccgttttattggcttcact

SEQ ID NO: 5203937 - DNA, 25 bp, Homo sapien
cactggtagcaaggggagttcaaca

SEQ ID NO: 5203938 - DNA, 25 bp, Homo sapien
cattttcttgccgttttattggctt

SEQ ID NO: 5203939 - DNA, 25 bp, Homo sapien
agcaacatccactggtagcaagggg

SEQ ID NO: 5203940 - DNA, 25 bp, Homo sapien
tctcttgtccctcctgctgaagaat

SEQ ID NO: 5203941 - DNA, 25 bp, Homo sapien
gttctcttgtccctcctgctgaaga

SEQ ID NO: 5203942 - DNA, 25 bp, Homo sapien
ttctcttgtccctcctgctgaagaa

SEQ ID NO: 5203943 - DNA, 25 bp, Homo sapien
ggacaggcacacgaattcatgagaa

SEQ ID NO: 5203944 - DNA, 25 bp, Homo sapien
taactgctggacaggcacacgaatt

SEQ ID NO: 5203945 - DNA, 25 bp, Homo sapien
acgaattcatgagaatttcagggcc

SEQ ID NO: 5203946 - DNA, 25 bp, Homo sapien
atctgtaactgctggacaggcacac

SEQ ID NO: 5203947 - DNA, 25 bp, Homo sapien
cacaaccttgagtttcaaaagccat

SEQ ID NO: 5203948 - DNA, 25 bp, Homo sapien
caaccttgagtttcaaaagccattg

SEQ ID NO: 5203949 - DNA, 25 bp, Homo sapien
accttgagtttcaaaagccattgaa

SEQ ID NO: 5203950 - DNA, 25 bp, Homo sapien
ttacacaaccttgagtttcaaaagc

SEQ ID NO: 5203951 - DNA, 25 bp, Homo sapien
catgcgtatagtcccatcctcaagg

SEQ ID NO: 5203952 - DNA, 25 bp, Homo sapien
tactctgccttgaataggtcttttg

SEQ ID NO: 5203953 - DNA, 25 bp, Homo sapien
ccctatattagtagggtctcctgac

SEQ ID NO: 5203954 - DNA, 25 bp, Homo sapien
gataaggtccacagaatgtttgagc

SEQ ID NO: 5203955 - DNA, 25 bp, Homo sapien
gagtacacgagtcaactcacgacag

SEQ ID NO: 5203956 - DNA, 25 bp, Homo sapien
gcttttgggagtacacgagtcaact

SEQ ID NO: 5203957 - DNA, 25 bp, Homo sapien
tcaactcacgacagagaggttgaga

SEQ ID NO: 5203958 - DNA, 25 bp, Homo sapien
cacgagtcaactcacgacagagagg

SEQ ID NO: 5203959 - DNA, 25 bp, Homo sapien
tcaagagaaggacccctggtacaca

SEQ ID NO: 5203960 - DNA, 25 bp, Homo sapien
ttttgtgaccttcaagagaaggacc

SEQ ID NO: 5203961 - DNA, 25 bp, Homo sapien
tgaccttcaagagaaggacccctgg

SEQ ID NO: 5203962 - DNA, 25 bp, Homo sapien
ctatggttgtgatgattttgtgacc

SEQ ID NO: 5203963 - DNA, 25 bp, Homo sapien
ctgagatgcatgagacaaatcccaa

SEQ ID NO: 5203964 - DNA, 25 bp, Homo sapien
cgagatgtgctaatgtttccagctc

SEQ ID NO: 5203965 - DNA, 25 bp, Homo sapien
ccagtgaattctgagcgagatgtgc

SEQ ID NO: 5203966 - DNA, 25 bp, Homo sapien
gatgcatgagacaaatcccaaccag

SEQ ID NO: 5203967 - DNA, 25 bp, Homo sapien
gttataactagatagcccagtcttc

SEQ ID NO: 5203968 - DNA, 25 bp, Homo sapien
taacattaagggagggcaagttata

SEQ ID NO: 5203969 - DNA, 25 bp, Homo sapien
gagggcaagttataactagatagcc

SEQ ID NO: 5203970 - DNA, 25 bp, Homo sapien
taagggagggcaagttataactaga

SEQ ID NO: 5203971 - DNA, 25 bp, Homo sapien
ccaaagggattgcttggctccaccc

SEQ ID NO: 5203972 - DNA, 25 bp, Homo sapien
gatattttcctcagatttggcagct

SEQ ID NO: 5203973 - DNA, 25 bp, Homo sapien
cagtgaccttctccccaatttggag

SEQ ID NO: 5203974 - DNA, 25 bp, Homo sapien
tttcctacatctctggaccaaaggg

SEQ ID NO: 5203975 - DNA, 25 bp, Homo sapien
attctctgggagatgttctctggtt

SEQ ID NO: 5203976 - DNA, 25 bp, Homo sapien
tgtgaggtgttctaccatgcagggg

SEQ ID NO: 5203977 - DNA, 25 bp, Homo sapien
cctggtgattgtggtttgaatgaac

SEQ ID NO: 5203978 - DNA, 25 bp, Homo sapien
gattgtggtttgaatgaactgactg

SEQ ID NO: 5203979 - DNA, 25 bp, Homo sapien
caacatctagagtaattcttatctc

SEQ ID NO: 5203980 - DNA, 25 bp, Homo sapien
gggccttgtggtctctaatcttctg

SEQ ID NO: 5203981 - DNA, 25 bp, Homo sapien
ttcccaggccagatgctcatgagtt

SEQ ID NO: 5203982 - DNA, 25 bp, Homo sapien
agcatcttccggctctcaacacgag

SEQ ID NO: 5203983 - DNA, 25 bp, Homo sapien
tcattctcaggcagtcattccacca

SEQ ID NO: 5203984 - DNA, 25 bp, Homo sapien
tctcactggagaatggttcattctc

SEQ ID NO: 5203985 - DNA, 25 bp, Homo sapien
tggcccaactctatggaacctctgc

SEQ ID NO: 5203986 - DNA, 25 bp, Homo sapien
tccttcaaagtgaggtacaggcctg

SEQ ID NO: 5203987 - DNA, 25 bp, Homo sapien
tcctctttcaggagtggctctgccc

SEQ ID NO: 5203988 - DNA, 25 bp, Homo sapien
accacgccgtgatgatccttcaaag

SEQ ID NO: 5203989 - DNA, 25 bp, Homo sapien
gagtctttccaagaattgcaggtca

SEQ ID NO: 5203990 - DNA, 25 bp, Homo sapien
aattgccctttcaatatcgaagccc

SEQ ID NO: 5203991 - DNA, 25 bp, Homo sapien
tgttgcacttagatgcagtccttgc

SEQ ID NO: 5203992 - DNA, 25 bp, Homo sapien
acttgtattcttgaaccgacggtgg

SEQ ID NO: 5203993 - DNA, 25 bp, Homo sapien
tgtaagcttattagacaagcaacca

SEQ ID NO: 5203994 - DNA, 25 bp, Homo sapien
tatcactaagattcgcctagcaaat

SEQ ID NO: 5203995 - DNA, 25 bp, Homo sapien
taatctctcgacatagtaactactg

SEQ ID NO: 5203996 - DNA, 25 bp, Homo sapien
caacagccaagacaaaggcatatag

SEQ ID NO: 5203997 - DNA, 25 bp, Homo sapien
caaattcctttgtagactgtaacac

SEQ ID NO: 5203998 - DNA, 25 bp, Homo sapien
taatcagaatcctaatctcaacaga

SEQ ID NO: 5203999 - DNA, 25 bp, Homo sapien
tctacatgatagaataaccaactct

SEQ ID NO: 5204000 - DNA, 25 bp, Homo sapien
taacactggaagttacagagagatc

SEQ ID NO: 5204001 - DNA, 25 bp, Homo sapien
ggctgatgttctgtcctctgactgc

SEQ ID NO: 5204002 - DNA, 25 bp, Homo sapien
tattgataattcaaactagaaagca

SEQ ID NO: 5204003 - DNA, 25 bp, Homo sapien
cattttattgataattcaaactaga

SEQ ID NO: 5204004 - DNA, 25 bp, Homo sapien
atttaccagcttgaggctgatgttc

SEQ ID NO: 5204005 - DNA, 25 bp, Homo sapien
caaagaacacgtgcaagctacagga

SEQ ID NO: 5204006 - DNA, 25 bp, Homo sapien
gctcagagtttagctgtatcagggt

SEQ ID NO: 5204007 - DNA, 25 bp, Homo sapien
gaaacaaggcaaagtggtgtattcc

SEQ ID NO: 5204008 - DNA, 25 bp, Homo sapien
caccagagatgtgctgtctgatcct

SEQ ID NO: 5204009 - DNA, 25 bp, Homo sapien
gcagagattttagggccttctgctc

SEQ ID NO: 5204010 - DNA, 25 bp, Homo sapien
tcaaggctggcagagattttagggc

SEQ ID NO: 5204011 - DNA, 25 bp, Homo sapien
tggcagagattttagggccttctgc

SEQ ID NO: 5204012 - DNA, 25 bp, Homo sapien
ggctggcagagattttagggccttc

SEQ ID NO: 5204013 - DNA, 25 bp, Homo sapien
tgctgtcctcctgccaagaaggacc

SEQ ID NO: 5204014 - DNA, 25 bp, Homo sapien
cctagtgctctccagcataaggcct

SEQ ID NO: 5204015 - DNA, 25 bp, Homo sapien
ggacagggtgttcctagaattccta

SEQ ID NO: 5204016 - DNA, 25 bp, Homo sapien
tgttcctagaattcctagtgctctc

SEQ ID NO: 5204017 - DNA, 25 bp, Homo sapien
ccttcaagagtaggagacccagaac

SEQ ID NO: 5204018 - DNA, 25 bp, Homo sapien
tccacagcaaactccctgtgccacc

SEQ ID NO: 5204019 - DNA, 25 bp, Homo sapien
caagagtaggagacccagaaccatt

SEQ ID NO: 5204020 - DNA, 25 bp, Homo sapien
taggagacccagaaccattttggac

SEQ ID NO: 5204021 - DNA, 25 bp, Homo sapien
caaaatggaaacttcagcattggat

SEQ ID NO: 5204022 - DNA, 25 bp, Homo sapien
tgctacaggcaatacgataaaaggc

SEQ ID NO: 5204023 - DNA, 25 bp, Homo sapien
tgaaatccccgaatgctacaggcaa

SEQ ID NO: 5204024 - DNA, 25 bp, Homo sapien
caggccatatgttgcctgagaaccc

SEQ ID NO: 5204025 - DNA, 25 bp, Homo sapien
tctgaatgacatcgtcccggaaatc

SEQ ID NO: 5204026 - DNA, 25 bp, Homo sapien
gaatttgagatacctggaatttagt

SEQ ID NO: 5204027 - DNA, 25 bp, Homo sapien
atataatctgaatgacatcgtcccg

SEQ ID NO: 5204028 - DNA, 25 bp, Homo sapien
gaatgacatcgtcccggaaatccat

SEQ ID NO: 5204029 - DNA, 25 bp, Homo sapien
ggtactggcaatgggcttggggcat

SEQ ID NO: 5204030 - DNA, 25 bp, Homo sapien
gtactggcaatgggcttggggcatt

SEQ ID NO: 5204031 - DNA, 25 bp, Homo sapien
tactggcaatgggcttggggcattt

SEQ ID NO: 5204032 - DNA, 25 bp, Homo sapien
gatgtctgggttaccaccctttgtc

SEQ ID NO: 5204033 - DNA, 25 bp, Homo sapien
ttagcaagactcgagagatgtctgg

SEQ ID NO: 5204034 - DNA, 25 bp, Homo sapien
agtcaggaataaacttggaagagac

SEQ ID NO: 5204035 - DNA, 25 bp, Homo sapien
tttgtctttgtccagcagcaatgat

SEQ ID NO: 5204036 - DNA, 25 bp, Homo sapien
aactgcactcctcaccagtgctgtg

SEQ ID NO: 5204037 - DNA, 25 bp, Homo sapien
cactccggaattcccacgggcataa

SEQ ID NO: 5204038 - DNA, 25 bp, Homo sapien
ttccaagtgaccacccataaatcct

SEQ ID NO: 5204039 - DNA, 25 bp, Homo sapien
cagagcagcgttctatgatgtgggc

SEQ ID NO: 5204040 - DNA, 25 bp, Homo sapien
tctgaaaagccgtctggatcacata

SEQ ID NO: 5204041 - DNA, 25 bp, Homo sapien
gacatcttctttaccactgacggtg

SEQ ID NO: 5204042 - DNA, 25 bp, Homo sapien
gaggaagcattttactccatttggg

SEQ ID NO: 5204043 - DNA, 25 bp, Homo sapien
tgtctcttagcatgacagtctcaat

SEQ ID NO: 5204044 - DNA, 25 bp, Homo sapien
cacaggacattgaatgttgggctga

SEQ ID NO: 5204045 - DNA, 25 bp, Homo sapien
ttacacaggacattgaatgttgggc

SEQ ID NO: 5204046 - DNA, 25 bp, Homo sapien
caggacattgaatgttgggctgaga

SEQ ID NO: 5204047 - DNA, 25 bp, Homo sapien
gacattgaatgttgggctgagaaac

SEQ ID NO: 5204048 - DNA, 25 bp, Homo sapien
tttcctctggaatccgtatagagct

SEQ ID NO: 5204049 - DNA, 25 bp, Homo sapien
gatgtttcctctggaatccgtatag

SEQ ID NO: 5204050 - DNA, 25 bp, Homo sapien
tgtttctggttgatgtttcctctgg

SEQ ID NO: 5204051 - DNA, 25 bp, Homo sapien
ctctggaatccgtatagagctcatc

SEQ ID NO: 5204052 - DNA, 25 bp, Homo sapien
ctgaatccaaacacgtcctagaaga

SEQ ID NO: 5204053 - DNA, 25 bp, Homo sapien
tgggttaaaaagcttacagacagta

SEQ ID NO: 5204054 - DNA, 25 bp, Homo sapien
ggactttaggttcattgttcagcca

SEQ ID NO: 5204055 - DNA, 25 bp, Homo sapien
gaccttcaatccctcagatcctgag

SEQ ID NO: 5204056 - DNA, 25 bp, Homo sapien
catgctaatcttctattgtgccaat

SEQ ID NO: 5204057 - DNA, 25 bp, Homo sapien
ccatgctaatcttctattgtgccaa

SEQ ID NO: 5204058 - DNA, 25 bp, Homo sapien
gctaatcttctattgtgccaatttt

SEQ ID NO: 5204059 - DNA, 25 bp, Homo sapien
ggaatgcctcatgaatttgctcatc

SEQ ID NO: 5204060 - DNA, 25 bp, Homo sapien
taagtcggggagaatgcgctcctca

SEQ ID NO: 5204061 - DNA, 25 bp, Homo sapien
agaatgcgctcctcatggagcccag

SEQ ID NO: 5204062 - DNA, 25 bp, Homo sapien
ggagcccagtgccagtattgtgtag

SEQ ID NO: 5204063 - DNA, 25 bp, Homo sapien
tcttaatgcatctggtaagtcgggg

SEQ ID NO: 5204064 - DNA, 25 bp, Homo sapien
aagagccaatgttgaccttgggtga

SEQ ID NO: 5204065 - DNA, 25 bp, Homo sapien
aaagagccaatgttgaccttgggtg

SEQ ID NO: 5204066 - DNA, 25 bp, Homo sapien
gagacctatgccatcaggttccaca

SEQ ID NO: 5204067 - DNA, 25 bp, Homo sapien
gctgcaggtgagacctatgccatca

SEQ ID NO: 5204068 - DNA, 25 bp, Homo sapien
ggtgagacctatgccatcaggttcc

SEQ ID NO: 5204069 - DNA, 25 bp, Homo sapien
tgcaggtgagacctatgccatcagg

SEQ ID NO: 5204070 - DNA, 25 bp, Homo sapien
cctcgaagttgaggcgtggactctg

SEQ ID NO: 5204071 - DNA, 25 bp, Homo sapien
cgtgaggtgctctttctggatcgcc

SEQ ID NO: 5204072 - DNA, 25 bp, Homo sapien
cattggctggcgatcactggtcgcg

SEQ ID NO: 5204073 - DNA, 25 bp, Homo sapien
gccaggtggctgttccaggtgactg

SEQ ID NO: 5204074 - DNA, 25 bp, Homo sapien
acccaagcctttgccggctcggtgc

SEQ ID NO: 5204075 - DNA, 25 bp, Homo sapien
gagaaagaggagtccggcgccaggc

SEQ ID NO: 5204076 - DNA, 25 bp, Homo sapien
tcggtgctccgcttccgggagaaag

SEQ ID NO: 5204077 - DNA, 25 bp, Homo sapien
tgcggtgtctgccaccgctgctgtc

SEQ ID NO: 5204078 - DNA, 25 bp, Homo sapien
tccctcagcaccgactcaggtgtgt

SEQ ID NO: 5204079 - DNA, 25 bp, Homo sapien
gatgtcctggatgtcgccaaaaggc

SEQ ID NO: 5204080 - DNA, 25 bp, Homo sapien
tgtgtacttgctgatcacaaggaag

SEQ ID NO: 5204081 - DNA, 25 bp, Homo sapien
aaaaggcgagaagcgctccctcagc

SEQ ID NO: 5204082 - DNA, 25 bp, Homo sapien
gggccgaggcactggccatgcatct

SEQ ID NO: 5204083 - DNA, 25 bp, Homo sapien
cgggcgaacttgacgaaagcaatgc

SEQ ID NO: 5204084 - DNA, 25 bp, Homo sapien
aggcctgtgagctgcgggcgaactt

SEQ ID NO: 5204085 - DNA, 25 bp, Homo sapien
tgacgaaagcaatgcccttggactc

SEQ ID NO: 5204086 - DNA, 25 bp, Homo sapien
caagccaggtgctgtctggtcagct

SEQ ID NO: 5204087 - DNA, 25 bp, Homo sapien
tcagctgccgggaacggatgttcca

SEQ ID NO: 5204088 - DNA, 25 bp, Homo sapien
cactgctgttctgtcacccggtggc

SEQ ID NO: 5204089 - DNA, 25 bp, Homo sapien
aaagtaggctaggacgagtttggca

SEQ ID NO: 5204090 - DNA, 25 bp, Homo sapien
tattgagggcttaccctgtgtgagg

SEQ ID NO: 5204091 - DNA, 25 bp, Homo sapien
tgtcaagttgttaacgcctcatctg

SEQ ID NO: 5204092 - DNA, 25 bp, Homo sapien
tcgcctggtactaggaaaacgtcca

SEQ ID NO: 5204093 - DNA, 25 bp, Homo sapien
cagtaacagaaagggtcaagaacca

SEQ ID NO: 5204094 - DNA, 25 bp, Homo sapien
catcttcaacatctcggtgacttcc

SEQ ID NO: 5204095 - DNA, 25 bp, Homo sapien
caaagattcttgtaagttcttcatc

SEQ ID NO: 5204096 - DNA, 25 bp, Homo sapien
tctgtgtaggactttggtatcataa

SEQ ID NO: 5204097 - DNA, 25 bp, Homo sapien
gacttccagatgatcgggactgagc

SEQ ID NO: 5204098 - DNA, 25 bp, Homo sapien
gatggttttaagtatcgtacgtagc

SEQ ID NO: 5204099 - DNA, 25 bp, Homo sapien
tgcaatactcgatatctccatacac

SEQ ID NO: 5204100 - DNA, 25 bp, Homo sapien
ttttctattgcttgggcagcttgtg

SEQ ID NO: 5204101 - DNA, 25 bp, Homo sapien
cagcttgtgatggttttaagtatcg

SEQ ID NO: 5204102 - DNA, 25 bp, Homo sapien
tgttcagaggattcagatgctttat

SEQ ID NO: 5204103 - DNA, 25 bp, Homo sapien
ggttcagccaagattgctctaaaac

SEQ ID NO: 5204104 - DNA, 25 bp, Homo sapien
tgtcccaaagcttcttgcctcatat

SEQ ID NO: 5204105 - DNA, 25 bp, Homo sapien
tatttactctaggttcatgtcccaa

SEQ ID NO: 5204106 - DNA, 25 bp, Homo sapien
ttacgtcaaataacattcacaggcc

SEQ ID NO: 5204107 - DNA, 25 bp, Homo sapien
ttttggtcagctatatagaggcaga

SEQ ID NO: 5204108 - DNA, 25 bp, Homo sapien
gaactttaggagtcataatccacat

SEQ ID NO: 5204109 - DNA, 25 bp, Homo sapien
gactcatacggagaggatctctaca

SEQ ID NO: 5204110 - DNA, 25 bp, Homo sapien
gaaaacagagtccattgtactgaat

SEQ ID NO: 5204111 - DNA, 25 bp, Homo sapien
tgtactgaataaaggcactgtattt

SEQ ID NO: 5204112 - DNA, 25 bp, Homo sapien
ttttgtagtacgcttctggtcatca

SEQ ID NO: 5204113 - DNA, 25 bp, Homo sapien
tttctacacagccaacaattcgctt

SEQ ID NO: 5204114 - DNA, 25 bp, Homo sapien
gaataaggatctcgttgaacttcac

SEQ ID NO: 5204115 - DNA, 25 bp, Homo sapien
gaaaggaactcttgatacaactgac

SEQ ID NO: 5204116 - DNA, 25 bp, Homo sapien
ggcctcggctatcattcttgtcaaa

SEQ ID NO: 5204117 - DNA, 25 bp, Homo sapien
caactgacaagcgtttggagattgc

SEQ ID NO: 5204118 - DNA, 25 bp, Homo sapien
tacttccatcatcaatgaaggaaac

SEQ ID NO: 5204119 - DNA, 25 bp, Homo sapien
ctattcggttcccaggagggtactg

SEQ ID NO: 5204120 - DNA, 25 bp, Homo sapien
ttaaaatactgaaccactccatgac

SEQ ID NO: 5204121 - DNA, 25 bp, Homo sapien
gagggtactgaaatccatgtaattt

SEQ ID NO: 5204122 - DNA, 25 bp, Homo sapien
cacctgagaggtcaattgtttctat

SEQ ID NO: 5204123 - DNA, 25 bp, Homo sapien
tcaaagctcggctttagacactcct

SEQ ID NO: 5204124 - DNA, 25 bp, Homo sapien
tctcacctgagaggtcaattgtttc

SEQ ID NO: 5204125 - DNA, 25 bp, Homo sapien
aagtcctatcaatcatgtacactca

SEQ ID NO: 5204126 - DNA, 25 bp, Homo sapien
tgacttgggttattccacaccattg

SEQ ID NO: 5204127 - DNA, 25 bp, Homo sapien
tattccacaccattgatgcaagctg

SEQ ID NO: 5204128 - DNA, 25 bp, Homo sapien
caagctgtgcagctaccatctgtgt

SEQ ID NO: 5204129 - DNA, 25 bp, Homo sapien
cacaccattgatgcaagctgtgcag

SEQ ID NO: 5204130 - DNA, 25 bp, Homo sapien
cgtctaaaggtaaaggatgaggatt

SEQ ID NO: 5204131 - DNA, 25 bp, Homo sapien
cagaatatatcttctaatacgtcta

SEQ ID NO: 5204132 - DNA, 25 bp, Homo sapien
catctgtctggatttgaggcaactg

SEQ ID NO: 5204133 - DNA, 25 bp, Homo sapien
ttttttgcatgatggaagtacaaca

SEQ ID NO: 5204134 - DNA, 25 bp, Homo sapien
tccatgtagagtggcaatggcatca

SEQ ID NO: 5204135 - DNA, 25 bp, Homo sapien
ggcataccccacattttttcctgac

SEQ ID NO: 5204136 - DNA, 25 bp, Homo sapien
cacaaggtaaacttcgatcaggtta

SEQ ID NO: 5204137 - DNA, 25 bp, Homo sapien
tctatcggcatacttggcatacccc

SEQ ID NO: 5204138 - DNA, 25 bp, Homo sapien
tgttagattcttctcttggcgaatc

SEQ ID NO: 5204139 - DNA, 25 bp, Homo sapien
tcttggcgaatctgccagcataact

SEQ ID NO: 5204140 - DNA, 25 bp, Homo sapien
tcagtaagttctttgccgtttgtta

SEQ ID NO: 5204141 - DNA, 25 bp, Homo sapien
gaatctgccagcataactttaagtc

SEQ ID NO: 5204142 - DNA, 25 bp, Homo sapien
aggcatttcattagagagaagtcaa

SEQ ID NO: 5204143 - DNA, 25 bp, Homo sapien
tcaattcataactcaagacaccaat

SEQ ID NO: 5204144 - DNA, 25 bp, Homo sapien
aagcaatccttattctagcaccgga

SEQ ID NO: 5204145 - DNA, 25 bp, Homo sapien
tattcctcatatactatttactcaa

SEQ ID NO: 5204146 - DNA, 25 bp, Homo sapien
aaatgcaagagttttagtttagact

SEQ ID NO: 5204147 - DNA, 25 bp, Homo sapien
caaatgcaagagttttagtttagac

SEQ ID NO: 5204148 - DNA, 25 bp, Homo sapien
caaagagggtcagtcgcagtggttc

SEQ ID NO: 5204149 - DNA, 25 bp, Homo sapien
aggcaaagagggtcagtcgcagtgg

SEQ ID NO: 5204150 - DNA, 25 bp, Homo sapien
gaattacattgtggttatcagaccc

SEQ ID NO: 5204151 - DNA, 25 bp, Homo sapien
tgactcacttaatcccaggcccata

SEQ ID NO: 5204152 - DNA, 25 bp, Homo sapien
gcttctatttcctaggcatgactca

SEQ ID NO: 5204153 - DNA, 25 bp, Homo sapien
tatatccttggatcagttgcttcta

SEQ ID NO: 5204154 - DNA, 25 bp, Homo sapien
aaaatacatgtcagcaatccctgct

SEQ ID NO: 5204155 - DNA, 25 bp, Homo sapien
tctgctacacgtaacaacatattgc

SEQ ID NO: 5204156 - DNA, 25 bp, Homo sapien
cacagactatcaggtatatggaaaa

SEQ ID NO: 5204157 - DNA, 25 bp, Homo sapien
ccagtcacattttcagtcagtcagc

SEQ ID NO: 5204158 - DNA, 25 bp, Homo sapien
tgtggacaccaaagttaaagaacca

SEQ ID NO: 5204159 - DNA, 25 bp, Homo sapien
tctcgatgccttacttttacaacag

SEQ ID NO: 5204160 - DNA, 25 bp, Homo sapien
gactaggaaacaacttctcgatgcc

SEQ ID NO: 5204161 - DNA, 25 bp, Homo sapien
ttacaacagtccaacctaaggtcca

SEQ ID NO: 5204162 - DNA, 25 bp, Homo sapien
cttgtctaataaggatgaccatttt

SEQ ID NO: 5204163 - DNA, 25 bp, Homo sapien
tattagaattcaagtattaaaatgg

SEQ ID NO: 5204164 - DNA, 25 bp, Homo sapien
cttcttgtctaataaggatgaccat

SEQ ID NO: 5204165 - DNA, 25 bp, Homo sapien
ggaaataatgcaatccatttattag

SEQ ID NO: 5204166 - DNA, 25 bp, Homo sapien
gatccatgtgttcttgagctactgt

SEQ ID NO: 5204167 - DNA, 25 bp, Homo sapien
tcccaggatccatgtgttcttgagc

SEQ ID NO: 5204168 - DNA, 25 bp, Homo sapien
ttcagttcccaggatccatgtgttc

SEQ ID NO: 5204169 - DNA, 25 bp, Homo sapien
cttcagttcccaggatccatgtgtt

SEQ ID NO: 5204170 - DNA, 25 bp, Homo sapien
gttagctagctcacatggaccttga

SEQ ID NO: 5204171 - DNA, 25 bp, Homo sapien
taaaaatggtcttccgatgccttcc

SEQ ID NO: 5204172 - DNA, 25 bp, Homo sapien
cacagggcctcgtaactttctcaaa

SEQ ID NO: 5204173 - DNA, 25 bp, Homo sapien
ttctcaaagtatagtgggagctgca

SEQ ID NO: 5204174 - DNA, 25 bp, Homo sapien
atatcagaacttctagtaaattagt

SEQ ID NO: 5204175 - DNA, 25 bp, Homo sapien
ttttatatatcagaacttctagtaa

SEQ ID NO: 5204176 - DNA, 25 bp, Homo sapien
tatttttatatatcagaacttctag

SEQ ID NO: 5204177 - DNA, 25 bp, Homo sapien
tcagaacttctagtaaattagtata

SEQ ID NO: 5204178 - DNA, 25 bp, Homo sapien
attactccaagagattatctcgcct

SEQ ID NO: 5204179 - DNA, 25 bp, Homo sapien
ttactccaagagattatctcgcctc

SEQ ID NO: 5204180 - DNA, 25 bp, Homo sapien
tactccaagagattatctcgcctca

SEQ ID NO: 5204181 - DNA, 25 bp, Homo sapien
gctggcacttgtattaagttacgaa

SEQ ID NO: 5204182 - DNA, 25 bp, Homo sapien
tactaatatagaagagggaggaaga

SEQ ID NO: 5204183 - DNA, 25 bp, Homo sapien
ttctctatcctcttcaaaatggtca

SEQ ID NO: 5204184 - DNA, 25 bp, Homo sapien
taaagtcagtcctttaagtaacaga

SEQ ID NO: 5204185 - DNA, 25 bp, Homo sapien
gaattggagtcagccattttttaaa

SEQ ID NO: 5204186 - DNA, 25 bp, Homo sapien
catgttccaatgcagaattggagtc

SEQ ID NO: 5204187 - DNA, 25 bp, Homo sapien
tccaatgcagaattggagtcagcca

SEQ ID NO: 5204188 - DNA, 25 bp, Homo sapien
tttattaacagcatgttccaatgca

SEQ ID NO: 5204189 - DNA, 25 bp, Homo sapien
cagaaagaagcctattatgacaaga

SEQ ID NO: 5204190 - DNA, 25 bp, Homo sapien
gacaagactctcaatagctgtctca

SEQ ID NO: 5204191 - DNA, 25 bp, Homo sapien
attaacagtatagccttctcataca

SEQ ID NO: 5204192 - DNA, 25 bp, Homo sapien
catacataagttaataaggagtgtc

SEQ ID NO: 5204193 - DNA, 25 bp, Homo sapien
cctactgagctgaatgccgcatgtg

SEQ ID NO: 5204194 - DNA, 25 bp, Homo sapien
gccgcatgtggttctcttagtcaag

SEQ ID NO: 5204195 - DNA, 25 bp, Homo sapien
caggaggtccatcagatctagggta

SEQ ID NO: 5204196 - DNA, 25 bp, Homo sapien
ggaaacctccaacatagtgcagctt

SEQ ID NO: 5204197 - DNA, 25 bp, Homo sapien
gctcttccacagcttacttaagtaa

SEQ ID NO: 5204198 - DNA, 25 bp, Homo sapien
tgatataatatccagcaggtggtca

SEQ ID NO: 5204199 - DNA, 25 bp, Homo sapien
aaaatgaatctatccactactcctg

SEQ ID NO: 5204200 - DNA, 25 bp, Homo sapien
tttatctaggccaattgcagagaac

SEQ ID NO: 5204201 - DNA, 25 bp, Homo sapien
tacagacattgctccattccagatg

SEQ ID NO: 5204202 - DNA, 25 bp, Homo sapien
cttgggctacaaaactacagacatt

SEQ ID NO: 5204203 - DNA, 25 bp, Homo sapien
gatgatttcaatactcaccgactgg

SEQ ID NO: 5204204 - DNA, 25 bp, Homo sapien
gaagaggatcttcagtcttgtgact

SEQ ID NO: 5204205 - DNA, 25 bp, Homo sapien
cagtaaaaggcaaaagatttatatg

SEQ ID NO: 5204206 - DNA, 25 bp, Homo sapien
aagactgttccctccacggaaatct

SEQ ID NO: 5204207 - DNA, 25 bp, Homo sapien
gttccctccacggaaatcttcagta

SEQ ID NO: 5204208 - DNA, 25 bp, Homo sapien
actgttccctccacggaaatcttca

SEQ ID NO: 5204209 - DNA, 25 bp, Homo sapien
gtgctgcgcctccagtggtccgctg

SEQ ID NO: 5204210 - DNA, 25 bp, Homo sapien
cggcggcgaccgtgctgcgcctcca

SEQ ID NO: 5204211 - DNA, 25 bp, Homo sapien
tccagtggtccgctgcgctgcagcc

SEQ ID NO: 5204212 - DNA, 25 bp, Homo sapien
cctcctctcccacgggcggggcgcg

SEQ ID NO: 5204213 - DNA, 25 bp, Homo sapien
gaggaggcatgggcgccgcctgcac

SEQ ID NO: 5204214 - DNA, 25 bp, Homo sapien
tgcaccgagccgcgatctccagcac

SEQ ID NO: 5204215 - DNA, 25 bp, Homo sapien
ggccccggcaggcggactggcgcgc

SEQ ID NO: 5204216 - DNA, 25 bp, Homo sapien
cccggcaggcggactggcgcgcggg

SEQ ID NO: 5204217 - DNA, 25 bp, Homo sapien
gccccggcaggcggactggcgcgcg

SEQ ID NO: 5204218 - DNA, 25 bp, Homo sapien
ccccggcaggcggactggcgcgcgg

SEQ ID NO: 5204219 - DNA, 25 bp, Homo sapien
gagcggtggcgccgcggactctgcg

SEQ ID NO: 5204220 - DNA, 25 bp, Homo sapien
gagggcgagcggtggcgccgcggac

SEQ ID NO: 5204221 - DNA, 25 bp, Homo sapien
tggcgccgcggactctgcggcggct

SEQ ID NO: 5204222 - DNA, 25 bp, Homo sapien
ggtggcgccgcggactctgcggcgg

SEQ ID NO: 5204223 - DNA, 25 bp, Homo sapien
gacaattacatcagtccttctccct

SEQ ID NO: 5204224 - DNA, 25 bp, Homo sapien
ggcgacacgatctgcgggcagctcc

SEQ ID NO: 5204225 - DNA, 25 bp, Homo sapien
gggaagcacgtcttgactgcaatgc

SEQ ID NO: 5204226 - DNA, 25 bp, Homo sapien
ccggcgacacgatctgcgggcagct

SEQ ID NO: 5204227 - DNA, 25 bp, Homo sapien
aatgcaaacgctgtcccggtctgaa

SEQ ID NO: 5204228 - DNA, 25 bp, Homo sapien
cttgcagatgtgtctatacgcagca

SEQ ID NO: 5204229 - DNA, 25 bp, Homo sapien
tctatgtttaagcaaccgttcaggt

SEQ ID NO: 5204230 - DNA, 25 bp, Homo sapien
tatgtaatgcttcccctagctttag

SEQ ID NO: 5204231 - DNA, 25 bp, Homo sapien
aaaacagcttaaaaggtgccttgca

SEQ ID NO: 5204232 - DNA, 25 bp, Homo sapien
caggagcttggcagtcagttgacat

SEQ ID NO: 5204233 - DNA, 25 bp, Homo sapien
taatgtatgttaagaccctggtgca

SEQ ID NO: 5204234 - DNA, 25 bp, Homo sapien
gaaaaggcattatgggccaattggc

SEQ ID NO: 5204235 - DNA, 25 bp, Homo sapien
taacaataccaacaccttgtaggcc

SEQ ID NO: 5204236 - DNA, 25 bp, Homo sapien
cgtgtgactgccaaatacaaagatg

SEQ ID NO: 5204237 - DNA, 25 bp, Homo sapien
gcaatatttaacacccgtgtgactg

SEQ ID NO: 5204238 - DNA, 25 bp, Homo sapien
tacaaagatgacgtcatccacatct

SEQ ID NO: 5204239 - DNA, 25 bp, Homo sapien
caggctcgccacacttgactcttgg

SEQ ID NO: 5204240 - DNA, 25 bp, Homo sapien
gggaagtcctcatttatagtgcacg

SEQ ID NO: 5204241 - DNA, 25 bp, Homo sapien
cggcttctgctttgtggaagtgaca

SEQ ID NO: 5204242 - DNA, 25 bp, Homo sapien
gagcagaagtcgttcagttggagaa

SEQ ID NO: 5204243 - DNA, 25 bp, Homo sapien
gaggtatgagatcaataatgacaca

SEQ ID NO: 5204244 - DNA, 25 bp, Homo sapien
taggggtggctccttaatatccttc

SEQ ID NO: 5204245 - DNA, 25 bp, Homo sapien
tttgaccttgctggggctatctggg

SEQ ID NO: 5204246 - DNA, 25 bp, Homo sapien
tctgggtaaattataggggtggctc

SEQ ID NO: 5204247 - DNA, 25 bp, Homo sapien
tctccttgggacatgatatgtcttt

SEQ ID NO: 5204248 - DNA, 25 bp, Homo sapien
taggtctgcacgttcattgctcaag

SEQ ID NO: 5204249 - DNA, 25 bp, Homo sapien
aaagctcccgaagacgattaatgcc

SEQ ID NO: 5204250 - DNA, 25 bp, Homo sapien
taatgccacaaacttccaccctggg

SEQ ID NO: 5204251 - DNA, 25 bp, Homo sapien
gtggtgtcccactaatctgttgcta

SEQ ID NO: 5204252 - DNA, 25 bp, Homo sapien
cgctgcagttagagtctcgttttat

SEQ ID NO: 5204253 - DNA, 25 bp, Homo sapien
caaagaagtagatgatttttcagct

SEQ ID NO: 5204254 - DNA, 25 bp, Homo sapien
gcaatattgagggtgtccaaaccac

SEQ ID NO: 5204255 - DNA, 25 bp, Homo sapien
gttttatgcacttaagaccatccca

SEQ ID NO: 5204256 - DNA, 25 bp, Homo sapien
aagaggaggcacttctatgggttgg

SEQ ID NO: 5204257 - DNA, 25 bp, Homo sapien
gaggaggcacttctatgggttggag

SEQ ID NO: 5204258 - DNA, 25 bp, Homo sapien
gaggcacttctatgggttggagtgg

SEQ ID NO: 5204259 - DNA, 25 bp, Homo sapien
ctgcctactgtccctttgggaggat

SEQ ID NO: 5204260 - DNA, 25 bp, Homo sapien
tcattgatctcaatacctcctgagc

SEQ ID NO: 5204261 - DNA, 25 bp, Homo sapien
tgctcctcaggttagtgttcattga

SEQ ID NO: 5204262 - DNA, 25 bp, Homo sapien
tcaggttagtgttcattgatctcaa

SEQ ID NO: 5204263 - DNA, 25 bp, Homo sapien
tgttcattgatctcaatacctcctg

SEQ ID NO: 5204264 - DNA, 25 bp, Homo sapien
ccctgatcagagataactgatgcat

SEQ ID NO: 5204265 - DNA, 25 bp, Homo sapien
ccgccctctgtttcccctgatcaga

SEQ ID NO: 5204266 - DNA, 25 bp, Homo sapien
cgactctccccgatccccatccttt

SEQ ID NO: 5204267 - DNA, 25 bp, Homo sapien
ccccgatccccatcctttcaggttg

SEQ ID NO: 5204268 - DNA, 25 bp, Homo sapien
tgagcttctctttaacgactctccc

SEQ ID NO: 5204269 - DNA, 25 bp, Homo sapien
tttaatcttccagtcaggtatctct

SEQ ID NO: 5204270 - DNA, 25 bp, Homo sapien
ccgacttacagagggctcggtgcta

SEQ ID NO: 5204271 - DNA, 25 bp, Homo sapien
ggactggctccggttctagcaattg

SEQ ID NO: 5204272 - DNA, 25 bp, Homo sapien
gctcggtgctagaggaagcagtcct

SEQ ID NO: 5204273 - DNA, 25 bp, Homo sapien
ggttctagcaattgccgacttacag

SEQ ID NO: 5204274 - DNA, 25 bp, Homo sapien
ggcctattttcagcccttctataat

SEQ ID NO: 5204275 - DNA, 25 bp, Homo sapien
cattggtttggcctattttcagccc

SEQ ID NO: 5204276 - DNA, 25 bp, Homo sapien
tttgtctggtttctggacattggtt

SEQ ID NO: 5204277 - DNA, 25 bp, Homo sapien
tgtctggtttctggacattggtttg

SEQ ID NO: 5204278 - DNA, 25 bp, Homo sapien
ttaacattccattatccaggacaaa

SEQ ID NO: 5204279 - DNA, 25 bp, Homo sapien
ggtgcctttgaatactttaacattc

SEQ ID NO: 5204280 - DNA, 25 bp, Homo sapien
atcgagtggtgcctttgaatacttt

SEQ ID NO: 5204281 - DNA, 25 bp, Homo sapien
gagtggtgcctttgaatactttaac

SEQ ID NO: 5204282 - DNA, 25 bp, Homo sapien
tttaattgacatgactgagagtccc

SEQ ID NO: 5204283 - DNA, 25 bp, Homo sapien
aatgatagatgtgctcttcggtgtc

SEQ ID NO: 5204284 - DNA, 25 bp, Homo sapien
gagtcccacatctatgctcccatgg

SEQ ID NO: 5204285 - DNA, 25 bp, Homo sapien
tcaaggtctattcttcgagctttct

SEQ ID NO: 5204286 - DNA, 25 bp, Homo sapien
ggcagagaaactgttgaaaactgat

SEQ ID NO: 5204287 - DNA, 25 bp, Homo sapien
ggcaaatcgtttcccctgataatgg

SEQ ID NO: 5204288 - DNA, 25 bp, Homo sapien
tggtgtaggcaaatcgtttcccctg

SEQ ID NO: 5204289 - DNA, 25 bp, Homo sapien
ccctgataatggcagagaaactgtt

SEQ ID NO: 5204290 - DNA, 25 bp, Homo sapien
tgtgaaaactagcatctcttggtga

SEQ ID NO: 5204291 - DNA, 25 bp, Homo sapien
cattctgacgatacaaccgatgatg

SEQ ID NO: 5204292 - DNA, 25 bp, Homo sapien
tgatgtcgcagtttggagacccatg

SEQ ID NO: 5204293 - DNA, 25 bp, Homo sapien
gacccatgcatcaaaccagtcctgg

SEQ ID NO: 5204294 - DNA, 25 bp, Homo sapien
gtatatagatactaaggtgcctgca

SEQ ID NO: 5204295 - DNA, 25 bp, Homo sapien
ttatccaccagtaagcaaccttgca

SEQ ID NO: 5204296 - DNA, 25 bp, Homo sapien
tgcacactcaaaacatggaagaagc

SEQ ID NO: 5204297 - DNA, 25 bp, Homo sapien
ccagtgagggcgacattcctaaaca

SEQ ID NO: 5204298 - DNA, 25 bp, Homo sapien
gcagggaggctattgctgcatggta

SEQ ID NO: 5204299 - DNA, 25 bp, Homo sapien
ctggccagttgtgcacgttgcaggg

SEQ ID NO: 5204300 - DNA, 25 bp, Homo sapien
aaaggggactgccacggaaagctgt

SEQ ID NO: 5204301 - DNA, 25 bp, Homo sapien
aggggactgccacggaaagctgttt

SEQ ID NO: 5204302 - DNA, 25 bp, Homo sapien
tcttccgagtcctgtaaccaggctg

SEQ ID NO: 5204303 - DNA, 25 bp, Homo sapien
cgagtcctgtaaccaggctgccact

SEQ ID NO: 5204304 - DNA, 25 bp, Homo sapien
tctcttccgagtcctgtaaccaggc

SEQ ID NO: 5204305 - DNA, 25 bp, Homo sapien
ctgtccatctcttccgagtcctgta

SEQ ID NO: 5204306 - DNA, 25 bp, Homo sapien
cctagtgaggacgacagagcagtga

SEQ ID NO: 5204307 - DNA, 25 bp, Homo sapien
tcaaaactaagcgtaaggagacatc

SEQ ID NO: 5204308 - DNA, 25 bp, Homo sapien
caagacgatcaaggcaatcagggta

SEQ ID NO: 5204309 - DNA, 25 bp, Homo sapien
gaaacatacacctgctccatgggca

SEQ ID NO: 5204310 - DNA, 25 bp, Homo sapien
gttaggtgccgactgagttctctga

SEQ ID NO: 5204311 - DNA, 25 bp, Homo sapien
gtaaagttaggtgccgactgagttc

SEQ ID NO: 5204312 - DNA, 25 bp, Homo sapien
atgtcagtaaagttaggtgccgact

SEQ ID NO: 5204313 - DNA, 25 bp, Homo sapien
tccacaaggtttgactggcaatgtg

SEQ ID NO: 5204314 - DNA, 25 bp, Homo sapien
ctataagcaaaccagccaggacaga

SEQ ID NO: 5204315 - DNA, 25 bp, Homo sapien
tattaagttcacacagatgatacag

SEQ ID NO: 5204316 - DNA, 25 bp, Homo sapien
cctaagtccttttaccagcagcagg

SEQ ID NO: 5204317 - DNA, 25 bp, Homo sapien
caagagcacagcaagttactaaagg

SEQ ID NO: 5204318 - DNA, 25 bp, Homo sapien
tcttgtgacccgcttgtctttcttt

SEQ ID NO: 5204319 - DNA, 25 bp, Homo sapien
ttgtgacccgcttgtctttctttga

SEQ ID NO: 5204320 - DNA, 25 bp, Homo sapien
tccatcgtcttgtgacccgcttgtc

SEQ ID NO: 5204321 - DNA, 25 bp, Homo sapien
catcgtcttgtgacccgcttgtctt

SEQ ID NO: 5204322 - DNA, 25 bp, Homo sapien
tctatgagatgcaggacagctacac

SEQ ID NO: 5204323 - DNA, 25 bp, Homo sapien
cagtagaaacatggccataccagtc

SEQ ID NO: 5204324 - DNA, 25 bp, Homo sapien
tctgggcaccttcacaatggctgtt

SEQ ID NO: 5204325 - DNA, 25 bp, Homo sapien
tcttgattgtgcaggataagggcca

SEQ ID NO: 5204326 - DNA, 25 bp, Homo sapien
tgccggcgccgagttgtgctgaact

SEQ ID NO: 5204327 - DNA, 25 bp, Homo sapien
gtagccactgctgccgctagcctct

SEQ ID NO: 5204328 - DNA, 25 bp, Homo sapien
gctagcctctgccggcgccgagttg

SEQ ID NO: 5204329 - DNA, 25 bp, Homo sapien
ctgaactggcccttcgcgggtggcc

SEQ ID NO: 5204330 - DNA, 25 bp, Homo sapien
tcttgaagtcctgtgaaaggaggga

SEQ ID NO: 5204331 - DNA, 25 bp, Homo sapien
gagaaccctcaacactcaatttggg

SEQ ID NO: 5204332 - DNA, 25 bp, Homo sapien
ggagggaagcctgatcgtagaatat

SEQ ID NO: 5204333 - DNA, 25 bp, Homo sapien
cattaggagatgctcttaagtcctg

SEQ ID NO: 5204334 - DNA, 25 bp, Homo sapien
taaaagaggtacgtggaatgggcca

SEQ ID NO: 5204335 - DNA, 25 bp, Homo sapien
tggttttgcatattacccacaggga

SEQ ID NO: 5204336 - DNA, 25 bp, Homo sapien
tatctgcattcaggtgccctcaaca

SEQ ID NO: 5204337 - DNA, 25 bp, Homo sapien
tctgaggactcacatggcttggaag

SEQ ID NO: 5204338 - DNA, 25 bp, Homo sapien
tctggagttatcaaaggaaccctac

SEQ ID NO: 5204339 - DNA, 25 bp, Homo sapien
tcaatactctgctggaatcctgtcc

SEQ ID NO: 5204340 - DNA, 25 bp, Homo sapien
gaatcaaaatatctggcctgagctg

SEQ ID NO: 5204341 - DNA, 25 bp, Homo sapien
tttggagaacttggctacactgggc

SEQ ID NO: 5204342 - DNA, 25 bp, Homo sapien
tggtgacatggtagcactgaaagga

SEQ ID NO: 5204343 - DNA, 25 bp, Homo sapien
gtgacatggtagcactgaaaggaac

SEQ ID NO: 5204344 - DNA, 25 bp, Homo sapien
ctggtgacatggtagcactgaaagg

SEQ ID NO: 5204345 - DNA, 25 bp, Homo sapien
ggtgacatggtagcactgaaaggaa

SEQ ID NO: 5204346 - DNA, 25 bp, Homo sapien
tctgaaattcaatatctgcacaaag

SEQ ID NO: 5204347 - DNA, 25 bp, Homo sapien
ttggggttggaggaatgcaagcgaa

SEQ ID NO: 5204348 - DNA, 25 bp, Homo sapien
tgaaattcaatatctgcacaaaggt

SEQ ID NO: 5204349 - DNA, 25 bp, Homo sapien
aattcaatatctgcacaaaggttgg

SEQ ID NO: 5204350 - DNA, 25 bp, Homo sapien
aactttccagagggtcagtgaggtg

SEQ ID NO: 5204351 - DNA, 25 bp, Homo sapien
ctttctgtgcgattagacaaaattc

SEQ ID NO: 5204352 - DNA, 25 bp, Homo sapien
gcctttactgtgatcctgctcggaa

SEQ ID NO: 5204353 - DNA, 25 bp, Homo sapien
agacagtgactgtcggagccgtgcc

SEQ ID NO: 5204354 - DNA, 25 bp, Homo sapien
cggagccgtgccatctgcgtgctgt

SEQ ID NO: 5204355 - DNA, 25 bp, Homo sapien
tatagctatgctattaaatgcagac

SEQ ID NO: 5204356 - DNA, 25 bp, Homo sapien
catcagggctaggaataatatttac

SEQ ID NO: 5204357 - DNA, 25 bp, Homo sapien
tacactgacaacctgatcacaaata

SEQ ID NO: 5204358 - DNA, 25 bp, Homo sapien
gactctgaatgtattctgttcaacc

SEQ ID NO: 5204359 - DNA, 25 bp, Homo sapien
gttcaaccgactccttagttcagca

SEQ ID NO: 5204360 - DNA, 25 bp, Homo sapien
agacagaagcatacagtgtaattgc

SEQ ID NO: 5204361 - DNA, 25 bp, Homo sapien
gaagacagaagcatacagtgtaatt

SEQ ID NO: 5204362 - DNA, 25 bp, Homo sapien
cagaagcatacagtgtaattgcttt

SEQ ID NO: 5204363 - DNA, 25 bp, Homo sapien
gacagaagcatacagtgtaattgct

SEQ ID NO: 5204364 - DNA, 25 bp, Homo sapien
gactgacatggatttgctcaccagc

SEQ ID NO: 5204365 - DNA, 25 bp, Homo sapien
cattggctacttgctgtgataaggg

SEQ ID NO: 5204366 - DNA, 25 bp, Homo sapien
gactctgacatggagaggcggctct

SEQ ID NO: 5204367 - DNA, 25 bp, Homo sapien
gaggagcacctcttgggcatcaaag

SEQ ID NO: 5204368 - DNA, 25 bp, Homo sapien
tgatcagaaatcactggtgtaaaag

SEQ ID NO: 5204369 - DNA, 25 bp, Homo sapien
ggtgtaaaagaattctacaataata

SEQ ID NO: 5204370 - DNA, 25 bp, Homo sapien
tatcatagaaatgatcagaaatcac

SEQ ID NO: 5204371 - DNA, 25 bp, Homo sapien
tctctcccaaactaatatatcatag

SEQ ID NO: 5204372 - DNA, 25 bp, Homo sapien
ccgagaaatattgtctgcaacactg

SEQ ID NO: 5204373 - DNA, 25 bp, Homo sapien
gcaacactggtgttgtcttcagata

SEQ ID NO: 5204374 - DNA, 25 bp, Homo sapien
gatatattatcactcacatcactga

SEQ ID NO: 5204375 - DNA, 25 bp, Homo sapien
tgatgtaagactcatcatctgaagc

SEQ ID NO: 5204376 - DNA, 25 bp, Homo sapien
caatttggcatgtagatagaacaac

SEQ ID NO: 5204377 - DNA, 25 bp, Homo sapien
taagtcttcgtgttgcaatttggca

SEQ ID NO: 5204378 - DNA, 25 bp, Homo sapien
gatagaacaacctggaagctcaaat

SEQ ID NO: 5204379 - DNA, 25 bp, Homo sapien
ggaatgcctgttcattaagtcttcg

SEQ ID NO: 5204380 - DNA, 25 bp, Homo sapien
tattgaacaatcagctgccaaaaga

SEQ ID NO: 5204381 - DNA, 25 bp, Homo sapien
tttttcaaccatttacctcaagaga

SEQ ID NO: 5204382 - DNA, 25 bp, Homo sapien
caaccatttacctcaagagatcata

SEQ ID NO: 5204383 - DNA, 25 bp, Homo sapien
taataagaaggactcaagctgttgg

SEQ ID NO: 5204384 - DNA, 25 bp, Homo sapien
gagtcacagtgaaggacactttgct

SEQ ID NO: 5204385 - DNA, 25 bp, Homo sapien
tggaagaaggagagtcacagtgaag

SEQ ID NO: 5204386 - DNA, 25 bp, Homo sapien
tcacagtgaaggacactttgctgtt

SEQ ID NO: 5204387 - DNA, 25 bp, Homo sapien
ctggaagaaggagagtcacagtgaa

SEQ ID NO: 5204388 - DNA, 25 bp, Homo sapien
tcagtttccgaagccttgtccagga

SEQ ID NO: 5204389 - DNA, 25 bp, Homo sapien
caggcatagagactttagacaggtc

SEQ ID NO: 5204390 - DNA, 25 bp, Homo sapien
ggctcgtttagctccacaggcatag

SEQ ID NO: 5204391 - DNA, 25 bp, Homo sapien
aggcatgctcgacgcccatttcgga

SEQ ID NO: 5204392 - DNA, 25 bp, Homo sapien
attcataagtctccccaaggactgg

SEQ ID NO: 5204393 - DNA, 25 bp, Homo sapien
tctgaaataggtggagcagtatcct

SEQ ID NO: 5204394 - DNA, 25 bp, Homo sapien
tgttctgagaaaaagcggaatccct

SEQ ID NO: 5204395 - DNA, 25 bp, Homo sapien
agtatcctgaaactgcaaatgcggc

SEQ ID NO: 5204396 - DNA, 25 bp, Homo sapien
caaaacacaaaattctttgattcac

SEQ ID NO: 5204397 - DNA, 25 bp, Homo sapien
aaaattctttgattcacagtgacag

SEQ ID NO: 5204398 - DNA, 25 bp, Homo sapien
ttcacagtgacaggcagaaatgggt

SEQ ID NO: 5204399 - DNA, 25 bp, Homo sapien
cagaaatgggtggatgatggctaac

SEQ ID NO: 5204400 - DNA, 25 bp, Homo sapien
tttggaagcatgacattcagtgttc

SEQ ID NO: 5204401 - DNA, 25 bp, Homo sapien
aacaggcaggatttccatcgacttc

SEQ ID NO: 5204402 - DNA, 25 bp, Homo sapien
aggcaggatttccatcgacttcccc

SEQ ID NO: 5204403 - DNA, 25 bp, Homo sapien
gaagcatgacattcagtgttccaac

SEQ ID NO: 5204404 - DNA, 25 bp, Homo sapien
gttgtgtatgcaagtggtgacttta

SEQ ID NO: 5204405 - DNA, 25 bp, Homo sapien
ggttacttctccataatgttctatc

SEQ ID NO: 5204406 - DNA, 25 bp, Homo sapien
tctccataatgttctatccatcttc

SEQ ID NO: 5204407 - DNA, 25 bp, Homo sapien
gtggtgactttattccacacatagt

SEQ ID NO: 5204408 - DNA, 25 bp, Homo sapien
ggtctctattccacgcataacatgg

SEQ ID NO: 5204409 - DNA, 25 bp, Homo sapien
cataacatggtagtatatcacagag

SEQ ID NO: 5204410 - DNA, 25 bp, Homo sapien
tcttagccttgaagtcccttattca

SEQ ID NO: 5204411 - DNA, 25 bp, Homo sapien
aaaccccaattgtgacatttgatgg

SEQ ID NO: 5204412 - DNA, 25 bp, Homo sapien
tcatgttagaattccaataattcac

SEQ ID NO: 5204413 - DNA, 25 bp, Homo sapien
ccaccccctggacttcattcatgtt

SEQ ID NO: 5204414 - DNA, 25 bp, Homo sapien
ttcccctcctgatctatcaccaccc

SEQ ID NO: 5204415 - DNA, 25 bp, Homo sapien
tccaaacagccggtacaccgccttc

SEQ ID NO: 5204416 - DNA, 25 bp, Homo sapien
gaaagaggccaatgaaccactgtga

SEQ ID NO: 5204417 - DNA, 25 bp, Homo sapien
gacgtatcccgagctcctggaataa

SEQ ID NO: 5204418 - DNA, 25 bp, Homo sapien
tgcggaatgaataagctagccactc

SEQ ID NO: 5204419 - DNA, 25 bp, Homo sapien
tgaagcccaatctctgactgcctgt

SEQ ID NO: 5204420 - DNA, 25 bp, Homo sapien
ttgatctggccggaaccgggcgtct

SEQ ID NO: 5204421 - DNA, 25 bp, Homo sapien
agctcatagtttgttggcatggaac

SEQ ID NO: 5204422 - DNA, 25 bp, Homo sapien
agcaaaccttgtgaagccatagtac

SEQ ID NO: 5204423 - DNA, 25 bp, Homo sapien
ccttgtgaagccatagtacagctca

SEQ ID NO: 5204424 - DNA, 25 bp, Homo sapien
ggcctcaacatcctaggctcgagcg

SEQ ID NO: 5204425 - DNA, 25 bp, Homo sapien
cacccagccatagtctgcatattaa

SEQ ID NO: 5204426 - DNA, 25 bp, Homo sapien
tggcctcaacatcctaggctcgagc

SEQ ID NO: 5204427 - DNA, 25 bp, Homo sapien
ctgcacccagccatagtctgcatat

SEQ ID NO: 5204428 - DNA, 25 bp, Homo sapien
taccgcacagtaacggacggagtct

SEQ ID NO: 5204429 - DNA, 25 bp, Homo sapien
tctaattgctatgaacataaaatac

SEQ ID NO: 5204430 - DNA, 25 bp, Homo sapien
tgcctcccaggatttacatattttc

SEQ ID NO: 5204431 - DNA, 25 bp, Homo sapien
gcagaaagcagttgatattttaaca

SEQ ID NO: 5204432 - DNA, 25 bp, Homo sapien
gttttcttccatatatcgtctccga

SEQ ID NO: 5204433 - DNA, 25 bp, Homo sapien
ggagttcctctactctttgcttctc

SEQ ID NO: 5204434 - DNA, 25 bp, Homo sapien
tatcgtctccgagatctctggagtt

SEQ ID NO: 5204435 - DNA, 25 bp, Homo sapien
ctctggagttcctctactctttgct

SEQ ID NO: 5204436 - DNA, 25 bp, Homo sapien
catggcctgtggcaaccatttgcaa

SEQ ID NO: 5204437 - DNA, 25 bp, Homo sapien
tctgggcaggatgctcactcttttc

SEQ ID NO: 5204438 - DNA, 25 bp, Homo sapien
aacttgctatgggagttaactgact

SEQ ID NO: 5204439 - DNA, 25 bp, Homo sapien
tttctgctgcccatgaaaagagaag

SEQ ID NO: 5204440 - DNA, 25 bp, Homo sapien
taccacagagagaccaaatctaaac

SEQ ID NO: 5204441 - DNA, 25 bp, Homo sapien
ctgtgtgatgtatatataatcctgc

SEQ ID NO: 5204442 - DNA, 25 bp, Homo sapien
tcacctactatcataccacagagag

SEQ ID NO: 5204443 - DNA, 25 bp, Homo sapien
cagatgcatttggaaacctcagatt

SEQ ID NO: 5204444 - DNA, 25 bp, Homo sapien
gagaggaactcagggcaggaacaaa

SEQ ID NO: 5204445 - DNA, 25 bp, Homo sapien
taggaccctctcctatagattagac

SEQ ID NO: 5204446 - DNA, 25 bp, Homo sapien
tctgctagctactgatgatgtgact

SEQ ID NO: 5204447 - DNA, 25 bp, Homo sapien
catataagcagtgtttgtaagccag

SEQ ID NO: 5204448 - DNA, 25 bp, Homo sapien
tctttgattggcatcaataactttt

SEQ ID NO: 5204449 - DNA, 25 bp, Homo sapien
agggtcctttcgaagctcccagtag

SEQ ID NO: 5204450 - DNA, 25 bp, Homo sapien
gtcctttcgaagctcccagtaggtg

SEQ ID NO: 5204451 - DNA, 25 bp, Homo sapien
cttctgaaagtccattataaagatg

SEQ ID NO: 5204452 - DNA, 25 bp, Homo sapien
cagaatgtgatatgttggctagctc

SEQ ID NO: 5204453 - DNA, 25 bp, Homo sapien
gaaaccacacatagctataagaaac

SEQ ID NO: 5204454 - DNA, 25 bp, Homo sapien
aatggtaggttttcagttgacccag

SEQ ID NO: 5204455 - DNA, 25 bp, Homo sapien
cacatctttttcgacaaggccagca

SEQ ID NO: 5204456 - DNA, 25 bp, Homo sapien
tccagacagtggaacaatcgtgtgg

SEQ ID NO: 5204457 - DNA, 25 bp, Homo sapien
actgaccgactgcttgtggcccagg

SEQ ID NO: 5204458 - DNA, 25 bp, Homo sapien
tcttaaggcatgaacaatggcatac

SEQ ID NO: 5204459 - DNA, 25 bp, Homo sapien
tatagtcacctacgtgcagaaacag

SEQ ID NO: 5204460 - DNA, 25 bp, Homo sapien
gaagattttactgccgcagggcaag

SEQ ID NO: 5204461 - DNA, 25 bp, Homo sapien
tagtactactaagcccacacaggaa

SEQ ID NO: 5204462 - DNA, 25 bp, Homo sapien
taacgacatgtatctcaggatgcag

SEQ ID NO: 5204463 - DNA, 25 bp, Homo sapien
ctattttgagactgttcagggaagt

SEQ ID NO: 5204464 - DNA, 25 bp, Homo sapien
tattttgagactgttcagggaagtg

SEQ ID NO: 5204465 - DNA, 25 bp, Homo sapien
ttttcttatgtttaggctattttga

SEQ ID NO: 5204466 - DNA, 25 bp, Homo sapien
cttatgtttaggctattttgagact

SEQ ID NO: 5204467 - DNA, 25 bp, Homo sapien
aaagagagtaaatctgcaccctggg

SEQ ID NO: 5204468 - DNA, 25 bp, Homo sapien
ggatgaggccatcgcaccaatgaat

SEQ ID NO: 5204469 - DNA, 25 bp, Homo sapien
tattacatcccctggtgtgtgcaga

SEQ ID NO: 5204470 - DNA, 25 bp, Homo sapien
tgtgccattgatccgctcagtctag

SEQ ID NO: 5204471 - DNA, 25 bp, Homo sapien
tacaggaccgaatcctactttggat

SEQ ID NO: 5204472 - DNA, 25 bp, Homo sapien
ctatgcctttcactatgttaggagc

SEQ ID NO: 5204473 - DNA, 25 bp, Homo sapien
aattcagttaggacttacaggaccg

SEQ ID NO: 5204474 - DNA, 25 bp, Homo sapien
tagtattcactaggaggctaactga

SEQ ID NO: 5204475 - DNA, 25 bp, Homo sapien
tgtaccgggctaccagaactaggac

SEQ ID NO: 5204476 - DNA, 25 bp, Homo sapien
caatggttgcctcaggatagaggat

SEQ ID NO: 5204477 - DNA, 25 bp, Homo sapien
ttactacttgatggcggatactggg

SEQ ID NO: 5204478 - DNA, 25 bp, Homo sapien
ggccttctagaaaaatcccatatgc

SEQ ID NO: 5204479 - DNA, 25 bp, Homo sapien
tttagctggcacactctcaccttag

SEQ ID NO: 5204480 - DNA, 25 bp, Homo sapien
ttctccggtttagcaaaaatcttgc

SEQ ID NO: 5204481 - DNA, 25 bp, Homo sapien
tctccatattacagggctggcgttg

SEQ ID NO: 5204482 - DNA, 25 bp, Homo sapien
ggcatgggcgtcaggctcaagccat

SEQ ID NO: 5204483 - DNA, 25 bp, Homo sapien
tgcaggctttccctaccagtcagga

SEQ ID NO: 5204484 - DNA, 25 bp, Homo sapien
gaaaaactccccttagagacataga

SEQ ID NO: 5204485 - DNA, 25 bp, Homo sapien
taagcagagtaatttcacagtggag

SEQ ID NO: 5204486 - DNA, 25 bp, Homo sapien
taggtgatcaagagtgtgctttgcc

SEQ ID NO: 5204487 - DNA, 25 bp, Homo sapien
gcaaggtccggaaaaccaagcacga

SEQ ID NO: 5204488 - DNA, 25 bp, Homo sapien
aagctgttaaatcaccgcggcggcg

SEQ ID NO: 5204489 - DNA, 25 bp, Homo sapien
gttcttctgcccaaaacaaaagctg

SEQ ID NO: 5204490 - DNA, 25 bp, Homo sapien
cctgcccggcgaattcagagggagc

SEQ ID NO: 5204491 - DNA, 25 bp, Homo sapien
tacacgcaggaggtcgttgagcttc

SEQ ID NO: 5204492 - DNA, 25 bp, Homo sapien
ccttcctgctaatgacaaaatcagc

SEQ ID NO: 5204493 - DNA, 25 bp, Homo sapien
tctagaatggtgctgtacacgcagg

SEQ ID NO: 5204494 - DNA, 25 bp, Homo sapien
tatctttaaacacatccagcttcta

SEQ ID NO: 5204495 - DNA, 25 bp, Homo sapien
ttccaccacagaatatcactctagg

SEQ ID NO: 5204496 - DNA, 25 bp, Homo sapien
tgtcactgactttgtaaggagtttc

SEQ ID NO: 5204497 - DNA, 25 bp, Homo sapien
caatttcttccacggtcacagagaa

SEQ ID NO: 5204498 - DNA, 25 bp, Homo sapien
cttggcctggcctagctgtcactga

SEQ ID NO: 5204499 - DNA, 25 bp, Homo sapien
tctgatgagtttctagagtggaggc

SEQ ID NO: 5204500 - DNA, 25 bp, Homo sapien
ccccatttgagaagggcatcactct

SEQ ID NO: 5204501 - DNA, 25 bp, Homo sapien
ttagccggcctttcacactgccagg

SEQ ID NO: 5204502 - DNA, 25 bp, Homo sapien
cactgccaggatatccgctttggga

SEQ ID NO: 5204503 - DNA, 25 bp, Homo sapien
cattaccgaggacaaccagagacaa

SEQ ID NO: 5204504 - DNA, 25 bp, Homo sapien
aagaagatgccagatcagagtggtt

SEQ ID NO: 5204505 - DNA, 25 bp, Homo sapien
taggagatgcattccacagatcctc

SEQ ID NO: 5204506 - DNA, 25 bp, Homo sapien
atcagagtggttactcagcagcacc

SEQ ID NO: 5204507 - DNA, 25 bp, Homo sapien
cagcaccaagtgtgtggaaaacttt

SEQ ID NO: 5204508 - DNA, 25 bp, Homo sapien
tgtggaaaactttccccaactcaca

SEQ ID NO: 5204509 - DNA, 25 bp, Homo sapien
aagtgagatcaaggtagacaaccaa

SEQ ID NO: 5204510 - DNA, 25 bp, Homo sapien
tgtggtgccccttgccacaatctgt

SEQ ID NO: 5204511 - DNA, 25 bp, Homo sapien
gctgcatgcaaagactagtcccatt

SEQ ID NO: 5204512 - DNA, 25 bp, Homo sapien
tcagagttccccttagtgtcagcta

SEQ ID NO: 5204513 - DNA, 25 bp, Homo sapien
taatgtgcccagcactatagcagcc

SEQ ID NO: 5204514 - DNA, 25 bp, Homo sapien
tgttatttgatgaagagccgctccc

SEQ ID NO: 5204515 - DNA, 25 bp, Homo sapien
gaaggtaggtctcatgtattcatac

SEQ ID NO: 5204516 - DNA, 25 bp, Homo sapien
gaaacatgaatgaaggtaggtctca

SEQ ID NO: 5204517 - DNA, 25 bp, Homo sapien
catagaggaaacatgaatgaaggta

SEQ ID NO: 5204518 - DNA, 25 bp, Homo sapien
attcatacagaaggaagcatgtagc

SEQ ID NO: 5204519 - DNA, 25 bp, Homo sapien
cgccggctcgtgctagctttctaca

SEQ ID NO: 5204520 - DNA, 25 bp, Homo sapien
tacattaggtggaagtctcagctct

SEQ ID NO: 5204521 - DNA, 25 bp, Homo sapien
taatcttgtaacatctcaagtcttc

SEQ ID NO: 5204522 - DNA, 25 bp, Homo sapien
caagtcttccatctgtcagcgccgg

SEQ ID NO: 5204523 - DNA, 25 bp, Homo sapien
tctttgacataaccatacacaggtg

SEQ ID NO: 5204524 - DNA, 25 bp, Homo sapien
catacatgtaatgggttacttcctt

SEQ ID NO: 5204525 - DNA, 25 bp, Homo sapien
gcatttgaccatgcatgttggctca

SEQ ID NO: 5204526 - DNA, 25 bp, Homo sapien
tactttctctaagcgtatgcaacct

SEQ ID NO: 5204527 - DNA, 25 bp, Homo sapien
tcattacagatgaactgagcgccaa

SEQ ID NO: 5204528 - DNA, 25 bp, Homo sapien
tgagcgccaatggacaatatcaatg

SEQ ID NO: 5204529 - DNA, 25 bp, Homo sapien
cagtctgtcatggctccggtatctc

SEQ ID NO: 5204530 - DNA, 25 bp, Homo sapien
ttaatcgtcatccttgaatgtgtca

SEQ ID NO: 5204531 - DNA, 25 bp, Homo sapien
tccatggaataagcttctcagttcc

SEQ ID NO: 5204532 - DNA, 25 bp, Homo sapien
ttcagcctccatggaataagcttct

SEQ ID NO: 5204533 - DNA, 25 bp, Homo sapien
tctcagttcctcaaatgaattgcca

SEQ ID NO: 5204534 - DNA, 25 bp, Homo sapien
gttcctcaaatgaattgccatatga

SEQ ID NO: 5204535 - DNA, 25 bp, Homo sapien
tgatgtagataaactggaaccttac

SEQ ID NO: 5204536 - DNA, 25 bp, Homo sapien
tgcaatcaaaaccacgataataagg

SEQ ID NO: 5204537 - DNA, 25 bp, Homo sapien
taataaggtaccacttcaaatccac

SEQ ID NO: 5204538 - DNA, 25 bp, Homo sapien
ttggtgatgatgtagataaactgga

SEQ ID NO: 5204539 - DNA, 25 bp, Homo sapien
tcttgtagatatggaaagccatcta

SEQ ID NO: 5204540 - DNA, 25 bp, Homo sapien
ttcaaaagaacctagatattctcca

SEQ ID NO: 5204541 - DNA, 25 bp, Homo sapien
actaaatagttcttgtagatatgga

SEQ ID NO: 5204542 - DNA, 25 bp, Homo sapien
atgatgcctctgaaacatttcttcc

SEQ ID NO: 5204543 - DNA, 25 bp, Homo sapien
gaataggactatggaggatacagaa

SEQ ID NO: 5204544 - DNA, 25 bp, Homo sapien
gatgaacgacccatgtcatgaatag

SEQ ID NO: 5204545 - DNA, 25 bp, Homo sapien
tactgtctacagttcattgagggtt

SEQ ID NO: 5204546 - DNA, 25 bp, Homo sapien
cattgagggtttagaatacagagat

SEQ ID NO: 5204547 - DNA, 25 bp, Homo sapien
gctgttaaactagccctgctgggca

SEQ ID NO: 5204548 - DNA, 25 bp, Homo sapien
gattctgggaggtaaatggaaccaa

SEQ ID NO: 5204549 - DNA, 25 bp, Homo sapien
cacatagctagtcagcggtagagca

SEQ ID NO: 5204550 - DNA, 25 bp, Homo sapien
catttctagcacaagtacaagtttg

SEQ ID NO: 5204551 - DNA, 25 bp, Homo sapien
gctttcccaagacatgtttatttaa

SEQ ID NO: 5204552 - DNA, 25 bp, Homo sapien
ggctttcccaagacatgtttattta

SEQ ID NO: 5204553 - DNA, 25 bp, Homo sapien
tatcttgtacctcttaatgtgacca

SEQ ID NO: 5204554 - DNA, 25 bp, Homo sapien
tccagctgcttagtgaaattgccaa

SEQ ID NO: 5204555 - DNA, 25 bp, Homo sapien
tcctggtgaaaagatcaacttactg

SEQ ID NO: 5204556 - DNA, 25 bp, Homo sapien
ggaacccagtcctagtcaagagtct

SEQ ID NO: 5204557 - DNA, 25 bp, Homo sapien
gaatccaggcgtagatgctaatcca

SEQ ID NO: 5204558 - DNA, 25 bp, Homo sapien
tgtcagacaagttactgggccagga

SEQ ID NO: 5204559 - DNA, 25 bp, Homo sapien
gagtttgagagttaagccacacagc

SEQ ID NO: 5204560 - DNA, 25 bp, Homo sapien
ccaggaatagtcagaggagcgaata

SEQ ID NO: 5204561 - DNA, 25 bp, Homo sapien
gaaatgcgtaggaccacgtgaggaa

SEQ ID NO: 5204562 - DNA, 25 bp, Homo sapien
aaacctaccagcgtttggccaggca

SEQ ID NO: 5204563 - DNA, 25 bp, Homo sapien
caatatgccttatggtgaaacacct

SEQ ID NO: 5204564 - DNA, 25 bp, Homo sapien
aatatcagaaataaggacgcccacc

SEQ ID NO: 5204565 - DNA, 25 bp, Homo sapien
tcttggatgaccgatcagattccca

SEQ ID NO: 5204566 - DNA, 25 bp, Homo sapien
tgacaagagcaaagacatagagagt

SEQ ID NO: 5204567 - DNA, 25 bp, Homo sapien
gtaagtgatacataggccctacctc

SEQ ID NO: 5204568 - DNA, 25 bp, Homo sapien
ccacaaagcttatgtaggtaagtga

SEQ ID NO: 5204569 - DNA, 25 bp, Homo sapien
taagctgtaatcaggcctaaagtgg

SEQ ID NO: 5204570 - DNA, 25 bp, Homo sapien
tatttgggtagcttcggcatgcagc

SEQ ID NO: 5204571 - DNA, 25 bp, Homo sapien
gacatggcaggtattgggttctccc

SEQ ID NO: 5204572 - DNA, 25 bp, Homo sapien
gacacgagaattccttggacccagt

SEQ ID NO: 5204573 - DNA, 25 bp, Homo sapien
caagtaagaagctggcgaaacatag

SEQ ID NO: 5204574 - DNA, 25 bp, Homo sapien
ggatttttatgcaggtatgcataga

SEQ ID NO: 5204575 - DNA, 25 bp, Homo sapien
aagccaatgcaagtatttggtgagc

SEQ ID NO: 5204576 - DNA, 25 bp, Homo sapien
catatttttattacctagtatgtgt

SEQ ID NO: 5204577 - DNA, 25 bp, Homo sapien
gctggagcgcgaggacagtgggacc

SEQ ID NO: 5204578 - DNA, 25 bp, Homo sapien
ctcgctggagcaacgcaagcaggag

SEQ ID NO: 5204579 - DNA, 25 bp, Homo sapien
cagtgggaccttcaggtcagcgtgc

SEQ ID NO: 5204580 - DNA, 25 bp, Homo sapien
ggcgtagccggagctacggcaccaa

SEQ ID NO: 5204581 - DNA, 25 bp, Homo sapien
gcaagcaatcttccataacaccgag

SEQ ID NO: 5204582 - DNA, 25 bp, Homo sapien
tgctagtgcctagcaagcccctgga

SEQ ID NO: 5204583 - DNA, 25 bp, Homo sapien
gaagcgacacgtcatctaatggccc

SEQ ID NO: 5204584 - DNA, 25 bp, Homo sapien
gaactgcttacttcaggcgatccgc

SEQ ID NO: 5204585 - DNA, 25 bp, Homo sapien
cacaagtccaccaccggaattttgg

SEQ ID NO: 5204586 - DNA, 25 bp, Homo sapien
tacctgagtgctgaaatgttttgcc

SEQ ID NO: 5204587 - DNA, 25 bp, Homo sapien
tcttactctgaagttgggcacacag

SEQ ID NO: 5204588 - DNA, 25 bp, Homo sapien
tctctttgaaatggagtcctgctgc

SEQ ID NO: 5204589 - DNA, 25 bp, Homo sapien
atcaaaacgtcatcaactgcaaccc

SEQ ID NO: 5204590 - DNA, 25 bp, Homo sapien
taaaatcaaaacgtcatcaactgca

SEQ ID NO: 5204591 - DNA, 25 bp, Homo sapien
attaaaatcaaaacgtcatcaactg

SEQ ID NO: 5204592 - DNA, 25 bp, Homo sapien
actgcaacccccagataaatccatt

SEQ ID NO: 5204593 - DNA, 25 bp, Homo sapien
tccatctccaacttgcttgacaaag

SEQ ID NO: 5204594 - DNA, 25 bp, Homo sapien
agaggttgatatttgtcagcttcac

SEQ ID NO: 5204595 - DNA, 25 bp, Homo sapien
ggaacaggaactaatctccctccat

SEQ ID NO: 5204596 - DNA, 25 bp, Homo sapien
gcttcactgaggcttggaacaggaa

SEQ ID NO: 5204597 - DNA, 25 bp, Homo sapien
gcatcaagatccaccgggcaattaa

SEQ ID NO: 5204598 - DNA, 25 bp, Homo sapien
catgactcaccaagacttaaagtag

SEQ ID NO: 5204599 - DNA, 25 bp, Homo sapien
gatgaatgagttggcactcccaaac

SEQ ID NO: 5204600 - DNA, 25 bp, Homo sapien
gaccatgtaacataggtaagcccaa

SEQ ID NO: 5204601 - DNA, 25 bp, Homo sapien
cttccatagagtgaaacatctgatt

SEQ ID NO: 5204602 - DNA, 25 bp, Homo sapien
gccttccatagagtgaaacatctga

SEQ ID NO: 5204603 - DNA, 25 bp, Homo sapien
cgccttccatagagtgaaacatctg

SEQ ID NO: 5204604 - DNA, 25 bp, Homo sapien
ctcgccttccatagagtgaaacatc

SEQ ID NO: 5204605 - DNA, 25 bp, Homo sapien
gaatctgatccagcaacgttaatcc

SEQ ID NO: 5204606 - DNA, 25 bp, Homo sapien
ccacttcatgtttggttactatacc

SEQ ID NO: 5204607 - DNA, 25 bp, Homo sapien
caaatgaagctttcactgcaatgga

SEQ ID NO: 5204608 - DNA, 25 bp, Homo sapien
tttctttgagtaatgttgatacttc

SEQ ID NO: 5204609 - DNA, 25 bp, Homo sapien
tatttctggtcaatctctagctgca

SEQ ID NO: 5204610 - DNA, 25 bp, Homo sapien
gcctcttcatcagttagctccttga

SEQ ID NO: 5204611 - DNA, 25 bp, Homo sapien
ctgcatcctatttctggtcaatctc

SEQ ID NO: 5204612 - DNA, 25 bp, Homo sapien
ttcatcagttagctccttgatctgg

SEQ ID NO: 5204613 - DNA, 25 bp, Homo sapien
tgccattcttgatctgggcctcatg

SEQ ID NO: 5204614 - DNA, 25 bp, Homo sapien
gggagtcaaggctgccattcttgat

SEQ ID NO: 5204615 - DNA, 25 bp, Homo sapien
tcaaggctgccattcttgatctggg

SEQ ID NO: 5204616 - DNA, 25 bp, Homo sapien
cattcttgatctgggcctcatgatt

SEQ ID NO: 5204617 - DNA, 25 bp, Homo sapien
tcagttttcctttgtccttctcatc

SEQ ID NO: 5204618 - DNA, 25 bp, Homo sapien
gcttcagttttcctttgtccttctc

SEQ ID NO: 5204619 - DNA, 25 bp, Homo sapien
cctcatcttcctcagtcttctgctt

SEQ ID NO: 5204620 - DNA, 25 bp, Homo sapien
tgttgcctaggttgggcttcagttt

SEQ ID NO: 5204621 - DNA, 25 bp, Homo sapien
cttggtccagcggtaatcaggcagg

SEQ ID NO: 5204622 - DNA, 25 bp, Homo sapien
ttggtccagcggtaatcaggcaggt

SEQ ID NO: 5204623 - DNA, 25 bp, Homo sapien
tcttggtccagcggtaatcaggcag

SEQ ID NO: 5204624 - DNA, 25 bp, Homo sapien
gtcttggtccagcggtaatcaggca

SEQ ID NO: 5204625 - DNA, 25 bp, Homo sapien
tggaggtgccgccgttggatgccac

SEQ ID NO: 5204626 - DNA, 25 bp, Homo sapien
ctggaggtgccgccgttggatgcca

SEQ ID NO: 5204627 - DNA, 25 bp, Homo sapien
tgccgtcctcaatgagccacgagct

SEQ ID NO: 5204628 - DNA, 25 bp, Homo sapien
tcctccgccttcacttcgttgtaga

SEQ ID NO: 5204629 - DNA, 25 bp, Homo sapien
agagctccccatcgatgatcgctgg

SEQ ID NO: 5204630 - DNA, 25 bp, Homo sapien
agatgcacagtcaccaccttgccgt

SEQ ID NO: 5204631 - DNA, 25 bp, Homo sapien
cttggaattctcagggttaatcttc

SEQ ID NO: 5204632 - DNA, 25 bp, Homo sapien
attctcagggttaatcttcttggta

SEQ ID NO: 5204633 - DNA, 25 bp, Homo sapien
caggtctgacagcttggaattctca

SEQ ID NO: 5204634 - DNA, 25 bp, Homo sapien
cttcttggtattgatctcagggtca

SEQ ID NO: 5204635 - DNA, 25 bp, Homo sapien
ggtcatagattgtcttttccaccat

SEQ ID NO: 5204636 - DNA, 25 bp, Homo sapien
agattgtcttttccaccatgatgtg

SEQ ID NO: 5204637 - DNA, 25 bp, Homo sapien
gtcttttccaccatgatgtgagtct

SEQ ID NO: 5204638 - DNA, 25 bp, Homo sapien
atagattgtcttttccaccatgatg

SEQ ID NO: 5204639 - DNA, 25 bp, Homo sapien
tggaaaaatccatctccggatgctg

SEQ ID NO: 5204640 - DNA, 25 bp, Homo sapien
gccttggaaaaatccatctccggat

SEQ ID NO: 5204641 - DNA, 25 bp, Homo sapien
cttctgttcgtctgaggttggcagc

SEQ ID NO: 5204642 - DNA, 25 bp, Homo sapien
cggatgctgatccatgaacttcttc

SEQ ID NO: 5204643 - DNA, 25 bp, Homo sapien
aaagaaagttgggtggttgcagctc

SEQ ID NO: 5204644 - DNA, 25 bp, Homo sapien
ttttaatgtgtaacagtaggccaac

SEQ ID NO: 5204645 - DNA, 25 bp, Homo sapien
agctcagccccaagagttcagggag

SEQ ID NO: 5204646 - DNA, 25 bp, Homo sapien
aatgtgtaacagtaggccaactggg

SEQ ID NO: 5204647 - DNA, 25 bp, Homo sapien
acagtgagcactgtcgtgtggttcg

SEQ ID NO: 5204648 - DNA, 25 bp, Homo sapien
ttgcttcccctcgaattccagcatg

SEQ ID NO: 5204649 - DNA, 25 bp, Homo sapien
gactgacgtatcaagctgtggtcaa

SEQ ID NO: 5204650 - DNA, 25 bp, Homo sapien
cgtgtggttcggatgctctccatga

SEQ ID NO: 5204651 - DNA, 25 bp, Homo sapien
ttaaatagtaacttgagggactcca

SEQ ID NO: 5204652 - DNA, 25 bp, Homo sapien
caaaatcctatacaactgcagctct

SEQ ID NO: 5204653 - DNA, 25 bp, Homo sapien
tattctagaacagacattgctgtgc

SEQ ID NO: 5204654 - DNA, 25 bp, Homo sapien
tccagtatgcacgtaatttcacaag

SEQ ID NO: 5204655 - DNA, 25 bp, Homo sapien
tatatgaagagttcaaaaacactga

SEQ ID NO: 5204656 - DNA, 25 bp, Homo sapien
ccaggtatatgaagagttcaaaaac

SEQ ID NO: 5204657 - DNA, 25 bp, Homo sapien
aaaaacactgaaagctatggttgta

SEQ ID NO: 5204658 - DNA, 25 bp, Homo sapien
ctatggttgtatgtgctgggaaaac

SEQ ID NO: 5204659 - DNA, 25 bp, Homo sapien
ttcctgatcccttgggctacacctg

SEQ ID NO: 5204660 - DNA, 25 bp, Homo sapien
gcctttcctgatcccttgggctaca

SEQ ID NO: 5204661 - DNA, 25 bp, Homo sapien
ctttcctgatcccttgggctacacc

SEQ ID NO: 5204662 - DNA, 25 bp, Homo sapien
tcctgatcccttgggctacacctgg

SEQ ID NO: 5204663 - DNA, 25 bp, Homo sapien
attcatacagaaaggagatacagtg

SEQ ID NO: 5204664 - DNA, 25 bp, Homo sapien
tacagtgacaaataggtctctggcc

SEQ ID NO: 5204665 - DNA, 25 bp, Homo sapien
tgtatccagccacagtcttctacct

SEQ ID NO: 5204666 - DNA, 25 bp, Homo sapien
gcaaggatgcaccattatttagtct

SEQ ID NO: 5204667 - DNA, 25 bp, Homo sapien
tagaagatgttataacttgaataat

SEQ ID NO: 5204668 - DNA, 25 bp, Homo sapien
tgttagaagatgttataacttgaat

SEQ ID NO: 5204669 - DNA, 25 bp, Homo sapien
gaagatgttataacttgaataattc

SEQ ID NO: 5204670 - DNA, 25 bp, Homo sapien
aagatgttataacttgaataattca

SEQ ID NO: 5204671 - DNA, 25 bp, Homo sapien
agcagtgcaaatgttgccgtttctt

SEQ ID NO: 5204672 - DNA, 25 bp, Homo sapien
gtgcaaatgttgccgtttcttccct

SEQ ID NO: 5204673 - DNA, 25 bp, Homo sapien
agtgcaaatgttgccgtttcttccc

SEQ ID NO: 5204674 - DNA, 25 bp, Homo sapien
cagtgcaaatgttgccgtttcttcc

SEQ ID NO: 5204675 - DNA, 25 bp, Homo sapien
tctttcaaataggatatttctcaac

SEQ ID NO: 5204676 - DNA, 25 bp, Homo sapien
ttctttcaaataggatatttctcaa

SEQ ID NO: 5204677 - DNA, 25 bp, Homo sapien
ttctgagtgctagcaatctgcctgc

SEQ ID NO: 5204678 - DNA, 25 bp, Homo sapien
gaaaacctcatgtgttaagccagga

SEQ ID NO: 5204679 - DNA, 25 bp, Homo sapien
gggttttctcacattgcccaagtgt

SEQ ID NO: 5204680 - DNA, 25 bp, Homo sapien
gtgcacaccactgcaaccaactaat

SEQ ID NO: 5204681 - DNA, 25 bp, Homo sapien
agaaatgtgttagaagtgaaaatga

SEQ ID NO: 5204682 - DNA, 25 bp, Homo sapien
gctgtgaacgagaaatgacatccat

SEQ ID NO: 5204683 - DNA, 25 bp, Homo sapien
gatcatccaagtaaagctgtgaacg

SEQ ID NO: 5204684 - DNA, 25 bp, Homo sapien
gaaagcacccataaactgtctccct

SEQ ID NO: 5204685 - DNA, 25 bp, Homo sapien
ggtcccttctttgagtgaaatatca

SEQ ID NO: 5204686 - DNA, 25 bp, Homo sapien
aaaacaaggaactgcatgaagtctc

SEQ ID NO: 5204687 - DNA, 25 bp, Homo sapien
atcaaaacaaggaactgcatgaagt

SEQ ID NO: 5204688 - DNA, 25 bp, Homo sapien
tcaaaacaaggaactgcatgaagtc

SEQ ID NO: 5204689 - DNA, 25 bp, Homo sapien
caaaacaaggaactgcatgaagtct

SEQ ID NO: 5204690 - DNA, 25 bp, Homo sapien
aaggtttgtggcacaactgcaccta

SEQ ID NO: 5204691 - DNA, 25 bp, Homo sapien
tgcacctaaaacaccaacacggtgt

SEQ ID NO: 5204692 - DNA, 25 bp, Homo sapien
tgtggcacaactgcacctaaaacac

SEQ ID NO: 5204693 - DNA, 25 bp, Homo sapien
caaagcaaacctagataatttaggg

SEQ ID NO: 5204694 - DNA, 25 bp, Homo sapien
gaaagggcacatgtctatcggaaca

SEQ ID NO: 5204695 - DNA, 25 bp, Homo sapien
gccatggcaattttgtgtcatggtc

SEQ ID NO: 5204696 - DNA, 25 bp, Homo sapien
tatcggaacatagattttgcatact

SEQ ID NO: 5204697 - DNA, 25 bp, Homo sapien
gctgtagaagatcacgttggtacca

SEQ ID NO: 5204698 - DNA, 25 bp, Homo sapien
taatggcagtcatgcgtgattttcc

SEQ ID NO: 5204699 - DNA, 25 bp, Homo sapien
cagataaacctctacttgcaaaggg

SEQ ID NO: 5204700 - DNA, 25 bp, Homo sapien
tgaaaaagatgagaagccacgtgac

SEQ ID NO: 5204701 - DNA, 25 bp, Homo sapien
cgtgacaagtcatatcaggatgcag

SEQ ID NO: 5204702 - DNA, 25 bp, Homo sapien
tggcatcacatttgcacataacctc

SEQ ID NO: 5204703 - DNA, 25 bp, Homo sapien
tattttcaagccgagactggttgaa

SEQ ID NO: 5204704 - DNA, 25 bp, Homo sapien
cagtacctgttagagattggttcca

SEQ ID NO: 5204705 - DNA, 25 bp, Homo sapien
aacctctggacatcttccggtgtac

SEQ ID NO: 5204706 - DNA, 25 bp, Homo sapien
agattagcaaacacaaaacaacttg

SEQ ID NO: 5204707 - DNA, 25 bp, Homo sapien
accagcattattgctgggaatggaa

SEQ ID NO: 5204708 - DNA, 25 bp, Homo sapien
aaaatgagacatcatatttcactca

SEQ ID NO: 5204709 - DNA, 25 bp, Homo sapien
catcatatttcactcatcagattag

SEQ ID NO: 5204710 - DNA, 25 bp, Homo sapien
ggcttttcttcgcatcaccgaggta

SEQ ID NO: 5204711 - DNA, 25 bp, Homo sapien
tataaaacatggaactcgacttcgg

SEQ ID NO: 5204712 - DNA, 25 bp, Homo sapien
taatccaggcgaatgcagaaggcct

SEQ ID NO: 5204713 - DNA, 25 bp, Homo sapien
catcaatcaggctcagtgctgcggc

SEQ ID NO: 5204714 - DNA, 25 bp, Homo sapien
cgggccggtggccaacagtcccgag

SEQ ID NO: 5204715 - DNA, 25 bp, Homo sapien
cacttcctggatgaaaggggccgga

SEQ ID NO: 5204716 - DNA, 25 bp, Homo sapien
acggcaaaaatgcgcccgcgaccgg

SEQ ID NO: 5204717 - DNA, 25 bp, Homo sapien
ttgttttcattgaccccgacgtcga

SEQ ID NO: 5204718 - DNA, 25 bp, Homo sapien
ttagaggccgggacagcgggcgcag

SEQ ID NO: 5204719 - DNA, 25 bp, Homo sapien
ccctccgccggcacgaagccgcttt

SEQ ID NO: 5204720 - DNA, 25 bp, Homo sapien
tgcgcgcgccgcagggacgtggcgg

SEQ ID NO: 5204721 - DNA, 25 bp, Homo sapien
ggcacgaagccgctttctgcctgcg

SEQ ID NO: 5204722 - DNA, 25 bp, Homo sapien
cgccggcacgaagccgctttctgcc

SEQ ID NO: 5204723 - DNA, 25 bp, Homo sapien
tgagatagttggtccacttgtacaa

SEQ ID NO: 5204724 - DNA, 25 bp, Homo sapien
tgtgagatagttggtccacttgtac

SEQ ID NO: 5204725 - DNA, 25 bp, Homo sapien
agatagttggtccacttgtacaaca

SEQ ID NO: 5204726 - DNA, 25 bp, Homo sapien
ctgtgagatagttggtccacttgta

SEQ ID NO: 5204727 - DNA, 25 bp, Homo sapien
gattacaagcatgaagcactctact

SEQ ID NO: 5204728 - DNA, 25 bp, Homo sapien
gcctccatttctctagctaaagcaa

SEQ ID NO: 5204729 - DNA, 25 bp, Homo sapien
ttaacactatacctcaaccaaacag

SEQ ID NO: 5204730 - DNA, 25 bp, Homo sapien
cagtataactgctctcacaatggcc

SEQ ID NO: 5204731 - DNA, 25 bp, Homo sapien
tctaaaacaaaccaacgaggctgcc

SEQ ID NO: 5204732 - DNA, 25 bp, Homo sapien
taggataagattccattatctaaaa

SEQ ID NO: 5204733 - DNA, 25 bp, Homo sapien
ctaaaacaaaccaacgaggctgcca

SEQ ID NO: 5204734 - DNA, 25 bp, Homo sapien
tgagctaacactcccgacaagagga

SEQ ID NO: 5204735 - DNA, 25 bp, Homo sapien
aaacatctggcattatctgtgaaaa

SEQ ID NO: 5204736 - DNA, 25 bp, Homo sapien
tgtgaaaaagattattggccaggca

SEQ ID NO: 5204737 - DNA, 25 bp, Homo sapien
gaacaactggaaccctaatactctg

SEQ ID NO: 5204738 - DNA, 25 bp, Homo sapien
tgcatccaatcaagggtggtcccct

SEQ ID NO: 5204739 - DNA, 25 bp, Homo sapien
tttatgcatccaatcaagggtggtc

SEQ ID NO: 5204740 - DNA, 25 bp, Homo sapien
cagaatttatgcatccaatcaaggg

SEQ ID NO: 5204741 - DNA, 25 bp, Homo sapien
gaatttatgcatccaatcaagggtg

SEQ ID NO: 5204742 - DNA, 25 bp, Homo sapien
ctatgatgataaacaaaggggaaat

SEQ ID NO: 5204743 - DNA, 25 bp, Homo sapien
atgataaacaaaggggaaatacagt

SEQ ID NO: 5204744 - DNA, 25 bp, Homo sapien
gatgataaacaaaggggaaatacag

SEQ ID NO: 5204745 - DNA, 25 bp, Homo sapien
atgatgataaacaaaggggaaatac

SEQ ID NO: 5204746 - DNA, 25 bp, Homo sapien
tttttagtccttgtatcagtcaaac

SEQ ID NO: 5204747 - DNA, 25 bp, Homo sapien
gtatcagtcaaacatgctttggagc

SEQ ID NO: 5204748 - DNA, 25 bp, Homo sapien
tcaaacatgctttggagctccccag

SEQ ID NO: 5204749 - DNA, 25 bp, Homo sapien
tctccaggaatgattaattccattc

SEQ ID NO: 5204750 - DNA, 25 bp, Homo sapien
caacatcttactgtctatatatcag

SEQ ID NO: 5204751 - DNA, 25 bp, Homo sapien
atcagccagtgaaagcacgagttta

SEQ ID NO: 5204752 - DNA, 25 bp, Homo sapien
tactgtctatatatcagccagtgaa

SEQ ID NO: 5204753 - DNA, 25 bp, Homo sapien
cagtgaaagcacgagtttaggctgg

SEQ ID NO: 5204754 - DNA, 25 bp, Homo sapien
acttattgtaatgtctataaggttc

SEQ ID NO: 5204755 - DNA, 25 bp, Homo sapien
attgtaatgtctataaggttcatcc

SEQ ID NO: 5204756 - DNA, 25 bp, Homo sapien
tctcaatacctataatttacttgct

SEQ ID NO: 5204757 - DNA, 25 bp, Homo sapien
tttacttattgtaatgtctataagg

SEQ ID NO: 5204758 - DNA, 25 bp, Homo sapien
gaggcgaagttcagacattttggtt

SEQ ID NO: 5204759 - DNA, 25 bp, Homo sapien
ttgctgcattaagaggtcacagtag

SEQ ID NO: 5204760 - DNA, 25 bp, Homo sapien
tggttttcagcgattcactggtttc

SEQ ID NO: 5204761 - DNA, 25 bp, Homo sapien
cacagtagaggcgaagttcagacat

SEQ ID NO: 5204762 - DNA, 25 bp, Homo sapien
tacagtaggcagaacccagaaaagc

SEQ ID NO: 5204763 - DNA, 25 bp, Homo sapien
ccacacagacacaatcgagaagatg

SEQ ID NO: 5204764 - DNA, 25 bp, Homo sapien
tcttatggaatgactgaggatcccc

SEQ ID NO: 5204765 - DNA, 25 bp, Homo sapien
taaccacacgtgaagagatcctctt

SEQ ID NO: 5204766 - DNA, 25 bp, Homo sapien
gacaagccttgacccctggagaaat

SEQ ID NO: 5204767 - DNA, 25 bp, Homo sapien
aactctcatagttgaagcagggacc

SEQ ID NO: 5204768 - DNA, 25 bp, Homo sapien
gaatttatgccgctagcctggagaa

SEQ ID NO: 5204769 - DNA, 25 bp, Homo sapien
tcacccagagagtggtatagctcac

SEQ ID NO: 5204770 - DNA, 25 bp, Homo sapien
ggatcgcaaagtgccctgatcctgg

SEQ ID NO: 5204771 - DNA, 25 bp, Homo sapien
tccaacactctttactaaatgctca

SEQ ID NO: 5204772 - DNA, 25 bp, Homo sapien
taacctagtcatggctattccaaca

SEQ ID NO: 5204773 - DNA, 25 bp, Homo sapien
gggatgaatagagactgatctaacc

SEQ ID NO: 5204774 - DNA, 25 bp, Homo sapien
gagaaactaagggatccggatggtg

SEQ ID NO: 5204775 - DNA, 25 bp, Homo sapien
gtgttacacgtggcactaagcagag

SEQ ID NO: 5204776 - DNA, 25 bp, Homo sapien
gttacacgtggcactaagcagagaa

SEQ ID NO: 5204777 - DNA, 25 bp, Homo sapien
agaaactaagggatccggatggtgc

SEQ ID NO: 5204778 - DNA, 25 bp, Homo sapien
cagggtggctgacagaacgcttcat

SEQ ID NO: 5204779 - DNA, 25 bp, Homo sapien
gaaccagggtggctgacagaacgct

SEQ ID NO: 5204780 - DNA, 25 bp, Homo sapien
ccagggtggctgacagaacgcttca

SEQ ID NO: 5204781 - DNA, 25 bp, Homo sapien
ctctctgaactgcaagaaccagggt

SEQ ID NO: 5204782 - DNA, 25 bp, Homo sapien
tgcaaattaagtaaaaagcattaaa

SEQ ID NO: 5204783 - DNA, 25 bp, Homo sapien
ctgcaaattaagtaaaaagcattaa

SEQ ID NO: 5204784 - DNA, 25 bp, Homo sapien
tatcactacaagaatctgtatctga

SEQ ID NO: 5204785 - DNA, 25 bp, Homo sapien
ctgagtaggttcttcggcgtcgctg

SEQ ID NO: 5204786 - DNA, 25 bp, Homo sapien
ggcgtcgctgggagagtcggtgaag

SEQ ID NO: 5204787 - DNA, 25 bp, Homo sapien
ttcaagaggaatatcactacaagaa

SEQ ID NO: 5204788 - DNA, 25 bp, Homo sapien
gcttcctgagaaatagtagagactt

SEQ ID NO: 5204789 - DNA, 25 bp, Homo sapien
aaacattcaatcacagtatgctgcc

SEQ ID NO: 5204790 - DNA, 25 bp, Homo sapien
gggctcttccaaagaatggttagct

SEQ ID NO: 5204791 - DNA, 25 bp, Homo sapien
gaactaactattggaacacgacctg

SEQ ID NO: 5204792 - DNA, 25 bp, Homo sapien
cttttttcacatactcaacctcttt

SEQ ID NO: 5204793 - DNA, 25 bp, Homo sapien
cttccaggtcttgcttgattggccc

SEQ ID NO: 5204794 - DNA, 25 bp, Homo sapien
tgattggcccaagaaagtttctttc

SEQ ID NO: 5204795 - DNA, 25 bp, Homo sapien
catactcaacctctttaaccctcct

SEQ ID NO: 5204796 - DNA, 25 bp, Homo sapien
cactgctagaatcatggttggcaca

SEQ ID NO: 5204797 - DNA, 25 bp, Homo sapien
tagagtatcaacagccacaaggaga

SEQ ID NO: 5204798 - DNA, 25 bp, Homo sapien
gacatgaaattcctttagcttctgg

SEQ ID NO: 5204799 - DNA, 25 bp, Homo sapien
tgtcaatattaactccagtcctctg

SEQ ID NO: 5204800 - DNA, 25 bp, Homo sapien
gaaggatggaagagtatcttctgat

SEQ ID NO: 5204801 - DNA, 25 bp, Homo sapien
gttttttggccataagtctgctttc

SEQ ID NO: 5204802 - DNA, 25 bp, Homo sapien
ggccataagtctgctttcttcagga

SEQ ID NO: 5204803 - DNA, 25 bp, Homo sapien
aatggttgctgatgccaaatctcca

SEQ ID NO: 5204804 - DNA, 25 bp, Homo sapien
gcttttgcatagcaatacttagagg

SEQ ID NO: 5204805 - DNA, 25 bp, Homo sapien
caatacttagaggaagttggacact

SEQ ID NO: 5204806 - DNA, 25 bp, Homo sapien
tagtttaattacagcagcttttgca

SEQ ID NO: 5204807 - DNA, 25 bp, Homo sapien
gaggaagttggacacttcagtttct

SEQ ID NO: 5204808 - DNA, 25 bp, Homo sapien
cacatcttaaatttggtaggtcaca

SEQ ID NO: 5204809 - DNA, 25 bp, Homo sapien
catttggtccatggcacaagttaca

SEQ ID NO: 5204810 - DNA, 25 bp, Homo sapien
tgaccatgctgtcagtcccctcaga

SEQ ID NO: 5204811 - DNA, 25 bp, Homo sapien
taagctacaatacaccctgaccatg

SEQ ID NO: 5204812 - DNA, 25 bp, Homo sapien
tggacaggcactaccaaaaaatgct

SEQ ID NO: 5204813 - DNA, 25 bp, Homo sapien
tctctagatattggaaagagctgca

SEQ ID NO: 5204814 - DNA, 25 bp, Homo sapien
caatgacaataggtatggacaggca

SEQ ID NO: 5204815 - DNA, 25 bp, Homo sapien
tctcaagtgatatagagcagtcatc

SEQ ID NO: 5204816 - DNA, 25 bp, Homo sapien
cagtttacccaaacacatattaatg

SEQ ID NO: 5204817 - DNA, 25 bp, Homo sapien
tcaccagcaggcctaaatatacaaa

SEQ ID NO: 5204818 - DNA, 25 bp, Homo sapien
tattagtgcctaataaagattagac

SEQ ID NO: 5204819 - DNA, 25 bp, Homo sapien
taaacttaagatggaaggcctataa

SEQ ID NO: 5204820 - DNA, 25 bp, Homo sapien
tgaggtatagggctgaaatcaggac

SEQ ID NO: 5204821 - DNA, 25 bp, Homo sapien
ggaagtgcaatacctaacctagcag

SEQ ID NO: 5204822 - DNA, 25 bp, Homo sapien
caggacttggaagcactaggtattg

SEQ ID NO: 5204823 - DNA, 25 bp, Homo sapien
gaagtctgtataaagagcaactgga

SEQ ID NO: 5204824 - DNA, 25 bp, Homo sapien
aatctccctccttcgagtatgcggc

SEQ ID NO: 5204825 - DNA, 25 bp, Homo sapien
gggtggtacccacatgacctaaaca

SEQ ID NO: 5204826 - DNA, 25 bp, Homo sapien
tgttagggctcagtctctcgcttcc

SEQ ID NO: 5204827 - DNA, 25 bp, Homo sapien
tactggcggtaggtaaggcataaca

SEQ ID NO: 5204828 - DNA, 25 bp, Homo sapien
taagagctcttcaggacaggtagaa

SEQ ID NO: 5204829 - DNA, 25 bp, Homo sapien
tattctcgatgatagttacccctgc

SEQ ID NO: 5204830 - DNA, 25 bp, Homo sapien
caagtaggtaggtcattctccgcta

SEQ ID NO: 5204831 - DNA, 25 bp, Homo sapien
tcatccctgtaaggaggtttgccac

SEQ ID NO: 5204832 - DNA, 25 bp, Homo sapien
ttagttatagcaatcaaaatctgta

SEQ ID NO: 5204833 - DNA, 25 bp, Homo sapien
tactacaatattttcgacaagcaga

SEQ ID NO: 5204834 - DNA, 25 bp, Homo sapien
ctaagttaatttagagactagcttt

SEQ ID NO: 5204835 - DNA, 25 bp, Homo sapien
tatagagtatacaccttttggaatt

SEQ ID NO: 5204836 - DNA, 25 bp, Homo sapien
taattggtctgcgtcaacctaccca

SEQ ID NO: 5204837 - DNA, 25 bp, Homo sapien
tctgactgctagacgatggccacaa

SEQ ID NO: 5204838 - DNA, 25 bp, Homo sapien
tgcaaagctggctacccattggaat

SEQ ID NO: 5204839 - DNA, 25 bp, Homo sapien
tgatgattgggtctcaccttgcccc

SEQ ID NO: 5204840 - DNA, 25 bp, Homo sapien
ttatcccttagcgaaaagcccactg

SEQ ID NO: 5204841 - DNA, 25 bp, Homo sapien
cctctgaaagtagcacggtgtggcc

SEQ ID NO: 5204842 - DNA, 25 bp, Homo sapien
cccagtgaaggagagctgcgctaaa

SEQ ID NO: 5204843 - DNA, 25 bp, Homo sapien
caacagaacggccagaagccccttt

SEQ ID NO: 5204844 - DNA, 25 bp, Homo sapien
ccaggcgctgagatccaatttgggc

SEQ ID NO: 5204845 - DNA, 25 bp, Homo sapien
tagtctgtgcggatgaaaattccaa

SEQ ID NO: 5204846 - DNA, 25 bp, Homo sapien
tgatgcctaaggatgattcccagcc

SEQ ID NO: 5204847 - DNA, 25 bp, Homo sapien
gaagacaggatttcgcacttgctaa

SEQ ID NO: 5204848 - DNA, 25 bp, Homo sapien
ttcagcaagttttccgtcttaagtc

SEQ ID NO: 5204849 - DNA, 25 bp, Homo sapien
ttaagtcagattccctaaaagcaga

SEQ ID NO: 5204850 - DNA, 25 bp, Homo sapien
ctccttaatgtaggtacaggtgacc

SEQ ID NO: 5204851 - DNA, 25 bp, Homo sapien
taggtacaggtgaccaaagctgaag

SEQ ID NO: 5204852 - DNA, 25 bp, Homo sapien
gaagctcttccatctgatatcagca

SEQ ID NO: 5204853 - DNA, 25 bp, Homo sapien
tgctttcacgggtgagcctacccca

SEQ ID NO: 5204854 - DNA, 25 bp, Homo sapien
gaattccgcctaaaattgaagctct

SEQ ID NO: 5204855 - DNA, 25 bp, Homo sapien
tgaaggcaaagttctaacagtagcc

SEQ ID NO: 5204856 - DNA, 25 bp, Homo sapien
aattcataagactgatacttctgac

SEQ ID NO: 5204857 - DNA, 25 bp, Homo sapien
tctgaagacaagggagggttcttct

SEQ ID NO: 5204858 - DNA, 25 bp, Homo sapien
aggtaaatataaactctctgaagac

SEQ ID NO: 5204859 - DNA, 25 bp, Homo sapien
ggccattacacaaggaggtaaatat

SEQ ID NO: 5204860 - DNA, 25 bp, Homo sapien
tctggtgaaggtggaacgtctaaaa

SEQ ID NO: 5204861 - DNA, 25 bp, Homo sapien
gaggtcacctggtataaagatggca

SEQ ID NO: 5204862 - DNA, 25 bp, Homo sapien
tattcagcagatggtacctatgagc

SEQ ID NO: 5204863 - DNA, 25 bp, Homo sapien
tgaaccaaaagctcctgaaccaatt

SEQ ID NO: 5204864 - DNA, 25 bp, Homo sapien
caggcttccgatgagggcaattaca

SEQ ID NO: 5204865 - DNA, 25 bp, Homo sapien
caattacagcgtggtggtagaaaac

SEQ ID NO: 5204866 - DNA, 25 bp, Homo sapien
tttgagatctcttcagtccaggctt

SEQ ID NO: 5204867 - DNA, 25 bp, Homo sapien
tctccaaaacgagtgaaatctccag

SEQ ID NO: 5204868 - DNA, 25 bp, Homo sapien
gcttctgactatgcaacgttggacg

SEQ ID NO: 5204869 - DNA, 25 bp, Homo sapien
aactacaagggcgaagcttctgact

SEQ ID NO: 5204870 - DNA, 25 bp, Homo sapien
tatgcttcccaacgcagagatgaag

SEQ ID NO: 5204871 - DNA, 25 bp, Homo sapien
gctgacaagaacagaggcgtatgct

SEQ ID NO: 5204872 - DNA, 25 bp, Homo sapien
ccacaatggtgtggaactccaagaa

SEQ ID NO: 5204873 - DNA, 25 bp, Homo sapien
tcacactgagaatgcgctcgcacag

SEQ ID NO: 5204874 - DNA, 25 bp, Homo sapien
cagtctaagccaactgccgaggtta

SEQ ID NO: 5204875 - DNA, 25 bp, Homo sapien
gattcattacaccaacacgagtgga

SEQ ID NO: 5204876 - DNA, 25 bp, Homo sapien
catgctctccgaggtgaagtggtca

SEQ ID NO: 5204877 - DNA, 25 bp, Homo sapien
ctttcagtggcaaaccagatcctgt

SEQ ID NO: 5204878 - DNA, 25 bp, Homo sapien
aagtggtcagcatcaagattccttt

SEQ ID NO: 5204879 - DNA, 25 bp, Homo sapien
aaggcatgggagcagttcatgctct

SEQ ID NO: 5204880 - DNA, 25 bp, Homo sapien
cattactattgaaaacactgagcac

SEQ ID NO: 5204881 - DNA, 25 bp, Homo sapien
tgtcatgaagaatgtccaacgtaag

SEQ ID NO: 5204882 - DNA, 25 bp, Homo sapien
taagactcatgctgggaaatacaaa

SEQ ID NO: 5204883 - DNA, 25 bp, Homo sapien
gcactatactcatcttgtcatgaag

SEQ ID NO: 5204884 - DNA, 25 bp, Homo sapien
ttcggcttcatgttatgtacattgg

SEQ ID NO: 5204885 - DNA, 25 bp, Homo sapien
gaaatattatggagctgtgggttcc

SEQ ID NO: 5204886 - DNA, 25 bp, Homo sapien
tgtgggttccacacttcggcttcat

SEQ ID NO: 5204887 - DNA, 25 bp, Homo sapien
aaagagaaatattatggagctgtgg

SEQ ID NO: 5204888 - DNA, 25 bp, Homo sapien
aacaccgcagttccatcctggttac

SEQ ID NO: 5204889 - DNA, 25 bp, Homo sapien
atagccaccaatgaggttggagaag

SEQ ID NO: 5204890 - DNA, 25 bp, Homo sapien
gccaccaatgaggttggagaagtag

SEQ ID NO: 5204891 - DNA, 25 bp, Homo sapien
ttctcctgcaagcaacaccgcagtt

SEQ ID NO: 5204892 - DNA, 25 bp, Homo sapien
tccaagtccgctctgtgagggtcag

SEQ ID NO: 5204893 - DNA, 25 bp, Homo sapien
gtatcagttccgcatcatcgcacag

SEQ ID NO: 5204894 - DNA, 25 bp, Homo sapien
tggtcccggcccaaagatgatggtg

SEQ ID NO: 5204895 - DNA, 25 bp, Homo sapien
tataccattgattccagagtccgag

SEQ ID NO: 5204896 - DNA, 25 bp, Homo sapien
tccagaatatcctgattatgaactt

SEQ ID NO: 5204897 - DNA, 25 bp, Homo sapien
tttttccagaatatcctgattatga

SEQ ID NO: 5204898 - DNA, 25 bp, Homo sapien
aaggtatctttgtaaggcaaggtgg

SEQ ID NO: 5204899 - DNA, 25 bp, Homo sapien
gtaaggcaaggtggcgtcatcagac

SEQ ID NO: 5204900 - DNA, 25 bp, Homo sapien
tccgcgtcctagcttgtaatgctgg

SEQ ID NO: 5204901 - DNA, 25 bp, Homo sapien
ctcagggtgcagaatacaggttccg

SEQ ID NO: 5204902 - DNA, 25 bp, Homo sapien
tagcttgtaatgctggtggacctgg

SEQ ID NO: 5204903 - DNA, 25 bp, Homo sapien
cagaatacaggttccgcgtcctagc

SEQ ID NO: 5204904 - DNA, 25 bp, Homo sapien
gagcagatcgatgggtccgtgtaaa

SEQ ID NO: 5204905 - DNA, 25 bp, Homo sapien
aggcttagaatatgaacaccgtgtc

SEQ ID NO: 5204906 - DNA, 25 bp, Homo sapien
tgtgacaatgacacggtaccgctcc

SEQ ID NO: 5204907 - DNA, 25 bp, Homo sapien
ggatgacggtggctcccaagtgact

SEQ ID NO: 5204908 - DNA, 25 bp, Homo sapien
tggctgcaacaaaccgcttcgggat

SEQ ID NO: 5204909 - DNA, 25 bp, Homo sapien
cagtctgaggtcatagagtgtcgca

SEQ ID NO: 5204910 - DNA, 25 bp, Homo sapien
gattggctcttacttgcagtctgag

SEQ ID NO: 5204911 - DNA, 25 bp, Homo sapien
agcatccgtaagtccacaggccctt

SEQ ID NO: 5204912 - DNA, 25 bp, Homo sapien
tgttgccaacaatcgatctttctac

SEQ ID NO: 5204913 - DNA, 25 bp, Homo sapien
ccatagtgttgccaacaatcgatct

SEQ ID NO: 5204914 - DNA, 25 bp, Homo sapien
tagtgttgccaacaatcgatctttc

SEQ ID NO: 5204915 - DNA, 25 bp, Homo sapien
ctttcccatagtgttgccaacaatc

SEQ ID NO: 5204916 - DNA, 25 bp, Homo sapien
tggatatgttctcgaggcctgcaaa

SEQ ID NO: 5204917 - DNA, 25 bp, Homo sapien
cagaagtgcctttggtgcctgcaaa

SEQ ID NO: 5204918 - DNA, 25 bp, Homo sapien
tctacgatggtggtagccgactcac

SEQ ID NO: 5204919 - DNA, 25 bp, Homo sapien
gcctgcaaagctagaagtggtcgat

SEQ ID NO: 5204920 - DNA, 25 bp, Homo sapien
taagtggcaaatccttttacagagt

SEQ ID NO: 5204921 - DNA, 25 bp, Homo sapien
gaagaggtttagcaggaacatacag

SEQ ID NO: 5204922 - DNA, 25 bp, Homo sapien
taaatatagcttaagtcagagaaca

SEQ ID NO: 5204923 - DNA, 25 bp, Homo sapien
gaacatacagtttctagtggtttca

SEQ ID NO: 5204924 - DNA, 25 bp, Homo sapien
tgaatatgaattccgtgtgaaggcc

SEQ ID NO: 5204925 - DNA, 25 bp, Homo sapien
caggaagcccatttaccattgacgt

SEQ ID NO: 5204926 - DNA, 25 bp, Homo sapien
cattggaaggccaggtccagtaacc

SEQ ID NO: 5204927 - DNA, 25 bp, Homo sapien
cattaaggagcctcaaatcgagccc

SEQ ID NO: 5204928 - DNA, 25 bp, Homo sapien
gtgatcagcaaacgaccaatctctg

SEQ ID NO: 5204929 - DNA, 25 bp, Homo sapien
tgtcatggctgaaaatgctgcagga

SEQ ID NO: 5204930 - DNA, 25 bp, Homo sapien
taggagactggcacaaggtgaatgc

SEQ ID NO: 5204931 - DNA, 25 bp, Homo sapien
caaagtcactggtctgacagaaggc

SEQ ID NO: 5204932 - DNA, 25 bp, Homo sapien
aaagaacttgtgtgactgtgcagca

SEQ ID NO: 5204933 - DNA, 25 bp, Homo sapien
tacaaggaagaccagtgcctcgagt

SEQ ID NO: 5204934 - DNA, 25 bp, Homo sapien
tcattattaagtccggagagagcct

SEQ ID NO: 5204935 - DNA, 25 bp, Homo sapien
taaccgacgtacttggatccaccag

SEQ ID NO: 5204936 - DNA, 25 bp, Homo sapien
tgggctatagcattgagaaacggca

SEQ ID NO: 5204937 - DNA, 25 bp, Homo sapien
tacattgatgtcacccgggaaacca

SEQ ID NO: 5204938 - DNA, 25 bp, Homo sapien
gaacgctgggtgagatgcaacttta

SEQ ID NO: 5204939 - DNA, 25 bp, Homo sapien
tataattttttagacccacctggca

SEQ ID NO: 5204940 - DNA, 25 bp, Homo sapien
tgtggcaaaacaccagttcaggatt

SEQ ID NO: 5204941 - DNA, 25 bp, Homo sapien
caatgtgacttctgatggcatgtca

SEQ ID NO: 5204942 - DNA, 25 bp, Homo sapien
gaagagaatatagagccactggact

SEQ ID NO: 5204943 - DNA, 25 bp, Homo sapien
tgtcactaacttgggatgctccagt

SEQ ID NO: 5204944 - DNA, 25 bp, Homo sapien
cccatctgagatagaagagtggcct

SEQ ID NO: 5204945 - DNA, 25 bp, Homo sapien
tctgacatgaaccatccacacttgg

SEQ ID NO: 5204946 - DNA, 25 bp, Homo sapien
tgataattccaaacagcatggcaga

SEQ ID NO: 5204947 - DNA, 25 bp, Homo sapien
taaaaggtgcttaagtccctgcaca

SEQ ID NO: 5204948 - DNA, 25 bp, Homo sapien
aacacagactttgatgatgatagta

SEQ ID NO: 5204949 - DNA, 25 bp, Homo sapien
atgatagtattagcagcagctaaca

SEQ ID NO: 5204950 - DNA, 25 bp, Homo sapien
tcagagcctactgtagcccaatatc

SEQ ID NO: 5204951 - DNA, 25 bp, Homo sapien
atatccattcaaagttcctggtcct

SEQ ID NO: 5204952 - DNA, 25 bp, Homo sapien
gagcctactgtagcccaatatccat

SEQ ID NO: 5204953 - DNA, 25 bp, Homo sapien
ccattcaaagttcctggtcctcctg

SEQ ID NO: 5204954 - DNA, 25 bp, Homo sapien
cagattggcatggacaaatgtagcc

SEQ ID NO: 5204955 - DNA, 25 bp, Homo sapien
tagtacagaaacgtgaaaccagcag

SEQ ID NO: 5204956 - DNA, 25 bp, Homo sapien
tgaaggacctttggctgtaactgaa

SEQ ID NO: 5204957 - DNA, 25 bp, Homo sapien
gtgtgtactatcatggttccctcca

SEQ ID NO: 5204958 - DNA, 25 bp, Homo sapien
tatgccactagaaaagatgcgggtg

SEQ ID NO: 5204959 - DNA, 25 bp, Homo sapien
gatggcggctcaccaattaagtcct

SEQ ID NO: 5204960 - DNA, 25 bp, Homo sapien
tggacacctcccttggaagatggcg

SEQ ID NO: 5204961 - DNA, 25 bp, Homo sapien
gaaaccagccgacttttgtggacag

SEQ ID NO: 5204962 - DNA, 25 bp, Homo sapien
tagggtatcatctcgagttcaagga

SEQ ID NO: 5204963 - DNA, 25 bp, Homo sapien
tgtggaagagagctaacaagactcc

SEQ ID NO: 5204964 - DNA, 25 bp, Homo sapien
tgggcaagccaagcctaccatcaga

SEQ ID NO: 5204965 - DNA, 25 bp, Homo sapien
tcaatttagcaggtgtgggcaagcc

SEQ ID NO: 5204966 - DNA, 25 bp, Homo sapien
cctgagggagaacttgatgcggact

SEQ ID NO: 5204967 - DNA, 25 bp, Homo sapien
tatatcttaaccctggagaacagct

SEQ ID NO: 5204968 - DNA, 25 bp, Homo sapien
gatgcggacttaaggaagacactca

SEQ ID NO: 5204969 - DNA, 25 bp, Homo sapien
tatgtaccagtaaaaggacgcccac

SEQ ID NO: 5204970 - DNA, 25 bp, Homo sapien
tctactctatactcattccccattc

SEQ ID NO: 5204971 - DNA, 25 bp, Homo sapien
cattccacatattcactcttcttcc

SEQ ID NO: 5204972 - DNA, 25 bp, Homo sapien
tcctaggtcatataggaaattgaca

SEQ ID NO: 5204973 - DNA, 25 bp, Homo sapien
ccagacctctactctatactcattc

SEQ ID NO: 5204974 - DNA, 25 bp, Homo sapien
tattcagcgtgaaccggaaggactc

SEQ ID NO: 5204975 - DNA, 25 bp, Homo sapien
ggactcaggagactataccattact

SEQ ID NO: 5204976 - DNA, 25 bp, Homo sapien
ctggaactaatgtctgcttggatgc

SEQ ID NO: 5204977 - DNA, 25 bp, Homo sapien
gccatgcagcggaatctgtgcacct

SEQ ID NO: 5204978 - DNA, 25 bp, Homo sapien
gaagagtacacagctactggcctag

SEQ ID NO: 5204979 - DNA, 25 bp, Homo sapien
cagtgactatcctcgcagaaaatgg

SEQ ID NO: 5204980 - DNA, 25 bp, Homo sapien
caggaccgcggtaaacattagccca

SEQ ID NO: 5204981 - DNA, 25 bp, Homo sapien
tctgggctcgtccaaagcatgatgg

SEQ ID NO: 5204982 - DNA, 25 bp, Homo sapien
ggttggaaagctgatcccaggccag

SEQ ID NO: 5204983 - DNA, 25 bp, Homo sapien
tgtcatggcacatccctctggagga

SEQ ID NO: 5204984 - DNA, 25 bp, Homo sapien
gatatagacgctgatgcttgctccc

SEQ ID NO: 5204985 - DNA, 25 bp, Homo sapien
tccaaagatggttgcgcagttccca

SEQ ID NO: 5204986 - DNA, 25 bp, Homo sapien
gccggtagcaaaacagtagccgtac

SEQ ID NO: 5204987 - DNA, 25 bp, Homo sapien
acagtttccaatgcagccggtagca

SEQ ID NO: 5204988 - DNA, 25 bp, Homo sapien
ttcttgatgttcctgggccaccaac

SEQ ID NO: 5204989 - DNA, 25 bp, Homo sapien
gaactgcttaaggagagacactggg

SEQ ID NO: 5204990 - DNA, 25 bp, Homo sapien
tgtacacaattctcaaattgctaga

SEQ ID NO: 5204991 - DNA, 25 bp, Homo sapien
gctagaaggccatgaatatgtattc

SEQ ID NO: 5204992 - DNA, 25 bp, Homo sapien
aacagatgctaacaagaagacatgc

SEQ ID NO: 5204993 - DNA, 25 bp, Homo sapien
tgtttccagtgaacctaaagagtgc

SEQ ID NO: 5204994 - DNA, 25 bp, Homo sapien
cattagctcatccatggtcatcaag

SEQ ID NO: 5204995 - DNA, 25 bp, Homo sapien
gaggagccatcaaggcgtctattct

SEQ ID NO: 5204996 - DNA, 25 bp, Homo sapien
gagaccacagccattagctcatcca

SEQ ID NO: 5204997 - DNA, 25 bp, Homo sapien
tcaagaagccaccattgagaccaca

SEQ ID NO: 5204998 - DNA, 25 bp, Homo sapien
ccgaatcattgcctatgtgtctgga

SEQ ID NO: 5204999 - DNA, 25 bp, Homo sapien
ctggaaagcctcctccaaccgtcac

SEQ ID NO: 5205000 - DNA, 25 bp, Homo sapien
catgctggaggggtgatccgaatca

SEQ ID NO: 5205001 - DNA, 25 bp, Homo sapien
gggtgatccgaatcattgcctatgt

SEQ ID NO: 5205002 - DNA, 25 bp, Homo sapien
tctgcagatctggagtggtctcccc

SEQ ID NO: 5205003 - DNA, 25 bp, Homo sapien
ggactaaatcatctgcagatctgga

SEQ ID NO: 5205004 - DNA, 25 bp, Homo sapien
ccaaagtgacagattggactaaatc

SEQ ID NO: 5205005 - DNA, 25 bp, Homo sapien
ccccactaaaagatggtggatccaa

SEQ ID NO: 5205006 - DNA, 25 bp, Homo sapien
gatggaagagagttaaccgagatcc

SEQ ID NO: 5205007 - DNA, 25 bp, Homo sapien
caatcaatgctgctggcgtgggtcc

SEQ ID NO: 5205008 - DNA, 25 bp, Homo sapien
tagcagcgtgactcgtaactccatg

SEQ ID NO: 5205009 - DNA, 25 bp, Homo sapien
tgaaggttccgactatcaattccgg

SEQ ID NO: 5205010 - DNA, 25 bp, Homo sapien
gaacctgttctctatgacacccatg

SEQ ID NO: 5205011 - DNA, 25 bp, Homo sapien
gacactggcttatataccatcacag

SEQ ID NO: 5205012 - DNA, 25 bp, Homo sapien
cccatgtcaacaaactggtggtaga

SEQ ID NO: 5205013 - DNA, 25 bp, Homo sapien
tagttattccgcagtctcgcaggag

SEQ ID NO: 5205014 - DNA, 25 bp, Homo sapien
gaattcaccttcttgtgtatccctt

SEQ ID NO: 5205015 - DNA, 25 bp, Homo sapien
gaagaaactgtagtcactaccctct

SEQ ID NO: 5205016 - DNA, 25 bp, Homo sapien
gggaattcaccttcttgtgtatccc

SEQ ID NO: 5205017 - DNA, 25 bp, Homo sapien
agtgtgaagaaactgtagtcactac

SEQ ID NO: 5205018 - DNA, 25 bp, Homo sapien
atccattttaatgaagtatatatat

SEQ ID NO: 5205019 - DNA, 25 bp, Homo sapien
ctatatgagaaaagatatatccatt

SEQ ID NO: 5205020 - DNA, 25 bp, Homo sapien
tatccattttaatgaagtatatata

SEQ ID NO: 5205021 - DNA, 25 bp, Homo sapien
tatgagaaaagatatatccatttta

SEQ ID NO: 5205022 - DNA, 25 bp, Homo sapien
gatgtctgtaatttcctcgctgtaa

SEQ ID NO: 5205023 - DNA, 25 bp, Homo sapien
gctgtaattttcctcgcagtctgtt

SEQ ID NO: 5205024 - DNA, 25 bp, Homo sapien
tcttagcaactgctgagacccattt

SEQ ID NO: 5205025 - DNA, 25 bp, Homo sapien
tccctgttcaaaggagatgatgtct

SEQ ID NO: 5205026 - DNA, 25 bp, Homo sapien
taactacctgtgaatgtgtggtgcc

SEQ ID NO: 5205027 - DNA, 25 bp, Homo sapien
tgtggtgcctaatctgaaagagctc

SEQ ID NO: 5205028 - DNA, 25 bp, Homo sapien
gagatccctgccactgatattcaag

SEQ ID NO: 5205029 - DNA, 25 bp, Homo sapien
tggtggcagcccaatcaaaggatac

SEQ ID NO: 5205030 - DNA, 25 bp, Homo sapien
caatggtggctctccaattactggc

SEQ ID NO: 5205031 - DNA, 25 bp, Homo sapien
tggactcctcctttggacaatggtg

SEQ ID NO: 5205032 - DNA, 25 bp, Homo sapien
tcaatgctagtgagctggactcctc

SEQ ID NO: 5205033 - DNA, 25 bp, Homo sapien
tcagtatgagttccgagtcagggca

SEQ ID NO: 5205034 - DNA, 25 bp, Homo sapien
gataaccaaggaagaggtatcccga

SEQ ID NO: 5205035 - DNA, 25 bp, Homo sapien
gtccgggaggacaaaggcacttaca

SEQ ID NO: 5205036 - DNA, 25 bp, Homo sapien
tcttgctacttgacatgggatgccc

SEQ ID NO: 5205037 - DNA, 25 bp, Homo sapien
tgggatgcccctcttgataatggtg

SEQ ID NO: 5205038 - DNA, 25 bp, Homo sapien
taaaggtcctccaacatctccagag

SEQ ID NO: 5205039 - DNA, 25 bp, Homo sapien
tctccagagaggctcacatacactg

SEQ ID NO: 5205040 - DNA, 25 bp, Homo sapien
tctcagctggtcattcaaagcaaag

SEQ ID NO: 5205041 - DNA, 25 bp, Homo sapien
tagaagcatccccagttacaaaggt

SEQ ID NO: 5205042 - DNA, 25 bp, Homo sapien
cctggaaagttcagtccaccttcag

SEQ ID NO: 5205043 - DNA, 25 bp, Homo sapien
agctggacctggaaagttcagtcca

SEQ ID NO: 5205044 - DNA, 25 bp, Homo sapien
tggaaagttcagtccaccttcagat

SEQ ID NO: 5205045 - DNA, 25 bp, Homo sapien
tggacctggaaagttcagtccacct

SEQ ID NO: 5205046 - DNA, 25 bp, Homo sapien
ttcctgagaaagatggagggtcccc

SEQ ID NO: 5205047 - DNA, 25 bp, Homo sapien
cattgtggaaaagagagacgtcagg

SEQ ID NO: 5205048 - DNA, 25 bp, Homo sapien
aaagtgaacccagtgaacccagtga

SEQ ID NO: 5205049 - DNA, 25 bp, Homo sapien
gctcatggaaggacaggaatactca

SEQ ID NO: 5205050 - DNA, 25 bp, Homo sapien
gatttcattggcttgcagatcctcc

SEQ ID NO: 5205051 - DNA, 25 bp, Homo sapien
tcttgctggacctggaaaaccaagc

SEQ ID NO: 5205052 - DNA, 25 bp, Homo sapien
gattggtatgtttggcccagtctaa

SEQ ID NO: 5205053 - DNA, 25 bp, Homo sapien
cccagtctaaagtgtgtggcagtta

SEQ ID NO: 5205054 - DNA, 25 bp, Homo sapien
gcaataagatgccagtaaaggacac

SEQ ID NO: 5205055 - DNA, 25 bp, Homo sapien
gaaccttctgatatcactaaagacg

SEQ ID NO: 5205056 - DNA, 25 bp, Homo sapien
taaaggacacaacatacaggtatgc

SEQ ID NO: 5205057 - DNA, 25 bp, Homo sapien
tggtggcagcccaatcacaggatac

SEQ ID NO: 5205058 - DNA, 25 bp, Homo sapien
cgtcaaggatacaaacttcaaggcc

SEQ ID NO: 5205059 - DNA, 25 bp, Homo sapien
gacactggcacatatatcattgagg

SEQ ID NO: 5205060 - DNA, 25 bp, Homo sapien
tcctcgatgtgaagctccttgctgg

SEQ ID NO: 5205061 - DNA, 25 bp, Homo sapien
tgtggagagacgagcaactgatagt

SEQ ID NO: 5205062 - DNA, 25 bp, Homo sapien
tcattgagaatcctatgctgccggt

SEQ ID NO: 5205063 - DNA, 25 bp, Homo sapien
gcagggtgctagcaaaccaagcaga

SEQ ID NO: 5205064 - DNA, 25 bp, Homo sapien
taaaggtgctgctgaatgtactgcc

SEQ ID NO: 5205065 - DNA, 25 bp, Homo sapien
caaatggtatgcctaccgcgtgaag

SEQ ID NO: 5205066 - DNA, 25 bp, Homo sapien
tctgataaatgggttgcctgtggag

SEQ ID NO: 5205067 - DNA, 25 bp, Homo sapien
aaagatgtccacgtggttctgataa

SEQ ID NO: 5205068 - DNA, 25 bp, Homo sapien
gataaatgggttgcctgtggagaac

SEQ ID NO: 5205069 - DNA, 25 bp, Homo sapien
cgtggttctgataaatgggttgcct

SEQ ID NO: 5205070 - DNA, 25 bp, Homo sapien
caactgcagtttgtatccctggtca

SEQ ID NO: 5205071 - DNA, 25 bp, Homo sapien
ggtggcctgtgtaagactgactctc

SEQ ID NO: 5205072 - DNA, 25 bp, Homo sapien
tgctcgtaacaaatgtggccctgga

SEQ ID NO: 5205073 - DNA, 25 bp, Homo sapien
gaagagaactgcataggtggcctgt

SEQ ID NO: 5205074 - DNA, 25 bp, Homo sapien
ggttccaagtacaggctatccaagg

SEQ ID NO: 5205075 - DNA, 25 bp, Homo sapien
tccaagtgaacgttcagacaagggc

SEQ ID NO: 5205076 - DNA, 25 bp, Homo sapien
tcgcccaagtgcacccaaagaattg

SEQ ID NO: 5205077 - DNA, 25 bp, Homo sapien
gaagaccttgtctgcctatgccgaa

SEQ ID NO: 5205078 - DNA, 25 bp, Homo sapien
agtacctattccgtgtgagtgcaag

SEQ ID NO: 5205079 - DNA, 25 bp, Homo sapien
gagacaagacttctatcaggtggga

SEQ ID NO: 5205080 - DNA, 25 bp, Homo sapien
gtacagtttccgagtgagagcccaa

SEQ ID NO: 5205081 - DNA, 25 bp, Homo sapien
tggccacagaccgtgcagagagttg

SEQ ID NO: 5205082 - DNA, 25 bp, Homo sapien
tacaactaagctatcaccctgagag

SEQ ID NO: 5205083 - DNA, 25 bp, Homo sapien
taatctttacatgccagagccttgg

SEQ ID NO: 5205084 - DNA, 25 bp, Homo sapien
caagcctctgacaatggtggtgcca

SEQ ID NO: 5205085 - DNA, 25 bp, Homo sapien
taagcttgaactggcaggtcagtcc

SEQ ID NO: 5205086 - DNA, 25 bp, Homo sapien
tacatcgactacagatttgtgatat

SEQ ID NO: 5205087 - DNA, 25 bp, Homo sapien
gaaagatacatcgactacagatttg

SEQ ID NO: 5205088 - DNA, 25 bp, Homo sapien
taaacaccagatgatgagtgaagga

SEQ ID NO: 5205089 - DNA, 25 bp, Homo sapien
tgaaggaaagatacatcgactacag

SEQ ID NO: 5205090 - DNA, 25 bp, Homo sapien
gttgagatcatcaggcctccacaag

SEQ ID NO: 5205091 - DNA, 25 bp, Homo sapien
aatttagtggccatcattgcaagct

SEQ ID NO: 5205092 - DNA, 25 bp, Homo sapien
tcaataaagataaggtggaagtcca

SEQ ID NO: 5205093 - DNA, 25 bp, Homo sapien
aagatattcttgaagcccctggtgc

SEQ ID NO: 5205094 - DNA, 25 bp, Homo sapien
caagctctcgaaccgatggcaaagt

SEQ ID NO: 5205095 - DNA, 25 bp, Homo sapien
ggtcattcagaacgctcaccttgag

SEQ ID NO: 5205096 - DNA, 25 bp, Homo sapien
catcatatccaagggagcagtgcgc

SEQ ID NO: 5205097 - DNA, 25 bp, Homo sapien
tgtgaagtctccaaacctggcgcag

SEQ ID NO: 5205098 - DNA, 25 bp, Homo sapien
ccacctccgagttaagcgtaagtat

SEQ ID NO: 5205099 - DNA, 25 bp, Homo sapien
tgttaaatctagtgcccacctccga

SEQ ID NO: 5205100 - DNA, 25 bp, Homo sapien
aactgtcgcctggaccagacgggtg

SEQ ID NO: 5205101 - DNA, 25 bp, Homo sapien
tctgtgatgctgctagttggctcag

SEQ ID NO: 5205102 - DNA, 25 bp, Homo sapien
gatgacacctcccaaattagagtag

SEQ ID NO: 5205103 - DNA, 25 bp, Homo sapien
tcaatgcaagacgaagggaaaactc

SEQ ID NO: 5205104 - DNA, 25 bp, Homo sapien
gttatattgcatgaaagcagcccaa

SEQ ID NO: 5205105 - DNA, 25 bp, Homo sapien
taaatggttcaagaatgaccagcgc

SEQ ID NO: 5205106 - DNA, 25 bp, Homo sapien
caagtggcaaactgatcattgaagg

SEQ ID NO: 5205107 - DNA, 25 bp, Homo sapien
ctaagcattcaatggtgatcaagtc

SEQ ID NO: 5205108 - DNA, 25 bp, Homo sapien
aatacatgtttgaagctgaagataa

SEQ ID NO: 5205109 - DNA, 25 bp, Homo sapien
tgagcttataaaggatggcactaag

SEQ ID NO: 5205110 - DNA, 25 bp, Homo sapien
gctaaatgtcttttacagaggccga

SEQ ID NO: 5205111 - DNA, 25 bp, Homo sapien
aaatattctatcaaggcagatggcc

SEQ ID NO: 5205112 - DNA, 25 bp, Homo sapien
tggaaaagcctctgtacggagtaga

SEQ ID NO: 5205113 - DNA, 25 bp, Homo sapien
gaggccgatccctacttcactgtga

SEQ ID NO: 5205114 - DNA, 25 bp, Homo sapien
tgtggaaaacgccaacaacctggag

SEQ ID NO: 5205115 - DNA, 25 bp, Homo sapien
gaaacctatacgagaccagcatgtg

SEQ ID NO: 5205116 - DNA, 25 bp, Homo sapien
tccctgcggaaccaaatgataagac

SEQ ID NO: 5205117 - DNA, 25 bp, Homo sapien
tcattagagattggctggtgaaacc

SEQ ID NO: 5205118 - DNA, 25 bp, Homo sapien
gtcacagtggtcaaaggacagccat

SEQ ID NO: 5205119 - DNA, 25 bp, Homo sapien
gtggagaaacctggccgaattgtgc

SEQ ID NO: 5205120 - DNA, 25 bp, Homo sapien
tgcgagttaaacaaagagcgtgacg

SEQ ID NO: 5205121 - DNA, 25 bp, Homo sapien
cattggcttgatgcgggctctgacc

SEQ ID NO: 5205122 - DNA, 25 bp, Homo sapien
agaatcagagttcgttggctcttca

SEQ ID NO: 5205123 - DNA, 25 bp, Homo sapien
aaagacatcatcttgacagaatcag

SEQ ID NO: 5205124 - DNA, 25 bp, Homo sapien
taaaggctgtgccactgaagtttgt

SEQ ID NO: 5205125 - DNA, 25 bp, Homo sapien
tcttcagcaatctttgaatgtttgg

SEQ ID NO: 5205126 - DNA, 25 bp, Homo sapien
tcaaaccacagtcttccagcataag

SEQ ID NO: 5205127 - DNA, 25 bp, Homo sapien
actgcagtctgttttcatggttcga

SEQ ID NO: 5205128 - DNA, 25 bp, Homo sapien
gaaaggccacccatctgttaattga

SEQ ID NO: 5205129 - DNA, 25 bp, Homo sapien
tcttgtgacgtcatatgattcccca

SEQ ID NO: 5205130 - DNA, 25 bp, Homo sapien
aaagtgaaaattatgggaggctcca

SEQ ID NO: 5205131 - DNA, 25 bp, Homo sapien
gtcacagtgtgcatacctatagcca

SEQ ID NO: 5205132 - DNA, 25 bp, Homo sapien
gagtttgcaatctcgtaacctgtta

SEQ ID NO: 5205133 - DNA, 25 bp, Homo sapien
cacgttgccatttccaaaagggttg

SEQ ID NO: 5205134 - DNA, 25 bp, Homo sapien
gaatctttcgaagaaccttatgacg

SEQ ID NO: 5205135 - DNA, 25 bp, Homo sapien
cttatgacgaactggaggtagaacc

SEQ ID NO: 5205136 - DNA, 25 bp, Homo sapien
aagagtgggaagaggcttaccaaga

SEQ ID NO: 5205137 - DNA, 25 bp, Homo sapien
gtagaaccatacacagagccatttg

SEQ ID NO: 5205138 - DNA, 25 bp, Homo sapien
tcatcaatgtagcaccgagtgacag

SEQ ID NO: 5205139 - DNA, 25 bp, Homo sapien
cacgggagacacctgtaccttggag

SEQ ID NO: 5205140 - DNA, 25 bp, Homo sapien
taccttggagtgtacagtagctggc

SEQ ID NO: 5205141 - DNA, 25 bp, Homo sapien
tacagttttgaggtgcagaaccctg

SEQ ID NO: 5205142 - DNA, 25 bp, Homo sapien
cagagcccgcagtcattgttgagaa

SEQ ID NO: 5205143 - DNA, 25 bp, Homo sapien
tacaagcatccatagaaggcgccca

SEQ ID NO: 5205144 - DNA, 25 bp, Homo sapien
ctttaaagtcgagagagagagcacc

SEQ ID NO: 5205145 - DNA, 25 bp, Homo sapien
tatggtacaaagacaagcggcaact

SEQ ID NO: 5205146 - DNA, 25 bp, Homo sapien
aatcagaagtgtggataatggacac

SEQ ID NO: 5205147 - DNA, 25 bp, Homo sapien
cctttcagagtaccgtggcaggttc

SEQ ID NO: 5205148 - DNA, 25 bp, Homo sapien
cagtgggagatatacctgtcaagcc

SEQ ID NO: 5205149 - DNA, 25 bp, Homo sapien
tctataacctggctaaaggatgatc

SEQ ID NO: 5205150 - DNA, 25 bp, Homo sapien
aagagttacactcaggagcagcccg

SEQ ID NO: 5205151 - DNA, 25 bp, Homo sapien
gaaaagccacagtcacaagatgtca

SEQ ID NO: 5205152 - DNA, 25 bp, Homo sapien
ttgcagccaaagctaccgattctgg

SEQ ID NO: 5205153 - DNA, 25 bp, Homo sapien
caagatgtcaatcccaacacaaggg

SEQ ID NO: 5205154 - DNA, 25 bp, Homo sapien
ctgcaaaattgcaggctccctcccc

SEQ ID NO: 5205155 - DNA, 25 bp, Homo sapien
gggtgtcctggtttaaggatggcaa

SEQ ID NO: 5205156 - DNA, 25 bp, Homo sapien
agggtgtcctggtttaaggatggca

SEQ ID NO: 5205157 - DNA, 25 bp, Homo sapien
tgcagactggactgcaaaattgcag

SEQ ID NO: 5205158 - DNA, 25 bp, Homo sapien
tgatgttcagattagttttggaggc

SEQ ID NO: 5205159 - DNA, 25 bp, Homo sapien
gaaaggtcaagaggtcatcagagaa

SEQ ID NO: 5205160 - DNA, 25 bp, Homo sapien
gtgttgcagtcttgataatccctga

SEQ ID NO: 5205161 - DNA, 25 bp, Homo sapien
ggcaaatacacgtgcctggctgaaa

SEQ ID NO: 5205162 - DNA, 25 bp, Homo sapien
tctttcatcaaaactcttgagcctg

SEQ ID NO: 5205163 - DNA, 25 bp, Homo sapien
gacatagtgagaggaacaaatgctc

SEQ ID NO: 5205164 - DNA, 25 bp, Homo sapien
gtgtgaagtctcaggcactggacca

SEQ ID NO: 5205165 - DNA, 25 bp, Homo sapien
tcatgcttttgtagaacctccttct

SEQ ID NO: 5205166 - DNA, 25 bp, Homo sapien
ctgtgcagtccgctatcaataagaa

SEQ ID NO: 5205167 - DNA, 25 bp, Homo sapien
gtgcagtccgctatcaataagaagg

SEQ ID NO: 5205168 - DNA, 25 bp, Homo sapien
agcctgtgcagtccgctatcaataa

SEQ ID NO: 5205169 - DNA, 25 bp, Homo sapien
gcctgtgcagtccgctatcaataag

SEQ ID NO: 5205170 - DNA, 25 bp, Homo sapien
ttttgagatgacatcaagtgtaaaa

SEQ ID NO: 5205171 - DNA, 25 bp, Homo sapien
tttttgagatgacatcaagtgtaaa

SEQ ID NO: 5205172 - DNA, 25 bp, Homo sapien
agggagaatctgtaagggcacattt

SEQ ID NO: 5205173 - DNA, 25 bp, Homo sapien
tttttatgattatccagctggtccc

SEQ ID NO: 5205174 - DNA, 25 bp, Homo sapien
gagatcagcaactgcaagaccaggg

SEQ ID NO: 5205175 - DNA, 25 bp, Homo sapien
cagatctaacagtggagcctgtcac

SEQ ID NO: 5205176 - DNA, 25 bp, Homo sapien
ccaaggactatacagctgcattgta

SEQ ID NO: 5205177 - DNA, 25 bp, Homo sapien
cagctggtagaccaaggactataca

SEQ ID NO: 5205178 - DNA, 25 bp, Homo sapien
tgttcagctggtagaccaaggacta

SEQ ID NO: 5205179 - DNA, 25 bp, Homo sapien
tagaccaaggactatacagctgcat

SEQ ID NO: 5205180 - DNA, 25 bp, Homo sapien
ctagtaatgctgtaggccaagtatc

SEQ ID NO: 5205181 - DNA, 25 bp, Homo sapien
aatgctgtaggccaagtatcaagca

SEQ ID NO: 5205182 - DNA, 25 bp, Homo sapien
agtaatgctgtaggccaagtatcaa

SEQ ID NO: 5205183 - DNA, 25 bp, Homo sapien
ctgtaggccaagtatcaagcacagc

SEQ ID NO: 5205184 - DNA, 25 bp, Homo sapien
tcatgtgtatcctggtgcctcattc

SEQ ID NO: 5205185 - DNA, 25 bp, Homo sapien
ttcatgtgtatcctggtgcctcatt

SEQ ID NO: 5205186 - DNA, 25 bp, Homo sapien
gttcatgtgtatcctggtgcctcat

SEQ ID NO: 5205187 - DNA, 25 bp, Homo sapien
gaatgactatggtgttgccacaaca

SEQ ID NO: 5205188 - DNA, 25 bp, Homo sapien
gcagccagcccgttttcaatgccgg

SEQ ID NO: 5205189 - DNA, 25 bp, Homo sapien
gaatgcctcgctacttccagctgaa

SEQ ID NO: 5205190 - DNA, 25 bp, Homo sapien
cagaagttgtgtctcctgatcagga

SEQ ID NO: 5205191 - DNA, 25 bp, Homo sapien
ggataatcaggttaactcggcactc

SEQ ID NO: 5205192 - DNA, 25 bp, Homo sapien
tccctctgcatgtggacaaattcca

SEQ ID NO: 5205193 - DNA, 25 bp, Homo sapien
cgcttctgtgccgtgatatccggaa

SEQ ID NO: 5205194 - DNA, 25 bp, Homo sapien
actgtgcagtctggcaagcctgccc

SEQ ID NO: 5205195 - DNA, 25 bp, Homo sapien
taacctaaattcttacgaggagtga

SEQ ID NO: 5205196 - DNA, 25 bp, Homo sapien
tgtcccactctggaattgatgtcct

SEQ ID NO: 5205197 - DNA, 25 bp, Homo sapien
tttaaggacaaggaaatcaagccca

SEQ ID NO: 5205198 - DNA, 25 bp, Homo sapien
cattttacgcgggagaaaatatgac

SEQ ID NO: 5205199 - DNA, 25 bp, Homo sapien
tatacaattacatctcgtcgtggac

SEQ ID NO: 5205200 - DNA, 25 bp, Homo sapien
gaatacagctttgtcatcgacggga

SEQ ID NO: 5205201 - DNA, 25 bp, Homo sapien
gaacctcacggtcaaggatgtaacc

SEQ ID NO: 5205202 - DNA, 25 bp, Homo sapien
tagagtgcattgtatccccagaaaa

SEQ ID NO: 5205203 - DNA, 25 bp, Homo sapien
tgaaagtcagagctacgggtaaccc

SEQ ID NO: 5205204 - DNA, 25 bp, Homo sapien
taaagctggcagagacactacaaga

SEQ ID NO: 5205205 - DNA, 25 bp, Homo sapien
caagattctgcctggtatactgcga

SEQ ID NO: 5205206 - DNA, 25 bp, Homo sapien
tgaggtgccttctaatacgtgcaag

SEQ ID NO: 5205207 - DNA, 25 bp, Homo sapien
ttcattttcaagtgatgagctcggg

SEQ ID NO: 5205208 - DNA, 25 bp, Homo sapien
gggttagacagctattagaaggtcc

SEQ ID NO: 5205209 - DNA, 25 bp, Homo sapien
gaaggtccaagttcactgttgctaa

SEQ ID NO: 5205210 - DNA, 25 bp, Homo sapien
cagctattagaaggtccaagttcac

SEQ ID NO: 5205211 - DNA, 25 bp, Homo sapien
taccactgatgtggactacataatc

SEQ ID NO: 5205212 - DNA, 25 bp, Homo sapien
agttcttctggctgtataacaggaa

SEQ ID NO: 5205213 - DNA, 25 bp, Homo sapien
ggtcatgggccaagacatcctgctt

SEQ ID NO: 5205214 - DNA, 25 bp, Homo sapien
tggacatggtcatgggccaagacat

SEQ ID NO: 5205215 - DNA, 25 bp, Homo sapien
ccacaatgcaatcctgaacagcttt

SEQ ID NO: 5205216 - DNA, 25 bp, Homo sapien
acaatgcaatcctgaacagctttac

SEQ ID NO: 5205217 - DNA, 25 bp, Homo sapien
atccacaatgcaatcctgaacagct

SEQ ID NO: 5205218 - DNA, 25 bp, Homo sapien
tttagattgacatccacaatgcaat

SEQ ID NO: 5205219 - DNA, 25 bp, Homo sapien
tattgactggactcagaagtagacg

SEQ ID NO: 5205220 - DNA, 25 bp, Homo sapien
tagtatactgtttctgcagagcaac

SEQ ID NO: 5205221 - DNA, 25 bp, Homo sapien
gaagtagacgctcttggagaggaca

SEQ ID NO: 5205222 - DNA, 25 bp, Homo sapien
ggcctttcttaccacatattgttgg

SEQ ID NO: 5205223 - DNA, 25 bp, Homo sapien
ggcgttaattttattatgccaacag

SEQ ID NO: 5205224 - DNA, 25 bp, Homo sapien
tgactcaatgtaaagacaacaagga

SEQ ID NO: 5205225 - DNA, 25 bp, Homo sapien
ttcttctatatctgtcacccctgag

SEQ ID NO: 5205226 - DNA, 25 bp, Homo sapien
gtggacttactagtatgattgtaca

SEQ ID NO: 5205227 - DNA, 25 bp, Homo sapien
tatccttgcttcaggtgtcaaacat

SEQ ID NO: 5205228 - DNA, 25 bp, Homo sapien
catgtcagacagctatatccttgct

SEQ ID NO: 5205229 - DNA, 25 bp, Homo sapien
tgttttgatttctccctctagccta

SEQ ID NO: 5205230 - DNA, 25 bp, Homo sapien
tagacaactcaagacaaaggaagcc

SEQ ID NO: 5205231 - DNA, 25 bp, Homo sapien
caatgctcagcctatgaactggtaa

SEQ ID NO: 5205232 - DNA, 25 bp, Homo sapien
gaactggtaaacaccaacagccgta

SEQ ID NO: 5205233 - DNA, 25 bp, Homo sapien
gctgtggacctttcatatgccaggc

SEQ ID NO: 5205234 - DNA, 25 bp, Homo sapien
caataactgcgtttagctgtggacc

SEQ ID NO: 5205235 - DNA, 25 bp, Homo sapien
taacgtacgctgttctgtagctgct

SEQ ID NO: 5205236 - DNA, 25 bp, Homo sapien
ttcatcatgctggtttggattgaca

SEQ ID NO: 5205237 - DNA, 25 bp, Homo sapien
ctaaaggaggacagtttttcatctg

SEQ ID NO: 5205238 - DNA, 25 bp, Homo sapien
tgtagctgcttcagaccgtgttagc

SEQ ID NO: 5205239 - DNA, 25 bp, Homo sapien
tataaccatgcaactatggaacagc

SEQ ID NO: 5205240 - DNA, 25 bp, Homo sapien
caatgtgaatgtacgtaatacctca

SEQ ID NO: 5205241 - DNA, 25 bp, Homo sapien
tgaggtacctagaggagtagagttc

SEQ ID NO: 5205242 - DNA, 25 bp, Homo sapien
gcagagttagtctttaagggtacaa

SEQ ID NO: 5205243 - DNA, 25 bp, Homo sapien
agaagagtaccaggccatccagaag

SEQ ID NO: 5205244 - DNA, 25 bp, Homo sapien
cagtacacagcagaagagtaccagg

SEQ ID NO: 5205245 - DNA, 25 bp, Homo sapien
gccatccagaaggccccgaggcaga

SEQ ID NO: 5205246 - DNA, 25 bp, Homo sapien
acagcagaagagtaccaggccatcc

SEQ ID NO: 5205247 - DNA, 25 bp, Homo sapien
caagtgcttacttgtggatactatc

SEQ ID NO: 5205248 - DNA, 25 bp, Homo sapien
gatactatcttaccaacggatcaca

SEQ ID NO: 5205249 - DNA, 25 bp, Homo sapien
actgctgtatcctgtgtagtactag

SEQ ID NO: 5205250 - DNA, 25 bp, Homo sapien
tgtttcgacccaagtactgctgtat

SEQ ID NO: 5205251 - DNA, 25 bp, Homo sapien
gaggaatcagcagcataggctttat

SEQ ID NO: 5205252 - DNA, 25 bp, Homo sapien
acacatcactagattgacgagggct

SEQ ID NO: 5205253 - DNA, 25 bp, Homo sapien
caccctaccgcgttcaatttgtgta

SEQ ID NO: 5205254 - DNA, 25 bp, Homo sapien
gacgagggcttttagagactgctcc

SEQ ID NO: 5205255 - DNA, 25 bp, Homo sapien
agaggttgcagtgacccagactgag

SEQ ID NO: 5205256 - DNA, 25 bp, Homo sapien
ggttgcagtgacccagactgagcca

SEQ ID NO: 5205257 - DNA, 25 bp, Homo sapien
atcacttgagcccaagaggcagagg

SEQ ID NO: 5205258 - DNA, 25 bp, Homo sapien
ctacccagaaggctgagttgggaga

SEQ ID NO: 5205259 - DNA, 25 bp, Homo sapien
tccatgttcatcaggcttgtctcga

SEQ ID NO: 5205260 - DNA, 25 bp, Homo sapien
acaggcatgtgcccggttaattttg

SEQ ID NO: 5205261 - DNA, 25 bp, Homo sapien
ttacaggcatgtgcccggttaattt

SEQ ID NO: 5205262 - DNA, 25 bp, Homo sapien
tctccatgttcatcaggcttgtctc

SEQ ID NO: 5205263 - DNA, 25 bp, Homo sapien
cactagaacatcagatccttgagga

SEQ ID NO: 5205264 - DNA, 25 bp, Homo sapien
ggacaggggctctatcttattcatt

SEQ ID NO: 5205265 - DNA, 25 bp, Homo sapien
tatgatgggtgtctgacacaggtgc

SEQ ID NO: 5205266 - DNA, 25 bp, Homo sapien
gacacaggtgctcaacaacattttt

SEQ ID NO: 5205267 - DNA, 25 bp, Homo sapien
tctgtcccatgagaatagcaacgta

SEQ ID NO: 5205268 - DNA, 25 bp, Homo sapien
aatttccgcttgtaactcctgctga

SEQ ID NO: 5205269 - DNA, 25 bp, Homo sapien
tattatcaaatagggcggcacccta

SEQ ID NO: 5205270 - DNA, 25 bp, Homo sapien
gaggtgtcttacgtaatattgccag

SEQ ID NO: 5205271 - DNA, 25 bp, Homo sapien
cctacctggtttggacttgatggga

SEQ ID NO: 5205272 - DNA, 25 bp, Homo sapien
tgagccagttagaccagagttaagc

SEQ ID NO: 5205273 - DNA, 25 bp, Homo sapien
gatacaagcagaaactgagccagtt

SEQ ID NO: 5205274 - DNA, 25 bp, Homo sapien
cctatggaatacatgtgtctgggca

SEQ ID NO: 5205275 - DNA, 25 bp, Homo sapien
ttatccttgaagataaatccaggaa

SEQ ID NO: 5205276 - DNA, 25 bp, Homo sapien
ctgcattatccttgaagataaatcc

SEQ ID NO: 5205277 - DNA, 25 bp, Homo sapien
gcattatccttgaagataaatccag

SEQ ID NO: 5205278 - DNA, 25 bp, Homo sapien
cattatccttgaagataaatccagg

SEQ ID NO: 5205279 - DNA, 25 bp, Homo sapien
cacatagcagttgggaacacgcaaa

SEQ ID NO: 5205280 - DNA, 25 bp, Homo sapien
agcagttgggaacacgcaaacaggc

SEQ ID NO: 5205281 - DNA, 25 bp, Homo sapien
ttattcttggccacatagcagttgg

SEQ ID NO: 5205282 - DNA, 25 bp, Homo sapien
catagcagttgggaacacgcaaaca

SEQ ID NO: 5205283 - DNA, 25 bp, Homo sapien
ccagtaagatgagtgaattattttc

SEQ ID NO: 5205284 - DNA, 25 bp, Homo sapien
tatgcagtagcttctcacatgcaaa

SEQ ID NO: 5205285 - DNA, 25 bp, Homo sapien
catgacctcttcatttgcccaaggt

SEQ ID NO: 5205286 - DNA, 25 bp, Homo sapien
atcctgcagttgaattcatctatgc

SEQ ID NO: 5205287 - DNA, 25 bp, Homo sapien
gaaaatttaaggtttgcagacttga

SEQ ID NO: 5205288 - DNA, 25 bp, Homo sapien
tacaaggaggagtttgtgaaggctc

SEQ ID NO: 5205289 - DNA, 25 bp, Homo sapien
gagtcaggccagtactccagcagac

SEQ ID NO: 5205290 - DNA, 25 bp, Homo sapien
ccagcagacttaagatacaaggagg

SEQ ID NO: 5205291 - DNA, 25 bp, Homo sapien
ggaggcaacatctactgacagtcac

SEQ ID NO: 5205292 - DNA, 25 bp, Homo sapien
ctcaggagaagcctatttcagaaat

SEQ ID NO: 5205293 - DNA, 25 bp, Homo sapien
tgaaatatcattggaggttcaagct

SEQ ID NO: 5205294 - DNA, 25 bp, Homo sapien
ggttcaagctcatagcaccgaataa

SEQ ID NO: 5205295 - DNA, 25 bp, Homo sapien
tcattggctttagtgctggcttgca

SEQ ID NO: 5205296 - DNA, 25 bp, Homo sapien
gaaatcagggatcaggtttagactg

SEQ ID NO: 5205297 - DNA, 25 bp, Homo sapien
ggaatctccaccaaccattctgctg

SEQ ID NO: 5205298 - DNA, 25 bp, Homo sapien
catgggtcgaaagcataggaatctc

SEQ ID NO: 5205299 - DNA, 25 bp, Homo sapien
ctgacttagtgaccccgccatgggt

SEQ ID NO: 5205300 - DNA, 25 bp, Homo sapien
cttcctttctcctacactcttgttt

SEQ ID NO: 5205301 - DNA, 25 bp, Homo sapien
tttctctcccaagttctctctcctg

SEQ ID NO: 5205302 - DNA, 25 bp, Homo sapien
ctctctcctgcagttgtccctccat

SEQ ID NO: 5205303 - DNA, 25 bp, Homo sapien
cactcttgttttccatgttcccttc

SEQ ID NO: 5205304 - DNA, 25 bp, Homo sapien
gtggctcaaagggtacattgtcccc

SEQ ID NO: 5205305 - DNA, 25 bp, Homo sapien
catggtagactgttatatgcatgcc

SEQ ID NO: 5205306 - DNA, 25 bp, Homo sapien
cagtgtgggcatcctcatggtagac

SEQ ID NO: 5205307 - DNA, 25 bp, Homo sapien
tcaagaagacatatgcaggctagct

SEQ ID NO: 5205308 - DNA, 25 bp, Homo sapien
tggatgtcctttgaaacctggggtg

SEQ ID NO: 5205309 - DNA, 25 bp, Homo sapien
tcctttgaaacctggggtgggctca

SEQ ID NO: 5205310 - DNA, 25 bp, Homo sapien
cctttgaaacctggggtgggctcat

SEQ ID NO: 5205311 - DNA, 25 bp, Homo sapien
cctggatgtcctttgaaacctgggg

SEQ ID NO: 5205312 - DNA, 25 bp, Homo sapien
tatttgccaatagctttggttttcc

SEQ ID NO: 5205313 - DNA, 25 bp, Homo sapien
caagtgggcaatgcagcccgtatat

SEQ ID NO: 5205314 - DNA, 25 bp, Homo sapien
cccttcttgaagctcagatgttagt

SEQ ID NO: 5205315 - DNA, 25 bp, Homo sapien
ccttgtccttcgtctgccgttatag

SEQ ID NO: 5205316 - DNA, 25 bp, Homo sapien
cagttttgcaccatttcttgtcaat

SEQ ID NO: 5205317 - DNA, 25 bp, Homo sapien
gtcagttttgcaccatttcttgtca

SEQ ID NO: 5205318 - DNA, 25 bp, Homo sapien
atttcacactgtagagcagtgtgaa

SEQ ID NO: 5205319 - DNA, 25 bp, Homo sapien
gttgtcagttttgcaccatttcttg

SEQ ID NO: 5205320 - DNA, 25 bp, Homo sapien
ctttggggttgtaatacagaatcat

SEQ ID NO: 5205321 - DNA, 25 bp, Homo sapien
atttaaagttgctaatatctgccac

SEQ ID NO: 5205322 - DNA, 25 bp, Homo sapien
aacctcatctgtgctctagatgcat

SEQ ID NO: 5205323 - DNA, 25 bp, Homo sapien
atccaggacctacagatttaaagtt

SEQ ID NO: 5205324 - DNA, 25 bp, Homo sapien
ctttatattgtttaatccaggacct

SEQ ID NO: 5205325 - DNA, 25 bp, Homo sapien
gccgatagcttctgctaaggcgtct

SEQ ID NO: 5205326 - DNA, 25 bp, Homo sapien
tgtcaaagccgatagcttctgctaa

SEQ ID NO: 5205327 - DNA, 25 bp, Homo sapien
ggtgtactgtcaaagccgatagctt

SEQ ID NO: 5205328 - DNA, 25 bp, Homo sapien
atttcggtgtactgtcaaagccgat

SEQ ID NO: 5205329 - DNA, 25 bp, Homo sapien
tatgtccttggcacctaatggtttt

SEQ ID NO: 5205330 - DNA, 25 bp, Homo sapien
ggccagctgtgaaacatatttgctc

SEQ ID NO: 5205331 - DNA, 25 bp, Homo sapien
gtggaagggctggatattgtacttt

SEQ ID NO: 5205332 - DNA, 25 bp, Homo sapien
ttctcgagctggtttttgggccagc

SEQ ID NO: 5205333 - DNA, 25 bp, Homo sapien
tgtctgagtgatttaaatcatcaaa

SEQ ID NO: 5205334 - DNA, 25 bp, Homo sapien
atgtctgagtgatttaaatcatcaa

SEQ ID NO: 5205335 - DNA, 25 bp, Homo sapien
caagtgtgtggattaagtacagaac

SEQ ID NO: 5205336 - DNA, 25 bp, Homo sapien
tagtgaaggacggattatctttttc

SEQ ID NO: 5205337 - DNA, 25 bp, Homo sapien
gaactctaagggattgatacataaa

SEQ ID NO: 5205338 - DNA, 25 bp, Homo sapien
atgattaaaaggagtggttgaccct

SEQ ID NO: 5205339 - DNA, 25 bp, Homo sapien
aaagtatgatagtttcttcactccc

SEQ ID NO: 5205340 - DNA, 25 bp, Homo sapien
gaaagcaagaaataccacaccaagg

SEQ ID NO: 5205341 - DNA, 25 bp, Homo sapien
gcaggatcatgctcatttgaaagac

SEQ ID NO: 5205342 - DNA, 25 bp, Homo sapien
gcaccttgtatgcagtaggcagaat

SEQ ID NO: 5205343 - DNA, 25 bp, Homo sapien
actgttctttgacgcccccaggatc

SEQ ID NO: 5205344 - DNA, 25 bp, Homo sapien
gtactgttctttgacgcccccagga

SEQ ID NO: 5205345 - DNA, 25 bp, Homo sapien
ctgtactgttctttgacgcccccag

SEQ ID NO: 5205346 - DNA, 25 bp, Homo sapien
agtctgtactgttctttgacgcccc

SEQ ID NO: 5205347 - DNA, 25 bp, Homo sapien
ccacaaaggcagtaagatcctggtg

SEQ ID NO: 5205348 - DNA, 25 bp, Homo sapien
gtagttgtgagtttctttgtctcac

SEQ ID NO: 5205349 - DNA, 25 bp, Homo sapien
gtgggcagatggacctgaggctgtc

SEQ ID NO: 5205350 - DNA, 25 bp, Homo sapien
ctggtgttcctggcccctagcaagg

SEQ ID NO: 5205351 - DNA, 25 bp, Homo sapien
tggctgacccctaaccactggaagt

SEQ ID NO: 5205352 - DNA, 25 bp, Homo sapien
tttgtagtgttggagttggcatcga

SEQ ID NO: 5205353 - DNA, 25 bp, Homo sapien
ttctagtaataaaaggtggctgacc

SEQ ID NO: 5205354 - DNA, 25 bp, Homo sapien
tggcatcgatgggaattgggtccac

SEQ ID NO: 5205355 - DNA, 25 bp, Homo sapien
aagtacaggtggagtggactgcggg

SEQ ID NO: 5205356 - DNA, 25 bp, Homo sapien
gtgtcgtctgttctcatatgcctca

SEQ ID NO: 5205357 - DNA, 25 bp, Homo sapien
gcagaagccttcattccttgactgt

SEQ ID NO: 5205358 - DNA, 25 bp, Homo sapien
tccacactgtgttagtcctggcaag

SEQ ID NO: 5205359 - DNA, 25 bp, Homo sapien
aatatgtccaaattcctgtcagctg

SEQ ID NO: 5205360 - DNA, 25 bp, Homo sapien
cacaacccaatgtaagttgcaggca

SEQ ID NO: 5205361 - DNA, 25 bp, Homo sapien
cagtttgtttcactacaagaataag

SEQ ID NO: 5205362 - DNA, 25 bp, Homo sapien
cctgtcagctgacttataaagggac

SEQ ID NO: 5205363 - DNA, 25 bp, Homo sapien
caatcttcatcaaccaagggtctca

SEQ ID NO: 5205364 - DNA, 25 bp, Homo sapien
tagtttataatctacgtctgtactc

SEQ ID NO: 5205365 - DNA, 25 bp, Homo sapien
tcgaatcttcccttagtttataatc

SEQ ID NO: 5205366 - DNA, 25 bp, Homo sapien
tactgaaaatccctttcgaatcttc

SEQ ID NO: 5205367 - DNA, 25 bp, Homo sapien
taaacctgatttctgcatagtttga

SEQ ID NO: 5205368 - DNA, 25 bp, Homo sapien
aaacctgatttctgcatagtttgag

SEQ ID NO: 5205369 - DNA, 25 bp, Homo sapien
aacctgatttctgcatagtttgagc

SEQ ID NO: 5205370 - DNA, 25 bp, Homo sapien
ggtcttttctagagtggcccatgaa

SEQ ID NO: 5205371 - DNA, 25 bp, Homo sapien
gaccacttgtgagaataactcttgg

SEQ ID NO: 5205372 - DNA, 25 bp, Homo sapien
gaagtgtgaagccagaactaggact

SEQ ID NO: 5205373 - DNA, 25 bp, Homo sapien
gatgctggtactctgaagaggttac

SEQ ID NO: 5205374 - DNA, 25 bp, Homo sapien
caggaaagggctaatgtcacatgga

SEQ ID NO: 5205375 - DNA, 25 bp, Homo sapien
aatgccagagccctatatcttctcc

SEQ ID NO: 5205376 - DNA, 25 bp, Homo sapien
catttcctgagaaagttggttgcag

SEQ ID NO: 5205377 - DNA, 25 bp, Homo sapien
tcaggaggcagtacaaggcatttca

SEQ ID NO: 5205378 - DNA, 25 bp, Homo sapien
gactgacagtgaaaacatctcttcc

SEQ ID NO: 5205379 - DNA, 25 bp, Homo sapien
tctggtaagactgacagtgaaaaca

SEQ ID NO: 5205380 - DNA, 25 bp, Homo sapien
tgccccctgtcaatcttctggtaag

SEQ ID NO: 5205381 - DNA, 25 bp, Homo sapien
ccctgtcaatcttctggtaagactg

SEQ ID NO: 5205382 - DNA, 25 bp, Homo sapien
ttccctcaggcccagagacagtcat

SEQ ID NO: 5205383 - DNA, 25 bp, Homo sapien
ctcctgttccctcaggcccagagac

SEQ ID NO: 5205384 - DNA, 25 bp, Homo sapien
gtctagatcctaggcctcctgttcc

SEQ ID NO: 5205385 - DNA, 25 bp, Homo sapien
atgtctagatcctaggcctcctgtt

SEQ ID NO: 5205386 - DNA, 25 bp, Homo sapien
caggaatgcctggaacaagattcac

SEQ ID NO: 5205387 - DNA, 25 bp, Homo sapien
tgccatcccagactcttgcacaatt

SEQ ID NO: 5205388 - DNA, 25 bp, Homo sapien
tactctcccatatatggctttcacc

SEQ ID NO: 5205389 - DNA, 25 bp, Homo sapien
tcagcccattgctcctactctccca

SEQ ID NO: 5205390 - DNA, 25 bp, Homo sapien
atgccatcccagactcttgcacaat

SEQ ID NO: 5205391 - DNA, 25 bp, Homo sapien
ccttgttgttggtcacgagcatccc

SEQ ID NO: 5205392 - DNA, 25 bp, Homo sapien
tatcccaagccagttgttgttcaac

SEQ ID NO: 5205393 - DNA, 25 bp, Homo sapien
gctgtgtagctttggaccactgcct

SEQ ID NO: 5205394 - DNA, 25 bp, Homo sapien
ttttgagcccctgagatatcccaag

SEQ ID NO: 5205395 - DNA, 25 bp, Homo sapien
tggttatgttttgcagtttgctgtc

SEQ ID NO: 5205396 - DNA, 25 bp, Homo sapien
tgcccaggtttttatgttggttatg

SEQ ID NO: 5205397 - DNA, 25 bp, Homo sapien
tccagccctggcagtcgtagtggga

SEQ ID NO: 5205398 - DNA, 25 bp, Homo sapien
aacagagctgcgagatctgcccttg

SEQ ID NO: 5205399 - DNA, 25 bp, Homo sapien
ttgtcttttatatacctgaccttct

SEQ ID NO: 5205400 - DNA, 25 bp, Homo sapien
cttcttctcagtaattgggccatct

SEQ ID NO: 5205401 - DNA, 25 bp, Homo sapien
tgtctgacaatctcaattgctctga

SEQ ID NO: 5205402 - DNA, 25 bp, Homo sapien
tctgatattgagtctttgtggcctg

SEQ ID NO: 5205403 - DNA, 25 bp, Homo sapien
ccatggtttcaggaggtgtaggtca

SEQ ID NO: 5205404 - DNA, 25 bp, Homo sapien
taattatgtggtggaaatgcctgtc

SEQ ID NO: 5205405 - DNA, 25 bp, Homo sapien
tgtaggtcaagtgaagaggtcttcc

SEQ ID NO: 5205406 - DNA, 25 bp, Homo sapien
tgccagagctgctttggatcccaaa

SEQ ID NO: 5205407 - DNA, 25 bp, Homo sapien
ctgtgtgcctttgctttatcccttt

SEQ ID NO: 5205408 - DNA, 25 bp, Homo sapien
ctacattacagctacagctgatgtt

SEQ ID NO: 5205409 - DNA, 25 bp, Homo sapien
acattacagctacagctgatgtttc

SEQ ID NO: 5205410 - DNA, 25 bp, Homo sapien
cacaggtaaccatagctttgaattt

SEQ ID NO: 5205411 - DNA, 25 bp, Homo sapien
tcgtgtcccacgtgacccattaggt

SEQ ID NO: 5205412 - DNA, 25 bp, Homo sapien
ttagatacgatggattttttgctcg

SEQ ID NO: 5205413 - DNA, 25 bp, Homo sapien
gcatttttgtgagttatttagatac

SEQ ID NO: 5205414 - DNA, 25 bp, Homo sapien
ggattttttgctcgtgtcccacgtg

SEQ ID NO: 5205415 - DNA, 25 bp, Homo sapien
ttatcatattaatgttgtcaaccat

SEQ ID NO: 5205416 - DNA, 25 bp, Homo sapien
cctgagggcgcttcagtatctggac

SEQ ID NO: 5205417 - DNA, 25 bp, Homo sapien
caatgatgctgtacaagaccttatc

SEQ ID NO: 5205418 - DNA, 25 bp, Homo sapien
ccgaagcgaatgacagccatgcagt

SEQ ID NO: 5205419 - DNA, 25 bp, Homo sapien
cagtccacggtctctatgatgtcga

SEQ ID NO: 5205420 - DNA, 25 bp, Homo sapien
aagaattgttctctggtaaagaaga

SEQ ID NO: 5205421 - DNA, 25 bp, Homo sapien
ccattcagtttccataatctttatc

SEQ ID NO: 5205422 - DNA, 25 bp, Homo sapien
tcttgacatgtgtttaggtaaacag

SEQ ID NO: 5205423 - DNA, 25 bp, Homo sapien
atgatttcatgatcttgacatgtgt

SEQ ID NO: 5205424 - DNA, 25 bp, Homo sapien
caaggggaaaattgcgtatgcgcat

SEQ ID NO: 5205425 - DNA, 25 bp, Homo sapien
tttgtgtagccaacagtgttctacc

SEQ ID NO: 5205426 - DNA, 25 bp, Homo sapien
cataaaagtttgtgtagccaacagt

SEQ ID NO: 5205427 - DNA, 25 bp, Homo sapien
aaagtttgtgtagccaacagtgttc

SEQ ID NO: 5205428 - DNA, 25 bp, Homo sapien
gctgaaacgtttcttgcaatgttgt

SEQ ID NO: 5205429 - DNA, 25 bp, Homo sapien
tgcttcgtggtacttagttttgaaa

SEQ ID NO: 5205430 - DNA, 25 bp, Homo sapien
ttttgaaagctgaaacgtttcttgc

SEQ ID NO: 5205431 - DNA, 25 bp, Homo sapien
gtgtcagtgcttcgtggtacttagt

SEQ ID NO: 5205432 - DNA, 25 bp, Homo sapien
gaaaaccaacatctcaatggtgacc

SEQ ID NO: 5205433 - DNA, 25 bp, Homo sapien
catattgaaagccataagtcccttc

SEQ ID NO: 5205434 - DNA, 25 bp, Homo sapien
tagcaaatggatactcggagtcata

SEQ ID NO: 5205435 - DNA, 25 bp, Homo sapien
tggtgaccacaacatattgaaagcc

SEQ ID NO: 5205436 - DNA, 25 bp, Homo sapien
actctgaatcctgtggggcatccca

SEQ ID NO: 5205437 - DNA, 25 bp, Homo sapien
cacagtggcaggtccactctgaatc

SEQ ID NO: 5205438 - DNA, 25 bp, Homo sapien
gcatcccaggaagtgctagggtctg

SEQ ID NO: 5205439 - DNA, 25 bp, Homo sapien
ttttggattatgaagcacagtggca

SEQ ID NO: 5205440 - DNA, 25 bp, Homo sapien
tcatctcaatagtgactatgacaga

SEQ ID NO: 5205441 - DNA, 25 bp, Homo sapien
tgtccttgaggtttggacaccatca

SEQ ID NO: 5205442 - DNA, 25 bp, Homo sapien
gagaggccaaaagacctttgacctg

SEQ ID NO: 5205443 - DNA, 25 bp, Homo sapien
taatacaatcgtatactacagtgtg

SEQ ID NO: 5205444 - DNA, 25 bp, Homo sapien
gagggctacctgtaaagattggcaa

SEQ ID NO: 5205445 - DNA, 25 bp, Homo sapien
gctctgaagtgcacaaataggaaat

SEQ ID NO: 5205446 - DNA, 25 bp, Homo sapien
ccatttatgatgactacttaagaag

SEQ ID NO: 5205447 - DNA, 25 bp, Homo sapien
tgtgccctgacagttgggagtttgt

SEQ ID NO: 5205448 - DNA, 25 bp, Homo sapien
tgcagggctatcaatagccctcttt

SEQ ID NO: 5205449 - DNA, 25 bp, Homo sapien
tgggagtattttcgcttctctgcag

SEQ ID NO: 5205450 - DNA, 25 bp, Homo sapien
cttctctgcagggctatcaatagcc

SEQ ID NO: 5205451 - DNA, 25 bp, Homo sapien
ctattgggagtattttcgcttctct

SEQ ID NO: 5205452 - DNA, 25 bp, Homo sapien
tgttgtgtgtaatatggtgggctca

SEQ ID NO: 5205453 - DNA, 25 bp, Homo sapien
ggcaatttaatgattagcatttgga

SEQ ID NO: 5205454 - DNA, 25 bp, Homo sapien
ctcatggtgaaggaattaatgggca

SEQ ID NO: 5205455 - DNA, 25 bp, Homo sapien
ggccattattgctaaatgttgtgtg

SEQ ID NO: 5205456 - DNA, 25 bp, Homo sapien
gggcccaggcaatccataaaaccca

SEQ ID NO: 5205457 - DNA, 25 bp, Homo sapien
gctgacattgttgatcctaggaata

SEQ ID NO: 5205458 - DNA, 25 bp, Homo sapien
ggaataaaaacgtgagatgatctct

SEQ ID NO: 5205459 - DNA, 25 bp, Homo sapien
ctggaaatatttctaggcacagggc

SEQ ID NO: 5205460 - DNA, 25 bp, Homo sapien
gagcactggtatctgcttgcaagga

SEQ ID NO: 5205461 - DNA, 25 bp, Homo sapien
gttatgggcccatgagagcactggt

SEQ ID NO: 5205462 - DNA, 25 bp, Homo sapien
tgatgcacgtatttccaagtgtatg

SEQ ID NO: 5205463 - DNA, 25 bp, Homo sapien
ggaaggagcatttaagcaaagttat

SEQ ID NO: 5205464 - DNA, 25 bp, Homo sapien
aagatcatgcataccctggaatctc

SEQ ID NO: 5205465 - DNA, 25 bp, Homo sapien
cataccctggaatctcacagggtgg

SEQ ID NO: 5205466 - DNA, 25 bp, Homo sapien
gtggctagaatgtggatttgtaagc

SEQ ID NO: 5205467 - DNA, 25 bp, Homo sapien
taaatcattagcctgaagatcatgc

SEQ ID NO: 5205468 - DNA, 25 bp, Homo sapien
ttgtgagatctgaaatagtttcaaa

SEQ ID NO: 5205469 - DNA, 25 bp, Homo sapien
ttctgtgtattctcctgaaatagtc

SEQ ID NO: 5205470 - DNA, 25 bp, Homo sapien
gaaaaatctggtcaaatattcaatt

SEQ ID NO: 5205471 - DNA, 25 bp, Homo sapien
tagtcaaaatatgggcacatttggg

SEQ ID NO: 5205472 - DNA, 25 bp, Homo sapien
taattcttcttggtttgattctgca

SEQ ID NO: 5205473 - DNA, 25 bp, Homo sapien
ctctaaagggccatccaaataataa

SEQ ID NO: 5205474 - DNA, 25 bp, Homo sapien
caaacggcataaggggtatcagtac

SEQ ID NO: 5205475 - DNA, 25 bp, Homo sapien
tacatttgtagaactctaaagggcc

SEQ ID NO: 5205476 - DNA, 25 bp, Homo sapien
gtccttcatagtatataataccagg

SEQ ID NO: 5205477 - DNA, 25 bp, Homo sapien
ggctaaatgtattaggcatccttca

SEQ ID NO: 5205478 - DNA, 25 bp, Homo sapien
cctaatgaggttagcatccacaggt

SEQ ID NO: 5205479 - DNA, 25 bp, Homo sapien
cttcatgggcgttgttgtgtccttc

SEQ ID NO: 5205480 - DNA, 25 bp, Homo sapien
taacactgtgggtctatgaagtcca

SEQ ID NO: 5205481 - DNA, 25 bp, Homo sapien
gaagtccacaggtgtttatgaaata

SEQ ID NO: 5205482 - DNA, 25 bp, Homo sapien
gataagagaggcaagatcccttcat

SEQ ID NO: 5205483 - DNA, 25 bp, Homo sapien
taaactgaggattgggcttacagca

SEQ ID NO: 5205484 - DNA, 25 bp, Homo sapien
aatattccagtagaagcaatacaga

SEQ ID NO: 5205485 - DNA, 25 bp, Homo sapien
atattccagtagaagcaatacagag

SEQ ID NO: 5205486 - DNA, 25 bp, Homo sapien
ctctgatcgtttaatgcttttctct

SEQ ID NO: 5205487 - DNA, 25 bp, Homo sapien
gatcgtttaatgcttttctctggct

SEQ ID NO: 5205488 - DNA, 25 bp, Homo sapien
tgatcgtttaatgcttttctctggc

SEQ ID NO: 5205489 - DNA, 25 bp, Homo sapien
ctgatcgtttaatgcttttctctgg

SEQ ID NO: 5205490 - DNA, 25 bp, Homo sapien
tattggcagcttgaaatttggctta

SEQ ID NO: 5205491 - DNA, 25 bp, Homo sapien
cacatcgtaatgaagtatgctaggg

SEQ ID NO: 5205492 - DNA, 25 bp, Homo sapien
tatgctagggtaaatgattgatagt

SEQ ID NO: 5205493 - DNA, 25 bp, Homo sapien
ttggcttagcaaattggcagcttga

SEQ ID NO: 5205494 - DNA, 25 bp, Homo sapien
gaagcatgtgctttcctttcccgag

SEQ ID NO: 5205495 - DNA, 25 bp, Homo sapien
caatgatactgggatgatgtggagc

SEQ ID NO: 5205496 - DNA, 25 bp, Homo sapien
catgtgattagaagttaggcgctcc

SEQ ID NO: 5205497 - DNA, 25 bp, Homo sapien
cccgaggaatcttgttttggaaatg

SEQ ID NO: 5205498 - DNA, 25 bp, Homo sapien
aaacctttatttgtccatgtcagca

SEQ ID NO: 5205499 - DNA, 25 bp, Homo sapien
ttctctgccttgtacgatgtgatcc

SEQ ID NO: 5205500 - DNA, 25 bp, Homo sapien
caatctgtattctgaggaccactgg

SEQ ID NO: 5205501 - DNA, 25 bp, Homo sapien
tcctgggggcaatacatgcagaaag

SEQ ID NO: 5205502 - DNA, 25 bp, Homo sapien
agtttagactgcatgcaaagagacc

SEQ ID NO: 5205503 - DNA, 25 bp, Homo sapien
gacaaagacagggaagtttagactg

SEQ ID NO: 5205504 - DNA, 25 bp, Homo sapien
ttctgaacacaaactggttttgtaa

SEQ ID NO: 5205505 - DNA, 25 bp, Homo sapien
gacagggaagtttagactgcatgca

SEQ ID NO: 5205506 - DNA, 25 bp, Homo sapien
tgggccagtgacattttgtaggaac

SEQ ID NO: 5205507 - DNA, 25 bp, Homo sapien
tgtaggaacatatgaatttttcaaa

SEQ ID NO: 5205508 - DNA, 25 bp, Homo sapien
ggtggcctcgactgccatctggtgg

SEQ ID NO: 5205509 - DNA, 25 bp, Homo sapien
tgtgggccagtgacattttgtagga

SEQ ID NO: 5205510 - DNA, 25 bp, Homo sapien
cttcatctggatcacaggggctttg

SEQ ID NO: 5205511 - DNA, 25 bp, Homo sapien
tcatctggatcacaggggctttgct

SEQ ID NO: 5205512 - DNA, 25 bp, Homo sapien
aggggctttgctgaacagctggagg

SEQ ID NO: 5205513 - DNA, 25 bp, Homo sapien
gggctttgctgaacagctggaggga

SEQ ID NO: 5205514 - DNA, 25 bp, Homo sapien
gacaatgaatggtgacccttctgag

SEQ ID NO: 5205515 - DNA, 25 bp, Homo sapien
catataccaatgcacaaatgaagac

SEQ ID NO: 5205516 - DNA, 25 bp, Homo sapien
tagcattgaactggaagggcacata

SEQ ID NO: 5205517 - DNA, 25 bp, Homo sapien
tactgtgtgaggtactgcttttggt

SEQ ID NO: 5205518 - DNA, 25 bp, Homo sapien
ctttgtgtagaaagttatcagctat

SEQ ID NO: 5205519 - DNA, 25 bp, Homo sapien
tagcctggtcatagggcaggcacat

SEQ ID NO: 5205520 - DNA, 25 bp, Homo sapien
tgctatcctgcagggtatagtgtgg

SEQ ID NO: 5205521 - DNA, 25 bp, Homo sapien
taattgtgctatcctgcagggtata

SEQ ID NO: 5205522 - DNA, 25 bp, Homo sapien
ggtaatctgctactaataccacatg

SEQ ID NO: 5205523 - DNA, 25 bp, Homo sapien
tagtcccttccacagcatccatcca

SEQ ID NO: 5205524 - DNA, 25 bp, Homo sapien
atccatgcggccctgtgactcccat

SEQ ID NO: 5205525 - DNA, 25 bp, Homo sapien
ggttcaacgttgctttggtccaatg

SEQ ID NO: 5205526 - DNA, 25 bp, Homo sapien
actgcacataccgagtagtagcatt

SEQ ID NO: 5205527 - DNA, 25 bp, Homo sapien
agctcctgagcctgacaataaatag

SEQ ID NO: 5205528 - DNA, 25 bp, Homo sapien
acaaactgcacataccgagtagtag

SEQ ID NO: 5205529 - DNA, 25 bp, Homo sapien
aaactgcacataccgagtagtagca

SEQ ID NO: 5205530 - DNA, 25 bp, Homo sapien
tcttgttgtagacttagtagaggac

SEQ ID NO: 5205531 - DNA, 25 bp, Homo sapien
aagagaccgacacccaagtcctgaa

SEQ ID NO: 5205532 - DNA, 25 bp, Homo sapien
gctcctacatgtacaatggccaaag

SEQ ID NO: 5205533 - DNA, 25 bp, Homo sapien
agtagaggacagtcaaggttcttcc

SEQ ID NO: 5205534 - DNA, 25 bp, Homo sapien
tctgtaattcataacctcgtttccc

SEQ ID NO: 5205535 - DNA, 25 bp, Homo sapien
tttgtccttttcgtttgcatggtat

SEQ ID NO: 5205536 - DNA, 25 bp, Homo sapien
tattctcctgaataaccacgaagcc

SEQ ID NO: 5205537 - DNA, 25 bp, Homo sapien
ttaaggctcagtcagtcttaaattc

SEQ ID NO: 5205538 - DNA, 25 bp, Homo sapien
tctgacggatagtgtagtaaataag

SEQ ID NO: 5205539 - DNA, 25 bp, Homo sapien
tagttaaagaggtccatctgacgga

SEQ ID NO: 5205540 - DNA, 25 bp, Homo sapien
tgatttgcattagttaaagaggtcc

SEQ ID NO: 5205541 - DNA, 25 bp, Homo sapien
gaggtccatctgacggatagtgtag

SEQ ID NO: 5205542 - DNA, 25 bp, Homo sapien
tgtgaaagaactgtagatgagtaca

SEQ ID NO: 5205543 - DNA, 25 bp, Homo sapien
gctgatatcctttgcatgtgaaaga

SEQ ID NO: 5205544 - DNA, 25 bp, Homo sapien
ttgcagttaaatcttcactaacagc

SEQ ID NO: 5205545 - DNA, 25 bp, Homo sapien
tatttactttaggatcaaggacaat

SEQ ID NO: 5205546 - DNA, 25 bp, Homo sapien
tatgttatcattatatcagcaaaac

SEQ ID NO: 5205547 - DNA, 25 bp, Homo sapien
tattaactggggaccatattccact

SEQ ID NO: 5205548 - DNA, 25 bp, Homo sapien
caaaacgaagattagataaatggac

SEQ ID NO: 5205549 - DNA, 25 bp, Homo sapien
atggacataaacaatattaactggg

SEQ ID NO: 5205550 - DNA, 25 bp, Homo sapien
aaagtcccacagacttcatctccat

SEQ ID NO: 5205551 - DNA, 25 bp, Homo sapien
cccagtatctttgctttccacataa

SEQ ID NO: 5205552 - DNA, 25 bp, Homo sapien
cataaaattcacaaagtcccacaga

SEQ ID NO: 5205553 - DNA, 25 bp, Homo sapien
cctcccagtatctttgctttccaca

SEQ ID NO: 5205554 - DNA, 25 bp, Homo sapien
cagatagctattcttgtagatctcc

SEQ ID NO: 5205555 - DNA, 25 bp, Homo sapien
agcttgggataaaaaccacaaatca

SEQ ID NO: 5205556 - DNA, 25 bp, Homo sapien
cttgggataaaaaccacaaatcaga

SEQ ID NO: 5205557 - DNA, 25 bp, Homo sapien
ttggggaaggtgaattctcctaaca

SEQ ID NO: 5205558 - DNA, 25 bp, Homo sapien
ccttccctgtaacagataaatgcct

SEQ ID NO: 5205559 - DNA, 25 bp, Homo sapien
tgcgttgagtatgtgctgccccttc

SEQ ID NO: 5205560 - DNA, 25 bp, Homo sapien
cagcattgcaagttctgttacttga

SEQ ID NO: 5205561 - DNA, 25 bp, Homo sapien
tattttgatgccatgtgtgcgttga

SEQ ID NO: 5205562 - DNA, 25 bp, Homo sapien
tgtcaagatgtagtagcaaaagatg

SEQ ID NO: 5205563 - DNA, 25 bp, Homo sapien
caagatgtagtagcaaaagatgttc

SEQ ID NO: 5205564 - DNA, 25 bp, Homo sapien
caaggggaatgcaaactttgtcaag

SEQ ID NO: 5205565 - DNA, 25 bp, Homo sapien
ctttgtcaagatgtagtagcaaaag

SEQ ID NO: 5205566 - DNA, 25 bp, Homo sapien
tgaaggtgtcagggaagggtgggag

SEQ ID NO: 5205567 - DNA, 25 bp, Homo sapien
ctggtgaaggtgtcagggaagggtg

SEQ ID NO: 5205568 - DNA, 25 bp, Homo sapien
tcagggaagggtgggaggacactgt

SEQ ID NO: 5205569 - DNA, 25 bp, Homo sapien
ggaagggtgggaggacactgtggga

SEQ ID NO: 5205570 - DNA, 25 bp, Homo sapien
gaagtttgcacttgttgggagccct

SEQ ID NO: 5205571 - DNA, 25 bp, Homo sapien
gtgtgaggagggtagcggtcgaagc

SEQ ID NO: 5205572 - DNA, 25 bp, Homo sapien
tgacgggcggcctcggccactaagc

SEQ ID NO: 5205573 - DNA, 25 bp, Homo sapien
gagcagagagaaggtccccgaagtt

SEQ ID NO: 5205574 - DNA, 25 bp, Homo sapien
tctcatggaaggtttttgcctctgg

SEQ ID NO: 5205575 - DNA, 25 bp, Homo sapien
tctgaagtgcatggcactggaagct

SEQ ID NO: 5205576 - DNA, 25 bp, Homo sapien
gtcccaactctgaagtgcatggcac

SEQ ID NO: 5205577 - DNA, 25 bp, Homo sapien
tgagctcagaggcaacctcgacaac

SEQ ID NO: 5205578 - DNA, 25 bp, Homo sapien
ccaaggtgttgactggagactttaa

SEQ ID NO: 5205579 - DNA, 25 bp, Homo sapien
tgcaatccaaggtgttgactggaga

SEQ ID NO: 5205580 - DNA, 25 bp, Homo sapien
ctccaagtgcaatccaaggtgttga

SEQ ID NO: 5205581 - DNA, 25 bp, Homo sapien
gactggagactttaaggggccctca

SEQ ID NO: 5205582 - DNA, 25 bp, Homo sapien
tcagaaaatcgagacagaagctgtt

SEQ ID NO: 5205583 - DNA, 25 bp, Homo sapien
tgaagtgcgtttacaaaggaggcac

SEQ ID NO: 5205584 - DNA, 25 bp, Homo sapien
tgtttccatattgaagtgcgtttac

SEQ ID NO: 5205585 - DNA, 25 bp, Homo sapien
ggaggcactgcaattgttttgtgct

SEQ ID NO: 5205586 - DNA, 25 bp, Homo sapien
attggggagcttccacagttactag

SEQ ID NO: 5205587 - DNA, 25 bp, Homo sapien
gggagcttccacagttactaggcag

SEQ ID NO: 5205588 - DNA, 25 bp, Homo sapien
gcttccacagttactaggcagttat

SEQ ID NO: 5205589 - DNA, 25 bp, Homo sapien
ccacagttactaggcagttatgagt

SEQ ID NO: 5205590 - DNA, 25 bp, Homo sapien
gaatggcttcaaaagctatggtgac

SEQ ID NO: 5205591 - DNA, 25 bp, Homo sapien
gctgtacacgtgaagaagagaaaat

SEQ ID NO: 5205592 - DNA, 25 bp, Homo sapien
tcaaaaaatgttgagaggtcaaaag

SEQ ID NO: 5205593 - DNA, 25 bp, Homo sapien
cctgccttaaggaaactaagttgag

SEQ ID NO: 5205594 - DNA, 25 bp, Homo sapien
tatcccatagcttagcacagtgttg

SEQ ID NO: 5205595 - DNA, 25 bp, Homo sapien
tgggtacctagcaagtgaaagtttc

SEQ ID NO: 5205596 - DNA, 25 bp, Homo sapien
taaatacctaacagagatctcagac

SEQ ID NO: 5205597 - DNA, 25 bp, Homo sapien
cagtgttgtgcacgtgttgggtacc

SEQ ID NO: 5205598 - DNA, 25 bp, Homo sapien
ggaccactgacattccatatacttc

SEQ ID NO: 5205599 - DNA, 25 bp, Homo sapien
agttgcttacttctacatctgtgcc

SEQ ID NO: 5205600 - DNA, 25 bp, Homo sapien
gatattgtctgaacaagttgcttac

SEQ ID NO: 5205601 - DNA, 25 bp, Homo sapien
tcctttagctagactacttctgcca

SEQ ID NO: 5205602 - DNA, 25 bp, Homo sapien
gtgctggcttcatttacactgatta

SEQ ID NO: 5205603 - DNA, 25 bp, Homo sapien
ctgggcttcatacatagaatccatt

SEQ ID NO: 5205604 - DNA, 25 bp, Homo sapien
ggcttcatacatagaatccatttct

SEQ ID NO: 5205605 - DNA, 25 bp, Homo sapien
tacataggttgttgaattgtcttgt

SEQ ID NO: 5205606 - DNA, 25 bp, Homo sapien
tttacataggttgttgaattgtctt

SEQ ID NO: 5205607 - DNA, 25 bp, Homo sapien
gattgtcttcaaggttgtgcctcat

SEQ ID NO: 5205608 - DNA, 25 bp, Homo sapien
tgtcttcaaggttgtgcctcatttg

SEQ ID NO: 5205609 - DNA, 25 bp, Homo sapien
ttgattgtcttcaaggttgtgcctc

SEQ ID NO: 5205610 - DNA, 25 bp, Homo sapien
tcttcaaggttgtgcctcatttggc

SEQ ID NO: 5205611 - DNA, 25 bp, Homo sapien
taataaaatgcatttggcttgtttg

SEQ ID NO: 5205612 - DNA, 25 bp, Homo sapien
tgtagcaatggacagaagaatgaat

SEQ ID NO: 5205613 - DNA, 25 bp, Homo sapien
tgtaaaagatacttataacatctgt

SEQ ID NO: 5205614 - DNA, 25 bp, Homo sapien
taaatataagaatcgtgtaccctaa

SEQ ID NO: 5205615 - DNA, 25 bp, Homo sapien
acatgccatctggtataaacacaga

SEQ ID NO: 5205616 - DNA, 25 bp, Homo sapien
atgtttaatactagcttctgttttt

SEQ ID NO: 5205617 - DNA, 25 bp, Homo sapien
tatgtttaatactagcttctgtttt

SEQ ID NO: 5205618 - DNA, 25 bp, Homo sapien
tcctgattggaaccactgtgtgggt

SEQ ID NO: 5205619 - DNA, 25 bp, Homo sapien
tatggcctcactacctcctgattgg

SEQ ID NO: 5205620 - DNA, 25 bp, Homo sapien
gggaatgctaccagatatggcctca

SEQ ID NO: 5205621 - DNA, 25 bp, Homo sapien
cccttttcctagagtaaagaggatg

SEQ ID NO: 5205622 - DNA, 25 bp, Homo sapien
catgaccttgaagttatgaaaagaa

SEQ ID NO: 5205623 - DNA, 25 bp, Homo sapien
accaagatctattctcaagtctgga

SEQ ID NO: 5205624 - DNA, 25 bp, Homo sapien
tctggaattcacaatcttttggtaa

SEQ ID NO: 5205625 - DNA, 25 bp, Homo sapien
ttatgaagaataaaccaagatctat

SEQ ID NO: 5205626 - DNA, 25 bp, Homo sapien
aatctgaactgaattccatcactgg

SEQ ID NO: 5205627 - DNA, 25 bp, Homo sapien
cagctgtttgatggcaacatctcca

SEQ ID NO: 5205628 - DNA, 25 bp, Homo sapien
tctccaaaggcagagaatctgaact

SEQ ID NO: 5205629 - DNA, 25 bp, Homo sapien
agggcttctagcagggtcacagaga

SEQ ID NO: 5205630 - DNA, 25 bp, Homo sapien
tatggccgtggtgtttttctgtagc

SEQ ID NO: 5205631 - DNA, 25 bp, Homo sapien
tatagattactaaaggaagtggagc

SEQ ID NO: 5205632 - DNA, 25 bp, Homo sapien
tgacagagcacttcttaagccagct

SEQ ID NO: 5205633 - DNA, 25 bp, Homo sapien
tgatgaggttgtccttattaagaac

SEQ ID NO: 5205634 - DNA, 25 bp, Homo sapien
tcagtaaattctcccagggtggtat

SEQ ID NO: 5205635 - DNA, 25 bp, Homo sapien
ctcccagggtggtatgtagagaaga

SEQ ID NO: 5205636 - DNA, 25 bp, Homo sapien
taaattctcccagggtggtatgtag

SEQ ID NO: 5205637 - DNA, 25 bp, Homo sapien
cctgagaaatcctcctgaggaaatt

SEQ ID NO: 5205638 - DNA, 25 bp, Homo sapien
gcattacttcaaagcaagaatggga

SEQ ID NO: 5205639 - DNA, 25 bp, Homo sapien
gtttttctatcactggatctttaca

SEQ ID NO: 5205640 - DNA, 25 bp, Homo sapien
ctgccgagcgggtgaagttcccaca

SEQ ID NO: 5205641 - DNA, 25 bp, Homo sapien
tgagagaaacggatggcctgggtgc

SEQ ID NO: 5205642 - DNA, 25 bp, Homo sapien
gaaatgatctggttttagaatctcc

SEQ ID NO: 5205643 - DNA, 25 bp, Homo sapien
cacaacatgtaaatgtgtccaaggg

SEQ ID NO: 5205644 - DNA, 25 bp, Homo sapien
gattaaatattgaacaggcctcgtg

SEQ ID NO: 5205645 - DNA, 25 bp, Homo sapien
aaagaaaaaccatgctgatttcaga

SEQ ID NO: 5205646 - DNA, 25 bp, Homo sapien
cataggacaagtattccaagtatat

SEQ ID NO: 5205647 - DNA, 25 bp, Homo sapien
caaggaacttgtagtcatcatgagc

SEQ ID NO: 5205648 - DNA, 25 bp, Homo sapien
tttagtgttacacataggacaagta

SEQ ID NO: 5205649 - DNA, 25 bp, Homo sapien
caagtaaatctaccaagatgctcca

SEQ ID NO: 5205650 - DNA, 25 bp, Homo sapien
cttctaggagcagcataccacattg

SEQ ID NO: 5205651 - DNA, 25 bp, Homo sapien
taggagcagcataccacattgtaga

SEQ ID NO: 5205652 - DNA, 25 bp, Homo sapien
ggagcagcataccacattgtagaga

SEQ ID NO: 5205653 - DNA, 25 bp, Homo sapien
tctaggagcagcataccacattgta

SEQ ID NO: 5205654 - DNA, 25 bp, Homo sapien
catcagtagcaacattggaacattt

SEQ ID NO: 5205655 - DNA, 25 bp, Homo sapien
ggatgccccagagatggtcatcagt

SEQ ID NO: 5205656 - DNA, 25 bp, Homo sapien
ttcatgtgaggccttccaaaacgat

SEQ ID NO: 5205657 - DNA, 25 bp, Homo sapien
aacgataactagcaacaaggatgcc

SEQ ID NO: 5205658 - DNA, 25 bp, Homo sapien
gggaaacattcataggatgaagctt

SEQ ID NO: 5205659 - DNA, 25 bp, Homo sapien
aaaagcttaagggaaacattcatag

SEQ ID NO: 5205660 - DNA, 25 bp, Homo sapien
gcttaagggaaacattcataggatg

SEQ ID NO: 5205661 - DNA, 25 bp, Homo sapien
taagggaaacattcataggatgaag

SEQ ID NO: 5205662 - DNA, 25 bp, Homo sapien
ttgctaagatgcaatatccattgac

SEQ ID NO: 5205663 - DNA, 25 bp, Homo sapien
tagggtgtggccccacaataaggaa

SEQ ID NO: 5205664 - DNA, 25 bp, Homo sapien
ggtgtggccccacaataaggaaaga

SEQ ID NO: 5205665 - DNA, 25 bp, Homo sapien
taaggaaagaacttgctaagatgca

SEQ ID NO: 5205666 - DNA, 25 bp, Homo sapien
attcatgattagtttgatggctggc

SEQ ID NO: 5205667 - DNA, 25 bp, Homo sapien
gctttgaatactgggtcctacttat

SEQ ID NO: 5205668 - DNA, 25 bp, Homo sapien
atggctggctttgaatactgggtcc

SEQ ID NO: 5205669 - DNA, 25 bp, Homo sapien
tcatgattagtttgatggctggctt

SEQ ID NO: 5205670 - DNA, 25 bp, Homo sapien
cccatccaagttagacagtgagata

SEQ ID NO: 5205671 - DNA, 25 bp, Homo sapien
tgggaggaaattggacccatccaag

SEQ ID NO: 5205672 - DNA, 25 bp, Homo sapien
tgtggagggatagaataaagcccca

SEQ ID NO: 5205673 - DNA, 25 bp, Homo sapien
tcttggaagcgagtaaggacactgg

SEQ ID NO: 5205674 - DNA, 25 bp, Homo sapien
aagaggcttttagggcaagaccctg

SEQ ID NO: 5205675 - DNA, 25 bp, Homo sapien
gcttattaccaaccagcaaagattg

SEQ ID NO: 5205676 - DNA, 25 bp, Homo sapien
caagaccctgatgatggaactggat

SEQ ID NO: 5205677 - DNA, 25 bp, Homo sapien
atcgaaggcactctggtcccaggat

SEQ ID NO: 5205678 - DNA, 25 bp, Homo sapien
gcttgataaggtgtctgaagtgaga

SEQ ID NO: 5205679 - DNA, 25 bp, Homo sapien
ggcgcaggcatctggcatcccaggt

SEQ ID NO: 5205680 - DNA, 25 bp, Homo sapien
tcagttttgcagtgcttgataaggt

SEQ ID NO: 5205681 - DNA, 25 bp, Homo sapien
ccaggtgtaatcctgaactgaatta

SEQ ID NO: 5205682 - DNA, 25 bp, Homo sapien
cctgtttggacgtggaagatttatc

SEQ ID NO: 5205683 - DNA, 25 bp, Homo sapien
tatcctggccaatttagctaaacct

SEQ ID NO: 5205684 - DNA, 25 bp, Homo sapien
gaaagttgcatttaacctcataaat

SEQ ID NO: 5205685 - DNA, 25 bp, Homo sapien
tgataagctaatttaactgtcctgt

SEQ ID NO: 5205686 - DNA, 25 bp, Homo sapien
cagagcatagggtgttggaagtatc

SEQ ID NO: 5205687 - DNA, 25 bp, Homo sapien
tctactgccacctgatgatttcaag

SEQ ID NO: 5205688 - DNA, 25 bp, Homo sapien
acttattccatctattctactgcca

SEQ ID NO: 5205689 - DNA, 25 bp, Homo sapien
tcagtagaaggaactactgatagca

SEQ ID NO: 5205690 - DNA, 25 bp, Homo sapien
ctgccttggagccaacaaggtagtg

SEQ ID NO: 5205691 - DNA, 25 bp, Homo sapien
tgcctcaggccaaataagctgcttg

SEQ ID NO: 5205692 - DNA, 25 bp, Homo sapien
tcaagtccttaagatagtttgagac

SEQ ID NO: 5205693 - DNA, 25 bp, Homo sapien
catcacgggctctgacacaagtcaa

SEQ ID NO: 5205694 - DNA, 25 bp, Homo sapien
tgtccttgtttctcaatctgtttgc

SEQ ID NO: 5205695 - DNA, 25 bp, Homo sapien
cctgaacgctgacaaggtggtctct

SEQ ID NO: 5205696 - DNA, 25 bp, Homo sapien
tgacctggcttagccttctgacctc

SEQ ID NO: 5205697 - DNA, 25 bp, Homo sapien
ccctgagtgtcctgcctgaacgctg

SEQ ID NO: 5205698 - DNA, 25 bp, Homo sapien
tacaggaggtaaaacggaagctatg

SEQ ID NO: 5205699 - DNA, 25 bp, Homo sapien
acaggcagcaagtgagtggaagcaa

SEQ ID NO: 5205700 - DNA, 25 bp, Homo sapien
gagactgagactaaatgcttacagg

SEQ ID NO: 5205701 - DNA, 25 bp, Homo sapien
caggtgagactgagactaaatgctt

SEQ ID NO: 5205702 - DNA, 25 bp, Homo sapien
gacgttagagttgtagatcatcatt

SEQ ID NO: 5205703 - DNA, 25 bp, Homo sapien
tatgttcccataacaagacgttaga

SEQ ID NO: 5205704 - DNA, 25 bp, Homo sapien
caaacataactgtaaaggtacagaa

SEQ ID NO: 5205705 - DNA, 25 bp, Homo sapien
attatacttgttcctaataactcca

SEQ ID NO: 5205706 - DNA, 25 bp, Homo sapien
gcaagccctttcaggtgatagtttt

SEQ ID NO: 5205707 - DNA, 25 bp, Homo sapien
caggtgatagttttgtccttgagtt

SEQ ID NO: 5205708 - DNA, 25 bp, Homo sapien
agccctttcaggtgatagttttgtc

SEQ ID NO: 5205709 - DNA, 25 bp, Homo sapien
ccctttcaggtgatagttttgtcct

SEQ ID NO: 5205710 - DNA, 25 bp, Homo sapien
taccaagccatgaagtcgactgcca

SEQ ID NO: 5205711 - DNA, 25 bp, Homo sapien
tctaggagatataagcaatgagtca

SEQ ID NO: 5205712 - DNA, 25 bp, Homo sapien
agagaaataaccagtcacaggcggg

SEQ ID NO: 5205713 - DNA, 25 bp, Homo sapien
ggttagaacacagcatgaacagaag

SEQ ID NO: 5205714 - DNA, 25 bp, Homo sapien
gggttgtaacaataatgcagggcca

SEQ ID NO: 5205715 - DNA, 25 bp, Homo sapien
tcaaaataggtgttgaatgcaaaca

SEQ ID NO: 5205716 - DNA, 25 bp, Homo sapien
tcatgaagagcatcgttaactgtgc

SEQ ID NO: 5205717 - DNA, 25 bp, Homo sapien
aaactgtataccttatgatctagag

SEQ ID NO: 5205718 - DNA, 25 bp, Homo sapien
tgactcatccgactctgattctgac

SEQ ID NO: 5205719 - DNA, 25 bp, Homo sapien
tggcgcagaaaccagatgttgagca

SEQ ID NO: 5205720 - DNA, 25 bp, Homo sapien
aaatacaccaaaggtcattgtggcg

SEQ ID NO: 5205721 - DNA, 25 bp, Homo sapien
tgcgggagcatctcaaaaatacacc

SEQ ID NO: 5205722 - DNA, 25 bp, Homo sapien
gaaagatgagctggatcctcttctt

SEQ ID NO: 5205723 - DNA, 25 bp, Homo sapien
gagctggatcctcttcttactcgca

SEQ ID NO: 5205724 - DNA, 25 bp, Homo sapien
aaaaagaaagatgagctggatcctc

SEQ ID NO: 5205725 - DNA, 25 bp, Homo sapien
tcttcttactcgcactggtggagca

SEQ ID NO: 5205726 - DNA, 25 bp, Homo sapien
gaggatccagtgtactcatacagag

SEQ ID NO: 5205727 - DNA, 25 bp, Homo sapien
gcttaatgagtctctcatgttccat

SEQ ID NO: 5205728 - DNA, 25 bp, Homo sapien
tcatagtttagcttaatgagtctct

SEQ ID NO: 5205729 - DNA, 25 bp, Homo sapien
cttgaggatccagtgtactcataca

SEQ ID NO: 5205730 - DNA, 25 bp, Homo sapien
ttcttagctctgttagctttcccag

SEQ ID NO: 5205731 - DNA, 25 bp, Homo sapien
ttttctaagccagctttcttagctc

SEQ ID NO: 5205732 - DNA, 25 bp, Homo sapien
cccagctgctgaatttttagaagtt

SEQ ID NO: 5205733 - DNA, 25 bp, Homo sapien
taattgtttttctaagccagctttc

SEQ ID NO: 5205734 - DNA, 25 bp, Homo sapien
aatgggctgccatgaactgactgcc

SEQ ID NO: 5205735 - DNA, 25 bp, Homo sapien
ggaccggctgaccttccttgtgaag

SEQ ID NO: 5205736 - DNA, 25 bp, Homo sapien
tgcactgcgttttatacttagagcc

SEQ ID NO: 5205737 - DNA, 25 bp, Homo sapien
actgactgcctgagcggaccggctg

SEQ ID NO: 5205738 - DNA, 25 bp, Homo sapien
ccccatactgtaggcaaacaaggac

SEQ ID NO: 5205739 - DNA, 25 bp, Homo sapien
gcaaacaaggactgaggtattgaaa

SEQ ID NO: 5205740 - DNA, 25 bp, Homo sapien
tgatgtaattgttccctcatatcct

SEQ ID NO: 5205741 - DNA, 25 bp, Homo sapien
tcagcttctagctgcatggaaggca

SEQ ID NO: 5205742 - DNA, 25 bp, Homo sapien
caactgtccgcttcttcaatctcac

SEQ ID NO: 5205743 - DNA, 25 bp, Homo sapien
tactccaactgtccgcttcttcaat

SEQ ID NO: 5205744 - DNA, 25 bp, Homo sapien
tccaactgtccgcttcttcaatctc

SEQ ID NO: 5205745 - DNA, 25 bp, Homo sapien
tatactccaactgtccgcttcttca

SEQ ID NO: 5205746 - DNA, 25 bp, Homo sapien
ttgagatagtcaggccttgccggcg

SEQ ID NO: 5205747 - DNA, 25 bp, Homo sapien
ttatatctgttgagatagtcaggcc

SEQ ID NO: 5205748 - DNA, 25 bp, Homo sapien
ggaccttttagcttgcaccattttc

SEQ ID NO: 5205749 - DNA, 25 bp, Homo sapien
ccattaggtagcacagtgaccatgg

SEQ ID NO: 5205750 - DNA, 25 bp, Homo sapien
tctccattgcatgtccaacttcttg

SEQ ID NO: 5205751 - DNA, 25 bp, Homo sapien
ggagtctccattgcatgtccaactt

SEQ ID NO: 5205752 - DNA, 25 bp, Homo sapien
tctgggagtctccattgcatgtcca

SEQ ID NO: 5205753 - DNA, 25 bp, Homo sapien
tgggagtctccattgcatgtccaac

SEQ ID NO: 5205754 - DNA, 25 bp, Homo sapien
aaaattgcaagaccagtttgttata

SEQ ID NO: 5205755 - DNA, 25 bp, Homo sapien
acaccactttagtcatttggtggca

SEQ ID NO: 5205756 - DNA, 25 bp, Homo sapien
taaacctgaaatgtcacagagccac

SEQ ID NO: 5205757 - DNA, 25 bp, Homo sapien
tctgtaatcagtggagtaaaattgc

SEQ ID NO: 5205758 - DNA, 25 bp, Homo sapien
tatagaagaagcgttccagcagagc

SEQ ID NO: 5205759 - DNA, 25 bp, Homo sapien
tctgcagcaagcctatagaagaagc

SEQ ID NO: 5205760 - DNA, 25 bp, Homo sapien
taaactctgcagcaagcctatagaa

SEQ ID NO: 5205761 - DNA, 25 bp, Homo sapien
caagcctatagaagaagcgttccag

SEQ ID NO: 5205762 - DNA, 25 bp, Homo sapien
ccttttagggtaatacaatgatcta

SEQ ID NO: 5205763 - DNA, 25 bp, Homo sapien
ttgcccttttagggtaatacaatga

SEQ ID NO: 5205764 - DNA, 25 bp, Homo sapien
gcccttttagggtaatacaatgatc

SEQ ID NO: 5205765 - DNA, 25 bp, Homo sapien
cccttttagggtaatacaatgatct

SEQ ID NO: 5205766 - DNA, 25 bp, Homo sapien
gatgaaatctatgtgatcacactga

SEQ ID NO: 5205767 - DNA, 25 bp, Homo sapien
gaccgatgaaatctatgtgatcaca

SEQ ID NO: 5205768 - DNA, 25 bp, Homo sapien
ctctgtttgtgaccgatgaaatcta

SEQ ID NO: 5205769 - DNA, 25 bp, Homo sapien
tggcaccactgccatcgttttcagt

SEQ ID NO: 5205770 - DNA, 25 bp, Homo sapien
cagcatccaacttgtggatcttctc

SEQ ID NO: 5205771 - DNA, 25 bp, Homo sapien
ttgcagcatccaacttgtggatctt

SEQ ID NO: 5205772 - DNA, 25 bp, Homo sapien
tcatttctcagtagaatattttgca

SEQ ID NO: 5205773 - DNA, 25 bp, Homo sapien
ttttgcagcatccaacttgtggatc

SEQ ID NO: 5205774 - DNA, 25 bp, Homo sapien
aatgagatcatttggccatatggcc

SEQ ID NO: 5205775 - DNA, 25 bp, Homo sapien
catggaaattgttaggaggcatatc

SEQ ID NO: 5205776 - DNA, 25 bp, Homo sapien
tagaacatcaacacccaagtcagaa

SEQ ID NO: 5205777 - DNA, 25 bp, Homo sapien
catacaatttagaagcagaagcata

SEQ ID NO: 5205778 - DNA, 25 bp, Homo sapien
caaatactcccttgctgaatttgtc

SEQ ID NO: 5205779 - DNA, 25 bp, Homo sapien
aatactcccttgctgaatttgtcct

SEQ ID NO: 5205780 - DNA, 25 bp, Homo sapien
agccaaatactcccttgctgaattt

SEQ ID NO: 5205781 - DNA, 25 bp, Homo sapien
gccaaatactcccttgctgaatttg

SEQ ID NO: 5205782 - DNA, 25 bp, Homo sapien
ttctaacctacccatctccaggttc

SEQ ID NO: 5205783 - DNA, 25 bp, Homo sapien
tcttctaacctacccatctccaggt

SEQ ID NO: 5205784 - DNA, 25 bp, Homo sapien
cttctaacctacccatctccaggtt

SEQ ID NO: 5205785 - DNA, 25 bp, Homo sapien
tctaacctacccatctccaggttct

SEQ ID NO: 5205786 - DNA, 25 bp, Homo sapien
gtctcccccttctcttggagtccta

SEQ ID NO: 5205787 - DNA, 25 bp, Homo sapien
tggagtcctagggttgagtttgaaa

SEQ ID NO: 5205788 - DNA, 25 bp, Homo sapien
tctcccccttctcttggagtcctag

SEQ ID NO: 5205789 - DNA, 25 bp, Homo sapien
cttggagtcctagggttgagtttga

SEQ ID NO: 5205790 - DNA, 25 bp, Homo sapien
gctgtcatttaagggtctgtgcacc

SEQ ID NO: 5205791 - DNA, 25 bp, Homo sapien
aatgtttgaaactcttggccccaca

SEQ ID NO: 5205792 - DNA, 25 bp, Homo sapien
aacttttgaactctacatgccaggt

SEQ ID NO: 5205793 - DNA, 25 bp, Homo sapien
gcacctctatttttcatgccaagag

SEQ ID NO: 5205794 - DNA, 25 bp, Homo sapien
ctgcaattccaggataacaggaaaa

SEQ ID NO: 5205795 - DNA, 25 bp, Homo sapien
tccaggataacaggaaaagacctct

SEQ ID NO: 5205796 - DNA, 25 bp, Homo sapien
ggataacaggaaaagacctcttgag

SEQ ID NO: 5205797 - DNA, 25 bp, Homo sapien
caggataacaggaaaagacctcttg

SEQ ID NO: 5205798 - DNA, 25 bp, Homo sapien
aatatgtgtttgaatgacccacttc

SEQ ID NO: 5205799 - DNA, 25 bp, Homo sapien
acttaatatgtgtttgaatgaccca

SEQ ID NO: 5205800 - DNA, 25 bp, Homo sapien
tgtgtttgaatgacccacttccaaa

SEQ ID NO: 5205801 - DNA, 25 bp, Homo sapien
ttgaatgacccacttccaaatatca

SEQ ID NO: 5205802 - DNA, 25 bp, Homo sapien
taagaagctttctagcgacactgca

SEQ ID NO: 5205803 - DNA, 25 bp, Homo sapien
ggttgtataactctgctccatggga

SEQ ID NO: 5205804 - DNA, 25 bp, Homo sapien
caacccatttcaagtggcatggcag

SEQ ID NO: 5205805 - DNA, 25 bp, Homo sapien
tctgaggtggccaagaataatctga

SEQ ID NO: 5205806 - DNA, 25 bp, Homo sapien
cttaaaacctgtagatccttgttct

SEQ ID NO: 5205807 - DNA, 25 bp, Homo sapien
gaattctaagattagagaactcgta

SEQ ID NO: 5205808 - DNA, 25 bp, Homo sapien
gtacttcctagaatgtatcaggtag

SEQ ID NO: 5205809 - DNA, 25 bp, Homo sapien
gttctttatagctatagggtcgtta

SEQ ID NO: 5205810 - DNA, 25 bp, Homo sapien
tctgctccaacctttatttctccca

SEQ ID NO: 5205811 - DNA, 25 bp, Homo sapien
ggcagctacagcagaagctttattt

SEQ ID NO: 5205812 - DNA, 25 bp, Homo sapien
caaccagaaatttgctggggtgttc

SEQ ID NO: 5205813 - DNA, 25 bp, Homo sapien
ctgattggcaactgagcccatggca

SEQ ID NO: 5205814 - DNA, 25 bp, Homo sapien
tatttccataattacaaatccctgt

SEQ ID NO: 5205815 - DNA, 25 bp, Homo sapien
tccataattacaaatccctgtcctt

SEQ ID NO: 5205816 - DNA, 25 bp, Homo sapien
ttctatttccataattacaaatccc

SEQ ID NO: 5205817 - DNA, 25 bp, Homo sapien
tttccataattacaaatccctgtcc

SEQ ID NO: 5205818 - DNA, 25 bp, Homo sapien
gatgtcatcatgatgttggtacaca

SEQ ID NO: 5205819 - DNA, 25 bp, Homo sapien
tcatgatgttggtacacatacacag

SEQ ID NO: 5205820 - DNA, 25 bp, Homo sapien
ctgactgaatctgtgcctttccgtc

SEQ ID NO: 5205821 - DNA, 25 bp, Homo sapien
tccgtcaatcttatcatcatgatgt

SEQ ID NO: 5205822 - DNA, 25 bp, Homo sapien
ttcagtgatttggtcctgtaacatt

SEQ ID NO: 5205823 - DNA, 25 bp, Homo sapien
tgatttggtcctgtaacattctccc

SEQ ID NO: 5205824 - DNA, 25 bp, Homo sapien
agtgatttggtcctgtaacattctc

SEQ ID NO: 5205825 - DNA, 25 bp, Homo sapien
tcagtgatttggtcctgtaacattc

SEQ ID NO: 5205826 - DNA, 25 bp, Homo sapien
tcttgtctgcctagtttttgcttct

SEQ ID NO: 5205827 - DNA, 25 bp, Homo sapien
ttcttgtctgcctagtttttgcttc

SEQ ID NO: 5205828 - DNA, 25 bp, Homo sapien
ggttgatgggagacctcacagattt

SEQ ID NO: 5205829 - DNA, 25 bp, Homo sapien
ctttcaggttgatgggagacctcac

SEQ ID NO: 5205830 - DNA, 25 bp, Homo sapien
tgatgggagacctcacagatttatt

SEQ ID NO: 5205831 - DNA, 25 bp, Homo sapien
tcaggttgatgggagacctcacaga

SEQ ID NO: 5205832 - DNA, 25 bp, Homo sapien
ctgatggagttctggatcgttccaa

SEQ ID NO: 5205833 - DNA, 25 bp, Homo sapien
tctggatcgttccaaaatccttctt

SEQ ID NO: 5205834 - DNA, 25 bp, Homo sapien
tgtgatggatgaagccagctatccg

SEQ ID NO: 5205835 - DNA, 25 bp, Homo sapien
ccagctatccgttgctttgcaaatg

SEQ ID NO: 5205836 - DNA, 25 bp, Homo sapien
cagcagccagagtcaacagtgtaat

SEQ ID NO: 5205837 - DNA, 25 bp, Homo sapien
ctccagcatcgaccatggaacagct

SEQ ID NO: 5205838 - DNA, 25 bp, Homo sapien
gggaagctccagcatcgaccatgga

SEQ ID NO: 5205839 - DNA, 25 bp, Homo sapien
tggagatcaacatcaacctctgtgt

SEQ ID NO: 5205840 - DNA, 25 bp, Homo sapien
tttgctacatttgctggtaactttg

SEQ ID NO: 5205841 - DNA, 25 bp, Homo sapien
tcaatgaccaagtcctccaggttca

SEQ ID NO: 5205842 - DNA, 25 bp, Homo sapien
caggttcacctcttgttatatggaa

SEQ ID NO: 5205843 - DNA, 25 bp, Homo sapien
tttccaagactgttgttttgctaca

SEQ ID NO: 5205844 - DNA, 25 bp, Homo sapien
cctcccagtaggctcgtggtctcgc

SEQ ID NO: 5205845 - DNA, 25 bp, Homo sapien
ttgttcgttcctcccagtaggctcg

SEQ ID NO: 5205846 - DNA, 25 bp, Homo sapien
ttcctcccagtaggctcgtggtctc

SEQ ID NO: 5205847 - DNA, 25 bp, Homo sapien
tcgttcctcccagtaggctcgtggt

SEQ ID NO: 5205848 - DNA, 25 bp, Homo sapien
tgccatgttcttgtcattcgttaag

SEQ ID NO: 5205849 - DNA, 25 bp, Homo sapien
caggcagagatataacatgcaagtc

SEQ ID NO: 5205850 - DNA, 25 bp, Homo sapien
gagggatgacacacttcaggaactt

SEQ ID NO: 5205851 - DNA, 25 bp, Homo sapien
cttagatgtctagcagagggatgac

SEQ ID NO: 5205852 - DNA, 25 bp, Homo sapien
tttgagggacgaatgagtttattca

SEQ ID NO: 5205853 - DNA, 25 bp, Homo sapien
ttccatggagaagttattgataacc

SEQ ID NO: 5205854 - DNA, 25 bp, Homo sapien
atttctggtttgagggacgaatgag

SEQ ID NO: 5205855 - DNA, 25 bp, Homo sapien
tgttttcctgaccaaaactctaaca

SEQ ID NO: 5205856 - DNA, 25 bp, Homo sapien
gacactgttgaaaggcatactagga

SEQ ID NO: 5205857 - DNA, 25 bp, Homo sapien
gattgtcacaaactaaacaggtgca

SEQ ID NO: 5205858 - DNA, 25 bp, Homo sapien
tcctggcttaggaatcagagaacca

SEQ ID NO: 5205859 - DNA, 25 bp, Homo sapien
cagagaaccatgtactgggctcaga

SEQ ID NO: 5205860 - DNA, 25 bp, Homo sapien
caaggtgcacatcacgtgaaattca

SEQ ID NO: 5205861 - DNA, 25 bp, Homo sapien
ttcacggcctacatcacaggagagc

SEQ ID NO: 5205862 - DNA, 25 bp, Homo sapien
gccgtcgatactctggagcccaatg

SEQ ID NO: 5205863 - DNA, 25 bp, Homo sapien
caggagagcgccgtcgatactctgg

SEQ ID NO: 5205864 - DNA, 25 bp, Homo sapien
tcctttgtgccatttgattgagaaa

SEQ ID NO: 5205865 - DNA, 25 bp, Homo sapien
gcgcctgccctacttagagttttaa

SEQ ID NO: 5205866 - DNA, 25 bp, Homo sapien
ttcaaaccaagtattggcaatagag

SEQ ID NO: 5205867 - DNA, 25 bp, Homo sapien
caaatcaccggcataacagtgaaag

SEQ ID NO: 5205868 - DNA, 25 bp, Homo sapien
gcaagatgacccagtttctatagga

SEQ ID NO: 5205869 - DNA, 25 bp, Homo sapien
tcaggcagttccaaaccccactaag

SEQ ID NO: 5205870 - DNA, 25 bp, Homo sapien
aggagagaacctcaaaagaccacag

SEQ ID NO: 5205871 - DNA, 25 bp, Homo sapien
gacaggaggttctagtggcacagaa

SEQ ID NO: 5205872 - DNA, 25 bp, Homo sapien
taaatgagagaccttcttgtattaa

SEQ ID NO: 5205873 - DNA, 25 bp, Homo sapien
gagaccttcttgtattaatttcaag

SEQ ID NO: 5205874 - DNA, 25 bp, Homo sapien
taaaagcgatcaagaagtacagatg

SEQ ID NO: 5205875 - DNA, 25 bp, Homo sapien
tgaagtatggagaggtctgagacat

SEQ ID NO: 5205876 - DNA, 25 bp, Homo sapien
aacctgagttgccaagcactgctgg

SEQ ID NO: 5205877 - DNA, 25 bp, Homo sapien
tgatctccaacactgcctagctatg

SEQ ID NO: 5205878 - DNA, 25 bp, Homo sapien
tatacagttttgacagccactgaca

SEQ ID NO: 5205879 - DNA, 25 bp, Homo sapien
tccattcattgtgtctagttcctgc

SEQ ID NO: 5205880 - DNA, 25 bp, Homo sapien
tatctgcagatattcagcttcttca

SEQ ID NO: 5205881 - DNA, 25 bp, Homo sapien
catttacaagtgaagcatctggcac

SEQ ID NO: 5205882 - DNA, 25 bp, Homo sapien
tcagggaggtggtatctgcatcccc

SEQ ID NO: 5205883 - DNA, 25 bp, Homo sapien
tgatttctggtgtcatggccatatt

SEQ ID NO: 5205884 - DNA, 25 bp, Homo sapien
ttaaatataaatggactaaattctg

SEQ ID NO: 5205885 - DNA, 25 bp, Homo sapien
tataaatggactaaattctgcaatt

SEQ ID NO: 5205886 - DNA, 25 bp, Homo sapien
aatataaatggactaaattctgcaa

SEQ ID NO: 5205887 - DNA, 25 bp, Homo sapien
taaatataaatggactaaattctgc

SEQ ID NO: 5205888 - DNA, 25 bp, Homo sapien
atcgcgcccggctaaactgaatatt

SEQ ID NO: 5205889 - DNA, 25 bp, Homo sapien
caggtaatgagttccacaggtgaga

SEQ ID NO: 5205890 - DNA, 25 bp, Homo sapien
cgcgcccggctaaactgaatattga

SEQ ID NO: 5205891 - DNA, 25 bp, Homo sapien
gaaagcagagaaaacttaatgcagg

SEQ ID NO: 5205892 - DNA, 25 bp, Homo sapien
tactcagtggacaaggaaattttcc

SEQ ID NO: 5205893 - DNA, 25 bp, Homo sapien
cagaatcagtgctgttagtacacca

SEQ ID NO: 5205894 - DNA, 25 bp, Homo sapien
cacagaatggagatttgtaacaacc

SEQ ID NO: 5205895 - DNA, 25 bp, Homo sapien
caaaatcgttgtacctagtattcag

SEQ ID NO: 5205896 - DNA, 25 bp, Homo sapien
aatagctgactagtactgtggtaac

SEQ ID NO: 5205897 - DNA, 25 bp, Homo sapien
acatatcatttaattacgaaattcc

SEQ ID NO: 5205898 - DNA, 25 bp, Homo sapien
ggttctggaagaataagactgaaca

SEQ ID NO: 5205899 - DNA, 25 bp, Homo sapien
gatcagaactgagtaatagctgact

SEQ ID NO: 5205900 - DNA, 25 bp, Homo sapien
gtggagcccaggcttctcgagcgct

SEQ ID NO: 5205901 - DNA, 25 bp, Homo sapien
catagtggagcccaggcttctcgag

SEQ ID NO: 5205902 - DNA, 25 bp, Homo sapien
tagtggagcccaggcttctcgagcg

SEQ ID NO: 5205903 - DNA, 25 bp, Homo sapien
gagcccaggcttctcgagcgctcca

SEQ ID NO: 5205904 - DNA, 25 bp, Homo sapien
gcgcccgaatctggcgtgggagaat

SEQ ID NO: 5205905 - DNA, 25 bp, Homo sapien
cgaatctggcgtgggagaatatctc

SEQ ID NO: 5205906 - DNA, 25 bp, Homo sapien
tggcgtgggagaatatctctttgac

SEQ ID NO: 5205907 - DNA, 25 bp, Homo sapien
atctggcgtgggagaatatctcttt

SEQ ID NO: 5205908 - DNA, 25 bp, Homo sapien
tgcagaaccaatgaggtggccgaat

SEQ ID NO: 5205909 - DNA, 25 bp, Homo sapien
aaccaatgaggtggccgaatcttcc

SEQ ID NO: 5205910 - DNA, 25 bp, Homo sapien
aagctgcagaaccaatgaggtggcc

SEQ ID NO: 5205911 - DNA, 25 bp, Homo sapien
agaggggacatgctgagaaactgat

SEQ ID NO: 5205912 - DNA, 25 bp, Homo sapien
aacctggagcactacgcctcctaag

SEQ ID NO: 5205913 - DNA, 25 bp, Homo sapien
tcaaccgccagatcaacctggagca

SEQ ID NO: 5205914 - DNA, 25 bp, Homo sapien
ggagcactacgcctcctaagtttac

SEQ ID NO: 5205915 - DNA, 25 bp, Homo sapien
agatcaacctggagcactacgcctc

SEQ ID NO: 5205916 - DNA, 25 bp, Homo sapien
gatgataacttatcactaactgcat

SEQ ID NO: 5205917 - DNA, 25 bp, Homo sapien
ctaactgcataaacaaacactcaga

SEQ ID NO: 5205918 - DNA, 25 bp, Homo sapien
tcttataggacagatctggtattga

SEQ ID NO: 5205919 - DNA, 25 bp, Homo sapien
tcagtgctttagctatgtcatgcca

SEQ ID NO: 5205920 - DNA, 25 bp, Homo sapien
aagatggtatctcacagtaattttg

SEQ ID NO: 5205921 - DNA, 25 bp, Homo sapien
acgtggcagtgcaggcatccttttg

SEQ ID NO: 5205922 - DNA, 25 bp, Homo sapien
gctgcaacaaacgtggcagtgcagg

SEQ ID NO: 5205923 - DNA, 25 bp, Homo sapien
tagtaggattactgacaagtgtggt

SEQ ID NO: 5205924 - DNA, 25 bp, Homo sapien
ggaggaggcacattctagttgcatc

SEQ ID NO: 5205925 - DNA, 25 bp, Homo sapien
gctattttggttcctatccatggag

SEQ ID NO: 5205926 - DNA, 25 bp, Homo sapien
catctagtcaggcatcttgagcccc

SEQ ID NO: 5205927 - DNA, 25 bp, Homo sapien
tctttatgacctgcagtgatatcct

SEQ ID NO: 5205928 - DNA, 25 bp, Homo sapien
ccaatggtggtagactgtgctgagt

SEQ ID NO: 5205929 - DNA, 25 bp, Homo sapien
tgttaggcccaagcagtctgatttg

SEQ ID NO: 5205930 - DNA, 25 bp, Homo sapien
ggcccctggacagcatactgaatta

SEQ ID NO: 5205931 - DNA, 25 bp, Homo sapien
cagcctgtccttagaccctgggaga

SEQ ID NO: 5205932 - DNA, 25 bp, Homo sapien
ctagctacaggtttatcaatgctgt

SEQ ID NO: 5205933 - DNA, 25 bp, Homo sapien
ttccagttggttagtgtattgtagt

SEQ ID NO: 5205934 - DNA, 25 bp, Homo sapien
tgtggttatcagctgtaatgtctcc

SEQ ID NO: 5205935 - DNA, 25 bp, Homo sapien
tgtattgtagtttataataatgcct

SEQ ID NO: 5205936 - DNA, 25 bp, Homo sapien
atttcatcaattttcagtagagtat

SEQ ID NO: 5205937 - DNA, 25 bp, Homo sapien
tttcataatggcctttctcttcaat

SEQ ID NO: 5205938 - DNA, 25 bp, Homo sapien
tcagtagagtattttcatattgttc

SEQ ID NO: 5205939 - DNA, 25 bp, Homo sapien
ttcataatggcctttctcttcaatt

SEQ ID NO: 5205940 - DNA, 25 bp, Homo sapien
gtgtctttatagaggtcaaactcaa

SEQ ID NO: 5205941 - DNA, 25 bp, Homo sapien
ttttagtgtctttatagaggtcaaa

SEQ ID NO: 5205942 - DNA, 25 bp, Homo sapien
tctttatagaggtcaaactcaaagt

SEQ ID NO: 5205943 - DNA, 25 bp, Homo sapien
ttatagaggtcaaactcaaagtttg

SEQ ID NO: 5205944 - DNA, 25 bp, Homo sapien
aaataacgtacccaaagtcatgcag

SEQ ID NO: 5205945 - DNA, 25 bp, Homo sapien
ttaatggatgcaatgaaaaaacggc

SEQ ID NO: 5205946 - DNA, 25 bp, Homo sapien
tctccaaacgagcaggcagtaaatt

SEQ ID NO: 5205947 - DNA, 25 bp, Homo sapien
gactattcaaacgataacttcctgg

SEQ ID NO: 5205948 - DNA, 25 bp, Homo sapien
aaccctcccaactggaatggcagga

SEQ ID NO: 5205949 - DNA, 25 bp, Homo sapien
taatgtgaaacataccaggacagaa

SEQ ID NO: 5205950 - DNA, 25 bp, Homo sapien
gatttcaccctttcaatgaggcagg

SEQ ID NO: 5205951 - DNA, 25 bp, Homo sapien
ggcaggcctggcttgaacaaccatt

SEQ ID NO: 5205952 - DNA, 25 bp, Homo sapien
agtcttgatctttttggcagtaagt

SEQ ID NO: 5205953 - DNA, 25 bp, Homo sapien
ttctttgtttggctaatactgaagt

SEQ ID NO: 5205954 - DNA, 25 bp, Homo sapien
ggctaatactgaagtcttgatcttt

SEQ ID NO: 5205955 - DNA, 25 bp, Homo sapien
tgtaattctttgtttggctaatact

SEQ ID NO: 5205956 - DNA, 25 bp, Homo sapien
tagtgttaagagcttgagccctaga

SEQ ID NO: 5205957 - DNA, 25 bp, Homo sapien
taacatgtgtgtcacctgttggaca

SEQ ID NO: 5205958 - DNA, 25 bp, Homo sapien
gagtgaggcaaattgtcctttccca

SEQ ID NO: 5205959 - DNA, 25 bp, Homo sapien
gagccctagagccataacacatggt

SEQ ID NO: 5205960 - DNA, 25 bp, Homo sapien
gtttctacttgcctgtctcaccatc

SEQ ID NO: 5205961 - DNA, 25 bp, Homo sapien
tttctacttgcctgtctcaccatcc

SEQ ID NO: 5205962 - DNA, 25 bp, Homo sapien
tccagctactgagaacttgttccgg

SEQ ID NO: 5205963 - DNA, 25 bp, Homo sapien
aacttgttccggtgatggagcctca

SEQ ID NO: 5205964 - DNA, 25 bp, Homo sapien
cctcaaaggaatttgtggattcctc

SEQ ID NO: 5205965 - DNA, 25 bp, Homo sapien
cggtgatggagcctcaaaggaattt

SEQ ID NO: 5205966 - DNA, 25 bp, Homo sapien
cgcggccaggacaaagagcgcggcg

SEQ ID NO: 5205967 - DNA, 25 bp, Homo sapien
ggcgcgagctgttcccgcgcgctcc

SEQ ID NO: 5205968 - DNA, 25 bp, Homo sapien
tcaccctgggggtgcacgcgtccgc

SEQ ID NO: 5205969 - DNA, 25 bp, Homo sapien
cgacgcccggcgggcgcgagctgtt

SEQ ID NO: 5205970 - DNA, 25 bp, Homo sapien
gcgagggcgcgagctcccggcgagg

SEQ ID NO: 5205971 - DNA, 25 bp, Homo sapien
gagtgtggaacattgaaagtcggag

SEQ ID NO: 5205972 - DNA, 25 bp, Homo sapien
cgcgcagtcagcaagttccgaggcg

SEQ ID NO: 5205973 - DNA, 25 bp, Homo sapien
agggggttgtgcagtgccgggctcc

SEQ ID NO: 5205974 - DNA, 25 bp, Homo sapien
ctcggccgcccgcccggcccgctcg

SEQ ID NO: 5205975 - DNA, 25 bp, Homo sapien
gcccgcccggcccgctcgcgcgccg

SEQ ID NO: 5205976 - DNA, 25 bp, Homo sapien
tcggccgcccgcccggcccgctcgc

SEQ ID NO: 5205977 - DNA, 25 bp, Homo sapien
gccgcccgcccggcccgctcgcgcg

SEQ ID NO: 5205978 - DNA, 25 bp, Homo sapien
tcaatttttatatcacggaccgaca

SEQ ID NO: 5205979 - DNA, 25 bp, Homo sapien
agtgcaacaaatttccgcgcccgcg

SEQ ID NO: 5205980 - DNA, 25 bp, Homo sapien
gcgccaagtgatgcgagcagcccag

SEQ ID NO: 5205981 - DNA, 25 bp, Homo sapien
aatgccaccaaggttcctcgctcaa

SEQ ID NO: 5205982 - DNA, 25 bp, Homo sapien
tgggaaaagcagaattcaaactgca

SEQ ID NO: 5205983 - DNA, 25 bp, Homo sapien
cctgggaaaagcagaattcaaactg

SEQ ID NO: 5205984 - DNA, 25 bp, Homo sapien
gggaaaagcagaattcaaactgcac

SEQ ID NO: 5205985 - DNA, 25 bp, Homo sapien
ctgggaaaagcagaattcaaactgc

SEQ ID NO: 5205986 - DNA, 25 bp, Homo sapien
tagcactagtggataacttagcagt

SEQ ID NO: 5205987 - DNA, 25 bp, Homo sapien
cagtggttttgctagagagtttggt

SEQ ID NO: 5205988 - DNA, 25 bp, Homo sapien
gggctctcatcatcggacctttgcc

SEQ ID NO: 5205989 - DNA, 25 bp, Homo sapien
tcgctggtccgcatctgaactgcca

SEQ ID NO: 5205990 - DNA, 25 bp, Homo sapien
gctggctctgccttcagtaatgcta

SEQ ID NO: 5205991 - DNA, 25 bp, Homo sapien
gaataaccagggaattacactgccc

SEQ ID NO: 5205992 - DNA, 25 bp, Homo sapien
tgccctctaccaccatgcagttaaa

SEQ ID NO: 5205993 - DNA, 25 bp, Homo sapien
caccatgcagttaaatgcaaggctg

SEQ ID NO: 5205994 - DNA, 25 bp, Homo sapien
ttagtgaaatgagaagagacaaaaa

SEQ ID NO: 5205995 - DNA, 25 bp, Homo sapien
agagacaaaaaggatttgatatagt

SEQ ID NO: 5205996 - DNA, 25 bp, Homo sapien
ctgttagtgaaatgagaagagacaa

SEQ ID NO: 5205997 - DNA, 25 bp, Homo sapien
aagagacaaaaaggatttgatatag

SEQ ID NO: 5205998 - DNA, 25 bp, Homo sapien
gaggatcaagggttatttcagctag

SEQ ID NO: 5205999 - DNA, 25 bp, Homo sapien
ggttatttcagctagctccttctga

SEQ ID NO: 5206000 - DNA, 25 bp, Homo sapien
atcaagggttatttcagctagctcc

SEQ ID NO: 5206001 - DNA, 25 bp, Homo sapien
aggaggaggatcaagggttatttca

SEQ ID NO: 5206002 - DNA, 25 bp, Homo sapien
cagacaatacatcaatctcttggta

SEQ ID NO: 5206003 - DNA, 25 bp, Homo sapien
ccacaatgtatacttatgctaaaaa

SEQ ID NO: 5206004 - DNA, 25 bp, Homo sapien
aaatccacaatgtatacttatgcta

SEQ ID NO: 5206005 - DNA, 25 bp, Homo sapien
gctgcacacatatccagacaataca

SEQ ID NO: 5206006 - DNA, 25 bp, Homo sapien
catttacttgttctctaaagcggca

SEQ ID NO: 5206007 - DNA, 25 bp, Homo sapien
gaaatacaatgcaagtcacatacgt

SEQ ID NO: 5206008 - DNA, 25 bp, Homo sapien
ccatttagaaggctggagggaaaat

SEQ ID NO: 5206009 - DNA, 25 bp, Homo sapien
taaatggctacagatttgacacacc

SEQ ID NO: 5206010 - DNA, 25 bp, Homo sapien
gcacaagtggtgactaggagaggac

SEQ ID NO: 5206011 - DNA, 25 bp, Homo sapien
tttcgctgtttgcacaagtggtgac

SEQ ID NO: 5206012 - DNA, 25 bp, Homo sapien
ctttctaaactttcgctgtttgcac

SEQ ID NO: 5206013 - DNA, 25 bp, Homo sapien
aaactttcgctgtttgcacaagtgg

SEQ ID NO: 5206014 - DNA, 25 bp, Homo sapien
cactcttaaaatattcgtcagtata

SEQ ID NO: 5206015 - DNA, 25 bp, Homo sapien
caatctgaacatacactcttaaaat

SEQ ID NO: 5206016 - DNA, 25 bp, Homo sapien
tcaatctgaacatacactcttaaaa

SEQ ID NO: 5206017 - DNA, 25 bp, Homo sapien
acatacactcttaaaatattcgtca

SEQ ID NO: 5206018 - DNA, 25 bp, Homo sapien
gatttacaagtgattttattatgtt

SEQ ID NO: 5206019 - DNA, 25 bp, Homo sapien
atgtttttatctcatattgataggg

SEQ ID NO: 5206020 - DNA, 25 bp, Homo sapien
tagatttacaagtgattttattatg

SEQ ID NO: 5206021 - DNA, 25 bp, Homo sapien
tttttatctcatattgatagggaag

SEQ ID NO: 5206022 - DNA, 25 bp, Homo sapien
catgtctctgagtttgcgttcaaag

SEQ ID NO: 5206023 - DNA, 25 bp, Homo sapien
gtctctgagtttgcgttcaaagcct

SEQ ID NO: 5206024 - DNA, 25 bp, Homo sapien
tgtctctgagtttgcgttcaaagcc

SEQ ID NO: 5206025 - DNA, 25 bp, Homo sapien
ttacatgtctctgagtttgcgttca

SEQ ID NO: 5206026 - DNA, 25 bp, Homo sapien
tataagagctatacccagtcctagt

SEQ ID NO: 5206027 - DNA, 25 bp, Homo sapien
tacatgacaagaggcaataccagtg

SEQ ID NO: 5206028 - DNA, 25 bp, Homo sapien
gatgaaagccatcctaggcaacgag

SEQ ID NO: 5206029 - DNA, 25 bp, Homo sapien
taaaccaaggagtacggtcaagcac

SEQ ID NO: 5206030 - DNA, 25 bp, Homo sapien
ctcatacgccgctgggaaagtaaaa

SEQ ID NO: 5206031 - DNA, 25 bp, Homo sapien
tcacaactggtgaggagataaacta

SEQ ID NO: 5206032 - DNA, 25 bp, Homo sapien
tggaaccctcatacgccgctgggaa

SEQ ID NO: 5206033 - DNA, 25 bp, Homo sapien
aaacagatgtgtatttgtgaatcct

SEQ ID NO: 5206034 - DNA, 25 bp, Homo sapien
agctttaaaggaactctggagtaca

SEQ ID NO: 5206035 - DNA, 25 bp, Homo sapien
gcaaacctacttatctggtgctgta

SEQ ID NO: 5206036 - DNA, 25 bp, Homo sapien
tatatgctaatctgtcaccttcgaa

SEQ ID NO: 5206037 - DNA, 25 bp, Homo sapien
tctcaactttctggaggctactctg

SEQ ID NO: 5206038 - DNA, 25 bp, Homo sapien
gtatgaaatcaaagatgaagagtcc

SEQ ID NO: 5206039 - DNA, 25 bp, Homo sapien
agatgaagagtcctggaggactggg

SEQ ID NO: 5206040 - DNA, 25 bp, Homo sapien
cttcaagctcttcagaatcagctca

SEQ ID NO: 5206041 - DNA, 25 bp, Homo sapien
aactgtatgaaatcaaagatgaaga

SEQ ID NO: 5206042 - DNA, 25 bp, Homo sapien
aggactgaacatacatgtttacctg

SEQ ID NO: 5206043 - DNA, 25 bp, Homo sapien
gactgaacatacatgtttacctgac

SEQ ID NO: 5206044 - DNA, 25 bp, Homo sapien
tgaaggactgaacatacatgtttac

SEQ ID NO: 5206045 - DNA, 25 bp, Homo sapien
tagtgaaggactgaacatacatgtt

SEQ ID NO: 5206046 - DNA, 25 bp, Homo sapien
taaatttggaacactaagggcaagc

SEQ ID NO: 5206047 - DNA, 25 bp, Homo sapien
cagagttgataaacctgcagcgcaa

SEQ ID NO: 5206048 - DNA, 25 bp, Homo sapien
gatatcctcgagaccttgggacaga

SEQ ID NO: 5206049 - DNA, 25 bp, Homo sapien
tatatgaatgcgtcaggcagctcct

SEQ ID NO: 5206050 - DNA, 25 bp, Homo sapien
cttatccacgctatctactacagag

SEQ ID NO: 5206051 - DNA, 25 bp, Homo sapien
agcgcttgcccaaaaattgcagtgg

SEQ ID NO: 5206052 - DNA, 25 bp, Homo sapien
ctgagacagtgtttgataatcctaa

SEQ ID NO: 5206053 - DNA, 25 bp, Homo sapien
gaaatgggtcaaatgagacactgac

SEQ ID NO: 5206054 - DNA, 25 bp, Homo sapien
aaagccacatttgttcatggaaact

SEQ ID NO: 5206055 - DNA, 25 bp, Homo sapien
atttactgcacagtctaactctctg

SEQ ID NO: 5206056 - DNA, 25 bp, Homo sapien
cttgctctgtcgttagtggcatgat

SEQ ID NO: 5206057 - DNA, 25 bp, Homo sapien
gaacctctaagagtctacttatgaa

SEQ ID NO: 5206058 - DNA, 25 bp, Homo sapien
ggaaatgtgctgaagcatcagaagg

SEQ ID NO: 5206059 - DNA, 25 bp, Homo sapien
atgttctaagcttctattactgttc

SEQ ID NO: 5206060 - DNA, 25 bp, Homo sapien
aagcgctatttgacactctatatga

SEQ ID NO: 5206061 - DNA, 25 bp, Homo sapien
ttcaatgcccctatgaggagaggta

SEQ ID NO: 5206062 - DNA, 25 bp, Homo sapien
ccttatgttgcacactgctcacaga

SEQ ID NO: 5206063 - DNA, 25 bp, Homo sapien
catctggaaagcttagaatgactga

SEQ ID NO: 5206064 - DNA, 25 bp, Homo sapien
gagatgactctccacactttgtgat

SEQ ID NO: 5206065 - DNA, 25 bp, Homo sapien
caaggatgaggtgttttgactcaca

SEQ ID NO: 5206066 - DNA, 25 bp, Homo sapien
aacatgtaaacagcctctgaaggca

SEQ ID NO: 5206067 - DNA, 25 bp, Homo sapien
tacatatagtcagtttctaaatttt

SEQ ID NO: 5206068 - DNA, 25 bp, Homo sapien
tgccatacatagtgccatagataat

SEQ ID NO: 5206069 - DNA, 25 bp, Homo sapien
tcgcttagagatttcatcctatttt

SEQ ID NO: 5206070 - DNA, 25 bp, Homo sapien
atatatttatcgcttagagatttca

SEQ ID NO: 5206071 - DNA, 25 bp, Homo sapien
caggtgataaaatgctcagccatga

SEQ ID NO: 5206072 - DNA, 25 bp, Homo sapien
tactacatctgaaaccatgggtccc

SEQ ID NO: 5206073 - DNA, 25 bp, Homo sapien
cactggctcactaaattaataaggg

SEQ ID NO: 5206074 - DNA, 25 bp, Homo sapien
tgccaaatgtaatcacctgtggagt

SEQ ID NO: 5206075 - DNA, 25 bp, Homo sapien
tttaaatgtcacacagactctagca

SEQ ID NO: 5206076 - DNA, 25 bp, Homo sapien
aatgtgtgaaagtcaggtgttctca

SEQ ID NO: 5206077 - DNA, 25 bp, Homo sapien
gagcatataccttaaacagctgggt

SEQ ID NO: 5206078 - DNA, 25 bp, Homo sapien
tctcaatgataactgcctgcactgt

SEQ ID NO: 5206079 - DNA, 25 bp, Homo sapien
tatgcagttttacggctcccaatac

SEQ ID NO: 5206080 - DNA, 25 bp, Homo sapien
gaacagatacctcacaccaaagata

SEQ ID NO: 5206081 - DNA, 25 bp, Homo sapien
taaacagatggcaagtaagcgtatg

SEQ ID NO: 5206082 - DNA, 25 bp, Homo sapien
caaggcaggcaacagtcttggagaa

SEQ ID NO: 5206083 - DNA, 25 bp, Homo sapien
tgttggtaagacgactcatacgcct

SEQ ID NO: 5206084 - DNA, 25 bp, Homo sapien
tagttcttaaatgtgctctcttccc

SEQ ID NO: 5206085 - DNA, 25 bp, Homo sapien
tatttgccatcggacaaagtgtaca

SEQ ID NO: 5206086 - DNA, 25 bp, Homo sapien
tactgccagttgatagaagagcttg

SEQ ID NO: 5206087 - DNA, 25 bp, Homo sapien
gttacattttggtgcactgcgctta

SEQ ID NO: 5206088 - DNA, 25 bp, Homo sapien
cataaggaatcccatccttggaatc

SEQ ID NO: 5206089 - DNA, 25 bp, Homo sapien
gatctgagtcctaggtgctactaag

SEQ ID NO: 5206090 - DNA, 25 bp, Homo sapien
agggttcctttcagtgcgaatgttg

SEQ ID NO: 5206091 - DNA, 25 bp, Homo sapien
tggtttgatctgtccctgctaaaac

SEQ ID NO: 5206092 - DNA, 25 bp, Homo sapien
caaacgcggcaatgttgggaagtgt

SEQ ID NO: 5206093 - DNA, 25 bp, Homo sapien
gacagacacttcaagaccaggcaaa

SEQ ID NO: 5206094 - DNA, 25 bp, Homo sapien
gagtcctcactctagcaagaatgaa

SEQ ID NO: 5206095 - DNA, 25 bp, Homo sapien
gcaatctagagcaataagaagtaaa

SEQ ID NO: 5206096 - DNA, 25 bp, Homo sapien
agtgttaaaggtaaattagcaatct

SEQ ID NO: 5206097 - DNA, 25 bp, Homo sapien
tgaatgttaatatcctaaaaccagg

SEQ ID NO: 5206098 - DNA, 25 bp, Homo sapien
gcatgtgtgtatgaacttacttgga

SEQ ID NO: 5206099 - DNA, 25 bp, Homo sapien
aatgtgatatccagaaaaaacacac

SEQ ID NO: 5206100 - DNA, 25 bp, Homo sapien
aaatgttatctcctttaggcccagc

SEQ ID NO: 5206101 - DNA, 25 bp, Homo sapien
ggcttaaatggataatctgatgaaa

SEQ ID NO: 5206102 - DNA, 25 bp, Homo sapien
tggtggcttaaatggataatctgat

SEQ ID NO: 5206103 - DNA, 25 bp, Homo sapien
tacagctcttaaattgtggcaaggt

SEQ ID NO: 5206104 - DNA, 25 bp, Homo sapien
aaaactagcagtgtactgtgagcgc

SEQ ID NO: 5206105 - DNA, 25 bp, Homo sapien
gagagtatgcccctctagaactgct

SEQ ID NO: 5206106 - DNA, 25 bp, Homo sapien
ctgtgagcgcaaaagttgaatctgg

SEQ ID NO: 5206107 - DNA, 25 bp, Homo sapien
gtcaaagcgggactccagttgtctt

SEQ ID NO: 5206108 - DNA, 25 bp, Homo sapien
gtctttaaggatgtccagacagatg

SEQ ID NO: 5206109 - DNA, 25 bp, Homo sapien
agtcaaagcgggactccagttgtct

SEQ ID NO: 5206110 - DNA, 25 bp, Homo sapien
agacagatgactccctgactgttga

SEQ ID NO: 5206111 - DNA, 25 bp, Homo sapien
ctgtctggctatcctgtcgtgttct

SEQ ID NO: 5206112 - DNA, 25 bp, Homo sapien
tatcctgtcgtgttctgctctgttg

SEQ ID NO: 5206113 - DNA, 25 bp, Homo sapien
tgagtggctatgcttccaaccagag

SEQ ID NO: 5206114 - DNA, 25 bp, Homo sapien
ttggtcaaatactgagtggctatgc

SEQ ID NO: 5206115 - DNA, 25 bp, Homo sapien
aagcagagtagaatcagtataacat

SEQ ID NO: 5206116 - DNA, 25 bp, Homo sapien
tatacacagaagtccgtattgtaaa

SEQ ID NO: 5206117 - DNA, 25 bp, Homo sapien
ctataaagatttgcagcacagtgag

SEQ ID NO: 5206118 - DNA, 25 bp, Homo sapien
tctcccaggctccaaaggataaaag

SEQ ID NO: 5206119 - DNA, 25 bp, Homo sapien
gctctctgagctacaaagggtaaaa

SEQ ID NO: 5206120 - DNA, 25 bp, Homo sapien
taatctacagctacaaagttctact

SEQ ID NO: 5206121 - DNA, 25 bp, Homo sapien
gaagcaagacttgcaagtaggcgtt

SEQ ID NO: 5206122 - DNA, 25 bp, Homo sapien
gacttcaggaccagtatccttagta

SEQ ID NO: 5206123 - DNA, 25 bp, Homo sapien
gactgacttaaaatattacgacagg

SEQ ID NO: 5206124 - DNA, 25 bp, Homo sapien
caatcatctcagacacactttctaa

SEQ ID NO: 5206125 - DNA, 25 bp, Homo sapien
aagaatgggtttatttgtgctagtc

SEQ ID NO: 5206126 - DNA, 25 bp, Homo sapien
tgctagtctttagtaatcttcatag

SEQ ID NO: 5206127 - DNA, 25 bp, Homo sapien
caatggtagtttgtggaagagctgc

SEQ ID NO: 5206128 - DNA, 25 bp, Homo sapien
caaagagtagcctgttccccaaaag

SEQ ID NO: 5206129 - DNA, 25 bp, Homo sapien
tatggacacagccaacaagtaagca

SEQ ID NO: 5206130 - DNA, 25 bp, Homo sapien
tagtttggcggtggtaattaggctc

SEQ ID NO: 5206131 - DNA, 25 bp, Homo sapien
gataggtatacaccttacaggatca

SEQ ID NO: 5206132 - DNA, 25 bp, Homo sapien
gaaacatcccattacacattgcaga

SEQ ID NO: 5206133 - DNA, 25 bp, Homo sapien
caccttgggcttcctgttacatgaa

SEQ ID NO: 5206134 - DNA, 25 bp, Homo sapien
taagagagatactgctggagttcca

SEQ ID NO: 5206135 - DNA, 25 bp, Homo sapien
tactccgttccacattaccaaatgg

SEQ ID NO: 5206136 - DNA, 25 bp, Homo sapien
taggttatatgaacaacccattgct

SEQ ID NO: 5206137 - DNA, 25 bp, Homo sapien
acagcaagcagatacatgtatttag

SEQ ID NO: 5206138 - DNA, 25 bp, Homo sapien
tatggcaccaaccacatacaaagca

SEQ ID NO: 5206139 - DNA, 25 bp, Homo sapien
cgaaaggctcatccagatagacaac

SEQ ID NO: 5206140 - DNA, 25 bp, Homo sapien
tgctaaaccatacctgatgaaaaag

SEQ ID NO: 5206141 - DNA, 25 bp, Homo sapien
aagaggagccattcgagctgatatg

SEQ ID NO: 5206142 - DNA, 25 bp, Homo sapien
ggtagattcttcaatgacttcagga

SEQ ID NO: 5206143 - DNA, 25 bp, Homo sapien
tgactccccaaaagtagtagcctac

SEQ ID NO: 5206144 - DNA, 25 bp, Homo sapien
tctgagcttaactaacatcagtctg

SEQ ID NO: 5206145 - DNA, 25 bp, Homo sapien
cacagtggaaaatcccacacatggc

SEQ ID NO: 5206146 - DNA, 25 bp, Homo sapien
tagcctacagtggaccaggagtctg

SEQ ID NO: 5206147 - DNA, 25 bp, Homo sapien
ccagcattatgagagtaggcaatac

SEQ ID NO: 5206148 - DNA, 25 bp, Homo sapien
gaagcctctaacaagctgcaagtca

SEQ ID NO: 5206149 - DNA, 25 bp, Homo sapien
cacaactcagtgcaggatggagatg

SEQ ID NO: 5206150 - DNA, 25 bp, Homo sapien
cataaatgggctggatgtttcctcc

SEQ ID NO: 5206151 - DNA, 25 bp, Homo sapien
ttctcagcaattaataaacttcaat

SEQ ID NO: 5206152 - DNA, 25 bp, Homo sapien
agtgaaaacatcttactgttggcct

SEQ ID NO: 5206153 - DNA, 25 bp, Homo sapien
aagtgaaaacatcttactgttggcc

SEQ ID NO: 5206154 - DNA, 25 bp, Homo sapien
ggtgtatttgatatacatcagccta

SEQ ID NO: 5206155 - DNA, 25 bp, Homo sapien
tattgaacttcaaccactggatgga

SEQ ID NO: 5206156 - DNA, 25 bp, Homo sapien
aaggactcagagtgccgatggtgta

SEQ ID NO: 5206157 - DNA, 25 bp, Homo sapien
tggaacttctttacaccactgttta

SEQ ID NO: 5206158 - DNA, 25 bp, Homo sapien
tctgtcaggattgcacatatggctt

SEQ ID NO: 5206159 - DNA, 25 bp, Homo sapien
aaaaacgagaatgttgggctcacct

SEQ ID NO: 5206160 - DNA, 25 bp, Homo sapien
tatggcttgggaatgtctcgtctaa

SEQ ID NO: 5206161 - DNA, 25 bp, Homo sapien
taaagcattgctacttgaagcctgg

SEQ ID NO: 5206162 - DNA, 25 bp, Homo sapien
gaaataccctaatgaccgactgaag

SEQ ID NO: 5206163 - DNA, 25 bp, Homo sapien
tgtggttcagaagcccagacacgga

SEQ ID NO: 5206164 - DNA, 25 bp, Homo sapien
gttaaacaatatgcgggactctgga

SEQ ID NO: 5206165 - DNA, 25 bp, Homo sapien
ggaaattggttaagcaatgctccca

SEQ ID NO: 5206166 - DNA, 25 bp, Homo sapien
ccaggtccaggggtggtgggagctc

SEQ ID NO: 5206167 - DNA, 25 bp, Homo sapien
cagccacggcctgtgggttctcagg

SEQ ID NO: 5206168 - DNA, 25 bp, Homo sapien
gtgaagtgaggcaccccaggtccag

SEQ ID NO: 5206169 - DNA, 25 bp, Homo sapien
tcatgtgaagtgaggcaccccaggt

SEQ ID NO: 5206170 - DNA, 25 bp, Homo sapien
tggttcttccaaatcacttctgaaa

SEQ ID NO: 5206171 - DNA, 25 bp, Homo sapien
cttggttcttccaaatcacttctga

SEQ ID NO: 5206172 - DNA, 25 bp, Homo sapien
ggttcttccaaatcacttctgaaag

SEQ ID NO: 5206173 - DNA, 25 bp, Homo sapien
ttggttcttccaaatcacttctgaa

SEQ ID NO: 5206174 - DNA, 25 bp, Homo sapien
cgcggccggccaggaaggatttcta

SEQ ID NO: 5206175 - DNA, 25 bp, Homo sapien
gaacagcttactaacggcagttggt

SEQ ID NO: 5206176 - DNA, 25 bp, Homo sapien
cagtgattcaattgtgtgcccaaga

SEQ ID NO: 5206177 - DNA, 25 bp, Homo sapien
tatttagtttcaaggtctgtggcca

SEQ ID NO: 5206178 - DNA, 25 bp, Homo sapien
gaatcgaacagtaggtcatctttgg

SEQ ID NO: 5206179 - DNA, 25 bp, Homo sapien
tataaatggaatcgaacagtaggtc

SEQ ID NO: 5206180 - DNA, 25 bp, Homo sapien
acagtaggtcatctttgggcttggc

SEQ ID NO: 5206181 - DNA, 25 bp, Homo sapien
gtaggtcatctttgggcttggctct

SEQ ID NO: 5206182 - DNA, 25 bp, Homo sapien
gacagaaagcttcaagtccagcata

SEQ ID NO: 5206183 - DNA, 25 bp, Homo sapien
agaaagcttcaagtccagcataggc

SEQ ID NO: 5206184 - DNA, 25 bp, Homo sapien
agacagaaagcttcaagtccagcat

SEQ ID NO: 5206185 - DNA, 25 bp, Homo sapien
aagcttcaagtccagcataggcaga

SEQ ID NO: 5206186 - DNA, 25 bp, Homo sapien
ttcatagtcacaggttctttctttt

SEQ ID NO: 5206187 - DNA, 25 bp, Homo sapien
tttttcttccttctgtacatccttc

SEQ ID NO: 5206188 - DNA, 25 bp, Homo sapien
tccttctgtacatccttccttccat

SEQ ID NO: 5206189 - DNA, 25 bp, Homo sapien
ttcttccttctgtacatccttcctt

SEQ ID NO: 5206190 - DNA, 25 bp, Homo sapien
tgtggagcaggcaacttaacacagc

SEQ ID NO: 5206191 - DNA, 25 bp, Homo sapien
acagttacagaggtggtttcctgtg

SEQ ID NO: 5206192 - DNA, 25 bp, Homo sapien
ctgtggagcaggcaacttaacacag

SEQ ID NO: 5206193 - DNA, 25 bp, Homo sapien
agcaacagttacagaggtggtttcc

SEQ ID NO: 5206194 - DNA, 25 bp, Homo sapien
tctccatgacatctgacagtggctt

SEQ ID NO: 5206195 - DNA, 25 bp, Homo sapien
tcatctccatgacatctgacagtgg

SEQ ID NO: 5206196 - DNA, 25 bp, Homo sapien
tgaggtctcatctccatgacatctg

SEQ ID NO: 5206197 - DNA, 25 bp, Homo sapien
gtctcatctccatgacatctgacag

SEQ ID NO: 5206198 - DNA, 25 bp, Homo sapien
ggtctacagatccattcacaatagt

SEQ ID NO: 5206199 - DNA, 25 bp, Homo sapien
caaatttataggagatgtccttccc

SEQ ID NO: 5206200 - DNA, 25 bp, Homo sapien
gatacaatgggttctaactcaacgt

SEQ ID NO: 5206201 - DNA, 25 bp, Homo sapien
caggctgaaccagtaggtctacaga

SEQ ID NO: 5206202 - DNA, 25 bp, Homo sapien
cattgaaaagttactgcactgcagg

SEQ ID NO: 5206203 - DNA, 25 bp, Homo sapien
catccatgggtgagttgcataacac

SEQ ID NO: 5206204 - DNA, 25 bp, Homo sapien
tgggtgtcacttggccgccagcatc

SEQ ID NO: 5206205 - DNA, 25 bp, Homo sapien
cctctgtcatctagctcatgtgaga

SEQ ID NO: 5206206 - DNA, 25 bp, Homo sapien
ggccccaagatccagcacatcaaac

SEQ ID NO: 5206207 - DNA, 25 bp, Homo sapien
ccccaagatccagcacatcaaactt

SEQ ID NO: 5206208 - DNA, 25 bp, Homo sapien
gccccaagatccagcacatcaaact

SEQ ID NO: 5206209 - DNA, 25 bp, Homo sapien
tcttgccctgtagactgggcttgtg

SEQ ID NO: 5206210 - DNA, 25 bp, Homo sapien
tgcatagaccccataatgtctccat

SEQ ID NO: 5206211 - DNA, 25 bp, Homo sapien
atcatttcagcatcgccttcctcca

SEQ ID NO: 5206212 - DNA, 25 bp, Homo sapien
ctgtagactgggcttgtgcatagac

SEQ ID NO: 5206213 - DNA, 25 bp, Homo sapien
tctcttgattcttcaactgatactc

SEQ ID NO: 5206214 - DNA, 25 bp, Homo sapien
ttctcttgattcttcaactgatact

SEQ ID NO: 5206215 - DNA, 25 bp, Homo sapien
gcagctgtggtaggactgctccctc

SEQ ID NO: 5206216 - DNA, 25 bp, Homo sapien
tggccaccctcgagggcgatggagt

SEQ ID NO: 5206217 - DNA, 25 bp, Homo sapien
gagtaacaatatctggtggggcctg

SEQ ID NO: 5206218 - DNA, 25 bp, Homo sapien
tggagtctcagtgaaggtgctttcc

SEQ ID NO: 5206219 - DNA, 25 bp, Homo sapien
tacatcgattcttgaagagtacgag

SEQ ID NO: 5206220 - DNA, 25 bp, Homo sapien
tgtcataatcacaagggtcactgaa

SEQ ID NO: 5206221 - DNA, 25 bp, Homo sapien
gctgataagtcctggctaaacttac

SEQ ID NO: 5206222 - DNA, 25 bp, Homo sapien
tgaacactgaaaccacatcaggagg

SEQ ID NO: 5206223 - DNA, 25 bp, Homo sapien
ctaccacatgcatagaaaacgctta

SEQ ID NO: 5206224 - DNA, 25 bp, Homo sapien
taccacatgcatagaaaacgcttac

SEQ ID NO: 5206225 - DNA, 25 bp, Homo sapien
cagagctgaattgagcaaattgatg

SEQ ID NO: 5206226 - DNA, 25 bp, Homo sapien
cctccttaaaagtagattccacatc

SEQ ID NO: 5206227 - DNA, 25 bp, Homo sapien
gaatcaactttctatataccagctg

SEQ ID NO: 5206228 - DNA, 25 bp, Homo sapien
gccacgaaagtgagttctgacatat

SEQ ID NO: 5206229 - DNA, 25 bp, Homo sapien
gagggaataggcacatcatcctggc

SEQ ID NO: 5206230 - DNA, 25 bp, Homo sapien
cgtgaaagaggaagccgaacttcgt

SEQ ID NO: 5206231 - DNA, 25 bp, Homo sapien
gaggaagccgaacttcgtggaagaa

SEQ ID NO: 5206232 - DNA, 25 bp, Homo sapien
caaagtatccccgtgaaagaggaag

SEQ ID NO: 5206233 - DNA, 25 bp, Homo sapien
ccgaacttcgtggaagaactctcag

SEQ ID NO: 5206234 - DNA, 25 bp, Homo sapien
taagagagttcctacatcacagcca

SEQ ID NO: 5206235 - DNA, 25 bp, Homo sapien
gataaagctgatcaatcttatgaaa

SEQ ID NO: 5206236 - DNA, 25 bp, Homo sapien
aaaaattccaaacgtctattgacag

SEQ ID NO: 5206237 - DNA, 25 bp, Homo sapien
tgtagagtttaatattttgtaccat

SEQ ID NO: 5206238 - DNA, 25 bp, Homo sapien
gattatgttcaccagttccaaagtg

SEQ ID NO: 5206239 - DNA, 25 bp, Homo sapien
agtgatacaaatccttgggaaatgt

SEQ ID NO: 5206240 - DNA, 25 bp, Homo sapien
tgatacaaatccttgggaaatgttg

SEQ ID NO: 5206241 - DNA, 25 bp, Homo sapien
atacaaatccttgggaaatgttgct

SEQ ID NO: 5206242 - DNA, 25 bp, Homo sapien
tcacaggcaatagcaggtgacattc

SEQ ID NO: 5206243 - DNA, 25 bp, Homo sapien
ttagccgctgctgacagtcggatga

SEQ ID NO: 5206244 - DNA, 25 bp, Homo sapien
tcatggcagacaatgagttgtgcat

SEQ ID NO: 5206245 - DNA, 25 bp, Homo sapien
gaagcagggttagccgctgctgaca

SEQ ID NO: 5206246 - DNA, 25 bp, Homo sapien
gagttagtctgttgttttctggcct

SEQ ID NO: 5206247 - DNA, 25 bp, Homo sapien
tataaagagtttgtcatatccggag

SEQ ID NO: 5206248 - DNA, 25 bp, Homo sapien
tgtagccaacagtacttataagtat

SEQ ID NO: 5206249 - DNA, 25 bp, Homo sapien
acatcatttgttaaggctttagaac

SEQ ID NO: 5206250 - DNA, 25 bp, Homo sapien
tctttaagtggaagcagatcatcat

SEQ ID NO: 5206251 - DNA, 25 bp, Homo sapien
ttctttaagtggaagcagatcatca

SEQ ID NO: 5206252 - DNA, 25 bp, Homo sapien
tttaagtggaagcagatcatcataa

SEQ ID NO: 5206253 - DNA, 25 bp, Homo sapien
tattctttaagtggaagcagatcat

SEQ ID NO: 5206254 - DNA, 25 bp, Homo sapien
gaagagaccctaatgatcacccagt

SEQ ID NO: 5206255 - DNA, 25 bp, Homo sapien
taaaggtactacgagcacagggctc

SEQ ID NO: 5206256 - DNA, 25 bp, Homo sapien
gaatcctgaactccctaacaagtgg

SEQ ID NO: 5206257 - DNA, 25 bp, Homo sapien
gaatggtagcactataccccaggct

SEQ ID NO: 5206258 - DNA, 25 bp, Homo sapien
gagatactttcatcgataagtttaa

SEQ ID NO: 5206259 - DNA, 25 bp, Homo sapien
tatctgagatactttcatcgataag

SEQ ID NO: 5206260 - DNA, 25 bp, Homo sapien
aaaatatctgagatactttcatcga

SEQ ID NO: 5206261 - DNA, 25 bp, Homo sapien
ttcatcgataagtttaagttcttcc

SEQ ID NO: 5206262 - DNA, 25 bp, Homo sapien
acagagatgaaggagtaatagtggt

SEQ ID NO: 5206263 - DNA, 25 bp, Homo sapien
gagatgaaggagtaatagtggtcac

SEQ ID NO: 5206264 - DNA, 25 bp, Homo sapien
cctcaatttgaaactctgaaacaga

SEQ ID NO: 5206265 - DNA, 25 bp, Homo sapien
ttgaaactctgaaacagagatgaag

SEQ ID NO: 5206266 - DNA, 25 bp, Homo sapien
attctctttaggtgaagatattctt

SEQ ID NO: 5206267 - DNA, 25 bp, Homo sapien
gagccaggaggatcatccacagcag

SEQ ID NO: 5206268 - DNA, 25 bp, Homo sapien
ttctctttaggtgaagatattcttt

SEQ ID NO: 5206269 - DNA, 25 bp, Homo sapien
agccaggaggatcatccacagcagg

SEQ ID NO: 5206270 - DNA, 25 bp, Homo sapien
ttcttataagaaatcagttgccacc

SEQ ID NO: 5206271 - DNA, 25 bp, Homo sapien
acttcaccttccctggatgattttg

SEQ ID NO: 5206272 - DNA, 25 bp, Homo sapien
gttaatcttcataatgttccctgca

SEQ ID NO: 5206273 - DNA, 25 bp, Homo sapien
gtttgtctgcctctaagttttccca

SEQ ID NO: 5206274 - DNA, 25 bp, Homo sapien
tgccctgacatcaaaactggaaaag

SEQ ID NO: 5206275 - DNA, 25 bp, Homo sapien
gatcaacattcctcatagacacaga

SEQ ID NO: 5206276 - DNA, 25 bp, Homo sapien
tattccccaaatgcaagactggttc

SEQ ID NO: 5206277 - DNA, 25 bp, Homo sapien
tctgtgaagctaaaattgccctgac

SEQ ID NO: 5206278 - DNA, 25 bp, Homo sapien
gggcctctctacttctgtgcactgt

SEQ ID NO: 5206279 - DNA, 25 bp, Homo sapien
ttcagggcatatggatttcttcatg

SEQ ID NO: 5206280 - DNA, 25 bp, Homo sapien
tctaggatggtaacttcagggcata

SEQ ID NO: 5206281 - DNA, 25 bp, Homo sapien
tagtctctccaaatgatgtctctag

SEQ ID NO: 5206282 - DNA, 25 bp, Homo sapien
ggaaactacaattgatttataagag

SEQ ID NO: 5206283 - DNA, 25 bp, Homo sapien
ccaaagaatgagttcagtgagatcc

SEQ ID NO: 5206284 - DNA, 25 bp, Homo sapien
tacgtttttgctctactagttgtta

SEQ ID NO: 5206285 - DNA, 25 bp, Homo sapien
tattctttctagtcaaattccagaa

SEQ ID NO: 5206286 - DNA, 25 bp, Homo sapien
ttcttaaactccctatcggagctag

SEQ ID NO: 5206287 - DNA, 25 bp, Homo sapien
aactccctatcggagctaggagaag

SEQ ID NO: 5206288 - DNA, 25 bp, Homo sapien
ccctatcggagctaggagaagagaa

SEQ ID NO: 5206289 - DNA, 25 bp, Homo sapien
taaactccctatcggagctaggaga

SEQ ID NO: 5206290 - DNA, 25 bp, Homo sapien
gcggcatcaagaacatgaatattat

SEQ ID NO: 5206291 - DNA, 25 bp, Homo sapien
tgcagcggcatcaagaacatgaata

SEQ ID NO: 5206292 - DNA, 25 bp, Homo sapien
gaatattatttgagtaaggctttac

SEQ ID NO: 5206293 - DNA, 25 bp, Homo sapien
ggctgcagcggcatcaagaacatga

SEQ ID NO: 5206294 - DNA, 25 bp, Homo sapien
gacttcaggatgagtcaaggacgtc

SEQ ID NO: 5206295 - DNA, 25 bp, Homo sapien
agtaactgacccctcaccaaagact

SEQ ID NO: 5206296 - DNA, 25 bp, Homo sapien
acgtctttattgtggaaatcccaag

SEQ ID NO: 5206297 - DNA, 25 bp, Homo sapien
ccaagtaaattgaggacctggtgaa

SEQ ID NO: 5206298 - DNA, 25 bp, Homo sapien
caagagaagagactagaccacatct

SEQ ID NO: 5206299 - DNA, 25 bp, Homo sapien
gaagagactagaccacatcttctag

SEQ ID NO: 5206300 - DNA, 25 bp, Homo sapien
tagaccacatcttctagatctaatt

SEQ ID NO: 5206301 - DNA, 25 bp, Homo sapien
tatgcaagagaagagactagaccac

SEQ ID NO: 5206302 - DNA, 25 bp, Homo sapien
gctgcagcagaaaagaataaatcta

SEQ ID NO: 5206303 - DNA, 25 bp, Homo sapien
acttcatggcaattgctgcagcaga

SEQ ID NO: 5206304 - DNA, 25 bp, Homo sapien
taggctgggactgcaacttcatggc

SEQ ID NO: 5206305 - DNA, 25 bp, Homo sapien
tctgcagtgcatcttcaagtctctg

SEQ ID NO: 5206306 - DNA, 25 bp, Homo sapien
gtatcctcaataaacgccagttgtt

SEQ ID NO: 5206307 - DNA, 25 bp, Homo sapien
ctgtagtttatctgaaagcgatttt

SEQ ID NO: 5206308 - DNA, 25 bp, Homo sapien
caaacaaatccataacgtatcctca

SEQ ID NO: 5206309 - DNA, 25 bp, Homo sapien
catgtagatcatagcttttaaacag

SEQ ID NO: 5206310 - DNA, 25 bp, Homo sapien
tattagtttaacttaagctatatac

SEQ ID NO: 5206311 - DNA, 25 bp, Homo sapien
ttaacttaagctatatacctattca

SEQ ID NO: 5206312 - DNA, 25 bp, Homo sapien
aaagatacacacatatcataacata

SEQ ID NO: 5206313 - DNA, 25 bp, Homo sapien
tagtttaacttaagctatataccta

SEQ ID NO: 5206314 - DNA, 25 bp, Homo sapien
taacttgatcatggtcttatccagt

SEQ ID NO: 5206315 - DNA, 25 bp, Homo sapien
gcaaccaccgctgccttcagatcat

SEQ ID NO: 5206316 - DNA, 25 bp, Homo sapien
cagatgaaataacttgatcatggtc

SEQ ID NO: 5206317 - DNA, 25 bp, Homo sapien
caccagcaaccaccgctgccttcag

SEQ ID NO: 5206318 - DNA, 25 bp, Homo sapien
ggaatgcaaatccatgggggaaggt

SEQ ID NO: 5206319 - DNA, 25 bp, Homo sapien
aatgcaaatccatgggggaaggtct

SEQ ID NO: 5206320 - DNA, 25 bp, Homo sapien
gaatgcaaatccatgggggaaggtc

SEQ ID NO: 5206321 - DNA, 25 bp, Homo sapien
caattgtctgtggtttatattccat

SEQ ID NO: 5206322 - DNA, 25 bp, Homo sapien
ccaattgtctgtggtttatattcca

SEQ ID NO: 5206323 - DNA, 25 bp, Homo sapien
accaattgtctgtggtttatattcc

SEQ ID NO: 5206324 - DNA, 25 bp, Homo sapien
tgcttggctggttaggctatggtcc

SEQ ID NO: 5206325 - DNA, 25 bp, Homo sapien
ctaaaggtacttccagtttgcttgg

SEQ ID NO: 5206326 - DNA, 25 bp, Homo sapien
ggtcctttgcagtatcattcatgtc

SEQ ID NO: 5206327 - DNA, 25 bp, Homo sapien
tggcaaagcgtgagtctaaaggtac

SEQ ID NO: 5206328 - DNA, 25 bp, Homo sapien
ctggagtcttctgtttatgcttcat

SEQ ID NO: 5206329 - DNA, 25 bp, Homo sapien
gaaatatatcactatatcttccatg

SEQ ID NO: 5206330 - DNA, 25 bp, Homo sapien
aggctgttttatagtagacattttt

SEQ ID NO: 5206331 - DNA, 25 bp, Homo sapien
cattaccaagcattatgtactgtgc

SEQ ID NO: 5206332 - DNA, 25 bp, Homo sapien
cactccaaaatcatggtaaaagtat

SEQ ID NO: 5206333 - DNA, 25 bp, Homo sapien
tagagaattaggtgtctcaggaccc

SEQ ID NO: 5206334 - DNA, 25 bp, Homo sapien
gcttttggcccagtcaacatctgaa

SEQ ID NO: 5206335 - DNA, 25 bp, Homo sapien
tagttttcctagcatagaatgggct

SEQ ID NO: 5206336 - DNA, 25 bp, Homo sapien
gcacacctaggttgagaaagattct

SEQ ID NO: 5206337 - DNA, 25 bp, Homo sapien
cattatcagctttgccggtaaaggt

SEQ ID NO: 5206338 - DNA, 25 bp, Homo sapien
aggtatcagctgtgaaatagcatgc

SEQ ID NO: 5206339 - DNA, 25 bp, Homo sapien
tggttgaccactgccctgcttttca

SEQ ID NO: 5206340 - DNA, 25 bp, Homo sapien
cctttttgtgggaagaggtatcagc

SEQ ID NO: 5206341 - DNA, 25 bp, Homo sapien
tgcccacatattcccgtgggcacat

SEQ ID NO: 5206342 - DNA, 25 bp, Homo sapien
tgactttagcttgataggcttagag

SEQ ID NO: 5206343 - DNA, 25 bp, Homo sapien
tgataggcttagagcctctgtggtg

SEQ ID NO: 5206344 - DNA, 25 bp, Homo sapien
gctggccactcagtatgcccacata

SEQ ID NO: 5206345 - DNA, 25 bp, Homo sapien
tggtacctcctatctggcacagtgt

SEQ ID NO: 5206346 - DNA, 25 bp, Homo sapien
catgccacgaaaagcagccctatgg

SEQ ID NO: 5206347 - DNA, 25 bp, Homo sapien
cctgggtctctaactggtgctataa

SEQ ID NO: 5206348 - DNA, 25 bp, Homo sapien
taagcaataccatgaccgaaactgg

SEQ ID NO: 5206349 - DNA, 25 bp, Homo sapien
ggcaatgaaggacaccagtaaatac

SEQ ID NO: 5206350 - DNA, 25 bp, Homo sapien
accagtaaatacaacaccctcagga

SEQ ID NO: 5206351 - DNA, 25 bp, Homo sapien
caacaccctcaggaaagcataatga

SEQ ID NO: 5206352 - DNA, 25 bp, Homo sapien
tcaggaaagcataatgagggctcat

SEQ ID NO: 5206353 - DNA, 25 bp, Homo sapien
gctgtactcttacattccctgcctt

SEQ ID NO: 5206354 - DNA, 25 bp, Homo sapien
tgctccgtgtactcggaatagagat

SEQ ID NO: 5206355 - DNA, 25 bp, Homo sapien
ctagtagtcacgggctctgcaggct

SEQ ID NO: 5206356 - DNA, 25 bp, Homo sapien
gattcttcccgccagctgtactctt

SEQ ID NO: 5206357 - DNA, 25 bp, Homo sapien
gctatagtgtcgtggcgtgatcttg

SEQ ID NO: 5206358 - DNA, 25 bp, Homo sapien
tcacccaggctatagtgtcgtggcg

SEQ ID NO: 5206359 - DNA, 25 bp, Homo sapien
cacgcctggctagttgtgtgtgtgt

SEQ ID NO: 5206360 - DNA, 25 bp, Homo sapien
acccaggctatagtgtcgtggcgtg

SEQ ID NO: 5206361 - DNA, 25 bp, Homo sapien
tattttctactgttgtactgtaaaa

SEQ ID NO: 5206362 - DNA, 25 bp, Homo sapien
ttaaaagttatgacctcattgcagc

SEQ ID NO: 5206363 - DNA, 25 bp, Homo sapien
ggtcctagggcgcttcttttggtgc

SEQ ID NO: 5206364 - DNA, 25 bp, Homo sapien
ggcagcagttcacaaaaagaacgta

SEQ ID NO: 5206365 - DNA, 25 bp, Homo sapien
tagtcctgccctatagtctgtctct

SEQ ID NO: 5206366 - DNA, 25 bp, Homo sapien
ggcttgcttgacttctaaatcctga

SEQ ID NO: 5206367 - DNA, 25 bp, Homo sapien
tgtgtgctcggttttggattctttt

SEQ ID NO: 5206368 - DNA, 25 bp, Homo sapien
catgtgtgctcggttttggattctt

SEQ ID NO: 5206369 - DNA, 25 bp, Homo sapien
gtgtgctcggttttggattcttttc

SEQ ID NO: 5206370 - DNA, 25 bp, Homo sapien
gcatgtgtgctcggttttggattct

SEQ ID NO: 5206371 - DNA, 25 bp, Homo sapien
tcttgatttgaaaattgtgccttaa

SEQ ID NO: 5206372 - DNA, 25 bp, Homo sapien
tcttaccaatataagggagagctac

SEQ ID NO: 5206373 - DNA, 25 bp, Homo sapien
tactatctggagacccatctgagcc

SEQ ID NO: 5206374 - DNA, 25 bp, Homo sapien
gcaactctaccacattagatgctgg

SEQ ID NO: 5206375 - DNA, 25 bp, Homo sapien
caatgagagacaaaaacgtgggagc

SEQ ID NO: 5206376 - DNA, 25 bp, Homo sapien
gattgtacctgttcgccagcaagca

SEQ ID NO: 5206377 - DNA, 25 bp, Homo sapien
tatgagattgtctacccagccacag

SEQ ID NO: 5206378 - DNA, 25 bp, Homo sapien
tagggcatcaacagcgtctgctaca

SEQ ID NO: 5206379 - DNA, 25 bp, Homo sapien
gggagccgtccagttctttcgttga

SEQ ID NO: 5206380 - DNA, 25 bp, Homo sapien
gcctctgaaatgtgccggagaccca

SEQ ID NO: 5206381 - DNA, 25 bp, Homo sapien
tctcaggctgaacggcaggcggttt

SEQ ID NO: 5206382 - DNA, 25 bp, Homo sapien
taaccgattcggattgctccagctg

SEQ ID NO: 5206383 - DNA, 25 bp, Homo sapien
ccggcctgggatgccgcgcactcgc

SEQ ID NO: 5206384 - DNA, 25 bp, Homo sapien
cgggcggagcgttcgggccggcctg

SEQ ID NO: 5206385 - DNA, 25 bp, Homo sapien
tcgcgctgcttctccgggtacgggc

SEQ ID NO: 5206386 - DNA, 25 bp, Homo sapien
agccgggagcttcgggtgctcgcgc

SEQ ID NO: 5206387 - DNA, 25 bp, Homo sapien
agagagggaagaggaggggaagtcg

SEQ ID NO: 5206388 - DNA, 25 bp, Homo sapien
gagagagggaagaggaggggaagtc

SEQ ID NO: 5206389 - DNA, 25 bp, Homo sapien
aggagagagggaagaggaggggaag

SEQ ID NO: 5206390 - DNA, 25 bp, Homo sapien
ctaccccaaagttgcacgggatgcg

SEQ ID NO: 5206391 - DNA, 25 bp, Homo sapien
ggcgcagcgtgtccggcgccagcgg

SEQ ID NO: 5206392 - DNA, 25 bp, Homo sapien
cgggatgcgacggttggccaacggg

SEQ ID NO: 5206393 - DNA, 25 bp, Homo sapien
ccccaagagatgaggcgcagcgtgt

SEQ ID NO: 5206394 - DNA, 25 bp, Homo sapien
cctggtaaagcagcgcgctctcagt

SEQ ID NO: 5206395 - DNA, 25 bp, Homo sapien
ccgtggctgtgcagcacgaccgagt

SEQ ID NO: 5206396 - DNA, 25 bp, Homo sapien
cgctctcagtgtccacgttgtaggg

SEQ ID NO: 5206397 - DNA, 25 bp, Homo sapien
gaccgagtagccgaacagcgtgttg

SEQ ID NO: 5206398 - DNA, 25 bp, Homo sapien
cgtgcgctcagacgtgagctgtgct

SEQ ID NO: 5206399 - DNA, 25 bp, Homo sapien
acagatgtgcagtccgcagcagggc

SEQ ID NO: 5206400 - DNA, 25 bp, Homo sapien
ctaaagcgagacacgtgcacgtgcg

SEQ ID NO: 5206401 - DNA, 25 bp, Homo sapien
gctgccgccccaagataagttagtt

SEQ ID NO: 5206402 - DNA, 25 bp, Homo sapien
agccagttggcagtgggcgcaccca

SEQ ID NO: 5206403 - DNA, 25 bp, Homo sapien
ttggcgagccagttggcagtgggcg

SEQ ID NO: 5206404 - DNA, 25 bp, Homo sapien
aagcgttggcgagccagttggcagt

SEQ ID NO: 5206405 - DNA, 25 bp, Homo sapien
tgaagcgttggcgagccagttggca

SEQ ID NO: 5206406 - DNA, 25 bp, Homo sapien
ttctttccgatcctgcatctgtaaa

SEQ ID NO: 5206407 - DNA, 25 bp, Homo sapien
gcatctgtaaatcgccccgggattg

SEQ ID NO: 5206408 - DNA, 25 bp, Homo sapien
acgtctggccgggattctttccgat

SEQ ID NO: 5206409 - DNA, 25 bp, Homo sapien
agctgttcgcacgtctggccgggat

SEQ ID NO: 5206410 - DNA, 25 bp, Homo sapien
gatcctgtccttaatacgctgagag

SEQ ID NO: 5206411 - DNA, 25 bp, Homo sapien
aacgacgggatatgggatcaattcc

SEQ ID NO: 5206412 - DNA, 25 bp, Homo sapien
taacaggcaacgtgaatctttccag

SEQ ID NO: 5206413 - DNA, 25 bp, Homo sapien
tgtgctttacacacggagagacggg

SEQ ID NO: 5206414 - DNA, 25 bp, Homo sapien
gaaaatggcttagactttggacgca

SEQ ID NO: 5206415 - DNA, 25 bp, Homo sapien
tcatctgaatgaagggaaccagctt

SEQ ID NO: 5206416 - DNA, 25 bp, Homo sapien
cagtaacactttggaacaagatagg

SEQ ID NO: 5206417 - DNA, 25 bp, Homo sapien
tggacgcattcagaccctagtttga

SEQ ID NO: 5206418 - DNA, 25 bp, Homo sapien
gacacccttctcgtgtttcagaacg

SEQ ID NO: 5206419 - DNA, 25 bp, Homo sapien
cgttctgaaacacgagaagggtgtc

SEQ ID NO: 5206420 - DNA, 25 bp, Homo sapien
tcctccatttagaatggttctcagt

SEQ ID NO: 5206421 - DNA, 25 bp, Homo sapien
tagaatggttctcagtattttggca

SEQ ID NO: 5206422 - DNA, 25 bp, Homo sapien
tttagaatggttctcagtattttgg

SEQ ID NO: 5206423 - DNA, 25 bp, Homo sapien
ccatttagaatggttctcagtattt

SEQ ID NO: 5206424 - DNA, 25 bp, Homo sapien
tgaaacttctttctctccacatgag

SEQ ID NO: 5206425 - DNA, 25 bp, Homo sapien
ttctttctctccacatgagtgcctc

SEQ ID NO: 5206426 - DNA, 25 bp, Homo sapien
ttccctgaaacttctttctctccac

SEQ ID NO: 5206427 - DNA, 25 bp, Homo sapien
aacatcacttccctgaaacttcttt

SEQ ID NO: 5206428 - DNA, 25 bp, Homo sapien
ttttatcagttgtattgaaaacatt

SEQ ID NO: 5206429 - DNA, 25 bp, Homo sapien
taattttatcagttgtattgaaaac

SEQ ID NO: 5206430 - DNA, 25 bp, Homo sapien
aataattttatcagttgtattgaaa

SEQ ID NO: 5206431 - DNA, 25 bp, Homo sapien
aaaataattttatcagttgtattga

SEQ ID NO: 5206432 - DNA, 25 bp, Homo sapien
ccaaccactgattgtctctctcttc

SEQ ID NO: 5206433 - DNA, 25 bp, Homo sapien
caaacaagtctttccacaaggttct

SEQ ID NO: 5206434 - DNA, 25 bp, Homo sapien
ccacaaggttctccattagggctac

SEQ ID NO: 5206435 - DNA, 25 bp, Homo sapien
ctggctgtctggaaagtgtgacccc

SEQ ID NO: 5206436 - DNA, 25 bp, Homo sapien
gctgatttcacgatggatctgtgga

SEQ ID NO: 5206437 - DNA, 25 bp, Homo sapien
gatgtgaaagctgcacccaggatag

SEQ ID NO: 5206438 - DNA, 25 bp, Homo sapien
aaaagtagaccaaatgatgtgaaag

SEQ ID NO: 5206439 - DNA, 25 bp, Homo sapien
aataaaagtagaccaaatgatgtga

SEQ ID NO: 5206440 - DNA, 25 bp, Homo sapien
gctattcttttactcagttctgttc

SEQ ID NO: 5206441 - DNA, 25 bp, Homo sapien
gcactccatagcaaccaccagtggg

SEQ ID NO: 5206442 - DNA, 25 bp, Homo sapien
cttgataacacggagctattctttt

SEQ ID NO: 5206443 - DNA, 25 bp, Homo sapien
tgttcgtaaatcagggggcactcca

SEQ ID NO: 5206444 - DNA, 25 bp, Homo sapien
gcatagagttaccatgagaaaaatg

SEQ ID NO: 5206445 - DNA, 25 bp, Homo sapien
tagcatagagttaccatgagaaaaa

SEQ ID NO: 5206446 - DNA, 25 bp, Homo sapien
ctatagcatagagttaccatgagaa

SEQ ID NO: 5206447 - DNA, 25 bp, Homo sapien
tatagcatagagttaccatgagaaa

SEQ ID NO: 5206448 - DNA, 25 bp, Homo sapien
ctagctctgtacttgctgatgctac

SEQ ID NO: 5206449 - DNA, 25 bp, Homo sapien
tcctagctctgtacttgctgatgct

SEQ ID NO: 5206450 - DNA, 25 bp, Homo sapien
ttatgtcctagctctgtacttgctg

SEQ ID NO: 5206451 - DNA, 25 bp, Homo sapien
tgtcctagctctgtacttgctgatg

SEQ ID NO: 5206452 - DNA, 25 bp, Homo sapien
aaaatttttctttgcgtgctgaggg

SEQ ID NO: 5206453 - DNA, 25 bp, Homo sapien
ttagctcctaaagacgcattgttgg

SEQ ID NO: 5206454 - DNA, 25 bp, Homo sapien
gaccaaagtcttattagcacccata

SEQ ID NO: 5206455 - DNA, 25 bp, Homo sapien
gatatcctctgacatgctctgttga

SEQ ID NO: 5206456 - DNA, 25 bp, Homo sapien
ggatattccagcttgacatgatgca

SEQ ID NO: 5206457 - DNA, 25 bp, Homo sapien
ctggatattccagcttgacatgatg

SEQ ID NO: 5206458 - DNA, 25 bp, Homo sapien
tggatattccagcttgacatgatgc

SEQ ID NO: 5206459 - DNA, 25 bp, Homo sapien
aagagagccagtccagtaagatgat

SEQ ID NO: 5206460 - DNA, 25 bp, Homo sapien
agtaagatgatcctggggcccccat

SEQ ID NO: 5206461 - DNA, 25 bp, Homo sapien
tgtagttatattgtagacaaaaaga

SEQ ID NO: 5206462 - DNA, 25 bp, Homo sapien
ttatattgtagacaaaaagagagcc

SEQ ID NO: 5206463 - DNA, 25 bp, Homo sapien
gtgcttcatggagcccctcatccag

SEQ ID NO: 5206464 - DNA, 25 bp, Homo sapien
agatatgggaggcactcaacagaaa

SEQ ID NO: 5206465 - DNA, 25 bp, Homo sapien
gctgtttttagacccatgtgcttca

SEQ ID NO: 5206466 - DNA, 25 bp, Homo sapien
gttaagctctgggaaatattctaag

SEQ ID NO: 5206467 - DNA, 25 bp, Homo sapien
tggtgcagtataatcagtttctagg

SEQ ID NO: 5206468 - DNA, 25 bp, Homo sapien
tcctgggtaaagtacatcatatggt

SEQ ID NO: 5206469 - DNA, 25 bp, Homo sapien
tatggtatgtatttccgagtcctag

SEQ ID NO: 5206470 - DNA, 25 bp, Homo sapien
gagaaagtatgagagtcctgggtaa

SEQ ID NO: 5206471 - DNA, 25 bp, Homo sapien
cttaccaatctgctcatgttgagga

SEQ ID NO: 5206472 - DNA, 25 bp, Homo sapien
tggctccgaaaatgaccagctccga

SEQ ID NO: 5206473 - DNA, 25 bp, Homo sapien
ggagctcctccgactacttcggtag

SEQ ID NO: 5206474 - DNA, 25 bp, Homo sapien
tacttcggtagtatgctggctccga

SEQ ID NO: 5206475 - DNA, 25 bp, Homo sapien
ttttcatcaatgctgaatatatatg

SEQ ID NO: 5206476 - DNA, 25 bp, Homo sapien
tttcatttcatgtaagatatttagt

SEQ ID NO: 5206477 - DNA, 25 bp, Homo sapien
catttcatgtaagatatttagttct

SEQ ID NO: 5206478 - DNA, 25 bp, Homo sapien
tttcatcaatgctgaatatatatgc

SEQ ID NO: 5206479 - DNA, 25 bp, Homo sapien
agccatctgcattgaggtccacagc

SEQ ID NO: 5206480 - DNA, 25 bp, Homo sapien
tctgcatgggtgctcccacgagcag

SEQ ID NO: 5206481 - DNA, 25 bp, Homo sapien
catctgcattgaggtccacagcaca

SEQ ID NO: 5206482 - DNA, 25 bp, Homo sapien
ccacgagcagatctgagaagccatc

SEQ ID NO: 5206483 - DNA, 25 bp, Homo sapien
gacaactttacacgatttactgttg

SEQ ID NO: 5206484 - DNA, 25 bp, Homo sapien
actgttgtaattggatatggatttt

SEQ ID NO: 5206485 - DNA, 25 bp, Homo sapien
gggagagaaaacgtgtcattataac

SEQ ID NO: 5206486 - DNA, 25 bp, Homo sapien
aacactccctgacaactttacacga

SEQ ID NO: 5206487 - DNA, 25 bp, Homo sapien
ttcaaagccatcattgtcaatgtcg

SEQ ID NO: 5206488 - DNA, 25 bp, Homo sapien
atttgtcacttccaacgaggtttgt

SEQ ID NO: 5206489 - DNA, 25 bp, Homo sapien
cacttccaacgaggtttgtttccat

SEQ ID NO: 5206490 - DNA, 25 bp, Homo sapien
gccaagattaactatagattcccca

SEQ ID NO: 5206491 - DNA, 25 bp, Homo sapien
acagtggtaaagatcaatgggtgac

SEQ ID NO: 5206492 - DNA, 25 bp, Homo sapien
caatggtgccttagaatcactgaaa

SEQ ID NO: 5206493 - DNA, 25 bp, Homo sapien
gaaaaaacttagcatgccattctgg

SEQ ID NO: 5206494 - DNA, 25 bp, Homo sapien
cagaaaaatggtgggtgtaacagct

SEQ ID NO: 5206495 - DNA, 25 bp, Homo sapien
gatgagaatttatagtaccccagca

SEQ ID NO: 5206496 - DNA, 25 bp, Homo sapien
cgtcaatatcagtgggtaaacagcc

SEQ ID NO: 5206497 - DNA, 25 bp, Homo sapien
ctcaatgtgacgagtgacggcagca

SEQ ID NO: 5206498 - DNA, 25 bp, Homo sapien
tgcataggagcagcgctgacctgaa

SEQ ID NO: 5206499 - DNA, 25 bp, Homo sapien
caagagctgtgtgaagcccagggtc

SEQ ID NO: 5206500 - DNA, 25 bp, Homo sapien
ttacctttaggagtggagtgctgag

SEQ ID NO: 5206501 - DNA, 25 bp, Homo sapien
tacaaattgagagactgcactgtcc

SEQ ID NO: 5206502 - DNA, 25 bp, Homo sapien
gggaatttgcctatgctcacaacag

SEQ ID NO: 5206503 - DNA, 25 bp, Homo sapien
acactcactgaagtgttaatgtagc

SEQ ID NO: 5206504 - DNA, 25 bp, Homo sapien
actcactgaagtgttaatgtagcca

SEQ ID NO: 5206505 - DNA, 25 bp, Homo sapien
cactcactgaagtgttaatgtagcc

SEQ ID NO: 5206506 - DNA, 25 bp, Homo sapien
aaacactcactgaagtgttaatgta

SEQ ID NO: 5206507 - DNA, 25 bp, Homo sapien
tacaggattgcacacaatagtttgc

SEQ ID NO: 5206508 - DNA, 25 bp, Homo sapien
aaattcttgatacaaagaatgcaac

SEQ ID NO: 5206509 - DNA, 25 bp, Homo sapien
aacaaaatgattagagcgcgggctc

SEQ ID NO: 5206510 - DNA, 25 bp, Homo sapien
tgcaacttcgaaaactaaccttatg

SEQ ID NO: 5206511 - DNA, 25 bp, Homo sapien
ctgtgagaaggttgacgagatccca

SEQ ID NO: 5206512 - DNA, 25 bp, Homo sapien
catctgcacggccattgtaaatata

SEQ ID NO: 5206513 - DNA, 25 bp, Homo sapien
catcttcttgtggagctccgatagc

SEQ ID NO: 5206514 - DNA, 25 bp, Homo sapien
gtaaatataaatagcaccttgcaag

SEQ ID NO: 5206515 - DNA, 25 bp, Homo sapien
catacttaacgatttgctgatctga

SEQ ID NO: 5206516 - DNA, 25 bp, Homo sapien
tgtcctgatatagactgtccaaaca

SEQ ID NO: 5206517 - DNA, 25 bp, Homo sapien
ttattatctgcatcaatttgtcctg

SEQ ID NO: 5206518 - DNA, 25 bp, Homo sapien
tagactgtccaaacatacttaacga

SEQ ID NO: 5206519 - DNA, 25 bp, Homo sapien
cagcagaatcagaccgaaaagcacc

SEQ ID NO: 5206520 - DNA, 25 bp, Homo sapien
aatcagaccgaaaagcaccaactgc

SEQ ID NO: 5206521 - DNA, 25 bp, Homo sapien
cagaatcagaccgaaaagcaccaac

SEQ ID NO: 5206522 - DNA, 25 bp, Homo sapien
gaatcagaccgaaaagcaccaactg

SEQ ID NO: 5206523 - DNA, 25 bp, Homo sapien
ggtcactaccactgctgattttaaa

SEQ ID NO: 5206524 - DNA, 25 bp, Homo sapien
tcatgagtcttattatgtgtgtaca

SEQ ID NO: 5206525 - DNA, 25 bp, Homo sapien
taccaaaagagcatcatgaggtcac

SEQ ID NO: 5206526 - DNA, 25 bp, Homo sapien
aaaccaaattgcaattaagcagtga

SEQ ID NO: 5206527 - DNA, 25 bp, Homo sapien
cacagaaggccatccattttcaaca

SEQ ID NO: 5206528 - DNA, 25 bp, Homo sapien
tcgttctatttactgactcagggtg

SEQ ID NO: 5206529 - DNA, 25 bp, Homo sapien
tggaacttccttgcccttatatgag

SEQ ID NO: 5206530 - DNA, 25 bp, Homo sapien
gaagcgtcaacaattactacaggtc

SEQ ID NO: 5206531 - DNA, 25 bp, Homo sapien
ggactactggaaataatatctggaa

SEQ ID NO: 5206532 - DNA, 25 bp, Homo sapien
aatatagagaattgcaattaatcta

SEQ ID NO: 5206533 - DNA, 25 bp, Homo sapien
agttaaagttatatggactactgga

SEQ ID NO: 5206534 - DNA, 25 bp, Homo sapien
gaattgcaattaatctaattactga

SEQ ID NO: 5206535 - DNA, 25 bp, Homo sapien
cttgatgtgttctacagttagcttc

SEQ ID NO: 5206536 - DNA, 25 bp, Homo sapien
tctctgctggacacctgtatgcttc

SEQ ID NO: 5206537 - DNA, 25 bp, Homo sapien
tgtaatcacgtcagaagttccatta

SEQ ID NO: 5206538 - DNA, 25 bp, Homo sapien
gaaatagaatcttggtggagactct

SEQ ID NO: 5206539 - DNA, 25 bp, Homo sapien
caataagttgctctctatcaacaac

SEQ ID NO: 5206540 - DNA, 25 bp, Homo sapien
tgctctctatcaacaacgttgaagt

SEQ ID NO: 5206541 - DNA, 25 bp, Homo sapien
tctatcaacaacgttgaagttcaca

SEQ ID NO: 5206542 - DNA, 25 bp, Homo sapien
aagttgctctctatcaacaacgttg

SEQ ID NO: 5206543 - DNA, 25 bp, Homo sapien
gattgtctcataccttaactggagc

SEQ ID NO: 5206544 - DNA, 25 bp, Homo sapien
cgtaccacggaatagatttgaggct

SEQ ID NO: 5206545 - DNA, 25 bp, Homo sapien
ggatgatacaataagaggactctga

SEQ ID NO: 5206546 - DNA, 25 bp, Homo sapien
aattacttgggttgagattgtctca

SEQ ID NO: 5206547 - DNA, 25 bp, Homo sapien
tgagttcccactgacatcactggca

SEQ ID NO: 5206548 - DNA, 25 bp, Homo sapien
catcatgagagctatcgtcctggcc

SEQ ID NO: 5206549 - DNA, 25 bp, Homo sapien
tcactggcaaagctggcacggaaac

SEQ ID NO: 5206550 - DNA, 25 bp, Homo sapien
tgtgctttggcaggacataccccaa

SEQ ID NO: 5206551 - DNA, 25 bp, Homo sapien
tctctacaattgactaaggtaagta

SEQ ID NO: 5206552 - DNA, 25 bp, Homo sapien
tatttacaggaacgatgccaagaaa

SEQ ID NO: 5206553 - DNA, 25 bp, Homo sapien
tttgtgaacatctaatgttggccct

SEQ ID NO: 5206554 - DNA, 25 bp, Homo sapien
tgatttcaatatttgtctctacaat

SEQ ID NO: 5206555 - DNA, 25 bp, Homo sapien
tcaagttcagggtagctgcaactgt

SEQ ID NO: 5206556 - DNA, 25 bp, Homo sapien
gatactgaaggaaacgagcatttct

SEQ ID NO: 5206557 - DNA, 25 bp, Homo sapien
taacagctacagctccttgacagaa

SEQ ID NO: 5206558 - DNA, 25 bp, Homo sapien
taaaaagtccctgccatgtacaatc

SEQ ID NO: 5206559 - DNA, 25 bp, Homo sapien
taataattgtatggctctggtggcc

SEQ ID NO: 5206560 - DNA, 25 bp, Homo sapien
cagttaagcaaagtaatcctgtgtg

SEQ ID NO: 5206561 - DNA, 25 bp, Homo sapien
gaacaaaaatctacatgccagtgat

SEQ ID NO: 5206562 - DNA, 25 bp, Homo sapien
tctggtggccaaaattaaagcttgg

SEQ ID NO: 5206563 - DNA, 25 bp, Homo sapien
tacccaggtagattgatgtcatgat

SEQ ID NO: 5206564 - DNA, 25 bp, Homo sapien
gaaggccactgaattcactggctct

SEQ ID NO: 5206565 - DNA, 25 bp, Homo sapien
tttaataaaacatgcgaaggccact

SEQ ID NO: 5206566 - DNA, 25 bp, Homo sapien
ggcattctttgttcagcaactaagc

SEQ ID NO: 5206567 - DNA, 25 bp, Homo sapien
tacactggtcgcttcactgattttc

SEQ ID NO: 5206568 - DNA, 25 bp, Homo sapien
cttaatatcttatgtctacacagca

SEQ ID NO: 5206569 - DNA, 25 bp, Homo sapien
tgtaacccattcacaatccattctg

SEQ ID NO: 5206570 - DNA, 25 bp, Homo sapien
ccattctgctctgtataacattcat

SEQ ID NO: 5206571 - DNA, 25 bp, Homo sapien
ctgtacttcgtttactgatgacatg

SEQ ID NO: 5206572 - DNA, 25 bp, Homo sapien
gcagcttcaatctgaattggggtga

SEQ ID NO: 5206573 - DNA, 25 bp, Homo sapien
gggtgaggatgtcccgcacatcttt

SEQ ID NO: 5206574 - DNA, 25 bp, Homo sapien
cctctgtacttcgtttactgatgac

SEQ ID NO: 5206575 - DNA, 25 bp, Homo sapien
cttcttcagaattatgccatatttt

SEQ ID NO: 5206576 - DNA, 25 bp, Homo sapien
acttcttcagaattatgccatattt

SEQ ID NO: 5206577 - DNA, 25 bp, Homo sapien
ttcttcagaattatgccatatttta

SEQ ID NO: 5206578 - DNA, 25 bp, Homo sapien
atctttgcagaaacctgtaaatcag

SEQ ID NO: 5206579 - DNA, 25 bp, Homo sapien
atgggcacaaaaccttgcaaagttt

SEQ ID NO: 5206580 - DNA, 25 bp, Homo sapien
tgggcacaaaaccttgcaaagttta

SEQ ID NO: 5206581 - DNA, 25 bp, Homo sapien
cagaaacctgtaaatcagcagaaca

SEQ ID NO: 5206582 - DNA, 25 bp, Homo sapien
ctttcaataatcgtgagcacagggc

SEQ ID NO: 5206583 - DNA, 25 bp, Homo sapien
caggacagtgtggagacagactttc

SEQ ID NO: 5206584 - DNA, 25 bp, Homo sapien
taggaccaagggcacaacagaactt

SEQ ID NO: 5206585 - DNA, 25 bp, Homo sapien
gaagatacagaggttcaggagagca

SEQ ID NO: 5206586 - DNA, 25 bp, Homo sapien
gaaaggtgatagcacaagtgtctga

SEQ ID NO: 5206587 - DNA, 25 bp, Homo sapien
gcccatgagggtaaaaacaccaaga

SEQ ID NO: 5206588 - DNA, 25 bp, Homo sapien
gtcttcttatcaaaggcccatgagg

SEQ ID NO: 5206589 - DNA, 25 bp, Homo sapien
cagagagactgcaatgaaaggtgat

SEQ ID NO: 5206590 - DNA, 25 bp, Homo sapien
ctgctgcctgaaccgagggaggaaa

SEQ ID NO: 5206591 - DNA, 25 bp, Homo sapien
tatatatgcacgagttcaagtcctg

SEQ ID NO: 5206592 - DNA, 25 bp, Homo sapien
tgaggaagaactactatgtccaccc

SEQ ID NO: 5206593 - DNA, 25 bp, Homo sapien
tgcgtggcactaaaatctgttggac

SEQ ID NO: 5206594 - DNA, 25 bp, Homo sapien
ctcccaacagcaagatatgttttat

SEQ ID NO: 5206595 - DNA, 25 bp, Homo sapien
caacagcaagatatgttttattttc

SEQ ID NO: 5206596 - DNA, 25 bp, Homo sapien
cccaacagcaagatatgttttattt

SEQ ID NO: 5206597 - DNA, 25 bp, Homo sapien
actcccaacagcaagatatgtttta

SEQ ID NO: 5206598 - DNA, 25 bp, Homo sapien
gagtcgtttcatatgcatcatctcc

SEQ ID NO: 5206599 - DNA, 25 bp, Homo sapien
gtagagtcgtttcatatgcatcatc

SEQ ID NO: 5206600 - DNA, 25 bp, Homo sapien
acccacgggtagtttgacatgtaga

SEQ ID NO: 5206601 - DNA, 25 bp, Homo sapien
aaagacccacgggtagtttgacatg

SEQ ID NO: 5206602 - DNA, 25 bp, Homo sapien
aatactgcagtcaagttgtaccacg

SEQ ID NO: 5206603 - DNA, 25 bp, Homo sapien
gagttatctgtgacttcacagttta

SEQ ID NO: 5206604 - DNA, 25 bp, Homo sapien
tgtaccacgccagagttatctgtga

SEQ ID NO: 5206605 - DNA, 25 bp, Homo sapien
gagagatgatctacatatatatagc

SEQ ID NO: 5206606 - DNA, 25 bp, Homo sapien
caggtagcatgcactgtgatactga

SEQ ID NO: 5206607 - DNA, 25 bp, Homo sapien
gcactgtgatactgaggtcctcttc

SEQ ID NO: 5206608 - DNA, 25 bp, Homo sapien
tgaggtcctcttccgctctgctgag

SEQ ID NO: 5206609 - DNA, 25 bp, Homo sapien
ctcttccgctctgctgagtgagctc

SEQ ID NO: 5206610 - DNA, 25 bp, Homo sapien
actgtatagcaagtcatgtactgcc

SEQ ID NO: 5206611 - DNA, 25 bp, Homo sapien
tgtgttaggtaaaatgaagtccatc

SEQ ID NO: 5206612 - DNA, 25 bp, Homo sapien
tctaggagacatatctatggaagtc

SEQ ID NO: 5206613 - DNA, 25 bp, Homo sapien
tgttctaggtggtacaaaaaccaga

SEQ ID NO: 5206614 - DNA, 25 bp, Homo sapien
tattttaaaggtattgctacagtca

SEQ ID NO: 5206615 - DNA, 25 bp, Homo sapien
aaaggtattgctacagtcactctgc

SEQ ID NO: 5206616 - DNA, 25 bp, Homo sapien
atgaacagtcagcttaacctcatat

SEQ ID NO: 5206617 - DNA, 25 bp, Homo sapien
gaacagtcagcttaacctcatattt

SEQ ID NO: 5206618 - DNA, 25 bp, Homo sapien
cattttcatcatttgatccatacac

SEQ ID NO: 5206619 - DNA, 25 bp, Homo sapien
accatgcacgtttcaggctcatttt

SEQ ID NO: 5206620 - DNA, 25 bp, Homo sapien
tccaccatgcacgtttcaggctcat

SEQ ID NO: 5206621 - DNA, 25 bp, Homo sapien
ttctccaccatgcacgtttcaggct

SEQ ID NO: 5206622 - DNA, 25 bp, Homo sapien
ggcagctgcataacaaagggagaca

SEQ ID NO: 5206623 - DNA, 25 bp, Homo sapien
catttggttctcatgaggtaggcca

SEQ ID NO: 5206624 - DNA, 25 bp, Homo sapien
gatgttatcgcaaaagcactctgtg

SEQ ID NO: 5206625 - DNA, 25 bp, Homo sapien
caccagctaagggaaatgctaacag

SEQ ID NO: 5206626 - DNA, 25 bp, Homo sapien
catccaaaatgttgaacagcttatc

SEQ ID NO: 5206627 - DNA, 25 bp, Homo sapien
aatgttgaacagcttatcagtttgg

SEQ ID NO: 5206628 - DNA, 25 bp, Homo sapien
ggagccatactattgccagtgttga

SEQ ID NO: 5206629 - DNA, 25 bp, Homo sapien
ggtaccattatttccacactaacat

SEQ ID NO: 5206630 - DNA, 25 bp, Homo sapien
aatagcctcttatcagtcttggaca

SEQ ID NO: 5206631 - DNA, 25 bp, Homo sapien
ttttgctgctctaatgcacacactc

SEQ ID NO: 5206632 - DNA, 25 bp, Homo sapien
caagaaccggactatgcctttcaag

SEQ ID NO: 5206633 - DNA, 25 bp, Homo sapien
tcaaggtctgcattgcactcttttg

SEQ ID NO: 5206634 - DNA, 25 bp, Homo sapien
atttaaacaatgtggatcagctttt

SEQ ID NO: 5206635 - DNA, 25 bp, Homo sapien
cagttggatatgaacactggcttct

SEQ ID NO: 5206636 - DNA, 25 bp, Homo sapien
ttctaaaatggatggccggccttcc

SEQ ID NO: 5206637 - DNA, 25 bp, Homo sapien
gatggccggccttccagttggatat

SEQ ID NO: 5206638 - DNA, 25 bp, Homo sapien
gaaggatcaccatagcctggtttat

SEQ ID NO: 5206639 - DNA, 25 bp, Homo sapien
gactacagaaagaggtaagttacca

SEQ ID NO: 5206640 - DNA, 25 bp, Homo sapien
aaattaactgcagtgcctcctttgg

SEQ ID NO: 5206641 - DNA, 25 bp, Homo sapien
cagctaccttgcaaataacttgatt

SEQ ID NO: 5206642 - DNA, 25 bp, Homo sapien
actcttggatttggctctggaaaac

SEQ ID NO: 5206643 - DNA, 25 bp, Homo sapien
ggaaaacctgttgctcttatttcaa

SEQ ID NO: 5206644 - DNA, 25 bp, Homo sapien
caaacttgagtgctgaagtctcatc

SEQ ID NO: 5206645 - DNA, 25 bp, Homo sapien
ttctcatccttgtttagttcaatta

SEQ ID NO: 5206646 - DNA, 25 bp, Homo sapien
acaataagtccaagtagcaagctac

SEQ ID NO: 5206647 - DNA, 25 bp, Homo sapien
ccacataacatatgagatcaataga

SEQ ID NO: 5206648 - DNA, 25 bp, Homo sapien
gatgatgtagtccttccagtagaac

SEQ ID NO: 5206649 - DNA, 25 bp, Homo sapien
gaaataacgtttgggtctttgatga

SEQ ID NO: 5206650 - DNA, 25 bp, Homo sapien
tactgttgatataactccaactgtc

SEQ ID NO: 5206651 - DNA, 25 bp, Homo sapien
ttgcttttactgttgatataactcc

SEQ ID NO: 5206652 - DNA, 25 bp, Homo sapien
gcttttactgttgatataactccaa

SEQ ID NO: 5206653 - DNA, 25 bp, Homo sapien
tgttgatataactccaactgtctct

SEQ ID NO: 5206654 - DNA, 25 bp, Homo sapien
tgttggaacacagcccgtaggaaat

SEQ ID NO: 5206655 - DNA, 25 bp, Homo sapien
ggttcattttactgaggcaagcaca

SEQ ID NO: 5206656 - DNA, 25 bp, Homo sapien
taacagatgttcaaaattcggccac

SEQ ID NO: 5206657 - DNA, 25 bp, Homo sapien
aatcagcgtgtatcaggtaaagtgc

SEQ ID NO: 5206658 - DNA, 25 bp, Homo sapien
aatgccttcgcaaatctcagaacat

SEQ ID NO: 5206659 - DNA, 25 bp, Homo sapien
tcaaatgccttcgcaaatctcagaa

SEQ ID NO: 5206660 - DNA, 25 bp, Homo sapien
caaatgccttcgcaaatctcagaac

SEQ ID NO: 5206661 - DNA, 25 bp, Homo sapien
aaatgccttcgcaaatctcagaaca

SEQ ID NO: 5206662 - DNA, 25 bp, Homo sapien
tgtgtatacacactctgggttcagg

SEQ ID NO: 5206663 - DNA, 25 bp, Homo sapien
tgtatacacactctgggttcaggag

SEQ ID NO: 5206664 - DNA, 25 bp, Homo sapien
aaagtttattcctgtgtatacacac

SEQ ID NO: 5206665 - DNA, 25 bp, Homo sapien
cataaagtttattcctgtgtataca

SEQ ID NO: 5206666 - DNA, 25 bp, Homo sapien
tgtgttccccttgtatctgagaggc

SEQ ID NO: 5206667 - DNA, 25 bp, Homo sapien
tgattcactgctccctaatccagag

SEQ ID NO: 5206668 - DNA, 25 bp, Homo sapien
catagttatatagcctacctgccaa

SEQ ID NO: 5206669 - DNA, 25 bp, Homo sapien
gttggacaaccatagtactctgctt

SEQ ID NO: 5206670 - DNA, 25 bp, Homo sapien
taggaacctgcaaacgcattcttgg

SEQ ID NO: 5206671 - DNA, 25 bp, Homo sapien
cactcagtggttagaagaagcatgc

SEQ ID NO: 5206672 - DNA, 25 bp, Homo sapien
ggaacatggcactctagatccctca

SEQ ID NO: 5206673 - DNA, 25 bp, Homo sapien
gcattcttggtaggcattgtgacac

SEQ ID NO: 5206674 - DNA, 25 bp, Homo sapien
tctctgaactatcaaagcaggcagt

SEQ ID NO: 5206675 - DNA, 25 bp, Homo sapien
tctaatattacaacgaaagctctct

SEQ ID NO: 5206676 - DNA, 25 bp, Homo sapien
tggttatgcgtgtctacattggctt

SEQ ID NO: 5206677 - DNA, 25 bp, Homo sapien
ttaaatcttttagtggagccatctg

SEQ ID NO: 5206678 - DNA, 25 bp, Homo sapien
gtgtgattcactggccttaactctg

SEQ ID NO: 5206679 - DNA, 25 bp, Homo sapien
taacctattaatgtacccctgagaa

SEQ ID NO: 5206680 - DNA, 25 bp, Homo sapien
cgtccggcccacacattcttaaagg

SEQ ID NO: 5206681 - DNA, 25 bp, Homo sapien
gattgaaaccaccatgtgcggagtg

SEQ ID NO: 5206682 - DNA, 25 bp, Homo sapien
cagaaatctttgatgggtggataca

SEQ ID NO: 5206683 - DNA, 25 bp, Homo sapien
tgcaatgtcatgtcagtcagcagaa

SEQ ID NO: 5206684 - DNA, 25 bp, Homo sapien
taggaaaagcttgaaccatgctggc

SEQ ID NO: 5206685 - DNA, 25 bp, Homo sapien
ggtggatacagctgggctgtctctt

SEQ ID NO: 5206686 - DNA, 25 bp, Homo sapien
tgctccaactgggttcgaagagata

SEQ ID NO: 5206687 - DNA, 25 bp, Homo sapien
gctccaactgggttcgaagagataa

SEQ ID NO: 5206688 - DNA, 25 bp, Homo sapien
tccaactgggttcgaagagataagc

SEQ ID NO: 5206689 - DNA, 25 bp, Homo sapien
caactgggttcgaagagataagcat

SEQ ID NO: 5206690 - DNA, 25 bp, Homo sapien
ctgtgatgccaaaggatgcagtgga

SEQ ID NO: 5206691 - DNA, 25 bp, Homo sapien
gctgtgatgccaaaggatgcagtgg

SEQ ID NO: 5206692 - DNA, 25 bp, Homo sapien
cagagctgtgatgccaaaggatgca

SEQ ID NO: 5206693 - DNA, 25 bp, Homo sapien
tctgtgttttgtgctgtctgtattt

SEQ ID NO: 5206694 - DNA, 25 bp, Homo sapien
tgtgctgtctgtatttgtggataca

SEQ ID NO: 5206695 - DNA, 25 bp, Homo sapien
gttttgtgctgtctgtatttgtgga

SEQ ID NO: 5206696 - DNA, 25 bp, Homo sapien
gctgtctgtatttgtggatacatct

SEQ ID NO: 5206697 - DNA, 25 bp, Homo sapien
taggttcagattccaggacttccag

SEQ ID NO: 5206698 - DNA, 25 bp, Homo sapien
ggaaaggggctttggatctccttca

SEQ ID NO: 5206699 - DNA, 25 bp, Homo sapien
atgtaggttcagattccaggacttc

SEQ ID NO: 5206700 - DNA, 25 bp, Homo sapien
aaaggggctttggatctccttcagc

SEQ ID NO: 5206701 - DNA, 25 bp, Homo sapien
tttatgagattccttgtccattcct

SEQ ID NO: 5206702 - DNA, 25 bp, Homo sapien
acatcaaaaaataccacggagattt

SEQ ID NO: 5206703 - DNA, 25 bp, Homo sapien
aataccacggagattttgattgaag

SEQ ID NO: 5206704 - DNA, 25 bp, Homo sapien
tgaagttctattataagtagttact

SEQ ID NO: 5206705 - DNA, 25 bp, Homo sapien
tgccagtaactctttggaacaaatc

SEQ ID NO: 5206706 - DNA, 25 bp, Homo sapien
taatcttgtgtaggtggtaactgca

SEQ ID NO: 5206707 - DNA, 25 bp, Homo sapien
tactgaggctttggactaatctttg

SEQ ID NO: 5206708 - DNA, 25 bp, Homo sapien
tagatcatgtatccccttgaagagc

SEQ ID NO: 5206709 - DNA, 25 bp, Homo sapien
tactctagtcattctctctaaagta

SEQ ID NO: 5206710 - DNA, 25 bp, Homo sapien
atttaagcttttactactctagtca

SEQ ID NO: 5206711 - DNA, 25 bp, Homo sapien
catagaagcgtgttcttatcttgat

SEQ ID NO: 5206712 - DNA, 25 bp, Homo sapien
tctctaaagtagacatagaagcgtg

SEQ ID NO: 5206713 - DNA, 25 bp, Homo sapien
tatggcaatacgacaacaggtcacc

SEQ ID NO: 5206714 - DNA, 25 bp, Homo sapien
gtataggagtctgctacagctgcca

SEQ ID NO: 5206715 - DNA, 25 bp, Homo sapien
caatggcctcccaatataatctggc

SEQ ID NO: 5206716 - DNA, 25 bp, Homo sapien
gctatgttgactaattcccacctaa

SEQ ID NO: 5206717 - DNA, 25 bp, Homo sapien
agaagctctggttctagttcaatca

SEQ ID NO: 5206718 - DNA, 25 bp, Homo sapien
aagctctggttctagttcaatcaca

SEQ ID NO: 5206719 - DNA, 25 bp, Homo sapien
gctctggttctagttcaatcacaag

SEQ ID NO: 5206720 - DNA, 25 bp, Homo sapien
tggttctagttcaatcacaagactt

SEQ ID NO: 5206721 - DNA, 25 bp, Homo sapien
agatgtgaagtggttaaagggccat

SEQ ID NO: 5206722 - DNA, 25 bp, Homo sapien
ggtgtaaggtgcaaaaagcagcatt

SEQ ID NO: 5206723 - DNA, 25 bp, Homo sapien
gggtgtaaggtgcaaaaagcagcat

SEQ ID NO: 5206724 - DNA, 25 bp, Homo sapien
gtaaggtgcaaaaagcagcattagc

SEQ ID NO: 5206725 - DNA, 25 bp, Homo sapien
ggaggggtgtaaggtgcaaaaagca

SEQ ID NO: 5206726 - DNA, 25 bp, Homo sapien
gcttggttacctttagagaaactca

SEQ ID NO: 5206727 - DNA, 25 bp, Homo sapien
ggtaaaaatgacatagggaaaagca

SEQ ID NO: 5206728 - DNA, 25 bp, Homo sapien
gggaaaagcaaaatgtgacagccca

SEQ ID NO: 5206729 - DNA, 25 bp, Homo sapien
ccatactcgagagcccttttctgag

SEQ ID NO: 5206730 - DNA, 25 bp, Homo sapien
cagtcagtcaaggagtaactcacat

SEQ ID NO: 5206731 - DNA, 25 bp, Homo sapien
gcataacacatagcacttccatctg

SEQ ID NO: 5206732 - DNA, 25 bp, Homo sapien
ccatctgatcagagaaataccacag

SEQ ID NO: 5206733 - DNA, 25 bp, Homo sapien
gaaataccacagaaccagtgccaat

SEQ ID NO: 5206734 - DNA, 25 bp, Homo sapien
aaagccacggatcaatcttctcagg

SEQ ID NO: 5206735 - DNA, 25 bp, Homo sapien
cacgccagtttcaccatttccggga

SEQ ID NO: 5206736 - DNA, 25 bp, Homo sapien
tgtcgtgtttacaaaaggcagccct

SEQ ID NO: 5206737 - DNA, 25 bp, Homo sapien
tatttcatgattagaggcacgccag

SEQ ID NO: 5206738 - DNA, 25 bp, Homo sapien
gaagcggcaacttcgcggttgccaa

SEQ ID NO: 5206739 - DNA, 25 bp, Homo sapien
ggcaacttcgcggttgccaatcgct

SEQ ID NO: 5206740 - DNA, 25 bp, Homo sapien
ttcgcggttgccaatcgctgaccat

SEQ ID NO: 5206741 - DNA, 25 bp, Homo sapien
tagaagcggcaacttcgcggttgcc

SEQ ID NO: 5206742 - DNA, 25 bp, Homo sapien
ttctgtatgtgtgcgtttgcgagag

SEQ ID NO: 5206743 - DNA, 25 bp, Homo sapien
tatgtgtgcgtttgcgagagtgtgt

SEQ ID NO: 5206744 - DNA, 25 bp, Homo sapien
tattctgtatgtgtgcgtttgcgag

SEQ ID NO: 5206745 - DNA, 25 bp, Homo sapien
gtgtgcgtttgcgagagtgtgtatg

SEQ ID NO: 5206746 - DNA, 25 bp, Homo sapien
gatgaagccgcttttatatggcgta

SEQ ID NO: 5206747 - DNA, 25 bp, Homo sapien
caacgctgcgtttacagatgaagcc

SEQ ID NO: 5206748 - DNA, 25 bp, Homo sapien
ttaggagaagccatcctttggcgcc

SEQ ID NO: 5206749 - DNA, 25 bp, Homo sapien
gtagggatagaatggcaggtacaac

SEQ ID NO: 5206750 - DNA, 25 bp, Homo sapien
aggtggggactgacgtagtgagagg

SEQ ID NO: 5206751 - DNA, 25 bp, Homo sapien
gatggaggtggggactgacgtagtg

SEQ ID NO: 5206752 - DNA, 25 bp, Homo sapien
atggaggtggggactgacgtagtga

SEQ ID NO: 5206753 - DNA, 25 bp, Homo sapien
ggaggtggggactgacgtagtgaga

SEQ ID NO: 5206754 - DNA, 25 bp, Homo sapien
gaactagctcgctttgaggacaaga

SEQ ID NO: 5206755 - DNA, 25 bp, Homo sapien
tcaatgcctggactagagagccgag

SEQ ID NO: 5206756 - DNA, 25 bp, Homo sapien
taagagagcgcaaaggccaatggaa

SEQ ID NO: 5206757 - DNA, 25 bp, Homo sapien
atacaaccgtcaaagaagtccccag

SEQ ID NO: 5206758 - DNA, 25 bp, Homo sapien
aaacactcgggcgtccctcttgctc

SEQ ID NO: 5206759 - DNA, 25 bp, Homo sapien
tcttgctcaagaacatctgactcca

SEQ ID NO: 5206760 - DNA, 25 bp, Homo sapien
tggcaaaacactcgggcgtccctct

SEQ ID NO: 5206761 - DNA, 25 bp, Homo sapien
catctgactccaccataattctcct

SEQ ID NO: 5206762 - DNA, 25 bp, Homo sapien
tgtctctgaaacatcctggagtggc

SEQ ID NO: 5206763 - DNA, 25 bp, Homo sapien
gtggcctttcctttgtacaaatctc

SEQ ID NO: 5206764 - DNA, 25 bp, Homo sapien
gaagcccaaggacagctaccgtgag

SEQ ID NO: 5206765 - DNA, 25 bp, Homo sapien
ggacagctaccgtgagacccaacct

SEQ ID NO: 5206766 - DNA, 25 bp, Homo sapien
tttccgcgcagaggagggtcacatc

SEQ ID NO: 5206767 - DNA, 25 bp, Homo sapien
tctcctgggagcctcgcgggcactg

SEQ ID NO: 5206768 - DNA, 25 bp, Homo sapien
ccgggtcgaaattttccgcgcagag

SEQ ID NO: 5206769 - DNA, 25 bp, Homo sapien
ggcactggctgagcgtcgcgatgcc

SEQ ID NO: 5206770 - DNA, 25 bp, Homo sapien
caggccgtgtccaggctcctctttt

SEQ ID NO: 5206771 - DNA, 25 bp, Homo sapien
tgtccaggctcctctttttagggcc

SEQ ID NO: 5206772 - DNA, 25 bp, Homo sapien
cgtgtccaggctcctctttttaggg

SEQ ID NO: 5206773 - DNA, 25 bp, Homo sapien
tcaatccaggccgtgtccaggctcc

SEQ ID NO: 5206774 - DNA, 25 bp, Homo sapien
tgctcgagggcagtgagtcatgaaa

SEQ ID NO: 5206775 - DNA, 25 bp, Homo sapien
tgtcctctccgggatccggctgact

SEQ ID NO: 5206776 - DNA, 25 bp, Homo sapien
tgcaaccgtccaaacaagtccaaag

SEQ ID NO: 5206777 - DNA, 25 bp, Homo sapien
gccgcggagaaggtcctcagtgcta

SEQ ID NO: 5206778 - DNA, 25 bp, Homo sapien
cacactcccctctccccacccctgg

SEQ ID NO: 5206779 - DNA, 25 bp, Homo sapien
tcccctctccccacccctggccaca

SEQ ID NO: 5206780 - DNA, 25 bp, Homo sapien
ccctctccccacccctggccacacg

SEQ ID NO: 5206781 - DNA, 25 bp, Homo sapien
cccaggccacactcccctctcccca

SEQ ID NO: 5206782 - DNA, 25 bp, Homo sapien
cgggccacacgcctccatcccttcc

SEQ ID NO: 5206783 - DNA, 25 bp, Homo sapien
cacacgcctccatcccttccccacc

SEQ ID NO: 5206784 - DNA, 25 bp, Homo sapien
gggccacacgcctccatcccttccc

SEQ ID NO: 5206785 - DNA, 25 bp, Homo sapien
gccacacgcctccatcccttcccca

SEQ ID NO: 5206786 - DNA, 25 bp, Homo sapien
cctgagaaacaggtcaccgccaggg

SEQ ID NO: 5206787 - DNA, 25 bp, Homo sapien
ctgcgctttatcttggccctgtgaa

SEQ ID NO: 5206788 - DNA, 25 bp, Homo sapien
agaaacaggtcaccgccagggacgc

SEQ ID NO: 5206789 - DNA, 25 bp, Homo sapien
ccggcccctgcgctttatcttggcc

SEQ ID NO: 5206790 - DNA, 25 bp, Homo sapien
aggacgcgggaacctctcgaggtcg

SEQ ID NO: 5206791 - DNA, 25 bp, Homo sapien
cgcgggaacctctcgaggtcggccg

SEQ ID NO: 5206792 - DNA, 25 bp, Homo sapien
gaacctctcgaggtcggccgggctg

SEQ ID NO: 5206793 - DNA, 25 bp, Homo sapien
gagaggacgcgggaacctctcgagg

SEQ ID NO: 5206794 - DNA, 25 bp, Homo sapien
tccctaaatcacagtcgcgtcgtgc

SEQ ID NO: 5206795 - DNA, 25 bp, Homo sapien
aattttttccgttctcgcaggtgca

SEQ ID NO: 5206796 - DNA, 25 bp, Homo sapien
aattaagattatgccgcaagcccag

SEQ ID NO: 5206797 - DNA, 25 bp, Homo sapien
taatagcgtctctcgttgctcttgg

SEQ ID NO: 5206798 - DNA, 25 bp, Homo sapien
ctacgactgccaagatactcctact

SEQ ID NO: 5206799 - DNA, 25 bp, Homo sapien
gattttacgttgttgattctgagtg

SEQ ID NO: 5206800 - DNA, 25 bp, Homo sapien
gccaagatactcctactgagttgat

SEQ ID NO: 5206801 - DNA, 25 bp, Homo sapien
cctggatcctgacagggaatcagag

SEQ ID NO: 5206802 - DNA, 25 bp, Homo sapien
atcggacgcacgaggccttgagcaa

SEQ ID NO: 5206803 - DNA, 25 bp, Homo sapien
cattatatgcacacacgatttgcac

SEQ ID NO: 5206804 - DNA, 25 bp, Homo sapien
gattcacacacgtacattcaagtgc

SEQ ID NO: 5206805 - DNA, 25 bp, Homo sapien
tcttgcacacacacggattcacaca

SEQ ID NO: 5206806 - DNA, 25 bp, Homo sapien
gcaggtgcgaccgtggacatacact

SEQ ID NO: 5206807 - DNA, 25 bp, Homo sapien
ggtgcgaccgtggacatacacttaa

SEQ ID NO: 5206808 - DNA, 25 bp, Homo sapien
gcgaccgtggacatacacttaacac

SEQ ID NO: 5206809 - DNA, 25 bp, Homo sapien
gaaagcaggtgcgaccgtggacata

SEQ ID NO: 5206810 - DNA, 25 bp, Homo sapien
tggccctgcgatcccctttggacag

SEQ ID NO: 5206811 - DNA, 25 bp, Homo sapien
aaggttggcaaatagcgtgtgcttg

SEQ ID NO: 5206812 - DNA, 25 bp, Homo sapien
caagctgttcctcgatccccgggaa

SEQ ID NO: 5206813 - DNA, 25 bp, Homo sapien
gtgtgcttgtcagttccctggccct

SEQ ID NO: 5206814 - DNA, 25 bp, Homo sapien
tgaagctacacacagctaccgagga

SEQ ID NO: 5206815 - DNA, 25 bp, Homo sapien
aaccattgttcttgcgacgctccgg

SEQ ID NO: 5206816 - DNA, 25 bp, Homo sapien
ttgtccacggtgctgataggttgag

SEQ ID NO: 5206817 - DNA, 25 bp, Homo sapien
atctagtaggccgaaggtcagggcc

SEQ ID NO: 5206818 - DNA, 25 bp, Homo sapien
tcagactagccagctcaaattatag

SEQ ID NO: 5206819 - DNA, 25 bp, Homo sapien
aattagatgcagacttacaggtctc

SEQ ID NO: 5206820 - DNA, 25 bp, Homo sapien
actaaaagctcagtcatggcgcccc

SEQ ID NO: 5206821 - DNA, 25 bp, Homo sapien
tgcccctaaatctggctacctagtt

SEQ ID NO: 5206822 - DNA, 25 bp, Homo sapien
ttctcatctgatgctaggatggcag

SEQ ID NO: 5206823 - DNA, 25 bp, Homo sapien
atctgatgctaggatggcaggggtg

SEQ ID NO: 5206824 - DNA, 25 bp, Homo sapien
tcatctgatgctaggatggcagggg

SEQ ID NO: 5206825 - DNA, 25 bp, Homo sapien
tctcatctgatgctaggatggcagg

SEQ ID NO: 5206826 - DNA, 25 bp, Homo sapien
taatctcctcccgggtaacgcgcga

SEQ ID NO: 5206827 - DNA, 25 bp, Homo sapien
tgttttctcacggttgatcgggttc

SEQ ID NO: 5206828 - DNA, 25 bp, Homo sapien
ctctctggactgtacgtttccccgg

SEQ ID NO: 5206829 - DNA, 25 bp, Homo sapien
cgtagatctgcaactctctggactg

SEQ ID NO: 5206830 - DNA, 25 bp, Homo sapien
ctcacggttgatcgggttctctggc

SEQ ID NO: 5206831 - DNA, 25 bp, Homo sapien
tggtgctaccaacttccttaactcg

SEQ ID NO: 5206832 - DNA, 25 bp, Homo sapien
gtgctaccaacttccttaactcgat

SEQ ID NO: 5206833 - DNA, 25 bp, Homo sapien
gacttggtgctaccaacttccttaa

SEQ ID NO: 5206834 - DNA, 25 bp, Homo sapien
tgccagacttggtgctaccaacttc

SEQ ID NO: 5206835 - DNA, 25 bp, Homo sapien
gaggggtaattgctatgtccaagta

SEQ ID NO: 5206836 - DNA, 25 bp, Homo sapien
gggtaattgctatgtccaagtaatc

SEQ ID NO: 5206837 - DNA, 25 bp, Homo sapien
ggaggggtaattgctatgtccaagt

SEQ ID NO: 5206838 - DNA, 25 bp, Homo sapien
aggggtaattgctatgtccaagtaa

SEQ ID NO: 5206839 - DNA, 25 bp, Homo sapien
catatggactttgtattagtaatta

SEQ ID NO: 5206840 - DNA, 25 bp, Homo sapien
gaaacatatggactttgtattagta

SEQ ID NO: 5206841 - DNA, 25 bp, Homo sapien
aaaaaggctggaaacatatggactt

SEQ ID NO: 5206842 - DNA, 25 bp, Homo sapien
ggctggaaacatatggactttgtat

SEQ ID NO: 5206843 - DNA, 25 bp, Homo sapien
acagaagcagagaacccataaagcg

SEQ ID NO: 5206844 - DNA, 25 bp, Homo sapien
tatttcagctcagacaagtagatga

SEQ ID NO: 5206845 - DNA, 25 bp, Homo sapien
gacaagtagatgatccgtgagcctc

SEQ ID NO: 5206846 - DNA, 25 bp, Homo sapien
taaagcgatgtaggtgcattgccac

SEQ ID NO: 5206847 - DNA, 25 bp, Homo sapien
catattctcacataggagaattcca

SEQ ID NO: 5206848 - DNA, 25 bp, Homo sapien
attctcacataggagaattccacca

SEQ ID NO: 5206849 - DNA, 25 bp, Homo sapien
cacataggagaattccaccaaccaa

SEQ ID NO: 5206850 - DNA, 25 bp, Homo sapien
acataggagaattccaccaaccaaa

SEQ ID NO: 5206851 - DNA, 25 bp, Homo sapien
tgttcagtgtatctgattgctgctg

SEQ ID NO: 5206852 - DNA, 25 bp, Homo sapien
ctgggcaaggtgagttagtccaaga

SEQ ID NO: 5206853 - DNA, 25 bp, Homo sapien
aggtgagttagtccaagagtgttca

SEQ ID NO: 5206854 - DNA, 25 bp, Homo sapien
caccctcacagtcccttacaatgac

SEQ ID NO: 5206855 - DNA, 25 bp, Homo sapien
gattgtccacatttgccatgcaaaa

SEQ ID NO: 5206856 - DNA, 25 bp, Homo sapien
cacatttgccatgcaaaacagctca

SEQ ID NO: 5206857 - DNA, 25 bp, Homo sapien
ctaaagattgtccacatttgccatg

SEQ ID NO: 5206858 - DNA, 25 bp, Homo sapien
gtccacatttgccatgcaaaacagc

SEQ ID NO: 5206859 - DNA, 25 bp, Homo sapien
tgctggaactcgtgaatccacttgc

SEQ ID NO: 5206860 - DNA, 25 bp, Homo sapien
gcatcaaaaagcatacttgatactg

SEQ ID NO: 5206861 - DNA, 25 bp, Homo sapien
gatactgtgacgagttgctggaact

SEQ ID NO: 5206862 - DNA, 25 bp, Homo sapien
cattgacgaaatccttgacagcatc

SEQ ID NO: 5206863 - DNA, 25 bp, Homo sapien
tgtattgactgtagccagaggataa

SEQ ID NO: 5206864 - DNA, 25 bp, Homo sapien
aggctccatttgatctttgaagttt

SEQ ID NO: 5206865 - DNA, 25 bp, Homo sapien
cataggtaggagattgatcaaaggc

SEQ ID NO: 5206866 - DNA, 25 bp, Homo sapien
tctaatctgctttcataggtaggag

SEQ ID NO: 5206867 - DNA, 25 bp, Homo sapien
gaaagctctttctgagttttccagt

SEQ ID NO: 5206868 - DNA, 25 bp, Homo sapien
cagaaagctctttctgagttttcca

SEQ ID NO: 5206869 - DNA, 25 bp, Homo sapien
aagctctttctgagttttccagtcc

SEQ ID NO: 5206870 - DNA, 25 bp, Homo sapien
tccagaaagctctttctgagttttc

SEQ ID NO: 5206871 - DNA, 25 bp, Homo sapien
tgccacactcaagacaggattctgg

SEQ ID NO: 5206872 - DNA, 25 bp, Homo sapien
aaagccaaagcgaacaaggcttggc

SEQ ID NO: 5206873 - DNA, 25 bp, Homo sapien
cttggcaagtttgagggtggacaaa

SEQ ID NO: 5206874 - DNA, 25 bp, Homo sapien
ggctagttctttacattcaactcca

SEQ ID NO: 5206875 - DNA, 25 bp, Homo sapien
gagggccggcgcttcacatgaaggc

SEQ ID NO: 5206876 - DNA, 25 bp, Homo sapien
gcttcacatgaaggcggccgggcgc

SEQ ID NO: 5206877 - DNA, 25 bp, Homo sapien
ccggcgcttcacatgaaggcggccg

SEQ ID NO: 5206878 - DNA, 25 bp, Homo sapien
ggccggcgcttcacatgaaggcggc

SEQ ID NO: 5206879 - DNA, 25 bp, Homo sapien
ctgcgcgagacaaggcggcggcagg

SEQ ID NO: 5206880 - DNA, 25 bp, Homo sapien
gcgcgagacaaggcggcggcaggga

SEQ ID NO: 5206881 - DNA, 25 bp, Homo sapien
tgcgcgagacaaggcggcggcaggg

SEQ ID NO: 5206882 - DNA, 25 bp, Homo sapien
gcactgggggctccgctaccccagc

SEQ ID NO: 5206883 - DNA, 25 bp, Homo sapien
ccgcactgggggctccgctacccca

SEQ ID NO: 5206884 - DNA, 25 bp, Homo sapien
ggccgcactgggggctccgctaccc

SEQ ID NO: 5206885 - DNA, 25 bp, Homo sapien
tgggggctccgctaccccagccgga

SEQ ID NO: 5206886 - DNA, 25 bp, Homo sapien
ctccgcctccgccgacgacgacagg

SEQ ID NO: 5206887 - DNA, 25 bp, Homo sapien
ccgacgacgacaggggccggtccat

SEQ ID NO: 5206888 - DNA, 25 bp, Homo sapien
cctccgccgacgacgacaggggccg

SEQ ID NO: 5206889 - DNA, 25 bp, Homo sapien
gccgacgacgacaggggccggtcca

SEQ ID NO: 5206890 - DNA, 25 bp, Homo sapien
ctgtggacagatcctccgtctccga

SEQ ID NO: 5206891 - DNA, 25 bp, Homo sapien
tcgtcctgcgtcgtcgcttctgtgg

SEQ ID NO: 5206892 - DNA, 25 bp, Homo sapien
cgtctccgacgcttgccaggagctg

SEQ ID NO: 5206893 - DNA, 25 bp, Homo sapien
cgacgcttgccaggagctgcggcac

SEQ ID NO: 5206894 - DNA, 25 bp, Homo sapien
gagccatatcgcgatcttctcgttg

SEQ ID NO: 5206895 - DNA, 25 bp, Homo sapien
cagtccttgagccatatcgcgatct

SEQ ID NO: 5206896 - DNA, 25 bp, Homo sapien
tccttgagccatatcgcgatcttct

SEQ ID NO: 5206897 - DNA, 25 bp, Homo sapien
atatcgcgatcttctcgttgggcac

SEQ ID NO: 5206898 - DNA, 25 bp, Homo sapien
gacccacagggacgcggcccgagtg

SEQ ID NO: 5206899 - DNA, 25 bp, Homo sapien
cggtttgtagcttacaacggtcgcg

SEQ ID NO: 5206900 - DNA, 25 bp, Homo sapien
tagcttacaacggtcgcgggaccca

SEQ ID NO: 5206901 - DNA, 25 bp, Homo sapien
tccggcgtcccgtccgcacggatct

SEQ ID NO: 5206902 - DNA, 25 bp, Homo sapien
agaggaggaagctatccgccggctc

SEQ ID NO: 5206903 - DNA, 25 bp, Homo sapien
gaggaggaagctatccgccggctca

SEQ ID NO: 5206904 - DNA, 25 bp, Homo sapien
tagaggaggaagctatccgccggct

SEQ ID NO: 5206905 - DNA, 25 bp, Homo sapien
aggaggaagctatccgccggctcac

SEQ ID NO: 5206906 - DNA, 25 bp, Homo sapien
gattccgtgccagttgtacagatgc

SEQ ID NO: 5206907 - DNA, 25 bp, Homo sapien
tgtctttagaggaggcaaactggca

SEQ ID NO: 5206908 - DNA, 25 bp, Homo sapien
tctttattcaggatatggacggcac

SEQ ID NO: 5206909 - DNA, 25 bp, Homo sapien
tctctgatgctaacacgatgcgtga

SEQ ID NO: 5206910 - DNA, 25 bp, Homo sapien
aattcacgagacatgggatcaatca

SEQ ID NO: 5206911 - DNA, 25 bp, Homo sapien
gtctctactggtctatgcactaaca

SEQ ID NO: 5206912 - DNA, 25 bp, Homo sapien
acaagtatactaacaatggcagctc

SEQ ID NO: 5206913 - DNA, 25 bp, Homo sapien
cctgatggctactttcttggatgta

SEQ ID NO: 5206914 - DNA, 25 bp, Homo sapien
cgtataagccttagtcttgtgaaag

SEQ ID NO: 5206915 - DNA, 25 bp, Homo sapien
tgaaaccatataaacgtataagcct

SEQ ID NO: 5206916 - DNA, 25 bp, Homo sapien
ccatataaacgtataagccttagtc

SEQ ID NO: 5206917 - DNA, 25 bp, Homo sapien
tataaacgtataagccttagtcttg

SEQ ID NO: 5206918 - DNA, 25 bp, Homo sapien
gctttgttcatccagtgaggctccc

SEQ ID NO: 5206919 - DNA, 25 bp, Homo sapien
ccttgagtgtactactgctttgttc

SEQ ID NO: 5206920 - DNA, 25 bp, Homo sapien
tactgctttgttcatccagtgaggc

SEQ ID NO: 5206921 - DNA, 25 bp, Homo sapien
ttgttcatccagtgaggctcccaaa

SEQ ID NO: 5206922 - DNA, 25 bp, Homo sapien
ctgaaagacacatttgaaaactcat

SEQ ID NO: 5206923 - DNA, 25 bp, Homo sapien
ttcagctcccaatgacaaatcatct

SEQ ID NO: 5206924 - DNA, 25 bp, Homo sapien
aatttgagcatcactttcatggagg

SEQ ID NO: 5206925 - DNA, 25 bp, Homo sapien
tcaatttgagcatcactttcatgga

SEQ ID NO: 5206926 - DNA, 25 bp, Homo sapien
gcatcactttcatggaggtggttgg

SEQ ID NO: 5206927 - DNA, 25 bp, Homo sapien
ttgagcatcactttcatggaggtgg

SEQ ID NO: 5206928 - DNA, 25 bp, Homo sapien
ttctgatgaaactgtaatcttctct

SEQ ID NO: 5206929 - DNA, 25 bp, Homo sapien
tgaaactgtaatcttctctctttgg

SEQ ID NO: 5206930 - DNA, 25 bp, Homo sapien
cttctccctttctgatgaaactgta

SEQ ID NO: 5206931 - DNA, 25 bp, Homo sapien
tctctctttggccaagatattattg

SEQ ID NO: 5206932 - DNA, 25 bp, Homo sapien
tgaaactgtcccactacttttccca

SEQ ID NO: 5206933 - DNA, 25 bp, Homo sapien
gaagcaatatctggttcatcacgtc

SEQ ID NO: 5206934 - DNA, 25 bp, Homo sapien
catccgttgcatctgagcactcaaa

SEQ ID NO: 5206935 - DNA, 25 bp, Homo sapien
taatatctatccctttggcaaagga

SEQ ID NO: 5206936 - DNA, 25 bp, Homo sapien
gggttttctacttccatccgttgca

SEQ ID NO: 5206937 - DNA, 25 bp, Homo sapien
ggcgtcccggagacttgagaatata

SEQ ID NO: 5206938 - DNA, 25 bp, Homo sapien
cgcattggccacagtagtaagcact

SEQ ID NO: 5206939 - DNA, 25 bp, Homo sapien
tataaagaagaaaacgcattggcca

SEQ ID NO: 5206940 - DNA, 25 bp, Homo sapien
agcacttcaatttgacgaaaacggc

SEQ ID NO: 5206941 - DNA, 25 bp, Homo sapien
taaacgatttgcagtgttacttcga

SEQ ID NO: 5206942 - DNA, 25 bp, Homo sapien
aactgtagccaacatagaagatgac

SEQ ID NO: 5206943 - DNA, 25 bp, Homo sapien
gctgatggagaaggactactacttt

SEQ ID NO: 5206944 - DNA, 25 bp, Homo sapien
tatcagcattctccgtaacagctgc

SEQ ID NO: 5206945 - DNA, 25 bp, Homo sapien
tctaatttggattctacaataccag

SEQ ID NO: 5206946 - DNA, 25 bp, Homo sapien
ctggatatgttgaaatcactatcta

SEQ ID NO: 5206947 - DNA, 25 bp, Homo sapien
tttggattctacaataccagattcc

SEQ ID NO: 5206948 - DNA, 25 bp, Homo sapien
cccagtttactctcatgactttgag

SEQ ID NO: 5206949 - DNA, 25 bp, Homo sapien
gatggtattgtcagtggtgcacaag

SEQ ID NO: 5206950 - DNA, 25 bp, Homo sapien
ttttcaggtgtggatatatggacac

SEQ ID NO: 5206951 - DNA, 25 bp, Homo sapien
ggagtccttctgctgtgtcattata

SEQ ID NO: 5206952 - DNA, 25 bp, Homo sapien
ggtgcacaaggctctttttcaggtg

SEQ ID NO: 5206953 - DNA, 25 bp, Homo sapien
ggtgctgctcctactccctttttat

SEQ ID NO: 5206954 - DNA, 25 bp, Homo sapien
tgtaaaatattccaaggtgctgctc

SEQ ID NO: 5206955 - DNA, 25 bp, Homo sapien
gaaaaatcttcactaatctgaggga

SEQ ID NO: 5206956 - DNA, 25 bp, Homo sapien
taagaggacatttatgagctgaatc

SEQ ID NO: 5206957 - DNA, 25 bp, Homo sapien
ggatcattttggtttaacttgtgaa

SEQ ID NO: 5206958 - DNA, 25 bp, Homo sapien
tggcttcagagagttaccatgacgt

SEQ ID NO: 5206959 - DNA, 25 bp, Homo sapien
gaagcaagtcatttggaataattag

SEQ ID NO: 5206960 - DNA, 25 bp, Homo sapien
gaacatctgcttgagaaggatcatt

SEQ ID NO: 5206961 - DNA, 25 bp, Homo sapien
gacttcgtaagacctagctggtaag

SEQ ID NO: 5206962 - DNA, 25 bp, Homo sapien
gagcttctccctccgtactttgaac

SEQ ID NO: 5206963 - DNA, 25 bp, Homo sapien
catgaggagcttctccctccgtact

SEQ ID NO: 5206964 - DNA, 25 bp, Homo sapien
ctcttttcgacttcgtaagacctag

SEQ ID NO: 5206965 - DNA, 25 bp, Homo sapien
tgcaaatgtataaggtatgaaacaa

SEQ ID NO: 5206966 - DNA, 25 bp, Homo sapien
gtaaaaaggccaactaagcatagca

SEQ ID NO: 5206967 - DNA, 25 bp, Homo sapien
accaaataggttcaactacaacata

SEQ ID NO: 5206968 - DNA, 25 bp, Homo sapien
ctcaaccaaataggttcaactacaa

SEQ ID NO: 5206969 - DNA, 25 bp, Homo sapien
gcaaaaccactgctatcggaatgct

SEQ ID NO: 5206970 - DNA, 25 bp, Homo sapien
gataggcagtctgtagaatcttcag

SEQ ID NO: 5206971 - DNA, 25 bp, Homo sapien
gatgattaagggataggcagtctgt

SEQ ID NO: 5206972 - DNA, 25 bp, Homo sapien
tgacttgcagtacgtaacagatgat

SEQ ID NO: 5206973 - DNA, 25 bp, Homo sapien
cccatagcctgcaaggactcctgaa

SEQ ID NO: 5206974 - DNA, 25 bp, Homo sapien
gagggacaagagactcctcctctga

SEQ ID NO: 5206975 - DNA, 25 bp, Homo sapien
tggcaaggtcttcaccaagtgacgt

SEQ ID NO: 5206976 - DNA, 25 bp, Homo sapien
gccttctctagtcccttctgaagag

SEQ ID NO: 5206977 - DNA, 25 bp, Homo sapien
tgtattctcaatggtgttgcactga

SEQ ID NO: 5206978 - DNA, 25 bp, Homo sapien
tagttcctgtattctcaatggtgtt

SEQ ID NO: 5206979 - DNA, 25 bp, Homo sapien
caatggtgttgcactgagggaaatc

SEQ ID NO: 5206980 - DNA, 25 bp, Homo sapien
ttgcactgagggaaatcctggctac

SEQ ID NO: 5206981 - DNA, 25 bp, Homo sapien
tcaatgatatgatcccctggactac

SEQ ID NO: 5206982 - DNA, 25 bp, Homo sapien
tgatatgatcccctggactacaggt

SEQ ID NO: 5206983 - DNA, 25 bp, Homo sapien
tatgatcccctggactacaggtgga

SEQ ID NO: 5206984 - DNA, 25 bp, Homo sapien
caatgatatgatcccctggactaca

SEQ ID NO: 5206985 - DNA, 25 bp, Homo sapien
ttgattttagcaggctacgccccat

SEQ ID NO: 5206986 - DNA, 25 bp, Homo sapien
aagctgtattaactctgtccatgga

SEQ ID NO: 5206987 - DNA, 25 bp, Homo sapien
tacgccccatcctttgattagacag

SEQ ID NO: 5206988 - DNA, 25 bp, Homo sapien
cagaggacacaacccttactgggct

SEQ ID NO: 5206989 - DNA, 25 bp, Homo sapien
tgtctatgtgagtaaggacacccga

SEQ ID NO: 5206990 - DNA, 25 bp, Homo sapien
tcacagagcacactcggtaagggta

SEQ ID NO: 5206991 - DNA, 25 bp, Homo sapien
caagccgtgaacaggtaggagtcct

SEQ ID NO: 5206992 - DNA, 25 bp, Homo sapien
gaagcgaaggcactacaagtagccc

SEQ ID NO: 5206993 - DNA, 25 bp, Homo sapien
tgtgcacagcatcgagggtcagtag

SEQ ID NO: 5206994 - DNA, 25 bp, Homo sapien
tcagagagctacgagcagaaccagg

SEQ ID NO: 5206995 - DNA, 25 bp, Homo sapien
ggagaacgtggtgccacagaagcca

SEQ ID NO: 5206996 - DNA, 25 bp, Homo sapien
cagtggaagtagactaactctgtgc

SEQ ID NO: 5206997 - DNA, 25 bp, Homo sapien
caactgtttagagacctgtgcacaa

SEQ ID NO: 5206998 - DNA, 25 bp, Homo sapien
tataagtcaatctacgtgggaggag

SEQ ID NO: 5206999 - DNA, 25 bp, Homo sapien
gaaagcacctgtccactagtgtagg

SEQ ID NO: 5207000 - DNA, 25 bp, Homo sapien
cctagaaagatgcaccacggtactg

SEQ ID NO: 5207001 - DNA, 25 bp, Homo sapien
atgttaaagtgaatacttccaaatc

SEQ ID NO: 5207002 - DNA, 25 bp, Homo sapien
aaaggcagaatttggggcctatata

SEQ ID NO: 5207003 - DNA, 25 bp, Homo sapien
accaatgttaaagtgaatacttcca

SEQ ID NO: 5207004 - DNA, 25 bp, Homo sapien
aaggcagaatttggggcctatatat

SEQ ID NO: 5207005 - DNA, 25 bp, Homo sapien
gaggtagaacagatgatttctgagt

SEQ ID NO: 5207006 - DNA, 25 bp, Homo sapien
ctgagtactatatggagcagcagca

SEQ ID NO: 5207007 - DNA, 25 bp, Homo sapien
gatgatttctgagtactatatggag

SEQ ID NO: 5207008 - DNA, 25 bp, Homo sapien
ataaagaggtagaacagatgatttc

SEQ ID NO: 5207009 - DNA, 25 bp, Homo sapien
ctagaatgcaatataacaaaattac

SEQ ID NO: 5207010 - DNA, 25 bp, Homo sapien
tttggaacacaaagatgtaagaaag

SEQ ID NO: 5207011 - DNA, 25 bp, Homo sapien
cacaaagatgtaagaaagaacttac

SEQ ID NO: 5207012 - DNA, 25 bp, Homo sapien
tctacaaattattttggaacacaaa

SEQ ID NO: 5207013 - DNA, 25 bp, Homo sapien
catggtttgctgacgcagcattgcc

SEQ ID NO: 5207014 - DNA, 25 bp, Homo sapien
tcaggctccgcctcattacctggag

SEQ ID NO: 5207015 - DNA, 25 bp, Homo sapien
tgttctaaacaaattcaggctccgc

SEQ ID NO: 5207016 - DNA, 25 bp, Homo sapien
tgctgacgcagcattgccaattcta

SEQ ID NO: 5207017 - DNA, 25 bp, Homo sapien
caaaccctggagctgatcaacttca

SEQ ID NO: 5207018 - DNA, 25 bp, Homo sapien
tcaaaccctggagctgatcaacttc

SEQ ID NO: 5207019 - DNA, 25 bp, Homo sapien
ttctcaaaccctggagctgatcaac

SEQ ID NO: 5207020 - DNA, 25 bp, Homo sapien
aaccctggagctgatcaacttcaaa

SEQ ID NO: 5207021 - DNA, 25 bp, Homo sapien
tgcggaggagcggaagggtgaaggc

SEQ ID NO: 5207022 - DNA, 25 bp, Homo sapien
catgagtgcggaggagcggaagggt

SEQ ID NO: 5207023 - DNA, 25 bp, Homo sapien
aaggcatgcgcacagcacgaagctg

SEQ ID NO: 5207024 - DNA, 25 bp, Homo sapien
aagggtgaaggcatgcgcacagcac

SEQ ID NO: 5207025 - DNA, 25 bp, Homo sapien
tccgaccaccctccaggtagcgtac

SEQ ID NO: 5207026 - DNA, 25 bp, Homo sapien
aactccgaccaccctccaggtagcg

SEQ ID NO: 5207027 - DNA, 25 bp, Homo sapien
tggtgaaaactccgaccaccctcca

SEQ ID NO: 5207028 - DNA, 25 bp, Homo sapien
ctaaattattggaacattataaata

SEQ ID NO: 5207029 - DNA, 25 bp, Homo sapien
gaagggcatgacaagttatcagcgc

SEQ ID NO: 5207030 - DNA, 25 bp, Homo sapien
agttatcagcgcttctactgccaca

SEQ ID NO: 5207031 - DNA, 25 bp, Homo sapien
gcatgacaagttatcagcgcttcta

SEQ ID NO: 5207032 - DNA, 25 bp, Homo sapien
tggagaagggcatgacaagttatca

SEQ ID NO: 5207033 - DNA, 25 bp, Homo sapien
ctggcttattattttttaaagacag

SEQ ID NO: 5207034 - DNA, 25 bp, Homo sapien
gcctggctgatttttaaattttctg

SEQ ID NO: 5207035 - DNA, 25 bp, Homo sapien
aagacagggtcttgctctgtcaccc

SEQ ID NO: 5207036 - DNA, 25 bp, Homo sapien
tcactgtagccttgagctcctggcc

SEQ ID NO: 5207037 - DNA, 25 bp, Homo sapien
gatcataaaaaaatgttattcttct

SEQ ID NO: 5207038 - DNA, 25 bp, Homo sapien
gagatcataaaaaaatgttattctt

SEQ ID NO: 5207039 - DNA, 25 bp, Homo sapien
tcataaaaaaatgttattcttctct

SEQ ID NO: 5207040 - DNA, 25 bp, Homo sapien
ctggagatcataaaaaaatgttatt

SEQ ID NO: 5207041 - DNA, 25 bp, Homo sapien
tcttctgttagcatgagagggacca

SEQ ID NO: 5207042 - DNA, 25 bp, Homo sapien
gagccaccgatgctcggaacacttt

SEQ ID NO: 5207043 - DNA, 25 bp, Homo sapien
gagctgttggcgttagagccaccga

SEQ ID NO: 5207044 - DNA, 25 bp, Homo sapien
ccactgaggcagtagaaggtactcc

SEQ ID NO: 5207045 - DNA, 25 bp, Homo sapien
ttttcaccatactgaacacagagaa

SEQ ID NO: 5207046 - DNA, 25 bp, Homo sapien
cacaaacttgatcaacaggaaagct

SEQ ID NO: 5207047 - DNA, 25 bp, Homo sapien
aatctcctctaacatatacctccaa

SEQ ID NO: 5207048 - DNA, 25 bp, Homo sapien
gaaatttgcagaaatgccattacaa

SEQ ID NO: 5207049 - DNA, 25 bp, Homo sapien
gagtataatggagcctgactgccaa

SEQ ID NO: 5207050 - DNA, 25 bp, Homo sapien
gaaagtgcctgccaaacatgcttaa

SEQ ID NO: 5207051 - DNA, 25 bp, Homo sapien
aaactctgtagcaagacggtctcaa

SEQ ID NO: 5207052 - DNA, 25 bp, Homo sapien
tagaagtgaggaaactaccctggga

SEQ ID NO: 5207053 - DNA, 25 bp, Homo sapien
aactgacagcaaggtatctaaagac

SEQ ID NO: 5207054 - DNA, 25 bp, Homo sapien
gaatcgagtccatctatcatccaac

SEQ ID NO: 5207055 - DNA, 25 bp, Homo sapien
tactgcctgtttatgccaactgaca

SEQ ID NO: 5207056 - DNA, 25 bp, Homo sapien
taaggtaatcagcagagacacaagt

SEQ ID NO: 5207057 - DNA, 25 bp, Homo sapien
tccacttacaatttcccgtctgatt

SEQ ID NO: 5207058 - DNA, 25 bp, Homo sapien
agtccacttacaatttcccgtctga

SEQ ID NO: 5207059 - DNA, 25 bp, Homo sapien
cacttacaatttcccgtctgatttc

SEQ ID NO: 5207060 - DNA, 25 bp, Homo sapien
gtccacttacaatttcccgtctgat

SEQ ID NO: 5207061 - DNA, 25 bp, Homo sapien
taatgataatcttgcttagaattag

SEQ ID NO: 5207062 - DNA, 25 bp, Homo sapien
aatcttgcttagaattagacgcttt

SEQ ID NO: 5207063 - DNA, 25 bp, Homo sapien
atgataatcttgcttagaattagac

SEQ ID NO: 5207064 - DNA, 25 bp, Homo sapien
gataatcttgcttagaattagacgc

SEQ ID NO: 5207065 - DNA, 25 bp, Homo sapien
agttgtgattaattcggccgggcgc

SEQ ID NO: 5207066 - DNA, 25 bp, Homo sapien
taattagagctacgagataaaatga

SEQ ID NO: 5207067 - DNA, 25 bp, Homo sapien
tgtaatctctatacatcttcctgag

SEQ ID NO: 5207068 - DNA, 25 bp, Homo sapien
gagagttaattcttatatccctggc

SEQ ID NO: 5207069 - DNA, 25 bp, Homo sapien
cagcaagtatcttctaaagcacaaa

SEQ ID NO: 5207070 - DNA, 25 bp, Homo sapien
tacacagctaataggatccatgcca

SEQ ID NO: 5207071 - DNA, 25 bp, Homo sapien
tccaccagtgcatatcattgataat

SEQ ID NO: 5207072 - DNA, 25 bp, Homo sapien
cattgataattccagtattacacag

SEQ ID NO: 5207073 - DNA, 25 bp, Homo sapien
tttgtcttgggtaaagcaacaaggc

SEQ ID NO: 5207074 - DNA, 25 bp, Homo sapien
caaagtgcctaagtttctatgtacg

SEQ ID NO: 5207075 - DNA, 25 bp, Homo sapien
cattaagtagttgtaggtaacctca

SEQ ID NO: 5207076 - DNA, 25 bp, Homo sapien
gacattaattaacagcagtggaggg

SEQ ID NO: 5207077 - DNA, 25 bp, Homo sapien
cacaaagaaacacaataggagttga

SEQ ID NO: 5207078 - DNA, 25 bp, Homo sapien
gaaaaaattataaatgctagaagaa

SEQ ID NO: 5207079 - DNA, 25 bp, Homo sapien
gaacactgttaacaactcaaccact

SEQ ID NO: 5207080 - DNA, 25 bp, Homo sapien
atcagcctttgtgtgatatttcaaa

SEQ ID NO: 5207081 - DNA, 25 bp, Homo sapien
gtgttatcatcataaccttggccga

SEQ ID NO: 5207082 - DNA, 25 bp, Homo sapien
agcaagagaagcactccctccactt

SEQ ID NO: 5207083 - DNA, 25 bp, Homo sapien
tccctccacttccatacagtgtgtt

SEQ ID NO: 5207084 - DNA, 25 bp, Homo sapien
gccgattgaggaccccagcagaagg

SEQ ID NO: 5207085 - DNA, 25 bp, Homo sapien
cacttcacctcctcaaattcaacat

SEQ ID NO: 5207086 - DNA, 25 bp, Homo sapien
atcttccagatgtatttaggctcca

SEQ ID NO: 5207087 - DNA, 25 bp, Homo sapien
atcattgaagtgaataatagaaaac

SEQ ID NO: 5207088 - DNA, 25 bp, Homo sapien
gttgcaacaccatcttccagtcccc

SEQ ID NO: 5207089 - DNA, 25 bp, Homo sapien
gaacacttcactctggaaattatca

SEQ ID NO: 5207090 - DNA, 25 bp, Homo sapien
aacacttcactctggaaattatcac

SEQ ID NO: 5207091 - DNA, 25 bp, Homo sapien
acacttcactctggaaattatcacc

SEQ ID NO: 5207092 - DNA, 25 bp, Homo sapien
tccagggaccctgacatattaaggt

SEQ ID NO: 5207093 - DNA, 25 bp, Homo sapien
cctgacatattaaggttgttgttgc

SEQ ID NO: 5207094 - DNA, 25 bp, Homo sapien
ctgtaccatacccggttctccaggg

SEQ ID NO: 5207095 - DNA, 25 bp, Homo sapien
tcatctgagaatacccagcctgtac

SEQ ID NO: 5207096 - DNA, 25 bp, Homo sapien
agatggcgctgtgctttccctcgaa

SEQ ID NO: 5207097 - DNA, 25 bp, Homo sapien
tacttcgcggtgctcttagacttca

SEQ ID NO: 5207098 - DNA, 25 bp, Homo sapien
ggctctccaaggtctcggtacattt

SEQ ID NO: 5207099 - DNA, 25 bp, Homo sapien
gagtaattggcatgatgtccgacag

SEQ ID NO: 5207100 - DNA, 25 bp, Homo sapien
acagtggtcactacgcagtccacca

SEQ ID NO: 5207101 - DNA, 25 bp, Homo sapien
gtggtcactacgcagtccaccaagg

SEQ ID NO: 5207102 - DNA, 25 bp, Homo sapien
ggtcactacgcagtccaccaaggtt

SEQ ID NO: 5207103 - DNA, 25 bp, Homo sapien
cactacgcagtccaccaaggttgga

SEQ ID NO: 5207104 - DNA, 25 bp, Homo sapien
gagcctggagaccaagaaccggaag

SEQ ID NO: 5207105 - DNA, 25 bp, Homo sapien
ctggagaccaagaaccggaagctgg

SEQ ID NO: 5207106 - DNA, 25 bp, Homo sapien
cctggagaccaagaaccggaagctg

SEQ ID NO: 5207107 - DNA, 25 bp, Homo sapien
tgaggagcctggagaccaagaaccg

SEQ ID NO: 5207108 - DNA, 25 bp, Homo sapien
gatgtctttcaaaagagaatcttga

SEQ ID NO: 5207109 - DNA, 25 bp, Homo sapien
tcaaaagagaatcttgaagagagaa

SEQ ID NO: 5207110 - DNA, 25 bp, Homo sapien
agagaatcttgaagagagaaaacat

SEQ ID NO: 5207111 - DNA, 25 bp, Homo sapien
ctttttagatgtctttcaaaagaga

SEQ ID NO: 5207112 - DNA, 25 bp, Homo sapien
tcagaaagactaaccctaagtggtg

SEQ ID NO: 5207113 - DNA, 25 bp, Homo sapien
tccagatcgagcaagtgaagatgcc

SEQ ID NO: 5207114 - DNA, 25 bp, Homo sapien
gaagatgccgaggtttgagtaaccc

SEQ ID NO: 5207115 - DNA, 25 bp, Homo sapien
caacatccacggtgatgcctggctt

SEQ ID NO: 5207116 - DNA, 25 bp, Homo sapien
tgactctggaatacaggcacggcaa

SEQ ID NO: 5207117 - DNA, 25 bp, Homo sapien
tctgactctggaatacaggcacggc

SEQ ID NO: 5207118 - DNA, 25 bp, Homo sapien
tggaatacaggcacggcaaactgta

SEQ ID NO: 5207119 - DNA, 25 bp, Homo sapien
ctctggaatacaggcacggcaaact

SEQ ID NO: 5207120 - DNA, 25 bp, Homo sapien
tggttctccatgcaatttcacatac

SEQ ID NO: 5207121 - DNA, 25 bp, Homo sapien
caggaatggttctccatgcaatttc

SEQ ID NO: 5207122 - DNA, 25 bp, Homo sapien
tgtacaggaatggttctccatgcaa

SEQ ID NO: 5207123 - DNA, 25 bp, Homo sapien
cttatgtacaggaatggttctccat

SEQ ID NO: 5207124 - DNA, 25 bp, Homo sapien
tttccccacatgcaaaagcaaattt

SEQ ID NO: 5207125 - DNA, 25 bp, Homo sapien
cttttccccacatgcaaaagcaaat

SEQ ID NO: 5207126 - DNA, 25 bp, Homo sapien
atcttttccccacatgcaaaagcaa

SEQ ID NO: 5207127 - DNA, 25 bp, Homo sapien
tcatcttttccccacatgcaaaagc

SEQ ID NO: 5207128 - DNA, 25 bp, Homo sapien
gggttatgctcattgagaatcacaa

SEQ ID NO: 5207129 - DNA, 25 bp, Homo sapien
ggggttatgctcattgagaatcaca

SEQ ID NO: 5207130 - DNA, 25 bp, Homo sapien
tcatctttaagagtccccagaaact

SEQ ID NO: 5207131 - DNA, 25 bp, Homo sapien
gcccaattttctcttgacaacacaa

SEQ ID NO: 5207132 - DNA, 25 bp, Homo sapien
aacttctcagtatggtccctggagc

SEQ ID NO: 5207133 - DNA, 25 bp, Homo sapien
tccccagaaacttctcagtatggtc

SEQ ID NO: 5207134 - DNA, 25 bp, Homo sapien
tacaattgtatcatggtacatccag

SEQ ID NO: 5207135 - DNA, 25 bp, Homo sapien
tcagcaacacggatttctgttatta

SEQ ID NO: 5207136 - DNA, 25 bp, Homo sapien
ctttactgtggtttcagcaacacgg

SEQ ID NO: 5207137 - DNA, 25 bp, Homo sapien
caattgtatcatggtacatccagac

SEQ ID NO: 5207138 - DNA, 25 bp, Homo sapien
caactacctcatgtggcttcttggg

SEQ ID NO: 5207139 - DNA, 25 bp, Homo sapien
tgtattttgatgacacatgagccca

SEQ ID NO: 5207140 - DNA, 25 bp, Homo sapien
tgcttaagcccctggtaaattctgt

SEQ ID NO: 5207141 - DNA, 25 bp, Homo sapien
tgtgttctccaagtagactacagtc

SEQ ID NO: 5207142 - DNA, 25 bp, Homo sapien
cttaggcccttcatgctcaaagaga

SEQ ID NO: 5207143 - DNA, 25 bp, Homo sapien
taggcccttcatgctcaaagagaat

SEQ ID NO: 5207144 - DNA, 25 bp, Homo sapien
ccttcatgctcaaagagaatcctca

SEQ ID NO: 5207145 - DNA, 25 bp, Homo sapien
tacccttaggcccttcatgctcaaa

SEQ ID NO: 5207146 - DNA, 25 bp, Homo sapien
cctggcaaaacagtgagacctggtt

SEQ ID NO: 5207147 - DNA, 25 bp, Homo sapien
agcctggcaaaacagtgagacctgg

SEQ ID NO: 5207148 - DNA, 25 bp, Homo sapien
gcctggcaaaacagtgagacctggt

SEQ ID NO: 5207149 - DNA, 25 bp, Homo sapien
ctggcaaaacagtgagacctggttt

SEQ ID NO: 5207150 - DNA, 25 bp, Homo sapien
ccacccgaatattgtgcttttcgga

SEQ ID NO: 5207151 - DNA, 25 bp, Homo sapien
cttaaaaaacggcgcaccacgagat

SEQ ID NO: 5207152 - DNA, 25 bp, Homo sapien
ccgaatattgtgcttttcggaccgg

SEQ ID NO: 5207153 - DNA, 25 bp, Homo sapien
tcccacccgaatattgtgcttttcg

SEQ ID NO: 5207154 - DNA, 25 bp, Homo sapien
tgaaaggacttgttttggagagccc

SEQ ID NO: 5207155 - DNA, 25 bp, Homo sapien
gttgaaaggacttgttttggagagc

SEQ ID NO: 5207156 - DNA, 25 bp, Homo sapien
tttggagagcccgttttctcttctg

SEQ ID NO: 5207157 - DNA, 25 bp, Homo sapien
ttgttgaaaggacttgttttggaga

SEQ ID NO: 5207158 - DNA, 25 bp, Homo sapien
tgtcccggatcagctactccacatt

SEQ ID NO: 5207159 - DNA, 25 bp, Homo sapien
agctactccacatttacatgagtgg

SEQ ID NO: 5207160 - DNA, 25 bp, Homo sapien
ttgtcccggatcagctactccacat

SEQ ID NO: 5207161 - DNA, 25 bp, Homo sapien
gctactccacatttacatgagtggc

SEQ ID NO: 5207162 - DNA, 25 bp, Homo sapien
atccaactactcaccaggctcaaca

SEQ ID NO: 5207163 - DNA, 25 bp, Homo sapien
agatcaaatgagatggggcgctttc

SEQ ID NO: 5207164 - DNA, 25 bp, Homo sapien
gatcaaatgagatggggcgctttca

SEQ ID NO: 5207165 - DNA, 25 bp, Homo sapien
caactactcaccaggctcaacactg

SEQ ID NO: 5207166 - DNA, 25 bp, Homo sapien
gaactgacttcgtgtgaaagacaaa

SEQ ID NO: 5207167 - DNA, 25 bp, Homo sapien
agcagggctctctcatctgtgttga

SEQ ID NO: 5207168 - DNA, 25 bp, Homo sapien
ttagatccagaagtcgactgaggca

SEQ ID NO: 5207169 - DNA, 25 bp, Homo sapien
gcaactagaacttctaatctctcag

SEQ ID NO: 5207170 - DNA, 25 bp, Homo sapien
ttgggccccctcttgtcatctattt

SEQ ID NO: 5207171 - DNA, 25 bp, Homo sapien
gttgggccccctcttgtcatctatt

SEQ ID NO: 5207172 - DNA, 25 bp, Homo sapien
gtggtgtgtacacactctgcttcct

SEQ ID NO: 5207173 - DNA, 25 bp, Homo sapien
cttttatggtgggtggtgtgtacac

SEQ ID NO: 5207174 - DNA, 25 bp, Homo sapien
gcttcctttgcttaggggatgcatt

SEQ ID NO: 5207175 - DNA, 25 bp, Homo sapien
gtgggtggtgtgtacacactctgct

SEQ ID NO: 5207176 - DNA, 25 bp, Homo sapien
cactcatgacaacccgaaacagtac

SEQ ID NO: 5207177 - DNA, 25 bp, Homo sapien
ctggcctctcatgcagttgaaactg

SEQ ID NO: 5207178 - DNA, 25 bp, Homo sapien
ttgagtatgatcagccactgggccc

SEQ ID NO: 5207179 - DNA, 25 bp, Homo sapien
gaaactgagctggacaaattgagta

SEQ ID NO: 5207180 - DNA, 25 bp, Homo sapien
tgctcagctggcctctcatgcagtt

SEQ ID NO: 5207181 - DNA, 25 bp, Homo sapien
acacttgacgttcaaaacctggaat

SEQ ID NO: 5207182 - DNA, 25 bp, Homo sapien
catctgaaaacacttgacgttcaaa

SEQ ID NO: 5207183 - DNA, 25 bp, Homo sapien
tcaaaacctggaatattctctgact

SEQ ID NO: 5207184 - DNA, 25 bp, Homo sapien
aaggttctaatgactccagagctca

SEQ ID NO: 5207185 - DNA, 25 bp, Homo sapien
cttcttccttagctgaggttgacta

SEQ ID NO: 5207186 - DNA, 25 bp, Homo sapien
tcttgccaggtttgcaaaggttcta

SEQ ID NO: 5207187 - DNA, 25 bp, Homo sapien
gaggttgactatatcttgccaggtt

SEQ ID NO: 5207188 - DNA, 25 bp, Homo sapien
cttcttcagggaatgctgattcatt

SEQ ID NO: 5207189 - DNA, 25 bp, Homo sapien
ttcttcttcagggaatgctgattca

SEQ ID NO: 5207190 - DNA, 25 bp, Homo sapien
ttaatggtcccgctgctcctctctt

SEQ ID NO: 5207191 - DNA, 25 bp, Homo sapien
gctcctctctttcattggtgccttc

SEQ ID NO: 5207192 - DNA, 25 bp, Homo sapien
gacttccaggatgtgcatagctact

SEQ ID NO: 5207193 - DNA, 25 bp, Homo sapien
tgcttctggaagtcaagcagtggaa

SEQ ID NO: 5207194 - DNA, 25 bp, Homo sapien
gtggaattccatggtatactcagaa

SEQ ID NO: 5207195 - DNA, 25 bp, Homo sapien
tctaaagttcagtcaaggagacttc

SEQ ID NO: 5207196 - DNA, 25 bp, Homo sapien
tattctttaattataagtgatgtgg

SEQ ID NO: 5207197 - DNA, 25 bp, Homo sapien
ataagtgatgtggaacaatgtgtac

SEQ ID NO: 5207198 - DNA, 25 bp, Homo sapien
gcttattctttaattataagtgatg

SEQ ID NO: 5207199 - DNA, 25 bp, Homo sapien
taattataagtgatgtggaacaatg

SEQ ID NO: 5207200 - DNA, 25 bp, Homo sapien
gttgttagaatgcaaaccttatcag

SEQ ID NO: 5207201 - DNA, 25 bp, Homo sapien
gctctggcagtattaaagttagaac

SEQ ID NO: 5207202 - DNA, 25 bp, Homo sapien
catcaaggattaagctctggcagta

SEQ ID NO: 5207203 - DNA, 25 bp, Homo sapien
caaaccttatcagtaggacatcaag

SEQ ID NO: 5207204 - DNA, 25 bp, Homo sapien
gatatttctctttaagctaaaccca

SEQ ID NO: 5207205 - DNA, 25 bp, Homo sapien
tctttaagctaaacccacacacaca

SEQ ID NO: 5207206 - DNA, 25 bp, Homo sapien
tatttctctttaagctaaacccaca

SEQ ID NO: 5207207 - DNA, 25 bp, Homo sapien
ttctctttaagctaaacccacacac

SEQ ID NO: 5207208 - DNA, 25 bp, Homo sapien
ctagaatagtcatttatacatgtgg

SEQ ID NO: 5207209 - DNA, 25 bp, Homo sapien
actaaggaaaatggttgtcaactca

SEQ ID NO: 5207210 - DNA, 25 bp, Homo sapien
ggtatgcttatcaacgggtttcaca

SEQ ID NO: 5207211 - DNA, 25 bp, Homo sapien
gaatcttgatattaagatcccacag

SEQ ID NO: 5207212 - DNA, 25 bp, Homo sapien
caccggggcctgctgtggggtgggt

SEQ ID NO: 5207213 - DNA, 25 bp, Homo sapien
cggggcctgctgtggggtgggtggt

SEQ ID NO: 5207214 - DNA, 25 bp, Homo sapien
accggggcctgctgtggggtgggtg

SEQ ID NO: 5207215 - DNA, 25 bp, Homo sapien
tctaaagtgcttcaggaggtaatcc

SEQ ID NO: 5207216 - DNA, 25 bp, Homo sapien
caacgtggcatcatgatggaatcgg

SEQ ID NO: 5207217 - DNA, 25 bp, Homo sapien
tgttgtaagagaaggctcagattcc

SEQ ID NO: 5207218 - DNA, 25 bp, Homo sapien
tttccaagctcgagtagaagcacag

SEQ ID NO: 5207219 - DNA, 25 bp, Homo sapien
gaataaaagtctatggctcctaagg

SEQ ID NO: 5207220 - DNA, 25 bp, Homo sapien
taatccacaattccgcaggtaggtc

SEQ ID NO: 5207221 - DNA, 25 bp, Homo sapien
tagctcgagcttgttatcataggca

SEQ ID NO: 5207222 - DNA, 25 bp, Homo sapien
gagactcactcatctactgcaaggc

SEQ ID NO: 5207223 - DNA, 25 bp, Homo sapien
tgtactctttgactagcatgcgccc

SEQ ID NO: 5207224 - DNA, 25 bp, Homo sapien
catgttttacagtagacccttgaac

SEQ ID NO: 5207225 - DNA, 25 bp, Homo sapien
tgagctagtaactctggccaaataa

SEQ ID NO: 5207226 - DNA, 25 bp, Homo sapien
caacatagaattggattgggccatt

SEQ ID NO: 5207227 - DNA, 25 bp, Homo sapien
ttctcattgtacttctcagggctga

SEQ ID NO: 5207228 - DNA, 25 bp, Homo sapien
ttggtttttggctggtatcaccttc

SEQ ID NO: 5207229 - DNA, 25 bp, Homo sapien
tttggctggtatcaccttctgactc

SEQ ID NO: 5207230 - DNA, 25 bp, Homo sapien
cctgtcctgacattctacacagcca

SEQ ID NO: 5207231 - DNA, 25 bp, Homo sapien
cacagatgcaatcctactgctaatc

SEQ ID NO: 5207232 - DNA, 25 bp, Homo sapien
atgcaatcctactgctaatcagcac

SEQ ID NO: 5207233 - DNA, 25 bp, Homo sapien
gatgcaatcctactgctaatcagca

SEQ ID NO: 5207234 - DNA, 25 bp, Homo sapien
cagatgcaatcctactgctaatcag

SEQ ID NO: 5207235 - DNA, 25 bp, Homo sapien
ctgccccgttaccacactggctgtc

SEQ ID NO: 5207236 - DNA, 25 bp, Homo sapien
aggctttcggacacatcactatgta

SEQ ID NO: 5207237 - DNA, 25 bp, Homo sapien
tatgtatgcctctgcttttccttgt

SEQ ID NO: 5207238 - DNA, 25 bp, Homo sapien
cattatctttgctgaagggtttctg

SEQ ID NO: 5207239 - DNA, 25 bp, Homo sapien
cctccctgatctggtatccataaga

SEQ ID NO: 5207240 - DNA, 25 bp, Homo sapien
tgatctggtatccataagaaaacat

SEQ ID NO: 5207241 - DNA, 25 bp, Homo sapien
ccctgatctggtatccataagaaaa

SEQ ID NO: 5207242 - DNA, 25 bp, Homo sapien
cctgatctggtatccataagaaaac

SEQ ID NO: 5207243 - DNA, 25 bp, Homo sapien
tgggttcttgtcaaatctcagatca

SEQ ID NO: 5207244 - DNA, 25 bp, Homo sapien
ctgggttcttgtcaaatctcagatc

SEQ ID NO: 5207245 - DNA, 25 bp, Homo sapien
gttcttgtcaaatctcagatcaatc

SEQ ID NO: 5207246 - DNA, 25 bp, Homo sapien
gggttcttgtcaaatctcagatcaa

SEQ ID NO: 5207247 - DNA, 25 bp, Homo sapien
caggttggaactcattttaaatcta

SEQ ID NO: 5207248 - DNA, 25 bp, Homo sapien
cattttaaatctaacagcagtctca

SEQ ID NO: 5207249 - DNA, 25 bp, Homo sapien
ctcttcctacccaggttggaactca

SEQ ID NO: 5207250 - DNA, 25 bp, Homo sapien
ggaactcattttaaatctaacagca

SEQ ID NO: 5207251 - DNA, 25 bp, Homo sapien
tttgctgtatcttgtggtaagactt

SEQ ID NO: 5207252 - DNA, 25 bp, Homo sapien
ttaattgattgcgtttgagtagtcc

SEQ ID NO: 5207253 - DNA, 25 bp, Homo sapien
ctttagagcctcttttcgcagtttt

SEQ ID NO: 5207254 - DNA, 25 bp, Homo sapien
attgattgcgtttgagtagtcctcc

SEQ ID NO: 5207255 - DNA, 25 bp, Homo sapien
ctggaagtcagaagatttgagattg

SEQ ID NO: 5207256 - DNA, 25 bp, Homo sapien
aatactggataatacgaagattttg

SEQ ID NO: 5207257 - DNA, 25 bp, Homo sapien
aagtcagaagatttgagattgacag

SEQ ID NO: 5207258 - DNA, 25 bp, Homo sapien
catagtagtgtagttctgactggaa

SEQ ID NO: 5207259 - DNA, 25 bp, Homo sapien
aaagatctgcagagatcctgtcagc

SEQ ID NO: 5207260 - DNA, 25 bp, Homo sapien
aaaagatctgcagagatcctgtcag

SEQ ID NO: 5207261 - DNA, 25 bp, Homo sapien
aaaatccttgcctttgagtactgct

SEQ ID NO: 5207262 - DNA, 25 bp, Homo sapien
tgtccaagcccttatttctatcaga

SEQ ID NO: 5207263 - DNA, 25 bp, Homo sapien
tcagacgtttgaacagctgggattc

SEQ ID NO: 5207264 - DNA, 25 bp, Homo sapien
agttcagccagatggaacttgtcca

SEQ ID NO: 5207265 - DNA, 25 bp, Homo sapien
caagtctttgtgattgtaaacagtg

SEQ ID NO: 5207266 - DNA, 25 bp, Homo sapien
gtctttgtgattgtaaacagtgccg

SEQ ID NO: 5207267 - DNA, 25 bp, Homo sapien
tttgtgattgtaaacagtgccgcaa

SEQ ID NO: 5207268 - DNA, 25 bp, Homo sapien
tcgttgatgggaatttgggtggttc

SEQ ID NO: 5207269 - DNA, 25 bp, Homo sapien
ccttggctaattggcagaggatatc

SEQ ID NO: 5207270 - DNA, 25 bp, Homo sapien
gagacttggatgaattttcagccta

SEQ ID NO: 5207271 - DNA, 25 bp, Homo sapien
gagtcgtcaggtttgagacttggat

SEQ ID NO: 5207272 - DNA, 25 bp, Homo sapien
tctgctccttggctaattggcagag

SEQ ID NO: 5207273 - DNA, 25 bp, Homo sapien
ctacaagtgtccacttctgagttca

SEQ ID NO: 5207274 - DNA, 25 bp, Homo sapien
gactacaagtgtccacttctgagtt

SEQ ID NO: 5207275 - DNA, 25 bp, Homo sapien
tgactacaagtgtccacttctgagt

SEQ ID NO: 5207276 - DNA, 25 bp, Homo sapien
ttgactacaagtgtccacttctgag

SEQ ID NO: 5207277 - DNA, 25 bp, Homo sapien
acttctcttgcctggatcaacgtga

SEQ ID NO: 5207278 - DNA, 25 bp, Homo sapien
tgcctggatcaacgtgactcttggt

SEQ ID NO: 5207279 - DNA, 25 bp, Homo sapien
tgttctgtttcggagggtcccgtgc

SEQ ID NO: 5207280 - DNA, 25 bp, Homo sapien
gagggtcccgtgcacttctcttgcc

SEQ ID NO: 5207281 - DNA, 25 bp, Homo sapien
tgcttaaactgagaacctgcagacc

SEQ ID NO: 5207282 - DNA, 25 bp, Homo sapien
cagtgcttgggatggcataatatca

SEQ ID NO: 5207283 - DNA, 25 bp, Homo sapien
tatcaaatgacctttttgccattgc

SEQ ID NO: 5207284 - DNA, 25 bp, Homo sapien
tgccattgcatgctttggcacttgt

SEQ ID NO: 5207285 - DNA, 25 bp, Homo sapien
tcacttatatgcagtagtttttcct

SEQ ID NO: 5207286 - DNA, 25 bp, Homo sapien
gaaatcaccgacatccgtggaacct

SEQ ID NO: 5207287 - DNA, 25 bp, Homo sapien
caccgacatccgtggaacctagaaa

SEQ ID NO: 5207288 - DNA, 25 bp, Homo sapien
tgaaggaaatcaccgacatccgtgg

SEQ ID NO: 5207289 - DNA, 25 bp, Homo sapien
tcaactctcctgaaggaaatcaccg

SEQ ID NO: 5207290 - DNA, 25 bp, Homo sapien
catttgaaggttactggctctcgaa

SEQ ID NO: 5207291 - DNA, 25 bp, Homo sapien
gctttagcagacttaaatggagcac

SEQ ID NO: 5207292 - DNA, 25 bp, Homo sapien
agtcttactttgatgggcctccagc

SEQ ID NO: 5207293 - DNA, 25 bp, Homo sapien
ggctctcgaactcttcttctgcaag

SEQ ID NO: 5207294 - DNA, 25 bp, Homo sapien
aatttattcccctcagtgagatact

SEQ ID NO: 5207295 - DNA, 25 bp, Homo sapien
gcctccattagtggggctatcaaca

SEQ ID NO: 5207296 - DNA, 25 bp, Homo sapien
cccctcagtgagatactgtatataa

SEQ ID NO: 5207297 - DNA, 25 bp, Homo sapien
gtatcacctgatggccttagtctgc

SEQ ID NO: 5207298 - DNA, 25 bp, Homo sapien
tctgcaaactcgaagtgcaagaatg

SEQ ID NO: 5207299 - DNA, 25 bp, Homo sapien
tggaaggagcagtcttctctatttt

SEQ ID NO: 5207300 - DNA, 25 bp, Homo sapien
acatccctctgcaaactcgaagtgc

SEQ ID NO: 5207301 - DNA, 25 bp, Homo sapien
caaactcgaagtgcaagaatggaag

SEQ ID NO: 5207302 - DNA, 25 bp, Homo sapien
tatcgttgactttgttggagatcag

SEQ ID NO: 5207303 - DNA, 25 bp, Homo sapien
gactgttcatgctcttttttgattc

SEQ ID NO: 5207304 - DNA, 25 bp, Homo sapien
cattgtttgttatcgttgactttgt

SEQ ID NO: 5207305 - DNA, 25 bp, Homo sapien
cagatggttataactttattttggg

SEQ ID NO: 5207306 - DNA, 25 bp, Homo sapien
tttatacatgttgtagtacacatca

SEQ ID NO: 5207307 - DNA, 25 bp, Homo sapien
caatacctttttactgcagccacaa

SEQ ID NO: 5207308 - DNA, 25 bp, Homo sapien
taagatttatacatgttgtagtaca

SEQ ID NO: 5207309 - DNA, 25 bp, Homo sapien
ctagctctttgaaactatgcaatac

SEQ ID NO: 5207310 - DNA, 25 bp, Homo sapien
tatatcttgtttctttgatttctga

SEQ ID NO: 5207311 - DNA, 25 bp, Homo sapien
tctgattttgtagccaatcagccat

SEQ ID NO: 5207312 - DNA, 25 bp, Homo sapien
gatttctgattttgtagccaatcag

SEQ ID NO: 5207313 - DNA, 25 bp, Homo sapien
atatcttgtttctttgatttctgat

SEQ ID NO: 5207314 - DNA, 25 bp, Homo sapien
ccagtgagtggtctcttggaatgga

SEQ ID NO: 5207315 - DNA, 25 bp, Homo sapien
accttctcctttgtctaggtgtgta

SEQ ID NO: 5207316 - DNA, 25 bp, Homo sapien
acagcagatggaccaccaagaatgc

SEQ ID NO: 5207317 - DNA, 25 bp, Homo sapien
gtgtgtatcagacaccctggtgcat

SEQ ID NO: 5207318 - DNA, 25 bp, Homo sapien
tccccagttgttgcttcctcacagg

SEQ ID NO: 5207319 - DNA, 25 bp, Homo sapien
tcctcacagggccttataggggcct

SEQ ID NO: 5207320 - DNA, 25 bp, Homo sapien
ttttgatgcacagccctctgatagg

SEQ ID NO: 5207321 - DNA, 25 bp, Homo sapien
gggtatccatcttagtctcagcttt

SEQ ID NO: 5207322 - DNA, 25 bp, Homo sapien
tgcattttgcttggtcgtatcctgt

SEQ ID NO: 5207323 - DNA, 25 bp, Homo sapien
tcgacttggcatttcagcatttgtc

SEQ ID NO: 5207324 - DNA, 25 bp, Homo sapien
cgtatcctgtgcgtttcgacttggc

SEQ ID NO: 5207325 - DNA, 25 bp, Homo sapien
gtcaggcacagattgggatccacat

SEQ ID NO: 5207326 - DNA, 25 bp, Homo sapien
ggtccagtgttatgaccaccagcat

SEQ ID NO: 5207327 - DNA, 25 bp, Homo sapien
tggtccagtgttatgaccaccagca

SEQ ID NO: 5207328 - DNA, 25 bp, Homo sapien
gtgccccgtactgccattccattga

SEQ ID NO: 5207329 - DNA, 25 bp, Homo sapien
gccccgtactgccattccattgaat

SEQ ID NO: 5207330 - DNA, 25 bp, Homo sapien
ctgagtgccccgtactgccattcca

SEQ ID NO: 5207331 - DNA, 25 bp, Homo sapien
gagtgccccgtactgccattccatt

SEQ ID NO: 5207332 - DNA, 25 bp, Homo sapien
gctcttcggactcccctttgcctga

SEQ ID NO: 5207333 - DNA, 25 bp, Homo sapien
cttgatcactctgtgctcttcggac

SEQ ID NO: 5207334 - DNA, 25 bp, Homo sapien
tcttgatcactctgtgctcttcgga

SEQ ID NO: 5207335 - DNA, 25 bp, Homo sapien
ttaagtagttcttcatgggaagtac

SEQ ID NO: 5207336 - DNA, 25 bp, Homo sapien
atatccttggactgagcaaatgatt

SEQ ID NO: 5207337 - DNA, 25 bp, Homo sapien
tgtcattttaagtagttcttcatgg

SEQ ID NO: 5207338 - DNA, 25 bp, Homo sapien
tggactgagcaaatgattacttttg

SEQ ID NO: 5207339 - DNA, 25 bp, Homo sapien
gtgagtggctctgacaaattctgct

SEQ ID NO: 5207340 - DNA, 25 bp, Homo sapien
tccgtgagtggctctgacaaattct

SEQ ID NO: 5207341 - DNA, 25 bp, Homo sapien
cgtgagtggctctgacaaattctgc

SEQ ID NO: 5207342 - DNA, 25 bp, Homo sapien
tgagtggctctgacaaattctgctg

SEQ ID NO: 5207343 - DNA, 25 bp, Homo sapien
gaatgcgaattgtctcagcaatgtc

SEQ ID NO: 5207344 - DNA, 25 bp, Homo sapien
ctgataattggatgggctggtggac

SEQ ID NO: 5207345 - DNA, 25 bp, Homo sapien
ggccatgtaggcaggaatgcgaatt

SEQ ID NO: 5207346 - DNA, 25 bp, Homo sapien
aggcaggaatgcgaattgtctcagc

SEQ ID NO: 5207347 - DNA, 25 bp, Homo sapien
aagcaccagaacatcttgtactcct

SEQ ID NO: 5207348 - DNA, 25 bp, Homo sapien
tctgtacccgtgtcaagtccaagca

SEQ ID NO: 5207349 - DNA, 25 bp, Homo sapien
cccgtgtcaagtccaagcaccagaa

SEQ ID NO: 5207350 - DNA, 25 bp, Homo sapien
tttctccaatctctgtacccgtgtc

SEQ ID NO: 5207351 - DNA, 25 bp, Homo sapien
tctgtctctgcctttgtctttgatc

SEQ ID NO: 5207352 - DNA, 25 bp, Homo sapien
tctgcctttgtctttgatcataggc

SEQ ID NO: 5207353 - DNA, 25 bp, Homo sapien
tgcctttgtctttgatcataggcat

SEQ ID NO: 5207354 - DNA, 25 bp, Homo sapien
gtctctgcctttgtctttgatcata

SEQ ID NO: 5207355 - DNA, 25 bp, Homo sapien
tgttcctgctttgtcagcgttacca

SEQ ID NO: 5207356 - DNA, 25 bp, Homo sapien
ctgttcctgctttgtcagcgttacc

SEQ ID NO: 5207357 - DNA, 25 bp, Homo sapien
gttcctgctttgtcagcgttaccat

SEQ ID NO: 5207358 - DNA, 25 bp, Homo sapien
cctgcacttccaacatgtggaagcc

SEQ ID NO: 5207359 - DNA, 25 bp, Homo sapien
cagtttaagggtgtcaacttgtgtt

SEQ ID NO: 5207360 - DNA, 25 bp, Homo sapien
ctggagggctgcactagacagggaa

SEQ ID NO: 5207361 - DNA, 25 bp, Homo sapien
gcctgtccctgacactcagtttaag

SEQ ID NO: 5207362 - DNA, 25 bp, Homo sapien
gctgcactagacagggaatattctt

SEQ ID NO: 5207363 - DNA, 25 bp, Homo sapien
agtaaatttgggcatctttctctcc

SEQ ID NO: 5207364 - DNA, 25 bp, Homo sapien
ttcctcagtaaatttgggcatcttt

SEQ ID NO: 5207365 - DNA, 25 bp, Homo sapien
ctcagtaaatttgggcatctttctc

SEQ ID NO: 5207366 - DNA, 25 bp, Homo sapien
taaatttgggcatctttctctccct

SEQ ID NO: 5207367 - DNA, 25 bp, Homo sapien
cctcttgtttgactgtcctgatatg

SEQ ID NO: 5207368 - DNA, 25 bp, Homo sapien
cccacccacttgtagggacacctct

SEQ ID NO: 5207369 - DNA, 25 bp, Homo sapien
ccacccacttgtagggacacctctt

SEQ ID NO: 5207370 - DNA, 25 bp, Homo sapien
cttgtttgactgtcctgatatgagc

SEQ ID NO: 5207371 - DNA, 25 bp, Homo sapien
gctgtattagtcaaggatatgtgcc

SEQ ID NO: 5207372 - DNA, 25 bp, Homo sapien
ccattttctcaggagtctgcttcca

SEQ ID NO: 5207373 - DNA, 25 bp, Homo sapien
tacatgtcaggctagccatgcttgg

SEQ ID NO: 5207374 - DNA, 25 bp, Homo sapien
ggagctctgggttccataatccatt

SEQ ID NO: 5207375 - DNA, 25 bp, Homo sapien
cacagagccctgaatagctgcagca

SEQ ID NO: 5207376 - DNA, 25 bp, Homo sapien
cagcaacttcgtgacttgagaggca

SEQ ID NO: 5207377 - DNA, 25 bp, Homo sapien
tctgaatttcacagagccctgaata

SEQ ID NO: 5207378 - DNA, 25 bp, Homo sapien
gaatagctgcagcaacttcgtgact

SEQ ID NO: 5207379 - DNA, 25 bp, Homo sapien
cctactgctatggtacaggaactgc

SEQ ID NO: 5207380 - DNA, 25 bp, Homo sapien
tcctactgctatggtacaggaactg

SEQ ID NO: 5207381 - DNA, 25 bp, Homo sapien
atctcctactgctatggtacaggaa

SEQ ID NO: 5207382 - DNA, 25 bp, Homo sapien
cttgatctcctactgctatggtaca

SEQ ID NO: 5207383 - DNA, 25 bp, Homo sapien
gggaaaggcgtggaggacgctgcct

SEQ ID NO: 5207384 - DNA, 25 bp, Homo sapien
ttaggttgacgtggcggtgtgcgcg

SEQ ID NO: 5207385 - DNA, 25 bp, Homo sapien
aacccggagctgagggaactgccct

SEQ ID NO: 5207386 - DNA, 25 bp, Homo sapien
aggtttaggttgacgtggcggtgtg

SEQ ID NO: 5207387 - DNA, 25 bp, Homo sapien
cgcggggtcgcttcctgtagctact

SEQ ID NO: 5207388 - DNA, 25 bp, Homo sapien
agccgcggcgcacgggattggtgag

SEQ ID NO: 5207389 - DNA, 25 bp, Homo sapien
cggtaggttcctcacgcgccggtct

SEQ ID NO: 5207390 - DNA, 25 bp, Homo sapien
aagcaccgcgtgcaggagagaagca

SEQ ID NO: 5207391 - DNA, 25 bp, Homo sapien
aagcgccaggtaaatgcaaggcgca

SEQ ID NO: 5207392 - DNA, 25 bp, Homo sapien
aaatgcaaggcgcaagctttcgcat

SEQ ID NO: 5207393 - DNA, 25 bp, Homo sapien
gggataagatgtttctcgcccaggg

SEQ ID NO: 5207394 - DNA, 25 bp, Homo sapien
tgtggccgaactgcccgtggcccga

SEQ ID NO: 5207395 - DNA, 25 bp, Homo sapien
tgatgtagagattaacaagtatcca

SEQ ID NO: 5207396 - DNA, 25 bp, Homo sapien
tagagattaacaagtatccaaacaa

SEQ ID NO: 5207397 - DNA, 25 bp, Homo sapien
tcagaaaaagagagggcatagtctc

SEQ ID NO: 5207398 - DNA, 25 bp, Homo sapien
aagagagggcatagtctcaatcaac

SEQ ID NO: 5207399 - DNA, 25 bp, Homo sapien
tggtcttcagctcatttctaatact

SEQ ID NO: 5207400 - DNA, 25 bp, Homo sapien
tttctaatacttccttttcattcca

SEQ ID NO: 5207401 - DNA, 25 bp, Homo sapien
ctgtgaatggtcttcagctcatttc

SEQ ID NO: 5207402 - DNA, 25 bp, Homo sapien
tctaatacttccttttcattccaca

SEQ ID NO: 5207403 - DNA, 25 bp, Homo sapien
acattaagattcactgctggttcca

SEQ ID NO: 5207404 - DNA, 25 bp, Homo sapien
taatatgcaaatttgagaacttctg

SEQ ID NO: 5207405 - DNA, 25 bp, Homo sapien
gaacattaagattcactgctggttc

SEQ ID NO: 5207406 - DNA, 25 bp, Homo sapien
tctacattacttcaagggtgaatca

SEQ ID NO: 5207407 - DNA, 25 bp, Homo sapien
gcagttttggacactccaagtaaac

SEQ ID NO: 5207408 - DNA, 25 bp, Homo sapien
aaatggccatatacactatcagaaa

SEQ ID NO: 5207409 - DNA, 25 bp, Homo sapien
gtgcccactaaaatggccatataca

SEQ ID NO: 5207410 - DNA, 25 bp, Homo sapien
tttggacactccaagtaaactgtaa

SEQ ID NO: 5207411 - DNA, 25 bp, Homo sapien
gtcatactttttccgtagatcttca

SEQ ID NO: 5207412 - DNA, 25 bp, Homo sapien
ccagctttcatactggccaccttga

SEQ ID NO: 5207413 - DNA, 25 bp, Homo sapien
aaatcataacgataatagttccagc

SEQ ID NO: 5207414 - DNA, 25 bp, Homo sapien
tagatcttcatctttgagtacttca

SEQ ID NO: 5207415 - DNA, 25 bp, Homo sapien
tttccaatgttatgatttcaggatc

SEQ ID NO: 5207416 - DNA, 25 bp, Homo sapien
tctttccaatgttatgatttcagga

SEQ ID NO: 5207417 - DNA, 25 bp, Homo sapien
ttctttccaatgttatgatttcagg

SEQ ID NO: 5207418 - DNA, 25 bp, Homo sapien
ctcttctttccaatgttatgatttc

SEQ ID NO: 5207419 - DNA, 25 bp, Homo sapien
ccgccccatggtgagattattataa

SEQ ID NO: 5207420 - DNA, 25 bp, Homo sapien
aattactccttgatttacgggctgc

SEQ ID NO: 5207421 - DNA, 25 bp, Homo sapien
cctatggcaggtagagccttatgaa

SEQ ID NO: 5207422 - DNA, 25 bp, Homo sapien
ttgaagccttgaacacctcaaagtc

SEQ ID NO: 5207423 - DNA, 25 bp, Homo sapien
cagttctccagaattaacagcagca

SEQ ID NO: 5207424 - DNA, 25 bp, Homo sapien
aatcatggcagtgtgaacagcctgg

SEQ ID NO: 5207425 - DNA, 25 bp, Homo sapien
aaatttacaaaccacagttctccag

SEQ ID NO: 5207426 - DNA, 25 bp, Homo sapien
gctaaatcatggcagtgtgaacagc

SEQ ID NO: 5207427 - DNA, 25 bp, Homo sapien
aaactagtaatgaggatgtgaaaaa

SEQ ID NO: 5207428 - DNA, 25 bp, Homo sapien
taaaactagtaatgaggatgtgaaa

SEQ ID NO: 5207429 - DNA, 25 bp, Homo sapien
aactagtaatgaggatgtgaaaaat

SEQ ID NO: 5207430 - DNA, 25 bp, Homo sapien
ctagtaatgaggatgtgaaaaatac

SEQ ID NO: 5207431 - DNA, 25 bp, Homo sapien
gctccaattcgaagtaacccatcca

SEQ ID NO: 5207432 - DNA, 25 bp, Homo sapien
tctatcatcaccacagttaacagct

SEQ ID NO: 5207433 - DNA, 25 bp, Homo sapien
gctgttgactcctttcattcggcaa

SEQ ID NO: 5207434 - DNA, 25 bp, Homo sapien
tttcattcggcaaagcattctatca

SEQ ID NO: 5207435 - DNA, 25 bp, Homo sapien
tgtctccatgatatttcactggggc

SEQ ID NO: 5207436 - DNA, 25 bp, Homo sapien
tcactgtacttctaacatgctgcat

SEQ ID NO: 5207437 - DNA, 25 bp, Homo sapien
tctgtcactgtacttctaacatgct

SEQ ID NO: 5207438 - DNA, 25 bp, Homo sapien
gcaaaactcactaaactctcctttg

SEQ ID NO: 5207439 - DNA, 25 bp, Homo sapien
tctttccaaagatactcttgagtat

SEQ ID NO: 5207440 - DNA, 25 bp, Homo sapien
tcttgagtatgacaaattccttcaa

SEQ ID NO: 5207441 - DNA, 25 bp, Homo sapien
ttatctttccaaagatactcttgag

SEQ ID NO: 5207442 - DNA, 25 bp, Homo sapien
tatctttccaaagatactcttgagt

SEQ ID NO: 5207443 - DNA, 25 bp, Homo sapien
aaagcagtttgtatggagttgacaa

SEQ ID NO: 5207444 - DNA, 25 bp, Homo sapien
tttgaacaaaaagtgatcagccagc

SEQ ID NO: 5207445 - DNA, 25 bp, Homo sapien
agtgatcagccagccaataccagca

SEQ ID NO: 5207446 - DNA, 25 bp, Homo sapien
aacaaaaagtgatcagccagccaat

SEQ ID NO: 5207447 - DNA, 25 bp, Homo sapien
gcatgaagcaaagtccatatttcca

SEQ ID NO: 5207448 - DNA, 25 bp, Homo sapien
tacggcttgctatgcagagtactga

SEQ ID NO: 5207449 - DNA, 25 bp, Homo sapien
acacagtttacagtttacggcttgc

SEQ ID NO: 5207450 - DNA, 25 bp, Homo sapien
ggttcctagaagaagctgtcatctt

SEQ ID NO: 5207451 - DNA, 25 bp, Homo sapien
ctaagcctgagtcgtgtctgtgaag

SEQ ID NO: 5207452 - DNA, 25 bp, Homo sapien
actaagcctgagtcgtgtctgtgaa

SEQ ID NO: 5207453 - DNA, 25 bp, Homo sapien
taagcctgagtcgtgtctgtgaagt

SEQ ID NO: 5207454 - DNA, 25 bp, Homo sapien
ggaaaaaacacatagctatgaatac

SEQ ID NO: 5207455 - DNA, 25 bp, Homo sapien
tgtgtttctttacatggtgatatag

SEQ ID NO: 5207456 - DNA, 25 bp, Homo sapien
aacacatagctatgaatacagtcat

SEQ ID NO: 5207457 - DNA, 25 bp, Homo sapien
ttacaaataggtgagttaaatgttc

SEQ ID NO: 5207458 - DNA, 25 bp, Homo sapien
aaataagcagtagtacttgttgtaa

SEQ ID NO: 5207459 - DNA, 25 bp, Homo sapien
cagtagtacttgttgtaatatctaa

SEQ ID NO: 5207460 - DNA, 25 bp, Homo sapien
catccatcctacattaacaagacca

SEQ ID NO: 5207461 - DNA, 25 bp, Homo sapien
tgtaatatctaagcttttacaaagg

SEQ ID NO: 5207462 - DNA, 25 bp, Homo sapien
tgctggtctgattctctcaatgaag

SEQ ID NO: 5207463 - DNA, 25 bp, Homo sapien
tggtctgattctctcaatgaagcag

SEQ ID NO: 5207464 - DNA, 25 bp, Homo sapien
gctggtctgattctctcaatgaagc

SEQ ID NO: 5207465 - DNA, 25 bp, Homo sapien
ctgctggtctgattctctcaatgaa

SEQ ID NO: 5207466 - DNA, 25 bp, Homo sapien
tagaaggaagaataatagactatca

SEQ ID NO: 5207467 - DNA, 25 bp, Homo sapien
tgagtgacctcccaatcatcaagaa

SEQ ID NO: 5207468 - DNA, 25 bp, Homo sapien
tacagaatgccaatgttttacacat

SEQ ID NO: 5207469 - DNA, 25 bp, Homo sapien
cattccccaaccaataattaagatt

SEQ ID NO: 5207470 - DNA, 25 bp, Homo sapien
taggaaaatgattatagaaggtaaa

SEQ ID NO: 5207471 - DNA, 25 bp, Homo sapien
aaatcacattgtaatctttttgaat

SEQ ID NO: 5207472 - DNA, 25 bp, Homo sapien
ctgtttcttaaatagtgatatacaa

SEQ ID NO: 5207473 - DNA, 25 bp, Homo sapien
tcttaaatagtgatatacaataaat

SEQ ID NO: 5207474 - DNA, 25 bp, Homo sapien
ttgccgaaagtagttcaaaatctgg

SEQ ID NO: 5207475 - DNA, 25 bp, Homo sapien
cgaaagtagttcaaaatctggaaga

SEQ ID NO: 5207476 - DNA, 25 bp, Homo sapien
ctctagtgtgtttgccgaaagtagt

SEQ ID NO: 5207477 - DNA, 25 bp, Homo sapien
tggaagattatgtattacttccaaa

SEQ ID NO: 5207478 - DNA, 25 bp, Homo sapien
tcagctcaggatcatttgaattttc

SEQ ID NO: 5207479 - DNA, 25 bp, Homo sapien
cagctcaggatcatttgaattttca

SEQ ID NO: 5207480 - DNA, 25 bp, Homo sapien
ttcagctcaggatcatttgaatttt

SEQ ID NO: 5207481 - DNA, 25 bp, Homo sapien
gtcctttaaatactgctagagacgg

SEQ ID NO: 5207482 - DNA, 25 bp, Homo sapien
cagattactacagatgtctggtgca

SEQ ID NO: 5207483 - DNA, 25 bp, Homo sapien
aaacatacagattactacagatgtc

SEQ ID NO: 5207484 - DNA, 25 bp, Homo sapien
tgctagagacggctgaaaaacatac

SEQ ID NO: 5207485 - DNA, 25 bp, Homo sapien
gcgtggtaacatgagaattcacact

SEQ ID NO: 5207486 - DNA, 25 bp, Homo sapien
caggaaaattttgaggtccaagcgt

SEQ ID NO: 5207487 - DNA, 25 bp, Homo sapien
gaggtccaagcgtggtaacatgaga

SEQ ID NO: 5207488 - DNA, 25 bp, Homo sapien
tggcaaaggcaagtatatcatatag

SEQ ID NO: 5207489 - DNA, 25 bp, Homo sapien
gaactgtacaatctagtgtaccaaa

SEQ ID NO: 5207490 - DNA, 25 bp, Homo sapien
gatttgatgctcttcgtaactctgg

SEQ ID NO: 5207491 - DNA, 25 bp, Homo sapien
tacagagtccctcatgaactgtaca

SEQ ID NO: 5207492 - DNA, 25 bp, Homo sapien
gtgtaccaaacttaagctgaccata

SEQ ID NO: 5207493 - DNA, 25 bp, Homo sapien
tccaatcatatttgataccactttc

SEQ ID NO: 5207494 - DNA, 25 bp, Homo sapien
agaccttatttacattcaatgcatt

SEQ ID NO: 5207495 - DNA, 25 bp, Homo sapien
caatgcattgattagctatgcatgg

SEQ ID NO: 5207496 - DNA, 25 bp, Homo sapien
ttgcctgagtttgataaataagacc

SEQ ID NO: 5207497 - DNA, 25 bp, Homo sapien
aggcttgttcattgttttaacttct

SEQ ID NO: 5207498 - DNA, 25 bp, Homo sapien
ttttaacttctttccagcaaatata

SEQ ID NO: 5207499 - DNA, 25 bp, Homo sapien
taatttcatttaaacaaagatttca

SEQ ID NO: 5207500 - DNA, 25 bp, Homo sapien
acaaagatttcaaaaggcttgttca

SEQ ID NO: 5207501 - DNA, 25 bp, Homo sapien
atattacgtactttcattctacggt

SEQ ID NO: 5207502 - DNA, 25 bp, Homo sapien
cgtactttcattctacggtatataa

SEQ ID NO: 5207503 - DNA, 25 bp, Homo sapien
tttatacgtgatattacgtactttc

SEQ ID NO: 5207504 - DNA, 25 bp, Homo sapien
tacgtgatattacgtactttcattc

SEQ ID NO: 5207505 - DNA, 25 bp, Homo sapien
tcatactcatgaatgttggactggt

SEQ ID NO: 5207506 - DNA, 25 bp, Homo sapien
ctggttgaataccactgttgttgga

SEQ ID NO: 5207507 - DNA, 25 bp, Homo sapien
gaactccaagatttgttcagcagag

SEQ ID NO: 5207508 - DNA, 25 bp, Homo sapien
tgttgttggataagcctgaatgtta

SEQ ID NO: 5207509 - DNA, 25 bp, Homo sapien
aaacagacaaatttctagtcacata

SEQ ID NO: 5207510 - DNA, 25 bp, Homo sapien
gacaaatttctagtcacatagtcta

SEQ ID NO: 5207511 - DNA, 25 bp, Homo sapien
ttctagtcacatagtctataatctg

SEQ ID NO: 5207512 - DNA, 25 bp, Homo sapien
tctagtcacatagtctataatctga

SEQ ID NO: 5207513 - DNA, 25 bp, Homo sapien
gaaatcaaccatccagacttcgttg

SEQ ID NO: 5207514 - DNA, 25 bp, Homo sapien
tgtaactagttcgttgaaggtggtg

SEQ ID NO: 5207515 - DNA, 25 bp, Homo sapien
gacaccacggagaatagaaatcaac

SEQ ID NO: 5207516 - DNA, 25 bp, Homo sapien
ggcattaagacttggcaaggatgac

SEQ ID NO: 5207517 - DNA, 25 bp, Homo sapien
ccacgttgatcagtccagttaatgt

SEQ ID NO: 5207518 - DNA, 25 bp, Homo sapien
tggcaatctatactgcccacgttga

SEQ ID NO: 5207519 - DNA, 25 bp, Homo sapien
gggcacaaaaagaatgatactgttg

SEQ ID NO: 5207520 - DNA, 25 bp, Homo sapien
tgatactgttggcaatctatactgc

SEQ ID NO: 5207521 - DNA, 25 bp, Homo sapien
tgataagctttatttgattttgggg

SEQ ID NO: 5207522 - DNA, 25 bp, Homo sapien
tgataatgataagctttatttgatt

SEQ ID NO: 5207523 - DNA, 25 bp, Homo sapien
atgataagctttatttgattttggg

SEQ ID NO: 5207524 - DNA, 25 bp, Homo sapien
taatgataagctttatttgattttg

SEQ ID NO: 5207525 - DNA, 25 bp, Homo sapien
aataagcatccctattccaaccatt

SEQ ID NO: 5207526 - DNA, 25 bp, Homo sapien
cctagaccccagattctcagggaat

SEQ ID NO: 5207527 - DNA, 25 bp, Homo sapien
tagaccccagattctcagggaataa

SEQ ID NO: 5207528 - DNA, 25 bp, Homo sapien
gggaataagcatccctattccaacc

SEQ ID NO: 5207529 - DNA, 25 bp, Homo sapien
ctttttcactgaaagtctgaggtgt

SEQ ID NO: 5207530 - DNA, 25 bp, Homo sapien
tctgaggtgttagatctgtggatac

SEQ ID NO: 5207531 - DNA, 25 bp, Homo sapien
ccaaggagcatagaaatcaatcacc

SEQ ID NO: 5207532 - DNA, 25 bp, Homo sapien
cctagccaagagctcaaattctgga

SEQ ID NO: 5207533 - DNA, 25 bp, Homo sapien
ttaggtcactaataagactgttacg

SEQ ID NO: 5207534 - DNA, 25 bp, Homo sapien
taaaacatggactttgccctcagga

SEQ ID NO: 5207535 - DNA, 25 bp, Homo sapien
cagactgcattgagggtatgtattc

SEQ ID NO: 5207536 - DNA, 25 bp, Homo sapien
gaagatggacaatgctataccgaaa

SEQ ID NO: 5207537 - DNA, 25 bp, Homo sapien
cagttgagtgttttataccaacact

SEQ ID NO: 5207538 - DNA, 25 bp, Homo sapien
acactagtggcaagagttcctcgag

SEQ ID NO: 5207539 - DNA, 25 bp, Homo sapien
taagctttagtgtgaactggtggaa

SEQ ID NO: 5207540 - DNA, 25 bp, Homo sapien
caagagttcctcgagttatggaggc

SEQ ID NO: 5207541 - DNA, 25 bp, Homo sapien
taagacctttaaaatccctctgcta

SEQ ID NO: 5207542 - DNA, 25 bp, Homo sapien
taaacctcttatctgatgcaccagc

SEQ ID NO: 5207543 - DNA, 25 bp, Homo sapien
gatgcaccagctaataacaaaaata

SEQ ID NO: 5207544 - DNA, 25 bp, Homo sapien
tccctctgctaaaaaattcccatgg

SEQ ID NO: 5207545 - DNA, 25 bp, Homo sapien
agttcaccagtgaccgcttgaccaa

SEQ ID NO: 5207546 - DNA, 25 bp, Homo sapien
tcatatctaaccacgcattggcctg

SEQ ID NO: 5207547 - DNA, 25 bp, Homo sapien
caactgatgtttactgctgaccact

SEQ ID NO: 5207548 - DNA, 25 bp, Homo sapien
gcctgctttgggtgaatgccgcata

SEQ ID NO: 5207549 - DNA, 25 bp, Homo sapien
aatttaacagttggataggccctga

SEQ ID NO: 5207550 - DNA, 25 bp, Homo sapien
tgctctttcgtagaaataaaattta

SEQ ID NO: 5207551 - DNA, 25 bp, Homo sapien
cagctttctggcatgtctgagcata

SEQ ID NO: 5207552 - DNA, 25 bp, Homo sapien
gacagtctacttttccagctttcac

SEQ ID NO: 5207553 - DNA, 25 bp, Homo sapien
ctgaaacacatcttttgagcttggc

SEQ ID NO: 5207554 - DNA, 25 bp, Homo sapien
tcagactgaaacacatcttttgagc

SEQ ID NO: 5207555 - DNA, 25 bp, Homo sapien
gactgaaacacatcttttgagcttg

SEQ ID NO: 5207556 - DNA, 25 bp, Homo sapien
cagactgaaacacatcttttgagct

SEQ ID NO: 5207557 - DNA, 25 bp, Homo sapien
ttttatctgtttgctaggcatttgc

SEQ ID NO: 5207558 - DNA, 25 bp, Homo sapien
taggtgatggccgttgtacttattc

SEQ ID NO: 5207559 - DNA, 25 bp, Homo sapien
ggtgatggccgttgtacttattctt

SEQ ID NO: 5207560 - DNA, 25 bp, Homo sapien
taggcatttgcagacggctctgtgc

SEQ ID NO: 5207561 - DNA, 25 bp, Homo sapien
cacttattaaggcagcgattgcttt

SEQ ID NO: 5207562 - DNA, 25 bp, Homo sapien
tcttgccttgatttcggagagtttc

SEQ ID NO: 5207563 - DNA, 25 bp, Homo sapien
atttttcacttattaaggcagcgat

SEQ ID NO: 5207564 - DNA, 25 bp, Homo sapien
gccttgatttcggagagtttccaat

SEQ ID NO: 5207565 - DNA, 25 bp, Homo sapien
gcatttcagtgtctaggctacattt

SEQ ID NO: 5207566 - DNA, 25 bp, Homo sapien
tttgcatggaccacagtcactattt

SEQ ID NO: 5207567 - DNA, 25 bp, Homo sapien
acatgtttttgcatggaccacagtc

SEQ ID NO: 5207568 - DNA, 25 bp, Homo sapien
tgtctaggctacattttgattgtcc

SEQ ID NO: 5207569 - DNA, 25 bp, Homo sapien
ggattacagtagaacctattgtcta

SEQ ID NO: 5207570 - DNA, 25 bp, Homo sapien
taatatggtgctataaagccagtct

SEQ ID NO: 5207571 - DNA, 25 bp, Homo sapien
ctttcagattcgtaaaaaatattct

SEQ ID NO: 5207572 - DNA, 25 bp, Homo sapien
tattcttgaggtaggttgtaaggct

SEQ ID NO: 5207573 - DNA, 25 bp, Homo sapien
catgacatgaaatatactttgccaa

SEQ ID NO: 5207574 - DNA, 25 bp, Homo sapien
aagcatattgggtattctctttaac

SEQ ID NO: 5207575 - DNA, 25 bp, Homo sapien
tgctcacagcagatattactaacta

SEQ ID NO: 5207576 - DNA, 25 bp, Homo sapien
tcttatttaatggatcatgacatga

SEQ ID NO: 5207577 - DNA, 25 bp, Homo sapien
tgaaacattataagtccgtcgaggg

SEQ ID NO: 5207578 - DNA, 25 bp, Homo sapien
tttatctgaaaaaggcagccctctg

SEQ ID NO: 5207579 - DNA, 25 bp, Homo sapien
tcctggatgatacggcaaactacag

SEQ ID NO: 5207580 - DNA, 25 bp, Homo sapien
agcagactcatgttcaagccagcca

SEQ ID NO: 5207581 - DNA, 25 bp, Homo sapien
cccttatgaggaaatactggtgagc

SEQ ID NO: 5207582 - DNA, 25 bp, Homo sapien
caacaggcatacagcagaatccaga

SEQ ID NO: 5207583 - DNA, 25 bp, Homo sapien
acattcgagaatgaaaggctcttgc

SEQ ID NO: 5207584 - DNA, 25 bp, Homo sapien
gaagccaattttgtagaactcctag

SEQ ID NO: 5207585 - DNA, 25 bp, Homo sapien
tagagctgattccaaaggcacacag

SEQ ID NO: 5207586 - DNA, 25 bp, Homo sapien
gcctggctgcctgatagaatgtgct

SEQ ID NO: 5207587 - DNA, 25 bp, Homo sapien
taaatggacctaatttccaagcctg

SEQ ID NO: 5207588 - DNA, 25 bp, Homo sapien
gtgtttcttaacatgactcccaggg

SEQ ID NO: 5207589 - DNA, 25 bp, Homo sapien
ttcctttatcttaatcatatacctt

SEQ ID NO: 5207590 - DNA, 25 bp, Homo sapien
cctttatcttaatcatataccttta

SEQ ID NO: 5207591 - DNA, 25 bp, Homo sapien
tcctttatcttaatcatataccttt

SEQ ID NO: 5207592 - DNA, 25 bp, Homo sapien
ggactaacactagactaaatattac

SEQ ID NO: 5207593 - DNA, 25 bp, Homo sapien
ttttatcgtactaaacatctttgaa

SEQ ID NO: 5207594 - DNA, 25 bp, Homo sapien
gaataaatgtgcctactttaagaca

SEQ ID NO: 5207595 - DNA, 25 bp, Homo sapien
tttgttggcagatttaaggactaac

SEQ ID NO: 5207596 - DNA, 25 bp, Homo sapien
gcacggggggagaaggcatgtcaca

SEQ ID NO: 5207597 - DNA, 25 bp, Homo sapien
ggggggagaaggcatgtcacacaga

SEQ ID NO: 5207598 - DNA, 25 bp, Homo sapien
cacacagagaaggagcgagaaagag

SEQ ID NO: 5207599 - DNA, 25 bp, Homo sapien
aaggcacggggggagaaggcatgtc

SEQ ID NO: 5207600 - DNA, 25 bp, Homo sapien
taaagaaacgggcacaaacacacca

SEQ ID NO: 5207601 - DNA, 25 bp, Homo sapien
ggatgattgctaactttcaggacca

SEQ ID NO: 5207602 - DNA, 25 bp, Homo sapien
gaccaaaggccactaggtgatgcac

SEQ ID NO: 5207603 - DNA, 25 bp, Homo sapien
ggtgatgcactcaaatgactactta

SEQ ID NO: 5207604 - DNA, 25 bp, Homo sapien
aagacatttaggtggccaacaaaga

SEQ ID NO: 5207605 - DNA, 25 bp, Homo sapien
gacatttaggtggccaacaaagata

SEQ ID NO: 5207606 - DNA, 25 bp, Homo sapien
catttaggtggccaacaaagatatg

SEQ ID NO: 5207607 - DNA, 25 bp, Homo sapien
gaagacatttaggtggccaacaaag

SEQ ID NO: 5207608 - DNA, 25 bp, Homo sapien
aaacatgagatactgctgttccaag

SEQ ID NO: 5207609 - DNA, 25 bp, Homo sapien
tgctagttaactggcttcagaacca

SEQ ID NO: 5207610 - DNA, 25 bp, Homo sapien
gaaagatatttcaatgcataggtgg

SEQ ID NO: 5207611 - DNA, 25 bp, Homo sapien
tattactttcagttggcagtggctg

SEQ ID NO: 5207612 - DNA, 25 bp, Homo sapien
tatataaaataccaacaaaatgatt

SEQ ID NO: 5207613 - DNA, 25 bp, Homo sapien
ccagggtagatgattacaggcacac

SEQ ID NO: 5207614 - DNA, 25 bp, Homo sapien
acctttgcctccgggttcatgcaat

SEQ ID NO: 5207615 - DNA, 25 bp, Homo sapien
cagcctccagggtagatgattacag

SEQ ID NO: 5207616 - DNA, 25 bp, Homo sapien
tgctactttagcaggtagagctacc

SEQ ID NO: 5207617 - DNA, 25 bp, Homo sapien
tacaatgcctctaagctataagggc

SEQ ID NO: 5207618 - DNA, 25 bp, Homo sapien
acatgtctatagcagtgtgtgtgcc

SEQ ID NO: 5207619 - DNA, 25 bp, Homo sapien
tcagagggatttacacagagcaaca

SEQ ID NO: 5207620 - DNA, 25 bp, Homo sapien
ttgccacccttctctgtaggaacca

SEQ ID NO: 5207621 - DNA, 25 bp, Homo sapien
attgatggcagaacagcccttcttg

SEQ ID NO: 5207622 - DNA, 25 bp, Homo sapien
ttcttgccacccttctctgtaggaa

SEQ ID NO: 5207623 - DNA, 25 bp, Homo sapien
gatggcagaacagcccttcttgcca

SEQ ID NO: 5207624 - DNA, 25 bp, Homo sapien
tgtggcacacttccggatctctttg

SEQ ID NO: 5207625 - DNA, 25 bp, Homo sapien
gatgggcttgtggacgctgatggca

SEQ ID NO: 5207626 - DNA, 25 bp, Homo sapien
tctgaggggtatgcttcttgaatcc

SEQ ID NO: 5207627 - DNA, 25 bp, Homo sapien
tccatggatgggcttgtggacgctg

SEQ ID NO: 5207628 - DNA, 25 bp, Homo sapien
cctggccccgacagctttgtagagg

SEQ ID NO: 5207629 - DNA, 25 bp, Homo sapien
ttatggataagacatgggacatcct

SEQ ID NO: 5207630 - DNA, 25 bp, Homo sapien
gggacatcctttattcgcctggccc

SEQ ID NO: 5207631 - DNA, 25 bp, Homo sapien
tggccccgacagctttgtagaggct

SEQ ID NO: 5207632 - DNA, 25 bp, Homo sapien
ctcgaggacttacgctaagtaaaat

SEQ ID NO: 5207633 - DNA, 25 bp, Homo sapien
tatctatggtagtcatattgataga

SEQ ID NO: 5207634 - DNA, 25 bp, Homo sapien
tgagtctcgaggacttacgctaagt

SEQ ID NO: 5207635 - DNA, 25 bp, Homo sapien
catattgatagaaagtagggtggtg

SEQ ID NO: 5207636 - DNA, 25 bp, Homo sapien
actccaatgggatatgaacgcacac

SEQ ID NO: 5207637 - DNA, 25 bp, Homo sapien
tttgcaatggccaaagggtgaaggc

SEQ ID NO: 5207638 - DNA, 25 bp, Homo sapien
cagcaaaggctttacagtggaagtt

SEQ ID NO: 5207639 - DNA, 25 bp, Homo sapien
gaacgcacactcattgggataccta

SEQ ID NO: 5207640 - DNA, 25 bp, Homo sapien
gagtacagtgacgtgacctcagctc

SEQ ID NO: 5207641 - DNA, 25 bp, Homo sapien
ctggagtacagtgacgtgacctcag

SEQ ID NO: 5207642 - DNA, 25 bp, Homo sapien
tggagtacagtgacgtgacctcagc

SEQ ID NO: 5207643 - DNA, 25 bp, Homo sapien
agtacagtgacgtgacctcagctca

SEQ ID NO: 5207644 - DNA, 25 bp, Homo sapien
acctgcaaagccctctatgatctgg

SEQ ID NO: 5207645 - DNA, 25 bp, Homo sapien
gatggatgaattgttcttcactcaa

SEQ ID NO: 5207646 - DNA, 25 bp, Homo sapien
agtttctcttttaccaggatcttct

SEQ ID NO: 5207647 - DNA, 25 bp, Homo sapien
tcactgtgagtagaagttgaagtcc

SEQ ID NO: 5207648 - DNA, 25 bp, Homo sapien
gctctcttgggttggagtcactgtt

SEQ ID NO: 5207649 - DNA, 25 bp, Homo sapien
tcttggatccccatgcattgttgtt

SEQ ID NO: 5207650 - DNA, 25 bp, Homo sapien
cccaggtgatgtttaggcctcctac

SEQ ID NO: 5207651 - DNA, 25 bp, Homo sapien
tctgaggtccgcaaatacgcatctg

SEQ ID NO: 5207652 - DNA, 25 bp, Homo sapien
tgctgctgccagtttaacatctata

SEQ ID NO: 5207653 - DNA, 25 bp, Homo sapien
tgactttgaccggatggcccttcca

SEQ ID NO: 5207654 - DNA, 25 bp, Homo sapien
gctgccagtttaacatctatactgg

SEQ ID NO: 5207655 - DNA, 25 bp, Homo sapien
gcccttccatactctagagctgctg

SEQ ID NO: 5207656 - DNA, 25 bp, Homo sapien
caggtacccggtcgccaatctcagt

SEQ ID NO: 5207657 - DNA, 25 bp, Homo sapien
tctaccacgtgtgtggctccaaaat

SEQ ID NO: 5207658 - DNA, 25 bp, Homo sapien
ccacgatgcttggaatagttctgtt

SEQ ID NO: 5207659 - DNA, 25 bp, Homo sapien
tctgtttactttaagcagttctacc

SEQ ID NO: 5207660 - DNA, 25 bp, Homo sapien
tcttgggtcctctgataggtgtcaa

SEQ ID NO: 5207661 - DNA, 25 bp, Homo sapien
cgtgtgtggttcaatgtcaggagct

SEQ ID NO: 5207662 - DNA, 25 bp, Homo sapien
agacaccctctctccgtttggtgag

SEQ ID NO: 5207663 - DNA, 25 bp, Homo sapien
agcctctgaggtgcaccacgttcct

SEQ ID NO: 5207664 - DNA, 25 bp, Homo sapien
ttgtgaacggattttacatctcttt

SEQ ID NO: 5207665 - DNA, 25 bp, Homo sapien
aatgtcaaaactgttgcaactacat

SEQ ID NO: 5207666 - DNA, 25 bp, Homo sapien
tcaaattttgtgaacggattttaca

SEQ ID NO: 5207667 - DNA, 25 bp, Homo sapien
aaaactgttgcaactacatagtgac

SEQ ID NO: 5207668 - DNA, 25 bp, Homo sapien
ggctagtcaagcaatgggggtgaag

SEQ ID NO: 5207669 - DNA, 25 bp, Homo sapien
tgagttgtaaataccaaggcactgg

SEQ ID NO: 5207670 - DNA, 25 bp, Homo sapien
aatgagttgtaaataccaaggcact

SEQ ID NO: 5207671 - DNA, 25 bp, Homo sapien
tcaatgagttgtaaataccaaggca

SEQ ID NO: 5207672 - DNA, 25 bp, Homo sapien
taaagcagagacttctaatatggtg

SEQ ID NO: 5207673 - DNA, 25 bp, Homo sapien
tggctggaactctatatgaaacact

SEQ ID NO: 5207674 - DNA, 25 bp, Homo sapien
ggtaataacatctaacagtggctgg

SEQ ID NO: 5207675 - DNA, 25 bp, Homo sapien
tcactgtgagcaaatagcactacct

SEQ ID NO: 5207676 - DNA, 25 bp, Homo sapien
acaactgaaaccagtagccgctggg

SEQ ID NO: 5207677 - DNA, 25 bp, Homo sapien
tatgaggaaacaacacccaagatga

SEQ ID NO: 5207678 - DNA, 25 bp, Homo sapien
aacattttgcctgattgagaagcac

SEQ ID NO: 5207679 - DNA, 25 bp, Homo sapien
tgtcacataggcaaagcaatcaagc

SEQ ID NO: 5207680 - DNA, 25 bp, Homo sapien
tgtcaaaagagaagcacataccatt

SEQ ID NO: 5207681 - DNA, 25 bp, Homo sapien
gacaatttgccatgcttatgatgta

SEQ ID NO: 5207682 - DNA, 25 bp, Homo sapien
tactaaagctttctcaggggcatta

SEQ ID NO: 5207683 - DNA, 25 bp, Homo sapien
tataaaaggtataataatctactct

SEQ ID NO: 5207684 - DNA, 25 bp, Homo sapien
tgtaaagccttgttatatcgcctag

SEQ ID NO: 5207685 - DNA, 25 bp, Homo sapien
tatcgcctaggttcaccagtcaact

SEQ ID NO: 5207686 - DNA, 25 bp, Homo sapien
gccttgttatatcgcctaggttcac

SEQ ID NO: 5207687 - DNA, 25 bp, Homo sapien
gttatatcgcctaggttcaccagtc

SEQ ID NO: 5207688 - DNA, 25 bp, Homo sapien
tactgactgtagagccaacttccac

SEQ ID NO: 5207689 - DNA, 25 bp, Homo sapien
ccactgagcaactggagattcctga

SEQ ID NO: 5207690 - DNA, 25 bp, Homo sapien
tccaaaggtgctccagagaagctcc

SEQ ID NO: 5207691 - DNA, 25 bp, Homo sapien
gctggcttactaccaattttgggaa

SEQ ID NO: 5207692 - DNA, 25 bp, Homo sapien
gctgcgatgagtaccatatattcca

SEQ ID NO: 5207693 - DNA, 25 bp, Homo sapien
ctacaatatgatagctgcgatgagt

SEQ ID NO: 5207694 - DNA, 25 bp, Homo sapien
tgcactgattttggtgagtatgtcc

SEQ ID NO: 5207695 - DNA, 25 bp, Homo sapien
tgagtatgtcctgccttataaggtg

SEQ ID NO: 5207696 - DNA, 25 bp, Homo sapien
cctcttatctgactgatctgcgaag

SEQ ID NO: 5207697 - DNA, 25 bp, Homo sapien
ctcggtaaagctcgtgggaccccat

SEQ ID NO: 5207698 - DNA, 25 bp, Homo sapien
gagctccaactagctctcagctgaa

SEQ ID NO: 5207699 - DNA, 25 bp, Homo sapien
tgatccaaggaagcggtgattgccg

SEQ ID NO: 5207700 - DNA, 25 bp, Homo sapien
tgcatgtcatccttgcccaggggcc

SEQ ID NO: 5207701 - DNA, 25 bp, Homo sapien
atgctaatcttctctgtattgttcc

SEQ ID NO: 5207702 - DNA, 25 bp, Homo sapien
tatatgtgctggtgaagtgagcaca

SEQ ID NO: 5207703 - DNA, 25 bp, Homo sapien
aaaaatatggaaggcttctcaaatt

SEQ ID NO: 5207704 - DNA, 25 bp, Homo sapien
cctgtcagtatttgttgaagaccag

SEQ ID NO: 5207705 - DNA, 25 bp, Homo sapien
tggcttcgacaactactgtcctatt

SEQ ID NO: 5207706 - DNA, 25 bp, Homo sapien
gaagaccagcatttctaccatgtag

SEQ ID NO: 5207707 - DNA, 25 bp, Homo sapien
tgtctgactactaaaatatccttgt

SEQ ID NO: 5207708 - DNA, 25 bp, Homo sapien
tctgcactgaaccttttagcatata

SEQ ID NO: 5207709 - DNA, 25 bp, Homo sapien
gactctactgtagcttaaataagaa

SEQ ID NO: 5207710 - DNA, 25 bp, Homo sapien
ccatgccacaaaccagattcaagaa

SEQ ID NO: 5207711 - DNA, 25 bp, Homo sapien
ttgttaccagaaagctaactgttaa

SEQ ID NO: 5207712 - DNA, 25 bp, Homo sapien
tcagccttacttggctccttaagca

SEQ ID NO: 5207713 - DNA, 25 bp, Homo sapien
cacggggaaacaggggtcacattca

SEQ ID NO: 5207714 - DNA, 25 bp, Homo sapien
gggtcacattcagccttacttggct

SEQ ID NO: 5207715 - DNA, 25 bp, Homo sapien
ttggctccttaagcagcgacactat

SEQ ID NO: 5207716 - DNA, 25 bp, Homo sapien
gaaagtttcatggagtatggactgt

SEQ ID NO: 5207717 - DNA, 25 bp, Homo sapien
gagtatggactgtgcaccattgtga

SEQ ID NO: 5207718 - DNA, 25 bp, Homo sapien
tttcatggagtatggactgtgcacc

SEQ ID NO: 5207719 - DNA, 25 bp, Homo sapien
ctgtgcaccattgtgaagtttcctg

SEQ ID NO: 5207720 - DNA, 25 bp, Homo sapien
ccaagaggctgagggttgtgggggc

SEQ ID NO: 5207721 - DNA, 25 bp, Homo sapien
agaggctgagggttgtgggggctac

SEQ ID NO: 5207722 - DNA, 25 bp, Homo sapien
taagttagaaccaagaggctgaggg

SEQ ID NO: 5207723 - DNA, 25 bp, Homo sapien
accaagaggctgagggttgtggggg

SEQ ID NO: 5207724 - DNA, 25 bp, Homo sapien
tcagcatgagtttcactgcctgtct

SEQ ID NO: 5207725 - DNA, 25 bp, Homo sapien
cttgagagcagctgtagccctaggg

SEQ ID NO: 5207726 - DNA, 25 bp, Homo sapien
tgctgcaagccaccctatgtgaagc

SEQ ID NO: 5207727 - DNA, 25 bp, Homo sapien
tgtgaagcctagtctagaaatctgc

SEQ ID NO: 5207728 - DNA, 25 bp, Homo sapien
ggagaggaaactgccccgaagacat

SEQ ID NO: 5207729 - DNA, 25 bp, Homo sapien
gaatctgagccccttgtataaatag

SEQ ID NO: 5207730 - DNA, 25 bp, Homo sapien
caaaaaggcattccacgtagcaaaa

SEQ ID NO: 5207731 - DNA, 25 bp, Homo sapien
gcattggcaatagatcaaaaaggca

SEQ ID NO: 5207732 - DNA, 25 bp, Homo sapien
catttaactgttagatcttgcaaag

SEQ ID NO: 5207733 - DNA, 25 bp, Homo sapien
taactgttagatcttgcaaaggttg

SEQ ID NO: 5207734 - DNA, 25 bp, Homo sapien
tagatcttgcaaaggttgaagctga

SEQ ID NO: 5207735 - DNA, 25 bp, Homo sapien
taaccatttaactgttagatcttgc

SEQ ID NO: 5207736 - DNA, 25 bp, Homo sapien
gaagagttctgatctgtacctatgg

SEQ ID NO: 5207737 - DNA, 25 bp, Homo sapien
ttttagactaacttccatggtgccc

SEQ ID NO: 5207738 - DNA, 25 bp, Homo sapien
gaaattcaagtgtacctgccataac

SEQ ID NO: 5207739 - DNA, 25 bp, Homo sapien
ttgctgagaaatgcataccatgctg

SEQ ID NO: 5207740 - DNA, 25 bp, Homo sapien
aatctgtttatttactgctagatat

SEQ ID NO: 5207741 - DNA, 25 bp, Homo sapien
gaatctgtttatttactgctagata

SEQ ID NO: 5207742 - DNA, 25 bp, Homo sapien
tgtgtgctaattaaagaagtagagc

SEQ ID NO: 5207743 - DNA, 25 bp, Homo sapien
cttccagtctgccaaaagaattgtt

SEQ ID NO: 5207744 - DNA, 25 bp, Homo sapien
tatgtacgtgtacttatggtgaaac

SEQ ID NO: 5207745 - DNA, 25 bp, Homo sapien
gttcttcatgggatcctaaaggaca

SEQ ID NO: 5207746 - DNA, 25 bp, Homo sapien
tatgttcctagatgaaatggccaaa

SEQ ID NO: 5207747 - DNA, 25 bp, Homo sapien
tggccaaacaagctcgaaatctcat

SEQ ID NO: 5207748 - DNA, 25 bp, Homo sapien
tcatattggagatcgcagtctttcc

SEQ ID NO: 5207749 - DNA, 25 bp, Homo sapien
actattgcggaatgtacctttagcc

SEQ ID NO: 5207750 - DNA, 25 bp, Homo sapien
tgtcattggtatttagatagatagt

SEQ ID NO: 5207751 - DNA, 25 bp, Homo sapien
gtatgtttagcaatatcaattcttc

SEQ ID NO: 5207752 - DNA, 25 bp, Homo sapien
gatcactttgggtggtatgtttagc

SEQ ID NO: 5207753 - DNA, 25 bp, Homo sapien
cattggtatttagatagatagttta

SEQ ID NO: 5207754 - DNA, 25 bp, Homo sapien
aacctcaggctcgtatgttcaggca

SEQ ID NO: 5207755 - DNA, 25 bp, Homo sapien
cctcaggctcgtatgttcaggcagt

SEQ ID NO: 5207756 - DNA, 25 bp, Homo sapien
tcaggctcgtatgttcaggcagtgc

SEQ ID NO: 5207757 - DNA, 25 bp, Homo sapien
tgtaacctcaggctcgtatgttcag

SEQ ID NO: 5207758 - DNA, 25 bp, Homo sapien
agttcagccatagtagcatgtgtca

SEQ ID NO: 5207759 - DNA, 25 bp, Homo sapien
tctgtgagcatgactgctctagata

SEQ ID NO: 5207760 - DNA, 25 bp, Homo sapien
ttattgaacaacagtgtgccatttc

SEQ ID NO: 5207761 - DNA, 25 bp, Homo sapien
tcttttttagcagaataatagtgca

SEQ ID NO: 5207762 - DNA, 25 bp, Homo sapien
caactataagaagcatatggaccag

SEQ ID NO: 5207763 - DNA, 25 bp, Homo sapien
catttatataggatttccagattag

SEQ ID NO: 5207764 - DNA, 25 bp, Homo sapien
tggcctgagaccagaagattgagac

SEQ ID NO: 5207765 - DNA, 25 bp, Homo sapien
taaagtcattgacccttcacttctt

SEQ ID NO: 5207766 - DNA, 25 bp, Homo sapien
gctgtaagctgctgtgcccaatctt

SEQ ID NO: 5207767 - DNA, 25 bp, Homo sapien
agctgctgtgcccaatcttcatttc

SEQ ID NO: 5207768 - DNA, 25 bp, Homo sapien
agctgtaagctgctgtgcccaatct

SEQ ID NO: 5207769 - DNA, 25 bp, Homo sapien
tgctgtgcccaatcttcatttcttt

SEQ ID NO: 5207770 - DNA, 25 bp, Homo sapien
ttattaactacatatgtgccaggca

SEQ ID NO: 5207771 - DNA, 25 bp, Homo sapien
gagatattgaattgactactgacct

SEQ ID NO: 5207772 - DNA, 25 bp, Homo sapien
taaaatggcatagggtctaggcttg

SEQ ID NO: 5207773 - DNA, 25 bp, Homo sapien
tgtggcccggataatatattgtgta

SEQ ID NO: 5207774 - DNA, 25 bp, Homo sapien
gtgctcctcgccgacaaagtctaga

SEQ ID NO: 5207775 - DNA, 25 bp, Homo sapien
tcaagcagtgggaggaaaaagcgct

SEQ ID NO: 5207776 - DNA, 25 bp, Homo sapien
agtggaaagagcacacaacgcgacc

SEQ ID NO: 5207777 - DNA, 25 bp, Homo sapien
cactcttaagcgaaactcgcctgga

SEQ ID NO: 5207778 - DNA, 25 bp, Homo sapien
tcgaaggatcaccagagcgacagtt

SEQ ID NO: 5207779 - DNA, 25 bp, Homo sapien
accaagctggtctcggcaagcagcg

SEQ ID NO: 5207780 - DNA, 25 bp, Homo sapien
ctcttaaagcagtccccatggtcag

SEQ ID NO: 5207781 - DNA, 25 bp, Homo sapien
gacaagggtggactctggttcattc

SEQ ID NO: 5207782 - DNA, 25 bp, Homo sapien
gaaaacggctgaactgctagtccct

SEQ ID NO: 5207783 - DNA, 25 bp, Homo sapien
tgcattttcccgaaaggctcgaggg

SEQ ID NO: 5207784 - DNA, 25 bp, Homo sapien
aaatccagcaggcatagaaaacggc

SEQ ID NO: 5207785 - DNA, 25 bp, Homo sapien
tatcccagcgatgcaatgtaaggcg

SEQ ID NO: 5207786 - DNA, 25 bp, Homo sapien
ttaataacgccaacttgcaggtccg

SEQ ID NO: 5207787 - DNA, 25 bp, Homo sapien
tcaccctggtgcattgcttcctgag

SEQ ID NO: 5207788 - DNA, 25 bp, Homo sapien
tctttccagttagcgttgtcaccct

SEQ ID NO: 5207789 - DNA, 25 bp, Homo sapien
cgagctaaggtcctgcacataacca

SEQ ID NO: 5207790 - DNA, 25 bp, Homo sapien
tgtatccaaatcatgagcagcatct

SEQ ID NO: 5207791 - DNA, 25 bp, Homo sapien
gtgtatccaaatcatgagcagcatc

SEQ ID NO: 5207792 - DNA, 25 bp, Homo sapien
cagtgtatccaaatcatgagcagca

SEQ ID NO: 5207793 - DNA, 25 bp, Homo sapien
tcagtgtatccaaatcatgagcagc

SEQ ID NO: 5207794 - DNA, 25 bp, Homo sapien
tcaactccatatgcaacattaagaa

SEQ ID NO: 5207795 - DNA, 25 bp, Homo sapien
tcaggcagatccaatatagaaatgc

SEQ ID NO: 5207796 - DNA, 25 bp, Homo sapien
tggaaaataagacaggatgttggtt

SEQ ID NO: 5207797 - DNA, 25 bp, Homo sapien
cttatatgtaaagtcactgaggaaa

SEQ ID NO: 5207798 - DNA, 25 bp, Homo sapien
tttgcttcttcaataaattcaaaac

SEQ ID NO: 5207799 - DNA, 25 bp, Homo sapien
tttttgcttcttcaataaattcaaa

SEQ ID NO: 5207800 - DNA, 25 bp, Homo sapien
ctttttgcttcttcaataaattcaa

SEQ ID NO: 5207801 - DNA, 25 bp, Homo sapien
ttctttttgcttcttcaataaattc

SEQ ID NO: 5207802 - DNA, 25 bp, Homo sapien
tatggaaggtcttgcatttttcacc

SEQ ID NO: 5207803 - DNA, 25 bp, Homo sapien
cactggtaaatgaggtttgttcaga

SEQ ID NO: 5207804 - DNA, 25 bp, Homo sapien
gaaacctattacaattgcagcagcc

SEQ ID NO: 5207805 - DNA, 25 bp, Homo sapien
ctcttgatatgtacgaagctgctcc

SEQ ID NO: 5207806 - DNA, 25 bp, Homo sapien
gaactgttctcctgtattctgtcac

SEQ ID NO: 5207807 - DNA, 25 bp, Homo sapien
atcacacattataataacaaagaga

SEQ ID NO: 5207808 - DNA, 25 bp, Homo sapien
aagggaaaagatggctatagaagtc

SEQ ID NO: 5207809 - DNA, 25 bp, Homo sapien
ttgctagtctactctccaaaaaagg

SEQ ID NO: 5207810 - DNA, 25 bp, Homo sapien
tacttatacagtaggtcaggacaat

SEQ ID NO: 5207811 - DNA, 25 bp, Homo sapien
tatgtggaaactatcaggccaggcg

SEQ ID NO: 5207812 - DNA, 25 bp, Homo sapien
agactgcctggcctatgtggtgaga

SEQ ID NO: 5207813 - DNA, 25 bp, Homo sapien
gaattgtattgtatgctccactgcc

SEQ ID NO: 5207814 - DNA, 25 bp, Homo sapien
tgcagtatgtgagaaagaggaccgt

SEQ ID NO: 5207815 - DNA, 25 bp, Homo sapien
tgacagcaaataagtgttacatctt

SEQ ID NO: 5207816 - DNA, 25 bp, Homo sapien
ttgacagcaaataagtgttacatct

SEQ ID NO: 5207817 - DNA, 25 bp, Homo sapien
ttaattcagaatttgacagcaaata

SEQ ID NO: 5207818 - DNA, 25 bp, Homo sapien
acagcaaataagtgttacatctttt

SEQ ID NO: 5207819 - DNA, 25 bp, Homo sapien
gccacactatgtacaaataatctca

SEQ ID NO: 5207820 - DNA, 25 bp, Homo sapien
gcatcttctcttaccttaaataagg

SEQ ID NO: 5207821 - DNA, 25 bp, Homo sapien
cacagtgatgccaattatatgctct

SEQ ID NO: 5207822 - DNA, 25 bp, Homo sapien
cagtcatagttagaatgtagggtaa

SEQ ID NO: 5207823 - DNA, 25 bp, Homo sapien
agactggcacagatagacaaacttc

SEQ ID NO: 5207824 - DNA, 25 bp, Homo sapien
tcaaataagactggcacagatagac

SEQ ID NO: 5207825 - DNA, 25 bp, Homo sapien
agtcaaataagactggcacagatag

SEQ ID NO: 5207826 - DNA, 25 bp, Homo sapien
ataagactggcacagatagacaaac

SEQ ID NO: 5207827 - DNA, 25 bp, Homo sapien
aagatggagtttgtcatcttcagaa

SEQ ID NO: 5207828 - DNA, 25 bp, Homo sapien
gcaaggggagagagcatcttatcac

SEQ ID NO: 5207829 - DNA, 25 bp, Homo sapien
aaaagatggagtttgtcatcttcag

SEQ ID NO: 5207830 - DNA, 25 bp, Homo sapien
gagagagcatcttatcactcatgct

SEQ ID NO: 5207831 - DNA, 25 bp, Homo sapien
agtctttgcgctgagaatttccgag

SEQ ID NO: 5207832 - DNA, 25 bp, Homo sapien
ccggagccattttggaatagggcaa

SEQ ID NO: 5207833 - DNA, 25 bp, Homo sapien
gcgaaccagcgtatggttctgtgaa

SEQ ID NO: 5207834 - DNA, 25 bp, Homo sapien
tctgtgaatgcttttcatccgggaa

SEQ ID NO: 5207835 - DNA, 25 bp, Homo sapien
tcaaaaatggcggaaacgctcccca

SEQ ID NO: 5207836 - DNA, 25 bp, Homo sapien
ggttgcgtaacttccggacctgcgc

SEQ ID NO: 5207837 - DNA, 25 bp, Homo sapien
gctccccacgggtaacggcgtgcta

SEQ ID NO: 5207838 - DNA, 25 bp, Homo sapien
cgggtaacggcgtgctaccttatgg

SEQ ID NO: 5207839 - DNA, 25 bp, Homo sapien
tgcgtcggcaactacacttaaaacc

SEQ ID NO: 5207840 - DNA, 25 bp, Homo sapien
gcgtcggcaactacacttaaaacca

SEQ ID NO: 5207841 - DNA, 25 bp, Homo sapien
tcggcaactacacttaaaaccagta

SEQ ID NO: 5207842 - DNA, 25 bp, Homo sapien
cgtcggcaactacacttaaaaccag

SEQ ID NO: 5207843 - DNA, 25 bp, Homo sapien
gaggttccactgcaaaggctgccat

SEQ ID NO: 5207844 - DNA, 25 bp, Homo sapien
tgaggttccactgcaaaggctgcca

SEQ ID NO: 5207845 - DNA, 25 bp, Homo sapien
tcaaatctaaagactctttccacac

SEQ ID NO: 5207846 - DNA, 25 bp, Homo sapien
caaatctaaagactctttccacacc

SEQ ID NO: 5207847 - DNA, 25 bp, Homo sapien
ggagctggcaaatcccccattaaaa

SEQ ID NO: 5207848 - DNA, 25 bp, Homo sapien
gagtcaccggagctggcaaatcccc

SEQ ID NO: 5207849 - DNA, 25 bp, Homo sapien
tggagtcaccggagctggcaaatcc

SEQ ID NO: 5207850 - DNA, 25 bp, Homo sapien
ccggagctggcaaatcccccattaa

SEQ ID NO: 5207851 - DNA, 25 bp, Homo sapien
tatgagctggtacaactggttgtgg

SEQ ID NO: 5207852 - DNA, 25 bp, Homo sapien
tttatgagctggtacaactggttgt

SEQ ID NO: 5207853 - DNA, 25 bp, Homo sapien
ccaagtcctgggctagaaatgtcat

SEQ ID NO: 5207854 - DNA, 25 bp, Homo sapien
gaagttaaaggtgttgatccaagtc

SEQ ID NO: 5207855 - DNA, 25 bp, Homo sapien
ctatatcccaataggacagttgagg

SEQ ID NO: 5207856 - DNA, 25 bp, Homo sapien
ggcaactgatcaggaccctgttggg

SEQ ID NO: 5207857 - DNA, 25 bp, Homo sapien
tgggcaactgatcaggaccctgttg

SEQ ID NO: 5207858 - DNA, 25 bp, Homo sapien
atatcccaataggacagttgaggca

SEQ ID NO: 5207859 - DNA, 25 bp, Homo sapien
acagcaatatctgtaagcctttgtc

SEQ ID NO: 5207860 - DNA, 25 bp, Homo sapien
tatgacccacgagtctttcaaacat

SEQ ID NO: 5207861 - DNA, 25 bp, Homo sapien
tgcacaaatttagaagccagtggtt

SEQ ID NO: 5207862 - DNA, 25 bp, Homo sapien
taaattatgacccacgagtctttca

SEQ ID NO: 5207863 - DNA, 25 bp, Homo sapien
ctgttccaggagtagatgtaactcc

SEQ ID NO: 5207864 - DNA, 25 bp, Homo sapien
tgttccaggagtagatgtaactcca

SEQ ID NO: 5207865 - DNA, 25 bp, Homo sapien
taaatgaacacagccctaccaatgt

SEQ ID NO: 5207866 - DNA, 25 bp, Homo sapien
aatgtctagattttagcccaccaag

SEQ ID NO: 5207867 - DNA, 25 bp, Homo sapien
gggattatacacatatgacgacata

SEQ ID NO: 5207868 - DNA, 25 bp, Homo sapien
tatttcccagagtacacagttaggt

SEQ ID NO: 5207869 - DNA, 25 bp, Homo sapien
tagttgaacccagcaacagtctcat

SEQ ID NO: 5207870 - DNA, 25 bp, Homo sapien
taagctgggtaggtccccaaatgat

SEQ ID NO: 5207871 - DNA, 25 bp, Homo sapien
cctacagggccatgtaatacatctg

SEQ ID NO: 5207872 - DNA, 25 bp, Homo sapien
tttctgggtaaagaccaattgtgac

SEQ ID NO: 5207873 - DNA, 25 bp, Homo sapien
tgcgtgtaacaaagcatcatcatcc

SEQ ID NO: 5207874 - DNA, 25 bp, Homo sapien
catccacctatttgttacagtttga

SEQ ID NO: 5207875 - DNA, 25 bp, Homo sapien
tgtccctgggatcacttactgactc

SEQ ID NO: 5207876 - DNA, 25 bp, Homo sapien
ggcacctggcatgactcaaataact

SEQ ID NO: 5207877 - DNA, 25 bp, Homo sapien
taaaacataaacattgccaccacca

SEQ ID NO: 5207878 - DNA, 25 bp, Homo sapien
tagagaccactcaatggtagcatag

SEQ ID NO: 5207879 - DNA, 25 bp, Homo sapien
cattgccaccaccataactagagac

SEQ ID NO: 5207880 - DNA, 25 bp, Homo sapien
caatggtagcatagttaatctgaca

SEQ ID NO: 5207881 - DNA, 25 bp, Homo sapien
aaacgtgtaacttttggagcaccag

SEQ ID NO: 5207882 - DNA, 25 bp, Homo sapien
gcagttctgctaagggatattcaac

SEQ ID NO: 5207883 - DNA, 25 bp, Homo sapien
tgaaacatcccactttgacaagtgc

SEQ ID NO: 5207884 - DNA, 25 bp, Homo sapien
gttggagtaacacctaagtcttgtg

SEQ ID NO: 5207885 - DNA, 25 bp, Homo sapien
ggcaacttcatgtgattcaacagac

SEQ ID NO: 5207886 - DNA, 25 bp, Homo sapien
actgttctacaggtcaatgcgcatg

SEQ ID NO: 5207887 - DNA, 25 bp, Homo sapien
tgtggcagtactacaagtgtggtct

SEQ ID NO: 5207888 - DNA, 25 bp, Homo sapien
tccaggcaatcggaatccaaagcat

SEQ ID NO: 5207889 - DNA, 25 bp, Homo sapien
taatgtcgtctttcgtggctgaccg

SEQ ID NO: 5207890 - DNA, 25 bp, Homo sapien
ccaaatacagtcacccaagagtcat

SEQ ID NO: 5207891 - DNA, 25 bp, Homo sapien
gagtcatcgaggtgatcttctgaag

SEQ ID NO: 5207892 - DNA, 25 bp, Homo sapien
caactgggcaggagataatgtcgtc

SEQ ID NO: 5207893 - DNA, 25 bp, Homo sapien
tacgaaaaaatactaggagtgcttc

SEQ ID NO: 5207894 - DNA, 25 bp, Homo sapien
gcctagataacagagagattgtctc

SEQ ID NO: 5207895 - DNA, 25 bp, Homo sapien
gaacaacggaatgcaatgacccgct

SEQ ID NO: 5207896 - DNA, 25 bp, Homo sapien
cagcccaattgctatggatatagga

SEQ ID NO: 5207897 - DNA, 25 bp, Homo sapien
tattcccatactgtgcaaattgtag

SEQ ID NO: 5207898 - DNA, 25 bp, Homo sapien
tgtagtaatatgtaggaagcagatg

SEQ ID NO: 5207899 - DNA, 25 bp, Homo sapien
taatatgtaggaagcagatgcttga

SEQ ID NO: 5207900 - DNA, 25 bp, Homo sapien
tactgtgcaaattgtagtaatatgt

SEQ ID NO: 5207901 - DNA, 25 bp, Homo sapien
gcctgcagtttagattgataacgaa

SEQ ID NO: 5207902 - DNA, 25 bp, Homo sapien
gattgataacgaatatgcatccaat

SEQ ID NO: 5207903 - DNA, 25 bp, Homo sapien
ttagattgataacgaatatgcatcc

SEQ ID NO: 5207904 - DNA, 25 bp, Homo sapien
tccgagcctgcagtttagattgata

SEQ ID NO: 5207905 - DNA, 25 bp, Homo sapien
agagtactataaacatcatcacatt

SEQ ID NO: 5207906 - DNA, 25 bp, Homo sapien
gtagaggctttgtatgctgtagcaa

SEQ ID NO: 5207907 - DNA, 25 bp, Homo sapien
tagaaatcctaggagtacttccagg

SEQ ID NO: 5207908 - DNA, 25 bp, Homo sapien
tacttccaggttgtgttggtgtacc

SEQ ID NO: 5207909 - DNA, 25 bp, Homo sapien
tggtgtaaaggctaaagatggagat

SEQ ID NO: 5207910 - DNA, 25 bp, Homo sapien
ggttctgcactttggataccatcaa

SEQ ID NO: 5207911 - DNA, 25 bp, Homo sapien
ttaatgcgccctcatgtcaaagatg

SEQ ID NO: 5207912 - DNA, 25 bp, Homo sapien
caaagctactccaacctaaggttct

SEQ ID NO: 5207913 - DNA, 25 bp, Homo sapien
gatgcacacaggatacatttcgtat

SEQ ID NO: 5207914 - DNA, 25 bp, Homo sapien
ttggcgtttgtctgtcagaaataac

SEQ ID NO: 5207915 - DNA, 25 bp, Homo sapien
aaacatgtactccattgctttggat

SEQ ID NO: 5207916 - DNA, 25 bp, Homo sapien
ttttttggcgtttgtctgtcagaaa

SEQ ID NO: 5207917 - DNA, 25 bp, Homo sapien
catgtactccattgctttggataca

SEQ ID NO: 5207918 - DNA, 25 bp, Homo sapien
agtgtagcaacctccttcttggtgt

SEQ ID NO: 5207919 - DNA, 25 bp, Homo sapien
cactctgctaactctgttttagtgt

SEQ ID NO: 5207920 - DNA, 25 bp, Homo sapien
tgttttagtgtagcaacctccttct

SEQ ID NO: 5207921 - DNA, 25 bp, Homo sapien
cgaaggaaccagcagcactctgcta

SEQ ID NO: 5207922 - DNA, 25 bp, Homo sapien
gaagcatgcactgttacagaaagca

SEQ ID NO: 5207923 - DNA, 25 bp, Homo sapien
tatgagatagctatccaatactgca

SEQ ID NO: 5207924 - DNA, 25 bp, Homo sapien
ttacaataatcaatgctgagttttc

SEQ ID NO: 5207925 - DNA, 25 bp, Homo sapien
gcatcttttaaagtgcgagctacaa

SEQ ID NO: 5207926 - DNA, 25 bp, Homo sapien
ccacgttctcatgaagactatgacg

SEQ ID NO: 5207927 - DNA, 25 bp, Homo sapien
tgtcggtagaaataactatagttcc

SEQ ID NO: 5207928 - DNA, 25 bp, Homo sapien
tgacaggacatatacaaacaaggat

SEQ ID NO: 5207929 - DNA, 25 bp, Homo sapien
tagaatacaccaagaggacactctg

SEQ ID NO: 5207930 - DNA, 25 bp, Homo sapien
ttcacagtccataaaggcctatgca

SEQ ID NO: 5207931 - DNA, 25 bp, Homo sapien
cattcatgccagtacattccttagt

SEQ ID NO: 5207932 - DNA, 25 bp, Homo sapien
tcagggtaactttcctaacatcaca

SEQ ID NO: 5207933 - DNA, 25 bp, Homo sapien
tcaaaaataggacagctcgctttct

SEQ ID NO: 5207934 - DNA, 25 bp, Homo sapien
gaggcctctgctgttgatacccagg

SEQ ID NO: 5207935 - DNA, 25 bp, Homo sapien
caatctttgatgttctgaggcctct

SEQ ID NO: 5207936 - DNA, 25 bp, Homo sapien
ggcagcaatctttgatgttctgagg

SEQ ID NO: 5207937 - DNA, 25 bp, Homo sapien
ctgaggcctctgctgttgataccca

SEQ ID NO: 5207938 - DNA, 25 bp, Homo sapien
cagaaaagcgactgtggccagactt

SEQ ID NO: 5207939 - DNA, 25 bp, Homo sapien
cagtgttaaggaagcaaccgggaag

SEQ ID NO: 5207940 - DNA, 25 bp, Homo sapien
ggaagttcagactgtgtggaattca

SEQ ID NO: 5207941 - DNA, 25 bp, Homo sapien
gactgtgtggaattcaccccagcac

SEQ ID NO: 5207942 - DNA, 25 bp, Homo sapien
ccttatgcttgggaagtgtgcatgt

SEQ ID NO: 5207943 - DNA, 25 bp, Homo sapien
ggcgtcttgcaacctttttccttga

SEQ ID NO: 5207944 - DNA, 25 bp, Homo sapien
caccgagaaggtcaaatgcagcatt

SEQ ID NO: 5207945 - DNA, 25 bp, Homo sapien
taggagtttacaggctggcccacct

SEQ ID NO: 5207946 - DNA, 25 bp, Homo sapien
catgcatgacgtactacactttacc

SEQ ID NO: 5207947 - DNA, 25 bp, Homo sapien
gcaggactgcccaacggacataaat

SEQ ID NO: 5207948 - DNA, 25 bp, Homo sapien
cagtatgtgtagcttaggatggcag

SEQ ID NO: 5207949 - DNA, 25 bp, Homo sapien
aaagatgattgagttccattcccag

SEQ ID NO: 5207950 - DNA, 25 bp, Homo sapien
acacagatttgacagccagtgctgt

SEQ ID NO: 5207951 - DNA, 25 bp, Homo sapien
caccaaacatgcttgagagttaaca

SEQ ID NO: 5207952 - DNA, 25 bp, Homo sapien
gaaggctttctatcacactggcatt

SEQ ID NO: 5207953 - DNA, 25 bp, Homo sapien
cttatataccacaaccttactgaga

SEQ ID NO: 5207954 - DNA, 25 bp, Homo sapien
tcacatgttgacacagagccaccct

SEQ ID NO: 5207955 - DNA, 25 bp, Homo sapien
tcttttgggtgctaagcctaactgc

SEQ ID NO: 5207956 - DNA, 25 bp, Homo sapien
tgcaaacttgttagcctggagaagg

SEQ ID NO: 5207957 - DNA, 25 bp, Homo sapien
taaacacagccttggatcaacttgg

SEQ ID NO: 5207958 - DNA, 25 bp, Homo sapien
ctggactctcagagccaggtacgtt

SEQ ID NO: 5207959 - DNA, 25 bp, Homo sapien
ggtacgttgcctcagattcatcttt

SEQ ID NO: 5207960 - DNA, 25 bp, Homo sapien
tactgcagcaaaccactttgggcaa

SEQ ID NO: 5207961 - DNA, 25 bp, Homo sapien
tttgggcaaattcccagcaacaccc

SEQ ID NO: 5207962 - DNA, 25 bp, Homo sapien
ttcctgtgcagctatcttcatggag

SEQ ID NO: 5207963 - DNA, 25 bp, Homo sapien
ggagtttagaggtgactcccattga

SEQ ID NO: 5207964 - DNA, 25 bp, Homo sapien
cctgtgcagctatcttcatggagtt

SEQ ID NO: 5207965 - DNA, 25 bp, Homo sapien
gagtttagaggtgactcccattgaa

SEQ ID NO: 5207966 - DNA, 25 bp, Homo sapien
cagtaatggcctgctgacacttcac

SEQ ID NO: 5207967 - DNA, 25 bp, Homo sapien
catccaactgtcactgattcaaccc

SEQ ID NO: 5207968 - DNA, 25 bp, Homo sapien
ttacaaaggaatataaggtctgtta

SEQ ID NO: 5207969 - DNA, 25 bp, Homo sapien
tataaggtctgttatctttgctcag

SEQ ID NO: 5207970 - DNA, 25 bp, Homo sapien
cactcgtagccctgttcttgtgtag

SEQ ID NO: 5207971 - DNA, 25 bp, Homo sapien
tcactcgtagccctgttcttgtgta

SEQ ID NO: 5207972 - DNA, 25 bp, Homo sapien
gctagctacaggagcggagatttta

SEQ ID NO: 5207973 - DNA, 25 bp, Homo sapien
cagttaacatgagacagcagctagc

SEQ ID NO: 5207974 - DNA, 25 bp, Homo sapien
tttctggaattataacagttctatc

SEQ ID NO: 5207975 - DNA, 25 bp, Homo sapien
ctctacattcacctatgttgtcaca

SEQ ID NO: 5207976 - DNA, 25 bp, Homo sapien
attttgacttgtattcaccctcaat

SEQ ID NO: 5207977 - DNA, 25 bp, Homo sapien
ttcctcattgtattaggcttctcta

SEQ ID NO: 5207978 - DNA, 25 bp, Homo sapien
tgacttgtattcaccctcaattatt

SEQ ID NO: 5207979 - DNA, 25 bp, Homo sapien
aagtgtatacatgaaggagagttta

SEQ ID NO: 5207980 - DNA, 25 bp, Homo sapien
gaaactgtgtaccaggactgagggt

SEQ ID NO: 5207981 - DNA, 25 bp, Homo sapien
aaatgcaagccgacttcttagcagg

SEQ ID NO: 5207982 - DNA, 25 bp, Homo sapien
tgccctgcagcgaagacaatactag

SEQ ID NO: 5207983 - DNA, 25 bp, Homo sapien
aaagcactagcagtttgagcccagt

SEQ ID NO: 5207984 - DNA, 25 bp, Homo sapien
gactgctcgtgtaatctaaccctta

SEQ ID NO: 5207985 - DNA, 25 bp, Homo sapien
catggaaggcaattcaaatgcgatg

SEQ ID NO: 5207986 - DNA, 25 bp, Homo sapien
tacttgaaacaagttggactgctcg

SEQ ID NO: 5207987 - DNA, 25 bp, Homo sapien
gcattttgccagagtcattctagca

SEQ ID NO: 5207988 - DNA, 25 bp, Homo sapien
tgtgtctgacacttctgccaatcaa

SEQ ID NO: 5207989 - DNA, 25 bp, Homo sapien
tcatgaagtgtgttatcctgcaaca

SEQ ID NO: 5207990 - DNA, 25 bp, Homo sapien
ttgatttacctaggcagtgtctgtg

SEQ ID NO: 5207991 - DNA, 25 bp, Homo sapien
gcatcataaagtgacctagagagca

SEQ ID NO: 5207992 - DNA, 25 bp, Homo sapien
cattgagctgaataaatacgggacc

SEQ ID NO: 5207993 - DNA, 25 bp, Homo sapien
gatacagcagacgttctcatgaagc

SEQ ID NO: 5207994 - DNA, 25 bp, Homo sapien
tgcaagctgaggaaacaacatctac

SEQ ID NO: 5207995 - DNA, 25 bp, Homo sapien
taaagaacgttaagcaccatggaga

SEQ ID NO: 5207996 - DNA, 25 bp, Homo sapien
gttcaaagcggttgtttatagccat

SEQ ID NO: 5207997 - DNA, 25 bp, Homo sapien
ggttcaaagcggttgtttatagcca

SEQ ID NO: 5207998 - DNA, 25 bp, Homo sapien
ttgtccagaaggttcaaagcggttg

SEQ ID NO: 5207999 - DNA, 25 bp, Homo sapien
cagaaggttcaaagcggttgtttat

SEQ ID NO: 5208000 - DNA, 25 bp, Homo sapien
tagaatcctgattgttaagtatata

SEQ ID NO: 5208001 - DNA, 25 bp, Homo sapien
tttactagaatcctgattgttaagt

SEQ ID NO: 5208002 - DNA, 25 bp, Homo sapien
gagaactccgaagaccaacatctga

SEQ ID NO: 5208003 - DNA, 25 bp, Homo sapien
tggccccggagaactccgaagacca

SEQ ID NO: 5208004 - DNA, 25 bp, Homo sapien
taagccgaatcccatgcgcaagttg

SEQ ID NO: 5208005 - DNA, 25 bp, Homo sapien
agtaagccgaatcccatgcgcaagt

SEQ ID NO: 5208006 - DNA, 25 bp, Homo sapien
cgcgggcagtcacggacagtaagcc

SEQ ID NO: 5208007 - DNA, 25 bp, Homo sapien
tcacggacagtaagccgaatcccat

SEQ ID NO: 5208008 - DNA, 25 bp, Homo sapien
tgcgcttcttgcatgttcttcccct

SEQ ID NO: 5208009 - DNA, 25 bp, Homo sapien
gcgcttcttgcatgttcttcccctt

SEQ ID NO: 5208010 - DNA, 25 bp, Homo sapien
gttggctttccctgtgcactagggc

SEQ ID NO: 5208011 - DNA, 25 bp, Homo sapien
ttggctttccctgtgcactagggcc

SEQ ID NO: 5208012 - DNA, 25 bp, Homo sapien
ggctttccctgtgcactagggccct

SEQ ID NO: 5208013 - DNA, 25 bp, Homo sapien
tggctttccctgtgcactagggccc

SEQ ID NO: 5208014 - DNA, 25 bp, Homo sapien
tcccaccttctgtaatcgccagtgt

SEQ ID NO: 5208015 - DNA, 25 bp, Homo sapien
aatagcgaacgttgtacccaacagg

SEQ ID NO: 5208016 - DNA, 25 bp, Homo sapien
cattcattgtgtcgtggtgaagtct

SEQ ID NO: 5208017 - DNA, 25 bp, Homo sapien
tcactctgtaggaccacatgtaccc

SEQ ID NO: 5208018 - DNA, 25 bp, Homo sapien
tcatgaccagcaccataatctcagc

SEQ ID NO: 5208019 - DNA, 25 bp, Homo sapien
cagtggatctgaccacatctgacca

SEQ ID NO: 5208020 - DNA, 25 bp, Homo sapien
tactatcagcatcgatcatgaccag

SEQ ID NO: 5208021 - DNA, 25 bp, Homo sapien
tgagtggtcccctctaaacttggca

SEQ ID NO: 5208022 - DNA, 25 bp, Homo sapien
cagcctttacaacagtgcttatagc

SEQ ID NO: 5208023 - DNA, 25 bp, Homo sapien
tattgccagcctttacaacagtgct

SEQ ID NO: 5208024 - DNA, 25 bp, Homo sapien
cctttacaacagtgcttatagccat

SEQ ID NO: 5208025 - DNA, 25 bp, Homo sapien
gccagcctttacaacagtgcttata

SEQ ID NO: 5208026 - DNA, 25 bp, Homo sapien
ttatcatgggagtgaactggtgact

SEQ ID NO: 5208027 - DNA, 25 bp, Homo sapien
gcaatgtcttaaatgtttgtcccct

SEQ ID NO: 5208028 - DNA, 25 bp, Homo sapien
tcccacactctattttaggcatact

SEQ ID NO: 5208029 - DNA, 25 bp, Homo sapien
gaagagagacctcagcaagcaccat

SEQ ID NO: 5208030 - DNA, 25 bp, Homo sapien
agacagccggaggaggcaacttcat

SEQ ID NO: 5208031 - DNA, 25 bp, Homo sapien
tgctgtggggtgaatttccacaagt

SEQ ID NO: 5208032 - DNA, 25 bp, Homo sapien
accaaaagagataatctgctgtggg

SEQ ID NO: 5208033 - DNA, 25 bp, Homo sapien
tgataccaaaagagataatctgctg

SEQ ID NO: 5208034 - DNA, 25 bp, Homo sapien
gctgtgataccaaaagagataatct

SEQ ID NO: 5208035 - DNA, 25 bp, Homo sapien
aagactggccatttgcctgacaaca

SEQ ID NO: 5208036 - DNA, 25 bp, Homo sapien
cctgacaacagagcacggaaagaag

SEQ ID NO: 5208037 - DNA, 25 bp, Homo sapien
tgtgaattaaagaaggccaaagctg

SEQ ID NO: 5208038 - DNA, 25 bp, Homo sapien
cagagcacggaaagaaggccatgat

SEQ ID NO: 5208039 - DNA, 25 bp, Homo sapien
gggaaggcggagactaggacatgat

SEQ ID NO: 5208040 - DNA, 25 bp, Homo sapien
ctggggaaggcggagactaggacat

SEQ ID NO: 5208041 - DNA, 25 bp, Homo sapien
tggggaaggcggagactaggacatg

SEQ ID NO: 5208042 - DNA, 25 bp, Homo sapien
ggggaaggcggagactaggacatga

SEQ ID NO: 5208043 - DNA, 25 bp, Homo sapien
caccttgaatatctgccgtatgatc

SEQ ID NO: 5208044 - DNA, 25 bp, Homo sapien
aaaagcaccttgaatatctgccgta

SEQ ID NO: 5208045 - DNA, 25 bp, Homo sapien
tgaatatctgccgtatgatctctgg

SEQ ID NO: 5208046 - DNA, 25 bp, Homo sapien
atatctgccgtatgatctctggaag

SEQ ID NO: 5208047 - DNA, 25 bp, Homo sapien
ttttgagactctaaggatcgaagct

SEQ ID NO: 5208048 - DNA, 25 bp, Homo sapien
gacaggtattagaccatgtatagtc

SEQ ID NO: 5208049 - DNA, 25 bp, Homo sapien
gctagaatactaagcaggagagact

SEQ ID NO: 5208050 - DNA, 25 bp, Homo sapien
tgtgtcctaaacttgactggccact

SEQ ID NO: 5208051 - DNA, 25 bp, Homo sapien
catcattggtcattaggcaaacaca

SEQ ID NO: 5208052 - DNA, 25 bp, Homo sapien
tggaaagtgtttcaagccaatagct

SEQ ID NO: 5208053 - DNA, 25 bp, Homo sapien
taatacacagagtgactcctagggc

SEQ ID NO: 5208054 - DNA, 25 bp, Homo sapien
cccttgtgtactgtcaaagaggcta

SEQ ID NO: 5208055 - DNA, 25 bp, Homo sapien
attcctggtggctctatcccattct

SEQ ID NO: 5208056 - DNA, 25 bp, Homo sapien
gctgtgtgttcctagctcacagatt

SEQ ID NO: 5208057 - DNA, 25 bp, Homo sapien
cacccccatgaggcaagaattcctg

SEQ ID NO: 5208058 - DNA, 25 bp, Homo sapien
aacaccagggaccatataggctgaa

SEQ ID NO: 5208059 - DNA, 25 bp, Homo sapien
aaactgtcctgatgacttgtctgaa

SEQ ID NO: 5208060 - DNA, 25 bp, Homo sapien
gtcctgatgacttgtctgaattcat

SEQ ID NO: 5208061 - DNA, 25 bp, Homo sapien
ggaaacagaaactgtcctgatgact

SEQ ID NO: 5208062 - DNA, 25 bp, Homo sapien
aacagaaactgtcctgatgacttgt

SEQ ID NO: 5208063 - DNA, 25 bp, Homo sapien
atgtgtgggaggcaactcttctctc

SEQ ID NO: 5208064 - DNA, 25 bp, Homo sapien
gggaggcaactcttctctcactgtg

SEQ ID NO: 5208065 - DNA, 25 bp, Homo sapien
ggtttgaagctctcgccctgatact

SEQ ID NO: 5208066 - DNA, 25 bp, Homo sapien
aaaggtttgaagctctcgccctgat

SEQ ID NO: 5208067 - DNA, 25 bp, Homo sapien
gtaatagaaatccagatttatgcca

SEQ ID NO: 5208068 - DNA, 25 bp, Homo sapien
ggctgtaatagaaatccagatttat

SEQ ID NO: 5208069 - DNA, 25 bp, Homo sapien
gaactcttcaatagctctccatttc

SEQ ID NO: 5208070 - DNA, 25 bp, Homo sapien
ctgtagaactcttcaatagctctcc

SEQ ID NO: 5208071 - DNA, 25 bp, Homo sapien
catagtgacactagcagctgtggtc

SEQ ID NO: 5208072 - DNA, 25 bp, Homo sapien
tgacactagcagctgtggtcaggaa

SEQ ID NO: 5208073 - DNA, 25 bp, Homo sapien
tagtgacactagcagctgtggtcag

SEQ ID NO: 5208074 - DNA, 25 bp, Homo sapien
gccatagtgacactagcagctgtgg

SEQ ID NO: 5208075 - DNA, 25 bp, Homo sapien
aaattctcagcatgtcatcgtttcc

SEQ ID NO: 5208076 - DNA, 25 bp, Homo sapien
gcatgtcatcgtttcctgagacctc

SEQ ID NO: 5208077 - DNA, 25 bp, Homo sapien
ggcccacaaacttgcaaagttctcc

SEQ ID NO: 5208078 - DNA, 25 bp, Homo sapien
cacaaacttgcaaagttctccatgg

SEQ ID NO: 5208079 - DNA, 25 bp, Homo sapien
tgccaagaaccatagaactccacag

SEQ ID NO: 5208080 - DNA, 25 bp, Homo sapien
tctcgaaatctaactctggcaggag

SEQ ID NO: 5208081 - DNA, 25 bp, Homo sapien
caggcatccatatctggacaaggga

SEQ ID NO: 5208082 - DNA, 25 bp, Homo sapien
taagtattgctcatgcccactgggc

SEQ ID NO: 5208083 - DNA, 25 bp, Homo sapien
agtttgaggacagatgtactgcttc

SEQ ID NO: 5208084 - DNA, 25 bp, Homo sapien
tgcttcctgtttgtggcctacactt

SEQ ID NO: 5208085 - DNA, 25 bp, Homo sapien
gagtttgaggacagatgtactgctt

SEQ ID NO: 5208086 - DNA, 25 bp, Homo sapien
tttgtggcctacacttccaactgtt

SEQ ID NO: 5208087 - DNA, 25 bp, Homo sapien
gtcttccaggtatgaattttcaaac

SEQ ID NO: 5208088 - DNA, 25 bp, Homo sapien
tcttccaggtatgaattttcaaact

SEQ ID NO: 5208089 - DNA, 25 bp, Homo sapien
ttccaggtatgaattttcaaacttc

SEQ ID NO: 5208090 - DNA, 25 bp, Homo sapien
tagtcttccaggtatgaattttcaa

SEQ ID NO: 5208091 - DNA, 25 bp, Homo sapien
tacaagaagggaacaaacatatgaa

SEQ ID NO: 5208092 - DNA, 25 bp, Homo sapien
gggaacatttacacactgtttgtag

SEQ ID NO: 5208093 - DNA, 25 bp, Homo sapien
aaatttgtccagctactattgaaag

SEQ ID NO: 5208094 - DNA, 25 bp, Homo sapien
aagtcatacaagatgttagcaaggc

SEQ ID NO: 5208095 - DNA, 25 bp, Homo sapien
cattcataggtgagctcattgaaac

SEQ ID NO: 5208096 - DNA, 25 bp, Homo sapien
acattcataggtgagctcattgaaa

SEQ ID NO: 5208097 - DNA, 25 bp, Homo sapien
actgggtgaagggtgaaattcgttg

SEQ ID NO: 5208098 - DNA, 25 bp, Homo sapien
gaagggtgaaattcgttgataattc

SEQ ID NO: 5208099 - DNA, 25 bp, Homo sapien
attgcagtttgctgatacatcctag

SEQ ID NO: 5208100 - DNA, 25 bp, Homo sapien
gagttattgccatatcagatgatta

SEQ ID NO: 5208101 - DNA, 25 bp, Homo sapien
ttcagagttattgccatatcagatg

SEQ ID NO: 5208102 - DNA, 25 bp, Homo sapien
agtttgctgatacatcctagccaga

SEQ ID NO: 5208103 - DNA, 25 bp, Homo sapien
ctttcctcttttgaagagatattgg

SEQ ID NO: 5208104 - DNA, 25 bp, Homo sapien
ttgtatcataatggcattggggccc

SEQ ID NO: 5208105 - DNA, 25 bp, Homo sapien
tcctcttttgaagagatattggtct

SEQ ID NO: 5208106 - DNA, 25 bp, Homo sapien
gattgtatcataatggcattggggc

SEQ ID NO: 5208107 - DNA, 25 bp, Homo sapien
gatgtcatttcgctggaattcccaa

SEQ ID NO: 5208108 - DNA, 25 bp, Homo sapien
tagcatcagtggctttcctggatca

SEQ ID NO: 5208109 - DNA, 25 bp, Homo sapien
tggccaacagatgtaagcagatgtc

SEQ ID NO: 5208110 - DNA, 25 bp, Homo sapien
gaaaatagctgtagcatcagtggct

SEQ ID NO: 5208111 - DNA, 25 bp, Homo sapien
acctggtcccgtccttgatacacag

SEQ ID NO: 5208112 - DNA, 25 bp, Homo sapien
acagtttgagggaaaccgccctcat

SEQ ID NO: 5208113 - DNA, 25 bp, Homo sapien
cccgtccttgatacacaggtattat

SEQ ID NO: 5208114 - DNA, 25 bp, Homo sapien
agtttgagggaaaccgccctcatga

SEQ ID NO: 5208115 - DNA, 25 bp, Homo sapien
tggccgacgaccaaaatagactcct

SEQ ID NO: 5208116 - DNA, 25 bp, Homo sapien
tcctgttgtcggtgccaagataaac

SEQ ID NO: 5208117 - DNA, 25 bp, Homo sapien
ggccagaaactactactcccattga

SEQ ID NO: 5208118 - DNA, 25 bp, Homo sapien
ctttgttaaagtgagccctggccga

SEQ ID NO: 5208119 - DNA, 25 bp, Homo sapien
ttgtaaagccagatcactacagcaa

SEQ ID NO: 5208120 - DNA, 25 bp, Homo sapien
ctcatgtcaacaccatccttggcca

SEQ ID NO: 5208121 - DNA, 25 bp, Homo sapien
taaagccagatcactacagcaaacc

SEQ ID NO: 5208122 - DNA, 25 bp, Homo sapien
ccagatcactacagcaaacctcatg

SEQ ID NO: 5208123 - DNA, 25 bp, Homo sapien
gctaattatggtgaggatcctgtaa

SEQ ID NO: 5208124 - DNA, 25 bp, Homo sapien
cagtatgtgctccataggcttagct

SEQ ID NO: 5208125 - DNA, 25 bp, Homo sapien
tccttggaagccaggaccttgtttg

SEQ ID NO: 5208126 - DNA, 25 bp, Homo sapien
tattgctgctaccagggtgagggac

SEQ ID NO: 5208127 - DNA, 25 bp, Homo sapien
ctcctcagtgggcctagggagtttt

SEQ ID NO: 5208128 - DNA, 25 bp, Homo sapien
cctcctcagtgggcctagggagttt

SEQ ID NO: 5208129 - DNA, 25 bp, Homo sapien
ttatttttcaatagcaagaacagaa

SEQ ID NO: 5208130 - DNA, 25 bp, Homo sapien
agtttttcctactgtctctacagga

SEQ ID NO: 5208131 - DNA, 25 bp, Homo sapien
tcctactgtctctacaggaaataac

SEQ ID NO: 5208132 - DNA, 25 bp, Homo sapien
caagaacagaaaaataaccctcagt

SEQ ID NO: 5208133 - DNA, 25 bp, Homo sapien
caacaaacctatagtcagactaaga

SEQ ID NO: 5208134 - DNA, 25 bp, Homo sapien
aaatcaacaaacctatagtcagact

SEQ ID NO: 5208135 - DNA, 25 bp, Homo sapien
caaaatcaacaaacctatagtcaga

SEQ ID NO: 5208136 - DNA, 25 bp, Homo sapien
tcaacaaacctatagtcagactaag

SEQ ID NO: 5208137 - DNA, 25 bp, Homo sapien
taatgcatccagacagcatgtaggt

SEQ ID NO: 5208138 - DNA, 25 bp, Homo sapien
ctgaagaatgtgggccctgtcacca

SEQ ID NO: 5208139 - DNA, 25 bp, Homo sapien
agaatgtgggccctgtcaccatacc

SEQ ID NO: 5208140 - DNA, 25 bp, Homo sapien
gcatgtaggtcacccaatactcatt

SEQ ID NO: 5208141 - DNA, 25 bp, Homo sapien
ctttgtcaacagaggtggaggattt

SEQ ID NO: 5208142 - DNA, 25 bp, Homo sapien
agctttgtcaacagaggtggaggat

SEQ ID NO: 5208143 - DNA, 25 bp, Homo sapien
gctttgtcaacagaggtggaggatt

SEQ ID NO: 5208144 - DNA, 25 bp, Homo sapien
aaactttgaattcagtccaaagtca

SEQ ID NO: 5208145 - DNA, 25 bp, Homo sapien
tctgagatagattaccaacttagtt

SEQ ID NO: 5208146 - DNA, 25 bp, Homo sapien
ctgggtaactttattcaagactttg

SEQ ID NO: 5208147 - DNA, 25 bp, Homo sapien
taaatctatacttatcctgaatatc

SEQ ID NO: 5208148 - DNA, 25 bp, Homo sapien
tggacacataatctggaacctctga

SEQ ID NO: 5208149 - DNA, 25 bp, Homo sapien
tagctgtttactctaactgaccacc

SEQ ID NO: 5208150 - DNA, 25 bp, Homo sapien
tgaaacctgcttagaactgtcagct

SEQ ID NO: 5208151 - DNA, 25 bp, Homo sapien
ctgaccaccctgcaattgaaacctg

SEQ ID NO: 5208152 - DNA, 25 bp, Homo sapien
ttaagcattccactgttgattgaca

SEQ ID NO: 5208153 - DNA, 25 bp, Homo sapien
tcacgtacagaaggtttaagaatag

SEQ ID NO: 5208154 - DNA, 25 bp, Homo sapien
gattgacactgtcacgtacagaagg

SEQ ID NO: 5208155 - DNA, 25 bp, Homo sapien
agcattccactgttgattgacactg

SEQ ID NO: 5208156 - DNA, 25 bp, Homo sapien
ctcccacaagcttctgatacctgaa

SEQ ID NO: 5208157 - DNA, 25 bp, Homo sapien
gatacctgaagataaggcaccttga

SEQ ID NO: 5208158 - DNA, 25 bp, Homo sapien
ggcaccttgaatatgctgtgtagct

SEQ ID NO: 5208159 - DNA, 25 bp, Homo sapien
caccttgaatatgctgtgtagctta

SEQ ID NO: 5208160 - DNA, 25 bp, Homo sapien
aaggtgaccttctctaaacaagtct

SEQ ID NO: 5208161 - DNA, 25 bp, Homo sapien
cctcagcagaatgatttggtctctc

SEQ ID NO: 5208162 - DNA, 25 bp, Homo sapien
ttggttgaccttgtcctcagcagaa

SEQ ID NO: 5208163 - DNA, 25 bp, Homo sapien
tttggtctctcaaaggtgaccttct

SEQ ID NO: 5208164 - DNA, 25 bp, Homo sapien
gaagagtgaagtcagggtatttaac

SEQ ID NO: 5208165 - DNA, 25 bp, Homo sapien
aagatgaagagtgaagtcagggtat

SEQ ID NO: 5208166 - DNA, 25 bp, Homo sapien
tgaagagtgaagtcagggtatttaa

SEQ ID NO: 5208167 - DNA, 25 bp, Homo sapien
gatgaagagtgaagtcagggtattt

SEQ ID NO: 5208168 - DNA, 25 bp, Homo sapien
tgatgtagccatcaatctgataaaa

SEQ ID NO: 5208169 - DNA, 25 bp, Homo sapien
tatgtgctctctattttgatgtagc

SEQ ID NO: 5208170 - DNA, 25 bp, Homo sapien
tctattttgatgtagccatcaatct

SEQ ID NO: 5208171 - DNA, 25 bp, Homo sapien
ttttgatgtagccatcaatctgata

SEQ ID NO: 5208172 - DNA, 25 bp, Homo sapien
ctgctatcagcaagtgatgctggaa

SEQ ID NO: 5208173 - DNA, 25 bp, Homo sapien
tcagcaagtgatgctggaagagtct

SEQ ID NO: 5208174 - DNA, 25 bp, Homo sapien
gaaatattagggtcgcataactcat

SEQ ID NO: 5208175 - DNA, 25 bp, Homo sapien
gactctgaaatattagggtcgcata

SEQ ID NO: 5208176 - DNA, 25 bp, Homo sapien
cattaacttctttgacgaggattgt

SEQ ID NO: 5208177 - DNA, 25 bp, Homo sapien
aattggagaccagtgcgtgttaaag

SEQ ID NO: 5208178 - DNA, 25 bp, Homo sapien
tctttgacgaggattgtaattggag

SEQ ID NO: 5208179 - DNA, 25 bp, Homo sapien
tcattggtaaatttagtactcttcc

SEQ ID NO: 5208180 - DNA, 25 bp, Homo sapien
aaactgtattggtccactggctgaa

SEQ ID NO: 5208181 - DNA, 25 bp, Homo sapien
gtcatctgccaaccataaaaactgt

SEQ ID NO: 5208182 - DNA, 25 bp, Homo sapien
aatgtcatctgccaaccataaaaac

SEQ ID NO: 5208183 - DNA, 25 bp, Homo sapien
tgtattggtccactggctgaatgag

SEQ ID NO: 5208184 - DNA, 25 bp, Homo sapien
tttactctctttgtgttgagtctta

SEQ ID NO: 5208185 - DNA, 25 bp, Homo sapien
gttgacagaataactctttttactc

SEQ ID NO: 5208186 - DNA, 25 bp, Homo sapien
tcaagacccttcgttgacagaataa

SEQ ID NO: 5208187 - DNA, 25 bp, Homo sapien
ccttcgttgacagaataactctttt

SEQ ID NO: 5208188 - DNA, 25 bp, Homo sapien
gcgtgtagtacattctagtaccaac

SEQ ID NO: 5208189 - DNA, 25 bp, Homo sapien
ttttgtggtctatattgagcgtgta

SEQ ID NO: 5208190 - DNA, 25 bp, Homo sapien
cattctagtaccaacttttagaggc

SEQ ID NO: 5208191 - DNA, 25 bp, Homo sapien
tctatattgagcgtgtagtacattc

SEQ ID NO: 5208192 - DNA, 25 bp, Homo sapien
cccttctggaccttgtttgtagtca

SEQ ID NO: 5208193 - DNA, 25 bp, Homo sapien
agtagcagataagtctgtgcttaag

SEQ ID NO: 5208194 - DNA, 25 bp, Homo sapien
gtgcttaaggtcttctcccttctgg

SEQ ID NO: 5208195 - DNA, 25 bp, Homo sapien
tctcccttctggaccttgtttgtag

SEQ ID NO: 5208196 - DNA, 25 bp, Homo sapien
ctgatactgagagctgtcagaggag

SEQ ID NO: 5208197 - DNA, 25 bp, Homo sapien
gtcagaggagtacatctgtcacccg

SEQ ID NO: 5208198 - DNA, 25 bp, Homo sapien
tactgagagctgtcagaggagtaca

SEQ ID NO: 5208199 - DNA, 25 bp, Homo sapien
ggagtacatctgtcacccgctgcct

SEQ ID NO: 5208200 - DNA, 25 bp, Homo sapien
gctggcaggcatgagtgttattata

SEQ ID NO: 5208201 - DNA, 25 bp, Homo sapien
ttattatagtgagcggcgttgccgg

SEQ ID NO: 5208202 - DNA, 25 bp, Homo sapien
ctcggcgcctgcactcggagttgct

SEQ ID NO: 5208203 - DNA, 25 bp, Homo sapien
gcgttgccggtccattgcactgagc

SEQ ID NO: 5208204 - DNA, 25 bp, Homo sapien
cccgcgggaggattccagcctagga

SEQ ID NO: 5208205 - DNA, 25 bp, Homo sapien
tcagattcgcgtcgggacgacgagc

SEQ ID NO: 5208206 - DNA, 25 bp, Homo sapien
acgtcctctggagactggctcactg

SEQ ID NO: 5208207 - DNA, 25 bp, Homo sapien
tttctcctcagattcgcgtcgggac

SEQ ID NO: 5208208 - DNA, 25 bp, Homo sapien
gatgcgtggagctgatgacaatgta

SEQ ID NO: 5208209 - DNA, 25 bp, Homo sapien
ttcttgctgagagggccccggaaaa

SEQ ID NO: 5208210 - DNA, 25 bp, Homo sapien
tcccttgatgttgcgaaagtgtccg

SEQ ID NO: 5208211 - DNA, 25 bp, Homo sapien
aaagtgtccgttgctgagatgcgtg

SEQ ID NO: 5208212 - DNA, 25 bp, Homo sapien
tagtcaactagaaacaacatagctg

SEQ ID NO: 5208213 - DNA, 25 bp, Homo sapien
caggcccaggaacttttcactgatg

SEQ ID NO: 5208214 - DNA, 25 bp, Homo sapien
caaaggtgaccctgttgaatcaggc

SEQ ID NO: 5208215 - DNA, 25 bp, Homo sapien
gaatcaggcttattgaggaaccaaa

SEQ ID NO: 5208216 - DNA, 25 bp, Homo sapien
actaaatatgaatgtgtgacatcca

SEQ ID NO: 5208217 - DNA, 25 bp, Homo sapien
taaatatgaatgtgtgacatccaaa

SEQ ID NO: 5208218 - DNA, 25 bp, Homo sapien
acctcatctctcatactaaatatga

SEQ ID NO: 5208219 - DNA, 25 bp, Homo sapien
ctcatctctcatactaaatatgaat

SEQ ID NO: 5208220 - DNA, 25 bp, Homo sapien
tttgttcccattgcctgtgacagtt

SEQ ID NO: 5208221 - DNA, 25 bp, Homo sapien
tgacagttatacataagaaactcca

SEQ ID NO: 5208222 - DNA, 25 bp, Homo sapien
tgcctgtgacagttatacataagaa

SEQ ID NO: 5208223 - DNA, 25 bp, Homo sapien
tcccattgcctgtgacagttataca

SEQ ID NO: 5208224 - DNA, 25 bp, Homo sapien
ctggaggattagttgtaatgtcacc

SEQ ID NO: 5208225 - DNA, 25 bp, Homo sapien
aatttcacaacagtatattggtctg

SEQ ID NO: 5208226 - DNA, 25 bp, Homo sapien
tctgttcagagctttaattacttcc

SEQ ID NO: 5208227 - DNA, 25 bp, Homo sapien
ttaattacttcctgtcttgggagac

SEQ ID NO: 5208228 - DNA, 25 bp, Homo sapien
gacagcttagctactttttatctta

SEQ ID NO: 5208229 - DNA, 25 bp, Homo sapien
tatatcatccgtgaagtgagacagc

SEQ ID NO: 5208230 - DNA, 25 bp, Homo sapien
tcttatttggttgcctttcactcca

SEQ ID NO: 5208231 - DNA, 25 bp, Homo sapien
tctcagatgttaagaaatgctactg

SEQ ID NO: 5208232 - DNA, 25 bp, Homo sapien
aattctcttattggcaggtgtttag

SEQ ID NO: 5208233 - DNA, 25 bp, Homo sapien
tgtgttttttcatagtagactacgt

SEQ ID NO: 5208234 - DNA, 25 bp, Homo sapien
gctttgtgactttattcaataattc

SEQ ID NO: 5208235 - DNA, 25 bp, Homo sapien
tcaataattctcttattggcaggtg

SEQ ID NO: 5208236 - DNA, 25 bp, Homo sapien
tgctcagactgtcagaggaatgaac

SEQ ID NO: 5208237 - DNA, 25 bp, Homo sapien
ggtatgagatatacactgcagtcta

SEQ ID NO: 5208238 - DNA, 25 bp, Homo sapien
tgtaaactaacccatcgattcaaag

SEQ ID NO: 5208239 - DNA, 25 bp, Homo sapien
aacctagtgggtgtcatattccttg

SEQ ID NO: 5208240 - DNA, 25 bp, Homo sapien
gaagacttgggtaaaaatgcctaga

SEQ ID NO: 5208241 - DNA, 25 bp, Homo sapien
tacaagtatatgcatgtgagccaat

SEQ ID NO: 5208242 - DNA, 25 bp, Homo sapien
caacaccaagtctcatgagtgggca

SEQ ID NO: 5208243 - DNA, 25 bp, Homo sapien
tacctacggacagtattgcatctgg

SEQ ID NO: 5208244 - DNA, 25 bp, Homo sapien
catcttcagacagtctgtcagacca

SEQ ID NO: 5208245 - DNA, 25 bp, Homo sapien
tctctaggtgcaaagtcctatcatc

SEQ ID NO: 5208246 - DNA, 25 bp, Homo sapien
tctgtactgaggaattagaatacca

SEQ ID NO: 5208247 - DNA, 25 bp, Homo sapien
aacttcttccaatgtcacaagtgaa

SEQ ID NO: 5208248 - DNA, 25 bp, Homo sapien
accacacctgccgaatttgtgtact

SEQ ID NO: 5208249 - DNA, 25 bp, Homo sapien
gccaccacacctgccgaatttgtgt

SEQ ID NO: 5208250 - DNA, 25 bp, Homo sapien
cacacctgccgaatttgtgtacttt

SEQ ID NO: 5208251 - DNA, 25 bp, Homo sapien
agagacagggcttcagggtttcacc

SEQ ID NO: 5208252 - DNA, 25 bp, Homo sapien
tgccaatatctgttattcttgagta

SEQ ID NO: 5208253 - DNA, 25 bp, Homo sapien
aacactaatgtagggtacagtttca

SEQ ID NO: 5208254 - DNA, 25 bp, Homo sapien
ccgggaacactaatgtagggtacag

SEQ ID NO: 5208255 - DNA, 25 bp, Homo sapien
tattcaacaatattacaatgccaat

SEQ ID NO: 5208256 - DNA, 25 bp, Homo sapien
tatttctatgtgactctgcaagagg

SEQ ID NO: 5208257 - DNA, 25 bp, Homo sapien
tgctaactaataaaggagcagggct

SEQ ID NO: 5208258 - DNA, 25 bp, Homo sapien
gagcgggttgccctatttcaaacat

SEQ ID NO: 5208259 - DNA, 25 bp, Homo sapien
ttaagtcttcagaggctaaagcaga

SEQ ID NO: 5208260 - DNA, 25 bp, Homo sapien
tggctgaacacaatttgatttacaa

SEQ ID NO: 5208261 - DNA, 25 bp, Homo sapien
ggctgaacacaatttgatttacaaa

SEQ ID NO: 5208262 - DNA, 25 bp, Homo sapien
acacaatttgatttacaaatttatc

SEQ ID NO: 5208263 - DNA, 25 bp, Homo sapien
gctgaacacaatttgatttacaaat

SEQ ID NO: 5208264 - DNA, 25 bp, Homo sapien
catgacggcaagtgttatattgatt

SEQ ID NO: 5208265 - DNA, 25 bp, Homo sapien
tctcctgctctaaccaaataacatg

SEQ ID NO: 5208266 - DNA, 25 bp, Homo sapien
atattttagagtctcctcaatggca

SEQ ID NO: 5208267 - DNA, 25 bp, Homo sapien
cagtctcttactgtagcaggacgag

SEQ ID NO: 5208268 - DNA, 25 bp, Homo sapien
ctagcatttaattgtaagcgtaatt

SEQ ID NO: 5208269 - DNA, 25 bp, Homo sapien
gcttggctgaatcctagcatttaat

SEQ ID NO: 5208270 - DNA, 25 bp, Homo sapien
ttaattgtaagcgtaatttgccacc

SEQ ID NO: 5208271 - DNA, 25 bp, Homo sapien
gtaagcgtaatttgccacctccata

SEQ ID NO: 5208272 - DNA, 25 bp, Homo sapien
tctgtgatcttccaaggtcaaatct

SEQ ID NO: 5208273 - DNA, 25 bp, Homo sapien
gatcttccaaggtcaaatctgacac

SEQ ID NO: 5208274 - DNA, 25 bp, Homo sapien
actccttctcgcttttcctctgtga

SEQ ID NO: 5208275 - DNA, 25 bp, Homo sapien
tactccttctcgcttttcctctgtg

SEQ ID NO: 5208276 - DNA, 25 bp, Homo sapien
ttattcatcaatgtatcctctgtgc

SEQ ID NO: 5208277 - DNA, 25 bp, Homo sapien
tattcatcaatgtatcctctgtgcc

SEQ ID NO: 5208278 - DNA, 25 bp, Homo sapien
taaaaagtttgaagtgagtgtgtgg

SEQ ID NO: 5208279 - DNA, 25 bp, Homo sapien
tcatctataatagaaccagatcaac

SEQ ID NO: 5208280 - DNA, 25 bp, Homo sapien
ttcacacttagttaaatatgctgac

SEQ ID NO: 5208281 - DNA, 25 bp, Homo sapien
tgtgggggcctactttctatataaa

SEQ ID NO: 5208282 - DNA, 25 bp, Homo sapien
tgaatttccattgttcgcttgcagc

SEQ ID NO: 5208283 - DNA, 25 bp, Homo sapien
gaatttccattgttcgcttgcagca

SEQ ID NO: 5208284 - DNA, 25 bp, Homo sapien
aatttccattgttcgcttgcagcat

SEQ ID NO: 5208285 - DNA, 25 bp, Homo sapien
gagcaaatgttcactccatatttaa

SEQ ID NO: 5208286 - DNA, 25 bp, Homo sapien
tgatgaataatttggatgtattaac

SEQ ID NO: 5208287 - DNA, 25 bp, Homo sapien
aaaaatattagcttcagcccagttt

SEQ ID NO: 5208288 - DNA, 25 bp, Homo sapien
ctagtgcttatttagggtcagtcac

SEQ ID NO: 5208289 - DNA, 25 bp, Homo sapien
ttagcggaacagacttcttggtcaa

SEQ ID NO: 5208290 - DNA, 25 bp, Homo sapien
ttttagcggaacagacttcttggtc

SEQ ID NO: 5208291 - DNA, 25 bp, Homo sapien
tttagcggaacagacttcttggtca

SEQ ID NO: 5208292 - DNA, 25 bp, Homo sapien
tagcggaacagacttcttggtcaaa

SEQ ID NO: 5208293 - DNA, 25 bp, Homo sapien
ctagagaagcaataattggtttctg

SEQ ID NO: 5208294 - DNA, 25 bp, Homo sapien
tctagagaagcaataattggtttct

SEQ ID NO: 5208295 - DNA, 25 bp, Homo sapien
agagaagcaataattggtttctgtt

SEQ ID NO: 5208296 - DNA, 25 bp, Homo sapien
gaagcaataattggtttctgtttac

SEQ ID NO: 5208297 - DNA, 25 bp, Homo sapien
gaaaattggacaatgtttccgtgtg

SEQ ID NO: 5208298 - DNA, 25 bp, Homo sapien
tgaataagtgaaaattggacaatgt

SEQ ID NO: 5208299 - DNA, 25 bp, Homo sapien
tggacaatgtttccgtgtgtaaaca

SEQ ID NO: 5208300 - DNA, 25 bp, Homo sapien
gtttccgtgtgtaaacattattcat

SEQ ID NO: 5208301 - DNA, 25 bp, Homo sapien
gaacaagttcctatgctaggttagc

SEQ ID NO: 5208302 - DNA, 25 bp, Homo sapien
ggattcctggcaatgactcagctaa

SEQ ID NO: 5208303 - DNA, 25 bp, Homo sapien
tcctgacccatatcaatttagaatg

SEQ ID NO: 5208304 - DNA, 25 bp, Homo sapien
tcaaggaaggatacaattagctctc

SEQ ID NO: 5208305 - DNA, 25 bp, Homo sapien
cttccagagcttttgctatggtatt

SEQ ID NO: 5208306 - DNA, 25 bp, Homo sapien
ttatagtactgcttgtcacagagtt

SEQ ID NO: 5208307 - DNA, 25 bp, Homo sapien
tatagtactgcttgtcacagagttc

SEQ ID NO: 5208308 - DNA, 25 bp, Homo sapien
agtttttgctccctaccctcaacag

SEQ ID NO: 5208309 - DNA, 25 bp, Homo sapien
tagtttttgctccctaccctcaaca

SEQ ID NO: 5208310 - DNA, 25 bp, Homo sapien
cctcaacaggggctgagtcaataga

SEQ ID NO: 5208311 - DNA, 25 bp, Homo sapien
caggggctgagtcaatagacagcca

SEQ ID NO: 5208312 - DNA, 25 bp, Homo sapien
gcgtctccccttctacgggtcaatg

SEQ ID NO: 5208313 - DNA, 25 bp, Homo sapien
aatgcgtctccccttctacgggtca

SEQ ID NO: 5208314 - DNA, 25 bp, Homo sapien
tttgtaatgcgtctccccttctacg

SEQ ID NO: 5208315 - DNA, 25 bp, Homo sapien
tgtatctttgtaatgcgtctcccct

SEQ ID NO: 5208316 - DNA, 25 bp, Homo sapien
ctccctggtaaaatagacatctctg

SEQ ID NO: 5208317 - DNA, 25 bp, Homo sapien
tccatagcaggattaccaggtctca

SEQ ID NO: 5208318 - DNA, 25 bp, Homo sapien
taaccttcaggtgactcaaaccgag

SEQ ID NO: 5208319 - DNA, 25 bp, Homo sapien
gagtctagttgtgccctcagtccta

SEQ ID NO: 5208320 - DNA, 25 bp, Homo sapien
tcttggcactatggttctgtattct

SEQ ID NO: 5208321 - DNA, 25 bp, Homo sapien
gtttcagtagcacattcatcttggc

SEQ ID NO: 5208322 - DNA, 25 bp, Homo sapien
tcagctgaagtagttggttgcaaat

SEQ ID NO: 5208323 - DNA, 25 bp, Homo sapien
gggctccatctttgctatctgtcga

SEQ ID NO: 5208324 - DNA, 25 bp, Homo sapien
tgcatgtgcttttcaatagccacac

SEQ ID NO: 5208325 - DNA, 25 bp, Homo sapien
catatcctgaaaatggtttctgcat

SEQ ID NO: 5208326 - DNA, 25 bp, Homo sapien
ttttcaatagccacacatatattac

SEQ ID NO: 5208327 - DNA, 25 bp, Homo sapien
tatattacatctcttacacatttga

SEQ ID NO: 5208328 - DNA, 25 bp, Homo sapien
taaggactccagggcaaatgagctt

SEQ ID NO: 5208329 - DNA, 25 bp, Homo sapien
ctgcaacattgttgatagctttcct

SEQ ID NO: 5208330 - DNA, 25 bp, Homo sapien
ttaaggactccagggcaaatgagct

SEQ ID NO: 5208331 - DNA, 25 bp, Homo sapien
tgcaacattgttgatagctttcctt

SEQ ID NO: 5208332 - DNA, 25 bp, Homo sapien
tatgtagcaccattgatacgcagca

SEQ ID NO: 5208333 - DNA, 25 bp, Homo sapien
ttatatgtagcaccattgatacgca

SEQ ID NO: 5208334 - DNA, 25 bp, Homo sapien
atgtagcaccattgatacgcagcat

SEQ ID NO: 5208335 - DNA, 25 bp, Homo sapien
tcttcttcgcgtagttttaaattca

SEQ ID NO: 5208336 - DNA, 25 bp, Homo sapien
tgctcattgaggatgtcaaggccaa

SEQ ID NO: 5208337 - DNA, 25 bp, Homo sapien
aaatatctcagaagagcaccaggag

SEQ ID NO: 5208338 - DNA, 25 bp, Homo sapien
gctctataagactgatgtggccaag

SEQ ID NO: 5208339 - DNA, 25 bp, Homo sapien
tctgccatgaagagcgaagctaaca

SEQ ID NO: 5208340 - DNA, 25 bp, Homo sapien
tatatgactgggatcaaagactggg

SEQ ID NO: 5208341 - DNA, 25 bp, Homo sapien
gatctcccttatctactgcatgctg

SEQ ID NO: 5208342 - DNA, 25 bp, Homo sapien
ggaattagattagccccaatgggac

SEQ ID NO: 5208343 - DNA, 25 bp, Homo sapien
ccaatgggacaatgttaaacttagc

SEQ ID NO: 5208344 - DNA, 25 bp, Homo sapien
tttatatctatgccttaggcaaatt

SEQ ID NO: 5208345 - DNA, 25 bp, Homo sapien
ttatatctatgccttaggcaaattt

SEQ ID NO: 5208346 - DNA, 25 bp, Homo sapien
atttatatctatgccttaggcaaat

SEQ ID NO: 5208347 - DNA, 25 bp, Homo sapien
tgtgcaggcgttggagtgccttttc

SEQ ID NO: 5208348 - DNA, 25 bp, Homo sapien
cagcttgtgcaggcgttggagtgcc

SEQ ID NO: 5208349 - DNA, 25 bp, Homo sapien
gcttgtgcaggcgttggagtgcctt

SEQ ID NO: 5208350 - DNA, 25 bp, Homo sapien
cttgtgcaggcgttggagtgccttt

SEQ ID NO: 5208351 - DNA, 25 bp, Homo sapien
gtaacagttgttgatttgaacatgg

SEQ ID NO: 5208352 - DNA, 25 bp, Homo sapien
taacagttgttgatttgaacatggg

SEQ ID NO: 5208353 - DNA, 25 bp, Homo sapien
tgttgatttgaacatggggccactt

SEQ ID NO: 5208354 - DNA, 25 bp, Homo sapien
agtaacagttgttgatttgaacatg

SEQ ID NO: 5208355 - DNA, 25 bp, Homo sapien
acattgcctctggtggatgaaaaga

SEQ ID NO: 5208356 - DNA, 25 bp, Homo sapien
gaactcaaaagcacatctgttggtg

SEQ ID NO: 5208357 - DNA, 25 bp, Homo sapien
gcttcacggacgctttctttggaaa

SEQ ID NO: 5208358 - DNA, 25 bp, Homo sapien
tctgctaatgggactgaattttgac

SEQ ID NO: 5208359 - DNA, 25 bp, Homo sapien
caactgaagtacttggtggcctcaa

SEQ ID NO: 5208360 - DNA, 25 bp, Homo sapien
gggcactagctacacagacagatgt

SEQ ID NO: 5208361 - DNA, 25 bp, Homo sapien
tgtaatctgaaagtggtcccatgca

SEQ ID NO: 5208362 - DNA, 25 bp, Homo sapien
tcaacctcagttgtggatgcctcgt

SEQ ID NO: 5208363 - DNA, 25 bp, Homo sapien
gaccactgacatgtgcttctttgaa

SEQ ID NO: 5208364 - DNA, 25 bp, Homo sapien
gaattataacgcagccactcagttg

SEQ ID NO: 5208365 - DNA, 25 bp, Homo sapien
ctagtgggatcaataatgcttgctc

SEQ ID NO: 5208366 - DNA, 25 bp, Homo sapien
gctctggtaaagctaatggagccag

SEQ ID NO: 5208367 - DNA, 25 bp, Homo sapien
ttgttggccagcatgtttggctgca

SEQ ID NO: 5208368 - DNA, 25 bp, Homo sapien
atggatagtggttacagaggtagaa

SEQ ID NO: 5208369 - DNA, 25 bp, Homo sapien
tggatagtggttacagaggtagaac

SEQ ID NO: 5208370 - DNA, 25 bp, Homo sapien
gtagaacataaggactgctgcaaag

SEQ ID NO: 5208371 - DNA, 25 bp, Homo sapien
aacataaggactgctgcaaaggcaa

SEQ ID NO: 5208372 - DNA, 25 bp, Homo sapien
ctgaggtaatgaggttctggtgaga

SEQ ID NO: 5208373 - DNA, 25 bp, Homo sapien
tgaggtaatgaggttctggtgagag

SEQ ID NO: 5208374 - DNA, 25 bp, Homo sapien
cctcggtcctactggtcctactgag

SEQ ID NO: 5208375 - DNA, 25 bp, Homo sapien
acaaagcctcggtcctactggtcct

SEQ ID NO: 5208376 - DNA, 25 bp, Homo sapien
aggacaaagcctcggtcctactggt

SEQ ID NO: 5208377 - DNA, 25 bp, Homo sapien
aagcctcggtcctactggtcctact

SEQ ID NO: 5208378 - DNA, 25 bp, Homo sapien
taggatgaagaacggaagctggaat

SEQ ID NO: 5208379 - DNA, 25 bp, Homo sapien
atgaagaacggaagctggaatgatt

SEQ ID NO: 5208380 - DNA, 25 bp, Homo sapien
ggatgaagaacggaagctggaatga

SEQ ID NO: 5208381 - DNA, 25 bp, Homo sapien
ctaggatgaagaacggaagctggaa

SEQ ID NO: 5208382 - DNA, 25 bp, Homo sapien
agaagagaggttgcaaagggatgac

SEQ ID NO: 5208383 - DNA, 25 bp, Homo sapien
gaagagaggttgcaaagggatgaca

SEQ ID NO: 5208384 - DNA, 25 bp, Homo sapien
gatgaacacttaacgcatatagcaa

SEQ ID NO: 5208385 - DNA, 25 bp, Homo sapien
tagtgccatcagctttgtctaaaca

SEQ ID NO: 5208386 - DNA, 25 bp, Homo sapien
ccaatgacgccatgtatcggccagt

SEQ ID NO: 5208387 - DNA, 25 bp, Homo sapien
caccagttaaatagccatgtaccca

SEQ ID NO: 5208388 - DNA, 25 bp, Homo sapien
gagaatgttcagaagttgcaggcag

SEQ ID NO: 5208389 - DNA, 25 bp, Homo sapien
aaaggaagagtagctttgccaaggg

SEQ ID NO: 5208390 - DNA, 25 bp, Homo sapien
gttactatcatgtagtacaatgggc

SEQ ID NO: 5208391 - DNA, 25 bp, Homo sapien
catgtagtacaatgggcactggttc

SEQ ID NO: 5208392 - DNA, 25 bp, Homo sapien
ctgagcgtatattccactccatttc

SEQ ID NO: 5208393 - DNA, 25 bp, Homo sapien
tattccactccatttcttgactgtg

SEQ ID NO: 5208394 - DNA, 25 bp, Homo sapien
tgagcgtatattccactccatttct

SEQ ID NO: 5208395 - DNA, 25 bp, Homo sapien
gtatattccactccatttcttgact

SEQ ID NO: 5208396 - DNA, 25 bp, Homo sapien
ttgaagtcagcgagaccaagaaccc

SEQ ID NO: 5208397 - DNA, 25 bp, Homo sapien
cgtgaggttctgcggcttcattctt

SEQ ID NO: 5208398 - DNA, 25 bp, Homo sapien
tcttgaagtcagcgagaccaagaac

SEQ ID NO: 5208399 - DNA, 25 bp, Homo sapien
attcttgaagtcagcgagaccaaga

SEQ ID NO: 5208400 - DNA, 25 bp, Homo sapien
gctgatggagaaagacctctatttc

SEQ ID NO: 5208401 - DNA, 25 bp, Homo sapien
aatgaattatacaccagtttatgtc

SEQ ID NO: 5208402 - DNA, 25 bp, Homo sapien
tttacaaagagtcacaagtgctggc

SEQ ID NO: 5208403 - DNA, 25 bp, Homo sapien
tgggaggtaaagcagaccatacatc

SEQ ID NO: 5208404 - DNA, 25 bp, Homo sapien
cctgttgtctcagggctgcttattc

SEQ ID NO: 5208405 - DNA, 25 bp, Homo sapien
cagaacaattgtttcctacagggtt

SEQ ID NO: 5208406 - DNA, 25 bp, Homo sapien
gcagaacaattgtttcctacagggt

SEQ ID NO: 5208407 - DNA, 25 bp, Homo sapien
tgcagaacaattgtttcctacaggg

SEQ ID NO: 5208408 - DNA, 25 bp, Homo sapien
tttcttcacaagcttgatgttgaga

SEQ ID NO: 5208409 - DNA, 25 bp, Homo sapien
ttcattggcactgtgtcgtttcttg

SEQ ID NO: 5208410 - DNA, 25 bp, Homo sapien
cattggcactgtgtcgtttcttgtg

SEQ ID NO: 5208411 - DNA, 25 bp, Homo sapien
tcattggcactgtgtcgtttcttgt

SEQ ID NO: 5208412 - DNA, 25 bp, Homo sapien
attggcactgtgtcgtttcttgtgt

SEQ ID NO: 5208413 - DNA, 25 bp, Homo sapien
accactactaccactgcagggttgc

SEQ ID NO: 5208414 - DNA, 25 bp, Homo sapien
caccactactaccactgcagggttg

SEQ ID NO: 5208415 - DNA, 25 bp, Homo sapien
gacagaaggtacttgggagagacaa

SEQ ID NO: 5208416 - DNA, 25 bp, Homo sapien
tgtggagatggtggatacagcaact

SEQ ID NO: 5208417 - DNA, 25 bp, Homo sapien
aaggtttcccacatactacagctgg

SEQ ID NO: 5208418 - DNA, 25 bp, Homo sapien
tacagcaactaaaagctcagcactg

SEQ ID NO: 5208419 - DNA, 25 bp, Homo sapien
gatccgcctgtctcgcggcttccca

SEQ ID NO: 5208420 - DNA, 25 bp, Homo sapien
cagcctcccgagtactcccgagtag

SEQ ID NO: 5208421 - DNA, 25 bp, Homo sapien
atccgcctgtctcgcggcttcccaa

SEQ ID NO: 5208422 - DNA, 25 bp, Homo sapien
cctcccgagtactcccgagtagctg

SEQ ID NO: 5208423 - DNA, 25 bp, Homo sapien
aaaaatattcaaatgggctgttttg

SEQ ID NO: 5208424 - DNA, 25 bp, Homo sapien
ctgttttgattggagtttgaaagga

SEQ ID NO: 5208425 - DNA, 25 bp, Homo sapien
tgggctgttttgattggagtttgaa

SEQ ID NO: 5208426 - DNA, 25 bp, Homo sapien
tgattggagtttgaaaggaaattcc

SEQ ID NO: 5208427 - DNA, 25 bp, Homo sapien
gaggctcgcttagtcctcttcagca

SEQ ID NO: 5208428 - DNA, 25 bp, Homo sapien
tatggccaggtagaacacgtatcag

SEQ ID NO: 5208429 - DNA, 25 bp, Homo sapien
gaatgtgacatgtgtacagatcaga

SEQ ID NO: 5208430 - DNA, 25 bp, Homo sapien
gctttagccaatgcatcctcacagg

SEQ ID NO: 5208431 - DNA, 25 bp, Homo sapien
tttgttacttcaacatgtagaagca

SEQ ID NO: 5208432 - DNA, 25 bp, Homo sapien
tactagcaaagaagtacagtcactt

SEQ ID NO: 5208433 - DNA, 25 bp, Homo sapien
ggcaacttctttcctactagcaaag

SEQ ID NO: 5208434 - DNA, 25 bp, Homo sapien
catttgttacttcaacatgtagaag

SEQ ID NO: 5208435 - DNA, 25 bp, Homo sapien
tgccaactattaacaaacatttcct

SEQ ID NO: 5208436 - DNA, 25 bp, Homo sapien
gccaactattaacaaacatttcctc

SEQ ID NO: 5208437 - DNA, 25 bp, Homo sapien
ctgccaactattaacaaacatttcc

SEQ ID NO: 5208438 - DNA, 25 bp, Homo sapien
atcgtgtgaatcaattcattctcca

SEQ ID NO: 5208439 - DNA, 25 bp, Homo sapien
ttttgatctttgaatcgtgtgaatc

SEQ ID NO: 5208440 - DNA, 25 bp, Homo sapien
tctttgaatcgtgtgaatcaattca

SEQ ID NO: 5208441 - DNA, 25 bp, Homo sapien
ttaagcttggtaatcaagtttatat

SEQ ID NO: 5208442 - DNA, 25 bp, Homo sapien
gacttcacacactctttgacattca

SEQ ID NO: 5208443 - DNA, 25 bp, Homo sapien
tttctcgaggaatgtaagacttcac

SEQ ID NO: 5208444 - DNA, 25 bp, Homo sapien
tgtaagacttcacacactctttgac

SEQ ID NO: 5208445 - DNA, 25 bp, Homo sapien
agtgtgggtttctcgaggaatgtaa

SEQ ID NO: 5208446 - DNA, 25 bp, Homo sapien
tataagaccaatattagactctctc

SEQ ID NO: 5208447 - DNA, 25 bp, Homo sapien
aagaccaatattagactctctctgg

SEQ ID NO: 5208448 - DNA, 25 bp, Homo sapien
atattagactctctctggcttggca

SEQ ID NO: 5208449 - DNA, 25 bp, Homo sapien
caatattagactctctctggcttgg

SEQ ID NO: 5208450 - DNA, 25 bp, Homo sapien
caaataacgagaatcacgtttccaa

SEQ ID NO: 5208451 - DNA, 25 bp, Homo sapien
cgtttccaaatttaagtacaggcat

SEQ ID NO: 5208452 - DNA, 25 bp, Homo sapien
atcacgtttccaaatttaagtacag

SEQ ID NO: 5208453 - DNA, 25 bp, Homo sapien
atccacaaataacgagaatcacgtt

SEQ ID NO: 5208454 - DNA, 25 bp, Homo sapien
gatgtaacccagtgatattattgca

SEQ ID NO: 5208455 - DNA, 25 bp, Homo sapien
tttattaaggcattcctcgcatgag

SEQ ID NO: 5208456 - DNA, 25 bp, Homo sapien
gattattcccatgcagaatttgtct

SEQ ID NO: 5208457 - DNA, 25 bp, Homo sapien
tgccatgtgcagtcttgtctttcca

SEQ ID NO: 5208458 - DNA, 25 bp, Homo sapien
caactgcatccgtggggacagggtt

SEQ ID NO: 5208459 - DNA, 25 bp, Homo sapien
acagggttggcattcctggtgtggc

SEQ ID NO: 5208460 - DNA, 25 bp, Homo sapien
cagccagcaactgcatccgtgggga

SEQ ID NO: 5208461 - DNA, 25 bp, Homo sapien
tacgaacgtaacatcctccattccc

SEQ ID NO: 5208462 - DNA, 25 bp, Homo sapien
ttaaagaaaagtccggcagagagga

SEQ ID NO: 5208463 - DNA, 25 bp, Homo sapien
agaaaagtccggcagagaggagtca

SEQ ID NO: 5208464 - DNA, 25 bp, Homo sapien
ttcttaaagaaaagtccggcagaga

SEQ ID NO: 5208465 - DNA, 25 bp, Homo sapien
aagtccggcagagaggagtcaagat

SEQ ID NO: 5208466 - DNA, 25 bp, Homo sapien
gcttctttgtactgcaaaggtcgtt

SEQ ID NO: 5208467 - DNA, 25 bp, Homo sapien
ttctttgtactgcaaaggtcgttgc

SEQ ID NO: 5208468 - DNA, 25 bp, Homo sapien
aaagcttctttgtactgcaaaggtc

SEQ ID NO: 5208469 - DNA, 25 bp, Homo sapien
ctttgtactgcaaaggtcgttgcat

SEQ ID NO: 5208470 - DNA, 25 bp, Homo sapien
catgaatctattcgatgagagtgat

SEQ ID NO: 5208471 - DNA, 25 bp, Homo sapien
gctattgtggatcagtagctaagca

SEQ ID NO: 5208472 - DNA, 25 bp, Homo sapien
tgcatgacaatatatatcacctgac

SEQ ID NO: 5208473 - DNA, 25 bp, Homo sapien
cacctgacagttgacatggcttttg

SEQ ID NO: 5208474 - DNA, 25 bp, Homo sapien
atcaaggtcttcaaccttattatct

SEQ ID NO: 5208475 - DNA, 25 bp, Homo sapien
catcaaggtcttcaaccttattatc

SEQ ID NO: 5208476 - DNA, 25 bp, Homo sapien
atcatcaaggtcttcaaccttatta

SEQ ID NO: 5208477 - DNA, 25 bp, Homo sapien
tcatcaaggtcttcaaccttattat

SEQ ID NO: 5208478 - DNA, 25 bp, Homo sapien
tacatttatttctatgccatattct

SEQ ID NO: 5208479 - DNA, 25 bp, Homo sapien
ttgtatggtacatttatttctatgc

SEQ ID NO: 5208480 - DNA, 25 bp, Homo sapien
tttctatgccatattcttacaataa

SEQ ID NO: 5208481 - DNA, 25 bp, Homo sapien
ttatttctatgccatattcttacaa

SEQ ID NO: 5208482 - DNA, 25 bp, Homo sapien
tatgggcacgtaaaactaatgtagt

SEQ ID NO: 5208483 - DNA, 25 bp, Homo sapien
tactgttcatggtaagccttaccaa

SEQ ID NO: 5208484 - DNA, 25 bp, Homo sapien
cttaaacaatgtagaggttatgggc

SEQ ID NO: 5208485 - DNA, 25 bp, Homo sapien
tacttatagcctactgttcatggta

SEQ ID NO: 5208486 - DNA, 25 bp, Homo sapien
tcttaacagtacaatatgatgaaat

SEQ ID NO: 5208487 - DNA, 25 bp, Homo sapien
ttgtgtaagattcttaacagtacaa

SEQ ID NO: 5208488 - DNA, 25 bp, Homo sapien
gtaagattcttaacagtacaatatg

SEQ ID NO: 5208489 - DNA, 25 bp, Homo sapien
agtctttaatgaacttagagtttat

SEQ ID NO: 5208490 - DNA, 25 bp, Homo sapien
tctggatcctgggtttcatcgggac

SEQ ID NO: 5208491 - DNA, 25 bp, Homo sapien
cacatgaacttaagaggtcaggctc

SEQ ID NO: 5208492 - DNA, 25 bp, Homo sapien
aaacaggagcagttctccctctgga

SEQ ID NO: 5208493 - DNA, 25 bp, Homo sapien
gaagaggttctgctaacaggctccc

SEQ ID NO: 5208494 - DNA, 25 bp, Homo sapien
agagtagaacagaatgtttgattta

SEQ ID NO: 5208495 - DNA, 25 bp, Homo sapien
ttcttgtctaaaatttccaagagta

SEQ ID NO: 5208496 - DNA, 25 bp, Homo sapien
tccaagagtagaacagaatgtttga

SEQ ID NO: 5208497 - DNA, 25 bp, Homo sapien
tctctttcattgtgtgacacaattt

SEQ ID NO: 5208498 - DNA, 25 bp, Homo sapien
ctgtgcccgaccaactcatgtttct

SEQ ID NO: 5208499 - DNA, 25 bp, Homo sapien
ttcatatagacaacccacagtttgg

SEQ ID NO: 5208500 - DNA, 25 bp, Homo sapien
cattgttaatcacctcacgttaagg

SEQ ID NO: 5208501 - DNA, 25 bp, Homo sapien
gacccttcatattaaaagcgattgt

SEQ ID NO: 5208502 - DNA, 25 bp, Homo sapien
agctgtgcatatctgtgcagcattc

SEQ ID NO: 5208503 - DNA, 25 bp, Homo sapien
ctgtgcatatctgtgcagcattcat

SEQ ID NO: 5208504 - DNA, 25 bp, Homo sapien
gctgacagctgtgcatatctgtgca

SEQ ID NO: 5208505 - DNA, 25 bp, Homo sapien
ctgatgctgacagctgtgcatatct

SEQ ID NO: 5208506 - DNA, 25 bp, Homo sapien
aacctgccatttccgctcaaatcgt

SEQ ID NO: 5208507 - DNA, 25 bp, Homo sapien
tgaagcccttgaactccaacctgcc

SEQ ID NO: 5208508 - DNA, 25 bp, Homo sapien
ggaaataaactcagactcactgaag

SEQ ID NO: 5208509 - DNA, 25 bp, Homo sapien
cgtcctttccctgatctaacacgaa

SEQ ID NO: 5208510 - DNA, 25 bp, Homo sapien
gggagttcggtgaaatagactgatc

SEQ ID NO: 5208511 - DNA, 25 bp, Homo sapien
tcatccaccagtccaaatacagttc

SEQ ID NO: 5208512 - DNA, 25 bp, Homo sapien
cagttcagactttgagaagtactag

SEQ ID NO: 5208513 - DNA, 25 bp, Homo sapien
gaaatagactgatctttcactcttt

SEQ ID NO: 5208514 - DNA, 25 bp, Homo sapien
tgaaaataggatcaggaaaacaacc

SEQ ID NO: 5208515 - DNA, 25 bp, Homo sapien
tcagatccctccattgacacgggat

SEQ ID NO: 5208516 - DNA, 25 bp, Homo sapien
gagaaagcaagagatctcagatctc

SEQ ID NO: 5208517 - DNA, 25 bp, Homo sapien
gctatcatgaaaataggatcaggaa

SEQ ID NO: 5208518 - DNA, 25 bp, Homo sapien
gagggccagtgcctgctcatatata

SEQ ID NO: 5208519 - DNA, 25 bp, Homo sapien
aaagtgctagttgacattttaacca

SEQ ID NO: 5208520 - DNA, 25 bp, Homo sapien
tgcagttagagatgcagctcttcag

SEQ ID NO: 5208521 - DNA, 25 bp, Homo sapien
tcttcctagaccattaatctgtcag

SEQ ID NO: 5208522 - DNA, 25 bp, Homo sapien
gctttaataaaacatagcaaatatg

SEQ ID NO: 5208523 - DNA, 25 bp, Homo sapien
aaacatagcaaatatgattccaacc

SEQ ID NO: 5208524 - DNA, 25 bp, Homo sapien
aataaaacatagcaaatatgattcc

SEQ ID NO: 5208525 - DNA, 25 bp, Homo sapien
taaaacatagcaaatatgattccaa

SEQ ID NO: 5208526 - DNA, 25 bp, Homo sapien
tgaaatcaatttattctggatcaaa

SEQ ID NO: 5208527 - DNA, 25 bp, Homo sapien
tatcggtactttttctatccattct

SEQ ID NO: 5208528 - DNA, 25 bp, Homo sapien
gagagtgaatcagtgtgaattaaca

SEQ ID NO: 5208529 - DNA, 25 bp, Homo sapien
gatgacaggaaagcaactacagagg

SEQ ID NO: 5208530 - DNA, 25 bp, Homo sapien
ctcttctgcctgttgataataaacc

SEQ ID NO: 5208531 - DNA, 25 bp, Homo sapien
cagtacttctcctgtagttcattcc

SEQ ID NO: 5208532 - DNA, 25 bp, Homo sapien
agtacttctcctgtagttcattcca

SEQ ID NO: 5208533 - DNA, 25 bp, Homo sapien
cttctgcctgttgataataaaccat

SEQ ID NO: 5208534 - DNA, 25 bp, Homo sapien
gcaaaaccgatcatgccttctcaac

SEQ ID NO: 5208535 - DNA, 25 bp, Homo sapien
aaacgaaagcaagctagtagttact

SEQ ID NO: 5208536 - DNA, 25 bp, Homo sapien
cattgcaaaaccgatcatgccttct

SEQ ID NO: 5208537 - DNA, 25 bp, Homo sapien
taaaacgaaagcaagctagtagtta

SEQ ID NO: 5208538 - DNA, 25 bp, Homo sapien
catctgttagatgctgagctctgtc

SEQ ID NO: 5208539 - DNA, 25 bp, Homo sapien
gtctttataaataggcccaggaagc

SEQ ID NO: 5208540 - DNA, 25 bp, Homo sapien
ctgagggctctatagttgaagaagc

SEQ ID NO: 5208541 - DNA, 25 bp, Homo sapien
taatagcatttcacatgggaattcc

SEQ ID NO: 5208542 - DNA, 25 bp, Homo sapien
gggagacattgtaatcttccatgta

SEQ ID NO: 5208543 - DNA, 25 bp, Homo sapien
catgttcaatggacagaagatttta

SEQ ID NO: 5208544 - DNA, 25 bp, Homo sapien
tatttacgggaagcaacacaaggga

SEQ ID NO: 5208545 - DNA, 25 bp, Homo sapien
cacaagggacctttctgggatgttg

SEQ ID NO: 5208546 - DNA, 25 bp, Homo sapien
agctccaaggacagtttgtgtggca

SEQ ID NO: 5208547 - DNA, 25 bp, Homo sapien
catcataaatcaatataactgggag

SEQ ID NO: 5208548 - DNA, 25 bp, Homo sapien
ttcaaagttttagctaccaatacac

SEQ ID NO: 5208549 - DNA, 25 bp, Homo sapien
taactttgaagagtaccaactatga

SEQ ID NO: 5208550 - DNA, 25 bp, Homo sapien
tccatttctctataaacctaaccaa

SEQ ID NO: 5208551 - DNA, 25 bp, Homo sapien
tggaattgccatctctattgaagct

SEQ ID NO: 5208552 - DNA, 25 bp, Homo sapien
cctggcccatataaccactttttat

SEQ ID NO: 5208553 - DNA, 25 bp, Homo sapien
acaaaagtacttgaacagggaactg

SEQ ID NO: 5208554 - DNA, 25 bp, Homo sapien
tctgctctaatctggatgcctttag

SEQ ID NO: 5208555 - DNA, 25 bp, Homo sapien
ccaatatttgtctgaatcatcacca

SEQ ID NO: 5208556 - DNA, 25 bp, Homo sapien
tgagaggaaaaacgacatatacttt

SEQ ID NO: 5208557 - DNA, 25 bp, Homo sapien
tatcacttccaatatttgtctgaat

SEQ ID NO: 5208558 - DNA, 25 bp, Homo sapien
caaatcatagactgctaccatcagc

SEQ ID NO: 5208559 - DNA, 25 bp, Homo sapien
tcttctcacgtgcacatagaaaata

SEQ ID NO: 5208560 - DNA, 25 bp, Homo sapien
tcaaagtgataccaaacacactctc

SEQ ID NO: 5208561 - DNA, 25 bp, Homo sapien
cacgtgctcagcataaagcaagtcc

SEQ ID NO: 5208562 - DNA, 25 bp, Homo sapien
aatattctaagacccaacacgtgct

SEQ ID NO: 5208563 - DNA, 25 bp, Homo sapien
gaggtttcacttgccttgatggagc

SEQ ID NO: 5208564 - DNA, 25 bp, Homo sapien
gcagttaactaggtatgcctatagg

SEQ ID NO: 5208565 - DNA, 25 bp, Homo sapien
tcttcatgagtacggtgtatgactc

SEQ ID NO: 5208566 - DNA, 25 bp, Homo sapien
cctccatggcagtatttttacaaca

SEQ ID NO: 5208567 - DNA, 25 bp, Homo sapien
ggtaatggagcacattaacccacat

SEQ ID NO: 5208568 - DNA, 25 bp, Homo sapien
gaaaataactcttcatatgtggaaa

SEQ ID NO: 5208569 - DNA, 25 bp, Homo sapien
aaagttcagtaagacctactaggca

SEQ ID NO: 5208570 - DNA, 25 bp, Homo sapien
cactctataatttcagggattcaaa

SEQ ID NO: 5208571 - DNA, 25 bp, Homo sapien
caaacttcgaggcaggaagctcacc

SEQ ID NO: 5208572 - DNA, 25 bp, Homo sapien
tcctcttcctcggtggtacctggga

SEQ ID NO: 5208573 - DNA, 25 bp, Homo sapien
cactaagacattgagacagccaggt

SEQ ID NO: 5208574 - DNA, 25 bp, Homo sapien
tccaactagcttgtgcactgagaag

SEQ ID NO: 5208575 - DNA, 25 bp, Homo sapien
actgtgccggcccacgcttaatttt

SEQ ID NO: 5208576 - DNA, 25 bp, Homo sapien
gatcatattcttaacctcagtataa

SEQ ID NO: 5208577 - DNA, 25 bp, Homo sapien
cacactggcttagattcagtaagtc

SEQ ID NO: 5208578 - DNA, 25 bp, Homo sapien
tagatctgccgcagtagcacactgg

SEQ ID NO: 5208579 - DNA, 25 bp, Homo sapien
gaaaggatcctgagttcttagccta

SEQ ID NO: 5208580 - DNA, 25 bp, Homo sapien
gctagggacctattctgggctgtaa

SEQ ID NO: 5208581 - DNA, 25 bp, Homo sapien
tcatctagggattaagctagggacc

SEQ ID NO: 5208582 - DNA, 25 bp, Homo sapien
tacaaagggcaagtagatccaatgg

SEQ ID NO: 5208583 - DNA, 25 bp, Homo sapien
tactggaagtcctgattactcagag

SEQ ID NO: 5208584 - DNA, 25 bp, Homo sapien
tactcagagacgttaatcgcatact

SEQ ID NO: 5208585 - DNA, 25 bp, Homo sapien
gcatactatgtgaaccccaatcatg

SEQ ID NO: 5208586 - DNA, 25 bp, Homo sapien
aatcagataggcacaatcagggtac

SEQ ID NO: 5208587 - DNA, 25 bp, Homo sapien
aattccaatgtgcaaagagtgccac

SEQ ID NO: 5208588 - DNA, 25 bp, Homo sapien
cagtatcctggtaaagttgacacac

SEQ ID NO: 5208589 - DNA, 25 bp, Homo sapien
gaagatgttctgtactcagtctcct

SEQ ID NO: 5208590 - DNA, 25 bp, Homo sapien
gagtgccacaaatatattgactgtg

SEQ ID NO: 5208591 - DNA, 25 bp, Homo sapien
tctcatggcatactggtaggcgtgt

SEQ ID NO: 5208592 - DNA, 25 bp, Homo sapien
taataatcaagaactgcccatgggt

SEQ ID NO: 5208593 - DNA, 25 bp, Homo sapien
gccccacctttggagttgagtccca

SEQ ID NO: 5208594 - DNA, 25 bp, Homo sapien
ggataccccgtaggcagtgtggcca

SEQ ID NO: 5208595 - DNA, 25 bp, Homo sapien
ttggggccaggtaaattcatgatcg

SEQ ID NO: 5208596 - DNA, 25 bp, Homo sapien
ccaggtaaattcatgatcgtactca

SEQ ID NO: 5208597 - DNA, 25 bp, Homo sapien
ggccaggtaaattcatgatcgtact

SEQ ID NO: 5208598 - DNA, 25 bp, Homo sapien
gggccaggtaaattcatgatcgtac

SEQ ID NO: 5208599 - DNA, 25 bp, Homo sapien
tttccttggaactagtatatttcat

SEQ ID NO: 5208600 - DNA, 25 bp, Homo sapien
ccttggaactagtatatttcatctg

SEQ ID NO: 5208601 - DNA, 25 bp, Homo sapien
tccttggaactagtatatttcatct

SEQ ID NO: 5208602 - DNA, 25 bp, Homo sapien
ttccttggaactagtatatttcatc

SEQ ID NO: 5208603 - DNA, 25 bp, Homo sapien
cccagggtacagtcctcaaattcat

SEQ ID NO: 5208604 - DNA, 25 bp, Homo sapien
cagggtacagtcctcaaattcatcc

SEQ ID NO: 5208605 - DNA, 25 bp, Homo sapien
ctcaaattcatccatgggcacatgc

SEQ ID NO: 5208606 - DNA, 25 bp, Homo sapien
tccccagggtacagtcctcaaattc

SEQ ID NO: 5208607 - DNA, 25 bp, Homo sapien
cttggcacagcagccagctcttctg

SEQ ID NO: 5208608 - DNA, 25 bp, Homo sapien
ctgcatctgcagctgtcacaaaggt

SEQ ID NO: 5208609 - DNA, 25 bp, Homo sapien
atctgcagctgtcacaaaggtggca

SEQ ID NO: 5208610 - DNA, 25 bp, Homo sapien
gcatctgcagctgtcacaaaggtgg

SEQ ID NO: 5208611 - DNA, 25 bp, Homo sapien
ctgtgcctcatgattccatgtgact

SEQ ID NO: 5208612 - DNA, 25 bp, Homo sapien
gataagatctctgagtgcataagtc

SEQ ID NO: 5208613 - DNA, 25 bp, Homo sapien
ccatgtgactttgaaattgttagta

SEQ ID NO: 5208614 - DNA, 25 bp, Homo sapien
gaattatcagtctgatcctttctgt

SEQ ID NO: 5208615 - DNA, 25 bp, Homo sapien
ggaaaaagttaagttgcatttctgc

SEQ ID NO: 5208616 - DNA, 25 bp, Homo sapien
ttctgcaatacattctctcccttcc

SEQ ID NO: 5208617 - DNA, 25 bp, Homo sapien
tgcatttctgcaatacattctctcc

SEQ ID NO: 5208618 - DNA, 25 bp, Homo sapien
catgccatctggaaaggaaaaagtt

SEQ ID NO: 5208619 - DNA, 25 bp, Homo sapien
atcatccatactctgcacgatgacc

SEQ ID NO: 5208620 - DNA, 25 bp, Homo sapien
tcatcatccatactctgcacgatga

SEQ ID NO: 5208621 - DNA, 25 bp, Homo sapien
ttcatcatccatactctgcacgatg

SEQ ID NO: 5208622 - DNA, 25 bp, Homo sapien
catcatccatactctgcacgatgac

SEQ ID NO: 5208623 - DNA, 25 bp, Homo sapien
caaaatccaggtattgacaaggcca

SEQ ID NO: 5208624 - DNA, 25 bp, Homo sapien
ccttggcatttcttatatcactcca

SEQ ID NO: 5208625 - DNA, 25 bp, Homo sapien
ggcatttcttatatcactccaatct

SEQ ID NO: 5208626 - DNA, 25 bp, Homo sapien
tggcatttcttatatcactccaatc

SEQ ID NO: 5208627 - DNA, 25 bp, Homo sapien
gagggcaatctacttgactcaatgc

SEQ ID NO: 5208628 - DNA, 25 bp, Homo sapien
cagagagctatctacatatgccagt

SEQ ID NO: 5208629 - DNA, 25 bp, Homo sapien
tgttaagccctgcaactgattggat

SEQ ID NO: 5208630 - DNA, 25 bp, Homo sapien
tgagacccactcatattatggaggg

SEQ ID NO: 5208631 - DNA, 25 bp, Homo sapien
gagaggaccacagttgaaacttcat

SEQ ID NO: 5208632 - DNA, 25 bp, Homo sapien
tgagaggaccacagttgaaacttca

SEQ ID NO: 5208633 - DNA, 25 bp, Homo sapien
cagagctgggaaaatcggtccgaga

SEQ ID NO: 5208634 - DNA, 25 bp, Homo sapien
cagcgcgtagagcgcccgcagagct

SEQ ID NO: 5208635 - DNA, 25 bp, Homo sapien
ggaatggccagagcccaacgacctc

SEQ ID NO: 5208636 - DNA, 25 bp, Homo sapien
tccaggcttccaatggtagcggccc

SEQ ID NO: 5208637 - DNA, 25 bp, Homo sapien
gcaccccgttgtccctctgtccgga

SEQ ID NO: 5208638 - DNA, 25 bp, Homo sapien
tctagcaccccgttgtccctctgtc

SEQ ID NO: 5208639 - DNA, 25 bp, Homo sapien
tccttctctagcaccccgttgtccc

SEQ ID NO: 5208640 - DNA, 25 bp, Homo sapien
tctccttctctagcaccccgttgtc

SEQ ID NO: 5208641 - DNA, 25 bp, Homo sapien
actgctgggtgtccgcggccaggac

SEQ ID NO: 5208642 - DNA, 25 bp, Homo sapien
gaccgtcttggtgacggcgactttg

SEQ ID NO: 5208643 - DNA, 25 bp, Homo sapien
cggccaggacgctggcgaccgtctt

SEQ ID NO: 5208644 - DNA, 25 bp, Homo sapien
aggcttggagcaggcgccgaggtac

SEQ ID NO: 5208645 - DNA, 25 bp, Homo sapien
tcgcgacccgtgtgtggcgatccct

SEQ ID NO: 5208646 - DNA, 25 bp, Homo sapien
gttgcggccggtacagtccgagcca

SEQ ID NO: 5208647 - DNA, 25 bp, Homo sapien
ggtcaccagctctcctggcgtcccg

SEQ ID NO: 5208648 - DNA, 25 bp, Homo sapien
ggttcggggcatcctgaagtcctcc

SEQ ID NO: 5208649 - DNA, 25 bp, Homo sapien
ctgcaaagtgggttttgtgcacgcc

SEQ ID NO: 5208650 - DNA, 25 bp, Homo sapien
cagcttgaccccgagaggtaggtcc

SEQ ID NO: 5208651 - DNA, 25 bp, Homo sapien
cttttcaccgaaattcgtagtatag

SEQ ID NO: 5208652 - DNA, 25 bp, Homo sapien
cccgagaggtaggtccagtagctga

SEQ ID NO: 5208653 - DNA, 25 bp, Homo sapien
caccgaaattcgtagtatagaatac

SEQ ID NO: 5208654 - DNA, 25 bp, Homo sapien
caataccttcggtcagatgtgggat

SEQ ID NO: 5208655 - DNA, 25 bp, Homo sapien
tccaaaccattaagatgaaagtgct

SEQ ID NO: 5208656 - DNA, 25 bp, Homo sapien
tcctgtaaatgttgatgcaaattcc

SEQ ID NO: 5208657 - DNA, 25 bp, Homo sapien
tgatgcagcctttgagttaaacagc

SEQ ID NO: 5208658 - DNA, 25 bp, Homo sapien
cacgagaatctgaccatgctggtgt

SEQ ID NO: 5208659 - DNA, 25 bp, Homo sapien
ggtggagtcctcatcaagggagata

SEQ ID NO: 5208660 - DNA, 25 bp, Homo sapien
tctttctaccatgcagggaggtaat

SEQ ID NO: 5208661 - DNA, 25 bp, Homo sapien
ggagataatgttcctatagagacca

SEQ ID NO: 5208662 - DNA, 25 bp, Homo sapien
tgtctagaggcaccaatttgggtcc

SEQ ID NO: 5208663 - DNA, 25 bp, Homo sapien
gcaccaatcccgacatgtctagagg

SEQ ID NO: 5208664 - DNA, 25 bp, Homo sapien
tcctgaacactatggagtctggctg

SEQ ID NO: 5208665 - DNA, 25 bp, Homo sapien
agtctggccgtaaccacagttgcag

SEQ ID NO: 5208666 - DNA, 25 bp, Homo sapien
tatctttgcgcttatagtatgcttt

SEQ ID NO: 5208667 - DNA, 25 bp, Homo sapien
attgctggtgatgtagccacctttc

SEQ ID NO: 5208668 - DNA, 25 bp, Homo sapien
cgacaatagggatcagtcaggttaa

SEQ ID NO: 5208669 - DNA, 25 bp, Homo sapien
tttccaaaagtcgacaatagggatc

SEQ ID NO: 5208670 - DNA, 25 bp, Homo sapien
aactggtaagatattgcctgtactt

SEQ ID NO: 5208671 - DNA, 25 bp, Homo sapien
actggtaagatattgcctgtactta

SEQ ID NO: 5208672 - DNA, 25 bp, Homo sapien
taagatattgcctgtacttattcaa

SEQ ID NO: 5208673 - DNA, 25 bp, Homo sapien
tggtaagatattgcctgtacttatt

SEQ ID NO: 5208674 - DNA, 25 bp, Homo sapien
cccattcttggccaactatagcaaa

SEQ ID NO: 5208675 - DNA, 25 bp, Homo sapien
tgtgttgatagataacccagtccct

SEQ ID NO: 5208676 - DNA, 25 bp, Homo sapien
ggaaacaacacatctgactagcaat

SEQ ID NO: 5208677 - DNA, 25 bp, Homo sapien
gaacaacatttttacaggtgcacgt

SEQ ID NO: 5208678 - DNA, 25 bp, Homo sapien
aacatcacaatgttgagggatttga

SEQ ID NO: 5208679 - DNA, 25 bp, Homo sapien
ccggtatgttatgtagttgttttgc

SEQ ID NO: 5208680 - DNA, 25 bp, Homo sapien
agttttggacttgtgcaacatcaca

SEQ ID NO: 5208681 - DNA, 25 bp, Homo sapien
agggatttgattgttttccggtatg

SEQ ID NO: 5208682 - DNA, 25 bp, Homo sapien
tggcatcatctgctatgccattccc

SEQ ID NO: 5208683 - DNA, 25 bp, Homo sapien
tgctaaaggtgaattggctgtttct

SEQ ID NO: 5208684 - DNA, 25 bp, Homo sapien
tgagtaagagtgcaaatattgctaa

SEQ ID NO: 5208685 - DNA, 25 bp, Homo sapien
catcatctgctatgccattcccaaa

SEQ ID NO: 5208686 - DNA, 25 bp, Homo sapien
ttcttcttgtgtgttcccgctgtcg

SEQ ID NO: 5208687 - DNA, 25 bp, Homo sapien
ccattaggaataggcgttgttcttc

SEQ ID NO: 5208688 - DNA, 25 bp, Homo sapien
cttctatttttctacgaagagtaag

SEQ ID NO: 5208689 - DNA, 25 bp, Homo sapien
tctgctgtgcgttcaagttgttcta

SEQ ID NO: 5208690 - DNA, 25 bp, Homo sapien
tgttgttcttctatcctctcttctc

SEQ ID NO: 5208691 - DNA, 25 bp, Homo sapien
atgctgttgttcttctatcctctct

SEQ ID NO: 5208692 - DNA, 25 bp, Homo sapien
tcagaagtaacatctcttttgtctt

SEQ ID NO: 5208693 - DNA, 25 bp, Homo sapien
ccatccttgtcagaagtaacatctc

SEQ ID NO: 5208694 - DNA, 25 bp, Homo sapien
tatatcttctccgttaaagccagta

SEQ ID NO: 5208695 - DNA, 25 bp, Homo sapien
atcttctccgttaaagccagtatct

SEQ ID NO: 5208696 - DNA, 25 bp, Homo sapien
tttcctatatcttctccgttaaagc

SEQ ID NO: 5208697 - DNA, 25 bp, Homo sapien
cctatatcttctccgttaaagccag

SEQ ID NO: 5208698 - DNA, 25 bp, Homo sapien
gataaatggagacggtaatcaggtc

SEQ ID NO: 5208699 - DNA, 25 bp, Homo sapien
ttgataaatggagacggtaatcagg

SEQ ID NO: 5208700 - DNA, 25 bp, Homo sapien
taaatggagacggtaatcaggtcat

SEQ ID NO: 5208701 - DNA, 25 bp, Homo sapien
ttttgataaatggagacggtaatca

SEQ ID NO: 5208702 - DNA, 25 bp, Homo sapien
gatttataccattatcctgtacatc

SEQ ID NO: 5208703 - DNA, 25 bp, Homo sapien
tattttgacgctgatgagcagcatt

SEQ ID NO: 5208704 - DNA, 25 bp, Homo sapien
atttgaactattttgacgctgatga

SEQ ID NO: 5208705 - DNA, 25 bp, Homo sapien
tgtacatctgcctgataaacaacag

SEQ ID NO: 5208706 - DNA, 25 bp, Homo sapien
ctctatcatcgaaaatacttgagtt

SEQ ID NO: 5208707 - DNA, 25 bp, Homo sapien
tgagtttttagataccatcccatct

SEQ ID NO: 5208708 - DNA, 25 bp, Homo sapien
gagtttttagataccatcccatctc

SEQ ID NO: 5208709 - DNA, 25 bp, Homo sapien
atccaaaaatgcctgtgaaactctg

SEQ ID NO: 5208710 - DNA, 25 bp, Homo sapien
gatacctgcgctgaaataattgaac

SEQ ID NO: 5208711 - DNA, 25 bp, Homo sapien
tggaaaaatttctcgtgggtgatac

SEQ ID NO: 5208712 - DNA, 25 bp, Homo sapien
caaaaatgcctgtgaaactctggaa

SEQ ID NO: 5208713 - DNA, 25 bp, Homo sapien
taattggcttgcttgtggtgaacac

SEQ ID NO: 5208714 - DNA, 25 bp, Homo sapien
agtatactgtaagaaccctgagcaa

SEQ ID NO: 5208715 - DNA, 25 bp, Homo sapien
tatttacctgattcgcagagatagc

SEQ ID NO: 5208716 - DNA, 25 bp, Homo sapien
gccatatgtagaaagagagtagctc

SEQ ID NO: 5208717 - DNA, 25 bp, Homo sapien
tcaactaggagcatgaaagctgatg

SEQ ID NO: 5208718 - DNA, 25 bp, Homo sapien
ttcaactaggagcatgaaagctgat

SEQ ID NO: 5208719 - DNA, 25 bp, Homo sapien
ttatatcaatgtattggtggaatac

SEQ ID NO: 5208720 - DNA, 25 bp, Homo sapien
tatcaatgtattggtggaataccat

SEQ ID NO: 5208721 - DNA, 25 bp, Homo sapien
atatcaatgtattggtggaatacca

SEQ ID NO: 5208722 - DNA, 25 bp, Homo sapien
tatatcaatgtattggtggaatacc

SEQ ID NO: 5208723 - DNA, 25 bp, Homo sapien
tcactgcacgtgctacagaaacttg

SEQ ID NO: 5208724 - DNA, 25 bp, Homo sapien
tgtgatggctgggtacaatatactg

SEQ ID NO: 5208725 - DNA, 25 bp, Homo sapien
caatatactggtcactgtagccaca

SEQ ID NO: 5208726 - DNA, 25 bp, Homo sapien
cttgaactatctgaagagaggatgg

SEQ ID NO: 5208727 - DNA, 25 bp, Homo sapien
tggtctccttactgacgtgtcaact

SEQ ID NO: 5208728 - DNA, 25 bp, Homo sapien
tatgtttagagattatagattgtcc

SEQ ID NO: 5208729 - DNA, 25 bp, Homo sapien
tgtggttggtctccttactgacgtg

SEQ ID NO: 5208730 - DNA, 25 bp, Homo sapien
tactgacgtgtcaactacaaatgca

SEQ ID NO: 5208731 - DNA, 25 bp, Homo sapien
gcaactgagggaatatgagcattgg

SEQ ID NO: 5208732 - DNA, 25 bp, Homo sapien
ggaatggcctgggttaaatcagaca

SEQ ID NO: 5208733 - DNA, 25 bp, Homo sapien
gcaatgaactccctaagctatctgt

SEQ ID NO: 5208734 - DNA, 25 bp, Homo sapien
aacttggtttaatgtcgactgacaa

SEQ ID NO: 5208735 - DNA, 25 bp, Homo sapien
cacattgggtccaaagtatgaggca

SEQ ID NO: 5208736 - DNA, 25 bp, Homo sapien
gatggtggctcagtctttaattccc

SEQ ID NO: 5208737 - DNA, 25 bp, Homo sapien
ggagtactacggtttcttcagatgc

SEQ ID NO: 5208738 - DNA, 25 bp, Homo sapien
aaaggatgtcctcaagtagctgaag

SEQ ID NO: 5208739 - DNA, 25 bp, Homo sapien
tcatcatcaatactcgtgacaagag

SEQ ID NO: 5208740 - DNA, 25 bp, Homo sapien
tacaggttaataatggactcgccaa

SEQ ID NO: 5208741 - DNA, 25 bp, Homo sapien
cagactttggcttacgagaagagag

SEQ ID NO: 5208742 - DNA, 25 bp, Homo sapien
tatggtttccaccattgacactgtg

SEQ ID NO: 5208743 - DNA, 25 bp, Homo sapien
tcacatgagtcagtagcagatttct

SEQ ID NO: 5208744 - DNA, 25 bp, Homo sapien
ggattttcatccaaagccgtgacag

SEQ ID NO: 5208745 - DNA, 25 bp, Homo sapien
aatgtccgttggcaaacccttccag

SEQ ID NO: 5208746 - DNA, 25 bp, Homo sapien
tggcactggcaatgacgtcagcata

SEQ ID NO: 5208747 - DNA, 25 bp, Homo sapien
tcattaagtggaggcaaatggcctg

SEQ ID NO: 5208748 - DNA, 25 bp, Homo sapien
tcaaaagttcttccactgcaatgag

SEQ ID NO: 5208749 - DNA, 25 bp, Homo sapien
gcttagggttgtccttagggctcac

SEQ ID NO: 5208750 - DNA, 25 bp, Homo sapien
gactgtcgacataagaataagcctg

SEQ ID NO: 5208751 - DNA, 25 bp, Homo sapien
ctgtgcctatattcccctgtgaaag

SEQ ID NO: 5208752 - DNA, 25 bp, Homo sapien
gctgctatgatttgatcagatggta

SEQ ID NO: 5208753 - DNA, 25 bp, Homo sapien
aagtgggcaattttgtgtccagtaa

SEQ ID NO: 5208754 - DNA, 25 bp, Homo sapien
tgtgaggatttcatcgggtaagcca

SEQ ID NO: 5208755 - DNA, 25 bp, Homo sapien
catgcttgttgtttaggaagggatc

SEQ ID NO: 5208756 - DNA, 25 bp, Homo sapien
agtaaaaacatgcttgttgtttagg

SEQ ID NO: 5208757 - DNA, 25 bp, Homo sapien
aaaacatgcttgttgtttaggaagg

SEQ ID NO: 5208758 - DNA, 25 bp, Homo sapien
aacatgcttgttgtttaggaaggga

SEQ ID NO: 5208759 - DNA, 25 bp, Homo sapien
tcaaaacattttcagctatcatcaa

SEQ ID NO: 5208760 - DNA, 25 bp, Homo sapien
tagtatcctcggctctagtagaagc

SEQ ID NO: 5208761 - DNA, 25 bp, Homo sapien
taccttctctaggaaaaatgtgctc

SEQ ID NO: 5208762 - DNA, 25 bp, Homo sapien
ggaatttgggacagaaagcatagct

SEQ ID NO: 5208763 - DNA, 25 bp, Homo sapien
tgtgttctttactgtttgatagagt

SEQ ID NO: 5208764 - DNA, 25 bp, Homo sapien
tgctgaggctatgcttgtttggaaa

SEQ ID NO: 5208765 - DNA, 25 bp, Homo sapien
tatagattggtaaactgctgaggct

SEQ ID NO: 5208766 - DNA, 25 bp, Homo sapien
tttagcagtaatgtgttctttactg

SEQ ID NO: 5208767 - DNA, 25 bp, Homo sapien
tcattgaaataagtacactggtcca

SEQ ID NO: 5208768 - DNA, 25 bp, Homo sapien
ggaatgaatgaacccgtagaaggat

SEQ ID NO: 5208769 - DNA, 25 bp, Homo sapien
taattacagcaagcatgtcactgat

SEQ ID NO: 5208770 - DNA, 25 bp, Homo sapien
caatatgctaattgaagatggttcc

SEQ ID NO: 5208771 - DNA, 25 bp, Homo sapien
aaaagaagaatcttcccggctggct

SEQ ID NO: 5208772 - DNA, 25 bp, Homo sapien
tctacagaggatctgacagaggtgg

SEQ ID NO: 5208773 - DNA, 25 bp, Homo sapien
gaatcaggccttttcgttggctctg

SEQ ID NO: 5208774 - DNA, 25 bp, Homo sapien
cacagctggatagcacagtattgac

SEQ ID NO: 5208775 - DNA, 25 bp, Homo sapien
gactcagtgagatgttcacaacatt

SEQ ID NO: 5208776 - DNA, 25 bp, Homo sapien
tctccaatggaaattgacctgctct

SEQ ID NO: 5208777 - DNA, 25 bp, Homo sapien
taaatggtaaagtactgactcagtg

SEQ ID NO: 5208778 - DNA, 25 bp, Homo sapien
tttggtgccatcagaaatgctcgaa

SEQ ID NO: 5208779 - DNA, 25 bp, Homo sapien
ttgtaggtatggcaaccattttctg

SEQ ID NO: 5208780 - DNA, 25 bp, Homo sapien
tgtaggtatggcaaccattttctgt

SEQ ID NO: 5208781 - DNA, 25 bp, Homo sapien
ctgaaagaggtcatcaaagccacca

SEQ ID NO: 5208782 - DNA, 25 bp, Homo sapien
gaatcactcctactaagagatcctg

SEQ ID NO: 5208783 - DNA, 25 bp, Homo sapien
gagtagaaaattgccagtctctggg

SEQ ID NO: 5208784 - DNA, 25 bp, Homo sapien
caaccaggctgtttaacttacatgc

SEQ ID NO: 5208785 - DNA, 25 bp, Homo sapien
ctgattttgaggagagctgtaggtt

SEQ ID NO: 5208786 - DNA, 25 bp, Homo sapien
ggttgctcattattcgaggagtaga

SEQ ID NO: 5208787 - DNA, 25 bp, Homo sapien
tccatacccgtatctaggcattcat

SEQ ID NO: 5208788 - DNA, 25 bp, Homo sapien
ggtaagtatgctattaggttgctca

SEQ ID NO: 5208789 - DNA, 25 bp, Homo sapien
tataccggattattaccacaggcca

SEQ ID NO: 5208790 - DNA, 25 bp, Homo sapien
tgtattttggagctaaccacactgg

SEQ ID NO: 5208791 - DNA, 25 bp, Homo sapien
tattgaggcattgtcgtataccgga

SEQ ID NO: 5208792 - DNA, 25 bp, Homo sapien
caaaaggtagactttccggagcttg

SEQ ID NO: 5208793 - DNA, 25 bp, Homo sapien
tgcacagctgattcttgagaaccag

SEQ ID NO: 5208794 - DNA, 25 bp, Homo sapien
tatcaacagcaaggtctagcccatg

SEQ ID NO: 5208795 - DNA, 25 bp, Homo sapien
tgtacaatgcctactaccctgtgga

SEQ ID NO: 5208796 - DNA, 25 bp, Homo sapien
taacaatagtagacactggatccag

SEQ ID NO: 5208797 - DNA, 25 bp, Homo sapien
tgatcaactgctgccaaaaggagag

SEQ ID NO: 5208798 - DNA, 25 bp, Homo sapien
tctccactggaggtaaacacagtct

SEQ ID NO: 5208799 - DNA, 25 bp, Homo sapien
catagactggatatcttttgctgaa

SEQ ID NO: 5208800 - DNA, 25 bp, Homo sapien
tatctgagatgtaagctgagtaact

SEQ ID NO: 5208801 - DNA, 25 bp, Homo sapien
cacagtaatatatggtggcaaggca

SEQ ID NO: 5208802 - DNA, 25 bp, Homo sapien
ggaaagtcgaatctcatgttcagaa

SEQ ID NO: 5208803 - DNA, 25 bp, Homo sapien
aaaatctctgatgtggtgaactcca

SEQ ID NO: 5208804 - DNA, 25 bp, Homo sapien
gaagacatgccctagaagcctgtaa

SEQ ID NO: 5208805 - DNA, 25 bp, Homo sapien
ctgaatagagagaaggctgtgtctt

SEQ ID NO: 5208806 - DNA, 25 bp, Homo sapien
gaatagagagaaggctgtgtctttt

SEQ ID NO: 5208807 - DNA, 25 bp, Homo sapien
tagagagaaggctgtgtcttttctt

SEQ ID NO: 5208808 - DNA, 25 bp, Homo sapien
agagaaggctgtgtcttttctttac

SEQ ID NO: 5208809 - DNA, 25 bp, Homo sapien
aaccctttgggtgatattatctgga

SEQ ID NO: 5208810 - DNA, 25 bp, Homo sapien
atattgccttctgggttagagcagc

SEQ ID NO: 5208811 - DNA, 25 bp, Homo sapien
tagagcagcaatcatccctatagca

SEQ ID NO: 5208812 - DNA, 25 bp, Homo sapien
tgcaagttttagagccaagcccata

SEQ ID NO: 5208813 - DNA, 25 bp, Homo sapien
accctgatgttaggttaatcatgcc

SEQ ID NO: 5208814 - DNA, 25 bp, Homo sapien
gttaggttaatcatgccgcttttca

SEQ ID NO: 5208815 - DNA, 25 bp, Homo sapien
gccaaccctgatgttaggttaatca

SEQ ID NO: 5208816 - DNA, 25 bp, Homo sapien
ctgtagccaaccctgatgttaggtt

SEQ ID NO: 5208817 - DNA, 25 bp, Homo sapien
gtgtgtatatctcatcatctttccc

SEQ ID NO: 5208818 - DNA, 25 bp, Homo sapien
gaagtaacttttgatacattctcac

SEQ ID NO: 5208819 - DNA, 25 bp, Homo sapien
atgtttttgagtacaaattcccact

SEQ ID NO: 5208820 - DNA, 25 bp, Homo sapien
gttgaagtaacttttgatacattct

SEQ ID NO: 5208821 - DNA, 25 bp, Homo sapien
caaagtatctgttgtagtccctaga

SEQ ID NO: 5208822 - DNA, 25 bp, Homo sapien
catgttcataatctgagtggtgttc

SEQ ID NO: 5208823 - DNA, 25 bp, Homo sapien
tgagctttcccttgcattgtcaatc

SEQ ID NO: 5208824 - DNA, 25 bp, Homo sapien
ggtgttcctcatccctacacgtttg

SEQ ID NO: 5208825 - DNA, 25 bp, Homo sapien
cagactgtgccgaatccctgctaat

SEQ ID NO: 5208826 - DNA, 25 bp, Homo sapien
tgtaacagactgtgccgaatccctg

SEQ ID NO: 5208827 - DNA, 25 bp, Homo sapien
tttttgttgtaacagactgtgccga

SEQ ID NO: 5208828 - DNA, 25 bp, Homo sapien
gccgaatccctgctaatctcttgaa

SEQ ID NO: 5208829 - DNA, 25 bp, Homo sapien
cttttaatctcctctcttactttct

SEQ ID NO: 5208830 - DNA, 25 bp, Homo sapien
tctctttttctctctcttcctcttc

SEQ ID NO: 5208831 - DNA, 25 bp, Homo sapien
ttttaatctcctctcttactttctc

SEQ ID NO: 5208832 - DNA, 25 bp, Homo sapien
agaaaagatcaattgtttaaccatc

SEQ ID NO: 5208833 - DNA, 25 bp, Homo sapien
taaccatctcagtaataacatcttc

SEQ ID NO: 5208834 - DNA, 25 bp, Homo sapien
tttgaggatcatctggtttactggg

SEQ ID NO: 5208835 - DNA, 25 bp, Homo sapien
aggatcatctggtttactgggttca

SEQ ID NO: 5208836 - DNA, 25 bp, Homo sapien
ggcaaacatgctgaaactgaaacct

SEQ ID NO: 5208837 - DNA, 25 bp, Homo sapien
tcatagcagtgtcatagagtttggc

SEQ ID NO: 5208838 - DNA, 25 bp, Homo sapien
tattacaaacagaggagtgaacaac

SEQ ID NO: 5208839 - DNA, 25 bp, Homo sapien
gaaaaccttaatttgagcatctgag

SEQ ID NO: 5208840 - DNA, 25 bp, Homo sapien
gcatccactggttacacaattttgt

SEQ ID NO: 5208841 - DNA, 25 bp, Homo sapien
ctgtggcaagagattattataaaca

SEQ ID NO: 5208842 - DNA, 25 bp, Homo sapien
taatctcttgtgatccaaactgtgg

SEQ ID NO: 5208843 - DNA, 25 bp, Homo sapien
accaagtcaactatgttttctgaaa

SEQ ID NO: 5208844 - DNA, 25 bp, Homo sapien
ggagttagctctccacaaaaatagc

SEQ ID NO: 5208845 - DNA, 25 bp, Homo sapien
ggatcttttcaacgatgttttcaac

SEQ ID NO: 5208846 - DNA, 25 bp, Homo sapien
gttttcaacttccacacactgatgt

SEQ ID NO: 5208847 - DNA, 25 bp, Homo sapien
caaaaatagctctgcagctgattgc

SEQ ID NO: 5208848 - DNA, 25 bp, Homo sapien
tccaatgaggtacgtctttctgtct

SEQ ID NO: 5208849 - DNA, 25 bp, Homo sapien
cagaagtataagagccagagtgctt

SEQ ID NO: 5208850 - DNA, 25 bp, Homo sapien
tattaacgtctagctctccagagag

SEQ ID NO: 5208851 - DNA, 25 bp, Homo sapien
tactataaacggaatcgacaacctg

SEQ ID NO: 5208852 - DNA, 25 bp, Homo sapien
cagtttttcagataatggtgcctca

SEQ ID NO: 5208853 - DNA, 25 bp, Homo sapien
tagataatattggtagcccgattgg

SEQ ID NO: 5208854 - DNA, 25 bp, Homo sapien
tgaggcttttccacgctgagggtgt

SEQ ID NO: 5208855 - DNA, 25 bp, Homo sapien
gcagcactggtggatactcttagag

SEQ ID NO: 5208856 - DNA, 25 bp, Homo sapien
tattctgaaatgaatttctagcaac

SEQ ID NO: 5208857 - DNA, 25 bp, Homo sapien
ccacctttgtaatatcaggctttct

SEQ ID NO: 5208858 - DNA, 25 bp, Homo sapien
atcttttaagagctccacctttgta

SEQ ID NO: 5208859 - DNA, 25 bp, Homo sapien
tctgaaatgaatttctagcaacggc

SEQ ID NO: 5208860 - DNA, 25 bp, Homo sapien
ggctgtttcaggcatcgtctttggt

SEQ ID NO: 5208861 - DNA, 25 bp, Homo sapien
tgtggccatgtcaagctcagcaaca

SEQ ID NO: 5208862 - DNA, 25 bp, Homo sapien
tttttcaggctgctcgtgcttagtg

SEQ ID NO: 5208863 - DNA, 25 bp, Homo sapien
tattacctgatttgagattgcttca

SEQ ID NO: 5208864 - DNA, 25 bp, Homo sapien
taatcaaggtacattcttgggccag

SEQ ID NO: 5208865 - DNA, 25 bp, Homo sapien
ttaccaaaaggtcagctagctactg

SEQ ID NO: 5208866 - DNA, 25 bp, Homo sapien
ggtcaattaggtaccttgccaggtc

SEQ ID NO: 5208867 - DNA, 25 bp, Homo sapien
tgtagattatactgcaggaccaaac

SEQ ID NO: 5208868 - DNA, 25 bp, Homo sapien
tcttggttgtatgaagatgaactca

SEQ ID NO: 5208869 - DNA, 25 bp, Homo sapien
tctgtgtatgaagtaatgtgttggt

SEQ ID NO: 5208870 - DNA, 25 bp, Homo sapien
tgtgttggttcagtaacaagattct

SEQ ID NO: 5208871 - DNA, 25 bp, Homo sapien
agatgaaatgagatcttcttggttg

SEQ ID NO: 5208872 - DNA, 25 bp, Homo sapien
tggttgctgcagaccgttgtccaga

SEQ ID NO: 5208873 - DNA, 25 bp, Homo sapien
aatggtgggccaaaaacagatatcc

SEQ ID NO: 5208874 - DNA, 25 bp, Homo sapien
gacactgatacactagaaactggtt

SEQ ID NO: 5208875 - DNA, 25 bp, Homo sapien
gtttgaaaactaggacatagaggcc

SEQ ID NO: 5208876 - DNA, 25 bp, Homo sapien
gtctgagtgacaatcttcagcctca

SEQ ID NO: 5208877 - DNA, 25 bp, Homo sapien
cttctaatattttagcacttgggtc

SEQ ID NO: 5208878 - DNA, 25 bp, Homo sapien
tagcacttgggtctgagtgacaatc

SEQ ID NO: 5208879 - DNA, 25 bp, Homo sapien
taatattttagcacttgggtctgag

SEQ ID NO: 5208880 - DNA, 25 bp, Homo sapien
cttaacactgtttccatgctctggc

SEQ ID NO: 5208881 - DNA, 25 bp, Homo sapien
tctggcttttgttcctgagaacttt

SEQ ID NO: 5208882 - DNA, 25 bp, Homo sapien
gctctggcttttgttcctgagaact

SEQ ID NO: 5208883 - DNA, 25 bp, Homo sapien
taacactgtttccatgctctggctt

SEQ ID NO: 5208884 - DNA, 25 bp, Homo sapien
tttgcactgccaagaacatccttgg

SEQ ID NO: 5208885 - DNA, 25 bp, Homo sapien
tgagggatttgcactgccaagaaca

SEQ ID NO: 5208886 - DNA, 25 bp, Homo sapien
atgacttcctttgagggatttgcac

SEQ ID NO: 5208887 - DNA, 25 bp, Homo sapien
cctttgagggatttgcactgccaag

SEQ ID NO: 5208888 - DNA, 25 bp, Homo sapien
ttacattgagaaaacacctttgaca

SEQ ID NO: 5208889 - DNA, 25 bp, Homo sapien
ttatatcaggtacaaaagcttcagt

SEQ ID NO: 5208890 - DNA, 25 bp, Homo sapien
tagatccttgtttggagacatcggg

SEQ ID NO: 5208891 - DNA, 25 bp, Homo sapien
cagtgttcatcctggtgagctggtg

SEQ ID NO: 5208892 - DNA, 25 bp, Homo sapien
tgatattttatccataagaggtacg

SEQ ID NO: 5208893 - DNA, 25 bp, Homo sapien
ggtgctttgtctacagttggatcat

SEQ ID NO: 5208894 - DNA, 25 bp, Homo sapien
ggatcttgatctctatattcgtgta

SEQ ID NO: 5208895 - DNA, 25 bp, Homo sapien
taagaggtacgttacttgcaaggat

SEQ ID NO: 5208896 - DNA, 25 bp, Homo sapien
gacaaagcagtaacatccctatggc

SEQ ID NO: 5208897 - DNA, 25 bp, Homo sapien
tccctatggccagtttgtacaacaa

SEQ ID NO: 5208898 - DNA, 25 bp, Homo sapien
gagtcaccacgcttgtctctctgtt

SEQ ID NO: 5208899 - DNA, 25 bp, Homo sapien
ttttcgtacagatagaacctcccta

SEQ ID NO: 5208900 - DNA, 25 bp, Homo sapien
acatctttatccttcagaagagctc

SEQ ID NO: 5208901 - DNA, 25 bp, Homo sapien
cttcagaagagctctaacatcctta

SEQ ID NO: 5208902 - DNA, 25 bp, Homo sapien
gaagagctctaacatccttaattgc

SEQ ID NO: 5208903 - DNA, 25 bp, Homo sapien
taacatccttaattgcatcctgcat

SEQ ID NO: 5208904 - DNA, 25 bp, Homo sapien
tcaataggacttcatgcaactggaa

SEQ ID NO: 5208905 - DNA, 25 bp, Homo sapien
tcccaagtctgcataatataggcaa

SEQ ID NO: 5208906 - DNA, 25 bp, Homo sapien
tggcaaatattattcccaagtctgc

SEQ ID NO: 5208907 - DNA, 25 bp, Homo sapien
taaactagccttagaggaatgtcct

SEQ ID NO: 5208908 - DNA, 25 bp, Homo sapien
cagcaagtttctggctgtaagctaa

SEQ ID NO: 5208909 - DNA, 25 bp, Homo sapien
agctgctaatatgggaaagattgaa

SEQ ID NO: 5208910 - DNA, 25 bp, Homo sapien
atcagcaagtttctggctgtaagct

SEQ ID NO: 5208911 - DNA, 25 bp, Homo sapien
caagtttctggctgtaagctaaaag

SEQ ID NO: 5208912 - DNA, 25 bp, Homo sapien
aaagggcgaaccacagaatttgtgc

SEQ ID NO: 5208913 - DNA, 25 bp, Homo sapien
aaaagggcgaaccacagaatttgtg

SEQ ID NO: 5208914 - DNA, 25 bp, Homo sapien
gctttctatggtcacctctggtatg

SEQ ID NO: 5208915 - DNA, 25 bp, Homo sapien
ccagaggataagctttctatggtca

SEQ ID NO: 5208916 - DNA, 25 bp, Homo sapien
ataagctttctatggtcacctctgg

SEQ ID NO: 5208917 - DNA, 25 bp, Homo sapien
ctctggtatgttggattcctccaaa

SEQ ID NO: 5208918 - DNA, 25 bp, Homo sapien
tgcaagtaattgtttagagttaata

SEQ ID NO: 5208919 - DNA, 25 bp, Homo sapien
ctgcaagtaattgtttagagttaat

SEQ ID NO: 5208920 - DNA, 25 bp, Homo sapien
gatggctcggctgctctagattccc

SEQ ID NO: 5208921 - DNA, 25 bp, Homo sapien
gaatgtctaagcttgtcattaccat

SEQ ID NO: 5208922 - DNA, 25 bp, Homo sapien
tctttggttggataacagaatcctc

SEQ ID NO: 5208923 - DNA, 25 bp, Homo sapien
tagaatcctctcatgcttagatggc

SEQ ID NO: 5208924 - DNA, 25 bp, Homo sapien
caggctccttgcttgctcgttttat

SEQ ID NO: 5208925 - DNA, 25 bp, Homo sapien
gctccttgcttgctcgttttatcat

SEQ ID NO: 5208926 - DNA, 25 bp, Homo sapien
tgaaaccacacgggagcatgggggt

SEQ ID NO: 5208927 - DNA, 25 bp, Homo sapien
tcaggctccttgcttgctcgtttta

SEQ ID NO: 5208928 - DNA, 25 bp, Homo sapien
tgccagatccaattgctctgagaat

SEQ ID NO: 5208929 - DNA, 25 bp, Homo sapien
tcctagatgccagatccaattgctc

SEQ ID NO: 5208930 - DNA, 25 bp, Homo sapien
cacatgggcttaattattagtttga

SEQ ID NO: 5208931 - DNA, 25 bp, Homo sapien
gtggatgctgtggtttcctagatgc

SEQ ID NO: 5208932 - DNA, 25 bp, Homo sapien
aggtattattaagcataagtacttt

SEQ ID NO: 5208933 - DNA, 25 bp, Homo sapien
gctgctttaggagtaagttcaaaga

SEQ ID NO: 5208934 - DNA, 25 bp, Homo sapien
ctttaggagtaagttcaaagatagc

SEQ ID NO: 5208935 - DNA, 25 bp, Homo sapien
ttgtgctgctttaggagtaagttca

SEQ ID NO: 5208936 - DNA, 25 bp, Homo sapien
gcactcatgctgtcctggaacttca

SEQ ID NO: 5208937 - DNA, 25 bp, Homo sapien
gattcactgcttcccctattttatg

SEQ ID NO: 5208938 - DNA, 25 bp, Homo sapien
atgtctttggtcttttactacttct

SEQ ID NO: 5208939 - DNA, 25 bp, Homo sapien
tgctttccttgattagattcactgc

SEQ ID NO: 5208940 - DNA, 25 bp, Homo sapien
aacacaggacatagcacccattgaa

SEQ ID NO: 5208941 - DNA, 25 bp, Homo sapien
tagctgtttaccttggcaccaaaga

SEQ ID NO: 5208942 - DNA, 25 bp, Homo sapien
caaagatgcctcttgagcgtttcct

SEQ ID NO: 5208943 - DNA, 25 bp, Homo sapien
tccagtaccaagacaactacaggtg

SEQ ID NO: 5208944 - DNA, 25 bp, Homo sapien
catccaattttgtttgacaggagac

SEQ ID NO: 5208945 - DNA, 25 bp, Homo sapien
ccatgggaacgcagcatccaatttt

SEQ ID NO: 5208946 - DNA, 25 bp, Homo sapien
ctggttagcagaccacatgtggtgt

SEQ ID NO: 5208947 - DNA, 25 bp, Homo sapien
tccactgtgtcgtgtaattcatcac

SEQ ID NO: 5208948 - DNA, 25 bp, Homo sapien
aaagctctctatgctcatcagctcc

SEQ ID NO: 5208949 - DNA, 25 bp, Homo sapien
tcctcctattgtctgaatgtacgtg

SEQ ID NO: 5208950 - DNA, 25 bp, Homo sapien
tattgtctgaatgtacgtggagtcc

SEQ ID NO: 5208951 - DNA, 25 bp, Homo sapien
tatgggtagttgtgaaggtaaacat

SEQ ID NO: 5208952 - DNA, 25 bp, Homo sapien
gtctatatgatctgttttgctgcag

SEQ ID NO: 5208953 - DNA, 25 bp, Homo sapien
tccttctcgtctatatgatctgttt

SEQ ID NO: 5208954 - DNA, 25 bp, Homo sapien
tctcgtctatatgatctgttttgct

SEQ ID NO: 5208955 - DNA, 25 bp, Homo sapien
ggtttccttctcgtctatatgatct

SEQ ID NO: 5208956 - DNA, 25 bp, Homo sapien
atggcttaggtcttgagaatattac

SEQ ID NO: 5208957 - DNA, 25 bp, Homo sapien
cagagtgactaaggttttctaccat

SEQ ID NO: 5208958 - DNA, 25 bp, Homo sapien
tccatttctgttcggcaaaataatt

SEQ ID NO: 5208959 - DNA, 25 bp, Homo sapien
tgcattttgtctactgttgacagtt

SEQ ID NO: 5208960 - DNA, 25 bp, Homo sapien
tattggacagccctaacggtttaga

SEQ ID NO: 5208961 - DNA, 25 bp, Homo sapien
ggatctatccattcactattagcaa

SEQ ID NO: 5208962 - DNA, 25 bp, Homo sapien
agaacattgggctgttgccattgaa

SEQ ID NO: 5208963 - DNA, 25 bp, Homo sapien
aaatgataatgccaggatctatcca

SEQ ID NO: 5208964 - DNA, 25 bp, Homo sapien
tctatgtaagacatgaaattgtaag

SEQ ID NO: 5208965 - DNA, 25 bp, Homo sapien
gaaacaagcttcactatgcctatgc

SEQ ID NO: 5208966 - DNA, 25 bp, Homo sapien
gagatagtcttaaatatccttggaa

SEQ ID NO: 5208967 - DNA, 25 bp, Homo sapien
atcttccatctgatcactgagtctg

SEQ ID NO: 5208968 - DNA, 25 bp, Homo sapien
gcaccagatcaaagaggctacgaag

SEQ ID NO: 5208969 - DNA, 25 bp, Homo sapien
tctccactggtatccctttctactt

SEQ ID NO: 5208970 - DNA, 25 bp, Homo sapien
aaatttgcaaaatattgccgtatca

SEQ ID NO: 5208971 - DNA, 25 bp, Homo sapien
catcatcttgcaattttagcctgaa

SEQ ID NO: 5208972 - DNA, 25 bp, Homo sapien
tattgccgtatcaagagaacaattt

SEQ ID NO: 5208973 - DNA, 25 bp, Homo sapien
gcatcacttgttcactctctgtcca

SEQ ID NO: 5208974 - DNA, 25 bp, Homo sapien
cattacaggtaattttccacactac

SEQ ID NO: 5208975 - DNA, 25 bp, Homo sapien
tacaggtaattttccacactacttc

SEQ ID NO: 5208976 - DNA, 25 bp, Homo sapien
ctctgaaccagttttcccattacag

SEQ ID NO: 5208977 - DNA, 25 bp, Homo sapien
tcccattacaggtaattttccacac

SEQ ID NO: 5208978 - DNA, 25 bp, Homo sapien
tccaccctgtgggcctgctgaagta

SEQ ID NO: 5208979 - DNA, 25 bp, Homo sapien
accctgtgggcctgctgaagtatca

SEQ ID NO: 5208980 - DNA, 25 bp, Homo sapien
caccctgtgggcctgctgaagtatc

SEQ ID NO: 5208981 - DNA, 25 bp, Homo sapien
cttccaccctgtgggcctgctgaag

SEQ ID NO: 5208982 - DNA, 25 bp, Homo sapien
tgcaagtgtaagaaccagaagaagt

SEQ ID NO: 5208983 - DNA, 25 bp, Homo sapien
tgtgcaagtgtaagaaccagaagaa

SEQ ID NO: 5208984 - DNA, 25 bp, Homo sapien
ttatgtgcaagtgtaagaaccagaa

SEQ ID NO: 5208985 - DNA, 25 bp, Homo sapien
tatgtgcaagtgtaagaaccagaag

SEQ ID NO: 5208986 - DNA, 25 bp, Homo sapien
gtggtacagctcctgagtagtggtt

SEQ ID NO: 5208987 - DNA, 25 bp, Homo sapien
gggaatagagatttagaggctcaga

SEQ ID NO: 5208988 - DNA, 25 bp, Homo sapien
tagtggttgattcttctcttgcagc

SEQ ID NO: 5208989 - DNA, 25 bp, Homo sapien
ccacatgggaatagagatttagagg

SEQ ID NO: 5208990 - DNA, 25 bp, Homo sapien
gaaatcgttttctctatttatcatg

SEQ ID NO: 5208991 - DNA, 25 bp, Homo sapien
atcgttttctctatttatcatgtcc

SEQ ID NO: 5208992 - DNA, 25 bp, Homo sapien
agaaatcgttttctctatttatcat

SEQ ID NO: 5208993 - DNA, 25 bp, Homo sapien
cgttttctctatttatcatgtcctt

SEQ ID NO: 5208994 - DNA, 25 bp, Homo sapien
gatagcctgtaagcagcctgttgca

SEQ ID NO: 5208995 - DNA, 25 bp, Homo sapien
caactttcatatcaaccctttcact

SEQ ID NO: 5208996 - DNA, 25 bp, Homo sapien
cctttcacttggatagcctgtaagc

SEQ ID NO: 5208997 - DNA, 25 bp, Homo sapien
gcagcctgttgcaactctgctcttc

SEQ ID NO: 5208998 - DNA, 25 bp, Homo sapien
cgttcacttccaagttctgcactta

SEQ ID NO: 5208999 - DNA, 25 bp, Homo sapien
ctagttaaatctcgattcacgttca

SEQ ID NO: 5209000 - DNA, 25 bp, Homo sapien
gattcacgttcacttccaagttctg

SEQ ID NO: 5209001 - DNA, 25 bp, Homo sapien
taaatctcgattcacgttcacttcc

SEQ ID NO: 5209002 - DNA, 25 bp, Homo sapien
caaggtactgtcataaggtcttaga

SEQ ID NO: 5209003 - DNA, 25 bp, Homo sapien
gcaaagcaagcctgaaaatatgact

SEQ ID NO: 5209004 - DNA, 25 bp, Homo sapien
tgtcataaggtcttagagaacctgg

SEQ ID NO: 5209005 - DNA, 25 bp, Homo sapien
acttttccatcaaggtactgtcata

SEQ ID NO: 5209006 - DNA, 25 bp, Homo sapien
tgagggatgtcggctagctttctgt

SEQ ID NO: 5209007 - DNA, 25 bp, Homo sapien
ctactcaagataggccaaggaaccc

SEQ ID NO: 5209008 - DNA, 25 bp, Homo sapien
agggatgtcggctagctttctgtgc

SEQ ID NO: 5209009 - DNA, 25 bp, Homo sapien
gatgtcggctagctttctgtgctgc

SEQ ID NO: 5209010 - DNA, 25 bp, Homo sapien
taatttagccattactctgtgtctg

SEQ ID NO: 5209011 - DNA, 25 bp, Homo sapien
gagttcacacccatctctctcagga

SEQ ID NO: 5209012 - DNA, 25 bp, Homo sapien
gacaaacatatttcacttgtgagtg

SEQ ID NO: 5209013 - DNA, 25 bp, Homo sapien
agaatgatctgactctggaactggg

SEQ ID NO: 5209014 - DNA, 25 bp, Homo sapien
ccatgaactgctatacagagctgtg

SEQ ID NO: 5209015 - DNA, 25 bp, Homo sapien
ctactgccaatgctccatctgggat

SEQ ID NO: 5209016 - DNA, 25 bp, Homo sapien
tgggcattgccttgccatgaactgc

SEQ ID NO: 5209017 - DNA, 25 bp, Homo sapien
tgactactgccaatgctccatctgg

SEQ ID NO: 5209018 - DNA, 25 bp, Homo sapien
tattccaacaatcatccatgtctct

SEQ ID NO: 5209019 - DNA, 25 bp, Homo sapien
aacaatcatccatgtctcttctgtc

SEQ ID NO: 5209020 - DNA, 25 bp, Homo sapien
tccaacaatcatccatgtctcttct

SEQ ID NO: 5209021 - DNA, 25 bp, Homo sapien
caatcatccatgtctcttctgtctc

SEQ ID NO: 5209022 - DNA, 25 bp, Homo sapien
tccctagcagttgggtcatgccatg

SEQ ID NO: 5209023 - DNA, 25 bp, Homo sapien
gattgagccacaagtttgaaactgc

SEQ ID NO: 5209024 - DNA, 25 bp, Homo sapien
gacttctgagtcaccacatggaaaa

SEQ ID NO: 5209025 - DNA, 25 bp, Homo sapien
tggcagttggcaaccaaggaactgt

SEQ ID NO: 5209026 - DNA, 25 bp, Homo sapien
agggagaatgggattggccgctgtc

SEQ ID NO: 5209027 - DNA, 25 bp, Homo sapien
gcagggagaatgggattggccgctg

SEQ ID NO: 5209028 - DNA, 25 bp, Homo sapien
gagaatgggattggccgctgtcatt

SEQ ID NO: 5209029 - DNA, 25 bp, Homo sapien
gggagaatgggattggccgctgtca

SEQ ID NO: 5209030 - DNA, 25 bp, Homo sapien
tttagtaccaattgcaacaggccat

SEQ ID NO: 5209031 - DNA, 25 bp, Homo sapien
gaagccatgagattagatatttcct

SEQ ID NO: 5209032 - DNA, 25 bp, Homo sapien
ggccattattcaatgggtccaacag

SEQ ID NO: 5209033 - DNA, 25 bp, Homo sapien
gctggatttcagtgtgtactatacc

SEQ ID NO: 5209034 - DNA, 25 bp, Homo sapien
gaggcggagctgaatggcccgtgag

SEQ ID NO: 5209035 - DNA, 25 bp, Homo sapien
gcccgtgagtgtcgcgtgcttcaga

SEQ ID NO: 5209036 - DNA, 25 bp, Homo sapien
ggagaggcggagctgaatggcccgt

SEQ ID NO: 5209037 - DNA, 25 bp, Homo sapien
aatggcccgtgagtgtcgcgtgctt

SEQ ID NO: 5209038 - DNA, 25 bp, Homo sapien
tcgatgtcgcagagcatagtgggta

SEQ ID NO: 5209039 - DNA, 25 bp, Homo sapien
atagtgggtagcgaggagcggctcc

SEQ ID NO: 5209040 - DNA, 25 bp, Homo sapien
aaacgcggcctttgcgacaggtcga

SEQ ID NO: 5209041 - DNA, 25 bp, Homo sapien
gaaagcgagtcgctcattggccccg

SEQ ID NO: 5209042 - DNA, 25 bp, Homo sapien
gacgaggaggaagaccggggcctca

SEQ ID NO: 5209043 - DNA, 25 bp, Homo sapien
ctgcggcaggacgaggaggaagacc

SEQ ID NO: 5209044 - DNA, 25 bp, Homo sapien
cggcaggacgaggaggaagaccggg

SEQ ID NO: 5209045 - DNA, 25 bp, Homo sapien
gcaggacgaggaggaagaccggggc

SEQ ID NO: 5209046 - DNA, 25 bp, Homo sapien
cgcagctgaataccgtcaggggttc

SEQ ID NO: 5209047 - DNA, 25 bp, Homo sapien
ctgaataccgtcaggggttctggcc

SEQ ID NO: 5209048 - DNA, 25 bp, Homo sapien
gcgcagctgaataccgtcaggggtt

SEQ ID NO: 5209049 - DNA, 25 bp, Homo sapien
cagctgaataccgtcaggggttctg

SEQ ID NO: 5209050 - DNA, 25 bp, Homo sapien
gacagatggcaccggccagacttac

SEQ ID NO: 5209051 - DNA, 25 bp, Homo sapien
gagacagatggcaccggccagactt

SEQ ID NO: 5209052 - DNA, 25 bp, Homo sapien
cggagacagatggcaccggccagac

SEQ ID NO: 5209053 - DNA, 25 bp, Homo sapien
tgcggagacagatggcaccggccag

SEQ ID NO: 5209054 - DNA, 25 bp, Homo sapien
ctgcccccggcctgagcctgtttct

SEQ ID NO: 5209055 - DNA, 25 bp, Homo sapien
ttttttgctccgcctttttgctgcc

SEQ ID NO: 5209056 - DNA, 25 bp, Homo sapien
tttttgctccgcctttttgctgccc

SEQ ID NO: 5209057 - DNA, 25 bp, Homo sapien
ttttgctccgcctttttgctgcccc

SEQ ID NO: 5209058 - DNA, 25 bp, Homo sapien
ggtcatttcgcacccgggtgcatgg

SEQ ID NO: 5209059 - DNA, 25 bp, Homo sapien
tcaattctgagaggactagcgaagg

SEQ ID NO: 5209060 - DNA, 25 bp, Homo sapien
gcgccagcagcgtcactatagtaat

SEQ ID NO: 5209061 - DNA, 25 bp, Homo sapien
taatgagagagctagcgtcatcagg

SEQ ID NO: 5209062 - DNA, 25 bp, Homo sapien
aatcatcctttgtagcagaatccat

SEQ ID NO: 5209063 - DNA, 25 bp, Homo sapien
ccaaatcatcctttgtagcagaatc

SEQ ID NO: 5209064 - DNA, 25 bp, Homo sapien
aaatcatcctttgtagcagaatcca

SEQ ID NO: 5209065 - DNA, 25 bp, Homo sapien
ctccaaatcatcctttgtagcagaa

SEQ ID NO: 5209066 - DNA, 25 bp, Homo sapien
tcagagggaatataataatatgcag

SEQ ID NO: 5209067 - DNA, 25 bp, Homo sapien
gcccttatcagagggaatataataa

SEQ ID NO: 5209068 - DNA, 25 bp, Homo sapien
gagggaatataataatatgcagcac

SEQ ID NO: 5209069 - DNA, 25 bp, Homo sapien
agcccttatcagagggaatataata

SEQ ID NO: 5209070 - DNA, 25 bp, Homo sapien
aaatttaacttgatgtgtgacagcc

SEQ ID NO: 5209071 - DNA, 25 bp, Homo sapien
tttgttgaccaaatttaacttgatg

SEQ ID NO: 5209072 - DNA, 25 bp, Homo sapien
gaccaaatttaacttgatgtgtgac

SEQ ID NO: 5209073 - DNA, 25 bp, Homo sapien
aacttgatgtgtgacagccttgata

SEQ ID NO: 5209074 - DNA, 25 bp, Homo sapien
gaagacacatgtatcgcagggccta

SEQ ID NO: 5209075 - DNA, 25 bp, Homo sapien
ggtaggtaccccatgttcacagata

SEQ ID NO: 5209076 - DNA, 25 bp, Homo sapien
gcaaaatctgggtgggtacatcccc

SEQ ID NO: 5209077 - DNA, 25 bp, Homo sapien
gataagtccagttatccacgcaagt

SEQ ID NO: 5209078 - DNA, 25 bp, Homo sapien
ccatgcctagttaaaagcaaaagct

SEQ ID NO: 5209079 - DNA, 25 bp, Homo sapien
cactccccagaaacgtacaggttca

SEQ ID NO: 5209080 - DNA, 25 bp, Homo sapien
catcagtgttataatggccttacag

SEQ ID NO: 5209081 - DNA, 25 bp, Homo sapien
gataatgaattataccaccccaaaa

SEQ ID NO: 5209082 - DNA, 25 bp, Homo sapien
ggtttgaacagctcatttagctcct

SEQ ID NO: 5209083 - DNA, 25 bp, Homo sapien
tacaggtttgaacagctcatttagc

SEQ ID NO: 5209084 - DNA, 25 bp, Homo sapien
tttgagcagcaactacaggtttgaa

SEQ ID NO: 5209085 - DNA, 25 bp, Homo sapien
gcaactacaggtttgaacagctcat

SEQ ID NO: 5209086 - DNA, 25 bp, Homo sapien
gtatagattctacctgaaatatgat

SEQ ID NO: 5209087 - DNA, 25 bp, Homo sapien
gtatttgtattataatctgccaggc

SEQ ID NO: 5209088 - DNA, 25 bp, Homo sapien
tgatgtgagaggaaaacggcactta

SEQ ID NO: 5209089 - DNA, 25 bp, Homo sapien
taaagttctttttgtagcatttatg

SEQ ID NO: 5209090 - DNA, 25 bp, Homo sapien
tcctttagtacactgtccttgcttg

SEQ ID NO: 5209091 - DNA, 25 bp, Homo sapien
gagtcaagtcatgggagaacttaca

SEQ ID NO: 5209092 - DNA, 25 bp, Homo sapien
cttcatctcttgcatcaatgtaaac

SEQ ID NO: 5209093 - DNA, 25 bp, Homo sapien
aacacttcgcttttcacattttctc

SEQ ID NO: 5209094 - DNA, 25 bp, Homo sapien
acttaaagggcatattatggtaatt

SEQ ID NO: 5209095 - DNA, 25 bp, Homo sapien
taataaatatcttagtagcaaaccg

SEQ ID NO: 5209096 - DNA, 25 bp, Homo sapien
gtagcaaaccgaaagtattcaacat

SEQ ID NO: 5209097 - DNA, 25 bp, Homo sapien
gggcatattatggtaattttcagat

SEQ ID NO: 5209098 - DNA, 25 bp, Homo sapien
ttcttgttcactacttcttccagct

SEQ ID NO: 5209099 - DNA, 25 bp, Homo sapien
cgtgcttcttgttcactacttcttc

SEQ ID NO: 5209100 - DNA, 25 bp, Homo sapien
agctttttctcatcccaattatcca

SEQ ID NO: 5209101 - DNA, 25 bp, Homo sapien
gctttttctcatcccaattatccat

SEQ ID NO: 5209102 - DNA, 25 bp, Homo sapien
caaagagagtgacccttcacaacat

SEQ ID NO: 5209103 - DNA, 25 bp, Homo sapien
caagcagtatacaggagcaaggtac

SEQ ID NO: 5209104 - DNA, 25 bp, Homo sapien
catggatagaagatacaattgtatt

SEQ ID NO: 5209105 - DNA, 25 bp, Homo sapien
gcctcaagtattaagctttgcaagt

SEQ ID NO: 5209106 - DNA, 25 bp, Homo sapien
cacataagggtgctctgtctagcct

SEQ ID NO: 5209107 - DNA, 25 bp, Homo sapien
tatgtagaacaatggcaaattccct

SEQ ID NO: 5209108 - DNA, 25 bp, Homo sapien
gtctagcctctattctgtgcagaaa

SEQ ID NO: 5209109 - DNA, 25 bp, Homo sapien
cacaagcggtggctcagtgtaggcc

SEQ ID NO: 5209110 - DNA, 25 bp, Homo sapien
gttgttttcaatagcttccaggaaa

SEQ ID NO: 5209111 - DNA, 25 bp, Homo sapien
tctctctcaattagatcttctaatg

SEQ ID NO: 5209112 - DNA, 25 bp, Homo sapien
cagggcatacccaaaaccagccata

SEQ ID NO: 5209113 - DNA, 25 bp, Homo sapien
ggaggaagtgcatgacgatacatgc

SEQ ID NO: 5209114 - DNA, 25 bp, Homo sapien
gaacacttgccaggtattaaatgct

SEQ ID NO: 5209115 - DNA, 25 bp, Homo sapien
cagagtgagtgttttgagtccagag

SEQ ID NO: 5209116 - DNA, 25 bp, Homo sapien
gactcattcccttctataagcagag

SEQ ID NO: 5209117 - DNA, 25 bp, Homo sapien
tagtgtgttatatcctgagtgagac

SEQ ID NO: 5209118 - DNA, 25 bp, Homo sapien
caggcaagaaaagattctagagtga

SEQ ID NO: 5209119 - DNA, 25 bp, Homo sapien
ggcaagaaaagattctagagtgatt

SEQ ID NO: 5209120 - DNA, 25 bp, Homo sapien
ccaggcaagaaaagattctagagtg

SEQ ID NO: 5209121 - DNA, 25 bp, Homo sapien
caagaaaagattctagagtgatttt

SEQ ID NO: 5209122 - DNA, 25 bp, Homo sapien
tccatatcttgttcaagtttatcaa

SEQ ID NO: 5209123 - DNA, 25 bp, Homo sapien
cactagtgctttccctgctttgaag

SEQ ID NO: 5209124 - DNA, 25 bp, Homo sapien
tatcttgttcaagtttatcaatctt

SEQ ID NO: 5209125 - DNA, 25 bp, Homo sapien
tgctttgaagtcagctttccttctt

SEQ ID NO: 5209126 - DNA, 25 bp, Homo sapien
taaagaatcagtttgggtgagcctg

SEQ ID NO: 5209127 - DNA, 25 bp, Homo sapien
gaaacaaaatcttgcatgacacaga

SEQ ID NO: 5209128 - DNA, 25 bp, Homo sapien
ataaagaatcagtttgggtgagcct

SEQ ID NO: 5209129 - DNA, 25 bp, Homo sapien
aagaatcagtttgggtgagcctgag

SEQ ID NO: 5209130 - DNA, 25 bp, Homo sapien
aattcaaacacttcacgaccactga

SEQ ID NO: 5209131 - DNA, 25 bp, Homo sapien
tgggtgtagcgggtatcatctgctt

SEQ ID NO: 5209132 - DNA, 25 bp, Homo sapien
attgaccagttcaggacgaaattca

SEQ ID NO: 5209133 - DNA, 25 bp, Homo sapien
gtgtagcgggtatcatctgcttcct

SEQ ID NO: 5209134 - DNA, 25 bp, Homo sapien
taatttcccatggttggagtaagga

SEQ ID NO: 5209135 - DNA, 25 bp, Homo sapien
ggagatgaggcacaaagcttcctct

SEQ ID NO: 5209136 - DNA, 25 bp, Homo sapien
caaggtggtatatgaaacttcttcc

SEQ ID NO: 5209137 - DNA, 25 bp, Homo sapien
cactgtcctaagctgtataaagaac

SEQ ID NO: 5209138 - DNA, 25 bp, Homo sapien
gaacagttttcttttactcctgaca

SEQ ID NO: 5209139 - DNA, 25 bp, Homo sapien
agaaagttgttacaaataagaacag

SEQ ID NO: 5209140 - DNA, 25 bp, Homo sapien
ctttaacaacatatagaaaagaaag

SEQ ID NO: 5209141 - DNA, 25 bp, Homo sapien
aacagttttcttttactcctgacat

SEQ ID NO: 5209142 - DNA, 25 bp, Homo sapien
tctttatctgaagtatatgtgctga

SEQ ID NO: 5209143 - DNA, 25 bp, Homo sapien
atctcttgggatgtacaggcttaaa

SEQ ID NO: 5209144 - DNA, 25 bp, Homo sapien
ttcatctacatctcttgggatgtac

SEQ ID NO: 5209145 - DNA, 25 bp, Homo sapien
gaatctttcaagactggctacagta

SEQ ID NO: 5209146 - DNA, 25 bp, Homo sapien
gaggtcccgaagtgaactcattgac

SEQ ID NO: 5209147 - DNA, 25 bp, Homo sapien
tagacagtgcacttttgataatcaa

SEQ ID NO: 5209148 - DNA, 25 bp, Homo sapien
aatctggtacctgcacacatctaag

SEQ ID NO: 5209149 - DNA, 25 bp, Homo sapien
ttttaatatacacccagctgctcat

SEQ ID NO: 5209150 - DNA, 25 bp, Homo sapien
ttcttctcaccgttatcattgcagt

SEQ ID NO: 5209151 - DNA, 25 bp, Homo sapien
gaaactggcaccctattcctataac

SEQ ID NO: 5209152 - DNA, 25 bp, Homo sapien
attgcagtctcaatgaaactggcac

SEQ ID NO: 5209153 - DNA, 25 bp, Homo sapien
gtctcaatgaaactggcaccctatt

SEQ ID NO: 5209154 - DNA, 25 bp, Homo sapien
cctctgagctacagatacatttagg

SEQ ID NO: 5209155 - DNA, 25 bp, Homo sapien
catatcctaaaaagcccttcccatg

SEQ ID NO: 5209156 - DNA, 25 bp, Homo sapien
agcccttcccatgaccatgtcttcc

SEQ ID NO: 5209157 - DNA, 25 bp, Homo sapien
tacagatacatttaggttttccata

SEQ ID NO: 5209158 - DNA, 25 bp, Homo sapien
gttttctcccagagcaagcatgcca

SEQ ID NO: 5209159 - DNA, 25 bp, Homo sapien
caagtcaatctgaatactggcaaga

SEQ ID NO: 5209160 - DNA, 25 bp, Homo sapien
agttgtgcctattgtcaccaaagcc

SEQ ID NO: 5209161 - DNA, 25 bp, Homo sapien
gagggcaagctggtttttcaagtta

SEQ ID NO: 5209162 - DNA, 25 bp, Homo sapien
gcaatagacaacatagactgatact

SEQ ID NO: 5209163 - DNA, 25 bp, Homo sapien
tttccccagaattactccagcaaga

SEQ ID NO: 5209164 - DNA, 25 bp, Homo sapien
tgagggcaggatcaatcttctacac

SEQ ID NO: 5209165 - DNA, 25 bp, Homo sapien
tcagtaaggcgtagaagcagaaaac

SEQ ID NO: 5209166 - DNA, 25 bp, Homo sapien
attttcagccctacctccagaagct

SEQ ID NO: 5209167 - DNA, 25 bp, Homo sapien
tccagaagcttcacttaatttgttt

SEQ ID NO: 5209168 - DNA, 25 bp, Homo sapien
ttcttctagttcatccaaatcctct

SEQ ID NO: 5209169 - DNA, 25 bp, Homo sapien
cctacctccagaagcttcacttaat

SEQ ID NO: 5209170 - DNA, 25 bp, Homo sapien
taatgtagtcaatttcaactcgtgc

SEQ ID NO: 5209171 - DNA, 25 bp, Homo sapien
tcaactcgtgctgagctgacttaat

SEQ ID NO: 5209172 - DNA, 25 bp, Homo sapien
gacttaattttttcagcgatgtgtt

SEQ ID NO: 5209173 - DNA, 25 bp, Homo sapien
taggtggaaagaaattaatgtagtc

SEQ ID NO: 5209174 - DNA, 25 bp, Homo sapien
tatgagatgtagccaaagtcagaag

SEQ ID NO: 5209175 - DNA, 25 bp, Homo sapien
tcctccagaatcagcataggaaata

SEQ ID NO: 5209176 - DNA, 25 bp, Homo sapien
gttaactcctccagaatcagcatag

SEQ ID NO: 5209177 - DNA, 25 bp, Homo sapien
taactcctccagaatcagcatagga

SEQ ID NO: 5209178 - DNA, 25 bp, Homo sapien
gggtggacagttacaacatcaatca

SEQ ID NO: 5209179 - DNA, 25 bp, Homo sapien
tgtttctggtaatagcacatgccca

SEQ ID NO: 5209180 - DNA, 25 bp, Homo sapien
taaatcactcattaaaaactgtgtc

SEQ ID NO: 5209181 - DNA, 25 bp, Homo sapien
gatacacttcttacttgggtggaca

SEQ ID NO: 5209182 - DNA, 25 bp, Homo sapien
aaatgtccatctaattgtccaaaga

SEQ ID NO: 5209183 - DNA, 25 bp, Homo sapien
tacagtgctcatgttttaggcagtc

SEQ ID NO: 5209184 - DNA, 25 bp, Homo sapien
cacaatactgaatctgcatacgcag

SEQ ID NO: 5209185 - DNA, 25 bp, Homo sapien
gggcattgtagctgatcctgtcaga

SEQ ID NO: 5209186 - DNA, 25 bp, Homo sapien
tactgtcaagtactctagatgcttc

SEQ ID NO: 5209187 - DNA, 25 bp, Homo sapien
agaccctcagcccaaagttttctgg

SEQ ID NO: 5209188 - DNA, 25 bp, Homo sapien
gcagaaatgagattagggtccagct

SEQ ID NO: 5209189 - DNA, 25 bp, Homo sapien
gcattacttgattcaactgcaggtg

SEQ ID NO: 5209190 - DNA, 25 bp, Homo sapien
tttatatcagtatgatgggcttaca

SEQ ID NO: 5209191 - DNA, 25 bp, Homo sapien
tacagcatctgatataccatctgtg

SEQ ID NO: 5209192 - DNA, 25 bp, Homo sapien
caccgcttaactaagggatatgttc

SEQ ID NO: 5209193 - DNA, 25 bp, Homo sapien
caatgtaacttcagtcatgcaccgc

SEQ ID NO: 5209194 - DNA, 25 bp, Homo sapien
taaggctaactacataggaatcagg

SEQ ID NO: 5209195 - DNA, 25 bp, Homo sapien
atatagtttaaaggagtcacaggtg

SEQ ID NO: 5209196 - DNA, 25 bp, Homo sapien
tggaatgaagctgatatacggtcct

SEQ ID NO: 5209197 - DNA, 25 bp, Homo sapien
gaaaacaccctagagattaattggc

SEQ ID NO: 5209198 - DNA, 25 bp, Homo sapien
tatctgacaggctgacgatatcagt

SEQ ID NO: 5209199 - DNA, 25 bp, Homo sapien
ttcagcaccgtgtaaaaattcagga

SEQ ID NO: 5209200 - DNA, 25 bp, Homo sapien
cacatgtgattgcacctggcagatt

SEQ ID NO: 5209201 - DNA, 25 bp, Homo sapien
tgattaagtttcttccctacaggtg

SEQ ID NO: 5209202 - DNA, 25 bp, Homo sapien
tcaacaactacctaataaacctgcc

SEQ ID NO: 5209203 - DNA, 25 bp, Homo sapien
ggcatatcatacatctaagagtcct

SEQ ID NO: 5209204 - DNA, 25 bp, Homo sapien
cactgcattggcttcacctatcata

SEQ ID NO: 5209205 - DNA, 25 bp, Homo sapien
gatggaatctcctgtacataaggca

SEQ ID NO: 5209206 - DNA, 25 bp, Homo sapien
gacaagcttaagatgactgaccaca

SEQ ID NO: 5209207 - DNA, 25 bp, Homo sapien
agttgccattgtctctacctcctca

SEQ ID NO: 5209208 - DNA, 25 bp, Homo sapien
aaactagttagcgttctaggcagca

SEQ ID NO: 5209209 - DNA, 25 bp, Homo sapien
cctctggacaagttctggcagtgaa

SEQ ID NO: 5209210 - DNA, 25 bp, Homo sapien
taatctatggtgaccagtgcttgtc

SEQ ID NO: 5209211 - DNA, 25 bp, Homo sapien
caacaagtgaatggacagtgtcaga

SEQ ID NO: 5209212 - DNA, 25 bp, Homo sapien
tactactaagcaatttacaggaatg

SEQ ID NO: 5209213 - DNA, 25 bp, Homo sapien
tcaccagaggaattaatcaaacata

SEQ ID NO: 5209214 - DNA, 25 bp, Homo sapien
tcctaattcaattgctgtgcctcag

SEQ ID NO: 5209215 - DNA, 25 bp, Homo sapien
taaaactgaccacatccactgaggg

SEQ ID NO: 5209216 - DNA, 25 bp, Homo sapien
tataaggttgtagccattaagacag

SEQ ID NO: 5209217 - DNA, 25 bp, Homo sapien
caaagcaccattgactgataatcag

SEQ ID NO: 5209218 - DNA, 25 bp, Homo sapien
tacttaatcatgcaagactgaatgc

SEQ ID NO: 5209219 - DNA, 25 bp, Homo sapien
cacttaagatcacaaacaaggcaag

SEQ ID NO: 5209220 - DNA, 25 bp, Homo sapien
cacagtacggcagaatttgaccaac

SEQ ID NO: 5209221 - DNA, 25 bp, Homo sapien
tagcatgaaagcaggtatagacagt

SEQ ID NO: 5209222 - DNA, 25 bp, Homo sapien
aatttttaatatggtcacacgaagc

SEQ ID NO: 5209223 - DNA, 25 bp, Homo sapien
tcatcaatgcaagcaattttttcca

SEQ ID NO: 5209224 - DNA, 25 bp, Homo sapien
ctgggcctttcaaatgtaaaactga

SEQ ID NO: 5209225 - DNA, 25 bp, Homo sapien
gacccgtgccaccaagaattcagat

SEQ ID NO: 5209226 - DNA, 25 bp, Homo sapien
ttactggacatgtgaggctgaagat

SEQ ID NO: 5209227 - DNA, 25 bp, Homo sapien
cgttgagctgtgcagtaagtagctt

SEQ ID NO: 5209228 - DNA, 25 bp, Homo sapien
tacagttgttcatatggaagcaatt

SEQ ID NO: 5209229 - DNA, 25 bp, Homo sapien
tggcaggatattcacgttgagctgt

SEQ ID NO: 5209230 - DNA, 25 bp, Homo sapien
ttcaatgcagtatttatcataatcc

SEQ ID NO: 5209231 - DNA, 25 bp, Homo sapien
tgttgtagcatttgccttagtccta

SEQ ID NO: 5209232 - DNA, 25 bp, Homo sapien
taatcccagtggcaagttgggtgtt

SEQ ID NO: 5209233 - DNA, 25 bp, Homo sapien
gaacaaatttggaggatcccacttc

SEQ ID NO: 5209234 - DNA, 25 bp, Homo sapien
gagtcaacagatcctttcaaacatt

SEQ ID NO: 5209235 - DNA, 25 bp, Homo sapien
tgagtcaacagatcctttcaaacat

SEQ ID NO: 5209236 - DNA, 25 bp, Homo sapien
ctatgagtcaacagatcctttcaaa

SEQ ID NO: 5209237 - DNA, 25 bp, Homo sapien
tatgagtcaacagatcctttcaaac

SEQ ID NO: 5209238 - DNA, 25 bp, Homo sapien
ctctactagatgtaacaggaattct

SEQ ID NO: 5209239 - DNA, 25 bp, Homo sapien
tctctctactagatgtaacaggaat

SEQ ID NO: 5209240 - DNA, 25 bp, Homo sapien
tgatctctctactagatgtaacagg

SEQ ID NO: 5209241 - DNA, 25 bp, Homo sapien
gatctctctactagatgtaacagga

SEQ ID NO: 5209242 - DNA, 25 bp, Homo sapien
ttgttgagtgaccataactgcagag

SEQ ID NO: 5209243 - DNA, 25 bp, Homo sapien
gaaaggatgaccaaactgctttctc

SEQ ID NO: 5209244 - DNA, 25 bp, Homo sapien
catgatcagctcagcgctattgctg

SEQ ID NO: 5209245 - DNA, 25 bp, Homo sapien
gctcagcgctattgctgagcatagc

SEQ ID NO: 5209246 - DNA, 25 bp, Homo sapien
tttgatactataataccgcctagtc

SEQ ID NO: 5209247 - DNA, 25 bp, Homo sapien
cagcttttattgcattaagctgcca

SEQ ID NO: 5209248 - DNA, 25 bp, Homo sapien
gatactataataccgcctagtcaat

SEQ ID NO: 5209249 - DNA, 25 bp, Homo sapien
ttaagctgccaagatctctgtgtta

SEQ ID NO: 5209250 - DNA, 25 bp, Homo sapien
agggctgagcttcggagcgaccgcc

SEQ ID NO: 5209251 - DNA, 25 bp, Homo sapien
aagtgcgcgcgggacgccaagccgg

SEQ ID NO: 5209252 - DNA, 25 bp, Homo sapien
tctcttctcggctagcccgggacag

SEQ ID NO: 5209253 - DNA, 25 bp, Homo sapien
cagcagcgcagacggtcctttgctt

SEQ ID NO: 5209254 - DNA, 25 bp, Homo sapien
gcaggagtcccgagagaagaagcgg

SEQ ID NO: 5209255 - DNA, 25 bp, Homo sapien
agagtactcggcaggactgtccacg

SEQ ID NO: 5209256 - DNA, 25 bp, Homo sapien
acgtctaggttgaaggcgcggcaca

SEQ ID NO: 5209257 - DNA, 25 bp, Homo sapien
gccgtcgccgcggcggaaaagccat

SEQ ID NO: 5209258 - DNA, 25 bp, Homo sapien
aatccacggcgaagccgaagtaact

SEQ ID NO: 5209259 - DNA, 25 bp, Homo sapien
cgaagaaatccacggcgaagccgaa

SEQ ID NO: 5209260 - DNA, 25 bp, Homo sapien
agacgcgctgggcacgaagaaatcc

SEQ ID NO: 5209261 - DNA, 25 bp, Homo sapien
cgctgggcacgaagaaatccacggc

SEQ ID NO: 5209262 - DNA, 25 bp, Homo sapien
taaagtcggagacaatttctaacac

SEQ ID NO: 5209263 - DNA, 25 bp, Homo sapien
gttataaatcctgacggcccttgca

SEQ ID NO: 5209264 - DNA, 25 bp, Homo sapien
gatgtcagcattcagtaaagtcgga

SEQ ID NO: 5209265 - DNA, 25 bp, Homo sapien
acagtactcctaacgctaacatggg

SEQ ID NO: 5209266 - DNA, 25 bp, Homo sapien
taagatgtacaggatcagaaggagg

SEQ ID NO: 5209267 - DNA, 25 bp, Homo sapien
tacaggatcagaaggagggtgccta

SEQ ID NO: 5209268 - DNA, 25 bp, Homo sapien
cattaagatgtacaggatcagaagg

SEQ ID NO: 5209269 - DNA, 25 bp, Homo sapien
cacaacattaagatgtacaggatca

SEQ ID NO: 5209270 - DNA, 25 bp, Homo sapien
gctttgggagctcccacgagaagaa

SEQ ID NO: 5209271 - DNA, 25 bp, Homo sapien
ccggcgggtagaagaccagtcacat

SEQ ID NO: 5209272 - DNA, 25 bp, Homo sapien
aaattcaattggctggcaccggcgg

SEQ ID NO: 5209273 - DNA, 25 bp, Homo sapien
tccttccacaatcccaggctgggtg

SEQ ID NO: 5209274 - DNA, 25 bp, Homo sapien
attttggcactgatcacaatgtcaa

SEQ ID NO: 5209275 - DNA, 25 bp, Homo sapien
gacatatttcccagaatcaatatat

SEQ ID NO: 5209276 - DNA, 25 bp, Homo sapien
tggaacagtccacatcatgattcct

SEQ ID NO: 5209277 - DNA, 25 bp, Homo sapien
cactgacatatttcccagaatcaat

SEQ ID NO: 5209278 - DNA, 25 bp, Homo sapien
catctgttgttagacacctgaactg

SEQ ID NO: 5209279 - DNA, 25 bp, Homo sapien
tatgccatgctaagactgggcttga

SEQ ID NO: 5209280 - DNA, 25 bp, Homo sapien
gcttccacctatgactgaaaacatg

SEQ ID NO: 5209281 - DNA, 25 bp, Homo sapien
ttttatggctgaacacagacacgta

SEQ ID NO: 5209282 - DNA, 25 bp, Homo sapien
ctgtttcgacctcacagatgctcca

SEQ ID NO: 5209283 - DNA, 25 bp, Homo sapien
aatggatcatccttggcataatctc

SEQ ID NO: 5209284 - DNA, 25 bp, Homo sapien
ctccaaaccactgatgggacttaaa

SEQ ID NO: 5209285 - DNA, 25 bp, Homo sapien
gggacttaaattccaatggatcatc

SEQ ID NO: 5209286 - DNA, 25 bp, Homo sapien
gtaagtaaatatccagaagactcac

SEQ ID NO: 5209287 - DNA, 25 bp, Homo sapien
tgtaagtaaatatccagaagactca

SEQ ID NO: 5209288 - DNA, 25 bp, Homo sapien
ctgtaagtaaatatccagaagactc

SEQ ID NO: 5209289 - DNA, 25 bp, Homo sapien
gtctgctaaaacttcacctcctaag

SEQ ID NO: 5209290 - DNA, 25 bp, Homo sapien
ttaaagtctgctaaaacttcacctc

SEQ ID NO: 5209291 - DNA, 25 bp, Homo sapien
aatgtggcacatcctttaaagtctg

SEQ ID NO: 5209292 - DNA, 25 bp, Homo sapien
tctgcctagaacatccccactctta

SEQ ID NO: 5209293 - DNA, 25 bp, Homo sapien
tccaatggtacaatggggcacaggc

SEQ ID NO: 5209294 - DNA, 25 bp, Homo sapien
tcagttctccaatggtacaatgggg

SEQ ID NO: 5209295 - DNA, 25 bp, Homo sapien
tctccaatggtacaatggggcacag

SEQ ID NO: 5209296 - DNA, 25 bp, Homo sapien
agttctccaatggtacaatggggca

SEQ ID NO: 5209297 - DNA, 25 bp, Homo sapien
ggagcatactcaacagtctttgttc

SEQ ID NO: 5209298 - DNA, 25 bp, Homo sapien
gcataaaatcctctggatcaccaaa

SEQ ID NO: 5209299 - DNA, 25 bp, Homo sapien
gggtgggcttggtagcaggttaaca

SEQ ID NO: 5209300 - DNA, 25 bp, Homo sapien
attataattgcttgaagtcatcttt

SEQ ID NO: 5209301 - DNA, 25 bp, Homo sapien
gcttggtagcaggttaacaaagaaa

SEQ ID NO: 5209302 - DNA, 25 bp, Homo sapien
taacctcaagttagagcaagtcggc

SEQ ID NO: 5209303 - DNA, 25 bp, Homo sapien
gaacccaggtgtgtctataacacta

SEQ ID NO: 5209304 - DNA, 25 bp, Homo sapien
cttgaccatggccaaccagctagta

SEQ ID NO: 5209305 - DNA, 25 bp, Homo sapien
taaataagagagtaggacctgaacc

SEQ ID NO: 5209306 - DNA, 25 bp, Homo sapien
taagattgctaggtcttcgctaaga

SEQ ID NO: 5209307 - DNA, 25 bp, Homo sapien
tcaggaaatggacagaccagaactt

SEQ ID NO: 5209308 - DNA, 25 bp, Homo sapien
tattttccaaccatagtaggctcaa

SEQ ID NO: 5209309 - DNA, 25 bp, Homo sapien
gctatcctcccacgtttagtacgga

SEQ ID NO: 5209310 - DNA, 25 bp, Homo sapien
ccctgtccatcagcatcaatatctt

SEQ ID NO: 5209311 - DNA, 25 bp, Homo sapien
tgccttggctacgtaaaagaacttc

SEQ ID NO: 5209312 - DNA, 25 bp, Homo sapien
ttttcatacatttaaggcactcctc

SEQ ID NO: 5209313 - DNA, 25 bp, Homo sapien
gaacttctaagtcatctgccctaaa

SEQ ID NO: 5209314 - DNA, 25 bp, Homo sapien
tctaaaagtgtctaatcctaggtat

SEQ ID NO: 5209315 - DNA, 25 bp, Homo sapien
aggctggtaagctggtcaaactcct

SEQ ID NO: 5209316 - DNA, 25 bp, Homo sapien
tttgaaatgaggactaatgcgaagt

SEQ ID NO: 5209317 - DNA, 25 bp, Homo sapien
aatgcgaagtattatcaggttacaa

SEQ ID NO: 5209318 - DNA, 25 bp, Homo sapien
ttagtgtctcagatctaaacagaag

SEQ ID NO: 5209319 - DNA, 25 bp, Homo sapien
gaccaccaagaagtactctgtcagc

SEQ ID NO: 5209320 - DNA, 25 bp, Homo sapien
caataaaagctaccaggaccaccaa

SEQ ID NO: 5209321 - DNA, 25 bp, Homo sapien
ggaccaccaagaagtactctgtcag

SEQ ID NO: 5209322 - DNA, 25 bp, Homo sapien
cttgccaataaaagctaccaggacc

SEQ ID NO: 5209323 - DNA, 25 bp, Homo sapien
tgcagtccgagttgctaattggtta

SEQ ID NO: 5209324 - DNA, 25 bp, Homo sapien
taattggttattatacttgatgctg

SEQ ID NO: 5209325 - DNA, 25 bp, Homo sapien
gtcgtatttagatacgatttctgcc

SEQ ID NO: 5209326 - DNA, 25 bp, Homo sapien
cttgatgctgtaaacattggggtcg

SEQ ID NO: 5209327 - DNA, 25 bp, Homo sapien
tattttgcgtctcagtgcctcagtg

SEQ ID NO: 5209328 - DNA, 25 bp, Homo sapien
aacttcaggagttagactgtctcca

SEQ ID NO: 5209329 - DNA, 25 bp, Homo sapien
agttacaagcgagtgactttgggca

SEQ ID NO: 5209330 - DNA, 25 bp, Homo sapien
tctgaacagcaagttacaagcgagt

SEQ ID NO: 5209331 - DNA, 25 bp, Homo sapien
tcaccattgaaatctccgacagcca

SEQ ID NO: 5209332 - DNA, 25 bp, Homo sapien
gaaatctccgacagccacagaataa

SEQ ID NO: 5209333 - DNA, 25 bp, Homo sapien
ccattgaaatctccgacagccacag

SEQ ID NO: 5209334 - DNA, 25 bp, Homo sapien
attgaaatctccgacagccacagaa

SEQ ID NO: 5209335 - DNA, 25 bp, Homo sapien
tagatatagttcaagtacttcatac

SEQ ID NO: 5209336 - DNA, 25 bp, Homo sapien
ttagatatagttcaagtacttcata

SEQ ID NO: 5209337 - DNA, 25 bp, Homo sapien
agtccttgctgctcttggaactcct

SEQ ID NO: 5209338 - DNA, 25 bp, Homo sapien
ctgctcttggaactcctgaaacaaa

SEQ ID NO: 5209339 - DNA, 25 bp, Homo sapien
attcccaaagtccttgctgctcttg

SEQ ID NO: 5209340 - DNA, 25 bp, Homo sapien
gctcttggaactcctgaaacaaagt

SEQ ID NO: 5209341 - DNA, 25 bp, Homo sapien
ctgctcgccagtaaaattgtataag

SEQ ID NO: 5209342 - DNA, 25 bp, Homo sapien
gctcgccagtaaaattgtataagga

SEQ ID NO: 5209343 - DNA, 25 bp, Homo sapien
gtaaaattgtataaggaggacatgt

SEQ ID NO: 5209344 - DNA, 25 bp, Homo sapien
ttgtataaggaggacatgttcttcc

SEQ ID NO: 5209345 - DNA, 25 bp, Homo sapien
ctccattaatgtcagtggcagctac

SEQ ID NO: 5209346 - DNA, 25 bp, Homo sapien
catctccattaatgtcagtggcagc

SEQ ID NO: 5209347 - DNA, 25 bp, Homo sapien
cagtggcagctacagaaaatccgaa

SEQ ID NO: 5209348 - DNA, 25 bp, Homo sapien
cagaaaatccgaaatatgcagccat

SEQ ID NO: 5209349 - DNA, 25 bp, Homo sapien
ccaaaggagctatggcactgccaaa

SEQ ID NO: 5209350 - DNA, 25 bp, Homo sapien
tctctgtagagacactgagacctgc

SEQ ID NO: 5209351 - DNA, 25 bp, Homo sapien
cacgatccatgaagagaggtgctcc

SEQ ID NO: 5209352 - DNA, 25 bp, Homo sapien
ggagtttgccatcagagccacgatc

SEQ ID NO: 5209353 - DNA, 25 bp, Homo sapien
tttgctacagtaagacccaaggaga

SEQ ID NO: 5209354 - DNA, 25 bp, Homo sapien
tttcaatatccctcttgatgatgcc

SEQ ID NO: 5209355 - DNA, 25 bp, Homo sapien
tatatttgttctactgacagacgac

SEQ ID NO: 5209356 - DNA, 25 bp, Homo sapien
caaggagaaaccttgggagaccata

SEQ ID NO: 5209357 - DNA, 25 bp, Homo sapien
aaaaatcagccatgcacagaggtgc

SEQ ID NO: 5209358 - DNA, 25 bp, Homo sapien
aaaccaaagataagcataacttctc

SEQ ID NO: 5209359 - DNA, 25 bp, Homo sapien
ttaaaacaggctggccacggtagct

SEQ ID NO: 5209360 - DNA, 25 bp, Homo sapien
ctctactgacatatgcattaataaa

SEQ ID NO: 5209361 - DNA, 25 bp, Homo sapien
tcattttcaccacctagaagagtgc

SEQ ID NO: 5209362 - DNA, 25 bp, Homo sapien
gccttaaaggtaaatcggctgggca

SEQ ID NO: 5209363 - DNA, 25 bp, Homo sapien
gcctgcagtaaacaccaactaagaa

SEQ ID NO: 5209364 - DNA, 25 bp, Homo sapien
tttcttaaagacatgagtagactct

SEQ ID NO: 5209365 - DNA, 25 bp, Homo sapien
gaatagccaaagcttggtggcatgc

SEQ ID NO: 5209366 - DNA, 25 bp, Homo sapien
ggtggcatgcttcgagcagcccact

SEQ ID NO: 5209367 - DNA, 25 bp, Homo sapien
cagcccactgcccttcaaggatttg

SEQ ID NO: 5209368 - DNA, 25 bp, Homo sapien
tgagatgggactgcgttcaagcctg

SEQ ID NO: 5209369 - DNA, 25 bp, Homo sapien
gctcgatctacaccaaaagctccta

SEQ ID NO: 5209370 - DNA, 25 bp, Homo sapien
ctgtataagatagctcgatctacac

SEQ ID NO: 5209371 - DNA, 25 bp, Homo sapien
tacaccaaaagctcctacaattaag

SEQ ID NO: 5209372 - DNA, 25 bp, Homo sapien
gatagctcgatctacaccaaaagct

SEQ ID NO: 5209373 - DNA, 25 bp, Homo sapien
tcaagaccagcatttacagtgataa

SEQ ID NO: 5209374 - DNA, 25 bp, Homo sapien
tagggtacacttcaagaccagcatt

SEQ ID NO: 5209375 - DNA, 25 bp, Homo sapien
gaccagcatttacagtgataactgg

SEQ ID NO: 5209376 - DNA, 25 bp, Homo sapien
aatgctagggtacacttcaagacca

SEQ ID NO: 5209377 - DNA, 25 bp, Homo sapien
tctgcctttaagcagaacctaacat

SEQ ID NO: 5209378 - DNA, 25 bp, Homo sapien
gccatctgcctttaagcagaaccta

SEQ ID NO: 5209379 - DNA, 25 bp, Homo sapien
gcctttaagcagaacctaacattaa

SEQ ID NO: 5209380 - DNA, 25 bp, Homo sapien
ttgccatctgcctttaagcagaacc

SEQ ID NO: 5209381 - DNA, 25 bp, Homo sapien
gcagatacgctatcaattcctcaca

SEQ ID NO: 5209382 - DNA, 25 bp, Homo sapien
gggacctgctgtagagaaacagtgc

SEQ ID NO: 5209383 - DNA, 25 bp, Homo sapien
gaaacagtgctcgtcgaattgctcc

SEQ ID NO: 5209384 - DNA, 25 bp, Homo sapien
ccccttgaaatagtcatgttcttgg

SEQ ID NO: 5209385 - DNA, 25 bp, Homo sapien
agttttcctatgtactggcccaagg

SEQ ID NO: 5209386 - DNA, 25 bp, Homo sapien
tttctaacaactgcactgtgatagt

SEQ ID NO: 5209387 - DNA, 25 bp, Homo sapien
cggttgcaagtaaatttccattatg

SEQ ID NO: 5209388 - DNA, 25 bp, Homo sapien
cattttcattgtaatacggttgcaa

SEQ ID NO: 5209389 - DNA, 25 bp, Homo sapien
aaatagtaattggagtgagtttgtc

SEQ ID NO: 5209390 - DNA, 25 bp, Homo sapien
gcagctgttctataatccaaccgat

SEQ ID NO: 5209391 - DNA, 25 bp, Homo sapien
cgactaatgttagcaggcgtgaact

SEQ ID NO: 5209392 - DNA, 25 bp, Homo sapien
tgcaagcctgttgtatcagcagctg

SEQ ID NO: 5209393 - DNA, 25 bp, Homo sapien
ctatctacagaaacttccagcttgg

SEQ ID NO: 5209394 - DNA, 25 bp, Homo sapien
ttcaccacagtcaagtagaatgtga

SEQ ID NO: 5209395 - DNA, 25 bp, Homo sapien
tgtcttcaccacagtcaagtagaat

SEQ ID NO: 5209396 - DNA, 25 bp, Homo sapien
gcttgggtttacagacattgtcttc

SEQ ID NO: 5209397 - DNA, 25 bp, Homo sapien
ctacaagttaacaatacaaatccag

SEQ ID NO: 5209398 - DNA, 25 bp, Homo sapien
tacaagttaacaatacaaatccaga

SEQ ID NO: 5209399 - DNA, 25 bp, Homo sapien
caatgtcagagggttgtcatcccca

SEQ ID NO: 5209400 - DNA, 25 bp, Homo sapien
ggacaaccccgatgaaatcagcctg

SEQ ID NO: 5209401 - DNA, 25 bp, Homo sapien
gatgagctcagcttcgtaggcacct

SEQ ID NO: 5209402 - DNA, 25 bp, Homo sapien
cagtggaatggaaacgatgagctca

SEQ ID NO: 5209403 - DNA, 25 bp, Homo sapien
tccagccttcattgggtttccaagg

SEQ ID NO: 5209404 - DNA, 25 bp, Homo sapien
cacataccacctggcgagtttggtt

SEQ ID NO: 5209405 - DNA, 25 bp, Homo sapien
gagttccagccttcattgggtttcc

SEQ ID NO: 5209406 - DNA, 25 bp, Homo sapien
tccaaggtcacataccacctggcga

SEQ ID NO: 5209407 - DNA, 25 bp, Homo sapien
gaaggcatgagtagggccacaacca

SEQ ID NO: 5209408 - DNA, 25 bp, Homo sapien
tttgataacacgaagctaaccacca

SEQ ID NO: 5209409 - DNA, 25 bp, Homo sapien
tttactagagtaagggaacatggct

SEQ ID NO: 5209410 - DNA, 25 bp, Homo sapien
ggaccaatccataagagagcctatt

SEQ ID NO: 5209411 - DNA, 25 bp, Homo sapien
ggaaaagatagtaatgctagtcaat

SEQ ID NO: 5209412 - DNA, 25 bp, Homo sapien
aggaaaagatagtaatgctagtcaa

SEQ ID NO: 5209413 - DNA, 25 bp, Homo sapien
aaagatagtaatgctagtcaatgtc

SEQ ID NO: 5209414 - DNA, 25 bp, Homo sapien
gaaaagatagtaatgctagtcaatg

SEQ ID NO: 5209415 - DNA, 25 bp, Homo sapien
cacagaagtatccatctctgactgc

SEQ ID NO: 5209416 - DNA, 25 bp, Homo sapien
tgctggtgcacactgaaacgaagac

SEQ ID NO: 5209417 - DNA, 25 bp, Homo sapien
tttggatttgtaagtcaaatttcac

SEQ ID NO: 5209418 - DNA, 25 bp, Homo sapien
cactgaaacgaagaccagctaagag

SEQ ID NO: 5209419 - DNA, 25 bp, Homo sapien
cagcaagatcaactttgtgagatac

SEQ ID NO: 5209420 - DNA, 25 bp, Homo sapien
agcaagatcaactttgtgagataca

SEQ ID NO: 5209421 - DNA, 25 bp, Homo sapien
gcaagatcaactttgtgagatacaa

SEQ ID NO: 5209422 - DNA, 25 bp, Homo sapien
aacagcaagatcaactttgtgagat

SEQ ID NO: 5209423 - DNA, 25 bp, Homo sapien
tctcagggttctccttgtgctccca

SEQ ID NO: 5209424 - DNA, 25 bp, Homo sapien
cttcttcagtctcagggttctcctt

SEQ ID NO: 5209425 - DNA, 25 bp, Homo sapien
tgtgctcccagtttggaatcggaag

SEQ ID NO: 5209426 - DNA, 25 bp, Homo sapien
gtgctgaacaactggcccaacatct

SEQ ID NO: 5209427 - DNA, 25 bp, Homo sapien
gtttgagtaaaatctaacaactgca

SEQ ID NO: 5209428 - DNA, 25 bp, Homo sapien
tctgacacatacttaaccaatgtag

SEQ ID NO: 5209429 - DNA, 25 bp, Homo sapien
tgctcacgaggtttgagtaaaatct

SEQ ID NO: 5209430 - DNA, 25 bp, Homo sapien
cttagttgttcctctcttcgttggc

SEQ ID NO: 5209431 - DNA, 25 bp, Homo sapien
aataacagcaatttccacagttaac

SEQ ID NO: 5209432 - DNA, 25 bp, Homo sapien
aatcatgttagcaataggttttaaa

SEQ ID NO: 5209433 - DNA, 25 bp, Homo sapien
ccacagttaacctctaattacaatg

SEQ ID NO: 5209434 - DNA, 25 bp, Homo sapien
gcaatttccacagttaacctctaat

SEQ ID NO: 5209435 - DNA, 25 bp, Homo sapien
ttatatttgtaaggccactgaagat

SEQ ID NO: 5209436 - DNA, 25 bp, Homo sapien
gaagtgcagttcattggtccatcaa

SEQ ID NO: 5209437 - DNA, 25 bp, Homo sapien
gaagatggagcattgccttgctgaa

SEQ ID NO: 5209438 - DNA, 25 bp, Homo sapien
ttgctgaatgaacttggaccattgt

SEQ ID NO: 5209439 - DNA, 25 bp, Homo sapien
cttttcagttgtttgcaaagatgag

SEQ ID NO: 5209440 - DNA, 25 bp, Homo sapien
tttcagttgtttgcaaagatgagat

SEQ ID NO: 5209441 - DNA, 25 bp, Homo sapien
ttttcagttgtttgcaaagatgaga

SEQ ID NO: 5209442 - DNA, 25 bp, Homo sapien
aaagtgtgaatatctccttcactga

SEQ ID NO: 5209443 - DNA, 25 bp, Homo sapien
ggcaagatcccgcttagtgatgaga

SEQ ID NO: 5209444 - DNA, 25 bp, Homo sapien
tctccttcactgagggcaagatccc

SEQ ID NO: 5209445 - DNA, 25 bp, Homo sapien
tagtgatgagatggtcccgctcacc

SEQ ID NO: 5209446 - DNA, 25 bp, Homo sapien
ttaaatgtctatggtgcacatattt

SEQ ID NO: 5209447 - DNA, 25 bp, Homo sapien
ttttaaatgtctatggtgcacatat

SEQ ID NO: 5209448 - DNA, 25 bp, Homo sapien
tttttaaatgtctatggtgcacata

SEQ ID NO: 5209449 - DNA, 25 bp, Homo sapien
tttaaatgtctatggtgcacatatt

SEQ ID NO: 5209450 - DNA, 25 bp, Homo sapien
tcagtctacagggaaatgcatatca

SEQ ID NO: 5209451 - DNA, 25 bp, Homo sapien
tcatgaccttgtattgggcaatggt

SEQ ID NO: 5209452 - DNA, 25 bp, Homo sapien
ttcacacagaatgagacaaaacctg

SEQ ID NO: 5209453 - DNA, 25 bp, Homo sapien
tcttcacaccaaccaggatgattat

SEQ ID NO: 5209454 - DNA, 25 bp, Homo sapien
ttcttttgccacacatgtagttcct

SEQ ID NO: 5209455 - DNA, 25 bp, Homo sapien
taataaccagatctcaacatcccca

SEQ ID NO: 5209456 - DNA, 25 bp, Homo sapien
gaactcaatattctttaggcaaacc

SEQ ID NO: 5209457 - DNA, 25 bp, Homo sapien
ggtttttccatggagggcctacaga

SEQ ID NO: 5209458 - DNA, 25 bp, Homo sapien
tcctctgtctaatctcccaacttgg

SEQ ID NO: 5209459 - DNA, 25 bp, Homo sapien
ccaacttggcagacaatcttcaagc

SEQ ID NO: 5209460 - DNA, 25 bp, Homo sapien
gactttacgtacaagattgcactct

SEQ ID NO: 5209461 - DNA, 25 bp, Homo sapien
tcataaaagtctcagtccacagtaa

SEQ ID NO: 5209462 - DNA, 25 bp, Homo sapien
caatgtggagttggtgatatcctca

SEQ ID NO: 5209463 - DNA, 25 bp, Homo sapien
agcagacgacttcagagaataggaa

SEQ ID NO: 5209464 - DNA, 25 bp, Homo sapien
ggtgatatcctcaattggaagattc

SEQ ID NO: 5209465 - DNA, 25 bp, Homo sapien
cttataaggaaactctatgacatta

SEQ ID NO: 5209466 - DNA, 25 bp, Homo sapien
tgatatcaagagcatgcacatacac

SEQ ID NO: 5209467 - DNA, 25 bp, Homo sapien
gagtctcgcccagtatgtaggccaa

SEQ ID NO: 5209468 - DNA, 25 bp, Homo sapien
ctcccaatgataggctgacttctga

SEQ ID NO: 5209469 - DNA, 25 bp, Homo sapien
aaggtctagctttaatcacttcggg

SEQ ID NO: 5209470 - DNA, 25 bp, Homo sapien
tgctaaaatgatcacccacacaggc

SEQ ID NO: 5209471 - DNA, 25 bp, Homo sapien
tcttgttcttcttgaggtggccgga

SEQ ID NO: 5209472 - DNA, 25 bp, Homo sapien
cattttcatgaggttgaagctgctc

SEQ ID NO: 5209473 - DNA, 25 bp, Homo sapien
ttaagtttctgagtttccttcacca

SEQ ID NO: 5209474 - DNA, 25 bp, Homo sapien
tgttcttcttgaggtggccggaccc

SEQ ID NO: 5209475 - DNA, 25 bp, Homo sapien
aacttactgattggtggcaggcaac

SEQ ID NO: 5209476 - DNA, 25 bp, Homo sapien
gaaggttcaccactctacagagcca

SEQ ID NO: 5209477 - DNA, 25 bp, Homo sapien
tagaagttattctgacagccgagac

SEQ ID NO: 5209478 - DNA, 25 bp, Homo sapien
ggtataactgatcatcatccccagg

SEQ ID NO: 5209479 - DNA, 25 bp, Homo sapien
cattgagatgggtagtggctgcaca

SEQ ID NO: 5209480 - DNA, 25 bp, Homo sapien
tgcacataggtattccaagaacgac

SEQ ID NO: 5209481 - DNA, 25 bp, Homo sapien
gattcagtacctctcccaagaagtt

SEQ ID NO: 5209482 - DNA, 25 bp, Homo sapien
taaatcaagcagaacactgtaccag

SEQ ID NO: 5209483 - DNA, 25 bp, Homo sapien
tgctccgagaggacgcgatgctggg

SEQ ID NO: 5209484 - DNA, 25 bp, Homo sapien
gctgctccgagaggacgcgatgctg

SEQ ID NO: 5209485 - DNA, 25 bp, Homo sapien
gggccaggctgctccgagaggacgc

SEQ ID NO: 5209486 - DNA, 25 bp, Homo sapien
ccaggctgctccgagaggacgcgat

SEQ ID NO: 5209487 - DNA, 25 bp, Homo sapien
gcctagagccagagggccgcggcgg

SEQ ID NO: 5209488 - DNA, 25 bp, Homo sapien
cggcggcatattgcggggctccggg

SEQ ID NO: 5209489 - DNA, 25 bp, Homo sapien
cagagggccgcggcggcatattgcg

SEQ ID NO: 5209490 - DNA, 25 bp, Homo sapien
gagccagagggccgcggcggcatat

SEQ ID NO: 5209491 - DNA, 25 bp, Homo sapien
gcaccacggccaggccgagaagcag

SEQ ID NO: 5209492 - DNA, 25 bp, Homo sapien
aggggacacgccggcagagcctcgc

SEQ ID NO: 5209493 - DNA, 25 bp, Homo sapien
gcaggggacacgccggcagagcctc

SEQ ID NO: 5209494 - DNA, 25 bp, Homo sapien
ggtgcaggggacacgccggcagagc

SEQ ID NO: 5209495 - DNA, 25 bp, Homo sapien
aggctgaggtcggagcggctgagtt

SEQ ID NO: 5209496 - DNA, 25 bp, Homo sapien
tcggagcggctgagttccgctctgg

SEQ ID NO: 5209497 - DNA, 25 bp, Homo sapien
gctgagttccgctctggcggccgcg

SEQ ID NO: 5209498 - DNA, 25 bp, Homo sapien
tggaaccgtcaaggtggaggttgcc

SEQ ID NO: 5209499 - DNA, 25 bp, Homo sapien
cagatcaagggaccaaaggctgggc

SEQ ID NO: 5209500 - DNA, 25 bp, Homo sapien
cagattcccgacaccagatcaaggg

SEQ ID NO: 5209501 - DNA, 25 bp, Homo sapien
tcagaaagctcattacccggagggc

SEQ ID NO: 5209502 - DNA, 25 bp, Homo sapien
tcattacccggagggcagattcccg

SEQ ID NO: 5209503 - DNA, 25 bp, Homo sapien
tctcccagacttcggcttcatagtg

SEQ ID NO: 5209504 - DNA, 25 bp, Homo sapien
tgaggagaacagacagtagggaaac

SEQ ID NO: 5209505 - DNA, 25 bp, Homo sapien
tgaattactcccttgtttgccactg

SEQ ID NO: 5209506 - DNA, 25 bp, Homo sapien
tgatctatcgaagagtgtggttcct

SEQ ID NO: 5209507 - DNA, 25 bp, Homo sapien
atcctgtttctgtttgtgtcatgtt

SEQ ID NO: 5209508 - DNA, 25 bp, Homo sapien
tcctgtttctgtttgtgtcatgttc

SEQ ID NO: 5209509 - DNA, 25 bp, Homo sapien
catcctgtttctgtttgtgtcatgt

SEQ ID NO: 5209510 - DNA, 25 bp, Homo sapien
ccatcctgtttctgtttgtgtcatg

SEQ ID NO: 5209511 - DNA, 25 bp, Homo sapien
cattggcctaactattcaggaagca

SEQ ID NO: 5209512 - DNA, 25 bp, Homo sapien
gatggaaatgccctaccaatttgag

SEQ ID NO: 5209513 - DNA, 25 bp, Homo sapien
ctgtgaactcaatacaagtccaggg

SEQ ID NO: 5209514 - DNA, 25 bp, Homo sapien
ccattagctaggctcggaaagcaca

SEQ ID NO: 5209515 - DNA, 25 bp, Homo sapien
gcccttgttgtactgaatgtgagag

SEQ ID NO: 5209516 - DNA, 25 bp, Homo sapien
tgtactgaatgtgagagttgtattc

SEQ ID NO: 5209517 - DNA, 25 bp, Homo sapien
atgtgagagttgtattctatgccca

SEQ ID NO: 5209518 - DNA, 25 bp, Homo sapien
tgtgagagttgtattctatgcccat

SEQ ID NO: 5209519 - DNA, 25 bp, Homo sapien
tattgactgtatcagtaggagccat

SEQ ID NO: 5209520 - DNA, 25 bp, Homo sapien
aaaggtagaaattgcagcatgtcgt

SEQ ID NO: 5209521 - DNA, 25 bp, Homo sapien
ctggagagaaaaaggtagaaattgc

SEQ ID NO: 5209522 - DNA, 25 bp, Homo sapien
aaaaaggtagaaattgcagcatgtc

SEQ ID NO: 5209523 - DNA, 25 bp, Homo sapien
agaaaaaggtagaaattgcagcatg

SEQ ID NO: 5209524 - DNA, 25 bp, Homo sapien
tgcttggctcaggtactgacgactg

SEQ ID NO: 5209525 - DNA, 25 bp, Homo sapien
cacgtagccatctttgtaagcaata

SEQ ID NO: 5209526 - DNA, 25 bp, Homo sapien
tactgtggaatttgtcttcgtgtag

SEQ ID NO: 5209527 - DNA, 25 bp, Homo sapien
tagggtacttttatcagcactgctc

SEQ ID NO: 5209528 - DNA, 25 bp, Homo sapien
atttattaaggtatcaagatttact

SEQ ID NO: 5209529 - DNA, 25 bp, Homo sapien
tgttacagaatactgttaccctgcc

SEQ ID NO: 5209530 - DNA, 25 bp, Homo sapien
tatttactgcattaatccaatagat

SEQ ID NO: 5209531 - DNA, 25 bp, Homo sapien
aatccaatagatttggaatgcttcc

SEQ ID NO: 5209532 - DNA, 25 bp, Homo sapien
cacataagagcacaatgctcttctg

SEQ ID NO: 5209533 - DNA, 25 bp, Homo sapien
tgcaaacagtgtggtttgccaaaag

SEQ ID NO: 5209534 - DNA, 25 bp, Homo sapien
cttcccacataagagcacaatgctc

SEQ ID NO: 5209535 - DNA, 25 bp, Homo sapien
tgctcttctgcaaacagtgtggttt

SEQ ID NO: 5209536 - DNA, 25 bp, Homo sapien
cgggaacagtgaaagtgtaactgat

SEQ ID NO: 5209537 - DNA, 25 bp, Homo sapien
catatatttgcttggctttgcggga

SEQ ID NO: 5209538 - DNA, 25 bp, Homo sapien
ttgcttggctttgcgggaacagtga

SEQ ID NO: 5209539 - DNA, 25 bp, Homo sapien
aaatagccatatatttgcttggctt

SEQ ID NO: 5209540 - DNA, 25 bp, Homo sapien
ggtttattgagagtaattccagttg

SEQ ID NO: 5209541 - DNA, 25 bp, Homo sapien
ctgttgtagaactgtaagatagcca

SEQ ID NO: 5209542 - DNA, 25 bp, Homo sapien
gccagtaacgttgctaatatgatgg

SEQ ID NO: 5209543 - DNA, 25 bp, Homo sapien
tccagttgtatgcagaaaattgtcc

SEQ ID NO: 5209544 - DNA, 25 bp, Homo sapien
tcattcagacgtagaagaggaagag

SEQ ID NO: 5209545 - DNA, 25 bp, Homo sapien
gaaacttgaatagagccattgacct

SEQ ID NO: 5209546 - DNA, 25 bp, Homo sapien
tgtccaagcaggtatgcgatcccct

SEQ ID NO: 5209547 - DNA, 25 bp, Homo sapien
tgcagcaagaggagtcaattcaatg

SEQ ID NO: 5209548 - DNA, 25 bp, Homo sapien
tgaccattccccgaccatgatttac

SEQ ID NO: 5209549 - DNA, 25 bp, Homo sapien
gttatgttccttgaccattccccga

SEQ ID NO: 5209550 - DNA, 25 bp, Homo sapien
agtaccccaaatgtggtgcatcata

SEQ ID NO: 5209551 - DNA, 25 bp, Homo sapien
ccagattaaatgattgttatgttcc

SEQ ID NO: 5209552 - DNA, 25 bp, Homo sapien
tagttcctggaagtggagctgctat

SEQ ID NO: 5209553 - DNA, 25 bp, Homo sapien
ctctagttcctggaagtggagctgc

SEQ ID NO: 5209554 - DNA, 25 bp, Homo sapien
ctagttcctggaagtggagctgcta

SEQ ID NO: 5209555 - DNA, 25 bp, Homo sapien
tctagttcctggaagtggagctgct

SEQ ID NO: 5209556 - DNA, 25 bp, Homo sapien
ggttgatgaacacatccatgggcca

SEQ ID NO: 5209557 - DNA, 25 bp, Homo sapien
tgactctgggcaggctcatgcttgg

SEQ ID NO: 5209558 - DNA, 25 bp, Homo sapien
catgggccagaagggtgatataccc

SEQ ID NO: 5209559 - DNA, 25 bp, Homo sapien
taataattgatcatgcctgcacgag

SEQ ID NO: 5209560 - DNA, 25 bp, Homo sapien
cgtttgatactgttagccaccgaga

SEQ ID NO: 5209561 - DNA, 25 bp, Homo sapien
gactcgctttaaccaatgaaatgtg

SEQ ID NO: 5209562 - DNA, 25 bp, Homo sapien
aatatgtgaatagcatagcccagag

SEQ ID NO: 5209563 - DNA, 25 bp, Homo sapien
tgagtttgcatggtgtggctctgcc

SEQ ID NO: 5209564 - DNA, 25 bp, Homo sapien
tgtggtaggcagttatgtccttgga

SEQ ID NO: 5209565 - DNA, 25 bp, Homo sapien
aggcagttatgtccttggaatcttc

SEQ ID NO: 5209566 - DNA, 25 bp, Homo sapien
aagaaacactgtgtggtaggcagtt

SEQ ID NO: 5209567 - DNA, 25 bp, Homo sapien
cactgtgtggtaggcagttatgtcc

SEQ ID NO: 5209568 - DNA, 25 bp, Homo sapien
acaaagtagtacagcaaaaaatcca

SEQ ID NO: 5209569 - DNA, 25 bp, Homo sapien
atgactattgttcctcctaatatgg

SEQ ID NO: 5209570 - DNA, 25 bp, Homo sapien
caaaaaatccaatgacaatgactat

SEQ ID NO: 5209571 - DNA, 25 bp, Homo sapien
gcaaaaaatccaatgacaatgacta

SEQ ID NO: 5209572 - DNA, 25 bp, Homo sapien
gttgttgaagttgtctggtctctct

SEQ ID NO: 5209573 - DNA, 25 bp, Homo sapien
ttgaggacctcaagtttagtgatat

SEQ ID NO: 5209574 - DNA, 25 bp, Homo sapien
cttgaggacctcaagtttagtgata

SEQ ID NO: 5209575 - DNA, 25 bp, Homo sapien
tgatatgatttatgtgtgttgttga

SEQ ID NO: 5209576 - DNA, 25 bp, Homo sapien
tatatgaggagtttttggcattgaa

SEQ ID NO: 5209577 - DNA, 25 bp, Homo sapien
ctgaggactatatgaggagtttttg

SEQ ID NO: 5209578 - DNA, 25 bp, Homo sapien
gcattgaataactgcgacttgtcct

SEQ ID NO: 5209579 - DNA, 25 bp, Homo sapien
gaataactgcgacttgtcctcagct

SEQ ID NO: 5209580 - DNA, 25 bp, Homo sapien
tgtgccttaaagctgggtcctcagg

SEQ ID NO: 5209581 - DNA, 25 bp, Homo sapien
tcaggtctataaaggagtgcctcac

SEQ ID NO: 5209582 - DNA, 25 bp, Homo sapien
taagctgcttgagtatcggctccaa

SEQ ID NO: 5209583 - DNA, 25 bp, Homo sapien
gctccaatctgaagcctgggatggc

SEQ ID NO: 5209584 - DNA, 25 bp, Homo sapien
tagtcaccatggtagaggcaacatt

SEQ ID NO: 5209585 - DNA, 25 bp, Homo sapien
tccagagtaacatcagtccaagtca

SEQ ID NO: 5209586 - DNA, 25 bp, Homo sapien
tatgctgctcccatgttgaatagga

SEQ ID NO: 5209587 - DNA, 25 bp, Homo sapien
tacatggtttgggtctctatgctgc

SEQ ID NO: 5209588 - DNA, 25 bp, Homo sapien
ctatagaactgaaagggcataatcc

SEQ ID NO: 5209589 - DNA, 25 bp, Homo sapien
tacgtattgataccagaggattcaa

SEQ ID NO: 5209590 - DNA, 25 bp, Homo sapien
tacaatgctcgtacatgggaaaatg

SEQ ID NO: 5209591 - DNA, 25 bp, Homo sapien
tgagaaactcatgcgccttataaga

SEQ ID NO: 5209592 - DNA, 25 bp, Homo sapien
gaaacacctggaaacaagaaggcaa

SEQ ID NO: 5209593 - DNA, 25 bp, Homo sapien
gttcaccaaaaattaaacaatgctc

SEQ ID NO: 5209594 - DNA, 25 bp, Homo sapien
ctagttcaccaaaaattaaacaatg

SEQ ID NO: 5209595 - DNA, 25 bp, Homo sapien
accaaaaattaaacaatgctccaag

SEQ ID NO: 5209596 - DNA, 25 bp, Homo sapien
tcaccaaaaattaaacaatgctcca

SEQ ID NO: 5209597 - DNA, 25 bp, Homo sapien
gcaagggtttgggactcatctctga

SEQ ID NO: 5209598 - DNA, 25 bp, Homo sapien
ggcaagggtttgggactcatctctg

SEQ ID NO: 5209599 - DNA, 25 bp, Homo sapien
agctccagatgtaatttgtctagaa

SEQ ID NO: 5209600 - DNA, 25 bp, Homo sapien
cagatgtaatttgtctagaaacggg

SEQ ID NO: 5209601 - DNA, 25 bp, Homo sapien
gatgtaatttgtctagaaacgggaa

SEQ ID NO: 5209602 - DNA, 25 bp, Homo sapien
catagctccagatgtaatttgtcta

SEQ ID NO: 5209603 - DNA, 25 bp, Homo sapien
agagggaatgaaggcttagctatgc

SEQ ID NO: 5209604 - DNA, 25 bp, Homo sapien
acagaatggattgttgttctgttgg

SEQ ID NO: 5209605 - DNA, 25 bp, Homo sapien
cattcaattcctccgtgtgtggatc

SEQ ID NO: 5209606 - DNA, 25 bp, Homo sapien
tgtccattaatgacaagaggctgaa

SEQ ID NO: 5209607 - DNA, 25 bp, Homo sapien
ggaccccggcgagtatttcttctca

SEQ ID NO: 5209608 - DNA, 25 bp, Homo sapien
tatgtgcccgataactggctccccg

SEQ ID NO: 5209609 - DNA, 25 bp, Homo sapien
agcagctctttgccagcgccgactg

SEQ ID NO: 5209610 - DNA, 25 bp, Homo sapien
tgcctcacctacgacgacttcctga

SEQ ID NO: 5209611 - DNA, 25 bp, Homo sapien
atcaggggcggcaccgactatgtgc

SEQ ID NO: 5209612 - DNA, 25 bp, Homo sapien
tgtggaggaggcaagccatctcaaa

SEQ ID NO: 5209613 - DNA, 25 bp, Homo sapien
aaaaagacctatcacaaactgggag

SEQ ID NO: 5209614 - DNA, 25 bp, Homo sapien
cctttgtacttaagaactggagtca

SEQ ID NO: 5209615 - DNA, 25 bp, Homo sapien
tgggtcatacacctaaactaagtgg

SEQ ID NO: 5209616 - DNA, 25 bp, Homo sapien
cctgtgtttgaatagctgtctcttg

SEQ ID NO: 5209617 - DNA, 25 bp, Homo sapien
tgtgtgactgctctaccagggtaat

SEQ ID NO: 5209618 - DNA, 25 bp, Homo sapien
cttttgaatttgactacagcgtgct

SEQ ID NO: 5209619 - DNA, 25 bp, Homo sapien
ggtagatatcatcctgttactgtca

SEQ ID NO: 5209620 - DNA, 25 bp, Homo sapien
agaccataaaagcaaaggcaacaca

SEQ ID NO: 5209621 - DNA, 25 bp, Homo sapien
tcttctggacattgtcctaggcaaa

SEQ ID NO: 5209622 - DNA, 25 bp, Homo sapien
aattctagcatgaaacctaagaaaa

SEQ ID NO: 5209623 - DNA, 25 bp, Homo sapien
gaaactggatccctacctctaacca

SEQ ID NO: 5209624 - DNA, 25 bp, Homo sapien
gacaggtaccatactgcttgtgcag

SEQ ID NO: 5209625 - DNA, 25 bp, Homo sapien
ggctgactgccaaactgttgagaaa

SEQ ID NO: 5209626 - DNA, 25 bp, Homo sapien
gacccattagagtgcccacagaaag

SEQ ID NO: 5209627 - DNA, 25 bp, Homo sapien
gggatgaacccctgaggaactcaga

SEQ ID NO: 5209628 - DNA, 25 bp, Homo sapien
caatgtcatacaggcagtgacatgt

SEQ ID NO: 5209629 - DNA, 25 bp, Homo sapien
tgtaatctcaggcatagcaggcttt

SEQ ID NO: 5209630 - DNA, 25 bp, Homo sapien
gcaggctttgctctactgttcaact

SEQ ID NO: 5209631 - DNA, 25 bp, Homo sapien
tctactgttcaactgctcctcaatg

SEQ ID NO: 5209632 - DNA, 25 bp, Homo sapien
tccacagtgcttgaattttattaaa

SEQ ID NO: 5209633 - DNA, 25 bp, Homo sapien
aagtttgagagctcttttttccaca

SEQ ID NO: 5209634 - DNA, 25 bp, Homo sapien
tttccacagtgcttgaattttatta

SEQ ID NO: 5209635 - DNA, 25 bp, Homo sapien
gtttgagagctcttttttccacagt

SEQ ID NO: 5209636 - DNA, 25 bp, Homo sapien
attgaggtctcagcacgttttataa

SEQ ID NO: 5209637 - DNA, 25 bp, Homo sapien
ttcctgcttagtttccattgaggtc

SEQ ID NO: 5209638 - DNA, 25 bp, Homo sapien
tctcagcacgttttataactgaacc

SEQ ID NO: 5209639 - DNA, 25 bp, Homo sapien
tcctgcttagtttccattgaggtct

SEQ ID NO: 5209640 - DNA, 25 bp, Homo sapien
catagcagaaactgtgaatagccag

SEQ ID NO: 5209641 - DNA, 25 bp, Homo sapien
agcagaaactgtgaatagccagaag

SEQ ID NO: 5209642 - DNA, 25 bp, Homo sapien
aattcatagcagaaactgtgaatag

SEQ ID NO: 5209643 - DNA, 25 bp, Homo sapien
ttcatagcagaaactgtgaatagcc

SEQ ID NO: 5209644 - DNA, 25 bp, Homo sapien
cctgcaggcagtatgtcctcctact

SEQ ID NO: 5209645 - DNA, 25 bp, Homo sapien
gcaggcagtatgtcctcctactgct

SEQ ID NO: 5209646 - DNA, 25 bp, Homo sapien
ccatggttccctggtacagtgacat

SEQ ID NO: 5209647 - DNA, 25 bp, Homo sapien
gtccatggttccctggtacagtgac

SEQ ID NO: 5209648 - DNA, 25 bp, Homo sapien
tcttcaaaggtctctcctcctaatc

SEQ ID NO: 5209649 - DNA, 25 bp, Homo sapien
tctgatatcatgagtcaggtcaaca

SEQ ID NO: 5209650 - DNA, 25 bp, Homo sapien
caggtcaacaatcttggtggataag

SEQ ID NO: 5209651 - DNA, 25 bp, Homo sapien
tctatcaaaatgcactgttatatct

SEQ ID NO: 5209652 - DNA, 25 bp, Homo sapien
tcacattttagctgttggtgaagtg

SEQ ID NO: 5209653 - DNA, 25 bp, Homo sapien
cacattttagctgttggtgaagtgg

SEQ ID NO: 5209654 - DNA, 25 bp, Homo sapien
tctgttggtcatcactgctaaccta

SEQ ID NO: 5209655 - DNA, 25 bp, Homo sapien
ctgttggtcatcactgctaacctat

SEQ ID NO: 5209656 - DNA, 25 bp, Homo sapien
ggagtttgaaacctaggacagccac

SEQ ID NO: 5209657 - DNA, 25 bp, Homo sapien
gagaaagcctgaacagaccaacttg

SEQ ID NO: 5209658 - DNA, 25 bp, Homo sapien
tgatagaccggaaaaggagagttcc

SEQ ID NO: 5209659 - DNA, 25 bp, Homo sapien
gcatgaatcggaggaagcttgccac

SEQ ID NO: 5209660 - DNA, 25 bp, Homo sapien
catattgtactttatgtttccctta

SEQ ID NO: 5209661 - DNA, 25 bp, Homo sapien
tattttctaacctatcttgtcattt

SEQ ID NO: 5209662 - DNA, 25 bp, Homo sapien
taataccaacttaacttcagtaata

SEQ ID NO: 5209663 - DNA, 25 bp, Homo sapien
caataaccctctagtttgaattaat

SEQ ID NO: 5209664 - DNA, 25 bp, Homo sapien
tgccaacctcctcttagcgtgctta

SEQ ID NO: 5209665 - DNA, 25 bp, Homo sapien
aacctcctcttagcgtgcttattct

SEQ ID NO: 5209666 - DNA, 25 bp, Homo sapien
ctcctcttagcgtgcttattcttct

SEQ ID NO: 5209667 - DNA, 25 bp, Homo sapien
agcatctcagggttcagctgctcag

SEQ ID NO: 5209668 - DNA, 25 bp, Homo sapien
gaggcattgttacattctagagcaa

SEQ ID NO: 5209669 - DNA, 25 bp, Homo sapien
ttgagataaggaggattaaatgttc

SEQ ID NO: 5209670 - DNA, 25 bp, Homo sapien
cagcagaagttttgaggttgagata

SEQ ID NO: 5209671 - DNA, 25 bp, Homo sapien
tcccatagaggcattgttacattct

SEQ ID NO: 5209672 - DNA, 25 bp, Homo sapien
agtaggtaaaagcctctttgatcat

SEQ ID NO: 5209673 - DNA, 25 bp, Homo sapien
tcctgaaggaacagtaggtaaaagc

SEQ ID NO: 5209674 - DNA, 25 bp, Homo sapien
tgaaggaacagtaggtaaaagcctc

SEQ ID NO: 5209675 - DNA, 25 bp, Homo sapien
ctgaaggaacagtaggtaaaagcct

SEQ ID NO: 5209676 - DNA, 25 bp, Homo sapien
tctcacatatattccatcagttctg

SEQ ID NO: 5209677 - DNA, 25 bp, Homo sapien
cacatatattccatcagttctgtcc

SEQ ID NO: 5209678 - DNA, 25 bp, Homo sapien
gtgatcacgtgagttaagacttaac

SEQ ID NO: 5209679 - DNA, 25 bp, Homo sapien
aagacttaacaaacacccatatata

SEQ ID NO: 5209680 - DNA, 25 bp, Homo sapien
tgcagactatgcaggattctgcttc

SEQ ID NO: 5209681 - DNA, 25 bp, Homo sapien
tctgcagactatgcaggattctgct

SEQ ID NO: 5209682 - DNA, 25 bp, Homo sapien
ggctgaagggaaagcaatcatggtc

SEQ ID NO: 5209683 - DNA, 25 bp, Homo sapien
ggaaggctgaagggaaagcaatcat

SEQ ID NO: 5209684 - DNA, 25 bp, Homo sapien
agaggcccattgatattctggagga

SEQ ID NO: 5209685 - DNA, 25 bp, Homo sapien
tcaaggtaaaatagccctagggcca

SEQ ID NO: 5209686 - DNA, 25 bp, Homo sapien
taagtttcacgattgtgacaggccc

SEQ ID NO: 5209687 - DNA, 25 bp, Homo sapien
tgcagaatgaccagtttcctccaaa

SEQ ID NO: 5209688 - DNA, 25 bp, Homo sapien
gggtgccacttatttctttgcccat

SEQ ID NO: 5209689 - DNA, 25 bp, Homo sapien
cattgaaaagtcagtaagaacccgg

SEQ ID NO: 5209690 - DNA, 25 bp, Homo sapien
gtaaattcaaaccacagatcatcat

SEQ ID NO: 5209691 - DNA, 25 bp, Homo sapien
tacagacaaattgcaagattagtcc

SEQ ID NO: 5209692 - DNA, 25 bp, Homo sapien
aataaatttggcatcacagcacgca

SEQ ID NO: 5209693 - DNA, 25 bp, Homo sapien
tgtttattagggtgatgtgagcaat

SEQ ID NO: 5209694 - DNA, 25 bp, Homo sapien
tttcatgtttattagggtgatgtga

SEQ ID NO: 5209695 - DNA, 25 bp, Homo sapien
tcatgtttattagggtgatgtgagc

SEQ ID NO: 5209696 - DNA, 25 bp, Homo sapien
tattagggtgatgtgagcaatatat

SEQ ID NO: 5209697 - DNA, 25 bp, Homo sapien
caactggtattgagtaactgcggct

SEQ ID NO: 5209698 - DNA, 25 bp, Homo sapien
aaaaggtgggctgatgcaagagaca

SEQ ID NO: 5209699 - DNA, 25 bp, Homo sapien
gccctgcctgtgtagcaaacttccg

SEQ ID NO: 5209700 - DNA, 25 bp, Homo sapien
ctaggtggtgagaagtccccagtag

SEQ ID NO: 5209701 - DNA, 25 bp, Homo sapien
ttattcctcgttcttgctgtaactt

SEQ ID NO: 5209702 - DNA, 25 bp, Homo sapien
ttttattcctcgttcttgctgtaac

SEQ ID NO: 5209703 - DNA, 25 bp, Homo sapien
tttttattcctcgttcttgctgtaa

SEQ ID NO: 5209704 - DNA, 25 bp, Homo sapien
tttattcctcgttcttgctgtaact

SEQ ID NO: 5209705 - DNA, 25 bp, Homo sapien
ggaacctcagcgtggtcagctatcc

SEQ ID NO: 5209706 - DNA, 25 bp, Homo sapien
agaaaaggcatgaagcgtccctgcc

SEQ ID NO: 5209707 - DNA, 25 bp, Homo sapien
aaggcatgaagcgtccctgcccttc

SEQ ID NO: 5209708 - DNA, 25 bp, Homo sapien
aacctcagcgtggtcagctatccag

SEQ ID NO: 5209709 - DNA, 25 bp, Homo sapien
ttatctcaagtaaggcctgagggtg

SEQ ID NO: 5209710 - DNA, 25 bp, Homo sapien
tggtttactcactcgactcaggata

SEQ ID NO: 5209711 - DNA, 25 bp, Homo sapien
tgcttagctttgttaggtgtggccc

SEQ ID NO: 5209712 - DNA, 25 bp, Homo sapien
tcctgagtgtaggaaactagacaca

SEQ ID NO: 5209713 - DNA, 25 bp, Homo sapien
caggaaatacgggtagctgttagat

SEQ ID NO: 5209714 - DNA, 25 bp, Homo sapien
tacgggtagctgttagatggagtct

SEQ ID NO: 5209715 - DNA, 25 bp, Homo sapien
gaaatacgggtagctgttagatgga

SEQ ID NO: 5209716 - DNA, 25 bp, Homo sapien
tagctgttagatggagtctttgtgc

SEQ ID NO: 5209717 - DNA, 25 bp, Homo sapien
tgtttccgttcctcaaagttgagca

SEQ ID NO: 5209718 - DNA, 25 bp, Homo sapien
tttggaactggatcaagcaaaaaac

SEQ ID NO: 5209719 - DNA, 25 bp, Homo sapien
tacatcctcaacgattttgttgcaa

SEQ ID NO: 5209720 - DNA, 25 bp, Homo sapien
cacgcaaatttccagtgactgcctg

SEQ ID NO: 5209721 - DNA, 25 bp, Homo sapien
tcccacaccaatgtgcccgtcccca

SEQ ID NO: 5209722 - DNA, 25 bp, Homo sapien
ttcagctctcctatttcccacacca

SEQ ID NO: 5209723 - DNA, 25 bp, Homo sapien
agctctcctatttcccacaccaatg

SEQ ID NO: 5209724 - DNA, 25 bp, Homo sapien
tcagctctcctatttcccacaccaa

SEQ ID NO: 5209725 - DNA, 25 bp, Homo sapien
ttggcatttgcgattggctgggccc

SEQ ID NO: 5209726 - DNA, 25 bp, Homo sapien
gcatttgcgattggctgggccccat

SEQ ID NO: 5209727 - DNA, 25 bp, Homo sapien
tgttacctgagtggaattctgttcc

SEQ ID NO: 5209728 - DNA, 25 bp, Homo sapien
ggctgggccccatgttacctgagtg

SEQ ID NO: 5209729 - DNA, 25 bp, Homo sapien
ggttaagacctttgcatggctggca

SEQ ID NO: 5209730 - DNA, 25 bp, Homo sapien
caagggcctcggcattctgagcaca

SEQ ID NO: 5209731 - DNA, 25 bp, Homo sapien
ttcatgctgctctagggttaagacc

SEQ ID NO: 5209732 - DNA, 25 bp, Homo sapien
aattgtatctccgacttgtcctgca

SEQ ID NO: 5209733 - DNA, 25 bp, Homo sapien
aggtgtgctgcactcaaagaactgc

SEQ ID NO: 5209734 - DNA, 25 bp, Homo sapien
tccattgattgtcccactcagaagg

SEQ ID NO: 5209735 - DNA, 25 bp, Homo sapien
ccaagatggcagaatgcaagtctcc

SEQ ID NO: 5209736 - DNA, 25 bp, Homo sapien
aaacctacttatctcacctgggaag

SEQ ID NO: 5209737 - DNA, 25 bp, Homo sapien
caagactggccttgtgtattcatac

SEQ ID NO: 5209738 - DNA, 25 bp, Homo sapien
tgtgaaatacagataagggtataat

SEQ ID NO: 5209739 - DNA, 25 bp, Homo sapien
aatatgtgaaatacagataagggta

SEQ ID NO: 5209740 - DNA, 25 bp, Homo sapien
taatagcatttgctacaaacaactt

SEQ ID NO: 5209741 - DNA, 25 bp, Homo sapien
taggcaaggctcaaagctgttttgc

SEQ ID NO: 5209742 - DNA, 25 bp, Homo sapien
ggcaaggctcaaagctgttttgctt

SEQ ID NO: 5209743 - DNA, 25 bp, Homo sapien
gcttataggcaaggctcaaagctgt

SEQ ID NO: 5209744 - DNA, 25 bp, Homo sapien
tataggcaaggctcaaagctgtttt

SEQ ID NO: 5209745 - DNA, 25 bp, Homo sapien
tgaccatgttgacatatatcagcct

SEQ ID NO: 5209746 - DNA, 25 bp, Homo sapien
tgccatagaaaggaacgcaggctgt

SEQ ID NO: 5209747 - DNA, 25 bp, Homo sapien
gctgttctagaccttcaactgccta

SEQ ID NO: 5209748 - DNA, 25 bp, Homo sapien
accatcttgacagtagaagtgacag

SEQ ID NO: 5209749 - DNA, 25 bp, Homo sapien
tgaattgcactaccaaatgatttgg

SEQ ID NO: 5209750 - DNA, 25 bp, Homo sapien
tgcaaagtagatgactcaagtgaat

SEQ ID NO: 5209751 - DNA, 25 bp, Homo sapien
aaactttgataggtcctttgcaaag

SEQ ID NO: 5209752 - DNA, 25 bp, Homo sapien
gactcaagtgaattgcactaccaaa

SEQ ID NO: 5209753 - DNA, 25 bp, Homo sapien
tttcttactgtttcagccgtctgca

SEQ ID NO: 5209754 - DNA, 25 bp, Homo sapien
tctgctaagcttaattgctggctgc

SEQ ID NO: 5209755 - DNA, 25 bp, Homo sapien
aattccaggtaatgaatcccacacc

SEQ ID NO: 5209756 - DNA, 25 bp, Homo sapien
taataaccgagtgctaattccaggt

SEQ ID NO: 5209757 - DNA, 25 bp, Homo sapien
tccaccactataccccattttctga

SEQ ID NO: 5209758 - DNA, 25 bp, Homo sapien
ttttgttgctcagtgctaaaccacc

SEQ ID NO: 5209759 - DNA, 25 bp, Homo sapien
ctcaaaggaactccttattcttgtt

SEQ ID NO: 5209760 - DNA, 25 bp, Homo sapien
gattgccattgctgccttgtacctc

SEQ ID NO: 5209761 - DNA, 25 bp, Homo sapien
attggcagagtttcctgtcccaaac

SEQ ID NO: 5209762 - DNA, 25 bp, Homo sapien
acacattggcagagtttcctgtccc

SEQ ID NO: 5209763 - DNA, 25 bp, Homo sapien
tggcagagtttcctgtcccaaacat

SEQ ID NO: 5209764 - DNA, 25 bp, Homo sapien
ctgacacattggcagagtttcctgt

SEQ ID NO: 5209765 - DNA, 25 bp, Homo sapien
atgccagccccctcactgaaggtgg

SEQ ID NO: 5209766 - DNA, 25 bp, Homo sapien
gttgagagcaatgccagccccctca

SEQ ID NO: 5209767 - DNA, 25 bp, Homo sapien
gccagccccctcactgaaggtggaa

SEQ ID NO: 5209768 - DNA, 25 bp, Homo sapien
agagcaatgccagccccctcactga

SEQ ID NO: 5209769 - DNA, 25 bp, Homo sapien
agggactccccagcaatgaggtcct

SEQ ID NO: 5209770 - DNA, 25 bp, Homo sapien
tgtgaagaggggagattcttagtgt

SEQ ID NO: 5209771 - DNA, 25 bp, Homo sapien
tggtggtgcaggggtcttactttct

SEQ ID NO: 5209772 - DNA, 25 bp, Homo sapien
tcttactttctggaggccatgtgga

SEQ ID NO: 5209773 - DNA, 25 bp, Homo sapien
ggtccattggttcactacttactca

SEQ ID NO: 5209774 - DNA, 25 bp, Homo sapien
gatcatgctgaaaaccactcaaacg

SEQ ID NO: 5209775 - DNA, 25 bp, Homo sapien
cttcaaatgagtgggaaagtctact

SEQ ID NO: 5209776 - DNA, 25 bp, Homo sapien
taaatagcgcattgatgagttgcct

SEQ ID NO: 5209777 - DNA, 25 bp, Homo sapien
taagaatgctcactgtacactgaat

SEQ ID NO: 5209778 - DNA, 25 bp, Homo sapien
tgctcccagaactcacactagttgg

SEQ ID NO: 5209779 - DNA, 25 bp, Homo sapien
ggccattcatgtgaagtcagggtac

SEQ ID NO: 5209780 - DNA, 25 bp, Homo sapien
tgccagctacagaatcactatgttt

SEQ ID NO: 5209781 - DNA, 25 bp, Homo sapien
tgttcacctcaaatctgacactgga

SEQ ID NO: 5209782 - DNA, 25 bp, Homo sapien
catgtgcagtctggcatctcaacaa

SEQ ID NO: 5209783 - DNA, 25 bp, Homo sapien
ttatcagcagggaagagtctactag

SEQ ID NO: 5209784 - DNA, 25 bp, Homo sapien
gaagttttatggcaatcgagaggga

SEQ ID NO: 5209785 - DNA, 25 bp, Homo sapien
catgttttcctgattgtttttagaa

SEQ ID NO: 5209786 - DNA, 25 bp, Homo sapien
ttcctgattgtttttagaatttcac

SEQ ID NO: 5209787 - DNA, 25 bp, Homo sapien
cctgattgtttttagaatttcacgg

SEQ ID NO: 5209788 - DNA, 25 bp, Homo sapien
tgattgtttttagaatttcacggtc

SEQ ID NO: 5209789 - DNA, 25 bp, Homo sapien
tctcaaaacttgagctctatcttca

SEQ ID NO: 5209790 - DNA, 25 bp, Homo sapien
cctggatgctggctaacccatggac

SEQ ID NO: 5209791 - DNA, 25 bp, Homo sapien
tggctaacccatggacatagtctac

SEQ ID NO: 5209792 - DNA, 25 bp, Homo sapien
acttcaaactcgtttgcctggatgc

SEQ ID NO: 5209793 - DNA, 25 bp, Homo sapien
ctgctgtaagtcagacacaccactt

SEQ ID NO: 5209794 - DNA, 25 bp, Homo sapien
tgctgtaagtcagacacaccactta

SEQ ID NO: 5209795 - DNA, 25 bp, Homo sapien
ccacttagggtcttcacaccaaatt

SEQ ID NO: 5209796 - DNA, 25 bp, Homo sapien
agacacaccacttagggtcttcaca

SEQ ID NO: 5209797 - DNA, 25 bp, Homo sapien
tatgatggtctcctacaattcccaa

SEQ ID NO: 5209798 - DNA, 25 bp, Homo sapien
tgggtccaccaaatctatgatggtc

SEQ ID NO: 5209799 - DNA, 25 bp, Homo sapien
aaaggtgtcccttgtttcatgctaa

SEQ ID NO: 5209800 - DNA, 25 bp, Homo sapien
gagttacacttgtccgtttccacca

SEQ ID NO: 5209801 - DNA, 25 bp, Homo sapien
gagttcctcttaggtctggttgaac

SEQ ID NO: 5209802 - DNA, 25 bp, Homo sapien
ggagttcctcttaggtctggttgaa

SEQ ID NO: 5209803 - DNA, 25 bp, Homo sapien
gggagttcctcttaggtctggttga

SEQ ID NO: 5209804 - DNA, 25 bp, Homo sapien
cctcttaggtctggttgaacctttg

SEQ ID NO: 5209805 - DNA, 25 bp, Homo sapien
atgattaatgttttaaaacttgctt

SEQ ID NO: 5209806 - DNA, 25 bp, Homo sapien
acagaattttctttatgattaatgt

SEQ ID NO: 5209807 - DNA, 25 bp, Homo sapien
ttatgattaatgttttaaaacttgc

SEQ ID NO: 5209808 - DNA, 25 bp, Homo sapien
cagaattttctttatgattaatgtt

SEQ ID NO: 5209809 - DNA, 25 bp, Homo sapien
gtgcagctaccagtctactgatgtt

SEQ ID NO: 5209810 - DNA, 25 bp, Homo sapien
gcagtgacttgacgtatatactggg

SEQ ID NO: 5209811 - DNA, 25 bp, Homo sapien
gtccacgtgcagctaccagtctact

SEQ ID NO: 5209812 - DNA, 25 bp, Homo sapien
tgctcccgtccacgtgcagctacca

SEQ ID NO: 5209813 - DNA, 25 bp, Homo sapien
taaatccttttagtgctggaaacca

SEQ ID NO: 5209814 - DNA, 25 bp, Homo sapien
ctcttttctcgggaagcacagactg

SEQ ID NO: 5209815 - DNA, 25 bp, Homo sapien
aagtggcaggcccatagtactgcat

SEQ ID NO: 5209816 - DNA, 25 bp, Homo sapien
ttggtatccccactagccgtcttgt

SEQ ID NO: 5209817 - DNA, 25 bp, Homo sapien
gtggatccctgacacctgtgtctcc

SEQ ID NO: 5209818 - DNA, 25 bp, Homo sapien
agcaggggcggatggacacctcata

SEQ ID NO: 5209819 - DNA, 25 bp, Homo sapien
cacctcatacaggacaattccagct

SEQ ID NO: 5209820 - DNA, 25 bp, Homo sapien
aattccagctggcatctgccaggtg

SEQ ID NO: 5209821 - DNA, 25 bp, Homo sapien
caataaacaatatgttgtacagcag

SEQ ID NO: 5209822 - DNA, 25 bp, Homo sapien
gaacaacaagcactctattttcccc

SEQ ID NO: 5209823 - DNA, 25 bp, Homo sapien
actattatagttactacctgaaaat

SEQ ID NO: 5209824 - DNA, 25 bp, Homo sapien
aataccatgttgttaacaataaaca

SEQ ID NO: 5209825 - DNA, 25 bp, Homo sapien
gctgccaggttttagtggacagaag

SEQ ID NO: 5209826 - DNA, 25 bp, Homo sapien
gaaagctatcagaattcctgtagag

SEQ ID NO: 5209827 - DNA, 25 bp, Homo sapien
gaggacaacaacattagccactgct

SEQ ID NO: 5209828 - DNA, 25 bp, Homo sapien
cagccaaattgagtggatggaagta

SEQ ID NO: 5209829 - DNA, 25 bp, Homo sapien
gcctaaaggttagtaatgccgcaag

SEQ ID NO: 5209830 - DNA, 25 bp, Homo sapien
tgatgtatcttcagctccagcctac

SEQ ID NO: 5209831 - DNA, 25 bp, Homo sapien
tgtgattgatatgaccagtcctgcc

SEQ ID NO: 5209832 - DNA, 25 bp, Homo sapien
tccagcctactgatagaaaggcagt

SEQ ID NO: 5209833 - DNA, 25 bp, Homo sapien
caatgtgtgtttttgcacgtgacat

SEQ ID NO: 5209834 - DNA, 25 bp, Homo sapien
gacggtctttacaatctgttatgtt

SEQ ID NO: 5209835 - DNA, 25 bp, Homo sapien
gtttttgcacgtgacatgggactcc

SEQ ID NO: 5209836 - DNA, 25 bp, Homo sapien
ctttactttgagtcaatgtgtgttt

SEQ ID NO: 5209837 - DNA, 25 bp, Homo sapien
cattctttgtcctaatttatcgagc

SEQ ID NO: 5209838 - DNA, 25 bp, Homo sapien
gcagcaaggtaaggatcttactctt

SEQ ID NO: 5209839 - DNA, 25 bp, Homo sapien
tcactttaccaaggatctatcttca

SEQ ID NO: 5209840 - DNA, 25 bp, Homo sapien
ggatcaagctcaaatagttaagggt

SEQ ID NO: 5209841 - DNA, 25 bp, Homo sapien
aatctgcaattataacggaggtttg

SEQ ID NO: 5209842 - DNA, 25 bp, Homo sapien
gctcaagctagccagtcttttagta

SEQ ID NO: 5209843 - DNA, 25 bp, Homo sapien
gtcactctgtgtttgtaatatcaat

SEQ ID NO: 5209844 - DNA, 25 bp, Homo sapien
tgcttcattgtttcccatattttat

SEQ ID NO: 5209845 - DNA, 25 bp, Homo sapien
tgttcaagtgtttccagcaagttct

SEQ ID NO: 5209846 - DNA, 25 bp, Homo sapien
gttcaagtgtttccagcaagttctc

SEQ ID NO: 5209847 - DNA, 25 bp, Homo sapien
gtgttcaagtgtttccagcaagttc

SEQ ID NO: 5209848 - DNA, 25 bp, Homo sapien
gggtcgcggcggggtagaggcgctc

SEQ ID NO: 5209849 - DNA, 25 bp, Homo sapien
acttcccagacagggtggctgctgg

SEQ ID NO: 5209850 - DNA, 25 bp, Homo sapien
cccagacagggtggctgctgggcag

SEQ ID NO: 5209851 - DNA, 25 bp, Homo sapien
ggtcgcggcggggtagaggcgctcc

SEQ ID NO: 5209852 - DNA, 25 bp, Homo sapien
acagatcaacaggataagaattttt

SEQ ID NO: 5209853 - DNA, 25 bp, Homo sapien
cagatcaacaggataagaatttttc

SEQ ID NO: 5209854 - DNA, 25 bp, Homo sapien
tcacagatcaacaggataagaattt

SEQ ID NO: 5209855 - DNA, 25 bp, Homo sapien
ggtcacagatcaacaggataagaat

SEQ ID NO: 5209856 - DNA, 25 bp, Homo sapien
gattttcaatggaatacaagcaata

SEQ ID NO: 5209857 - DNA, 25 bp, Homo sapien
tatatacaggattcaatattaaatg

SEQ ID NO: 5209858 - DNA, 25 bp, Homo sapien
aatgattttcaatggaatacaagca

SEQ ID NO: 5209859 - DNA, 25 bp, Homo sapien
tattatatacaggattcaatattaa

SEQ ID NO: 5209860 - DNA, 25 bp, Homo sapien
tagtagtagttaggaggtgacatta

SEQ ID NO: 5209861 - DNA, 25 bp, Homo sapien
agtagtagtagttaggaggtgacat

SEQ ID NO: 5209862 - DNA, 25 bp, Homo sapien
gtagtagttaggaggtgacattagc

SEQ ID NO: 5209863 - DNA, 25 bp, Homo sapien
tagtagttaggaggtgacattagct

SEQ ID NO: 5209864 - DNA, 25 bp, Homo sapien
tcatggttatgtccatacgacttcc

SEQ ID NO: 5209865 - DNA, 25 bp, Homo sapien
tatgtccatacgacttcctcttcca

SEQ ID NO: 5209866 - DNA, 25 bp, Homo sapien
catgctcatggttatgtccatacga

SEQ ID NO: 5209867 - DNA, 25 bp, Homo sapien
tccaacatgctcatggttatgtcca

SEQ ID NO: 5209868 - DNA, 25 bp, Homo sapien
acttcagtgtcaagaagaccatgcc

SEQ ID NO: 5209869 - DNA, 25 bp, Homo sapien
ttcagtgtcaagaagaccatgccag

SEQ ID NO: 5209870 - DNA, 25 bp, Homo sapien
gaaacttcagtgtcaagaagaccat

SEQ ID NO: 5209871 - DNA, 25 bp, Homo sapien
cacagaaacttcagtgtcaagaaga

SEQ ID NO: 5209872 - DNA, 25 bp, Homo sapien
ctgatgaagtccattatatctctga

SEQ ID NO: 5209873 - DNA, 25 bp, Homo sapien
tcatggatcagctgatggaatgtac

SEQ ID NO: 5209874 - DNA, 25 bp, Homo sapien
gatgaagtccattatatctctgaac

SEQ ID NO: 5209875 - DNA, 25 bp, Homo sapien
gatcagctgatggaatgtactggct

SEQ ID NO: 5209876 - DNA, 25 bp, Homo sapien
catttgtctagtatctctgtgaagt

SEQ ID NO: 5209877 - DNA, 25 bp, Homo sapien
gttttaaacttctcacatctgctgc

SEQ ID NO: 5209878 - DNA, 25 bp, Homo sapien
gctgcaaaagatatgtcgcacacct

SEQ ID NO: 5209879 - DNA, 25 bp, Homo sapien
agcacatacacgcttcttctccact

SEQ ID NO: 5209880 - DNA, 25 bp, Homo sapien
catattcctgatgttaagctttgca

SEQ ID NO: 5209881 - DNA, 25 bp, Homo sapien
tgcatattttagcaccttcctggag

SEQ ID NO: 5209882 - DNA, 25 bp, Homo sapien
tattcccagaggtgttaataggtat

SEQ ID NO: 5209883 - DNA, 25 bp, Homo sapien
agctttgcaagtcagatgggattga

SEQ ID NO: 5209884 - DNA, 25 bp, Homo sapien
cttcaggtctttaaccagggaatat

SEQ ID NO: 5209885 - DNA, 25 bp, Homo sapien
actacttccagtgggggactcagca

SEQ ID NO: 5209886 - DNA, 25 bp, Homo sapien
ttcaccttgggctcctgtgactgtt

SEQ ID NO: 5209887 - DNA, 25 bp, Homo sapien
cagcaccatccccactaaatttaaa

SEQ ID NO: 5209888 - DNA, 25 bp, Homo sapien
ttagaatgccactacttccagtggg

SEQ ID NO: 5209889 - DNA, 25 bp, Homo sapien
aaggcccgaagctcgttcactttgt

SEQ ID NO: 5209890 - DNA, 25 bp, Homo sapien
aggcccgaagctcgttcactttgtg

SEQ ID NO: 5209891 - DNA, 25 bp, Homo sapien
agctcgttcactttgtggggttcca

SEQ ID NO: 5209892 - DNA, 25 bp, Homo sapien
ccgaagctcgttcactttgtggggt

SEQ ID NO: 5209893 - DNA, 25 bp, Homo sapien
cggtgtgcagaacgctcggatcctg

SEQ ID NO: 5209894 - DNA, 25 bp, Homo sapien
cctcaggaagcacatttcctcggtg

SEQ ID NO: 5209895 - DNA, 25 bp, Homo sapien
atttcctcggtgtgcagaacgctcg

SEQ ID NO: 5209896 - DNA, 25 bp, Homo sapien
tcaggaagcacatttcctcggtgtg

SEQ ID NO: 5209897 - DNA, 25 bp, Homo sapien
tagcaggtggtatttaccccccata

SEQ ID NO: 5209898 - DNA, 25 bp, Homo sapien
ctgagtagcaggtggtatttacccc

SEQ ID NO: 5209899 - DNA, 25 bp, Homo sapien
tgagtagcaggtggtatttaccccc

SEQ ID NO: 5209900 - DNA, 25 bp, Homo sapien
tggtatttaccccccatactctcca

SEQ ID NO: 5209901 - DNA, 25 bp, Homo sapien
cttcctccactttcttactaccagg

SEQ ID NO: 5209902 - DNA, 25 bp, Homo sapien
tttcctcacttgatggtttgtctgc

SEQ ID NO: 5209903 - DNA, 25 bp, Homo sapien
gatcactttcctcacttgatggttt

SEQ ID NO: 5209904 - DNA, 25 bp, Homo sapien
ttgatggtttgtctgcctttaagtc

SEQ ID NO: 5209905 - DNA, 25 bp, Homo sapien
taatggcatctgtgaaaacgtcaat

SEQ ID NO: 5209906 - DNA, 25 bp, Homo sapien
ttaatggcatctgtgaaaacgtcaa

SEQ ID NO: 5209907 - DNA, 25 bp, Homo sapien
aatggcatctgtgaaaacgtcaatg

SEQ ID NO: 5209908 - DNA, 25 bp, Homo sapien
ctaaattggacttctttcagcgttg

SEQ ID NO: 5209909 - DNA, 25 bp, Homo sapien
tttccagtggcctggaagcctgtgt

SEQ ID NO: 5209910 - DNA, 25 bp, Homo sapien
gagccctaaattggacttctttcag

SEQ ID NO: 5209911 - DNA, 25 bp, Homo sapien
ttttctgagccctaaattggacttc

SEQ ID NO: 5209912 - DNA, 25 bp, Homo sapien
agccatactgagctcctgactgttg

SEQ ID NO: 5209913 - DNA, 25 bp, Homo sapien
tactgagctcctgactgttgtctgg

SEQ ID NO: 5209914 - DNA, 25 bp, Homo sapien
cttccaagaaaattaccaggcatta

SEQ ID NO: 5209915 - DNA, 25 bp, Homo sapien
agaaaattaccaggcattaccccag

SEQ ID NO: 5209916 - DNA, 25 bp, Homo sapien
cactcctggtatgccccctccgatt

SEQ ID NO: 5209917 - DNA, 25 bp, Homo sapien
ttaagcccaggcattctggccactc

SEQ ID NO: 5209918 - DNA, 25 bp, Homo sapien
ttcattaagcccaggcattctggcc

SEQ ID NO: 5209919 - DNA, 25 bp, Homo sapien
aggcattctggccactcctggtatg

SEQ ID NO: 5209920 - DNA, 25 bp, Homo sapien
agaagtggggacatgagaacttttc

SEQ ID NO: 5209921 - DNA, 25 bp, Homo sapien
acagatgcattacagtgcatgcaca

SEQ ID NO: 5209922 - DNA, 25 bp, Homo sapien
gacaacagatgcattacagtgcatg

SEQ ID NO: 5209923 - DNA, 25 bp, Homo sapien
aaagacaacagatgcattacagtgc

SEQ ID NO: 5209924 - DNA, 25 bp, Homo sapien
ttcaaagacaacagatgcattacag

SEQ ID NO: 5209925 - DNA, 25 bp, Homo sapien
catcccctgctaaaatacattgttg

SEQ ID NO: 5209926 - DNA, 25 bp, Homo sapien
tataacacaggtgatactagtttac

SEQ ID NO: 5209927 - DNA, 25 bp, Homo sapien
accttgtcgctttacattcttagaa

SEQ ID NO: 5209928 - DNA, 25 bp, Homo sapien
cttggttacgttataaaatcatgtc

SEQ ID NO: 5209929 - DNA, 25 bp, Homo sapien
ggtcattgggctgaaaacccggaca

SEQ ID NO: 5209930 - DNA, 25 bp, Homo sapien
ttgggctgaaaacccggacaggagc

SEQ ID NO: 5209931 - DNA, 25 bp, Homo sapien
cattgggctgaaaacccggacagga

SEQ ID NO: 5209932 - DNA, 25 bp, Homo sapien
tcattgggctgaaaacccggacagg

SEQ ID NO: 5209933 - DNA, 25 bp, Homo sapien
gatcacttgtaaggggtcatgggca

SEQ ID NO: 5209934 - DNA, 25 bp, Homo sapien
tttctataatgatcacttgtaaggg

SEQ ID NO: 5209935 - DNA, 25 bp, Homo sapien
taatgatcacttgtaaggggtcatg

SEQ ID NO: 5209936 - DNA, 25 bp, Homo sapien
gtttctataatgatcacttgtaagg

SEQ ID NO: 5209937 - DNA, 25 bp, Homo sapien
ttccttcaagagcactgttgttcat

SEQ ID NO: 5209938 - DNA, 25 bp, Homo sapien
tggaaatttccttcaagagcactgt

SEQ ID NO: 5209939 - DNA, 25 bp, Homo sapien
ttgttcatacccagttttacttctg

SEQ ID NO: 5209940 - DNA, 25 bp, Homo sapien
caagagcactgttgttcatacccag

SEQ ID NO: 5209941 - DNA, 25 bp, Homo sapien
gtgacaaacactgttgggctgggtt

SEQ ID NO: 5209942 - DNA, 25 bp, Homo sapien
acaaacactgttgggctgggttctg

SEQ ID NO: 5209943 - DNA, 25 bp, Homo sapien
tgaagagccaactttcttggccaag

SEQ ID NO: 5209944 - DNA, 25 bp, Homo sapien
gggtgacaaacactgttgggctggg

SEQ ID NO: 5209945 - DNA, 25 bp, Homo sapien
catctactaccacttttctcacagg

SEQ ID NO: 5209946 - DNA, 25 bp, Homo sapien
tctcacaggaatgttaataccaagt

SEQ ID NO: 5209947 - DNA, 25 bp, Homo sapien
cacaggaatgttaataccaagtttt

SEQ ID NO: 5209948 - DNA, 25 bp, Homo sapien
atctactaccacttttctcacagga

SEQ ID NO: 5209949 - DNA, 25 bp, Homo sapien
ggcctgcttccatgaggacacccgt

SEQ ID NO: 5209950 - DNA, 25 bp, Homo sapien
tccatgaggacacccgtccctttct

SEQ ID NO: 5209951 - DNA, 25 bp, Homo sapien
gcttccatgaggacacccgtccctt

SEQ ID NO: 5209952 - DNA, 25 bp, Homo sapien
tggcctgcttccatgaggacacccg

SEQ ID NO: 5209953 - DNA, 25 bp, Homo sapien
cagcatagtctgacccgtgactgca

SEQ ID NO: 5209954 - DNA, 25 bp, Homo sapien
gatactggctgatctgcacctatca

SEQ ID NO: 5209955 - DNA, 25 bp, Homo sapien
taaagatcactatcaccatagaaac

SEQ ID NO: 5209956 - DNA, 25 bp, Homo sapien
cctcatacttagatccttggcctga

SEQ ID NO: 5209957 - DNA, 25 bp, Homo sapien
tagggtgcccaaaatagagtctcag

SEQ ID NO: 5209958 - DNA, 25 bp, Homo sapien
tgagcaatgcaaacaagccggtaca

SEQ ID NO: 5209959 - DNA, 25 bp, Homo sapien
ggagtctctgggcacatcatcaatc

SEQ ID NO: 5209960 - DNA, 25 bp, Homo sapien
tgctgatggcctaaacgtatcgttg

SEQ ID NO: 5209961 - DNA, 25 bp, Homo sapien
tcacggcaccaaaatttcactcgca

SEQ ID NO: 5209962 - DNA, 25 bp, Homo sapien
accaaaatttcactcgcatccatgt

SEQ ID NO: 5209963 - DNA, 25 bp, Homo sapien
acggcaccaaaatttcactcgcatc

SEQ ID NO: 5209964 - DNA, 25 bp, Homo sapien
ggcaccaaaatttcactcgcatcca

SEQ ID NO: 5209965 - DNA, 25 bp, Homo sapien
tgagggaccacctttgcagcaaact

SEQ ID NO: 5209966 - DNA, 25 bp, Homo sapien
aggacagtgggccttctctcacagc

SEQ ID NO: 5209967 - DNA, 25 bp, Homo sapien
tacaggtggatcagtggacctacca

SEQ ID NO: 5209968 - DNA, 25 bp, Homo sapien
tcacagctccagtagagagttcccc

SEQ ID NO: 5209969 - DNA, 25 bp, Homo sapien
tccggagcccaagagctgtgctcgt

SEQ ID NO: 5209970 - DNA, 25 bp, Homo sapien
atttccggagcccaagagctgtgct

SEQ ID NO: 5209971 - DNA, 25 bp, Homo sapien
cagaatttccggagcccaagagctg

SEQ ID NO: 5209972 - DNA, 25 bp, Homo sapien
agcccaagagctgtgctcgtttaga

SEQ ID NO: 5209973 - DNA, 25 bp, Homo sapien
tttccaaataatggagcctgagagt

SEQ ID NO: 5209974 - DNA, 25 bp, Homo sapien
ccttgggcttttccaaataatggag

SEQ ID NO: 5209975 - DNA, 25 bp, Homo sapien
gagcctgagagtccccactactttc

SEQ ID NO: 5209976 - DNA, 25 bp, Homo sapien
aaataatggagcctgagagtcccca

SEQ ID NO: 5209977 - DNA, 25 bp, Homo sapien
gggtacgttgctgcttggtgaccat

SEQ ID NO: 5209978 - DNA, 25 bp, Homo sapien
aatacagcacataagggcaatggag

SEQ ID NO: 5209979 - DNA, 25 bp, Homo sapien
cataagggcaatggagctctgaaga

SEQ ID NO: 5209980 - DNA, 25 bp, Homo sapien
gctctgaagagggtacgttgctgct

SEQ ID NO: 5209981 - DNA, 25 bp, Homo sapien
tccagtcgatctctccagggagcct

SEQ ID NO: 5209982 - DNA, 25 bp, Homo sapien
tacaagggtcaatggttactgtcca

SEQ ID NO: 5209983 - DNA, 25 bp, Homo sapien
agttggctttgatcccctccagtcg

SEQ ID NO: 5209984 - DNA, 25 bp, Homo sapien
catttgtcactgagggtcagttggc

SEQ ID NO: 5209985 - DNA, 25 bp, Homo sapien
gtaatttgtatatgatagcattcat

SEQ ID NO: 5209986 - DNA, 25 bp, Homo sapien
cgtaatttgtatatgatagcattca

SEQ ID NO: 5209987 - DNA, 25 bp, Homo sapien
tttttggtgggacttcagactcaat

SEQ ID NO: 5209988 - DNA, 25 bp, Homo sapien
gaactgcagaatctgctacaccgtc

SEQ ID NO: 5209989 - DNA, 25 bp, Homo sapien
gtttttggtgggacttcagactcaa

SEQ ID NO: 5209990 - DNA, 25 bp, Homo sapien
gcagtgattagaggagtcactctca

SEQ ID NO: 5209991 - DNA, 25 bp, Homo sapien
catgcagtgattagaggagtcactc

SEQ ID NO: 5209992 - DNA, 25 bp, Homo sapien
gattagaggagtcactctcataaac

SEQ ID NO: 5209993 - DNA, 25 bp, Homo sapien
aagcatgcagtgattagaggagtca

SEQ ID NO: 5209994 - DNA, 25 bp, Homo sapien
tcattctcttctgcggaagacaacg

SEQ ID NO: 5209995 - DNA, 25 bp, Homo sapien
ttctgcctgagagggttcattctct

SEQ ID NO: 5209996 - DNA, 25 bp, Homo sapien
actgtggcaccagacactcctgaag

SEQ ID NO: 5209997 - DNA, 25 bp, Homo sapien
tagacttgcgcccaactgtggcacc

SEQ ID NO: 5209998 - DNA, 25 bp, Homo sapien
ggcagccatagtggatgtttcactt

SEQ ID NO: 5209999 - DNA, 25 bp, Homo sapien
tggattgccagtttttcttggcagc

SEQ ID NO: 5210000 - DNA, 25 bp, Homo sapien
tcttggcagccatagtggatgtttc

SEQ ID NO: 5210001 - DNA, 25 bp, Homo sapien
ttggcagccatagtggatgtttcac

SEQ ID NO: 5210002 - DNA, 25 bp, Homo sapien
ggtcactgtcactggtactacttac

SEQ ID NO: 5210003 - DNA, 25 bp, Homo sapien
caacctcccgttcgtgcctcagtag

SEQ ID NO: 5210004 - DNA, 25 bp, Homo sapien
tcactgtcactggtactacttactg

SEQ ID NO: 5210005 - DNA, 25 bp, Homo sapien
caggttgtactgcttgcagcaacct

SEQ ID NO: 5210006 - DNA, 25 bp, Homo sapien
tgcagtgattgtcttgctgctccct

SEQ ID NO: 5210007 - DNA, 25 bp, Homo sapien
gcagtgattgtcttgctgctccctg

SEQ ID NO: 5210008 - DNA, 25 bp, Homo sapien
gcagccgccgataaattgtacacag

SEQ ID NO: 5210009 - DNA, 25 bp, Homo sapien
gataaattgtacacagttaccactt

SEQ ID NO: 5210010 - DNA, 25 bp, Homo sapien
gccgccgataaattgtacacagtta

SEQ ID NO: 5210011 - DNA, 25 bp, Homo sapien
gccgataaattgtacacagttacca

SEQ ID NO: 5210012 - DNA, 25 bp, Homo sapien
cttcattgagcggtgcattgccggc

SEQ ID NO: 5210013 - DNA, 25 bp, Homo sapien
ccggcagatattttgtcacttgcta

SEQ ID NO: 5210014 - DNA, 25 bp, Homo sapien
gagcggtgcattgccggcagatatt

SEQ ID NO: 5210015 - DNA, 25 bp, Homo sapien
gcattgccggcagatattttgtcac

SEQ ID NO: 5210016 - DNA, 25 bp, Homo sapien
tgcttccacgaagaagcactccaaa

SEQ ID NO: 5210017 - DNA, 25 bp, Homo sapien
catgcttccacgaagaagcactcca

SEQ ID NO: 5210018 - DNA, 25 bp, Homo sapien
tccacgaagaagcactccaaatcac

SEQ ID NO: 5210019 - DNA, 25 bp, Homo sapien
ttccacgaagaagcactccaaatca

SEQ ID NO: 5210020 - DNA, 25 bp, Homo sapien
taacttctgctggtgaagcccaagt

SEQ ID NO: 5210021 - DNA, 25 bp, Homo sapien
aataacttctgctggtgaagcccaa

SEQ ID NO: 5210022 - DNA, 25 bp, Homo sapien
acttctgctggtgaagcccaagtct

SEQ ID NO: 5210023 - DNA, 25 bp, Homo sapien
tcaataacttctgctggtgaagccc

SEQ ID NO: 5210024 - DNA, 25 bp, Homo sapien
cagtaggtatttatgcctgctatcc

SEQ ID NO: 5210025 - DNA, 25 bp, Homo sapien
tcacagtaggtatttatgcctgcta

SEQ ID NO: 5210026 - DNA, 25 bp, Homo sapien
cctgctatcctcatccgagataagg

SEQ ID NO: 5210027 - DNA, 25 bp, Homo sapien
tgcctgctatcctcatccgagataa

SEQ ID NO: 5210028 - DNA, 25 bp, Homo sapien
tctgatggtcgttatctgtgggccc

SEQ ID NO: 5210029 - DNA, 25 bp, Homo sapien
gacatttccacacgggacgcctgtg

SEQ ID NO: 5210030 - DNA, 25 bp, Homo sapien
agaaggaaactctagccgactccgg

SEQ ID NO: 5210031 - DNA, 25 bp, Homo sapien
gaatgagagagaaacccatccgcag

SEQ ID NO: 5210032 - DNA, 25 bp, Homo sapien
ctgggacgcggggctggggactccg

SEQ ID NO: 5210033 - DNA, 25 bp, Homo sapien
agagctgccggttcctccgagcctg

SEQ ID NO: 5210034 - DNA, 25 bp, Homo sapien
cgaatccaaaactggcgctggcggc

SEQ ID NO: 5210035 - DNA, 25 bp, Homo sapien
aacacggcgctggactcgggaccct

SEQ ID NO: 5210036 - DNA, 25 bp, Homo sapien
aaagtttctctacgccaacacggcg

SEQ ID NO: 5210037 - DNA, 25 bp, Homo sapien
gaatttagcagtcggagcgagaacc

SEQ ID NO: 5210038 - DNA, 25 bp, Homo sapien
tggacccggccaagcgaatttagca

SEQ ID NO: 5210039 - DNA, 25 bp, Homo sapien
agagaactgcctgctccggattctg

SEQ ID NO: 5210040 - DNA, 25 bp, Homo sapien
ccggattctgatccgtgtggcgagt

SEQ ID NO: 5210041 - DNA, 25 bp, Homo sapien
tttgcccagcgtaccaagtggaccc

SEQ ID NO: 5210042 - DNA, 25 bp, Homo sapien
caacaccagctaagtcttccttact

SEQ ID NO: 5210043 - DNA, 25 bp, Homo sapien
agtttgcccagcgtaccaagtggac

SEQ ID NO: 5210044 - DNA, 25 bp, Homo sapien
tggagtttgcccagcgtaccaagtg

SEQ ID NO: 5210045 - DNA, 25 bp, Homo sapien
taatttcctcggtcatatccaactg

SEQ ID NO: 5210046 - DNA, 25 bp, Homo sapien
caaagtaaggccgaagtcaaggaat

SEQ ID NO: 5210047 - DNA, 25 bp, Homo sapien
gaagttgcagcaaacctcgtccaag

SEQ ID NO: 5210048 - DNA, 25 bp, Homo sapien
gtatgatcagcacaaacagcatcag

SEQ ID NO: 5210049 - DNA, 25 bp, Homo sapien
tgacccaaatccatgctagctgaga

SEQ ID NO: 5210050 - DNA, 25 bp, Homo sapien
gaaaaccatctgctcaaacccttaa

SEQ ID NO: 5210051 - DNA, 25 bp, Homo sapien
acaaagaagtcatgccggatacgtt

SEQ ID NO: 5210052 - DNA, 25 bp, Homo sapien
tatcaggatcacttttgataagcac

SEQ ID NO: 5210053 - DNA, 25 bp, Homo sapien
caaatcaggcaaaagtcaaaggaat

SEQ ID NO: 5210054 - DNA, 25 bp, Homo sapien
gattgtgaatcaaaacactcattac

SEQ ID NO: 5210055 - DNA, 25 bp, Homo sapien
gtcaatggatgtggtatcacgataa

SEQ ID NO: 5210056 - DNA, 25 bp, Homo sapien
taatgctggagcactttaggcctca

SEQ ID NO: 5210057 - DNA, 25 bp, Homo sapien
agcttctaggaagagtgtcatcagt

SEQ ID NO: 5210058 - DNA, 25 bp, Homo sapien
ggaagagtgtcatcagtatgaaaca

SEQ ID NO: 5210059 - DNA, 25 bp, Homo sapien
gagtcaggagcatagtccaggagaa

SEQ ID NO: 5210060 - DNA, 25 bp, Homo sapien
tccaggagaactgtgctgagtctac

SEQ ID NO: 5210061 - DNA, 25 bp, Homo sapien
tattgatgatccctgactgtcttca

SEQ ID NO: 5210062 - DNA, 25 bp, Homo sapien
tagaaaaggtcttccccatccactc

SEQ ID NO: 5210063 - DNA, 25 bp, Homo sapien
tctcatttattgatgatccctgact

SEQ ID NO: 5210064 - DNA, 25 bp, Homo sapien
actcccagtttcattaagagacgaa

SEQ ID NO: 5210065 - DNA, 25 bp, Homo sapien
aaaagcttttcaggtggtttcaatg

SEQ ID NO: 5210066 - DNA, 25 bp, Homo sapien
agacatccatatcccagtaggctct

SEQ ID NO: 5210067 - DNA, 25 bp, Homo sapien
acttgtcctaagttgtcagacatcc

SEQ ID NO: 5210068 - DNA, 25 bp, Homo sapien
ggtggtttcaatgtgtagccagagt

SEQ ID NO: 5210069 - DNA, 25 bp, Homo sapien
cagtatctcatgctctaggtggcta

SEQ ID NO: 5210070 - DNA, 25 bp, Homo sapien
gactcagggtaccatgtcagctctg

SEQ ID NO: 5210071 - DNA, 25 bp, Homo sapien
taactaacttcattggtcaggccct

SEQ ID NO: 5210072 - DNA, 25 bp, Homo sapien
ccctgggaggcattatgtaactaac

SEQ ID NO: 5210073 - DNA, 25 bp, Homo sapien
tataaacatgcctcttaatactcct

SEQ ID NO: 5210074 - DNA, 25 bp, Homo sapien
ttaagaaaatccactttccatttca

SEQ ID NO: 5210075 - DNA, 25 bp, Homo sapien
tattttttagtctcaatcctgttaa

SEQ ID NO: 5210076 - DNA, 25 bp, Homo sapien
tggatgtagagcttattgctataaa

SEQ ID NO: 5210077 - DNA, 25 bp, Homo sapien
gagggatgcccctcagttgagcaga

SEQ ID NO: 5210078 - DNA, 25 bp, Homo sapien
gtcacagaaagttggataacctgag

SEQ ID NO: 5210079 - DNA, 25 bp, Homo sapien
gttggacaggtggtcttgatcattt

SEQ ID NO: 5210080 - DNA, 25 bp, Homo sapien
gaaaagttggacaggtggtcttgat

SEQ ID NO: 5210081 - DNA, 25 bp, Homo sapien
gcagctgagacaacatccccagcac

SEQ ID NO: 5210082 - DNA, 25 bp, Homo sapien
cagctgagacaacatccccagcacc

SEQ ID NO: 5210083 - DNA, 25 bp, Homo sapien
catttaatgatactgatcactcttc

SEQ ID NO: 5210084 - DNA, 25 bp, Homo sapien
tcctccctctcagaagctacccatt

SEQ ID NO: 5210085 - DNA, 25 bp, Homo sapien
gctgggtccagagtcgcagcctcct

SEQ ID NO: 5210086 - DNA, 25 bp, Homo sapien
ctcttctgacaggttgcaggacagt

SEQ ID NO: 5210087 - DNA, 25 bp, Homo sapien
ctggaggactgaaaacctggtggct

SEQ ID NO: 5210088 - DNA, 25 bp, Homo sapien
caacttgaattaacgaactggagga

SEQ ID NO: 5210089 - DNA, 25 bp, Homo sapien
gaccctagctgtagttccaggactg

SEQ ID NO: 5210090 - DNA, 25 bp, Homo sapien
tatgtttggctaagggtgaccctag

SEQ ID NO: 5210091 - DNA, 25 bp, Homo sapien
tatgttgccttgacaggatatgcct

SEQ ID NO: 5210092 - DNA, 25 bp, Homo sapien
gctcaatccctaatcgaaagtttgg

SEQ ID NO: 5210093 - DNA, 25 bp, Homo sapien
tggaaattaccggatcaaagtctgt

SEQ ID NO: 5210094 - DNA, 25 bp, Homo sapien
aaatgactgtagctggcctggaaag

SEQ ID NO: 5210095 - DNA, 25 bp, Homo sapien
ctgggtatgctcaaatatagttgaa

SEQ ID NO: 5210096 - DNA, 25 bp, Homo sapien
ctcctatgtatatcagatggaatca

SEQ ID NO: 5210097 - DNA, 25 bp, Homo sapien
tatatagcttctatcatacagttgc

SEQ ID NO: 5210098 - DNA, 25 bp, Homo sapien
tacagttgccatcagaattcttcta

SEQ ID NO: 5210099 - DNA, 25 bp, Homo sapien
tcatacagagacttcacccctggaa

SEQ ID NO: 5210100 - DNA, 25 bp, Homo sapien
gggacctctgtccactactggatat

SEQ ID NO: 5210101 - DNA, 25 bp, Homo sapien
caagagctgcattaggttaccataa

SEQ ID NO: 5210102 - DNA, 25 bp, Homo sapien
tctctaccggcctgaagctggaact

SEQ ID NO: 5210103 - DNA, 25 bp, Homo sapien
tattcgccctccgtcttggttccag

SEQ ID NO: 5210104 - DNA, 25 bp, Homo sapien
gactccctttgtgagtgtgagagga

SEQ ID NO: 5210105 - DNA, 25 bp, Homo sapien
actgttaatcagttgccgtggttcc

SEQ ID NO: 5210106 - DNA, 25 bp, Homo sapien
tactctctcctagtacaggcagtct

SEQ ID NO: 5210107 - DNA, 25 bp, Homo sapien
gtacctcttctgtatttagatacac

SEQ ID NO: 5210108 - DNA, 25 bp, Homo sapien
aatatagtattttcactgtacctct

SEQ ID NO: 5210109 - DNA, 25 bp, Homo sapien
tagtattttcactgtacctcttctg

SEQ ID NO: 5210110 - DNA, 25 bp, Homo sapien
tatagtattttcactgtacctcttc

SEQ ID NO: 5210111 - DNA, 25 bp, Homo sapien
ctgtttgaacaactctgctgctgac

SEQ ID NO: 5210112 - DNA, 25 bp, Homo sapien
ctaactgtatattttcgaataacct

SEQ ID NO: 5210113 - DNA, 25 bp, Homo sapien
ctgtatattttcgaataacctatct

SEQ ID NO: 5210114 - DNA, 25 bp, Homo sapien
tctgtttgaacaactctgctgctga

SEQ ID NO: 5210115 - DNA, 25 bp, Homo sapien
tctttacccaaaccaatgtcacagg

SEQ ID NO: 5210116 - DNA, 25 bp, Homo sapien
gggcactttatcctgcttcattggc

SEQ ID NO: 5210117 - DNA, 25 bp, Homo sapien
tagtctgaggtcttatgtttgagtc

SEQ ID NO: 5210118 - DNA, 25 bp, Homo sapien
agaaccatcctgttttgtaactttg

SEQ ID NO: 5210119 - DNA, 25 bp, Homo sapien
aaatctagactacagttcagttcct

SEQ ID NO: 5210120 - DNA, 25 bp, Homo sapien
agttccactacactgaaatctagac

SEQ ID NO: 5210121 - DNA, 25 bp, Homo sapien
gaatgaccccctttggagcaaccca

SEQ ID NO: 5210122 - DNA, 25 bp, Homo sapien
ttggagcaacccagtcagttttatg

SEQ ID NO: 5210123 - DNA, 25 bp, Homo sapien
aatgttcagttccacgacttaaatc

SEQ ID NO: 5210124 - DNA, 25 bp, Homo sapien
ttcttcctgctaaaagcacggttca

SEQ ID NO: 5210125 - DNA, 25 bp, Homo sapien
tcttcctgctaaaagcacggttcat

SEQ ID NO: 5210126 - DNA, 25 bp, Homo sapien
ctttcttcctgctaaaagcacggtt

SEQ ID NO: 5210127 - DNA, 25 bp, Homo sapien
tttcttcctgctaaaagcacggttc

SEQ ID NO: 5210128 - DNA, 25 bp, Homo sapien
taaacatttacctgactttcttgga

SEQ ID NO: 5210129 - DNA, 25 bp, Homo sapien
cccagagttgaagagtgccttaaag

SEQ ID NO: 5210130 - DNA, 25 bp, Homo sapien
tgtttgaacacctctcacttcagag

SEQ ID NO: 5210131 - DNA, 25 bp, Homo sapien
gaagcagctacagactataatcaat

SEQ ID NO: 5210132 - DNA, 25 bp, Homo sapien
gattacatgtgatggccaagtatat

SEQ ID NO: 5210133 - DNA, 25 bp, Homo sapien
catgtgatggccaagtatattgggt

SEQ ID NO: 5210134 - DNA, 25 bp, Homo sapien
cttctgaggtcctggatcatttagt

SEQ ID NO: 5210135 - DNA, 25 bp, Homo sapien
gatcatttagtaagattacatgtga

SEQ ID NO: 5210136 - DNA, 25 bp, Homo sapien
gaatctctgagtaactctaacacca

SEQ ID NO: 5210137 - DNA, 25 bp, Homo sapien
cagaatctctgagtaactctaacac

SEQ ID NO: 5210138 - DNA, 25 bp, Homo sapien
aatctctgagtaactctaacaccat

SEQ ID NO: 5210139 - DNA, 25 bp, Homo sapien
tcagaatctctgagtaactctaaca

SEQ ID NO: 5210140 - DNA, 25 bp, Homo sapien
gttttgataaagcttcaggtgtatg

SEQ ID NO: 5210141 - DNA, 25 bp, Homo sapien
tttgcattatagggaatgaaatgtt

SEQ ID NO: 5210142 - DNA, 25 bp, Homo sapien
ctttgcattatagggaatgaaatgt

SEQ ID NO: 5210143 - DNA, 25 bp, Homo sapien
gataaagcttcaggtgtatgcatcc

SEQ ID NO: 5210144 - DNA, 25 bp, Homo sapien
caattaggtcatataccaatcttaa

SEQ ID NO: 5210145 - DNA, 25 bp, Homo sapien
caaataatgttgtaactttctctct

SEQ ID NO: 5210146 - DNA, 25 bp, Homo sapien
tactatgactcattaagccaaataa

SEQ ID NO: 5210147 - DNA, 25 bp, Homo sapien
gggtaatttatcatatgttctcaaa

SEQ ID NO: 5210148 - DNA, 25 bp, Homo sapien
gcaaccacataatccattgataaca

SEQ ID NO: 5210149 - DNA, 25 bp, Homo sapien
cattgataacatcaatttctgtgtt

SEQ ID NO: 5210150 - DNA, 25 bp, Homo sapien
aagcaaccacataatccattgataa

SEQ ID NO: 5210151 - DNA, 25 bp, Homo sapien
aaaagcaaccacataatccattgat

SEQ ID NO: 5210152 - DNA, 25 bp, Homo sapien
taatgagcaccaaccatgtgctagg

SEQ ID NO: 5210153 - DNA, 25 bp, Homo sapien
gcttcaaggcattacaggtgtttgc

SEQ ID NO: 5210154 - DNA, 25 bp, Homo sapien
tcatttcgatgaggctccaaagtcc

SEQ ID NO: 5210155 - DNA, 25 bp, Homo sapien
ccttgacaacgcagtggaggacttc

SEQ ID NO: 5210156 - DNA, 25 bp, Homo sapien
caaagtcaccttgccagtattgaga

SEQ ID NO: 5210157 - DNA, 25 bp, Homo sapien
agagctagaagcatatgggagtttc

SEQ ID NO: 5210158 - DNA, 25 bp, Homo sapien
cagagtattccttttgggcaatgaa

SEQ ID NO: 5210159 - DNA, 25 bp, Homo sapien
caccttgccagtattgagagctaga

SEQ ID NO: 5210160 - DNA, 25 bp, Homo sapien
tttagtggacacaactggtgcctgc

SEQ ID NO: 5210161 - DNA, 25 bp, Homo sapien
gaagatactagggtttagtggacac

SEQ ID NO: 5210162 - DNA, 25 bp, Homo sapien
tcctgggatccactttatcaactca

SEQ ID NO: 5210163 - DNA, 25 bp, Homo sapien
ctgggatccactttatcaactcaga

SEQ ID NO: 5210164 - DNA, 25 bp, Homo sapien
gcttgaaatataccaaattgttaag

SEQ ID NO: 5210165 - DNA, 25 bp, Homo sapien
tgcaactttcaaccccttggttcaa

SEQ ID NO: 5210166 - DNA, 25 bp, Homo sapien
gccaatagttccttttttaatatgc

SEQ ID NO: 5210167 - DNA, 25 bp, Homo sapien
tcactgcaactttcaaccccttggt

SEQ ID NO: 5210168 - DNA, 25 bp, Homo sapien
ctttagtttccttacagcatctctc

SEQ ID NO: 5210169 - DNA, 25 bp, Homo sapien
agcatctctcacaacttctgttcct

SEQ ID NO: 5210170 - DNA, 25 bp, Homo sapien
tagtttccttacagcatctctcaca

SEQ ID NO: 5210171 - DNA, 25 bp, Homo sapien
cttacagcatctctcacaacttctg

SEQ ID NO: 5210172 - DNA, 25 bp, Homo sapien
ctacttacggacattgccagatcct

SEQ ID NO: 5210173 - DNA, 25 bp, Homo sapien
tacttacggacattgccagatcctg

SEQ ID NO: 5210174 - DNA, 25 bp, Homo sapien
tctcctctcttagtctcaccagttt

SEQ ID NO: 5210175 - DNA, 25 bp, Homo sapien
cctctcttagtctcaccagtttccc

SEQ ID NO: 5210176 - DNA, 25 bp, Homo sapien
tcctctcttagtctcaccagtttcc

SEQ ID NO: 5210177 - DNA, 25 bp, Homo sapien
tctctcctctcttagtctcaccagt

SEQ ID NO: 5210178 - DNA, 25 bp, Homo sapien
ccagaatactcatgtgcttagcaga

SEQ ID NO: 5210179 - DNA, 25 bp, Homo sapien
gactcaggtatagaactagactcag

SEQ ID NO: 5210180 - DNA, 25 bp, Homo sapien
ggagcccagctaaacttgagtatta

SEQ ID NO: 5210181 - DNA, 25 bp, Homo sapien
aaatatagtgagtatcttgaaagca

SEQ ID NO: 5210182 - DNA, 25 bp, Homo sapien
ctacgaatgaaaaattattcacaaa

SEQ ID NO: 5210183 - DNA, 25 bp, Homo sapien
aattgatatttgcaactccacttta

SEQ ID NO: 5210184 - DNA, 25 bp, Homo sapien
tatttgcaactccactttaggaatt

SEQ ID NO: 5210185 - DNA, 25 bp, Homo sapien
tccataaattgatatttgcaactcc

SEQ ID NO: 5210186 - DNA, 25 bp, Homo sapien
ttttactccataaattgatatttgc

SEQ ID NO: 5210187 - DNA, 25 bp, Homo sapien
cctataaacgtaggtggtagccatc

SEQ ID NO: 5210188 - DNA, 25 bp, Homo sapien
catcttgtagcggtagttagtggta

SEQ ID NO: 5210189 - DNA, 25 bp, Homo sapien
aacgtaggtggtagccatcttgtag

SEQ ID NO: 5210190 - DNA, 25 bp, Homo sapien
tgtagcggtagttagtggtagccat

SEQ ID NO: 5210191 - DNA, 25 bp, Homo sapien
taggttgtatccaagaactgagaac

SEQ ID NO: 5210192 - DNA, 25 bp, Homo sapien
cataccgcaatcagcattcttagga

SEQ ID NO: 5210193 - DNA, 25 bp, Homo sapien
taaactccaagattgctccccaggt

SEQ ID NO: 5210194 - DNA, 25 bp, Homo sapien
tgggaatagaattcaagtagggctc

SEQ ID NO: 5210195 - DNA, 25 bp, Homo sapien
gaatatcctcttgtcagttttatca

SEQ ID NO: 5210196 - DNA, 25 bp, Homo sapien
acacttttcgctgtcaaatacatag

SEQ ID NO: 5210197 - DNA, 25 bp, Homo sapien
ttttcgctgtcaaatacatagcaca

SEQ ID NO: 5210198 - DNA, 25 bp, Homo sapien
tatgaagctggcaattgtgttgaac

SEQ ID NO: 5210199 - DNA, 25 bp, Homo sapien
ttcaaatactttgccaatgccagaa

SEQ ID NO: 5210200 - DNA, 25 bp, Homo sapien
aaatacatgcataacataagcaggc

SEQ ID NO: 5210201 - DNA, 25 bp, Homo sapien
acatgtaagtttatgctcatgacca

SEQ ID NO: 5210202 - DNA, 25 bp, Homo sapien
gggaaacacacgtttgctcaccact

SEQ ID NO: 5210203 - DNA, 25 bp, Homo sapien
gaaccatatagatcatatttcctgg

SEQ ID NO: 5210204 - DNA, 25 bp, Homo sapien
tagttgatacgctatatccaaggag

SEQ ID NO: 5210205 - DNA, 25 bp, Homo sapien
tagaatgaactctgactctgaaaca

SEQ ID NO: 5210206 - DNA, 25 bp, Homo sapien
aatttatttctatgggtaaggcagg

SEQ ID NO: 5210207 - DNA, 25 bp, Homo sapien
catgcgcacaacaagagaaaatagt

SEQ ID NO: 5210208 - DNA, 25 bp, Homo sapien
tattgcctggtaagtatagaagctc

SEQ ID NO: 5210209 - DNA, 25 bp, Homo sapien
tcaccatggaagaaggaggactatt

SEQ ID NO: 5210210 - DNA, 25 bp, Homo sapien
gataaagtccccaataagagcagat

SEQ ID NO: 5210211 - DNA, 25 bp, Homo sapien
cagatgaactctagaggaggccaca

SEQ ID NO: 5210212 - DNA, 25 bp, Homo sapien
tgtaaccctgcgatctgttttcttg

SEQ ID NO: 5210213 - DNA, 25 bp, Homo sapien
gtatgccaggtcaaatgcttggcca

SEQ ID NO: 5210214 - DNA, 25 bp, Homo sapien
gattctagaaatttcctgtatgcca

SEQ ID NO: 5210215 - DNA, 25 bp, Homo sapien
ggccaattgttaaagtgatctcttc

SEQ ID NO: 5210216 - DNA, 25 bp, Homo sapien
cttgtgggaattcaatataaaatag

SEQ ID NO: 5210217 - DNA, 25 bp, Homo sapien
gtgggaattcaatataaaatagtta

SEQ ID NO: 5210218 - DNA, 25 bp, Homo sapien
tgggaattcaatataaaatagttaa

SEQ ID NO: 5210219 - DNA, 25 bp, Homo sapien
tgtgggaattcaatataaaatagtt

SEQ ID NO: 5210220 - DNA, 25 bp, Homo sapien
ccccatgagaagcatcaggaagtga

SEQ ID NO: 5210221 - DNA, 25 bp, Homo sapien
ctctgatccccatgagaagcatcag

SEQ ID NO: 5210222 - DNA, 25 bp, Homo sapien
gatccccatgagaagcatcaggaag

SEQ ID NO: 5210223 - DNA, 25 bp, Homo sapien
tgaagcaaagtcacatgagaacact

SEQ ID NO: 5210224 - DNA, 25 bp, Homo sapien
atattttctgtttctaagtcttgga

SEQ ID NO: 5210225 - DNA, 25 bp, Homo sapien
aggtgctgatacttgagttattctc

SEQ ID NO: 5210226 - DNA, 25 bp, Homo sapien
tattctcagttggttttccaaatct

SEQ ID NO: 5210227 - DNA, 25 bp, Homo sapien
cagttggttttccaaatcttgtact

SEQ ID NO: 5210228 - DNA, 25 bp, Homo sapien
gatgtgtgttccatcttgggatgga

SEQ ID NO: 5210229 - DNA, 25 bp, Homo sapien
tcttgggatggaaggttgaataatg

SEQ ID NO: 5210230 - DNA, 25 bp, Homo sapien
tgggatggaaggttgaataatgagt

SEQ ID NO: 5210231 - DNA, 25 bp, Homo sapien
tgtgtgttccatcttgggatggaag

SEQ ID NO: 5210232 - DNA, 25 bp, Homo sapien
gaagataaaaaaggtaggctgcagt

SEQ ID NO: 5210233 - DNA, 25 bp, Homo sapien
gaagctgactcagtaaccctatgag

SEQ ID NO: 5210234 - DNA, 25 bp, Homo sapien
tatatgaactcagtgtaagaccgtg

SEQ ID NO: 5210235 - DNA, 25 bp, Homo sapien
caatgaccaggtttggatttgcatc

SEQ ID NO: 5210236 - DNA, 25 bp, Homo sapien
cagggagatgaatcaccattactac

SEQ ID NO: 5210237 - DNA, 25 bp, Homo sapien
aatcaggcgagttgataggagtgac

SEQ ID NO: 5210238 - DNA, 25 bp, Homo sapien
cagtcccagtgatagtctggaatca

SEQ ID NO: 5210239 - DNA, 25 bp, Homo sapien
ttactacgccagaaagaggatgagc

SEQ ID NO: 5210240 - DNA, 25 bp, Homo sapien
gcgacttaggtgtcatactgcctgc

SEQ ID NO: 5210241 - DNA, 25 bp, Homo sapien
catatcaaagatgtcagtggagggc

SEQ ID NO: 5210242 - DNA, 25 bp, Homo sapien
ttgcgagtaggcatcgaagactggt

SEQ ID NO: 5210243 - DNA, 25 bp, Homo sapien
taatctcagtagatctactaggtac

SEQ ID NO: 5210244 - DNA, 25 bp, Homo sapien
tttgattgaatatctggagggaaat

SEQ ID NO: 5210245 - DNA, 25 bp, Homo sapien
tgattgaatatctggagggaaatct

SEQ ID NO: 5210246 - DNA, 25 bp, Homo sapien
cagttaaatgggtcaaaaggttctg

SEQ ID NO: 5210247 - DNA, 25 bp, Homo sapien
ttgattgaatatctggagggaaatc

SEQ ID NO: 5210248 - DNA, 25 bp, Homo sapien
tgaaggaaaccatagttttggtaca

SEQ ID NO: 5210249 - DNA, 25 bp, Homo sapien
tattttaagcgagtttttatagcga

SEQ ID NO: 5210250 - DNA, 25 bp, Homo sapien
tgggccagtctatcaaaatagtcac

SEQ ID NO: 5210251 - DNA, 25 bp, Homo sapien
taacattctctttgtcccatatcaa

SEQ ID NO: 5210252 - DNA, 25 bp, Homo sapien
aatgcagtgactgtttaactctaga

SEQ ID NO: 5210253 - DNA, 25 bp, Homo sapien
caatgaaccattagaatccatgcca

SEQ ID NO: 5210254 - DNA, 25 bp, Homo sapien
caaccttatccttagcatatgtagg

SEQ ID NO: 5210255 - DNA, 25 bp, Homo sapien
acattcctaaataagttgtcactgg

SEQ ID NO: 5210256 - DNA, 25 bp, Homo sapien
catggcccatagtgcaaagcattta

SEQ ID NO: 5210257 - DNA, 25 bp, Homo sapien
taggatataataacttcaccaaaat

SEQ ID NO: 5210258 - DNA, 25 bp, Homo sapien
taaatcatggcccatagtgcaaagc

SEQ ID NO: 5210259 - DNA, 25 bp, Homo sapien
aataggatataataacttcaccaaa

SEQ ID NO: 5210260 - DNA, 25 bp, Homo sapien
ggtgtctgtctggattctaccatat

SEQ ID NO: 5210261 - DNA, 25 bp, Homo sapien
gtgtctgtctggattctaccatata

SEQ ID NO: 5210262 - DNA, 25 bp, Homo sapien
tggtgtctgtctggattctaccata

SEQ ID NO: 5210263 - DNA, 25 bp, Homo sapien
tgtctgtctggattctaccatatat

SEQ ID NO: 5210264 - DNA, 25 bp, Homo sapien
tgaaaacctcaagacatatgttaag

SEQ ID NO: 5210265 - DNA, 25 bp, Homo sapien
gaacaataatgaattcatgtactac

SEQ ID NO: 5210266 - DNA, 25 bp, Homo sapien
aattcaggcatgttattacatctag

SEQ ID NO: 5210267 - DNA, 25 bp, Homo sapien
tctagaacaataatgaattcatgta

SEQ ID NO: 5210268 - DNA, 25 bp, Homo sapien
ttagccacgcgtggtagtgcacact

SEQ ID NO: 5210269 - DNA, 25 bp, Homo sapien
cacgcgtggtagtgcacacttgtag

SEQ ID NO: 5210270 - DNA, 25 bp, Homo sapien
caggaagctgaggagggaagattgc

SEQ ID NO: 5210271 - DNA, 25 bp, Homo sapien
agattgcttgagcccgggcggtgga

SEQ ID NO: 5210272 - DNA, 25 bp, Homo sapien
gttggtgacatgtactggacagttt

SEQ ID NO: 5210273 - DNA, 25 bp, Homo sapien
tatggtgttcacaacccattgtact

SEQ ID NO: 5210274 - DNA, 25 bp, Homo sapien
gcattagattcattaggctagcacg

SEQ ID NO: 5210275 - DNA, 25 bp, Homo sapien
taactgcttatactgaaatatggtc

SEQ ID NO: 5210276 - DNA, 25 bp, Homo sapien
aataattaatatctgaaatgcttac

SEQ ID NO: 5210277 - DNA, 25 bp, Homo sapien
atattcatgctttgatcaactaata

SEQ ID NO: 5210278 - DNA, 25 bp, Homo sapien
aaatattcatgctttgatcaactaa

SEQ ID NO: 5210279 - DNA, 25 bp, Homo sapien
ataattaatatctgaaatgcttaca

SEQ ID NO: 5210280 - DNA, 25 bp, Homo sapien
ggtcgagacaaaatactgtgccttc

SEQ ID NO: 5210281 - DNA, 25 bp, Homo sapien
tactgtgccttcaagagttagtccc

SEQ ID NO: 5210282 - DNA, 25 bp, Homo sapien
tcagcacctactgtctaacgggtcg

SEQ ID NO: 5210283 - DNA, 25 bp, Homo sapien
tctaacgggtcgagacaaaatactg

SEQ ID NO: 5210284 - DNA, 25 bp, Homo sapien
taaatagaactcagacacaaggcag

SEQ ID NO: 5210285 - DNA, 25 bp, Homo sapien
gagggctacccctactctaagtcac

SEQ ID NO: 5210286 - DNA, 25 bp, Homo sapien
taattcatgtagaacgggtgccaca

SEQ ID NO: 5210287 - DNA, 25 bp, Homo sapien
gctagaaattagtgaccttgtggca

SEQ ID NO: 5210288 - DNA, 25 bp, Homo sapien
tatgaagatttatgagtatcccctc

SEQ ID NO: 5210289 - DNA, 25 bp, Homo sapien
cctggcccgaaaatggttcaacttg

SEQ ID NO: 5210290 - DNA, 25 bp, Homo sapien
cattccctgtactgtctagcctgac

SEQ ID NO: 5210291 - DNA, 25 bp, Homo sapien
tatacttctgacacacaattgccta

SEQ ID NO: 5210292 - DNA, 25 bp, Homo sapien
tgaagtcatcctgaagatgtggcag

SEQ ID NO: 5210293 - DNA, 25 bp, Homo sapien
caggccattaatacttttgtagaga

SEQ ID NO: 5210294 - DNA, 25 bp, Homo sapien
tcttgaagtcatcctgaagatgtgg

SEQ ID NO: 5210295 - DNA, 25 bp, Homo sapien
atgtggcaggccattaatacttttg

SEQ ID NO: 5210296 - DNA, 25 bp, Homo sapien
tatactttgtgggactcttggttct

SEQ ID NO: 5210297 - DNA, 25 bp, Homo sapien
tgggactcttggttctctagccacg

SEQ ID NO: 5210298 - DNA, 25 bp, Homo sapien
agctccatttcaaaaaccatgctaa

SEQ ID NO: 5210299 - DNA, 25 bp, Homo sapien
cagtaagacaacctggattatactt

SEQ ID NO: 5210300 - DNA, 25 bp, Homo sapien
taatgaatgtctctggtatgaaggt

SEQ ID NO: 5210301 - DNA, 25 bp, Homo sapien
aagaagccttctagatgagatgaca

SEQ ID NO: 5210302 - DNA, 25 bp, Homo sapien
taagatttattgtgtctccaaggat

SEQ ID NO: 5210303 - DNA, 25 bp, Homo sapien
ggaggtagtacactggtaaagaagc

SEQ ID NO: 5210304 - DNA, 25 bp, Homo sapien
aaaatcctctatatcaatggtcccc

SEQ ID NO: 5210305 - DNA, 25 bp, Homo sapien
ccatctggtgtaaggagagacagtg

SEQ ID NO: 5210306 - DNA, 25 bp, Homo sapien
tttgtgctgcttaagaacctaatgc

SEQ ID NO: 5210307 - DNA, 25 bp, Homo sapien
ggagtgtacgacctagatcccttat

SEQ ID NO: 5210308 - DNA, 25 bp, Homo sapien
caaatctctgaatttcaagaatcca

SEQ ID NO: 5210309 - DNA, 25 bp, Homo sapien
tgaatttcaagaatccatattagtt

SEQ ID NO: 5210310 - DNA, 25 bp, Homo sapien
tttcaagaatccatattagtttcat

SEQ ID NO: 5210311 - DNA, 25 bp, Homo sapien
ttcctccaaatctctgaatttcaag

SEQ ID NO: 5210312 - DNA, 25 bp, Homo sapien
gctggttcgtatagcctcagtgtaa

SEQ ID NO: 5210313 - DNA, 25 bp, Homo sapien
gcactgcttctctcatgtggctggt

SEQ ID NO: 5210314 - DNA, 25 bp, Homo sapien
aaggctgccgaggaattccttaagc

SEQ ID NO: 5210315 - DNA, 25 bp, Homo sapien
tatagcctcagtgtaaaggctgccg

SEQ ID NO: 5210316 - DNA, 25 bp, Homo sapien
tctggagttgacttcactgaatttg

SEQ ID NO: 5210317 - DNA, 25 bp, Homo sapien
cactgaatttgtggagacaattgaa

SEQ ID NO: 5210318 - DNA, 25 bp, Homo sapien
caattttatcagtgtgaggtctaat

SEQ ID NO: 5210319 - DNA, 25 bp, Homo sapien
tctaattaataaccacggaataatg

SEQ ID NO: 5210320 - DNA, 25 bp, Homo sapien
ttccatacccctatattggattttc

SEQ ID NO: 5210321 - DNA, 25 bp, Homo sapien
ctccacttgaatgacctgtttccat

SEQ ID NO: 5210322 - DNA, 25 bp, Homo sapien
tttccaacataaacgctcttctcca

SEQ ID NO: 5210323 - DNA, 25 bp, Homo sapien
ctttccaacataaacgctcttctcc

SEQ ID NO: 5210324 - DNA, 25 bp, Homo sapien
tggagataatgacttaaatcaagca

SEQ ID NO: 5210325 - DNA, 25 bp, Homo sapien
ggagataatgacttaaatcaagcag

SEQ ID NO: 5210326 - DNA, 25 bp, Homo sapien
aaacagccaatctctccgtagccaa

SEQ ID NO: 5210327 - DNA, 25 bp, Homo sapien
gccaatctctccgtagccaacagat

SEQ ID NO: 5210328 - DNA, 25 bp, Homo sapien
tctctccgtagccaacagatgtatt

SEQ ID NO: 5210329 - DNA, 25 bp, Homo sapien
ctccgtagccaacagatgtattgtc

SEQ ID NO: 5210330 - DNA, 25 bp, Homo sapien
cctaacagtgtggagtcttagctga

SEQ ID NO: 5210331 - DNA, 25 bp, Homo sapien
tcttggtattggatctgacacagcc

SEQ ID NO: 5210332 - DNA, 25 bp, Homo sapien
tatagcacctgtgacttgaggcaca

SEQ ID NO: 5210333 - DNA, 25 bp, Homo sapien
tgacacagcctataggcagccataa

SEQ ID NO: 5210334 - DNA, 25 bp, Homo sapien
ttcaagttcacaacttttccttgct

SEQ ID NO: 5210335 - DNA, 25 bp, Homo sapien
tgtatgtacctctttgttgagtttc

SEQ ID NO: 5210336 - DNA, 25 bp, Homo sapien
ttatgtatgtacctctttgttgagt

SEQ ID NO: 5210337 - DNA, 25 bp, Homo sapien
tgagtttcttattcagatgatgagt

SEQ ID NO: 5210338 - DNA, 25 bp, Homo sapien
cctcaaagctttggcagttataggc

SEQ ID NO: 5210339 - DNA, 25 bp, Homo sapien
gtgtctccaagtccaatagatggaa

SEQ ID NO: 5210340 - DNA, 25 bp, Homo sapien
aaaatggtttgacacattcagaagc

SEQ ID NO: 5210341 - DNA, 25 bp, Homo sapien
cagaaaacgctctgaggagtccaaa

SEQ ID NO: 5210342 - DNA, 25 bp, Homo sapien
tcagtccttaaagttctgccacatg

SEQ ID NO: 5210343 - DNA, 25 bp, Homo sapien
catgttcgctttgatagcacaagca

SEQ ID NO: 5210344 - DNA, 25 bp, Homo sapien
gataccatatgtttggcatcagtcc

SEQ ID NO: 5210345 - DNA, 25 bp, Homo sapien
tgcaattagcattccaaaggttatg

SEQ ID NO: 5210346 - DNA, 25 bp, Homo sapien
tttgtaaacatttcacccaccgtca

SEQ ID NO: 5210347 - DNA, 25 bp, Homo sapien
tgtaaacatttcacccaccgtcaac

SEQ ID NO: 5210348 - DNA, 25 bp, Homo sapien
cttgatatttgtaaacatttcaccc

SEQ ID NO: 5210349 - DNA, 25 bp, Homo sapien
gatatttgtaaacatttcacccacc

SEQ ID NO: 5210350 - DNA, 25 bp, Homo sapien
tctgaccacacaaatcactactaag

SEQ ID NO: 5210351 - DNA, 25 bp, Homo sapien
agtttaatttttggcctggctgcag

SEQ ID NO: 5210352 - DNA, 25 bp, Homo sapien
tgaaggtctcctcttgcgatctgcc

SEQ ID NO: 5210353 - DNA, 25 bp, Homo sapien
gcgatctgcccttccggactatcat

SEQ ID NO: 5210354 - DNA, 25 bp, Homo sapien
ctgtgactcccatttgactttgatt

SEQ ID NO: 5210355 - DNA, 25 bp, Homo sapien
ttgattcagatgattcccttcttga

SEQ ID NO: 5210356 - DNA, 25 bp, Homo sapien
gactcccatttgactttgattcaga

SEQ ID NO: 5210357 - DNA, 25 bp, Homo sapien
actttgattcagatgattcccttct

SEQ ID NO: 5210358 - DNA, 25 bp, Homo sapien
tatttttatccaagttccttcgata

SEQ ID NO: 5210359 - DNA, 25 bp, Homo sapien
ctttctttccacttcaaaagagtct

SEQ ID NO: 5210360 - DNA, 25 bp, Homo sapien
cataactgaactttctttccacttc

SEQ ID NO: 5210361 - DNA, 25 bp, Homo sapien
tctttccacttcaaaagagtctcca

SEQ ID NO: 5210362 - DNA, 25 bp, Homo sapien
taactgaactttctttccacttcaa

SEQ ID NO: 5210363 - DNA, 25 bp, Homo sapien
ggatgtggaaatacacccagtccat

SEQ ID NO: 5210364 - DNA, 25 bp, Homo sapien
gaagctgtggatatgccatatagct

SEQ ID NO: 5210365 - DNA, 25 bp, Homo sapien
gaagctaatagcatcatcaaagaga

SEQ ID NO: 5210366 - DNA, 25 bp, Homo sapien
ccagtccataaaagaggtggaagct

SEQ ID NO: 5210367 - DNA, 25 bp, Homo sapien
aacaacacagctgtatttcagattt

SEQ ID NO: 5210368 - DNA, 25 bp, Homo sapien
tcctccatgagttaagttgcaaaag

SEQ ID NO: 5210369 - DNA, 25 bp, Homo sapien
tatttcagattttatgtctgatacc

SEQ ID NO: 5210370 - DNA, 25 bp, Homo sapien
taagcaaaaatatggagagaagtgc

SEQ ID NO: 5210371 - DNA, 25 bp, Homo sapien
tgaagaagagtatctgattgatcac

SEQ ID NO: 5210372 - DNA, 25 bp, Homo sapien
cagggctcttggttgaagttcttga

SEQ ID NO: 5210373 - DNA, 25 bp, Homo sapien
ttgaagaagagtatctgattgatca

SEQ ID NO: 5210374 - DNA, 25 bp, Homo sapien
gaagaagagtatctgattgatcact

SEQ ID NO: 5210375 - DNA, 25 bp, Homo sapien
gggatgagtcttgctcgcgtttcaa

SEQ ID NO: 5210376 - DNA, 25 bp, Homo sapien
caatcttgttggattgacgagaggt

SEQ ID NO: 5210377 - DNA, 25 bp, Homo sapien
gcataactgtgggaacagtgtggtc

SEQ ID NO: 5210378 - DNA, 25 bp, Homo sapien
tagcgcgagtaagggcaggcataac

SEQ ID NO: 5210379 - DNA, 25 bp, Homo sapien
aaggatggttgactgtgcctttcag

SEQ ID NO: 5210380 - DNA, 25 bp, Homo sapien
tcttcaaaggatggttgactgtgcc

SEQ ID NO: 5210381 - DNA, 25 bp, Homo sapien
cttcaaaggatggttgactgtgcct

SEQ ID NO: 5210382 - DNA, 25 bp, Homo sapien
tcaaaggatggttgactgtgccttt

SEQ ID NO: 5210383 - DNA, 25 bp, Homo sapien
cttgattcaggttcttttgtcattt

SEQ ID NO: 5210384 - DNA, 25 bp, Homo sapien
tagacttgatgttgaattctctgtc

SEQ ID NO: 5210385 - DNA, 25 bp, Homo sapien
cagggacgctaattgtagcaattcc

SEQ ID NO: 5210386 - DNA, 25 bp, Homo sapien
taaagtgggttttggcactgcttta

SEQ ID NO: 5210387 - DNA, 25 bp, Homo sapien
cagacagtcaatttcactgagggca

SEQ ID NO: 5210388 - DNA, 25 bp, Homo sapien
agcaccgggcccgtcataaaactca

SEQ ID NO: 5210389 - DNA, 25 bp, Homo sapien
taaatatcagacatgagactctttg

SEQ ID NO: 5210390 - DNA, 25 bp, Homo sapien
gtagcaccatcaagttgttccctgc

SEQ ID NO: 5210391 - DNA, 25 bp, Homo sapien
ttcaaagtagcaccatcaagttgtt

SEQ ID NO: 5210392 - DNA, 25 bp, Homo sapien
ttcctgttgtgccaaaataatagtg

SEQ ID NO: 5210393 - DNA, 25 bp, Homo sapien
agctccccttttgcacaaagctcat

SEQ ID NO: 5210394 - DNA, 25 bp, Homo sapien
tgaagcagagcgagaagtagccagc

SEQ ID NO: 5210395 - DNA, 25 bp, Homo sapien
cctgttgtgccaaaataatagtggg

SEQ ID NO: 5210396 - DNA, 25 bp, Homo sapien
gcacagccatggtcagttcaacgtt

SEQ ID NO: 5210397 - DNA, 25 bp, Homo sapien
caaggtactgtaagtggcaaacacc

SEQ ID NO: 5210398 - DNA, 25 bp, Homo sapien
agctgtgccgtctctgaagttatga

SEQ ID NO: 5210399 - DNA, 25 bp, Homo sapien
tataaaaagcttgcaaccacgaggc

SEQ ID NO: 5210400 - DNA, 25 bp, Homo sapien
caagatgggaacatcctccttcaac

SEQ ID NO: 5210401 - DNA, 25 bp, Homo sapien
tgaccaagatgggaacatcctcctt

SEQ ID NO: 5210402 - DNA, 25 bp, Homo sapien
accaagatgggaacatcctccttca

SEQ ID NO: 5210403 - DNA, 25 bp, Homo sapien
agatgggaacatcctccttcaacag

SEQ ID NO: 5210404 - DNA, 25 bp, Homo sapien
cacatattatgtcatcgcagagaac

SEQ ID NO: 5210405 - DNA, 25 bp, Homo sapien
ggcagtctaattcttgatcgtcaca

SEQ ID NO: 5210406 - DNA, 25 bp, Homo sapien
aacattctccaaatggaatttctgg

SEQ ID NO: 5210407 - DNA, 25 bp, Homo sapien
tgtgggcaaactgcacaacattctc

SEQ ID NO: 5210408 - DNA, 25 bp, Homo sapien
cttgaccattaggagggcgagtagg

SEQ ID NO: 5210409 - DNA, 25 bp, Homo sapien
ggccttgaggtccttgaccattagg

SEQ ID NO: 5210410 - DNA, 25 bp, Homo sapien
ccttgaccattaggagggcgagtag

SEQ ID NO: 5210411 - DNA, 25 bp, Homo sapien
tgaggaccagtagggcatgattcac

SEQ ID NO: 5210412 - DNA, 25 bp, Homo sapien
ctgaggaccagtagggcatgattca

SEQ ID NO: 5210413 - DNA, 25 bp, Homo sapien
ccagtagggcatgattcacagattc

SEQ ID NO: 5210414 - DNA, 25 bp, Homo sapien
ggaccagtagggcatgattcacaga

SEQ ID NO: 5210415 - DNA, 25 bp, Homo sapien
tgctactccagacttgacatcatat

SEQ ID NO: 5210416 - DNA, 25 bp, Homo sapien
atagcctgcgagtcctcctactgct

SEQ ID NO: 5210417 - DNA, 25 bp, Homo sapien
ttgacatcatatgaatcatactggg

SEQ ID NO: 5210418 - DNA, 25 bp, Homo sapien
agctggtccaggatagcctgcgagt

SEQ ID NO: 5210419 - DNA, 25 bp, Homo sapien
gggaaccaggatgaccagatgtacc

SEQ ID NO: 5210420 - DNA, 25 bp, Homo sapien
gaaccaggatgaccagatgtaccag

SEQ ID NO: 5210421 - DNA, 25 bp, Homo sapien
aggggaaccaggatgaccagatgta

SEQ ID NO: 5210422 - DNA, 25 bp, Homo sapien
accaggatgaccagatgtaccaggg

SEQ ID NO: 5210423 - DNA, 25 bp, Homo sapien
agcttgcccaggttcaccagggggt

SEQ ID NO: 5210424 - DNA, 25 bp, Homo sapien
atggacctatagcaccaggaggtcc

SEQ ID NO: 5210425 - DNA, 25 bp, Homo sapien
aggcaatcctcgctctccaggtcgt

SEQ ID NO: 5210426 - DNA, 25 bp, Homo sapien
tggaggtccaggcaatcctcgctct

SEQ ID NO: 5210427 - DNA, 25 bp, Homo sapien
gtcgtccgggtctacctgattctcc

SEQ ID NO: 5210428 - DNA, 25 bp, Homo sapien
tctccaggtcgtccgggtctacctg

SEQ ID NO: 5210429 - DNA, 25 bp, Homo sapien
tccaggtatcccagctggacctttg

SEQ ID NO: 5210430 - DNA, 25 bp, Homo sapien
atccaggtatcccagctggaccttt

SEQ ID NO: 5210431 - DNA, 25 bp, Homo sapien
ccttttctccatttcgtccatcgaa

SEQ ID NO: 5210432 - DNA, 25 bp, Homo sapien
tttaatccaggagcacctgtttcac

SEQ ID NO: 5210433 - DNA, 25 bp, Homo sapien
ctttaatccaggagcacctgtttca

SEQ ID NO: 5210434 - DNA, 25 bp, Homo sapien
tttctccatttcgtccatcgaagcc

SEQ ID NO: 5210435 - DNA, 25 bp, Homo sapien
tccattttcgcctggaagaccattt

SEQ ID NO: 5210436 - DNA, 25 bp, Homo sapien
gagctccattttcgcctggaagacc

SEQ ID NO: 5210437 - DNA, 25 bp, Homo sapien
aggagctccattttcgcctggaaga

SEQ ID NO: 5210438 - DNA, 25 bp, Homo sapien
tttcgcctggaagaccattttcacc

SEQ ID NO: 5210439 - DNA, 25 bp, Homo sapien
gaagtcctggccgtcctcgctcacc

SEQ ID NO: 5210440 - DNA, 25 bp, Homo sapien
ccaggaagtcctggccgtcctcgct

SEQ ID NO: 5210441 - DNA, 25 bp, Homo sapien
gccccaggaagtcctggccgtcctc

SEQ ID NO: 5210442 - DNA, 25 bp, Homo sapien
aggaagtcctggccgtcctcgctca

SEQ ID NO: 5210443 - DNA, 25 bp, Homo sapien
atcactgcctcgagcaccgtcatta

SEQ ID NO: 5210444 - DNA, 25 bp, Homo sapien
tcgagcaccgtcattaccccgagca

SEQ ID NO: 5210445 - DNA, 25 bp, Homo sapien
tggttgaccatcactgcctcgagca

SEQ ID NO: 5210446 - DNA, 25 bp, Homo sapien
gagcaccgtcattaccccgagcacc

SEQ ID NO: 5210447 - DNA, 25 bp, Homo sapien
ttagcaccaggggatccagggaatc

SEQ ID NO: 5210448 - DNA, 25 bp, Homo sapien
gggatccagggaatccggcagttcc

SEQ ID NO: 5210449 - DNA, 25 bp, Homo sapien
accaggggatccagggaatccggca

SEQ ID NO: 5210450 - DNA, 25 bp, Homo sapien
gatccagggaatccggcagttccag

SEQ ID NO: 5210451 - DNA, 25 bp, Homo sapien
gggcaccatttgaaccaggagaccc

SEQ ID NO: 5210452 - DNA, 25 bp, Homo sapien
caccatttgaaccaggagaccctgc

SEQ ID NO: 5210453 - DNA, 25 bp, Homo sapien
catttgaaccaggagaccctgcagg

SEQ ID NO: 5210454 - DNA, 25 bp, Homo sapien
gcaccatttgaaccaggagaccctg

SEQ ID NO: 5210455 - DNA, 25 bp, Homo sapien
accaggactaccattaatcccagga

SEQ ID NO: 5210456 - DNA, 25 bp, Homo sapien
caggactaccattaatcccaggagg

SEQ ID NO: 5210457 - DNA, 25 bp, Homo sapien
gactaccattaatcccaggagggcc

SEQ ID NO: 5210458 - DNA, 25 bp, Homo sapien
catttcgcctttaccaccaggacta

SEQ ID NO: 5210459 - DNA, 25 bp, Homo sapien
tggaggaccccgggctcccatcagt

SEQ ID NO: 5210460 - DNA, 25 bp, Homo sapien
tgcaccacctcgcagtccaggagca

SEQ ID NO: 5210461 - DNA, 25 bp, Homo sapien
ccaggagcaccattagcaccggctg

SEQ ID NO: 5210462 - DNA, 25 bp, Homo sapien
agtccaggagcaccattagcaccgg

SEQ ID NO: 5210463 - DNA, 25 bp, Homo sapien
gttcaccacgtggtccgggctctcc

SEQ ID NO: 5210464 - DNA, 25 bp, Homo sapien
tcaccacgtggtccgggctctcctt

SEQ ID NO: 5210465 - DNA, 25 bp, Homo sapien
cgttcaccacgtggtccgggctctc

SEQ ID NO: 5210466 - DNA, 25 bp, Homo sapien
gcgttcaccacgtggtccgggctct

SEQ ID NO: 5210467 - DNA, 25 bp, Homo sapien
tgccatcttcgcctttagctcctgg

SEQ ID NO: 5210468 - DNA, 25 bp, Homo sapien
ctggaacacctggaataccagcctc

SEQ ID NO: 5210469 - DNA, 25 bp, Homo sapien
atccttgccatcttcgcctttagct

SEQ ID NO: 5210470 - DNA, 25 bp, Homo sapien
ggaacacctggaataccagcctcac

SEQ ID NO: 5210471 - DNA, 25 bp, Homo sapien
gcaggtcctcggaacccaggggcac

SEQ ID NO: 5210472 - DNA, 25 bp, Homo sapien
gggatgccatttggtccagcaggtc

SEQ ID NO: 5210473 - DNA, 25 bp, Homo sapien
tgccatttggtccagcaggtcctcg

SEQ ID NO: 5210474 - DNA, 25 bp, Homo sapien
tttctcctgggatgccatttggtcc

SEQ ID NO: 5210475 - DNA, 25 bp, Homo sapien
ctggagcaccacgctctccagcagg

SEQ ID NO: 5210476 - DNA, 25 bp, Homo sapien
ggaggccctggtttcccatcacttc

SEQ ID NO: 5210477 - DNA, 25 bp, Homo sapien
gaggacctggtcgaccactttctcc

SEQ ID NO: 5210478 - DNA, 25 bp, Homo sapien
tttaggaccggggaagcccatgaca

SEQ ID NO: 5210479 - DNA, 25 bp, Homo sapien
acctggtcgaccactttctccttga

SEQ ID NO: 5210480 - DNA, 25 bp, Homo sapien
cccaggaggacctggtcgaccactt

SEQ ID NO: 5210481 - DNA, 25 bp, Homo sapien
ggagactgagttttgaccatttctt

SEQ ID NO: 5210482 - DNA, 25 bp, Homo sapien
gggccacctcgttctccattcttac

SEQ ID NO: 5210483 - DNA, 25 bp, Homo sapien
agggccacctcgttctccattctta

SEQ ID NO: 5210484 - DNA, 25 bp, Homo sapien
ggccacctcgttctccattcttacc

SEQ ID NO: 5210485 - DNA, 25 bp, Homo sapien
gccacctcgttctccattcttacca

SEQ ID NO: 5210486 - DNA, 25 bp, Homo sapien
tgaggtccagtttcaccattctttc

SEQ ID NO: 5210487 - DNA, 25 bp, Homo sapien
cctgaggtccagtttcaccattctt

SEQ ID NO: 5210488 - DNA, 25 bp, Homo sapien
gtccctgaggtccagtttcaccatt

SEQ ID NO: 5210489 - DNA, 25 bp, Homo sapien
tccctgaggtccagtttcaccattc

SEQ ID NO: 5210490 - DNA, 25 bp, Homo sapien
ctgtgtctcctttgtcaccaccagg

SEQ ID NO: 5210491 - DNA, 25 bp, Homo sapien
ggtcctgtgtctcctttgtcaccac

SEQ ID NO: 5210492 - DNA, 25 bp, Homo sapien
tgtaatccttgtggaccagggggtc

SEQ ID NO: 5210493 - DNA, 25 bp, Homo sapien
ccagggggtcctgtgtctcctttgt

SEQ ID NO: 5210494 - DNA, 25 bp, Homo sapien
tctcctggaggaccacctgtaccag

SEQ ID NO: 5210495 - DNA, 25 bp, Homo sapien
gaggaccacctgtaccaggcaagcc

SEQ ID NO: 5210496 - DNA, 25 bp, Homo sapien
tggaggaccacctgtaccaggcaag

SEQ ID NO: 5210497 - DNA, 25 bp, Homo sapien
tcctggaggaccacctgtaccaggc

SEQ ID NO: 5210498 - DNA, 25 bp, Homo sapien
tccaggtgcaccggcatcacccttt

SEQ ID NO: 5210499 - DNA, 25 bp, Homo sapien
gtgcaccggcatcaccctttggacc

SEQ ID NO: 5210500 - DNA, 25 bp, Homo sapien
aggtgcaccggcatcaccctttgga

SEQ ID NO: 5210501 - DNA, 25 bp, Homo sapien
caggtgcaccggcatcaccctttgg

SEQ ID NO: 5210502 - DNA, 25 bp, Homo sapien
ggaggtccacgttcaccaggggcac

SEQ ID NO: 5210503 - DNA, 25 bp, Homo sapien
aggaggtccacgttcaccaggggca

SEQ ID NO: 5210504 - DNA, 25 bp, Homo sapien
caggaggtccacgttcaccaggggc

SEQ ID NO: 5210505 - DNA, 25 bp, Homo sapien
ctttggaccaggacttccaagacct

SEQ ID NO: 5210506 - DNA, 25 bp, Homo sapien
tttggaccaggacttccaagacctc

SEQ ID NO: 5210507 - DNA, 25 bp, Homo sapien
ttggaccaggacttccaagacctcc

SEQ ID NO: 5210508 - DNA, 25 bp, Homo sapien
ccatcagcacctggaccgcctggtt

SEQ ID NO: 5210509 - DNA, 25 bp, Homo sapien
tgggacaccatcagcacctggaccg

SEQ ID NO: 5210510 - DNA, 25 bp, Homo sapien
gacaccatcagcacctggaccgcct

SEQ ID NO: 5210511 - DNA, 25 bp, Homo sapien
gggacaccatcagcacctggaccgc

SEQ ID NO: 5210512 - DNA, 25 bp, Homo sapien
gccaggaggaccaataggaccagta

SEQ ID NO: 5210513 - DNA, 25 bp, Homo sapien
gaggaccaataggaccagtaggacc

SEQ ID NO: 5210514 - DNA, 25 bp, Homo sapien
ctgggccaggaggaccaataggacc

SEQ ID NO: 5210515 - DNA, 25 bp, Homo sapien
ggaggaccaataggaccagtaggac

SEQ ID NO: 5210516 - DNA, 25 bp, Homo sapien
gtccagctatacctggaagtccggg

SEQ ID NO: 5210517 - DNA, 25 bp, Homo sapien
cacgaggtccagctatacctggaag

SEQ ID NO: 5210518 - DNA, 25 bp, Homo sapien
taccacgaggtccagctatacctgg

SEQ ID NO: 5210519 - DNA, 25 bp, Homo sapien
agggctaccacgaggtccagctata

SEQ ID NO: 5210520 - DNA, 25 bp, Homo sapien
cctggagggccagtttcacctctct

SEQ ID NO: 5210521 - DNA, 25 bp, Homo sapien
ggagggccagtttcacctctctcac

SEQ ID NO: 5210522 - DNA, 25 bp, Homo sapien
accagggaaaccagcaggtcctgga

SEQ ID NO: 5210523 - DNA, 25 bp, Homo sapien
gtcctggagggccagtttcacctct

SEQ ID NO: 5210524 - DNA, 25 bp, Homo sapien
tctcctttaccaccaggttcaccat

SEQ ID NO: 5210525 - DNA, 25 bp, Homo sapien
ttaccaccaggttcaccattctgtc

SEQ ID NO: 5210526 - DNA, 25 bp, Homo sapien
cacctttctcacccggagcccctct

SEQ ID NO: 5210527 - DNA, 25 bp, Homo sapien
caggagggcctccttcacctttctc

SEQ ID NO: 5210528 - DNA, 25 bp, Homo sapien
gattgctggtgctgagattcatact

SEQ ID NO: 5210529 - DNA, 25 bp, Homo sapien
gaaaaccaggaactctatgaagagg

SEQ ID NO: 5210530 - DNA, 25 bp, Homo sapien
tcttgacactatgacatgctatctc

SEQ ID NO: 5210531 - DNA, 25 bp, Homo sapien
tagaacacttaggacttacagaggg

SEQ ID NO: 5210532 - DNA, 25 bp, Homo sapien
caggactgccacgttcacctttgac

SEQ ID NO: 5210533 - DNA, 25 bp, Homo sapien
cacctttgacaccttggggaccagg

SEQ ID NO: 5210534 - DNA, 25 bp, Homo sapien
ccaccaggactgccacgttcacctt

SEQ ID NO: 5210535 - DNA, 25 bp, Homo sapien
ggactgccacgttcacctttgacac

SEQ ID NO: 5210536 - DNA, 25 bp, Homo sapien
tataactcatgtatgaatgagcgat

SEQ ID NO: 5210537 - DNA, 25 bp, Homo sapien
aagtataatgtgtggcatgatctgc

SEQ ID NO: 5210538 - DNA, 25 bp, Homo sapien
tggaactagtgtctcaaatgcagct

SEQ ID NO: 5210539 - DNA, 25 bp, Homo sapien
catgatctgcattgtacctgaaagt

SEQ ID NO: 5210540 - DNA, 25 bp, Homo sapien
tgaatttcaaaagtagaacaaataa

SEQ ID NO: 5210541 - DNA, 25 bp, Homo sapien
tggtaatatatttttgaatttcaaa

SEQ ID NO: 5210542 - DNA, 25 bp, Homo sapien
ttgaatttcaaaagtagaacaaata

SEQ ID NO: 5210543 - DNA, 25 bp, Homo sapien
ctgtgaaatggtaatatatttttga

SEQ ID NO: 5210544 - DNA, 25 bp, Homo sapien
ggaagaccacgagcaccagggaagc

SEQ ID NO: 5210545 - DNA, 25 bp, Homo sapien
ctctttctgaagtgtatgatgagaa

SEQ ID NO: 5210546 - DNA, 25 bp, Homo sapien
gtttctcatcctatacatacatgaa

SEQ ID NO: 5210547 - DNA, 25 bp, Homo sapien
cctatacatacatgaatgctctttc

SEQ ID NO: 5210548 - DNA, 25 bp, Homo sapien
tgagacttactagagaaataagtag

SEQ ID NO: 5210549 - DNA, 25 bp, Homo sapien
gcaccagtgttacccgcaggacctg

SEQ ID NO: 5210550 - DNA, 25 bp, Homo sapien
caccttttggtccagacactccagg

SEQ ID NO: 5210551 - DNA, 25 bp, Homo sapien
atccttgcctggagaaccgctggga

SEQ ID NO: 5210552 - DNA, 25 bp, Homo sapien
tgccaggagcaccagtgttacccgc

SEQ ID NO: 5210553 - DNA, 25 bp, Homo sapien
gtgatcccagcaatcccaagtgggc

SEQ ID NO: 5210554 - DNA, 25 bp, Homo sapien
ctgcaagaccccgtgctccagtgat

SEQ ID NO: 5210555 - DNA, 25 bp, Homo sapien
ccagtgatcccagcaatcccaagtg

SEQ ID NO: 5210556 - DNA, 25 bp, Homo sapien
tgcaagaccccgtgctccagtgatc

SEQ ID NO: 5210557 - DNA, 25 bp, Homo sapien
cagggcttcccctaggacctggcat

SEQ ID NO: 5210558 - DNA, 25 bp, Homo sapien
ccacgttctccactgagaccgttag

SEQ ID NO: 5210559 - DNA, 25 bp, Homo sapien
gctgtaccagccagaccaggaagac

SEQ ID NO: 5210560 - DNA, 25 bp, Homo sapien
caggttcaccagctgtaccagccag

SEQ ID NO: 5210561 - DNA, 25 bp, Homo sapien
gagaccgttagctcctggtttccca

SEQ ID NO: 5210562 - DNA, 25 bp, Homo sapien
ctggctggttgaataaaaactgcta

SEQ ID NO: 5210563 - DNA, 25 bp, Homo sapien
tggctggttgaataaaaactgctac

SEQ ID NO: 5210564 - DNA, 25 bp, Homo sapien
gctggttgaataaaaactgctactc

SEQ ID NO: 5210565 - DNA, 25 bp, Homo sapien
tggttgaataaaaactgctactcac

SEQ ID NO: 5210566 - DNA, 25 bp, Homo sapien
ttgctgaaataaattatcaaattct

SEQ ID NO: 5210567 - DNA, 25 bp, Homo sapien
gctgaaataaattatcaaattctac

SEQ ID NO: 5210568 - DNA, 25 bp, Homo sapien
ctttgctgaaataaattatcaaatt

SEQ ID NO: 5210569 - DNA, 25 bp, Homo sapien
tgctgaaataaattatcaaattcta

SEQ ID NO: 5210570 - DNA, 25 bp, Homo sapien
cttgccaccaggagatccatctcgg

SEQ ID NO: 5210571 - DNA, 25 bp, Homo sapien
gcctggaagaccatctgatccaggg

SEQ ID NO: 5210572 - DNA, 25 bp, Homo sapien
ttgccaccaggagatccatctcggc

SEQ ID NO: 5210573 - DNA, 25 bp, Homo sapien
tggaagaccatctgatccagggttt

SEQ ID NO: 5210574 - DNA, 25 bp, Homo sapien
gctggaccgacaggaccaggtgggc

SEQ ID NO: 5210575 - DNA, 25 bp, Homo sapien
gcaggaccgggagcaccagcagggc

SEQ ID NO: 5210576 - DNA, 25 bp, Homo sapien
ggaaccagcaggaccgggagcacca

SEQ ID NO: 5210577 - DNA, 25 bp, Homo sapien
ctcgggaaccagcaggaccgggagc

SEQ ID NO: 5210578 - DNA, 25 bp, Homo sapien
ccagcaggaccgggagcaccagcag

SEQ ID NO: 5210579 - DNA, 25 bp, Homo sapien
ccacgttcacctgtttcacctttgt

SEQ ID NO: 5210580 - DNA, 25 bp, Homo sapien
tggattaccagggaatcctcgatgt

SEQ ID NO: 5210581 - DNA, 25 bp, Homo sapien
cgttcacctgtttcacctttgtcac

SEQ ID NO: 5210582 - DNA, 25 bp, Homo sapien
tcgatgtcctttgatgccagcagct

SEQ ID NO: 5210583 - DNA, 25 bp, Homo sapien
gtcctggactgccgattgcaccctg

SEQ ID NO: 5210584 - DNA, 25 bp, Homo sapien
ctggactgccgattgcaccctgctg

SEQ ID NO: 5210585 - DNA, 25 bp, Homo sapien
tcctggactgccgattgcaccctgc

SEQ ID NO: 5210586 - DNA, 25 bp, Homo sapien
aggtcctggactgccgattgcaccc

SEQ ID NO: 5210587 - DNA, 25 bp, Homo sapien
tgtaatatctttctgtgctacttac

SEQ ID NO: 5210588 - DNA, 25 bp, Homo sapien
ctgtaatatctttctgtgctactta

SEQ ID NO: 5210589 - DNA, 25 bp, Homo sapien
tatcatgacatcacaatgccagaat

SEQ ID NO: 5210590 - DNA, 25 bp, Homo sapien
tcatgacatcacaatgccagaatat

SEQ ID NO: 5210591 - DNA, 25 bp, Homo sapien
tgacatcacaatgccagaatatctt

SEQ ID NO: 5210592 - DNA, 25 bp, Homo sapien
aagtatcatgacatcacaatgccag

SEQ ID NO: 5210593 - DNA, 25 bp, Homo sapien
aggccctggtggtccaatgggacct

SEQ ID NO: 5210594 - DNA, 25 bp, Homo sapien
ctctgttacctcgaggccctggtgg

SEQ ID NO: 5210595 - DNA, 25 bp, Homo sapien
ctgttacctcgaggccctggtggtc

SEQ ID NO: 5210596 - DNA, 25 bp, Homo sapien
ggccctggtggtccaatgggacctg

SEQ ID NO: 5210597 - DNA, 25 bp, Homo sapien
gatgactgatgtaagcaaacacctg

SEQ ID NO: 5210598 - DNA, 25 bp, Homo sapien
ctctagtgggatagcaatgtggaca

SEQ ID NO: 5210599 - DNA, 25 bp, Homo sapien
tgaggtatgcacattcagtcgccac

SEQ ID NO: 5210600 - DNA, 25 bp, Homo sapien
gcctttagggtcacgtgatcaccga

SEQ ID NO: 5210601 - DNA, 25 bp, Homo sapien
cacagcaaggaccaggggcaccagg

SEQ ID NO: 5210602 - DNA, 25 bp, Homo sapien
caggagggcctggttgccctgggtg

SEQ ID NO: 5210603 - DNA, 25 bp, Homo sapien
acagcaaggaccaggggcaccagga

SEQ ID NO: 5210604 - DNA, 25 bp, Homo sapien
gtccaggagggcctggttgccctgg

SEQ ID NO: 5210605 - DNA, 25 bp, Homo sapien
cccagcaatggcagcggctccaaca

SEQ ID NO: 5210606 - DNA, 25 bp, Homo sapien
ccagcaatggcagcggctccaacac

SEQ ID NO: 5210607 - DNA, 25 bp, Homo sapien
agcaatggcagcggctccaacacca

SEQ ID NO: 5210608 - DNA, 25 bp, Homo sapien
gcaatggcagcggctccaacaccac

SEQ ID NO: 5210609 - DNA, 25 bp, Homo sapien
tgtccattaacagacttgagtgaag

SEQ ID NO: 5210610 - DNA, 25 bp, Homo sapien
gttcaggatggcagaatttcaggtc

SEQ ID NO: 5210611 - DNA, 25 bp, Homo sapien
gagtgaagtcataatctcatcggtg

SEQ ID NO: 5210612 - DNA, 25 bp, Homo sapien
ccatcaggactaatgaggctttcta

SEQ ID NO: 5210613 - DNA, 25 bp, Homo sapien
ggttgtctaacctagatttgttcca

SEQ ID NO: 5210614 - DNA, 25 bp, Homo sapien
ccaatagttctaaagctgaaatccc

SEQ ID NO: 5210615 - DNA, 25 bp, Homo sapien
tccctatgattgatgcttgtctcct

SEQ ID NO: 5210616 - DNA, 25 bp, Homo sapien
gaaatgactcctagcaaaggcagtg

SEQ ID NO: 5210617 - DNA, 25 bp, Homo sapien
tggttagggtcaacccagtattctc

SEQ ID NO: 5210618 - DNA, 25 bp, Homo sapien
tattacagaataccttgatagcatc

SEQ ID NO: 5210619 - DNA, 25 bp, Homo sapien
ttccatattacagaataccttgata

SEQ ID NO: 5210620 - DNA, 25 bp, Homo sapien
tacagaataccttgatagcatccaa

SEQ ID NO: 5210621 - DNA, 25 bp, Homo sapien
catattacagaataccttgatagca

SEQ ID NO: 5210622 - DNA, 25 bp, Homo sapien
actagaatctgtccaccagtgtttc

SEQ ID NO: 5210623 - DNA, 25 bp, Homo sapien
catggactctccaaaccaaacgtgt

SEQ ID NO: 5210624 - DNA, 25 bp, Homo sapien
ctgaaaaccaccatccatggactct

SEQ ID NO: 5210625 - DNA, 25 bp, Homo sapien
ccagtgtttccgtggaacattcaaa

SEQ ID NO: 5210626 - DNA, 25 bp, Homo sapien
gcaattatgtttgtaccaacctagt

SEQ ID NO: 5210627 - DNA, 25 bp, Homo sapien
ctgcacgcgagggattcatgtagta

SEQ ID NO: 5210628 - DNA, 25 bp, Homo sapien
acaaaggatatagaggtgacttatt

SEQ ID NO: 5210629 - DNA, 25 bp, Homo sapien
tgtgatgaacatataggaagaatac

SEQ ID NO: 5210630 - DNA, 25 bp, Homo sapien
aacagatcaaacatttcagttgtaa

SEQ ID NO: 5210631 - DNA, 25 bp, Homo sapien
ctgtaatagggaacaaataaaacag

SEQ ID NO: 5210632 - DNA, 25 bp, Homo sapien
tgtaatagggaacaaataaaacaga

SEQ ID NO: 5210633 - DNA, 25 bp, Homo sapien
aataaaacagatcaaacatttcagt

SEQ ID NO: 5210634 - DNA, 25 bp, Homo sapien
tatgtgatgttctgggaagctcggc

SEQ ID NO: 5210635 - DNA, 25 bp, Homo sapien
tgccagatgcacatcaaggacatct

SEQ ID NO: 5210636 - DNA, 25 bp, Homo sapien
cactggcctgatccatgtatgcaat

SEQ ID NO: 5210637 - DNA, 25 bp, Homo sapien
ctggagagaagtcgaaggaatgcca

SEQ ID NO: 5210638 - DNA, 25 bp, Homo sapien
gaatttgctatttccttcagccttg

SEQ ID NO: 5210639 - DNA, 25 bp, Homo sapien
tcctccagaactgtgtaggtgaatt

SEQ ID NO: 5210640 - DNA, 25 bp, Homo sapien
gctatttccttcagccttgaattca

SEQ ID NO: 5210641 - DNA, 25 bp, Homo sapien
actgtgtaggtgaatttgctatttc

SEQ ID NO: 5210642 - DNA, 25 bp, Homo sapien
tttatgacctatattgagaaaaatg

SEQ ID NO: 5210643 - DNA, 25 bp, Homo sapien
tgctttatgacctatattgagaaaa

SEQ ID NO: 5210644 - DNA, 25 bp, Homo sapien
ctttatgacctatattgagaaaaat

SEQ ID NO: 5210645 - DNA, 25 bp, Homo sapien
gctttatgacctatattgagaaaaa

SEQ ID NO: 5210646 - DNA, 25 bp, Homo sapien
gctatagaccagtgcatcctcagga

SEQ ID NO: 5210647 - DNA, 25 bp, Homo sapien
tgagacctgctctacttcaaagctg

SEQ ID NO: 5210648 - DNA, 25 bp, Homo sapien
tggttccggccattgctaacaggtt

SEQ ID NO: 5210649 - DNA, 25 bp, Homo sapien
taaagaagcattcatcgtgccatgt

SEQ ID NO: 5210650 - DNA, 25 bp, Homo sapien
accaaattcttgatcaggaccacca

SEQ ID NO: 5210651 - DNA, 25 bp, Homo sapien
ggaccaccaatgtcatagggtgcaa

SEQ ID NO: 5210652 - DNA, 25 bp, Homo sapien
caataggtagtctcacagccttgcg

SEQ ID NO: 5210653 - DNA, 25 bp, Homo sapien
cagccttgcgtgttcgatattcaaa

SEQ ID NO: 5210654 - DNA, 25 bp, Homo sapien
ctggttgacaagattagaacaagag

SEQ ID NO: 5210655 - DNA, 25 bp, Homo sapien
tgtcggtcacttgcactggttgaca

SEQ ID NO: 5210656 - DNA, 25 bp, Homo sapien
tttattatagcaccattgagacatt

SEQ ID NO: 5210657 - DNA, 25 bp, Homo sapien
ttgaattgtatttggtggaacagca

SEQ ID NO: 5210658 - DNA, 25 bp, Homo sapien
aaaaagaggagcacctttacaagca

SEQ ID NO: 5210659 - DNA, 25 bp, Homo sapien
ttactggtgagcacagtcattgctc

SEQ ID NO: 5210660 - DNA, 25 bp, Homo sapien
tgggactcatagaatacaatctgtg

SEQ ID NO: 5210661 - DNA, 25 bp, Homo sapien
tacattagcaccataacatgcgtct

SEQ ID NO: 5210662 - DNA, 25 bp, Homo sapien
ggaggagaatcccctgtggcatgcc

SEQ ID NO: 5210663 - DNA, 25 bp, Homo sapien
cctgtggcatgccaatgaatctttc

SEQ ID NO: 5210664 - DNA, 25 bp, Homo sapien
gaggagaatcccctgtggcatgcca

SEQ ID NO: 5210665 - DNA, 25 bp, Homo sapien
tgtgacaaaagcagccccataattt

SEQ ID NO: 5210666 - DNA, 25 bp, Homo sapien
aaaaaagatcaacaaccacatacaa

SEQ ID NO: 5210667 - DNA, 25 bp, Homo sapien
ccacatacaagcttacaaagttaaa

SEQ ID NO: 5210668 - DNA, 25 bp, Homo sapien
acaaccacatacaagcttacaaagt

SEQ ID NO: 5210669 - DNA, 25 bp, Homo sapien
tcaagattactggagttccttaatg

SEQ ID NO: 5210670 - DNA, 25 bp, Homo sapien
ggagttccttaatgtagacgtgcat

SEQ ID NO: 5210671 - DNA, 25 bp, Homo sapien
gcattattaatctatagagttagaa

SEQ ID NO: 5210672 - DNA, 25 bp, Homo sapien
tactttttcaagattactggagttc

SEQ ID NO: 5210673 - DNA, 25 bp, Homo sapien
tgagtattgggatcaataacacaca

SEQ ID NO: 5210674 - DNA, 25 bp, Homo sapien
actctctgtgatacattaagttaca

SEQ ID NO: 5210675 - DNA, 25 bp, Homo sapien
ggtgagaatacttactctcttcgca

SEQ ID NO: 5210676 - DNA, 25 bp, Homo sapien
tatatatgcagtatctcaggttctc

SEQ ID NO: 5210677 - DNA, 25 bp, Homo sapien
tgtaggtccccttgtgtctcaatac

SEQ ID NO: 5210678 - DNA, 25 bp, Homo sapien
tgttcctctgtcatactgtatctgg

SEQ ID NO: 5210679 - DNA, 25 bp, Homo sapien
tgaaagaaagagcatcgttccaatg

SEQ ID NO: 5210680 - DNA, 25 bp, Homo sapien
tccaagactggagataggcagggct

SEQ ID NO: 5210681 - DNA, 25 bp, Homo sapien
gaattcggcgttgaaattgggccag

SEQ ID NO: 5210682 - DNA, 25 bp, Homo sapien
taaagtaagccaagacacatcgaca

SEQ ID NO: 5210683 - DNA, 25 bp, Homo sapien
gaacacagaatgtggcacgcttgcc

SEQ ID NO: 5210684 - DNA, 25 bp, Homo sapien
tgttggcggcacagaccaggaattc

SEQ ID NO: 5210685 - DNA, 25 bp, Homo sapien
tgaaaacattcagggaggactttga

SEQ ID NO: 5210686 - DNA, 25 bp, Homo sapien
gaaatgctggacaatgaagagtatg

SEQ ID NO: 5210687 - DNA, 25 bp, Homo sapien
gttgacttgaggatgatacaaagct

SEQ ID NO: 5210688 - DNA, 25 bp, Homo sapien
catgaaaactccatagaaatgctgg

SEQ ID NO: 5210689 - DNA, 25 bp, Homo sapien
gaaggctcacaatgtacagcatggt

SEQ ID NO: 5210690 - DNA, 25 bp, Homo sapien
tcaaacagtacggaaggctcacaat

SEQ ID NO: 5210691 - DNA, 25 bp, Homo sapien
catcaaacagtacggaaggctcaca

SEQ ID NO: 5210692 - DNA, 25 bp, Homo sapien
cagtacggaaggctcacaatgtaca

SEQ ID NO: 5210693 - DNA, 25 bp, Homo sapien
gatcatatgcctaggaactcttgcc

SEQ ID NO: 5210694 - DNA, 25 bp, Homo sapien
gcagtgccccaagagattggccata

SEQ ID NO: 5210695 - DNA, 25 bp, Homo sapien
gcatgtaggtgcaaagcagtgcccc

SEQ ID NO: 5210696 - DNA, 25 bp, Homo sapien
cactatggatgttacttgcaggcat

SEQ ID NO: 5210697 - DNA, 25 bp, Homo sapien
atgcctcttgtcaaggtgccttata

SEQ ID NO: 5210698 - DNA, 25 bp, Homo sapien
gtggcattaataggctcaactaatt

SEQ ID NO: 5210699 - DNA, 25 bp, Homo sapien
caggtgtattgctgtgggcagctac

SEQ ID NO: 5210700 - DNA, 25 bp, Homo sapien
ggcagctacatcaggtactgtggca

SEQ ID NO: 5210701 - DNA, 25 bp, Homo sapien
attgttcatccgatcaatgtatgaa

SEQ ID NO: 5210702 - DNA, 25 bp, Homo sapien
tgttcatccgatcaatgtatgaaga

SEQ ID NO: 5210703 - DNA, 25 bp, Homo sapien
ttcattgttcatccgatcaatgtat

SEQ ID NO: 5210704 - DNA, 25 bp, Homo sapien
ccttcattgttcatccgatcaatgt

SEQ ID NO: 5210705 - DNA, 25 bp, Homo sapien
cttctcccagatctttctggaatac

SEQ ID NO: 5210706 - DNA, 25 bp, Homo sapien
ctagactcggaaaatccaattttgg

SEQ ID NO: 5210707 - DNA, 25 bp, Homo sapien
tcaagtctgcctagactcggaaaat

SEQ ID NO: 5210708 - DNA, 25 bp, Homo sapien
tctgtattcttgtactccaatgtgc

SEQ ID NO: 5210709 - DNA, 25 bp, Homo sapien
caattttggcaaactgatgtctgta

SEQ ID NO: 5210710 - DNA, 25 bp, Homo sapien
ccctggggtattagttaaggcatgt

SEQ ID NO: 5210711 - DNA, 25 bp, Homo sapien
tcagagaggagataaagcttctctt

SEQ ID NO: 5210712 - DNA, 25 bp, Homo sapien
cagagaggagataaagcttctcttc

SEQ ID NO: 5210713 - DNA, 25 bp, Homo sapien
ggtattagttaaggcatgtagatgg

SEQ ID NO: 5210714 - DNA, 25 bp, Homo sapien
tatgtaaatgcatcatgtgttgtgt

SEQ ID NO: 5210715 - DNA, 25 bp, Homo sapien
gatgtcagagtttagcagcgtgcct

SEQ ID NO: 5210716 - DNA, 25 bp, Homo sapien
gttgtgttatgctgtttagccacag

SEQ ID NO: 5210717 - DNA, 25 bp, Homo sapien
atgtttttggtgagaagggatgtca

SEQ ID NO: 5210718 - DNA, 25 bp, Homo sapien
aagctgcatcgcttgaaaaaagttt

SEQ ID NO: 5210719 - DNA, 25 bp, Homo sapien
ttaaagctgcatcgcttgaaaaaag

SEQ ID NO: 5210720 - DNA, 25 bp, Homo sapien
gttttcgcagactgtgctggagctg

SEQ ID NO: 5210721 - DNA, 25 bp, Homo sapien
tgaaaaaagttttcgcagactgtgc

SEQ ID NO: 5210722 - DNA, 25 bp, Homo sapien
tttggttgtttaccatcaatcagac

SEQ ID NO: 5210723 - DNA, 25 bp, Homo sapien
tcaggcacagagacgcgtgttctga

SEQ ID NO: 5210724 - DNA, 25 bp, Homo sapien
cactggatggttatgagcctgaaca

SEQ ID NO: 5210725 - DNA, 25 bp, Homo sapien
caatcagaccgttgcttggcagaca

SEQ ID NO: 5210726 - DNA, 25 bp, Homo sapien
gagaaatggtggcttgatgttgacc

SEQ ID NO: 5210727 - DNA, 25 bp, Homo sapien
gttgagaaatggtggcttgatgttg

SEQ ID NO: 5210728 - DNA, 25 bp, Homo sapien
gaaatggtggcttgatgttgaccat

SEQ ID NO: 5210729 - DNA, 25 bp, Homo sapien
ttgagaaatggtggcttgatgttga

SEQ ID NO: 5210730 - DNA, 25 bp, Homo sapien
gcatacagctgtgttcctatttgca

SEQ ID NO: 5210731 - DNA, 25 bp, Homo sapien
gccgatacattgcaactttgggtat

SEQ ID NO: 5210732 - DNA, 25 bp, Homo sapien
tatcaaaatggcactttgttctgta

SEQ ID NO: 5210733 - DNA, 25 bp, Homo sapien
gttcctatttgcacagactccacat

SEQ ID NO: 5210734 - DNA, 25 bp, Homo sapien
tcatgttgtccctcactgctcagtg

SEQ ID NO: 5210735 - DNA, 25 bp, Homo sapien
tttcttcatgttgtccctcactgct

SEQ ID NO: 5210736 - DNA, 25 bp, Homo sapien
gcaatttcttcatgttgtccctcac

SEQ ID NO: 5210737 - DNA, 25 bp, Homo sapien
ttcacctaattttgcaatttcttca

SEQ ID NO: 5210738 - DNA, 25 bp, Homo sapien
aacctgaactggcacctttcctgga

SEQ ID NO: 5210739 - DNA, 25 bp, Homo sapien
ctggcacctttcctggataggagga

SEQ ID NO: 5210740 - DNA, 25 bp, Homo sapien
tgtagaacaaacctgaactggcacc

SEQ ID NO: 5210741 - DNA, 25 bp, Homo sapien
tctttcaattctgtagaacaaacct

SEQ ID NO: 5210742 - DNA, 25 bp, Homo sapien
tgctgctatctctcgtaccacaaaa

SEQ ID NO: 5210743 - DNA, 25 bp, Homo sapien
tacccaatagcagccttattaggct

SEQ ID NO: 5210744 - DNA, 25 bp, Homo sapien
tcctgttgtatcaaaggtcttgaga

SEQ ID NO: 5210745 - DNA, 25 bp, Homo sapien
tttggatcctagagttgctgctatc

SEQ ID NO: 5210746 - DNA, 25 bp, Homo sapien
gatctgtagtcagctttcccaagat

SEQ ID NO: 5210747 - DNA, 25 bp, Homo sapien
tgtagtcagctttcccaagatcatc

SEQ ID NO: 5210748 - DNA, 25 bp, Homo sapien
tctgtagtcagctttcccaagatca

SEQ ID NO: 5210749 - DNA, 25 bp, Homo sapien
ctgtagtcagctttcccaagatcat

SEQ ID NO: 5210750 - DNA, 25 bp, Homo sapien
tgactccatgagtaaccagcaaggg

SEQ ID NO: 5210751 - DNA, 25 bp, Homo sapien
tccaacccatcaaaatagtgcagac

SEQ ID NO: 5210752 - DNA, 25 bp, Homo sapien
tagtgcagactttgatgtcaggaaa

SEQ ID NO: 5210753 - DNA, 25 bp, Homo sapien
ggattgttcatcactcacttggctt

SEQ ID NO: 5210754 - DNA, 25 bp, Homo sapien
tgacagaaacgtttcctccatctca

SEQ ID NO: 5210755 - DNA, 25 bp, Homo sapien
agaaacgtttcctccatctcaatct

SEQ ID NO: 5210756 - DNA, 25 bp, Homo sapien
gacagaaacgtttcctccatctcaa

SEQ ID NO: 5210757 - DNA, 25 bp, Homo sapien
cagaaacgtttcctccatctcaatc

SEQ ID NO: 5210758 - DNA, 25 bp, Homo sapien
gccaggggcccaggcaggggcacag

SEQ ID NO: 5210759 - DNA, 25 bp, Homo sapien
tgccaggggcccaggcaggggcaca

SEQ ID NO: 5210760 - DNA, 25 bp, Homo sapien
ctgccaggggcccaggcaggggcac

SEQ ID NO: 5210761 - DNA, 25 bp, Homo sapien
caggggcccaggcaggggcacagca

SEQ ID NO: 5210762 - DNA, 25 bp, Homo sapien
ttcctaggttgagcaagaaatctgt

SEQ ID NO: 5210763 - DNA, 25 bp, Homo sapien
tcctggcatgcctcaacaacatttg

SEQ ID NO: 5210764 - DNA, 25 bp, Homo sapien
tgaatgttgtatgccacagggcctg

SEQ ID NO: 5210765 - DNA, 25 bp, Homo sapien
gaggtggtttgcttcccaaattggc

SEQ ID NO: 5210766 - DNA, 25 bp, Homo sapien
gatgagcttccatgaatcttggggt

SEQ ID NO: 5210767 - DNA, 25 bp, Homo sapien
tgagcttccatgaatcttggggtca

SEQ ID NO: 5210768 - DNA, 25 bp, Homo sapien
gagcttccatgaatcttggggtcat

SEQ ID NO: 5210769 - DNA, 25 bp, Homo sapien
tgatgagcttccatgaatcttgggg

SEQ ID NO: 5210770 - DNA, 25 bp, Homo sapien
cttccaagtcgctgatcctgtgtcc

SEQ ID NO: 5210771 - DNA, 25 bp, Homo sapien
ttccaagtcgctgatcctgtgtcca

SEQ ID NO: 5210772 - DNA, 25 bp, Homo sapien
tccaagtcgctgatcctgtgtccat

SEQ ID NO: 5210773 - DNA, 25 bp, Homo sapien
gggctgtcccgcctctggctgtagc

SEQ ID NO: 5210774 - DNA, 25 bp, Homo sapien
tctggctgtagctcctcaaggacat

SEQ ID NO: 5210775 - DNA, 25 bp, Homo sapien
cagggctgtcccgcctctggctgta

SEQ ID NO: 5210776 - DNA, 25 bp, Homo sapien
agggctgtcccgcctctggctgtag

SEQ ID NO: 5210777 - DNA, 25 bp, Homo sapien
ttagatcagggttgttgggcaagaa

SEQ ID NO: 5210778 - DNA, 25 bp, Homo sapien
tcccagctctttaggtggtttgaca

SEQ ID NO: 5210779 - DNA, 25 bp, Homo sapien
ggtggtttgacaggaccaactccag

SEQ ID NO: 5210780 - DNA, 25 bp, Homo sapien
cccagctctttaggtggtttgacag

SEQ ID NO: 5210781 - DNA, 25 bp, Homo sapien
tttgacaggaccaactccagggtga

SEQ ID NO: 5210782 - DNA, 25 bp, Homo sapien
atttcatgctgtgataattcagagc

SEQ ID NO: 5210783 - DNA, 25 bp, Homo sapien
gctgtgataattcagagccctaaat

SEQ ID NO: 5210784 - DNA, 25 bp, Homo sapien
cttgaaaagagtataatggtttgga

SEQ ID NO: 5210785 - DNA, 25 bp, Homo sapien
tttcatgctgtgataattcagagcc

SEQ ID NO: 5210786 - DNA, 25 bp, Homo sapien
ggcctctcttgcatgctggattgcc

SEQ ID NO: 5210787 - DNA, 25 bp, Homo sapien
tgcatgctggattgcctgggcctga

SEQ ID NO: 5210788 - DNA, 25 bp, Homo sapien
ctgggacttcaataagaattttgta

SEQ ID NO: 5210789 - DNA, 25 bp, Homo sapien
atttagctctctgggagtcaaagct

SEQ ID NO: 5210790 - DNA, 25 bp, Homo sapien
gctgctaccttttgtgctggcctct

SEQ ID NO: 5210791 - DNA, 25 bp, Homo sapien
cacttacaggcataggctttcagtg

SEQ ID NO: 5210792 - DNA, 25 bp, Homo sapien
cacactggtaacaagtttgtgggac

SEQ ID NO: 5210793 - DNA, 25 bp, Homo sapien
agtgctagctgatagttcaccaggc

SEQ ID NO: 5210794 - DNA, 25 bp, Homo sapien
tgagcattggtaagactctggacat

SEQ ID NO: 5210795 - DNA, 25 bp, Homo sapien
ggacatcactatgtttttcactcat

SEQ ID NO: 5210796 - DNA, 25 bp, Homo sapien
ctgagcattggtaagactctggaca

SEQ ID NO: 5210797 - DNA, 25 bp, Homo sapien
gactctggacatcactatgtttttc

SEQ ID NO: 5210798 - DNA, 25 bp, Homo sapien
attttcagcatacattcagtttgtt

SEQ ID NO: 5210799 - DNA, 25 bp, Homo sapien
gaccaattttgtgatgctactttta

SEQ ID NO: 5210800 - DNA, 25 bp, Homo sapien
agaccaattttgtgatgctactttt

SEQ ID NO: 5210801 - DNA, 25 bp, Homo sapien
accaattttgtgatgctacttttaa

SEQ ID NO: 5210802 - DNA, 25 bp, Homo sapien
tagaccaattttgtgatgctacttt

SEQ ID NO: 5210803 - DNA, 25 bp, Homo sapien
accaagggtcagtaacagacttcca

SEQ ID NO: 5210804 - DNA, 25 bp, Homo sapien
tgaccaagggtcagtaacagacttc

SEQ ID NO: 5210805 - DNA, 25 bp, Homo sapien
ttttgaccaagggtcagtaacagac

SEQ ID NO: 5210806 - DNA, 25 bp, Homo sapien
tcttgttttgaccaagggtcagtaa

SEQ ID NO: 5210807 - DNA, 25 bp, Homo sapien
tcgcctgatttgagaaagtcgtgac

SEQ ID NO: 5210808 - DNA, 25 bp, Homo sapien
ccagaagagctgatattgtagcaca

SEQ ID NO: 5210809 - DNA, 25 bp, Homo sapien
caatgatataattgggaagacgcac

SEQ ID NO: 5210810 - DNA, 25 bp, Homo sapien
agagagtggacaagcatttctcgcc

SEQ ID NO: 5210811 - DNA, 25 bp, Homo sapien
cttcgggagagtttctggtggagga

SEQ ID NO: 5210812 - DNA, 25 bp, Homo sapien
ctggtggaggatgcacaatctcatt

SEQ ID NO: 5210813 - DNA, 25 bp, Homo sapien
ttctggtggaggatgcacaatctca

SEQ ID NO: 5210814 - DNA, 25 bp, Homo sapien
agccttcgggagagtttctggtgga

SEQ ID NO: 5210815 - DNA, 25 bp, Homo sapien
aaataaaatgagatcgtctgccaac

SEQ ID NO: 5210816 - DNA, 25 bp, Homo sapien
tatgcgctagattcactttgcaggc

SEQ ID NO: 5210817 - DNA, 25 bp, Homo sapien
aatgagatcgtctgccaacacttac

SEQ ID NO: 5210818 - DNA, 25 bp, Homo sapien
ctatgcgctagattcactttgcagg

SEQ ID NO: 5210819 - DNA, 25 bp, Homo sapien
tttgatgtcaaataagtttgctcgt

SEQ ID NO: 5210820 - DNA, 25 bp, Homo sapien
ttttgatgtcaaataagtttgctcg

SEQ ID NO: 5210821 - DNA, 25 bp, Homo sapien
tttgcttaaatgtgaatcgatcttc

SEQ ID NO: 5210822 - DNA, 25 bp, Homo sapien
tgaaataactcagagggattgaatg

SEQ ID NO: 5210823 - DNA, 25 bp, Homo sapien
cagcacttgaagttggatcagccag

SEQ ID NO: 5210824 - DNA, 25 bp, Homo sapien
tatccgatgtatgttgtgcagtgtg

SEQ ID NO: 5210825 - DNA, 25 bp, Homo sapien
aaatttatgggtaaagctgatacag

SEQ ID NO: 5210826 - DNA, 25 bp, Homo sapien
tgcccaataaatttatgggtaaagc

SEQ ID NO: 5210827 - DNA, 25 bp, Homo sapien
tcttgacacatgaggtttatggtct

SEQ ID NO: 5210828 - DNA, 25 bp, Homo sapien
taaagctgatacagtgtcttgacac

SEQ ID NO: 5210829 - DNA, 25 bp, Homo sapien
gaagtcattgcatttgctactaatt

SEQ ID NO: 5210830 - DNA, 25 bp, Homo sapien
aattcaacttttggaacagtcttag

SEQ ID NO: 5210831 - DNA, 25 bp, Homo sapien
tcttagcttcggatgagagaggtgt

SEQ ID NO: 5210832 - DNA, 25 bp, Homo sapien
gctactaattgactggcttgcaaaa

SEQ ID NO: 5210833 - DNA, 25 bp, Homo sapien
taggatctaagtttctcatactgga

SEQ ID NO: 5210834 - DNA, 25 bp, Homo sapien
tagtttcacatattgtgagacccaa

SEQ ID NO: 5210835 - DNA, 25 bp, Homo sapien
tttctcatactggatttagtttcac

SEQ ID NO: 5210836 - DNA, 25 bp, Homo sapien
gagacccaaagtatatgtccttgcc

SEQ ID NO: 5210837 - DNA, 25 bp, Homo sapien
tcaaaaatggactcaatttcaaggt

SEQ ID NO: 5210838 - DNA, 25 bp, Homo sapien
ttcatgcagactgctttctattccc

SEQ ID NO: 5210839 - DNA, 25 bp, Homo sapien
acagcaacagtcaagagcacattgt

SEQ ID NO: 5210840 - DNA, 25 bp, Homo sapien
cccaggtaaggttcatgcagactgc

SEQ ID NO: 5210841 - DNA, 25 bp, Homo sapien
tatgatttactgtgcctatcacatc

SEQ ID NO: 5210842 - DNA, 25 bp, Homo sapien
gcaccttgggccatttgatgagtat

SEQ ID NO: 5210843 - DNA, 25 bp, Homo sapien
gcctatcacatctgttaacactgca

SEQ ID NO: 5210844 - DNA, 25 bp, Homo sapien
tgatgagtatgatttactgtgccta

SEQ ID NO: 5210845 - DNA, 25 bp, Homo sapien
gtaaaggcacttgcaagttcatttc

SEQ ID NO: 5210846 - DNA, 25 bp, Homo sapien
aaatgggagatctaatagaagctat

SEQ ID NO: 5210847 - DNA, 25 bp, Homo sapien
aagtaaaggcacttgcaagttcatt

SEQ ID NO: 5210848 - DNA, 25 bp, Homo sapien
agtaaaggcacttgcaagttcattt

SEQ ID NO: 5210849 - DNA, 25 bp, Homo sapien
aactattgtggcgaaggtcttgcat

SEQ ID NO: 5210850 - DNA, 25 bp, Homo sapien
gcaggcagctggaaactattgtggc

SEQ ID NO: 5210851 - DNA, 25 bp, Homo sapien
gggagcataaaaactttggctgaga

SEQ ID NO: 5210852 - DNA, 25 bp, Homo sapien
gtggacagaacgtcttttaaggctg

SEQ ID NO: 5210853 - DNA, 25 bp, Homo sapien
gactgaaatgtttttaggtgcttat

SEQ ID NO: 5210854 - DNA, 25 bp, Homo sapien
taaggaagtaacacaaattctggct

SEQ ID NO: 5210855 - DNA, 25 bp, Homo sapien
tagtgagatacttttctctgatctc

SEQ ID NO: 5210856 - DNA, 25 bp, Homo sapien
aaaatgagcattgtactctaaggaa

SEQ ID NO: 5210857 - DNA, 25 bp, Homo sapien
catctggctctatgctagaaacgtt

SEQ ID NO: 5210858 - DNA, 25 bp, Homo sapien
gaactgttactgtttactgagtgcc

SEQ ID NO: 5210859 - DNA, 25 bp, Homo sapien
caacctatgaaactatgaatctggg

SEQ ID NO: 5210860 - DNA, 25 bp, Homo sapien
catcaggcctaagtgtctcctcttg

SEQ ID NO: 5210861 - DNA, 25 bp, Homo sapien
tctggttcacagcagtgctcagata

SEQ ID NO: 5210862 - DNA, 25 bp, Homo sapien
tgctcagataataccagttgaagga

SEQ ID NO: 5210863 - DNA, 25 bp, Homo sapien
tattcttactacattgcttatgttt

SEQ ID NO: 5210864 - DNA, 25 bp, Homo sapien
cacagcagtgctcagataataccag

SEQ ID NO: 5210865 - DNA, 25 bp, Homo sapien
tgagatatgcattttgtcagtatca

SEQ ID NO: 5210866 - DNA, 25 bp, Homo sapien
ttgtcagtatcatatcggtcatgtc

SEQ ID NO: 5210867 - DNA, 25 bp, Homo sapien
catatcggtcatgtctattggtgtg

SEQ ID NO: 5210868 - DNA, 25 bp, Homo sapien
gtatcatatcggtcatgtctattgg

SEQ ID NO: 5210869 - DNA, 25 bp, Homo sapien
ccattaattgcatgacattgaactc

SEQ ID NO: 5210870 - DNA, 25 bp, Homo sapien
gtgtgactcgaagtatttcatgtac

SEQ ID NO: 5210871 - DNA, 25 bp, Homo sapien
tacttctgattgaaagtgtgactcg

SEQ ID NO: 5210872 - DNA, 25 bp, Homo sapien
tacaacatacttctaagagagaagc

SEQ ID NO: 5210873 - DNA, 25 bp, Homo sapien
tgagattctatctcaggtattgtgc

SEQ ID NO: 5210874 - DNA, 25 bp, Homo sapien
aaaaaacgattgaagcaggtcctag

SEQ ID NO: 5210875 - DNA, 25 bp, Homo sapien
cctagtcttaaggaacattcgttgt

SEQ ID NO: 5210876 - DNA, 25 bp, Homo sapien
taacttaggtttaaagcacatagac

SEQ ID NO: 5210877 - DNA, 25 bp, Homo sapien
tactgctatagttccaaatattaaa

SEQ ID NO: 5210878 - DNA, 25 bp, Homo sapien
tctaccgacatctgaattgtgctgg

SEQ ID NO: 5210879 - DNA, 25 bp, Homo sapien
tgaaatactttgaaagtctaccgac

SEQ ID NO: 5210880 - DNA, 25 bp, Homo sapien
tttccaaccatgtgataatttgtgc

SEQ ID NO: 5210881 - DNA, 25 bp, Homo sapien
tgtctttgaccccattagtatgtag

SEQ ID NO: 5210882 - DNA, 25 bp, Homo sapien
tgaagaaacagttccctagcttctt

SEQ ID NO: 5210883 - DNA, 25 bp, Homo sapien
gggcctctggagaatcgtctagtgt

SEQ ID NO: 5210884 - DNA, 25 bp, Homo sapien
gaaggcatttggtgcatgaagaaac

SEQ ID NO: 5210885 - DNA, 25 bp, Homo sapien
gaatgtggacctatacaaattccag

SEQ ID NO: 5210886 - DNA, 25 bp, Homo sapien
catttggattttgggactgcggctc

SEQ ID NO: 5210887 - DNA, 25 bp, Homo sapien
aaattccagctggtgatagtacacg

SEQ ID NO: 5210888 - DNA, 25 bp, Homo sapien
tagtacacgttgttcttttgcagac

SEQ ID NO: 5210889 - DNA, 25 bp, Homo sapien
ctactgagggtctgatttcattcat

SEQ ID NO: 5210890 - DNA, 25 bp, Homo sapien
cctctactgagggtctgatttcatt

SEQ ID NO: 5210891 - DNA, 25 bp, Homo sapien
tctactgagggtctgatttcattca

SEQ ID NO: 5210892 - DNA, 25 bp, Homo sapien
tgcctctactgagggtctgatttca

SEQ ID NO: 5210893 - DNA, 25 bp, Homo sapien
tcttagttgaaaggtggcgaggaca

SEQ ID NO: 5210894 - DNA, 25 bp, Homo sapien
gagatttgggaaatcttatggaaac

SEQ ID NO: 5210895 - DNA, 25 bp, Homo sapien
tgtccttaattgatgttcttagttg

SEQ ID NO: 5210896 - DNA, 25 bp, Homo sapien
taattgatgttcttagttgaaaggt

SEQ ID NO: 5210897 - DNA, 25 bp, Homo sapien
gccaatcaaattctcccacataaga

SEQ ID NO: 5210898 - DNA, 25 bp, Homo sapien
taagaatttgggacacagaagatga

SEQ ID NO: 5210899 - DNA, 25 bp, Homo sapien
tagagtcaaccttctttgaaaccac

SEQ ID NO: 5210900 - DNA, 25 bp, Homo sapien
taattagagagggtatgtgaaccaa

SEQ ID NO: 5210901 - DNA, 25 bp, Homo sapien
tacagtcagtattgcctacagtaat

SEQ ID NO: 5210902 - DNA, 25 bp, Homo sapien
taaattgcaaccaaacaagaaggag

SEQ ID NO: 5210903 - DNA, 25 bp, Homo sapien
gaatgtcaacgatgttacagtcagt

SEQ ID NO: 5210904 - DNA, 25 bp, Homo sapien
caagaaggagttataaatgtcccat

SEQ ID NO: 5210905 - DNA, 25 bp, Homo sapien
caccatgtacagtatttcacaccac

SEQ ID NO: 5210906 - DNA, 25 bp, Homo sapien
cctgcataatgtacataggagacat

SEQ ID NO: 5210907 - DNA, 25 bp, Homo sapien
tactgcttagtatcttcatgtatgt

SEQ ID NO: 5210908 - DNA, 25 bp, Homo sapien
tttcacaccactaccctgcataatg

SEQ ID NO: 5210909 - DNA, 25 bp, Homo sapien
gtggatggagtgtaaaatatcactt

SEQ ID NO: 5210910 - DNA, 25 bp, Homo sapien
ggtactttgtaacctgatacaggct

SEQ ID NO: 5210911 - DNA, 25 bp, Homo sapien
ataccctttgtcacagtggatggag

SEQ ID NO: 5210912 - DNA, 25 bp, Homo sapien
ttctctttcatgactgtgataccct

SEQ ID NO: 5210913 - DNA, 25 bp, Homo sapien
tttctagtgtctgtggtgtcggcgc

SEQ ID NO: 5210914 - DNA, 25 bp, Homo sapien
caccggaggcgtcgctttctagtgt

SEQ ID NO: 5210915 - DNA, 25 bp, Homo sapien
tggttttctcggtcgcagcgttgag

SEQ ID NO: 5210916 - DNA, 25 bp, Homo sapien
gagcctctcgcgtccctggttttct

SEQ ID NO: 5210917 - DNA, 25 bp, Homo sapien
gtaggactccgcttccgtgcaggca

SEQ ID NO: 5210918 - DNA, 25 bp, Homo sapien
tagcggaatggccaatctctggtcc

SEQ ID NO: 5210919 - DNA, 25 bp, Homo sapien
cgggcccttctaggcctgagactcg

SEQ ID NO: 5210920 - DNA, 25 bp, Homo sapien
tgaacttccttcgttgagccgggta

SEQ ID NO: 5210921 - DNA, 25 bp, Homo sapien
gctctcctaaagttcaactcgctgc

SEQ ID NO: 5210922 - DNA, 25 bp, Homo sapien
tgccgccacaacgaaccacgcggat

SEQ ID NO: 5210923 - DNA, 25 bp, Homo sapien
taaagttcaactcgctgccgccaca

SEQ ID NO: 5210924 - DNA, 25 bp, Homo sapien
cacaacgaaccacgcggatgttctc

SEQ ID NO: 5210925 - DNA, 25 bp, Homo sapien
cgatatccgccaggcgggcgagtcc

SEQ ID NO: 5210926 - DNA, 25 bp, Homo sapien
gggcgagtccgaacgcgactgacaa

SEQ ID NO: 5210927 - DNA, 25 bp, Homo sapien
tcagccgacaaagcgcggtgcccct

SEQ ID NO: 5210928 - DNA, 25 bp, Homo sapien
gaacgcgactgacaattccttctcc

SEQ ID NO: 5210929 - DNA, 25 bp, Homo sapien
tctgtacgaaagagtaggtactgca

SEQ ID NO: 5210930 - DNA, 25 bp, Homo sapien
tactgcaaaggtagtggcatacaca

SEQ ID NO: 5210931 - DNA, 25 bp, Homo sapien
aatctgcagtggtaacgggacctcc

SEQ ID NO: 5210932 - DNA, 25 bp, Homo sapien
cagggcctttatctacctgcaggta

SEQ ID NO: 5210933 - DNA, 25 bp, Homo sapien
tatgagtccgaagcgtcacagtgtg

SEQ ID NO: 5210934 - DNA, 25 bp, Homo sapien
tgtgacagcctcttaaagcctgttt

SEQ ID NO: 5210935 - DNA, 25 bp, Homo sapien
tccgaagcgtcacagtgtgacagcc

SEQ ID NO: 5210936 - DNA, 25 bp, Homo sapien
ggttacatggatatgagtccgaagc

SEQ ID NO: 5210937 - DNA, 25 bp, Homo sapien
agaggaagccgccaaaattccacaa

SEQ ID NO: 5210938 - DNA, 25 bp, Homo sapien
aggaagccgccaaaattccacaagt

SEQ ID NO: 5210939 - DNA, 25 bp, Homo sapien
tcaagaggaagccgccaaaattcca

SEQ ID NO: 5210940 - DNA, 25 bp, Homo sapien
tttcaagaggaagccgccaaaattc

SEQ ID NO: 5210941 - DNA, 25 bp, Homo sapien
gatgccgcagaatgggatgcaaaca

SEQ ID NO: 5210942 - DNA, 25 bp, Homo sapien
ttcacagcaccatataactgtggga

SEQ ID NO: 5210943 - DNA, 25 bp, Homo sapien
caaacagaactggactgagagtcag

SEQ ID NO: 5210944 - DNA, 25 bp, Homo sapien
ggcaaggatgactcattgtttcagt

SEQ ID NO: 5210945 - DNA, 25 bp, Homo sapien
caaggcgcagaaatataaatcttct

SEQ ID NO: 5210946 - DNA, 25 bp, Homo sapien
gtaaaaagtatttgctctgtgtcta

SEQ ID NO: 5210947 - DNA, 25 bp, Homo sapien
gggcactgtttgactactttcacga

SEQ ID NO: 5210948 - DNA, 25 bp, Homo sapien
tattatcacagaacaaggcgcagaa

SEQ ID NO: 5210949 - DNA, 25 bp, Homo sapien
aagtcaaaggttctgctccagttgg

SEQ ID NO: 5210950 - DNA, 25 bp, Homo sapien
gaggtctgggccttttgtacagaaa

SEQ ID NO: 5210951 - DNA, 25 bp, Homo sapien
atttcttccatgtagcagcagctac

SEQ ID NO: 5210952 - DNA, 25 bp, Homo sapien
aatggtaagtcaaaggttctgctcc

SEQ ID NO: 5210953 - DNA, 25 bp, Homo sapien
tagtactgccaacagcagtgttttt

SEQ ID NO: 5210954 - DNA, 25 bp, Homo sapien
caatagtactgccaacagcagtgtt

SEQ ID NO: 5210955 - DNA, 25 bp, Homo sapien
tactgccaacagcagtgtttttcca

SEQ ID NO: 5210956 - DNA, 25 bp, Homo sapien
tcttcaatagtactgccaacagcag

SEQ ID NO: 5210957 - DNA, 25 bp, Homo sapien
gttgttggggttaagctggattcca

SEQ ID NO: 5210958 - DNA, 25 bp, Homo sapien
gtccatgcagtatgtgtacacactc

SEQ ID NO: 5210959 - DNA, 25 bp, Homo sapien
ctgtaactgtgctgtaaactttaac

SEQ ID NO: 5210960 - DNA, 25 bp, Homo sapien
tgtgtacacactcttctgtaactgt

SEQ ID NO: 5210961 - DNA, 25 bp, Homo sapien
ctcttttggatattcgcaatgcatg

SEQ ID NO: 5210962 - DNA, 25 bp, Homo sapien
gaccttactaacacataggcttact

SEQ ID NO: 5210963 - DNA, 25 bp, Homo sapien
tttggtagcaccagaagaccttact

SEQ ID NO: 5210964 - DNA, 25 bp, Homo sapien
actaatggtttaggacactggtctg

SEQ ID NO: 5210965 - DNA, 25 bp, Homo sapien
tataatatgcttggatgctgaggca

SEQ ID NO: 5210966 - DNA, 25 bp, Homo sapien
cactgttaaccttaaagaggtagag

SEQ ID NO: 5210967 - DNA, 25 bp, Homo sapien
tgcaagaagcagatccatccatttc

SEQ ID NO: 5210968 - DNA, 25 bp, Homo sapien
tttatttatattgcttctgcaaaac

SEQ ID NO: 5210969 - DNA, 25 bp, Homo sapien
caactttctgtcttgaagagggaga

SEQ ID NO: 5210970 - DNA, 25 bp, Homo sapien
gtcccacagtttaattgtgccatca

SEQ ID NO: 5210971 - DNA, 25 bp, Homo sapien
tctatatagtcccacagtttaattg

SEQ ID NO: 5210972 - DNA, 25 bp, Homo sapien
attaagatgccatctatatagtccc

SEQ ID NO: 5210973 - DNA, 25 bp, Homo sapien
atgccatctatatagtcccacagtt

SEQ ID NO: 5210974 - DNA, 25 bp, Homo sapien
ttcacataacgaaaagtaaagatca

SEQ ID NO: 5210975 - DNA, 25 bp, Homo sapien
catctaccattaaattacattgcct

SEQ ID NO: 5210976 - DNA, 25 bp, Homo sapien
ttattcacataacgaaaagtaaaga

SEQ ID NO: 5210977 - DNA, 25 bp, Homo sapien
agaaacagtacatctaccattaaat

SEQ ID NO: 5210978 - DNA, 25 bp, Homo sapien
gggcatgaagtttacatccaactat

SEQ ID NO: 5210979 - DNA, 25 bp, Homo sapien
caagagtaaagagggcatgaagttt

SEQ ID NO: 5210980 - DNA, 25 bp, Homo sapien
gcaagagtaaagagggcatgaagtt

SEQ ID NO: 5210981 - DNA, 25 bp, Homo sapien
taaagagggcatgaagtttacatcc

SEQ ID NO: 5210982 - DNA, 25 bp, Homo sapien
tctccaaatgagcacaataatgaca

SEQ ID NO: 5210983 - DNA, 25 bp, Homo sapien
aaatgcccattctaaaaactgttgg

SEQ ID NO: 5210984 - DNA, 25 bp, Homo sapien
tatgccatttccaccctgacttaag

SEQ ID NO: 5210985 - DNA, 25 bp, Homo sapien
tgaggtctgcaatctactattacaa

SEQ ID NO: 5210986 - DNA, 25 bp, Homo sapien
tagatcagtcgttttccatcctgtc

SEQ ID NO: 5210987 - DNA, 25 bp, Homo sapien
tttttcagtaaactaggccccagca

SEQ ID NO: 5210988 - DNA, 25 bp, Homo sapien
tgcagtaagcaagccagctagcaca

SEQ ID NO: 5210989 - DNA, 25 bp, Homo sapien
ggccccagcacacagaatcttatta

SEQ ID NO: 5210990 - DNA, 25 bp, Homo sapien
aacaaatcatctgagagttttcaga

SEQ ID NO: 5210991 - DNA, 25 bp, Homo sapien
gccataatattagggtaaaatctcc

SEQ ID NO: 5210992 - DNA, 25 bp, Homo sapien
tatgaatgttggtcagctgagtagc

SEQ ID NO: 5210993 - DNA, 25 bp, Homo sapien
tcagaaatgctatgatgggcctgcc

SEQ ID NO: 5210994 - DNA, 25 bp, Homo sapien
actctttgtttgaatgagcaagttt

SEQ ID NO: 5210995 - DNA, 25 bp, Homo sapien
tggactctttgtttgaatgagcaag

SEQ ID NO: 5210996 - DNA, 25 bp, Homo sapien
gactctttgtttgaatgagcaagtt

SEQ ID NO: 5210997 - DNA, 25 bp, Homo sapien
ggactctttgtttgaatgagcaagt

SEQ ID NO: 5210998 - DNA, 25 bp, Homo sapien
acttgggtgactggtttatgtaatc

SEQ ID NO: 5210999 - DNA, 25 bp, Homo sapien
ccaaaggcaatgcacttgggtgact

SEQ ID NO: 5211000 - DNA, 25 bp, Homo sapien
ggtgactggtttatgtaatccaaaa

SEQ ID NO: 5211001 - DNA, 25 bp, Homo sapien
caaaggcaatgcacttgggtgactg

SEQ ID NO: 5211002 - DNA, 25 bp, Homo sapien
gcatgccgctacagtgatgtccgga

SEQ ID NO: 5211003 - DNA, 25 bp, Homo sapien
gggaggccataatttctaaagacac

SEQ ID NO: 5211004 - DNA, 25 bp, Homo sapien
caaaggcaataggacagaacacaca

SEQ ID NO: 5211005 - DNA, 25 bp, Homo sapien
cttaagactaaagaagcatgccgct

SEQ ID NO: 5211006 - DNA, 25 bp, Homo sapien
tgtcctctgtggctcaacatcatcc

SEQ ID NO: 5211007 - DNA, 25 bp, Homo sapien
ccactgccacaatcaggatctagaa

SEQ ID NO: 5211008 - DNA, 25 bp, Homo sapien
gctgagcggcactccattgtatgca

SEQ ID NO: 5211009 - DNA, 25 bp, Homo sapien
tgtacatctatataaccactgccac

SEQ ID NO: 5211010 - DNA, 25 bp, Homo sapien
acaagtaaaattcccgtactgcagc

SEQ ID NO: 5211011 - DNA, 25 bp, Homo sapien
acagacaagtaaaattcccgtactg

SEQ ID NO: 5211012 - DNA, 25 bp, Homo sapien
tcccgtactgcagcaacatatactc

SEQ ID NO: 5211013 - DNA, 25 bp, Homo sapien
aaattcccgtactgcagcaacatat

SEQ ID NO: 5211014 - DNA, 25 bp, Homo sapien
atatgtcaaagcctacattcattcc

SEQ ID NO: 5211015 - DNA, 25 bp, Homo sapien
caaagcctacattcattcctacatt

SEQ ID NO: 5211016 - DNA, 25 bp, Homo sapien
tgtcaaagcctacattcattcctac

SEQ ID NO: 5211017 - DNA, 25 bp, Homo sapien
gtcaaagcctacattcattcctaca

SEQ ID NO: 5211018 - DNA, 25 bp, Homo sapien
gttataatatctagcctatttccta

SEQ ID NO: 5211019 - DNA, 25 bp, Homo sapien
agaagtcaggatcaatattatacta

SEQ ID NO: 5211020 - DNA, 25 bp, Homo sapien
aaatccaaagggatcaatctacttg

SEQ ID NO: 5211021 - DNA, 25 bp, Homo sapien
cttgttataatatctagcctatttc

SEQ ID NO: 5211022 - DNA, 25 bp, Homo sapien
cctgagacattagatctgagacaaa

SEQ ID NO: 5211023 - DNA, 25 bp, Homo sapien
ggcataatcaaacctgagacattag

SEQ ID NO: 5211024 - DNA, 25 bp, Homo sapien
atcttagcatgaggcataatcaaac

SEQ ID NO: 5211025 - DNA, 25 bp, Homo sapien
gcatgaggcataatcaaacctgaga

SEQ ID NO: 5211026 - DNA, 25 bp, Homo sapien
tggtcaaagcttgttcaaatttctc

SEQ ID NO: 5211027 - DNA, 25 bp, Homo sapien
tcaataaatataactgcaggatttt

SEQ ID NO: 5211028 - DNA, 25 bp, Homo sapien
taatttatctatggaagccactgac

SEQ ID NO: 5211029 - DNA, 25 bp, Homo sapien
tatatcaatatacaacatgaacttc

SEQ ID NO: 5211030 - DNA, 25 bp, Homo sapien
gtgacatgctacacatgtaaaattg

SEQ ID NO: 5211031 - DNA, 25 bp, Homo sapien
gccatccatgtgaccagatgcgatg

SEQ ID NO: 5211032 - DNA, 25 bp, Homo sapien
atttcttgatgatgataaagtaaac

SEQ ID NO: 5211033 - DNA, 25 bp, Homo sapien
gatgcgatgcagtcttccgttgggt

SEQ ID NO: 5211034 - DNA, 25 bp, Homo sapien
ccatatcatggtgccaatgtaaaca

SEQ ID NO: 5211035 - DNA, 25 bp, Homo sapien
gccaaatccataaccatatcatggt

SEQ ID NO: 5211036 - DNA, 25 bp, Homo sapien
atcatggtgccaatgtaaacatgtg

SEQ ID NO: 5211037 - DNA, 25 bp, Homo sapien
ccataaccatatcatggtgccaatg

SEQ ID NO: 5211038 - DNA, 25 bp, Homo sapien
caaataaactgacataactctcacc

SEQ ID NO: 5211039 - DNA, 25 bp, Homo sapien
agtcaaataaactgacataactctc

SEQ ID NO: 5211040 - DNA, 25 bp, Homo sapien
aactgacataactctcaccacatgg

SEQ ID NO: 5211041 - DNA, 25 bp, Homo sapien
taactctcaccacatgggtgtgagg

SEQ ID NO: 5211042 - DNA, 25 bp, Homo sapien
aaatgagcagcctacattgtctcca

SEQ ID NO: 5211043 - DNA, 25 bp, Homo sapien
gactctaaggataccacagcatatg

SEQ ID NO: 5211044 - DNA, 25 bp, Homo sapien
ggcttccgggcattacacccaagta

SEQ ID NO: 5211045 - DNA, 25 bp, Homo sapien
cataatcgggttgaaggtgtctcct

SEQ ID NO: 5211046 - DNA, 25 bp, Homo sapien
tccattcaaggaaattaaaaggatg

SEQ ID NO: 5211047 - DNA, 25 bp, Homo sapien
attcaaggaaattaaaaggatggtg

SEQ ID NO: 5211048 - DNA, 25 bp, Homo sapien
cttcatatccattcaaggaaattaa

SEQ ID NO: 5211049 - DNA, 25 bp, Homo sapien
gatggtgttttgaggaaaaaagaga

SEQ ID NO: 5211050 - DNA, 25 bp, Homo sapien
tacaagtacagattcacgaccgcca

SEQ ID NO: 5211051 - DNA, 25 bp, Homo sapien
agaataaatctcctgcaggcgagac

SEQ ID NO: 5211052 - DNA, 25 bp, Homo sapien
tcaatagtagctcctaaacgcggga

SEQ ID NO: 5211053 - DNA, 25 bp, Homo sapien
ttgcatcgcgccactctacaagtac

SEQ ID NO: 5211054 - DNA, 25 bp, Homo sapien
gtggatttacaaagatatcctagtc

SEQ ID NO: 5211055 - DNA, 25 bp, Homo sapien
actgcctctatttctatcaaatcta

SEQ ID NO: 5211056 - DNA, 25 bp, Homo sapien
tttacaaagatatcctagtctaggc

SEQ ID NO: 5211057 - DNA, 25 bp, Homo sapien
ttctatcaaatctacaggactcttg

SEQ ID NO: 5211058 - DNA, 25 bp, Homo sapien
ggataggggcttttctgttggagtc

SEQ ID NO: 5211059 - DNA, 25 bp, Homo sapien
attttgtgagttagtggaaaatcta

SEQ ID NO: 5211060 - DNA, 25 bp, Homo sapien
tgttggagtctttaagtttttatca

SEQ ID NO: 5211061 - DNA, 25 bp, Homo sapien
tcaaggtttcggtgaataattatta

SEQ ID NO: 5211062 - DNA, 25 bp, Homo sapien
cttcaaggtttcggtgaataattat

SEQ ID NO: 5211063 - DNA, 25 bp, Homo sapien
caaggtttcggtgaataattattat

SEQ ID NO: 5211064 - DNA, 25 bp, Homo sapien
cactaggccttgaattactgcggat

SEQ ID NO: 5211065 - DNA, 25 bp, Homo sapien
actaggccttgaattactgcggatg

SEQ ID NO: 5211066 - DNA, 25 bp, Homo sapien
ttcactaggccttgaattactgcgg

SEQ ID NO: 5211067 - DNA, 25 bp, Homo sapien
ctttcactaggccttgaattactgc

SEQ ID NO: 5211068 - DNA, 25 bp, Homo sapien
tgacaaataacaggtgaaataagag

SEQ ID NO: 5211069 - DNA, 25 bp, Homo sapien
ggtgacaaataacaggtgaaataag

SEQ ID NO: 5211070 - DNA, 25 bp, Homo sapien
gtggtgacaaataacaggtgaaata

SEQ ID NO: 5211071 - DNA, 25 bp, Homo sapien
gacaaataacaggtgaaataagaga

SEQ ID NO: 5211072 - DNA, 25 bp, Homo sapien
tttagttcttggatcaatcatcaaa

SEQ ID NO: 5211073 - DNA, 25 bp, Homo sapien
ttagttcttggatcaatcatcaaac

SEQ ID NO: 5211074 - DNA, 25 bp, Homo sapien
tagttcttggatcaatcatcaaacc

SEQ ID NO: 5211075 - DNA, 25 bp, Homo sapien
ttcaagtaaacatatgcacaggatc

SEQ ID NO: 5211076 - DNA, 25 bp, Homo sapien
tccagtggtactgtaaagagctttc

SEQ ID NO: 5211077 - DNA, 25 bp, Homo sapien
gctactaaacaaattgcttgactcc

SEQ ID NO: 5211078 - DNA, 25 bp, Homo sapien
tatgttcaagtaaacatatgcacag

SEQ ID NO: 5211079 - DNA, 25 bp, Homo sapien
atgtaacctgcaactgtggcctcaa

SEQ ID NO: 5211080 - DNA, 25 bp, Homo sapien
actgtggcctcaatggaattatgct

SEQ ID NO: 5211081 - DNA, 25 bp, Homo sapien
ctgtggcctcaatggaattatgctc

SEQ ID NO: 5211082 - DNA, 25 bp, Homo sapien
gagctagtgtcacagttgctatgac

SEQ ID NO: 5211083 - DNA, 25 bp, Homo sapien
ggtctaaaggccacggtgagaaaga

SEQ ID NO: 5211084 - DNA, 25 bp, Homo sapien
tattaagtgtactaaatgcctacaa

SEQ ID NO: 5211085 - DNA, 25 bp, Homo sapien
tacaggcattatacttgagataagc

SEQ ID NO: 5211086 - DNA, 25 bp, Homo sapien
gcagcctttgttagttcaatttgga

SEQ ID NO: 5211087 - DNA, 25 bp, Homo sapien
cttttcttgccgctgttccactgtt

SEQ ID NO: 5211088 - DNA, 25 bp, Homo sapien
tcttattatacatccacagtttcat

SEQ ID NO: 5211089 - DNA, 25 bp, Homo sapien
gcaagccagttaccaaagcagccaa

SEQ ID NO: 5211090 - DNA, 25 bp, Homo sapien
cagagtcatctgttaatatccatac

SEQ ID NO: 5211091 - DNA, 25 bp, Homo sapien
gaaacagagagctgtaatgcagtct

SEQ ID NO: 5211092 - DNA, 25 bp, Homo sapien
catctttgctagctgtaaccaaggt

SEQ ID NO: 5211093 - DNA, 25 bp, Homo sapien
gcagtcttcgtgtggcatgttaatt

SEQ ID NO: 5211094 - DNA, 25 bp, Homo sapien
catgttacagaatcccatattgtga

SEQ ID NO: 5211095 - DNA, 25 bp, Homo sapien
ccatcttcggagaaacaacagttag

SEQ ID NO: 5211096 - DNA, 25 bp, Homo sapien
actgctagtaaagaaccatcttcgg

SEQ ID NO: 5211097 - DNA, 25 bp, Homo sapien
ttcccagctcgttggcaaaatgtac

SEQ ID NO: 5211098 - DNA, 25 bp, Homo sapien
taagaaggtttggatcccctgaggc

SEQ ID NO: 5211099 - DNA, 25 bp, Homo sapien
aaatagtactacatacttcccgaag

SEQ ID NO: 5211100 - DNA, 25 bp, Homo sapien
cttcaggctacttttggagagggca

SEQ ID NO: 5211101 - DNA, 25 bp, Homo sapien
tgttggcacagtttgtggactcaga

SEQ ID NO: 5211102 - DNA, 25 bp, Homo sapien
taaattcagaatcagacatgctggg

SEQ ID NO: 5211103 - DNA, 25 bp, Homo sapien
aaaacttgcgatttcaattgtgaag

SEQ ID NO: 5211104 - DNA, 25 bp, Homo sapien
tgattctgtcctcaggcccaactac

SEQ ID NO: 5211105 - DNA, 25 bp, Homo sapien
gctgggaattagagacgatctcatt

SEQ ID NO: 5211106 - DNA, 25 bp, Homo sapien
caaggaagttagcaacagtcagttc

SEQ ID NO: 5211107 - DNA, 25 bp, Homo sapien
gaccaattctttaacacactgtgcg

SEQ ID NO: 5211108 - DNA, 25 bp, Homo sapien
taggaaaacagaacggatgaccaat

SEQ ID NO: 5211109 - DNA, 25 bp, Homo sapien
tccagcggctgttctatgtaatgca

SEQ ID NO: 5211110 - DNA, 25 bp, Homo sapien
cgtcaatctcccaaagcaaaggtgc

SEQ ID NO: 5211111 - DNA, 25 bp, Homo sapien
tcagtagcaccaagtagatactttg

SEQ ID NO: 5211112 - DNA, 25 bp, Homo sapien
tgaacacgtcaatctcccaaagcaa

SEQ ID NO: 5211113 - DNA, 25 bp, Homo sapien
caagtagatactttgaacacgtcaa

SEQ ID NO: 5211114 - DNA, 25 bp, Homo sapien
aatcttatgcttccaactaacacac

SEQ ID NO: 5211115 - DNA, 25 bp, Homo sapien
actaacacacatggagacacactga

SEQ ID NO: 5211116 - DNA, 25 bp, Homo sapien
cttaggaagaggaatcttatgcttc

SEQ ID NO: 5211117 - DNA, 25 bp, Homo sapien
cttattcttaggaagaggaatctta

SEQ ID NO: 5211118 - DNA, 25 bp, Homo sapien
tgaggggaaaaacaaaggtgattca

SEQ ID NO: 5211119 - DNA, 25 bp, Homo sapien
gatcgggttccataactctaacatt

SEQ ID NO: 5211120 - DNA, 25 bp, Homo sapien
cactgaagactgagagattgcagca

SEQ ID NO: 5211121 - DNA, 25 bp, Homo sapien
tctctgaattaggatcgggttccat

SEQ ID NO: 5211122 - DNA, 25 bp, Homo sapien
aatattctctgaattaggatcgggt

SEQ ID NO: 5211123 - DNA, 25 bp, Homo sapien
ggagctctcctagaactaagtatgg

SEQ ID NO: 5211124 - DNA, 25 bp, Homo sapien
gaagggccgtgcctcaagcaaaatg

SEQ ID NO: 5211125 - DNA, 25 bp, Homo sapien
taagtatggacgcacacaatgacaa

SEQ ID NO: 5211126 - DNA, 25 bp, Homo sapien
gatgttctcttactacaaagtgtgg

SEQ ID NO: 5211127 - DNA, 25 bp, Homo sapien
tgcttcaagaacatagaggatgacc

SEQ ID NO: 5211128 - DNA, 25 bp, Homo sapien
gaaagaagaattcgtgctccagagg

SEQ ID NO: 5211129 - DNA, 25 bp, Homo sapien
tggcagatcacactaatcctgggac

SEQ ID NO: 5211130 - DNA, 25 bp, Homo sapien
gttagttctagcctcagactggcag

SEQ ID NO: 5211131 - DNA, 25 bp, Homo sapien
gccactggtaagcttctgaggtgaa

SEQ ID NO: 5211132 - DNA, 25 bp, Homo sapien
ggccttggctcactaggtttaaata

SEQ ID NO: 5211133 - DNA, 25 bp, Homo sapien
gtaaaactgggatctatttagccac

SEQ ID NO: 5211134 - DNA, 25 bp, Homo sapien
gacatctcgtggaacaaacactccc

SEQ ID NO: 5211135 - DNA, 25 bp, Homo sapien
caaatctaaacaaggtgttacaggg

SEQ ID NO: 5211136 - DNA, 25 bp, Homo sapien
gaattaatgatgcaaaagacaaact

SEQ ID NO: 5211137 - DNA, 25 bp, Homo sapien
gacaaactgtagagtgcaaatctaa

SEQ ID NO: 5211138 - DNA, 25 bp, Homo sapien
cctatttaataaccacgatgagagt

SEQ ID NO: 5211139 - DNA, 25 bp, Homo sapien
gtttgcttgttggtgtgagtttttc

SEQ ID NO: 5211140 - DNA, 25 bp, Homo sapien
tttttcttctggagactttgtactg

SEQ ID NO: 5211141 - DNA, 25 bp, Homo sapien
actttgtactgaatgtcaataaact

SEQ ID NO: 5211142 - DNA, 25 bp, Homo sapien
tgtttgcttgttggtgtgagttttt

SEQ ID NO: 5211143 - DNA, 25 bp, Homo sapien
caatacatcctgctatgaatggcta

SEQ ID NO: 5211144 - DNA, 25 bp, Homo sapien
gggaggcaatacatcctgctatgaa

SEQ ID NO: 5211145 - DNA, 25 bp, Homo sapien
ttttagggaggcaatacatcctgct

SEQ ID NO: 5211146 - DNA, 25 bp, Homo sapien
cctgctatgaatggctaaaacatac

SEQ ID NO: 5211147 - DNA, 25 bp, Homo sapien
tgtgaataccgcaagtttagagact

SEQ ID NO: 5211148 - DNA, 25 bp, Homo sapien
tcaataaggcctacgtagacttccc

SEQ ID NO: 5211149 - DNA, 25 bp, Homo sapien
taaattagctcagatagtggaagcc

SEQ ID NO: 5211150 - DNA, 25 bp, Homo sapien
gtttaaaattacaagctgcatccca

SEQ ID NO: 5211151 - DNA, 25 bp, Homo sapien
cacaattctaagctggctgtaggga

SEQ ID NO: 5211152 - DNA, 25 bp, Homo sapien
gttttcaaagggcacatactcacaa

SEQ ID NO: 5211153 - DNA, 25 bp, Homo sapien
tgaggcctagcatcccacttatgag

SEQ ID NO: 5211154 - DNA, 25 bp, Homo sapien
gaacttagtagacctgagaaagcac

SEQ ID NO: 5211155 - DNA, 25 bp, Homo sapien
ctgtgtttgacttaacagtaagtac

SEQ ID NO: 5211156 - DNA, 25 bp, Homo sapien
aagaactgtgtttgacttaacagta

SEQ ID NO: 5211157 - DNA, 25 bp, Homo sapien
tgtttgacttaacagtaagtactac

SEQ ID NO: 5211158 - DNA, 25 bp, Homo sapien
gaactgtgtttgacttaacagtaag

SEQ ID NO: 5211159 - DNA, 25 bp, Homo sapien
agttgtaccagctcattctctaaag

SEQ ID NO: 5211160 - DNA, 25 bp, Homo sapien
ggtagttgtaccagctcattctcta

SEQ ID NO: 5211161 - DNA, 25 bp, Homo sapien
ctcactaattgcgggtatgttttct

SEQ ID NO: 5211162 - DNA, 25 bp, Homo sapien
aattgcgggtatgttttctgttaag

SEQ ID NO: 5211163 - DNA, 25 bp, Homo sapien
tcacatggttttcataattacttac

SEQ ID NO: 5211164 - DNA, 25 bp, Homo sapien
ctgtttcacatggttttcataatta

SEQ ID NO: 5211165 - DNA, 25 bp, Homo sapien
gtttcacatggttttcataattact

SEQ ID NO: 5211166 - DNA, 25 bp, Homo sapien
ttcacatggttttcataattactta

SEQ ID NO: 5211167 - DNA, 25 bp, Homo sapien
caaacagaaaacacggttgcaatta

SEQ ID NO: 5211168 - DNA, 25 bp, Homo sapien
cacggagtcccttttattgtaaatg

SEQ ID NO: 5211169 - DNA, 25 bp, Homo sapien
ttaaaaagcttatcctccaccgcag

SEQ ID NO: 5211170 - DNA, 25 bp, Homo sapien
catgaaaaggctttccctatacaaa

SEQ ID NO: 5211171 - DNA, 25 bp, Homo sapien
cttagtctctttagacagcagcaat

SEQ ID NO: 5211172 - DNA, 25 bp, Homo sapien
ttagtctctttagacagcagcaatg

SEQ ID NO: 5211173 - DNA, 25 bp, Homo sapien
tcttagtctctttagacagcagcaa

SEQ ID NO: 5211174 - DNA, 25 bp, Homo sapien
tagtctctttagacagcagcaatga

SEQ ID NO: 5211175 - DNA, 25 bp, Homo sapien
gatcctgtttcccaaaagagagtgt

SEQ ID NO: 5211176 - DNA, 25 bp, Homo sapien
atgtaccaagcccttaaaacacaca

SEQ ID NO: 5211177 - DNA, 25 bp, Homo sapien
aaaaggataaacacaaacgatcctg

SEQ ID NO: 5211178 - DNA, 25 bp, Homo sapien
actttctaatttgacacctatgtag

SEQ ID NO: 5211179 - DNA, 25 bp, Homo sapien
aacctgtgttacttgtatcctggac

SEQ ID NO: 5211180 - DNA, 25 bp, Homo sapien
caactgatgtataatgtcttctcct

SEQ ID NO: 5211181 - DNA, 25 bp, Homo sapien
ccagctgtagtctattttcctaaat

SEQ ID NO: 5211182 - DNA, 25 bp, Homo sapien
catatctacatcttcaggaatttcc

SEQ ID NO: 5211183 - DNA, 25 bp, Homo sapien
acacaaagtccaaggatcctcccca

SEQ ID NO: 5211184 - DNA, 25 bp, Homo sapien
aatagatgtttttagaatatcaaca

SEQ ID NO: 5211185 - DNA, 25 bp, Homo sapien
tcaacatacaatcaaaaacacaaag

SEQ ID NO: 5211186 - DNA, 25 bp, Homo sapien
tccaaggatcctccccatctccaag

SEQ ID NO: 5211187 - DNA, 25 bp, Homo sapien
gaggccccacttcatagttcacaga

SEQ ID NO: 5211188 - DNA, 25 bp, Homo sapien
tgctgtatccccacgtgttagaagg

SEQ ID NO: 5211189 - DNA, 25 bp, Homo sapien
tactagcaactggactttgggtcag

SEQ ID NO: 5211190 - DNA, 25 bp, Homo sapien
tttaggatgctacagaccgggtggt

SEQ ID NO: 5211191 - DNA, 25 bp, Homo sapien
cagtctgagatccatggacctgctc

SEQ ID NO: 5211192 - DNA, 25 bp, Homo sapien
aaaatcagtgacgaactcacagggc

SEQ ID NO: 5211193 - DNA, 25 bp, Homo sapien
tgagaggtctacttcaatggcagtc

SEQ ID NO: 5211194 - DNA, 25 bp, Homo sapien
tacagagggtcatgttaaaagccat

SEQ ID NO: 5211195 - DNA, 25 bp, Homo sapien
gatagggctaacagagttctgggca

SEQ ID NO: 5211196 - DNA, 25 bp, Homo sapien
caaggttgcaattaagtagcaaggc

SEQ ID NO: 5211197 - DNA, 25 bp, Homo sapien
gaacccaggcttcgtagagattcaa

SEQ ID NO: 5211198 - DNA, 25 bp, Homo sapien
tcaggcaaaggatacctcaagcctt

SEQ ID NO: 5211199 - DNA, 25 bp, Homo sapien
tcctgaagagtaaatgtggaccgag

SEQ ID NO: 5211200 - DNA, 25 bp, Homo sapien
gggtacattccacaacatcctgaag

SEQ ID NO: 5211201 - DNA, 25 bp, Homo sapien
ctgggggtacattccacaacatcct

SEQ ID NO: 5211202 - DNA, 25 bp, Homo sapien
cctgaagagtaaatgtggaccgagt

SEQ ID NO: 5211203 - DNA, 25 bp, Homo sapien
agcttcaggatgatgcctgggatct

SEQ ID NO: 5211204 - DNA, 25 bp, Homo sapien
cttcaggatgatgcctgggatctgc

SEQ ID NO: 5211205 - DNA, 25 bp, Homo sapien
atgatgcctgggatctgcagagcag

SEQ ID NO: 5211206 - DNA, 25 bp, Homo sapien
caggatgatgcctgggatctgcaga

SEQ ID NO: 5211207 - DNA, 25 bp, Homo sapien
cagccacggatggagatgtagcctc

SEQ ID NO: 5211208 - DNA, 25 bp, Homo sapien
gcagaattcctcagtgttagcacag

SEQ ID NO: 5211209 - DNA, 25 bp, Homo sapien
taaactgactgactgacctacctaa

SEQ ID NO: 5211210 - DNA, 25 bp, Homo sapien
acaaagtctgcctgtccagccagca

SEQ ID NO: 5211211 - DNA, 25 bp, Homo sapien
taatgggaacaaggactgggcaatg

SEQ ID NO: 5211212 - DNA, 25 bp, Homo sapien
cagtcccttggcaacttgtgtggat

SEQ ID NO: 5211213 - DNA, 25 bp, Homo sapien
ttgtgtggatctggcaaagaggtaa

SEQ ID NO: 5211214 - DNA, 25 bp, Homo sapien
gaatgtggcattagccgtcctcata

SEQ ID NO: 5211215 - DNA, 25 bp, Homo sapien
tatgatgtcagttaagtattgctcc

SEQ ID NO: 5211216 - DNA, 25 bp, Homo sapien
tgaactggctacacttagtcacact

SEQ ID NO: 5211217 - DNA, 25 bp, Homo sapien
taatgttgtcttcctcttgatccac

SEQ ID NO: 5211218 - DNA, 25 bp, Homo sapien
gaattagcacaagtctgaactggct

SEQ ID NO: 5211219 - DNA, 25 bp, Homo sapien
aacatgagggtgtaagccttcagcc

SEQ ID NO: 5211220 - DNA, 25 bp, Homo sapien
caagatggtactttgccttaaccgt

SEQ ID NO: 5211221 - DNA, 25 bp, Homo sapien
gcatatgtagcacttcacagcatgg

SEQ ID NO: 5211222 - DNA, 25 bp, Homo sapien
gcaacatgtctgtaccaagatggta

SEQ ID NO: 5211223 - DNA, 25 bp, Homo sapien
gcggtcctgatgcaaaagaagttag

SEQ ID NO: 5211224 - DNA, 25 bp, Homo sapien
tgtgccttgagaactaaaagctgtt

SEQ ID NO: 5211225 - DNA, 25 bp, Homo sapien
aatactctgggaaacaagctctttg

SEQ ID NO: 5211226 - DNA, 25 bp, Homo sapien
tgcagaattccaataaatggctggg

SEQ ID NO: 5211227 - DNA, 25 bp, Homo sapien
ctcatcacatgttcaagtcctcctc

SEQ ID NO: 5211228 - DNA, 25 bp, Homo sapien
tcagggccacagagttggtcctttc

SEQ ID NO: 5211229 - DNA, 25 bp, Homo sapien
tctccactttcctagaggaccattc

SEQ ID NO: 5211230 - DNA, 25 bp, Homo sapien
cactttcgtcaatgacctggctttg

SEQ ID NO: 5211231 - DNA, 25 bp, Homo sapien
tattgtcaaggagcttataatacaa

SEQ ID NO: 5211232 - DNA, 25 bp, Homo sapien
tgataacatgatcttacaaactctc

SEQ ID NO: 5211233 - DNA, 25 bp, Homo sapien
aaaaaagtggatactattgtcaagg

SEQ ID NO: 5211234 - DNA, 25 bp, Homo sapien
aagaggggccagttgcttatatctg

SEQ ID NO: 5211235 - DNA, 25 bp, Homo sapien
caggaccagcatcatggtgacgctc

SEQ ID NO: 5211236 - DNA, 25 bp, Homo sapien
gcctcaggcagcaagtcagcattca

SEQ ID NO: 5211237 - DNA, 25 bp, Homo sapien
gcagctcagtgttgtcaggaccagc

SEQ ID NO: 5211238 - DNA, 25 bp, Homo sapien
tcccatttgactgcaagatgcctgc

SEQ ID NO: 5211239 - DNA, 25 bp, Homo sapien
gggtggagatattgcctatgtttct

SEQ ID NO: 5211240 - DNA, 25 bp, Homo sapien
gaaaaggggtggagatattgcctat

SEQ ID NO: 5211241 - DNA, 25 bp, Homo sapien
gagatattgcctatgtttctgggca

SEQ ID NO: 5211242 - DNA, 25 bp, Homo sapien
tggagatattgcctatgtttctggg

SEQ ID NO: 5211243 - DNA, 25 bp, Homo sapien
cattttagccacaaaggaggaacaa

SEQ ID NO: 5211244 - DNA, 25 bp, Homo sapien
tgtgggaacagcaatcattttagcc

SEQ ID NO: 5211245 - DNA, 25 bp, Homo sapien
tctgtagtaacattgaggtcatcct

SEQ ID NO: 5211246 - DNA, 25 bp, Homo sapien
aatacacatattcaaggcaaactct

SEQ ID NO: 5211247 - DNA, 25 bp, Homo sapien
caagtgttgatcaaaaatgtcagga

SEQ ID NO: 5211248 - DNA, 25 bp, Homo sapien
gattgtttgctatctcaaatcccaa

SEQ ID NO: 5211249 - DNA, 25 bp, Homo sapien
ggctgaagcatgcaaggtcgtgtct

SEQ ID NO: 5211250 - DNA, 25 bp, Homo sapien
gatagtgagagatccaagcttgtgg

SEQ ID NO: 5211251 - DNA, 25 bp, Homo sapien
tgttgtctctggaggaggtctgtca

SEQ ID NO: 5211252 - DNA, 25 bp, Homo sapien
aggtctgtcagtgctccagccagag

SEQ ID NO: 5211253 - DNA, 25 bp, Homo sapien
catgaaaatcacgtggtggtgcctc

SEQ ID NO: 5211254 - DNA, 25 bp, Homo sapien
accttgatggttgagctgtgtacag

SEQ ID NO: 5211255 - DNA, 25 bp, Homo sapien
caagcttcggaagacttaagatgag

SEQ ID NO: 5211256 - DNA, 25 bp, Homo sapien
taaatactgtgacatgggaagtgca

SEQ ID NO: 5211257 - DNA, 25 bp, Homo sapien
ggaggagcctcaaaccagagaaagg

SEQ ID NO: 5211258 - DNA, 25 bp, Homo sapien
gacatgggaagtgcaatttgctgtg

SEQ ID NO: 5211259 - DNA, 25 bp, Homo sapien
ttaatccagcgtgccttcccaattc

SEQ ID NO: 5211260 - DNA, 25 bp, Homo sapien
ttgaacgcatgcgcaggccgggtct

SEQ ID NO: 5211261 - DNA, 25 bp, Homo sapien
ggggaggagtttcgcgcctgcgcat

SEQ ID NO: 5211262 - DNA, 25 bp, Homo sapien
cctggggaggagtttcgcgcctgcg

SEQ ID NO: 5211263 - DNA, 25 bp, Homo sapien
tggggaggagtttcgcgcctgcgca

SEQ ID NO: 5211264 - DNA, 25 bp, Homo sapien
ctgaaggagcctacggcattagcca

SEQ ID NO: 5211265 - DNA, 25 bp, Homo sapien
cggcattagccacagcgcatgcgcg

SEQ ID NO: 5211266 - DNA, 25 bp, Homo sapien
gcattagccacagcgcatgcgcgct

SEQ ID NO: 5211267 - DNA, 25 bp, Homo sapien
agccacagcgcatgcgcgcttccag

SEQ ID NO: 5211268 - DNA, 25 bp, Homo sapien
tccaccgagcgcaagacacgcggga

SEQ ID NO: 5211269 - DNA, 25 bp, Homo sapien
ttccaccgagcgcaagacacgcggg

SEQ ID NO: 5211270 - DNA, 25 bp, Homo sapien
cgaattgtcggtggggatcagcaca

SEQ ID NO: 5211271 - DNA, 25 bp, Homo sapien
agagctgtcctctggtcgcgtccct

SEQ ID NO: 5211272 - DNA, 25 bp, Homo sapien
tctggtcgcgtccctcggctgggca

SEQ ID NO: 5211273 - DNA, 25 bp, Homo sapien
gctgcttagatcctccttgtgtggg

SEQ ID NO: 5211274 - DNA, 25 bp, Homo sapien
tccaggagccttttcgtcgcgtctc

SEQ ID NO: 5211275 - DNA, 25 bp, Homo sapien
gagccttttcgtcgcgtctcacact

SEQ ID NO: 5211276 - DNA, 25 bp, Homo sapien
cttcagggtccagtggcgcccggtc

SEQ ID NO: 5211277 - DNA, 25 bp, Homo sapien
cgcccggtcccgagtccaggagcct

SEQ ID NO: 5211278 - DNA, 25 bp, Homo sapien
tctggttaacggagaagcagcagct

SEQ ID NO: 5211279 - DNA, 25 bp, Homo sapien
ccagtttggtatgagtgacaaccca

SEQ ID NO: 5211280 - DNA, 25 bp, Homo sapien
gaccccgggttgctggcatggttaa

SEQ ID NO: 5211281 - DNA, 25 bp, Homo sapien
caacccaatgcgtgttttaggacca

SEQ ID NO: 5211282 - DNA, 25 bp, Homo sapien
attttgtgaacatgactgattacat

SEQ ID NO: 5211283 - DNA, 25 bp, Homo sapien
agggctcaactaagtgaaaactaag

SEQ ID NO: 5211284 - DNA, 25 bp, Homo sapien
catagtatcacaagagcctctaaaa

SEQ ID NO: 5211285 - DNA, 25 bp, Homo sapien
tcatttatttgtaggggagggctca

SEQ ID NO: 5211286 - DNA, 25 bp, Homo sapien
ggttagaaagttcatccaccacaat

SEQ ID NO: 5211287 - DNA, 25 bp, Homo sapien
aaggttagaaagttcatccaccaca

SEQ ID NO: 5211288 - DNA, 25 bp, Homo sapien
tagaaagttcatccaccacaatttt

SEQ ID NO: 5211289 - DNA, 25 bp, Homo sapien
gttagaaagttcatccaccacaatt

SEQ ID NO: 5211290 - DNA, 25 bp, Homo sapien
aatatattgctgttctgttgttgcc

SEQ ID NO: 5211291 - DNA, 25 bp, Homo sapien
ctgcaagaaagaatatattgctgtt

SEQ ID NO: 5211292 - DNA, 25 bp, Homo sapien
caagaaagaatatattgctgttctg

SEQ ID NO: 5211293 - DNA, 25 bp, Homo sapien
gaaagaatatattgctgttctgttg

SEQ ID NO: 5211294 - DNA, 25 bp, Homo sapien
ctctcagacagcatttctgttcggt

SEQ ID NO: 5211295 - DNA, 25 bp, Homo sapien
ttgctctcagacagcatttctgttc

SEQ ID NO: 5211296 - DNA, 25 bp, Homo sapien
tcttgctctcagacagcatttctgt

SEQ ID NO: 5211297 - DNA, 25 bp, Homo sapien
tgctctcagacagcatttctgttcg

SEQ ID NO: 5211298 - DNA, 25 bp, Homo sapien
cccacaataccttggaggcttaaag

SEQ ID NO: 5211299 - DNA, 25 bp, Homo sapien
cagatgagtataatttaggcacccc

SEQ ID NO: 5211300 - DNA, 25 bp, Homo sapien
tatataactgttgactcatcttcgg

SEQ ID NO: 5211301 - DNA, 25 bp, Homo sapien
agcacttggctaagcacttttaaca

SEQ ID NO: 5211302 - DNA, 25 bp, Homo sapien
tgttatgtgaaatcaggttgactat

SEQ ID NO: 5211303 - DNA, 25 bp, Homo sapien
tggtcttgtctaagttttctatttc

SEQ ID NO: 5211304 - DNA, 25 bp, Homo sapien
ggttgactatttcttgattttggtc

SEQ ID NO: 5211305 - DNA, 25 bp, Homo sapien
tcttttttcagttcatccaatatat

SEQ ID NO: 5211306 - DNA, 25 bp, Homo sapien
atagtaagtcctcttttaaatcttg

SEQ ID NO: 5211307 - DNA, 25 bp, Homo sapien
caagtgtaggacgtgagcagaaaat

SEQ ID NO: 5211308 - DNA, 25 bp, Homo sapien
taaacactggtagttaacatcagac

SEQ ID NO: 5211309 - DNA, 25 bp, Homo sapien
cacaggctgggtagtcaaaacaccc

SEQ ID NO: 5211310 - DNA, 25 bp, Homo sapien
aaacacccctcaagtgtaggacgtg

SEQ ID NO: 5211311 - DNA, 25 bp, Homo sapien
caaagcaagctacggcgaccaaaaa

SEQ ID NO: 5211312 - DNA, 25 bp, Homo sapien
ccctaccaaaccataaataatgact

SEQ ID NO: 5211313 - DNA, 25 bp, Homo sapien
taatgactagatgcttgataatata

SEQ ID NO: 5211314 - DNA, 25 bp, Homo sapien
aaatgccaaagcaagctacggcgac

SEQ ID NO: 5211315 - DNA, 25 bp, Homo sapien
ttgtaaaataatgcatccggaaatg

SEQ ID NO: 5211316 - DNA, 25 bp, Homo sapien
ctgatttgccaatccagatgtttgg

SEQ ID NO: 5211317 - DNA, 25 bp, Homo sapien
cttaagatcaattctgaaaagtcca

SEQ ID NO: 5211318 - DNA, 25 bp, Homo sapien
cggaaatgacagtagacttaagatc

SEQ ID NO: 5211319 - DNA, 25 bp, Homo sapien
gtctccaatgcagcttgtggcaaca

SEQ ID NO: 5211320 - DNA, 25 bp, Homo sapien
tgtgtacatcagtaagaaagacttg

SEQ ID NO: 5211321 - DNA, 25 bp, Homo sapien
gatacaaatgctggtaagtctgctg

SEQ ID NO: 5211322 - DNA, 25 bp, Homo sapien
ggcttcatttgctaccactgataca

SEQ ID NO: 5211323 - DNA, 25 bp, Homo sapien
ttgcaataaccatggaatcaatgcc

SEQ ID NO: 5211324 - DNA, 25 bp, Homo sapien
aagacacgtttcttgactgctacac

SEQ ID NO: 5211325 - DNA, 25 bp, Homo sapien
gaagatcaattggttcatctaaagg

SEQ ID NO: 5211326 - DNA, 25 bp, Homo sapien
catctaaaggaatatgacggtcagc

SEQ ID NO: 5211327 - DNA, 25 bp, Homo sapien
tctttagagaattcttctgaaggta

SEQ ID NO: 5211328 - DNA, 25 bp, Homo sapien
tctctgttaaaggtagttggcatgg

SEQ ID NO: 5211329 - DNA, 25 bp, Homo sapien
aaaggtagttggcatggtcttttct

SEQ ID NO: 5211330 - DNA, 25 bp, Homo sapien
ctttagagaattcttctgaaggtat

SEQ ID NO: 5211331 - DNA, 25 bp, Homo sapien
tatccaatggccgaattaagtgaca

SEQ ID NO: 5211332 - DNA, 25 bp, Homo sapien
ttagtcccgcccttcctgtgattcg

SEQ ID NO: 5211333 - DNA, 25 bp, Homo sapien
tatcatccaaaactgtatccaatgg

SEQ ID NO: 5211334 - DNA, 25 bp, Homo sapien
gaagggctaacagcttgtagttcct

SEQ ID NO: 5211335 - DNA, 25 bp, Homo sapien
caggagaagaaacactgtgtcatac

SEQ ID NO: 5211336 - DNA, 25 bp, Homo sapien
aaatgttatcaactacacagtaaag

SEQ ID NO: 5211337 - DNA, 25 bp, Homo sapien
aatgttatcaactacacagtaaaga

SEQ ID NO: 5211338 - DNA, 25 bp, Homo sapien
tgttatcaactacacagtaaagaaa

SEQ ID NO: 5211339 - DNA, 25 bp, Homo sapien
aaaaatgttatcaactacacagtaa

SEQ ID NO: 5211340 - DNA, 25 bp, Homo sapien
tctagaagaaattcgacccagttcc

SEQ ID NO: 5211341 - DNA, 25 bp, Homo sapien
gaataacctgcaagttgctcatctg

SEQ ID NO: 5211342 - DNA, 25 bp, Homo sapien
tccagcccatgcgactgaaagcgga

SEQ ID NO: 5211343 - DNA, 25 bp, Homo sapien
tgaaagcggacacgatgacgagaat

SEQ ID NO: 5211344 - DNA, 25 bp, Homo sapien
ggaatatccagtgtaaggactacct

SEQ ID NO: 5211345 - DNA, 25 bp, Homo sapien
tgtgttcaaaaaacgtggcagagga

SEQ ID NO: 5211346 - DNA, 25 bp, Homo sapien
cccttactgggaggaaagcaaacat

SEQ ID NO: 5211347 - DNA, 25 bp, Homo sapien
gaaatgtctatagagacaaagccag

SEQ ID NO: 5211348 - DNA, 25 bp, Homo sapien
tatagaagggctccacagtcctgaa

SEQ ID NO: 5211349 - DNA, 25 bp, Homo sapien
tgtaaaggcaactacaagtcagtgg

SEQ ID NO: 5211350 - DNA, 25 bp, Homo sapien
tgacactttagggatatggaaccaa

SEQ ID NO: 5211351 - DNA, 25 bp, Homo sapien
catgggctaggaccagaaacttaag

SEQ ID NO: 5211352 - DNA, 25 bp, Homo sapien
tagacagataatataaccactatgt

SEQ ID NO: 5211353 - DNA, 25 bp, Homo sapien
atcaacctgctttgatttatacaca

SEQ ID NO: 5211354 - DNA, 25 bp, Homo sapien
tatactacaaaatagtctaaatctc

SEQ ID NO: 5211355 - DNA, 25 bp, Homo sapien
taaattaggtttattgtgtccagaa

SEQ ID NO: 5211356 - DNA, 25 bp, Homo sapien
tccacagctgcaaggcgtaaaagta

SEQ ID NO: 5211357 - DNA, 25 bp, Homo sapien
ttcccaaatcggcagagaatttaga

SEQ ID NO: 5211358 - DNA, 25 bp, Homo sapien
actgcatggcccgtttgggcagaag

SEQ ID NO: 5211359 - DNA, 25 bp, Homo sapien
gagcagaggctgtaagaccaagttc

SEQ ID NO: 5211360 - DNA, 25 bp, Homo sapien
tagtctccttttcaatagaaagatt

SEQ ID NO: 5211361 - DNA, 25 bp, Homo sapien
agtctccttttcaatagaaagattt

SEQ ID NO: 5211362 - DNA, 25 bp, Homo sapien
tagtaaagcagcagagtatcttact

SEQ ID NO: 5211363 - DNA, 25 bp, Homo sapien
gaaattccatggttttagaagctct

SEQ ID NO: 5211364 - DNA, 25 bp, Homo sapien
tgttaaaggctatttagagacctca

SEQ ID NO: 5211365 - DNA, 25 bp, Homo sapien
gagacctcaccctaagtcaacgcat

SEQ ID NO: 5211366 - DNA, 25 bp, Homo sapien
gggctgagaacagtcgtcgccgcct

SEQ ID NO: 5211367 - DNA, 25 bp, Homo sapien
caagcccgcttagcgcttagtccag

SEQ ID NO: 5211368 - DNA, 25 bp, Homo sapien
ttagtccagcggcatgccgtgggca

SEQ ID NO: 5211369 - DNA, 25 bp, Homo sapien
aaacaccgaaacagagtagcagagg

SEQ ID NO: 5211370 - DNA, 25 bp, Homo sapien
cacatggtaagagacggaacaatag

SEQ ID NO: 5211371 - DNA, 25 bp, Homo sapien
cagaggtagagttcactctgccagg

SEQ ID NO: 5211372 - DNA, 25 bp, Homo sapien
caacattggggaatctattttaaca

SEQ ID NO: 5211373 - DNA, 25 bp, Homo sapien
cttgtgagaccaagcttacaatcat

SEQ ID NO: 5211374 - DNA, 25 bp, Homo sapien
ctaattaaatctagtgtgtcctttt

SEQ ID NO: 5211375 - DNA, 25 bp, Homo sapien
tctaattaaatctagtgtgtccttt

SEQ ID NO: 5211376 - DNA, 25 bp, Homo sapien
atccttttttgggcaatcttaacat

SEQ ID NO: 5211377 - DNA, 25 bp, Homo sapien
agtctaagagggcagtagggtccac

SEQ ID NO: 5211378 - DNA, 25 bp, Homo sapien
gacaaccagctaactagtgcagtag

SEQ ID NO: 5211379 - DNA, 25 bp, Homo sapien
tcagtaggattgcagtggagaagcc

SEQ ID NO: 5211380 - DNA, 25 bp, Homo sapien
catgggaggtctacttgagagcgca

SEQ ID NO: 5211381 - DNA, 25 bp, Homo sapien
gggtgacgtagtaagactctgttcc

SEQ ID NO: 5211382 - DNA, 25 bp, Homo sapien
tgacgtagtaagactctgttccaaa

SEQ ID NO: 5211383 - DNA, 25 bp, Homo sapien
atggactttggggattctagaggaa

SEQ ID NO: 5211384 - DNA, 25 bp, Homo sapien
tggactttggggattctagaggaaa

SEQ ID NO: 5211385 - DNA, 25 bp, Homo sapien
ggccaggagccaacagtattaagca

SEQ ID NO: 5211386 - DNA, 25 bp, Homo sapien
ggatttgttaaggttcccagcctca

SEQ ID NO: 5211387 - DNA, 25 bp, Homo sapien
ctgttgcagtggaaaagggtgttct

SEQ ID NO: 5211388 - DNA, 25 bp, Homo sapien
tccccaggcacatgatagtagagtg

SEQ ID NO: 5211389 - DNA, 25 bp, Homo sapien
ggatcctttgtaatatcagtcaaac

SEQ ID NO: 5211390 - DNA, 25 bp, Homo sapien
ctggatcctttgtaatatcagtcaa

SEQ ID NO: 5211391 - DNA, 25 bp, Homo sapien
tggatcctttgtaatatcagtcaaa

SEQ ID NO: 5211392 - DNA, 25 bp, Homo sapien
ctgaatgttaactttagcataatat

SEQ ID NO: 5211393 - DNA, 25 bp, Homo sapien
aatttgtgtggtactgaatgttaac

SEQ ID NO: 5211394 - DNA, 25 bp, Homo sapien
cattcacgtcttcatcatagatttc

SEQ ID NO: 5211395 - DNA, 25 bp, Homo sapien
ggatcatatgttggatcttcattca

SEQ ID NO: 5211396 - DNA, 25 bp, Homo sapien
tagtaagccaatagcctgtttcaaa

SEQ ID NO: 5211397 - DNA, 25 bp, Homo sapien
ttatagcattagtaagccaatagcc

SEQ ID NO: 5211398 - DNA, 25 bp, Homo sapien
cagatatcaagataatcctgattat

SEQ ID NO: 5211399 - DNA, 25 bp, Homo sapien
tagcattagtaagccaatagcctgt

SEQ ID NO: 5211400 - DNA, 25 bp, Homo sapien
taaactcagtagaaatggaatcaga

SEQ ID NO: 5211401 - DNA, 25 bp, Homo sapien
taggtatcctatccctcttctgata

SEQ ID NO: 5211402 - DNA, 25 bp, Homo sapien
tctttaaactcagtagaaatggaat

SEQ ID NO: 5211403 - DNA, 25 bp, Homo sapien
catattaactttaggtatcctatcc

SEQ ID NO: 5211404 - DNA, 25 bp, Homo sapien
tattttgactggttagtagaatatg

SEQ ID NO: 5211405 - DNA, 25 bp, Homo sapien
tatacactatacaccctgatctcaa

SEQ ID NO: 5211406 - DNA, 25 bp, Homo sapien
tatggtttaatcaacataagggaca

SEQ ID NO: 5211407 - DNA, 25 bp, Homo sapien
taataatatacactatacaccctga

SEQ ID NO: 5211408 - DNA, 25 bp, Homo sapien
aaattctggcatttaaaatctcttc

SEQ ID NO: 5211409 - DNA, 25 bp, Homo sapien
tctctttgtagtgaaaattctggca

SEQ ID NO: 5211410 - DNA, 25 bp, Homo sapien
gggtgctgatatcaaattcaattcc

SEQ ID NO: 5211411 - DNA, 25 bp, Homo sapien
cattctcaattgaaggggtgctgat

SEQ ID NO: 5211412 - DNA, 25 bp, Homo sapien
tctgtgagggtgatagatgtaccta

SEQ ID NO: 5211413 - DNA, 25 bp, Homo sapien
catttggagagctgtcgagtgcctg

SEQ ID NO: 5211414 - DNA, 25 bp, Homo sapien
cactctttggttacctgttctggga

SEQ ID NO: 5211415 - DNA, 25 bp, Homo sapien
tgagtgtccagagatttctactgca

SEQ ID NO: 5211416 - DNA, 25 bp, Homo sapien
tattagcagcacaatctcgtatttt

SEQ ID NO: 5211417 - DNA, 25 bp, Homo sapien
taaatgtattagcagcacaatctcg

SEQ ID NO: 5211418 - DNA, 25 bp, Homo sapien
aatgtattagcagcacaatctcgta

SEQ ID NO: 5211419 - DNA, 25 bp, Homo sapien
tgtattagcagcacaatctcgtatt

SEQ ID NO: 5211420 - DNA, 25 bp, Homo sapien
ttccatgactggtattgagtaatat

SEQ ID NO: 5211421 - DNA, 25 bp, Homo sapien
tccatgactggtattgagtaatatt

SEQ ID NO: 5211422 - DNA, 25 bp, Homo sapien
ccatgactggtattgagtaatattc

SEQ ID NO: 5211423 - DNA, 25 bp, Homo sapien
accactgtgtcttatatagttgctg

SEQ ID NO: 5211424 - DNA, 25 bp, Homo sapien
cagtctcagattgttcactatttca

SEQ ID NO: 5211425 - DNA, 25 bp, Homo sapien
gttcatgtaattgagcatctgtcag

SEQ ID NO: 5211426 - DNA, 25 bp, Homo sapien
tatttcatttatggctccccaccac

SEQ ID NO: 5211427 - DNA, 25 bp, Homo sapien
gctgaacgtaacaaagcgcctctgg

SEQ ID NO: 5211428 - DNA, 25 bp, Homo sapien
taatagaaactctgttgtgcagggc

SEQ ID NO: 5211429 - DNA, 25 bp, Homo sapien
caacagcggacttcataccaaatgg

SEQ ID NO: 5211430 - DNA, 25 bp, Homo sapien
tacggctaaatgtgtggaaaactgc

SEQ ID NO: 5211431 - DNA, 25 bp, Homo sapien
tcctaagttgttcaagaagactcat

SEQ ID NO: 5211432 - DNA, 25 bp, Homo sapien
tctggcaagattacatcgaacagtg

SEQ ID NO: 5211433 - DNA, 25 bp, Homo sapien
gacaacgcattaaaagcagacctgg

SEQ ID NO: 5211434 - DNA, 25 bp, Homo sapien
caggcatgtcatatgcaacctgaca

SEQ ID NO: 5211435 - DNA, 25 bp, Homo sapien
aaagcggcaaagtgaatcggcatcc

SEQ ID NO: 5211436 - DNA, 25 bp, Homo sapien
tctaatgagcaagcctgtgcagcaa

SEQ ID NO: 5211437 - DNA, 25 bp, Homo sapien
tgcaaacgttgtcatagaaagcggc

SEQ ID NO: 5211438 - DNA, 25 bp, Homo sapien
ggatccttcctacagagagcaataa

SEQ ID NO: 5211439 - DNA, 25 bp, Homo sapien
ctcattgcaggctctgcctctcggt

SEQ ID NO: 5211440 - DNA, 25 bp, Homo sapien
ggcatggaccaccatacccgttaat

SEQ ID NO: 5211441 - DNA, 25 bp, Homo sapien
ttgcaggctctgcctctcggttcaa

SEQ ID NO: 5211442 - DNA, 25 bp, Homo sapien
gcatggaccaccatacccgttaatt

SEQ ID NO: 5211443 - DNA, 25 bp, Homo sapien
tagcaccgatagaaaacaggtattg

SEQ ID NO: 5211444 - DNA, 25 bp, Homo sapien
gtattgaatagtgtccagtgctcct

SEQ ID NO: 5211445 - DNA, 25 bp, Homo sapien
gcaagtaacagtggagtgcactgat

SEQ ID NO: 5211446 - DNA, 25 bp, Homo sapien
cctgaagtggcagcaagtaacagtg

SEQ ID NO: 5211447 - DNA, 25 bp, Homo sapien
caaagttttccacactgggagttca

SEQ ID NO: 5211448 - DNA, 25 bp, Homo sapien
cacactgggagttcaggaatattta

SEQ ID NO: 5211449 - DNA, 25 bp, Homo sapien
tttccacactgggagttcaggaata

SEQ ID NO: 5211450 - DNA, 25 bp, Homo sapien
tccacactgggagttcaggaatatt

SEQ ID NO: 5211451 - DNA, 25 bp, Homo sapien
cagagtatcaataactaaactgaat

SEQ ID NO: 5211452 - DNA, 25 bp, Homo sapien
catggaaataaaactacgtttgcac

SEQ ID NO: 5211453 - DNA, 25 bp, Homo sapien
aaaatgcagctctttattattcata

SEQ ID NO: 5211454 - DNA, 25 bp, Homo sapien
tatagtctgggtcacagatctttga

SEQ ID NO: 5211455 - DNA, 25 bp, Homo sapien
aggacttcccccacaatggctgtag

SEQ ID NO: 5211456 - DNA, 25 bp, Homo sapien
ggtgaatttttatgcgcttttaggc

SEQ ID NO: 5211457 - DNA, 25 bp, Homo sapien
ttctgtttgtgtcattgtcaggact

SEQ ID NO: 5211458 - DNA, 25 bp, Homo sapien
cccccacaatggctgtaggaagcag

SEQ ID NO: 5211459 - DNA, 25 bp, Homo sapien
gtgcacagctccctatgaagtactg

SEQ ID NO: 5211460 - DNA, 25 bp, Homo sapien
tgcatgcattaaattcccctctgtg

SEQ ID NO: 5211461 - DNA, 25 bp, Homo sapien
gaaaataatacaactccctcggcta

SEQ ID NO: 5211462 - DNA, 25 bp, Homo sapien
gacttagattggctggtcacatact

SEQ ID NO: 5211463 - DNA, 25 bp, Homo sapien
ggcaatgaaatgcttgattctgttt

SEQ ID NO: 5211464 - DNA, 25 bp, Homo sapien
tgcacaaaaggcaatgaaatgcttg

SEQ ID NO: 5211465 - DNA, 25 bp, Homo sapien
tgtaatttgcacaaaaggcaatgaa

SEQ ID NO: 5211466 - DNA, 25 bp, Homo sapien
cacaaaaggcaatgaaatgcttgat

SEQ ID NO: 5211467 - DNA, 25 bp, Homo sapien
ttaagtgttcaacagaaaaacacag

SEQ ID NO: 5211468 - DNA, 25 bp, Homo sapien
gttaagtgttcaacagaaaaacaca

SEQ ID NO: 5211469 - DNA, 25 bp, Homo sapien
tgttaagtgttcaacagaaaaacac

SEQ ID NO: 5211470 - DNA, 25 bp, Homo sapien
ctgttaagtgttcaacagaaaaaca

SEQ ID NO: 5211471 - DNA, 25 bp, Homo sapien
tacatctccagtattgatcatttgc

SEQ ID NO: 5211472 - DNA, 25 bp, Homo sapien
tcatttgctaagcaaattacttcca

SEQ ID NO: 5211473 - DNA, 25 bp, Homo sapien
tccagtattgatcatttgctaagca

SEQ ID NO: 5211474 - DNA, 25 bp, Homo sapien
aattacttccaaggacatgacggcc

SEQ ID NO: 5211475 - DNA, 25 bp, Homo sapien
tcacctgtcttctgcgccgatcatg

SEQ ID NO: 5211476 - DNA, 25 bp, Homo sapien
aatcacctgtcttctgcgccgatca

SEQ ID NO: 5211477 - DNA, 25 bp, Homo sapien
acctgtcttctgcgccgatcatgct

SEQ ID NO: 5211478 - DNA, 25 bp, Homo sapien
aaatcacctgtcttctgcgccgatc

SEQ ID NO: 5211479 - DNA, 25 bp, Homo sapien
cactgcacttttgtgggttgagata

SEQ ID NO: 5211480 - DNA, 25 bp, Homo sapien
cacaaaccagtaggttgattagaga

SEQ ID NO: 5211481 - DNA, 25 bp, Homo sapien
gaatgacagcacagcgagagtgtac

SEQ ID NO: 5211482 - DNA, 25 bp, Homo sapien
gagatggaatgcctcccgcttctac

SEQ ID NO: 5211483 - DNA, 25 bp, Homo sapien
tctggaccgtactcaaatgccaact

SEQ ID NO: 5211484 - DNA, 25 bp, Homo sapien
ccctgctgtattcttccctgagagt

SEQ ID NO: 5211485 - DNA, 25 bp, Homo sapien
tgtcactgaatagtaacgtgggttt

SEQ ID NO: 5211486 - DNA, 25 bp, Homo sapien
aatactccctcatctacttctggac

SEQ ID NO: 5211487 - DNA, 25 bp, Homo sapien
caatacccgtatacagttcattaca

SEQ ID NO: 5211488 - DNA, 25 bp, Homo sapien
tttaagttcaatagatttatcaggc

SEQ ID NO: 5211489 - DNA, 25 bp, Homo sapien
aatagatttatcaggcttgggattc

SEQ ID NO: 5211490 - DNA, 25 bp, Homo sapien
acatttactagcacattttctatgt

SEQ ID NO: 5211491 - DNA, 25 bp, Homo sapien
cagaactcagaaatctgataagata

SEQ ID NO: 5211492 - DNA, 25 bp, Homo sapien
atcagaactcagaaatctgataaga

SEQ ID NO: 5211493 - DNA, 25 bp, Homo sapien
tctctcacagctctttgattgtttt

SEQ ID NO: 5211494 - DNA, 25 bp, Homo sapien
actcagaaatctgataagatatggg

SEQ ID NO: 5211495 - DNA, 25 bp, Homo sapien
gaccatttgcagtagctgctgaaac

SEQ ID NO: 5211496 - DNA, 25 bp, Homo sapien
gataattggcctaatgcttcctgat

SEQ ID NO: 5211497 - DNA, 25 bp, Homo sapien
tcttggtactgagacgcactttagg

SEQ ID NO: 5211498 - DNA, 25 bp, Homo sapien
ttacagaacccaggagaccatttgc

SEQ ID NO: 5211499 - DNA, 25 bp, Homo sapien
atatttattttgtatttattcctgg

SEQ ID NO: 5211500 - DNA, 25 bp, Homo sapien
tatatttattttgtatttattcctg

SEQ ID NO: 5211501 - DNA, 25 bp, Homo sapien
atttattttgtatttattcctggtg

SEQ ID NO: 5211502 - DNA, 25 bp, Homo sapien
ttattttgtatttattcctggtgaa

SEQ ID NO: 5211503 - DNA, 25 bp, Homo sapien
ccactattcctgaatcagtacaaaa

SEQ ID NO: 5211504 - DNA, 25 bp, Homo sapien
aaaagtgtttgtgcattcatgtagc

SEQ ID NO: 5211505 - DNA, 25 bp, Homo sapien
ctttagatgctctataatccagcat

SEQ ID NO: 5211506 - DNA, 25 bp, Homo sapien
ggttaattatctctctattaaggcc

SEQ ID NO: 5211507 - DNA, 25 bp, Homo sapien
tcatgtagctaactatatcctttag

SEQ ID NO: 5211508 - DNA, 25 bp, Homo sapien
ttccttgtttatccagttgttatca

SEQ ID NO: 5211509 - DNA, 25 bp, Homo sapien
cttgtttatccagttgttatcagga

SEQ ID NO: 5211510 - DNA, 25 bp, Homo sapien
cagttgttatcaggatgagggcaca

SEQ ID NO: 5211511 - DNA, 25 bp, Homo sapien
tccagttgttatcaggatgagggca

SEQ ID NO: 5211512 - DNA, 25 bp, Homo sapien
cttcaaatgaatttaagaacaagtt

SEQ ID NO: 5211513 - DNA, 25 bp, Homo sapien
ttcaaatgaatttaagaacaagtta

SEQ ID NO: 5211514 - DNA, 25 bp, Homo sapien
tcaaatgaatttaagaacaagttaa

SEQ ID NO: 5211515 - DNA, 25 bp, Homo sapien
agcaattgcagcagaagatacagcc

SEQ ID NO: 5211516 - DNA, 25 bp, Homo sapien
aggaatcgctccctccatagctata

SEQ ID NO: 5211517 - DNA, 25 bp, Homo sapien
aaagagccaccagaggaggaatcgc

SEQ ID NO: 5211518 - DNA, 25 bp, Homo sapien
gcgttgtgacttgccagtgattcca

SEQ ID NO: 5211519 - DNA, 25 bp, Homo sapien
gtttgtcctgccaaggcccaaagtg

SEQ ID NO: 5211520 - DNA, 25 bp, Homo sapien
gctgtatccaatttgttctgccata

SEQ ID NO: 5211521 - DNA, 25 bp, Homo sapien
tgttgttttagtgtttgtcctgcca

SEQ ID NO: 5211522 - DNA, 25 bp, Homo sapien
ccttgttccttaacatctatttgaa

SEQ ID NO: 5211523 - DNA, 25 bp, Homo sapien
tcttagtaagcgaaccaatggtgca

SEQ ID NO: 5211524 - DNA, 25 bp, Homo sapien
gattttgatgcatcctgctgtcctt

SEQ ID NO: 5211525 - DNA, 25 bp, Homo sapien
tacttagagctatgacagcttcacc

SEQ ID NO: 5211526 - DNA, 25 bp, Homo sapien
caaatggatcccactgctctgatga

SEQ ID NO: 5211527 - DNA, 25 bp, Homo sapien
gaagggtgatttcttagtagttgga

SEQ ID NO: 5211528 - DNA, 25 bp, Homo sapien
tctacaaccaattgttgactgacag

SEQ ID NO: 5211529 - DNA, 25 bp, Homo sapien
ggataagtactggaaaggcattttc

SEQ ID NO: 5211530 - DNA, 25 bp, Homo sapien
gacaggattgcttgtatgggctaca

SEQ ID NO: 5211531 - DNA, 25 bp, Homo sapien
tatcgccgcccagttttagcaactg

SEQ ID NO: 5211532 - DNA, 25 bp, Homo sapien
tattcccatataagtcacacattcc

SEQ ID NO: 5211533 - DNA, 25 bp, Homo sapien
tccagccaacagaggctgcttgaca

SEQ ID NO: 5211534 - DNA, 25 bp, Homo sapien
aacagaggctgcttgacagaaggca

SEQ ID NO: 5211535 - DNA, 25 bp, Homo sapien
tttaatagctgagaaaatatccttt

SEQ ID NO: 5211536 - DNA, 25 bp, Homo sapien
gaaaatatcctttctgtgttcaggg

SEQ ID NO: 5211537 - DNA, 25 bp, Homo sapien
cagggaccaaccacagagctccatt

SEQ ID NO: 5211538 - DNA, 25 bp, Homo sapien
aactccctcataatttttaatagct

SEQ ID NO: 5211539 - DNA, 25 bp, Homo sapien
taaaggacatcagcatattcaaatc

SEQ ID NO: 5211540 - DNA, 25 bp, Homo sapien
gcatgccaaggaaaatgccacttca

SEQ ID NO: 5211541 - DNA, 25 bp, Homo sapien
aacacatcattccctaggacaatgc

SEQ ID NO: 5211542 - DNA, 25 bp, Homo sapien
aatgcatgccaaggaaaatgccact

SEQ ID NO: 5211543 - DNA, 25 bp, Homo sapien
cattattccactttccaatattaag

SEQ ID NO: 5211544 - DNA, 25 bp, Homo sapien
caactgttgattcaagaaaacgttc

SEQ ID NO: 5211545 - DNA, 25 bp, Homo sapien
aaaaagtgttaatgcatagcctgct

SEQ ID NO: 5211546 - DNA, 25 bp, Homo sapien
ttgttgaaagcgattattgaaggca

SEQ ID NO: 5211547 - DNA, 25 bp, Homo sapien
tagagtatttgtccctgtctggtca

SEQ ID NO: 5211548 - DNA, 25 bp, Homo sapien
cagttgttactaggttgaaggatca

SEQ ID NO: 5211549 - DNA, 25 bp, Homo sapien
tctggtcatagcagtgatcataggg

SEQ ID NO: 5211550 - DNA, 25 bp, Homo sapien
gacttcccagatacatacagttgtt

SEQ ID NO: 5211551 - DNA, 25 bp, Homo sapien
gaatacagactatcaactaaaatag

SEQ ID NO: 5211552 - DNA, 25 bp, Homo sapien
ctgtcaagacaatagtagaagtctg

SEQ ID NO: 5211553 - DNA, 25 bp, Homo sapien
tctaatgactttagccagtacaaca

SEQ ID NO: 5211554 - DNA, 25 bp, Homo sapien
aatatggtccatatctctaatgact

SEQ ID NO: 5211555 - DNA, 25 bp, Homo sapien
gctttgttgcacagcgatgtaaaga

SEQ ID NO: 5211556 - DNA, 25 bp, Homo sapien
tgcacagcgatgtaaagaacttttc

SEQ ID NO: 5211557 - DNA, 25 bp, Homo sapien
ttgttgcacagcgatgtaaagaact

SEQ ID NO: 5211558 - DNA, 25 bp, Homo sapien
gttgcacagcgatgtaaagaacttt

SEQ ID NO: 5211559 - DNA, 25 bp, Homo sapien
gatagcagagccgttggattgttcc

SEQ ID NO: 5211560 - DNA, 25 bp, Homo sapien
ggattgttcctaatgtggtaaatgc

SEQ ID NO: 5211561 - DNA, 25 bp, Homo sapien
tctattcccgagtacaaatgatagc

SEQ ID NO: 5211562 - DNA, 25 bp, Homo sapien
ggtaaatgcttctgggataccagct

SEQ ID NO: 5211563 - DNA, 25 bp, Homo sapien
taattagctatttcataggaaagtc

SEQ ID NO: 5211564 - DNA, 25 bp, Homo sapien
aattagctatttcataggaaagtct

SEQ ID NO: 5211565 - DNA, 25 bp, Homo sapien
ctaattagctatttcataggaaagt

SEQ ID NO: 5211566 - DNA, 25 bp, Homo sapien
taataggatgcggaaagcatttgca

SEQ ID NO: 5211567 - DNA, 25 bp, Homo sapien
tgaactgattaggtttattcctgca

SEQ ID NO: 5211568 - DNA, 25 bp, Homo sapien
tgtatgttaagtagccaagagcaga

SEQ ID NO: 5211569 - DNA, 25 bp, Homo sapien
aatgctgggttaatacttgcatctc

SEQ ID NO: 5211570 - DNA, 25 bp, Homo sapien
gtctcctctatcgatgatttcacta

SEQ ID NO: 5211571 - DNA, 25 bp, Homo sapien
ctaaacctcattaaagtctcctcta

SEQ ID NO: 5211572 - DNA, 25 bp, Homo sapien
tgcaacttctaacataggaccatac

SEQ ID NO: 5211573 - DNA, 25 bp, Homo sapien
tcttgttggatcttactaaacctca

SEQ ID NO: 5211574 - DNA, 25 bp, Homo sapien
tatcactacttggagagaagacttg

SEQ ID NO: 5211575 - DNA, 25 bp, Homo sapien
aatgttacaatttagcttccctggc

SEQ ID NO: 5211576 - DNA, 25 bp, Homo sapien
tatacccatagtagagattctcttc

SEQ ID NO: 5211577 - DNA, 25 bp, Homo sapien
tacatgggtcctattcggatgcact

SEQ ID NO: 5211578 - DNA, 25 bp, Homo sapien
ttatggatggtcctccattcttctc

SEQ ID NO: 5211579 - DNA, 25 bp, Homo sapien
aagataggaattatggatggtcctc

SEQ ID NO: 5211580 - DNA, 25 bp, Homo sapien
ggaattatggatggtcctccattct

SEQ ID NO: 5211581 - DNA, 25 bp, Homo sapien
gataggaattatggatggtcctcca

SEQ ID NO: 5211582 - DNA, 25 bp, Homo sapien
tcaagtgatataatagggaaggcct

SEQ ID NO: 5211583 - DNA, 25 bp, Homo sapien
tctgcagatctagtccattcaagtg

SEQ ID NO: 5211584 - DNA, 25 bp, Homo sapien
tgtgactctagcaaactgatcttga

SEQ ID NO: 5211585 - DNA, 25 bp, Homo sapien
tggtcctacacgaacaagcactaag

SEQ ID NO: 5211586 - DNA, 25 bp, Homo sapien
gaccactatatggtttgctagcttg

SEQ ID NO: 5211587 - DNA, 25 bp, Homo sapien
agcttgttatgtcaagttagcacca

SEQ ID NO: 5211588 - DNA, 25 bp, Homo sapien
tctctcctgagagccctaggtatag

SEQ ID NO: 5211589 - DNA, 25 bp, Homo sapien
taactaaaacatactaagagaacag

SEQ ID NO: 5211590 - DNA, 25 bp, Homo sapien
agagtcccatgaagttagttacagg

SEQ ID NO: 5211591 - DNA, 25 bp, Homo sapien
tgttttattagccttctgcaggctc

SEQ ID NO: 5211592 - DNA, 25 bp, Homo sapien
caagttggttcaaacacactattct

SEQ ID NO: 5211593 - DNA, 25 bp, Homo sapien
tagttacaggaggtaataaagtcaa

SEQ ID NO: 5211594 - DNA, 25 bp, Homo sapien
catactcatgtacttgatgggcaat

SEQ ID NO: 5211595 - DNA, 25 bp, Homo sapien
taaatatggagaatgagcaacactg

SEQ ID NO: 5211596 - DNA, 25 bp, Homo sapien
tttgaaaccataactctgacctgac

SEQ ID NO: 5211597 - DNA, 25 bp, Homo sapien
tgtagacatgctaaggaaaatctgc

SEQ ID NO: 5211598 - DNA, 25 bp, Homo sapien
taaagtatagtcttgagcctacctg

SEQ ID NO: 5211599 - DNA, 25 bp, Homo sapien
ccttaatggtgctggataacacaat

SEQ ID NO: 5211600 - DNA, 25 bp, Homo sapien
tcaatccaccagaaagttgtgactc

SEQ ID NO: 5211601 - DNA, 25 bp, Homo sapien
tggctaggccaagatactcaggaaa

SEQ ID NO: 5211602 - DNA, 25 bp, Homo sapien
tgaattctggccctgtatcatacag

SEQ ID NO: 5211603 - DNA, 25 bp, Homo sapien
gaatgtattgatgctggcaggtaga

SEQ ID NO: 5211604 - DNA, 25 bp, Homo sapien
ctcaaatcaggataggagaagctat

SEQ ID NO: 5211605 - DNA, 25 bp, Homo sapien
tatcatacaggcctaggactttccc

SEQ ID NO: 5211606 - DNA, 25 bp, Homo sapien
aaaaacacaacttgtcagcattata

SEQ ID NO: 5211607 - DNA, 25 bp, Homo sapien
gacagttgtgctatatatgaattac

SEQ ID NO: 5211608 - DNA, 25 bp, Homo sapien
tcagcattatattccgtaacttgac

SEQ ID NO: 5211609 - DNA, 25 bp, Homo sapien
ccgtaacttgacagttgtgctatat

SEQ ID NO: 5211610 - DNA, 25 bp, Homo sapien
gaacatctcagaaccagcaagtatg

SEQ ID NO: 5211611 - DNA, 25 bp, Homo sapien
ggccgaaagatagctgtttcctgca

SEQ ID NO: 5211612 - DNA, 25 bp, Homo sapien
cctctcccaaatcaaagttccagtg

SEQ ID NO: 5211613 - DNA, 25 bp, Homo sapien
caggcagttgagaattggccgaaag

SEQ ID NO: 5211614 - DNA, 25 bp, Homo sapien
gatatgtcatctgcccattacccat

SEQ ID NO: 5211615 - DNA, 25 bp, Homo sapien
aattccttcaggttgcatctggtgg

SEQ ID NO: 5211616 - DNA, 25 bp, Homo sapien
catctggtggtgtcgcaagtaactt

SEQ ID NO: 5211617 - DNA, 25 bp, Homo sapien
tctccaggtttaattagcagcttgg

SEQ ID NO: 5211618 - DNA, 25 bp, Homo sapien
tggaattttacatggatatcaaaga

SEQ ID NO: 5211619 - DNA, 25 bp, Homo sapien
gcttaaaagccttgacaaacatcct

SEQ ID NO: 5211620 - DNA, 25 bp, Homo sapien
tcagggtctaaaatagtgtactatg

SEQ ID NO: 5211621 - DNA, 25 bp, Homo sapien
gctagtaatgtttgtatgctattag

SEQ ID NO: 5211622 - DNA, 25 bp, Homo sapien
gataatccactatattgtaccagcc

SEQ ID NO: 5211623 - DNA, 25 bp, Homo sapien
tgataatccactatattgtaccagc

SEQ ID NO: 5211624 - DNA, 25 bp, Homo sapien
ataatccactatattgtaccagcca

SEQ ID NO: 5211625 - DNA, 25 bp, Homo sapien
tctgataatccactatattgtacca

SEQ ID NO: 5211626 - DNA, 25 bp, Homo sapien
gaaaaataggtggatttccttcatc

SEQ ID NO: 5211627 - DNA, 25 bp, Homo sapien
gactaacagccatttcttgtactag

SEQ ID NO: 5211628 - DNA, 25 bp, Homo sapien
gaaattatgcaggataggaaagact

SEQ ID NO: 5211629 - DNA, 25 bp, Homo sapien
gacagctgtatagcttctatggcac

SEQ ID NO: 5211630 - DNA, 25 bp, Homo sapien
tagaatactacagaggctactgcca

SEQ ID NO: 5211631 - DNA, 25 bp, Homo sapien
ccagagtgctccaccatgagtggtg

SEQ ID NO: 5211632 - DNA, 25 bp, Homo sapien
gattggcctcttattgttcgggtca

SEQ ID NO: 5211633 - DNA, 25 bp, Homo sapien
tgggaaagccatagaacatttggcc

SEQ ID NO: 5211634 - DNA, 25 bp, Homo sapien
tgttatgttgtccatttcaactaag

SEQ ID NO: 5211635 - DNA, 25 bp, Homo sapien
aatggtaagaggttcatatctgtac

SEQ ID NO: 5211636 - DNA, 25 bp, Homo sapien
tagcaatagatgtgctaccaccatt

SEQ ID NO: 5211637 - DNA, 25 bp, Homo sapien
cataaaggctgaaatagtttgcaga

SEQ ID NO: 5211638 - DNA, 25 bp, Homo sapien
ccatgggagtctgttgtgcataaac

SEQ ID NO: 5211639 - DNA, 25 bp, Homo sapien
caagaagctctttctgccagtggag

SEQ ID NO: 5211640 - DNA, 25 bp, Homo sapien
aacaggtgggattgttcctccagca

SEQ ID NO: 5211641 - DNA, 25 bp, Homo sapien
tctttggacatagcaccaggtgaca

SEQ ID NO: 5211642 - DNA, 25 bp, Homo sapien
catgagaactcattgactatcgcga

SEQ ID NO: 5211643 - DNA, 25 bp, Homo sapien
aaaatacgcccccatgatgtagtca

SEQ ID NO: 5211644 - DNA, 25 bp, Homo sapien
cggaaggcaaattgggagtaggcgt

SEQ ID NO: 5211645 - DNA, 25 bp, Homo sapien
gactatcgcgacacagtaccaaggg

SEQ ID NO: 5211646 - DNA, 25 bp, Homo sapien
ttttccttcagtaatgcattccttc

SEQ ID NO: 5211647 - DNA, 25 bp, Homo sapien
aagttttcaggagctactgtcttat

SEQ ID NO: 5211648 - DNA, 25 bp, Homo sapien
cattcccagcttccgtatttattga

SEQ ID NO: 5211649 - DNA, 25 bp, Homo sapien
tctccacttctatgtttcatggtct

SEQ ID NO: 5211650 - DNA, 25 bp, Homo sapien
tgtattcggcctccgctggatcagt

SEQ ID NO: 5211651 - DNA, 25 bp, Homo sapien
tctggacgggaccttgcacagttcc

SEQ ID NO: 5211652 - DNA, 25 bp, Homo sapien
cacagagagcgttttgggcaaagac

SEQ ID NO: 5211653 - DNA, 25 bp, Homo sapien
tctcctgcagcgataagggcagtcg

SEQ ID NO: 5211654 - DNA, 25 bp, Homo sapien
tgagaacagagaatggaccttatct

SEQ ID NO: 5211655 - DNA, 25 bp, Homo sapien
tacatctgtggcacgccaatgtggc

SEQ ID NO: 5211656 - DNA, 25 bp, Homo sapien
ttgtcttctgcctgtagactcagat

SEQ ID NO: 5211657 - DNA, 25 bp, Homo sapien
ctaacctagtaggacataattagga

SEQ ID NO: 5211658 - DNA, 25 bp, Homo sapien
gggtaactcagtactccagagtcca

SEQ ID NO: 5211659 - DNA, 25 bp, Homo sapien
agagtccagtcacttccagacctga

SEQ ID NO: 5211660 - DNA, 25 bp, Homo sapien
ccagacctgataaaccaatttcaag

SEQ ID NO: 5211661 - DNA, 25 bp, Homo sapien
tttgtggtgggtaactcagtactcc

SEQ ID NO: 5211662 - DNA, 25 bp, Homo sapien
tagacccacacacttgaaaaataag

SEQ ID NO: 5211663 - DNA, 25 bp, Homo sapien
gaaacatttgtctctcctagaattc

SEQ ID NO: 5211664 - DNA, 25 bp, Homo sapien
agttattgccggtgaaaatacagag

SEQ ID NO: 5211665 - DNA, 25 bp, Homo sapien
tatgtgggaataacagagactcgct

SEQ ID NO: 5211666 - DNA, 25 bp, Homo sapien
tagcctcatgctagtcatgaagaac

SEQ ID NO: 5211667 - DNA, 25 bp, Homo sapien
tagtgctgttaaattatggcttacc

SEQ ID NO: 5211668 - DNA, 25 bp, Homo sapien
caaatggagtaacccagtgtcaacc

SEQ ID NO: 5211669 - DNA, 25 bp, Homo sapien
cagtaagtatcacccaaaaatagcc

SEQ ID NO: 5211670 - DNA, 25 bp, Homo sapien
taaattggtgtcaacagcatggaat

SEQ ID NO: 5211671 - DNA, 25 bp, Homo sapien
gcccgcttcaacctcatgttggtca

SEQ ID NO: 5211672 - DNA, 25 bp, Homo sapien
tattactagagccttcaccattttc

SEQ ID NO: 5211673 - DNA, 25 bp, Homo sapien
cactatcctggtaattctgctctaa

SEQ ID NO: 5211674 - DNA, 25 bp, Homo sapien
gatagccaagtgtcttacaagcagc

SEQ ID NO: 5211675 - DNA, 25 bp, Homo sapien
cagagttcatggaggttcacctttg

SEQ ID NO: 5211676 - DNA, 25 bp, Homo sapien
tgtggtctggcagaaacaacgtctc

SEQ ID NO: 5211677 - DNA, 25 bp, Homo sapien
tggcaggtctgcagtaaaagataac

SEQ ID NO: 5211678 - DNA, 25 bp, Homo sapien
gagtgtactaattcccaaaatgcca

SEQ ID NO: 5211679 - DNA, 25 bp, Homo sapien
gatttgtaagaaactaggaccagct

SEQ ID NO: 5211680 - DNA, 25 bp, Homo sapien
caatggctggtccttcaagtgctgt

SEQ ID NO: 5211681 - DNA, 25 bp, Homo sapien
tgggcaggcccagcttataagttaa

SEQ ID NO: 5211682 - DNA, 25 bp, Homo sapien
taatcctcgcaacacaggtaccttg

SEQ ID NO: 5211683 - DNA, 25 bp, Homo sapien
gaacgttggagttgcccacagtgaa

SEQ ID NO: 5211684 - DNA, 25 bp, Homo sapien
cctacagagcaaacatgaacgttgg

SEQ ID NO: 5211685 - DNA, 25 bp, Homo sapien
caaatacccgtgtcatgaacagccg

SEQ ID NO: 5211686 - DNA, 25 bp, Homo sapien
ctgtcatcagcatctacaagtagca

SEQ ID NO: 5211687 - DNA, 25 bp, Homo sapien
tgtcatcagcatctacaagtagcat

SEQ ID NO: 5211688 - DNA, 25 bp, Homo sapien
caaatgctgaagattctttactgct

SEQ ID NO: 5211689 - DNA, 25 bp, Homo sapien
gtcaaatgctgaagattctttactg

SEQ ID NO: 5211690 - DNA, 25 bp, Homo sapien
tacaccacattatgtcaacagcatg

SEQ ID NO: 5211691 - DNA, 25 bp, Homo sapien
gagtctgactacttgacacactggc

SEQ ID NO: 5211692 - DNA, 25 bp, Homo sapien
gaaagaagtgatctgaactctgacc

SEQ ID NO: 5211693 - DNA, 25 bp, Homo sapien
aacagcatgtaccttccacattgag

SEQ ID NO: 5211694 - DNA, 25 bp, Homo sapien
cctgtggaacgtgggaaaactatct

SEQ ID NO: 5211695 - DNA, 25 bp, Homo sapien
gatgagtaccgcaccagctttgcct

SEQ ID NO: 5211696 - DNA, 25 bp, Homo sapien
gcagcgcggcaaacctgctgggaaa

SEQ ID NO: 5211697 - DNA, 25 bp, Homo sapien
tctagagcggaaggagcattatact

SEQ ID NO: 5211698 - DNA, 25 bp, Homo sapien
ttctctggcccagagcgctcgggct

SEQ ID NO: 5211699 - DNA, 25 bp, Homo sapien
tagcagcggcggcttttgctgagtt

SEQ ID NO: 5211700 - DNA, 25 bp, Homo sapien
agcctcttcacggtctgtaaggtca

SEQ ID NO: 5211701 - DNA, 25 bp, Homo sapien
tcgccgtcttcggaggcaccggcga

SEQ ID NO: 5211702 - DNA, 25 bp, Homo sapien
gcaaatcctcgttgtcttgccaggg

SEQ ID NO: 5211703 - DNA, 25 bp, Homo sapien
tcctcgttgtcttgccagggtcctg

SEQ ID NO: 5211704 - DNA, 25 bp, Homo sapien
caaatcctcgttgtcttgccagggt

SEQ ID NO: 5211705 - DNA, 25 bp, Homo sapien
aatcctcgttgtcttgccagggtcc

SEQ ID NO: 5211706 - DNA, 25 bp, Homo sapien
tggccgtaagagccaagtggcctca

SEQ ID NO: 5211707 - DNA, 25 bp, Homo sapien
ctgcgtggccgtaagagccaagtgg

SEQ ID NO: 5211708 - DNA, 25 bp, Homo sapien
cgtggccgtaagagccaagtggcct

SEQ ID NO: 5211709 - DNA, 25 bp, Homo sapien
agtggcctcagaggctcgcccccta

SEQ ID NO: 5211710 - DNA, 25 bp, Homo sapien
tgagagggaaaagcgggctccggct

SEQ ID NO: 5211711 - DNA, 25 bp, Homo sapien
ctgagagggaaaagcgggctccggc

SEQ ID NO: 5211712 - DNA, 25 bp, Homo sapien
agagggaaaagcgggctccggctgc

SEQ ID NO: 5211713 - DNA, 25 bp, Homo sapien
agggaaaagcgggctccggctgcat

SEQ ID NO: 5211714 - DNA, 25 bp, Homo sapien
tgagattggcgctgctcgcagccaa

SEQ ID NO: 5211715 - DNA, 25 bp, Homo sapien
tgtacagtcgccttcgtcggtaggg

SEQ ID NO: 5211716 - DNA, 25 bp, Homo sapien
cagcgagtctgtccgggaaagcttc

SEQ ID NO: 5211717 - DNA, 25 bp, Homo sapien
cgaacgcggtggacgctgtacagtc

SEQ ID NO: 5211718 - DNA, 25 bp, Homo sapien
agagagcgcggcactgagtcccgcc

SEQ ID NO: 5211719 - DNA, 25 bp, Homo sapien
cgggtgcagagagcgcggcactgag

SEQ ID NO: 5211720 - DNA, 25 bp, Homo sapien
gcgcgcggcagagcgggtgcagaga

SEQ ID NO: 5211721 - DNA, 25 bp, Homo sapien
agagcgggtgcagagagcgcggcac

SEQ ID NO: 5211722 - DNA, 25 bp, Homo sapien
ccgatgcgcaggcccaaccccgcac

SEQ ID NO: 5211723 - DNA, 25 bp, Homo sapien
gcgcaggcccaaccccgcacccgca

SEQ ID NO: 5211724 - DNA, 25 bp, Homo sapien
gatgcgcaggcccaaccccgcaccc

SEQ ID NO: 5211725 - DNA, 25 bp, Homo sapien
atgcgcaggcccaaccccgcacccg

SEQ ID NO: 5211726 - DNA, 25 bp, Homo sapien
catccactagccgcaagcagccagc

SEQ ID NO: 5211727 - DNA, 25 bp, Homo sapien
atccactagccgcaagcagccagcg

SEQ ID NO: 5211728 - DNA, 25 bp, Homo sapien
ctgctagcgcgaggcaggcaattac

SEQ ID NO: 5211729 - DNA, 25 bp, Homo sapien
tcgagccatcgaggatataataaat

SEQ ID NO: 5211730 - DNA, 25 bp, Homo sapien
tcagaaaacgcgttccacgtgtgcg

SEQ ID NO: 5211731 - DNA, 25 bp, Homo sapien
ttagctgccctatagcgttcgcgcc

SEQ ID NO: 5211732 - DNA, 25 bp, Homo sapien
taataaatacccgttagtcacacca

SEQ ID NO: 5211733 - DNA, 25 bp, Homo sapien
gagtttaacttgcaccccttgtatg

SEQ ID NO: 5211734 - DNA, 25 bp, Homo sapien
tataaaccgccactcacacaagatg

SEQ ID NO: 5211735 - DNA, 25 bp, Homo sapien
tacaggtgcctgtcttcggcgtacg

SEQ ID NO: 5211736 - DNA, 25 bp, Homo sapien
gcgtacggataaacccagaaggcca

SEQ ID NO: 5211737 - DNA, 25 bp, Homo sapien
atatcaggatagtcagtcttccata

SEQ ID NO: 5211738 - DNA, 25 bp, Homo sapien
gagggaaaaggaacacttctgaaga

SEQ ID NO: 5211739 - DNA, 25 bp, Homo sapien
cagtcttccatatttgctgggaggg

SEQ ID NO: 5211740 - DNA, 25 bp, Homo sapien
aagaagtgctgatgacccggaaagt

SEQ ID NO: 5211741 - DNA, 25 bp, Homo sapien
tctttgtactgcctccattcggcct

SEQ ID NO: 5211742 - DNA, 25 bp, Homo sapien
gactcgaatctcaaccacctatagg

SEQ ID NO: 5211743 - DNA, 25 bp, Homo sapien
aattctactcgctctctacatcctg

SEQ ID NO: 5211744 - DNA, 25 bp, Homo sapien
tcctgaactactgcaataaccacct

SEQ ID NO: 5211745 - DNA, 25 bp, Homo sapien
atgcaacttgtaagaattgttaagc

SEQ ID NO: 5211746 - DNA, 25 bp, Homo sapien
aacttgtaagaattgttaagcattc

SEQ ID NO: 5211747 - DNA, 25 bp, Homo sapien
gcaacttgtaagaattgttaagcat

SEQ ID NO: 5211748 - DNA, 25 bp, Homo sapien
aaaatgcaacttgtaagaattgtta

SEQ ID NO: 5211749 - DNA, 25 bp, Homo sapien
ggagtcgaactgttgccgcaggcaa

SEQ ID NO: 5211750 - DNA, 25 bp, Homo sapien
taacatctacgcttgtggcaccagc

SEQ ID NO: 5211751 - DNA, 25 bp, Homo sapien
tctgagaacttgaaaggagtcgaac

SEQ ID NO: 5211752 - DNA, 25 bp, Homo sapien
tgaccaccgaagtgatgatctgaga

SEQ ID NO: 5211753 - DNA, 25 bp, Homo sapien
acaaattgaccccaaggcttctcca

SEQ ID NO: 5211754 - DNA, 25 bp, Homo sapien
tcattgccattacaggtgcatcaac

SEQ ID NO: 5211755 - DNA, 25 bp, Homo sapien
ccgttatctcgcacctcaattttat

SEQ ID NO: 5211756 - DNA, 25 bp, Homo sapien
tttgaggtgtagtacttcattgcca

SEQ ID NO: 5211757 - DNA, 25 bp, Homo sapien
cagctataaaaaatatacgagacaa

SEQ ID NO: 5211758 - DNA, 25 bp, Homo sapien
acgtattttgactaaagctcctcca

SEQ ID NO: 5211759 - DNA, 25 bp, Homo sapien
ttcccagacgtattttgactaaagc

SEQ ID NO: 5211760 - DNA, 25 bp, Homo sapien
cagacgtattttgactaaagctcct

SEQ ID NO: 5211761 - DNA, 25 bp, Homo sapien
cttgaccaagatgtgaaggtttctg

SEQ ID NO: 5211762 - DNA, 25 bp, Homo sapien
tggccactgccatctaaaacatact

SEQ ID NO: 5211763 - DNA, 25 bp, Homo sapien
aacatactgggtgctaaaattatca

SEQ ID NO: 5211764 - DNA, 25 bp, Homo sapien
cagcagccgttcttgttgtaattaa

SEQ ID NO: 5211765 - DNA, 25 bp, Homo sapien
gagtaactagtccatggaagtgtcc

SEQ ID NO: 5211766 - DNA, 25 bp, Homo sapien
gataaactgcaatgagggaacacaa

SEQ ID NO: 5211767 - DNA, 25 bp, Homo sapien
tagcctttatcaggaccaagcccaa

SEQ ID NO: 5211768 - DNA, 25 bp, Homo sapien
aattggtggctagaataaaggctga

SEQ ID NO: 5211769 - DNA, 25 bp, Homo sapien
tattgtttctcttgattacggatcc

SEQ ID NO: 5211770 - DNA, 25 bp, Homo sapien
tccagtcacaggcatgttagaccat

SEQ ID NO: 5211771 - DNA, 25 bp, Homo sapien
gctaccttcttaccagttttgacca

SEQ ID NO: 5211772 - DNA, 25 bp, Homo sapien
actaggagtttatctgagttgaacc

SEQ ID NO: 5211773 - DNA, 25 bp, Homo sapien
aagctcatgaggagatcttggatct

SEQ ID NO: 5211774 - DNA, 25 bp, Homo sapien
cttgttatgtacaaagacaatcctt

SEQ ID NO: 5211775 - DNA, 25 bp, Homo sapien
gtcaggtttaaggataccaaagctc

SEQ ID NO: 5211776 - DNA, 25 bp, Homo sapien
tttgcagttgagtaaaactgctttc

SEQ ID NO: 5211777 - DNA, 25 bp, Homo sapien
tttctaactcgaaagatttctcttc

SEQ ID NO: 5211778 - DNA, 25 bp, Homo sapien
attttctaactcgaaagatttctct

SEQ ID NO: 5211779 - DNA, 25 bp, Homo sapien
ttctaactcgaaagatttctcttcc

SEQ ID NO: 5211780 - DNA, 25 bp, Homo sapien
cacagtcggcaaccgcggcccacat

SEQ ID NO: 5211781 - DNA, 25 bp, Homo sapien
ctgcccgcgccacagtcggcaaccg

SEQ ID NO: 5211782 - DNA, 25 bp, Homo sapien
gtcccgtgccaacgcctccaccctg

SEQ ID NO: 5211783 - DNA, 25 bp, Homo sapien
gcggcccacatgtcccgtgccaacg

SEQ ID NO: 5211784 - DNA, 25 bp, Homo sapien
gaccagggtgcacagcaacggatcc

SEQ ID NO: 5211785 - DNA, 25 bp, Homo sapien
gtagaggccccgcagtcggtgctcc

SEQ ID NO: 5211786 - DNA, 25 bp, Homo sapien
gcatcggactctccccgaccagggt

SEQ ID NO: 5211787 - DNA, 25 bp, Homo sapien
ggtgctcctacccaggcgcatcgga

SEQ ID NO: 5211788 - DNA, 25 bp, Homo sapien
ggtcaaacataagagtttcatcagg

SEQ ID NO: 5211789 - DNA, 25 bp, Homo sapien
ctccagtccacttcttcgagtagac

SEQ ID NO: 5211790 - DNA, 25 bp, Homo sapien
cacttcttcgagtagacttgggtca

SEQ ID NO: 5211791 - DNA, 25 bp, Homo sapien
ccctctatttaagtcagcagtacaa

SEQ ID NO: 5211792 - DNA, 25 bp, Homo sapien
actccagtctcgatcagctgaccca

SEQ ID NO: 5211793 - DNA, 25 bp, Homo sapien
cagtctcgatcagctgacccaatac

SEQ ID NO: 5211794 - DNA, 25 bp, Homo sapien
gacaactccagtctcgatcagctga

SEQ ID NO: 5211795 - DNA, 25 bp, Homo sapien
acaactccagtctcgatcagctgac

SEQ ID NO: 5211796 - DNA, 25 bp, Homo sapien
gcattcatcactaacgacaacatct

SEQ ID NO: 5211797 - DNA, 25 bp, Homo sapien
catcactaacgacaacatcttctac

SEQ ID NO: 5211798 - DNA, 25 bp, Homo sapien
ttagccgagctgctttcctctgcat

SEQ ID NO: 5211799 - DNA, 25 bp, Homo sapien
taacgacaacatcttctactcttac

SEQ ID NO: 5211800 - DNA, 25 bp, Homo sapien
ctctgttcctggttaagggcctgca

SEQ ID NO: 5211801 - DNA, 25 bp, Homo sapien
tctctgttcctggttaagggcctgc

SEQ ID NO: 5211802 - DNA, 25 bp, Homo sapien
tctgttcctggttaagggcctgcat

SEQ ID NO: 5211803 - DNA, 25 bp, Homo sapien
ccactcacagctagtcccattgatt

SEQ ID NO: 5211804 - DNA, 25 bp, Homo sapien
tcccattgattcttcctcataatag

SEQ ID NO: 5211805 - DNA, 25 bp, Homo sapien
ttctggtcctttgccactcacagct

SEQ ID NO: 5211806 - DNA, 25 bp, Homo sapien
cacagctagtcccattgattcttcc

SEQ ID NO: 5211807 - DNA, 25 bp, Homo sapien
ccataagtttacttctaagatctta

SEQ ID NO: 5211808 - DNA, 25 bp, Homo sapien
cttctaagatcttacaagttactat

SEQ ID NO: 5211809 - DNA, 25 bp, Homo sapien
aagtttacttctaagatcttacaag

SEQ ID NO: 5211810 - DNA, 25 bp, Homo sapien
tacttctaagatcttacaagttact

SEQ ID NO: 5211811 - DNA, 25 bp, Homo sapien
ctagggacaaaaatgatatagataa

SEQ ID NO: 5211812 - DNA, 25 bp, Homo sapien
aaatgatatagataacttttaatac

SEQ ID NO: 5211813 - DNA, 25 bp, Homo sapien
aatgatatagataacttttaataca

SEQ ID NO: 5211814 - DNA, 25 bp, Homo sapien
ggacaaaaatgatatagataacttt

SEQ ID NO: 5211815 - DNA, 25 bp, Homo sapien
tgtgatctgatactctgcttttctg

SEQ ID NO: 5211816 - DNA, 25 bp, Homo sapien
tgatctgatactctgcttttctgcc

SEQ ID NO: 5211817 - DNA, 25 bp, Homo sapien
cttgtgatctgatactctgcttttc

SEQ ID NO: 5211818 - DNA, 25 bp, Homo sapien
gatctgatactctgcttttctgcca

SEQ ID NO: 5211819 - DNA, 25 bp, Homo sapien
tcttcagagtggtactgaaaggatt

SEQ ID NO: 5211820 - DNA, 25 bp, Homo sapien
ctgagattcttcagagtggtactga

SEQ ID NO: 5211821 - DNA, 25 bp, Homo sapien
gaaaggattccatattgttcataac

SEQ ID NO: 5211822 - DNA, 25 bp, Homo sapien
ccatattgttcataacagcagtccc

SEQ ID NO: 5211823 - DNA, 25 bp, Homo sapien
agcttcatgagtaaatcagaattat

SEQ ID NO: 5211824 - DNA, 25 bp, Homo sapien
ggaaagaggtttaacataagctctg

SEQ ID NO: 5211825 - DNA, 25 bp, Homo sapien
ccccaaagggaaatatgtgaacagc

SEQ ID NO: 5211826 - DNA, 25 bp, Homo sapien
tattgactgttttaccttacacaca

SEQ ID NO: 5211827 - DNA, 25 bp, Homo sapien
ggacactaaagggacactacgcagc

SEQ ID NO: 5211828 - DNA, 25 bp, Homo sapien
tacaccagtgatgctaagatatagc

SEQ ID NO: 5211829 - DNA, 25 bp, Homo sapien
ttcaataaccaactccaagggacac

SEQ ID NO: 5211830 - DNA, 25 bp, Homo sapien
tctaatcccgtataagcaggcttct

SEQ ID NO: 5211831 - DNA, 25 bp, Homo sapien
ctttttgatgtactggtcgactgtt

SEQ ID NO: 5211832 - DNA, 25 bp, Homo sapien
agagtggtctgcatcacactttgga

SEQ ID NO: 5211833 - DNA, 25 bp, Homo sapien
tctggtgttgaaagactagtgaaag

SEQ ID NO: 5211834 - DNA, 25 bp, Homo sapien
actggtcgactgtttatgaagatga

SEQ ID NO: 5211835 - DNA, 25 bp, Homo sapien
atacttggcttttatctggtgttaa

SEQ ID NO: 5211836 - DNA, 25 bp, Homo sapien
taggaacatcgattttcagaaagaa

SEQ ID NO: 5211837 - DNA, 25 bp, Homo sapien
tacaaacgagtagattcctttaggc

SEQ ID NO: 5211838 - DNA, 25 bp, Homo sapien
gttaaatttacatcaacatcagctg

SEQ ID NO: 5211839 - DNA, 25 bp, Homo sapien
ggtaatggtccataacaagtcgtca

SEQ ID NO: 5211840 - DNA, 25 bp, Homo sapien
tactaagaacgatgtcagctgcgga

SEQ ID NO: 5211841 - DNA, 25 bp, Homo sapien
tttccgaagagttttcaagacctgc

SEQ ID NO: 5211842 - DNA, 25 bp, Homo sapien
tctgactgggtgtgcttaacggaac

SEQ ID NO: 5211843 - DNA, 25 bp, Homo sapien
tttttcaggcactaaaattttcaca

SEQ ID NO: 5211844 - DNA, 25 bp, Homo sapien
gttcagggattggataattattatt

SEQ ID NO: 5211845 - DNA, 25 bp, Homo sapien
tcagggattggataattattattac

SEQ ID NO: 5211846 - DNA, 25 bp, Homo sapien
ttcagggattggataattattatta

SEQ ID NO: 5211847 - DNA, 25 bp, Homo sapien
cagggattggataattattattact

SEQ ID NO: 5211848 - DNA, 25 bp, Homo sapien
tgattactcgattgctaagtaaatc

SEQ ID NO: 5211849 - DNA, 25 bp, Homo sapien
tcttgattactcgattgctaagtaa

SEQ ID NO: 5211850 - DNA, 25 bp, Homo sapien
atgggtttcttgattactcgattgc

SEQ ID NO: 5211851 - DNA, 25 bp, Homo sapien
gtttcttgattactcgattgctaag

SEQ ID NO: 5211852 - DNA, 25 bp, Homo sapien
actgaggacgatgatcttgaacaaa

SEQ ID NO: 5211853 - DNA, 25 bp, Homo sapien
cttcaatttgtagtgttgcatcctc

SEQ ID NO: 5211854 - DNA, 25 bp, Homo sapien
tcttcactcaatgtcttccacagtt

SEQ ID NO: 5211855 - DNA, 25 bp, Homo sapien
gagaaactgaggacgatgatcttga

SEQ ID NO: 5211856 - DNA, 25 bp, Homo sapien
attttctgctggattagatcaccag

SEQ ID NO: 5211857 - DNA, 25 bp, Homo sapien
gattggaggtataatttcactctca

SEQ ID NO: 5211858 - DNA, 25 bp, Homo sapien
gctggattagatcaccagaacataa

SEQ ID NO: 5211859 - DNA, 25 bp, Homo sapien
tatgattggaggtataatttcactc

SEQ ID NO: 5211860 - DNA, 25 bp, Homo sapien
ttctcactaatcatgatgcaactag

SEQ ID NO: 5211861 - DNA, 25 bp, Homo sapien
cttctcactaatcatgatgcaacta

SEQ ID NO: 5211862 - DNA, 25 bp, Homo sapien
gaactccaagataaagacaggaaga

SEQ ID NO: 5211863 - DNA, 25 bp, Homo sapien
agtacgattcttgggtgttgtatca

SEQ ID NO: 5211864 - DNA, 25 bp, Homo sapien
aggaagagaaatggtagctagtacg

SEQ ID NO: 5211865 - DNA, 25 bp, Homo sapien
aatttaggatcatggacagaactcc

SEQ ID NO: 5211866 - DNA, 25 bp, Homo sapien
cataagaagccagagttgcaacagt

SEQ ID NO: 5211867 - DNA, 25 bp, Homo sapien
gaaagtgacaccaaatacaagtgaa

SEQ ID NO: 5211868 - DNA, 25 bp, Homo sapien
caaaatagagctaggacaaacagaa

SEQ ID NO: 5211869 - DNA, 25 bp, Homo sapien
gccagtatatgtgcacaattaagga

SEQ ID NO: 5211870 - DNA, 25 bp, Homo sapien
gaaacctgagattgtggatcaagca

SEQ ID NO: 5211871 - DNA, 25 bp, Homo sapien
ggatcaagcaaggttcatccttctc

SEQ ID NO: 5211872 - DNA, 25 bp, Homo sapien
tctgggccaaattccatgcgctggt

SEQ ID NO: 5211873 - DNA, 25 bp, Homo sapien
gactcctgttcaatggctctcttca

SEQ ID NO: 5211874 - DNA, 25 bp, Homo sapien
cattcccaaccttctaccttcgatt

SEQ ID NO: 5211875 - DNA, 25 bp, Homo sapien
aataaataccactaatccttactag

SEQ ID NO: 5211876 - DNA, 25 bp, Homo sapien
ctaccttcgattttaatctagtatg

SEQ ID NO: 5211877 - DNA, 25 bp, Homo sapien
taccactaatccttactaggaaaca

SEQ ID NO: 5211878 - DNA, 25 bp, Homo sapien
gtgcgtgccatcacacccggctaac

SEQ ID NO: 5211879 - DNA, 25 bp, Homo sapien
ggtgcgtgccatcacacccggctaa

SEQ ID NO: 5211880 - DNA, 25 bp, Homo sapien
cagaacattccactgaacaaatgac

SEQ ID NO: 5211881 - DNA, 25 bp, Homo sapien
gcatatagccaacctattaagtaga

SEQ ID NO: 5211882 - DNA, 25 bp, Homo sapien
tacctgaacctagtgatagtgcctt

SEQ ID NO: 5211883 - DNA, 25 bp, Homo sapien
ttggcaccattgcatggaaaggttg

SEQ ID NO: 5211884 - DNA, 25 bp, Homo sapien
tactgtccgtgtgagcctagttaag

SEQ ID NO: 5211885 - DNA, 25 bp, Homo sapien
gaatggttgaagaccccaatggctg

SEQ ID NO: 5211886 - DNA, 25 bp, Homo sapien
ggtgcaggctccacagttaaactgt

SEQ ID NO: 5211887 - DNA, 25 bp, Homo sapien
tcattgcaaaaaggtgtctgtcggg

SEQ ID NO: 5211888 - DNA, 25 bp, Homo sapien
caaaacagacacaataatacactgt

SEQ ID NO: 5211889 - DNA, 25 bp, Homo sapien
aataatacactgtcaagttaggtgg

SEQ ID NO: 5211890 - DNA, 25 bp, Homo sapien
ttttcaactgctattcaaagtttct

SEQ ID NO: 5211891 - DNA, 25 bp, Homo sapien
actgtcaagttaggtggtccaccct

SEQ ID NO: 5211892 - DNA, 25 bp, Homo sapien
gacgaggatcagacaggtaagttga

SEQ ID NO: 5211893 - DNA, 25 bp, Homo sapien
agttgatccactgtatctttggtca

SEQ ID NO: 5211894 - DNA, 25 bp, Homo sapien
ttatcttgaaaccattcgctgtaag

SEQ ID NO: 5211895 - DNA, 25 bp, Homo sapien
ggtaagttgatccactgtatctttg

SEQ ID NO: 5211896 - DNA, 25 bp, Homo sapien
gcgaggtctacattcataaacttcc

SEQ ID NO: 5211897 - DNA, 25 bp, Homo sapien
ctaaataacttatcactttgcgagg

SEQ ID NO: 5211898 - DNA, 25 bp, Homo sapien
gggagacaattagccattccttcta

SEQ ID NO: 5211899 - DNA, 25 bp, Homo sapien
taaatctgctactccatagaatggg

SEQ ID NO: 5211900 - DNA, 25 bp, Homo sapien
cttcagaatacagcaggcacactac

SEQ ID NO: 5211901 - DNA, 25 bp, Homo sapien
tcagaatacagcaggcacactacca

SEQ ID NO: 5211902 - DNA, 25 bp, Homo sapien
cagaatacagcaggcacactaccaa

SEQ ID NO: 5211903 - DNA, 25 bp, Homo sapien
ttcagaatacagcaggcacactacc

SEQ ID NO: 5211904 - DNA, 25 bp, Homo sapien
acaagcagactttcctgttaaggaa

SEQ ID NO: 5211905 - DNA, 25 bp, Homo sapien
gccattacgattctcttcaaggtta

SEQ ID NO: 5211906 - DNA, 25 bp, Homo sapien
ggttaccaatgtcatctagtagcca

SEQ ID NO: 5211907 - DNA, 25 bp, Homo sapien
ggacttaagcatgcctggattttag

SEQ ID NO: 5211908 - DNA, 25 bp, Homo sapien
ggacaattgtactttgccattacga

SEQ ID NO: 5211909 - DNA, 25 bp, Homo sapien
gaccatgaacacactctttaatttc

SEQ ID NO: 5211910 - DNA, 25 bp, Homo sapien
tacatgggtaattgtctggatagac

SEQ ID NO: 5211911 - DNA, 25 bp, Homo sapien
tgtagataatgtcttggatgtcctc

SEQ ID NO: 5211912 - DNA, 25 bp, Homo sapien
tgtctggatagacgcactgcttctc

SEQ ID NO: 5211913 - DNA, 25 bp, Homo sapien
tcatgtagtttctggaagataggtt

SEQ ID NO: 5211914 - DNA, 25 bp, Homo sapien
tagtttctggaagataggttaaatg

SEQ ID NO: 5211915 - DNA, 25 bp, Homo sapien
tgtagtttctggaagataggttaaa

SEQ ID NO: 5211916 - DNA, 25 bp, Homo sapien
ctggaagataggttaaatgatgaaa

SEQ ID NO: 5211917 - DNA, 25 bp, Homo sapien
tctacaatacgtggaacttttttca

SEQ ID NO: 5211918 - DNA, 25 bp, Homo sapien
caagtcagtgaatcctcatttaaaa

SEQ ID NO: 5211919 - DNA, 25 bp, Homo sapien
caatacgtggaacttttttcaatat

SEQ ID NO: 5211920 - DNA, 25 bp, Homo sapien
tctgcgtggttgctaggcttccctt

SEQ ID NO: 5211921 - DNA, 25 bp, Homo sapien
tagcctcgtcaaccaggattggtcc

SEQ ID NO: 5211922 - DNA, 25 bp, Homo sapien
agcagccgttacctccattctggga

SEQ ID NO: 5211923 - DNA, 25 bp, Homo sapien
ttcagcatttggtcccgcgggtggt

SEQ ID NO: 5211924 - DNA, 25 bp, Homo sapien
ggttttgggtcagccctgtggctat

SEQ ID NO: 5211925 - DNA, 25 bp, Homo sapien
caggtctgacttccgtagggttttg

SEQ ID NO: 5211926 - DNA, 25 bp, Homo sapien
tagggttttgggtcagccctgtggc

SEQ ID NO: 5211927 - DNA, 25 bp, Homo sapien
tgtggctatagcgaaggctgggatc

SEQ ID NO: 5211928 - DNA, 25 bp, Homo sapien
ggactataggcgtacactgccatac

SEQ ID NO: 5211929 - DNA, 25 bp, Homo sapien
tataggcgtacactgccatacccgg

SEQ ID NO: 5211930 - DNA, 25 bp, Homo sapien
gactataggcgtacactgccatacc

SEQ ID NO: 5211931 - DNA, 25 bp, Homo sapien
taggcgtacactgccatacccggct

SEQ ID NO: 5211932 - DNA, 25 bp, Homo sapien
ctggaggtcggcaacgcggccgcaa

SEQ ID NO: 5211933 - DNA, 25 bp, Homo sapien
tctgcgtagagaagccgactgctgc

SEQ ID NO: 5211934 - DNA, 25 bp, Homo sapien
ctcacaaagccgaaaacaagaaggg

SEQ ID NO: 5211935 - DNA, 25 bp, Homo sapien
gagtctcctactcccgggttctgcg

SEQ ID NO: 5211936 - DNA, 25 bp, Homo sapien
gggtcagctccctcttaatggcctg

SEQ ID NO: 5211937 - DNA, 25 bp, Homo sapien
tagtcccgttgaaagtcacaatcca

SEQ ID NO: 5211938 - DNA, 25 bp, Homo sapien
gagttcatggaacgaggatctgtct

SEQ ID NO: 5211939 - DNA, 25 bp, Homo sapien
cataatagtcccgttgaaagtcaca

SEQ ID NO: 5211940 - DNA, 25 bp, Homo sapien
cttaacattgttcatctctactgct

SEQ ID NO: 5211941 - DNA, 25 bp, Homo sapien
tgacttaacattgttcatctctact

SEQ ID NO: 5211942 - DNA, 25 bp, Homo sapien
cctcttctgacttaacattgttcat

SEQ ID NO: 5211943 - DNA, 25 bp, Homo sapien
tcctcttctgacttaacattgttca

SEQ ID NO: 5211944 - DNA, 25 bp, Homo sapien
agtcatcctcgccattggcgctgtc

SEQ ID NO: 5211945 - DNA, 25 bp, Homo sapien
agagtcatcctcgccattggcgctg

SEQ ID NO: 5211946 - DNA, 25 bp, Homo sapien
ttaagagtcatcctcgccattggcg

SEQ ID NO: 5211947 - DNA, 25 bp, Homo sapien
taagagtcatcctcgccattggcgc

SEQ ID NO: 5211948 - DNA, 25 bp, Homo sapien
taacaaaactactaggagcgtcaaa

SEQ ID NO: 5211949 - DNA, 25 bp, Homo sapien
cgcctaggtaaagaaataatgggat

SEQ ID NO: 5211950 - DNA, 25 bp, Homo sapien
tactaggagcgtcaaaggaagtgaa

SEQ ID NO: 5211951 - DNA, 25 bp, Homo sapien
gacaagcgcctaggtaaagaaataa

SEQ ID NO: 5211952 - DNA, 25 bp, Homo sapien
tttttctagaggatgcatttgacat

SEQ ID NO: 5211953 - DNA, 25 bp, Homo sapien
tctagaggatgcatttgacatgcca

SEQ ID NO: 5211954 - DNA, 25 bp, Homo sapien
tttctagaggatgcatttgacatgc

SEQ ID NO: 5211955 - DNA, 25 bp, Homo sapien
gagattgcctttgcagttagggaag

SEQ ID NO: 5211956 - DNA, 25 bp, Homo sapien
gctggaactggtatgaagacctgat

SEQ ID NO: 5211957 - DNA, 25 bp, Homo sapien
taagtgcactcctatgctgtgaagc

SEQ ID NO: 5211958 - DNA, 25 bp, Homo sapien
tctagtctggagtcagagttaacca

SEQ ID NO: 5211959 - DNA, 25 bp, Homo sapien
tatatgttatactgcccctgaaacc

SEQ ID NO: 5211960 - DNA, 25 bp, Homo sapien
gaccaaacctataatgtaatagcat

SEQ ID NO: 5211961 - DNA, 25 bp, Homo sapien
caaagtgtcttgacacctccaaagg

SEQ ID NO: 5211962 - DNA, 25 bp, Homo sapien
caagagagtttaaatccaatacaaa

SEQ ID NO: 5211963 - DNA, 25 bp, Homo sapien
tcacactagctctagcgatggatgc

SEQ ID NO: 5211964 - DNA, 25 bp, Homo sapien
gtccagcgacaatgactccagcatg

SEQ ID NO: 5211965 - DNA, 25 bp, Homo sapien
cgctgtccagcgacaatgactccag

SEQ ID NO: 5211966 - DNA, 25 bp, Homo sapien
caggacgctgtccagcgacaatgac

SEQ ID NO: 5211967 - DNA, 25 bp, Homo sapien
ggacgctgtccagcgacaatgactc

SEQ ID NO: 5211968 - DNA, 25 bp, Homo sapien
ggacagaaccttggtggcacctata

SEQ ID NO: 5211969 - DNA, 25 bp, Homo sapien
acaccaagggcaacaatgtagtgga

SEQ ID NO: 5211970 - DNA, 25 bp, Homo sapien
acttccatgaatttccagatgagtc

SEQ ID NO: 5211971 - DNA, 25 bp, Homo sapien
catgaggtggcaaaacacgggcaca

SEQ ID NO: 5211972 - DNA, 25 bp, Homo sapien
agagggcaagtggaacccactgagt

SEQ ID NO: 5211973 - DNA, 25 bp, Homo sapien
ggagagggcaagtggaacccactga

SEQ ID NO: 5211974 - DNA, 25 bp, Homo sapien
gagagggcaagtggaacccactgag

SEQ ID NO: 5211975 - DNA, 25 bp, Homo sapien
ggccttcgtgctcataatttccact

SEQ ID NO: 5211976 - DNA, 25 bp, Homo sapien
tttaggtagtttctagtgcaagcag

SEQ ID NO: 5211977 - DNA, 25 bp, Homo sapien
gccccactggtacaagaaacaagac

SEQ ID NO: 5211978 - DNA, 25 bp, Homo sapien
tctagtgcaagcagaacctttccca

SEQ ID NO: 5211979 - DNA, 25 bp, Homo sapien
tacacaggctaggactcaaagacac

SEQ ID NO: 5211980 - DNA, 25 bp, Homo sapien
cacgtgatcagttagctatggcagc

SEQ ID NO: 5211981 - DNA, 25 bp, Homo sapien
tctttcacacatgatcaggcaaggg

SEQ ID NO: 5211982 - DNA, 25 bp, Homo sapien
gaggagactcaatccacttgggaag

SEQ ID NO: 5211983 - DNA, 25 bp, Homo sapien
tgtctgtaataagctagagtccatg

SEQ ID NO: 5211984 - DNA, 25 bp, Homo sapien
tgtaataagctagagtccatgccct

SEQ ID NO: 5211985 - DNA, 25 bp, Homo sapien
ataagctagagtccatgcccttcag

SEQ ID NO: 5211986 - DNA, 25 bp, Homo sapien
gtatgtctgtaataagctagagtcc

SEQ ID NO: 5211987 - DNA, 25 bp, Homo sapien
ggatggttcttctattaatgtgtta

SEQ ID NO: 5211988 - DNA, 25 bp, Homo sapien
tataaggcttacacctttgaaacaa

SEQ ID NO: 5211989 - DNA, 25 bp, Homo sapien
tattaatgtgttagcaactctacag

SEQ ID NO: 5211990 - DNA, 25 bp, Homo sapien
tctcaaattgtgtggatggttcttc

SEQ ID NO: 5211991 - DNA, 25 bp, Homo sapien
agatattgaccccttatcagatgca

SEQ ID NO: 5211992 - DNA, 25 bp, Homo sapien
tatatgcttgacatctttgccaaaa

SEQ ID NO: 5211993 - DNA, 25 bp, Homo sapien
attaactgtaaaagcgtggatttat

SEQ ID NO: 5211994 - DNA, 25 bp, Homo sapien
ttctcccattgtatatgcttgacat

SEQ ID NO: 5211995 - DNA, 25 bp, Homo sapien
agaaataggctgatagctcctgaat

SEQ ID NO: 5211996 - DNA, 25 bp, Homo sapien
tataaagtatgtagaaataggctga

SEQ ID NO: 5211997 - DNA, 25 bp, Homo sapien
aagtatgtagaaataggctgatagc

SEQ ID NO: 5211998 - DNA, 25 bp, Homo sapien
tatgtagaaataggctgatagctcc

SEQ ID NO: 5211999 - DNA, 25 bp, Homo sapien
tcctcagttcctgcttctgcataag

SEQ ID NO: 5212000 - DNA, 25 bp, Homo sapien
ctactcctcagttcctgcttctgca

SEQ ID NO: 5212001 - DNA, 25 bp, Homo sapien
ctcctcagttcctgcttctgcataa

SEQ ID NO: 5212002 - DNA, 25 bp, Homo sapien
tcagttcctgcttctgcataagcgt

SEQ ID NO: 5212003 - DNA, 25 bp, Homo sapien
cattcagtagctgtgagcccaatat

SEQ ID NO: 5212004 - DNA, 25 bp, Homo sapien
aatatatggtttccgtgtagatcac

SEQ ID NO: 5212005 - DNA, 25 bp, Homo sapien
tcactaaactgtctccaccagtcgg

SEQ ID NO: 5212006 - DNA, 25 bp, Homo sapien
caccagtcggtctcattcagtagct

SEQ ID NO: 5212007 - DNA, 25 bp, Homo sapien
acaacctgtaccagtttaaggctat

SEQ ID NO: 5212008 - DNA, 25 bp, Homo sapien
tcatcttcaaggacaaacaagtgtc

SEQ ID NO: 5212009 - DNA, 25 bp, Homo sapien
gaatcacatctgataagtcttgcca

SEQ ID NO: 5212010 - DNA, 25 bp, Homo sapien
tatgctgtatcttaagcccaaacca

SEQ ID NO: 5212011 - DNA, 25 bp, Homo sapien
ccaggctggagcctgacccttcctt

SEQ ID NO: 5212012 - DNA, 25 bp, Homo sapien
gagccaagctgctcctgccaggctg

SEQ ID NO: 5212013 - DNA, 25 bp, Homo sapien
tggagcctgacccttccttcgccat

SEQ ID NO: 5212014 - DNA, 25 bp, Homo sapien
aggctggagcctgacccttccttcg

SEQ ID NO: 5212015 - DNA, 25 bp, Homo sapien
cccgcaactaccaagcagctgccgg

SEQ ID NO: 5212016 - DNA, 25 bp, Homo sapien
tgccggcgccgcagcgggaacagac

SEQ ID NO: 5212017 - DNA, 25 bp, Homo sapien
gaacagacccgcaaaggtcaatgaa

SEQ ID NO: 5212018 - DNA, 25 bp, Homo sapien
gcaactaccaagcagctgccggcgc

SEQ ID NO: 5212019 - DNA, 25 bp, Homo sapien
tggcagagggttgcctcgatacttc

SEQ ID NO: 5212020 - DNA, 25 bp, Homo sapien
tgccagccggttggtctgggccacc

SEQ ID NO: 5212021 - DNA, 25 bp, Homo sapien
gacccacgaacttcgggtggcagag

SEQ ID NO: 5212022 - DNA, 25 bp, Homo sapien
tcgatacttcctcaggcgcagggtc

SEQ ID NO: 5212023 - DNA, 25 bp, Homo sapien
gctcctcgcgggttcgcggcccgca

SEQ ID NO: 5212024 - DNA, 25 bp, Homo sapien
cgcgctcctcgcgggttcgcggccc

SEQ ID NO: 5212025 - DNA, 25 bp, Homo sapien
gcagcatgtggaggacggggcgtcc

SEQ ID NO: 5212026 - DNA, 25 bp, Homo sapien
gggcaaagtgcagtccagctgccag

SEQ ID NO: 5212027 - DNA, 25 bp, Homo sapien
ctgtcgtgggaggggggcttgctgg

SEQ ID NO: 5212028 - DNA, 25 bp, Homo sapien
gggtctccgaagctcccggagcagc

SEQ ID NO: 5212029 - DNA, 25 bp, Homo sapien
gcgcgcccatggcacgtccggacag

SEQ ID NO: 5212030 - DNA, 25 bp, Homo sapien
cagctgcgcgcccatggcacgtccg

SEQ ID NO: 5212031 - DNA, 25 bp, Homo sapien
ccatggcacgtccggacagccgtgg

SEQ ID NO: 5212032 - DNA, 25 bp, Homo sapien
gctgacaagcaaagaccgacagaca

SEQ ID NO: 5212033 - DNA, 25 bp, Homo sapien
acagctgacaagcaaagaccgacag

SEQ ID NO: 5212034 - DNA, 25 bp, Homo sapien
cagctgacaagcaaagaccgacaga

SEQ ID NO: 5212035 - DNA, 25 bp, Homo sapien
tgacaagcaaagaccgacagacacc

SEQ ID NO: 5212036 - DNA, 25 bp, Homo sapien
gcagctggctgagaacggtctcgtt

SEQ ID NO: 5212037 - DNA, 25 bp, Homo sapien
gtgaggctctatccacggcagctgg

SEQ ID NO: 5212038 - DNA, 25 bp, Homo sapien
taactcttctcgattaggggacgga

SEQ ID NO: 5212039 - DNA, 25 bp, Homo sapien
aactcatgggtttctgccattgaaa

SEQ ID NO: 5212040 - DNA, 25 bp, Homo sapien
gggtggaattgcaactcataatgag

SEQ ID NO: 5212041 - DNA, 25 bp, Homo sapien
tgaaaatcttcactcactcttcagg

SEQ ID NO: 5212042 - DNA, 25 bp, Homo sapien
actcactcttcaggtaggcagcagg

SEQ ID NO: 5212043 - DNA, 25 bp, Homo sapien
tgcaactcataatgagatacctttc

SEQ ID NO: 5212044 - DNA, 25 bp, Homo sapien
gaaaccactgatcttaaggcaaaag

SEQ ID NO: 5212045 - DNA, 25 bp, Homo sapien
tttactagcctgaactgaagatggg

SEQ ID NO: 5212046 - DNA, 25 bp, Homo sapien
tgttcctacccctaataagagtgat

SEQ ID NO: 5212047 - DNA, 25 bp, Homo sapien
tggagtaaaggatgcaatcacggct

SEQ ID NO: 5212048 - DNA, 25 bp, Homo sapien
aagcagtggcaaagactacttccag

SEQ ID NO: 5212049 - DNA, 25 bp, Homo sapien
ctttcaccactcttcacgtgtagtg

SEQ ID NO: 5212050 - DNA, 25 bp, Homo sapien
cagggcacttcagtaatcaatgttc

SEQ ID NO: 5212051 - DNA, 25 bp, Homo sapien
ttgaccagtgctttccctctccagg

SEQ ID NO: 5212052 - DNA, 25 bp, Homo sapien
ccttcatatatggtaggaaatggga

SEQ ID NO: 5212053 - DNA, 25 bp, Homo sapien
cttctggcataaagggttcttcact

SEQ ID NO: 5212054 - DNA, 25 bp, Homo sapien
gaagccatcctaggtagacatctct

SEQ ID NO: 5212055 - DNA, 25 bp, Homo sapien
tctttgacattaactggagaagcca

SEQ ID NO: 5212056 - DNA, 25 bp, Homo sapien
tgctgcaaggcatcacacaagatat

SEQ ID NO: 5212057 - DNA, 25 bp, Homo sapien
ggtacttgatgttattgcatgccca

SEQ ID NO: 5212058 - DNA, 25 bp, Homo sapien
gagacaggcggtgtgcatattccaa

SEQ ID NO: 5212059 - DNA, 25 bp, Homo sapien
ctcaatgtatggaatgtcatggtac

SEQ ID NO: 5212060 - DNA, 25 bp, Homo sapien
tttattcaaactagcacctccacag

SEQ ID NO: 5212061 - DNA, 25 bp, Homo sapien
agcacctccacagtcaaagtgttgt

SEQ ID NO: 5212062 - DNA, 25 bp, Homo sapien
agtcaaagtgttgtcatcctacagc

SEQ ID NO: 5212063 - DNA, 25 bp, Homo sapien
tgtcacatttattcaaactagcacc

SEQ ID NO: 5212064 - DNA, 25 bp, Homo sapien
tgtccaaaggcaacgaaaacatggc

SEQ ID NO: 5212065 - DNA, 25 bp, Homo sapien
tagcttccctaaaaggtagccaggc

SEQ ID NO: 5212066 - DNA, 25 bp, Homo sapien
caatgggacagtacaaatcccggga

SEQ ID NO: 5212067 - DNA, 25 bp, Homo sapien
caggagctagtcagtctttcagtca

SEQ ID NO: 5212068 - DNA, 25 bp, Homo sapien
aaagacattaaagatcatgtcctgc

SEQ ID NO: 5212069 - DNA, 25 bp, Homo sapien
ctctttagaaactaagtgaacttca

SEQ ID NO: 5212070 - DNA, 25 bp, Homo sapien
tcatgtcctgcacccttctcataga

SEQ ID NO: 5212071 - DNA, 25 bp, Homo sapien
taagtgaacttcaggtttgtaagaa

SEQ ID NO: 5212072 - DNA, 25 bp, Homo sapien
cagcacagacagcttacaaaagtgt

SEQ ID NO: 5212073 - DNA, 25 bp, Homo sapien
tgtgcactatttgcccttgtagaaa

SEQ ID NO: 5212074 - DNA, 25 bp, Homo sapien
tctacagtaaccaaccataatgcag

SEQ ID NO: 5212075 - DNA, 25 bp, Homo sapien
gggagcttacaacagaggcaactat

SEQ ID NO: 5212076 - DNA, 25 bp, Homo sapien
tgtaaaggtgaaaacatttcctcca

SEQ ID NO: 5212077 - DNA, 25 bp, Homo sapien
ctctgaaggtcttatcaagccgatc

SEQ ID NO: 5212078 - DNA, 25 bp, Homo sapien
aggtcttatcaagccgatcagcaaa

SEQ ID NO: 5212079 - DNA, 25 bp, Homo sapien
tgaaggtcttatcaagccgatcagc

SEQ ID NO: 5212080 - DNA, 25 bp, Homo sapien
ttatcaagccgatcagcaaaaaagg

SEQ ID NO: 5212081 - DNA, 25 bp, Homo sapien
tccctagttggcttgcagaaccgct

SEQ ID NO: 5212082 - DNA, 25 bp, Homo sapien
caaagaataatataggcatgcctca

SEQ ID NO: 5212083 - DNA, 25 bp, Homo sapien
taacttgcaactgacattagacgca

SEQ ID NO: 5212084 - DNA, 25 bp, Homo sapien
catagacgttgaaattcatggaccc

SEQ ID NO: 5212085 - DNA, 25 bp, Homo sapien
cacattgagtagtctcatgcttccc

SEQ ID NO: 5212086 - DNA, 25 bp, Homo sapien
tgagtagtctcatgcttcccttgag

SEQ ID NO: 5212087 - DNA, 25 bp, Homo sapien
gtgttgtgggcatcctcagtcacat

SEQ ID NO: 5212088 - DNA, 25 bp, Homo sapien
tgtgggcatcctcagtcacattgag

SEQ ID NO: 5212089 - DNA, 25 bp, Homo sapien
taccaaaggaaatgtatgtctagca

SEQ ID NO: 5212090 - DNA, 25 bp, Homo sapien
cacacacgtataatacattttgtat

SEQ ID NO: 5212091 - DNA, 25 bp, Homo sapien
tttaagtgctagagaaaataatcaa

SEQ ID NO: 5212092 - DNA, 25 bp, Homo sapien
aaggacatgggatacgttgtagcac

SEQ ID NO: 5212093 - DNA, 25 bp, Homo sapien
tataagggaatagggtgccacggaa

SEQ ID NO: 5212094 - DNA, 25 bp, Homo sapien
ccacggaaagtgtttctgagaggaa

SEQ ID NO: 5212095 - DNA, 25 bp, Homo sapien
gtgccacggaaagtgtttctgagag

SEQ ID NO: 5212096 - DNA, 25 bp, Homo sapien
aactgtataagggaatagggtgcca

SEQ ID NO: 5212097 - DNA, 25 bp, Homo sapien
cgctggaacggtccgggagattctc

SEQ ID NO: 5212098 - DNA, 25 bp, Homo sapien
tctgctgctttagcttcggagtgtt

SEQ ID NO: 5212099 - DNA, 25 bp, Homo sapien
caagggcaggctcttcagcggcact

SEQ ID NO: 5212100 - DNA, 25 bp, Homo sapien
gaagtttcgagtcgcgctcagaggc

SEQ ID NO: 5212101 - DNA, 25 bp, Homo sapien
caacactctgagcatggatactggt

SEQ ID NO: 5212102 - DNA, 25 bp, Homo sapien
gaaataagccataattgcctgccag

SEQ ID NO: 5212103 - DNA, 25 bp, Homo sapien
gatgattaaactccatggcctcttg

SEQ ID NO: 5212104 - DNA, 25 bp, Homo sapien
ggtccattcacagctcaaaaaagtt

SEQ ID NO: 5212105 - DNA, 25 bp, Homo sapien
gtcacgcgagcgaaggcgaagcccc

SEQ ID NO: 5212106 - DNA, 25 bp, Homo sapien
ggatccgagcttggcctcagccagg

SEQ ID NO: 5212107 - DNA, 25 bp, Homo sapien
gtcacaagtggagcgcgatgattca

SEQ ID NO: 5212108 - DNA, 25 bp, Homo sapien
ttgtcgccgcccacgaattcacttt

SEQ ID NO: 5212109 - DNA, 25 bp, Homo sapien
cgcggagaggcgacggcgcgcgccg

SEQ ID NO: 5212110 - DNA, 25 bp, Homo sapien
cagcccgggccccagatccaaggag

SEQ ID NO: 5212111 - DNA, 25 bp, Homo sapien
ctgtggtgggtgtcgtaaggaggaa

SEQ ID NO: 5212112 - DNA, 25 bp, Homo sapien
gcccgggccccagatccaaggagga

SEQ ID NO: 5212113 - DNA, 25 bp, Homo sapien
gctgcagcggcgatgccgggcatgc

SEQ ID NO: 5212114 - DNA, 25 bp, Homo sapien
gatgccgggcatgcctggccgggcc

SEQ ID NO: 5212115 - DNA, 25 bp, Homo sapien
gccggcgcgcagaggcgaggaaccc

SEQ ID NO: 5212116 - DNA, 25 bp, Homo sapien
caggccggcgcgcagaggcgaggaa

SEQ ID NO: 5212117 - DNA, 25 bp, Homo sapien
gaagtgaacaccatcatacagtggg

SEQ ID NO: 5212118 - DNA, 25 bp, Homo sapien
gatgcatctctcaaagccaaggctg

SEQ ID NO: 5212119 - DNA, 25 bp, Homo sapien
catcaagtaggtcactggaggtagc

SEQ ID NO: 5212120 - DNA, 25 bp, Homo sapien
taaccgtctacatgatagggccaaa

SEQ ID NO: 5212121 - DNA, 25 bp, Homo sapien
gagaggtggagactgcataagccat

SEQ ID NO: 5212122 - DNA, 25 bp, Homo sapien
ctgagaggtggagactgcataagcc

SEQ ID NO: 5212123 - DNA, 25 bp, Homo sapien
cctgagaggtggagactgcataagc

SEQ ID NO: 5212124 - DNA, 25 bp, Homo sapien
aggtggagactgcataagccatgat

SEQ ID NO: 5212125 - DNA, 25 bp, Homo sapien
acaggagagctggttcttaggctct

SEQ ID NO: 5212126 - DNA, 25 bp, Homo sapien
tcaggtatataaactcggccacatg

SEQ ID NO: 5212127 - DNA, 25 bp, Homo sapien
aggctctgttttgccaatcaggtat

SEQ ID NO: 5212128 - DNA, 25 bp, Homo sapien
tagaaagagccttgcttgggataca

SEQ ID NO: 5212129 - DNA, 25 bp, Homo sapien
gaatgatcatatgcttagcagcaat

SEQ ID NO: 5212130 - DNA, 25 bp, Homo sapien
gatcatatgcttagcagcaatattg

SEQ ID NO: 5212131 - DNA, 25 bp, Homo sapien
cttagaatgatcatatgcttagcag

SEQ ID NO: 5212132 - DNA, 25 bp, Homo sapien
tcatatgcttagcagcaatattgaa

SEQ ID NO: 5212133 - DNA, 25 bp, Homo sapien
tggaattggcacccaccctctgggc

SEQ ID NO: 5212134 - DNA, 25 bp, Homo sapien
tggtggaattggcacccaccctctg

SEQ ID NO: 5212135 - DNA, 25 bp, Homo sapien
gctggtggaattggcacccaccctc

SEQ ID NO: 5212136 - DNA, 25 bp, Homo sapien
ggtggaattggcacccaccctctgg

SEQ ID NO: 5212137 - DNA, 25 bp, Homo sapien
tcagccagcgtcttgaagtcaactg

SEQ ID NO: 5212138 - DNA, 25 bp, Homo sapien
tttcttttcttcgatcagcagctgg

SEQ ID NO: 5212139 - DNA, 25 bp, Homo sapien
taacttcctgtaccagtacatcagc

SEQ ID NO: 5212140 - DNA, 25 bp, Homo sapien
ctgctgtctgcacgcccgggcaatg

SEQ ID NO: 5212141 - DNA, 25 bp, Homo sapien
tgaggagcaaaaggcatgctattct

SEQ ID NO: 5212142 - DNA, 25 bp, Homo sapien
tgcaatgaacattttatcaatactg

SEQ ID NO: 5212143 - DNA, 25 bp, Homo sapien
tcaaggtgctagtatactgataggg

SEQ ID NO: 5212144 - DNA, 25 bp, Homo sapien
tattctatgatggagaaagccacag

SEQ ID NO: 5212145 - DNA, 25 bp, Homo sapien
gcttcatttagtttatcggagcaag

SEQ ID NO: 5212146 - DNA, 25 bp, Homo sapien
tcggagcaagattttatatgacatg

SEQ ID NO: 5212147 - DNA, 25 bp, Homo sapien
gagattacaagacaaaagcctcatg

SEQ ID NO: 5212148 - DNA, 25 bp, Homo sapien
catttcatctcttcgcctgtggtca

SEQ ID NO: 5212149 - DNA, 25 bp, Homo sapien
taaactcattggattcttctccaaa

SEQ ID NO: 5212150 - DNA, 25 bp, Homo sapien
tagtaaactcattggattcttctcc

SEQ ID NO: 5212151 - DNA, 25 bp, Homo sapien
cccagtcattagtaaactcattgga

SEQ ID NO: 5212152 - DNA, 25 bp, Homo sapien
cattagtaaactcattggattcttc

SEQ ID NO: 5212153 - DNA, 25 bp, Homo sapien
gagggcaatatatccatcccagcag

SEQ ID NO: 5212154 - DNA, 25 bp, Homo sapien
ctgtgcacttagattgagggcaata

SEQ ID NO: 5212155 - DNA, 25 bp, Homo sapien
ccagtgagagagtgaatcaaaagct

SEQ ID NO: 5212156 - DNA, 25 bp, Homo sapien
gggcttcatcaagtcagatgctcag

SEQ ID NO: 5212157 - DNA, 25 bp, Homo sapien
gactttgctaagaagctctgctgtt

SEQ ID NO: 5212158 - DNA, 25 bp, Homo sapien
tcctgatgaacaaccctggctaatg

SEQ ID NO: 5212159 - DNA, 25 bp, Homo sapien
gttgggtcagtaaaggcaacatcct

SEQ ID NO: 5212160 - DNA, 25 bp, Homo sapien
gatgccaccttgttaccattgagga

SEQ ID NO: 5212161 - DNA, 25 bp, Homo sapien
taaaatggtgacacactgaagtcca

SEQ ID NO: 5212162 - DNA, 25 bp, Homo sapien
cacaaaaggttgattgatgactccc

SEQ ID NO: 5212163 - DNA, 25 bp, Homo sapien
gaacccctgtctgtatgtcatagac

SEQ ID NO: 5212164 - DNA, 25 bp, Homo sapien
tgagggtgtttggatctcgtgacac

SEQ ID NO: 5212165 - DNA, 25 bp, Homo sapien
tctaggccatgattatgtctgcata

SEQ ID NO: 5212166 - DNA, 25 bp, Homo sapien
tctcactctgaatctgtgccataaa

SEQ ID NO: 5212167 - DNA, 25 bp, Homo sapien
caaatgattgttacttgaagcagct

SEQ ID NO: 5212168 - DNA, 25 bp, Homo sapien
taagtagcttgctgaggcccactca

SEQ ID NO: 5212169 - DNA, 25 bp, Homo sapien
gatgtaaatgtcaacgaggccttgg

SEQ ID NO: 5212170 - DNA, 25 bp, Homo sapien
taagaaaggccccaatagcactgtc

SEQ ID NO: 5212171 - DNA, 25 bp, Homo sapien
cctcagagccggtgtttccagtgtg

SEQ ID NO: 5212172 - DNA, 25 bp, Homo sapien
ggcatgagcagcacaagagtcccat

SEQ ID NO: 5212173 - DNA, 25 bp, Homo sapien
ggatctgtatgcaatgagtcctccc

SEQ ID NO: 5212174 - DNA, 25 bp, Homo sapien
cttcctggatctgtatgcaatgagt

SEQ ID NO: 5212175 - DNA, 25 bp, Homo sapien
ctgcaggtgccaggttttggaccag

SEQ ID NO: 5212176 - DNA, 25 bp, Homo sapien
ccaggttttggaccaggaggctcag

SEQ ID NO: 5212177 - DNA, 25 bp, Homo sapien
tggaaaaatactcctcaaaagagga

SEQ ID NO: 5212178 - DNA, 25 bp, Homo sapien
tcacagttcagtttatacaggtaca

SEQ ID NO: 5212179 - DNA, 25 bp, Homo sapien
cacagttcagtttatacaggtacac

SEQ ID NO: 5212180 - DNA, 25 bp, Homo sapien
agttcagtttatacaggtacaccgg

SEQ ID NO: 5212181 - DNA, 25 bp, Homo sapien
aacagcacaatattcactgtaagaa

SEQ ID NO: 5212182 - DNA, 25 bp, Homo sapien
agcactaacagcacaatattcactg

SEQ ID NO: 5212183 - DNA, 25 bp, Homo sapien
cactaacagcacaatattcactgta

SEQ ID NO: 5212184 - DNA, 25 bp, Homo sapien
tattgaaatgtttcaagcagcacta

SEQ ID NO: 5212185 - DNA, 25 bp, Homo sapien
attcatacagtataatactcagaaa

SEQ ID NO: 5212186 - DNA, 25 bp, Homo sapien
ttcatacagtataatactcagaaat

SEQ ID NO: 5212187 - DNA, 25 bp, Homo sapien
gggaacactgagacgaaggcaccct

SEQ ID NO: 5212188 - DNA, 25 bp, Homo sapien
ccgtgtgtgtcgcactaagaatata

SEQ ID NO: 5212189 - DNA, 25 bp, Homo sapien
tctagttaaacacgcagagagttgg

SEQ ID NO: 5212190 - DNA, 25 bp, Homo sapien
ttgctgaaaagccaaccgtgtgtgt

SEQ ID NO: 5212191 - DNA, 25 bp, Homo sapien
gggagcacgctgaggaggcgaaagc

SEQ ID NO: 5212192 - DNA, 25 bp, Homo sapien
ggaggcgaaagcactgggcgaggct

SEQ ID NO: 5212193 - DNA, 25 bp, Homo sapien
gggcccggggagcacgctgaggagg

SEQ ID NO: 5212194 - DNA, 25 bp, Homo sapien
agcacgctgaggaggcgaaagcact

SEQ ID NO: 5212195 - DNA, 25 bp, Homo sapien
cggcggcggatgcgtcgactgcccg

SEQ ID NO: 5212196 - DNA, 25 bp, Homo sapien
gcggcggatgcgtcgactgcccgct

SEQ ID NO: 5212197 - DNA, 25 bp, Homo sapien
ggcggatgcgtcgactgcccgctcc

SEQ ID NO: 5212198 - DNA, 25 bp, Homo sapien
ggatgcgtcgactgcccgctcccgg

SEQ ID NO: 5212199 - DNA, 25 bp, Homo sapien
cgccggtcactaccggctggacccg

SEQ ID NO: 5212200 - DNA, 25 bp, Homo sapien
gtcactaccggctggacccgtttca

SEQ ID NO: 5212201 - DNA, 25 bp, Homo sapien
gccgccggtcactaccggctggacc

SEQ ID NO: 5212202 - DNA, 25 bp, Homo sapien
cgctgcggctcctcctcctccccgg

SEQ ID NO: 5212203 - DNA, 25 bp, Homo sapien
ccgctgcggctcctcctcctccccg

SEQ ID NO: 5212204 - DNA, 25 bp, Homo sapien
ctgcggctcctcctcctccccggcc

SEQ ID NO: 5212205 - DNA, 25 bp, Homo sapien
gctgcggctcctcctcctccccggc

SEQ ID NO: 5212206 - DNA, 25 bp, Homo sapien
gcgagggatgcggaccgggtggggc

SEQ ID NO: 5212207 - DNA, 25 bp, Homo sapien
gaggacggaggcggagggcccagcg

SEQ ID NO: 5212208 - DNA, 25 bp, Homo sapien
cggaggacggaggcggagggcccag

SEQ ID NO: 5212209 - DNA, 25 bp, Homo sapien
ggaggacggaggcggagggcccagc

SEQ ID NO: 5212210 - DNA, 25 bp, Homo sapien
cggctgtcggggcagcgcgcaccat

SEQ ID NO: 5212211 - DNA, 25 bp, Homo sapien
gcggctgtcggggcagcgcgcacca

SEQ ID NO: 5212212 - DNA, 25 bp, Homo sapien
cactccggcctgggtaactgagaga

SEQ ID NO: 5212213 - DNA, 25 bp, Homo sapien
actccggcctgggtaactgagagag

SEQ ID NO: 5212214 - DNA, 25 bp, Homo sapien
tccggcctgggtaactgagagagat

SEQ ID NO: 5212215 - DNA, 25 bp, Homo sapien
cggcctgggtaactgagagagatcc

SEQ ID NO: 5212216 - DNA, 25 bp, Homo sapien
tacaaacttcagaatttgtactgtt

SEQ ID NO: 5212217 - DNA, 25 bp, Homo sapien
caagtttacaaacttcagaatttgt

SEQ ID NO: 5212218 - DNA, 25 bp, Homo sapien
tttacaaacttcagaatttgtactg

SEQ ID NO: 5212219 - DNA, 25 bp, Homo sapien
cagcaagtttacaaacttcagaatt

SEQ ID NO: 5212220 - DNA, 25 bp, Homo sapien
ccactctggcttggagacattccca

SEQ ID NO: 5212221 - DNA, 25 bp, Homo sapien
gggcgaatctttggtacacatctca

SEQ ID NO: 5212222 - DNA, 25 bp, Homo sapien
ggtttgacaaatccaatgcccaggt

SEQ ID NO: 5212223 - DNA, 25 bp, Homo sapien
cattcgaaggtggttctggttccct

SEQ ID NO: 5212224 - DNA, 25 bp, Homo sapien
aaagtcaagtccatcatacggttag

SEQ ID NO: 5212225 - DNA, 25 bp, Homo sapien
tgttggcaggatagttaactggtga

SEQ ID NO: 5212226 - DNA, 25 bp, Homo sapien
gctgttggcaaagtaacggtgtctg

SEQ ID NO: 5212227 - DNA, 25 bp, Homo sapien
ggttcactgttcatgtttggagctg

SEQ ID NO: 5212228 - DNA, 25 bp, Homo sapien
ccagatactggagtgtgaccgtgtc

SEQ ID NO: 5212229 - DNA, 25 bp, Homo sapien
acagtggttgtctccttggttacgc

SEQ ID NO: 5212230 - DNA, 25 bp, Homo sapien
tctacgattgtgacagaagaggcac

SEQ ID NO: 5212231 - DNA, 25 bp, Homo sapien
gctgcaacccatagcgatctctgtg

SEQ ID NO: 5212232 - DNA, 25 bp, Homo sapien
gaactgagtggcaacgatcaaggcc

SEQ ID NO: 5212233 - DNA, 25 bp, Homo sapien
tcccaaaagttgaaggcctgcgagt

SEQ ID NO: 5212234 - DNA, 25 bp, Homo sapien
gccatggtcatgagaacgccgaaga

SEQ ID NO: 5212235 - DNA, 25 bp, Homo sapien
aggactgaacagaccccaaagaggg

SEQ ID NO: 5212236 - DNA, 25 bp, Homo sapien
taaatgcctaggacaggtggaccct

SEQ ID NO: 5212237 - DNA, 25 bp, Homo sapien
gattacggtgggttacatcacagtc

SEQ ID NO: 5212238 - DNA, 25 bp, Homo sapien
taagctggtgttcctatacctgaaa

SEQ ID NO: 5212239 - DNA, 25 bp, Homo sapien
tgtgagagtctcttagcacacagct

SEQ ID NO: 5212240 - DNA, 25 bp, Homo sapien
agaatgcttaagtggagttggctcc

SEQ ID NO: 5212241 - DNA, 25 bp, Homo sapien
tacttttctgtaaggcaagaatgct

SEQ ID NO: 5212242 - DNA, 25 bp, Homo sapien
cattttaggaacagacatgtcgtac

SEQ ID NO: 5212243 - DNA, 25 bp, Homo sapien
tggctccacatttagagccaacaga

SEQ ID NO: 5212244 - DNA, 25 bp, Homo sapien
ttgagcagacccagaacgaacatcc

SEQ ID NO: 5212245 - DNA, 25 bp, Homo sapien
caaggagaccagaaccgagtattca

SEQ ID NO: 5212246 - DNA, 25 bp, Homo sapien
ttgtgctaaacatgaactctctgga

SEQ ID NO: 5212247 - DNA, 25 bp, Homo sapien
cagagcagtgcactgggagagatcc

SEQ ID NO: 5212248 - DNA, 25 bp, Homo sapien
gacccatccttgtagaacagagcat

SEQ ID NO: 5212249 - DNA, 25 bp, Homo sapien
cagcaggtatgactggccactgacc

SEQ ID NO: 5212250 - DNA, 25 bp, Homo sapien
tcagagtcagtggtagtcccacagc

SEQ ID NO: 5212251 - DNA, 25 bp, Homo sapien
tataagccacaaagctcagagtcag

SEQ ID NO: 5212252 - DNA, 25 bp, Homo sapien
gaaagaaccacagctggcattcctt

SEQ ID NO: 5212253 - DNA, 25 bp, Homo sapien
ctggctggtttgaaagaaccacagc

SEQ ID NO: 5212254 - DNA, 25 bp, Homo sapien
agctggcattccttgggattcccat

SEQ ID NO: 5212255 - DNA, 25 bp, Homo sapien
ggactggctggtttgaaagaaccac

SEQ ID NO: 5212256 - DNA, 25 bp, Homo sapien
ttttgctgtaactgtctggaatctc

SEQ ID NO: 5212257 - DNA, 25 bp, Homo sapien
gttttgctgtaactgtctggaatct

SEQ ID NO: 5212258 - DNA, 25 bp, Homo sapien
tagcagaatagggttttgctgtaac

SEQ ID NO: 5212259 - DNA, 25 bp, Homo sapien
agcagaatagggttttgctgtaact

SEQ ID NO: 5212260 - DNA, 25 bp, Homo sapien
tcactggagtgaccggttcacaact

SEQ ID NO: 5212261 - DNA, 25 bp, Homo sapien
cagattgccatcaacaagctgagtg

SEQ ID NO: 5212262 - DNA, 25 bp, Homo sapien
gggacccttaggtctcagattgcca

SEQ ID NO: 5212263 - DNA, 25 bp, Homo sapien
cacaattgatagtcctttaggagca

SEQ ID NO: 5212264 - DNA, 25 bp, Homo sapien
aaataacccagtgtcaattgatcca

SEQ ID NO: 5212265 - DNA, 25 bp, Homo sapien
caattgatccagtttaggaggtaga

SEQ ID NO: 5212266 - DNA, 25 bp, Homo sapien
cccagtgtcaattgatccagtttag

SEQ ID NO: 5212267 - DNA, 25 bp, Homo sapien
taggaggtagattgtgctttgcctt

SEQ ID NO: 5212268 - DNA, 25 bp, Homo sapien
ctcaggagtgggaaaactgaaggac

SEQ ID NO: 5212269 - DNA, 25 bp, Homo sapien
ggcttctaacatatctgccctcagc

SEQ ID NO: 5212270 - DNA, 25 bp, Homo sapien
attacatttaagcatgaatttagga

SEQ ID NO: 5212271 - DNA, 25 bp, Homo sapien
ccagcagactccaaactcaggagtg

SEQ ID NO: 5212272 - DNA, 25 bp, Homo sapien
tagcgagccgtattgcaggccaggc

SEQ ID NO: 5212273 - DNA, 25 bp, Homo sapien
cgtattgcaggccaggccaatgtac

SEQ ID NO: 5212274 - DNA, 25 bp, Homo sapien
taaatatagcgagccgtattgcagg

SEQ ID NO: 5212275 - DNA, 25 bp, Homo sapien
gaaatataaatatagcgagccgtat

SEQ ID NO: 5212276 - DNA, 25 bp, Homo sapien
ccaggtcaggatagaacaggaacca

SEQ ID NO: 5212277 - DNA, 25 bp, Homo sapien
aataaagcaattaagccaggtcagg

SEQ ID NO: 5212278 - DNA, 25 bp, Homo sapien
tatttatagagtctgcacactgtag

SEQ ID NO: 5212279 - DNA, 25 bp, Homo sapien
gaatcattcttacctgcagttcctg

SEQ ID NO: 5212280 - DNA, 25 bp, Homo sapien
tgctgcccagatggccgcgtgtgtc

SEQ ID NO: 5212281 - DNA, 25 bp, Homo sapien
gactaacacgcctccgatcatggca

SEQ ID NO: 5212282 - DNA, 25 bp, Homo sapien
ggaacggctgcactgaggtaagaaa

SEQ ID NO: 5212283 - DNA, 25 bp, Homo sapien
ctgaggtaagaaatgcatgctgccc

SEQ ID NO: 5212284 - DNA, 25 bp, Homo sapien
tctcctaatggaataacaatgatga

SEQ ID NO: 5212285 - DNA, 25 bp, Homo sapien
tcctttagggttattatcagcaggt

SEQ ID NO: 5212286 - DNA, 25 bp, Homo sapien
tatggttagattcttctggttcaaa

SEQ ID NO: 5212287 - DNA, 25 bp, Homo sapien
gatctctgtagcatctcattaagct

SEQ ID NO: 5212288 - DNA, 25 bp, Homo sapien
gcagtaggatcaccaagcaggccat

SEQ ID NO: 5212289 - DNA, 25 bp, Homo sapien
caaagagcagtaggatcaccaagca

SEQ ID NO: 5212290 - DNA, 25 bp, Homo sapien
aattcctcggaaggttgcagcagcc

SEQ ID NO: 5212291 - DNA, 25 bp, Homo sapien
agcaggccatgccaattcctcggaa

SEQ ID NO: 5212292 - DNA, 25 bp, Homo sapien
tcgatggttgctataggaacgggac

SEQ ID NO: 5212293 - DNA, 25 bp, Homo sapien
gaagtctgggctcaatgcgtggcat

SEQ ID NO: 5212294 - DNA, 25 bp, Homo sapien
tgtctgttgctgtaccaagtcgatg

SEQ ID NO: 5212295 - DNA, 25 bp, Homo sapien
tgtatctcagaagcacggttgtctc

SEQ ID NO: 5212296 - DNA, 25 bp, Homo sapien
gctactccagacaaagctgacgtga

SEQ ID NO: 5212297 - DNA, 25 bp, Homo sapien
ggtgtcctatcagacccatacagtg

SEQ ID NO: 5212298 - DNA, 25 bp, Homo sapien
gtgaggccacctgcataaccataat

SEQ ID NO: 5212299 - DNA, 25 bp, Homo sapien
gagtgacaggtaatattgctagccc

SEQ ID NO: 5212300 - DNA, 25 bp, Homo sapien
ctttcatctcctttcctatgtgcaa

SEQ ID NO: 5212301 - DNA, 25 bp, Homo sapien
ggggctggtctgcgtctgagatgct

SEQ ID NO: 5212302 - DNA, 25 bp, Homo sapien
ggctggtctgcgtctgagatgctgc

SEQ ID NO: 5212303 - DNA, 25 bp, Homo sapien
gctggtctgcgtctgagatgctgct

SEQ ID NO: 5212304 - DNA, 25 bp, Homo sapien
tctgtgcacgggtccacactggggt

SEQ ID NO: 5212305 - DNA, 25 bp, Homo sapien
tcctcccgcggccagctgagcctgc

SEQ ID NO: 5212306 - DNA, 25 bp, Homo sapien
tcagtgtcctcccgcggccagctga

SEQ ID NO: 5212307 - DNA, 25 bp, Homo sapien
gtcctcccgcggccagctgagcctg

SEQ ID NO: 5212308 - DNA, 25 bp, Homo sapien
agtgtcctcccgcggccagctgagc

SEQ ID NO: 5212309 - DNA, 25 bp, Homo sapien
aggagcctgattccatgcagggtgt

SEQ ID NO: 5212310 - DNA, 25 bp, Homo sapien
ctgaggagcctgattccatgcaggg

SEQ ID NO: 5212311 - DNA, 25 bp, Homo sapien
gaggagcctgattccatgcagggtg

SEQ ID NO: 5212312 - DNA, 25 bp, Homo sapien
tgaggagcctgattccatgcagggt

SEQ ID NO: 5212313 - DNA, 25 bp, Homo sapien
ttccatgttaatgagtttagatatt

SEQ ID NO: 5212314 - DNA, 25 bp, Homo sapien
tccaggggaggcatatcctggctgg

SEQ ID NO: 5212315 - DNA, 25 bp, Homo sapien
tgagtttagatatttagaagcatat

SEQ ID NO: 5212316 - DNA, 25 bp, Homo sapien
tagaagcatatgcagtgctgtgctc

SEQ ID NO: 5212317 - DNA, 25 bp, Homo sapien
tagtggcaagctttacgtgcgatcc

SEQ ID NO: 5212318 - DNA, 25 bp, Homo sapien
ctatggtgtcatggagaagccctca

SEQ ID NO: 5212319 - DNA, 25 bp, Homo sapien
gatcctgtctaatcagggtcagagg

SEQ ID NO: 5212320 - DNA, 25 bp, Homo sapien
tgtgaagcgagacatccaagtgtag

SEQ ID NO: 5212321 - DNA, 25 bp, Homo sapien
ttaaggtagcatatggcactttggg

SEQ ID NO: 5212322 - DNA, 25 bp, Homo sapien
caaggctggaaatgactgcattatc

SEQ ID NO: 5212323 - DNA, 25 bp, Homo sapien
tgcattatcgattctgctgtcacag

SEQ ID NO: 5212324 - DNA, 25 bp, Homo sapien
ggtctcattcattagagtataggac

SEQ ID NO: 5212325 - DNA, 25 bp, Homo sapien
tgccccgcagcaatggacactgtag

SEQ ID NO: 5212326 - DNA, 25 bp, Homo sapien
ccagtttccctctagttcatcacta

SEQ ID NO: 5212327 - DNA, 25 bp, Homo sapien
cactagtaatacttttgtaagatac

SEQ ID NO: 5212328 - DNA, 25 bp, Homo sapien
ctgcggctcttgtcagtgcttctca

SEQ ID NO: 5212329 - DNA, 25 bp, Homo sapien
taatacctagggctgaattacaggg

SEQ ID NO: 5212330 - DNA, 25 bp, Homo sapien
gatgtggaagtttgaagacacctgc

SEQ ID NO: 5212331 - DNA, 25 bp, Homo sapien
taggtgacaacaggagcaagctgcc

SEQ ID NO: 5212332 - DNA, 25 bp, Homo sapien
tagccttattgacttagaaccctgc

SEQ ID NO: 5212333 - DNA, 25 bp, Homo sapien
gcttggtgcctacaaaagcttactg

SEQ ID NO: 5212334 - DNA, 25 bp, Homo sapien
taattatggagcctaacagatccct

SEQ ID NO: 5212335 - DNA, 25 bp, Homo sapien
gctctgcccttcacaggtggttgga

SEQ ID NO: 5212336 - DNA, 25 bp, Homo sapien
aagttgaactctttgacaccagatg

SEQ ID NO: 5212337 - DNA, 25 bp, Homo sapien
tctagtgaacggtggcaaaaacatt

SEQ ID NO: 5212338 - DNA, 25 bp, Homo sapien
tagcattcttggtgacttctgctac

SEQ ID NO: 5212339 - DNA, 25 bp, Homo sapien
cagggattctattaaagttaggcag

SEQ ID NO: 5212340 - DNA, 25 bp, Homo sapien
ccattttgaagataacttagcattc

SEQ ID NO: 5212341 - DNA, 25 bp, Homo sapien
gaagagcagctctttaacccgagta

SEQ ID NO: 5212342 - DNA, 25 bp, Homo sapien
cgagtactgcctgacatgcgacctt

SEQ ID NO: 5212343 - DNA, 25 bp, Homo sapien
tctgcatgaagagcagtatggcctt

SEQ ID NO: 5212344 - DNA, 25 bp, Homo sapien
gccacttgtcacctgaagaaatcag

SEQ ID NO: 5212345 - DNA, 25 bp, Homo sapien
agataggcagtgctgtcagtgcagc

SEQ ID NO: 5212346 - DNA, 25 bp, Homo sapien
tgctgtcagtgcagcaagcaaggtg

SEQ ID NO: 5212347 - DNA, 25 bp, Homo sapien
tcaggagataggcagtgctgtcagt

SEQ ID NO: 5212348 - DNA, 25 bp, Homo sapien
taggcagtgctgtcagtgcagcaag

SEQ ID NO: 5212349 - DNA, 25 bp, Homo sapien
aagcatgggccccttgcagacgaca

SEQ ID NO: 5212350 - DNA, 25 bp, Homo sapien
cagacgacaggagcagaagtcttct

SEQ ID NO: 5212351 - DNA, 25 bp, Homo sapien
tccctggttctggtctatgctggtg

SEQ ID NO: 5212352 - DNA, 25 bp, Homo sapien
cctcagtttgcctatgcagccataa

SEQ ID NO: 5212353 - DNA, 25 bp, Homo sapien
gctctaatggttggttgttggtttg

SEQ ID NO: 5212354 - DNA, 25 bp, Homo sapien
aatggttggttgttggtttgcctca

SEQ ID NO: 5212355 - DNA, 25 bp, Homo sapien
ttggtttgcctcagtttatattgta

SEQ ID NO: 5212356 - DNA, 25 bp, Homo sapien
tctaatggttggttgttggtttgcc

SEQ ID NO: 5212357 - DNA, 25 bp, Homo sapien
ttattttcttccacacacagtatag

SEQ ID NO: 5212358 - DNA, 25 bp, Homo sapien
attttcttccacacacagtatagca

SEQ ID NO: 5212359 - DNA, 25 bp, Homo sapien
ttttcttccacacacagtatagcac

SEQ ID NO: 5212360 - DNA, 25 bp, Homo sapien
tattttcttccacacacagtatagc

SEQ ID NO: 5212361 - DNA, 25 bp, Homo sapien
caggttctgatttagcagtctgcag

SEQ ID NO: 5212362 - DNA, 25 bp, Homo sapien
tgtggaccacaccttaagaccctag

SEQ ID NO: 5212363 - DNA, 25 bp, Homo sapien
tacatgcaagctagatgggaatctt

SEQ ID NO: 5212364 - DNA, 25 bp, Homo sapien
cagcaagctccatgtgatgtcggtg

SEQ ID NO: 5212365 - DNA, 25 bp, Homo sapien
cttgaatccggaagaacttacgact

SEQ ID NO: 5212366 - DNA, 25 bp, Homo sapien
tggaggtgacactctatcttgaatc

SEQ ID NO: 5212367 - DNA, 25 bp, Homo sapien
cactctatcttgaatccggaagaac

SEQ ID NO: 5212368 - DNA, 25 bp, Homo sapien
gaagaacttacgactttcattccac

SEQ ID NO: 5212369 - DNA, 25 bp, Homo sapien
tcagtccttccccaactttggtgta

SEQ ID NO: 5212370 - DNA, 25 bp, Homo sapien
tagcaagttgttctagcttcatttc

SEQ ID NO: 5212371 - DNA, 25 bp, Homo sapien
ccttccccaactttggtgtagcaag

SEQ ID NO: 5212372 - DNA, 25 bp, Homo sapien
tcaggggttggatgtaaagcccatt

SEQ ID NO: 5212373 - DNA, 25 bp, Homo sapien
acactccgggttagcgactcttcct

SEQ ID NO: 5212374 - DNA, 25 bp, Homo sapien
tggacgccccgcgtgcgctggaggc

SEQ ID NO: 5212375 - DNA, 25 bp, Homo sapien
aattcagcctccaaatccgcaggtc

SEQ ID NO: 5212376 - DNA, 25 bp, Homo sapien
ccgcaggtcacaggtcagccaagtt

SEQ ID NO: 5212377 - DNA, 25 bp, Homo sapien
tgccgaaggaccttcccattcacgg

SEQ ID NO: 5212378 - DNA, 25 bp, Homo sapien
gtttgccgaaggaccttcccattca

SEQ ID NO: 5212379 - DNA, 25 bp, Homo sapien
gaaggaccttcccattcacgggctg

SEQ ID NO: 5212380 - DNA, 25 bp, Homo sapien
aggaccttcccattcacgggctgtc

SEQ ID NO: 5212381 - DNA, 25 bp, Homo sapien
ttgcaagaagcaagtgcacaccgca

SEQ ID NO: 5212382 - DNA, 25 bp, Homo sapien
ctgtcttgcaagaagcaagtgcaca

SEQ ID NO: 5212383 - DNA, 25 bp, Homo sapien
tcttgcaagaagcaagtgcacaccg

SEQ ID NO: 5212384 - DNA, 25 bp, Homo sapien
tgcaagaagcaagtgcacaccgcac

SEQ ID NO: 5212385 - DNA, 25 bp, Homo sapien
tcccttatcggagcctgaacactgt

SEQ ID NO: 5212386 - DNA, 25 bp, Homo sapien
cacactgtcccttatcggagcctga

SEQ ID NO: 5212387 - DNA, 25 bp, Homo sapien
actgtcccttatcggagcctgaaca

SEQ ID NO: 5212388 - DNA, 25 bp, Homo sapien
ggcacactgtcccttatcggagcct

SEQ ID NO: 5212389 - DNA, 25 bp, Homo sapien
ttcaccagaagtgtaaacctcctct

SEQ ID NO: 5212390 - DNA, 25 bp, Homo sapien
cctcttactgcattgattcataaag

SEQ ID NO: 5212391 - DNA, 25 bp, Homo sapien
cattccctattcttcaccagaagtg

SEQ ID NO: 5212392 - DNA, 25 bp, Homo sapien
cataaagtattctacaacaaatgat

SEQ ID NO: 5212393 - DNA, 25 bp, Homo sapien
ctgataattattgagttttttgttg

SEQ ID NO: 5212394 - DNA, 25 bp, Homo sapien
tgtttttctctgataattattgagt

SEQ ID NO: 5212395 - DNA, 25 bp, Homo sapien
tctctgataattattgagttttttg

SEQ ID NO: 5212396 - DNA, 25 bp, Homo sapien
tattacagtgtttttctctgataat

SEQ ID NO: 5212397 - DNA, 25 bp, Homo sapien
tattttcagtctaccaagagcttcc

SEQ ID NO: 5212398 - DNA, 25 bp, Homo sapien
atttgtctcaaggtaatggcctcac

SEQ ID NO: 5212399 - DNA, 25 bp, Homo sapien
gaaagggtctcattgcaagactagt

SEQ ID NO: 5212400 - DNA, 25 bp, Homo sapien
tgtcatggaagcacccttgtgagtc

SEQ ID NO: 5212401 - DNA, 25 bp, Homo sapien
ttaacactgtttttccgttgccata

SEQ ID NO: 5212402 - DNA, 25 bp, Homo sapien
tgtttttccgttgccataactgccc

SEQ ID NO: 5212403 - DNA, 25 bp, Homo sapien
taacactgtttttccgttgccataa

SEQ ID NO: 5212404 - DNA, 25 bp, Homo sapien
cactgtttttccgttgccataactg

SEQ ID NO: 5212405 - DNA, 25 bp, Homo sapien
gggccctgtctttccaaattgtatc

SEQ ID NO: 5212406 - DNA, 25 bp, Homo sapien
tgattcccgaacacagtctgtgctt

SEQ ID NO: 5212407 - DNA, 25 bp, Homo sapien
tacacactggacttactgattcccg

SEQ ID NO: 5212408 - DNA, 25 bp, Homo sapien
aattgtatccctcacagttctcagc

SEQ ID NO: 5212409 - DNA, 25 bp, Homo sapien
tgtcacaagcaggaaagtcatcagc

SEQ ID NO: 5212410 - DNA, 25 bp, Homo sapien
caagcaggaaagtcatcagcctgca

SEQ ID NO: 5212411 - DNA, 25 bp, Homo sapien
agcaggaaagtcatcagcctgcatg

SEQ ID NO: 5212412 - DNA, 25 bp, Homo sapien
tcacaagcaggaaagtcatcagcct

SEQ ID NO: 5212413 - DNA, 25 bp, Homo sapien
gaatgctggcactgtaatcttgttc

SEQ ID NO: 5212414 - DNA, 25 bp, Homo sapien
gtaatcttgttctgcacatttgtaa

SEQ ID NO: 5212415 - DNA, 25 bp, Homo sapien
tgttctgcacatttgtaatctggag

SEQ ID NO: 5212416 - DNA, 25 bp, Homo sapien
ggcactgtaatcttgttctgcacat

SEQ ID NO: 5212417 - DNA, 25 bp, Homo sapien
caacactgacacttctccccactcc

SEQ ID NO: 5212418 - DNA, 25 bp, Homo sapien
ccccactcctgttatcctgggtaat

SEQ ID NO: 5212419 - DNA, 25 bp, Homo sapien
tcctgttatcctgggtaatgtcagt

SEQ ID NO: 5212420 - DNA, 25 bp, Homo sapien
actcctgttatcctgggtaatgtca

SEQ ID NO: 5212421 - DNA, 25 bp, Homo sapien
gctcttatgagctttagtgcatgaa

SEQ ID NO: 5212422 - DNA, 25 bp, Homo sapien
ggtagttcgttacttacatatacac

SEQ ID NO: 5212423 - DNA, 25 bp, Homo sapien
tatgttccagatggacaacactgct

SEQ ID NO: 5212424 - DNA, 25 bp, Homo sapien
tctattttgcctactcagggaactt

SEQ ID NO: 5212425 - DNA, 25 bp, Homo sapien
cctacatgaaatcgccagattttgc

SEQ ID NO: 5212426 - DNA, 25 bp, Homo sapien
ggttgagctctaccaagtccagttc

SEQ ID NO: 5212427 - DNA, 25 bp, Homo sapien
tctgtctgatagcaggagatgcaaa

SEQ ID NO: 5212428 - DNA, 25 bp, Homo sapien
tcttgcctgcacatcctacatgaaa

SEQ ID NO: 5212429 - DNA, 25 bp, Homo sapien
taggaatatcacgtcagaaaggcac

SEQ ID NO: 5212430 - DNA, 25 bp, Homo sapien
gcacaaggcttccaagggtcaggca

SEQ ID NO: 5212431 - DNA, 25 bp, Homo sapien
tcagggaggtgatgagtctaaaacc

SEQ ID NO: 5212432 - DNA, 25 bp, Homo sapien
tagaggctccagtcaacaaaatcat

SEQ ID NO: 5212433 - DNA, 25 bp, Homo sapien
cagttgacgagcatggaaggttcat

SEQ ID NO: 5212434 - DNA, 25 bp, Homo sapien
tagcagatgaaccaaccagactggc

SEQ ID NO: 5212435 - DNA, 25 bp, Homo sapien
gacttcagatcatttagacagccca

SEQ ID NO: 5212436 - DNA, 25 bp, Homo sapien
taccagatgcccacagatggctcag

SEQ ID NO: 5212437 - DNA, 25 bp, Homo sapien
ggattacagtcctgccccaccacac

SEQ ID NO: 5212438 - DNA, 25 bp, Homo sapien
tgcctgccttggcctcccaaagtgc

SEQ ID NO: 5212439 - DNA, 25 bp, Homo sapien
tacagtcctgccccaccacacccgg

SEQ ID NO: 5212440 - DNA, 25 bp, Homo sapien
ctgcctgccttggcctcccaaagtg

SEQ ID NO: 5212441 - DNA, 25 bp, Homo sapien
gaagggcaacagttacatgacaaag

SEQ ID NO: 5212442 - DNA, 25 bp, Homo sapien
tatgatgtccctaattccagtacca

SEQ ID NO: 5212443 - DNA, 25 bp, Homo sapien
aagtggcaggaactcgggcctgaaa

SEQ ID NO: 5212444 - DNA, 25 bp, Homo sapien
caggttttgcccctcagtatttggg

SEQ ID NO: 5212445 - DNA, 25 bp, Homo sapien
acatctgtcctactatgagtcttaa

SEQ ID NO: 5212446 - DNA, 25 bp, Homo sapien
tgcaatcacagagtacgtaaaaagt

SEQ ID NO: 5212447 - DNA, 25 bp, Homo sapien
tgtatgagttgagaagtagctttgc

SEQ ID NO: 5212448 - DNA, 25 bp, Homo sapien
gtcttaatagcaagtccaattctgc

SEQ ID NO: 5212449 - DNA, 25 bp, Homo sapien
ttgtcactctttggatccagtaaga

SEQ ID NO: 5212450 - DNA, 25 bp, Homo sapien
tcactctttggatccagtaagacca

SEQ ID NO: 5212451 - DNA, 25 bp, Homo sapien
cactctttggatccagtaagaccat

SEQ ID NO: 5212452 - DNA, 25 bp, Homo sapien
tgtcactctttggatccagtaagac

SEQ ID NO: 5212453 - DNA, 25 bp, Homo sapien
atgcagcaagggcatttgccacagc

SEQ ID NO: 5212454 - DNA, 25 bp, Homo sapien
gcaagggcatttgccacagcatgga

SEQ ID NO: 5212455 - DNA, 25 bp, Homo sapien
cacagcatggaccatgcaggaccat

SEQ ID NO: 5212456 - DNA, 25 bp, Homo sapien
gaccatgcaggaccatacttccaca

SEQ ID NO: 5212457 - DNA, 25 bp, Homo sapien
gaacagtagtttggcaagtcgaacc

SEQ ID NO: 5212458 - DNA, 25 bp, Homo sapien
ctaggagcggatactttgaaaggac

SEQ ID NO: 5212459 - DNA, 25 bp, Homo sapien
tcgaaccaagagttgcaacatgtcc

SEQ ID NO: 5212460 - DNA, 25 bp, Homo sapien
tacatcatgactcagcttacccagg

SEQ ID NO: 5212461 - DNA, 25 bp, Homo sapien
tgaggccaagatctctgtcccacag

SEQ ID NO: 5212462 - DNA, 25 bp, Homo sapien
gtatcgagtacctaataagtgctgg

SEQ ID NO: 5212463 - DNA, 25 bp, Homo sapien
gcaacagcgctataaagtatgcact

SEQ ID NO: 5212464 - DNA, 25 bp, Homo sapien
aattcatctgatcctcgcaacagcg

SEQ ID NO: 5212465 - DNA, 25 bp, Homo sapien
gtttccagagttggaagaaacaaca

SEQ ID NO: 5212466 - DNA, 25 bp, Homo sapien
ctgaactattgagccttctagtgga

SEQ ID NO: 5212467 - DNA, 25 bp, Homo sapien
tcctcttcccaagcttgtctgtgtc

SEQ ID NO: 5212468 - DNA, 25 bp, Homo sapien
acaacattaaatcctcttcccaagc

SEQ ID NO: 5212469 - DNA, 25 bp, Homo sapien
ctcccagagtgtgcctacttcgctg

SEQ ID NO: 5212470 - DNA, 25 bp, Homo sapien
cccagagtgtgcctacttcgctgat

SEQ ID NO: 5212471 - DNA, 25 bp, Homo sapien
gctgatggggatacaaggcattctt

SEQ ID NO: 5212472 - DNA, 25 bp, Homo sapien
agagtgtgcctacttcgctgatggg

SEQ ID NO: 5212473 - DNA, 25 bp, Homo sapien
ccacgcgcggccgagtgacgcagat

SEQ ID NO: 5212474 - DNA, 25 bp, Homo sapien
agtgacgcagatcccggcgtgggcc

SEQ ID NO: 5212475 - DNA, 25 bp, Homo sapien
gattccgctcttgctacattcgccg

SEQ ID NO: 5212476 - DNA, 25 bp, Homo sapien
tgggagattccgctcttgctacatt

SEQ ID NO: 5212477 - DNA, 25 bp, Homo sapien
gacggcgctcgcttggccgcggcgg

SEQ ID NO: 5212478 - DNA, 25 bp, Homo sapien
ctgcagcggtcttggcgcgctctcc

SEQ ID NO: 5212479 - DNA, 25 bp, Homo sapien
aaggtggtgggcgcgctctctctgc

SEQ ID NO: 5212480 - DNA, 25 bp, Homo sapien
ggtcttggcgcgctctccccgagga

SEQ ID NO: 5212481 - DNA, 25 bp, Homo sapien
ttagagacacaaagagtttctggct

SEQ ID NO: 5212482 - DNA, 25 bp, Homo sapien
tatccaacgcttgtatgtcccacat

SEQ ID NO: 5212483 - DNA, 25 bp, Homo sapien
caaattcctcatcggccttagagac

SEQ ID NO: 5212484 - DNA, 25 bp, Homo sapien
gcacctcagcgccaagtttctgtaa

SEQ ID NO: 5212485 - DNA, 25 bp, Homo sapien
taagtcttaggccaatgaaacctga

SEQ ID NO: 5212486 - DNA, 25 bp, Homo sapien
aaactgacatacttctgttttcatc

SEQ ID NO: 5212487 - DNA, 25 bp, Homo sapien
tgaaacctgacataacttcggaggc

SEQ ID NO: 5212488 - DNA, 25 bp, Homo sapien
tgttataatggaataaatgagtcct

SEQ ID NO: 5212489 - DNA, 25 bp, Homo sapien
aagaattcaagttcagtcatgagat

SEQ ID NO: 5212490 - DNA, 25 bp, Homo sapien
ttaagaattcaagttcagtcatgag

SEQ ID NO: 5212491 - DNA, 25 bp, Homo sapien
ttttaagaattcaagttcagtcatg

SEQ ID NO: 5212492 - DNA, 25 bp, Homo sapien
taagaattcaagttcagtcatgaga

SEQ ID NO: 5212493 - DNA, 25 bp, Homo sapien
attcaaataacaccaacaactaagc

SEQ ID NO: 5212494 - DNA, 25 bp, Homo sapien
ttcaaataacaccaacaactaagcc

SEQ ID NO: 5212495 - DNA, 25 bp, Homo sapien
tcaaataacaccaacaactaagcca

SEQ ID NO: 5212496 - DNA, 25 bp, Homo sapien
aagatatcctggaacgaccactcgg

SEQ ID NO: 5212497 - DNA, 25 bp, Homo sapien
tcggaggccttgctgccaatgtaca

SEQ ID NO: 5212498 - DNA, 25 bp, Homo sapien
cattcaaaagctaactcggaggcct

SEQ ID NO: 5212499 - DNA, 25 bp, Homo sapien
ttccatcagcttaaatgttcctccc

SEQ ID NO: 5212500 - DNA, 25 bp, Homo sapien
tacttaataaatcctccgggcacca

SEQ ID NO: 5212501 - DNA, 25 bp, Homo sapien
agacacagaagctccaagacatggg

SEQ ID NO: 5212502 - DNA, 25 bp, Homo sapien
aatacagtttcccaggtgcctgaga

SEQ ID NO: 5212503 - DNA, 25 bp, Homo sapien
taaatcacctaaaggaggctctgcc

SEQ ID NO: 5212504 - DNA, 25 bp, Homo sapien
gaacaaaaacgagaagcatctgcat

SEQ ID NO: 5212505 - DNA, 25 bp, Homo sapien
ggataaaggcatcaaaataagaaag

SEQ ID NO: 5212506 - DNA, 25 bp, Homo sapien
cagccatgttggtgatccctctggt

SEQ ID NO: 5212507 - DNA, 25 bp, Homo sapien
cataactactgcaggatattcccag

SEQ ID NO: 5212508 - DNA, 25 bp, Homo sapien
cgggcattgctactcctttcataac

SEQ ID NO: 5212509 - DNA, 25 bp, Homo sapien
tttaaatgaggttcccgggcattgc

SEQ ID NO: 5212510 - DNA, 25 bp, Homo sapien
tattgcactgtatttccgaatttcc

SEQ ID NO: 5212511 - DNA, 25 bp, Homo sapien
atattgcactgtatttccgaatttc

SEQ ID NO: 5212512 - DNA, 25 bp, Homo sapien
tatattgcactgtatttccgaattt

SEQ ID NO: 5212513 - DNA, 25 bp, Homo sapien
atatattgcactgtatttccgaatt

SEQ ID NO: 5212514 - DNA, 25 bp, Homo sapien
taacgactagcaacatgccacatac

SEQ ID NO: 5212515 - DNA, 25 bp, Homo sapien
ctaacgactagcaacatgccacata

SEQ ID NO: 5212516 - DNA, 25 bp, Homo sapien
acgactagcaacatgccacatacac

SEQ ID NO: 5212517 - DNA, 25 bp, Homo sapien
aacgactagcaacatgccacataca

SEQ ID NO: 5212518 - DNA, 25 bp, Homo sapien
caactgcttaagatatcgtttccaa

SEQ ID NO: 5212519 - DNA, 25 bp, Homo sapien
gagaaacagacaacactacaatcag

SEQ ID NO: 5212520 - DNA, 25 bp, Homo sapien
ttaaagggttggcatcacacaaacc

SEQ ID NO: 5212521 - DNA, 25 bp, Homo sapien
gtacacaactctttttactgacaga

SEQ ID NO: 5212522 - DNA, 25 bp, Homo sapien
gctcatctcttcttgtcagcagggc

SEQ ID NO: 5212523 - DNA, 25 bp, Homo sapien
ggtgacttctcgagaaatctgtcga

SEQ ID NO: 5212524 - DNA, 25 bp, Homo sapien
tgacttctcgagaaatctgtcgagc

SEQ ID NO: 5212525 - DNA, 25 bp, Homo sapien
tctgtcgagccaaggcaaaaagctc

SEQ ID NO: 5212526 - DNA, 25 bp, Homo sapien
tttaattctctttggggataattca

SEQ ID NO: 5212527 - DNA, 25 bp, Homo sapien
ctccactttaattctctttggggat

SEQ ID NO: 5212528 - DNA, 25 bp, Homo sapien
ctttggggataattcatctctttct

SEQ ID NO: 5212529 - DNA, 25 bp, Homo sapien
ctctttggggataattcatctcttt

SEQ ID NO: 5212530 - DNA, 25 bp, Homo sapien
tatacagtccaagctaaatccaaag

SEQ ID NO: 5212531 - DNA, 25 bp, Homo sapien
ggtctacaatataccagtccctatg

SEQ ID NO: 5212532 - DNA, 25 bp, Homo sapien
caagttcagtgaggtaagctagtag

SEQ ID NO: 5212533 - DNA, 25 bp, Homo sapien
tcatcacagacaagactgggtttcc

SEQ ID NO: 5212534 - DNA, 25 bp, Homo sapien
tctttgataagctatatatttgcag

SEQ ID NO: 5212535 - DNA, 25 bp, Homo sapien
tttgcagcagagggcaaatccttaa

SEQ ID NO: 5212536 - DNA, 25 bp, Homo sapien
ttgataagctatatatttgcagcag

SEQ ID NO: 5212537 - DNA, 25 bp, Homo sapien
cccttctttgataagctatatattt

SEQ ID NO: 5212538 - DNA, 25 bp, Homo sapien
agaagtcctttatatttagagtttg

SEQ ID NO: 5212539 - DNA, 25 bp, Homo sapien
gcaagttcttcactcttagctctag

SEQ ID NO: 5212540 - DNA, 25 bp, Homo sapien
gaatcctggaaatctggaaacccat

SEQ ID NO: 5212541 - DNA, 25 bp, Homo sapien
ctgtgaactaagagctgcaagttct

SEQ ID NO: 5212542 - DNA, 25 bp, Homo sapien
tagcctgctggaagagtgtttgcac

SEQ ID NO: 5212543 - DNA, 25 bp, Homo sapien
taagagagtaggacaagaaagctgc

SEQ ID NO: 5212544 - DNA, 25 bp, Homo sapien
tattgctctcatgttgatacagctg

SEQ ID NO: 5212545 - DNA, 25 bp, Homo sapien
taagtagcaccatatcagattccgt

SEQ ID NO: 5212546 - DNA, 25 bp, Homo sapien
cagctgtggctcagatgacgtttta

SEQ ID NO: 5212547 - DNA, 25 bp, Homo sapien
ccatctgagttatcggaagtcaagc

SEQ ID NO: 5212548 - DNA, 25 bp, Homo sapien
catctgagttatcggaagtcaagcc

SEQ ID NO: 5212549 - DNA, 25 bp, Homo sapien
tccatctgagttatcggaagtcaag

SEQ ID NO: 5212550 - DNA, 25 bp, Homo sapien
tgtccatctgagttatcggaagtca

SEQ ID NO: 5212551 - DNA, 25 bp, Homo sapien
aattttgcctgaacactccttagga

SEQ ID NO: 5212552 - DNA, 25 bp, Homo sapien
aaattttgcctgaacactccttagg

SEQ ID NO: 5212553 - DNA, 25 bp, Homo sapien
tgtaaattaggcattcggagattca

SEQ ID NO: 5212554 - DNA, 25 bp, Homo sapien
attaggcattcggagattcaaaggt

SEQ ID NO: 5212555 - DNA, 25 bp, Homo sapien
taaagtctgctcagctccccatcca

SEQ ID NO: 5212556 - DNA, 25 bp, Homo sapien
aaattaggcattcggagattcaaag

SEQ ID NO: 5212557 - DNA, 25 bp, Homo sapien
cctctcatcatatagcacgttctca

SEQ ID NO: 5212558 - DNA, 25 bp, Homo sapien
taactatgataaggagctgctcatc

SEQ ID NO: 5212559 - DNA, 25 bp, Homo sapien
ggtagtaacacaactcaaaccagct

SEQ ID NO: 5212560 - DNA, 25 bp, Homo sapien
tagcatctgctaccaagagtatgat

SEQ ID NO: 5212561 - DNA, 25 bp, Homo sapien
tgtcaaagcaaacatgtagtccatc

SEQ ID NO: 5212562 - DNA, 25 bp, Homo sapien
tggacccaggcttgcactgtatgaa

SEQ ID NO: 5212563 - DNA, 25 bp, Homo sapien
ttaccaatgaagcaactgaaggacg

SEQ ID NO: 5212564 - DNA, 25 bp, Homo sapien
tcagggtcactcagtcaagtatcgg

SEQ ID NO: 5212565 - DNA, 25 bp, Homo sapien
tatcggtgctaagatctggacccag

SEQ ID NO: 5212566 - DNA, 25 bp, Homo sapien
agctgaatgagggtagtcttttaaa

SEQ ID NO: 5212567 - DNA, 25 bp, Homo sapien
ggtaaaagctgaatgagggtagtct

SEQ ID NO: 5212568 - DNA, 25 bp, Homo sapien
taaggtaaaagctgaatgagggtag

SEQ ID NO: 5212569 - DNA, 25 bp, Homo sapien
taaaagctgaatgagggtagtcttt

SEQ ID NO: 5212570 - DNA, 25 bp, Homo sapien
tatccacatctattagaccaaacag

SEQ ID NO: 5212571 - DNA, 25 bp, Homo sapien
gaccaaacaggtctcaacatctaga

SEQ ID NO: 5212572 - DNA, 25 bp, Homo sapien
tggtttccacagactaccgtaccag

SEQ ID NO: 5212573 - DNA, 25 bp, Homo sapien
tgatgccatttccagagaacggtga

SEQ ID NO: 5212574 - DNA, 25 bp, Homo sapien
tacgtgacagtgatctgagactaca

SEQ ID NO: 5212575 - DNA, 25 bp, Homo sapien
caaagttgcaaggtccataagaagc

SEQ ID NO: 5212576 - DNA, 25 bp, Homo sapien
tcaaagcttttatacatgggtccac

SEQ ID NO: 5212577 - DNA, 25 bp, Homo sapien
gagatatactaaccagtgctatggc

SEQ ID NO: 5212578 - DNA, 25 bp, Homo sapien
tgtaatactgaggtaaccaattgac

SEQ ID NO: 5212579 - DNA, 25 bp, Homo sapien
tcaactaattataacttccaattca

SEQ ID NO: 5212580 - DNA, 25 bp, Homo sapien
aaatcaactaattataacttccaat

SEQ ID NO: 5212581 - DNA, 25 bp, Homo sapien
ttggactatattggctgtaatactg

SEQ ID NO: 5212582 - DNA, 25 bp, Homo sapien
tctttattgccacaggaagcaagtg

SEQ ID NO: 5212583 - DNA, 25 bp, Homo sapien
ctttattgccacaggaagcaagtgc

SEQ ID NO: 5212584 - DNA, 25 bp, Homo sapien
aatctttattgccacaggaagcaag

SEQ ID NO: 5212585 - DNA, 25 bp, Homo sapien
aaatctttattgccacaggaagcaa

SEQ ID NO: 5212586 - DNA, 25 bp, Homo sapien
catacaaggtttgttcaattctaac

SEQ ID NO: 5212587 - DNA, 25 bp, Homo sapien
gtaaaagagcaactactgtatttgg

SEQ ID NO: 5212588 - DNA, 25 bp, Homo sapien
gtatttggtcattcaagctgttaca

SEQ ID NO: 5212589 - DNA, 25 bp, Homo sapien
cagctacttactaattgaattgatt

SEQ ID NO: 5212590 - DNA, 25 bp, Homo sapien
cacagataagaagcttgcattccct

SEQ ID NO: 5212591 - DNA, 25 bp, Homo sapien
ggatcattctcttattaactttgga

SEQ ID NO: 5212592 - DNA, 25 bp, Homo sapien
ggcactggatcattctcttattaac

SEQ ID NO: 5212593 - DNA, 25 bp, Homo sapien
ctcttattaactttggaggcctact

SEQ ID NO: 5212594 - DNA, 25 bp, Homo sapien
aaaaatgtcaggcactggatcattc

SEQ ID NO: 5212595 - DNA, 25 bp, Homo sapien
gttctatgggattcttctttgacct

SEQ ID NO: 5212596 - DNA, 25 bp, Homo sapien
tctttgacctttttaggtacagaca

SEQ ID NO: 5212597 - DNA, 25 bp, Homo sapien
aaattttaggtgttgcctgattagt

SEQ ID NO: 5212598 - DNA, 25 bp, Homo sapien
acagtgcaaaggtggtgtgcctagt

SEQ ID NO: 5212599 - DNA, 25 bp, Homo sapien
tcttgattggggtctggatagaaag

SEQ ID NO: 5212600 - DNA, 25 bp, Homo sapien
gcagccatgagcatcttgcagcaga

SEQ ID NO: 5212601 - DNA, 25 bp, Homo sapien
agaaagttattgtcgggctggcctg

SEQ ID NO: 5212602 - DNA, 25 bp, Homo sapien
gccatgagcatcttgcagcagacat

SEQ ID NO: 5212603 - DNA, 25 bp, Homo sapien
tccatccatacggcttccctaagat

SEQ ID NO: 5212604 - DNA, 25 bp, Homo sapien
catacggcttccctaagatcctgtt

SEQ ID NO: 5212605 - DNA, 25 bp, Homo sapien
cggcttccctaagatcctgttcctt

SEQ ID NO: 5212606 - DNA, 25 bp, Homo sapien
atccatacggcttccctaagatcct

SEQ ID NO: 5212607 - DNA, 25 bp, Homo sapien
ccttgattgtgccatgtcagcaaag

SEQ ID NO: 5212608 - DNA, 25 bp, Homo sapien
cacgctggagtccttgattgtgcca

SEQ ID NO: 5212609 - DNA, 25 bp, Homo sapien
catagagatggccacgctggagtcc

SEQ ID NO: 5212610 - DNA, 25 bp, Homo sapien
gatgagccatagagatggccacgct

SEQ ID NO: 5212611 - DNA, 25 bp, Homo sapien
atgaggagactcatggcccacagaa

SEQ ID NO: 5212612 - DNA, 25 bp, Homo sapien
taatggcagtaatgaggagactcat

SEQ ID NO: 5212613 - DNA, 25 bp, Homo sapien
tgaggagactcatggcccacagaag

SEQ ID NO: 5212614 - DNA, 25 bp, Homo sapien
tggtaatggcagtaatgaggagact

SEQ ID NO: 5212615 - DNA, 25 bp, Homo sapien
gaacgctcaccagcattctcaattc

SEQ ID NO: 5212616 - DNA, 25 bp, Homo sapien
tgacctgtaaagaacgctcaccagc

SEQ ID NO: 5212617 - DNA, 25 bp, Homo sapien
gatactgtgtaggtgtgacctgtaa

SEQ ID NO: 5212618 - DNA, 25 bp, Homo sapien
tgtaggtgtgacctgtaaagaacgc

SEQ ID NO: 5212619 - DNA, 25 bp, Homo sapien
tcctcttgccccgatctgtttatat

SEQ ID NO: 5212620 - DNA, 25 bp, Homo sapien
tctcctcttgccccgatctgtttat

SEQ ID NO: 5212621 - DNA, 25 bp, Homo sapien
cctcttgccccgatctgtttatatg

SEQ ID NO: 5212622 - DNA, 25 bp, Homo sapien
tcttgccccgatctgtttatatgga

SEQ ID NO: 5212623 - DNA, 25 bp, Homo sapien
taccagggtccactttcctggcagc

SEQ ID NO: 5212624 - DNA, 25 bp, Homo sapien
tgttaccagggtccactttcctggc

SEQ ID NO: 5212625 - DNA, 25 bp, Homo sapien
tgttgttgttgttaccagggtccac

SEQ ID NO: 5212626 - DNA, 25 bp, Homo sapien
ccttggtgattcaccccactggttt

SEQ ID NO: 5212627 - DNA, 25 bp, Homo sapien
tgtgaattttccagaagccccacag

SEQ ID NO: 5212628 - DNA, 25 bp, Homo sapien
attttccagaagccccacagatgcc

SEQ ID NO: 5212629 - DNA, 25 bp, Homo sapien
acttcacagtctctaccatctgctc

SEQ ID NO: 5212630 - DNA, 25 bp, Homo sapien
agccccacagatgcctcccacttca

SEQ ID NO: 5212631 - DNA, 25 bp, Homo sapien
ttagctcttgtttagacaaatcttt

SEQ ID NO: 5212632 - DNA, 25 bp, Homo sapien
tcctttagctcttgtttagacaaat

SEQ ID NO: 5212633 - DNA, 25 bp, Homo sapien
tttcctttagctcttgtttagacaa

SEQ ID NO: 5212634 - DNA, 25 bp, Homo sapien
ttcctttagctcttgtttagacaaa

SEQ ID NO: 5212635 - DNA, 25 bp, Homo sapien
caactctgacttgagactgggtcat

SEQ ID NO: 5212636 - DNA, 25 bp, Homo sapien
tcatttatccttcacgctgtctccc

SEQ ID NO: 5212637 - DNA, 25 bp, Homo sapien
gaggtagaacaaatgtgtcagagct

SEQ ID NO: 5212638 - DNA, 25 bp, Homo sapien
aggaggtagaacaaatgtgtcagag

SEQ ID NO: 5212639 - DNA, 25 bp, Homo sapien
tgtctccccgagatgaaggaggtag

SEQ ID NO: 5212640 - DNA, 25 bp, Homo sapien
gtgcaatggcaatctgtgatccttt

SEQ ID NO: 5212641 - DNA, 25 bp, Homo sapien
tccatttctaatcgcccttttcttg

SEQ ID NO: 5212642 - DNA, 25 bp, Homo sapien
aagatttcctcatcaagaaacaaat

SEQ ID NO: 5212643 - DNA, 25 bp, Homo sapien
tttcttgtgtcctctgtacagattg

SEQ ID NO: 5212644 - DNA, 25 bp, Homo sapien
cttgtgtcctctgtacagattgcaa

SEQ ID NO: 5212645 - DNA, 25 bp, Homo sapien
caggtgagatcagcaagctgctttc

SEQ ID NO: 5212646 - DNA, 25 bp, Homo sapien
cccacacatctattttcagccatgg

SEQ ID NO: 5212647 - DNA, 25 bp, Homo sapien
ttttcaggtgagatcagcaagctgc

SEQ ID NO: 5212648 - DNA, 25 bp, Homo sapien
gtcgttttcaggtgagatcagcaag

SEQ ID NO: 5212649 - DNA, 25 bp, Homo sapien
catgcagcacatatggttaagtccc

SEQ ID NO: 5212650 - DNA, 25 bp, Homo sapien
caaaaagtgggacaagaccatctcc

SEQ ID NO: 5212651 - DNA, 25 bp, Homo sapien
tcagatcaatctaaggtccaccact

SEQ ID NO: 5212652 - DNA, 25 bp, Homo sapien
agcgccgacgttctctctctggtgg

SEQ ID NO: 5212653 - DNA, 25 bp, Homo sapien
ttgacaagagagagcactcaggctg

SEQ ID NO: 5212654 - DNA, 25 bp, Homo sapien
tttgcaatgtccttagttgacaaga

SEQ ID NO: 5212655 - DNA, 25 bp, Homo sapien
aaggcagcacgacagggtggcatgt

SEQ ID NO: 5212656 - DNA, 25 bp, Homo sapien
ccttagttgacaagagagagcactc

SEQ ID NO: 5212657 - DNA, 25 bp, Homo sapien
ctggaagcagtaatatctgaggcag

SEQ ID NO: 5212658 - DNA, 25 bp, Homo sapien
gattcattctgttgttgctctcacc

SEQ ID NO: 5212659 - DNA, 25 bp, Homo sapien
caaattcctaggctgttaagaacga

SEQ ID NO: 5212660 - DNA, 25 bp, Homo sapien
gaaggaccttgacctagattctccc

SEQ ID NO: 5212661 - DNA, 25 bp, Homo sapien
ggcatagtttcaccaagcctgcagg

SEQ ID NO: 5212662 - DNA, 25 bp, Homo sapien
ggtcattaggactctttggaagata

SEQ ID NO: 5212663 - DNA, 25 bp, Homo sapien
agctgggtcattaggactctttgga

SEQ ID NO: 5212664 - DNA, 25 bp, Homo sapien
tgggtcattaggactctttggaaga

SEQ ID NO: 5212665 - DNA, 25 bp, Homo sapien
tcattaggactctttggaagataat

SEQ ID NO: 5212666 - DNA, 25 bp, Homo sapien
gacatgtgttctttactcaagggaa

SEQ ID NO: 5212667 - DNA, 25 bp, Homo sapien
ttttcaagcacaggcagtggaagcc

SEQ ID NO: 5212668 - DNA, 25 bp, Homo sapien
aacatccctgggagaagcgattgag

SEQ ID NO: 5212669 - DNA, 25 bp, Homo sapien
tcagtttctttggatggcccctctt

SEQ ID NO: 5212670 - DNA, 25 bp, Homo sapien
ggtgaaatcatgatccaggccctca

SEQ ID NO: 5212671 - DNA, 25 bp, Homo sapien
attaatattgcacttaatactggtg

SEQ ID NO: 5212672 - DNA, 25 bp, Homo sapien
tgcacttaatactggtgaaatcatg

SEQ ID NO: 5212673 - DNA, 25 bp, Homo sapien
tggtgaaatcatgatccaggccctc

SEQ ID NO: 5212674 - DNA, 25 bp, Homo sapien
agagcagccaacagcattactgaag

SEQ ID NO: 5212675 - DNA, 25 bp, Homo sapien
gctggcagatgcataactctctgct

SEQ ID NO: 5212676 - DNA, 25 bp, Homo sapien
gaagatgaggaaaagaagtgccttc

SEQ ID NO: 5212677 - DNA, 25 bp, Homo sapien
ttttttggccacaccatacccagag

SEQ ID NO: 5212678 - DNA, 25 bp, Homo sapien
cctccaacagcctccaggatagtgt

SEQ ID NO: 5212679 - DNA, 25 bp, Homo sapien
actgtcattagagtcagctgttggc

SEQ ID NO: 5212680 - DNA, 25 bp, Homo sapien
tcttcagccactgcgagtgcacgtg

SEQ ID NO: 5212681 - DNA, 25 bp, Homo sapien
agctgttggccctgaagagccctgg

SEQ ID NO: 5212682 - DNA, 25 bp, Homo sapien
ggattgccgcgaccggttctcttcg

SEQ ID NO: 5212683 - DNA, 25 bp, Homo sapien
accggttctcttcgctccgcctaag

SEQ ID NO: 5212684 - DNA, 25 bp, Homo sapien
ctaggattgccgcgaccggttctct

SEQ ID NO: 5212685 - DNA, 25 bp, Homo sapien
cgcgctaggattgccgcgaccggtt

SEQ ID NO: 5212686 - DNA, 25 bp, Homo sapien
gggcggtgagatgacagaagaggaa

SEQ ID NO: 5212687 - DNA, 25 bp, Homo sapien
tcggactcccgcagcggatgcgggt

SEQ ID NO: 5212688 - DNA, 25 bp, Homo sapien
gaggaaagggcagctacttgggtgt

SEQ ID NO: 5212689 - DNA, 25 bp, Homo sapien
gtgtggttccggctcggactcccgc

SEQ ID NO: 5212690 - DNA, 25 bp, Homo sapien
aggtcccgcagcatccccgagcctc

SEQ ID NO: 5212691 - DNA, 25 bp, Homo sapien
gcatccccgagcctcgcagccgcat

SEQ ID NO: 5212692 - DNA, 25 bp, Homo sapien
gccggcgggcgaccgcaggagcagg

SEQ ID NO: 5212693 - DNA, 25 bp, Homo sapien
gcgaccgcaggagcaggtcccgcag

SEQ ID NO: 5212694 - DNA, 25 bp, Homo sapien
ggctgtgcccgccgcagagtcgcgc

SEQ ID NO: 5212695 - DNA, 25 bp, Homo sapien
caagggctgtgcccgccgcagagtc

SEQ ID NO: 5212696 - DNA, 25 bp, Homo sapien
gtgcccgccgcagagtcgcgctcac

SEQ ID NO: 5212697 - DNA, 25 bp, Homo sapien
ctgtgcccgccgcagagtcgcgctc

SEQ ID NO: 5212698 - DNA, 25 bp, Homo sapien
ccaccacgggtggagtcgcgcggcg

SEQ ID NO: 5212699 - DNA, 25 bp, Homo sapien
ggctgcggatgcgtgctccccttgc

SEQ ID NO: 5212700 - DNA, 25 bp, Homo sapien
tcctgcaagatctccgaaggagagc

SEQ ID NO: 5212701 - DNA, 25 bp, Homo sapien
cgggtggcgacaccccgggctgcgg

SEQ ID NO: 5212702 - DNA, 25 bp, Homo sapien
caagatctccgaaggagagctggac

SEQ ID NO: 5212703 - DNA, 25 bp, Homo sapien
ttgccctcgctgttgccaaacgcgt

SEQ ID NO: 5212704 - DNA, 25 bp, Homo sapien
tcgctgttgccaaacgcgtccgtct

SEQ ID NO: 5212705 - DNA, 25 bp, Homo sapien
agctctttgccctcgctgttgccaa

SEQ ID NO: 5212706 - DNA, 25 bp, Homo sapien
ttcacctgaggccaccagctctttg

SEQ ID NO: 5212707 - DNA, 25 bp, Homo sapien
agggagctgagcacgcagcgcgggc

SEQ ID NO: 5212708 - DNA, 25 bp, Homo sapien
ctaaatgtcactcggtggagatgtt

SEQ ID NO: 5212709 - DNA, 25 bp, Homo sapien
gatgttcgtgcagcatcgcccacga

SEQ ID NO: 5212710 - DNA, 25 bp, Homo sapien
gcagcatcgcccacgaatggctggg

SEQ ID NO: 5212711 - DNA, 25 bp, Homo sapien
gaaacattgtttccggtgccccaga

SEQ ID NO: 5212712 - DNA, 25 bp, Homo sapien
taaaggctctgctgaacgcccaact

SEQ ID NO: 5212713 - DNA, 25 bp, Homo sapien
cagatggctctacacgtgcctgagg

SEQ ID NO: 5212714 - DNA, 25 bp, Homo sapien
tctggcttccaaccggatgatggca

SEQ ID NO: 5212715 - DNA, 25 bp, Homo sapien
tgtaagttcctcatagagcttaaaa

SEQ ID NO: 5212716 - DNA, 25 bp, Homo sapien
gaaggacgggtctatgtcactcaaa

SEQ ID NO: 5212717 - DNA, 25 bp, Homo sapien
tcttttttagaagcctgtaccagaa

SEQ ID NO: 5212718 - DNA, 25 bp, Homo sapien
tatcctcatcaagaagacaatttta

SEQ ID NO: 5212719 - DNA, 25 bp, Homo sapien
cacctcatgctctcagtggttagca

SEQ ID NO: 5212720 - DNA, 25 bp, Homo sapien
gccttgataaaactgcatcctgtca

SEQ ID NO: 5212721 - DNA, 25 bp, Homo sapien
gagaactaaactggtctgccttgat

SEQ ID NO: 5212722 - DNA, 25 bp, Homo sapien
ggtaatttgtccatacgtttgcaca

SEQ ID NO: 5212723 - DNA, 25 bp, Homo sapien
taaagtaaggttgtggtctaggaga

SEQ ID NO: 5212724 - DNA, 25 bp, Homo sapien
ttaggagcaacaaggcaaactcatc

SEQ ID NO: 5212725 - DNA, 25 bp, Homo sapien
agcaataaagatccctaaagtaagg

SEQ ID NO: 5212726 - DNA, 25 bp, Homo sapien
cattctctggtatcactaagttttg

SEQ ID NO: 5212727 - DNA, 25 bp, Homo sapien
cacaaaattaatccttgtatgaaca

SEQ ID NO: 5212728 - DNA, 25 bp, Homo sapien
acaaaattaatccttgtatgaacat

SEQ ID NO: 5212729 - DNA, 25 bp, Homo sapien
aagaacacaaaattaatccttgtat

SEQ ID NO: 5212730 - DNA, 25 bp, Homo sapien
agaacacaaaattaatccttgtatg

SEQ ID NO: 5212731 - DNA, 25 bp, Homo sapien
ccaagctaggtaacagaccctgttt

SEQ ID NO: 5212732 - DNA, 25 bp, Homo sapien
ttgtatagaacagcaaatcttccaa

SEQ ID NO: 5212733 - DNA, 25 bp, Homo sapien
tcttccaagctaggtaacagaccct

SEQ ID NO: 5212734 - DNA, 25 bp, Homo sapien
tcagcaattgtatagaacagcaaat

SEQ ID NO: 5212735 - DNA, 25 bp, Homo sapien
tgaatatggcatcttagtgtcacta

SEQ ID NO: 5212736 - DNA, 25 bp, Homo sapien
gaatctacatgtcagacgaccttta

SEQ ID NO: 5212737 - DNA, 25 bp, Homo sapien
cactgattaccttgaaatgagcatg

SEQ ID NO: 5212738 - DNA, 25 bp, Homo sapien
tacccaacacttgaacatgaatatg

SEQ ID NO: 5212739 - DNA, 25 bp, Homo sapien
ttcgcaatcctgtagatttgagtgc

SEQ ID NO: 5212740 - DNA, 25 bp, Homo sapien
atatccatacactctttcaacctgg

SEQ ID NO: 5212741 - DNA, 25 bp, Homo sapien
aacctgggatcagacgttcgcaatc

SEQ ID NO: 5212742 - DNA, 25 bp, Homo sapien
aagatctttgtctagcatgacacca

SEQ ID NO: 5212743 - DNA, 25 bp, Homo sapien
gaaagaatactcttagcccggtgta

SEQ ID NO: 5212744 - DNA, 25 bp, Homo sapien
ggaacacaggtctgtctgaagccct

SEQ ID NO: 5212745 - DNA, 25 bp, Homo sapien
gctgagaaagcgtgcaagtcatgca

SEQ ID NO: 5212746 - DNA, 25 bp, Homo sapien
tgacaggacaaaggatgtgctctac

SEQ ID NO: 5212747 - DNA, 25 bp, Homo sapien
tatgccctagagacttgtacttttc

SEQ ID NO: 5212748 - DNA, 25 bp, Homo sapien
gcagttccctggcttaataatcaga

SEQ ID NO: 5212749 - DNA, 25 bp, Homo sapien
tactatctcttaattgcaggcagaa

SEQ ID NO: 5212750 - DNA, 25 bp, Homo sapien
gaaactgcctgtattacaagcatag

SEQ ID NO: 5212751 - DNA, 25 bp, Homo sapien
catacaaatgaaaggctaccattca

SEQ ID NO: 5212752 - DNA, 25 bp, Homo sapien
aattgactatcaacctgggtacagg

SEQ ID NO: 5212753 - DNA, 25 bp, Homo sapien
ggcagtctccaactttcgaacaggt

SEQ ID NO: 5212754 - DNA, 25 bp, Homo sapien
ttaacacactgcttcaaccaaacct

SEQ ID NO: 5212755 - DNA, 25 bp, Homo sapien
aaatgcttgtgtcaacaaaacaatg

SEQ ID NO: 5212756 - DNA, 25 bp, Homo sapien
caggaatcacaaactttcttctaaa

SEQ ID NO: 5212757 - DNA, 25 bp, Homo sapien
tcatcaatgtgtgaggtaaaagaca

SEQ ID NO: 5212758 - DNA, 25 bp, Homo sapien
ggtaaaagacataaagtcaggaatc

SEQ ID NO: 5212759 - DNA, 25 bp, Homo sapien
tatcggtaacgcttataacagtagt

SEQ ID NO: 5212760 - DNA, 25 bp, Homo sapien
catgggtgctagtagggtttcacta

SEQ ID NO: 5212761 - DNA, 25 bp, Homo sapien
ttgactgcgtgtgggtttggcatcc

SEQ ID NO: 5212762 - DNA, 25 bp, Homo sapien
gggccaactggattatactaaagct

SEQ ID NO: 5212763 - DNA, 25 bp, Homo sapien
actgaatttggccagttgaggaata

SEQ ID NO: 5212764 - DNA, 25 bp, Homo sapien
tgaaattatatcctgttaggactaa

SEQ ID NO: 5212765 - DNA, 25 bp, Homo sapien
gaatagtgtcatgttttgacaagcc

SEQ ID NO: 5212766 - DNA, 25 bp, Homo sapien
caagactacaactgtgaataaaata

SEQ ID NO: 5212767 - DNA, 25 bp, Homo sapien
ttattagtagtcagttcattagaga

SEQ ID NO: 5212768 - DNA, 25 bp, Homo sapien
actgcatagttggaattattctttt

SEQ ID NO: 5212769 - DNA, 25 bp, Homo sapien
taactgcatagttggaattattctt

SEQ ID NO: 5212770 - DNA, 25 bp, Homo sapien
atgtaactgcatagttggaattatt

SEQ ID NO: 5212771 - DNA, 25 bp, Homo sapien
tgtaactgcatagttggaattattc

SEQ ID NO: 5212772 - DNA, 25 bp, Homo sapien
aactttggtatctccagtagaatgc

SEQ ID NO: 5212773 - DNA, 25 bp, Homo sapien
gacagaagggaactttggtatctcc

SEQ ID NO: 5212774 - DNA, 25 bp, Homo sapien
gaagggaactttggtatctccagta

SEQ ID NO: 5212775 - DNA, 25 bp, Homo sapien
aagacagaagggaactttggtatct

SEQ ID NO: 5212776 - DNA, 25 bp, Homo sapien
tttgttgaatcttagtccactcggc

SEQ ID NO: 5212777 - DNA, 25 bp, Homo sapien
gcacatattcagttccaagatcatt

SEQ ID NO: 5212778 - DNA, 25 bp, Homo sapien
tcttttccaacatatcgatgcacat

SEQ ID NO: 5212779 - DNA, 25 bp, Homo sapien
catattcagttccaagatcattaac

SEQ ID NO: 5212780 - DNA, 25 bp, Homo sapien
tagtaataatcatacccagcactcc

SEQ ID NO: 5212781 - DNA, 25 bp, Homo sapien
taatcctcactatctcaaccagggc

SEQ ID NO: 5212782 - DNA, 25 bp, Homo sapien
cacccatgcacctatcatttagctg

SEQ ID NO: 5212783 - DNA, 25 bp, Homo sapien
tcccagtggtatgagatgcctaaaa

SEQ ID NO: 5212784 - DNA, 25 bp, Homo sapien
ctttattagtgaagtcacaacaatt

SEQ ID NO: 5212785 - DNA, 25 bp, Homo sapien
gcatttaccataggattatgtggtt

SEQ ID NO: 5212786 - DNA, 25 bp, Homo sapien
caacaattgctccagcatttaccat

SEQ ID NO: 5212787 - DNA, 25 bp, Homo sapien
tgaagtcacaacaattgctccagca

SEQ ID NO: 5212788 - DNA, 25 bp, Homo sapien
tattggagttttcctataagcttag

SEQ ID NO: 5212789 - DNA, 25 bp, Homo sapien
taaatattggagttttcctataagc

SEQ ID NO: 5212790 - DNA, 25 bp, Homo sapien
tggagttttcctataagcttagtag

SEQ ID NO: 5212791 - DNA, 25 bp, Homo sapien
cttagtagttaagaatttatgcaac

SEQ ID NO: 5212792 - DNA, 25 bp, Homo sapien
ggaacgactccatgtaccccaagga

SEQ ID NO: 5212793 - DNA, 25 bp, Homo sapien
catgcctacatatacaaaagagagt

SEQ ID NO: 5212794 - DNA, 25 bp, Homo sapien
taaacacaacttccgtatgcattgg

SEQ ID NO: 5212795 - DNA, 25 bp, Homo sapien
tctgcttgtgtatctcttggaacga

SEQ ID NO: 5212796 - DNA, 25 bp, Homo sapien
ggtaccacaagccatgtccatataa

SEQ ID NO: 5212797 - DNA, 25 bp, Homo sapien
actcttttggaaatggatgtcagca

SEQ ID NO: 5212798 - DNA, 25 bp, Homo sapien
tctgtgacctaaactgtaccctata

SEQ ID NO: 5212799 - DNA, 25 bp, Homo sapien
tgtgataaccctgcatcaagtaagt

SEQ ID NO: 5212800 - DNA, 25 bp, Homo sapien
tattccatagatcctaatgctgtaa

SEQ ID NO: 5212801 - DNA, 25 bp, Homo sapien
ccatagatcctaatgctgtaaaata

SEQ ID NO: 5212802 - DNA, 25 bp, Homo sapien
ttgaactgttgcagttgtcaaaata

SEQ ID NO: 5212803 - DNA, 25 bp, Homo sapien
tgaactgttgcagttgtcaaaatat

SEQ ID NO: 5212804 - DNA, 25 bp, Homo sapien
gccaggttcattctttacaagagga

SEQ ID NO: 5212805 - DNA, 25 bp, Homo sapien
tatatacaatcagtagctggaagga

SEQ ID NO: 5212806 - DNA, 25 bp, Homo sapien
caagaggattagagtgtggctgaca

SEQ ID NO: 5212807 - DNA, 25 bp, Homo sapien
tagaaatgtaactccaaagctgttc

SEQ ID NO: 5212808 - DNA, 25 bp, Homo sapien
atagtcaaatttttcagcattattt

SEQ ID NO: 5212809 - DNA, 25 bp, Homo sapien
aaatttttcagcattatttactcct

SEQ ID NO: 5212810 - DNA, 25 bp, Homo sapien
atttttcagcattatttactccttg

SEQ ID NO: 5212811 - DNA, 25 bp, Homo sapien
tcaaatttttcagcattatttactc

SEQ ID NO: 5212812 - DNA, 25 bp, Homo sapien
cattaccagccatcttattcaaaaa

SEQ ID NO: 5212813 - DNA, 25 bp, Homo sapien
atattcattaccagccatcttattc

SEQ ID NO: 5212814 - DNA, 25 bp, Homo sapien
taccagccatcttattcaaaaactg

SEQ ID NO: 5212815 - DNA, 25 bp, Homo sapien
agccatcttattcaaaaactgcatg

SEQ ID NO: 5212816 - DNA, 25 bp, Homo sapien
agtaatatcctattgcaaaatttcg

SEQ ID NO: 5212817 - DNA, 25 bp, Homo sapien
tattgcaaaatttcgatctccactt

SEQ ID NO: 5212818 - DNA, 25 bp, Homo sapien
tcctattgcaaaatttcgatctcca

SEQ ID NO: 5212819 - DNA, 25 bp, Homo sapien
gcaaaatttcgatctccactttctc

SEQ ID NO: 5212820 - DNA, 25 bp, Homo sapien
ggaagtagaagtctaatataccaac

SEQ ID NO: 5212821 - DNA, 25 bp, Homo sapien
ataccaaccatgtctgtgccttctg

SEQ ID NO: 5212822 - DNA, 25 bp, Homo sapien
agtctaatataccaaccatgtctgt

SEQ ID NO: 5212823 - DNA, 25 bp, Homo sapien
gtagaagtctaatataccaaccatg

SEQ ID NO: 5212824 - DNA, 25 bp, Homo sapien
atatatacgatttacataattagat

SEQ ID NO: 5212825 - DNA, 25 bp, Homo sapien
tatatatacgatttacataattaga

SEQ ID NO: 5212826 - DNA, 25 bp, Homo sapien
tgcccagccgacacatccatttata

SEQ ID NO: 5212827 - DNA, 25 bp, Homo sapien
catagcccattgtgcgtaacacggt

SEQ ID NO: 5212828 - DNA, 25 bp, Homo sapien
cacattgggccgatgaaaagctgca

SEQ ID NO: 5212829 - DNA, 25 bp, Homo sapien
caaggcaggtgacgcatatactaca

SEQ ID NO: 5212830 - DNA, 25 bp, Homo sapien
gatggtctggattcccaatttacgg

SEQ ID NO: 5212831 - DNA, 25 bp, Homo sapien
actgccccagatagcaaagatttgt

SEQ ID NO: 5212832 - DNA, 25 bp, Homo sapien
aaattttcctcagccatactccaag

SEQ ID NO: 5212833 - DNA, 25 bp, Homo sapien
tactccaagatctacaagaggcaca

SEQ ID NO: 5212834 - DNA, 25 bp, Homo sapien
gacagaatcgacttgcaatactgcc

SEQ ID NO: 5212835 - DNA, 25 bp, Homo sapien
taagatttaccctgatttggccaaa

SEQ ID NO: 5212836 - DNA, 25 bp, Homo sapien
gaactagactaggaagtgccagcct

SEQ ID NO: 5212837 - DNA, 25 bp, Homo sapien
tgaagattttagttgaccgaagtcc

SEQ ID NO: 5212838 - DNA, 25 bp, Homo sapien
gccagcctctaaacactaagatttg

SEQ ID NO: 5212839 - DNA, 25 bp, Homo sapien
tcacaagtcacttcaatggagcaca

SEQ ID NO: 5212840 - DNA, 25 bp, Homo sapien
cacaagtcacttcaatggagcacag

SEQ ID NO: 5212841 - DNA, 25 bp, Homo sapien
ccagtaattgggcagaaaccaccat

SEQ ID NO: 5212842 - DNA, 25 bp, Homo sapien
agtactctttcaccagtaattgggc

SEQ ID NO: 5212843 - DNA, 25 bp, Homo sapien
aatgtatttcgaactgcttcagggc

SEQ ID NO: 5212844 - DNA, 25 bp, Homo sapien
ggaaagcaaactgccctgagaagtc

SEQ ID NO: 5212845 - DNA, 25 bp, Homo sapien
cactggattgccttaaaagcagaag

SEQ ID NO: 5212846 - DNA, 25 bp, Homo sapien
tgtacactggattgccttaaaagca

SEQ ID NO: 5212847 - DNA, 25 bp, Homo sapien
gtacactggattgccttaaaagcag

SEQ ID NO: 5212848 - DNA, 25 bp, Homo sapien
cttgtacactggattgccttaaaag

SEQ ID NO: 5212849 - DNA, 25 bp, Homo sapien
aatgttatgttcaacaatagggaaa

SEQ ID NO: 5212850 - DNA, 25 bp, Homo sapien
tgttatgttcaacaatagggaaact

SEQ ID NO: 5212851 - DNA, 25 bp, Homo sapien
aataattcagtaaaagagtattcag

SEQ ID NO: 5212852 - DNA, 25 bp, Homo sapien
tatgttcaacaatagggaaactggg

SEQ ID NO: 5212853 - DNA, 25 bp, Homo sapien
gaggagaccagcacatcatacccat

SEQ ID NO: 5212854 - DNA, 25 bp, Homo sapien
aagtgaattcccttaacactgttgc

SEQ ID NO: 5212855 - DNA, 25 bp, Homo sapien
tgttgcccatcttatccagaggagg

SEQ ID NO: 5212856 - DNA, 25 bp, Homo sapien
gacaactaaaagaatgcccccagca

SEQ ID NO: 5212857 - DNA, 25 bp, Homo sapien
tgatcaccaccttctcttcgaggat

SEQ ID NO: 5212858 - DNA, 25 bp, Homo sapien
gttatggaaattacacagagaaaca

SEQ ID NO: 5212859 - DNA, 25 bp, Homo sapien
ttttgcaaagtgtctcaaattatca

SEQ ID NO: 5212860 - DNA, 25 bp, Homo sapien
ccttctcttcgaggatcaagttttt

SEQ ID NO: 5212861 - DNA, 25 bp, Homo sapien
gaaatccctgacactaggctaacta

SEQ ID NO: 5212862 - DNA, 25 bp, Homo sapien
ccgaggccactaacaaactaagatt

SEQ ID NO: 5212863 - DNA, 25 bp, Homo sapien
tatagcatgcagcacattccaatgt

SEQ ID NO: 5212864 - DNA, 25 bp, Homo sapien
tatgattagcaaagacccgaggcca

SEQ ID NO: 5212865 - DNA, 25 bp, Homo sapien
tagtttagcactacagaaaatgtac

SEQ ID NO: 5212866 - DNA, 25 bp, Homo sapien
gcttcatgttactcaggtcgactcc

SEQ ID NO: 5212867 - DNA, 25 bp, Homo sapien
ctattctgttggttttgcataattc

SEQ ID NO: 5212868 - DNA, 25 bp, Homo sapien
tacatagtaacagaaattaatttga

SEQ ID NO: 5212869 - DNA, 25 bp, Homo sapien
ttagtgcacttgagtgaagaaaggt

SEQ ID NO: 5212870 - DNA, 25 bp, Homo sapien
tacagttgtagagatgtcctcattt

SEQ ID NO: 5212871 - DNA, 25 bp, Homo sapien
acagttgtagagatgtcctcatttg

SEQ ID NO: 5212872 - DNA, 25 bp, Homo sapien
cagttgtagagatgtcctcatttga

SEQ ID NO: 5212873 - DNA, 25 bp, Homo sapien
agttgtagagatgtcctcatttgac

SEQ ID NO: 5212874 - DNA, 25 bp, Homo sapien
ttttctctcccagactttccattct

SEQ ID NO: 5212875 - DNA, 25 bp, Homo sapien
ctcccagactttccattctatatac

SEQ ID NO: 5212876 - DNA, 25 bp, Homo sapien
tctctcccagactttccattctata

SEQ ID NO: 5212877 - DNA, 25 bp, Homo sapien
gcttttctctcccagactttccatt

SEQ ID NO: 5212878 - DNA, 25 bp, Homo sapien
ggccctggtgcaactaacataaata

SEQ ID NO: 5212879 - DNA, 25 bp, Homo sapien
aaaaagctttatggctccagcaccc

SEQ ID NO: 5212880 - DNA, 25 bp, Homo sapien
cacaaatatgcagtaaggccttgag

SEQ ID NO: 5212881 - DNA, 25 bp, Homo sapien
gtttgagggcctattcgcagtatct

SEQ ID NO: 5212882 - DNA, 25 bp, Homo sapien
aagtacttcaagaacaatatgcatt

SEQ ID NO: 5212883 - DNA, 25 bp, Homo sapien
tccaaacactaagataaaatgcaca

SEQ ID NO: 5212884 - DNA, 25 bp, Homo sapien
tgtaggcatactggaaaataaaggt

SEQ ID NO: 5212885 - DNA, 25 bp, Homo sapien
caaacactaagataaaatgcacaac

SEQ ID NO: 5212886 - DNA, 25 bp, Homo sapien
tttattgtgcaatacaaaatgtagg

SEQ ID NO: 5212887 - DNA, 25 bp, Homo sapien
ttaaaatgttgaagttgcttttata

SEQ ID NO: 5212888 - DNA, 25 bp, Homo sapien
aaaaaaccactaatgctatattgca

SEQ ID NO: 5212889 - DNA, 25 bp, Homo sapien
aaaccactaatgctatattgcattt

SEQ ID NO: 5212890 - DNA, 25 bp, Homo sapien
aaaaaccactaatgctatattgcat

SEQ ID NO: 5212891 - DNA, 25 bp, Homo sapien
gaaataacctacaaatagggttgca

SEQ ID NO: 5212892 - DNA, 25 bp, Homo sapien
ataacctacaaatagggttgcactt

SEQ ID NO: 5212893 - DNA, 25 bp, Homo sapien
aataacctacaaatagggttgcact

SEQ ID NO: 5212894 - DNA, 25 bp, Homo sapien
tactcttcatttggtttagcaatgt

SEQ ID NO: 5212895 - DNA, 25 bp, Homo sapien
taaagcaatatgatgatactcttca

SEQ ID NO: 5212896 - DNA, 25 bp, Homo sapien
tgtatcactgtcattctgtttaata

SEQ ID NO: 5212897 - DNA, 25 bp, Homo sapien
ttcctattatttaggcaacaacaga

SEQ ID NO: 5212898 - DNA, 25 bp, Homo sapien
actataatttggatcatgctgtgga

SEQ ID NO: 5212899 - DNA, 25 bp, Homo sapien
tatttgacctacaatacatggagcc

SEQ ID NO: 5212900 - DNA, 25 bp, Homo sapien
gatcaccaggtattttaagtctcct

SEQ ID NO: 5212901 - DNA, 25 bp, Homo sapien
tacactgtcagatcaagatcaccag

SEQ ID NO: 5212902 - DNA, 25 bp, Homo sapien
tggtaacagaaaccacaaatcttta

SEQ ID NO: 5212903 - DNA, 25 bp, Homo sapien
tatactttaccaattctagggcagc

SEQ ID NO: 5212904 - DNA, 25 bp, Homo sapien
ttttgtgtcaaagcttggaacagga

SEQ ID NO: 5212905 - DNA, 25 bp, Homo sapien
gttagttactctcttaccctggcag

SEQ ID NO: 5212906 - DNA, 25 bp, Homo sapien
ttaacaactgggacataagactgct

SEQ ID NO: 5212907 - DNA, 25 bp, Homo sapien
aaaagcaaagtgctaggaaacctgg

SEQ ID NO: 5212908 - DNA, 25 bp, Homo sapien
tacaaacagaaagtccatcctaaca

SEQ ID NO: 5212909 - DNA, 25 bp, Homo sapien
tttccaagagctaacatgcaaagaa

SEQ ID NO: 5212910 - DNA, 25 bp, Homo sapien
taaatcttgtgcatagacctggatc

SEQ ID NO: 5212911 - DNA, 25 bp, Homo sapien
aacccatttcctgagtaactttgat

SEQ ID NO: 5212912 - DNA, 25 bp, Homo sapien
gaagtttcattgtgcattagatgca

SEQ ID NO: 5212913 - DNA, 25 bp, Homo sapien
gatgcatatacttcaaggatctaag

SEQ ID NO: 5212914 - DNA, 25 bp, Homo sapien
aacacttcacggtttctggcacata

SEQ ID NO: 5212915 - DNA, 25 bp, Homo sapien
gatacagctaaccatgctctctgca

SEQ ID NO: 5212916 - DNA, 25 bp, Homo sapien
gcttaattgcaaacacaagttggat

SEQ ID NO: 5212917 - DNA, 25 bp, Homo sapien
tcctggcagtaagctttatctaaag

SEQ ID NO: 5212918 - DNA, 25 bp, Homo sapien
ctaacagaacctctatttgttaaag

SEQ ID NO: 5212919 - DNA, 25 bp, Homo sapien
tcaggtgagtttccagtaaagcttc

SEQ ID NO: 5212920 - DNA, 25 bp, Homo sapien
cagttagtctggtcaatgagcgtca

SEQ ID NO: 5212921 - DNA, 25 bp, Homo sapien
tgttaaaggtagtattgtgtccaat

SEQ ID NO: 5212922 - DNA, 25 bp, Homo sapien
tatggagcatactcacagaagaggt

SEQ ID NO: 5212923 - DNA, 25 bp, Homo sapien
tcattttcactggtctccagagcct

SEQ ID NO: 5212924 - DNA, 25 bp, Homo sapien
tattgtgaaacgttcaacatgtgtg

SEQ ID NO: 5212925 - DNA, 25 bp, Homo sapien
tattcaaattacatagcaggctcct

SEQ ID NO: 5212926 - DNA, 25 bp, Homo sapien
tatattgaggtgctacccaaaggtg

SEQ ID NO: 5212927 - DNA, 25 bp, Homo sapien
caactactatctactgggtcaagca

SEQ ID NO: 5212928 - DNA, 25 bp, Homo sapien
caaatatgactgttacgctactggc

SEQ ID NO: 5212929 - DNA, 25 bp, Homo sapien
tggtaagtggaagaacaagggctca

SEQ ID NO: 5212930 - DNA, 25 bp, Homo sapien
tgttacctctaaacagcgctctcca

SEQ ID NO: 5212931 - DNA, 25 bp, Homo sapien
tacctctaaacagcgctctccaaag

SEQ ID NO: 5212932 - DNA, 25 bp, Homo sapien
cctgattccttcagatccccccagc

SEQ ID NO: 5212933 - DNA, 25 bp, Homo sapien
aagccctgattccttcagatccccc

SEQ ID NO: 5212934 - DNA, 25 bp, Homo sapien
cagacagaagatcctaactacaact

SEQ ID NO: 5212935 - DNA, 25 bp, Homo sapien
taaaaactgttttcatcgctcaaag

SEQ ID NO: 5212936 - DNA, 25 bp, Homo sapien
tcaggcctttaataccagtggagac

SEQ ID NO: 5212937 - DNA, 25 bp, Homo sapien
tggagacccctaaaaacagacagaa

SEQ ID NO: 5212938 - DNA, 25 bp, Homo sapien
gaaactagtccgtaagatggcccat

SEQ ID NO: 5212939 - DNA, 25 bp, Homo sapien
tagccaaaagaacccacgtgtgtga

SEQ ID NO: 5212940 - DNA, 25 bp, Homo sapien
aagacagccttcagttcaatgccca

SEQ ID NO: 5212941 - DNA, 25 bp, Homo sapien
tgaacacttcagctgagtcacgtgc

SEQ ID NO: 5212942 - DNA, 25 bp, Homo sapien
cacatctccagtatatgcagcaaac

SEQ ID NO: 5212943 - DNA, 25 bp, Homo sapien
gacacatctccagtatatgcagcaa

SEQ ID NO: 5212944 - DNA, 25 bp, Homo sapien
agacacatctccagtatatgcagca

SEQ ID NO: 5212945 - DNA, 25 bp, Homo sapien
cagacacatctccagtatatgcagc

SEQ ID NO: 5212946 - DNA, 25 bp, Homo sapien
tgctcgcccagaagcaacttcataa

SEQ ID NO: 5212947 - DNA, 25 bp, Homo sapien
tctgtaaagtgcatgctaatccatc

SEQ ID NO: 5212948 - DNA, 25 bp, Homo sapien
tgcatgctaatccatcctgtaaaca

SEQ ID NO: 5212949 - DNA, 25 bp, Homo sapien
taaccttaaaatggctgctcgccca

SEQ ID NO: 5212950 - DNA, 25 bp, Homo sapien
tccatgtccatagctgacaaagcaa

SEQ ID NO: 5212951 - DNA, 25 bp, Homo sapien
cgctgttccatgtccatagctgaca

SEQ ID NO: 5212952 - DNA, 25 bp, Homo sapien
tctagaatcatagtcccgctgttcc

SEQ ID NO: 5212953 - DNA, 25 bp, Homo sapien
gcagcagctacatggagtgctgttc

SEQ ID NO: 5212954 - DNA, 25 bp, Homo sapien
aagggtttactttgcaggcttccag

SEQ ID NO: 5212955 - DNA, 25 bp, Homo sapien
agggtttactttgcaggcttccagc

SEQ ID NO: 5212956 - DNA, 25 bp, Homo sapien
gcaaaaatttaacaacttcaacatg

SEQ ID NO: 5212957 - DNA, 25 bp, Homo sapien
ttccagcaaaaatttaacaacttca

SEQ ID NO: 5212958 - DNA, 25 bp, Homo sapien
gacaggaattaactaagagcagaac

SEQ ID NO: 5212959 - DNA, 25 bp, Homo sapien
ccagcagaagacaggaattaactaa

SEQ ID NO: 5212960 - DNA, 25 bp, Homo sapien
cacaattaaaacagctagagaaaca

SEQ ID NO: 5212961 - DNA, 25 bp, Homo sapien
cagaagacaggaattaactaagagc

SEQ ID NO: 5212962 - DNA, 25 bp, Homo sapien
tcaggctgcataaatgtcgaatccc

SEQ ID NO: 5212963 - DNA, 25 bp, Homo sapien
tgcataaatgtcgaatccctgccag

SEQ ID NO: 5212964 - DNA, 25 bp, Homo sapien
tgtcgaatccctgccagcaatcact

SEQ ID NO: 5212965 - DNA, 25 bp, Homo sapien
taaatgtcgaatccctgccagcaat

SEQ ID NO: 5212966 - DNA, 25 bp, Homo sapien
tatcaaaccaccatcaagtatgcgt

SEQ ID NO: 5212967 - DNA, 25 bp, Homo sapien
tcatgaagccttctgaaactgattc

SEQ ID NO: 5212968 - DNA, 25 bp, Homo sapien
gctaaagagtaatcaacttgctcca

SEQ ID NO: 5212969 - DNA, 25 bp, Homo sapien
aatacagctcccagttctcaaatga

SEQ ID NO: 5212970 - DNA, 25 bp, Homo sapien
actggaggagcaagattggccccaa

SEQ ID NO: 5212971 - DNA, 25 bp, Homo sapien
cctcattagggctaaaacacactgg

SEQ ID NO: 5212972 - DNA, 25 bp, Homo sapien
tacacatccaagtgcttatggaggg

SEQ ID NO: 5212973 - DNA, 25 bp, Homo sapien
taatagactgctctagggttccaga

SEQ ID NO: 5212974 - DNA, 25 bp, Homo sapien
ttaataatagaaatgcagaaaggga

SEQ ID NO: 5212975 - DNA, 25 bp, Homo sapien
gatgatcaccccacattcctagatt

SEQ ID NO: 5212976 - DNA, 25 bp, Homo sapien
caaagatgatcaccccacattccta

SEQ ID NO: 5212977 - DNA, 25 bp, Homo sapien
attaataatagaaatgcagaaaggg

SEQ ID NO: 5212978 - DNA, 25 bp, Homo sapien
ccttcccgttgtcagaatctccttg

SEQ ID NO: 5212979 - DNA, 25 bp, Homo sapien
tacatcatggtgtccaaagtgcagt

SEQ ID NO: 5212980 - DNA, 25 bp, Homo sapien
ttcatccatgggagtgttattccac

SEQ ID NO: 5212981 - DNA, 25 bp, Homo sapien
aatctccttgaggtgtgtactggac

SEQ ID NO: 5212982 - DNA, 25 bp, Homo sapien
tgacggcagcagttaatagcacagt

SEQ ID NO: 5212983 - DNA, 25 bp, Homo sapien
tttagtcacacaaagcgggctgctc

SEQ ID NO: 5212984 - DNA, 25 bp, Homo sapien
tcaagcatgggaacagcttcgggcc

SEQ ID NO: 5212985 - DNA, 25 bp, Homo sapien
gaacattggccgtggtttcaccaaa

SEQ ID NO: 5212986 - DNA, 25 bp, Homo sapien
gggccatctggtatatgatttatga

SEQ ID NO: 5212987 - DNA, 25 bp, Homo sapien
ttactgtcagtgtctgtttgcagcc

SEQ ID NO: 5212988 - DNA, 25 bp, Homo sapien
gcctttttataagtgccacctaaca

SEQ ID NO: 5212989 - DNA, 25 bp, Homo sapien
cattgggactgcttgtcagacacac

SEQ ID NO: 5212990 - DNA, 25 bp, Homo sapien
ttaagagatgggtttgacaaggttc

SEQ ID NO: 5212991 - DNA, 25 bp, Homo sapien
tcctatgtaactgcattgagaactg

SEQ ID NO: 5212992 - DNA, 25 bp, Homo sapien
tagatggcgagaacctaagtttcag

SEQ ID NO: 5212993 - DNA, 25 bp, Homo sapien
gagaactgcatatgtttcgctgata

SEQ ID NO: 5212994 - DNA, 25 bp, Homo sapien
tttgttatggcttaatgacactagc

SEQ ID NO: 5212995 - DNA, 25 bp, Homo sapien
tctcccaagggagttaggctattca

SEQ ID NO: 5212996 - DNA, 25 bp, Homo sapien
taaccatagatgtagataaactcag

SEQ ID NO: 5212997 - DNA, 25 bp, Homo sapien
cacaagttgtgtttgatatccaaag

SEQ ID NO: 5212998 - DNA, 25 bp, Homo sapien
cattgtcatctcagggtagtgcacc

SEQ ID NO: 5212999 - DNA, 25 bp, Homo sapien
cagggtaagccacgaggcattgtca

SEQ ID NO: 5213000 - DNA, 25 bp, Homo sapien
catccctggagtgtgaaacatttcc

SEQ ID NO: 5213001 - DNA, 25 bp, Homo sapien
ggctattgcttatcacatccctgga

SEQ ID NO: 5213002 - DNA, 25 bp, Homo sapien
tttgaaacccaattgtgccagcctg

SEQ ID NO: 5213003 - DNA, 25 bp, Homo sapien
cagacttgccactgattgggcccag

SEQ ID NO: 5213004 - DNA, 25 bp, Homo sapien
cagagcacactgagatactaagaat

SEQ ID NO: 5213005 - DNA, 25 bp, Homo sapien
tctcatcgttactgaagagcttcac

SEQ ID NO: 5213006 - DNA, 25 bp, Homo sapien
tctatagtcaaacatccttcaaggg

SEQ ID NO: 5213007 - DNA, 25 bp, Homo sapien
gaaggaaacccgtgtgcatatggaa

SEQ ID NO: 5213008 - DNA, 25 bp, Homo sapien
cataaagatgttagctctccctgag

SEQ ID NO: 5213009 - DNA, 25 bp, Homo sapien
aataaacatgcaagagtagcgaggc

SEQ ID NO: 5213010 - DNA, 25 bp, Homo sapien
gagaaaccccttttgtcactgagtg

SEQ ID NO: 5213011 - DNA, 25 bp, Homo sapien
gtgacaacttattccaaccgcccag

SEQ ID NO: 5213012 - DNA, 25 bp, Homo sapien
caccttggacttacagaggatacca

SEQ ID NO: 5213013 - DNA, 25 bp, Homo sapien
gaataactttgatgacgtatgcctg

SEQ ID NO: 5213014 - DNA, 25 bp, Homo sapien
ctcccattgcctgacggtccagcat

SEQ ID NO: 5213015 - DNA, 25 bp, Homo sapien
ctgggttcgcttggctaataagagg

SEQ ID NO: 5213016 - DNA, 25 bp, Homo sapien
gcttggctaataagaggcgttgcag

SEQ ID NO: 5213017 - DNA, 25 bp, Homo sapien
taagaggcgttgcagctcccattgc

SEQ ID NO: 5213018 - DNA, 25 bp, Homo sapien
tgatcccagaggaagaacgcgtcct

SEQ ID NO: 5213019 - DNA, 25 bp, Homo sapien
tgagtattccaagtgcgagcagtgc

SEQ ID NO: 5213020 - DNA, 25 bp, Homo sapien
gagcagtgccacctgttctcggaga

SEQ ID NO: 5213021 - DNA, 25 bp, Homo sapien
tgctgacccgcgaatagtgatccca

SEQ ID NO: 5213022 - DNA, 25 bp, Homo sapien
ctgcgctcggaaagctagggctcca

SEQ ID NO: 5213023 - DNA, 25 bp, Homo sapien
cgttcctgagcggtttttgaccgcg

SEQ ID NO: 5213024 - DNA, 25 bp, Homo sapien
gctagggctccaaagcgttcctgag

SEQ ID NO: 5213025 - DNA, 25 bp, Homo sapien
tgaccgcgaatgtgatagtgctcat

SEQ ID NO: 5213026 - DNA, 25 bp, Homo sapien
caaggaaagaaacggtggaagtgca

SEQ ID NO: 5213027 - DNA, 25 bp, Homo sapien
aggtttccagcaccttaggtgcaga

SEQ ID NO: 5213028 - DNA, 25 bp, Homo sapien
cagaaatcaggacacgtttccctcc

SEQ ID NO: 5213029 - DNA, 25 bp, Homo sapien
tccctccctctaaggtgaaacggca

SEQ ID NO: 5213030 - DNA, 25 bp, Homo sapien
tagatagcgaagtgaagcgggtaaa

SEQ ID NO: 5213031 - DNA, 25 bp, Homo sapien
actgtgtagatagcgaagtgaagcg

SEQ ID NO: 5213032 - DNA, 25 bp, Homo sapien
atagcgaagtgaagcgggtaaaaga

SEQ ID NO: 5213033 - DNA, 25 bp, Homo sapien
caagtgcaaactgtgtagatagcga

SEQ ID NO: 5213034 - DNA, 25 bp, Homo sapien
gaaactcagtctcgtgcctcctaga

SEQ ID NO: 5213035 - DNA, 25 bp, Homo sapien
tagagccccttaagagtaggcgagc

SEQ ID NO: 5213036 - DNA, 25 bp, Homo sapien
aacctctggttcaagggcagctacc

SEQ ID NO: 5213037 - DNA, 25 bp, Homo sapien
tgaggacgcctatagaaactgccag

SEQ ID NO: 5213038 - DNA, 25 bp, Homo sapien
tggagctctccagtgctcaagacct

SEQ ID NO: 5213039 - DNA, 25 bp, Homo sapien
tccagtgctcaagacctggagagct

SEQ ID NO: 5213040 - DNA, 25 bp, Homo sapien
ctgttgagcaagtaatgctactgag

SEQ ID NO: 5213041 - DNA, 25 bp, Homo sapien
tgctgctgaatctgttgagcaagta

SEQ ID NO: 5213042 - DNA, 25 bp, Homo sapien
tcctgcgtgttgctgatattatgcg

SEQ ID NO: 5213043 - DNA, 25 bp, Homo sapien
tattggaacaaattcatgagcataa

SEQ ID NO: 5213044 - DNA, 25 bp, Homo sapien
ttatgcgtattgaaagcagacacct

SEQ ID NO: 5213045 - DNA, 25 bp, Homo sapien
tctggatggtcctgcgtgttgctga

SEQ ID NO: 5213046 - DNA, 25 bp, Homo sapien
caattgaaactgcagtatgttccct

SEQ ID NO: 5213047 - DNA, 25 bp, Homo sapien
ggtcaaaggtgtttccaacgatgca

SEQ ID NO: 5213048 - DNA, 25 bp, Homo sapien
tctccaagtgtgtatgcggtgttga

SEQ ID NO: 5213049 - DNA, 25 bp, Homo sapien
taagccgaagtgattcaacagagcc

SEQ ID NO: 5213050 - DNA, 25 bp, Homo sapien
agacttgcagccacctgacttcatg

SEQ ID NO: 5213051 - DNA, 25 bp, Homo sapien
tctttaatgaaagtgtatacaatcc

SEQ ID NO: 5213052 - DNA, 25 bp, Homo sapien
tatcctacagttgtcactcacagac

SEQ ID NO: 5213053 - DNA, 25 bp, Homo sapien
tatagcactaaatctttgggcacca

SEQ ID NO: 5213054 - DNA, 25 bp, Homo sapien
gacagaaggagtgaccaaggcaagc

SEQ ID NO: 5213055 - DNA, 25 bp, Homo sapien
ttaggacacgcttgttccctggcac

SEQ ID NO: 5213056 - DNA, 25 bp, Homo sapien
tccactcctgagatcatactgggaa

SEQ ID NO: 5213057 - DNA, 25 bp, Homo sapien
tgagaagccaagtgtgcagcttgac

SEQ ID NO: 5213058 - DNA, 25 bp, Homo sapien
ccaggtcctctgactttgtacaaag

SEQ ID NO: 5213059 - DNA, 25 bp, Homo sapien
gactttgtacaaagggctctccagc

SEQ ID NO: 5213060 - DNA, 25 bp, Homo sapien
ggttaagtcttcgtagacatagatc

SEQ ID NO: 5213061 - DNA, 25 bp, Homo sapien
cagagtgattgtctagaagggttaa

SEQ ID NO: 5213062 - DNA, 25 bp, Homo sapien
aatccatgtgcttttaagctctgta

SEQ ID NO: 5213063 - DNA, 25 bp, Homo sapien
catgtgcttttaagctctgtataac

SEQ ID NO: 5213064 - DNA, 25 bp, Homo sapien
gcttttaagctctgtataacttgca

SEQ ID NO: 5213065 - DNA, 25 bp, Homo sapien
gaaaaatccatgtgcttttaagctc

SEQ ID NO: 5213066 - DNA, 25 bp, Homo sapien
ctgatgttgaccaaaaggtttcctt

SEQ ID NO: 5213067 - DNA, 25 bp, Homo sapien
accgttttgctgatgttgaccaaaa

SEQ ID NO: 5213068 - DNA, 25 bp, Homo sapien
ttgctgatgttgaccaaaaggtttc

SEQ ID NO: 5213069 - DNA, 25 bp, Homo sapien
cgttttgctgatgttgaccaaaagg

SEQ ID NO: 5213070 - DNA, 25 bp, Homo sapien
caaccacagaatcacggtcccagag

SEQ ID NO: 5213071 - DNA, 25 bp, Homo sapien
tttaaatccgtcaggcccaaccaca

SEQ ID NO: 5213072 - DNA, 25 bp, Homo sapien
aaccacagaatcacggtcccagagc

SEQ ID NO: 5213073 - DNA, 25 bp, Homo sapien
tttagctggtttaaatccgtcaggc

SEQ ID NO: 5213074 - DNA, 25 bp, Homo sapien
ctgtggaaggtgcagtggttggatc

SEQ ID NO: 5213075 - DNA, 25 bp, Homo sapien
ctgctgtgcggccagcatctgatgc

SEQ ID NO: 5213076 - DNA, 25 bp, Homo sapien
tcatgtttccatagggacatgaagt

SEQ ID NO: 5213077 - DNA, 25 bp, Homo sapien
tttccatagggacatgaagtagtgt

SEQ ID NO: 5213078 - DNA, 25 bp, Homo sapien
tgtttccatagggacatgaagtagt

SEQ ID NO: 5213079 - DNA, 25 bp, Homo sapien
ttccatagggacatgaagtagtgtt

SEQ ID NO: 5213080 - DNA, 25 bp, Homo sapien
catcctcttcaacgtttgtaattgc

SEQ ID NO: 5213081 - DNA, 25 bp, Homo sapien
gctctgcagcccgtaaagaagcatg

SEQ ID NO: 5213082 - DNA, 25 bp, Homo sapien
agaactccatcctcttcaacgtttg

SEQ ID NO: 5213083 - DNA, 25 bp, Homo sapien
taaagaagcatgatctacagcagta

SEQ ID NO: 5213084 - DNA, 25 bp, Homo sapien
tgtgtgtcattcttgatcaggggcc

SEQ ID NO: 5213085 - DNA, 25 bp, Homo sapien
tactctgtatctttccaatttttgt

SEQ ID NO: 5213086 - DNA, 25 bp, Homo sapien
aaatttgtgtgtcattcttgatcag

SEQ ID NO: 5213087 - DNA, 25 bp, Homo sapien
ctactctgtatctttccaatttttg

SEQ ID NO: 5213088 - DNA, 25 bp, Homo sapien
tgattttcactatctattgcttcat

SEQ ID NO: 5213089 - DNA, 25 bp, Homo sapien
tacagatgctggtagagaaagacga

SEQ ID NO: 5213090 - DNA, 25 bp, Homo sapien
ttgcttcattggctaggagcatcat

SEQ ID NO: 5213091 - DNA, 25 bp, Homo sapien
atacagatgctggtagagaaagacg

SEQ ID NO: 5213092 - DNA, 25 bp, Homo sapien
tgatgtcacaaagggagaagaacgc

SEQ ID NO: 5213093 - DNA, 25 bp, Homo sapien
tatcgggctccgtggctaacttatt

SEQ ID NO: 5213094 - DNA, 25 bp, Homo sapien
gaagggcaagcactggtggcctacc

SEQ ID NO: 5213095 - DNA, 25 bp, Homo sapien
gaaacacctgggctattatcgggct

SEQ ID NO: 5213096 - DNA, 25 bp, Homo sapien
cctgagcactcctgagacaactctg

SEQ ID NO: 5213097 - DNA, 25 bp, Homo sapien
gaagctgaccgaaggagctggatgc

SEQ ID NO: 5213098 - DNA, 25 bp, Homo sapien
actcctgagacaactctgagaagct

SEQ ID NO: 5213099 - DNA, 25 bp, Homo sapien
aaggagctggatgctgcttcttgtg

SEQ ID NO: 5213100 - DNA, 25 bp, Homo sapien
tcccttaaccaggaatatcctagca

SEQ ID NO: 5213101 - DNA, 25 bp, Homo sapien
caggaatatcctagcaatagctcat

SEQ ID NO: 5213102 - DNA, 25 bp, Homo sapien
tagcaatagctcattccattgctgc

SEQ ID NO: 5213103 - DNA, 25 bp, Homo sapien
tatcctagcaatagctcattccatt

SEQ ID NO: 5213104 - DNA, 25 bp, Homo sapien
gatctttaagccaaacccggataca

SEQ ID NO: 5213105 - DNA, 25 bp, Homo sapien
tctttaagccaaacccggatacatg

SEQ ID NO: 5213106 - DNA, 25 bp, Homo sapien
ttgatctttaagccaaacccggata

SEQ ID NO: 5213107 - DNA, 25 bp, Homo sapien
ctttaagccaaacccggatacatga

SEQ ID NO: 5213108 - DNA, 25 bp, Homo sapien
tagttcataacagctgctcatcagc

SEQ ID NO: 5213109 - DNA, 25 bp, Homo sapien
tcacaacccatgcagctgtattagt

SEQ ID NO: 5213110 - DNA, 25 bp, Homo sapien
gcagtgagctcaacattatttccaa

SEQ ID NO: 5213111 - DNA, 25 bp, Homo sapien
tcgtgggcacagctagatcagggca

SEQ ID NO: 5213112 - DNA, 25 bp, Homo sapien
ttctggtccagtgactgtccttgct

SEQ ID NO: 5213113 - DNA, 25 bp, Homo sapien
gggccttgcacccatccaaagggct

SEQ ID NO: 5213114 - DNA, 25 bp, Homo sapien
ccttctggtccagtgactgtccttg

SEQ ID NO: 5213115 - DNA, 25 bp, Homo sapien
gctgcttggatgggccttgcaccca

SEQ ID NO: 5213116 - DNA, 25 bp, Homo sapien
ccacgcgccgcggttgaggctcccg

SEQ ID NO: 5213117 - DNA, 25 bp, Homo sapien
gcgcacccagctgcggagtgctcag

SEQ ID NO: 5213118 - DNA, 25 bp, Homo sapien
cgtgcgcacccagctgcggagtgct

SEQ ID NO: 5213119 - DNA, 25 bp, Homo sapien
acccagctgcggagtgctcagcggc

SEQ ID NO: 5213120 - DNA, 25 bp, Homo sapien
tcgctctccggtggcgctccgggac

SEQ ID NO: 5213121 - DNA, 25 bp, Homo sapien
ccacgtcgtcctcgctctccggtgg

SEQ ID NO: 5213122 - DNA, 25 bp, Homo sapien
gactgcgcgccgcgcgctctggtac

SEQ ID NO: 5213123 - DNA, 25 bp, Homo sapien
ccgccgcggctgttctgccaaggct

SEQ ID NO: 5213124 - DNA, 25 bp, Homo sapien
tccctctctgggaccgtgaatcaat

SEQ ID NO: 5213125 - DNA, 25 bp, Homo sapien
tccgctgcggcggaacaaaggaggc

SEQ ID NO: 5213126 - DNA, 25 bp, Homo sapien
ggcggaacaaaggaggcgagcgcag

SEQ ID NO: 5213127 - DNA, 25 bp, Homo sapien
aatcaatcccatcccgggcaggaaa

SEQ ID NO: 5213128 - DNA, 25 bp, Homo sapien
catagcctgaggagactaaagttac

SEQ ID NO: 5213129 - DNA, 25 bp, Homo sapien
catttgcccaggagcattctgagga

SEQ ID NO: 5213130 - DNA, 25 bp, Homo sapien
aaagtctggtacctcttgcccagtg

SEQ ID NO: 5213131 - DNA, 25 bp, Homo sapien
tcagtgccaccctaaggacagatac

SEQ ID NO: 5213132 - DNA, 25 bp, Homo sapien
aaacttaaccagctattctaacatg

SEQ ID NO: 5213133 - DNA, 25 bp, Homo sapien
caggaacatttaccaactttatggg

SEQ ID NO: 5213134 - DNA, 25 bp, Homo sapien
cataagttgggacaagtgaatactg

SEQ ID NO: 5213135 - DNA, 25 bp, Homo sapien
taacatgtacctggccaaggaaccc

SEQ ID NO: 5213136 - DNA, 25 bp, Homo sapien
catggatacatgctggactcttctg

SEQ ID NO: 5213137 - DNA, 25 bp, Homo sapien
catataaagttgatcgagagtccat

SEQ ID NO: 5213138 - DNA, 25 bp, Homo sapien
gacccatgctactggtatacaaaca

SEQ ID NO: 5213139 - DNA, 25 bp, Homo sapien
caaacattcgttgtgacagggagaa

SEQ ID NO: 5213140 - DNA, 25 bp, Homo sapien
gaccacgtatggagcaataaaacaa

SEQ ID NO: 5213141 - DNA, 25 bp, Homo sapien
aaacatacaatagtgaactaccttg

SEQ ID NO: 5213142 - DNA, 25 bp, Homo sapien
cttgaccacgtatggagcaataaaa

SEQ ID NO: 5213143 - DNA, 25 bp, Homo sapien
caatagtgaactaccttgtagaaac

SEQ ID NO: 5213144 - DNA, 25 bp, Homo sapien
ggtctcctcattgagaggttctaaa

SEQ ID NO: 5213145 - DNA, 25 bp, Homo sapien
tggtcaaagcgcttcttgaggttgt

SEQ ID NO: 5213146 - DNA, 25 bp, Homo sapien
tgtccagaagtgaggttttcacctc

SEQ ID NO: 5213147 - DNA, 25 bp, Homo sapien
aaagaaccatatccccaactccaat

SEQ ID NO: 5213148 - DNA, 25 bp, Homo sapien
taaaagtccacatgaaatcctgcta

SEQ ID NO: 5213149 - DNA, 25 bp, Homo sapien
cagaacatgtctggccggatctcag

SEQ ID NO: 5213150 - DNA, 25 bp, Homo sapien
agcagtgctcgggaacgtcacgacc

SEQ ID NO: 5213151 - DNA, 25 bp, Homo sapien
tcctgaccagtcaccctaaaaacag

SEQ ID NO: 5213152 - DNA, 25 bp, Homo sapien
gccttgttcttgcctaaattgtagc

SEQ ID NO: 5213153 - DNA, 25 bp, Homo sapien
tccaaatttgtactgggccttgttc

SEQ ID NO: 5213154 - DNA, 25 bp, Homo sapien
gttcttgcctaaattgtagctttcc

SEQ ID NO: 5213155 - DNA, 25 bp, Homo sapien
ccaaatttgtactgggccttgttct

SEQ ID NO: 5213156 - DNA, 25 bp, Homo sapien
taactcaggcccctatatctagatg

SEQ ID NO: 5213157 - DNA, 25 bp, Homo sapien
ggtcagcaccaaatatacttctcgt

SEQ ID NO: 5213158 - DNA, 25 bp, Homo sapien
gaacagagattatacccatgaggtg

SEQ ID NO: 5213159 - DNA, 25 bp, Homo sapien
caaactaaatttactggtcagcacc

SEQ ID NO: 5213160 - DNA, 25 bp, Homo sapien
gctgaaaccttgactacagctggga

SEQ ID NO: 5213161 - DNA, 25 bp, Homo sapien
tactgttcacgctgggaatgggcct

SEQ ID NO: 5213162 - DNA, 25 bp, Homo sapien
tgagcctgcaaaaggttcaagcctc

SEQ ID NO: 5213163 - DNA, 25 bp, Homo sapien
ctcagataagattgcagccctgctg

SEQ ID NO: 5213164 - DNA, 25 bp, Homo sapien
taaagattgctcttgttccatgcaa

SEQ ID NO: 5213165 - DNA, 25 bp, Homo sapien
taggcatttcatgttaacagggctg

SEQ ID NO: 5213166 - DNA, 25 bp, Homo sapien
actctgttgggtctggattacctgg

SEQ ID NO: 5213167 - DNA, 25 bp, Homo sapien
tcacatacaaccaagtctaggcatt

SEQ ID NO: 5213168 - DNA, 25 bp, Homo sapien
taaagctgtgtctccgtttcaaaca

SEQ ID NO: 5213169 - DNA, 25 bp, Homo sapien
actgtccaagagatagatggtgctc

SEQ ID NO: 5213170 - DNA, 25 bp, Homo sapien
aatggtctacctttgcagcgatcag

SEQ ID NO: 5213171 - DNA, 25 bp, Homo sapien
caccaaagctacactctggaaggca

SEQ ID NO: 5213172 - DNA, 25 bp, Homo sapien
taggtttagcttcaaccagaatatt

SEQ ID NO: 5213173 - DNA, 25 bp, Homo sapien
ccaggactagacgtcaagtttttgc

SEQ ID NO: 5213174 - DNA, 25 bp, Homo sapien
ctgatgtcaggccttaatttcttca

SEQ ID NO: 5213175 - DNA, 25 bp, Homo sapien
ttcttagtgctaccatactgcttcc

SEQ ID NO: 5213176 - DNA, 25 bp, Homo sapien
tcacagcaaccatggaaagtcagca

SEQ ID NO: 5213177 - DNA, 25 bp, Homo sapien
tgagagcaccatgtaatgatcacct

SEQ ID NO: 5213178 - DNA, 25 bp, Homo sapien
ggactatcattaagagcatggactc

SEQ ID NO: 5213179 - DNA, 25 bp, Homo sapien
gttacttagcctttatgagcctcgg

SEQ ID NO: 5213180 - DNA, 25 bp, Homo sapien
gacttaggtgtctatctgggcctta

SEQ ID NO: 5213181 - DNA, 25 bp, Homo sapien
gacaataggacggagaacagtgact

SEQ ID NO: 5213182 - DNA, 25 bp, Homo sapien
tataacaaatctgggacctgagggt

SEQ ID NO: 5213183 - DNA, 25 bp, Homo sapien
tcagtgtatgcatctcatgtcgcca

SEQ ID NO: 5213184 - DNA, 25 bp, Homo sapien
gaacttcacgtaagcagtctgagct

SEQ ID NO: 5213185 - DNA, 25 bp, Homo sapien
aagacatcccctgagtagttacgac

SEQ ID NO: 5213186 - DNA, 25 bp, Homo sapien
cccaagcacataccaaagacagaga

SEQ ID NO: 5213187 - DNA, 25 bp, Homo sapien
ggaagtcacccaagtgtccagcgac

SEQ ID NO: 5213188 - DNA, 25 bp, Homo sapien
gtgagggctcagttcataaaaattt

SEQ ID NO: 5213189 - DNA, 25 bp, Homo sapien
gaccggtatgggttaacagatataa

SEQ ID NO: 5213190 - DNA, 25 bp, Homo sapien
cagatataaccacacttccaatgta

SEQ ID NO: 5213191 - DNA, 25 bp, Homo sapien
ctggtgaataaatgggtaaagaccg

SEQ ID NO: 5213192 - DNA, 25 bp, Homo sapien
ggagcatgaacttctatgacctaga

SEQ ID NO: 5213193 - DNA, 25 bp, Homo sapien
tgctcaccacgtagtgctttgtagg

SEQ ID NO: 5213194 - DNA, 25 bp, Homo sapien
ggtgtgaactagagtagcagtgcca

SEQ ID NO: 5213195 - DNA, 25 bp, Homo sapien
gactgacagaacaagcaagatggga

SEQ ID NO: 5213196 - DNA, 25 bp, Homo sapien
ggatctagccttagtacggaacaag

SEQ ID NO: 5213197 - DNA, 25 bp, Homo sapien
gaagaacacgagttgctttggagaa

SEQ ID NO: 5213198 - DNA, 25 bp, Homo sapien
tgtggcaaaagcaacggatctagcc

SEQ ID NO: 5213199 - DNA, 25 bp, Homo sapien
caagtgaggacggttcctccctaag

SEQ ID NO: 5213200 - DNA, 25 bp, Homo sapien
atattcgctctgctgaacactttca

SEQ ID NO: 5213201 - DNA, 25 bp, Homo sapien
gactagggcctcatattcgctctgc

SEQ ID NO: 5213202 - DNA, 25 bp, Homo sapien
tcagttccgcagtctcacgactagg

SEQ ID NO: 5213203 - DNA, 25 bp, Homo sapien
cagtctcacgactagggcctcatat

SEQ ID NO: 5213204 - DNA, 25 bp, Homo sapien
ttatgccttgagctaggaaggcctg

SEQ ID NO: 5213205 - DNA, 25 bp, Homo sapien
catcccagggcatgcccaagatgag

SEQ ID NO: 5213206 - DNA, 25 bp, Homo sapien
tgggaattttgtcagtaagcagcac

SEQ ID NO: 5213207 - DNA, 25 bp, Homo sapien
tacttactatgaacctaatgccagg

SEQ ID NO: 5213208 - DNA, 25 bp, Homo sapien
taatcctagcagacaagagaccatg

SEQ ID NO: 5213209 - DNA, 25 bp, Homo sapien
gctactgaagtctgttgaacaatag

SEQ ID NO: 5213210 - DNA, 25 bp, Homo sapien
taggctgggcccatgtgactatgca

SEQ ID NO: 5213211 - DNA, 25 bp, Homo sapien
agcttccttcgcagttaggctgggc

SEQ ID NO: 5213212 - DNA, 25 bp, Homo sapien
aaaacattaacattgcattggctta

SEQ ID NO: 5213213 - DNA, 25 bp, Homo sapien
ctatagtcatatgtggaaaacgaac

SEQ ID NO: 5213214 - DNA, 25 bp, Homo sapien
tatgtattcatcacccatctgggaa

SEQ ID NO: 5213215 - DNA, 25 bp, Homo sapien
catctgggaagagttgaatccaaaa

SEQ ID NO: 5213216 - DNA, 25 bp, Homo sapien
tatgttctttcaaacatggccccat

SEQ ID NO: 5213217 - DNA, 25 bp, Homo sapien
gtctgtgacaccgaaatacatccaa

SEQ ID NO: 5213218 - DNA, 25 bp, Homo sapien
ttatgttctttcaaacatggcccca

SEQ ID NO: 5213219 - DNA, 25 bp, Homo sapien
gacaccgaaatacatccaaagctta

SEQ ID NO: 5213220 - DNA, 25 bp, Homo sapien
cactttccccagtaatgagaataca

SEQ ID NO: 5213221 - DNA, 25 bp, Homo sapien
gatctcgtagggatctgtatgcttc

SEQ ID NO: 5213222 - DNA, 25 bp, Homo sapien
gaatacattggtccttatcttgatc

SEQ ID NO: 5213223 - DNA, 25 bp, Homo sapien
tgtatgcttcatccgaaagggcaaa

SEQ ID NO: 5213224 - DNA, 25 bp, Homo sapien
cagagttgcttggtaggagccttac

SEQ ID NO: 5213225 - DNA, 25 bp, Homo sapien
tgcagagttgcttggtaggagcctt

SEQ ID NO: 5213226 - DNA, 25 bp, Homo sapien
gcagagttgcttggtaggagcctta

SEQ ID NO: 5213227 - DNA, 25 bp, Homo sapien
attcatctaaccactctttcttcag

SEQ ID NO: 5213228 - DNA, 25 bp, Homo sapien
acattcatctaaccactctttcttc

SEQ ID NO: 5213229 - DNA, 25 bp, Homo sapien
cattcatctaaccactctttcttca

SEQ ID NO: 5213230 - DNA, 25 bp, Homo sapien
cacattcatctaaccactctttctt

SEQ ID NO: 5213231 - DNA, 25 bp, Homo sapien
catttctgaccacctagagcctaga

SEQ ID NO: 5213232 - DNA, 25 bp, Homo sapien
gctgttctttaacttgattaacttc

SEQ ID NO: 5213233 - DNA, 25 bp, Homo sapien
acttgattaacttctgctccttttc

SEQ ID NO: 5213234 - DNA, 25 bp, Homo sapien
aagctgttctttaacttgattaact

SEQ ID NO: 5213235 - DNA, 25 bp, Homo sapien
tctttaacttgattaacttctgctc

SEQ ID NO: 5213236 - DNA, 25 bp, Homo sapien
tagtcaattgagtgaccaggaagca

SEQ ID NO: 5213237 - DNA, 25 bp, Homo sapien
taacacttctagagagtagtcaatt

SEQ ID NO: 5213238 - DNA, 25 bp, Homo sapien
attcaacaccttttaacacttctag

SEQ ID NO: 5213239 - DNA, 25 bp, Homo sapien
tgaccaggaagcaaagcttcatgct

SEQ ID NO: 5213240 - DNA, 25 bp, Homo sapien
tccatagaaatatacttaacagaag

SEQ ID NO: 5213241 - DNA, 25 bp, Homo sapien
gagaatcattcctatgactcatgga

SEQ ID NO: 5213242 - DNA, 25 bp, Homo sapien
gcttccatgtcttacaagttcatag

SEQ ID NO: 5213243 - DNA, 25 bp, Homo sapien
tgtagcaatgatatttctgtccaaa

SEQ ID NO: 5213244 - DNA, 25 bp, Homo sapien
ctagaggagttgtcattccttacag

SEQ ID NO: 5213245 - DNA, 25 bp, Homo sapien
cttacagttttggcatttccaaaag

SEQ ID NO: 5213246 - DNA, 25 bp, Homo sapien
gttgtcattccttacagttttggca

SEQ ID NO: 5213247 - DNA, 25 bp, Homo sapien
tccttacagttttggcatttccaaa

SEQ ID NO: 5213248 - DNA, 25 bp, Homo sapien
taccaaactcagataagcaaagtgt

SEQ ID NO: 5213249 - DNA, 25 bp, Homo sapien
gataaaaattgcttgttactccaaa

SEQ ID NO: 5213250 - DNA, 25 bp, Homo sapien
catcctttctggacccactgaataa

SEQ ID NO: 5213251 - DNA, 25 bp, Homo sapien
gccaagcctatggactttacctcta

SEQ ID NO: 5213252 - DNA, 25 bp, Homo sapien
ggagtacaagtacataaaccactgt

SEQ ID NO: 5213253 - DNA, 25 bp, Homo sapien
tacaacatagcagggtctatcagac

SEQ ID NO: 5213254 - DNA, 25 bp, Homo sapien
gaagacattgcaatttccccggagt

SEQ ID NO: 5213255 - DNA, 25 bp, Homo sapien
ggttaaccagaccaacacagactgg

SEQ ID NO: 5213256 - DNA, 25 bp, Homo sapien
tacaagatttccctggctagcatgg

SEQ ID NO: 5213257 - DNA, 25 bp, Homo sapien
caaccgtgaggatgagtgggaaaca

SEQ ID NO: 5213258 - DNA, 25 bp, Homo sapien
gtaaacagaattgagagctacccgg

SEQ ID NO: 5213259 - DNA, 25 bp, Homo sapien
cacaagcgaaagcatggcatggctc

SEQ ID NO: 5213260 - DNA, 25 bp, Homo sapien
tattactcctcctagtggatcgcct

SEQ ID NO: 5213261 - DNA, 25 bp, Homo sapien
tcctcctagtggatcgcctttaaag

SEQ ID NO: 5213262 - DNA, 25 bp, Homo sapien
ggatcgcctttaaagtcaaattcaa

SEQ ID NO: 5213263 - DNA, 25 bp, Homo sapien
agttacttattactcctcctagtgg

SEQ ID NO: 5213264 - DNA, 25 bp, Homo sapien
tcttatgcctcaaagacacaagtat

SEQ ID NO: 5213265 - DNA, 25 bp, Homo sapien
ggaaacatattcttatgcctcaaag

SEQ ID NO: 5213266 - DNA, 25 bp, Homo sapien
aagacacaagtatctaaactattct

SEQ ID NO: 5213267 - DNA, 25 bp, Homo sapien
acatattcttatgcctcaaagacac

SEQ ID NO: 5213268 - DNA, 25 bp, Homo sapien
taatcaaccacgagtcaagaggagc

SEQ ID NO: 5213269 - DNA, 25 bp, Homo sapien
tacaagagacactgaaaaccccgtg

SEQ ID NO: 5213270 - DNA, 25 bp, Homo sapien
gggtgccacaactccaaagcactga

SEQ ID NO: 5213271 - DNA, 25 bp, Homo sapien
tagaaaactctgcacctgggctaga

SEQ ID NO: 5213272 - DNA, 25 bp, Homo sapien
cattccaaaatgttcagctataagt

SEQ ID NO: 5213273 - DNA, 25 bp, Homo sapien
tgaggcaaaccactagctggatagc

SEQ ID NO: 5213274 - DNA, 25 bp, Homo sapien
tctccatggatactgcaagaatcag

SEQ ID NO: 5213275 - DNA, 25 bp, Homo sapien
gatcagctgccatatattgtaaaaa

SEQ ID NO: 5213276 - DNA, 25 bp, Homo sapien
tggtgaaaggctagagacaataaac

SEQ ID NO: 5213277 - DNA, 25 bp, Homo sapien
gaaccagactaaggctctatcctta

SEQ ID NO: 5213278 - DNA, 25 bp, Homo sapien
cactattttagttgctggtcactca

SEQ ID NO: 5213279 - DNA, 25 bp, Homo sapien
ccaggcactattacaagtgctttag

SEQ ID NO: 5213280 - DNA, 25 bp, Homo sapien
agagcagctgatagaacacatggaa

SEQ ID NO: 5213281 - DNA, 25 bp, Homo sapien
tcacctcttggctgtttaacaaccc

SEQ ID NO: 5213282 - DNA, 25 bp, Homo sapien
gctgtttaacaacccgagatttctc

SEQ ID NO: 5213283 - DNA, 25 bp, Homo sapien
gctgatagaacacatggaagtttct

SEQ ID NO: 5213284 - DNA, 25 bp, Homo sapien
gactcaggtagttatacctgctgaa

SEQ ID NO: 5213285 - DNA, 25 bp, Homo sapien
tccattcactttggccgaatccaga

SEQ ID NO: 5213286 - DNA, 25 bp, Homo sapien
tggccgaatccagactcaggtagtt

SEQ ID NO: 5213287 - DNA, 25 bp, Homo sapien
tgctgaaatccctctcaagcttaag

SEQ ID NO: 5213288 - DNA, 25 bp, Homo sapien
actcagcttcatgatccataaagcc

SEQ ID NO: 5213289 - DNA, 25 bp, Homo sapien
gaactcaatgttccccagtttcaac

SEQ ID NO: 5213290 - DNA, 25 bp, Homo sapien
taaagcccacaatctgcatggcatt

SEQ ID NO: 5213291 - DNA, 25 bp, Homo sapien
tagaccattcactcgagattcgggc

SEQ ID NO: 5213292 - DNA, 25 bp, Homo sapien
tcctaaacaaacaaagttgattctc

SEQ ID NO: 5213293 - DNA, 25 bp, Homo sapien
ggaaactgaatgctcgttctagaac

SEQ ID NO: 5213294 - DNA, 25 bp, Homo sapien
tctagaactgattgatcaatgccgg

SEQ ID NO: 5213295 - DNA, 25 bp, Homo sapien
cagtgtagttgaaactttctcctgt

SEQ ID NO: 5213296 - DNA, 25 bp, Homo sapien
cctgtttggcctcaactgttcggaa

SEQ ID NO: 5213297 - DNA, 25 bp, Homo sapien
gccagagcatcacgggcataataag

SEQ ID NO: 5213298 - DNA, 25 bp, Homo sapien
catgaaaacaacctgctgtagaggt

SEQ ID NO: 5213299 - DNA, 25 bp, Homo sapien
aatgctttcattgattcgatttacc

SEQ ID NO: 5213300 - DNA, 25 bp, Homo sapien
gattcgatttaccaaccatgaaaac

SEQ ID NO: 5213301 - DNA, 25 bp, Homo sapien
gattttgctcatagaaattcagtac

SEQ ID NO: 5213302 - DNA, 25 bp, Homo sapien
actgattttgctcatagaaattcag

SEQ ID NO: 5213303 - DNA, 25 bp, Homo sapien
tgattttgctcatagaaattcagta

SEQ ID NO: 5213304 - DNA, 25 bp, Homo sapien
ctgattttgctcatagaaattcagt

SEQ ID NO: 5213305 - DNA, 25 bp, Homo sapien
aagccataaatgtccagaacaccca

SEQ ID NO: 5213306 - DNA, 25 bp, Homo sapien
ctcgaaaatctcaaagccataaatg

SEQ ID NO: 5213307 - DNA, 25 bp, Homo sapien
agaacacccatgaccttctttctca

SEQ ID NO: 5213308 - DNA, 25 bp, Homo sapien
atgtccagaacacccatgaccttct

SEQ ID NO: 5213309 - DNA, 25 bp, Homo sapien
ttttaggtatatgtgttgcttaacc

SEQ ID NO: 5213310 - DNA, 25 bp, Homo sapien
aaatcacttttttcaggggccatgc

SEQ ID NO: 5213311 - DNA, 25 bp, Homo sapien
taggtatatgtgttgcttaaccaag

SEQ ID NO: 5213312 - DNA, 25 bp, Homo sapien
ggtatatgtgttgcttaaccaagca

SEQ ID NO: 5213313 - DNA, 25 bp, Homo sapien
ccgctaagtagctgtataaccctgg

SEQ ID NO: 5213314 - DNA, 25 bp, Homo sapien
gaagtgcccctggtctcaatcttag

SEQ ID NO: 5213315 - DNA, 25 bp, Homo sapien
catctacgaagcacccaatgctggc

SEQ ID NO: 5213316 - DNA, 25 bp, Homo sapien
gcctggagtttaggtcctgagtctg

SEQ ID NO: 5213317 - DNA, 25 bp, Homo sapien
tattgcaaactcacctccaaagtct

SEQ ID NO: 5213318 - DNA, 25 bp, Homo sapien
cacagaaatcagcatctattgcaaa

SEQ ID NO: 5213319 - DNA, 25 bp, Homo sapien
aatcagcatctattgcaaactcacc

SEQ ID NO: 5213320 - DNA, 25 bp, Homo sapien
ctccaaagtctccaaaacatgtcat

SEQ ID NO: 5213321 - DNA, 25 bp, Homo sapien
gaagcaccccaaacagaaaagctag

SEQ ID NO: 5213322 - DNA, 25 bp, Homo sapien
gacacagtgagctccacaatctctg

SEQ ID NO: 5213323 - DNA, 25 bp, Homo sapien
gcccattgcaggcactcgaggagtg

SEQ ID NO: 5213324 - DNA, 25 bp, Homo sapien
ctaggacagacgcttgcccattgca

SEQ ID NO: 5213325 - DNA, 25 bp, Homo sapien
cctgctcttctttaagagtaagttc

SEQ ID NO: 5213326 - DNA, 25 bp, Homo sapien
tgttgcagcttttcgttacaataat

SEQ ID NO: 5213327 - DNA, 25 bp, Homo sapien
ataattaataatgaactgctcaaag

SEQ ID NO: 5213328 - DNA, 25 bp, Homo sapien
agttcaatgaagatttgttgcagct

SEQ ID NO: 5213329 - DNA, 25 bp, Homo sapien
tagcattattgaagtagtcaatgtg

SEQ ID NO: 5213330 - DNA, 25 bp, Homo sapien
ctattaggtcacaaatgatagcatt

SEQ ID NO: 5213331 - DNA, 25 bp, Homo sapien
gaagtagtcaatgtgagtccattct

SEQ ID NO: 5213332 - DNA, 25 bp, Homo sapien
ttctattaggtcacaaatgatagca

SEQ ID NO: 5213333 - DNA, 25 bp, Homo sapien
catggaatagacctgggctccaacc

SEQ ID NO: 5213334 - DNA, 25 bp, Homo sapien
tgcccaggagtcatggaatagacct

SEQ ID NO: 5213335 - DNA, 25 bp, Homo sapien
aggctggtacctttaaggcctggtg

SEQ ID NO: 5213336 - DNA, 25 bp, Homo sapien
caaccatacaagaaaggctggtacc

SEQ ID NO: 5213337 - DNA, 25 bp, Homo sapien
cattgaggaaccgagagcacttgct

SEQ ID NO: 5213338 - DNA, 25 bp, Homo sapien
ctcaaaatgctggtgggtggcacat

SEQ ID NO: 5213339 - DNA, 25 bp, Homo sapien
aaggtctcatcagtgactgtgccag

SEQ ID NO: 5213340 - DNA, 25 bp, Homo sapien
ctgtgaggcagagacgtgtcattga

SEQ ID NO: 5213341 - DNA, 25 bp, Homo sapien
tttcatcagagtggccacggatgcc

SEQ ID NO: 5213342 - DNA, 25 bp, Homo sapien
gcttgggacaggtctcgatagagaa

SEQ ID NO: 5213343 - DNA, 25 bp, Homo sapien
ccttttcaggttgatcttggcggga

SEQ ID NO: 5213344 - DNA, 25 bp, Homo sapien
tttgtcaacgaatccttccacctgg

SEQ ID NO: 5213345 - DNA, 25 bp, Homo sapien
tgccagagcagttaactaaagcact

SEQ ID NO: 5213346 - DNA, 25 bp, Homo sapien
ttttaagccaatcccagataaggta

SEQ ID NO: 5213347 - DNA, 25 bp, Homo sapien
catgtctcctaagaagtgccagagc

SEQ ID NO: 5213348 - DNA, 25 bp, Homo sapien
ctgcttgggctacactcagattgaa

SEQ ID NO: 5213349 - DNA, 25 bp, Homo sapien
ggtacctgatctgatgacacactag

SEQ ID NO: 5213350 - DNA, 25 bp, Homo sapien
tctttctaggcaaggttcataggcc

SEQ ID NO: 5213351 - DNA, 25 bp, Homo sapien
tcataggcctgcctgaaggcgtagc

SEQ ID NO: 5213352 - DNA, 25 bp, Homo sapien
ctagagcctcgttgaagatgtgtgc

SEQ ID NO: 5213353 - DNA, 25 bp, Homo sapien
cggatgaatatctttgatctaccaa

SEQ ID NO: 5213354 - DNA, 25 bp, Homo sapien
tgttcttgggtttcggatgaatatc

SEQ ID NO: 5213355 - DNA, 25 bp, Homo sapien
gatctaccaaaggagtattcttcca

SEQ ID NO: 5213356 - DNA, 25 bp, Homo sapien
cttccacgggaatttctaattcatt

SEQ ID NO: 5213357 - DNA, 25 bp, Homo sapien
tgtaccaggcggcaatcacaatttg

SEQ ID NO: 5213358 - DNA, 25 bp, Homo sapien
gtgcggcatttccacccccgatata

SEQ ID NO: 5213359 - DNA, 25 bp, Homo sapien
ttcattagcaggaagtgtgtgcggc

SEQ ID NO: 5213360 - DNA, 25 bp, Homo sapien
tcctccaggcgttgcttcctcaggt

SEQ ID NO: 5213361 - DNA, 25 bp, Homo sapien
gaactctttgtctgctggtacctct

SEQ ID NO: 5213362 - DNA, 25 bp, Homo sapien
cttccaaccccggatataagactga

SEQ ID NO: 5213363 - DNA, 25 bp, Homo sapien
ctgaattactaaggcggaactcttt

SEQ ID NO: 5213364 - DNA, 25 bp, Homo sapien
ccccggatataagactgaattacta

SEQ ID NO: 5213365 - DNA, 25 bp, Homo sapien
tcagttcccgcagaatttttcgagc

SEQ ID NO: 5213366 - DNA, 25 bp, Homo sapien
ccttacagcgcttttgatgcttcag

SEQ ID NO: 5213367 - DNA, 25 bp, Homo sapien
caatggtcgtgactgcttccttaca

SEQ ID NO: 5213368 - DNA, 25 bp, Homo sapien
tgggtcccatgccaatatgcagcaa

SEQ ID NO: 5213369 - DNA, 25 bp, Homo sapien
tggtaaacgcaaaagcatgtgccac

SEQ ID NO: 5213370 - DNA, 25 bp, Homo sapien
aaaagagagacactagtcaccacca

SEQ ID NO: 5213371 - DNA, 25 bp, Homo sapien
agtcaccaccaaatggtaaacgcaa

SEQ ID NO: 5213372 - DNA, 25 bp, Homo sapien
aagagagacactagtcaccaccaaa

SEQ ID NO: 5213373 - DNA, 25 bp, Homo sapien
gcatgtttattcctagcctcctcct

SEQ ID NO: 5213374 - DNA, 25 bp, Homo sapien
cagtaagcccaaataactgcaatag

SEQ ID NO: 5213375 - DNA, 25 bp, Homo sapien
ttcagccgtctcagttcccttcgtg

SEQ ID NO: 5213376 - DNA, 25 bp, Homo sapien
gcccaaataactgcaatagcatgtt

SEQ ID NO: 5213377 - DNA, 25 bp, Homo sapien
ccctaataggctagaggtaaggact

SEQ ID NO: 5213378 - DNA, 25 bp, Homo sapien
taaatctggcggctaggacatgcac

SEQ ID NO: 5213379 - DNA, 25 bp, Homo sapien
tcaacatgttgcagaagaccgactg

SEQ ID NO: 5213380 - DNA, 25 bp, Homo sapien
taataatcaatagctgccacactga

SEQ ID NO: 5213381 - DNA, 25 bp, Homo sapien
gcactcctgagttcatccctttgga

SEQ ID NO: 5213382 - DNA, 25 bp, Homo sapien
aagagacagcccaatgcagacagca

SEQ ID NO: 5213383 - DNA, 25 bp, Homo sapien
tgagtaacagccctaatgatgtcat

SEQ ID NO: 5213384 - DNA, 25 bp, Homo sapien
ggctgaagaagctatgcactcctga

SEQ ID NO: 5213385 - DNA, 25 bp, Homo sapien
tcaagcgtttcaattcccttcgagc

SEQ ID NO: 5213386 - DNA, 25 bp, Homo sapien
tagcctcctccttcaagcgtttcaa

SEQ ID NO: 5213387 - DNA, 25 bp, Homo sapien
agtaagcccaaatgacagcaactgc

SEQ ID NO: 5213388 - DNA, 25 bp, Homo sapien
gcaactgcatgcttacgcctagcct

SEQ ID NO: 5213389 - DNA, 25 bp, Homo sapien
attctctgaagcgtaaactcataga

SEQ ID NO: 5213390 - DNA, 25 bp, Homo sapien
tgaagcgtaaactcatagattttct

SEQ ID NO: 5213391 - DNA, 25 bp, Homo sapien
gcgtaaactcatagattttctttcc

SEQ ID NO: 5213392 - DNA, 25 bp, Homo sapien
aaactcatagattttctttccagca

SEQ ID NO: 5213393 - DNA, 25 bp, Homo sapien
gggtaaagtcatggctttcttggat

SEQ ID NO: 5213394 - DNA, 25 bp, Homo sapien
tcacagggtaaagtcatggctttct

SEQ ID NO: 5213395 - DNA, 25 bp, Homo sapien
tccccactaatttgcttgccagcct

SEQ ID NO: 5213396 - DNA, 25 bp, Homo sapien
gtttcacagggtaaagtcatggctt

SEQ ID NO: 5213397 - DNA, 25 bp, Homo sapien
caagaataagtaaggtcttgagggc

SEQ ID NO: 5213398 - DNA, 25 bp, Homo sapien
ggtcttgagggccaattcttgtcta

SEQ ID NO: 5213399 - DNA, 25 bp, Homo sapien
ttagctccttgtgagtagaatccaa

SEQ ID NO: 5213400 - DNA, 25 bp, Homo sapien
tcttgtctattggagataaggaagg

SEQ ID NO: 5213401 - DNA, 25 bp, Homo sapien
tgtgaattggtccctgtatttttta

SEQ ID NO: 5213402 - DNA, 25 bp, Homo sapien
atgggtataaagccttcttgtcttt

SEQ ID NO: 5213403 - DNA, 25 bp, Homo sapien
agtttctgctggtctgtgaattggt

SEQ ID NO: 5213404 - DNA, 25 bp, Homo sapien
gtctgtgaattggtccctgtatttt

SEQ ID NO: 5213405 - DNA, 25 bp, Homo sapien
aggcaaaacggcgtacaaatatact

SEQ ID NO: 5213406 - DNA, 25 bp, Homo sapien
aaacggcgtacaaatatacttgaga

SEQ ID NO: 5213407 - DNA, 25 bp, Homo sapien
gaattttatgggtaaagcaaagcca

SEQ ID NO: 5213408 - DNA, 25 bp, Homo sapien
cctgaattttatgggtaaagcaaag

SEQ ID NO: 5213409 - DNA, 25 bp, Homo sapien
tgagtccacggtgtctaaaataaag

SEQ ID NO: 5213410 - DNA, 25 bp, Homo sapien
ttctgagtccacggtgtctaaaata

SEQ ID NO: 5213411 - DNA, 25 bp, Homo sapien
ctgagtccacggtgtctaaaataaa

SEQ ID NO: 5213412 - DNA, 25 bp, Homo sapien
tctgagtccacggtgtctaaaataa

SEQ ID NO: 5213413 - DNA, 25 bp, Homo sapien
ttcctgcacattagaaatagtttca

SEQ ID NO: 5213414 - DNA, 25 bp, Homo sapien
aaattcctgcacattagaaatagtt

SEQ ID NO: 5213415 - DNA, 25 bp, Homo sapien
cctgcacattagaaatagtttcaaa

SEQ ID NO: 5213416 - DNA, 25 bp, Homo sapien
gaaatagtttcaaatgaaagtacca

SEQ ID NO: 5213417 - DNA, 25 bp, Homo sapien
ccattagcacggttaattttgttca

SEQ ID NO: 5213418 - DNA, 25 bp, Homo sapien
tgttgatttccaggtaagccccttg

SEQ ID NO: 5213419 - DNA, 25 bp, Homo sapien
agccccttggaatggttgcccaaca

SEQ ID NO: 5213420 - DNA, 25 bp, Homo sapien
tcagcaatgatgatcttttcttcaa

SEQ ID NO: 5213421 - DNA, 25 bp, Homo sapien
tccaccaatggaacctctgacttga

SEQ ID NO: 5213422 - DNA, 25 bp, Homo sapien
ggtggacggcgaagaagccatcatt

SEQ ID NO: 5213423 - DNA, 25 bp, Homo sapien
cattgataccttggtcacatccacc

SEQ ID NO: 5213424 - DNA, 25 bp, Homo sapien
gatttgtccagacttttggtcagca

SEQ ID NO: 5213425 - DNA, 25 bp, Homo sapien
gacacatgtccctacatatgatcaa

SEQ ID NO: 5213426 - DNA, 25 bp, Homo sapien
gggttggccagagagtaacattatt

SEQ ID NO: 5213427 - DNA, 25 bp, Homo sapien
actgtcctagtatttgatatgcccc

SEQ ID NO: 5213428 - DNA, 25 bp, Homo sapien
catgtgtcactgaggttgagaatca

SEQ ID NO: 5213429 - DNA, 25 bp, Homo sapien
tctcaatattgagcttctgtttggt

SEQ ID NO: 5213430 - DNA, 25 bp, Homo sapien
tgtgcgatagagcttggtggccatt

SEQ ID NO: 5213431 - DNA, 25 bp, Homo sapien
agtctcctttactagctgcttctga

SEQ ID NO: 5213432 - DNA, 25 bp, Homo sapien
ggtggccatttcaatcaggtgatca

SEQ ID NO: 5213433 - DNA, 25 bp, Homo sapien
cacatacctggtacttaataagtag

SEQ ID NO: 5213434 - DNA, 25 bp, Homo sapien
tattaatgaatgagatcgagagctg

SEQ ID NO: 5213435 - DNA, 25 bp, Homo sapien
tccactaggatgtcaggtacatgag

SEQ ID NO: 5213436 - DNA, 25 bp, Homo sapien
atttgtacatactggtctcttccac

SEQ ID NO: 5213437 - DNA, 25 bp, Homo sapien
catatcaaagagagtctgacttaca

SEQ ID NO: 5213438 - DNA, 25 bp, Homo sapien
gagtatacatgaagcccaacctccc

SEQ ID NO: 5213439 - DNA, 25 bp, Homo sapien
tcctgagcaatctagacatgcaaag

SEQ ID NO: 5213440 - DNA, 25 bp, Homo sapien
gaaaagttatttagtccgaacagca

SEQ ID NO: 5213441 - DNA, 25 bp, Homo sapien
caaacatgtgagtagtgccttgcac

SEQ ID NO: 5213442 - DNA, 25 bp, Homo sapien
gggaccaccgtcatctgtgcaatcc

SEQ ID NO: 5213443 - DNA, 25 bp, Homo sapien
actataaggcagctgaatctctgaa

SEQ ID NO: 5213444 - DNA, 25 bp, Homo sapien
ttttacttgtagacaactggcagtg

SEQ ID NO: 5213445 - DNA, 25 bp, Homo sapien
gtcctgtctgaactgtaccaggaac

SEQ ID NO: 5213446 - DNA, 25 bp, Homo sapien
cacatactttgtcctgtctgaactg

SEQ ID NO: 5213447 - DNA, 25 bp, Homo sapien
tttcgtttacatgttgggacactcc

SEQ ID NO: 5213448 - DNA, 25 bp, Homo sapien
ttttcgtttacatgttgggacactc

SEQ ID NO: 5213449 - DNA, 25 bp, Homo sapien
aaaccaaattgcactattacaaagg

SEQ ID NO: 5213450 - DNA, 25 bp, Homo sapien
ggaacaagtccatgaaagtagagag

SEQ ID NO: 5213451 - DNA, 25 bp, Homo sapien
tgcactattacaaaggaacaagtcc

SEQ ID NO: 5213452 - DNA, 25 bp, Homo sapien
caaagaactctaaaagcctttggtg

SEQ ID NO: 5213453 - DNA, 25 bp, Homo sapien
gttttcataccatctagcacagtgc

SEQ ID NO: 5213454 - DNA, 25 bp, Homo sapien
tatgctgatttagggtacacagacc

SEQ ID NO: 5213455 - DNA, 25 bp, Homo sapien
gttaaaccagcacaaaccagccaga

SEQ ID NO: 5213456 - DNA, 25 bp, Homo sapien
tagtttctacaatcctgctccagga

SEQ ID NO: 5213457 - DNA, 25 bp, Homo sapien
taggcaccctgtaccaatcaccttt

SEQ ID NO: 5213458 - DNA, 25 bp, Homo sapien
tatacattatcctcccaaataagaa

SEQ ID NO: 5213459 - DNA, 25 bp, Homo sapien
caatgtatatacattatcctcccaa

SEQ ID NO: 5213460 - DNA, 25 bp, Homo sapien
tacacaaattttgatccatgactaa

SEQ ID NO: 5213461 - DNA, 25 bp, Homo sapien
ggcacaaggcaagaagaatctaagt

SEQ ID NO: 5213462 - DNA, 25 bp, Homo sapien
tacaaaagcaactaacaacaatggt

SEQ ID NO: 5213463 - DNA, 25 bp, Homo sapien
taatctaccactttaggcacaaggc

SEQ ID NO: 5213464 - DNA, 25 bp, Homo sapien
tctacctgcaccaataaacacaaag

SEQ ID NO: 5213465 - DNA, 25 bp, Homo sapien
gtagagaaccataccaatctccctg

SEQ ID NO: 5213466 - DNA, 25 bp, Homo sapien
ataccaatctccctgattagaccac

SEQ ID NO: 5213467 - DNA, 25 bp, Homo sapien
accaatctccctgattagaccacat

SEQ ID NO: 5213468 - DNA, 25 bp, Homo sapien
gagtagagaaccataccaatctccc

SEQ ID NO: 5213469 - DNA, 25 bp, Homo sapien
gaaggctttgtcatacttcccacac

SEQ ID NO: 5213470 - DNA, 25 bp, Homo sapien
gctttgtcatacttcccacactgga

SEQ ID NO: 5213471 - DNA, 25 bp, Homo sapien
aggctttgtcatacttcccacactg

SEQ ID NO: 5213472 - DNA, 25 bp, Homo sapien
cctcgaaggctttgtcatacttccc

SEQ ID NO: 5213473 - DNA, 25 bp, Homo sapien
aggcctgcaggcattacacagacaa

SEQ ID NO: 5213474 - DNA, 25 bp, Homo sapien
ggcctgcaggcattacacagacaag

SEQ ID NO: 5213475 - DNA, 25 bp, Homo sapien
cagacaagcatgatggacgtcacca

SEQ ID NO: 5213476 - DNA, 25 bp, Homo sapien
cattacacagacaagcatgatggac

SEQ ID NO: 5213477 - DNA, 25 bp, Homo sapien
tggtcagtcctactctcttggtctc

SEQ ID NO: 5213478 - DNA, 25 bp, Homo sapien
ggtctccagaaacatttgtagcagg

SEQ ID NO: 5213479 - DNA, 25 bp, Homo sapien
tctcttggtctccagaaacatttgt

SEQ ID NO: 5213480 - DNA, 25 bp, Homo sapien
tctctcttttcaaagtgttggtcag

SEQ ID NO: 5213481 - DNA, 25 bp, Homo sapien
tgaagtttgtgtgtggaagtaggct

SEQ ID NO: 5213482 - DNA, 25 bp, Homo sapien
taggctgcagggctgttattgggaa

SEQ ID NO: 5213483 - DNA, 25 bp, Homo sapien
tttgtgtgtggaagtaggctgcagg

SEQ ID NO: 5213484 - DNA, 25 bp, Homo sapien
cagggctgttattgggaagtggtga

SEQ ID NO: 5213485 - DNA, 25 bp, Homo sapien
cctttgccacatcggtttcgtgtga

SEQ ID NO: 5213486 - DNA, 25 bp, Homo sapien
agtgctgacaacacatattgcctgc

SEQ ID NO: 5213487 - DNA, 25 bp, Homo sapien
catagacagaacacttcctggttcc

SEQ ID NO: 5213488 - DNA, 25 bp, Homo sapien
cctttgctgtcagagtcggaaacat

SEQ ID NO: 5213489 - DNA, 25 bp, Homo sapien
ctgcctctgacaggggatacagcct

SEQ ID NO: 5213490 - DNA, 25 bp, Homo sapien
gatacagcctgctggcgtgaatggt

SEQ ID NO: 5213491 - DNA, 25 bp, Homo sapien
ctggcgtgaatggtccatgccacca

SEQ ID NO: 5213492 - DNA, 25 bp, Homo sapien
cagcctgctggcgtgaatggtccat

SEQ ID NO: 5213493 - DNA, 25 bp, Homo sapien
gaagctgttcggcttaagccagaac

SEQ ID NO: 5213494 - DNA, 25 bp, Homo sapien
ttgccaattgcctgagactgctttc

SEQ ID NO: 5213495 - DNA, 25 bp, Homo sapien
ccagtttcaacaagaacgaagaagg

SEQ ID NO: 5213496 - DNA, 25 bp, Homo sapien
tttctgccagtttcaacaagaacga

SEQ ID NO: 5213497 - DNA, 25 bp, Homo sapien
caacttgacatatgacacgggtccc

SEQ ID NO: 5213498 - DNA, 25 bp, Homo sapien
cctttgctcctccaacttgacatat

SEQ ID NO: 5213499 - DNA, 25 bp, Homo sapien
ttgacatatgacacgggtcccacca

SEQ ID NO: 5213500 - DNA, 25 bp, Homo sapien
tcctccaacttgacatatgacacgg

SEQ ID NO: 5213501 - DNA, 25 bp, Homo sapien
aagggagccagaaattgaaacttgg

SEQ ID NO: 5213502 - DNA, 25 bp, Homo sapien
agccagaaattgaaacttggctccc

SEQ ID NO: 5213503 - DNA, 25 bp, Homo sapien
gggagccagaaattgaaacttggct

SEQ ID NO: 5213504 - DNA, 25 bp, Homo sapien
gaaattgaaacttggctcccaggca

SEQ ID NO: 5213505 - DNA, 25 bp, Homo sapien
gagctattagagaaaccggtcctgt

SEQ ID NO: 5213506 - DNA, 25 bp, Homo sapien
cagagcaacagtgtctctaattaca

SEQ ID NO: 5213507 - DNA, 25 bp, Homo sapien
tctaattacaattttccatactgaa

SEQ ID NO: 5213508 - DNA, 25 bp, Homo sapien
tgaaagacaccgcacatacatgcta

SEQ ID NO: 5213509 - DNA, 25 bp, Homo sapien
catgctacccatacccgtataggca

SEQ ID NO: 5213510 - DNA, 25 bp, Homo sapien
caggcaaattattgggagcaaacca

SEQ ID NO: 5213511 - DNA, 25 bp, Homo sapien
ttaaggcaacgtaattctgtccatc

SEQ ID NO: 5213512 - DNA, 25 bp, Homo sapien
ctcttgcagtgattaagggtgtcca

SEQ ID NO: 5213513 - DNA, 25 bp, Homo sapien
gctgccatgctgtatgacagctggc

SEQ ID NO: 5213514 - DNA, 25 bp, Homo sapien
tagttttcttaagggtctgtagcca

SEQ ID NO: 5213515 - DNA, 25 bp, Homo sapien
ttaaatggaattgatgcaaattcac

SEQ ID NO: 5213516 - DNA, 25 bp, Homo sapien
ttgatgcaaattcactagtatccat

SEQ ID NO: 5213517 - DNA, 25 bp, Homo sapien
tgtagccaataatgttatccatatg

SEQ ID NO: 5213518 - DNA, 25 bp, Homo sapien
tcatgctccatgagggaatgctccc

SEQ ID NO: 5213519 - DNA, 25 bp, Homo sapien
tcatcagtgccctgcggtgggaaat

SEQ ID NO: 5213520 - DNA, 25 bp, Homo sapien
cccatgttttggagatcacgtgtcc

SEQ ID NO: 5213521 - DNA, 25 bp, Homo sapien
gggcataaatcactccaagcgtaaa

SEQ ID NO: 5213522 - DNA, 25 bp, Homo sapien
ccagtagcgaaggaagattcagggc

SEQ ID NO: 5213523 - DNA, 25 bp, Homo sapien
gctgccttttccgaaacagttaata

SEQ ID NO: 5213524 - DNA, 25 bp, Homo sapien
taatatcccacgacttatcgagagg

SEQ ID NO: 5213525 - DNA, 25 bp, Homo sapien
tatcgagaggcagaggtagccactg

SEQ ID NO: 5213526 - DNA, 25 bp, Homo sapien
gctggtcatagagaaagtgctccat

SEQ ID NO: 5213527 - DNA, 25 bp, Homo sapien
ccttgtggccatcttattctccttg

SEQ ID NO: 5213528 - DNA, 25 bp, Homo sapien
catcttattctccttgtactgccag

SEQ ID NO: 5213529 - DNA, 25 bp, Homo sapien
tcttattctccttgtactgccagcc

SEQ ID NO: 5213530 - DNA, 25 bp, Homo sapien
tggccatcttattctccttgtactg

SEQ ID NO: 5213531 - DNA, 25 bp, Homo sapien
cagatcagatctccttctactccca

SEQ ID NO: 5213532 - DNA, 25 bp, Homo sapien
agatcagatctccttctactcccac

SEQ ID NO: 5213533 - DNA, 25 bp, Homo sapien
aatattggggaacccattgagcaac

SEQ ID NO: 5213534 - DNA, 25 bp, Homo sapien
ccattgagcaacagatctacacttt

SEQ ID NO: 5213535 - DNA, 25 bp, Homo sapien
ctggtcagcattctctgtacaggag

SEQ ID NO: 5213536 - DNA, 25 bp, Homo sapien
gatctacactttgtttactggtcag

SEQ ID NO: 5213537 - DNA, 25 bp, Homo sapien
ttgagtgacccaaagaacgtgggtg

SEQ ID NO: 5213538 - DNA, 25 bp, Homo sapien
tgacccaaagaacgtgggtggctaa

SEQ ID NO: 5213539 - DNA, 25 bp, Homo sapien
gaggatttgagtgacccaaagaacg

SEQ ID NO: 5213540 - DNA, 25 bp, Homo sapien
cccaaagaacgtgggtggctaagat

SEQ ID NO: 5213541 - DNA, 25 bp, Homo sapien
tgatcaggaaaggccgaaaggtcat

SEQ ID NO: 5213542 - DNA, 25 bp, Homo sapien
tccagtgtaaagaggatctggacag

SEQ ID NO: 5213543 - DNA, 25 bp, Homo sapien
atctggacagatttgatcaggaaag

SEQ ID NO: 5213544 - DNA, 25 bp, Homo sapien
taattccagtgtaaagaggatctgg

SEQ ID NO: 5213545 - DNA, 25 bp, Homo sapien
tacgctaattaaaggagaaccatcc

SEQ ID NO: 5213546 - DNA, 25 bp, Homo sapien
cacacacaattagagggagcctggg

SEQ ID NO: 5213547 - DNA, 25 bp, Homo sapien
taaacgtccacgattctatggccag

SEQ ID NO: 5213548 - DNA, 25 bp, Homo sapien
gaagcttgtgagtgctaaacaccca

SEQ ID NO: 5213549 - DNA, 25 bp, Homo sapien
ccagaagtgcctgattcgaagaatc

SEQ ID NO: 5213550 - DNA, 25 bp, Homo sapien
attttatttggcataggcaaaatga

SEQ ID NO: 5213551 - DNA, 25 bp, Homo sapien
tcttccatagtacccacagcaatcg

SEQ ID NO: 5213552 - DNA, 25 bp, Homo sapien
caatcgatgttgaaaagccagaagt

SEQ ID NO: 5213553 - DNA, 25 bp, Homo sapien
ctttgttatctttcctttgccctgt

SEQ ID NO: 5213554 - DNA, 25 bp, Homo sapien
cccatgtgagtaaaattttctgacc

SEQ ID NO: 5213555 - DNA, 25 bp, Homo sapien
tcttcccatgtgagtaaaattttct

SEQ ID NO: 5213556 - DNA, 25 bp, Homo sapien
aattttctgaccaagagcctcttcc

SEQ ID NO: 5213557 - DNA, 25 bp, Homo sapien
acctgaacagaattgtacgctaaca

SEQ ID NO: 5213558 - DNA, 25 bp, Homo sapien
tctctccagtgttgcataaccattc

SEQ ID NO: 5213559 - DNA, 25 bp, Homo sapien
accattccagtattcccaattaggg

SEQ ID NO: 5213560 - DNA, 25 bp, Homo sapien
tggtaaccaaccttcacctgaacag

SEQ ID NO: 5213561 - DNA, 25 bp, Homo sapien
tgtgttcagttgttgtctctgttgc

SEQ ID NO: 5213562 - DNA, 25 bp, Homo sapien
atgtgttcagttgttgtctctgttg

SEQ ID NO: 5213563 - DNA, 25 bp, Homo sapien
gattatgtgttcagttgttgtctct

SEQ ID NO: 5213564 - DNA, 25 bp, Homo sapien
attatgtgttcagttgttgtctctg

SEQ ID NO: 5213565 - DNA, 25 bp, Homo sapien
gtcaatctagtcagtttgaccttaa

SEQ ID NO: 5213566 - DNA, 25 bp, Homo sapien
cacccaccacaacgacctcaggtga

SEQ ID NO: 5213567 - DNA, 25 bp, Homo sapien
caagtcctgcgatggaatctcggct

SEQ ID NO: 5213568 - DNA, 25 bp, Homo sapien
ctgcgtccagccattaccaataatc

SEQ ID NO: 5213569 - DNA, 25 bp, Homo sapien
caaagacagatgaaatacgagatgc

SEQ ID NO: 5213570 - DNA, 25 bp, Homo sapien
cacagtgtctgtgcagcgactgcaa

SEQ ID NO: 5213571 - DNA, 25 bp, Homo sapien
cgagatgcgtgtttatctgtgcaca

SEQ ID NO: 5213572 - DNA, 25 bp, Homo sapien
gcctgttgacaggtatcccgagaaa

SEQ ID NO: 5213573 - DNA, 25 bp, Homo sapien
aggtctggccaggacgatggtcaag

SEQ ID NO: 5213574 - DNA, 25 bp, Homo sapien
tctggccaggacgatggtcaagatg

SEQ ID NO: 5213575 - DNA, 25 bp, Homo sapien
gccaggacgatggtcaagatggctt

SEQ ID NO: 5213576 - DNA, 25 bp, Homo sapien
caggacgatggtcaagatggcttca

SEQ ID NO: 5213577 - DNA, 25 bp, Homo sapien
ctccatgaggtaacaagggctactt

SEQ ID NO: 5213578 - DNA, 25 bp, Homo sapien
tgaaagcagaagtaccagattcgcc

SEQ ID NO: 5213579 - DNA, 25 bp, Homo sapien
ccagattcgccctttagtgatggtc

SEQ ID NO: 5213580 - DNA, 25 bp, Homo sapien
aaaagcaaccaatcgcctgtcagag

SEQ ID NO: 5213581 - DNA, 25 bp, Homo sapien
taggtgtggagccaccaactcactg

SEQ ID NO: 5213582 - DNA, 25 bp, Homo sapien
tatttaacctgttggtattattgca

SEQ ID NO: 5213583 - DNA, 25 bp, Homo sapien
ggttttctaggtgtggagccaccaa

SEQ ID NO: 5213584 - DNA, 25 bp, Homo sapien
ttaacctgttggtattattgcaaac

SEQ ID NO: 5213585 - DNA, 25 bp, Homo sapien
tccatgtatgattccagttttctct

SEQ ID NO: 5213586 - DNA, 25 bp, Homo sapien
tgtatgattccagttttctctcttc

SEQ ID NO: 5213587 - DNA, 25 bp, Homo sapien
catcctccatgtatgattccagttt

SEQ ID NO: 5213588 - DNA, 25 bp, Homo sapien
catgtatgattccagttttctctct

SEQ ID NO: 5213589 - DNA, 25 bp, Homo sapien
tgtatcttctgtttaacttggaaac

SEQ ID NO: 5213590 - DNA, 25 bp, Homo sapien
gaatctcccatatgtatcttctgtt

SEQ ID NO: 5213591 - DNA, 25 bp, Homo sapien
ctctttgtctatgaatctcccatat

SEQ ID NO: 5213592 - DNA, 25 bp, Homo sapien
tctgtttaacttggaaacaaagcac

SEQ ID NO: 5213593 - DNA, 25 bp, Homo sapien
tagtgggctgcaggccttagatgac

SEQ ID NO: 5213594 - DNA, 25 bp, Homo sapien
ttttggagaatacttgtccaaaggc

SEQ ID NO: 5213595 - DNA, 25 bp, Homo sapien
aaccttaaaatctgtgtgctcaacc

SEQ ID NO: 5213596 - DNA, 25 bp, Homo sapien
gatgactcatacttgcttttggaga

SEQ ID NO: 5213597 - DNA, 25 bp, Homo sapien
taccttgctgagtgaatgtccaggg

SEQ ID NO: 5213598 - DNA, 25 bp, Homo sapien
tgtatcacttatggcctctcctaga

SEQ ID NO: 5213599 - DNA, 25 bp, Homo sapien
gggcactagtttgggctgtatcact

SEQ ID NO: 5213600 - DNA, 25 bp, Homo sapien
agatgactgagtataccttgctgag

SEQ ID NO: 5213601 - DNA, 25 bp, Homo sapien
tatcattggcagcaatttggttttt

SEQ ID NO: 5213602 - DNA, 25 bp, Homo sapien
gtttgaaactttatcattggcagca

SEQ ID NO: 5213603 - DNA, 25 bp, Homo sapien
cattggcagcaatttggtttttgta

SEQ ID NO: 5213604 - DNA, 25 bp, Homo sapien
aactttatcattggcagcaatttgg

SEQ ID NO: 5213605 - DNA, 25 bp, Homo sapien
ggtataatccactttgtaacataat

SEQ ID NO: 5213606 - DNA, 25 bp, Homo sapien
cttacaggtataatccactttgtaa

SEQ ID NO: 5213607 - DNA, 25 bp, Homo sapien
caggtataatccactttgtaacata

SEQ ID NO: 5213608 - DNA, 25 bp, Homo sapien
taatccactttgtaacataattggc

SEQ ID NO: 5213609 - DNA, 25 bp, Homo sapien
aaggaacgggctgtgacagcgaaac

SEQ ID NO: 5213610 - DNA, 25 bp, Homo sapien
gaaacgggagcggagacagaacacc

SEQ ID NO: 5213611 - DNA, 25 bp, Homo sapien
gcgtcccaaacagcgactgatgaac

SEQ ID NO: 5213612 - DNA, 25 bp, Homo sapien
aaacagcgactgatgaacacgcccg

SEQ ID NO: 5213613 - DNA, 25 bp, Homo sapien
cacttctgccctgagtcccgctcac

SEQ ID NO: 5213614 - DNA, 25 bp, Homo sapien
aacgcagtgaggggacacttctgcc

SEQ ID NO: 5213615 - DNA, 25 bp, Homo sapien
acttctgccctgagtcccgctcact

SEQ ID NO: 5213616 - DNA, 25 bp, Homo sapien
acacttctgccctgagtcccgctca

SEQ ID NO: 5213617 - DNA, 25 bp, Homo sapien
gacaggaaggcaagcgtactaactg

SEQ ID NO: 5213618 - DNA, 25 bp, Homo sapien
aggaaggcaagcgtactaactgccc

SEQ ID NO: 5213619 - DNA, 25 bp, Homo sapien
aggcaagcgtactaactgccccgtt

SEQ ID NO: 5213620 - DNA, 25 bp, Homo sapien
tcccaaccgggcgacaggaaggcaa

SEQ ID NO: 5213621 - DNA, 25 bp, Homo sapien
gcagggcggggtcaaagcttcccac

SEQ ID NO: 5213622 - DNA, 25 bp, Homo sapien
ttagtcagggaccgggcaaaccagc

SEQ ID NO: 5213623 - DNA, 25 bp, Homo sapien
aaaccagcccggacagcactgagcc

SEQ ID NO: 5213624 - DNA, 25 bp, Homo sapien
tgcggagacgcgagtgggcagggcg

SEQ ID NO: 5213625 - DNA, 25 bp, Homo sapien
ctatctccaggacaataaagacgac

SEQ ID NO: 5213626 - DNA, 25 bp, Homo sapien
taagtgggtcgttgaccctattcat

SEQ ID NO: 5213627 - DNA, 25 bp, Homo sapien
ttcagtccgggcttaatatctctta

SEQ ID NO: 5213628 - DNA, 25 bp, Homo sapien
caggacaataaagacgacatttaag

SEQ ID NO: 5213629 - DNA, 25 bp, Homo sapien
gatctcatcccacacggaaatagtg

SEQ ID NO: 5213630 - DNA, 25 bp, Homo sapien
tgatgctgcccgttttatctgctac

SEQ ID NO: 5213631 - DNA, 25 bp, Homo sapien
tcccctggctgtataagacctccga

SEQ ID NO: 5213632 - DNA, 25 bp, Homo sapien
tggtcaaccgaataatatcccctgg

SEQ ID NO: 5213633 - DNA, 25 bp, Homo sapien
tgctttgatgacactttacctcact

SEQ ID NO: 5213634 - DNA, 25 bp, Homo sapien
gctttgatgacactttacctcactt

SEQ ID NO: 5213635 - DNA, 25 bp, Homo sapien
tttgatgacactttacctcacttcc

SEQ ID NO: 5213636 - DNA, 25 bp, Homo sapien
ctttgatgacactttacctcacttc

SEQ ID NO: 5213637 - DNA, 25 bp, Homo sapien
aagtgtcagacatcctttccacatg

SEQ ID NO: 5213638 - DNA, 25 bp, Homo sapien
gacatcctttccacatggatgcata

SEQ ID NO: 5213639 - DNA, 25 bp, Homo sapien
ttgaagttcaccaccccttccagta

SEQ ID NO: 5213640 - DNA, 25 bp, Homo sapien
cccttccagtataaagtgtcagaca

SEQ ID NO: 5213641 - DNA, 25 bp, Homo sapien
gccaaagaggtttacaattcatacc

SEQ ID NO: 5213642 - DNA, 25 bp, Homo sapien
tctttgccaggaaaaattgacactt

SEQ ID NO: 5213643 - DNA, 25 bp, Homo sapien
tcaaatggctcttgtgacacctaaa

SEQ ID NO: 5213644 - DNA, 25 bp, Homo sapien
ctacagaaatgcttccactagggct

SEQ ID NO: 5213645 - DNA, 25 bp, Homo sapien
gaatctcgcattgcggctgcctgca

SEQ ID NO: 5213646 - DNA, 25 bp, Homo sapien
aggtcagggtggagatcattaccag

SEQ ID NO: 5213647 - DNA, 25 bp, Homo sapien
cattaccagggtagtagtgtatgga

SEQ ID NO: 5213648 - DNA, 25 bp, Homo sapien
agtgtatggaatctcgcattgcggc

SEQ ID NO: 5213649 - DNA, 25 bp, Homo sapien
tgaatacaacccaatgtctaggcta

SEQ ID NO: 5213650 - DNA, 25 bp, Homo sapien
acccaatgtctaggctaacatggag

SEQ ID NO: 5213651 - DNA, 25 bp, Homo sapien
caacccaatgtctaggctaacatgg

SEQ ID NO: 5213652 - DNA, 25 bp, Homo sapien
aatacaacccaatgtctaggctaac

SEQ ID NO: 5213653 - DNA, 25 bp, Homo sapien
cagtaacagacactaagacctttca

SEQ ID NO: 5213654 - DNA, 25 bp, Homo sapien
tatgaatacatgaaggtcaggacag

SEQ ID NO: 5213655 - DNA, 25 bp, Homo sapien
ggcaaagcgttaagtgtttctgatc

SEQ ID NO: 5213656 - DNA, 25 bp, Homo sapien
taagcatcttattccctcagtggca

SEQ ID NO: 5213657 - DNA, 25 bp, Homo sapien
tttttcacgtaactgacctccatta

SEQ ID NO: 5213658 - DNA, 25 bp, Homo sapien
cattaagaaatgagtgacctctaac

SEQ ID NO: 5213659 - DNA, 25 bp, Homo sapien
cctgacaaagagcagtcattaagaa

SEQ ID NO: 5213660 - DNA, 25 bp, Homo sapien
tgagtgacctctaacggtttttcac

SEQ ID NO: 5213661 - DNA, 25 bp, Homo sapien
catgagagtgaaccatgtttagggt

SEQ ID NO: 5213662 - DNA, 25 bp, Homo sapien
ccagcagtggtaatggatttgcacc

SEQ ID NO: 5213663 - DNA, 25 bp, Homo sapien
ccctcttttgatcgatcactgtgga

SEQ ID NO: 5213664 - DNA, 25 bp, Homo sapien
tctgaaataaagtcctcaacccttc

SEQ ID NO: 5213665 - DNA, 25 bp, Homo sapien
cgataatctgggttgggttcactga

SEQ ID NO: 5213666 - DNA, 25 bp, Homo sapien
tgttctgctgtcctcgataatctgg

SEQ ID NO: 5213667 - DNA, 25 bp, Homo sapien
ggcacttctgaataaaccatacaaa

SEQ ID NO: 5213668 - DNA, 25 bp, Homo sapien
ggttcactgaaatttggcacttctg

SEQ ID NO: 5213669 - DNA, 25 bp, Homo sapien
tatactaagtatcaacagggctagc

SEQ ID NO: 5213670 - DNA, 25 bp, Homo sapien
cagggctagcctaatcatagaatta

SEQ ID NO: 5213671 - DNA, 25 bp, Homo sapien
tatatctagtagatgacacctcaga

SEQ ID NO: 5213672 - DNA, 25 bp, Homo sapien
taattactcagcacaccacaaagtg

SEQ ID NO: 5213673 - DNA, 25 bp, Homo sapien
ctgtacccatattactattcatgga

SEQ ID NO: 5213674 - DNA, 25 bp, Homo sapien
ttactattcatggaattattcttct

SEQ ID NO: 5213675 - DNA, 25 bp, Homo sapien
gtacccatattactattcatggaat

SEQ ID NO: 5213676 - DNA, 25 bp, Homo sapien
aattattcttctgttcactctgtgc

SEQ ID NO: 5213677 - DNA, 25 bp, Homo sapien
cagagctacaaggatcatgaacatg

SEQ ID NO: 5213678 - DNA, 25 bp, Homo sapien
gagccatcctaatgaactctaatca

SEQ ID NO: 5213679 - DNA, 25 bp, Homo sapien
tcagaagacctttaacagagctaca

SEQ ID NO: 5213680 - DNA, 25 bp, Homo sapien
tgagggtcactagcctttaaacggc

SEQ ID NO: 5213681 - DNA, 25 bp, Homo sapien
taaaaaagaatacaaaaattcatca

SEQ ID NO: 5213682 - DNA, 25 bp, Homo sapien
tcatcttttaaaggctctccgaggg

SEQ ID NO: 5213683 - DNA, 25 bp, Homo sapien
gattcagggccagtgtgaacaccat

SEQ ID NO: 5213684 - DNA, 25 bp, Homo sapien
gagggtccctgccattacttattgt

SEQ ID NO: 5213685 - DNA, 25 bp, Homo sapien
tggatttataagtccccggccattg

SEQ ID NO: 5213686 - DNA, 25 bp, Homo sapien
gaagtcaatcattccgagagccaca

SEQ ID NO: 5213687 - DNA, 25 bp, Homo sapien
gtaactaggacttcagactgcatgt

SEQ ID NO: 5213688 - DNA, 25 bp, Homo sapien
cattcttcaacaggagactcgagca

SEQ ID NO: 5213689 - DNA, 25 bp, Homo sapien
tagtagtcactgaacgaagtcaatc

SEQ ID NO: 5213690 - DNA, 25 bp, Homo sapien
tgcagagctaagtaaccatgaggtt

SEQ ID NO: 5213691 - DNA, 25 bp, Homo sapien
gggcaaacaatctggcacaactttt

SEQ ID NO: 5213692 - DNA, 25 bp, Homo sapien
gaggttgataccatcactacaacag

SEQ ID NO: 5213693 - DNA, 25 bp, Homo sapien
cagtagttaagatgtactggctctc

SEQ ID NO: 5213694 - DNA, 25 bp, Homo sapien
tggcctgctaggaacaggaacgccc

SEQ ID NO: 5213695 - DNA, 25 bp, Homo sapien
catacttgtggaacctaaggcttaa

SEQ ID NO: 5213696 - DNA, 25 bp, Homo sapien
taataactcatccaacatcacaggt

SEQ ID NO: 5213697 - DNA, 25 bp, Homo sapien
tagatcagtatcaattctggcctgc

SEQ ID NO: 5213698 - DNA, 25 bp, Homo sapien
tgagaatacaaaacttggcaacctt

SEQ ID NO: 5213699 - DNA, 25 bp, Homo sapien
atgagaatacaaaacttggcaacct

SEQ ID NO: 5213700 - DNA, 25 bp, Homo sapien
cccaaccctacatgctgtcacggta

SEQ ID NO: 5213701 - DNA, 25 bp, Homo sapien
agaggtgaatggaaaaacaccagtg

SEQ ID NO: 5213702 - DNA, 25 bp, Homo sapien
tctttgtaatgaagacccaacccta

SEQ ID NO: 5213703 - DNA, 25 bp, Homo sapien
gaggtgaatggaaaaacaccagtgt

SEQ ID NO: 5213704 - DNA, 25 bp, Homo sapien
cccacaagttctctgtactttcatc

SEQ ID NO: 5213705 - DNA, 25 bp, Homo sapien
cctttctgacacaaacctggaccca

SEQ ID NO: 5213706 - DNA, 25 bp, Homo sapien
aacctggacccacaagttctctgta

SEQ ID NO: 5213707 - DNA, 25 bp, Homo sapien
ttctctgtactttcatcatcttgtc

SEQ ID NO: 5213708 - DNA, 25 bp, Homo sapien
taaattactccgcaactctgggtgc

SEQ ID NO: 5213709 - DNA, 25 bp, Homo sapien
tcttgatagaggttgcgataaagcc

SEQ ID NO: 5213710 - DNA, 25 bp, Homo sapien
tgtcaccgggaacagagaattcctt

SEQ ID NO: 5213711 - DNA, 25 bp, Homo sapien
tagggaaaattgtacgatgtctgca

SEQ ID NO: 5213712 - DNA, 25 bp, Homo sapien
ctgaatgccaaccttggagtacaaa

SEQ ID NO: 5213713 - DNA, 25 bp, Homo sapien
ctatgcggattctgaatgccaacct

SEQ ID NO: 5213714 - DNA, 25 bp, Homo sapien
actctctggctatgcggattctgaa

SEQ ID NO: 5213715 - DNA, 25 bp, Homo sapien
gaatgccaaccttggagtacaaaat

SEQ ID NO: 5213716 - DNA, 25 bp, Homo sapien
tacccaagagtccataatttccctg

SEQ ID NO: 5213717 - DNA, 25 bp, Homo sapien
gttagggagagtatccagttatccc

SEQ ID NO: 5213718 - DNA, 25 bp, Homo sapien
tctatgaagcaccatccactgtcag

SEQ ID NO: 5213719 - DNA, 25 bp, Homo sapien
gtcagcagcagcctcaatgtttcac

SEQ ID NO: 5213720 - DNA, 25 bp, Homo sapien
gagagacattcctaaacgtgggcga

SEQ ID NO: 5213721 - DNA, 25 bp, Homo sapien
catggaatgggtataccaccgtcta

SEQ ID NO: 5213722 - DNA, 25 bp, Homo sapien
tatgatccccgctgttggagacggg

SEQ ID NO: 5213723 - DNA, 25 bp, Homo sapien
gaagaggactaaccaaagacgtgca

SEQ ID NO: 5213724 - DNA, 25 bp, Homo sapien
agtgcctaacggcaccatttctcag

SEQ ID NO: 5213725 - DNA, 25 bp, Homo sapien
tccattcctggtaagtgcccttgca

SEQ ID NO: 5213726 - DNA, 25 bp, Homo sapien
gcaatagactacatcatatagccta

SEQ ID NO: 5213727 - DNA, 25 bp, Homo sapien
tttagtgtagcccaaatgttcataa

SEQ ID NO: 5213728 - DNA, 25 bp, Homo sapien
caatgaaccacgtatgcaccagtgg

SEQ ID NO: 5213729 - DNA, 25 bp, Homo sapien
taatctgcattctaagggtgctcat

SEQ ID NO: 5213730 - DNA, 25 bp, Homo sapien
cataaggttgtaatggagctggaca

SEQ ID NO: 5213731 - DNA, 25 bp, Homo sapien
ctttggatatatagttacgcacctc

SEQ ID NO: 5213732 - DNA, 25 bp, Homo sapien
caagtccttcttaagggatctgccc

SEQ ID NO: 5213733 - DNA, 25 bp, Homo sapien
tgtagagatcatatgtcaagaggga

SEQ ID NO: 5213734 - DNA, 25 bp, Homo sapien
gaggtgccagatgctcacagaaacc

SEQ ID NO: 5213735 - DNA, 25 bp, Homo sapien
catttccacaaggacggcaccaagt

SEQ ID NO: 5213736 - DNA, 25 bp, Homo sapien
gcattttgcagccgccacctttctg

SEQ ID NO: 5213737 - DNA, 25 bp, Homo sapien
gaaagccagtcctaaaactgtctct

SEQ ID NO: 5213738 - DNA, 25 bp, Homo sapien
cacctttctgcctccagcgctgctg

SEQ ID NO: 5213739 - DNA, 25 bp, Homo sapien
catctgcaccgctgtctcgctgggt

SEQ ID NO: 5213740 - DNA, 25 bp, Homo sapien
gaaattgggattagccctgtcccca

SEQ ID NO: 5213741 - DNA, 25 bp, Homo sapien
cccttggtgcaaggaaggaccagac

SEQ ID NO: 5213742 - DNA, 25 bp, Homo sapien
gccagtagacatgacctgccaggat

SEQ ID NO: 5213743 - DNA, 25 bp, Homo sapien
gtatacctggacacaaatgtaggca

SEQ ID NO: 5213744 - DNA, 25 bp, Homo sapien
tgcttattcctcacacagggtgtgt

SEQ ID NO: 5213745 - DNA, 25 bp, Homo sapien
gacagttgacttggtagaaaccctg

SEQ ID NO: 5213746 - DNA, 25 bp, Homo sapien
gatcttcatccaatgacagacaggc

SEQ ID NO: 5213747 - DNA, 25 bp, Homo sapien
ccatggttggttatcaggtaatcta

SEQ ID NO: 5213748 - DNA, 25 bp, Homo sapien
acccagtcagcaatagcctccaaat

SEQ ID NO: 5213749 - DNA, 25 bp, Homo sapien
gcctccaaattaccaagcttgtcta

SEQ ID NO: 5213750 - DNA, 25 bp, Homo sapien
ttaccaagcttgtctattgattctc

SEQ ID NO: 5213751 - DNA, 25 bp, Homo sapien
tgtctattgattctcttggtgtctc

SEQ ID NO: 5213752 - DNA, 25 bp, Homo sapien
gctttactgtgtacctttgtaagca

SEQ ID NO: 5213753 - DNA, 25 bp, Homo sapien
actgtgtacctttgtaagcatcacc

SEQ ID NO: 5213754 - DNA, 25 bp, Homo sapien
ctctctgctttactgtgtacctttg

SEQ ID NO: 5213755 - DNA, 25 bp, Homo sapien
tctgctttactgtgtacctttgtaa

SEQ ID NO: 5213756 - DNA, 25 bp, Homo sapien
ttgtcctcatttcgcatattctgct

SEQ ID NO: 5213757 - DNA, 25 bp, Homo sapien
gatatctttaatatacttgtcctca

SEQ ID NO: 5213758 - DNA, 25 bp, Homo sapien
tttcgcatattctgctgcttattgc

SEQ ID NO: 5213759 - DNA, 25 bp, Homo sapien
aatatacttgtcctcatttcgcata

SEQ ID NO: 5213760 - DNA, 25 bp, Homo sapien
taaaactcacttcactggattgtca

SEQ ID NO: 5213761 - DNA, 25 bp, Homo sapien
taagtattgatagtgcagctgggtg

SEQ ID NO: 5213762 - DNA, 25 bp, Homo sapien
tatcagagtctcaaaacaggaggtg

SEQ ID NO: 5213763 - DNA, 25 bp, Homo sapien
tcagagtcaacagcctaaattcaaa

SEQ ID NO: 5213764 - DNA, 25 bp, Homo sapien
ctgactagcactccaaccacgttcc

SEQ ID NO: 5213765 - DNA, 25 bp, Homo sapien
tgactagcactccaaccacgttcca

SEQ ID NO: 5213766 - DNA, 25 bp, Homo sapien
gcccctggaaattaatgcagcacca

SEQ ID NO: 5213767 - DNA, 25 bp, Homo sapien
tcagtaaggaaatcggcccctggaa

SEQ ID NO: 5213768 - DNA, 25 bp, Homo sapien
gaaagcgagctcgagtctcaaacga

SEQ ID NO: 5213769 - DNA, 25 bp, Homo sapien
tatttcgtgtaccaattcgccccag

SEQ ID NO: 5213770 - DNA, 25 bp, Homo sapien
tcttgaaccatggagagttggtaca

SEQ ID NO: 5213771 - DNA, 25 bp, Homo sapien
tatgtaggattgtgatcacccttgc

SEQ ID NO: 5213772 - DNA, 25 bp, Homo sapien
cccttgctgtcttgaaccatggaga

SEQ ID NO: 5213773 - DNA, 25 bp, Homo sapien
gagagttggtacataatgaattctg

SEQ ID NO: 5213774 - DNA, 25 bp, Homo sapien
tgatataccatagccttagtcaggg

SEQ ID NO: 5213775 - DNA, 25 bp, Homo sapien
tgtatgctgcatgacaaccagcaga

SEQ ID NO: 5213776 - DNA, 25 bp, Homo sapien
cagctgggagtatgtgagactcacc

SEQ ID NO: 5213777 - DNA, 25 bp, Homo sapien
ccaatgcccttctggatgtatgctg

SEQ ID NO: 5213778 - DNA, 25 bp, Homo sapien
cttccttcaattgccaaatgagcca

SEQ ID NO: 5213779 - DNA, 25 bp, Homo sapien
ttccttcaattgccaaatgagccat

SEQ ID NO: 5213780 - DNA, 25 bp, Homo sapien
tgtatttgcactggcgaaattccca

SEQ ID NO: 5213781 - DNA, 25 bp, Homo sapien
gagaacagagttccggtttcatgta

SEQ ID NO: 5213782 - DNA, 25 bp, Homo sapien
actgacaattggagaacagagttcc

SEQ ID NO: 5213783 - DNA, 25 bp, Homo sapien
aaattcccattcagtagcccaagcc

SEQ ID NO: 5213784 - DNA, 25 bp, Homo sapien
gacaatctgtaattgcctgcagcct

SEQ ID NO: 5213785 - DNA, 25 bp, Homo sapien
ctaaagcgatacagcaacagtgctg

SEQ ID NO: 5213786 - DNA, 25 bp, Homo sapien
ggtcctctaatcaggctcgtgccct

SEQ ID NO: 5213787 - DNA, 25 bp, Homo sapien
ttcttgaggacctgtgataacacag

SEQ ID NO: 5213788 - DNA, 25 bp, Homo sapien
tgcagcctgtctatgatcatcgaca

SEQ ID NO: 5213789 - DNA, 25 bp, Homo sapien
caacttgcacttgtgactagagtca

SEQ ID NO: 5213790 - DNA, 25 bp, Homo sapien
aaagagatgctcctatgtaccacac

SEQ ID NO: 5213791 - DNA, 25 bp, Homo sapien
gcttcctttcagaccagtgctttaa

SEQ ID NO: 5213792 - DNA, 25 bp, Homo sapien
tctcttgcctgttctctggataaag

SEQ ID NO: 5213793 - DNA, 25 bp, Homo sapien
tgcctttcttccaggtcgaggctag

SEQ ID NO: 5213794 - DNA, 25 bp, Homo sapien
cttgcctgttctctggataaaggtc

SEQ ID NO: 5213795 - DNA, 25 bp, Homo sapien
ggtcgaggctagatgcctgtgattc

SEQ ID NO: 5213796 - DNA, 25 bp, Homo sapien
tgaggccccagttgtttgcccttct

SEQ ID NO: 5213797 - DNA, 25 bp, Homo sapien
ctgaggccccagttgtttgcccttc

SEQ ID NO: 5213798 - DNA, 25 bp, Homo sapien
tctgaggccccagttgtttgccctt

SEQ ID NO: 5213799 - DNA, 25 bp, Homo sapien
ttttggattgtaacacactagacaa

SEQ ID NO: 5213800 - DNA, 25 bp, Homo sapien
cttgtttttggattgtaacacacta

SEQ ID NO: 5213801 - DNA, 25 bp, Homo sapien
tgtttttggattgtaacacactaga

SEQ ID NO: 5213802 - DNA, 25 bp, Homo sapien
gtttttggattgtaacacactagac

SEQ ID NO: 5213803 - DNA, 25 bp, Homo sapien
gatgttcacgcagatcattccagat

SEQ ID NO: 5213804 - DNA, 25 bp, Homo sapien
tgagtctacaggatgttcacgcaga

SEQ ID NO: 5213805 - DNA, 25 bp, Homo sapien
acgcagatcattccagatctctgga

SEQ ID NO: 5213806 - DNA, 25 bp, Homo sapien
tacaggatgttcacgcagatcattc

SEQ ID NO: 5213807 - DNA, 25 bp, Homo sapien
tggtttgcaaacattttgttctaat

SEQ ID NO: 5213808 - DNA, 25 bp, Homo sapien
actacaattcactctagtgggccca

SEQ ID NO: 5213809 - DNA, 25 bp, Homo sapien
tacaattcactctagtgggcccaca

SEQ ID NO: 5213810 - DNA, 25 bp, Homo sapien
cactacaattcactctagtgggccc

SEQ ID NO: 5213811 - DNA, 25 bp, Homo sapien
aacactacaattcactctagtgggc

SEQ ID NO: 5213812 - DNA, 25 bp, Homo sapien
ttagaccctctcttcctagcattgc

SEQ ID NO: 5213813 - DNA, 25 bp, Homo sapien
cccatgtgcctttaaggaatcattc

SEQ ID NO: 5213814 - DNA, 25 bp, Homo sapien
tttcctgtgcacctataatatcggc

SEQ ID NO: 5213815 - DNA, 25 bp, Homo sapien
aaattggaaagctgcataactgaca

SEQ ID NO: 5213816 - DNA, 25 bp, Homo sapien
tgtagcagagctcacatccactctc

SEQ ID NO: 5213817 - DNA, 25 bp, Homo sapien
tctgttgttgaaactcttcttgtga

SEQ ID NO: 5213818 - DNA, 25 bp, Homo sapien
tgggactgctggagagcctacttac

SEQ ID NO: 5213819 - DNA, 25 bp, Homo sapien
gagcctacttacatcacggtgaaaa

SEQ ID NO: 5213820 - DNA, 25 bp, Homo sapien
cttcttgtgaaagtcttctgggact

SEQ ID NO: 5213821 - DNA, 25 bp, Homo sapien
tgctgttagtttgtgatgctcccca

SEQ ID NO: 5213822 - DNA, 25 bp, Homo sapien
tttgcatttgacgagtggtgttcca

SEQ ID NO: 5213823 - DNA, 25 bp, Homo sapien
ctccccgaccttgtgctagaactgg

SEQ ID NO: 5213824 - DNA, 25 bp, Homo sapien
accctgtaaaaaatgtccacctctg

SEQ ID NO: 5213825 - DNA, 25 bp, Homo sapien
gctttcctcctatcaaagagggata

SEQ ID NO: 5213826 - DNA, 25 bp, Homo sapien
tgaccttctaatggatgcatcccag

SEQ ID NO: 5213827 - DNA, 25 bp, Homo sapien
agtacctaactttgagagacgcctc

SEQ ID NO: 5213828 - DNA, 25 bp, Homo sapien
gatctaaccctttaaagtgggatga

SEQ ID NO: 5213829 - DNA, 25 bp, Homo sapien
gcctgaagaaagtggatagcctcaa

SEQ ID NO: 5213830 - DNA, 25 bp, Homo sapien
ggacctctcctcagatgatgatttg

SEQ ID NO: 5213831 - DNA, 25 bp, Homo sapien
gaaatctctcacgtcaaatcaccag

SEQ ID NO: 5213832 - DNA, 25 bp, Homo sapien
gatgatttgccccacgatgaggagg

SEQ ID NO: 5213833 - DNA, 25 bp, Homo sapien
ggaaaatgagatccctgccagcgtg

SEQ ID NO: 5213834 - DNA, 25 bp, Homo sapien
gacacacgtattacagcagctcagg

SEQ ID NO: 5213835 - DNA, 25 bp, Homo sapien
tacattgtccgtcttttcaggagga

SEQ ID NO: 5213836 - DNA, 25 bp, Homo sapien
tgggattttggcaggcccaagccct

SEQ ID NO: 5213837 - DNA, 25 bp, Homo sapien
gacagatcagtttggagggctccgt

SEQ ID NO: 5213838 - DNA, 25 bp, Homo sapien
gctcctggacaagctggtgaacatg

SEQ ID NO: 5213839 - DNA, 25 bp, Homo sapien
tccgtgaagggcatccagaatgacc

SEQ ID NO: 5213840 - DNA, 25 bp, Homo sapien
tgaacatgctagacgctgtgcagga

SEQ ID NO: 5213841 - DNA, 25 bp, Homo sapien
tagctaagcttgaacagacactgtg

SEQ ID NO: 5213842 - DNA, 25 bp, Homo sapien
tcttcctacctgaacaatagctaag

SEQ ID NO: 5213843 - DNA, 25 bp, Homo sapien
ggcttctccttaattcttgcctgga

SEQ ID NO: 5213844 - DNA, 25 bp, Homo sapien
taaacttttgtcatctcggcttctc

SEQ ID NO: 5213845 - DNA, 25 bp, Homo sapien
tacatctaaacactgcacttcctgc

SEQ ID NO: 5213846 - DNA, 25 bp, Homo sapien
agagcgccacccgttggtcatagtc

SEQ ID NO: 5213847 - DNA, 25 bp, Homo sapien
ggtcatagtcagagtcctcatctcc

SEQ ID NO: 5213848 - DNA, 25 bp, Homo sapien
aacacctttacgagctgcctgcagc

SEQ ID NO: 5213849 - DNA, 25 bp, Homo sapien
ggaaggaagttatgacccatgctac

SEQ ID NO: 5213850 - DNA, 25 bp, Homo sapien
tatgcagagggaaataagccagtta

SEQ ID NO: 5213851 - DNA, 25 bp, Homo sapien
cttgagggcattatgcagagggaaa

SEQ ID NO: 5213852 - DNA, 25 bp, Homo sapien
aaggaaggaagttatgacccatgct

SEQ ID NO: 5213853 - DNA, 25 bp, Homo sapien
cactaccacgaagacaatatgggga

SEQ ID NO: 5213854 - DNA, 25 bp, Homo sapien
gggaaaactgcgaccgtgattcaat

SEQ ID NO: 5213855 - DNA, 25 bp, Homo sapien
tgatgaaaaagatgtacctgagact

SEQ ID NO: 5213856 - DNA, 25 bp, Homo sapien
ttctaaaacctattatgccttccca

SEQ ID NO: 5213857 - DNA, 25 bp, Homo sapien
gcaggagtatggatttcagcctcca

SEQ ID NO: 5213858 - DNA, 25 bp, Homo sapien
caaactcacctaatgtggcacggac

SEQ ID NO: 5213859 - DNA, 25 bp, Homo sapien
catggaatagaaatgggcacttgct

SEQ ID NO: 5213860 - DNA, 25 bp, Homo sapien
ggcacttgctctaggataactcagg

SEQ ID NO: 5213861 - DNA, 25 bp, Homo sapien
tcatgtggaaagtatacctcgcttc

SEQ ID NO: 5213862 - DNA, 25 bp, Homo sapien
tggtgtcctggtcattaagctgccg

SEQ ID NO: 5213863 - DNA, 25 bp, Homo sapien
tatcgggcatgacaatcaccactgg

SEQ ID NO: 5213864 - DNA, 25 bp, Homo sapien
taagctgccgtctactctcaacaag

SEQ ID NO: 5213865 - DNA, 25 bp, Homo sapien
aaggaccattagagacagaacacaa

SEQ ID NO: 5213866 - DNA, 25 bp, Homo sapien
ccacttgctgagagttaataggctc

SEQ ID NO: 5213867 - DNA, 25 bp, Homo sapien
tctggactgagtggtgaagtttgaa

SEQ ID NO: 5213868 - DNA, 25 bp, Homo sapien
tctgccatcgaaagccaggcagggc

SEQ ID NO: 5213869 - DNA, 25 bp, Homo sapien
gagctaagatagacctgggaccaga

SEQ ID NO: 5213870 - DNA, 25 bp, Homo sapien
tggcactttacagagaggagctaag

SEQ ID NO: 5213871 - DNA, 25 bp, Homo sapien
tagaccacagcggagactggcactt

SEQ ID NO: 5213872 - DNA, 25 bp, Homo sapien
gaaagcctagcatcagatagccaaa

SEQ ID NO: 5213873 - DNA, 25 bp, Homo sapien
cacacagggtgttcttgttgtcaat

SEQ ID NO: 5213874 - DNA, 25 bp, Homo sapien
gatatagatatcaccagtggcccaa

SEQ ID NO: 5213875 - DNA, 25 bp, Homo sapien
tctttcccacggactagctgagctg

SEQ ID NO: 5213876 - DNA, 25 bp, Homo sapien
cataaacattggtataatctgcacc

SEQ ID NO: 5213877 - DNA, 25 bp, Homo sapien
gatctggaattatccagatgactga

SEQ ID NO: 5213878 - DNA, 25 bp, Homo sapien
actctaagacaattatttaccactg

SEQ ID NO: 5213879 - DNA, 25 bp, Homo sapien
tctccgtactttctgggtattagtc

SEQ ID NO: 5213880 - DNA, 25 bp, Homo sapien
tgggcatgagtatgtaataattctc

SEQ ID NO: 5213881 - DNA, 25 bp, Homo sapien
caggagagaaatttacagatgttcc

SEQ ID NO: 5213882 - DNA, 25 bp, Homo sapien
cagtgatctgtaagtttggaagagc

SEQ ID NO: 5213883 - DNA, 25 bp, Homo sapien
caatgtatagccattcccaaagcgt

SEQ ID NO: 5213884 - DNA, 25 bp, Homo sapien
gaagagctcatacagacaaatgggt

SEQ ID NO: 5213885 - DNA, 25 bp, Homo sapien
caaagaagcatcgtgtcagaaacag

SEQ ID NO: 5213886 - DNA, 25 bp, Homo sapien
gggctctcagcaaccgtccagatct

SEQ ID NO: 5213887 - DNA, 25 bp, Homo sapien
tgaagaaaactccttattaggcagc

SEQ ID NO: 5213888 - DNA, 25 bp, Homo sapien
tcatgtctttgggtcgatgtcaagg

SEQ ID NO: 5213889 - DNA, 25 bp, Homo sapien
tcagtttgaagttcttctccacagc

SEQ ID NO: 5213890 - DNA, 25 bp, Homo sapien
cttctccacagcccaatgttaccat

SEQ ID NO: 5213891 - DNA, 25 bp, Homo sapien
tccatctgcccctgctccttttcag

SEQ ID NO: 5213892 - DNA, 25 bp, Homo sapien
atctgcccctgctccttttcagttt

SEQ ID NO: 5213893 - DNA, 25 bp, Homo sapien
ttgtatctcccccttgtggatcagg

SEQ ID NO: 5213894 - DNA, 25 bp, Homo sapien
gctgtgctgtatctgtgccctgcat

SEQ ID NO: 5213895 - DNA, 25 bp, Homo sapien
tgtggatcaggccccctcgagctag

SEQ ID NO: 5213896 - DNA, 25 bp, Homo sapien
ctcgagctagcacccatcccatatc

SEQ ID NO: 5213897 - DNA, 25 bp, Homo sapien
tgatgtggccgagcgtcagaaaatc

SEQ ID NO: 5213898 - DNA, 25 bp, Homo sapien
gatggaaaatgcctcagactggctg

SEQ ID NO: 5213899 - DNA, 25 bp, Homo sapien
tcctcacaactagtatgacaggttg

SEQ ID NO: 5213900 - DNA, 25 bp, Homo sapien
tcagaaaatcgagagaacagttagc

SEQ ID NO: 5213901 - DNA, 25 bp, Homo sapien
tggatatgcaatctccttaactgga

SEQ ID NO: 5213902 - DNA, 25 bp, Homo sapien
gtacttctggaaatatggatatgca

SEQ ID NO: 5213903 - DNA, 25 bp, Homo sapien
taactggaatgtaacctcttgaaga

SEQ ID NO: 5213904 - DNA, 25 bp, Homo sapien
tccagcagaatatccagttggtcag

SEQ ID NO: 5213905 - DNA, 25 bp, Homo sapien
gacattttagtcaaatagcgagagc

SEQ ID NO: 5213906 - DNA, 25 bp, Homo sapien
gcgagagccagctatgcaaagatct

SEQ ID NO: 5213907 - DNA, 25 bp, Homo sapien
caaagatctgttgaaacagtattct

SEQ ID NO: 5213908 - DNA, 25 bp, Homo sapien
gaaaacctctggtccaaaggcgcaa

SEQ ID NO: 5213909 - DNA, 25 bp, Homo sapien
gataaggtccttgcctttaaacagc

SEQ ID NO: 5213910 - DNA, 25 bp, Homo sapien
agataaggtccttgcctttaaacag

SEQ ID NO: 5213911 - DNA, 25 bp, Homo sapien
tcatcaagtatttataattgcagaa

SEQ ID NO: 5213912 - DNA, 25 bp, Homo sapien
tataattgcagaatgccagaaaagg

SEQ ID NO: 5213913 - DNA, 25 bp, Homo sapien
ttgcagaatgccagaaaaggacatt

SEQ ID NO: 5213914 - DNA, 25 bp, Homo sapien
ttccagtaagtcccaatagacttac

SEQ ID NO: 5213915 - DNA, 25 bp, Homo sapien
ctccagcatgattcattaaaatgaa

SEQ ID NO: 5213916 - DNA, 25 bp, Homo sapien
tctccagcatgattcattaaaatga

SEQ ID NO: 5213917 - DNA, 25 bp, Homo sapien
tcttcaagtccaatttcaagatcaa

SEQ ID NO: 5213918 - DNA, 25 bp, Homo sapien
cttcaagtccaatttcaagatcaaa

SEQ ID NO: 5213919 - DNA, 25 bp, Homo sapien
tcagttcctgagacaacttctgtaa

SEQ ID NO: 5213920 - DNA, 25 bp, Homo sapien
taaaccggcaagtatctcttcactg

SEQ ID NO: 5213921 - DNA, 25 bp, Homo sapien
taggtgtgctgaatacactctcagt

SEQ ID NO: 5213922 - DNA, 25 bp, Homo sapien
tacacttcacatcacccatagaggc

SEQ ID NO: 5213923 - DNA, 25 bp, Homo sapien
tgttggagtaagtcctgttactaag

SEQ ID NO: 5213924 - DNA, 25 bp, Homo sapien
tggagtaagtcctgttactaagtac

SEQ ID NO: 5213925 - DNA, 25 bp, Homo sapien
ttggagtaagtcctgttactaagta

SEQ ID NO: 5213926 - DNA, 25 bp, Homo sapien
cctgttggagtaagtcctgttacta

SEQ ID NO: 5213927 - DNA, 25 bp, Homo sapien
acgtgaataagaagttttgcatctg

SEQ ID NO: 5213928 - DNA, 25 bp, Homo sapien
cttcatagacgttatgttttacagt

SEQ ID NO: 5213929 - DNA, 25 bp, Homo sapien
tcatagacgttatgttttacagtct

SEQ ID NO: 5213930 - DNA, 25 bp, Homo sapien
tacagtctttaaaacgtgaataaga

SEQ ID NO: 5213931 - DNA, 25 bp, Homo sapien
tgccatcagtgaatctgcacaaaat

SEQ ID NO: 5213932 - DNA, 25 bp, Homo sapien
gctgccatcagtgaatctgcacaaa

SEQ ID NO: 5213933 - DNA, 25 bp, Homo sapien
ctgccatcagtgaatctgcacaaaa

SEQ ID NO: 5213934 - DNA, 25 bp, Homo sapien
gcgatcctgtgttcctcggaagccg

SEQ ID NO: 5213935 - DNA, 25 bp, Homo sapien
cagcagctggacactttgcgagggc

SEQ ID NO: 5213936 - DNA, 25 bp, Homo sapien
ctagtcatggtgctgtgggagtccc

SEQ ID NO: 5213937 - DNA, 25 bp, Homo sapien
tcggaagccgtttgctgctgcagag

SEQ ID NO: 5213938 - DNA, 25 bp, Homo sapien
tccaccaatcagagcccgactgcct

SEQ ID NO: 5213939 - DNA, 25 bp, Homo sapien
ggatgcgggcggcagagctcgagag

SEQ ID NO: 5213940 - DNA, 25 bp, Homo sapien
cagagctcgagaggcggctgccggg

SEQ ID NO: 5213941 - DNA, 25 bp, Homo sapien
gctgcttcccaaacgccagagggat

SEQ ID NO: 5213942 - DNA, 25 bp, Homo sapien
tagatcctagaaatagatgccgttc

SEQ ID NO: 5213943 - DNA, 25 bp, Homo sapien
taagttagatcctagaaatagatgc

SEQ ID NO: 5213944 - DNA, 25 bp, Homo sapien
ccttcaataagttagatcctagaaa

SEQ ID NO: 5213945 - DNA, 25 bp, Homo sapien
gaaatagatgccgttctgtccctgt

SEQ ID NO: 5213946 - DNA, 25 bp, Homo sapien
tgtctgatattatgggattatattg

SEQ ID NO: 5213947 - DNA, 25 bp, Homo sapien
ataggatcctgttattcttatactg

SEQ ID NO: 5213948 - DNA, 25 bp, Homo sapien
cctgttattcttatactgtctgata

SEQ ID NO: 5213949 - DNA, 25 bp, Homo sapien
ctgatattatgggattatattgatg

SEQ ID NO: 5213950 - DNA, 25 bp, Homo sapien
gctttttgggaagctatactatatg

SEQ ID NO: 5213951 - DNA, 25 bp, Homo sapien
gaatataacctaatgtgtccatgag

SEQ ID NO: 5213952 - DNA, 25 bp, Homo sapien
gtcattaggccatgaacattcccca

SEQ ID NO: 5213953 - DNA, 25 bp, Homo sapien
gaagctatactatatgtcattaggc

SEQ ID NO: 5213954 - DNA, 25 bp, Homo sapien
aaacagctgttcgaatatgtttcat

SEQ ID NO: 5213955 - DNA, 25 bp, Homo sapien
gcaaaaaagcagaagtaccaaaaca

SEQ ID NO: 5213956 - DNA, 25 bp, Homo sapien
atgttatcctttatgtcattgaatc

SEQ ID NO: 5213957 - DNA, 25 bp, Homo sapien
gcacattctccagtaatgttatcct

SEQ ID NO: 5213958 - DNA, 25 bp, Homo sapien
gaagtaccaaaacattctcattacc

SEQ ID NO: 5213959 - DNA, 25 bp, Homo sapien
tcaccccagctcattgctcatgtct

SEQ ID NO: 5213960 - DNA, 25 bp, Homo sapien
tgtctccaatcagactgggaagggt

SEQ ID NO: 5213961 - DNA, 25 bp, Homo sapien
ccagctcattgctcatgtctccaat

SEQ ID NO: 5213962 - DNA, 25 bp, Homo sapien
ctcatgtctccaatcagactgggaa

SEQ ID NO: 5213963 - DNA, 25 bp, Homo sapien
gatgaggaaaatatgacatgtcatg

SEQ ID NO: 5213964 - DNA, 25 bp, Homo sapien
ggaaaatatgacatgtcatgggcat

SEQ ID NO: 5213965 - DNA, 25 bp, Homo sapien
atttgatgaggaaaatatgacatgt

SEQ ID NO: 5213966 - DNA, 25 bp, Homo sapien
gaggaaaatatgacatgtcatgggc

SEQ ID NO: 5213967 - DNA, 25 bp, Homo sapien
tacccagattggcataaagtagcaa

SEQ ID NO: 5213968 - DNA, 25 bp, Homo sapien
ttctgattaaacgtgcaggatgctc

SEQ ID NO: 5213969 - DNA, 25 bp, Homo sapien
tctaaatatggaatgcagttaccca

SEQ ID NO: 5213970 - DNA, 25 bp, Homo sapien
tgttcagagtctctccaaaggacag

SEQ ID NO: 5213971 - DNA, 25 bp, Homo sapien
tttctttcagcaaacttgcctccat

SEQ ID NO: 5213972 - DNA, 25 bp, Homo sapien
catcagttgtgttctttctttcagc

SEQ ID NO: 5213973 - DNA, 25 bp, Homo sapien
gttctttctttcagcaaacttgcct

SEQ ID NO: 5213974 - DNA, 25 bp, Homo sapien
tctttctttcagcaaacttgcctcc

SEQ ID NO: 5213975 - DNA, 25 bp, Homo sapien
aagttctgttagatcatcagcaaaa

SEQ ID NO: 5213976 - DNA, 25 bp, Homo sapien
tcagagatgtagcagctaattgtac

SEQ ID NO: 5213977 - DNA, 25 bp, Homo sapien
ttctcagagatgtagcagctaattg

SEQ ID NO: 5213978 - DNA, 25 bp, Homo sapien
gatgtagcagctaattgtacttttt

SEQ ID NO: 5213979 - DNA, 25 bp, Homo sapien
gaaaatgacaaatgaccttgccaaa

SEQ ID NO: 5213980 - DNA, 25 bp, Homo sapien
agaagcagaccatctttgtcaaaag

SEQ ID NO: 5213981 - DNA, 25 bp, Homo sapien
caattctttactgagaagcaggtgc

SEQ ID NO: 5213982 - DNA, 25 bp, Homo sapien
tgccaaaaccatgctgatgtgaaaa

SEQ ID NO: 5213983 - DNA, 25 bp, Homo sapien
tacctgaaattttatatagatacca

SEQ ID NO: 5213984 - DNA, 25 bp, Homo sapien
ttttatatagataccatttgttcat

SEQ ID NO: 5213985 - DNA, 25 bp, Homo sapien
ctgaggttctctcttgtgaagatat

SEQ ID NO: 5213986 - DNA, 25 bp, Homo sapien
tcttgtgaagatattattacctgaa

SEQ ID NO: 5213987 - DNA, 25 bp, Homo sapien
gatatctgaaggttcagcatccttc

SEQ ID NO: 5213988 - DNA, 25 bp, Homo sapien
tttctttgatcctttgcctttcacc

SEQ ID NO: 5213989 - DNA, 25 bp, Homo sapien
ggaatgctggcctgatatctgaagg

SEQ ID NO: 5213990 - DNA, 25 bp, Homo sapien
cttctttcttttgggaatgctggcc

SEQ ID NO: 5213991 - DNA, 25 bp, Homo sapien
caaatatcagtaaagtaggctccag

SEQ ID NO: 5213992 - DNA, 25 bp, Homo sapien
gatcaaatgtacatgagtggctatt

SEQ ID NO: 5213993 - DNA, 25 bp, Homo sapien
gtaaagtaggctccagatcaaatgt

SEQ ID NO: 5213994 - DNA, 25 bp, Homo sapien
gaacatctgctatgtccgcaaatat

SEQ ID NO: 5213995 - DNA, 25 bp, Homo sapien
gcttcagctcccagtattgtcccct

SEQ ID NO: 5213996 - DNA, 25 bp, Homo sapien
aattgcttcattcctatatcgccta

SEQ ID NO: 5213997 - DNA, 25 bp, Homo sapien
agtattgtcccctgaaattgcttca

SEQ ID NO: 5213998 - DNA, 25 bp, Homo sapien
caggtaggaatatccgtgaataaca

SEQ ID NO: 5213999 - DNA, 25 bp, Homo sapien
cccatgggtgtttcaagtgaatctc

SEQ ID NO: 5214000 - DNA, 25 bp, Homo sapien
cagagctaacagtctggaggtcata

SEQ ID NO: 5214001 - DNA, 25 bp, Homo sapien
aggtcatacagctagctactcccat

SEQ ID NO: 5214002 - DNA, 25 bp, Homo sapien
tagcaggaatccataaccccatggg

SEQ ID NO: 5214003 - DNA, 25 bp, Homo sapien
catctccatcttcaatcatcctcat

SEQ ID NO: 5214004 - DNA, 25 bp, Homo sapien
tccaattaaaatgccatctccatct

SEQ ID NO: 5214005 - DNA, 25 bp, Homo sapien
aaaatgccatctccatcttcaatca

SEQ ID NO: 5214006 - DNA, 25 bp, Homo sapien
caattaaaatgccatctccatcttc

SEQ ID NO: 5214007 - DNA, 25 bp, Homo sapien
cacagaccaggggtaggcgagttgg

SEQ ID NO: 5214008 - DNA, 25 bp, Homo sapien
gaacacagaccaggggtaggcgagt

SEQ ID NO: 5214009 - DNA, 25 bp, Homo sapien
ggtaggcgagttggtaaggaatgtg

SEQ ID NO: 5214010 - DNA, 25 bp, Homo sapien
aggcgagttggtaaggaatgtgagc

SEQ ID NO: 5214011 - DNA, 25 bp, Homo sapien
gagtattccaaattcctcactccta

SEQ ID NO: 5214012 - DNA, 25 bp, Homo sapien
cctattccttatgatattactgcca

SEQ ID NO: 5214013 - DNA, 25 bp, Homo sapien
tacttactcatgtgttttggcactg

SEQ ID NO: 5214014 - DNA, 25 bp, Homo sapien
atttcacatgtagtacagataactt

SEQ ID NO: 5214015 - DNA, 25 bp, Homo sapien
gacatttgacattatgcagcatgaa

SEQ ID NO: 5214016 - DNA, 25 bp, Homo sapien
tagaggatgaacagaatagagcagc

SEQ ID NO: 5214017 - DNA, 25 bp, Homo sapien
tagagcagcctacaacctctaatgc

SEQ ID NO: 5214018 - DNA, 25 bp, Homo sapien
acacttggttgcatagaggatgaac

SEQ ID NO: 5214019 - DNA, 25 bp, Homo sapien
gcttttgcaccaccatcgtgagggt

SEQ ID NO: 5214020 - DNA, 25 bp, Homo sapien
ggtacaatttgctcaattggcagct

SEQ ID NO: 5214021 - DNA, 25 bp, Homo sapien
caccaccatcgtgagggtatgtggg

SEQ ID NO: 5214022 - DNA, 25 bp, Homo sapien
ttggcagcttttgcaccaccatcgt

SEQ ID NO: 5214023 - DNA, 25 bp, Homo sapien
ctgcgatgcgggtcgtaatagccag

SEQ ID NO: 5214024 - DNA, 25 bp, Homo sapien
ccctgcgatgcgggtcgtaatagcc

SEQ ID NO: 5214025 - DNA, 25 bp, Homo sapien
ccccctgcgatgcgggtcgtaatag

SEQ ID NO: 5214026 - DNA, 25 bp, Homo sapien
gcgatgcgggtcgtaatagccaggg

SEQ ID NO: 5214027 - DNA, 25 bp, Homo sapien
caatagaaactgttgatatagcaaa

SEQ ID NO: 5214028 - DNA, 25 bp, Homo sapien
ctcatgcttgaaataatccattctg

SEQ ID NO: 5214029 - DNA, 25 bp, Homo sapien
aaaatgtttctcatgcttgaaataa

SEQ ID NO: 5214030 - DNA, 25 bp, Homo sapien
gatatagcaaatgtaaatgttggta

SEQ ID NO: 5214031 - DNA, 25 bp, Homo sapien
gaatccagcttcatcagaattgctt

SEQ ID NO: 5214032 - DNA, 25 bp, Homo sapien
cagcttcatcagaattgcttatcat

SEQ ID NO: 5214033 - DNA, 25 bp, Homo sapien
ccctccaaaaatatcctggaatcca

SEQ ID NO: 5214034 - DNA, 25 bp, Homo sapien
tggaatccagcttcatcagaattgc

SEQ ID NO: 5214035 - DNA, 25 bp, Homo sapien
actttagggtcaagcattggtatta

SEQ ID NO: 5214036 - DNA, 25 bp, Homo sapien
tagggtcaagcattggtattagagc

SEQ ID NO: 5214037 - DNA, 25 bp, Homo sapien
gaaactttagggtcaagcattggta

SEQ ID NO: 5214038 - DNA, 25 bp, Homo sapien
tggaaactttagggtcaagcattgg

SEQ ID NO: 5214039 - DNA, 25 bp, Homo sapien
taccggtacctcagtcacatctttg

SEQ ID NO: 5214040 - DNA, 25 bp, Homo sapien
cagctcagacggtaattccacagga

SEQ ID NO: 5214041 - DNA, 25 bp, Homo sapien
ttgtcatgttcgaagctgctgtcag

SEQ ID NO: 5214042 - DNA, 25 bp, Homo sapien
gcaatgcaggtttgatagcaacacc

SEQ ID NO: 5214043 - DNA, 25 bp, Homo sapien
caggacaagcgatgggaaatggaac

SEQ ID NO: 5214044 - DNA, 25 bp, Homo sapien
cacaatttacaaagtcaccagggaa

SEQ ID NO: 5214045 - DNA, 25 bp, Homo sapien
gctgagagaagttagctcaaatacc

SEQ ID NO: 5214046 - DNA, 25 bp, Homo sapien
tcgtctcacattttgggatcaagca

SEQ ID NO: 5214047 - DNA, 25 bp, Homo sapien
aatggtactcatcagtaccaagaag

SEQ ID NO: 5214048 - DNA, 25 bp, Homo sapien
agtggaaggtgcagcatcaggctct

SEQ ID NO: 5214049 - DNA, 25 bp, Homo sapien
ccaagaagagattgaggcccctcaa

SEQ ID NO: 5214050 - DNA, 25 bp, Homo sapien
tcaggctctcccaggttgaatccct

SEQ ID NO: 5214051 - DNA, 25 bp, Homo sapien
gcttggagcctgtaattgaggtcta

SEQ ID NO: 5214052 - DNA, 25 bp, Homo sapien
gtaattgaggtctactggcacaaaa

SEQ ID NO: 5214053 - DNA, 25 bp, Homo sapien
gagataaaggcttggagcctgtaat

SEQ ID NO: 5214054 - DNA, 25 bp, Homo sapien
agctctctcactggactggagataa

SEQ ID NO: 5214055 - DNA, 25 bp, Homo sapien
agaagagtttgtcggaggtgaatta

SEQ ID NO: 5214056 - DNA, 25 bp, Homo sapien
gcagagaaaactgaccaaacctgga

SEQ ID NO: 5214057 - DNA, 25 bp, Homo sapien
aacctggatcaatgcgattatcttc

SEQ ID NO: 5214058 - DNA, 25 bp, Homo sapien
cctcagctgtggctaatcgatccaa

SEQ ID NO: 5214059 - DNA, 25 bp, Homo sapien
tcagacacgccccatactggatggt

SEQ ID NO: 5214060 - DNA, 25 bp, Homo sapien
gctttcagacacgccccatactgga

SEQ ID NO: 5214061 - DNA, 25 bp, Homo sapien
tttcagacacgccccatactggatg

SEQ ID NO: 5214062 - DNA, 25 bp, Homo sapien
gacacgccccatactggatggtcac

SEQ ID NO: 5214063 - DNA, 25 bp, Homo sapien
ggagaagaagtgagtggcaaatgca

SEQ ID NO: 5214064 - DNA, 25 bp, Homo sapien
cagtccagtagacataaggaagtcc

SEQ ID NO: 5214065 - DNA, 25 bp, Homo sapien
caacagtccagtagacataaggaag

SEQ ID NO: 5214066 - DNA, 25 bp, Homo sapien
atgcaacagtccagtagacataagg

SEQ ID NO: 5214067 - DNA, 25 bp, Homo sapien
cccaattagaggaagttgcagacac

SEQ ID NO: 5214068 - DNA, 25 bp, Homo sapien
aaaaagatgctgtccagggacctat

SEQ ID NO: 5214069 - DNA, 25 bp, Homo sapien
aactgcagttccaaaactgggtgcc

SEQ ID NO: 5214070 - DNA, 25 bp, Homo sapien
cagacacaggttacggcatagggca

SEQ ID NO: 5214071 - DNA, 25 bp, Homo sapien
cacttgataaggtcacgttgagtcc

SEQ ID NO: 5214072 - DNA, 25 bp, Homo sapien
gagtcccagtgcatctcgtagtaca

SEQ ID NO: 5214073 - DNA, 25 bp, Homo sapien
taaggtcacgttgagtcccagtgca

SEQ ID NO: 5214074 - DNA, 25 bp, Homo sapien
gcatctcgtagtacaattttatcat

SEQ ID NO: 5214075 - DNA, 25 bp, Homo sapien
ccttggagacagggcaagactccat

SEQ ID NO: 5214076 - DNA, 25 bp, Homo sapien
tcacaccattgggctccagccttgg

SEQ ID NO: 5214077 - DNA, 25 bp, Homo sapien
acaccattgggctccagccttggag

SEQ ID NO: 5214078 - DNA, 25 bp, Homo sapien
accattgggctccagccttggagac

SEQ ID NO: 5214079 - DNA, 25 bp, Homo sapien
aacctgcttcatccaatgcaagacg

SEQ ID NO: 5214080 - DNA, 25 bp, Homo sapien
cttcatccaatgcaagacgtaacat

SEQ ID NO: 5214081 - DNA, 25 bp, Homo sapien
cttgacggagatagctgtcactagg

SEQ ID NO: 5214082 - DNA, 25 bp, Homo sapien
tgcttcatccaatgcaagacgtaac

SEQ ID NO: 5214083 - DNA, 25 bp, Homo sapien
caaccggctccaactggtgttttga

SEQ ID NO: 5214084 - DNA, 25 bp, Homo sapien
tcaaccggctccaactggtgttttg

SEQ ID NO: 5214085 - DNA, 25 bp, Homo sapien
ccgaagtccaaagacttcaacattt

SEQ ID NO: 5214086 - DNA, 25 bp, Homo sapien
acagactcccgaagtccaaagactt

SEQ ID NO: 5214087 - DNA, 25 bp, Homo sapien
caacagatttgtgcggcattggcat

SEQ ID NO: 5214088 - DNA, 25 bp, Homo sapien
ttagtctcaacagatttgtgcggca

SEQ ID NO: 5214089 - DNA, 25 bp, Homo sapien
tattttagtctcaacagatttgtgc

SEQ ID NO: 5214090 - DNA, 25 bp, Homo sapien
ctggggtgagaaatattttagtctc

SEQ ID NO: 5214091 - DNA, 25 bp, Homo sapien
ctttggctgatatcatgaagtgtca

SEQ ID NO: 5214092 - DNA, 25 bp, Homo sapien
ctggagactcccaacctgatgatgt

SEQ ID NO: 5214093 - DNA, 25 bp, Homo sapien
cctgatgatgtcatagtcctcttcc

SEQ ID NO: 5214094 - DNA, 25 bp, Homo sapien
ttccaaagggtccgctgtccctgga

SEQ ID NO: 5214095 - DNA, 25 bp, Homo sapien
tacaaaagacttcaaggcaccaagc

SEQ ID NO: 5214096 - DNA, 25 bp, Homo sapien
tgctgccctaggagtaggcctgtgt

SEQ ID NO: 5214097 - DNA, 25 bp, Homo sapien
catttatgcccaaaagcaagcagga

SEQ ID NO: 5214098 - DNA, 25 bp, Homo sapien
taagaatttgtagatgggccctcat

SEQ ID NO: 5214099 - DNA, 25 bp, Homo sapien
aaaaggcaatccacagattattggg

SEQ ID NO: 5214100 - DNA, 25 bp, Homo sapien
cataagagaacatcctattgctgtg

SEQ ID NO: 5214101 - DNA, 25 bp, Homo sapien
ggaaacataatgcttagaccagata

SEQ ID NO: 5214102 - DNA, 25 bp, Homo sapien
caagtcacttagatgctctgtgtat

SEQ ID NO: 5214103 - DNA, 25 bp, Homo sapien
tctatttgaaatagtggccttgagg

SEQ ID NO: 5214104 - DNA, 25 bp, Homo sapien
tcctgtagaggaagacctgatttct

SEQ ID NO: 5214105 - DNA, 25 bp, Homo sapien
tccttggaactagctgacacttgtt

SEQ ID NO: 5214106 - DNA, 25 bp, Homo sapien
tcttgctgtgttttcggtgtctctg

SEQ ID NO: 5214107 - DNA, 25 bp, Homo sapien
gtttacagtactctccccaggtatc

SEQ ID NO: 5214108 - DNA, 25 bp, Homo sapien
cagaggcaattcaatgtgtttacag

SEQ ID NO: 5214109 - DNA, 25 bp, Homo sapien
catgattgagcaacctcggtgagct

SEQ ID NO: 5214110 - DNA, 25 bp, Homo sapien
ccgaacgctatagaacagaggcaat

SEQ ID NO: 5214111 - DNA, 25 bp, Homo sapien
tctcttaatcgtgggctatctctga

SEQ ID NO: 5214112 - DNA, 25 bp, Homo sapien
gaaaatagttcaaagtcacacaata

SEQ ID NO: 5214113 - DNA, 25 bp, Homo sapien
atatacagactctaatttgtctcca

SEQ ID NO: 5214114 - DNA, 25 bp, Homo sapien
tgtctccaatgcctgatctcttaat

SEQ ID NO: 5214115 - DNA, 25 bp, Homo sapien
gctacattaccaaggttgccatggc

SEQ ID NO: 5214116 - DNA, 25 bp, Homo sapien
tggcttgggaataatctggctgttt

SEQ ID NO: 5214117 - DNA, 25 bp, Homo sapien
ccaatagctacattaccaaggttgc

SEQ ID NO: 5214118 - DNA, 25 bp, Homo sapien
ttccaactggcttgggaataatctg

SEQ ID NO: 5214119 - DNA, 25 bp, Homo sapien
acatcctgggaactcttcagaagca

SEQ ID NO: 5214120 - DNA, 25 bp, Homo sapien
cacactgtgatttgaacatcctggg

SEQ ID NO: 5214121 - DNA, 25 bp, Homo sapien
actcttcagaagcaggtaactgcat

SEQ ID NO: 5214122 - DNA, 25 bp, Homo sapien
tgtgatttgaacatcctgggaactc

SEQ ID NO: 5214123 - DNA, 25 bp, Homo sapien
taacatgcttccaggaaatttgata

SEQ ID NO: 5214124 - DNA, 25 bp, Homo sapien
catgcttccaggaaatttgatattt

SEQ ID NO: 5214125 - DNA, 25 bp, Homo sapien
ttaaggataacatgcttccaggaaa

SEQ ID NO: 5214126 - DNA, 25 bp, Homo sapien
ggataacatgcttccaggaaatttg

SEQ ID NO: 5214127 - DNA, 25 bp, Homo sapien
cataatcaacagctgttgagctact

SEQ ID NO: 5214128 - DNA, 25 bp, Homo sapien
aacagctgttgagctacttgccaac

SEQ ID NO: 5214129 - DNA, 25 bp, Homo sapien
tgccaaccgtagtttctctagtttc

SEQ ID NO: 5214130 - DNA, 25 bp, Homo sapien
tgttgagctacttgccaaccgtagt

SEQ ID NO: 5214131 - DNA, 25 bp, Homo sapien
ctggctctggccacaaattttcaat

SEQ ID NO: 5214132 - DNA, 25 bp, Homo sapien
gctctggccacaaattttcaatcat

SEQ ID NO: 5214133 - DNA, 25 bp, Homo sapien
ggctctggccacaaattttcaatca

SEQ ID NO: 5214134 - DNA, 25 bp, Homo sapien
tggctctggccacaaattttcaatc

SEQ ID NO: 5214135 - DNA, 25 bp, Homo sapien
acacatccttatctctgaatttcac

SEQ ID NO: 5214136 - DNA, 25 bp, Homo sapien
gaaaaatactgaacacatccttatc

SEQ ID NO: 5214137 - DNA, 25 bp, Homo sapien
aagaaaaatactgaacacatcctta

SEQ ID NO: 5214138 - DNA, 25 bp, Homo sapien
catccttatctctgaatttcactcc

SEQ ID NO: 5214139 - DNA, 25 bp, Homo sapien
gcaggagccttcgactctttctttt

SEQ ID NO: 5214140 - DNA, 25 bp, Homo sapien
tgcaggagccttcgactctttcttt

SEQ ID NO: 5214141 - DNA, 25 bp, Homo sapien
ctgcaggagccttcgactctttctt

SEQ ID NO: 5214142 - DNA, 25 bp, Homo sapien
tgtccttggtcttattgcctgtaat

SEQ ID NO: 5214143 - DNA, 25 bp, Homo sapien
ccttggtcttattgcctgtaatatt

SEQ ID NO: 5214144 - DNA, 25 bp, Homo sapien
gtccttggtcttattgcctgtaata

SEQ ID NO: 5214145 - DNA, 25 bp, Homo sapien
ttggtcttattgcctgtaatatttc

SEQ ID NO: 5214146 - DNA, 25 bp, Homo sapien
caggcaagaattggaagatctgctg

SEQ ID NO: 5214147 - DNA, 25 bp, Homo sapien
tctaccaatgcttaacagagggatt

SEQ ID NO: 5214148 - DNA, 25 bp, Homo sapien
tgagggtagaaagaaactgcctgct

SEQ ID NO: 5214149 - DNA, 25 bp, Homo sapien
cactgacactatcctgatgagggta

SEQ ID NO: 5214150 - DNA, 25 bp, Homo sapien
tgatttcttttcattgacgttgatt

SEQ ID NO: 5214151 - DNA, 25 bp, Homo sapien
ttcttttcattgacgttgattttca

SEQ ID NO: 5214152 - DNA, 25 bp, Homo sapien
tcttttcattgacgttgattttcat

SEQ ID NO: 5214153 - DNA, 25 bp, Homo sapien
ggatctttcaacaagccacattcaa

SEQ ID NO: 5214154 - DNA, 25 bp, Homo sapien
tccttatccctaggaataggaatca

SEQ ID NO: 5214155 - DNA, 25 bp, Homo sapien
gaataggaatcaccttctgttcagg

SEQ ID NO: 5214156 - DNA, 25 bp, Homo sapien
ctcttaagatgtagttaatagtacc

SEQ ID NO: 5214157 - DNA, 25 bp, Homo sapien
caagtgtatccaagggattcccggc

SEQ ID NO: 5214158 - DNA, 25 bp, Homo sapien
cggagatctttagagcggacagtct

SEQ ID NO: 5214159 - DNA, 25 bp, Homo sapien
gagctccggtttccagagagtgctg

SEQ ID NO: 5214160 - DNA, 25 bp, Homo sapien
cagctgatccgagttccttggcaag

SEQ ID NO: 5214161 - DNA, 25 bp, Homo sapien
cagagactagaattgcaaactctgc

SEQ ID NO: 5214162 - DNA, 25 bp, Homo sapien
gaattgcaaactctgcttttttctt

SEQ ID NO: 5214163 - DNA, 25 bp, Homo sapien
agactagaattgcaaactctgcttt

SEQ ID NO: 5214164 - DNA, 25 bp, Homo sapien
agaattgcaaactctgcttttttct

SEQ ID NO: 5214165 - DNA, 25 bp, Homo sapien
ggaatttgtattttataggctacca

SEQ ID NO: 5214166 - DNA, 25 bp, Homo sapien
gaatttgtattttataggctaccat

SEQ ID NO: 5214167 - DNA, 25 bp, Homo sapien
ttaggaatttgtattttataggcta

SEQ ID NO: 5214168 - DNA, 25 bp, Homo sapien
taggaatttgtattttataggctac

SEQ ID NO: 5214169 - DNA, 25 bp, Homo sapien
tgttgtcacttgactttcactcccc

SEQ ID NO: 5214170 - DNA, 25 bp, Homo sapien
ttgtcacttgactttcactccccat

SEQ ID NO: 5214171 - DNA, 25 bp, Homo sapien
atagcccttttgcagaaatgttgtc

SEQ ID NO: 5214172 - DNA, 25 bp, Homo sapien
aatgttgtcacttgactttcactcc

SEQ ID NO: 5214173 - DNA, 25 bp, Homo sapien
aatcatagagaagataacctactga

SEQ ID NO: 5214174 - DNA, 25 bp, Homo sapien
tccaagtggggcacttgaatcatag

SEQ ID NO: 5214175 - DNA, 25 bp, Homo sapien
tctcctccaagtggggcacttgaat

SEQ ID NO: 5214176 - DNA, 25 bp, Homo sapien
gtggggcacttgaatcatagagaag

SEQ ID NO: 5214177 - DNA, 25 bp, Homo sapien
gaggacttcaagacttctagatgag

SEQ ID NO: 5214178 - DNA, 25 bp, Homo sapien
cagccattgggatgatcaaaagtac

SEQ ID NO: 5214179 - DNA, 25 bp, Homo sapien
gattgagaagatcttgctgaggact

SEQ ID NO: 5214180 - DNA, 25 bp, Homo sapien
cagggaatacttgatgcagccattg

SEQ ID NO: 5214181 - DNA, 25 bp, Homo sapien
tggctctttggtaacgactcagctg

SEQ ID NO: 5214182 - DNA, 25 bp, Homo sapien
tctttggtaacgactcagctgtgca

SEQ ID NO: 5214183 - DNA, 25 bp, Homo sapien
aacgactcagctgtgcatgtcaagg

SEQ ID NO: 5214184 - DNA, 25 bp, Homo sapien
ggtaacgactcagctgtgcatgtca

SEQ ID NO: 5214185 - DNA, 25 bp, Homo sapien
cagtttaggtaccaggccaacagga

SEQ ID NO: 5214186 - DNA, 25 bp, Homo sapien
tcagtttaggtaccaggccaacagg

SEQ ID NO: 5214187 - DNA, 25 bp, Homo sapien
ttcagtttaggtaccaggccaacag

SEQ ID NO: 5214188 - DNA, 25 bp, Homo sapien
gcaatgtgcctcaacaagtctgaaa

SEQ ID NO: 5214189 - DNA, 25 bp, Homo sapien
tctggatctccacagtttcaggctc

SEQ ID NO: 5214190 - DNA, 25 bp, Homo sapien
caagtctgaaaatggtcgtctggat

SEQ ID NO: 5214191 - DNA, 25 bp, Homo sapien
tggttcaagatagcaatgtgcctca

SEQ ID NO: 5214192 - DNA, 25 bp, Homo sapien
tgtatatccattgtaaactattcct

SEQ ID NO: 5214193 - DNA, 25 bp, Homo sapien
tcaaggctgtaagacctacttctcc

SEQ ID NO: 5214194 - DNA, 25 bp, Homo sapien
caattatacttgatgcattctggat

SEQ ID NO: 5214195 - DNA, 25 bp, Homo sapien
ttggagcaacttaagaccttgacca

SEQ ID NO: 5214196 - DNA, 25 bp, Homo sapien
caaaggctcaaagctatgacagtgt

SEQ ID NO: 5214197 - DNA, 25 bp, Homo sapien
cactgcatctagcatagagtggtta

SEQ ID NO: 5214198 - DNA, 25 bp, Homo sapien
tgagtgtgtgtacccaatttaaatc

SEQ ID NO: 5214199 - DNA, 25 bp, Homo sapien
ggccattgccagacaatatgatcag

SEQ ID NO: 5214200 - DNA, 25 bp, Homo sapien
gggaggtctcttcatagaatcaaca

SEQ ID NO: 5214201 - DNA, 25 bp, Homo sapien
gaatcaacatttaagctagtagctg

SEQ ID NO: 5214202 - DNA, 25 bp, Homo sapien
gcaacatgaatagagggtaaggctt

SEQ ID NO: 5214203 - DNA, 25 bp, Homo sapien
caatgtatggtagaatggttgaccc

SEQ ID NO: 5214204 - DNA, 25 bp, Homo sapien
tagttgacccccttcaatggccctg

SEQ ID NO: 5214205 - DNA, 25 bp, Homo sapien
tctggacttcaaccccttttgacat

SEQ ID NO: 5214206 - DNA, 25 bp, Homo sapien
tagcaaccacagctgattctggact

SEQ ID NO: 5214207 - DNA, 25 bp, Homo sapien
ccttcaatggccctgcaacatagca

SEQ ID NO: 5214208 - DNA, 25 bp, Homo sapien
ggttaacaagcagtagtctttcagc

SEQ ID NO: 5214209 - DNA, 25 bp, Homo sapien
gccactgggaataccacccacattg

SEQ ID NO: 5214210 - DNA, 25 bp, Homo sapien
tcagcatcacaagctagggctgcgg

SEQ ID NO: 5214211 - DNA, 25 bp, Homo sapien
ccaaatattcatagctctcagcatc

SEQ ID NO: 5214212 - DNA, 25 bp, Homo sapien
cctgcgaagatgattggctaaccat

SEQ ID NO: 5214213 - DNA, 25 bp, Homo sapien
caaccctagtagaattgagctccaa

SEQ ID NO: 5214214 - DNA, 25 bp, Homo sapien
taagacagttagctgatgaagcacc

SEQ ID NO: 5214215 - DNA, 25 bp, Homo sapien
tatctatgttaagggagagtctcca

SEQ ID NO: 5214216 - DNA, 25 bp, Homo sapien
gattcacgcttgacaggttttatgg

SEQ ID NO: 5214217 - DNA, 25 bp, Homo sapien
tcccatttgctaataagtaattttc

SEQ ID NO: 5214218 - DNA, 25 bp, Homo sapien
tttcttcttgattcacgcttgacag

SEQ ID NO: 5214219 - DNA, 25 bp, Homo sapien
tattctaggttgtcccatttgctaa

SEQ ID NO: 5214220 - DNA, 25 bp, Homo sapien
atctggcgctaagcattgatctaga

SEQ ID NO: 5214221 - DNA, 25 bp, Homo sapien
tggagctgtggaaatctggcgctaa

SEQ ID NO: 5214222 - DNA, 25 bp, Homo sapien
gaagttattgatgcagtggagctgt

SEQ ID NO: 5214223 - DNA, 25 bp, Homo sapien
ttgaagttattgatgcagtggagct

SEQ ID NO: 5214224 - DNA, 25 bp, Homo sapien
tactgctttaaattagcagtgttga

SEQ ID NO: 5214225 - DNA, 25 bp, Homo sapien
gctttaaattagcagtgttgaattt

SEQ ID NO: 5214226 - DNA, 25 bp, Homo sapien
ctgctttaaattagcagtgttgaat

SEQ ID NO: 5214227 - DNA, 25 bp, Homo sapien
ttactgctttaaattagcagtgttg

SEQ ID NO: 5214228 - DNA, 25 bp, Homo sapien
ggactaggaagtaacgaggaatgcc

SEQ ID NO: 5214229 - DNA, 25 bp, Homo sapien
ggaagtaacgaggaatgcctactgc

SEQ ID NO: 5214230 - DNA, 25 bp, Homo sapien
ggaatgcctactgcatcatcccaac

SEQ ID NO: 5214231 - DNA, 25 bp, Homo sapien
aatgcctactgcatcatcccaactg

SEQ ID NO: 5214232 - DNA, 25 bp, Homo sapien
tgcattgcagggtctcctttttaat

SEQ ID NO: 5214233 - DNA, 25 bp, Homo sapien
ccagccttgcattgcagggtctcct

SEQ ID NO: 5214234 - DNA, 25 bp, Homo sapien
ttgcattgcagggtctcctttttaa

SEQ ID NO: 5214235 - DNA, 25 bp, Homo sapien
aaccagccttgcattgcagggtctc

SEQ ID NO: 5214236 - DNA, 25 bp, Homo sapien
ctctaacaggagtccgctcagtcat

SEQ ID NO: 5214237 - DNA, 25 bp, Homo sapien
tctgagaacataggactctaacagg

SEQ ID NO: 5214238 - DNA, 25 bp, Homo sapien
tttctctgagaacataggactctaa

SEQ ID NO: 5214239 - DNA, 25 bp, Homo sapien
aggactctaacaggagtccgctcag

SEQ ID NO: 5214240 - DNA, 25 bp, Homo sapien
gatattctgatgacggggaaaaaaa

SEQ ID NO: 5214241 - DNA, 25 bp, Homo sapien
cgatattctgatgacggggaaaaaa

SEQ ID NO: 5214242 - DNA, 25 bp, Homo sapien
ttttctcttgcaattacaaggtttc

SEQ ID NO: 5214243 - DNA, 25 bp, Homo sapien
ttgcaattacaaggtttcttattcc

SEQ ID NO: 5214244 - DNA, 25 bp, Homo sapien
ctaagattagcttcactgaacttcc

SEQ ID NO: 5214245 - DNA, 25 bp, Homo sapien
atattcctctgaactaagattagct

SEQ ID NO: 5214246 - DNA, 25 bp, Homo sapien
tcagaactgatcaccataagtacct

SEQ ID NO: 5214247 - DNA, 25 bp, Homo sapien
agtaccttgtaatgcgttttgacac

SEQ ID NO: 5214248 - DNA, 25 bp, Homo sapien
ccataagtaccttgtaatgcgtttt

SEQ ID NO: 5214249 - DNA, 25 bp, Homo sapien
taagtaccttgtaatgcgttttgac

SEQ ID NO: 5214250 - DNA, 25 bp, Homo sapien
tccaaaacctctgcaatgactgatg

SEQ ID NO: 5214251 - DNA, 25 bp, Homo sapien
tatccctcctgaatcccgtaaaaga

SEQ ID NO: 5214252 - DNA, 25 bp, Homo sapien
gatactcctgtcaggtgccagtaga

SEQ ID NO: 5214253 - DNA, 25 bp, Homo sapien
tgcagcagaattgctcaacaagttt

SEQ ID NO: 5214254 - DNA, 25 bp, Homo sapien
aaagaagggatgcctggaattcctg

SEQ ID NO: 5214255 - DNA, 25 bp, Homo sapien
gaggatataattgcaatggcatttt

SEQ ID NO: 5214256 - DNA, 25 bp, Homo sapien
ataattgcaatggcattttcacctt

SEQ ID NO: 5214257 - DNA, 25 bp, Homo sapien
aagaagggatgcctggaattcctgt

SEQ ID NO: 5214258 - DNA, 25 bp, Homo sapien
tgtattcctcccatgtacccactgt

SEQ ID NO: 5214259 - DNA, 25 bp, Homo sapien
gtgacagaaggtggcactatctcat

SEQ ID NO: 5214260 - DNA, 25 bp, Homo sapien
cataaactgattaaaccaattctgt

SEQ ID NO: 5214261 - DNA, 25 bp, Homo sapien
gaaggtggcactatctcattgccac

SEQ ID NO: 5214262 - DNA, 25 bp, Homo sapien
aagtactgcgcaaggcccatggtta

SEQ ID NO: 5214263 - DNA, 25 bp, Homo sapien
aaggaggctctctttacttgaagta

SEQ ID NO: 5214264 - DNA, 25 bp, Homo sapien
tttacttgaagtactgcgcaaggcc

SEQ ID NO: 5214265 - DNA, 25 bp, Homo sapien
tgcgcaaggcccatggttagcacca

SEQ ID NO: 5214266 - DNA, 25 bp, Homo sapien
ttgaagttcttccaagttaggacag

SEQ ID NO: 5214267 - DNA, 25 bp, Homo sapien
gaagttcttccaagttaggacagac

SEQ ID NO: 5214268 - DNA, 25 bp, Homo sapien
aagttcttccaagttaggacagact

SEQ ID NO: 5214269 - DNA, 25 bp, Homo sapien
tgaagttcttccaagttaggacaga

SEQ ID NO: 5214270 - DNA, 25 bp, Homo sapien
cataaaacgataactactaaaagct

SEQ ID NO: 5214271 - DNA, 25 bp, Homo sapien
ccagagtatttttgagcaaagcagc

SEQ ID NO: 5214272 - DNA, 25 bp, Homo sapien
tagccatctgactcaagccaagtag

SEQ ID NO: 5214273 - DNA, 25 bp, Homo sapien
gaatgtgtggctgattgccagagta

SEQ ID NO: 5214274 - DNA, 25 bp, Homo sapien
aacagtttacaaatgattacctcat

SEQ ID NO: 5214275 - DNA, 25 bp, Homo sapien
tctttatgataagtttatgggcaca

SEQ ID NO: 5214276 - DNA, 25 bp, Homo sapien
tttatgataagtttatgggcacaat

SEQ ID NO: 5214277 - DNA, 25 bp, Homo sapien
ggtgagaggatggtaaaattatttc

SEQ ID NO: 5214278 - DNA, 25 bp, Homo sapien
ttactggcataattctgcggtttct

SEQ ID NO: 5214279 - DNA, 25 bp, Homo sapien
tagttcttctactggctactgcagg

SEQ ID NO: 5214280 - DNA, 25 bp, Homo sapien
cacacctttctgatatgaagagggc

SEQ ID NO: 5214281 - DNA, 25 bp, Homo sapien
tgtgtccatgaagtttctctgcctc

SEQ ID NO: 5214282 - DNA, 25 bp, Homo sapien
ctgccaaaacacagaggataaaagc

SEQ ID NO: 5214283 - DNA, 25 bp, Homo sapien
tgccaaaacacagaggataaaagcc

SEQ ID NO: 5214284 - DNA, 25 bp, Homo sapien
ccaaaacacagaggataaaagccat

SEQ ID NO: 5214285 - DNA, 25 bp, Homo sapien
gccaaaacacagaggataaaagcca

SEQ ID NO: 5214286 - DNA, 25 bp, Homo sapien
tacaagcttcaattaaccaatctag

SEQ ID NO: 5214287 - DNA, 25 bp, Homo sapien
agtcctcattcactttagtgtgcca

SEQ ID NO: 5214288 - DNA, 25 bp, Homo sapien
tcactttagtgtgccactgagtaca

SEQ ID NO: 5214289 - DNA, 25 bp, Homo sapien
taaccaatctagcacactatctaaa

SEQ ID NO: 5214290 - DNA, 25 bp, Homo sapien
tagtcaataatgcattgatactggc

SEQ ID NO: 5214291 - DNA, 25 bp, Homo sapien
gatactggctcatcaatcataacaa

SEQ ID NO: 5214292 - DNA, 25 bp, Homo sapien
ttaataaaaatcctatggctgggca

SEQ ID NO: 5214293 - DNA, 25 bp, Homo sapien
tgtctacacaaagaatgaaccctaa

SEQ ID NO: 5214294 - DNA, 25 bp, Homo sapien
gaaagaggcacttatttatcctgaa

SEQ ID NO: 5214295 - DNA, 25 bp, Homo sapien
tcaagtcaaatacacatcctggctt

SEQ ID NO: 5214296 - DNA, 25 bp, Homo sapien
tatgttgcctactaatcaagtcaaa

SEQ ID NO: 5214297 - DNA, 25 bp, Homo sapien
taactggaattatgagcattggtag

SEQ ID NO: 5214298 - DNA, 25 bp, Homo sapien
aaaattccaatcatggtacaacaca

SEQ ID NO: 5214299 - DNA, 25 bp, Homo sapien
ctgccagactgctgctcttttaaaa

SEQ ID NO: 5214300 - DNA, 25 bp, Homo sapien
tttaaaattccaatcatggtacaac

SEQ ID NO: 5214301 - DNA, 25 bp, Homo sapien
atctcgtctgccagactgctgctct

SEQ ID NO: 5214302 - DNA, 25 bp, Homo sapien
taggccactaggaatagctaaacca

SEQ ID NO: 5214303 - DNA, 25 bp, Homo sapien
taaacatgctgcttagagttaacag

SEQ ID NO: 5214304 - DNA, 25 bp, Homo sapien
caaggtcgatttcagaatgtggaga

SEQ ID NO: 5214305 - DNA, 25 bp, Homo sapien
gacagatacaggtaaggactagaca

SEQ ID NO: 5214306 - DNA, 25 bp, Homo sapien
cttcaccaaattggaagatgttcca

SEQ ID NO: 5214307 - DNA, 25 bp, Homo sapien
tcaccaaattggaagatgttccaca

SEQ ID NO: 5214308 - DNA, 25 bp, Homo sapien
caccaaattggaagatgttccacat

SEQ ID NO: 5214309 - DNA, 25 bp, Homo sapien
ttcaccaaattggaagatgttccac

SEQ ID NO: 5214310 - DNA, 25 bp, Homo sapien
gtttcttgccagcacatcttagaga

SEQ ID NO: 5214311 - DNA, 25 bp, Homo sapien
cttgccagcacatcttagagatagc

SEQ ID NO: 5214312 - DNA, 25 bp, Homo sapien
cctgtttcttgccagcacatcttag

SEQ ID NO: 5214313 - DNA, 25 bp, Homo sapien
ttgccagcacatcttagagatagca

SEQ ID NO: 5214314 - DNA, 25 bp, Homo sapien
catcttgaagcactagcttctgaaa

SEQ ID NO: 5214315 - DNA, 25 bp, Homo sapien
ttgaagcactagcttctgaaagagt

SEQ ID NO: 5214316 - DNA, 25 bp, Homo sapien
ccatcttgaagcactagcttctgaa

SEQ ID NO: 5214317 - DNA, 25 bp, Homo sapien
tcttgaagcactagcttctgaaaga

SEQ ID NO: 5214318 - DNA, 25 bp, Homo sapien
cacagatcacttgtatgcagatgtc

SEQ ID NO: 5214319 - DNA, 25 bp, Homo sapien
gagtcttactgatccctatgtccat

SEQ ID NO: 5214320 - DNA, 25 bp, Homo sapien
ggctagagctacgttgatggaaaaa

SEQ ID NO: 5214321 - DNA, 25 bp, Homo sapien
aagtctcagggtcaataaattgctc

SEQ ID NO: 5214322 - DNA, 25 bp, Homo sapien
tgtatgatcaaattatagaagaact

SEQ ID NO: 5214323 - DNA, 25 bp, Homo sapien
ggtttatgcttttgcctattacgaa

SEQ ID NO: 5214324 - DNA, 25 bp, Homo sapien
tttttatttctctgagacacatact

SEQ ID NO: 5214325 - DNA, 25 bp, Homo sapien
gagaggaaatgctagcacatatgaa

SEQ ID NO: 5214326 - DNA, 25 bp, Homo sapien
tccaacctcatgttcaggctgcaaa

SEQ ID NO: 5214327 - DNA, 25 bp, Homo sapien
catccttggatatctagacagaagt

SEQ ID NO: 5214328 - DNA, 25 bp, Homo sapien
gaaagcctactgtgaacatctctga

SEQ ID NO: 5214329 - DNA, 25 bp, Homo sapien
tctgggactgtgatgggaaagccta

SEQ ID NO: 5214330 - DNA, 25 bp, Homo sapien
ttcatgggctccaaaggaatcatcc

SEQ ID NO: 5214331 - DNA, 25 bp, Homo sapien
tctgtactcagtatggccaccattg

SEQ ID NO: 5214332 - DNA, 25 bp, Homo sapien
tcccacttgagatgacgatatgaca

SEQ ID NO: 5214333 - DNA, 25 bp, Homo sapien
cctcacagactgaatgattcatggg

SEQ ID NO: 5214334 - DNA, 25 bp, Homo sapien
tggtaattccatacaaggaggaggg

SEQ ID NO: 5214335 - DNA, 25 bp, Homo sapien
gtctatctggtaattccatacaagg

SEQ ID NO: 5214336 - DNA, 25 bp, Homo sapien
ccttgggcagtgtctatctggtaat

SEQ ID NO: 5214337 - DNA, 25 bp, Homo sapien
gggtggagggcttatcttctaggca

SEQ ID NO: 5214338 - DNA, 25 bp, Homo sapien
gaaaataaagcgagagcacattggt

SEQ ID NO: 5214339 - DNA, 25 bp, Homo sapien
tggtaagagacctacatcacaaaag

SEQ ID NO: 5214340 - DNA, 25 bp, Homo sapien
ggaccaacaacagagactagaagga

SEQ ID NO: 5214341 - DNA, 25 bp, Homo sapien
aagttgcaaaaaggtcgaagtctcg

SEQ ID NO: 5214342 - DNA, 25 bp, Homo sapien
aaggtaatataatgtaacttcaatc

SEQ ID NO: 5214343 - DNA, 25 bp, Homo sapien
cccctagatttaggggcagaactga

SEQ ID NO: 5214344 - DNA, 25 bp, Homo sapien
gaatcatctgcccctagatttaggg

SEQ ID NO: 5214345 - DNA, 25 bp, Homo sapien
tacacttcagactactgcagtaaga

SEQ ID NO: 5214346 - DNA, 25 bp, Homo sapien
caaaggcactctctcttaaaactat

SEQ ID NO: 5214347 - DNA, 25 bp, Homo sapien
tgagagttctgaccccatgtccgat

SEQ ID NO: 5214348 - DNA, 25 bp, Homo sapien
cacatggtagaagagataagtcttc

SEQ ID NO: 5214349 - DNA, 25 bp, Homo sapien
caaacatttagaccatggaacttat

SEQ ID NO: 5214350 - DNA, 25 bp, Homo sapien
ggttagctatgttatgtcttctaca

SEQ ID NO: 5214351 - DNA, 25 bp, Homo sapien
cctgagaagcagatatgtagcagat

SEQ ID NO: 5214352 - DNA, 25 bp, Homo sapien
tagcagatctcttattgcattaata

SEQ ID NO: 5214353 - DNA, 25 bp, Homo sapien
catcacagcttcatgtataggttag

SEQ ID NO: 5214354 - DNA, 25 bp, Homo sapien
tttgcatctttgccttgtgagagcc

SEQ ID NO: 5214355 - DNA, 25 bp, Homo sapien
tgcatctttgccttgtgagagccat

SEQ ID NO: 5214356 - DNA, 25 bp, Homo sapien
ctttgcatctttgccttgtgagagc

SEQ ID NO: 5214357 - DNA, 25 bp, Homo sapien
ttgcatctttgccttgtgagagcca

SEQ ID NO: 5214358 - DNA, 25 bp, Homo sapien
gacagctcagatgtaggaacaacac

SEQ ID NO: 5214359 - DNA, 25 bp, Homo sapien
gatgtcgatcactaatcagcaggtt

SEQ ID NO: 5214360 - DNA, 25 bp, Homo sapien
gaatatacagaacagattgcagcct

SEQ ID NO: 5214361 - DNA, 25 bp, Homo sapien
gcacaagctatgtttataagacagc

SEQ ID NO: 5214362 - DNA, 25 bp, Homo sapien
ggagtgtgcatctgttcaaactttc

SEQ ID NO: 5214363 - DNA, 25 bp, Homo sapien
tgtgtactgctgcaaggagtgtgca

SEQ ID NO: 5214364 - DNA, 25 bp, Homo sapien
gttcaactatgccaatgctgggagt

SEQ ID NO: 5214365 - DNA, 25 bp, Homo sapien
ggaggacagtttggcatgactaaat

SEQ ID NO: 5214366 - DNA, 25 bp, Homo sapien
tcagaggtcttagaaaagggtgtca

SEQ ID NO: 5214367 - DNA, 25 bp, Homo sapien
gaggtcttagaaaagggtgtcacag

SEQ ID NO: 5214368 - DNA, 25 bp, Homo sapien
cttcagaggtcttagaaaagggtgt

SEQ ID NO: 5214369 - DNA, 25 bp, Homo sapien
ggtcttagaaaagggtgtcacagcc

SEQ ID NO: 5214370 - DNA, 25 bp, Homo sapien
tctttgttcctgttatcttcagaag

SEQ ID NO: 5214371 - DNA, 25 bp, Homo sapien
tgttcctgttatcttcagaaggagg

SEQ ID NO: 5214372 - DNA, 25 bp, Homo sapien
ttcctgttatcttcagaaggaggag

SEQ ID NO: 5214373 - DNA, 25 bp, Homo sapien
ttatcttcagaaggaggagaaccat

SEQ ID NO: 5214374 - DNA, 25 bp, Homo sapien
ttccctagctgctgcttggagagtc

SEQ ID NO: 5214375 - DNA, 25 bp, Homo sapien
tttctgctggcttccctagctgctg

SEQ ID NO: 5214376 - DNA, 25 bp, Homo sapien
tgctgcttggagagtccagctgatt

SEQ ID NO: 5214377 - DNA, 25 bp, Homo sapien
gcttggagagtccagctgattcagc

SEQ ID NO: 5214378 - DNA, 25 bp, Homo sapien
gggattttcccaaacactctctgca

SEQ ID NO: 5214379 - DNA, 25 bp, Homo sapien
agagggacagatttttcgcaaatgg

SEQ ID NO: 5214380 - DNA, 25 bp, Homo sapien
gatttttcgcaaatggtgcctgtgc

SEQ ID NO: 5214381 - DNA, 25 bp, Homo sapien
tctctgcacaatgagggctctttcc

SEQ ID NO: 5214382 - DNA, 25 bp, Homo sapien
atgaccagtgatgaggagcattaat

SEQ ID NO: 5214383 - DNA, 25 bp, Homo sapien
cagtgatgaggagcattaatttgct

SEQ ID NO: 5214384 - DNA, 25 bp, Homo sapien
gaccagtgatgaggagcattaattt

SEQ ID NO: 5214385 - DNA, 25 bp, Homo sapien
ccagtgatgaggagcattaatttgc

SEQ ID NO: 5214386 - DNA, 25 bp, Homo sapien
gtatctatgatattaaggtcattag

SEQ ID NO: 5214387 - DNA, 25 bp, Homo sapien
gtttgtgatggtagtcaatgtatcc

SEQ ID NO: 5214388 - DNA, 25 bp, Homo sapien
caatgtatcctcagtagttttcaag

SEQ ID NO: 5214389 - DNA, 25 bp, Homo sapien
gtgtcatggacttctctctatttca

SEQ ID NO: 5214390 - DNA, 25 bp, Homo sapien
ataactttctacaaatgtctctgca

SEQ ID NO: 5214391 - DNA, 25 bp, Homo sapien
atataggctgctgaggataaatatt

SEQ ID NO: 5214392 - DNA, 25 bp, Homo sapien
aggctgctgaggataaatattttcc

SEQ ID NO: 5214393 - DNA, 25 bp, Homo sapien
aataactttctacaaatgtctctgc

SEQ ID NO: 5214394 - DNA, 25 bp, Homo sapien
gtgaatgatgccttagccccagttt

SEQ ID NO: 5214395 - DNA, 25 bp, Homo sapien
tgtgaatgatgccttagccccagtt

SEQ ID NO: 5214396 - DNA, 25 bp, Homo sapien
taatcagggcattttcttgaccaag

SEQ ID NO: 5214397 - DNA, 25 bp, Homo sapien
ttaatcagggcattttcttgaccaa

SEQ ID NO: 5214398 - DNA, 25 bp, Homo sapien
tatccaggacggacacattggctca

SEQ ID NO: 5214399 - DNA, 25 bp, Homo sapien
gagtatccaggacggacacattggc

SEQ ID NO: 5214400 - DNA, 25 bp, Homo sapien
aagaaataagagtatccaggacgga

SEQ ID NO: 5214401 - DNA, 25 bp, Homo sapien
taagagtatccaggacggacacatt

SEQ ID NO: 5214402 - DNA, 25 bp, Homo sapien
gcaggaagaatcaccaatttcatgg

SEQ ID NO: 5214403 - DNA, 25 bp, Homo sapien
ctgcaggaagaatcaccaatttcat

SEQ ID NO: 5214404 - DNA, 25 bp, Homo sapien
tgcaggaagaatcaccaatttcatg

SEQ ID NO: 5214405 - DNA, 25 bp, Homo sapien
ctagccattaggagaagcaacttct

SEQ ID NO: 5214406 - DNA, 25 bp, Homo sapien
gccattaggagaagcaacttctgta

SEQ ID NO: 5214407 - DNA, 25 bp, Homo sapien
taggagaagcaacttctgtattctc

SEQ ID NO: 5214408 - DNA, 25 bp, Homo sapien
ggagaagcaacttctgtattctctt

SEQ ID NO: 5214409 - DNA, 25 bp, Homo sapien
ctaaggaacaaaaagtccgacatca

SEQ ID NO: 5214410 - DNA, 25 bp, Homo sapien
ctttcaatgagtccatgttcctaat

SEQ ID NO: 5214411 - DNA, 25 bp, Homo sapien
ccatgttcctaatttttcttggtca

SEQ ID NO: 5214412 - DNA, 25 bp, Homo sapien
tagtttatgccaaatcattccatat

SEQ ID NO: 5214413 - DNA, 25 bp, Homo sapien
gggggttgctggaagccctacttca

SEQ ID NO: 5214414 - DNA, 25 bp, Homo sapien
gttgctggaagccctacttcagatc

SEQ ID NO: 5214415 - DNA, 25 bp, Homo sapien
gggttgctggaagccctacttcaga

SEQ ID NO: 5214416 - DNA, 25 bp, Homo sapien
gctggaagccctacttcagatccca

SEQ ID NO: 5214417 - DNA, 25 bp, Homo sapien
aaactactgcgttctaggcaggacc

SEQ ID NO: 5214418 - DNA, 25 bp, Homo sapien
gtccctgggtgagcctaattcagaa

SEQ ID NO: 5214419 - DNA, 25 bp, Homo sapien
ggacttagtattagccactgtggaa

SEQ ID NO: 5214420 - DNA, 25 bp, Homo sapien
tgcacatcaatagacgtccctgggt

SEQ ID NO: 5214421 - DNA, 25 bp, Homo sapien
tccagaagactcaaactttgggttc

SEQ ID NO: 5214422 - DNA, 25 bp, Homo sapien
caaactttgggttctagatcatgaa

SEQ ID NO: 5214423 - DNA, 25 bp, Homo sapien
gggttctagatcatgaagagtttga

SEQ ID NO: 5214424 - DNA, 25 bp, Homo sapien
ttgtcctcagttagtgaatcactaa

SEQ ID NO: 5214425 - DNA, 25 bp, Homo sapien
tattgctaaagttaaccactgggtg

SEQ ID NO: 5214426 - DNA, 25 bp, Homo sapien
gatagagctgtccatatctaggatg

SEQ ID NO: 5214427 - DNA, 25 bp, Homo sapien
ccactgggtgaactaaaagatccca

SEQ ID NO: 5214428 - DNA, 25 bp, Homo sapien
taattatgggattatcgtgcctagc

SEQ ID NO: 5214429 - DNA, 25 bp, Homo sapien
tgaaatactcccacaagtgaattgt

SEQ ID NO: 5214430 - DNA, 25 bp, Homo sapien
tctgtctctaaactcaaggccttga

SEQ ID NO: 5214431 - DNA, 25 bp, Homo sapien
actgccatgggatgtaggcccctat

SEQ ID NO: 5214432 - DNA, 25 bp, Homo sapien
gaagtgtttattgccagcaatctga

SEQ ID NO: 5214433 - DNA, 25 bp, Homo sapien
gttaatgtaacaagtattcccactg

SEQ ID NO: 5214434 - DNA, 25 bp, Homo sapien
cccactgttagatgagtgttgagcc

SEQ ID NO: 5214435 - DNA, 25 bp, Homo sapien
cctgatactggcgtttcttccctta

SEQ ID NO: 5214436 - DNA, 25 bp, Homo sapien
ggagtctgtcagtaaatcttgttaa

SEQ ID NO: 5214437 - DNA, 25 bp, Homo sapien
cttctgcagtggcatgtgtgacaaa

SEQ ID NO: 5214438 - DNA, 25 bp, Homo sapien
ctcttctgcagtggcatgtgtgaca

SEQ ID NO: 5214439 - DNA, 25 bp, Homo sapien
ttctgcagtggcatgtgtgacaaaa

SEQ ID NO: 5214440 - DNA, 25 bp, Homo sapien
cctcttctgcagtggcatgtgtgac

SEQ ID NO: 5214441 - DNA, 25 bp, Homo sapien
ccagtaacggtatggtcgtcaaagt

SEQ ID NO: 5214442 - DNA, 25 bp, Homo sapien
tggtcattcccagtaacggtatggt

SEQ ID NO: 5214443 - DNA, 25 bp, Homo sapien
tatggtcgtcaaagtttacaagcgc

SEQ ID NO: 5214444 - DNA, 25 bp, Homo sapien
caaagtttacaagcgcaaagcccct

SEQ ID NO: 5214445 - DNA, 25 bp, Homo sapien
gacttggcattactctgaaggaatt

SEQ ID NO: 5214446 - DNA, 25 bp, Homo sapien
ggacttggcattactctgaaggaat

SEQ ID NO: 5214447 - DNA, 25 bp, Homo sapien
ataggacttggcattactctgaagg

SEQ ID NO: 5214448 - DNA, 25 bp, Homo sapien
catgcccaactctgatgccaattga

SEQ ID NO: 5214449 - DNA, 25 bp, Homo sapien
caactctgatgccaattgaagtctt

SEQ ID NO: 5214450 - DNA, 25 bp, Homo sapien
tgcccaactctgatgccaattgaag

SEQ ID NO: 5214451 - DNA, 25 bp, Homo sapien
ctctgatgccaattgaagtcttctg

SEQ ID NO: 5214452 - DNA, 25 bp, Homo sapien
acctggaggagcagaaatagttatc

SEQ ID NO: 5214453 - DNA, 25 bp, Homo sapien
cctttacctggaggagcagaaatag

SEQ ID NO: 5214454 - DNA, 25 bp, Homo sapien
atcctttacctggaggagcagaaat

SEQ ID NO: 5214455 - DNA, 25 bp, Homo sapien
ttacctggaggagcagaaatagtta

SEQ ID NO: 5214456 - DNA, 25 bp, Homo sapien
ctttcctcttagaaactcatcaaat

SEQ ID NO: 5214457 - DNA, 25 bp, Homo sapien
cccatacttcctactctgagatgtc

SEQ ID NO: 5214458 - DNA, 25 bp, Homo sapien
agtgtcgggcgacttttcccgcagc

SEQ ID NO: 5214459 - DNA, 25 bp, Homo sapien
tgaaagccaagtgtcgggcgacttt

SEQ ID NO: 5214460 - DNA, 25 bp, Homo sapien
gtcgggcgacttttcccgcagccat

SEQ ID NO: 5214461 - DNA, 25 bp, Homo sapien
caagtgtcgggcgacttttcccgca

SEQ ID NO: 5214462 - DNA, 25 bp, Homo sapien
agacctcctcatctagaaatgctcc

SEQ ID NO: 5214463 - DNA, 25 bp, Homo sapien
ctggtgccaagacctcctcatctag

SEQ ID NO: 5214464 - DNA, 25 bp, Homo sapien
agagaagcccccaatacaggacaat

SEQ ID NO: 5214465 - DNA, 25 bp, Homo sapien
ccccaatacaggacaatataatcca

SEQ ID NO: 5214466 - DNA, 25 bp, Homo sapien
tgccatctctaaggcttcaacccag

SEQ ID NO: 5214467 - DNA, 25 bp, Homo sapien
gcttcaacccagtctttcgaggcag

SEQ ID NO: 5214468 - DNA, 25 bp, Homo sapien
ccagtctttcgaggcagttgcggat

SEQ ID NO: 5214469 - DNA, 25 bp, Homo sapien
tctaaggcttcaacccagtctttcg

SEQ ID NO: 5214470 - DNA, 25 bp, Homo sapien
atttcacatatgactgaacactgaa

SEQ ID NO: 5214471 - DNA, 25 bp, Homo sapien
tgcttagctgcatctttaccctcca

SEQ ID NO: 5214472 - DNA, 25 bp, Homo sapien
tctatttcacatatgactgaacact

SEQ ID NO: 5214473 - DNA, 25 bp, Homo sapien
gcttagctgcatctttaccctccat

SEQ ID NO: 5214474 - DNA, 25 bp, Homo sapien
ctgccctcaaaggaagatttcttct

SEQ ID NO: 5214475 - DNA, 25 bp, Homo sapien
gccctcaaaggaagatttcttctgt

SEQ ID NO: 5214476 - DNA, 25 bp, Homo sapien
tgccctcaaaggaagatttcttctg

SEQ ID NO: 5214477 - DNA, 25 bp, Homo sapien
ccctcaaaggaagatttcttctgtc

SEQ ID NO: 5214478 - DNA, 25 bp, Homo sapien
tgaggcaagcatccaatacaggatt

SEQ ID NO: 5214479 - DNA, 25 bp, Homo sapien
gatcatagagcatcctgtggagttt

SEQ ID NO: 5214480 - DNA, 25 bp, Homo sapien
aatccccaaatgaggcaagcatcca

SEQ ID NO: 5214481 - DNA, 25 bp, Homo sapien
catcctgtggagttttgtgttactc

SEQ ID NO: 5214482 - DNA, 25 bp, Homo sapien
tatcctcattttatattgataagtt

SEQ ID NO: 5214483 - DNA, 25 bp, Homo sapien
ctagttgacaaccaatatcctcatt

SEQ ID NO: 5214484 - DNA, 25 bp, Homo sapien
aatatccccccagtctgctatttct

SEQ ID NO: 5214485 - DNA, 25 bp, Homo sapien
ttttacatctactggtcaattccac

SEQ ID NO: 5214486 - DNA, 25 bp, Homo sapien
aaaaggacttgatggacaagatcaa

SEQ ID NO: 5214487 - DNA, 25 bp, Homo sapien
gaatacctatcagactcaataagtt

SEQ ID NO: 5214488 - DNA, 25 bp, Homo sapien
ggaatgtatgtgatcttcttcagtt

SEQ ID NO: 5214489 - DNA, 25 bp, Homo sapien
gacaagatcaaggaccaccacacaa

SEQ ID NO: 5214490 - DNA, 25 bp, Homo sapien
atttttctagtgtagatcattgcag

SEQ ID NO: 5214491 - DNA, 25 bp, Homo sapien
tatttttctagtgtagatcattgca

SEQ ID NO: 5214492 - DNA, 25 bp, Homo sapien
ttttctagtgtagatcattgcagat

SEQ ID NO: 5214493 - DNA, 25 bp, Homo sapien
tttttctagtgtagatcattgcaga

SEQ ID NO: 5214494 - DNA, 25 bp, Homo sapien
gaaacctcttccaggagttgtgtgg

SEQ ID NO: 5214495 - DNA, 25 bp, Homo sapien
tgcagggcccaataagtaggctact

SEQ ID NO: 5214496 - DNA, 25 bp, Homo sapien
gttgtgtggtcctcatgtagctgtc

SEQ ID NO: 5214497 - DNA, 25 bp, Homo sapien
gcttttgagtgaggtgacaggctac

SEQ ID NO: 5214498 - DNA, 25 bp, Homo sapien
agggaatgaattccttccagcagct

SEQ ID NO: 5214499 - DNA, 25 bp, Homo sapien
ttctttcattacagtcacacaggca

SEQ ID NO: 5214500 - DNA, 25 bp, Homo sapien
aaacaaagctggtatgccctcacca

SEQ ID NO: 5214501 - DNA, 25 bp, Homo sapien
tcaccacaggacctttgaacttgat

SEQ ID NO: 5214502 - DNA, 25 bp, Homo sapien
attgccgattgccttgattaatacc

SEQ ID NO: 5214503 - DNA, 25 bp, Homo sapien
gacattgccgattgccttgattaat

SEQ ID NO: 5214504 - DNA, 25 bp, Homo sapien
tgccgattgccttgattaataccat

SEQ ID NO: 5214505 - DNA, 25 bp, Homo sapien
ctgacattgccgattgccttgatta

SEQ ID NO: 5214506 - DNA, 25 bp, Homo sapien
tgtggacatttggaaaagaaaagta

SEQ ID NO: 5214507 - DNA, 25 bp, Homo sapien
ctgtggacatttggaaaagaaaagt

SEQ ID NO: 5214508 - DNA, 25 bp, Homo sapien
tggacatttggaaaagaaaagtata

SEQ ID NO: 5214509 - DNA, 25 bp, Homo sapien
cagaagacttcaattcatgatctaa

SEQ ID NO: 5214510 - DNA, 25 bp, Homo sapien
tgtttaggtgtgctttcaaaatcgt

SEQ ID NO: 5214511 - DNA, 25 bp, Homo sapien
taacttttggctgtcctcattgcct

SEQ ID NO: 5214512 - DNA, 25 bp, Homo sapien
tttttcactgagctagttctacagg

SEQ ID NO: 5214513 - DNA, 25 bp, Homo sapien
cctttgatattggatggtagttatt

SEQ ID NO: 5214514 - DNA, 25 bp, Homo sapien
tttttcatctacctttgatattgga

SEQ ID NO: 5214515 - DNA, 25 bp, Homo sapien
catctacctttgatattggatggta

SEQ ID NO: 5214516 - DNA, 25 bp, Homo sapien
tattggatggtagttattaaggtgc

SEQ ID NO: 5214517 - DNA, 25 bp, Homo sapien
cagattcatgtatgtggcattggta

SEQ ID NO: 5214518 - DNA, 25 bp, Homo sapien
ggcattggtattcacacaaaatcca

SEQ ID NO: 5214519 - DNA, 25 bp, Homo sapien
ccatttatagagttgttgtcaaata

SEQ ID NO: 5214520 - DNA, 25 bp, Homo sapien
aatccatttatagagttgttgtcaa

SEQ ID NO: 5214521 - DNA, 25 bp, Homo sapien
tcttgaggaagattccaatgaactg

SEQ ID NO: 5214522 - DNA, 25 bp, Homo sapien
ccatatgttggcattgagaatacca

SEQ ID NO: 5214523 - DNA, 25 bp, Homo sapien
tatttccacgggcaaattaccaaga

SEQ ID NO: 5214524 - DNA, 25 bp, Homo sapien
ccaagaaggtattcagtagtagaga

SEQ ID NO: 5214525 - DNA, 25 bp, Homo sapien
ttctttatcagggatcatcaacata

SEQ ID NO: 5214526 - DNA, 25 bp, Homo sapien
tctttatcagggatcatcaacatat

SEQ ID NO: 5214527 - DNA, 25 bp, Homo sapien
ctttatcagggatcatcaacatatg

SEQ ID NO: 5214528 - DNA, 25 bp, Homo sapien
aaggtgtcagagtcatagtcaggat

SEQ ID NO: 5214529 - DNA, 25 bp, Homo sapien
aaaggtgtcagagtcatagtcagga

SEQ ID NO: 5214530 - DNA, 25 bp, Homo sapien
ctaaaggtcttcaaaggtgtcagag

SEQ ID NO: 5214531 - DNA, 25 bp, Homo sapien
aggtgtcagagtcatagtcaggatt

SEQ ID NO: 5214532 - DNA, 25 bp, Homo sapien
tgttcctctgaaatgagagcccttt

SEQ ID NO: 5214533 - DNA, 25 bp, Homo sapien
cttctgtgttaagaatgttcctctg

SEQ ID NO: 5214534 - DNA, 25 bp, Homo sapien
tctgccttctgtgttaagaatgttc

SEQ ID NO: 5214535 - DNA, 25 bp, Homo sapien
tctgaaatgagagccctttggagga

SEQ ID NO: 5214536 - DNA, 25 bp, Homo sapien
gataatcatgtttgttttgtctgag

SEQ ID NO: 5214537 - DNA, 25 bp, Homo sapien
ctgacatacagaaggaagataatca

SEQ ID NO: 5214538 - DNA, 25 bp, Homo sapien
cttactgacatacagaaggaagata

SEQ ID NO: 5214539 - DNA, 25 bp, Homo sapien
tactgacatacagaaggaagataat

SEQ ID NO: 5214540 - DNA, 25 bp, Homo sapien
ctttggcagccttccacaccccaaa

SEQ ID NO: 5214541 - DNA, 25 bp, Homo sapien
ctctttggcagccttccacacccca

SEQ ID NO: 5214542 - DNA, 25 bp, Homo sapien
tggcagccttccacaccccaaaaac

SEQ ID NO: 5214543 - DNA, 25 bp, Homo sapien
ttggcagccttccacaccccaaaaa

SEQ ID NO: 5214544 - DNA, 25 bp, Homo sapien
tgctgtttgaataagatggaagtcc

SEQ ID NO: 5214545 - DNA, 25 bp, Homo sapien
tgtacagctccaacacccatattga

SEQ ID NO: 5214546 - DNA, 25 bp, Homo sapien
tttggactccacaacccattatttg

SEQ ID NO: 5214547 - DNA, 25 bp, Homo sapien
gggccaatggtgtcattctgttctt

SEQ ID NO: 5214548 - DNA, 25 bp, Homo sapien
tgattttccctgtggtatctgataa

SEQ ID NO: 5214549 - DNA, 25 bp, Homo sapien
gattttccctgtggtatctgataac

SEQ ID NO: 5214550 - DNA, 25 bp, Homo sapien
tccaggattgtctgtggctctagca

SEQ ID NO: 5214551 - DNA, 25 bp, Homo sapien
aggtgggaattaagtatgatggttc

SEQ ID NO: 5214552 - DNA, 25 bp, Homo sapien
ttctttgcacatactcccctccttc

SEQ ID NO: 5214553 - DNA, 25 bp, Homo sapien
ttccaggattgtctgtggctctagc

SEQ ID NO: 5214554 - DNA, 25 bp, Homo sapien
ccaactgtaaaaattccttatatca

SEQ ID NO: 5214555 - DNA, 25 bp, Homo sapien
cattttcgaagtggttttggcaaca

SEQ ID NO: 5214556 - DNA, 25 bp, Homo sapien
tcatgatttgaaggcataatataag

SEQ ID NO: 5214557 - DNA, 25 bp, Homo sapien
gagggatggcaaatgtacaggaaca

SEQ ID NO: 5214558 - DNA, 25 bp, Homo sapien
caggaatactagctaattctcggac

SEQ ID NO: 5214559 - DNA, 25 bp, Homo sapien
taattctcggactggaggctgggat

SEQ ID NO: 5214560 - DNA, 25 bp, Homo sapien
tgggatgcccagaagatgtgcaaat

SEQ ID NO: 5214561 - DNA, 25 bp, Homo sapien
ggcatttatgccgagttttatatca

SEQ ID NO: 5214562 - DNA, 25 bp, Homo sapien
caacttggaactactattaactcta

SEQ ID NO: 5214563 - DNA, 25 bp, Homo sapien
tctgtgttgtaatactgagtatacc

SEQ ID NO: 5214564 - DNA, 25 bp, Homo sapien
actattaactctatggatatctgtg

SEQ ID NO: 5214565 - DNA, 25 bp, Homo sapien
gagtataccaataatctgttgattt

SEQ ID NO: 5214566 - DNA, 25 bp, Homo sapien
tggttttccttacatgctgtcacag

SEQ ID NO: 5214567 - DNA, 25 bp, Homo sapien
ggagtcagctgattgctaacactac

SEQ ID NO: 5214568 - DNA, 25 bp, Homo sapien
tgtccactggtgatactgaaactcc

SEQ ID NO: 5214569 - DNA, 25 bp, Homo sapien
gcatctatagagtgttgctgaaact

SEQ ID NO: 5214570 - DNA, 25 bp, Homo sapien
tattggtatgggcggcccttttctc

SEQ ID NO: 5214571 - DNA, 25 bp, Homo sapien
ttggtatgggcggcccttttctctg

SEQ ID NO: 5214572 - DNA, 25 bp, Homo sapien
attggtatgggcggcccttttctct

SEQ ID NO: 5214573 - DNA, 25 bp, Homo sapien
catcactgtattttccgttgacaat

SEQ ID NO: 5214574 - DNA, 25 bp, Homo sapien
cagtctcgagctctgatctctggcc

SEQ ID NO: 5214575 - DNA, 25 bp, Homo sapien
ctagaatatgtgttttaagtttcca

SEQ ID NO: 5214576 - DNA, 25 bp, Homo sapien
ttccaattgtattctcagtctcgag

SEQ ID NO: 5214577 - DNA, 25 bp, Homo sapien
catatctattgagatttgcaacata

SEQ ID NO: 5214578 - DNA, 25 bp, Homo sapien
cttcttcttcttatagctatcaaca

SEQ ID NO: 5214579 - DNA, 25 bp, Homo sapien
ttcttcttcttatagctatcaacag

SEQ ID NO: 5214580 - DNA, 25 bp, Homo sapien
cttcttttatttgcaacgtatagaa

SEQ ID NO: 5214581 - DNA, 25 bp, Homo sapien
tttaacgatctcaaaatatgggcca

SEQ ID NO: 5214582 - DNA, 25 bp, Homo sapien
taacgatctcaaaatatgggccaat

SEQ ID NO: 5214583 - DNA, 25 bp, Homo sapien
ttaacgatctcaaaatatgggccaa

SEQ ID NO: 5214584 - DNA, 25 bp, Homo sapien
cttttaacgatctcaaaatatgggc

SEQ ID NO: 5214585 - DNA, 25 bp, Homo sapien
ctgttggaaaggttacagaaatgac

SEQ ID NO: 5214586 - DNA, 25 bp, Homo sapien
tgttggaaaggttacagaaatgaca

SEQ ID NO: 5214587 - DNA, 25 bp, Homo sapien
gttggaaaggttacagaaatgacaa

SEQ ID NO: 5214588 - DNA, 25 bp, Homo sapien
ttatgccgaatctcccaatgccaac

SEQ ID NO: 5214589 - DNA, 25 bp, Homo sapien
ccaacagttgttgatgtctctaaga

SEQ ID NO: 5214590 - DNA, 25 bp, Homo sapien
agatattctgcatcttggtcccagg

SEQ ID NO: 5214591 - DNA, 25 bp, Homo sapien
tctaagaacagatggtttgtgggag

SEQ ID NO: 5214592 - DNA, 25 bp, Homo sapien
gatatatttgggttagaaggtagaa

SEQ ID NO: 5214593 - DNA, 25 bp, Homo sapien
ggttagaaggtagaagccaagagaa

SEQ ID NO: 5214594 - DNA, 25 bp, Homo sapien
tatttgggttagaaggtagaagcca

SEQ ID NO: 5214595 - DNA, 25 bp, Homo sapien
gaagccaagagaattggttcatgga

SEQ ID NO: 5214596 - DNA, 25 bp, Homo sapien
tatgcttgcaaacttgagaagtggc

SEQ ID NO: 5214597 - DNA, 25 bp, Homo sapien
ggtccagaggctaagtaagagttca

SEQ ID NO: 5214598 - DNA, 25 bp, Homo sapien
taagtgaacaagatgactcatctgg

SEQ ID NO: 5214599 - DNA, 25 bp, Homo sapien
catctgggtcgaacatcctctgtca

SEQ ID NO: 5214600 - DNA, 25 bp, Homo sapien
tcagagaggctaaacgacttagcca

SEQ ID NO: 5214601 - DNA, 25 bp, Homo sapien
gttccattatacattgccgactcat

SEQ ID NO: 5214602 - DNA, 25 bp, Homo sapien
tttatccacatcacaagccttcaga

SEQ ID NO: 5214603 - DNA, 25 bp, Homo sapien
gccagtcagccaagagtcaatttgt

SEQ ID NO: 5214604 - DNA, 25 bp, Homo sapien
ggagatcaggtatattcaatccact

SEQ ID NO: 5214605 - DNA, 25 bp, Homo sapien
ctcctggagatcaggtatattcaat

SEQ ID NO: 5214606 - DNA, 25 bp, Homo sapien
caggtatattcaatccacttggatc

SEQ ID NO: 5214607 - DNA, 25 bp, Homo sapien
gatcaggtatattcaatccacttgg

SEQ ID NO: 5214608 - DNA, 25 bp, Homo sapien
cataattcaggtagggaagaaagcc

SEQ ID NO: 5214609 - DNA, 25 bp, Homo sapien
tagtccgtggaaggccatagttcac

SEQ ID NO: 5214610 - DNA, 25 bp, Homo sapien
taacagcaaggataacagactccct

SEQ ID NO: 5214611 - DNA, 25 bp, Homo sapien
tattcctagggatggaaagacagca

SEQ ID NO: 5214612 - DNA, 25 bp, Homo sapien
ccatcataatattccgctacaatac

SEQ ID NO: 5214613 - DNA, 25 bp, Homo sapien
taatattccgctacaataccatcaa

SEQ ID NO: 5214614 - DNA, 25 bp, Homo sapien
aataccatcaacttcacatacacaa

SEQ ID NO: 5214615 - DNA, 25 bp, Homo sapien
ttccgctacaataccatcaacttca

SEQ ID NO: 5214616 - DNA, 25 bp, Homo sapien
gggatcttggtatcgacttcgaaat

SEQ ID NO: 5214617 - DNA, 25 bp, Homo sapien
gagctggaccagtttagccatccgt

SEQ ID NO: 5214618 - DNA, 25 bp, Homo sapien
cgaaattgagcagtagataggttcc

SEQ ID NO: 5214619 - DNA, 25 bp, Homo sapien
aagcactgggtacattgcctgccta

SEQ ID NO: 5214620 - DNA, 25 bp, Homo sapien
aatgagtaaacattaagacaaatag

SEQ ID NO: 5214621 - DNA, 25 bp, Homo sapien
aacattaagacaaatagatctttca

SEQ ID NO: 5214622 - DNA, 25 bp, Homo sapien
gaatgagtaaacattaagacaaata

SEQ ID NO: 5214623 - DNA, 25 bp, Homo sapien
taagacaaatagatctttcaaacaa

SEQ ID NO: 5214624 - DNA, 25 bp, Homo sapien
gataaattctgtgaatagagctaag

SEQ ID NO: 5214625 - DNA, 25 bp, Homo sapien
tgcaaaacggaggtcaatcatttca

SEQ ID NO: 5214626 - DNA, 25 bp, Homo sapien
taaggtcaaatacacattctgtgca

SEQ ID NO: 5214627 - DNA, 25 bp, Homo sapien
tcatcattttgggtatagtcagcag

SEQ ID NO: 5214628 - DNA, 25 bp, Homo sapien
tcatcttaacttttcgagaacttga

SEQ ID NO: 5214629 - DNA, 25 bp, Homo sapien
catcttaacttttcgagaacttgag

SEQ ID NO: 5214630 - DNA, 25 bp, Homo sapien
ttaacttttcgagaacttgagagga

SEQ ID NO: 5214631 - DNA, 25 bp, Homo sapien
tcttaacttttcgagaacttgagag

SEQ ID NO: 5214632 - DNA, 25 bp, Homo sapien
gattgcagggtactctctcctccac

SEQ ID NO: 5214633 - DNA, 25 bp, Homo sapien
tgtccactctttaggatctttccct

SEQ ID NO: 5214634 - DNA, 25 bp, Homo sapien
tccacaaaactgtccactctttagg

SEQ ID NO: 5214635 - DNA, 25 bp, Homo sapien
tcacagttgcccgattgcagggtac

SEQ ID NO: 5214636 - DNA, 25 bp, Homo sapien
caaagtttagtaggttgactcctag

SEQ ID NO: 5214637 - DNA, 25 bp, Homo sapien
tagtttgacccaaatgccttaggga

SEQ ID NO: 5214638 - DNA, 25 bp, Homo sapien
gccttagggaattataactcctgtg

SEQ ID NO: 5214639 - DNA, 25 bp, Homo sapien
caaaatagacttatgtgagatcgag

SEQ ID NO: 5214640 - DNA, 25 bp, Homo sapien
tgatgcctttcaggattccccccat

SEQ ID NO: 5214641 - DNA, 25 bp, Homo sapien
ccttggaaaatagccagccatgatg

SEQ ID NO: 5214642 - DNA, 25 bp, Homo sapien
cagccatgatgcctttcaggattcc

SEQ ID NO: 5214643 - DNA, 25 bp, Homo sapien
gccatgatgcctttcaggattcccc

SEQ ID NO: 5214644 - DNA, 25 bp, Homo sapien
ctctaacatgattgacactaacttc

SEQ ID NO: 5214645 - DNA, 25 bp, Homo sapien
tcataagttttctcaggtcttccca

SEQ ID NO: 5214646 - DNA, 25 bp, Homo sapien
catgattgacactaacttcagtgac

SEQ ID NO: 5214647 - DNA, 25 bp, Homo sapien
cctgaaggtattagacatggcgcaa

SEQ ID NO: 5214648 - DNA, 25 bp, Homo sapien
tttccttagaaattgcgtgctcata

SEQ ID NO: 5214649 - DNA, 25 bp, Homo sapien
ttgcgtgctcatagccaactccttg

SEQ ID NO: 5214650 - DNA, 25 bp, Homo sapien
cgtgctcatagccaactccttgact

SEQ ID NO: 5214651 - DNA, 25 bp, Homo sapien
tagaaattgcgtgctcatagccaac

SEQ ID NO: 5214652 - DNA, 25 bp, Homo sapien
gttttcctctttctctccttctctc

SEQ ID NO: 5214653 - DNA, 25 bp, Homo sapien
tagtctttcccatggtgggcctctt

SEQ ID NO: 5214654 - DNA, 25 bp, Homo sapien
agaggactaagtgtgggacataact

SEQ ID NO: 5214655 - DNA, 25 bp, Homo sapien
ataaggagagtaggcagaggactaa

SEQ ID NO: 5214656 - DNA, 25 bp, Homo sapien
gacataactgcattcccaccaaagg

SEQ ID NO: 5214657 - DNA, 25 bp, Homo sapien
cactgtatatctcaatgacatggac

SEQ ID NO: 5214658 - DNA, 25 bp, Homo sapien
gtaacctgaagtcaatatagctgtg

SEQ ID NO: 5214659 - DNA, 25 bp, Homo sapien
aagtcaatatagctgtgaaattcac

SEQ ID NO: 5214660 - DNA, 25 bp, Homo sapien
actgtatatctcaatgacatggaca

SEQ ID NO: 5214661 - DNA, 25 bp, Homo sapien
gatatgctgacagcttcaccagaaa

SEQ ID NO: 5214662 - DNA, 25 bp, Homo sapien
gatgggatcttgcagatatgctgac

SEQ ID NO: 5214663 - DNA, 25 bp, Homo sapien
gagggactgcaaaactaagatggga

SEQ ID NO: 5214664 - DNA, 25 bp, Homo sapien
ttcaccagaaattggagcttggcca

SEQ ID NO: 5214665 - DNA, 25 bp, Homo sapien
gagtaatacctgctgaggcatattc

SEQ ID NO: 5214666 - DNA, 25 bp, Homo sapien
ttggttgagtaatacctgctgaggc

SEQ ID NO: 5214667 - DNA, 25 bp, Homo sapien
aatacctgctgaggcatattctcca

SEQ ID NO: 5214668 - DNA, 25 bp, Homo sapien
cagcccatcctacctgactgtgcat

SEQ ID NO: 5214669 - DNA, 25 bp, Homo sapien
catgtatgtgacatgcagaggtgta

SEQ ID NO: 5214670 - DNA, 25 bp, Homo sapien
atgtatgtgacatgcagaggtgtag

SEQ ID NO: 5214671 - DNA, 25 bp, Homo sapien
tgtatgtgacatgcagaggtgtaga

SEQ ID NO: 5214672 - DNA, 25 bp, Homo sapien
acaaatgcatcaggctcaatactca

SEQ ID NO: 5214673 - DNA, 25 bp, Homo sapien
tcacaaatgcatcaggctcaatact

SEQ ID NO: 5214674 - DNA, 25 bp, Homo sapien
ttcacaaatgcatcaggctcaatac

SEQ ID NO: 5214675 - DNA, 25 bp, Homo sapien
ttttcacaaatgcatcaggctcaat

SEQ ID NO: 5214676 - DNA, 25 bp, Homo sapien
atttaagtccacttcaaaagtcctg

SEQ ID NO: 5214677 - DNA, 25 bp, Homo sapien
gcaacaccatttcatgcttaacgcc

SEQ ID NO: 5214678 - DNA, 25 bp, Homo sapien
catttaagtccacttcaaaagtcct

SEQ ID NO: 5214679 - DNA, 25 bp, Homo sapien
agaagcaacaccatttcatgcttaa

SEQ ID NO: 5214680 - DNA, 25 bp, Homo sapien
gaattcaaatggtttgaataggccc

SEQ ID NO: 5214681 - DNA, 25 bp, Homo sapien
taggccctgcacaaattgtcactgg

SEQ ID NO: 5214682 - DNA, 25 bp, Homo sapien
aacaattccacttgaattcaaatgg

SEQ ID NO: 5214683 - DNA, 25 bp, Homo sapien
aaatggtttgaataggccctgcaca

SEQ ID NO: 5214684 - DNA, 25 bp, Homo sapien
tttctgaaaagtgtatgccattcat

SEQ ID NO: 5214685 - DNA, 25 bp, Homo sapien
ttgggccctcctggttggatatcct

SEQ ID NO: 5214686 - DNA, 25 bp, Homo sapien
cctggttggatatcctcaacctgtt

SEQ ID NO: 5214687 - DNA, 25 bp, Homo sapien
atttctgaaaagtgtatgccattca

SEQ ID NO: 5214688 - DNA, 25 bp, Homo sapien
tcaggtgtcacaggatcagagaaag

SEQ ID NO: 5214689 - DNA, 25 bp, Homo sapien
catgtgttaaatgctacgtgggaag

SEQ ID NO: 5214690 - DNA, 25 bp, Homo sapien
ctgagactggcttcactagggttgc

SEQ ID NO: 5214691 - DNA, 25 bp, Homo sapien
tacaagggtgtttatcaggtgtcac

SEQ ID NO: 5214692 - DNA, 25 bp, Homo sapien
aatctgcctgcagttttaatgcagc

SEQ ID NO: 5214693 - DNA, 25 bp, Homo sapien
tgcctgcagttttaatgcagctttt

SEQ ID NO: 5214694 - DNA, 25 bp, Homo sapien
atctgcctgcagttttaatgcagct

SEQ ID NO: 5214695 - DNA, 25 bp, Homo sapien
tctgcctgcagttttaatgcagctt

SEQ ID NO: 5214696 - DNA, 25 bp, Homo sapien
gagattcattctgcatatcacagta

SEQ ID NO: 5214697 - DNA, 25 bp, Homo sapien
catctttgccgcctggttttacagg

SEQ ID NO: 5214698 - DNA, 25 bp, Homo sapien
catcagcaggaatatgctttcatct

SEQ ID NO: 5214699 - DNA, 25 bp, Homo sapien
tttgccatcagccacaatgagattc

SEQ ID NO: 5214700 - DNA, 25 bp, Homo sapien
aaacatttccaacgacaggacttgg

SEQ ID NO: 5214701 - DNA, 25 bp, Homo sapien
cccaaaaggactcattaggcttgtt

SEQ ID NO: 5214702 - DNA, 25 bp, Homo sapien
tcccagtgcttagagtactttcaca

SEQ ID NO: 5214703 - DNA, 25 bp, Homo sapien
tgaatgcttctgtaaaccccaaaag

SEQ ID NO: 5214704 - DNA, 25 bp, Homo sapien
cttctaaagaccgataaggggcatt

SEQ ID NO: 5214705 - DNA, 25 bp, Homo sapien
aaagaccgataaggggcattttgtg

SEQ ID NO: 5214706 - DNA, 25 bp, Homo sapien
taaggggcattttgtggtaatgtct

SEQ ID NO: 5214707 - DNA, 25 bp, Homo sapien
ccgataaggggcattttgtggtaat

SEQ ID NO: 5214708 - DNA, 25 bp, Homo sapien
tgggttggcgatggtgatgtaattc

SEQ ID NO: 5214709 - DNA, 25 bp, Homo sapien
ctagcttgggttggcgatggtgatg

SEQ ID NO: 5214710 - DNA, 25 bp, Homo sapien
agcttgggttggcgatggtgatgta

SEQ ID NO: 5214711 - DNA, 25 bp, Homo sapien
cttgggttggcgatggtgatgtaat

SEQ ID NO: 5214712 - DNA, 25 bp, Homo sapien
gatttatcctatctattgggtagcc

SEQ ID NO: 5214713 - DNA, 25 bp, Homo sapien
tatcctatctattgggtagccatca

SEQ ID NO: 5214714 - DNA, 25 bp, Homo sapien
tatctattgggtagccatcaaaagc

SEQ ID NO: 5214715 - DNA, 25 bp, Homo sapien
tttaagatttatcctatctattggg

SEQ ID NO: 5214716 - DNA, 25 bp, Homo sapien
ggtttattgaagctataacccaaga

SEQ ID NO: 5214717 - DNA, 25 bp, Homo sapien
ggattctacattgatctgagagtga

SEQ ID NO: 5214718 - DNA, 25 bp, Homo sapien
tagtactaacttcatcttcgagaaa

SEQ ID NO: 5214719 - DNA, 25 bp, Homo sapien
caagaaatcaaggaacgtggattct

SEQ ID NO: 5214720 - DNA, 25 bp, Homo sapien
aaactctttgaaaatggcatgaagt

SEQ ID NO: 5214721 - DNA, 25 bp, Homo sapien
aaaactctttgaaaatggcatgaag

SEQ ID NO: 5214722 - DNA, 25 bp, Homo sapien
aactctttgaaaatggcatgaagtt

SEQ ID NO: 5214723 - DNA, 25 bp, Homo sapien
aattgaacacataaggataaccaaa

SEQ ID NO: 5214724 - DNA, 25 bp, Homo sapien
taatcgtttaagcaccttcaagatc

SEQ ID NO: 5214725 - DNA, 25 bp, Homo sapien
aaaattgaacacataaggataacca

SEQ ID NO: 5214726 - DNA, 25 bp, Homo sapien
tttctggtccaataatcgtttaagc

SEQ ID NO: 5214727 - DNA, 25 bp, Homo sapien
gcttatgagattttcctcttagttt

SEQ ID NO: 5214728 - DNA, 25 bp, Homo sapien
tgagattttcctcttagttttctgg

SEQ ID NO: 5214729 - DNA, 25 bp, Homo sapien
ttagttttctggtaattttcatcat

SEQ ID NO: 5214730 - DNA, 25 bp, Homo sapien
ctatgcttatgagattttcctctta

SEQ ID NO: 5214731 - DNA, 25 bp, Homo sapien
tgtatatgtggacagattcctcgta

SEQ ID NO: 5214732 - DNA, 25 bp, Homo sapien
tacttgttcaagagaacagttcgct

SEQ ID NO: 5214733 - DNA, 25 bp, Homo sapien
cagagcactgaaatcgtctcagcac

SEQ ID NO: 5214734 - DNA, 25 bp, Homo sapien
gattcctcgtactgatacttgttca

SEQ ID NO: 5214735 - DNA, 25 bp, Homo sapien
gaacgatctatgtctctgcagctga

SEQ ID NO: 5214736 - DNA, 25 bp, Homo sapien
tcatggcagtgaacgatctatgtct

SEQ ID NO: 5214737 - DNA, 25 bp, Homo sapien
cagctgatggtcataccacctttct

SEQ ID NO: 5214738 - DNA, 25 bp, Homo sapien
tgcagctgatggtcataccaccttt

SEQ ID NO: 5214739 - DNA, 25 bp, Homo sapien
aattgtttcagcaagcccattccag

SEQ ID NO: 5214740 - DNA, 25 bp, Homo sapien
caataaagtaaaggtcagtcggcat

SEQ ID NO: 5214741 - DNA, 25 bp, Homo sapien
aaacattaaaatgccagcgagctgg

SEQ ID NO: 5214742 - DNA, 25 bp, Homo sapien
cagtcttcaaggctattattacagg

SEQ ID NO: 5214743 - DNA, 25 bp, Homo sapien
cttctctctatccatgtagccatgg

SEQ ID NO: 5214744 - DNA, 25 bp, Homo sapien
tcttctctctatccatgtagccatg

SEQ ID NO: 5214745 - DNA, 25 bp, Homo sapien
caatttgttcatagcatggcttcca

SEQ ID NO: 5214746 - DNA, 25 bp, Homo sapien
aattggataccacttagagacctga

SEQ ID NO: 5214747 - DNA, 25 bp, Homo sapien
tggcttccaagtactgagcacctga

SEQ ID NO: 5214748 - DNA, 25 bp, Homo sapien
gaagtggcattggaatacaaataaa

SEQ ID NO: 5214749 - DNA, 25 bp, Homo sapien
tcatataaccaatccacagtcgctg

SEQ ID NO: 5214750 - DNA, 25 bp, Homo sapien
gagtaacataaggagcccaagcatc

SEQ ID NO: 5214751 - DNA, 25 bp, Homo sapien
ccaatccacagtcgctggtattttc

SEQ ID NO: 5214752 - DNA, 25 bp, Homo sapien
agaatcctgctcatctgtttgtaga

SEQ ID NO: 5214753 - DNA, 25 bp, Homo sapien
atcaggaggtcaatgaaagcttccc

SEQ ID NO: 5214754 - DNA, 25 bp, Homo sapien
gaatcaggaggtcaatgaaagcttc

SEQ ID NO: 5214755 - DNA, 25 bp, Homo sapien
ggaggtcaatgaaagcttcccttac

SEQ ID NO: 5214756 - DNA, 25 bp, Homo sapien
caggaggtcaatgaaagcttccctt

SEQ ID NO: 5214757 - DNA, 25 bp, Homo sapien
atatagctactccattggccaatgc

SEQ ID NO: 5214758 - DNA, 25 bp, Homo sapien
ctttctggaccatatagctactcca

SEQ ID NO: 5214759 - DNA, 25 bp, Homo sapien
cttctggtcatctaaggcccacttt

SEQ ID NO: 5214760 - DNA, 25 bp, Homo sapien
ctggtcatctaaggcccactttctg

SEQ ID NO: 5214761 - DNA, 25 bp, Homo sapien
ttgcaataagaacccataataatag

SEQ ID NO: 5214762 - DNA, 25 bp, Homo sapien
agtggaaaagagctataatcatata

SEQ ID NO: 5214763 - DNA, 25 bp, Homo sapien
catgctctatctaaatgttttgcaa

SEQ ID NO: 5214764 - DNA, 25 bp, Homo sapien
ccttaatttaagattcatgctctat

SEQ ID NO: 5214765 - DNA, 25 bp, Homo sapien
attgactatcggagtgttcctgtga

SEQ ID NO: 5214766 - DNA, 25 bp, Homo sapien
atcaaattgactatcggagtgttcc

SEQ ID NO: 5214767 - DNA, 25 bp, Homo sapien
caaattgactatcggagtgttcctg

SEQ ID NO: 5214768 - DNA, 25 bp, Homo sapien
aattgactatcggagtgttcctgtg

SEQ ID NO: 5214769 - DNA, 25 bp, Homo sapien
taacagggtgaaaactcgctcagca

SEQ ID NO: 5214770 - DNA, 25 bp, Homo sapien
agcaccaccagatgacaccaaacca

SEQ ID NO: 5214771 - DNA, 25 bp, Homo sapien
cagggtgaaaactcgctcagcacca

SEQ ID NO: 5214772 - DNA, 25 bp, Homo sapien
ctcatggtatgtaacagggtgaaaa

SEQ ID NO: 5214773 - DNA, 25 bp, Homo sapien
ctggaggagatatgaaatcctgcca

SEQ ID NO: 5214774 - DNA, 25 bp, Homo sapien
tggaggagatatgaaatcctgccat

SEQ ID NO: 5214775 - DNA, 25 bp, Homo sapien
ttactgccacataatttaggacagc

SEQ ID NO: 5214776 - DNA, 25 bp, Homo sapien
cccacttcactacagatgttcttca

SEQ ID NO: 5214777 - DNA, 25 bp, Homo sapien
gatggggacttcacggaccatttgc

SEQ ID NO: 5214778 - DNA, 25 bp, Homo sapien
ttaggacagcccacttcactacaga

SEQ ID NO: 5214779 - DNA, 25 bp, Homo sapien
tctgaaactgactgaatatgtggat

SEQ ID NO: 5214780 - DNA, 25 bp, Homo sapien
gtttctgtgactgtcggtaaaagct

SEQ ID NO: 5214781 - DNA, 25 bp, Homo sapien
gtgactgtcggtaaaagctacaaat

SEQ ID NO: 5214782 - DNA, 25 bp, Homo sapien
tggatcttccctttatcacattgga

SEQ ID NO: 5214783 - DNA, 25 bp, Homo sapien
tcatctttgtccttcttgttagtgg

SEQ ID NO: 5214784 - DNA, 25 bp, Homo sapien
ctcatctttgtccttcttgttagtg

SEQ ID NO: 5214785 - DNA, 25 bp, Homo sapien
cactcatctttgtccttcttgttag

SEQ ID NO: 5214786 - DNA, 25 bp, Homo sapien
tcactcatctttgtccttcttgtta

SEQ ID NO: 5214787 - DNA, 25 bp, Homo sapien
atcccttgtattttagcctatgatg

SEQ ID NO: 5214788 - DNA, 25 bp, Homo sapien
tttagcctatgatgtgtggcataca

SEQ ID NO: 5214789 - DNA, 25 bp, Homo sapien
tatcccttgtattttagcctatgat

SEQ ID NO: 5214790 - DNA, 25 bp, Homo sapien
ctgtttatgacactctggctgtgct

SEQ ID NO: 5214791 - DNA, 25 bp, Homo sapien
gtgctcttggtgcttctaacagtcc

SEQ ID NO: 5214792 - DNA, 25 bp, Homo sapien
tgtttatgacactctggctgtgctc

SEQ ID NO: 5214793 - DNA, 25 bp, Homo sapien
tggctgtgctcttggtgcttctaac

SEQ ID NO: 5214794 - DNA, 25 bp, Homo sapien
tcttttgtctccattttggaggaca

SEQ ID NO: 5214795 - DNA, 25 bp, Homo sapien
tttcttttgtctccattttggagga

SEQ ID NO: 5214796 - DNA, 25 bp, Homo sapien
tgattttcttttgtctccattttgg

SEQ ID NO: 5214797 - DNA, 25 bp, Homo sapien
attttcttttgtctccattttggag

SEQ ID NO: 5214798 - DNA, 25 bp, Homo sapien
tggtgaaagtgggatccaagacttt

SEQ ID NO: 5214799 - DNA, 25 bp, Homo sapien
aagggtgatgctgcacattctatca

SEQ ID NO: 5214800 - DNA, 25 bp, Homo sapien
gctgaaagggtgatgctgcacattc

SEQ ID NO: 5214801 - DNA, 25 bp, Homo sapien
tgaaagtgggatccaagactttcaa

SEQ ID NO: 5214802 - DNA, 25 bp, Homo sapien
aggctgtgtctgatttatgggcttg

SEQ ID NO: 5214803 - DNA, 25 bp, Homo sapien
caacctcgaggctgtgtctgattta

SEQ ID NO: 5214804 - DNA, 25 bp, Homo sapien
gatttatgggcttggcttggttcca

SEQ ID NO: 5214805 - DNA, 25 bp, Homo sapien
tggcttggttccacccctcacagag

SEQ ID NO: 5214806 - DNA, 25 bp, Homo sapien
actggttgtatatcctggttctcaa

SEQ ID NO: 5214807 - DNA, 25 bp, Homo sapien
ctcaaatgctacctggttctcaaat

SEQ ID NO: 5214808 - DNA, 25 bp, Homo sapien
ggttgtatatcctggttctcaaatg

SEQ ID NO: 5214809 - DNA, 25 bp, Homo sapien
gttgtatatcctggttctcaaatgc

SEQ ID NO: 5214810 - DNA, 25 bp, Homo sapien
gatataaacccaagcatttgaactg

SEQ ID NO: 5214811 - DNA, 25 bp, Homo sapien
agcatttgaactggcggtggaaacc

SEQ ID NO: 5214812 - DNA, 25 bp, Homo sapien
cccaagcatttgaactggcggtgga

SEQ ID NO: 5214813 - DNA, 25 bp, Homo sapien
taaacccaagcatttgaactggcgg

SEQ ID NO: 5214814 - DNA, 25 bp, Homo sapien
gataggcactggaatttgctttgag

SEQ ID NO: 5214815 - DNA, 25 bp, Homo sapien
gcaccatcttacataactggaagtc

SEQ ID NO: 5214816 - DNA, 25 bp, Homo sapien
ttgctttgagtaagcagcaccatct

SEQ ID NO: 5214817 - DNA, 25 bp, Homo sapien
tatcttgcagctacatctatctgaa

SEQ ID NO: 5214818 - DNA, 25 bp, Homo sapien
ttcttcctacccattcctggaagcg

SEQ ID NO: 5214819 - DNA, 25 bp, Homo sapien
tggtctatttctggagtttttcttc

SEQ ID NO: 5214820 - DNA, 25 bp, Homo sapien
tctatttctggagtttttcttccta

SEQ ID NO: 5214821 - DNA, 25 bp, Homo sapien
tttcttcctacccattcctggaagc

SEQ ID NO: 5214822 - DNA, 25 bp, Homo sapien
cacagataggttccctcttccttag

SEQ ID NO: 5214823 - DNA, 25 bp, Homo sapien
aatcaatgcacagataggttccctc

SEQ ID NO: 5214824 - DNA, 25 bp, Homo sapien
tccttagacgatcttcccctcctca

SEQ ID NO: 5214825 - DNA, 25 bp, Homo sapien
tccaaatcaatgcacagataggttc

SEQ ID NO: 5214826 - DNA, 25 bp, Homo sapien
tagcctatccgatggcgaggagaga

SEQ ID NO: 5214827 - DNA, 25 bp, Homo sapien
ggagagatttctgctctgtaggatc

SEQ ID NO: 5214828 - DNA, 25 bp, Homo sapien
aaactgtgttgttggccgatttggg

SEQ ID NO: 5214829 - DNA, 25 bp, Homo sapien
tctgtaggatctgcctcgccctgga

SEQ ID NO: 5214830 - DNA, 25 bp, Homo sapien
ttcaaaagagttgggccaggttgtg

SEQ ID NO: 5214831 - DNA, 25 bp, Homo sapien
accaatggaacagtaggaaattctg

SEQ ID NO: 5214832 - DNA, 25 bp, Homo sapien
aattcaaaagagttgggccaggttg

SEQ ID NO: 5214833 - DNA, 25 bp, Homo sapien
ctcaacctccaagggagaaccaatg

SEQ ID NO: 5214834 - DNA, 25 bp, Homo sapien
tcatcatacccaaaatcaagttcat

SEQ ID NO: 5214835 - DNA, 25 bp, Homo sapien
catcatcatacccaaaatcaagttc

SEQ ID NO: 5214836 - DNA, 25 bp, Homo sapien
tcatcatcatacccaaaatcaagtt

SEQ ID NO: 5214837 - DNA, 25 bp, Homo sapien
catcatacccaaaatcaagttcata

SEQ ID NO: 5214838 - DNA, 25 bp, Homo sapien
tctgacctcgcctgctcagaggtac

SEQ ID NO: 5214839 - DNA, 25 bp, Homo sapien
ctctgtgaccacatctgagatgcac

SEQ ID NO: 5214840 - DNA, 25 bp, Homo sapien
acatcacaagcatcccctgcttggg

SEQ ID NO: 5214841 - DNA, 25 bp, Homo sapien
cagccttgggagtgtgctttgttct

SEQ ID NO: 5214842 - DNA, 25 bp, Homo sapien
gcagtgtagtaagtaacttccttgt

SEQ ID NO: 5214843 - DNA, 25 bp, Homo sapien
ctggcagtgtagtaagtaacttcct

SEQ ID NO: 5214844 - DNA, 25 bp, Homo sapien
gtctggaagcacctgattgtgttct

SEQ ID NO: 5214845 - DNA, 25 bp, Homo sapien
tctggaagcacctgattgtgttctc

SEQ ID NO: 5214846 - DNA, 25 bp, Homo sapien
tgccagaagctgtgtagcagcaaaa

SEQ ID NO: 5214847 - DNA, 25 bp, Homo sapien
taagtaatgtgagttaaagattcat

SEQ ID NO: 5214848 - DNA, 25 bp, Homo sapien
ggaatcttgatctgtgtaagtaatg

SEQ ID NO: 5214849 - DNA, 25 bp, Homo sapien
tcttgatctgtgtaagtaatgtgag

SEQ ID NO: 5214850 - DNA, 25 bp, Homo sapien
ctcgatggaatcttgatctgtgtaa

SEQ ID NO: 5214851 - DNA, 25 bp, Homo sapien
cttgcataactgctatgctctcctc

SEQ ID NO: 5214852 - DNA, 25 bp, Homo sapien
cattattctgtttcagggcaagtcc

SEQ ID NO: 5214853 - DNA, 25 bp, Homo sapien
agggcaagtccaccttgcataactg

SEQ ID NO: 5214854 - DNA, 25 bp, Homo sapien
tcagggcaagtccaccttgcataac

SEQ ID NO: 5214855 - DNA, 25 bp, Homo sapien
cagagcctgagtatttagattcttt

SEQ ID NO: 5214856 - DNA, 25 bp, Homo sapien
ccagagcctgagtatttagattctt

SEQ ID NO: 5214857 - DNA, 25 bp, Homo sapien
agagcctgagtatttagattctttc

SEQ ID NO: 5214858 - DNA, 25 bp, Homo sapien
tcatgaggttgaactgcttcttcat

SEQ ID NO: 5214859 - DNA, 25 bp, Homo sapien
ctgcttcatgaggttgaactgcttc

SEQ ID NO: 5214860 - DNA, 25 bp, Homo sapien
tgcttcatgaggttgaactgcttct

SEQ ID NO: 5214861 - DNA, 25 bp, Homo sapien
cttcatgaggttgaactgcttcttc

SEQ ID NO: 5214862 - DNA, 25 bp, Homo sapien
tgatgggttggggcatcatctgtca

SEQ ID NO: 5214863 - DNA, 25 bp, Homo sapien
gcagaggcttttcccgcatctgcac

SEQ ID NO: 5214864 - DNA, 25 bp, Homo sapien
ggagctgggttgaaaggccgcccat

SEQ ID NO: 5214865 - DNA, 25 bp, Homo sapien
ggtgcaggagctgggttgaaaggcc

SEQ ID NO: 5214866 - DNA, 25 bp, Homo sapien
caatcatgatagatgatgaagagga

SEQ ID NO: 5214867 - DNA, 25 bp, Homo sapien
tgcaatcatgatagatgatgaagag

SEQ ID NO: 5214868 - DNA, 25 bp, Homo sapien
cttgcaatcatgatagatgatgaag

SEQ ID NO: 5214869 - DNA, 25 bp, Homo sapien
gcaatcatgatagatgatgaagagg

SEQ ID NO: 5214870 - DNA, 25 bp, Homo sapien
cagtaactattatagcatgagcaaa

SEQ ID NO: 5214871 - DNA, 25 bp, Homo sapien
tagattccttacacaacttagtcct

SEQ ID NO: 5214872 - DNA, 25 bp, Homo sapien
tgtcagtaactattatagcatgagc

SEQ ID NO: 5214873 - DNA, 25 bp, Homo sapien
gcctgacagtgtagattccttacac

SEQ ID NO: 5214874 - DNA, 25 bp, Homo sapien
gaaattgaaaattaatgtaatgttc

SEQ ID NO: 5214875 - DNA, 25 bp, Homo sapien
ttcttcctgaaattgaaaattaatg

SEQ ID NO: 5214876 - DNA, 25 bp, Homo sapien
cttcctgaaattgaaaattaatgta

SEQ ID NO: 5214877 - DNA, 25 bp, Homo sapien
ctaagcattacaaaagtaattttct

SEQ ID NO: 5214878 - DNA, 25 bp, Homo sapien
agaggtctcacctctactgatttca

SEQ ID NO: 5214879 - DNA, 25 bp, Homo sapien
gaatctagctgtcatatgaagtcag

SEQ ID NO: 5214880 - DNA, 25 bp, Homo sapien
gccaaggcatcaagaggtctcacct

SEQ ID NO: 5214881 - DNA, 25 bp, Homo sapien
ccttgaatttgtggtggccttgtga

SEQ ID NO: 5214882 - DNA, 25 bp, Homo sapien
gaacttggcggttctcttccagtgc

SEQ ID NO: 5214883 - DNA, 25 bp, Homo sapien
gctaggacaatggatatctcagtga

SEQ ID NO: 5214884 - DNA, 25 bp, Homo sapien
ctggacattatatgagctaggacaa

SEQ ID NO: 5214885 - DNA, 25 bp, Homo sapien
gacaccagtttgcactgacagctga

SEQ ID NO: 5214886 - DNA, 25 bp, Homo sapien
tcctctgaagaactgaccatattat

SEQ ID NO: 5214887 - DNA, 25 bp, Homo sapien
tgttcccacaaatgcgatcactgag

SEQ ID NO: 5214888 - DNA, 25 bp, Homo sapien
gacttctacttagtctttacttcag

SEQ ID NO: 5214889 - DNA, 25 bp, Homo sapien
tttgaggccagatgaaattttcctc

SEQ ID NO: 5214890 - DNA, 25 bp, Homo sapien
catgttggtacatggcctaacccca

SEQ ID NO: 5214891 - DNA, 25 bp, Homo sapien
ttgcaccacccgtttttctgtggag

SEQ ID NO: 5214892 - DNA, 25 bp, Homo sapien
ctgttgcttttggaagcctttcctc

SEQ ID NO: 5214893 - DNA, 25 bp, Homo sapien
cagcttttctgtttataagatgagg

SEQ ID NO: 5214894 - DNA, 25 bp, Homo sapien
ggactcactatattgacctcatttt

SEQ ID NO: 5214895 - DNA, 25 bp, Homo sapien
gattacctctgcaaaggtaatcctc

SEQ ID NO: 5214896 - DNA, 25 bp, Homo sapien
caggctattctcgttggcttgtaga

SEQ ID NO: 5214897 - DNA, 25 bp, Homo sapien
catgaggacatcaaccatactggat

SEQ ID NO: 5214898 - DNA, 25 bp, Homo sapien
tcattgcgagagaaaagatcatgga

SEQ ID NO: 5214899 - DNA, 25 bp, Homo sapien
ataattgaacttttgagccacaggg

SEQ ID NO: 5214900 - DNA, 25 bp, Homo sapien
caaaagttcggttcatcattgcgag

SEQ ID NO: 5214901 - DNA, 25 bp, Homo sapien
tacaaaggagccgtgatagcttctg

SEQ ID NO: 5214902 - DNA, 25 bp, Homo sapien
ttaaactgacaaagcaccaagagag

SEQ ID NO: 5214903 - DNA, 25 bp, Homo sapien
aaagacagctggcatggactcagag

SEQ ID NO: 5214904 - DNA, 25 bp, Homo sapien
tgatgtgaaattgaaagacagctgg

SEQ ID NO: 5214905 - DNA, 25 bp, Homo sapien
cagagcctcttgagtttagctcaga

SEQ ID NO: 5214906 - DNA, 25 bp, Homo sapien
ggtgcgatctcagttcaccgcaacc

SEQ ID NO: 5214907 - DNA, 25 bp, Homo sapien
tttcgttcttgtggcccaggcctga

SEQ ID NO: 5214908 - DNA, 25 bp, Homo sapien
tgcaatggtgcgatctcagttcacc

SEQ ID NO: 5214909 - DNA, 25 bp, Homo sapien
ctgcctgcctcggccttccaaagtg

SEQ ID NO: 5214910 - DNA, 25 bp, Homo sapien
aaagtttttggaacacttcatcagt

SEQ ID NO: 5214911 - DNA, 25 bp, Homo sapien
ggagatagatgtggacttcagtgtc

SEQ ID NO: 5214912 - DNA, 25 bp, Homo sapien
tctttgcctgtctcaaggagataga

SEQ ID NO: 5214913 - DNA, 25 bp, Homo sapien
taaagcagtcgaagagcctaaacaa

SEQ ID NO: 5214914 - DNA, 25 bp, Homo sapien
aacactactaaaagcttgtcagctc

SEQ ID NO: 5214915 - DNA, 25 bp, Homo sapien
tcaggatacaggacatagagttttc

SEQ ID NO: 5214916 - DNA, 25 bp, Homo sapien
tccaagagctgacaaacaagcaagt

SEQ ID NO: 5214917 - DNA, 25 bp, Homo sapien
gaaacaccatgtctctttgcaaaag

SEQ ID NO: 5214918 - DNA, 25 bp, Homo sapien
catgtaacccaacgtataagatggc

SEQ ID NO: 5214919 - DNA, 25 bp, Homo sapien
tactatctcacagggatcactttgg

SEQ ID NO: 5214920 - DNA, 25 bp, Homo sapien
gcagtaagttgcacctgtcataggg

SEQ ID NO: 5214921 - DNA, 25 bp, Homo sapien
tatctcctcttagtgtcatggcctg

SEQ ID NO: 5214922 - DNA, 25 bp, Homo sapien
tctggtactcggtcttgcaaattcc

SEQ ID NO: 5214923 - DNA, 25 bp, Homo sapien
cactggaaacactaaggttagccac

SEQ ID NO: 5214924 - DNA, 25 bp, Homo sapien
gctccctgagcaatgtgggtaacag

SEQ ID NO: 5214925 - DNA, 25 bp, Homo sapien
gttcactggaaacactaaggttagc

SEQ ID NO: 5214926 - DNA, 25 bp, Homo sapien
caatgtgggtaacaggttcactgga

SEQ ID NO: 5214927 - DNA, 25 bp, Homo sapien
ggtgaacacgtctagacttgggctg

SEQ ID NO: 5214928 - DNA, 25 bp, Homo sapien
cggtgaacacgtctagacttgggct

SEQ ID NO: 5214929 - DNA, 25 bp, Homo sapien
gtgaacacgtctagacttgggctgg

SEQ ID NO: 5214930 - DNA, 25 bp, Homo sapien
ccggtgaacacgtctagacttgggc

SEQ ID NO: 5214931 - DNA, 25 bp, Homo sapien
cattattccgtccacagctgaactc

SEQ ID NO: 5214932 - DNA, 25 bp, Homo sapien
cttcattattccgtccacagctgaa

SEQ ID NO: 5214933 - DNA, 25 bp, Homo sapien
tgcagctgcccttcattattccgtc

SEQ ID NO: 5214934 - DNA, 25 bp, Homo sapien
tgtgagtgttctccaagccgcagcc

SEQ ID NO: 5214935 - DNA, 25 bp, Homo sapien
tagcagttgcacaagagacaccatc

SEQ ID NO: 5214936 - DNA, 25 bp, Homo sapien
gatccaaaggtcacttcttcttagc

SEQ ID NO: 5214937 - DNA, 25 bp, Homo sapien
ggtttcagctacgtgcgaggctcag

SEQ ID NO: 5214938 - DNA, 25 bp, Homo sapien
cctaggacgttgaggctacaacgag

SEQ ID NO: 5214939 - DNA, 25 bp, Homo sapien
tcaaaagataactgaggcttcccag

SEQ ID NO: 5214940 - DNA, 25 bp, Homo sapien
tgctggcaataacacaaataattga

SEQ ID NO: 5214941 - DNA, 25 bp, Homo sapien
cagagtttgtctaaagcttaagttc

SEQ ID NO: 5214942 - DNA, 25 bp, Homo sapien
gtgccaggataacagtcctaagcca

SEQ ID NO: 5214943 - DNA, 25 bp, Homo sapien
tcttcaagcccagacatgaatgatg

SEQ ID NO: 5214944 - DNA, 25 bp, Homo sapien
caatcatactctctaggcttagctg

SEQ ID NO: 5214945 - DNA, 25 bp, Homo sapien
cctaggtaatcattgcttggtgaca

SEQ ID NO: 5214946 - DNA, 25 bp, Homo sapien
gcttagctgacttagcctaggtaat

SEQ ID NO: 5214947 - DNA, 25 bp, Homo sapien
gcacttctagtgcaagaatgtatca

SEQ ID NO: 5214948 - DNA, 25 bp, Homo sapien
catactgaacccaaaaattgtgcac

SEQ ID NO: 5214949 - DNA, 25 bp, Homo sapien
ggagggaaactcctattgtcaagaa

SEQ ID NO: 5214950 - DNA, 25 bp, Homo sapien
acaacacggcgtaaggatgggtagt

SEQ ID NO: 5214951 - DNA, 25 bp, Homo sapien
tcaagtcttcaggaacagagccatc

SEQ ID NO: 5214952 - DNA, 25 bp, Homo sapien
gggtctgacaatctgaatctgagca

SEQ ID NO: 5214953 - DNA, 25 bp, Homo sapien
gaaaggagccctagtatatagtcag

SEQ ID NO: 5214954 - DNA, 25 bp, Homo sapien
gaattcattgctgtcagggtctgac

SEQ ID NO: 5214955 - DNA, 25 bp, Homo sapien
taaatgttccttataccagaggtcc

SEQ ID NO: 5214956 - DNA, 25 bp, Homo sapien
gtttactgtttcactctccatggag

SEQ ID NO: 5214957 - DNA, 25 bp, Homo sapien
cataagctcccagggtagagggaac

SEQ ID NO: 5214958 - DNA, 25 bp, Homo sapien
gctgatctaatgcaaagcggttatc

SEQ ID NO: 5214959 - DNA, 25 bp, Homo sapien
aaactccctgaacaaagagcctcag

SEQ ID NO: 5214960 - DNA, 25 bp, Homo sapien
cacatctctgttgcaaatgaacata

SEQ ID NO: 5214961 - DNA, 25 bp, Homo sapien
catggtaagatgaagcagctatagc

SEQ ID NO: 5214962 - DNA, 25 bp, Homo sapien
tgttacacaaagagttacagtcatg

SEQ ID NO: 5214963 - DNA, 25 bp, Homo sapien
cgtactgttatgctgtgtttaccac

SEQ ID NO: 5214964 - DNA, 25 bp, Homo sapien
gacaaatattaagcctcaccctgat

SEQ ID NO: 5214965 - DNA, 25 bp, Homo sapien
taggcagggctttcatctacctgtg

SEQ ID NO: 5214966 - DNA, 25 bp, Homo sapien
ttaccactctggtgaaattgctctc

SEQ ID NO: 5214967 - DNA, 25 bp, Homo sapien
aaagaacatgactaattctgccagg

SEQ ID NO: 5214968 - DNA, 25 bp, Homo sapien
aacatgactaattctgccaggcgtg

SEQ ID NO: 5214969 - DNA, 25 bp, Homo sapien
tataaagaacatgactaattctgcc

SEQ ID NO: 5214970 - DNA, 25 bp, Homo sapien
catgactaattctgccaggcgtggt

SEQ ID NO: 5214971 - DNA, 25 bp, Homo sapien
tccacatggatcgtccgaggaatag

SEQ ID NO: 5214972 - DNA, 25 bp, Homo sapien
ttcgaacgtcggttgctgaggcctt

SEQ ID NO: 5214973 - DNA, 25 bp, Homo sapien
aattcaagtctacgcaaactgcgga

SEQ ID NO: 5214974 - DNA, 25 bp, Homo sapien
ttcttaacgcatgcgtggagcgccc

SEQ ID NO: 5214975 - DNA, 25 bp, Homo sapien
tcacactcgagtgccgtgtgcatct

SEQ ID NO: 5214976 - DNA, 25 bp, Homo sapien
gactgcgctaactgcgtcgcagaaa

SEQ ID NO: 5214977 - DNA, 25 bp, Homo sapien
gtattcaccaaagcagactgcgcta

SEQ ID NO: 5214978 - DNA, 25 bp, Homo sapien
aaccccggctgcaccaaatcgtgta

SEQ ID NO: 5214979 - DNA, 25 bp, Homo sapien
cacgccgtcccgggactcgcagtct

SEQ ID NO: 5214980 - DNA, 25 bp, Homo sapien
cccagcgcccgcatccccgagggaa

SEQ ID NO: 5214981 - DNA, 25 bp, Homo sapien
ctccgccgcgcacggggccggttct

SEQ ID NO: 5214982 - DNA, 25 bp, Homo sapien
gcccgcatccccgagggaaccagcc

SEQ ID NO: 5214983 - DNA, 25 bp, Homo sapien
ctctgcttcggctggccgccgccga

SEQ ID NO: 5214984 - DNA, 25 bp, Homo sapien
tctgcttcggctggccgccgccgac

SEQ ID NO: 5214985 - DNA, 25 bp, Homo sapien
ttcggctggccgccgccgactgcag

SEQ ID NO: 5214986 - DNA, 25 bp, Homo sapien
tgcttcggctggccgccgccgactg

SEQ ID NO: 5214987 - DNA, 25 bp, Homo sapien
cgttagcctcggtccggaacagcgg

SEQ ID NO: 5214988 - DNA, 25 bp, Homo sapien
gcgctccgcctcggcttttcggttg

SEQ ID NO: 5214989 - DNA, 25 bp, Homo sapien
gctccgcacgcgaagtggatgccgc

SEQ ID NO: 5214990 - DNA, 25 bp, Homo sapien
tcgccccattacagaccagagagaa

SEQ ID NO: 5214991 - DNA, 25 bp, Homo sapien
aatgtgcgttgtctggcatggatcc

SEQ ID NO: 5214992 - DNA, 25 bp, Homo sapien
tatccaggcgtctatgtacggaacg

SEQ ID NO: 5214993 - DNA, 25 bp, Homo sapien
caaagtacttcaaatcaggtgctca

SEQ ID NO: 5214994 - DNA, 25 bp, Homo sapien
tacttgcatacgacacttgaggcct

SEQ ID NO: 5214995 - DNA, 25 bp, Homo sapien
gtagagaccatcaaagctcattctg

SEQ ID NO: 5214996 - DNA, 25 bp, Homo sapien
catcaaactgttgtgggttaggctg

SEQ ID NO: 5214997 - DNA, 25 bp, Homo sapien
ctgggcagccttgcaaactttaagc

SEQ ID NO: 5214998 - DNA, 25 bp, Homo sapien
ggcatttccaatactgaggtaagca

SEQ ID NO: 5214999 - DNA, 25 bp, Homo sapien
cactttcaaactttattatcagtac

SEQ ID NO: 5215000 - DNA, 25 bp, Homo sapien
aacactttcaaactttattatcagt

SEQ ID NO: 5215001 - DNA, 25 bp, Homo sapien
actttcaaactttattatcagtaca

SEQ ID NO: 5215002 - DNA, 25 bp, Homo sapien
acactttcaaactttattatcagta

SEQ ID NO: 5215003 - DNA, 25 bp, Homo sapien
cttacattgttttactgatctcatt

SEQ ID NO: 5215004 - DNA, 25 bp, Homo sapien
ttttataatgtagtaacacaccatg

SEQ ID NO: 5215005 - DNA, 25 bp, Homo sapien
tataacacagtgcaaagtatatttc

SEQ ID NO: 5215006 - DNA, 25 bp, Homo sapien
gcccctttcatcaagaagctatgtt

SEQ ID NO: 5215007 - DNA, 25 bp, Homo sapien
agtgctgggatgtgacccaaagtgc

SEQ ID NO: 5215008 - DNA, 25 bp, Homo sapien
tgcgagcgacagtacccggcccgat

SEQ ID NO: 5215009 - DNA, 25 bp, Homo sapien
cggcccgatcaatttagtacttatt

SEQ ID NO: 5215010 - DNA, 25 bp, Homo sapien
aaatgaagaccaaataaaagaatga

SEQ ID NO: 5215011 - DNA, 25 bp, Homo sapien
cacaaaagctgtagatggtttacac

SEQ ID NO: 5215012 - DNA, 25 bp, Homo sapien
ggaatacaatgatacaagcaacgtt

SEQ ID NO: 5215013 - DNA, 25 bp, Homo sapien
tcaaatgaatgactccacgaaacac

SEQ ID NO: 5215014 - DNA, 25 bp, Homo sapien
tatgctttcagaatcatttaggcca

SEQ ID NO: 5215015 - DNA, 25 bp, Homo sapien
tggcggatcttgagcgcaagttcaa

SEQ ID NO: 5215016 - DNA, 25 bp, Homo sapien
taagttgaattatcatatatggcat

SEQ ID NO: 5215017 - DNA, 25 bp, Homo sapien
gaatgttatgatctatctgaataaa

SEQ ID NO: 5215018 - DNA, 25 bp, Homo sapien
catggtggcgtgtcagaagccaagg

SEQ ID NO: 5215019 - DNA, 25 bp, Homo sapien
ataagaggcctcaagaaaaaaggag

SEQ ID NO: 5215020 - DNA, 25 bp, Homo sapien
aacatgggggaataagaggcctcaa

SEQ ID NO: 5215021 - DNA, 25 bp, Homo sapien
agaacatgggggaataagaggcctc

SEQ ID NO: 5215022 - DNA, 25 bp, Homo sapien
tgggggaataagaggcctcaagaaa

SEQ ID NO: 5215023 - DNA, 25 bp, Homo sapien
tatctttgatcagtcaggtctctac

SEQ ID NO: 5215024 - DNA, 25 bp, Homo sapien
tgcccatgctaaagccaatcactgg

SEQ ID NO: 5215025 - DNA, 25 bp, Homo sapien
cagaacactcaaccaaagtgggtaa

SEQ ID NO: 5215026 - DNA, 25 bp, Homo sapien
aagcacgctcaaatttaccctcaga

SEQ ID NO: 5215027 - DNA, 25 bp, Homo sapien
attatgcagcatgccttaaagaatc

SEQ ID NO: 5215028 - DNA, 25 bp, Homo sapien
caatctaattctctggaagttgcca

SEQ ID NO: 5215029 - DNA, 25 bp, Homo sapien
caacagtagcaaatagctaggaatg

SEQ ID NO: 5215030 - DNA, 25 bp, Homo sapien
ctaggaatgtatctaaccaaagaca

SEQ ID NO: 5215031 - DNA, 25 bp, Homo sapien
tccacgatgctgtctgtgaagcgct

SEQ ID NO: 5215032 - DNA, 25 bp, Homo sapien
caatggttgcaatgatgaaaaataa

SEQ ID NO: 5215033 - DNA, 25 bp, Homo sapien
catggcaatggttgcaatgatgaaa

SEQ ID NO: 5215034 - DNA, 25 bp, Homo sapien
gtctgtgaagcgcttcagggccatg

SEQ ID NO: 5215035 - DNA, 25 bp, Homo sapien
tgtggacccgattatgctcatactg

SEQ ID NO: 5215036 - DNA, 25 bp, Homo sapien
tgtacacgatcaggtttgtggaccc

SEQ ID NO: 5215037 - DNA, 25 bp, Homo sapien
gaaacatgatcgtggccaagatcct

SEQ ID NO: 5215038 - DNA, 25 bp, Homo sapien
cacgctcactgggagtaatggaatc

SEQ ID NO: 5215039 - DNA, 25 bp, Homo sapien
aagtctgctgtcgatttgatataac

SEQ ID NO: 5215040 - DNA, 25 bp, Homo sapien
ttaataactgagtgacgttcaaaca

SEQ ID NO: 5215041 - DNA, 25 bp, Homo sapien
ggagagttggcaccatgaccatagt

SEQ ID NO: 5215042 - DNA, 25 bp, Homo sapien
cagggcaaaggtatgtaaataaatc

SEQ ID NO: 5215043 - DNA, 25 bp, Homo sapien
taacaacttggaatcttccaaggaa

SEQ ID NO: 5215044 - DNA, 25 bp, Homo sapien
cattcttctaacaacttggaatctt

SEQ ID NO: 5215045 - DNA, 25 bp, Homo sapien
tcttccaaggaataatccttttgac

SEQ ID NO: 5215046 - DNA, 25 bp, Homo sapien
ttcttctaacaacttggaatcttcc

SEQ ID NO: 5215047 - DNA, 25 bp, Homo sapien
acagtgatagaaatgataccacaaa

SEQ ID NO: 5215048 - DNA, 25 bp, Homo sapien
gacagtgatagaaatgataccacaa

SEQ ID NO: 5215049 - DNA, 25 bp, Homo sapien
tgaagcatccttggttaatgatagg

SEQ ID NO: 5215050 - DNA, 25 bp, Homo sapien
aaggaatttgaagcatccttggtta

SEQ ID NO: 5215051 - DNA, 25 bp, Homo sapien
ttaatgataggaaccaagatcacgc

SEQ ID NO: 5215052 - DNA, 25 bp, Homo sapien
ctacagctaatgcaacaaggaatgt

SEQ ID NO: 5215053 - DNA, 25 bp, Homo sapien
cagtagatgaagaagggcgtctcca

SEQ ID NO: 5215054 - DNA, 25 bp, Homo sapien
gggcagtagatgaagaagggcgtct

SEQ ID NO: 5215055 - DNA, 25 bp, Homo sapien
gtagatgaagaagggcgtctccact

SEQ ID NO: 5215056 - DNA, 25 bp, Homo sapien
gcagtagatgaagaagggcgtctcc

SEQ ID NO: 5215057 - DNA, 25 bp, Homo sapien
gcaagtaaatgcctcctagagcaac

SEQ ID NO: 5215058 - DNA, 25 bp, Homo sapien
ttaaacattctaatgcagtgttcaa

SEQ ID NO: 5215059 - DNA, 25 bp, Homo sapien
gcaacaagtcctttcaatacagcat

SEQ ID NO: 5215060 - DNA, 25 bp, Homo sapien
tgtccatgcccatgtgcatgttggt

SEQ ID NO: 5215061 - DNA, 25 bp, Homo sapien
taatgtaagccactaagccgataga

SEQ ID NO: 5215062 - DNA, 25 bp, Homo sapien
gaagaagattggtctctcctagaaa

SEQ ID NO: 5215063 - DNA, 25 bp, Homo sapien
caaatggcaagtagagaggaactcc

SEQ ID NO: 5215064 - DNA, 25 bp, Homo sapien
gccagccactatcctatgaagaaga

SEQ ID NO: 5215065 - DNA, 25 bp, Homo sapien
gctttcttccaatagttgattcttc

SEQ ID NO: 5215066 - DNA, 25 bp, Homo sapien
gcttgagttgaagccagtcagaatc

SEQ ID NO: 5215067 - DNA, 25 bp, Homo sapien
tttaacttgtgatctgaaagctttc

SEQ ID NO: 5215068 - DNA, 25 bp, Homo sapien
agaatctggtgtattgtttaacttg

SEQ ID NO: 5215069 - DNA, 25 bp, Homo sapien
tcataaaagtatttgtcggccgggc

SEQ ID NO: 5215070 - DNA, 25 bp, Homo sapien
gattattcccatgagaaatgctgaa

SEQ ID NO: 5215071 - DNA, 25 bp, Homo sapien
ttttttcataggaggagacactagc

SEQ ID NO: 5215072 - DNA, 25 bp, Homo sapien
catatggctcctagcttacaagggc

SEQ ID NO: 5215073 - DNA, 25 bp, Homo sapien
acccagccactagtcttgagtttct

SEQ ID NO: 5215074 - DNA, 25 bp, Homo sapien
gccactagtcttgagtttctaagag

SEQ ID NO: 5215075 - DNA, 25 bp, Homo sapien
cactagtcttgagtttctaagagag

SEQ ID NO: 5215076 - DNA, 25 bp, Homo sapien
cagccactagtcttgagtttctaag

SEQ ID NO: 5215077 - DNA, 25 bp, Homo sapien
cacagttttgttctcgccgtggtgg

SEQ ID NO: 5215078 - DNA, 25 bp, Homo sapien
cactggtgattatgcttcctcagca

SEQ ID NO: 5215079 - DNA, 25 bp, Homo sapien
aattgcgagcccatcactgaagttg

SEQ ID NO: 5215080 - DNA, 25 bp, Homo sapien
ccgtggtggttatgtgcagcagcat

SEQ ID NO: 5215081 - DNA, 25 bp, Homo sapien
ttcatgtggcagttcatgacagaag

SEQ ID NO: 5215082 - DNA, 25 bp, Homo sapien
agtactgattcctcctgtcaatcca

SEQ ID NO: 5215083 - DNA, 25 bp, Homo sapien
gacagaagacggctatagaagtact

SEQ ID NO: 5215084 - DNA, 25 bp, Homo sapien
tagaagtactgattcctcctgtcaa

SEQ ID NO: 5215085 - DNA, 25 bp, Homo sapien
accatccaggtaacatttttgaaca

SEQ ID NO: 5215086 - DNA, 25 bp, Homo sapien
aaagttatacttagtgaaccagtca

SEQ ID NO: 5215087 - DNA, 25 bp, Homo sapien
taggtacatctaggacaactttcaa

SEQ ID NO: 5215088 - DNA, 25 bp, Homo sapien
tgaagaaagactgccttaggtacat

SEQ ID NO: 5215089 - DNA, 25 bp, Homo sapien
gaggaagctgggtcatttctttaca

SEQ ID NO: 5215090 - DNA, 25 bp, Homo sapien
tcttccctagtagcctatccagcta

SEQ ID NO: 5215091 - DNA, 25 bp, Homo sapien
gatagatacaaggaccagagccctt

SEQ ID NO: 5215092 - DNA, 25 bp, Homo sapien
tccagctacagtatggtatagttta

SEQ ID NO: 5215093 - DNA, 25 bp, Homo sapien
tctgtgggagtctcagaattccggc

SEQ ID NO: 5215094 - DNA, 25 bp, Homo sapien
tgtgaaaccctggtggagtccaaga

SEQ ID NO: 5215095 - DNA, 25 bp, Homo sapien
tgagttcaaacctggaagcggctgt

SEQ ID NO: 5215096 - DNA, 25 bp, Homo sapien
gaattccggcaggagtttgtgaaac

SEQ ID NO: 5215097 - DNA, 25 bp, Homo sapien
tccttaatggagtatgcttagtgct

SEQ ID NO: 5215098 - DNA, 25 bp, Homo sapien
gatgtccaattgttacagcgccatt

SEQ ID NO: 5215099 - DNA, 25 bp, Homo sapien
tccaactgttttgattacggtggct

SEQ ID NO: 5215100 - DNA, 25 bp, Homo sapien
aaatcaactttgctgcccttttgca

SEQ ID NO: 5215101 - DNA, 25 bp, Homo sapien
tcctaagtaacaaccaaacagcatg

SEQ ID NO: 5215102 - DNA, 25 bp, Homo sapien
caacggtgtcatgggtacaaaatac

SEQ ID NO: 5215103 - DNA, 25 bp, Homo sapien
aatacaccaactttgttgccatagc

SEQ ID NO: 5215104 - DNA, 25 bp, Homo sapien
taacaaatcaagattcaaggcgaac

SEQ ID NO: 5215105 - DNA, 25 bp, Homo sapien
ggaagaacagaggtaacaggtgctt

SEQ ID NO: 5215106 - DNA, 25 bp, Homo sapien
gaaatggcctaaggaagaacagagg

SEQ ID NO: 5215107 - DNA, 25 bp, Homo sapien
gtatattttatgctatggttacagt

SEQ ID NO: 5215108 - DNA, 25 bp, Homo sapien
tatgctatggttacagttatttttt

SEQ ID NO: 5215109 - DNA, 25 bp, Homo sapien
ctgcaattaagaaacaatgggaatg

SEQ ID NO: 5215110 - DNA, 25 bp, Homo sapien
tgcaattaagaaacaatgggaatgt

SEQ ID NO: 5215111 - DNA, 25 bp, Homo sapien
caatgggaatgttttaaaaccacag

SEQ ID NO: 5215112 - DNA, 25 bp, Homo sapien
caattaagaaacaatgggaatgttt

SEQ ID NO: 5215113 - DNA, 25 bp, Homo sapien
cagctgtgcctatgagcatgcctat

SEQ ID NO: 5215114 - DNA, 25 bp, Homo sapien
catatccaccaaggctacatagagg

SEQ ID NO: 5215115 - DNA, 25 bp, Homo sapien
cctgcagtgactgcaaagatccaaa

SEQ ID NO: 5215116 - DNA, 25 bp, Homo sapien
tattggcatactgaccaacagctgt

SEQ ID NO: 5215117 - DNA, 25 bp, Homo sapien
gctatccagcataactagtaccaag

SEQ ID NO: 5215118 - DNA, 25 bp, Homo sapien
cagaaaacaacctagcagagctatc

SEQ ID NO: 5215119 - DNA, 25 bp, Homo sapien
catctctatgcccttatgccattgc

SEQ ID NO: 5215120 - DNA, 25 bp, Homo sapien
tagtaccaagtcatgcacactgccc

SEQ ID NO: 5215121 - DNA, 25 bp, Homo sapien
tttatcttcatagagggcaatcacc

SEQ ID NO: 5215122 - DNA, 25 bp, Homo sapien
ggcaaatccaaagagcaatcctaaa

SEQ ID NO: 5215123 - DNA, 25 bp, Homo sapien
attctgaaggatgaattgccccaca

SEQ ID NO: 5215124 - DNA, 25 bp, Homo sapien
ttctgaaggatgaattgccccacag

SEQ ID NO: 5215125 - DNA, 25 bp, Homo sapien
ccaagcaatgagatgaggactgtcc

SEQ ID NO: 5215126 - DNA, 25 bp, Homo sapien
gcagctacactggttgccaagcaga

SEQ ID NO: 5215127 - DNA, 25 bp, Homo sapien
cctacgtgcagggaaaacagtacta

SEQ ID NO: 5215128 - DNA, 25 bp, Homo sapien
gaatgcagaatcctaccgtgggtat

SEQ ID NO: 5215129 - DNA, 25 bp, Homo sapien
gattgccatgactcttccctctgac

SEQ ID NO: 5215130 - DNA, 25 bp, Homo sapien
cactggattggacgaggtgtagcac

SEQ ID NO: 5215131 - DNA, 25 bp, Homo sapien
gcagatataccaaaacggccaagtt

SEQ ID NO: 5215132 - DNA, 25 bp, Homo sapien
caagtgagcggagaggagtattatc

SEQ ID NO: 5215133 - DNA, 25 bp, Homo sapien
tccggtgcaggcttaatttataata

SEQ ID NO: 5215134 - DNA, 25 bp, Homo sapien
ggccatcttgaaaggtgtccggtgc

SEQ ID NO: 5215135 - DNA, 25 bp, Homo sapien
tcatatctccggatgcatgctggga

SEQ ID NO: 5215136 - DNA, 25 bp, Homo sapien
cttgccctgcttcgggtggcgcatg

SEQ ID NO: 5215137 - DNA, 25 bp, Homo sapien
ataaatatgagtttgagcccctgcc

SEQ ID NO: 5215138 - DNA, 25 bp, Homo sapien
gccacagatgcctaacataccatta

SEQ ID NO: 5215139 - DNA, 25 bp, Homo sapien
taaatttagcaccatactggaagga

SEQ ID NO: 5215140 - DNA, 25 bp, Homo sapien
aaagaagctttatcccactagaggc

SEQ ID NO: 5215141 - DNA, 25 bp, Homo sapien
cattttgttgattatgtactttctt

SEQ ID NO: 5215142 - DNA, 25 bp, Homo sapien
actgttttcactgtatcctgtagga

SEQ ID NO: 5215143 - DNA, 25 bp, Homo sapien
cctgtaggattttgcatgttgcatt

SEQ ID NO: 5215144 - DNA, 25 bp, Homo sapien
gaaacacttaaactataaacatcca

SEQ ID NO: 5215145 - DNA, 25 bp, Homo sapien
aacccattccaattgaaaggtacat

SEQ ID NO: 5215146 - DNA, 25 bp, Homo sapien
cccattccaattgaaaggtacattt

SEQ ID NO: 5215147 - DNA, 25 bp, Homo sapien
acccattccaattgaaaggtacatt

SEQ ID NO: 5215148 - DNA, 25 bp, Homo sapien
ccatttgttttgtcagcacagaagt

SEQ ID NO: 5215149 - DNA, 25 bp, Homo sapien
gacaacctaaggcttcgtcacttat

SEQ ID NO: 5215150 - DNA, 25 bp, Homo sapien
cacccaaagggtgtcttgactttat

SEQ ID NO: 5215151 - DNA, 25 bp, Homo sapien
gagggcttttgtgcaatgtcacagc

SEQ ID NO: 5215152 - DNA, 25 bp, Homo sapien
ctattaagagtctgatgcattcttc

SEQ ID NO: 5215153 - DNA, 25 bp, Homo sapien
tatttaggttgtttgatgaggttat

SEQ ID NO: 5215154 - DNA, 25 bp, Homo sapien
gtattatacctttagcattctgggc

SEQ ID NO: 5215155 - DNA, 25 bp, Homo sapien
cactgtggatctcatagccttgtag

SEQ ID NO: 5215156 - DNA, 25 bp, Homo sapien
cctgaaatatgttactgctgagttc

SEQ ID NO: 5215157 - DNA, 25 bp, Homo sapien
tatgctttatggtggcagactctga

SEQ ID NO: 5215158 - DNA, 25 bp, Homo sapien
agttctcttctgtgtagtcaacaat

SEQ ID NO: 5215159 - DNA, 25 bp, Homo sapien
cattcctggatttgcaaaagataaa

SEQ ID NO: 5215160 - DNA, 25 bp, Homo sapien
ccacagggatgctggcgaaacttgc

SEQ ID NO: 5215161 - DNA, 25 bp, Homo sapien
ggtgtctgcctctgagttagcctca

SEQ ID NO: 5215162 - DNA, 25 bp, Homo sapien
cctgaaagtttgcaaggaagtctcc

SEQ ID NO: 5215163 - DNA, 25 bp, Homo sapien
agtgaaacttgtggaaagctgccca

SEQ ID NO: 5215164 - DNA, 25 bp, Homo sapien
gtaatttgtgtttatatgatgtgat

SEQ ID NO: 5215165 - DNA, 25 bp, Homo sapien
gcactttttctagttatggaatcaa

SEQ ID NO: 5215166 - DNA, 25 bp, Homo sapien
agtaatttgtgtttatatgatgtga

SEQ ID NO: 5215167 - DNA, 25 bp, Homo sapien
ctttttctagttatggaatcaagta

SEQ ID NO: 5215168 - DNA, 25 bp, Homo sapien
cacttgtggcctgggttactgagcg

SEQ ID NO: 5215169 - DNA, 25 bp, Homo sapien
agatgaccggaaatggaacctgcgc

SEQ ID NO: 5215170 - DNA, 25 bp, Homo sapien
ttgcttagcaacaaacgctgcccgg

SEQ ID NO: 5215171 - DNA, 25 bp, Homo sapien
tactgagcgctttccgtgaatgccc

SEQ ID NO: 5215172 - DNA, 25 bp, Homo sapien
cagtgtttctccgagacctctgagg

SEQ ID NO: 5215173 - DNA, 25 bp, Homo sapien
aaggtgtttactggatcctgcctcg

SEQ ID NO: 5215174 - DNA, 25 bp, Homo sapien
caaaggatagttttctggagtgtgg

SEQ ID NO: 5215175 - DNA, 25 bp, Homo sapien
tggaagcacatgaataatgaaaggt

SEQ ID NO: 5215176 - DNA, 25 bp, Homo sapien
cattctaaccattgtcaagtgtacg

SEQ ID NO: 5215177 - DNA, 25 bp, Homo sapien
accatcaccatcgttcgtcttcaaa

SEQ ID NO: 5215178 - DNA, 25 bp, Homo sapien
catttggttactctatgtatttcag

SEQ ID NO: 5215179 - DNA, 25 bp, Homo sapien
cagcagatgtagcaatgtatcagaa

SEQ ID NO: 5215180 - DNA, 25 bp, Homo sapien
aattaaagttccagtgagatttgcc

SEQ ID NO: 5215181 - DNA, 25 bp, Homo sapien
gacatgcgtccagaactgctgcttg

SEQ ID NO: 5215182 - DNA, 25 bp, Homo sapien
gaatgtattttcaggcgaaactgct

SEQ ID NO: 5215183 - DNA, 25 bp, Homo sapien
cagttgtcctttgcttctcaagtgc

SEQ ID NO: 5215184 - DNA, 25 bp, Homo sapien
tgccatggctgatctaacaggaaac

SEQ ID NO: 5215185 - DNA, 25 bp, Homo sapien
tggacagctcacaaatagttaatgg

SEQ ID NO: 5215186 - DNA, 25 bp, Homo sapien
ggttcacagcaggattcgagctcct

SEQ ID NO: 5215187 - DNA, 25 bp, Homo sapien
gatctcttgcacgtgtggttcacag

SEQ ID NO: 5215188 - DNA, 25 bp, Homo sapien
tacgataactgtgatctcatgacca

SEQ ID NO: 5215189 - DNA, 25 bp, Homo sapien
cagagtggcccctcattgtggtctt

SEQ ID NO: 5215190 - DNA, 25 bp, Homo sapien
tagagactatatccagccctaatga

SEQ ID NO: 5215191 - DNA, 25 bp, Homo sapien
gctgggaccaatgcaagagactagg

SEQ ID NO: 5215192 - DNA, 25 bp, Homo sapien
cagcaccggtaggtctattaacaca

SEQ ID NO: 5215193 - DNA, 25 bp, Homo sapien
gacatcaggctcgtctgaagttctt

SEQ ID NO: 5215194 - DNA, 25 bp, Homo sapien
gcggtagcaagactgatgtgatcat

SEQ ID NO: 5215195 - DNA, 25 bp, Homo sapien
tattaacacagtgcccgagtcagcg

SEQ ID NO: 5215196 - DNA, 25 bp, Homo sapien
catcttagaatacaagccagtcatt

SEQ ID NO: 5215197 - DNA, 25 bp, Homo sapien
tctagagtagaagatacttaggtat

SEQ ID NO: 5215198 - DNA, 25 bp, Homo sapien
cttaggtatagttaaatattctgta

SEQ ID NO: 5215199 - DNA, 25 bp, Homo sapien
gcatcttagaatacaagccagtcat

SEQ ID NO: 5215200 - DNA, 25 bp, Homo sapien
tcttccagatcgttcaggctcttta

SEQ ID NO: 5215201 - DNA, 25 bp, Homo sapien
ggcttcttccagatcgttcaggctc

SEQ ID NO: 5215202 - DNA, 25 bp, Homo sapien
gatcgttcaggctctttacccaagc

SEQ ID NO: 5215203 - DNA, 25 bp, Homo sapien
aagccccgaacctccagtctcttat

SEQ ID NO: 5215204 - DNA, 25 bp, Homo sapien
tgttggctcattataatagctgata

SEQ ID NO: 5215205 - DNA, 25 bp, Homo sapien
gttggctagatttgcaattaatgtt

SEQ ID NO: 5215206 - DNA, 25 bp, Homo sapien
atttggaaaggcgagatgttggcta

SEQ ID NO: 5215207 - DNA, 25 bp, Homo sapien
tgtttgttggctcattataatagct

SEQ ID NO: 5215208 - DNA, 25 bp, Homo sapien
cgaaatacattggtcagcttgtcaa

SEQ ID NO: 5215209 - DNA, 25 bp, Homo sapien
ctgaggatactttccctgattataa

SEQ ID NO: 5215210 - DNA, 25 bp, Homo sapien
agaagtcttgtttgctactcactgc

SEQ ID NO: 5215211 - DNA, 25 bp, Homo sapien
gaaatggcagtcctacgaaatacat

SEQ ID NO: 5215212 - DNA, 25 bp, Homo sapien
cccagctactcgggaggctgaggca

SEQ ID NO: 5215213 - DNA, 25 bp, Homo sapien
gaggcggagcttgcagtgagccgag

SEQ ID NO: 5215214 - DNA, 25 bp, Homo sapien
cagaaaattagccaggtgcctgtag

SEQ ID NO: 5215215 - DNA, 25 bp, Homo sapien
ggagagtggtgtgaacccaggaggc

SEQ ID NO: 5215216 - DNA, 25 bp, Homo sapien
aacatgtatcccctgtactgcaaaa

SEQ ID NO: 5215217 - DNA, 25 bp, Homo sapien
cctagaagaatgattgctggtcaaa

SEQ ID NO: 5215218 - DNA, 25 bp, Homo sapien
tatggttggatcttgctttagtcga

SEQ ID NO: 5215219 - DNA, 25 bp, Homo sapien
tagtcgaccttctgtaaatgggaat

SEQ ID NO: 5215220 - DNA, 25 bp, Homo sapien
caaatatgggtgttggacatgctca

SEQ ID NO: 5215221 - DNA, 25 bp, Homo sapien
caaattgtcccaagcttatcagtgg

SEQ ID NO: 5215222 - DNA, 25 bp, Homo sapien
catcttgttatcttgcctgccccag

SEQ ID NO: 5215223 - DNA, 25 bp, Homo sapien
cacatcaggtggcaataaagtcagg

SEQ ID NO: 5215224 - DNA, 25 bp, Homo sapien
gcttcctgttgcctttccaatgtac

SEQ ID NO: 5215225 - DNA, 25 bp, Homo sapien
ctgttgcctttccaatgtacttcat

SEQ ID NO: 5215226 - DNA, 25 bp, Homo sapien
tttgcttcctgttgcctttccaatg

SEQ ID NO: 5215227 - DNA, 25 bp, Homo sapien
tcctgttgcctttccaatgtacttc

SEQ ID NO: 5215228 - DNA, 25 bp, Homo sapien
tctgcgcggagacagcatagctctg

SEQ ID NO: 5215229 - DNA, 25 bp, Homo sapien
gagtggcagcgtatgtaacctggca

SEQ ID NO: 5215230 - DNA, 25 bp, Homo sapien
tagctctgtagaaatgagtggcagc

SEQ ID NO: 5215231 - DNA, 25 bp, Homo sapien
tggtgtggccactttacgttttcaa

SEQ ID NO: 5215232 - DNA, 25 bp, Homo sapien
taggcggtacggtccggctgagagg

SEQ ID NO: 5215233 - DNA, 25 bp, Homo sapien
ctcatacgtgaggaaggaggacccg

SEQ ID NO: 5215234 - DNA, 25 bp, Homo sapien
aggtggctgattgctgctggcgcct

SEQ ID NO: 5215235 - DNA, 25 bp, Homo sapien
ggaaccagccgcctcggtacagaga

SEQ ID NO: 5215236 - DNA, 25 bp, Homo sapien
tcacttcacgagaagccaggtcaca

SEQ ID NO: 5215237 - DNA, 25 bp, Homo sapien
gcccggctggagctagagaactcgt

SEQ ID NO: 5215238 - DNA, 25 bp, Homo sapien
ttcaaaccgcgactgcaagcttcgg

SEQ ID NO: 5215239 - DNA, 25 bp, Homo sapien
gctgctgtcgccaggagtcacttca

SEQ ID NO: 5215240 - DNA, 25 bp, Homo sapien
taaatgcaaaatcggctattcagcc

SEQ ID NO: 5215241 - DNA, 25 bp, Homo sapien
cttttgaaagcaagaggacgactcc

SEQ ID NO: 5215242 - DNA, 25 bp, Homo sapien
aagggaaacagctagcttcacagga

SEQ ID NO: 5215243 - DNA, 25 bp, Homo sapien
tttgcttggcttactgggatagaac

SEQ ID NO: 5215244 - DNA, 25 bp, Homo sapien
tactcaagggaatgagagcaggaac

SEQ ID NO: 5215245 - DNA, 25 bp, Homo sapien
tctgacatcaggcacaagggttaac

SEQ ID NO: 5215246 - DNA, 25 bp, Homo sapien
agtgcctgagaccaagtaagtgtag

SEQ ID NO: 5215247 - DNA, 25 bp, Homo sapien
tcagccctgcaccaaagaacataag

SEQ ID NO: 5215248 - DNA, 25 bp, Homo sapien
ctttgggtcctccagaaaaattatg

SEQ ID NO: 5215249 - DNA, 25 bp, Homo sapien
gggagtgagtgtggcccggccagat

SEQ ID NO: 5215250 - DNA, 25 bp, Homo sapien
cctcaggcaatctgggccacagcag

SEQ ID NO: 5215251 - DNA, 25 bp, Homo sapien
ccagatggggagatgtgaacactgt

SEQ ID NO: 5215252 - DNA, 25 bp, Homo sapien
actgttttggggcttctggtgctgc

SEQ ID NO: 5215253 - DNA, 25 bp, Homo sapien
tgtgaatagagaggatgttgttgac

SEQ ID NO: 5215254 - DNA, 25 bp, Homo sapien
tgttgacaagaacctgagggctatt

SEQ ID NO: 5215255 - DNA, 25 bp, Homo sapien
aatagagaggatgttgttgacaaga

SEQ ID NO: 5215256 - DNA, 25 bp, Homo sapien
gatgttgttgacaagaacctgaggg

SEQ ID NO: 5215257 - DNA, 25 bp, Homo sapien
aaggatgaccgtgtgtgtgctgtcc

SEQ ID NO: 5215258 - DNA, 25 bp, Homo sapien
gagctgtcaggaaggatgaccgtgt

SEQ ID NO: 5215259 - DNA, 25 bp, Homo sapien
agtggtaactgcattccgaggagct

SEQ ID NO: 5215260 - DNA, 25 bp, Homo sapien
cagagtggtaactgcattccgagga

SEQ ID NO: 5215261 - DNA, 25 bp, Homo sapien
aacccaaccgtctttcaatcaacag

SEQ ID NO: 5215262 - DNA, 25 bp, Homo sapien
gcttgatgcccagggaacaacccaa

SEQ ID NO: 5215263 - DNA, 25 bp, Homo sapien
ttttagggactcaggagaatcttga

SEQ ID NO: 5215264 - DNA, 25 bp, Homo sapien
tcagctccacggtaatttttaggga

SEQ ID NO: 5215265 - DNA, 25 bp, Homo sapien
gctgcagtggaaagattcaacaatg

SEQ ID NO: 5215266 - DNA, 25 bp, Homo sapien
tcttcgtgtcacgtatcttggtggc

SEQ ID NO: 5215267 - DNA, 25 bp, Homo sapien
ctaaggttgttacaggtgagatgcc

SEQ ID NO: 5215268 - DNA, 25 bp, Homo sapien
tgtaattcggtggttctgggctgca

SEQ ID NO: 5215269 - DNA, 25 bp, Homo sapien
ttggcactgagtaaagaagcggctg

SEQ ID NO: 5215270 - DNA, 25 bp, Homo sapien
cagctgctaggagagaatatgatga

SEQ ID NO: 5215271 - DNA, 25 bp, Homo sapien
tcagctgccatgtttgctcacccag

SEQ ID NO: 5215272 - DNA, 25 bp, Homo sapien
ctttaaagctacaaagagccagtgc

SEQ ID NO: 5215273 - DNA, 25 bp, Homo sapien
ctctgactctcaactctggtaatga

SEQ ID NO: 5215274 - DNA, 25 bp, Homo sapien
tctggtaatgatggtgctctagtgg

SEQ ID NO: 5215275 - DNA, 25 bp, Homo sapien
gacagggcagctggaactctggctg

SEQ ID NO: 5215276 - DNA, 25 bp, Homo sapien
gacagcttctagagcagcccttggg

SEQ ID NO: 5215277 - DNA, 25 bp, Homo sapien
gaatcttgctgttctacccagaagc

SEQ ID NO: 5215278 - DNA, 25 bp, Homo sapien
cacagaagtaactcttgggccttgg

SEQ ID NO: 5215279 - DNA, 25 bp, Homo sapien
taccctgcagggctaggtagaacgt

SEQ ID NO: 5215280 - DNA, 25 bp, Homo sapien
ggaaggcagcacacctaccaacatt

SEQ ID NO: 5215281 - DNA, 25 bp, Homo sapien
ggccacaaggcggatgtttctccac

SEQ ID NO: 5215282 - DNA, 25 bp, Homo sapien
tatgggctactccagaaaagacctg

SEQ ID NO: 5215283 - DNA, 25 bp, Homo sapien
taagctatatgtcaccttcgttggg

SEQ ID NO: 5215284 - DNA, 25 bp, Homo sapien
caggttaattatccgaagagatcac

SEQ ID NO: 5215285 - DNA, 25 bp, Homo sapien
gtacatcagacgacatgttccagtg

SEQ ID NO: 5215286 - DNA, 25 bp, Homo sapien
ctggcctggtagaaaattggtctca

SEQ ID NO: 5215287 - DNA, 25 bp, Homo sapien
gacccatagcttgtcattgtgatga

SEQ ID NO: 5215288 - DNA, 25 bp, Homo sapien
cctgaaaaatcagaccagttgcctt

SEQ ID NO: 5215289 - DNA, 25 bp, Homo sapien
ggactttctcttactccccattgga

SEQ ID NO: 5215290 - DNA, 25 bp, Homo sapien
agggactttctcttactccccattg

SEQ ID NO: 5215291 - DNA, 25 bp, Homo sapien
ctttctcttactccccattggattc

SEQ ID NO: 5215292 - DNA, 25 bp, Homo sapien
agctccttgaaaagggactttctct

SEQ ID NO: 5215293 - DNA, 25 bp, Homo sapien
gatgtgcagagtcggcaatccagag

SEQ ID NO: 5215294 - DNA, 25 bp, Homo sapien
gcttctggttgtctccgaacacatg

SEQ ID NO: 5215295 - DNA, 25 bp, Homo sapien
taactgctcggctgtatctgtcaag

SEQ ID NO: 5215296 - DNA, 25 bp, Homo sapien
aactttgtccctacacatgtggctg

SEQ ID NO: 5215297 - DNA, 25 bp, Homo sapien
tggttcatcggcaacacctgacaag

SEQ ID NO: 5215298 - DNA, 25 bp, Homo sapien
gcagtagacccacaagtgcgctggt

SEQ ID NO: 5215299 - DNA, 25 bp, Homo sapien
tcgtggagcatttcctaaaaccagg

SEQ ID NO: 5215300 - DNA, 25 bp, Homo sapien
caaagaccatcagttaagagaagcc

SEQ ID NO: 5215301 - DNA, 25 bp, Homo sapien
tgacctgggctgtttgctcctgcct

SEQ ID NO: 5215302 - DNA, 25 bp, Homo sapien
tggtggttgtattctccgtcagcca

SEQ ID NO: 5215303 - DNA, 25 bp, Homo sapien
tcctcttaaggaacggctggtctcc

SEQ ID NO: 5215304 - DNA, 25 bp, Homo sapien
tgttgttcttgatcactgcagggta

SEQ ID NO: 5215305 - DNA, 25 bp, Homo sapien
tccaactcctcggagttcaccatat

SEQ ID NO: 5215306 - DNA, 25 bp, Homo sapien
ctggtgatctccaactcctcggagt

SEQ ID NO: 5215307 - DNA, 25 bp, Homo sapien
tcaacctgtgccatttctaacctgg

SEQ ID NO: 5215308 - DNA, 25 bp, Homo sapien
ttcaacctgtgccatttctaacctg

SEQ ID NO: 5215309 - DNA, 25 bp, Homo sapien
tctaaccctgtgagtagcgaatctg

SEQ ID NO: 5215310 - DNA, 25 bp, Homo sapien
tttccgacgggagaacatcctgcct

SEQ ID NO: 5215311 - DNA, 25 bp, Homo sapien
tctgccccatctagatttccgacgg

SEQ ID NO: 5215312 - DNA, 25 bp, Homo sapien
ccgtgaagttcctcatcagcccaga

SEQ ID NO: 5215313 - DNA, 25 bp, Homo sapien
cttgccctggaatatgcccaaagtg

SEQ ID NO: 5215314 - DNA, 25 bp, Homo sapien
caaagtgacgtctcacaaatgacca

SEQ ID NO: 5215315 - DNA, 25 bp, Homo sapien
ctccaacccatggtagaggggagca

SEQ ID NO: 5215316 - DNA, 25 bp, Homo sapien
ttcaaatacagagtgctaaatctgt

SEQ ID NO: 5215317 - DNA, 25 bp, Homo sapien
aaagtcgtcgtcacagttttctcct

SEQ ID NO: 5215318 - DNA, 25 bp, Homo sapien
acagttttctcctcaatgtagctct

SEQ ID NO: 5215319 - DNA, 25 bp, Homo sapien
cacagttttctcctcaatgtagctc

SEQ ID NO: 5215320 - DNA, 25 bp, Homo sapien
ttctcctcaatgtagctctgggatt

SEQ ID NO: 5215321 - DNA, 25 bp, Homo sapien
gattgtcagacacactcttgtctcc

SEQ ID NO: 5215322 - DNA, 25 bp, Homo sapien
cagacacactcttgtctccattcag

SEQ ID NO: 5215323 - DNA, 25 bp, Homo sapien
ttgtcagacacactcttgtctccat

SEQ ID NO: 5215324 - DNA, 25 bp, Homo sapien
tgtcagacacactcttgtctccatt

SEQ ID NO: 5215325 - DNA, 25 bp, Homo sapien
tcaagtggcttcaaagccgtagtcg

SEQ ID NO: 5215326 - DNA, 25 bp, Homo sapien
tagtcgccagtaggtgccctcttag

SEQ ID NO: 5215327 - DNA, 25 bp, Homo sapien
taggtgccctcttagcaggtggcct

SEQ ID NO: 5215328 - DNA, 25 bp, Homo sapien
caaagccgtagtcgccagtaggtgc

SEQ ID NO: 5215329 - DNA, 25 bp, Homo sapien
tctgcattctcgggcacactgttct

SEQ ID NO: 5215330 - DNA, 25 bp, Homo sapien
cttgcagtcttgtcattggctcttc

SEQ ID NO: 5215331 - DNA, 25 bp, Homo sapien
cagtaatgtgctggtgcccatttct

SEQ ID NO: 5215332 - DNA, 25 bp, Homo sapien
tggctcttctaagcccgtgttgttt

SEQ ID NO: 5215333 - DNA, 25 bp, Homo sapien
agtgcacagatattcccaaggccag

SEQ ID NO: 5215334 - DNA, 25 bp, Homo sapien
tgcacagatattcccaaggccagac

SEQ ID NO: 5215335 - DNA, 25 bp, Homo sapien
tcagtgcacagatattcccaaggcc

SEQ ID NO: 5215336 - DNA, 25 bp, Homo sapien
gtgcacagatattcccaaggccaga

SEQ ID NO: 5215337 - DNA, 25 bp, Homo sapien
cactaaggtggatatttgtatcggc

SEQ ID NO: 5215338 - DNA, 25 bp, Homo sapien
tcaaactgaagagtgcgagattggg

SEQ ID NO: 5215339 - DNA, 25 bp, Homo sapien
ggatatttgtatcggctatagctct

SEQ ID NO: 5215340 - DNA, 25 bp, Homo sapien
tgggtcacagccttttgcactaagg

SEQ ID NO: 5215341 - DNA, 25 bp, Homo sapien
tcttctggccaccaattttacccac

SEQ ID NO: 5215342 - DNA, 25 bp, Homo sapien
cttccttgacttcgaagttctctct

SEQ ID NO: 5215343 - DNA, 25 bp, Homo sapien
ccttccttgacttcgaagttctctc

SEQ ID NO: 5215344 - DNA, 25 bp, Homo sapien
caattttacccactcctcagtcttt

SEQ ID NO: 5215345 - DNA, 25 bp, Homo sapien
agcttttgttcgtcctagtagccat

SEQ ID NO: 5215346 - DNA, 25 bp, Homo sapien
tccagcttttgttcgtcctagtagc

SEQ ID NO: 5215347 - DNA, 25 bp, Homo sapien
cttccagcttttgttcgtcctagta

SEQ ID NO: 5215348 - DNA, 25 bp, Homo sapien
cagcttttgttcgtcctagtagcca

SEQ ID NO: 5215349 - DNA, 25 bp, Homo sapien
tgtcccgtcgctggcttgtgggcgg

SEQ ID NO: 5215350 - DNA, 25 bp, Homo sapien
ctttttaatacagaaacagttctat

SEQ ID NO: 5215351 - DNA, 25 bp, Homo sapien
cagttctataaaagctacggttgag

SEQ ID NO: 5215352 - DNA, 25 bp, Homo sapien
tttcttaagctgtaactcaaggcct

SEQ ID NO: 5215353 - DNA, 25 bp, Homo sapien
tgatttctgtagtaatggtaagcat

SEQ ID NO: 5215354 - DNA, 25 bp, Homo sapien
tgttgatttctgtagtaatggtaag

SEQ ID NO: 5215355 - DNA, 25 bp, Homo sapien
tcttcctaatgtggttattccttct

SEQ ID NO: 5215356 - DNA, 25 bp, Homo sapien
tcctaatgtggttattccttcttgt

SEQ ID NO: 5215357 - DNA, 25 bp, Homo sapien
caagtttgccgtaagatgacccctc

SEQ ID NO: 5215358 - DNA, 25 bp, Homo sapien
ggtcctaatgagtgccgcttggcct

SEQ ID NO: 5215359 - DNA, 25 bp, Homo sapien
aatagaggttgtcttggctgtagcc

SEQ ID NO: 5215360 - DNA, 25 bp, Homo sapien
tcttgttggccctcacattggctgt

SEQ ID NO: 5215361 - DNA, 25 bp, Homo sapien
tccctgccacagcagagtagggtcc

SEQ ID NO: 5215362 - DNA, 25 bp, Homo sapien
tgctgttacggggagacaccactcc

SEQ ID NO: 5215363 - DNA, 25 bp, Homo sapien
tgtgtactctgctgttacggggaga

SEQ ID NO: 5215364 - DNA, 25 bp, Homo sapien
cagagtagggtcctctcctgtttcc

SEQ ID NO: 5215365 - DNA, 25 bp, Homo sapien
tgctctcattagtcaaatcactctc

SEQ ID NO: 5215366 - DNA, 25 bp, Homo sapien
tgatgagagagtcatggcaagaatt

SEQ ID NO: 5215367 - DNA, 25 bp, Homo sapien
gagtcatggcaagaattgctctcat

SEQ ID NO: 5215368 - DNA, 25 bp, Homo sapien
ggcaagaattgctctcattagtcaa

SEQ ID NO: 5215369 - DNA, 25 bp, Homo sapien
aatatgttaccatattccccttcca

SEQ ID NO: 5215370 - DNA, 25 bp, Homo sapien
atatgttaccatattccccttccaa

SEQ ID NO: 5215371 - DNA, 25 bp, Homo sapien
ttttgaatgtagctcgccggtctct

SEQ ID NO: 5215372 - DNA, 25 bp, Homo sapien
tgatctccagcttcaactgaattgg

SEQ ID NO: 5215373 - DNA, 25 bp, Homo sapien
gccggtctctgggttggatgtttaa

SEQ ID NO: 5215374 - DNA, 25 bp, Homo sapien
tattggcttccatcgtgaggctttc

SEQ ID NO: 5215375 - DNA, 25 bp, Homo sapien
taggtgactgctaagcttttattgc

SEQ ID NO: 5215376 - DNA, 25 bp, Homo sapien
ctaggtgactgctaagcttttattg

SEQ ID NO: 5215377 - DNA, 25 bp, Homo sapien
ttaaggcaagttcaagcccttccaa

SEQ ID NO: 5215378 - DNA, 25 bp, Homo sapien
tcaagcccttccaaagggaccctca

SEQ ID NO: 5215379 - DNA, 25 bp, Homo sapien
agatttaaggcaagttcaagccctt

SEQ ID NO: 5215380 - DNA, 25 bp, Homo sapien
caagcccttccaaagggaccctcat

SEQ ID NO: 5215381 - DNA, 25 bp, Homo sapien
cttttgatataaaactgaggtcttc

SEQ ID NO: 5215382 - DNA, 25 bp, Homo sapien
ttgcagaagccatacccataagcct

SEQ ID NO: 5215383 - DNA, 25 bp, Homo sapien
tgagtctgcatctgctaatttgagt

SEQ ID NO: 5215384 - DNA, 25 bp, Homo sapien
tcctccgtgctttcatcattagtaa

SEQ ID NO: 5215385 - DNA, 25 bp, Homo sapien
gtgaagcttgtcagccagaccctgc

SEQ ID NO: 5215386 - DNA, 25 bp, Homo sapien
tcagcacagtctggcaggttacatt

SEQ ID NO: 5215387 - DNA, 25 bp, Homo sapien
tcaaccactgaatcatgccctcttt

SEQ ID NO: 5215388 - DNA, 25 bp, Homo sapien
tcacctttaccttgccatttacaca

SEQ ID NO: 5215389 - DNA, 25 bp, Homo sapien
tttttggcttagtgctttgttaggc

SEQ ID NO: 5215390 - DNA, 25 bp, Homo sapien
gcttagtgctttgttaggcttttta

SEQ ID NO: 5215391 - DNA, 25 bp, Homo sapien
ctatcataagtaaggggctgtctgt

SEQ ID NO: 5215392 - DNA, 25 bp, Homo sapien
taaggggctgtctgtatttcctagt

SEQ ID NO: 5215393 - DNA, 25 bp, Homo sapien
ggttcgcagtacctgttctggatca

SEQ ID NO: 5215394 - DNA, 25 bp, Homo sapien
tcatgccaaacgaaattcacgtgct

SEQ ID NO: 5215395 - DNA, 25 bp, Homo sapien
ttctggatcaactgaatgtatgagg

SEQ ID NO: 5215396 - DNA, 25 bp, Homo sapien
gaaattcacgtgctgttgtggtgtc

SEQ ID NO: 5215397 - DNA, 25 bp, Homo sapien
gttgttgtgaagacttgattccaca

SEQ ID NO: 5215398 - DNA, 25 bp, Homo sapien
tccagatcttggatatttactgaga

SEQ ID NO: 5215399 - DNA, 25 bp, Homo sapien
gcaagtttcaagatctagtgtctgg

SEQ ID NO: 5215400 - DNA, 25 bp, Homo sapien
cttagaggtaggaatgcaagtttca

SEQ ID NO: 5215401 - DNA, 25 bp, Homo sapien
ggcctggatccacattcttgtgcat

SEQ ID NO: 5215402 - DNA, 25 bp, Homo sapien
tggcagcattgggtgaaaacctttc

SEQ ID NO: 5215403 - DNA, 25 bp, Homo sapien
cagttttgcttggtgtgttggatag

SEQ ID NO: 5215404 - DNA, 25 bp, Homo sapien
tgtgcattgctgactactttcttgg

SEQ ID NO: 5215405 - DNA, 25 bp, Homo sapien
ctgtggtgtcggtaaagaaatcaaa

SEQ ID NO: 5215406 - DNA, 25 bp, Homo sapien
ccatttggccgcagactctgaggtt

SEQ ID NO: 5215407 - DNA, 25 bp, Homo sapien
ctctatcacggtattgggcaacatt

SEQ ID NO: 5215408 - DNA, 25 bp, Homo sapien
ggtttgggcaccatgatgatttccc

SEQ ID NO: 5215409 - DNA, 25 bp, Homo sapien
ccatctccgtgacaggtgatttcca

SEQ ID NO: 5215410 - DNA, 25 bp, Homo sapien
ggctgtatgttccaagaggttatct

SEQ ID NO: 5215411 - DNA, 25 bp, Homo sapien
cctattccctcgagggttcatttct

SEQ ID NO: 5215412 - DNA, 25 bp, Homo sapien
tctttctcttcccaacagatggctg

SEQ ID NO: 5215413 - DNA, 25 bp, Homo sapien
ttctcctattccctcgagggttcat

SEQ ID NO: 5215414 - DNA, 25 bp, Homo sapien
gaggcgcaggacccccggcgccctc

SEQ ID NO: 5215415 - DNA, 25 bp, Homo sapien
gtgcgggcagatgccgccgaagcgt

SEQ ID NO: 5215416 - DNA, 25 bp, Homo sapien
accggtccccgacgtgccgccagct

SEQ ID NO: 5215417 - DNA, 25 bp, Homo sapien
agggaggtcccgctggccaaggtct

SEQ ID NO: 5215418 - DNA, 25 bp, Homo sapien
cggtgcgggcagatgccgccgaagc

SEQ ID NO: 5215419 - DNA, 25 bp, Homo sapien
ctacgtgggactggttgatgaagat

SEQ ID NO: 5215420 - DNA, 25 bp, Homo sapien
tacgtgggactggttgatgaagatg

SEQ ID NO: 5215421 - DNA, 25 bp, Homo sapien
ggagacagcgctaataacttttgtg

SEQ ID NO: 5215422 - DNA, 25 bp, Homo sapien
agggagacagcgctaataacttttg

SEQ ID NO: 5215423 - DNA, 25 bp, Homo sapien
gggagggagacagcgctaataactt

SEQ ID NO: 5215424 - DNA, 25 bp, Homo sapien
agacagcgctaataacttttgtgaa

SEQ ID NO: 5215425 - DNA, 25 bp, Homo sapien
ggaggactttggctccggtcaactg

SEQ ID NO: 5215426 - DNA, 25 bp, Homo sapien
actttggctccggtcaactgcccaa

SEQ ID NO: 5215427 - DNA, 25 bp, Homo sapien
cggtcaactgcccaaccattgaaac

SEQ ID NO: 5215428 - DNA, 25 bp, Homo sapien
ggtcaactgcccaaccattgaaaca

SEQ ID NO: 5215429 - DNA, 25 bp, Homo sapien
gagaatggactcatataccatcatg

SEQ ID NO: 5215430 - DNA, 25 bp, Homo sapien
tctccacagtctctggtaacaacca

SEQ ID NO: 5215431 - DNA, 25 bp, Homo sapien
taccatcatgctgtacattgggtct

SEQ ID NO: 5215432 - DNA, 25 bp, Homo sapien
cccagtctcatgtggtttcttatag

SEQ ID NO: 5215433 - DNA, 25 bp, Homo sapien
cccgtggcagggcatgtcgggaact

SEQ ID NO: 5215434 - DNA, 25 bp, Homo sapien
agtagctccggtacgcaggcgcacc

SEQ ID NO: 5215435 - DNA, 25 bp, Homo sapien
catgtcgggaactgtagttttcccg

SEQ ID NO: 5215436 - DNA, 25 bp, Homo sapien
gcagtagctccggtacgcaggcgca

SEQ ID NO: 5215437 - DNA, 25 bp, Homo sapien
ctgtccgcctgaggctccgtactgc

SEQ ID NO: 5215438 - DNA, 25 bp, Homo sapien
caggcgagcgggtttccgtggaact

SEQ ID NO: 5215439 - DNA, 25 bp, Homo sapien
gtccgcctgaggctccgtactgcag

SEQ ID NO: 5215440 - DNA, 25 bp, Homo sapien
ccgtggaactaacacagcattttaa

SEQ ID NO: 5215441 - DNA, 25 bp, Homo sapien
ccacctcatgttcaagttgctgaag

SEQ ID NO: 5215442 - DNA, 25 bp, Homo sapien
cctcatgttcaagttgctgaaggtg

SEQ ID NO: 5215443 - DNA, 25 bp, Homo sapien
gaaaggggggtccacctcatgttca

SEQ ID NO: 5215444 - DNA, 25 bp, Homo sapien
gggtccacctcatgttcaagttgct

SEQ ID NO: 5215445 - DNA, 25 bp, Homo sapien
tgtttcagaagctgtagcgttgatg

SEQ ID NO: 5215446 - DNA, 25 bp, Homo sapien
ctcatcctttgctgaagtactgtga

SEQ ID NO: 5215447 - DNA, 25 bp, Homo sapien
cattattaggtcatccctcagtgaa

SEQ ID NO: 5215448 - DNA, 25 bp, Homo sapien
gaaaggaccggtctggacactgtag

SEQ ID NO: 5215449 - DNA, 25 bp, Homo sapien
cagtttgcagccgaaagatgttcat

SEQ ID NO: 5215450 - DNA, 25 bp, Homo sapien
tcgatttaccagaaactcacagttc

SEQ ID NO: 5215451 - DNA, 25 bp, Homo sapien
tgcatgaggctttcaagacggcaca

SEQ ID NO: 5215452 - DNA, 25 bp, Homo sapien
aacagtctggagcttccaaatagcc

SEQ ID NO: 5215453 - DNA, 25 bp, Homo sapien
ctttgtctgcgaggcaatcttcaga

SEQ ID NO: 5215454 - DNA, 25 bp, Homo sapien
tcttcagagtggcagtcaacctttg

SEQ ID NO: 5215455 - DNA, 25 bp, Homo sapien
tgctggcgcaaattcataacttcga

SEQ ID NO: 5215456 - DNA, 25 bp, Homo sapien
aacttcgagatgcaacagcttcagg

SEQ ID NO: 5215457 - DNA, 25 bp, Homo sapien
ttcattttacgttttgtggtcttca

SEQ ID NO: 5215458 - DNA, 25 bp, Homo sapien
taggcttgaaagcattcagctggcc

SEQ ID NO: 5215459 - DNA, 25 bp, Homo sapien
accctctgtcataggctgaattgtg

SEQ ID NO: 5215460 - DNA, 25 bp, Homo sapien
tctcttaggaagataaataccacac

SEQ ID NO: 5215461 - DNA, 25 bp, Homo sapien
tacgtgatatacctacaatgtgccg

SEQ ID NO: 5215462 - DNA, 25 bp, Homo sapien
gtacctggtactaaaggagtgtgcc

SEQ ID NO: 5215463 - DNA, 25 bp, Homo sapien
cctggtactaaaggagtgtgccacc

SEQ ID NO: 5215464 - DNA, 25 bp, Homo sapien
gagtacctggtactaaaggagtgtg

SEQ ID NO: 5215465 - DNA, 25 bp, Homo sapien
tacctggtactaaaggagtgtgcca

SEQ ID NO: 5215466 - DNA, 25 bp, Homo sapien
tgttttcgttctacctccactgttg

SEQ ID NO: 5215467 - DNA, 25 bp, Homo sapien
tacttctcctgagccagttgtctcc

SEQ ID NO: 5215468 - DNA, 25 bp, Homo sapien
ctaaggtacttctcctgagccagtt

SEQ ID NO: 5215469 - DNA, 25 bp, Homo sapien
gttctacctccactgttgatcccat

SEQ ID NO: 5215470 - DNA, 25 bp, Homo sapien
caacagaatgcggtcttggagcagt

SEQ ID NO: 5215471 - DNA, 25 bp, Homo sapien
tggctaccatattggcattgcaagt

SEQ ID NO: 5215472 - DNA, 25 bp, Homo sapien
tagcacatgtataaggcaacattcc

SEQ ID NO: 5215473 - DNA, 25 bp, Homo sapien
agaaccttctgtgcactctccaatg

SEQ ID NO: 5215474 - DNA, 25 bp, Homo sapien
gatcagatttgagctgtgaagtagc

SEQ ID NO: 5215475 - DNA, 25 bp, Homo sapien
tatagaatcacgtagagcaatgcag

SEQ ID NO: 5215476 - DNA, 25 bp, Homo sapien
tgggccagtagttcttgagcgctct

SEQ ID NO: 5215477 - DNA, 25 bp, Homo sapien
cagtagttcttgagcgctctgtata

SEQ ID NO: 5215478 - DNA, 25 bp, Homo sapien
tattcccaggtccacaaacaagctg

SEQ ID NO: 5215479 - DNA, 25 bp, Homo sapien
gaaatatgaccgaacaccttgggat

SEQ ID NO: 5215480 - DNA, 25 bp, Homo sapien
cattacagcagccatagagcacaga

SEQ ID NO: 5215481 - DNA, 25 bp, Homo sapien
tgtgggaaataccaataacactggc

SEQ ID NO: 5215482 - DNA, 25 bp, Homo sapien
aaccaacttggaaatgaggtcatct

SEQ ID NO: 5215483 - DNA, 25 bp, Homo sapien
cttcaaccaacttggaaatgaggtc

SEQ ID NO: 5215484 - DNA, 25 bp, Homo sapien
tttcttcaaccaacttggaaatgag

SEQ ID NO: 5215485 - DNA, 25 bp, Homo sapien
tcaaccaacttggaaatgaggtcat

SEQ ID NO: 5215486 - DNA, 25 bp, Homo sapien
catgaagagacattatttcggacct

SEQ ID NO: 5215487 - DNA, 25 bp, Homo sapien
tgaagagacattatttcggacctca

SEQ ID NO: 5215488 - DNA, 25 bp, Homo sapien
gaagagacattatttcggacctcaa

SEQ ID NO: 5215489 - DNA, 25 bp, Homo sapien
atgaagagacattatttcggacctc

SEQ ID NO: 5215490 - DNA, 25 bp, Homo sapien
gcctgatggtcagcaatgattctgg

SEQ ID NO: 5215491 - DNA, 25 bp, Homo sapien
cagctcaactctgaacactttttag

SEQ ID NO: 5215492 - DNA, 25 bp, Homo sapien
gcatgcagctcaactctgaacactt

SEQ ID NO: 5215493 - DNA, 25 bp, Homo sapien
tccatagtaacagtctgaagcatgc

SEQ ID NO: 5215494 - DNA, 25 bp, Homo sapien
tcttgaaatgtctgcgtcatcattt

SEQ ID NO: 5215495 - DNA, 25 bp, Homo sapien
tgtagttcatttgtgatactggcat

SEQ ID NO: 5215496 - DNA, 25 bp, Homo sapien
gtgatactggcatgggctgcatcca

SEQ ID NO: 5215497 - DNA, 25 bp, Homo sapien
gggctgcatccagcaataagttttg

SEQ ID NO: 5215498 - DNA, 25 bp, Homo sapien
tctcctctagcagagacttcttctc

SEQ ID NO: 5215499 - DNA, 25 bp, Homo sapien
ttgcaatagttgattctagcagctc

SEQ ID NO: 5215500 - DNA, 25 bp, Homo sapien
aattcacctcgcaatcttgcaatag

SEQ ID NO: 5215501 - DNA, 25 bp, Homo sapien
tctggatacactggttatgctcaag

SEQ ID NO: 5215502 - DNA, 25 bp, Homo sapien
ggccaatcagggagtctctgaggca

SEQ ID NO: 5215503 - DNA, 25 bp, Homo sapien
actgcagagatagcacatcctctca

SEQ ID NO: 5215504 - DNA, 25 bp, Homo sapien
agagatagcacatcctctcagaaaa

SEQ ID NO: 5215505 - DNA, 25 bp, Homo sapien
ccaatcagggagtctctgaggcaga

SEQ ID NO: 5215506 - DNA, 25 bp, Homo sapien
ccaaattgcatctttcttgcactat

SEQ ID NO: 5215507 - DNA, 25 bp, Homo sapien
aaattgcatctttcttgcactattt

SEQ ID NO: 5215508 - DNA, 25 bp, Homo sapien
caaattgcatctttcttgcactatt

SEQ ID NO: 5215509 - DNA, 25 bp, Homo sapien
tccaaattgcatctttcttgcacta

SEQ ID NO: 5215510 - DNA, 25 bp, Homo sapien
cccatggtaatcagaagtgacttgc

SEQ ID NO: 5215511 - DNA, 25 bp, Homo sapien
caagagtctgcaggttatgagttaa

SEQ ID NO: 5215512 - DNA, 25 bp, Homo sapien
tctagggaagccatttgatctgcca

SEQ ID NO: 5215513 - DNA, 25 bp, Homo sapien
agtctgcaggttatgagttaatgta

SEQ ID NO: 5215514 - DNA, 25 bp, Homo sapien
tggagttttccgttttcataggcca

SEQ ID NO: 5215515 - DNA, 25 bp, Homo sapien
cagtttatttttactttcagtgatt

SEQ ID NO: 5215516 - DNA, 25 bp, Homo sapien
gccagtttatttttactttcagtga

SEQ ID NO: 5215517 - DNA, 25 bp, Homo sapien
ccagtttatttttactttcagtgat

SEQ ID NO: 5215518 - DNA, 25 bp, Homo sapien
taagagttatgtgctccaagagcac

SEQ ID NO: 5215519 - DNA, 25 bp, Homo sapien
agttatgtgctccaagagcactttc

SEQ ID NO: 5215520 - DNA, 25 bp, Homo sapien
tgtaagagttatgtgctccaagagc

SEQ ID NO: 5215521 - DNA, 25 bp, Homo sapien
tgtcttgtaagagttatgtgctcca

SEQ ID NO: 5215522 - DNA, 25 bp, Homo sapien
tacttattcatcttgcgtagatgat

SEQ ID NO: 5215523 - DNA, 25 bp, Homo sapien
gcgtagatgatcattctgtaagctg

SEQ ID NO: 5215524 - DNA, 25 bp, Homo sapien
ctgagcatatttagtctgtaaatac

SEQ ID NO: 5215525 - DNA, 25 bp, Homo sapien
gctggtgtcagtaaaagactgtact

SEQ ID NO: 5215526 - DNA, 25 bp, Homo sapien
ttagcagaaccttgtatgtactagg

SEQ ID NO: 5215527 - DNA, 25 bp, Homo sapien
tccgcttttgtagatattaatcaca

SEQ ID NO: 5215528 - DNA, 25 bp, Homo sapien
gaaatatagcagcaatccgcttttg

SEQ ID NO: 5215529 - DNA, 25 bp, Homo sapien
aagtttgttaaactgagtcaagtga

SEQ ID NO: 5215530 - DNA, 25 bp, Homo sapien
gcaggtgtaccctcttggcactgag

SEQ ID NO: 5215531 - DNA, 25 bp, Homo sapien
tgctgcaggtgtaccctcttggcac

SEQ ID NO: 5215532 - DNA, 25 bp, Homo sapien
gcctgctgcaggtgtaccctcttgg

SEQ ID NO: 5215533 - DNA, 25 bp, Homo sapien
ctgcctgctgcaggtgtaccctctt

SEQ ID NO: 5215534 - DNA, 25 bp, Homo sapien
actgtaaaatatgacccagcaaaga

SEQ ID NO: 5215535 - DNA, 25 bp, Homo sapien
ttccctgtcagagagcgcatctaat

SEQ ID NO: 5215536 - DNA, 25 bp, Homo sapien
gaaggagccgtaatggaaaatatat

SEQ ID NO: 5215537 - DNA, 25 bp, Homo sapien
agaaacagaccttatgccaacttcc

SEQ ID NO: 5215538 - DNA, 25 bp, Homo sapien
taggtgcaaagctcacacggcgtgt

SEQ ID NO: 5215539 - DNA, 25 bp, Homo sapien
acactaggcaaaccaactgatgacg

SEQ ID NO: 5215540 - DNA, 25 bp, Homo sapien
tatactgtttacatgggacctagag

SEQ ID NO: 5215541 - DNA, 25 bp, Homo sapien
cacggcgtgtagagtttggaataac

SEQ ID NO: 5215542 - DNA, 25 bp, Homo sapien
gagagatcctagagtctccaatatc

SEQ ID NO: 5215543 - DNA, 25 bp, Homo sapien
tattaaaggtcttgaggctagaatc

SEQ ID NO: 5215544 - DNA, 25 bp, Homo sapien
tcaaaagagtctttagagagatcct

SEQ ID NO: 5215545 - DNA, 25 bp, Homo sapien
taaaggtcttgaggctagaatctct

SEQ ID NO: 5215546 - DNA, 25 bp, Homo sapien
ctactataaatagaacccatcttta

SEQ ID NO: 5215547 - DNA, 25 bp, Homo sapien
atcagtgattagaataagacataga

SEQ ID NO: 5215548 - DNA, 25 bp, Homo sapien
aataacattacaaatcagtgattag

SEQ ID NO: 5215549 - DNA, 25 bp, Homo sapien
cagtgattagaataagacatagaaa

SEQ ID NO: 5215550 - DNA, 25 bp, Homo sapien
ttctgactctctttcagggccgcat

SEQ ID NO: 5215551 - DNA, 25 bp, Homo sapien
tacgacacttcactgttcgggacag

SEQ ID NO: 5215552 - DNA, 25 bp, Homo sapien
ttcactgttcgggacagctcctctt

SEQ ID NO: 5215553 - DNA, 25 bp, Homo sapien
tttcagggccgcattacgacacttc

SEQ ID NO: 5215554 - DNA, 25 bp, Homo sapien
cagacacagtaggatgctagtggga

SEQ ID NO: 5215555 - DNA, 25 bp, Homo sapien
gaaagagcatggaaagcagacaagc

SEQ ID NO: 5215556 - DNA, 25 bp, Homo sapien
tggatctcattactcccaggaaaga

SEQ ID NO: 5215557 - DNA, 25 bp, Homo sapien
gacatttgatcctttctggttactc

SEQ ID NO: 5215558 - DNA, 25 bp, Homo sapien
gccaattgtcgctgaaagtttccca

SEQ ID NO: 5215559 - DNA, 25 bp, Homo sapien
tagcttctgccaattgtcgctgaaa

SEQ ID NO: 5215560 - DNA, 25 bp, Homo sapien
tctttagcttctgccaattgtcgct

SEQ ID NO: 5215561 - DNA, 25 bp, Homo sapien
gattgtgactttgcagttgtcttct

SEQ ID NO: 5215562 - DNA, 25 bp, Homo sapien
tgtgagaagccagcacattctccaa

SEQ ID NO: 5215563 - DNA, 25 bp, Homo sapien
tgagaagccagcacattctccaaca

SEQ ID NO: 5215564 - DNA, 25 bp, Homo sapien
gagaagccagcacattctccaacat

SEQ ID NO: 5215565 - DNA, 25 bp, Homo sapien
gtgagaagccagcacattctccaac

SEQ ID NO: 5215566 - DNA, 25 bp, Homo sapien
tccgcccaagctctatttgtacttt

SEQ ID NO: 5215567 - DNA, 25 bp, Homo sapien
atctctgaatccctccgcccaagct

SEQ ID NO: 5215568 - DNA, 25 bp, Homo sapien
gaggcctgcaatctctgaatccctc

SEQ ID NO: 5215569 - DNA, 25 bp, Homo sapien
aatccctccgcccaagctctatttg

SEQ ID NO: 5215570 - DNA, 25 bp, Homo sapien
tccttagtacaatccagcaatacca

SEQ ID NO: 5215571 - DNA, 25 bp, Homo sapien
gacactgctccttagtacaatccag

SEQ ID NO: 5215572 - DNA, 25 bp, Homo sapien
tgctccttagtacaatccagcaata

SEQ ID NO: 5215573 - DNA, 25 bp, Homo sapien
tgacttgacactgctccttagtaca

SEQ ID NO: 5215574 - DNA, 25 bp, Homo sapien
taaactcagaccatttattctttaa

SEQ ID NO: 5215575 - DNA, 25 bp, Homo sapien
ctctcataacatagaggcaatatgc

SEQ ID NO: 5215576 - DNA, 25 bp, Homo sapien
ggcaatatgccctattaaactcaga

SEQ ID NO: 5215577 - DNA, 25 bp, Homo sapien
tgttctctcataacatagaggcaat

SEQ ID NO: 5215578 - DNA, 25 bp, Homo sapien
cactgttgtgctggtcctccatgac

SEQ ID NO: 5215579 - DNA, 25 bp, Homo sapien
tctttgctttccaattgctcttgaa

SEQ ID NO: 5215580 - DNA, 25 bp, Homo sapien
tgtgatctagctttgtttgcagatg

SEQ ID NO: 5215581 - DNA, 25 bp, Homo sapien
tcctgttgtcttctctagctacacc

SEQ ID NO: 5215582 - DNA, 25 bp, Homo sapien
tagctacacctagagctttttgtag

SEQ ID NO: 5215583 - DNA, 25 bp, Homo sapien
tcctcccattctaaaaacagggcag

SEQ ID NO: 5215584 - DNA, 25 bp, Homo sapien
tgcttcccgctagtcccaaaggaag

SEQ ID NO: 5215585 - DNA, 25 bp, Homo sapien
gaagtccttagcatattacccaaca

SEQ ID NO: 5215586 - DNA, 25 bp, Homo sapien
taaggaaaatcgcagaccatctacc

SEQ ID NO: 5215587 - DNA, 25 bp, Homo sapien
gagcttctatgcgttcagcatgcaa

SEQ ID NO: 5215588 - DNA, 25 bp, Homo sapien
cagccacttcccgttgtgccacttt

SEQ ID NO: 5215589 - DNA, 25 bp, Homo sapien
actgctttcttagagcttctatgcg

SEQ ID NO: 5215590 - DNA, 25 bp, Homo sapien
tctctctcggtttgaaactgctttc

SEQ ID NO: 5215591 - DNA, 25 bp, Homo sapien
gctcagaaacccatagtgctccgtt

SEQ ID NO: 5215592 - DNA, 25 bp, Homo sapien
aaggcacacctttgtcgggcagaga

SEQ ID NO: 5215593 - DNA, 25 bp, Homo sapien
tataactaaggccatccatcaggtg

SEQ ID NO: 5215594 - DNA, 25 bp, Homo sapien
tcatttccggagtggagatcccaaa

SEQ ID NO: 5215595 - DNA, 25 bp, Homo sapien
gcattttaagagcatgactttggag

SEQ ID NO: 5215596 - DNA, 25 bp, Homo sapien
gctgagtgatctggagcaattaact

SEQ ID NO: 5215597 - DNA, 25 bp, Homo sapien
gcagatttatggagcaatagaccaa

SEQ ID NO: 5215598 - DNA, 25 bp, Homo sapien
gcaattaactaccttaagcctcagg

SEQ ID NO: 5215599 - DNA, 25 bp, Homo sapien
gacaagtggagcttaatttgggtct

SEQ ID NO: 5215600 - DNA, 25 bp, Homo sapien
tctgtcgcagctctcggttggtccg

SEQ ID NO: 5215601 - DNA, 25 bp, Homo sapien
agcattattcgccttagctgacaag

SEQ ID NO: 5215602 - DNA, 25 bp, Homo sapien
ggttggtccgggacacttccactga

SEQ ID NO: 5215603 - DNA, 25 bp, Homo sapien
gggtatccaggaagtgagaagaggt

SEQ ID NO: 5215604 - DNA, 25 bp, Homo sapien
gtatccaggaagtgagaagaggttt

SEQ ID NO: 5215605 - DNA, 25 bp, Homo sapien
acagggtatccaggaagtgagaaga

SEQ ID NO: 5215606 - DNA, 25 bp, Homo sapien
tcacagggtatccaggaagtgagaa

SEQ ID NO: 5215607 - DNA, 25 bp, Homo sapien
tcttccctagacaccattgactgac

SEQ ID NO: 5215608 - DNA, 25 bp, Homo sapien
gctgctagggttctaaaacctgtct

SEQ ID NO: 5215609 - DNA, 25 bp, Homo sapien
gcaaagtccagtacaatcaacacgg

SEQ ID NO: 5215610 - DNA, 25 bp, Homo sapien
gtctccccaaagacaactggctata

SEQ ID NO: 5215611 - DNA, 25 bp, Homo sapien
gatattgatccttaattagctccat

SEQ ID NO: 5215612 - DNA, 25 bp, Homo sapien
ttctgatattgatccttaattagct

SEQ ID NO: 5215613 - DNA, 25 bp, Homo sapien
atattgatccttaattagctccatt

SEQ ID NO: 5215614 - DNA, 25 bp, Homo sapien
ctgatattgatccttaattagctcc

SEQ ID NO: 5215615 - DNA, 25 bp, Homo sapien
tgtttattccgcactgaggcatcat

SEQ ID NO: 5215616 - DNA, 25 bp, Homo sapien
gaggcatcatattggctcttagcca

SEQ ID NO: 5215617 - DNA, 25 bp, Homo sapien
ttctaggtgcagctcttgctgttta

SEQ ID NO: 5215618 - DNA, 25 bp, Homo sapien
tctttctgcaggttagtcatttcac

SEQ ID NO: 5215619 - DNA, 25 bp, Homo sapien
tgttctgattccacactggcttctt

SEQ ID NO: 5215620 - DNA, 25 bp, Homo sapien
tggcttctttcagcgtattctctgt

SEQ ID NO: 5215621 - DNA, 25 bp, Homo sapien
caggtgtctgacagtttcttccaat

SEQ ID NO: 5215622 - DNA, 25 bp, Homo sapien
ctttacatttcttcaggtgtctgac

SEQ ID NO: 5215623 - DNA, 25 bp, Homo sapien
gagcttcttccagattagctgttat

SEQ ID NO: 5215624 - DNA, 25 bp, Homo sapien
aagttgtagaccatcaaacctgtgc

SEQ ID NO: 5215625 - DNA, 25 bp, Homo sapien
gcaaccggttttttgtcagctcaag

SEQ ID NO: 5215626 - DNA, 25 bp, Homo sapien
tgtgcttaaaccagcgatgagcttc

SEQ ID NO: 5215627 - DNA, 25 bp, Homo sapien
tgacatcatgttttacatcttggtc

SEQ ID NO: 5215628 - DNA, 25 bp, Homo sapien
atgacatcatgttttacatcttggt

SEQ ID NO: 5215629 - DNA, 25 bp, Homo sapien
tcgatgcagaacagattggttggac

SEQ ID NO: 5215630 - DNA, 25 bp, Homo sapien
ttgggcatgggcctaagattctgtt

SEQ ID NO: 5215631 - DNA, 25 bp, Homo sapien
tgttttctctcccatcgatgcagaa

SEQ ID NO: 5215632 - DNA, 25 bp, Homo sapien
ggcatgggcctaagattctgttttc

SEQ ID NO: 5215633 - DNA, 25 bp, Homo sapien
gataaactcaggtccaaaatcttca

SEQ ID NO: 5215634 - DNA, 25 bp, Homo sapien
tataagagttcataaagtgataaac

SEQ ID NO: 5215635 - DNA, 25 bp, Homo sapien
ttggaatcatggagtgtagctacac

SEQ ID NO: 5215636 - DNA, 25 bp, Homo sapien
cataaagaagctcccttgtcaagga

SEQ ID NO: 5215637 - DNA, 25 bp, Homo sapien
caaaatatatcgtttagtagcaata

SEQ ID NO: 5215638 - DNA, 25 bp, Homo sapien
atcatttagaacttgctaaaagcct

SEQ ID NO: 5215639 - DNA, 25 bp, Homo sapien
atcgtttagtagcaatatcatttag

SEQ ID NO: 5215640 - DNA, 25 bp, Homo sapien
catttagaacttgctaaaagccttt

SEQ ID NO: 5215641 - DNA, 25 bp, Homo sapien
cagtaactacagtcctataggtgtc

SEQ ID NO: 5215642 - DNA, 25 bp, Homo sapien
gagtagtaggctcatcaacctttga

SEQ ID NO: 5215643 - DNA, 25 bp, Homo sapien
ggaggactatgcctgaacaacactt

SEQ ID NO: 5215644 - DNA, 25 bp, Homo sapien
tcatattcccaaaaaacctacgaga

SEQ ID NO: 5215645 - DNA, 25 bp, Homo sapien
gctgctcctgcatgatcacagttga

SEQ ID NO: 5215646 - DNA, 25 bp, Homo sapien
gagggagtctgctcctgaaccaacc

SEQ ID NO: 5215647 - DNA, 25 bp, Homo sapien
tcacagttgatcgaggagggagtct

SEQ ID NO: 5215648 - DNA, 25 bp, Homo sapien
tccctgggaatttcagacttgaaat

SEQ ID NO: 5215649 - DNA, 25 bp, Homo sapien
aattagctcactggactgtggctcc

SEQ ID NO: 5215650 - DNA, 25 bp, Homo sapien
gacttgtgtgttggaattctgtgga

SEQ ID NO: 5215651 - DNA, 25 bp, Homo sapien
tataggtaatggtagaggtaactga

SEQ ID NO: 5215652 - DNA, 25 bp, Homo sapien
cagtgtctactaaatagccgtggag

SEQ ID NO: 5215653 - DNA, 25 bp, Homo sapien
taaagcaccgcaactgagaacagag

SEQ ID NO: 5215654 - DNA, 25 bp, Homo sapien
gacttacgaagagatattgcctaca

SEQ ID NO: 5215655 - DNA, 25 bp, Homo sapien
taccggaatggctcaaacgcttttg

SEQ ID NO: 5215656 - DNA, 25 bp, Homo sapien
tctccctagggtatagaacttgacc

SEQ ID NO: 5215657 - DNA, 25 bp, Homo sapien
actgtgtgacccacagggagccagc

SEQ ID NO: 5215658 - DNA, 25 bp, Homo sapien
tccatagtctttgagtcagaagctt

SEQ ID NO: 5215659 - DNA, 25 bp, Homo sapien
agggagccagcgtcattgtagctgt

SEQ ID NO: 5215660 - DNA, 25 bp, Homo sapien
ttctccatagtctttgagtcagaag

SEQ ID NO: 5215661 - DNA, 25 bp, Homo sapien
taaactggcagagaagaagcggata

SEQ ID NO: 5215662 - DNA, 25 bp, Homo sapien
catctttgtccggagagcactggca

SEQ ID NO: 5215663 - DNA, 25 bp, Homo sapien
gaactagctggaacttgtagagacc

SEQ ID NO: 5215664 - DNA, 25 bp, Homo sapien
taagaagatgcactctaggaccaga

SEQ ID NO: 5215665 - DNA, 25 bp, Homo sapien
gagttattgaataccctgatggtta

SEQ ID NO: 5215666 - DNA, 25 bp, Homo sapien
gatactctgttgttgattacctggt

SEQ ID NO: 5215667 - DNA, 25 bp, Homo sapien
tcatcatcaggaattaactctacca

SEQ ID NO: 5215668 - DNA, 25 bp, Homo sapien
gttaaaattatgtgcttcctgcaat

SEQ ID NO: 5215669 - DNA, 25 bp, Homo sapien
agacgaccgctttcactgtgatggg

SEQ ID NO: 5215670 - DNA, 25 bp, Homo sapien
ggacccagacgaccgctttcactgt

SEQ ID NO: 5215671 - DNA, 25 bp, Homo sapien
gcagcttcttccttatcttacagaa

SEQ ID NO: 5215672 - DNA, 25 bp, Homo sapien
tatcttacagaaactccggttttca

SEQ ID NO: 5215673 - DNA, 25 bp, Homo sapien
ccatttatacgtcccggtctggcgc

SEQ ID NO: 5215674 - DNA, 25 bp, Homo sapien
gcagaccgggcgagtttcccagaag

SEQ ID NO: 5215675 - DNA, 25 bp, Homo sapien
gaaggacgccggttccttgctcttg

SEQ ID NO: 5215676 - DNA, 25 bp, Homo sapien
cgcggaacctgagtgctgcagctgc

SEQ ID NO: 5215677 - DNA, 25 bp, Homo sapien
tccccaagtatcaagggagccatgt

SEQ ID NO: 5215678 - DNA, 25 bp, Homo sapien
tcttctaatgggactgctagcaaac

SEQ ID NO: 5215679 - DNA, 25 bp, Homo sapien
gactttcttactgatggcatggcag

SEQ ID NO: 5215680 - DNA, 25 bp, Homo sapien
gctgaggaactccaaacttaggaaa

SEQ ID NO: 5215681 - DNA, 25 bp, Homo sapien
agggaatgctcatcagtttcagggc

SEQ ID NO: 5215682 - DNA, 25 bp, Homo sapien
gctctcggtgttaagacctccacaa

SEQ ID NO: 5215683 - DNA, 25 bp, Homo sapien
atgctcatcagtttcagggcattga

SEQ ID NO: 5215684 - DNA, 25 bp, Homo sapien
tatccctgctctcggtgttaagacc

SEQ ID NO: 5215685 - DNA, 25 bp, Homo sapien
tgattcccatactcacatttggaat

SEQ ID NO: 5215686 - DNA, 25 bp, Homo sapien
ttggaatagctgcttttcctgtatc

SEQ ID NO: 5215687 - DNA, 25 bp, Homo sapien
tactctagctcatgctgagttattc

SEQ ID NO: 5215688 - DNA, 25 bp, Homo sapien
tcatgctgagttattctgattccca

SEQ ID NO: 5215689 - DNA, 25 bp, Homo sapien
gatggctgtaaaacttagataaacc

SEQ ID NO: 5215690 - DNA, 25 bp, Homo sapien
taacattctcattatcatgggctac

SEQ ID NO: 5215691 - DNA, 25 bp, Homo sapien
catgggctactttaagctaatcagt

SEQ ID NO: 5215692 - DNA, 25 bp, Homo sapien
gggtcctcatttagaagtcaatctg

SEQ ID NO: 5215693 - DNA, 25 bp, Homo sapien
tctactcacactgttgtggtatgtg

SEQ ID NO: 5215694 - DNA, 25 bp, Homo sapien
ggaagacaatctctactcacactgt

SEQ ID NO: 5215695 - DNA, 25 bp, Homo sapien
ttcacaccttggagtggaagacaat

SEQ ID NO: 5215696 - DNA, 25 bp, Homo sapien
ttggagtggaagacaatctctactc

SEQ ID NO: 5215697 - DNA, 25 bp, Homo sapien
gacgtatgggcctttaggctcttaa

SEQ ID NO: 5215698 - DNA, 25 bp, Homo sapien
tcagggcaggatgcaccaaataggg

SEQ ID NO: 5215699 - DNA, 25 bp, Homo sapien
caaatagggcccgaagtttccatat

SEQ ID NO: 5215700 - DNA, 25 bp, Homo sapien
ggctcttaaatagcttcagggcagg

SEQ ID NO: 5215701 - DNA, 25 bp, Homo sapien
tgagcatgccgctaatggagaaagg

SEQ ID NO: 5215702 - DNA, 25 bp, Homo sapien
agctgaatgagcatgccgctaatgg

SEQ ID NO: 5215703 - DNA, 25 bp, Homo sapien
tggagaaagggggtattttcacaga

SEQ ID NO: 5215704 - DNA, 25 bp, Homo sapien
gataagagctgaatgagcatgccgc

SEQ ID NO: 5215705 - DNA, 25 bp, Homo sapien
cacatcaatttggaatccactgaat

SEQ ID NO: 5215706 - DNA, 25 bp, Homo sapien
tcaatttggaatccactgaatatac

SEQ ID NO: 5215707 - DNA, 25 bp, Homo sapien
agaccacatcaatttggaatccact

SEQ ID NO: 5215708 - DNA, 25 bp, Homo sapien
aatttggaatccactgaatatacag

SEQ ID NO: 5215709 - DNA, 25 bp, Homo sapien
tgatgactctagaaaagccatctgt

SEQ ID NO: 5215710 - DNA, 25 bp, Homo sapien
tctgtgcctggttaacattgagttt

SEQ ID NO: 5215711 - DNA, 25 bp, Homo sapien
tattttggctagacaaattcagatc

SEQ ID NO: 5215712 - DNA, 25 bp, Homo sapien
aatggaataccccttcttgagtgaa

SEQ ID NO: 5215713 - DNA, 25 bp, Homo sapien
catttagtatttctaaagcctcctt

SEQ ID NO: 5215714 - DNA, 25 bp, Homo sapien
tactgcctgtagagagttacctaac

SEQ ID NO: 5215715 - DNA, 25 bp, Homo sapien
tagattatatacttgtcccatggca

SEQ ID NO: 5215716 - DNA, 25 bp, Homo sapien
aagggaaatgataaactcgtggtgg

SEQ ID NO: 5215717 - DNA, 25 bp, Homo sapien
cttactgagaacattaaagggaaat

SEQ ID NO: 5215718 - DNA, 25 bp, Homo sapien
aatgtagagcctgatcttgttctcc

SEQ ID NO: 5215719 - DNA, 25 bp, Homo sapien
tgctgccttgtcatcctacatgtgg

SEQ ID NO: 5215720 - DNA, 25 bp, Homo sapien
tattcctagtgcctaagatagtgcc

SEQ ID NO: 5215721 - DNA, 25 bp, Homo sapien
caaatttgcaagagtttgggatcct

SEQ ID NO: 5215722 - DNA, 25 bp, Homo sapien
tttttcatgtactaccaaaccgctg

SEQ ID NO: 5215723 - DNA, 25 bp, Homo sapien
gaaatactgggttatggtctgtgca

SEQ ID NO: 5215724 - DNA, 25 bp, Homo sapien
agtgtctcctgagtacatgtacaag

SEQ ID NO: 5215725 - DNA, 25 bp, Homo sapien
taagtctttttatccacgagcatca

SEQ ID NO: 5215726 - DNA, 25 bp, Homo sapien
tttgcagtgctaaaatgctttcgtc

SEQ ID NO: 5215727 - DNA, 25 bp, Homo sapien
ccccttgtacttgcattgaaatgaa

SEQ ID NO: 5215728 - DNA, 25 bp, Homo sapien
tatgctctagcatgtgcaatatatc

SEQ ID NO: 5215729 - DNA, 25 bp, Homo sapien
cacgatgatacaaatctggtgccag

SEQ ID NO: 5215730 - DNA, 25 bp, Homo sapien
gcccttctgcgagatgaaaactcag

SEQ ID NO: 5215731 - DNA, 25 bp, Homo sapien
ggatcatatacacaaaggcagcaca

SEQ ID NO: 5215732 - DNA, 25 bp, Homo sapien
tcttccgcgttggttagagagggct

SEQ ID NO: 5215733 - DNA, 25 bp, Homo sapien
gagagggctacgcatcttctactgc

SEQ ID NO: 5215734 - DNA, 25 bp, Homo sapien
ctcttgtatagaatgggtctctttc

SEQ ID NO: 5215735 - DNA, 25 bp, Homo sapien
tctctttcacttccaagttatgcct

SEQ ID NO: 5215736 - DNA, 25 bp, Homo sapien
ttcacttccaagttatgcctattaa

SEQ ID NO: 5215737 - DNA, 25 bp, Homo sapien
tatagaatgggtctctttcacttcc

SEQ ID NO: 5215738 - DNA, 25 bp, Homo sapien
tctggtgctactaagagtccactcc

SEQ ID NO: 5215739 - DNA, 25 bp, Homo sapien
cagattctggtgctactaagagtcc

SEQ ID NO: 5215740 - DNA, 25 bp, Homo sapien
gctactaagagtccactccacttag

SEQ ID NO: 5215741 - DNA, 25 bp, Homo sapien
tgtaagtgagatgccatgagcagct

SEQ ID NO: 5215742 - DNA, 25 bp, Homo sapien
tcactaacacgatgccctagtcaca

SEQ ID NO: 5215743 - DNA, 25 bp, Homo sapien
tcctctcttgatgcatatcattgac

SEQ ID NO: 5215744 - DNA, 25 bp, Homo sapien
tgatcttaccatgtttgtcctctct

SEQ ID NO: 5215745 - DNA, 25 bp, Homo sapien
tccaccaagggtctacgagaatgtc

SEQ ID NO: 5215746 - DNA, 25 bp, Homo sapien
gagaaaccatcatcgtatctgacac

SEQ ID NO: 5215747 - DNA, 25 bp, Homo sapien
tcatcgtatctgacacaggataccc

SEQ ID NO: 5215748 - DNA, 25 bp, Homo sapien
cctgaacttccttcggtggttgaag

SEQ ID NO: 5215749 - DNA, 25 bp, Homo sapien
tcctgaacttccttcggtggttgaa

SEQ ID NO: 5215750 - DNA, 25 bp, Homo sapien
tgaagactgcttgtttgcaccaaca

SEQ ID NO: 5215751 - DNA, 25 bp, Homo sapien
catgccatggtaggatgagaagttt

SEQ ID NO: 5215752 - DNA, 25 bp, Homo sapien
gatgggactcatcgttctggctagg

SEQ ID NO: 5215753 - DNA, 25 bp, Homo sapien
gaaaggcaggcttgaacacagcagg

SEQ ID NO: 5215754 - DNA, 25 bp, Homo sapien
tgctggctcacctaactgtggatgg

SEQ ID NO: 5215755 - DNA, 25 bp, Homo sapien
ggctcacctaactgtggatggatta

SEQ ID NO: 5215756 - DNA, 25 bp, Homo sapien
ttgcaggtatcttatccccactgct

SEQ ID NO: 5215757 - DNA, 25 bp, Homo sapien
tcacctaactgtggatggattagaa

SEQ ID NO: 5215758 - DNA, 25 bp, Homo sapien
tttcaggaagaccattttggtacca

SEQ ID NO: 5215759 - DNA, 25 bp, Homo sapien
aatccttcatagtctagaaactcag

SEQ ID NO: 5215760 - DNA, 25 bp, Homo sapien
gaaactcaggataattatcctaaca

SEQ ID NO: 5215761 - DNA, 25 bp, Homo sapien
tagaaataacatatcgcatgcaata

SEQ ID NO: 5215762 - DNA, 25 bp, Homo sapien
gctcaggtttatggttcattcaaaa

SEQ ID NO: 5215763 - DNA, 25 bp, Homo sapien
gggttgaatcccaagtggagctgtc

SEQ ID NO: 5215764 - DNA, 25 bp, Homo sapien
tgcacaataacttctctgttctttg

SEQ ID NO: 5215765 - DNA, 25 bp, Homo sapien
tggagctgtcaagctcaggtttatg

SEQ ID NO: 5215766 - DNA, 25 bp, Homo sapien
taaagaagctatggaagatcactgt

SEQ ID NO: 5215767 - DNA, 25 bp, Homo sapien
tccactctggctcattgtttaaagg

SEQ ID NO: 5215768 - DNA, 25 bp, Homo sapien
gctgtgatagaaggtaacgcccatc

SEQ ID NO: 5215769 - DNA, 25 bp, Homo sapien
taattccaggccacttctagcatcc

SEQ ID NO: 5215770 - DNA, 25 bp, Homo sapien
tatccagcccttagcatagtctatg

SEQ ID NO: 5215771 - DNA, 25 bp, Homo sapien
tgctcagtattgttatatccagccc

SEQ ID NO: 5215772 - DNA, 25 bp, Homo sapien
ttgttatatccagcccttagcatag

SEQ ID NO: 5215773 - DNA, 25 bp, Homo sapien
gtttgtcttgctcagtattgttata

SEQ ID NO: 5215774 - DNA, 25 bp, Homo sapien
tatttgtttatcaaatcaagaaata

SEQ ID NO: 5215775 - DNA, 25 bp, Homo sapien
tgtttatcaaatcaagaaataaaac

SEQ ID NO: 5215776 - DNA, 25 bp, Homo sapien
gtttatcaaatcaagaaataaaaca

SEQ ID NO: 5215777 - DNA, 25 bp, Homo sapien
tttgtttatcaaatcaagaaataaa

SEQ ID NO: 5215778 - DNA, 25 bp, Homo sapien
tgtctcatcctctcagtgagcaaag

SEQ ID NO: 5215779 - DNA, 25 bp, Homo sapien
ccactttgctgggacacttgtgagg

SEQ ID NO: 5215780 - DNA, 25 bp, Homo sapien
tgcaagggcaacaatcatactaaca

SEQ ID NO: 5215781 - DNA, 25 bp, Homo sapien
ggatttccatgtgcgtgatgctcca

SEQ ID NO: 5215782 - DNA, 25 bp, Homo sapien
tctgagaaacgaacccctcttcatg

SEQ ID NO: 5215783 - DNA, 25 bp, Homo sapien
tttgacgttgtgtatttcaggattc

SEQ ID NO: 5215784 - DNA, 25 bp, Homo sapien
ctgttgtatgtctttgacgttgtgt

SEQ ID NO: 5215785 - DNA, 25 bp, Homo sapien
aggattctgagaaacgaacccctct

SEQ ID NO: 5215786 - DNA, 25 bp, Homo sapien
attttgtgtcgtttggctcctgtcc

SEQ ID NO: 5215787 - DNA, 25 bp, Homo sapien
cattttgtgtcgtttggctcctgtc

SEQ ID NO: 5215788 - DNA, 25 bp, Homo sapien
tcccattttgtgtcgtttggctcct

SEQ ID NO: 5215789 - DNA, 25 bp, Homo sapien
tttgtgtcgtttggctcctgtcctc

SEQ ID NO: 5215790 - DNA, 25 bp, Homo sapien
tcccaagggttctatgtcaatccag

SEQ ID NO: 5215791 - DNA, 25 bp, Homo sapien
gtcacttgggaatgtctgggcacag

SEQ ID NO: 5215792 - DNA, 25 bp, Homo sapien
gaaggtggtactccgaagacctgct

SEQ ID NO: 5215793 - DNA, 25 bp, Homo sapien
tcattctgtgggacttaaggaccag

SEQ ID NO: 5215794 - DNA, 25 bp, Homo sapien
gaggcactgcaccaatatctgcagc

SEQ ID NO: 5215795 - DNA, 25 bp, Homo sapien
atctgaacaacaaatcccacttgtg

SEQ ID NO: 5215796 - DNA, 25 bp, Homo sapien
tctgaatctaccagaggcactgcac

SEQ ID NO: 5215797 - DNA, 25 bp, Homo sapien
ttgaaggcaaggacaggtcccatct

SEQ ID NO: 5215798 - DNA, 25 bp, Homo sapien
ttcttcatctttataactcagaccc

SEQ ID NO: 5215799 - DNA, 25 bp, Homo sapien
cttcttcatctttataactcagacc

SEQ ID NO: 5215800 - DNA, 25 bp, Homo sapien
tcttcatctttataactcagaccca

SEQ ID NO: 5215801 - DNA, 25 bp, Homo sapien
tcagaggctgcgtctttcaggaggc

SEQ ID NO: 5215802 - DNA, 25 bp, Homo sapien
tagctgtgcgtatttgtatacttcc

SEQ ID NO: 5215803 - DNA, 25 bp, Homo sapien
gtatacttcctgttacaccttggta

SEQ ID NO: 5215804 - DNA, 25 bp, Homo sapien
cctgcggcctgtgccttacattcta

SEQ ID NO: 5215805 - DNA, 25 bp, Homo sapien
cagagccctttgtgcagactattat

SEQ ID NO: 5215806 - DNA, 25 bp, Homo sapien
gataggatccctgtctactactcag

SEQ ID NO: 5215807 - DNA, 25 bp, Homo sapien
tctgacaactgagcggtactccatc

SEQ ID NO: 5215808 - DNA, 25 bp, Homo sapien
tcctccagccaaatgaaactgttcc

SEQ ID NO: 5215809 - DNA, 25 bp, Homo sapien
cagtgctgcagaacttccggtgctc

SEQ ID NO: 5215810 - DNA, 25 bp, Homo sapien
taggttgcacagatgtaggatgcca

SEQ ID NO: 5215811 - DNA, 25 bp, Homo sapien
ggtctcagagctaaccaggctcggc

SEQ ID NO: 5215812 - DNA, 25 bp, Homo sapien
gacttcagaacttccggtctcagag

SEQ ID NO: 5215813 - DNA, 25 bp, Homo sapien
atgacatgaagataagctttcttct

SEQ ID NO: 5215814 - DNA, 25 bp, Homo sapien
tgttctttcagctcgttacgtaaag

SEQ ID NO: 5215815 - DNA, 25 bp, Homo sapien
cagctcgttacgtaaagatacattt

SEQ ID NO: 5215816 - DNA, 25 bp, Homo sapien
gacatgaagataagctttcttctta

SEQ ID NO: 5215817 - DNA, 25 bp, Homo sapien
tgcacagtgccaaatgtaccaagta

SEQ ID NO: 5215818 - DNA, 25 bp, Homo sapien
tactctaaaagtgagagcaagcctc

SEQ ID NO: 5215819 - DNA, 25 bp, Homo sapien
gagcaagcctctgcgtgcctgggca

SEQ ID NO: 5215820 - DNA, 25 bp, Homo sapien
tgtaccaagtactctaaaagtgaga

SEQ ID NO: 5215821 - DNA, 25 bp, Homo sapien
gatcaccgagttcctgattgaagtg

SEQ ID NO: 5215822 - DNA, 25 bp, Homo sapien
tcttctgtgagagcctgcaataacc

SEQ ID NO: 5215823 - DNA, 25 bp, Homo sapien
gtgtgtgtacgtgtccacctccctt

SEQ ID NO: 5215824 - DNA, 25 bp, Homo sapien
tccttgtgggtgttaactgaattct

SEQ ID NO: 5215825 - DNA, 25 bp, Homo sapien
gaacagcggagggaaatgtctcgat

SEQ ID NO: 5215826 - DNA, 25 bp, Homo sapien
tcagcctggataatgcacccagccc

SEQ ID NO: 5215827 - DNA, 25 bp, Homo sapien
cacaaggatttaggagggacagctc

SEQ ID NO: 5215828 - DNA, 25 bp, Homo sapien
ggaaatgtctcgatgaacagtttca

SEQ ID NO: 5215829 - DNA, 25 bp, Homo sapien
cctttcattggggtcccgtctgctt

SEQ ID NO: 5215830 - DNA, 25 bp, Homo sapien
catgattgtcctcgggaacctttca

SEQ ID NO: 5215831 - DNA, 25 bp, Homo sapien
tttcattggggtcccgtctgctttc

SEQ ID NO: 5215832 - DNA, 25 bp, Homo sapien
attgtcctcgggaacctttcattgg

SEQ ID NO: 5215833 - DNA, 25 bp, Homo sapien
cctttgggactagtaggaccacagt

SEQ ID NO: 5215834 - DNA, 25 bp, Homo sapien
ggatgagtgtttgaatctcctttca

SEQ ID NO: 5215835 - DNA, 25 bp, Homo sapien
ggagttctggttacaacccaagcag

SEQ ID NO: 5215836 - DNA, 25 bp, Homo sapien
tcatagtagctgtattccccacaca

SEQ ID NO: 5215837 - DNA, 25 bp, Homo sapien
tcttcattccttccttttctaaaga

SEQ ID NO: 5215838 - DNA, 25 bp, Homo sapien
ctctctgagtgtcttcttcattcct

SEQ ID NO: 5215839 - DNA, 25 bp, Homo sapien
cttctctctgagtgtcttcttcatt

SEQ ID NO: 5215840 - DNA, 25 bp, Homo sapien
ccgcctttccaacttcttggaccat

SEQ ID NO: 5215841 - DNA, 25 bp, Homo sapien
ttgtcctggccgctgtgtagctgcc

SEQ ID NO: 5215842 - DNA, 25 bp, Homo sapien
ccgctgtgtagctgccttcgatggg

SEQ ID NO: 5215843 - DNA, 25 bp, Homo sapien
tcattatctgactccaggagcgtcg

SEQ ID NO: 5215844 - DNA, 25 bp, Homo sapien
cgtcgttgcctttgtcagggctcca

SEQ ID NO: 5215845 - DNA, 25 bp, Homo sapien
cacagatgcgtgattaaacatttct

SEQ ID NO: 5215846 - DNA, 25 bp, Homo sapien
gcacagatgcgtgattaaacatttc

SEQ ID NO: 5215847 - DNA, 25 bp, Homo sapien
acagatgcgtgattaaacatttctt

SEQ ID NO: 5215848 - DNA, 25 bp, Homo sapien
cagatgcgtgattaaacatttcttt

SEQ ID NO: 5215849 - DNA, 25 bp, Homo sapien
gcccagtgcagggaagacacaacac

SEQ ID NO: 5215850 - DNA, 25 bp, Homo sapien
ctgggcccagtgcagggaagacaca

SEQ ID NO: 5215851 - DNA, 25 bp, Homo sapien
gggcccagtgcagggaagacacaac

SEQ ID NO: 5215852 - DNA, 25 bp, Homo sapien
tgggcccagtgcagggaagacacaa

SEQ ID NO: 5215853 - DNA, 25 bp, Homo sapien
aggtagcagatggcttagcagctgt

SEQ ID NO: 5215854 - DNA, 25 bp, Homo sapien
tagcagatggcttagcagctgtgag

SEQ ID NO: 5215855 - DNA, 25 bp, Homo sapien
ggtagcagatggcttagcagctgtg

SEQ ID NO: 5215856 - DNA, 25 bp, Homo sapien
gtagcagatggcttagcagctgtga

SEQ ID NO: 5215857 - DNA, 25 bp, Homo sapien
gagaagggttcctggcataatcaat

SEQ ID NO: 5215858 - DNA, 25 bp, Homo sapien
atgaacttggctgttgtgtcgatgt

SEQ ID NO: 5215859 - DNA, 25 bp, Homo sapien
tgtcccttgaaatggcgctgctttc

SEQ ID NO: 5215860 - DNA, 25 bp, Homo sapien
tgtggcgccccagccccaatgaact

SEQ ID NO: 5215861 - DNA, 25 bp, Homo sapien
ggagacagctgcttcacatggggaa

SEQ ID NO: 5215862 - DNA, 25 bp, Homo sapien
aaaagagccccatggtttcctagag

SEQ ID NO: 5215863 - DNA, 25 bp, Homo sapien
ctgacaagacatgggagaaagaaat

SEQ ID NO: 5215864 - DNA, 25 bp, Homo sapien
gagccccatggtttcctagagggta

SEQ ID NO: 5215865 - DNA, 25 bp, Homo sapien
ctagccctttactggatgggtgcta

SEQ ID NO: 5215866 - DNA, 25 bp, Homo sapien
ggtgctagagccgaagactttctcc

SEQ ID NO: 5215867 - DNA, 25 bp, Homo sapien
gatgggtgctagagccgaagacttt

SEQ ID NO: 5215868 - DNA, 25 bp, Homo sapien
ttactggatgggtgctagagccgaa

SEQ ID NO: 5215869 - DNA, 25 bp, Homo sapien
cgtccaaagctgctcttactcctat

SEQ ID NO: 5215870 - DNA, 25 bp, Homo sapien
ctttccatccccgtccaaagctgct

SEQ ID NO: 5215871 - DNA, 25 bp, Homo sapien
aaagctgctcttactcctatatttg

SEQ ID NO: 5215872 - DNA, 25 bp, Homo sapien
gctgctcttactcctatatttgtca

SEQ ID NO: 5215873 - DNA, 25 bp, Homo sapien
cctctgcgtttagtctgctgtttat

SEQ ID NO: 5215874 - DNA, 25 bp, Homo sapien
tctctcctctgcgtttagtctgctg

SEQ ID NO: 5215875 - DNA, 25 bp, Homo sapien
ccagatgtctctcctctgcgtttag

SEQ ID NO: 5215876 - DNA, 25 bp, Homo sapien
gatgtctctcctctgcgtttagtct

SEQ ID NO: 5215877 - DNA, 25 bp, Homo sapien
aagtttgtattggcttctttgaata

SEQ ID NO: 5215878 - DNA, 25 bp, Homo sapien
aaagtttgtattggcttctttgaat

SEQ ID NO: 5215879 - DNA, 25 bp, Homo sapien
ctttgagcttttcaatggccccaaa

SEQ ID NO: 5215880 - DNA, 25 bp, Homo sapien
ctgaggaattaggaaccttgggcct

SEQ ID NO: 5215881 - DNA, 25 bp, Homo sapien
aggatgcaggcctggtgaatactga

SEQ ID NO: 5215882 - DNA, 25 bp, Homo sapien
ccttgggcctcgggcctttgagctt

SEQ ID NO: 5215883 - DNA, 25 bp, Homo sapien
tggttggttgactagcttacaggta

SEQ ID NO: 5215884 - DNA, 25 bp, Homo sapien
aatctgatatgtactccaggaagcc

SEQ ID NO: 5215885 - DNA, 25 bp, Homo sapien
taaaatccttgacatgcctgagagc

SEQ ID NO: 5215886 - DNA, 25 bp, Homo sapien
taggttgttcctagcatagacaagg

SEQ ID NO: 5215887 - DNA, 25 bp, Homo sapien
tacctcgtgcctagttaagtaactg

SEQ ID NO: 5215888 - DNA, 25 bp, Homo sapien
cctttatcagacattgcgctagact

SEQ ID NO: 5215889 - DNA, 25 bp, Homo sapien
aatagttcccaagctttactccctg

SEQ ID NO: 5215890 - DNA, 25 bp, Homo sapien
caatctctctgtatctggtacctcg

SEQ ID NO: 5215891 - DNA, 25 bp, Homo sapien
gtttgttgttgccttgagtggtttc

SEQ ID NO: 5215892 - DNA, 25 bp, Homo sapien
gtgtttgttgttgccttgagtggtt

SEQ ID NO: 5215893 - DNA, 25 bp, Homo sapien
aggtgtttgttgttgccttgagtgg

SEQ ID NO: 5215894 - DNA, 25 bp, Homo sapien
ttgttgttgccttgagtggtttcac

SEQ ID NO: 5215895 - DNA, 25 bp, Homo sapien
gagaaaggatcgcagactgggaccc

SEQ ID NO: 5215896 - DNA, 25 bp, Homo sapien
tcctctttagttgcgccaggctgtg

SEQ ID NO: 5215897 - DNA, 25 bp, Homo sapien
tcctgcccagaatgcggctcttgtg

SEQ ID NO: 5215898 - DNA, 25 bp, Homo sapien
tggagaccgccctttcggatcgggc

SEQ ID NO: 5215899 - DNA, 25 bp, Homo sapien
ccaaaagacccatcaactcggtgat

SEQ ID NO: 5215900 - DNA, 25 bp, Homo sapien
actcggtgatttaggactgctttgc

SEQ ID NO: 5215901 - DNA, 25 bp, Homo sapien
aatatgcccgttgtatctgtagccc

SEQ ID NO: 5215902 - DNA, 25 bp, Homo sapien
catggtgtttgacagctgtcttcta

SEQ ID NO: 5215903 - DNA, 25 bp, Homo sapien
tattatccacaaattacctttcagg

SEQ ID NO: 5215904 - DNA, 25 bp, Homo sapien
tctgattgggtggagaactgctgcc

SEQ ID NO: 5215905 - DNA, 25 bp, Homo sapien
tagttacaaaaagaggatgatggtc

SEQ ID NO: 5215906 - DNA, 25 bp, Homo sapien
aacttaggtgcaggcatgtccgcga

SEQ ID NO: 5215907 - DNA, 25 bp, Homo sapien
agcagtgtcagtgatccctcaaatg

SEQ ID NO: 5215908 - DNA, 25 bp, Homo sapien
ttcagaagcagtgtcagtgatccct

SEQ ID NO: 5215909 - DNA, 25 bp, Homo sapien
catagatccccattttgattggtgg

SEQ ID NO: 5215910 - DNA, 25 bp, Homo sapien
cagaagcagtgtcagtgatccctca

SEQ ID NO: 5215911 - DNA, 25 bp, Homo sapien
tgttgactgaagagtcacttgatga

SEQ ID NO: 5215912 - DNA, 25 bp, Homo sapien
cacgtgatgttaacagcgttcttga

SEQ ID NO: 5215913 - DNA, 25 bp, Homo sapien
ttttgcatcgctctgacatattgac

SEQ ID NO: 5215914 - DNA, 25 bp, Homo sapien
gttaacagcgttcttgaacagttgt

SEQ ID NO: 5215915 - DNA, 25 bp, Homo sapien
tctttaggcagctgaacagcaaaat

SEQ ID NO: 5215916 - DNA, 25 bp, Homo sapien
tttaggcagctgaacagcaaaatcc

SEQ ID NO: 5215917 - DNA, 25 bp, Homo sapien
aggcagctgaacagcaaaatcccat

SEQ ID NO: 5215918 - DNA, 25 bp, Homo sapien
ttaggcagctgaacagcaaaatccc

SEQ ID NO: 5215919 - DNA, 25 bp, Homo sapien
gacatagtagtagcggtggtcagac

SEQ ID NO: 5215920 - DNA, 25 bp, Homo sapien
taaagatggaactccaccctttgct

SEQ ID NO: 5215921 - DNA, 25 bp, Homo sapien
tgccaagaatgtgttgtccaaaatg

SEQ ID NO: 5215922 - DNA, 25 bp, Homo sapien
ttatgataggacatagtagtagcgg

SEQ ID NO: 5215923 - DNA, 25 bp, Homo sapien
actcttacgtatatcaggaaagtgg

SEQ ID NO: 5215924 - DNA, 25 bp, Homo sapien
tggtctgaggtggtagcaagattcc

SEQ ID NO: 5215925 - DNA, 25 bp, Homo sapien
tgacgaagatcacgatgatgaagat

SEQ ID NO: 5215926 - DNA, 25 bp, Homo sapien
tcaccagtggtgttaaggttcaagt

SEQ ID NO: 5215927 - DNA, 25 bp, Homo sapien
gcacggccagatagcaaaatatttg

SEQ ID NO: 5215928 - DNA, 25 bp, Homo sapien
aatatttgaactcttgtggatgtgg

SEQ ID NO: 5215929 - DNA, 25 bp, Homo sapien
gaatgcatacagaacatccctggtg

SEQ ID NO: 5215930 - DNA, 25 bp, Homo sapien
tgattccgtcctgcgtggctgttct

SEQ ID NO: 5215931 - DNA, 25 bp, Homo sapien
tctgcaagcagcattagtatataac

SEQ ID NO: 5215932 - DNA, 25 bp, Homo sapien
taagaaacagcttgtggccgggtgt

SEQ ID NO: 5215933 - DNA, 25 bp, Homo sapien
tattgacactttaggagttcctgct

SEQ ID NO: 5215934 - DNA, 25 bp, Homo sapien
ctaacgcggtgaagtcccgtctact

SEQ ID NO: 5215935 - DNA, 25 bp, Homo sapien
tatacactatactggagggatttca

SEQ ID NO: 5215936 - DNA, 25 bp, Homo sapien
taaacagtaaatgccagtagtgacc

SEQ ID NO: 5215937 - DNA, 25 bp, Homo sapien
atagaggaagagctagaaatccagt

SEQ ID NO: 5215938 - DNA, 25 bp, Homo sapien
taaacattgcagatcagtgtagaac

SEQ ID NO: 5215939 - DNA, 25 bp, Homo sapien
tagtagtgaactattggtatagccc

SEQ ID NO: 5215940 - DNA, 25 bp, Homo sapien
actattggtatagcccgctgtggag

SEQ ID NO: 5215941 - DNA, 25 bp, Homo sapien
ctctcccaaatagcccaaattggta

SEQ ID NO: 5215942 - DNA, 25 bp, Homo sapien
tgaactattggtatagcccgctgtg

SEQ ID NO: 5215943 - DNA, 25 bp, Homo sapien
ttgatgttgatgaatcaacacttag

SEQ ID NO: 5215944 - DNA, 25 bp, Homo sapien
gttgatgttgatgaatcaacactta

SEQ ID NO: 5215945 - DNA, 25 bp, Homo sapien
tgatgttgatgaatcaacacttagt

SEQ ID NO: 5215946 - DNA, 25 bp, Homo sapien
aaagtgttaatgaccagccatctgg

SEQ ID NO: 5215947 - DNA, 25 bp, Homo sapien
ccagctggttatgttcctattcgaa

SEQ ID NO: 5215948 - DNA, 25 bp, Homo sapien
tgacagctactccaacacctttggg

SEQ ID NO: 5215949 - DNA, 25 bp, Homo sapien
ggtatgactggtttccacatgcaaa

SEQ ID NO: 5215950 - DNA, 25 bp, Homo sapien
tagatgctatgttcccagaaggata

SEQ ID NO: 5215951 - DNA, 25 bp, Homo sapien
cttggcggtgggaaagagaaattga

SEQ ID NO: 5215952 - DNA, 25 bp, Homo sapien
gaaattgatgagagaaatcgcccac

SEQ ID NO: 5215953 - DNA, 25 bp, Homo sapien
cataatgagtatgactcctgaacag

SEQ ID NO: 5215954 - DNA, 25 bp, Homo sapien
atgaacatggctacccctactccag

SEQ ID NO: 5215955 - DNA, 25 bp, Homo sapien
aaagcatagtgtgcctctgtgaatc

SEQ ID NO: 5215956 - DNA, 25 bp, Homo sapien
tctgtgtgcatcataataactggta

SEQ ID NO: 5215957 - DNA, 25 bp, Homo sapien
gaatgacactaccaattgggcatga

SEQ ID NO: 5215958 - DNA, 25 bp, Homo sapien
gaagtcttatcagagctagtgtcag

SEQ ID NO: 5215959 - DNA, 25 bp, Homo sapien
gattgtcactgtgcaactcagcaac

SEQ ID NO: 5215960 - DNA, 25 bp, Homo sapien
gtaactaagcactgtaaagactgag

SEQ ID NO: 5215961 - DNA, 25 bp, Homo sapien
tcagcaacgatttgtgaggctcaac

SEQ ID NO: 5215962 - DNA, 25 bp, Homo sapien
gaattacagggcgaaagatgggact

SEQ ID NO: 5215963 - DNA, 25 bp, Homo sapien
gaagccatgagcaatctttcaaggg

SEQ ID NO: 5215964 - DNA, 25 bp, Homo sapien
tcccagtgaagtcatggagtcacag

SEQ ID NO: 5215965 - DNA, 25 bp, Homo sapien
gactccaaaatggtgttcagcagaa

SEQ ID NO: 5215966 - DNA, 25 bp, Homo sapien
gccaaccacagtagctccttagaga

SEQ ID NO: 5215967 - DNA, 25 bp, Homo sapien
tatatgtgctgctgaggcgagcaca

SEQ ID NO: 5215968 - DNA, 25 bp, Homo sapien
ctcctctgtattgttccaattttag

SEQ ID NO: 5215969 - DNA, 25 bp, Homo sapien
atccttgcagaggggccatgctaat

SEQ ID NO: 5215970 - DNA, 25 bp, Homo sapien
ggaacacttcacagatttgcatgtc

SEQ ID NO: 5215971 - DNA, 25 bp, Homo sapien
tgcagcaccgccctcctctggtcgg

SEQ ID NO: 5215972 - DNA, 25 bp, Homo sapien
cccggctccggtctcttccagccaa

SEQ ID NO: 5215973 - DNA, 25 bp, Homo sapien
gatagactctccgaagccggtcgtc

SEQ ID NO: 5215974 - DNA, 25 bp, Homo sapien
tagactctccgaagccggtcgtcac

SEQ ID NO: 5215975 - DNA, 25 bp, Homo sapien
cgagactacccttctcaaggccgta

SEQ ID NO: 5215976 - DNA, 25 bp, Homo sapien
ccgtatgaccagtccgagctgccat

SEQ ID NO: 5215977 - DNA, 25 bp, Homo sapien
ttctcaaggccgtatgaccagtccg

SEQ ID NO: 5215978 - DNA, 25 bp, Homo sapien
tacccttctcaaggccgtatgacca

SEQ ID NO: 5215979 - DNA, 25 bp, Homo sapien
cgctgtcgccgacttcggacggcat

SEQ ID NO: 5215980 - DNA, 25 bp, Homo sapien
ctgcgccccggccgctgtcgccgac

SEQ ID NO: 5215981 - DNA, 25 bp, Homo sapien
ctgccattccgcacgggcgcctgcg

SEQ ID NO: 5215982 - DNA, 25 bp, Homo sapien
cgccccggccgctgtcgccgacttc

SEQ ID NO: 5215983 - DNA, 25 bp, Homo sapien
gcgccgctcttgagtccctcagatg

SEQ ID NO: 5215984 - DNA, 25 bp, Homo sapien
cggaaatgcaccgagtccggctctg

SEQ ID NO: 5215985 - DNA, 25 bp, Homo sapien
aaacgagccacgaacacagccttgg

SEQ ID NO: 5215986 - DNA, 25 bp, Homo sapien
tcggcagccaaaatcgaaaactact

SEQ ID NO: 5215987 - DNA, 25 bp, Homo sapien
cagcagtagcaacaagccatagggg

SEQ ID NO: 5215988 - DNA, 25 bp, Homo sapien
aaaggcaccaatggccaaattgctt

SEQ ID NO: 5215989 - DNA, 25 bp, Homo sapien
aagagcccaaaggcaccaatggcca

SEQ ID NO: 5215990 - DNA, 25 bp, Homo sapien
tagcaacaagccataggggaggaga

SEQ ID NO: 5215991 - DNA, 25 bp, Homo sapien
cagccggcaacccttctgcgcaaag

SEQ ID NO: 5215992 - DNA, 25 bp, Homo sapien
gccagcagccggcaacccttctgcg

SEQ ID NO: 5215993 - DNA, 25 bp, Homo sapien
cgccaaacacaaactcccatacagc

SEQ ID NO: 5215994 - DNA, 25 bp, Homo sapien
acacaaactcccatacagccagcag

SEQ ID NO: 5215995 - DNA, 25 bp, Homo sapien
caactggaccacatggagaacagct

SEQ ID NO: 5215996 - DNA, 25 bp, Homo sapien
cattggaaatgaacgcaaactgccg

SEQ ID NO: 5215997 - DNA, 25 bp, Homo sapien
tacaagtatggtatccgtgtcccga

SEQ ID NO: 5215998 - DNA, 25 bp, Homo sapien
gaaatgaatactggacaactggacc

SEQ ID NO: 5215999 - DNA, 25 bp, Homo sapien
cacactctagcctgggtaacagaat

SEQ ID NO: 5216000 - DNA, 25 bp, Homo sapien
tagcctgggtaacagaatgagactc

SEQ ID NO: 5216001 - DNA, 25 bp, Homo sapien
gcctgggtaacagaatgagactccg

SEQ ID NO: 5216002 - DNA, 25 bp, Homo sapien
tctagcctgggtaacagaatgagac

SEQ ID NO: 5216003 - DNA, 25 bp, Homo sapien
cagtataccacaggaagctaaatat

SEQ ID NO: 5216004 - DNA, 25 bp, Homo sapien
ttaatggtgcagtgattttgaagaa

SEQ ID NO: 5216005 - DNA, 25 bp, Homo sapien
catcagtataccacaggaagctaaa

SEQ ID NO: 5216006 - DNA, 25 bp, Homo sapien
attaatggtgcagtgattttgaaga

SEQ ID NO: 5216007 - DNA, 25 bp, Homo sapien
ttgtaatcctccactcccgatacta

SEQ ID NO: 5216008 - DNA, 25 bp, Homo sapien
atctctttgatataacatctgattt

SEQ ID NO: 5216009 - DNA, 25 bp, Homo sapien
tataacatctgattttttgcaccaa

SEQ ID NO: 5216010 - DNA, 25 bp, Homo sapien
ccgatactacatcatacatttcctg

SEQ ID NO: 5216011 - DNA, 25 bp, Homo sapien
acagcgctatgcctatatcttttct

SEQ ID NO: 5216012 - DNA, 25 bp, Homo sapien
gctatgcctatatcttttctacctt

SEQ ID NO: 5216013 - DNA, 25 bp, Homo sapien
gcgctatgcctatatcttttctacc

SEQ ID NO: 5216014 - DNA, 25 bp, Homo sapien
agccacagcgctatgcctatatctt

SEQ ID NO: 5216015 - DNA, 25 bp, Homo sapien
cctgggctaaaacgccaaatagtct

SEQ ID NO: 5216016 - DNA, 25 bp, Homo sapien
aggtacaagttcttgggtagccagg

SEQ ID NO: 5216017 - DNA, 25 bp, Homo sapien
gtacaagttcttgggtagccaggaa

SEQ ID NO: 5216018 - DNA, 25 bp, Homo sapien
ggctaaaacgccaaatagtctccaa

SEQ ID NO: 5216019 - DNA, 25 bp, Homo sapien
agtggaacaaatcaagggctttatg

SEQ ID NO: 5216020 - DNA, 25 bp, Homo sapien
gtggaacaaatcaagggctttatga

SEQ ID NO: 5216021 - DNA, 25 bp, Homo sapien
caagacaactggtttgagaactgtg

SEQ ID NO: 5216022 - DNA, 25 bp, Homo sapien
taaggaccaaatatcctctaaatat

SEQ ID NO: 5216023 - DNA, 25 bp, Homo sapien
taatgtcttcaataaccatactgca

SEQ ID NO: 5216024 - DNA, 25 bp, Homo sapien
tataccctctcattgttccatatag

SEQ ID NO: 5216025 - DNA, 25 bp, Homo sapien
tgtagaagtgatcgaaattcaaaag

SEQ ID NO: 5216026 - DNA, 25 bp, Homo sapien
catgaagcattaactcccgaggtat

SEQ ID NO: 5216027 - DNA, 25 bp, Homo sapien
gtttctggaccatacagcttacatg

SEQ ID NO: 5216028 - DNA, 25 bp, Homo sapien
gagtgtggcaagctgggaatgtaga

SEQ ID NO: 5216029 - DNA, 25 bp, Homo sapien
catgccagtattctagcaatggtga

SEQ ID NO: 5216030 - DNA, 25 bp, Homo sapien
aatatcctaagccatacggcaggcc

SEQ ID NO: 5216031 - DNA, 25 bp, Homo sapien
aatggtgcaggtttataaccaaagc

SEQ ID NO: 5216032 - DNA, 25 bp, Homo sapien
cggcaggccctataacaataagtta

SEQ ID NO: 5216033 - DNA, 25 bp, Homo sapien
tgcatagtgctggagacattcaacc

SEQ ID NO: 5216034 - DNA, 25 bp, Homo sapien
cacattactgaaagtgagtgtacac

SEQ ID NO: 5216035 - DNA, 25 bp, Homo sapien
aattagcattactgaaagagcagcc

SEQ ID NO: 5216036 - DNA, 25 bp, Homo sapien
caaactacctcggagaaagtggcaa

SEQ ID NO: 5216037 - DNA, 25 bp, Homo sapien
taacactttactatgtctatgcaaa

SEQ ID NO: 5216038 - DNA, 25 bp, Homo sapien
gctgtaacactttactatgtctatg

SEQ ID NO: 5216039 - DNA, 25 bp, Homo sapien
ttttaagacatgaaatgctgtaaca

SEQ ID NO: 5216040 - DNA, 25 bp, Homo sapien
aaatgctgtaacactttactatgtc

SEQ ID NO: 5216041 - DNA, 25 bp, Homo sapien
gaggtggcatgttctaactcctaga

SEQ ID NO: 5216042 - DNA, 25 bp, Homo sapien
cctgatactgggtacaagagccatg

SEQ ID NO: 5216043 - DNA, 25 bp, Homo sapien
tagtgcttgccaccaccagatgaga

SEQ ID NO: 5216044 - DNA, 25 bp, Homo sapien
ggtttactgctgtcattgtccatgc

SEQ ID NO: 5216045 - DNA, 25 bp, Homo sapien
gggttgtgccctccttcgatgcatt

SEQ ID NO: 5216046 - DNA, 25 bp, Homo sapien
ccttttaaatgagtttgtggcctga

SEQ ID NO: 5216047 - DNA, 25 bp, Homo sapien
cattccagccttggactcattgact

SEQ ID NO: 5216048 - DNA, 25 bp, Homo sapien
gaataataatgttgcagtcccctaa

SEQ ID NO: 5216049 - DNA, 25 bp, Homo sapien
ggtaagggaactgactgaggacact

SEQ ID NO: 5216050 - DNA, 25 bp, Homo sapien
tttgcagaagtgtaattggatgtcc

SEQ ID NO: 5216051 - DNA, 25 bp, Homo sapien
tatttcaggttgctacgatttctgc

SEQ ID NO: 5216052 - DNA, 25 bp, Homo sapien
caaaagtttgagttatctgatgatc

SEQ ID NO: 5216053 - DNA, 25 bp, Homo sapien
gaagtgtcgtggaccctattggaaa

SEQ ID NO: 5216054 - DNA, 25 bp, Homo sapien
taaggcactaaagaccaagcatagg

SEQ ID NO: 5216055 - DNA, 25 bp, Homo sapien
tgcagaggcatagtcacaacagatt

SEQ ID NO: 5216056 - DNA, 25 bp, Homo sapien
taagtacatgccacgcaactctgtg

SEQ ID NO: 5216057 - DNA, 25 bp, Homo sapien
cagtgtgctttaaggcattgattcc

SEQ ID NO: 5216058 - DNA, 25 bp, Homo sapien
catccttagggtatgtctgatcctg

SEQ ID NO: 5216059 - DNA, 25 bp, Homo sapien
gaggtaggaatgtctgttgtcacca

SEQ ID NO: 5216060 - DNA, 25 bp, Homo sapien
tcctcttggcctggagaaatcttaa

SEQ ID NO: 5216061 - DNA, 25 bp, Homo sapien
gcctgcgggtccaggcctcgcgggt

SEQ ID NO: 5216062 - DNA, 25 bp, Homo sapien
cctgcgggtccaggcctcgcgggtc

SEQ ID NO: 5216063 - DNA, 25 bp, Homo sapien
tcgccgccgacgacctgtctcgccg

SEQ ID NO: 5216064 - DNA, 25 bp, Homo sapien
gtacgcggccttcccgcaccacctc

SEQ ID NO: 5216065 - DNA, 25 bp, Homo sapien
ctgcgacccccgagtgggccttcct

SEQ ID NO: 5216066 - DNA, 25 bp, Homo sapien
ctgtctcgccgagcgcacgccttgc

SEQ ID NO: 5216067 - DNA, 25 bp, Homo sapien
gacgcgatttgacccttgagccgta

SEQ ID NO: 5216068 - DNA, 25 bp, Homo sapien
tgcgcaggacgctgacgcgaagact

SEQ ID NO: 5216069 - DNA, 25 bp, Homo sapien
tagggagcgcggcattttctggaaa

SEQ ID NO: 5216070 - DNA, 25 bp, Homo sapien
tctaggcttttctaggcgcccagcc

SEQ ID NO: 5216071 - DNA, 25 bp, Homo sapien
gaaaaaatcacccagcgcgcaggcg

SEQ ID NO: 5216072 - DNA, 25 bp, Homo sapien
gtgtagcgccgcaaagagactcgca

SEQ ID NO: 5216073 - DNA, 25 bp, Homo sapien
gccgcaaagagactcgcagtccggc

SEQ ID NO: 5216074 - DNA, 25 bp, Homo sapien
tctagtgtagcgccgcaaagagact

SEQ ID NO: 5216075 - DNA, 25 bp, Homo sapien
tagcgccgcaaagagactcgcagtc

SEQ ID NO: 5216076 - DNA, 25 bp, Homo sapien
cttgccgctccaaggtgccatcggg

SEQ ID NO: 5216077 - DNA, 25 bp, Homo sapien
ggcgtcagggatccccgtacgcctc

SEQ ID NO: 5216078 - DNA, 25 bp, Homo sapien
agggatccccgtacgcctcagacag

SEQ ID NO: 5216079 - DNA, 25 bp, Homo sapien
tgccatcgggcgctggtcactgagt

SEQ ID NO: 5216080 - DNA, 25 bp, Homo sapien
tgcgcccgggttctcgcccccctgc

SEQ ID NO: 5216081 - DNA, 25 bp, Homo sapien
caggtgagacgctgcgcgtgcgccc

SEQ ID NO: 5216082 - DNA, 25 bp, Homo sapien
ggtgagacgctgcgcgtgcgcccgg

SEQ ID NO: 5216083 - DNA, 25 bp, Homo sapien
ggttctcgcccccctgccttacaca

SEQ ID NO: 5216084 - DNA, 25 bp, Homo sapien
ggtcgttgtcgctcctccggtgagc

SEQ ID NO: 5216085 - DNA, 25 bp, Homo sapien
tcaaccttagtttattccaaggtca

SEQ ID NO: 5216086 - DNA, 25 bp, Homo sapien
tgagcaaccagaccagctttaaggt

SEQ ID NO: 5216087 - DNA, 25 bp, Homo sapien
tttcaggaaacgctgggtcaagctc

SEQ ID NO: 5216088 - DNA, 25 bp, Homo sapien
caatattccaagtttaattcccgat

SEQ ID NO: 5216089 - DNA, 25 bp, Homo sapien
aaggaagcgcatttgaatgtactaa

SEQ ID NO: 5216090 - DNA, 25 bp, Homo sapien
taatcacattatcaacaggcaacgc

SEQ ID NO: 5216091 - DNA, 25 bp, Homo sapien
aacgccaccgtgctatacatctcaa

SEQ ID NO: 5216092 - DNA, 25 bp, Homo sapien
caaacctcagcttattcgttaagga

SEQ ID NO: 5216093 - DNA, 25 bp, Homo sapien
tcagcagcactcctttcaaccaata

SEQ ID NO: 5216094 - DNA, 25 bp, Homo sapien
cccgatccaacagcgactactgttg

SEQ ID NO: 5216095 - DNA, 25 bp, Homo sapien
caatactcggtcaaagagtggaaga

SEQ ID NO: 5216096 - DNA, 25 bp, Homo sapien
gaaactttctaaacgcttgtcctgc

SEQ ID NO: 5216097 - DNA, 25 bp, Homo sapien
aaaataagcatcatagcattggtca

SEQ ID NO: 5216098 - DNA, 25 bp, Homo sapien
gaggacaatttttaatactctgaaa

SEQ ID NO: 5216099 - DNA, 25 bp, Homo sapien
agaaccaaagcagttaatgatcttg

SEQ ID NO: 5216100 - DNA, 25 bp, Homo sapien
tcttgaaaacgacataaactctact

SEQ ID NO: 5216101 - DNA, 25 bp, Homo sapien
gcccgaggcctaaacaattaactga

SEQ ID NO: 5216102 - DNA, 25 bp, Homo sapien
gctgagatctttagaagcccgaggc

SEQ ID NO: 5216103 - DNA, 25 bp, Homo sapien
tcccaggctgcagattggacaagac

SEQ ID NO: 5216104 - DNA, 25 bp, Homo sapien
cgttaggcggcattcagagctgtcc

SEQ ID NO: 5216105 - DNA, 25 bp, Homo sapien
ctttcacgctaactggttgaatctc

SEQ ID NO: 5216106 - DNA, 25 bp, Homo sapien
tatctccaactttcacgctaactgg

SEQ ID NO: 5216107 - DNA, 25 bp, Homo sapien
aagaactttatctccaactttcacg

SEQ ID NO: 5216108 - DNA, 25 bp, Homo sapien
aactttcacgctaactggttgaatc

SEQ ID NO: 5216109 - DNA, 25 bp, Homo sapien
aaccattagttaagacaactaattg

SEQ ID NO: 5216110 - DNA, 25 bp, Homo sapien
ccattagttaagacaactaattgca

SEQ ID NO: 5216111 - DNA, 25 bp, Homo sapien
gttaagacaactaattgcaaatatc

SEQ ID NO: 5216112 - DNA, 25 bp, Homo sapien
caactaattgcaaatatctgacttc

SEQ ID NO: 5216113 - DNA, 25 bp, Homo sapien
atgtcaccatctctaaataggaaat

SEQ ID NO: 5216114 - DNA, 25 bp, Homo sapien
caccatctctaaataggaaataatc

SEQ ID NO: 5216115 - DNA, 25 bp, Homo sapien
tttccaagaatgtcaccatctctaa

SEQ ID NO: 5216116 - DNA, 25 bp, Homo sapien
gtcaccatctctaaataggaaataa

SEQ ID NO: 5216117 - DNA, 25 bp, Homo sapien
gcagcatcatgttgatgccatttca

SEQ ID NO: 5216118 - DNA, 25 bp, Homo sapien
ggaaattatttacatgacgaaagat

SEQ ID NO: 5216119 - DNA, 25 bp, Homo sapien
aacttcagtggaatgggcagcatca

SEQ ID NO: 5216120 - DNA, 25 bp, Homo sapien
tggaatgggcagcatcatgttgatg

SEQ ID NO: 5216121 - DNA, 25 bp, Homo sapien
gtacaaggaaacaattttggagaca

SEQ ID NO: 5216122 - DNA, 25 bp, Homo sapien
caaggaaacaattttggagacactg

SEQ ID NO: 5216123 - DNA, 25 bp, Homo sapien
aggaaacaattttggagacactgga

SEQ ID NO: 5216124 - DNA, 25 bp, Homo sapien
tacaaggaaacaattttggagacac

SEQ ID NO: 5216125 - DNA, 25 bp, Homo sapien
catatttttatttggaagtgtttat

SEQ ID NO: 5216126 - DNA, 25 bp, Homo sapien
tttttatttggaagtgtttatatca

SEQ ID NO: 5216127 - DNA, 25 bp, Homo sapien
taagggttggtaatcaattctagcg

SEQ ID NO: 5216128 - DNA, 25 bp, Homo sapien
taagtttgactactaagacagctgg

SEQ ID NO: 5216129 - DNA, 25 bp, Homo sapien
tgcccaggctgtctcgatctcaaga

SEQ ID NO: 5216130 - DNA, 25 bp, Homo sapien
ttagtacaccaaaggcagtaacacg

SEQ ID NO: 5216131 - DNA, 25 bp, Homo sapien
gaccagtctcggcaatatagtgaaa

SEQ ID NO: 5216132 - DNA, 25 bp, Homo sapien
agaccagtctcggcaatatagtgaa

SEQ ID NO: 5216133 - DNA, 25 bp, Homo sapien
ttgagaccagtctcggcaatatagt

SEQ ID NO: 5216134 - DNA, 25 bp, Homo sapien
agtttgagaccagtctcggcaatat

SEQ ID NO: 5216135 - DNA, 25 bp, Homo sapien
agtgaataggaataaccagttaaca

SEQ ID NO: 5216136 - DNA, 25 bp, Homo sapien
tcaagcactcagtcaaaaaataggc

SEQ ID NO: 5216137 - DNA, 25 bp, Homo sapien
tagaagtcataaaagatcaagcact

SEQ ID NO: 5216138 - DNA, 25 bp, Homo sapien
taacaagggtaagcaaggtggctca

SEQ ID NO: 5216139 - DNA, 25 bp, Homo sapien
ggaatcagggtagaaaacaggccag

SEQ ID NO: 5216140 - DNA, 25 bp, Homo sapien
tgtcccagaagccacctaaggaatc

SEQ ID NO: 5216141 - DNA, 25 bp, Homo sapien
tagagaaccgtaattctgtcccaga

SEQ ID NO: 5216142 - DNA, 25 bp, Homo sapien
tgcaagcaaatacttagagaaccgt

SEQ ID NO: 5216143 - DNA, 25 bp, Homo sapien
tgcgttgcacgttggtatgggctct

SEQ ID NO: 5216144 - DNA, 25 bp, Homo sapien
cggtttgaaaggtcgtgatcgcagc

SEQ ID NO: 5216145 - DNA, 25 bp, Homo sapien
gaacgaacttcgtatagtggcgacc

SEQ ID NO: 5216146 - DNA, 25 bp, Homo sapien
tatgggctctcgttagttacacggg

SEQ ID NO: 5216147 - DNA, 25 bp, Homo sapien
acggaacagctgcagcctgcgccgg

SEQ ID NO: 5216148 - DNA, 25 bp, Homo sapien
agcggcagctgacggaacagctgca

SEQ ID NO: 5216149 - DNA, 25 bp, Homo sapien
cggcgctctgcgtctgggaggagga

SEQ ID NO: 5216150 - DNA, 25 bp, Homo sapien
cagagcggcgctctgcgtctgggag

SEQ ID NO: 5216151 - DNA, 25 bp, Homo sapien
ggtacccggatgtagggacggcagc

SEQ ID NO: 5216152 - DNA, 25 bp, Homo sapien
tggagtcggtacccggatgtaggga

SEQ ID NO: 5216153 - DNA, 25 bp, Homo sapien
ctggagtcggtacccggatgtaggg

SEQ ID NO: 5216154 - DNA, 25 bp, Homo sapien
tcggtacccggatgtagggacggca

SEQ ID NO: 5216155 - DNA, 25 bp, Homo sapien
tcagcactgccgtcccctccgccat

SEQ ID NO: 5216156 - DNA, 25 bp, Homo sapien
gataggacaaactacggcgtaagca

SEQ ID NO: 5216157 - DNA, 25 bp, Homo sapien
taaaggtatctgagaaaagagcatg

SEQ ID NO: 5216158 - DNA, 25 bp, Homo sapien
gaacagatccatttcactaaacgaa

SEQ ID NO: 5216159 - DNA, 25 bp, Homo sapien
aacaaccttgatccatgacaatgtg

SEQ ID NO: 5216160 - DNA, 25 bp, Homo sapien
tgcgtatgtactaaacatgtaccgg

SEQ ID NO: 5216161 - DNA, 25 bp, Homo sapien
cctagttaggtctaagatagttgcg

SEQ ID NO: 5216162 - DNA, 25 bp, Homo sapien
tatttacagaacacgcattgcatta

SEQ ID NO: 5216163 - DNA, 25 bp, Homo sapien
tagaaaacacatgtacagttggccc

SEQ ID NO: 5216164 - DNA, 25 bp, Homo sapien
aatgtctctgaggtaaaacttggtg

SEQ ID NO: 5216165 - DNA, 25 bp, Homo sapien
agtaaaccaataatctataaacctg

SEQ ID NO: 5216166 - DNA, 25 bp, Homo sapien
ggttctggaattctctgtagataat

SEQ ID NO: 5216167 - DNA, 25 bp, Homo sapien
cagatattcccctaagtgattaaga

SEQ ID NO: 5216168 - DNA, 25 bp, Homo sapien
attcatcaggccaattatagaaatc

SEQ ID NO: 5216169 - DNA, 25 bp, Homo sapien
ggattcatcaggccaattatagaaa

SEQ ID NO: 5216170 - DNA, 25 bp, Homo sapien
aaggattcatcaggccaattataga

SEQ ID NO: 5216171 - DNA, 25 bp, Homo sapien
ttcatcaaaggattcatcaggccaa

SEQ ID NO: 5216172 - DNA, 25 bp, Homo sapien
ctgttgaacagctagtgtactgtcc

SEQ ID NO: 5216173 - DNA, 25 bp, Homo sapien
gttgaacagctagtgtactgtccat

SEQ ID NO: 5216174 - DNA, 25 bp, Homo sapien
tgttgaacagctagtgtactgtcca

SEQ ID NO: 5216175 - DNA, 25 bp, Homo sapien
tccaaaagacacagggtgaaaagaa

SEQ ID NO: 5216176 - DNA, 25 bp, Homo sapien
tcgtactccaaaagacacagggtga

SEQ ID NO: 5216177 - DNA, 25 bp, Homo sapien
acatcgtactccaaaagacacaggg

SEQ ID NO: 5216178 - DNA, 25 bp, Homo sapien
tactccaaaagacacagggtgaaaa

SEQ ID NO: 5216179 - DNA, 25 bp, Homo sapien
aaaggccacctcaaattccacatca

SEQ ID NO: 5216180 - DNA, 25 bp, Homo sapien
attgtataccttctccaaaggccac

SEQ ID NO: 5216181 - DNA, 25 bp, Homo sapien
ctccttgaggagatacagctaaatt

SEQ ID NO: 5216182 - DNA, 25 bp, Homo sapien
taattactattgaaaccactctccc

SEQ ID NO: 5216183 - DNA, 25 bp, Homo sapien
gccttcaggtggttcaagaattttg

SEQ ID NO: 5216184 - DNA, 25 bp, Homo sapien
tctgctcttatgttctgttgaatat

SEQ ID NO: 5216185 - DNA, 25 bp, Homo sapien
tgtcaatattggagcaatctgctct

SEQ ID NO: 5216186 - DNA, 25 bp, Homo sapien
ttggccttcaggtggttcaagaatt

SEQ ID NO: 5216187 - DNA, 25 bp, Homo sapien
cttaaatgttcatacttccacacac

SEQ ID NO: 5216188 - DNA, 25 bp, Homo sapien
acagcaagtccatttagctcaaggc

SEQ ID NO: 5216189 - DNA, 25 bp, Homo sapien
tccatttagctcaaggcagaactgc

SEQ ID NO: 5216190 - DNA, 25 bp, Homo sapien
aagtccatttagctcaaggcagaac

SEQ ID NO: 5216191 - DNA, 25 bp, Homo sapien
gacagcaagtccatttagctcaagg

SEQ ID NO: 5216192 - DNA, 25 bp, Homo sapien
tcttttggagttttatgagctgcac

SEQ ID NO: 5216193 - DNA, 25 bp, Homo sapien
agaaaaatccattgttcagttgctg

SEQ ID NO: 5216194 - DNA, 25 bp, Homo sapien
gagtgcaagtatctggatggcattc

SEQ ID NO: 5216195 - DNA, 25 bp, Homo sapien
tcagttgctgtcatttgagtgcaag

SEQ ID NO: 5216196 - DNA, 25 bp, Homo sapien
gatgtgccttaataactaatgttga

SEQ ID NO: 5216197 - DNA, 25 bp, Homo sapien
tttgagatgtgccttaataactaat

SEQ ID NO: 5216198 - DNA, 25 bp, Homo sapien
ttacttcaaccttgagtccttgggc

SEQ ID NO: 5216199 - DNA, 25 bp, Homo sapien
ttcaaccttgagtccttgggctcag

SEQ ID NO: 5216200 - DNA, 25 bp, Homo sapien
ataacaataacgcacaaccctcgca

SEQ ID NO: 5216201 - DNA, 25 bp, Homo sapien
aataacgcacaaccctcgcaccaac

SEQ ID NO: 5216202 - DNA, 25 bp, Homo sapien
cagcataacaataacgcacaaccct

SEQ ID NO: 5216203 - DNA, 25 bp, Homo sapien
taacgcacaaccctcgcaccaactg

SEQ ID NO: 5216204 - DNA, 25 bp, Homo sapien
gttaatcgactgttatcggtaaggc

SEQ ID NO: 5216205 - DNA, 25 bp, Homo sapien
gaactgcgtaaatccacttatgctc

SEQ ID NO: 5216206 - DNA, 25 bp, Homo sapien
gattttcccagcaacggcaagacca

SEQ ID NO: 5216207 - DNA, 25 bp, Homo sapien
cagcctactcaacgacatgaacaca

SEQ ID NO: 5216208 - DNA, 25 bp, Homo sapien
tatttattgctattcagaagacatg

SEQ ID NO: 5216209 - DNA, 25 bp, Homo sapien
catcaagtgtgtgtctagtatagtc

SEQ ID NO: 5216210 - DNA, 25 bp, Homo sapien
gaagacatgcagcaccatcaagtgt

SEQ ID NO: 5216211 - DNA, 25 bp, Homo sapien
gtgtgtctagtatagtctatagcag

SEQ ID NO: 5216212 - DNA, 25 bp, Homo sapien
gtactagccttagactgaactggcc

SEQ ID NO: 5216213 - DNA, 25 bp, Homo sapien
gctttgacagccaagttctgctgtt

SEQ ID NO: 5216214 - DNA, 25 bp, Homo sapien
gcattaacgagcaacctaattttac

SEQ ID NO: 5216215 - DNA, 25 bp, Homo sapien
caaaaatgcattaacgagcaaccta

SEQ ID NO: 5216216 - DNA, 25 bp, Homo sapien
cctagtttcgctacagatgattcct

SEQ ID NO: 5216217 - DNA, 25 bp, Homo sapien
actgatcctagtttcgctacagatg

SEQ ID NO: 5216218 - DNA, 25 bp, Homo sapien
tcctacggcatactgatcctagttt

SEQ ID NO: 5216219 - DNA, 25 bp, Homo sapien
tgtaaatcctacggcatactgatcc

SEQ ID NO: 5216220 - DNA, 25 bp, Homo sapien
caaacttagtaaaccgatgacacaa

SEQ ID NO: 5216221 - DNA, 25 bp, Homo sapien
cttagtaaaccgatgacacaaaaat

SEQ ID NO: 5216222 - DNA, 25 bp, Homo sapien
ttagtaaaccgatgacacaaaaatg

SEQ ID NO: 5216223 - DNA, 25 bp, Homo sapien
tcacaaacttagtaaaccgatgaca

SEQ ID NO: 5216224 - DNA, 25 bp, Homo sapien
tcaggttatccttggacatcaaatt

SEQ ID NO: 5216225 - DNA, 25 bp, Homo sapien
aattggtacaatcaggttatccttg

SEQ ID NO: 5216226 - DNA, 25 bp, Homo sapien
tcttctaaaattggtacaatcaggt

SEQ ID NO: 5216227 - DNA, 25 bp, Homo sapien
ggttatccttggacatcaaattgta

SEQ ID NO: 5216228 - DNA, 25 bp, Homo sapien
tcactttccccagaaactgaattct

SEQ ID NO: 5216229 - DNA, 25 bp, Homo sapien
ttcactttccccagaaactgaattc

SEQ ID NO: 5216230 - DNA, 25 bp, Homo sapien
cttcactttccccagaaactgaatt

SEQ ID NO: 5216231 - DNA, 25 bp, Homo sapien
tatatgatcagtacatttttcctat

SEQ ID NO: 5216232 - DNA, 25 bp, Homo sapien
ttatatgatcagtacatttttccta

SEQ ID NO: 5216233 - DNA, 25 bp, Homo sapien
attatatgatcagtacatttttcct

SEQ ID NO: 5216234 - DNA, 25 bp, Homo sapien
agtttggcaataagacctccagtgc

SEQ ID NO: 5216235 - DNA, 25 bp, Homo sapien
tagctgatgggcagtgttcaaagcc

SEQ ID NO: 5216236 - DNA, 25 bp, Homo sapien
tggcaagcttggaaaggcatacact

SEQ ID NO: 5216237 - DNA, 25 bp, Homo sapien
tgtaccagtccgttgttgcagaacg

SEQ ID NO: 5216238 - DNA, 25 bp, Homo sapien
ttaccattaccattggtttatagtg

SEQ ID NO: 5216239 - DNA, 25 bp, Homo sapien
aattaccattaccattggtttatag

SEQ ID NO: 5216240 - DNA, 25 bp, Homo sapien
taccattaccattggtttatagtgc

SEQ ID NO: 5216241 - DNA, 25 bp, Homo sapien
attaccattaccattggtttatagt

SEQ ID NO: 5216242 - DNA, 25 bp, Homo sapien
agtccccgttaacactaagccatat

SEQ ID NO: 5216243 - DNA, 25 bp, Homo sapien
tccaaacatacagtacagggaaggt

SEQ ID NO: 5216244 - DNA, 25 bp, Homo sapien
tgagacaccatctagagagaacagc

SEQ ID NO: 5216245 - DNA, 25 bp, Homo sapien
cctagtatagtagtgaatcaacttc

SEQ ID NO: 5216246 - DNA, 25 bp, Homo sapien
tattctgatagtaaaagttgttaag

SEQ ID NO: 5216247 - DNA, 25 bp, Homo sapien
ccaaggatttctaattgtattctga

SEQ ID NO: 5216248 - DNA, 25 bp, Homo sapien
cctgtgcctgaccaaggatttctaa

SEQ ID NO: 5216249 - DNA, 25 bp, Homo sapien
aagttgttaagtcatcaagaattta

SEQ ID NO: 5216250 - DNA, 25 bp, Homo sapien
catatagacagtagggcaaagtact

SEQ ID NO: 5216251 - DNA, 25 bp, Homo sapien
tttagcacattcaacaaggattcac

SEQ ID NO: 5216252 - DNA, 25 bp, Homo sapien
aagatgtcatcatatagacagtagg

SEQ ID NO: 5216253 - DNA, 25 bp, Homo sapien
acctttagcacattcaacaaggatt

SEQ ID NO: 5216254 - DNA, 25 bp, Homo sapien
aaacttagccgaggctgtggtctca

SEQ ID NO: 5216255 - DNA, 25 bp, Homo sapien
attaaaaacttagccgaggctgtgg

SEQ ID NO: 5216256 - DNA, 25 bp, Homo sapien
gaaatcggactcttttcttacacca

SEQ ID NO: 5216257 - DNA, 25 bp, Homo sapien
gtgttggaaaagctggatatccatg

SEQ ID NO: 5216258 - DNA, 25 bp, Homo sapien
gattgaaatcggactcttttcttac

SEQ ID NO: 5216259 - DNA, 25 bp, Homo sapien
tgttggaaaagctggatatccatgt

SEQ ID NO: 5216260 - DNA, 25 bp, Homo sapien
aaacttgggctctctatgcctaagg

SEQ ID NO: 5216261 - DNA, 25 bp, Homo sapien
tgcacccagccaagcaatcgctttt

SEQ ID NO: 5216262 - DNA, 25 bp, Homo sapien
aaatgtgtgtaaatagctatgagcc

SEQ ID NO: 5216263 - DNA, 25 bp, Homo sapien
gaagcatttgctccaacaattaccc

SEQ ID NO: 5216264 - DNA, 25 bp, Homo sapien
tctatgtaaactttggcacaacctc

SEQ ID NO: 5216265 - DNA, 25 bp, Homo sapien
tctggttaaacagatgttccattcg

SEQ ID NO: 5216266 - DNA, 25 bp, Homo sapien
gacccagcctttcctctaatctatg

SEQ ID NO: 5216267 - DNA, 25 bp, Homo sapien
tcagcttctcatgaatgtacaaagt

SEQ ID NO: 5216268 - DNA, 25 bp, Homo sapien
tccctcccgggaatgctggacaaag

SEQ ID NO: 5216269 - DNA, 25 bp, Homo sapien
gcagtgacaacgtcctccgggaatt

SEQ ID NO: 5216270 - DNA, 25 bp, Homo sapien
gaagcatcggattagacacaacctc

SEQ ID NO: 5216271 - DNA, 25 bp, Homo sapien
tagacgacggacagtttgatcagga

SEQ ID NO: 5216272 - DNA, 25 bp, Homo sapien
acatgggtgtaaggtggccatcaaa

SEQ ID NO: 5216273 - DNA, 25 bp, Homo sapien
ttattcatgggataagacccacccc

SEQ ID NO: 5216274 - DNA, 25 bp, Homo sapien
atgatttgactacctcccactgggc

SEQ ID NO: 5216275 - DNA, 25 bp, Homo sapien
gcagcctgtgtctacatgacatggg

SEQ ID NO: 5216276 - DNA, 25 bp, Homo sapien
cagagtggtagcctcaatgatagat

SEQ ID NO: 5216277 - DNA, 25 bp, Homo sapien
caatgagttcagcttgctgagaggt

SEQ ID NO: 5216278 - DNA, 25 bp, Homo sapien
ttatgggggtcagctgtggtatcca

SEQ ID NO: 5216279 - DNA, 25 bp, Homo sapien
gagtcaatgtcaggtagatcagaga

SEQ ID NO: 5216280 - DNA, 25 bp, Homo sapien
caaagggagtccgtctgtggtcaaa

SEQ ID NO: 5216281 - DNA, 25 bp, Homo sapien
taatgagtcctcttacagaaggagg

SEQ ID NO: 5216282 - DNA, 25 bp, Homo sapien
caaaggaggaacttagcctgtgact

SEQ ID NO: 5216283 - DNA, 25 bp, Homo sapien
tagccagggagttaagacctaattc

SEQ ID NO: 5216284 - DNA, 25 bp, Homo sapien
tgttgtctctgacctccggctgcca

SEQ ID NO: 5216285 - DNA, 25 bp, Homo sapien
tccggctgccactccagtgtatata

SEQ ID NO: 5216286 - DNA, 25 bp, Homo sapien
cttctgttgtctctgacctccggct

SEQ ID NO: 5216287 - DNA, 25 bp, Homo sapien
tccagtgtatataggagtgggtcat

SEQ ID NO: 5216288 - DNA, 25 bp, Homo sapien
ctacttgtagataattacatccaag

SEQ ID NO: 5216289 - DNA, 25 bp, Homo sapien
gccaactggaatagacaaagcaccg

SEQ ID NO: 5216290 - DNA, 25 bp, Homo sapien
taattacatccaagttgcccttttg

SEQ ID NO: 5216291 - DNA, 25 bp, Homo sapien
tggacacctctttttatcatccagc

SEQ ID NO: 5216292 - DNA, 25 bp, Homo sapien
atcaaactgcaaggcggcagcgagg

SEQ ID NO: 5216293 - DNA, 25 bp, Homo sapien
aactgcaaggcggcagcgaggctgg

SEQ ID NO: 5216294 - DNA, 25 bp, Homo sapien
aaggcggcagcgaggctgggggagg

SEQ ID NO: 5216295 - DNA, 25 bp, Homo sapien
agatcaaactgcaaggcggcagcga

SEQ ID NO: 5216296 - DNA, 25 bp, Homo sapien
gatacatgaggactcacataaatct

SEQ ID NO: 5216297 - DNA, 25 bp, Homo sapien
tgatacatgaggactcacataaatc

SEQ ID NO: 5216298 - DNA, 25 bp, Homo sapien
ctgatacatgaggactcacataaat

SEQ ID NO: 5216299 - DNA, 25 bp, Homo sapien
atacatgaggactcacataaatcta

SEQ ID NO: 5216300 - DNA, 25 bp, Homo sapien
ggaggaggcggcgttctgacagcac

SEQ ID NO: 5216301 - DNA, 25 bp, Homo sapien
ctgacagcacgtgtgagaggcgcat

SEQ ID NO: 5216302 - DNA, 25 bp, Homo sapien
cggcgttctgacagcacgtgtgaga

SEQ ID NO: 5216303 - DNA, 25 bp, Homo sapien
gcagaccggccgcaagcggaggagg

SEQ ID NO: 5216304 - DNA, 25 bp, Homo sapien
ctatgatatgagaggtggccggcca

SEQ ID NO: 5216305 - DNA, 25 bp, Homo sapien
gcggcgccgcgttcacgtagaaaat

SEQ ID NO: 5216306 - DNA, 25 bp, Homo sapien
gaaatctgtgcaggagataccggcc

SEQ ID NO: 5216307 - DNA, 25 bp, Homo sapien
tagatggtctgcgaatcatccccgg

SEQ ID NO: 5216308 - DNA, 25 bp, Homo sapien
ggaagccatccacggtatagcggtt

SEQ ID NO: 5216309 - DNA, 25 bp, Homo sapien
cagtgggaatggacacagatgcgct

SEQ ID NO: 5216310 - DNA, 25 bp, Homo sapien
tcggttcaagagacctcccaaggca

SEQ ID NO: 5216311 - DNA, 25 bp, Homo sapien
aaaccattagtttgccggacacagc

SEQ ID NO: 5216312 - DNA, 25 bp, Homo sapien
gcagagacccccagcctagacagca

SEQ ID NO: 5216313 - DNA, 25 bp, Homo sapien
ggcagagacccccagcctagacagc

SEQ ID NO: 5216314 - DNA, 25 bp, Homo sapien
acaggctgcagcaaagtcccaaaga

SEQ ID NO: 5216315 - DNA, 25 bp, Homo sapien
gtgacaggctgcagcaaagtcccaa

SEQ ID NO: 5216316 - DNA, 25 bp, Homo sapien
tggatgtccatagaatcgaggcaag

SEQ ID NO: 5216317 - DNA, 25 bp, Homo sapien
caaaagcccagtttcaggtcccagc

SEQ ID NO: 5216318 - DNA, 25 bp, Homo sapien
cctggactggtctagtcttggaaac

SEQ ID NO: 5216319 - DNA, 25 bp, Homo sapien
tccggtgggctttcaccagccaagt

SEQ ID NO: 5216320 - DNA, 25 bp, Homo sapien
cacagagaaatgaataggagcaggc

SEQ ID NO: 5216321 - DNA, 25 bp, Homo sapien
ccacaagccggtaagaactgagttt

SEQ ID NO: 5216322 - DNA, 25 bp, Homo sapien
ccagccacgagaggtagtttgggca

SEQ ID NO: 5216323 - DNA, 25 bp, Homo sapien
gaaaggagtcactaattagcctgag

SEQ ID NO: 5216324 - DNA, 25 bp, Homo sapien
ggactattaacaaagcagggagact

SEQ ID NO: 5216325 - DNA, 25 bp, Homo sapien
tagagccatctaccggttgaagtgt

SEQ ID NO: 5216326 - DNA, 25 bp, Homo sapien
caatagtggttgcaaagctatccct

SEQ ID NO: 5216327 - DNA, 25 bp, Homo sapien
gatacacatgggcaaaaatcatctg

SEQ ID NO: 5216328 - DNA, 25 bp, Homo sapien
tgtattaaagatcctgattgaccaa

SEQ ID NO: 5216329 - DNA, 25 bp, Homo sapien
agaaatcatgaggtaaattatgcac

SEQ ID NO: 5216330 - DNA, 25 bp, Homo sapien
tgcacatggataacaaaattaagac

SEQ ID NO: 5216331 - DNA, 25 bp, Homo sapien
attacctgaaagttgtgtattaaca

SEQ ID NO: 5216332 - DNA, 25 bp, Homo sapien
tccaagtatggctgaacctcccaag

SEQ ID NO: 5216333 - DNA, 25 bp, Homo sapien
gctgaacctcccaagtggtactcat

SEQ ID NO: 5216334 - DNA, 25 bp, Homo sapien
cttggtgaacatccaagtatggctg

SEQ ID NO: 5216335 - DNA, 25 bp, Homo sapien
tgaacatccaagtatggctgaacct

SEQ ID NO: 5216336 - DNA, 25 bp, Homo sapien
tgcagatgtttcatccagaagtgac

SEQ ID NO: 5216337 - DNA, 25 bp, Homo sapien
cagatgtttcatccagaagtgactc

SEQ ID NO: 5216338 - DNA, 25 bp, Homo sapien
gcagatgtttcatccagaagtgact

SEQ ID NO: 5216339 - DNA, 25 bp, Homo sapien
taaaattcgattgcacaatacgagg

SEQ ID NO: 5216340 - DNA, 25 bp, Homo sapien
tgtactaaggtttctgagctcaaat

SEQ ID NO: 5216341 - DNA, 25 bp, Homo sapien
tattttggcacaccctaaggccact

SEQ ID NO: 5216342 - DNA, 25 bp, Homo sapien
gttgtgatatgaagtctcagccttg

SEQ ID NO: 5216343 - DNA, 25 bp, Homo sapien
ggtttgaaaccttgatattctcaaa

SEQ ID NO: 5216344 - DNA, 25 bp, Homo sapien
cagcctttgtctaggtttgaaacct

SEQ ID NO: 5216345 - DNA, 25 bp, Homo sapien
tcagcctttgtctaggtttgaaacc

SEQ ID NO: 5216346 - DNA, 25 bp, Homo sapien
ctaggtttgaaaccttgatattctc

SEQ ID NO: 5216347 - DNA, 25 bp, Homo sapien
tattccagcagtggcaaattgcttg

SEQ ID NO: 5216348 - DNA, 25 bp, Homo sapien
attccagcagtggcaaattgcttgt

SEQ ID NO: 5216349 - DNA, 25 bp, Homo sapien
ctattccagcagtggcaaattgctt

SEQ ID NO: 5216350 - DNA, 25 bp, Homo sapien
cataatggtgttgcttattttcata

SEQ ID NO: 5216351 - DNA, 25 bp, Homo sapien
catactccagaggtaacttcggtcc

SEQ ID NO: 5216352 - DNA, 25 bp, Homo sapien
tactccagaggtaacttcggtccca

SEQ ID NO: 5216353 - DNA, 25 bp, Homo sapien
tttcatactccagaggtaacttcgg

SEQ ID NO: 5216354 - DNA, 25 bp, Homo sapien
gctagaacatatagtaacggtccgt

SEQ ID NO: 5216355 - DNA, 25 bp, Homo sapien
caaaactacttagtgcaagggtcaa

SEQ ID NO: 5216356 - DNA, 25 bp, Homo sapien
tagcactagccttcaaatgcaggac

SEQ ID NO: 5216357 - DNA, 25 bp, Homo sapien
gaagattactatgttcagcctctgc

SEQ ID NO: 5216358 - DNA, 25 bp, Homo sapien
gccgaaattgggctaggcagcgtct

SEQ ID NO: 5216359 - DNA, 25 bp, Homo sapien
ccaagttcacgatgacccgagagaa

SEQ ID NO: 5216360 - DNA, 25 bp, Homo sapien
aactcgaggaagttgtcgccgcggc

SEQ ID NO: 5216361 - DNA, 25 bp, Homo sapien
cgaagtccgagcaggtaaaccgctt

SEQ ID NO: 5216362 - DNA, 25 bp, Homo sapien
ttcggtctaggaggctagcagtccg

SEQ ID NO: 5216363 - DNA, 25 bp, Homo sapien
gactttgtttcaccgcccagcggcg

SEQ ID NO: 5216364 - DNA, 25 bp, Homo sapien
tccgaaatgtgatgcaaacgccggc

SEQ ID NO: 5216365 - DNA, 25 bp, Homo sapien
aaaagagagggaggtatccgaaatg

SEQ ID NO: 5216366 - DNA, 25 bp, Homo sapien
cgctgcgacggtccctcatccggcc

SEQ ID NO: 5216367 - DNA, 25 bp, Homo sapien
gcctggcagtgcgaccccgctgcga

SEQ ID NO: 5216368 - DNA, 25 bp, Homo sapien
gggtcgcccgtgctgcctccaggag

SEQ ID NO: 5216369 - DNA, 25 bp, Homo sapien
agaggccgccgtcacgcagtccccg

SEQ ID NO: 5216370 - DNA, 25 bp, Homo sapien
gaacttttcctctgccgtcagtggg

SEQ ID NO: 5216371 - DNA, 25 bp, Homo sapien
aaaagtcacttgtgcgtctcgtggc

SEQ ID NO: 5216372 - DNA, 25 bp, Homo sapien
catccatcagaacgcaaagacgcag

SEQ ID NO: 5216373 - DNA, 25 bp, Homo sapien
gagtctgggaacctccggataagga

SEQ ID NO: 5216374 - DNA, 25 bp, Homo sapien
gatgcagggtccacttaaaactctg

SEQ ID NO: 5216375 - DNA, 25 bp, Homo sapien
ccggttgtgctttctgcagcgcaaa

SEQ ID NO: 5216376 - DNA, 25 bp, Homo sapien
tggtggtaaccacaaggaccagtga

SEQ ID NO: 5216377 - DNA, 25 bp, Homo sapien
gcagcgcaaaaactctgggctcttg

SEQ ID NO: 5216378 - DNA, 25 bp, Homo sapien
ggggctctgatggtccagtaactca

SEQ ID NO: 5216379 - DNA, 25 bp, Homo sapien
ctctgatggtccagtaactcagtgt

SEQ ID NO: 5216380 - DNA, 25 bp, Homo sapien
agaaacctctttgggtggggcagca

SEQ ID NO: 5216381 - DNA, 25 bp, Homo sapien
gctctgatggtccagtaactcagtg

SEQ ID NO: 5216382 - DNA, 25 bp, Homo sapien
agtagactgttcgaccagaccctcg

SEQ ID NO: 5216383 - DNA, 25 bp, Homo sapien
ttagtatcaagtgcactggagagga

SEQ ID NO: 5216384 - DNA, 25 bp, Homo sapien
ggcatgttagaatgtccccaggatg

SEQ ID NO: 5216385 - DNA, 25 bp, Homo sapien
gtttatctaaaggaggcatgggctt

SEQ ID NO: 5216386 - DNA, 25 bp, Homo sapien
tctgacctacgtcccctgctggttt

SEQ ID NO: 5216387 - DNA, 25 bp, Homo sapien
taaactatctgacctacgtcccctg

SEQ ID NO: 5216388 - DNA, 25 bp, Homo sapien
tataaactatctgacctacgtcccc

SEQ ID NO: 5216389 - DNA, 25 bp, Homo sapien
tatctgacctacgtcccctgctggt

SEQ ID NO: 5216390 - DNA, 25 bp, Homo sapien
gatcctactggtccttctttagctt

SEQ ID NO: 5216391 - DNA, 25 bp, Homo sapien
tctttcaatccattagtgtgcgtca

SEQ ID NO: 5216392 - DNA, 25 bp, Homo sapien
ctttctcccaaggtcagatttcctg

SEQ ID NO: 5216393 - DNA, 25 bp, Homo sapien
tctcgggtcatgctagataactctt

SEQ ID NO: 5216394 - DNA, 25 bp, Homo sapien
gcaagcacaagttagttacagcact

SEQ ID NO: 5216395 - DNA, 25 bp, Homo sapien
tgccaacttcaagcccaaattagaa

SEQ ID NO: 5216396 - DNA, 25 bp, Homo sapien
taaggacagataagcattttaggca

SEQ ID NO: 5216397 - DNA, 25 bp, Homo sapien
gaccagctctgatacacaacagaaa

SEQ ID NO: 5216398 - DNA, 25 bp, Homo sapien
tgtacaggacttctaggacaactaa

SEQ ID NO: 5216399 - DNA, 25 bp, Homo sapien
gaagcagatgtaccggtgctagacc

SEQ ID NO: 5216400 - DNA, 25 bp, Homo sapien
gatagaactcgtgctgagaatggca

SEQ ID NO: 5216401 - DNA, 25 bp, Homo sapien
tatctaggacaagttctgcacatga

SEQ ID NO: 5216402 - DNA, 25 bp, Homo sapien
ggaactgggatgcacctatttgaag

SEQ ID NO: 5216403 - DNA, 25 bp, Homo sapien
gaactgggatgcacctatttgaaga

SEQ ID NO: 5216404 - DNA, 25 bp, Homo sapien
ataaactgacaatccagggagatgc

SEQ ID NO: 5216405 - DNA, 25 bp, Homo sapien
gcaatggccacatgactcactagtc

SEQ ID NO: 5216406 - DNA, 25 bp, Homo sapien
catgtagcagaaatgcaacctatgc

SEQ ID NO: 5216407 - DNA, 25 bp, Homo sapien
caaatgacataggacagtgaaaggg

SEQ ID NO: 5216408 - DNA, 25 bp, Homo sapien
ggctagaaaaccatggctgttcatt

SEQ ID NO: 5216409 - DNA, 25 bp, Homo sapien
cactatggctattagttggtagagc

SEQ ID NO: 5216410 - DNA, 25 bp, Homo sapien
tgtgacttagccaagacactatggc

SEQ ID NO: 5216411 - DNA, 25 bp, Homo sapien
tatttcagcacaactagatacaaca

SEQ ID NO: 5216412 - DNA, 25 bp, Homo sapien
aaaccctgacggtatggcctcagaa

SEQ ID NO: 5216413 - DNA, 25 bp, Homo sapien
tctttactggtagtgatccctttgt

SEQ ID NO: 5216414 - DNA, 25 bp, Homo sapien
tctgaatctttactggtagtgatcc

SEQ ID NO: 5216415 - DNA, 25 bp, Homo sapien
ttactggtagtgatccctttgtcct

SEQ ID NO: 5216416 - DNA, 25 bp, Homo sapien
gaatctttactggtagtgatccctt

SEQ ID NO: 5216417 - DNA, 25 bp, Homo sapien
cactctgagtacctaacttctggtt

SEQ ID NO: 5216418 - DNA, 25 bp, Homo sapien
catgaatgaccggaaaccactctga

SEQ ID NO: 5216419 - DNA, 25 bp, Homo sapien
atgaccaagtagcatgaatgaccgg

SEQ ID NO: 5216420 - DNA, 25 bp, Homo sapien
tccaacaattacttggatgaccaag

SEQ ID NO: 5216421 - DNA, 25 bp, Homo sapien
cctgtgacatcaatgatccaatgtc

SEQ ID NO: 5216422 - DNA, 25 bp, Homo sapien
cctgtatagctgtagctctttgttc

SEQ ID NO: 5216423 - DNA, 25 bp, Homo sapien
cacttgggactgacagctgccaaac

SEQ ID NO: 5216424 - DNA, 25 bp, Homo sapien
caatgtcacgttcacacttgggact

SEQ ID NO: 5216425 - DNA, 25 bp, Homo sapien
tacctgagctgcaaactgtccagag

SEQ ID NO: 5216426 - DNA, 25 bp, Homo sapien
gagcctcctgttcacctgtaataaa

SEQ ID NO: 5216427 - DNA, 25 bp, Homo sapien
taaagtgagccaaagacaagaactg

SEQ ID NO: 5216428 - DNA, 25 bp, Homo sapien
ggtgcgcccttccattgtgcagcaa

SEQ ID NO: 5216429 - DNA, 25 bp, Homo sapien
gagagcagctttaatcaggttaatc

SEQ ID NO: 5216430 - DNA, 25 bp, Homo sapien
aatcctgctactttatgtggtattg

SEQ ID NO: 5216431 - DNA, 25 bp, Homo sapien
gttgacaccgctatcacttctttta

SEQ ID NO: 5216432 - DNA, 25 bp, Homo sapien
gatccttgagagcagctttaatcag

SEQ ID NO: 5216433 - DNA, 25 bp, Homo sapien
gtaggaaatagatttagacttggca

SEQ ID NO: 5216434 - DNA, 25 bp, Homo sapien
ggtaggaaatagatttagacttggc

SEQ ID NO: 5216435 - DNA, 25 bp, Homo sapien
taggaaatagatttagacttggcat

SEQ ID NO: 5216436 - DNA, 25 bp, Homo sapien
tctcactgttgaggttaaccttgct

SEQ ID NO: 5216437 - DNA, 25 bp, Homo sapien
tatatactccatactccgtttctcc

SEQ ID NO: 5216438 - DNA, 25 bp, Homo sapien
ttatataacatgtccctgaactggg

SEQ ID NO: 5216439 - DNA, 25 bp, Homo sapien
gttgacatgtctccgccttaggctc

SEQ ID NO: 5216440 - DNA, 25 bp, Homo sapien
gagagtcccctaacagtgcttaaca

SEQ ID NO: 5216441 - DNA, 25 bp, Homo sapien
tagaaaatgactggcctggaaactg

SEQ ID NO: 5216442 - DNA, 25 bp, Homo sapien
tcagagcaaaaactataccagtggt

SEQ ID NO: 5216443 - DNA, 25 bp, Homo sapien
aagacatagtcccagcattggctag

SEQ ID NO: 5216444 - DNA, 25 bp, Homo sapien
tatgaatcccactaagtcactgtga

SEQ ID NO: 5216445 - DNA, 25 bp, Homo sapien
tccaaatgtgaagctgtccagtact

SEQ ID NO: 5216446 - DNA, 25 bp, Homo sapien
gaggcaatgcaagtcaacgaatgag

SEQ ID NO: 5216447 - DNA, 25 bp, Homo sapien
cattcaacagttaaggagcatgctg

SEQ ID NO: 5216448 - DNA, 25 bp, Homo sapien
tcttcacatgaggaggtaaatacca

SEQ ID NO: 5216449 - DNA, 25 bp, Homo sapien
gatctctgtgggtagctaagcttag

SEQ ID NO: 5216450 - DNA, 25 bp, Homo sapien
tgagttgctggccaaatcgcacctt

SEQ ID NO: 5216451 - DNA, 25 bp, Homo sapien
gagggctaacccacataattagtgg

SEQ ID NO: 5216452 - DNA, 25 bp, Homo sapien
ttatcagaggagtgacaaaggtaca

SEQ ID NO: 5216453 - DNA, 25 bp, Homo sapien
catagtcaaattgtacatggttgac

SEQ ID NO: 5216454 - DNA, 25 bp, Homo sapien
tttagcatagtcaaattgtacatgg

SEQ ID NO: 5216455 - DNA, 25 bp, Homo sapien
tatcagaggagtgacaaaggtacaa

SEQ ID NO: 5216456 - DNA, 25 bp, Homo sapien
gaatgagtttcgacaactgtcctgc

SEQ ID NO: 5216457 - DNA, 25 bp, Homo sapien
cactagcagggtactaacttagggc

SEQ ID NO: 5216458 - DNA, 25 bp, Homo sapien
gaagaaaagaggctatcacgggata

SEQ ID NO: 5216459 - DNA, 25 bp, Homo sapien
taaatagtcttgagtgtaaacaccc

SEQ ID NO: 5216460 - DNA, 25 bp, Homo sapien
taaaggcaggtaagaaggtaactca

SEQ ID NO: 5216461 - DNA, 25 bp, Homo sapien
caaggagtccagtttgaaggaagca

SEQ ID NO: 5216462 - DNA, 25 bp, Homo sapien
tcagagtcagcaaacccgagttaca

SEQ ID NO: 5216463 - DNA, 25 bp, Homo sapien
tcaatgagatacagtgtggaggcac

SEQ ID NO: 5216464 - DNA, 25 bp, Homo sapien
gagcaaaatggcagacaagcaactt

SEQ ID NO: 5216465 - DNA, 25 bp, Homo sapien
taccctgaggaattaacctctgagc

SEQ ID NO: 5216466 - DNA, 25 bp, Homo sapien
actcagcctgtgcatcatcatttag

SEQ ID NO: 5216467 - DNA, 25 bp, Homo sapien
gacaagcaacttgcactcagcctgt

SEQ ID NO: 5216468 - DNA, 25 bp, Homo sapien
aagaagcgcctccaaaactattatt

SEQ ID NO: 5216469 - DNA, 25 bp, Homo sapien
tattctcaagtgcacacgcattaca

SEQ ID NO: 5216470 - DNA, 25 bp, Homo sapien
gtgcacacgcattacatgatgccat

SEQ ID NO: 5216471 - DNA, 25 bp, Homo sapien
acttcagcaaagaagcgcctccaaa

SEQ ID NO: 5216472 - DNA, 25 bp, Homo sapien
ttgaattgccagtgccatcccttcc

SEQ ID NO: 5216473 - DNA, 25 bp, Homo sapien
cttgaattgccagtgccatcccttc

SEQ ID NO: 5216474 - DNA, 25 bp, Homo sapien
tgaattgccagtgccatcccttccc

SEQ ID NO: 5216475 - DNA, 25 bp, Homo sapien
tcttgaattgccagtgccatccctt

SEQ ID NO: 5216476 - DNA, 25 bp, Homo sapien
caagggtagtttatccttgccaggg

SEQ ID NO: 5216477 - DNA, 25 bp, Homo sapien
cctctgggaacagtagggactcgcc

SEQ ID NO: 5216478 - DNA, 25 bp, Homo sapien
tcattaggcagagtcaccagcagca

SEQ ID NO: 5216479 - DNA, 25 bp, Homo sapien
gggactcgcctcatgaagacccaga

SEQ ID NO: 5216480 - DNA, 25 bp, Homo sapien
gcaagcagaccctaggcctgatttt

SEQ ID NO: 5216481 - DNA, 25 bp, Homo sapien
tcataagcatttcgtggacactcaa

SEQ ID NO: 5216482 - DNA, 25 bp, Homo sapien
ttttggcagtttaacagcctggcag

SEQ ID NO: 5216483 - DNA, 25 bp, Homo sapien
gataatctatgcaaaacaactggca

SEQ ID NO: 5216484 - DNA, 25 bp, Homo sapien
caaaagtggactcttctaggttgag

SEQ ID NO: 5216485 - DNA, 25 bp, Homo sapien
tccgtaatgtcctcaggccaaagat

SEQ ID NO: 5216486 - DNA, 25 bp, Homo sapien
cagggattggaacaccaggtaaagt

SEQ ID NO: 5216487 - DNA, 25 bp, Homo sapien
aaagtgtttagcagtttccatgaga

SEQ ID NO: 5216488 - DNA, 25 bp, Homo sapien
tgtcaagcaggtctgaagtgtggtt

SEQ ID NO: 5216489 - DNA, 25 bp, Homo sapien
ttcagataaggggcagtttcaaatg

SEQ ID NO: 5216490 - DNA, 25 bp, Homo sapien
gggcagtttcaaatgtcaagcaggt

SEQ ID NO: 5216491 - DNA, 25 bp, Homo sapien
tcaaatgtcaagcaggtctgaagtg

SEQ ID NO: 5216492 - DNA, 25 bp, Homo sapien
ctgcagaagtatagctgctatgcac

SEQ ID NO: 5216493 - DNA, 25 bp, Homo sapien
gagattctgcagaagtatagctgct

SEQ ID NO: 5216494 - DNA, 25 bp, Homo sapien
ttctgcagaagtatagctgctatgc

SEQ ID NO: 5216495 - DNA, 25 bp, Homo sapien
gattctgcagaagtatagctgctat

SEQ ID NO: 5216496 - DNA, 25 bp, Homo sapien
tcagtgcgtgcagggccatgaaaag

SEQ ID NO: 5216497 - DNA, 25 bp, Homo sapien
ctgaaacagccatcagtgcgtgcag

SEQ ID NO: 5216498 - DNA, 25 bp, Homo sapien
gggaccagctcgatgaacaaataac

SEQ ID NO: 5216499 - DNA, 25 bp, Homo sapien
aaataaccatttctactacacattg

SEQ ID NO: 5216500 - DNA, 25 bp, Homo sapien
tgggagatatctgggttcccacact

SEQ ID NO: 5216501 - DNA, 25 bp, Homo sapien
aatgggagatatctgggttcccaca

SEQ ID NO: 5216502 - DNA, 25 bp, Homo sapien
agaatgggagatatctgggttccca

SEQ ID NO: 5216503 - DNA, 25 bp, Homo sapien
cagaatgggagatatctgggttccc

SEQ ID NO: 5216504 - DNA, 25 bp, Homo sapien
cataatgaagaatcagtggaaactc

SEQ ID NO: 5216505 - DNA, 25 bp, Homo sapien
tgaagaatcagtggaaactctgagc

SEQ ID NO: 5216506 - DNA, 25 bp, Homo sapien
tcagtggaaactctgagctgttttc

SEQ ID NO: 5216507 - DNA, 25 bp, Homo sapien
aatcagtggaaactctgagctgttt

SEQ ID NO: 5216508 - DNA, 25 bp, Homo sapien
tccctgtaactcttctcaatctttc

SEQ ID NO: 5216509 - DNA, 25 bp, Homo sapien
ctaaacttccctgtaactcttctca

SEQ ID NO: 5216510 - DNA, 25 bp, Homo sapien
taaacttccctgtaactcttctcaa

SEQ ID NO: 5216511 - DNA, 25 bp, Homo sapien
acttccctgtaactcttctcaatct

SEQ ID NO: 5216512 - DNA, 25 bp, Homo sapien
gcaatatggataacttcactggcta

SEQ ID NO: 5216513 - DNA, 25 bp, Homo sapien
gccacagggtgtagctagtattaag

SEQ ID NO: 5216514 - DNA, 25 bp, Homo sapien
gaaacgccgaacatgtaagtgtcaa

SEQ ID NO: 5216515 - DNA, 25 bp, Homo sapien
tgtgtatacttgaaccgagccatga

SEQ ID NO: 5216516 - DNA, 25 bp, Homo sapien
ataaatagctttcttagaaggaaga

SEQ ID NO: 5216517 - DNA, 25 bp, Homo sapien
aaatagctttcttagaaggaagaca

SEQ ID NO: 5216518 - DNA, 25 bp, Homo sapien
aatagctttcttagaaggaagacag

SEQ ID NO: 5216519 - DNA, 25 bp, Homo sapien
taaatagctttcttagaaggaagac

SEQ ID NO: 5216520 - DNA, 25 bp, Homo sapien
cattaagtgctgactggatactgag

SEQ ID NO: 5216521 - DNA, 25 bp, Homo sapien
tctgcagaagcacggcatgaaaagc

SEQ ID NO: 5216522 - DNA, 25 bp, Homo sapien
gaagtggcagtataagcattaagtg

SEQ ID NO: 5216523 - DNA, 25 bp, Homo sapien
ccttcatggtctctaactttgagaa

SEQ ID NO: 5216524 - DNA, 25 bp, Homo sapien
cttaggatgaagtttttgcatggtc

SEQ ID NO: 5216525 - DNA, 25 bp, Homo sapien
aggatgaagtttttgcatggtcgtc

SEQ ID NO: 5216526 - DNA, 25 bp, Homo sapien
gtaatcctttggaagataagaggta

SEQ ID NO: 5216527 - DNA, 25 bp, Homo sapien
gataagaggtattctgatttttgga

SEQ ID NO: 5216528 - DNA, 25 bp, Homo sapien
gctgaagatcatgatcacgctgtga

SEQ ID NO: 5216529 - DNA, 25 bp, Homo sapien
tttggtgatgccaagcgtagccatc

SEQ ID NO: 5216530 - DNA, 25 bp, Homo sapien
gaaaagccagacaggaaatgtcacc

SEQ ID NO: 5216531 - DNA, 25 bp, Homo sapien
ggctcttaagtctcccatttggtga

SEQ ID NO: 5216532 - DNA, 25 bp, Homo sapien
caagttcttcttctacacaaaccat

SEQ ID NO: 5216533 - DNA, 25 bp, Homo sapien
atctgctcaacttgaggcataagcc

SEQ ID NO: 5216534 - DNA, 25 bp, Homo sapien
tcttactacgcaactaatctgctca

SEQ ID NO: 5216535 - DNA, 25 bp, Homo sapien
tgctcaacttgaggcataagccatt

SEQ ID NO: 5216536 - DNA, 25 bp, Homo sapien
cagagacccatacttgtctaagcgc

SEQ ID NO: 5216537 - DNA, 25 bp, Homo sapien
gacccatacttgtctaagcgctggg

SEQ ID NO: 5216538 - DNA, 25 bp, Homo sapien
cctgcagagacccatacttgtctaa

SEQ ID NO: 5216539 - DNA, 25 bp, Homo sapien
tcttcaaccagtccggcctgcagag

SEQ ID NO: 5216540 - DNA, 25 bp, Homo sapien
tgcatacattttgcctttccaatgg

SEQ ID NO: 5216541 - DNA, 25 bp, Homo sapien
ttccaatgggcctatgctcaaaatc

SEQ ID NO: 5216542 - DNA, 25 bp, Homo sapien
caatgggcctatgctcaaaatcaca

SEQ ID NO: 5216543 - DNA, 25 bp, Homo sapien
gggcctatgctcaaaatcacatcca

SEQ ID NO: 5216544 - DNA, 25 bp, Homo sapien
caagtattaagtacaaatcactctg

SEQ ID NO: 5216545 - DNA, 25 bp, Homo sapien
ttgctaagaaagctgaaattacagg

SEQ ID NO: 5216546 - DNA, 25 bp, Homo sapien
tgattatttgaacagaggctaccct

SEQ ID NO: 5216547 - DNA, 25 bp, Homo sapien
tcatgctggtgcctcgactacctag

SEQ ID NO: 5216548 - DNA, 25 bp, Homo sapien
tgctgaaagacacggttttctttct

SEQ ID NO: 5216549 - DNA, 25 bp, Homo sapien
ccaccacatttttggtttgaaggat

SEQ ID NO: 5216550 - DNA, 25 bp, Homo sapien
gctgctgaaagacacggttttcttt

SEQ ID NO: 5216551 - DNA, 25 bp, Homo sapien
ttcttccaccacatttttggtttga

SEQ ID NO: 5216552 - DNA, 25 bp, Homo sapien
gatatgggtgactccttgctcagct

SEQ ID NO: 5216553 - DNA, 25 bp, Homo sapien
caagaggctgcttacttcgagaaac

SEQ ID NO: 5216554 - DNA, 25 bp, Homo sapien
tgtgtccagagtgaaaaaacggttg

SEQ ID NO: 5216555 - DNA, 25 bp, Homo sapien
ccccgtggagtatggaaaaggcaca

SEQ ID NO: 5216556 - DNA, 25 bp, Homo sapien
gaatgccctttgtatttgcgctgaa

SEQ ID NO: 5216557 - DNA, 25 bp, Homo sapien
tatgtggacaaaaagggttacgtgc

SEQ ID NO: 5216558 - DNA, 25 bp, Homo sapien
ttaagaccgatattcctgagcatgg

SEQ ID NO: 5216559 - DNA, 25 bp, Homo sapien
gttttgaagaaaccagcccgtgtga

SEQ ID NO: 5216560 - DNA, 25 bp, Homo sapien
aacattatacgggtaggaataagca

SEQ ID NO: 5216561 - DNA, 25 bp, Homo sapien
tatacgggtaggaataagcagggat

SEQ ID NO: 5216562 - DNA, 25 bp, Homo sapien
gatagggaaggagagtgtgagtgtt

SEQ ID NO: 5216563 - DNA, 25 bp, Homo sapien
ggaaggagagtgtgagtgtttctcc

SEQ ID NO: 5216564 - DNA, 25 bp, Homo sapien
gccgagatgacagagttaacaggca

SEQ ID NO: 5216565 - DNA, 25 bp, Homo sapien
gttccttaatagacacgattgcatt

SEQ ID NO: 5216566 - DNA, 25 bp, Homo sapien
tggagggagtccacatagttcctta

SEQ ID NO: 5216567 - DNA, 25 bp, Homo sapien
tcactggtgatgagccgagatgaca

SEQ ID NO: 5216568 - DNA, 25 bp, Homo sapien
catttctatgagaaaccggctctct

SEQ ID NO: 5216569 - DNA, 25 bp, Homo sapien
gactgtgtccgccatttctatgaga

SEQ ID NO: 5216570 - DNA, 25 bp, Homo sapien
tttcctggactgtgtccgccatttc

SEQ ID NO: 5216571 - DNA, 25 bp, Homo sapien
tgagaaaccggctctcttgaatcat

SEQ ID NO: 5216572 - DNA, 25 bp, Homo sapien
aaagctctcagttgctttgttgagt

SEQ ID NO: 5216573 - DNA, 25 bp, Homo sapien
tactgtaatgttccaagcaaagctc

SEQ ID NO: 5216574 - DNA, 25 bp, Homo sapien
cttcaatactgtaatgttccaagca

SEQ ID NO: 5216575 - DNA, 25 bp, Homo sapien
gcaaagctctcagttgctttgttga

SEQ ID NO: 5216576 - DNA, 25 bp, Homo sapien
ctacacattggagagatgaggagaa

SEQ ID NO: 5216577 - DNA, 25 bp, Homo sapien
gaaaagtaaaggcacaggggacatc

SEQ ID NO: 5216578 - DNA, 25 bp, Homo sapien
ggggacatctgagtgtttcatctac

SEQ ID NO: 5216579 - DNA, 25 bp, Homo sapien
cacattggagagatgaggagaagaa

SEQ ID NO: 5216580 - DNA, 25 bp, Homo sapien
catgttaattccagtatgcagctcc

SEQ ID NO: 5216581 - DNA, 25 bp, Homo sapien
tattcctgcactaggctgcctggac

SEQ ID NO: 5216582 - DNA, 25 bp, Homo sapien
tgtgcactgtgacttacatcttttg

SEQ ID NO: 5216583 - DNA, 25 bp, Homo sapien
ggctagtctcaccactatcaggtaa

SEQ ID NO: 5216584 - DNA, 25 bp, Homo sapien
ggtattattactaccctgagggaga

SEQ ID NO: 5216585 - DNA, 25 bp, Homo sapien
agtgggcttaagtcagaagttaaca

SEQ ID NO: 5216586 - DNA, 25 bp, Homo sapien
ctaagtgggcttaagtcagaagtta

SEQ ID NO: 5216587 - DNA, 25 bp, Homo sapien
acactaagtgggcttaagtcagaag

SEQ ID NO: 5216588 - DNA, 25 bp, Homo sapien
gcttaagtcagaagttaacaaagaa

SEQ ID NO: 5216589 - DNA, 25 bp, Homo sapien
tgccactggaataagaccctcaatt

SEQ ID NO: 5216590 - DNA, 25 bp, Homo sapien
gcgagactaaactggctgccactgg

SEQ ID NO: 5216591 - DNA, 25 bp, Homo sapien
ttttggcttcatccctattttgccc

SEQ ID NO: 5216592 - DNA, 25 bp, Homo sapien
cctcccagttgcgttcaccaaatgt

SEQ ID NO: 5216593 - DNA, 25 bp, Homo sapien
cttcctggtaatcaatgatatccat

SEQ ID NO: 5216594 - DNA, 25 bp, Homo sapien
cttcttcctggtaatcaatgatatc

SEQ ID NO: 5216595 - DNA, 25 bp, Homo sapien
ttcttcctggtaatcaatgatatcc

SEQ ID NO: 5216596 - DNA, 25 bp, Homo sapien
tcttcctggtaatcaatgatatcca

SEQ ID NO: 5216597 - DNA, 25 bp, Homo sapien
ccatccatgatttcaccagcaaata

SEQ ID NO: 5216598 - DNA, 25 bp, Homo sapien
taaactgtatggaactctcaagtgt

SEQ ID NO: 5216599 - DNA, 25 bp, Homo sapien
tcagcatatgttcaaattgtgccca

SEQ ID NO: 5216600 - DNA, 25 bp, Homo sapien
ggaagcggtgtgtaaccatccatga

SEQ ID NO: 5216601 - DNA, 25 bp, Homo sapien
tcctgcaacatgtgtggtaagtgtg

SEQ ID NO: 5216602 - DNA, 25 bp, Homo sapien
caaacccacgataaacaagaacctg

SEQ ID NO: 5216603 - DNA, 25 bp, Homo sapien
agtttcttggttgatagcaaaccca

SEQ ID NO: 5216604 - DNA, 25 bp, Homo sapien
gatatcagtttcttggttgatagca

SEQ ID NO: 5216605 - DNA, 25 bp, Homo sapien
tcaaaaaacattggtgtatccccaa

SEQ ID NO: 5216606 - DNA, 25 bp, Homo sapien
atcaaaaaacattggtgtatcccca

SEQ ID NO: 5216607 - DNA, 25 bp, Homo sapien
ttttgtcttcagtgtgggtacaggg

SEQ ID NO: 5216608 - DNA, 25 bp, Homo sapien
tacagggtttggaagcatttaataa

SEQ ID NO: 5216609 - DNA, 25 bp, Homo sapien
aggaaatgaataatgccggcttccc

SEQ ID NO: 5216610 - DNA, 25 bp, Homo sapien
tgcccaggttcacacgagaaataag

SEQ ID NO: 5216611 - DNA, 25 bp, Homo sapien
tgaagagaattacactggacatgct

SEQ ID NO: 5216612 - DNA, 25 bp, Homo sapien
cacaaaggtgcagctattaggaaat

SEQ ID NO: 5216613 - DNA, 25 bp, Homo sapien
tctaacagtcttggctgaatgaagc

SEQ ID NO: 5216614 - DNA, 25 bp, Homo sapien
gctctctagaatgaaggcctatctg

SEQ ID NO: 5216615 - DNA, 25 bp, Homo sapien
tgtggagggctgtgcacaactgcca

SEQ ID NO: 5216616 - DNA, 25 bp, Homo sapien
agacatcatagtgggatgagtagtt

SEQ ID NO: 5216617 - DNA, 25 bp, Homo sapien
catcatagtgggatgagtagttatt

SEQ ID NO: 5216618 - DNA, 25 bp, Homo sapien
acagacatcatagtgggatgagtag

SEQ ID NO: 5216619 - DNA, 25 bp, Homo sapien
gatatttaggatttctgttacttcc

SEQ ID NO: 5216620 - DNA, 25 bp, Homo sapien
tatcctaaccataaaatagggtaga

SEQ ID NO: 5216621 - DNA, 25 bp, Homo sapien
tatcttataacccatcaaaagatat

SEQ ID NO: 5216622 - DNA, 25 bp, Homo sapien
cgtaaaccagttcaaatacatctca

SEQ ID NO: 5216623 - DNA, 25 bp, Homo sapien
gactttgcttgttaagccaagtacc

SEQ ID NO: 5216624 - DNA, 25 bp, Homo sapien
taacattattaagtgactttgcttg

SEQ ID NO: 5216625 - DNA, 25 bp, Homo sapien
attaagtgactttgcttgttaagcc

SEQ ID NO: 5216626 - DNA, 25 bp, Homo sapien
aagtgactttgcttgttaagccaag

SEQ ID NO: 5216627 - DNA, 25 bp, Homo sapien
tcttactgcccattgctgaataagg

SEQ ID NO: 5216628 - DNA, 25 bp, Homo sapien
cactctatgttcttactgcccattg

SEQ ID NO: 5216629 - DNA, 25 bp, Homo sapien
tatgttcttactgcccattgctgaa

SEQ ID NO: 5216630 - DNA, 25 bp, Homo sapien
actgcccattgctgaataaggaaac

SEQ ID NO: 5216631 - DNA, 25 bp, Homo sapien
ggcattcttcaacagatctccttgg

SEQ ID NO: 5216632 - DNA, 25 bp, Homo sapien
tggcattcttcaacagatctccttg

SEQ ID NO: 5216633 - DNA, 25 bp, Homo sapien
tctatgtccaataccccatataggg

SEQ ID NO: 5216634 - DNA, 25 bp, Homo sapien
ggtgaacgtgtcgataatgcccaga

SEQ ID NO: 5216635 - DNA, 25 bp, Homo sapien
gaatgagaaaccagagtccttgata

SEQ ID NO: 5216636 - DNA, 25 bp, Homo sapien
aacactgatactaaaggctttaatt

SEQ ID NO: 5216637 - DNA, 25 bp, Homo sapien
gaaaatgagtgctagactctcagct

SEQ ID NO: 5216638 - DNA, 25 bp, Homo sapien
caaagatattatcggacccacagaa

SEQ ID NO: 5216639 - DNA, 25 bp, Homo sapien
catagatgtgtggtaactggttagc

SEQ ID NO: 5216640 - DNA, 25 bp, Homo sapien
tgtttcagagtaccacacaggtagg

SEQ ID NO: 5216641 - DNA, 25 bp, Homo sapien
catctagcaaggacacccagtggaa

SEQ ID NO: 5216642 - DNA, 25 bp, Homo sapien
cacaggagactaggagacttttccc

SEQ ID NO: 5216643 - DNA, 25 bp, Homo sapien
gaagcagagtatggctgacaaccca

SEQ ID NO: 5216644 - DNA, 25 bp, Homo sapien
taaaatgccagtgataatacccgcc

SEQ ID NO: 5216645 - DNA, 25 bp, Homo sapien
caccagcagggtaggatggttccaa

SEQ ID NO: 5216646 - DNA, 25 bp, Homo sapien
tgtgcctgatttccttcacttagaa

SEQ ID NO: 5216647 - DNA, 25 bp, Homo sapien
ttagtggttaacgatcttcagcacg

SEQ ID NO: 5216648 - DNA, 25 bp, Homo sapien
aatggaacggtacaacatgtggcct

SEQ ID NO: 5216649 - DNA, 25 bp, Homo sapien
cataaatgccaattacgtccaggta

SEQ ID NO: 5216650 - DNA, 25 bp, Homo sapien
gcctggcaatattcactgctctgaa

SEQ ID NO: 5216651 - DNA, 25 bp, Homo sapien
ggtggtgcagtgttccataaatgcc

SEQ ID NO: 5216652 - DNA, 25 bp, Homo sapien
tgacccagaaaatggtctatattgg

SEQ ID NO: 5216653 - DNA, 25 bp, Homo sapien
gataatgagcacatatattattccc

SEQ ID NO: 5216654 - DNA, 25 bp, Homo sapien
tattcccaaatatgtccttatccac

SEQ ID NO: 5216655 - DNA, 25 bp, Homo sapien
tatccactttgtaatctcacactcc

SEQ ID NO: 5216656 - DNA, 25 bp, Homo sapien
ccttaaaatttggagtgatgtattc

SEQ ID NO: 5216657 - DNA, 25 bp, Homo sapien
ttatcttgttcacaagatactgcta

SEQ ID NO: 5216658 - DNA, 25 bp, Homo sapien
atcttgttcacaagatactgctaaa

SEQ ID NO: 5216659 - DNA, 25 bp, Homo sapien
cttgttcacaagatactgctaaaat

SEQ ID NO: 5216660 - DNA, 25 bp, Homo sapien
tgttcacaagatactgctaaaattc

SEQ ID NO: 5216661 - DNA, 25 bp, Homo sapien
gaaaggtcatagctacacagagaga

SEQ ID NO: 5216662 - DNA, 25 bp, Homo sapien
ttttccagactgtgatgtagggagc

SEQ ID NO: 5216663 - DNA, 25 bp, Homo sapien
gagtgccccagattactgcctaaag

SEQ ID NO: 5216664 - DNA, 25 bp, Homo sapien
caaggttgggaatctaaggagcaca

SEQ ID NO: 5216665 - DNA, 25 bp, Homo sapien
cactgcacgcaagttgggcctggtg

SEQ ID NO: 5216666 - DNA, 25 bp, Homo sapien
agtgccacagccattgtccagccat

SEQ ID NO: 5216667 - DNA, 25 bp, Homo sapien
cttatctgcccactgcacgcaagtt

SEQ ID NO: 5216668 - DNA, 25 bp, Homo sapien
gctctcaaggcacttggtgtccagt

SEQ ID NO: 5216669 - DNA, 25 bp, Homo sapien
tttccagtaacttggaccagagaca

SEQ ID NO: 5216670 - DNA, 25 bp, Homo sapien
cttgtagaatctggaacgctgagga

SEQ ID NO: 5216671 - DNA, 25 bp, Homo sapien
tggaccagagacaactgtaaatgtg

SEQ ID NO: 5216672 - DNA, 25 bp, Homo sapien
gaacgctgaggaggtctctttccag

SEQ ID NO: 5216673 - DNA, 25 bp, Homo sapien
tctccacatccagataggaggtctg

SEQ ID NO: 5216674 - DNA, 25 bp, Homo sapien
catccagataggaggtctgcaccat

SEQ ID NO: 5216675 - DNA, 25 bp, Homo sapien
ttcaggtctgcactctccacatcca

SEQ ID NO: 5216676 - DNA, 25 bp, Homo sapien
gacgcttcaggtctgcactctccac

SEQ ID NO: 5216677 - DNA, 25 bp, Homo sapien
atcttccgtattgttgttcatgtcc

SEQ ID NO: 5216678 - DNA, 25 bp, Homo sapien
tgctttcacaaaatcttccgtattg

SEQ ID NO: 5216679 - DNA, 25 bp, Homo sapien
catgtccatgatgcctgggagggca

SEQ ID NO: 5216680 - DNA, 25 bp, Homo sapien
gagggcatgtaggtgtaatccatcc

SEQ ID NO: 5216681 - DNA, 25 bp, Homo sapien
catgttgagctacagctgctacaag

SEQ ID NO: 5216682 - DNA, 25 bp, Homo sapien
tgttgagctacagctgctacaagca

SEQ ID NO: 5216683 - DNA, 25 bp, Homo sapien
atgttgagctacagctgctacaagc

SEQ ID NO: 5216684 - DNA, 25 bp, Homo sapien
tgatgctccgtttgatacccaagag

SEQ ID NO: 5216685 - DNA, 25 bp, Homo sapien
ctggattcaatgatgctccgtttga

SEQ ID NO: 5216686 - DNA, 25 bp, Homo sapien
ttcaatgatgctccgtttgataccc

SEQ ID NO: 5216687 - DNA, 25 bp, Homo sapien
aatgatgctccgtttgatacccaag

SEQ ID NO: 5216688 - DNA, 25 bp, Homo sapien
ggtggatgctctcatccagaacata

SEQ ID NO: 5216689 - DNA, 25 bp, Homo sapien
tgcaccaagtgcagggtggatgctc

SEQ ID NO: 5216690 - DNA, 25 bp, Homo sapien
tgcagggtggatgctctcatccaga

SEQ ID NO: 5216691 - DNA, 25 bp, Homo sapien
caagtgcagggtggatgctctcatc

SEQ ID NO: 5216692 - DNA, 25 bp, Homo sapien
ggagccaatccactgtaactacttg

SEQ ID NO: 5216693 - DNA, 25 bp, Homo sapien
atctttaacttgtcctatggggcct

SEQ ID NO: 5216694 - DNA, 25 bp, Homo sapien
ggtagcacactccatctttaacttg

SEQ ID NO: 5216695 - DNA, 25 bp, Homo sapien
cttcacagcacccattaggtagcac

SEQ ID NO: 5216696 - DNA, 25 bp, Homo sapien
tcagaaacagaaacggtcacctggt

SEQ ID NO: 5216697 - DNA, 25 bp, Homo sapien
cccactcagtaaggatctctggagg

SEQ ID NO: 5216698 - DNA, 25 bp, Homo sapien
tcacctggtgacgttaggaagctca

SEQ ID NO: 5216699 - DNA, 25 bp, Homo sapien
tcaatgtgaaccaatggctagagcc

SEQ ID NO: 5216700 - DNA, 25 bp, Homo sapien
gcagagaaaactttttcctcatcaa

SEQ ID NO: 5216701 - DNA, 25 bp, Homo sapien
tattacctgcaccagatatttcatt

SEQ ID NO: 5216702 - DNA, 25 bp, Homo sapien
tataccagaaagctgaggtgaatgc

SEQ ID NO: 5216703 - DNA, 25 bp, Homo sapien
tctaccaccatctcaatgactatta

SEQ ID NO: 5216704 - DNA, 25 bp, Homo sapien
cagcagcctcaaattcagccacaat

SEQ ID NO: 5216705 - DNA, 25 bp, Homo sapien
agcagcagcctcaaattcagccaca

SEQ ID NO: 5216706 - DNA, 25 bp, Homo sapien
gcagcctcaaattcagccacaatca

SEQ ID NO: 5216707 - DNA, 25 bp, Homo sapien
cttttgatgagcagcagcctcaaat

SEQ ID NO: 5216708 - DNA, 25 bp, Homo sapien
tcttgaccagagaggtaacgatgtt

SEQ ID NO: 5216709 - DNA, 25 bp, Homo sapien
gatttgtgatttgcaagatacagca

SEQ ID NO: 5216710 - DNA, 25 bp, Homo sapien
gagaggtaacgatgttgcaagccaa

SEQ ID NO: 5216711 - DNA, 25 bp, Homo sapien
tcctccacgtggatccttctcttga

SEQ ID NO: 5216712 - DNA, 25 bp, Homo sapien
catgtaacggcagcaggaaaggaga

SEQ ID NO: 5216713 - DNA, 25 bp, Homo sapien
tggtcagcagccaaagttccgcaaa

SEQ ID NO: 5216714 - DNA, 25 bp, Homo sapien
gagatgacaaagaggtctccacaaa

SEQ ID NO: 5216715 - DNA, 25 bp, Homo sapien
tctgtagaccactgtgtaaccttgg

SEQ ID NO: 5216716 - DNA, 25 bp, Homo sapien
atgagcatgggccaccagtcgggag

SEQ ID NO: 5216717 - DNA, 25 bp, Homo sapien
ccatgagcatgggccaccagtcggg

SEQ ID NO: 5216718 - DNA, 25 bp, Homo sapien
tgggccaccagtcgggagagccaca

SEQ ID NO: 5216719 - DNA, 25 bp, Homo sapien
agcatgggccaccagtcgggagagc

SEQ ID NO: 5216720 - DNA, 25 bp, Homo sapien
tcaaaagatgaaaagaccgagttac

SEQ ID NO: 5216721 - DNA, 25 bp, Homo sapien
gtctggtccgataccagaaggcaaa

SEQ ID NO: 5216722 - DNA, 25 bp, Homo sapien
aaaagaacctgataatgtgtattgc

SEQ ID NO: 5216723 - DNA, 25 bp, Homo sapien
tgctgacatcttactgggtgctcat

SEQ ID NO: 5216724 - DNA, 25 bp, Homo sapien
ggtctaattggccaaaatcgacact

SEQ ID NO: 5216725 - DNA, 25 bp, Homo sapien
tcgacactcaattgccccatgacag

SEQ ID NO: 5216726 - DNA, 25 bp, Homo sapien
agtatactaggagagatgcaatttc

SEQ ID NO: 5216727 - DNA, 25 bp, Homo sapien
catgacagtactagggaagtatact

SEQ ID NO: 5216728 - DNA, 25 bp, Homo sapien
tccatgtactactggtcttcctgca

SEQ ID NO: 5216729 - DNA, 25 bp, Homo sapien
ttccatgtactactggtcttcctgc

SEQ ID NO: 5216730 - DNA, 25 bp, Homo sapien
ttcattccaatgcagcaagtgccat

SEQ ID NO: 5216731 - DNA, 25 bp, Homo sapien
tccttctgttgttgactcgtctttc

SEQ ID NO: 5216732 - DNA, 25 bp, Homo sapien
ctgtaaacttcttgttgactcatcg

SEQ ID NO: 5216733 - DNA, 25 bp, Homo sapien
tgttgactcgtctttctcagtgctg

SEQ ID NO: 5216734 - DNA, 25 bp, Homo sapien
gattgtggtaaacgcaccgagtgcc

SEQ ID NO: 5216735 - DNA, 25 bp, Homo sapien
ctgattgtggtaaacgcaccgagtg

SEQ ID NO: 5216736 - DNA, 25 bp, Homo sapien
ttgtggtaaacgcaccgagtgcccc

SEQ ID NO: 5216737 - DNA, 25 bp, Homo sapien
tgtggtaaacgcaccgagtgcccct

SEQ ID NO: 5216738 - DNA, 25 bp, Homo sapien
tgcactgtgaaagtcgacctgactt

SEQ ID NO: 5216739 - DNA, 25 bp, Homo sapien
caccacaggactgctataccaccat

SEQ ID NO: 5216740 - DNA, 25 bp, Homo sapien
ttctcaacacctccatcttgcatct

SEQ ID NO: 5216741 - DNA, 25 bp, Homo sapien
gttctctgagtgcaccacaggactg

SEQ ID NO: 5216742 - DNA, 25 bp, Homo sapien
tcagttctctgagtgcaccacagga

SEQ ID NO: 5216743 - DNA, 25 bp, Homo sapien
tacagccatgtgagaggaccacgtc

SEQ ID NO: 5216744 - DNA, 25 bp, Homo sapien
gtagagaaggccacacacaatctta

SEQ ID NO: 5216745 - DNA, 25 bp, Homo sapien
cgtgttggaccagttaatgctgctg

SEQ ID NO: 5216746 - DNA, 25 bp, Homo sapien
attgccacccaagtagattctgttg

SEQ ID NO: 5216747 - DNA, 25 bp, Homo sapien
cagaccactagagatgattccagag

SEQ ID NO: 5216748 - DNA, 25 bp, Homo sapien
gagttataagccaggtgatgaagtt

SEQ ID NO: 5216749 - DNA, 25 bp, Homo sapien
tcttcagaccactagagatgattcc

SEQ ID NO: 5216750 - DNA, 25 bp, Homo sapien
agatgattccagagttataagccag

SEQ ID NO: 5216751 - DNA, 25 bp, Homo sapien
cagcatgtggtggtagcttcactcc

SEQ ID NO: 5216752 - DNA, 25 bp, Homo sapien
gactactgagaatggatctgtacca

SEQ ID NO: 5216753 - DNA, 25 bp, Homo sapien
tatccactgattcacacggtagctg

SEQ ID NO: 5216754 - DNA, 25 bp, Homo sapien
gcatcatggtgagtacttgagccca

SEQ ID NO: 5216755 - DNA, 25 bp, Homo sapien
caagaatgccaatgtttattgccac

SEQ ID NO: 5216756 - DNA, 25 bp, Homo sapien
gattcttaggcaaacactgtttcca

SEQ ID NO: 5216757 - DNA, 25 bp, Homo sapien
tatggccaaagcaacaaaggcagac

SEQ ID NO: 5216758 - DNA, 25 bp, Homo sapien
tttggtaaatccagtcatgccctta

SEQ ID NO: 5216759 - DNA, 25 bp, Homo sapien
gaataagtagatccaatcatgccca

SEQ ID NO: 5216760 - DNA, 25 bp, Homo sapien
ctgataagagaataagtagatccaa

SEQ ID NO: 5216761 - DNA, 25 bp, Homo sapien
taagagaataagtagatccaatcat

SEQ ID NO: 5216762 - DNA, 25 bp, Homo sapien
gagaataagtagatccaatcatgcc

SEQ ID NO: 5216763 - DNA, 25 bp, Homo sapien
gaatttgtaagctaattggctggaa

SEQ ID NO: 5216764 - DNA, 25 bp, Homo sapien
tcttacatgactacaaaaggcacag

SEQ ID NO: 5216765 - DNA, 25 bp, Homo sapien
cattagtctacatttgctgccataa

SEQ ID NO: 5216766 - DNA, 25 bp, Homo sapien
gtttttctgtacgtaatctgaccta

SEQ ID NO: 5216767 - DNA, 25 bp, Homo sapien
ccactccttgtgtcagatcccgata

SEQ ID NO: 5216768 - DNA, 25 bp, Homo sapien
tccagcagagccagaacataaaggc

SEQ ID NO: 5216769 - DNA, 25 bp, Homo sapien
gtcagatcccgataccttttcttgg

SEQ ID NO: 5216770 - DNA, 25 bp, Homo sapien
gataccttttcttggtccagcagag

SEQ ID NO: 5216771 - DNA, 25 bp, Homo sapien
caataacgggttggtgtataacagt

SEQ ID NO: 5216772 - DNA, 25 bp, Homo sapien
tgcagctcacacaataacgggttgg

SEQ ID NO: 5216773 - DNA, 25 bp, Homo sapien
cacaataacgggttggtgtataaca

SEQ ID NO: 5216774 - DNA, 25 bp, Homo sapien
gctcacacaataacgggttggtgta

SEQ ID NO: 5216775 - DNA, 25 bp, Homo sapien
cttattccttctagtctcctagttt

SEQ ID NO: 5216776 - DNA, 25 bp, Homo sapien
tctcctagttttgactttatgtaag

SEQ ID NO: 5216777 - DNA, 25 bp, Homo sapien
tgctgattactggagtccatgagat

SEQ ID NO: 5216778 - DNA, 25 bp, Homo sapien
ctgattactggagtccatgagatga

SEQ ID NO: 5216779 - DNA, 25 bp, Homo sapien
gtttgtatctgtttggagcagcatt

SEQ ID NO: 5216780 - DNA, 25 bp, Homo sapien
tgtttgtatctgtttggagcagcat

SEQ ID NO: 5216781 - DNA, 25 bp, Homo sapien
tttgtatctgtttggagcagcattt

SEQ ID NO: 5216782 - DNA, 25 bp, Homo sapien
ttcagaagtgtcacttaggcagcaa

SEQ ID NO: 5216783 - DNA, 25 bp, Homo sapien
cgtcggctccccgaagtgttgcttc

SEQ ID NO: 5216784 - DNA, 25 bp, Homo sapien
gcccagcttcaaccaataacttgga

SEQ ID NO: 5216785 - DNA, 25 bp, Homo sapien
gccagtaagagtgaaaaggaacagc

SEQ ID NO: 5216786 - DNA, 25 bp, Homo sapien
aattagagtattgatcttcaataag

SEQ ID NO: 5216787 - DNA, 25 bp, Homo sapien
tatttaggaagaaatatgtgtatgt

SEQ ID NO: 5216788 - DNA, 25 bp, Homo sapien
ttagagtattgatcttcaataagcc

SEQ ID NO: 5216789 - DNA, 25 bp, Homo sapien
agctaattagagtattgatcttcaa

SEQ ID NO: 5216790 - DNA, 25 bp, Homo sapien
ctggatcatcgtaggcttgcttgag

SEQ ID NO: 5216791 - DNA, 25 bp, Homo sapien
caaactgacctggatcatcgtaggc

SEQ ID NO: 5216792 - DNA, 25 bp, Homo sapien
ctgacctggatcatcgtaggcttgc

SEQ ID NO: 5216793 - DNA, 25 bp, Homo sapien
ctgcaaactgacctggatcatcgta

SEQ ID NO: 5216794 - DNA, 25 bp, Homo sapien
ctaactaggtgtgccccagatttgt

SEQ ID NO: 5216795 - DNA, 25 bp, Homo sapien
tctctaactaggtgtgccccagatt

SEQ ID NO: 5216796 - DNA, 25 bp, Homo sapien
taggtgtgccccagatttgttcctt

SEQ ID NO: 5216797 - DNA, 25 bp, Homo sapien
cttctctaactaggtgtgccccaga

SEQ ID NO: 5216798 - DNA, 25 bp, Homo sapien
ggctacaggtgtgaaagtaaatgct

SEQ ID NO: 5216799 - DNA, 25 bp, Homo sapien
gggaacactaaatgcactaaatgtg

SEQ ID NO: 5216800 - DNA, 25 bp, Homo sapien
catatttaggttataccatgccaca

SEQ ID NO: 5216801 - DNA, 25 bp, Homo sapien
tgaatctgctatgcaaggctacagg

SEQ ID NO: 5216802 - DNA, 25 bp, Homo sapien
ggctcgataacgctcaggcttcttt

SEQ ID NO: 5216803 - DNA, 25 bp, Homo sapien
tatttttaccctggctcgataacgc

SEQ ID NO: 5216804 - DNA, 25 bp, Homo sapien
gagaagctgactccatctgacgtca

SEQ ID NO: 5216805 - DNA, 25 bp, Homo sapien
gactccatctgacgtcatattctat

SEQ ID NO: 5216806 - DNA, 25 bp, Homo sapien
gaacactgcctaccaagtttacaat

SEQ ID NO: 5216807 - DNA, 25 bp, Homo sapien
ccagaaggcttttttgaacactgcc

SEQ ID NO: 5216808 - DNA, 25 bp, Homo sapien
ctctttcaatctccataccagaagg

SEQ ID NO: 5216809 - DNA, 25 bp, Homo sapien
taatgttactggaactaaagctctg

SEQ ID NO: 5216810 - DNA, 25 bp, Homo sapien
tcctgaacatcagttgttgagcggg

SEQ ID NO: 5216811 - DNA, 25 bp, Homo sapien
agccagaattatcaccagctgtttc

SEQ ID NO: 5216812 - DNA, 25 bp, Homo sapien
cgattgccttcctgctcctgaacat

SEQ ID NO: 5216813 - DNA, 25 bp, Homo sapien
gttgttgagcgggggaaagaagcca

SEQ ID NO: 5216814 - DNA, 25 bp, Homo sapien
tttgaggccacttctgggaagtcag

SEQ ID NO: 5216815 - DNA, 25 bp, Homo sapien
tgggaagtcagccttccagtccgct

SEQ ID NO: 5216816 - DNA, 25 bp, Homo sapien
tccgctcctttttgcgtgggagtag

SEQ ID NO: 5216817 - DNA, 25 bp, Homo sapien
tgactgtcctccctttgaggccact

SEQ ID NO: 5216818 - DNA, 25 bp, Homo sapien
tgtgtgacctccattgaaaacaaaa

SEQ ID NO: 5216819 - DNA, 25 bp, Homo sapien
caatgttgatggctatatatgtgtg

SEQ ID NO: 5216820 - DNA, 25 bp, Homo sapien
ctaaggagcaatcccttgtagaggc

SEQ ID NO: 5216821 - DNA, 25 bp, Homo sapien
caacagatggcttgtgccattttga

SEQ ID NO: 5216822 - DNA, 25 bp, Homo sapien
aagggcaagccagttgctccccaga

SEQ ID NO: 5216823 - DNA, 25 bp, Homo sapien
gccagttgctccccagaattgccat

SEQ ID NO: 5216824 - DNA, 25 bp, Homo sapien
gggcaagccagttgctccccagaat

SEQ ID NO: 5216825 - DNA, 25 bp, Homo sapien
gcaagccagttgctccccagaattg

SEQ ID NO: 5216826 - DNA, 25 bp, Homo sapien
aagggcagataaaaaattctcgtgt

SEQ ID NO: 5216827 - DNA, 25 bp, Homo sapien
aaaaaattctcgtgtgacctttctg

SEQ ID NO: 5216828 - DNA, 25 bp, Homo sapien
tctgattacatctcttgagtgtgta

SEQ ID NO: 5216829 - DNA, 25 bp, Homo sapien
tctcgtgtgacctttctgattacat

SEQ ID NO: 5216830 - DNA, 25 bp, Homo sapien
taacgagccggattctcatttttct

SEQ ID NO: 5216831 - DNA, 25 bp, Homo sapien
tggatccctcctctatgtggagcat

SEQ ID NO: 5216832 - DNA, 25 bp, Homo sapien
ccatctttaaaataacgagccggat

SEQ ID NO: 5216833 - DNA, 25 bp, Homo sapien
taaatgtcagccctggacctagagg

SEQ ID NO: 5216834 - DNA, 25 bp, Homo sapien
ctggcaccttgttcctatatatgtt

SEQ ID NO: 5216835 - DNA, 25 bp, Homo sapien
tcagagcgtaatacaaagcaggttt

SEQ ID NO: 5216836 - DNA, 25 bp, Homo sapien
tctaagaagatgcaaattgatgtca

SEQ ID NO: 5216837 - DNA, 25 bp, Homo sapien
ctgaatgattaaggcctgacaagtg

SEQ ID NO: 5216838 - DNA, 25 bp, Homo sapien
aacccagcaggacagtcattatgcc

SEQ ID NO: 5216839 - DNA, 25 bp, Homo sapien
gggtcagcccctgagactgcaatca

SEQ ID NO: 5216840 - DNA, 25 bp, Homo sapien
tccaggtacagggttcaagctgcca

SEQ ID NO: 5216841 - DNA, 25 bp, Homo sapien
gaccaaagtctgatatccaagggca

SEQ ID NO: 5216842 - DNA, 25 bp, Homo sapien
ccttttcagtacgtcttgtagtggt

SEQ ID NO: 5216843 - DNA, 25 bp, Homo sapien
tcagtacgtcttgtagtggttgtaa

SEQ ID NO: 5216844 - DNA, 25 bp, Homo sapien
aaccttttcagtacgtcttgtagtg

SEQ ID NO: 5216845 - DNA, 25 bp, Homo sapien
gtggttgtaaaatgagtgacaaaat

SEQ ID NO: 5216846 - DNA, 25 bp, Homo sapien
cattcttctcagtggtacgtttgat

SEQ ID NO: 5216847 - DNA, 25 bp, Homo sapien
ggtacgtttgatgtaatatgttcat

SEQ ID NO: 5216848 - DNA, 25 bp, Homo sapien
tatgtttcaggatgttgtctaggaa

SEQ ID NO: 5216849 - DNA, 25 bp, Homo sapien
tcttatgtttcaggatgttgtctag

SEQ ID NO: 5216850 - DNA, 25 bp, Homo sapien
aatatgcctcccacgtgggaaactg

SEQ ID NO: 5216851 - DNA, 25 bp, Homo sapien
tgcctcccacgtgggaaactgttaa

SEQ ID NO: 5216852 - DNA, 25 bp, Homo sapien
cgtcaatatgcctcccacgtgggaa

SEQ ID NO: 5216853 - DNA, 25 bp, Homo sapien
gtcaatatgcctcccacgtgggaaa

SEQ ID NO: 5216854 - DNA, 25 bp, Homo sapien
cctaaggctactgtgtacatattcc

SEQ ID NO: 5216855 - DNA, 25 bp, Homo sapien
caaagaaagaattcacggaggagac

SEQ ID NO: 5216856 - DNA, 25 bp, Homo sapien
gaggagactgtttccatgtgagctg

SEQ ID NO: 5216857 - DNA, 25 bp, Homo sapien
gaaagaattcaggttccactcaagg

SEQ ID NO: 5216858 - DNA, 25 bp, Homo sapien
cgaggaattatcatgttacaagtaa

SEQ ID NO: 5216859 - DNA, 25 bp, Homo sapien
ataccccagtgttcacacctcgagg

SEQ ID NO: 5216860 - DNA, 25 bp, Homo sapien
ccagtgttcacacctcgaggaatta

SEQ ID NO: 5216861 - DNA, 25 bp, Homo sapien
cacctcgaggaattatcatgttaca

SEQ ID NO: 5216862 - DNA, 25 bp, Homo sapien
caggttcattctgccgccatatacg

SEQ ID NO: 5216863 - DNA, 25 bp, Homo sapien
gtgaagactttgaagttgcaggttc

SEQ ID NO: 5216864 - DNA, 25 bp, Homo sapien
taggcacatgacagaccaattagtg

SEQ ID NO: 5216865 - DNA, 25 bp, Homo sapien
ccaaaattcctagggttgactgtag

SEQ ID NO: 5216866 - DNA, 25 bp, Homo sapien
ctgtttagaaagttcacacttgaag

SEQ ID NO: 5216867 - DNA, 25 bp, Homo sapien
gagcatttccacaacccgataccag

SEQ ID NO: 5216868 - DNA, 25 bp, Homo sapien
caatgagcatttccacaacccgata

SEQ ID NO: 5216869 - DNA, 25 bp, Homo sapien
ggcagggtctgctctggaacagctg

SEQ ID NO: 5216870 - DNA, 25 bp, Homo sapien
gaacagctgttgtttggtgactgtt

SEQ ID NO: 5216871 - DNA, 25 bp, Homo sapien
gcagactgtatcttcagtgcagtaa

SEQ ID NO: 5216872 - DNA, 25 bp, Homo sapien
tatcaacaacatgctttagcacttt

SEQ ID NO: 5216873 - DNA, 25 bp, Homo sapien
gcactttttgaaatggtgctttgag

SEQ ID NO: 5216874 - DNA, 25 bp, Homo sapien
aatggtgctttgaggcagataaatg

SEQ ID NO: 5216875 - DNA, 25 bp, Homo sapien
tttctgtcaactaataaaattgtgt

SEQ ID NO: 5216876 - DNA, 25 bp, Homo sapien
gatgtgaagtttaagtcaaaggtta

SEQ ID NO: 5216877 - DNA, 25 bp, Homo sapien
tctccattaaattaactgtgtatgt

SEQ ID NO: 5216878 - DNA, 25 bp, Homo sapien
gtgttaattagcatagatgtgaagt

SEQ ID NO: 5216879 - DNA, 25 bp, Homo sapien
acttcttgtcgcattatgtgtctta

SEQ ID NO: 5216880 - DNA, 25 bp, Homo sapien
tcaaattttacttcttgtcgcatta

SEQ ID NO: 5216881 - DNA, 25 bp, Homo sapien
taattccattctcatcaaaaccttg

SEQ ID NO: 5216882 - DNA, 25 bp, Homo sapien
tgtgtcttataattccattctcatc

SEQ ID NO: 5216883 - DNA, 25 bp, Homo sapien
cctctgtcattagaagaaatgtgac

SEQ ID NO: 5216884 - DNA, 25 bp, Homo sapien
tcagcattaaatggcagatactcca

SEQ ID NO: 5216885 - DNA, 25 bp, Homo sapien
gtgttgtttcagcattaaatggcag

SEQ ID NO: 5216886 - DNA, 25 bp, Homo sapien
ccagttctcttcgagtttgtggtat

SEQ ID NO: 5216887 - DNA, 25 bp, Homo sapien
atcctggtatgggataaattctgca

SEQ ID NO: 5216888 - DNA, 25 bp, Homo sapien
tgtttcatagtacatcgtaaccttt

SEQ ID NO: 5216889 - DNA, 25 bp, Homo sapien
cactgtctaatgaagccagagtctt

SEQ ID NO: 5216890 - DNA, 25 bp, Homo sapien
gcgtccctctgcaataatagtcact

SEQ ID NO: 5216891 - DNA, 25 bp, Homo sapien
gagacattggcatttgcgtccctct

SEQ ID NO: 5216892 - DNA, 25 bp, Homo sapien
tcgaaactcttttggactgtgtttc

SEQ ID NO: 5216893 - DNA, 25 bp, Homo sapien
aatctcgaaactcttttggactgtg

SEQ ID NO: 5216894 - DNA, 25 bp, Homo sapien
tctcgaaactcttttggactgtgtt

SEQ ID NO: 5216895 - DNA, 25 bp, Homo sapien
aaaatctcgaaactcttttggactg

SEQ ID NO: 5216896 - DNA, 25 bp, Homo sapien
aaatttatacaagcctccttttgct

SEQ ID NO: 5216897 - DNA, 25 bp, Homo sapien
atatcactgaataccatttcataca

SEQ ID NO: 5216898 - DNA, 25 bp, Homo sapien
catcgtgtggcgtctatatcactga

SEQ ID NO: 5216899 - DNA, 25 bp, Homo sapien
tttgctgtgaaaattgtacatcgtg

SEQ ID NO: 5216900 - DNA, 25 bp, Homo sapien
tttcagagtcagggaataagaagcc

SEQ ID NO: 5216901 - DNA, 25 bp, Homo sapien
atttcagagtcagggaataagaagc

SEQ ID NO: 5216902 - DNA, 25 bp, Homo sapien
taatcatagattcccaagaaacaat

SEQ ID NO: 5216903 - DNA, 25 bp, Homo sapien
aagaaacaatacacagttgctgttt

SEQ ID NO: 5216904 - DNA, 25 bp, Homo sapien
acagttgctgttttggaatggttca

SEQ ID NO: 5216905 - DNA, 25 bp, Homo sapien
gttgtaataaccaccagcatttgct

SEQ ID NO: 5216906 - DNA, 25 bp, Homo sapien
tctgggtctttcacaagggagagct

SEQ ID NO: 5216907 - DNA, 25 bp, Homo sapien
tctctgggtctttcacaagggagag

SEQ ID NO: 5216908 - DNA, 25 bp, Homo sapien
tctttcacaagggagagcttgggcc

SEQ ID NO: 5216909 - DNA, 25 bp, Homo sapien
tgggtctttcacaagggagagcttg

SEQ ID NO: 5216910 - DNA, 25 bp, Homo sapien
ttgggtcagaagcttccaagggagc

SEQ ID NO: 5216911 - DNA, 25 bp, Homo sapien
accactgggttagacagaaaagtca

SEQ ID NO: 5216912 - DNA, 25 bp, Homo sapien
caagggagccttcgttgcactaatt

SEQ ID NO: 5216913 - DNA, 25 bp, Homo sapien
gaatgaaagtgcataaaccactggg

SEQ ID NO: 5216914 - DNA, 25 bp, Homo sapien
ccttggcacattaatgaattctgtc

SEQ ID NO: 5216915 - DNA, 25 bp, Homo sapien
tattgtgacgtacagtcctggaaag

SEQ ID NO: 5216916 - DNA, 25 bp, Homo sapien
gttgtagacaagttggccacatcct

SEQ ID NO: 5216917 - DNA, 25 bp, Homo sapien
gaaacaggccatgtgtattgtgacg

SEQ ID NO: 5216918 - DNA, 25 bp, Homo sapien
tcacatctttgacatcatggtccat

SEQ ID NO: 5216919 - DNA, 25 bp, Homo sapien
ttcacatctttgacatcatggtcca

SEQ ID NO: 5216920 - DNA, 25 bp, Homo sapien
cggtcagggacagctctgtaaaatt

SEQ ID NO: 5216921 - DNA, 25 bp, Homo sapien
ggctgaatcctagtctcatagttta

SEQ ID NO: 5216922 - DNA, 25 bp, Homo sapien
tctggctgaatcctagtctcatagt

SEQ ID NO: 5216923 - DNA, 25 bp, Homo sapien
ttcattgctatagtgacatcggtca

SEQ ID NO: 5216924 - DNA, 25 bp, Homo sapien
cagtagtggacccagaacatcctgc

SEQ ID NO: 5216925 - DNA, 25 bp, Homo sapien
gaacatcctgctctccatgataaac

SEQ ID NO: 5216926 - DNA, 25 bp, Homo sapien
ctaacagtagtggacccagaacatc

SEQ ID NO: 5216927 - DNA, 25 bp, Homo sapien
tgataaacttccaggccagaaactt

SEQ ID NO: 5216928 - DNA, 25 bp, Homo sapien
atttcacagtaacagtagcggacct

SEQ ID NO: 5216929 - DNA, 25 bp, Homo sapien
aactgccatgtttctcctggaaatc

SEQ ID NO: 5216930 - DNA, 25 bp, Homo sapien
gcttgtaaatatacagctctcttgg

SEQ ID NO: 5216931 - DNA, 25 bp, Homo sapien
cctggaaatcaatattccactggct

SEQ ID NO: 5216932 - DNA, 25 bp, Homo sapien
tatacagggccattagctgtgcaaa

SEQ ID NO: 5216933 - DNA, 25 bp, Homo sapien
gaagtgctagcttcaccccgatcat

SEQ ID NO: 5216934 - DNA, 25 bp, Homo sapien
ttcttccacttctacagacatctct

SEQ ID NO: 5216935 - DNA, 25 bp, Homo sapien
gatcattttgctccttacttgttcc

SEQ ID NO: 5216936 - DNA, 25 bp, Homo sapien
gtgctagcttcaccccgatcatttg

SEQ ID NO: 5216937 - DNA, 25 bp, Homo sapien
aattgaaaatgatggaactgctgac

SEQ ID NO: 5216938 - DNA, 25 bp, Homo sapien
cacaattgaaaatgatggaactgct

SEQ ID NO: 5216939 - DNA, 25 bp, Homo sapien
acaattgaaaatgatggaactgctg

SEQ ID NO: 5216940 - DNA, 25 bp, Homo sapien
caattgaaaatgatggaactgctga

SEQ ID NO: 5216941 - DNA, 25 bp, Homo sapien
gaatgaaaagccctcttccaccttc

SEQ ID NO: 5216942 - DNA, 25 bp, Homo sapien
atggtatataagatactggatggcc

SEQ ID NO: 5216943 - DNA, 25 bp, Homo sapien
cagctagagaatggtatataagata

SEQ ID NO: 5216944 - DNA, 25 bp, Homo sapien
tatctcttaccataggataacattt

SEQ ID NO: 5216945 - DNA, 25 bp, Homo sapien
ggttaacttccacattaagacactg

SEQ ID NO: 5216946 - DNA, 25 bp, Homo sapien
aaagtgtgctagaaggctgtttttg

SEQ ID NO: 5216947 - DNA, 25 bp, Homo sapien
ttaacttccacattaagacactgaa

SEQ ID NO: 5216948 - DNA, 25 bp, Homo sapien
aaaaagtgtgctagaaggctgtttt

SEQ ID NO: 5216949 - DNA, 25 bp, Homo sapien
tagctctgcaactggtcctctatga

SEQ ID NO: 5216950 - DNA, 25 bp, Homo sapien
ggtgacttcttgcactgttccctga

SEQ ID NO: 5216951 - DNA, 25 bp, Homo sapien
tcaattttggctggtacaacccaca

SEQ ID NO: 5216952 - DNA, 25 bp, Homo sapien
tgttccctgaagcaaaagatagctc

SEQ ID NO: 5216953 - DNA, 25 bp, Homo sapien
gtgttgacctctgatccacagcctt

SEQ ID NO: 5216954 - DNA, 25 bp, Homo sapien
aggtgttgacctctgatccacagcc

SEQ ID NO: 5216955 - DNA, 25 bp, Homo sapien
tgttgacctctgatccacagccttc

SEQ ID NO: 5216956 - DNA, 25 bp, Homo sapien
ggtgttgacctctgatccacagcct

SEQ ID NO: 5216957 - DNA, 25 bp, Homo sapien
gctggcagcttggtacttctgattt

SEQ ID NO: 5216958 - DNA, 25 bp, Homo sapien
ggtacttctgatttcccagcagatg

SEQ ID NO: 5216959 - DNA, 25 bp, Homo sapien
gcagcttggtacttctgatttccca

SEQ ID NO: 5216960 - DNA, 25 bp, Homo sapien
tctgatttcccagcagatgagatgt

SEQ ID NO: 5216961 - DNA, 25 bp, Homo sapien
tcaaggagcatgataccactgagtg

SEQ ID NO: 5216962 - DNA, 25 bp, Homo sapien
aaggagcatgataccactgagtggc

SEQ ID NO: 5216963 - DNA, 25 bp, Homo sapien
caaggagcatgataccactgagtgg

SEQ ID NO: 5216964 - DNA, 25 bp, Homo sapien
aggagcatgataccactgagtggca

SEQ ID NO: 5216965 - DNA, 25 bp, Homo sapien
ctgtctggatacccatggactgttt

SEQ ID NO: 5216966 - DNA, 25 bp, Homo sapien
atggactgtttgcgtttggctctgg

SEQ ID NO: 5216967 - DNA, 25 bp, Homo sapien
catggactgtttgcgtttggctctg

SEQ ID NO: 5216968 - DNA, 25 bp, Homo sapien
cccatggactgtttgcgtttggctc

SEQ ID NO: 5216969 - DNA, 25 bp, Homo sapien
cctcctggccatttaatagtggaat

SEQ ID NO: 5216970 - DNA, 25 bp, Homo sapien
tgtgatctataagaatcccatgaac

SEQ ID NO: 5216971 - DNA, 25 bp, Homo sapien
cctttctgcacaaattgtcttaggc

SEQ ID NO: 5216972 - DNA, 25 bp, Homo sapien
atagtggaatagtggttcagtttca

SEQ ID NO: 5216973 - DNA, 25 bp, Homo sapien
acctgccctagcaaccgagtctttc

SEQ ID NO: 5216974 - DNA, 25 bp, Homo sapien
cacctgccctagcaaccgagtcttt

SEQ ID NO: 5216975 - DNA, 25 bp, Homo sapien
ttcacctgccctagcaaccgagtct

SEQ ID NO: 5216976 - DNA, 25 bp, Homo sapien
cttcacctgccctagcaaccgagtc

SEQ ID NO: 5216977 - DNA, 25 bp, Homo sapien
tctcccaggtcggaatcaaggaatg

SEQ ID NO: 5216978 - DNA, 25 bp, Homo sapien
caggtcggaatcaaggaatgtcatg

SEQ ID NO: 5216979 - DNA, 25 bp, Homo sapien
cccaggtcggaatcaaggaatgtca

SEQ ID NO: 5216980 - DNA, 25 bp, Homo sapien
acattctcccaggtcggaatcaagg

SEQ ID NO: 5216981 - DNA, 25 bp, Homo sapien
tccaccttggatggcttgcactgca

SEQ ID NO: 5216982 - DNA, 25 bp, Homo sapien
cacgcgttcagctggtgtcctttga

SEQ ID NO: 5216983 - DNA, 25 bp, Homo sapien
cgcgttcagctggtgtcctttgact

SEQ ID NO: 5216984 - DNA, 25 bp, Homo sapien
cgttcagctggtgtcctttgactgc

SEQ ID NO: 5216985 - DNA, 25 bp, Homo sapien
ttaactcagctttatcaatcagttt

SEQ ID NO: 5216986 - DNA, 25 bp, Homo sapien
caggggcgatgctatctggtcaaaa

SEQ ID NO: 5216987 - DNA, 25 bp, Homo sapien
gagattccctggtagtcctccgtac

SEQ ID NO: 5216988 - DNA, 25 bp, Homo sapien
gggactttgttgtctaggagattcc

SEQ ID NO: 5216989 - DNA, 25 bp, Homo sapien
tggtagtcctccgtacccaaatgcc

SEQ ID NO: 5216990 - DNA, 25 bp, Homo sapien
ttagtctgtatcatggaagacggcc

SEQ ID NO: 5216991 - DNA, 25 bp, Homo sapien
cacagttcagaggagaggatgaaac

SEQ ID NO: 5216992 - DNA, 25 bp, Homo sapien
cctcacagttcagaggagaggatga

SEQ ID NO: 5216993 - DNA, 25 bp, Homo sapien
aagacggcctgagagatggataggg

SEQ ID NO: 5216994 - DNA, 25 bp, Homo sapien
ggctgactgcagaccaattgtttct

SEQ ID NO: 5216995 - DNA, 25 bp, Homo sapien
gatttggaagttaatgcctcattca

SEQ ID NO: 5216996 - DNA, 25 bp, Homo sapien
ggtcagagatttggaagttaatgcc

SEQ ID NO: 5216997 - DNA, 25 bp, Homo sapien
cagtgtgggaaaagtaacactgtgc

SEQ ID NO: 5216998 - DNA, 25 bp, Homo sapien
atggagaataattgctaacctgcct

SEQ ID NO: 5216999 - DNA, 25 bp, Homo sapien
tggagaataattgctaacctgcctt

SEQ ID NO: 5217000 - DNA, 25 bp, Homo sapien
gaataattgctaacctgcctttctc

SEQ ID NO: 5217001 - DNA, 25 bp, Homo sapien
gagaataattgctaacctgcctttc

SEQ ID NO: 5217002 - DNA, 25 bp, Homo sapien
ctcacaaaacccgtgtattctggtg

SEQ ID NO: 5217003 - DNA, 25 bp, Homo sapien
tttctcacaaaacccgtgtattctg

SEQ ID NO: 5217004 - DNA, 25 bp, Homo sapien
aacccgtgtattctggtgatacttg

SEQ ID NO: 5217005 - DNA, 25 bp, Homo sapien
caaaacccgtgtattctggtgatac

SEQ ID NO: 5217006 - DNA, 25 bp, Homo sapien
ttacggcttcatgagttaggttcag

SEQ ID NO: 5217007 - DNA, 25 bp, Homo sapien
gtcgaatatcatttacggcttcatg

SEQ ID NO: 5217008 - DNA, 25 bp, Homo sapien
aaaaatgtcgaatatcatttacggc

SEQ ID NO: 5217009 - DNA, 25 bp, Homo sapien
tgagttaggttcaggagggttactc

SEQ ID NO: 5217010 - DNA, 25 bp, Homo sapien
tcaaaaagtacttgaaagctaccca

SEQ ID NO: 5217011 - DNA, 25 bp, Homo sapien
tcctcgatggagttagggagattga

SEQ ID NO: 5217012 - DNA, 25 bp, Homo sapien
tttttcctcgatggagttagggaga

SEQ ID NO: 5217013 - DNA, 25 bp, Homo sapien
gctacccatgcaacagtgtgacggg

SEQ ID NO: 5217014 - DNA, 25 bp, Homo sapien
agtaaagcggccttgagtagagtta

SEQ ID NO: 5217015 - DNA, 25 bp, Homo sapien
cggccttgagtagagttattattaa

SEQ ID NO: 5217016 - DNA, 25 bp, Homo sapien
taaagcggccttgagtagagttatt

SEQ ID NO: 5217017 - DNA, 25 bp, Homo sapien
atgccttttgatgccccttacagtg

SEQ ID NO: 5217018 - DNA, 25 bp, Homo sapien
gagtaccgcaggaatcttcactggg

SEQ ID NO: 5217019 - DNA, 25 bp, Homo sapien
ctttatgttgggtggttgagcttcc

SEQ ID NO: 5217020 - DNA, 25 bp, Homo sapien
catagaacaatatgatttccctggg

SEQ ID NO: 5217021 - DNA, 25 bp, Homo sapien
gcatagtaatgtccctggcctctta

SEQ ID NO: 5217022 - DNA, 25 bp, Homo sapien
tgtaggtggtggtccctttgaggac

SEQ ID NO: 5217023 - DNA, 25 bp, Homo sapien
tggtggtccctttgaggaccgactc

SEQ ID NO: 5217024 - DNA, 25 bp, Homo sapien
ttccatccaagccctaaactagagc

SEQ ID NO: 5217025 - DNA, 25 bp, Homo sapien
gaggaccgactctccaccgtgctgt

SEQ ID NO: 5217026 - DNA, 25 bp, Homo sapien
tgatgctgtacttggttacttagtt

SEQ ID NO: 5217027 - DNA, 25 bp, Homo sapien
gctgtacttggttacttagtttgat

SEQ ID NO: 5217028 - DNA, 25 bp, Homo sapien
tattgaccatttgagtataaaaata

SEQ ID NO: 5217029 - DNA, 25 bp, Homo sapien
tacttggttacttagtttgatgtat

SEQ ID NO: 5217030 - DNA, 25 bp, Homo sapien
attattatcacattcagggactctt

SEQ ID NO: 5217031 - DNA, 25 bp, Homo sapien
ttagttattatcattgctatcagca

SEQ ID NO: 5217032 - DNA, 25 bp, Homo sapien
cattgctatcagcatcattattatt

SEQ ID NO: 5217033 - DNA, 25 bp, Homo sapien
cattcagggactctttccagccaga

SEQ ID NO: 5217034 - DNA, 25 bp, Homo sapien
tgtgtgattacagcactaaggatca

SEQ ID NO: 5217035 - DNA, 25 bp, Homo sapien
cctttctaagagattggcaccattg

SEQ ID NO: 5217036 - DNA, 25 bp, Homo sapien
tacagcactaaggatcacattggag

SEQ ID NO: 5217037 - DNA, 25 bp, Homo sapien
tgagcactaaggaccacattggagt

SEQ ID NO: 5217038 - DNA, 25 bp, Homo sapien
aaatttcatgcgtgtccatgtgaag

SEQ ID NO: 5217039 - DNA, 25 bp, Homo sapien
ttctcacagagcaaagaacaggagt

SEQ ID NO: 5217040 - DNA, 25 bp, Homo sapien
accaaatttcatgcgtgtccatgtg

SEQ ID NO: 5217041 - DNA, 25 bp, Homo sapien
ctcacagagcaaagaacaggagtac

SEQ ID NO: 5217042 - DNA, 25 bp, Homo sapien
aaggactggccatttacacttcttg

SEQ ID NO: 5217043 - DNA, 25 bp, Homo sapien
tggccatttacacttcttgtgtggt

SEQ ID NO: 5217044 - DNA, 25 bp, Homo sapien
tacgtcaggccatctgggcatatac

SEQ ID NO: 5217045 - DNA, 25 bp, Homo sapien
gactggccatttacacttcttgtgt

SEQ ID NO: 5217046 - DNA, 25 bp, Homo sapien
agaggctcggcccacacttgtgcac

SEQ ID NO: 5217047 - DNA, 25 bp, Homo sapien
ttttctgattagtaccaaagcgcag

SEQ ID NO: 5217048 - DNA, 25 bp, Homo sapien
gctcggcccacacttgtgcacaagt

SEQ ID NO: 5217049 - DNA, 25 bp, Homo sapien
taccaaagcgcagaacgggcaagga

SEQ ID NO: 5217050 - DNA, 25 bp, Homo sapien
tatagtccatggctgtcattaccag

SEQ ID NO: 5217051 - DNA, 25 bp, Homo sapien
ggaccagtaatagccactcctcagg

SEQ ID NO: 5217052 - DNA, 25 bp, Homo sapien
ccagattttgggacttcttggacca

SEQ ID NO: 5217053 - DNA, 25 bp, Homo sapien
gggccaataaggacttgtcaagttc

SEQ ID NO: 5217054 - DNA, 25 bp, Homo sapien
caaggtggttcatctatcgatggca

SEQ ID NO: 5217055 - DNA, 25 bp, Homo sapien
tttaatcagaaagtccatggttgct

SEQ ID NO: 5217056 - DNA, 25 bp, Homo sapien
cagggagaagacatgttgcaataca

SEQ ID NO: 5217057 - DNA, 25 bp, Homo sapien
ggttgtttgcagttagccctggccc

SEQ ID NO: 5217058 - DNA, 25 bp, Homo sapien
ccaagtcttctcatggattgtgttt

SEQ ID NO: 5217059 - DNA, 25 bp, Homo sapien
cccaagtcttctcatggattgtgtt

SEQ ID NO: 5217060 - DNA, 25 bp, Homo sapien
caagtcttctcatggattgtgtttg

SEQ ID NO: 5217061 - DNA, 25 bp, Homo sapien
aagtcttctcatggattgtgtttgt

SEQ ID NO: 5217062 - DNA, 25 bp, Homo sapien
catctctttcccctgaagtaaagca

SEQ ID NO: 5217063 - DNA, 25 bp, Homo sapien
tcccctgaagtaaagcatctcttcc

SEQ ID NO: 5217064 - DNA, 25 bp, Homo sapien
tttcatctctttcccctgaagtaaa

SEQ ID NO: 5217065 - DNA, 25 bp, Homo sapien
tctttcccctgaagtaaagcatctc

SEQ ID NO: 5217066 - DNA, 25 bp, Homo sapien
tccagtgtagagttgttggagcaca

SEQ ID NO: 5217067 - DNA, 25 bp, Homo sapien
gtagagttgttggagcacagcctgc

SEQ ID NO: 5217068 - DNA, 25 bp, Homo sapien
gctccagtgtagagttgttggagca

SEQ ID NO: 5217069 - DNA, 25 bp, Homo sapien
cagtgtagagttgttggagcacagc

SEQ ID NO: 5217070 - DNA, 25 bp, Homo sapien
catctaagagggaaattgactggtt

SEQ ID NO: 5217071 - DNA, 25 bp, Homo sapien
cagtcatctgaatgcctaatttgga

SEQ ID NO: 5217072 - DNA, 25 bp, Homo sapien
cacggttcgtgctctacctcatgac

SEQ ID NO: 5217073 - DNA, 25 bp, Homo sapien
gactggttaaccttatcctcctgaa

SEQ ID NO: 5217074 - DNA, 25 bp, Homo sapien
tttggtaggttataagatgggcctg

SEQ ID NO: 5217075 - DNA, 25 bp, Homo sapien
tgcccaatactctcaatttcagctg

SEQ ID NO: 5217076 - DNA, 25 bp, Homo sapien
aatttcagctgccaccaaagaggac

SEQ ID NO: 5217077 - DNA, 25 bp, Homo sapien
gggcctgctgcccaatactctcaat

SEQ ID NO: 5217078 - DNA, 25 bp, Homo sapien
gctgctgggtgtcctaggttaagat

SEQ ID NO: 5217079 - DNA, 25 bp, Homo sapien
gattttggaggcagtgtgtagtgca

SEQ ID NO: 5217080 - DNA, 25 bp, Homo sapien
gagcctgaaagacttgcgttcagat

SEQ ID NO: 5217081 - DNA, 25 bp, Homo sapien
tgcgttcagatcatggttccttcac

SEQ ID NO: 5217082 - DNA, 25 bp, Homo sapien
gcttgacattgatgcagggagatta

SEQ ID NO: 5217083 - DNA, 25 bp, Homo sapien
tgactcagccttttagttggagtca

SEQ ID NO: 5217084 - DNA, 25 bp, Homo sapien
cattgatgcagggagattattttcc

SEQ ID NO: 5217085 - DNA, 25 bp, Homo sapien
tttagtgcacacaagcagcttgaca

SEQ ID NO: 5217086 - DNA, 25 bp, Homo sapien
gggagcggagcatgaatcccaatgt

SEQ ID NO: 5217087 - DNA, 25 bp, Homo sapien
acttgctttccgtatttttcactct

SEQ ID NO: 5217088 - DNA, 25 bp, Homo sapien
cgaacccctcaggtgagaaacttgc

SEQ ID NO: 5217089 - DNA, 25 bp, Homo sapien
aatgtgagcatggtctcctcggcct

SEQ ID NO: 5217090 - DNA, 25 bp, Homo sapien
tgaaatacttgtaggaggcacctgg

SEQ ID NO: 5217091 - DNA, 25 bp, Homo sapien
gacttcatatcggagaaccctaagg

SEQ ID NO: 5217092 - DNA, 25 bp, Homo sapien
tctgcgtaaggaagaagaccctcgg

SEQ ID NO: 5217093 - DNA, 25 bp, Homo sapien
gttcttgacatcacagcgagctggt

SEQ ID NO: 5217094 - DNA, 25 bp, Homo sapien
tatcccagattataggtccacgcca

SEQ ID NO: 5217095 - DNA, 25 bp, Homo sapien
gcagagttggaaatgcttaccacca

SEQ ID NO: 5217096 - DNA, 25 bp, Homo sapien
tgaaagcctgcgtctgctgttaggc

SEQ ID NO: 5217097 - DNA, 25 bp, Homo sapien
taacctgtggccacaaagtgagatg

SEQ ID NO: 5217098 - DNA, 25 bp, Homo sapien
gtgggagtccatgctgatgacactc

SEQ ID NO: 5217099 - DNA, 25 bp, Homo sapien
tgggagtccatgctgatgacactca

SEQ ID NO: 5217100 - DNA, 25 bp, Homo sapien
gggagtccatgctgatgacactcat

SEQ ID NO: 5217101 - DNA, 25 bp, Homo sapien
tgtctccaggagattaggattccag

SEQ ID NO: 5217102 - DNA, 25 bp, Homo sapien
ggagattaggattccagtggtcatc

SEQ ID NO: 5217103 - DNA, 25 bp, Homo sapien
cgttaatagcgcaaagcagaagact

SEQ ID NO: 5217104 - DNA, 25 bp, Homo sapien
cagctagttagggaacagccgtact

SEQ ID NO: 5217105 - DNA, 25 bp, Homo sapien
tcttggattctaaacttcttagtta

SEQ ID NO: 5217106 - DNA, 25 bp, Homo sapien
tgttttgtctaaagtattggttgca

SEQ ID NO: 5217107 - DNA, 25 bp, Homo sapien
gcttggggtcgctgatggaggtggt

SEQ ID NO: 5217108 - DNA, 25 bp, Homo sapien
taacttgtataaggggcctgagatc

SEQ ID NO: 5217109 - DNA, 25 bp, Homo sapien
gtttcattagaatttgagctggtga

SEQ ID NO: 5217110 - DNA, 25 bp, Homo sapien
tgtttcattagaatttgagctggtg

SEQ ID NO: 5217111 - DNA, 25 bp, Homo sapien
gaagtggtctttggtacctcagaga

SEQ ID NO: 5217112 - DNA, 25 bp, Homo sapien
tggtctttggtacctcagagaaacc

SEQ ID NO: 5217113 - DNA, 25 bp, Homo sapien
cagaagaagtggtctttggtacctc

SEQ ID NO: 5217114 - DNA, 25 bp, Homo sapien
gaagaagtggtctttggtacctcag

SEQ ID NO: 5217115 - DNA, 25 bp, Homo sapien
tggagttctgatcaacgaggcacaa

SEQ ID NO: 5217116 - DNA, 25 bp, Homo sapien
ttttttgcgaagaagcaaggtttgc

SEQ ID NO: 5217117 - DNA, 25 bp, Homo sapien
cgaggcacaaatgtactcctgttct

SEQ ID NO: 5217118 - DNA, 25 bp, Homo sapien
ggtaaagacattaattgccagcatt

SEQ ID NO: 5217119 - DNA, 25 bp, Homo sapien
ggacaagtgttgcagtcagatccca

SEQ ID NO: 5217120 - DNA, 25 bp, Homo sapien
cagtgagaccttgctcccagtcgtt

SEQ ID NO: 5217121 - DNA, 25 bp, Homo sapien
tgagtgagcgctttgacacaccgag

SEQ ID NO: 5217122 - DNA, 25 bp, Homo sapien
gatgccacatggtgcttcgaaagga

SEQ ID NO: 5217123 - DNA, 25 bp, Homo sapien
ctggaggatactcgcagaagtcttg

SEQ ID NO: 5217124 - DNA, 25 bp, Homo sapien
tggccctggaggatactcgcagaag

SEQ ID NO: 5217125 - DNA, 25 bp, Homo sapien
gtgttactggccctggaggatactc

SEQ ID NO: 5217126 - DNA, 25 bp, Homo sapien
gaggatactcgcagaagtcttggag

SEQ ID NO: 5217127 - DNA, 25 bp, Homo sapien
aaaaaaggaactccgtacagcagat

SEQ ID NO: 5217128 - DNA, 25 bp, Homo sapien
gaaaaaaggaactccgtacagcaga

SEQ ID NO: 5217129 - DNA, 25 bp, Homo sapien
aaaaggaactccgtacagcagatca

SEQ ID NO: 5217130 - DNA, 25 bp, Homo sapien
aaaggaactccgtacagcagatcat

SEQ ID NO: 5217131 - DNA, 25 bp, Homo sapien
gagctgcccagaatcactcactcga

SEQ ID NO: 5217132 - DNA, 25 bp, Homo sapien
gccttttgggatcgatgacatttga

SEQ ID NO: 5217133 - DNA, 25 bp, Homo sapien
cactgtatcgtgttggttttgctct

SEQ ID NO: 5217134 - DNA, 25 bp, Homo sapien
tgatgggtttctcactgagctgccc

SEQ ID NO: 5217135 - DNA, 25 bp, Homo sapien
gagtatgctacaagatgacaggaac

SEQ ID NO: 5217136 - DNA, 25 bp, Homo sapien
tcccgaggtaatttataacccatgc

SEQ ID NO: 5217137 - DNA, 25 bp, Homo sapien
tctgacaaatcaagatatatggcgg

SEQ ID NO: 5217138 - DNA, 25 bp, Homo sapien
tacaagtgccatttgtgcggaggga

SEQ ID NO: 5217139 - DNA, 25 bp, Homo sapien
tactagtttcacgatgacagtcctg

SEQ ID NO: 5217140 - DNA, 25 bp, Homo sapien
gacagtttgtccatttgttagcctc

SEQ ID NO: 5217141 - DNA, 25 bp, Homo sapien
attgtgcgggttggttactgactgc

SEQ ID NO: 5217142 - DNA, 25 bp, Homo sapien
tctttgcccaggaattaacaactga

SEQ ID NO: 5217143 - DNA, 25 bp, Homo sapien
tgtttttgtaattgtcttgttctta

SEQ ID NO: 5217144 - DNA, 25 bp, Homo sapien
agaaacattagttttctcttgatta

SEQ ID NO: 5217145 - DNA, 25 bp, Homo sapien
tcaaatcaaatgagaaacattagtt

SEQ ID NO: 5217146 - DNA, 25 bp, Homo sapien
aatcaaatgagaaacattagttttc

SEQ ID NO: 5217147 - DNA, 25 bp, Homo sapien
gaaacattagttttctcttgattat

SEQ ID NO: 5217148 - DNA, 25 bp, Homo sapien
tctctccatttcgtctagaactagg

SEQ ID NO: 5217149 - DNA, 25 bp, Homo sapien
catttcgtctagaactagggttttg

SEQ ID NO: 5217150 - DNA, 25 bp, Homo sapien
gaactagggttttggcaaatataga

SEQ ID NO: 5217151 - DNA, 25 bp, Homo sapien
tctagaactagggttttggcaaata

SEQ ID NO: 5217152 - DNA, 25 bp, Homo sapien
gagactagctatgtttcaagtactc

SEQ ID NO: 5217153 - DNA, 25 bp, Homo sapien
cgtgaacattgattataggccttga

SEQ ID NO: 5217154 - DNA, 25 bp, Homo sapien
aagccagttgtcatttgcataatag

SEQ ID NO: 5217155 - DNA, 25 bp, Homo sapien
gctacatgaagttagaggctactgt

SEQ ID NO: 5217156 - DNA, 25 bp, Homo sapien
cattagttcccaagaaactttgagg

SEQ ID NO: 5217157 - DNA, 25 bp, Homo sapien
actgtatgaaaatgccgtgacttta

SEQ ID NO: 5217158 - DNA, 25 bp, Homo sapien
cattgaaagtctgccaacactgtta

SEQ ID NO: 5217159 - DNA, 25 bp, Homo sapien
atggtcattagttcccaagaaactt

SEQ ID NO: 5217160 - DNA, 25 bp, Homo sapien
tcgcgccgcactcggttctctgcca

SEQ ID NO: 5217161 - DNA, 25 bp, Homo sapien
accgcctcgcgccgcactcggttct

SEQ ID NO: 5217162 - DNA, 25 bp, Homo sapien
gcctcgcgccgcactcggttctctg

SEQ ID NO: 5217163 - DNA, 25 bp, Homo sapien
ctcgcgccgcactcggttctctgcc

SEQ ID NO: 5217164 - DNA, 25 bp, Homo sapien
gcggtcgcctcttgcgcgtcggtct

SEQ ID NO: 5217165 - DNA, 25 bp, Homo sapien
gtcggtctgcgtctccgccggcaga

SEQ ID NO: 5217166 - DNA, 25 bp, Homo sapien
tctccaaagtcgaaagtactccgcg

SEQ ID NO: 5217167 - DNA, 25 bp, Homo sapien
gtactccgcgcagttaacagagctg

SEQ ID NO: 5217168 - DNA, 25 bp, Homo sapien
tttacagaactgctcccgagagcgt

SEQ ID NO: 5217169 - DNA, 25 bp, Homo sapien
cgaacttagtttggccctctggcgc

SEQ ID NO: 5217170 - DNA, 25 bp, Homo sapien
agggacatgaggtgcaaccagttga

SEQ ID NO: 5217171 - DNA, 25 bp, Homo sapien
ccgtacagtcaacgcttcttaaggg

SEQ ID NO: 5217172 - DNA, 25 bp, Homo sapien
gggtggctcccctaagaattgctat

SEQ ID NO: 5217173 - DNA, 25 bp, Homo sapien
taagttcctggacattgatccggag

SEQ ID NO: 5217174 - DNA, 25 bp, Homo sapien
cctgtgaggttagcgaagtgatcct

SEQ ID NO: 5217175 - DNA, 25 bp, Homo sapien
tccggaggaggattcgcagttcaac

SEQ ID NO: 5217176 - DNA, 25 bp, Homo sapien
ccggtttacagtcgatttctacaag

SEQ ID NO: 5217177 - DNA, 25 bp, Homo sapien
tctctcgcagcgtggttgcagaagg

SEQ ID NO: 5217178 - DNA, 25 bp, Homo sapien
tctacaagtaaactagattagcagg

SEQ ID NO: 5217179 - DNA, 25 bp, Homo sapien
gggcagtcattctctcgcagcgtgg

SEQ ID NO: 5217180 - DNA, 25 bp, Homo sapien
ttcgtattttgcacgcgccagggcg

SEQ ID NO: 5217181 - DNA, 25 bp, Homo sapien
tgataccgagaaaacaggcgaggcg

SEQ ID NO: 5217182 - DNA, 25 bp, Homo sapien
gggcccatagcctcaaagcgttcgg

SEQ ID NO: 5217183 - DNA, 25 bp, Homo sapien
tccttaacccgtggactgcaggcga

SEQ ID NO: 5217184 - DNA, 25 bp, Homo sapien
tctgggtcgctgtctcaatagttga

SEQ ID NO: 5217185 - DNA, 25 bp, Homo sapien
gaatttacacctttctgggtcgctg

SEQ ID NO: 5217186 - DNA, 25 bp, Homo sapien
ggcaccaggtgaatttacacctttc

SEQ ID NO: 5217187 - DNA, 25 bp, Homo sapien
tcaatagttgacaagtccctctgtg

SEQ ID NO: 5217188 - DNA, 25 bp, Homo sapien
cactttggaaaggaacaggtcccag

SEQ ID NO: 5217189 - DNA, 25 bp, Homo sapien
gacctccagggctcgctagtgtttt

SEQ ID NO: 5217190 - DNA, 25 bp, Homo sapien
aggacaccgggcatcacactttgga

SEQ ID NO: 5217191 - DNA, 25 bp, Homo sapien
ccaataataagggagtaggcgagta

SEQ ID NO: 5217192 - DNA, 25 bp, Homo sapien
ggaagccatcctggtgccatcagag

SEQ ID NO: 5217193 - DNA, 25 bp, Homo sapien
cagagcctgggtgcaaacggcccac

SEQ ID NO: 5217194 - DNA, 25 bp, Homo sapien
gctctcaacagctttcagagcaact

SEQ ID NO: 5217195 - DNA, 25 bp, Homo sapien
tgagaccctactgcaggcacactca

SEQ ID NO: 5217196 - DNA, 25 bp, Homo sapien
tgccttgcctgtagtgggctctccc

SEQ ID NO: 5217197 - DNA, 25 bp, Homo sapien
gattagggggtgctcttttcaagga

SEQ ID NO: 5217198 - DNA, 25 bp, Homo sapien
aaaatgattaaccttcctgccttgc

SEQ ID NO: 5217199 - DNA, 25 bp, Homo sapien
taacaaaatgattaaccttcctgcc

SEQ ID NO: 5217200 - DNA, 25 bp, Homo sapien
gaggacgccgtttacttcccgcaga

SEQ ID NO: 5217201 - DNA, 25 bp, Homo sapien
taattctgcggcgaaatcgagagcg

SEQ ID NO: 5217202 - DNA, 25 bp, Homo sapien
gaagacctcggagctgagggcttct

SEQ ID NO: 5217203 - DNA, 25 bp, Homo sapien
ccacttctttggagggaggacgccg

SEQ ID NO: 5217204 - DNA, 25 bp, Homo sapien
tgttgcagagtacgaagccaagccc

SEQ ID NO: 5217205 - DNA, 25 bp, Homo sapien
taaagaaaggccgatgctcagagcg

SEQ ID NO: 5217206 - DNA, 25 bp, Homo sapien
caggccgagggcagttttgagtcaa

SEQ ID NO: 5217207 - DNA, 25 bp, Homo sapien
ggtgtgaacatcgactaagcccagt

SEQ ID NO: 5217208 - DNA, 25 bp, Homo sapien
aatgaagcgcattacctgggaagcc

SEQ ID NO: 5217209 - DNA, 25 bp, Homo sapien
ccagctctttgaagggcgcacggtg

SEQ ID NO: 5217210 - DNA, 25 bp, Homo sapien
gagcagcgtccgcagcaaagtcctt

SEQ ID NO: 5217211 - DNA, 25 bp, Homo sapien
caagggtgcaattcccgtgcgcgtg

SEQ ID NO: 5217212 - DNA, 25 bp, Homo sapien
tccccgagttcagaggcgcttaagt

SEQ ID NO: 5217213 - DNA, 25 bp, Homo sapien
tcatggcgccttatctggagagcag

SEQ ID NO: 5217214 - DNA, 25 bp, Homo sapien
tgatctcaggagaggtaaacgacca

SEQ ID NO: 5217215 - DNA, 25 bp, Homo sapien
taaacgaccatccttggaacacgga

SEQ ID NO: 5217216 - DNA, 25 bp, Homo sapien
atgagtgctctgtagtcaaacttac

SEQ ID NO: 5217217 - DNA, 25 bp, Homo sapien
tacaatagtgttaaaggagtatgcc

SEQ ID NO: 5217218 - DNA, 25 bp, Homo sapien
ggagtatgcctaactaagaacgaca

SEQ ID NO: 5217219 - DNA, 25 bp, Homo sapien
tatgcgggaacataataatcacaat

SEQ ID NO: 5217220 - DNA, 25 bp, Homo sapien
tgctgtgaaccatcacaggtttagc

SEQ ID NO: 5217221 - DNA, 25 bp, Homo sapien
acaggtttagcccacaggacactct

SEQ ID NO: 5217222 - DNA, 25 bp, Homo sapien
gaaccatcacaggtttagcccacag

SEQ ID NO: 5217223 - DNA, 25 bp, Homo sapien
tgggtctgctgtgaaccatcacagg

SEQ ID NO: 5217224 - DNA, 25 bp, Homo sapien
tatactcctggtaacgttggctcac

SEQ ID NO: 5217225 - DNA, 25 bp, Homo sapien
accttacccagctgaggagcctctg

SEQ ID NO: 5217226 - DNA, 25 bp, Homo sapien
aatggcctctcagcatatactcctg

SEQ ID NO: 5217227 - DNA, 25 bp, Homo sapien
tttgttcccgaatgaaagactagag

SEQ ID NO: 5217228 - DNA, 25 bp, Homo sapien
acagccgtttttccggatctcacct

SEQ ID NO: 5217229 - DNA, 25 bp, Homo sapien
gtcacagccgtttttccggatctca

SEQ ID NO: 5217230 - DNA, 25 bp, Homo sapien
aagtcacagccgtttttccggatct

SEQ ID NO: 5217231 - DNA, 25 bp, Homo sapien
taagtcacagccgtttttccggatc

SEQ ID NO: 5217232 - DNA, 25 bp, Homo sapien
tttgttcctcgaagctgcatattat

SEQ ID NO: 5217233 - DNA, 25 bp, Homo sapien
cgaagctgcatattattgccacaat

SEQ ID NO: 5217234 - DNA, 25 bp, Homo sapien
tgttcctcgaagctgcatattattg

SEQ ID NO: 5217235 - DNA, 25 bp, Homo sapien
cctcgaagctgcatattattgccac

SEQ ID NO: 5217236 - DNA, 25 bp, Homo sapien
tctgagacactaggtaattcaggct

SEQ ID NO: 5217237 - DNA, 25 bp, Homo sapien
tactgggatcagaacagtttctgag

SEQ ID NO: 5217238 - DNA, 25 bp, Homo sapien
ttctgagacactaggtaattcaggc

SEQ ID NO: 5217239 - DNA, 25 bp, Homo sapien
ggatattttactgggatcagaacag

SEQ ID NO: 5217240 - DNA, 25 bp, Homo sapien
gcagggaatgagtggtccatagttg

SEQ ID NO: 5217241 - DNA, 25 bp, Homo sapien
cagggaatgagtggtccatagttgc

SEQ ID NO: 5217242 - DNA, 25 bp, Homo sapien
ggcagggaatgagtggtccatagtt

SEQ ID NO: 5217243 - DNA, 25 bp, Homo sapien
ggcttctggtctctggtggcttcta

SEQ ID NO: 5217244 - DNA, 25 bp, Homo sapien
gcttctactggtgcatagagggtga

SEQ ID NO: 5217245 - DNA, 25 bp, Homo sapien
tctggtggcttctactggtgcatag

SEQ ID NO: 5217246 - DNA, 25 bp, Homo sapien
tctggtctctggtggcttctactgg

SEQ ID NO: 5217247 - DNA, 25 bp, Homo sapien
gacattggccatacggagatgagga

SEQ ID NO: 5217248 - DNA, 25 bp, Homo sapien
aatggccagatcctgcagttatccc

SEQ ID NO: 5217249 - DNA, 25 bp, Homo sapien
gttatcccttgtcttggccactgca

SEQ ID NO: 5217250 - DNA, 25 bp, Homo sapien
tggtaagtactcaacacatgcttgt

SEQ ID NO: 5217251 - DNA, 25 bp, Homo sapien
tatgggacaaccagacgtttctgtt

SEQ ID NO: 5217252 - DNA, 25 bp, Homo sapien
tgggcactcttcacacgggccatgt

SEQ ID NO: 5217253 - DNA, 25 bp, Homo sapien
ggaacctttggaacaccatccatcc

SEQ ID NO: 5217254 - DNA, 25 bp, Homo sapien
acaggaacctttggaacaccatcca

SEQ ID NO: 5217255 - DNA, 25 bp, Homo sapien
gacagcgagaacttagagggcaaca

SEQ ID NO: 5217256 - DNA, 25 bp, Homo sapien
aattcatttggtgggttgatagggc

SEQ ID NO: 5217257 - DNA, 25 bp, Homo sapien
gagggcaacagacccaattcatttg

SEQ ID NO: 5217258 - DNA, 25 bp, Homo sapien
agagcccatggaagacagcgagaac

SEQ ID NO: 5217259 - DNA, 25 bp, Homo sapien
ggacatgaatctcatctgtgaagtc

SEQ ID NO: 5217260 - DNA, 25 bp, Homo sapien
gtctttgtgagatttaagcagtttg

SEQ ID NO: 5217261 - DNA, 25 bp, Homo sapien
cattcctggcaaagtaaagatgtca

SEQ ID NO: 5217262 - DNA, 25 bp, Homo sapien
agtcctcatcatgcctcattcctgg

SEQ ID NO: 5217263 - DNA, 25 bp, Homo sapien
gccaaactgatttgtcctaaagtgc

SEQ ID NO: 5217264 - DNA, 25 bp, Homo sapien
ttcccattcacaaatacgcgtgtga

SEQ ID NO: 5217265 - DNA, 25 bp, Homo sapien
tgcaagggtcatctgccaaactgat

SEQ ID NO: 5217266 - DNA, 25 bp, Homo sapien
gcgtgtgaatattgcaagggtcatc

SEQ ID NO: 5217267 - DNA, 25 bp, Homo sapien
gaaaaatggcttgactctgggttac

SEQ ID NO: 5217268 - DNA, 25 bp, Homo sapien
gagcactgccaactaaggaagccca

SEQ ID NO: 5217269 - DNA, 25 bp, Homo sapien
caaaatgttctaggagtctggtgga

SEQ ID NO: 5217270 - DNA, 25 bp, Homo sapien
caagggaagacacgtatagggcaag

SEQ ID NO: 5217271 - DNA, 25 bp, Homo sapien
ctcagaatctagtggctccccagaa

SEQ ID NO: 5217272 - DNA, 25 bp, Homo sapien
gaagctatgaccttcaagttcagtg

SEQ ID NO: 5217273 - DNA, 25 bp, Homo sapien
tgcttatgctgaccagtgaccaagg

SEQ ID NO: 5217274 - DNA, 25 bp, Homo sapien
ggtcttccaatttggaggctcaaat

SEQ ID NO: 5217275 - DNA, 25 bp, Homo sapien
tgaaccctcattatgcttatgctga

SEQ ID NO: 5217276 - DNA, 25 bp, Homo sapien
tagcacccactgtctagcctttgtg

SEQ ID NO: 5217277 - DNA, 25 bp, Homo sapien
cacccactgtctagcctttgtgact

SEQ ID NO: 5217278 - DNA, 25 bp, Homo sapien
tgcaatgcttctgagttccctcctc

SEQ ID NO: 5217279 - DNA, 25 bp, Homo sapien
gagttccctcctcgaattttgccat

SEQ ID NO: 5217280 - DNA, 25 bp, Homo sapien
aaaacttcaaaagtgtgatctgctt

SEQ ID NO: 5217281 - DNA, 25 bp, Homo sapien
gagaatctcagatccgattctgcct

SEQ ID NO: 5217282 - DNA, 25 bp, Homo sapien
tctcagatccgattctgcctgcagc

SEQ ID NO: 5217283 - DNA, 25 bp, Homo sapien
tcagatccgattctgcctgcagcca

SEQ ID NO: 5217284 - DNA, 25 bp, Homo sapien
aatctcagatccgattctgcctgca

SEQ ID NO: 5217285 - DNA, 25 bp, Homo sapien
taaagccagatccaacaactaccca

SEQ ID NO: 5217286 - DNA, 25 bp, Homo sapien
cctgtggctggattacgtattcctg

SEQ ID NO: 5217287 - DNA, 25 bp, Homo sapien
tcagagccaggcgttcctgtggctg

SEQ ID NO: 5217288 - DNA, 25 bp, Homo sapien
cccatttgaatagttggccgctggc

SEQ ID NO: 5217289 - DNA, 25 bp, Homo sapien
tctttccgtggacgcttttcctcgc

SEQ ID NO: 5217290 - DNA, 25 bp, Homo sapien
ctgtacaagcaactctggccctcga

SEQ ID NO: 5217291 - DNA, 25 bp, Homo sapien
tgtccgtggacaagcagactgtatg

SEQ ID NO: 5217292 - DNA, 25 bp, Homo sapien
aacatcccgtgtaggcccgtcttgt

SEQ ID NO: 5217293 - DNA, 25 bp, Homo sapien
gagccctgggtttcaaaaagaatgc

SEQ ID NO: 5217294 - DNA, 25 bp, Homo sapien
gcagcatcctgtttgataaaaccag

SEQ ID NO: 5217295 - DNA, 25 bp, Homo sapien
cagagcaatttacatgaacaccagt

SEQ ID NO: 5217296 - DNA, 25 bp, Homo sapien
taaaaccagagcaatttacatgaac

SEQ ID NO: 5217297 - DNA, 25 bp, Homo sapien
gtgtaggattgggagagatttcgaa

SEQ ID NO: 5217298 - DNA, 25 bp, Homo sapien
ctgtgtaggattgggagagatttcg

SEQ ID NO: 5217299 - DNA, 25 bp, Homo sapien
tgtgtaggattgggagagatttcga

SEQ ID NO: 5217300 - DNA, 25 bp, Homo sapien
ctgcttatgaaggagaaagagctct

SEQ ID NO: 5217301 - DNA, 25 bp, Homo sapien
ggagaaagagctctccacactggta

SEQ ID NO: 5217302 - DNA, 25 bp, Homo sapien
agaaagagctctccacactggtatg

SEQ ID NO: 5217303 - DNA, 25 bp, Homo sapien
aaggagaaagagctctccacactgg

SEQ ID NO: 5217304 - DNA, 25 bp, Homo sapien
tatagaccggttaggaatattgtgc

SEQ ID NO: 5217305 - DNA, 25 bp, Homo sapien
acttaatgtgtgcactgagtcgagc

SEQ ID NO: 5217306 - DNA, 25 bp, Homo sapien
agctctgaaggcgtctatagaccgg

SEQ ID NO: 5217307 - DNA, 25 bp, Homo sapien
taacgctggcgtgtggtctaaggca

SEQ ID NO: 5217308 - DNA, 25 bp, Homo sapien
ttgtgtgggataaattcagatctaa

SEQ ID NO: 5217309 - DNA, 25 bp, Homo sapien
gaggtgatagattgttgaggtatcc

SEQ ID NO: 5217310 - DNA, 25 bp, Homo sapien
ggcatccagaggtgatagattgttg

SEQ ID NO: 5217311 - DNA, 25 bp, Homo sapien
aaattcagatctaagttatcatcac

SEQ ID NO: 5217312 - DNA, 25 bp, Homo sapien
catggctaacatgtgaagctgtggg

SEQ ID NO: 5217313 - DNA, 25 bp, Homo sapien
tgtgggattcccgagttttgacgca

SEQ ID NO: 5217314 - DNA, 25 bp, Homo sapien
cacagggacagcagtatttagcagt

SEQ ID NO: 5217315 - DNA, 25 bp, Homo sapien
ttaaaacgtctgaagcggccggagc

SEQ ID NO: 5217316 - DNA, 25 bp, Homo sapien
tccagtttcatctcttgggctcctc

SEQ ID NO: 5217317 - DNA, 25 bp, Homo sapien
ctcttgggctcctcatctctgtgtc

SEQ ID NO: 5217318 - DNA, 25 bp, Homo sapien
ctctccagtttcatctcttgggctc

SEQ ID NO: 5217319 - DNA, 25 bp, Homo sapien
ccagtttcatctcttgggctcctca

SEQ ID NO: 5217320 - DNA, 25 bp, Homo sapien
gggagatgttggtagaggagtttta

SEQ ID NO: 5217321 - DNA, 25 bp, Homo sapien
tgttggtagaggagttttaagagcc

SEQ ID NO: 5217322 - DNA, 25 bp, Homo sapien
tggtagaggagttttaagagcctcc

SEQ ID NO: 5217323 - DNA, 25 bp, Homo sapien
agatgttggtagaggagttttaaga

SEQ ID NO: 5217324 - DNA, 25 bp, Homo sapien
aacttgaacctgggtgtctgactct

SEQ ID NO: 5217325 - DNA, 25 bp, Homo sapien
acttgaacctgggtgtctgactcta

SEQ ID NO: 5217326 - DNA, 25 bp, Homo sapien
aacctgggtgtctgactctaaatcc

SEQ ID NO: 5217327 - DNA, 25 bp, Homo sapien
ccagtactgctgcatcggggatcaa

SEQ ID NO: 5217328 - DNA, 25 bp, Homo sapien
gaagactgcttctatgaactgcaaa

SEQ ID NO: 5217329 - DNA, 25 bp, Homo sapien
gctgggaagactgcttctatgaact

SEQ ID NO: 5217330 - DNA, 25 bp, Homo sapien
agcttttgtcaggcacttcccaggg

SEQ ID NO: 5217331 - DNA, 25 bp, Homo sapien
tagcagggtggtcacagttcatgcc

SEQ ID NO: 5217332 - DNA, 25 bp, Homo sapien
catgatatcccaactgaggctgagc

SEQ ID NO: 5217333 - DNA, 25 bp, Homo sapien
tgtaaccagtgagttgtgccaaaac

SEQ ID NO: 5217334 - DNA, 25 bp, Homo sapien
tctcctaggccagaagggtcattat

SEQ ID NO: 5217335 - DNA, 25 bp, Homo sapien
gtgaccaccgaaaatatctgcagac

SEQ ID NO: 5217336 - DNA, 25 bp, Homo sapien
cagccaaggttgagctttagagcag

SEQ ID NO: 5217337 - DNA, 25 bp, Homo sapien
tgggagcaatgttgcttgccccacc

SEQ ID NO: 5217338 - DNA, 25 bp, Homo sapien
atgcatgctcaagttagaaccactg

SEQ ID NO: 5217339 - DNA, 25 bp, Homo sapien
gacacaggagaataaggagtggcca

SEQ ID NO: 5217340 - DNA, 25 bp, Homo sapien
tattggctgagtccaaccagaagcc

SEQ ID NO: 5217341 - DNA, 25 bp, Homo sapien
gagtggccagaacctcattgagagc

SEQ ID NO: 5217342 - DNA, 25 bp, Homo sapien
ccctgggtaatctggtttctggaca

SEQ ID NO: 5217343 - DNA, 25 bp, Homo sapien
gaagaaaatgcagggcctcttgttc

SEQ ID NO: 5217344 - DNA, 25 bp, Homo sapien
catgggacctttctgagcatggagc

SEQ ID NO: 5217345 - DNA, 25 bp, Homo sapien
ggagccccatgtgactgcacaggaa

SEQ ID NO: 5217346 - DNA, 25 bp, Homo sapien
gctttatatcagtcagaatcctggc

SEQ ID NO: 5217347 - DNA, 25 bp, Homo sapien
agccaggtgatgctgtcttgcaata

SEQ ID NO: 5217348 - DNA, 25 bp, Homo sapien
tagcttcaagtctcattcatgccat

SEQ ID NO: 5217349 - DNA, 25 bp, Homo sapien
taccataagtttaccagtagatgtg

SEQ ID NO: 5217350 - DNA, 25 bp, Homo sapien
tagatgtgatgatgggttgtccttt

SEQ ID NO: 5217351 - DNA, 25 bp, Homo sapien
tgacctcatctagggcaaattaggt

SEQ ID NO: 5217352 - DNA, 25 bp, Homo sapien
aaaccagcaagcaccatgacctcat

SEQ ID NO: 5217353 - DNA, 25 bp, Homo sapien
gcaccatgacctcatctagggcaaa

SEQ ID NO: 5217354 - DNA, 25 bp, Homo sapien
ctgattacttgtaaaccagcaagca

SEQ ID NO: 5217355 - DNA, 25 bp, Homo sapien
ggggtggtggcagatgtctataatt

SEQ ID NO: 5217356 - DNA, 25 bp, Homo sapien
caggggtggtggcagatgtctataa

SEQ ID NO: 5217357 - DNA, 25 bp, Homo sapien
ggtggtggcagatgtctataattcc

SEQ ID NO: 5217358 - DNA, 25 bp, Homo sapien
ggatgctgaagtaggtgaatcactt

SEQ ID NO: 5217359 - DNA, 25 bp, Homo sapien
ttattccttggtgtatttgaaagta

SEQ ID NO: 5217360 - DNA, 25 bp, Homo sapien
ccttggtgtatttgaaagtagtagc

SEQ ID NO: 5217361 - DNA, 25 bp, Homo sapien
tattccttggtgtatttgaaagtag

SEQ ID NO: 5217362 - DNA, 25 bp, Homo sapien
ttccttggtgtatttgaaagtagta

SEQ ID NO: 5217363 - DNA, 25 bp, Homo sapien
ggttctttacggatccaccagctcg

SEQ ID NO: 5217364 - DNA, 25 bp, Homo sapien
tttacggatccaccagctcgcttcg

SEQ ID NO: 5217365 - DNA, 25 bp, Homo sapien
ttctttacggatccaccagctcgct

SEQ ID NO: 5217366 - DNA, 25 bp, Homo sapien
tgggttctttacggatccaccagct

SEQ ID NO: 5217367 - DNA, 25 bp, Homo sapien
gccagaagctcctgtccaattcgta

SEQ ID NO: 5217368 - DNA, 25 bp, Homo sapien
ctggttagccagaagctcctgtcca

SEQ ID NO: 5217369 - DNA, 25 bp, Homo sapien
gaagctcctgtccaattcgtaactt

SEQ ID NO: 5217370 - DNA, 25 bp, Homo sapien
ggttagccagaagctcctgtccaat

SEQ ID NO: 5217371 - DNA, 25 bp, Homo sapien
taccatcgggtaaacgtaatctatg

SEQ ID NO: 5217372 - DNA, 25 bp, Homo sapien
tctaccatcgggtaaacgtaatcta

SEQ ID NO: 5217373 - DNA, 25 bp, Homo sapien
ccatcgggtaaacgtaatctatggt

SEQ ID NO: 5217374 - DNA, 25 bp, Homo sapien
catcgggtaaacgtaatctatggtt

SEQ ID NO: 5217375 - DNA, 25 bp, Homo sapien
gccgcctgttacagacgctcctgcg

SEQ ID NO: 5217376 - DNA, 25 bp, Homo sapien
ttccatgacccccgttgcgtagagg

SEQ ID NO: 5217377 - DNA, 25 bp, Homo sapien
atattgtcgcattccatgacccccg

SEQ ID NO: 5217378 - DNA, 25 bp, Homo sapien
gttacagacgctcctgcgtcttcag

SEQ ID NO: 5217379 - DNA, 25 bp, Homo sapien
tttgtctacaccagcatgtctcctg

SEQ ID NO: 5217380 - DNA, 25 bp, Homo sapien
gtctacaccagcatgtctcctggca

SEQ ID NO: 5217381 - DNA, 25 bp, Homo sapien
tgtgtccccaggggttttgtctaca

SEQ ID NO: 5217382 - DNA, 25 bp, Homo sapien
gggttttgtctacaccagcatgtct

SEQ ID NO: 5217383 - DNA, 25 bp, Homo sapien
tccggcagctgtcccgttgagcctt

SEQ ID NO: 5217384 - DNA, 25 bp, Homo sapien
gctgtcccgttgagccttgccatgt

SEQ ID NO: 5217385 - DNA, 25 bp, Homo sapien
atgtttccgcacgccttgctcgctg

SEQ ID NO: 5217386 - DNA, 25 bp, Homo sapien
gcacgccttgctcgctgcagccatc

SEQ ID NO: 5217387 - DNA, 25 bp, Homo sapien
aggtctctgggcaggtcctgtgcat

SEQ ID NO: 5217388 - DNA, 25 bp, Homo sapien
gtctctgggcaggtcctgtgcatga

SEQ ID NO: 5217389 - DNA, 25 bp, Homo sapien
tctgggcaggtcctgtgcatgaggc

SEQ ID NO: 5217390 - DNA, 25 bp, Homo sapien
gcaggtcctgtgcatgaggccgaac

SEQ ID NO: 5217391 - DNA, 25 bp, Homo sapien
agctgcttgctgatgtggtaaacag

SEQ ID NO: 5217392 - DNA, 25 bp, Homo sapien
tgtggtaaacagatcagaaggccgc

SEQ ID NO: 5217393 - DNA, 25 bp, Homo sapien
gcttgctgatgtggtaaacagatca

SEQ ID NO: 5217394 - DNA, 25 bp, Homo sapien
cacagaaccgagctgcttgctgatg

SEQ ID NO: 5217395 - DNA, 25 bp, Homo sapien
gtttgtctatgattctggctgtgca

SEQ ID NO: 5217396 - DNA, 25 bp, Homo sapien
ttgtctatgattctggctgtgcagt

SEQ ID NO: 5217397 - DNA, 25 bp, Homo sapien
ctcgatgatccagggtttgtctatg

SEQ ID NO: 5217398 - DNA, 25 bp, Homo sapien
gcagttgcccttctctacaatccca

SEQ ID NO: 5217399 - DNA, 25 bp, Homo sapien
gtgggattcatattttgggtggcca

SEQ ID NO: 5217400 - DNA, 25 bp, Homo sapien
tgtgggattcatattttgggtggcc

SEQ ID NO: 5217401 - DNA, 25 bp, Homo sapien
tgggattcatattttgggtggccac

SEQ ID NO: 5217402 - DNA, 25 bp, Homo sapien
ggtgtgggattcatattttgggtgg

SEQ ID NO: 5217403 - DNA, 25 bp, Homo sapien
ctgtctagattaagaggtggccccg

SEQ ID NO: 5217404 - DNA, 25 bp, Homo sapien
tttctgtctagattaagaggtggcc

SEQ ID NO: 5217405 - DNA, 25 bp, Homo sapien
cagctatttctgtctagattaagag

SEQ ID NO: 5217406 - DNA, 25 bp, Homo sapien
aaaccaaacagctatttctgtctag

SEQ ID NO: 5217407 - DNA, 25 bp, Homo sapien
tgaagtgatgataaaggaaataggt

SEQ ID NO: 5217408 - DNA, 25 bp, Homo sapien
gaaaacagttagtggtattattgta

SEQ ID NO: 5217409 - DNA, 25 bp, Homo sapien
gaagcacttgccctgtttaactgag

SEQ ID NO: 5217410 - DNA, 25 bp, Homo sapien
tctttgctatcgataaagaaaacag

SEQ ID NO: 5217411 - DNA, 25 bp, Homo sapien
aaggtctagttacacacgcataaag

SEQ ID NO: 5217412 - DNA, 25 bp, Homo sapien
gaaggtctagttacacacgcataaa

SEQ ID NO: 5217413 - DNA, 25 bp, Homo sapien
aggtctagttacacacgcataaagg

SEQ ID NO: 5217414 - DNA, 25 bp, Homo sapien
gagcccctccagactccatggtatg

SEQ ID NO: 5217415 - DNA, 25 bp, Homo sapien
ccatggtatgcccatccccaggttt

SEQ ID NO: 5217416 - DNA, 25 bp, Homo sapien
tctgtgtatcccaaaatgatcccct

SEQ ID NO: 5217417 - DNA, 25 bp, Homo sapien
tgcccatccccaggtttctgtgtat

SEQ ID NO: 5217418 - DNA, 25 bp, Homo sapien
ctatgtgcggtataaaatcaacctc

SEQ ID NO: 5217419 - DNA, 25 bp, Homo sapien
taaagtctacttgtattaagggaga

SEQ ID NO: 5217420 - DNA, 25 bp, Homo sapien
ttgttcactactgctatgtgcggta

SEQ ID NO: 5217421 - DNA, 25 bp, Homo sapien
ggagatactatgcagattgcatcat

SEQ ID NO: 5217422 - DNA, 25 bp, Homo sapien
ataggctgccctcccatcataagca

SEQ ID NO: 5217423 - DNA, 25 bp, Homo sapien
tttgccaccagagttgatcaccacc

SEQ ID NO: 5217424 - DNA, 25 bp, Homo sapien
tgcttaggcctctacaagacccttt

SEQ ID NO: 5217425 - DNA, 25 bp, Homo sapien
acctcatttatgatatcactgatgg

SEQ ID NO: 5217426 - DNA, 25 bp, Homo sapien
aacacgcttctccagggccctgtaa

SEQ ID NO: 5217427 - DNA, 25 bp, Homo sapien
gcttctccagggccctgtaactcat

SEQ ID NO: 5217428 - DNA, 25 bp, Homo sapien
cgcttctccagggccctgtaactca

SEQ ID NO: 5217429 - DNA, 25 bp, Homo sapien
ctcaacacgcttctccagggccctg

SEQ ID NO: 5217430 - DNA, 25 bp, Homo sapien
acattgaaatcaagactccgtagta

SEQ ID NO: 5217431 - DNA, 25 bp, Homo sapien
gcacattgaaatcaagactccgtag

SEQ ID NO: 5217432 - DNA, 25 bp, Homo sapien
cacattgaaatcaagactccgtagt

SEQ ID NO: 5217433 - DNA, 25 bp, Homo sapien
cattgaaatcaagactccgtagtac

SEQ ID NO: 5217434 - DNA, 25 bp, Homo sapien
ttcagagactcccaaccctccaaag

SEQ ID NO: 5217435 - DNA, 25 bp, Homo sapien
ttcaggacaatagactgactttgtt

SEQ ID NO: 5217436 - DNA, 25 bp, Homo sapien
tatttcaggacaatagactgacttt

SEQ ID NO: 5217437 - DNA, 25 bp, Homo sapien
ttatttcaggacaatagactgactt

SEQ ID NO: 5217438 - DNA, 25 bp, Homo sapien
ctatattatggattgcacccacaat

SEQ ID NO: 5217439 - DNA, 25 bp, Homo sapien
taggccactggctctatattatgga

SEQ ID NO: 5217440 - DNA, 25 bp, Homo sapien
cacccacaattaaagtgggcccaga

SEQ ID NO: 5217441 - DNA, 25 bp, Homo sapien
tgttaagcacacataggccactggc

SEQ ID NO: 5217442 - DNA, 25 bp, Homo sapien
catattctaatgtaagttgttttgt

SEQ ID NO: 5217443 - DNA, 25 bp, Homo sapien
ttgttgtcactttcacatttgtggg

SEQ ID NO: 5217444 - DNA, 25 bp, Homo sapien
ctaatgtaagttgttttgttgtcac

SEQ ID NO: 5217445 - DNA, 25 bp, Homo sapien
catttgtggggttatattcttcacc

SEQ ID NO: 5217446 - DNA, 25 bp, Homo sapien
gggtgcctgccaggactgatctgtt

SEQ ID NO: 5217447 - DNA, 25 bp, Homo sapien
tattagtaggttgtggcttgcagac

SEQ ID NO: 5217448 - DNA, 25 bp, Homo sapien
gatctgtttagcaaacaagctggag

SEQ ID NO: 5217449 - DNA, 25 bp, Homo sapien
cagaagcactgatcaaatggtagat

SEQ ID NO: 5217450 - DNA, 25 bp, Homo sapien
catttttacattcttgtacttgaag

SEQ ID NO: 5217451 - DNA, 25 bp, Homo sapien
atttttacattcttgtacttgaagt

SEQ ID NO: 5217452 - DNA, 25 bp, Homo sapien
gagattgtattaaggacacaagcca

SEQ ID NO: 5217453 - DNA, 25 bp, Homo sapien
aatgagattgtattaaggacacaag

SEQ ID NO: 5217454 - DNA, 25 bp, Homo sapien
aatgaatgagattgtattaaggaca

SEQ ID NO: 5217455 - DNA, 25 bp, Homo sapien
atgaatgagattgtattaaggacac

SEQ ID NO: 5217456 - DNA, 25 bp, Homo sapien
tacacggacagtcatttctctgatg

SEQ ID NO: 5217457 - DNA, 25 bp, Homo sapien
tctgatgcccgacatggcaatatct

SEQ ID NO: 5217458 - DNA, 25 bp, Homo sapien
gatgcccgacatggcaatatcttct

SEQ ID NO: 5217459 - DNA, 25 bp, Homo sapien
gacagtcatttctctgatgcccgac

SEQ ID NO: 5217460 - DNA, 25 bp, Homo sapien
ggaagctgaagtgtcagcaatacag

SEQ ID NO: 5217461 - DNA, 25 bp, Homo sapien
ccttgtgttgatgggaagctgaagt

SEQ ID NO: 5217462 - DNA, 25 bp, Homo sapien
tgggaagctgaagtgtcagcaatac

SEQ ID NO: 5217463 - DNA, 25 bp, Homo sapien
aagctgaagtgtcagcaatacagac

SEQ ID NO: 5217464 - DNA, 25 bp, Homo sapien
ggaagtgaacatgcctcctggaata

SEQ ID NO: 5217465 - DNA, 25 bp, Homo sapien
tcataggaaggagccaatgctgacc

SEQ ID NO: 5217466 - DNA, 25 bp, Homo sapien
taagccttaagttccctcttgatgg

SEQ ID NO: 5217467 - DNA, 25 bp, Homo sapien
tcctggaatagcactaagtcaagcc

SEQ ID NO: 5217468 - DNA, 25 bp, Homo sapien
tgtctttgcaattgggatcttgttc

SEQ ID NO: 5217469 - DNA, 25 bp, Homo sapien
gcaaggttgatgacaagtgcttgaa

SEQ ID NO: 5217470 - DNA, 25 bp, Homo sapien
gagagtccattgtggatcttctggc

SEQ ID NO: 5217471 - DNA, 25 bp, Homo sapien
cataagtagcatgttggagagtcca

SEQ ID NO: 5217472 - DNA, 25 bp, Homo sapien
gccgttagcctaaagctgttggaaa

SEQ ID NO: 5217473 - DNA, 25 bp, Homo sapien
gacccatatttttgacaacagctgc

SEQ ID NO: 5217474 - DNA, 25 bp, Homo sapien
tgagtccttccctgattatctggca

SEQ ID NO: 5217475 - DNA, 25 bp, Homo sapien
ttatctggcaggacaaacttcatcc

SEQ ID NO: 5217476 - DNA, 25 bp, Homo sapien
tagaattaataatttccctgtcttc

SEQ ID NO: 5217477 - DNA, 25 bp, Homo sapien
caccccaactcaattgtgaacaaat

SEQ ID NO: 5217478 - DNA, 25 bp, Homo sapien
ggtgctttgtaggttagaattaata

SEQ ID NO: 5217479 - DNA, 25 bp, Homo sapien
gatgctcttctgtccagctctatgg

SEQ ID NO: 5217480 - DNA, 25 bp, Homo sapien
atgcttcttgctcaccactaaagat

SEQ ID NO: 5217481 - DNA, 25 bp, Homo sapien
aatgcttcttgctcaccactaaaga

SEQ ID NO: 5217482 - DNA, 25 bp, Homo sapien
gcttcttgctcaccactaaagatat

SEQ ID NO: 5217483 - DNA, 25 bp, Homo sapien
tgcttcttgctcaccactaaagata

SEQ ID NO: 5217484 - DNA, 25 bp, Homo sapien
tctacttgggcatcttctgatttct

SEQ ID NO: 5217485 - DNA, 25 bp, Homo sapien
cgaggaagaactcttctacttgggc

SEQ ID NO: 5217486 - DNA, 25 bp, Homo sapien
catgaaaagacgaggaagaactctt

SEQ ID NO: 5217487 - DNA, 25 bp, Homo sapien
actcttctacttgggcatcttctga

SEQ ID NO: 5217488 - DNA, 25 bp, Homo sapien
catccacattgtgagttctaacaag

SEQ ID NO: 5217489 - DNA, 25 bp, Homo sapien
gagttctaacaagcaagtcaggcat

SEQ ID NO: 5217490 - DNA, 25 bp, Homo sapien
gaatgctgcaggtagcgtttgagaa

SEQ ID NO: 5217491 - DNA, 25 bp, Homo sapien
ctatctagaaagtcaaggttagcat

SEQ ID NO: 5217492 - DNA, 25 bp, Homo sapien
atcactactgtgatgccgaatgaca

SEQ ID NO: 5217493 - DNA, 25 bp, Homo sapien
gttgtagattgaagtgatatcacta

SEQ ID NO: 5217494 - DNA, 25 bp, Homo sapien
gaagtgatatcactactgtgatgcc

SEQ ID NO: 5217495 - DNA, 25 bp, Homo sapien
gccgaatgacactagtcaagttctt

SEQ ID NO: 5217496 - DNA, 25 bp, Homo sapien
ggttggtgcctgaactcagtgtatg

SEQ ID NO: 5217497 - DNA, 25 bp, Homo sapien
ctattgctttgactgggttggttgg

SEQ ID NO: 5217498 - DNA, 25 bp, Homo sapien
cttttgaggctgtgtagacactcac

SEQ ID NO: 5217499 - DNA, 25 bp, Homo sapien
tcagtgtatgggtagctgcgtcttt

SEQ ID NO: 5217500 - DNA, 25 bp, Homo sapien
catagttattactccaggccgcaaa

SEQ ID NO: 5217501 - DNA, 25 bp, Homo sapien
tatttataatgcgatctgacctggg

SEQ ID NO: 5217502 - DNA, 25 bp, Homo sapien
cgcaaaaatgtgtgcgcccctacga

SEQ ID NO: 5217503 - DNA, 25 bp, Homo sapien
gaattttcgaacatttgagctcagg

SEQ ID NO: 5217504 - DNA, 25 bp, Homo sapien
tgcataactaaactgcaaggcgcag

SEQ ID NO: 5217505 - DNA, 25 bp, Homo sapien
gaagcccccaatctgtgaacaacgt

SEQ ID NO: 5217506 - DNA, 25 bp, Homo sapien
tgaacaacgttcacaggattcactc

SEQ ID NO: 5217507 - DNA, 25 bp, Homo sapien
gcgcagtcatgaggttccgaagccc

SEQ ID NO: 5217508 - DNA, 25 bp, Homo sapien
cctggagcatccagcaaggagcctg

SEQ ID NO: 5217509 - DNA, 25 bp, Homo sapien
tgcatggtctgtggaatctacctca

SEQ ID NO: 5217510 - DNA, 25 bp, Homo sapien
ggtgcacactacaagtcacgctggg

SEQ ID NO: 5217511 - DNA, 25 bp, Homo sapien
aggacagtgtgaacgctcagagccc

SEQ ID NO: 5217512 - DNA, 25 bp, Homo sapien
ctctccaagattggtgcaatccctg

SEQ ID NO: 5217513 - DNA, 25 bp, Homo sapien
ctccaagattggtgcaatccctgga

SEQ ID NO: 5217514 - DNA, 25 bp, Homo sapien
caagattggtgcaatccctggaggc

SEQ ID NO: 5217515 - DNA, 25 bp, Homo sapien
ggaggcacatcgcttttttgcaggg

SEQ ID NO: 5217516 - DNA, 25 bp, Homo sapien
ttgattgtccttatgtccttgctcc

SEQ ID NO: 5217517 - DNA, 25 bp, Homo sapien
cacaaaccacactgggccatggttt

SEQ ID NO: 5217518 - DNA, 25 bp, Homo sapien
gtccttatgtccttgctccagatcc

SEQ ID NO: 5217519 - DNA, 25 bp, Homo sapien
gattgtccttatgtccttgctccag

SEQ ID NO: 5217520 - DNA, 25 bp, Homo sapien
gagcggacatgaagtaagagagcct

SEQ ID NO: 5217521 - DNA, 25 bp, Homo sapien
tatcctggctgtttggtcaaatgcc

SEQ ID NO: 5217522 - DNA, 25 bp, Homo sapien
gacaaggaggtctgagtaagagaca

SEQ ID NO: 5217523 - DNA, 25 bp, Homo sapien
acatgatggacctgtgggagcggac

SEQ ID NO: 5217524 - DNA, 25 bp, Homo sapien
cttcctgttgtctttactcttaaat

SEQ ID NO: 5217525 - DNA, 25 bp, Homo sapien
ttaaattcaggctgtcttttaaatg

SEQ ID NO: 5217526 - DNA, 25 bp, Homo sapien
tgcagaaacgccagtgggaaaaagt

SEQ ID NO: 5217527 - DNA, 25 bp, Homo sapien
cagaaacgccagtgggaaaaagtgt

SEQ ID NO: 5217528 - DNA, 25 bp, Homo sapien
aaaagtgtgagttggagctcctcat

SEQ ID NO: 5217529 - DNA, 25 bp, Homo sapien
aaacgccagtgggaaaaagtgtgag

SEQ ID NO: 5217530 - DNA, 25 bp, Homo sapien
tgtgatggctcactcagtgctgtga

SEQ ID NO: 5217531 - DNA, 25 bp, Homo sapien
ggttcatagtcacatccgtgtctag

SEQ ID NO: 5217532 - DNA, 25 bp, Homo sapien
cactgggccccgtgagttatatggc

SEQ ID NO: 5217533 - DNA, 25 bp, Homo sapien
tgctgtgactcacaaagcagggcca

SEQ ID NO: 5217534 - DNA, 25 bp, Homo sapien
acttgctccaactcattgggagatg

SEQ ID NO: 5217535 - DNA, 25 bp, Homo sapien
gacttgctccaactcattgggagat

SEQ ID NO: 5217536 - DNA, 25 bp, Homo sapien
cttgctccaactcattgggagatgc

SEQ ID NO: 5217537 - DNA, 25 bp, Homo sapien
cgccagatttctcccagatgaattt

SEQ ID NO: 5217538 - DNA, 25 bp, Homo sapien
gccagatttctcccagatgaatttc

SEQ ID NO: 5217539 - DNA, 25 bp, Homo sapien
ccagatttctcccagatgaatttct

SEQ ID NO: 5217540 - DNA, 25 bp, Homo sapien
gtgctgctaggcacaaccctctctc

SEQ ID NO: 5217541 - DNA, 25 bp, Homo sapien
cagcgcctcctctgtaggactgtgc

SEQ ID NO: 5217542 - DNA, 25 bp, Homo sapien
taggactgtgcattttgtgctgcta

SEQ ID NO: 5217543 - DNA, 25 bp, Homo sapien
ctgaaagaactattagcttctagtt

SEQ ID NO: 5217544 - DNA, 25 bp, Homo sapien
tcagatggaaagtctaaaggtttag

SEQ ID NO: 5217545 - DNA, 25 bp, Homo sapien
tcaaggaagtacttattcttttgga

SEQ ID NO: 5217546 - DNA, 25 bp, Homo sapien
tggtgttgggcatgacttcaaggaa

SEQ ID NO: 5217547 - DNA, 25 bp, Homo sapien
taagatgatctgctgctcataaacc

SEQ ID NO: 5217548 - DNA, 25 bp, Homo sapien
gcttcagggcgttgtgacagttgtg

SEQ ID NO: 5217549 - DNA, 25 bp, Homo sapien
gccttgcagtgaggggatccgtgct

SEQ ID NO: 5217550 - DNA, 25 bp, Homo sapien
ttgtgacagttgtgttggaagaaaa

SEQ ID NO: 5217551 - DNA, 25 bp, Homo sapien
ttcagggcgttgtgacagttgtgtt

SEQ ID NO: 5217552 - DNA, 25 bp, Homo sapien
tcagcactgggcgtaatgagacggc

SEQ ID NO: 5217553 - DNA, 25 bp, Homo sapien
tattgcggtcgctttgttaatgcag

SEQ ID NO: 5217554 - DNA, 25 bp, Homo sapien
catatgggacgaatactggttagct

SEQ ID NO: 5217555 - DNA, 25 bp, Homo sapien
cacacttcaaagcagagcatatggg

SEQ ID NO: 5217556 - DNA, 25 bp, Homo sapien
tctttggggaacctttagcatctct

SEQ ID NO: 5217557 - DNA, 25 bp, Homo sapien
tggccatccccaaggctttgccatg

SEQ ID NO: 5217558 - DNA, 25 bp, Homo sapien
tgacccatctgaactactctttggg

SEQ ID NO: 5217559 - DNA, 25 bp, Homo sapien
ggctttgccatgacccatctgaact

SEQ ID NO: 5217560 - DNA, 25 bp, Homo sapien
tcacaggcagtaccgggcagccaag

SEQ ID NO: 5217561 - DNA, 25 bp, Homo sapien
ctggacagctttatggtgaggagga

SEQ ID NO: 5217562 - DNA, 25 bp, Homo sapien
ggagtggcctgtaatgtgtgtttcc

SEQ ID NO: 5217563 - DNA, 25 bp, Homo sapien
ctgaggctggacagctttatggtga

SEQ ID NO: 5217564 - DNA, 25 bp, Homo sapien
catgtaggaccttcccctcttggtg

SEQ ID NO: 5217565 - DNA, 25 bp, Homo sapien
acacgacatgcaggcttttgttttg

SEQ ID NO: 5217566 - DNA, 25 bp, Homo sapien
tcttggtgtccgtaagagttgccat

SEQ ID NO: 5217567 - DNA, 25 bp, Homo sapien
tgaattaggatgtggcaaacacgac

SEQ ID NO: 5217568 - DNA, 25 bp, Homo sapien
ttgtgattattcgagctggctgact

SEQ ID NO: 5217569 - DNA, 25 bp, Homo sapien
ttacaactattgtgattattcgagc

SEQ ID NO: 5217570 - DNA, 25 bp, Homo sapien
ttaaatagagctaaatgccattaca

SEQ ID NO: 5217571 - DNA, 25 bp, Homo sapien
cctgctggggatctatcttcaacca

SEQ ID NO: 5217572 - DNA, 25 bp, Homo sapien
tacaaatacattcacttctaccgca

SEQ ID NO: 5217573 - DNA, 25 bp, Homo sapien
tacattcacttctaccgcaagacac

SEQ ID NO: 5217574 - DNA, 25 bp, Homo sapien
gacaccctaattctcgtccagtcat

SEQ ID NO: 5217575 - DNA, 25 bp, Homo sapien
ttctaccgcaagacaccctaattct

SEQ ID NO: 5217576 - DNA, 25 bp, Homo sapien
ctcagccggcggctcaacggtcggc

SEQ ID NO: 5217577 - DNA, 25 bp, Homo sapien
gcggctcaacggtcggcggccgcgg

SEQ ID NO: 5217578 - DNA, 25 bp, Homo sapien
ccgcgagagcggttcggaggtggag

SEQ ID NO: 5217579 - DNA, 25 bp, Homo sapien
ggtcgccgccgcgagagcggttcgg

SEQ ID NO: 5217580 - DNA, 25 bp, Homo sapien
atcggctccaggcacggtggaaagc

SEQ ID NO: 5217581 - DNA, 25 bp, Homo sapien
caacaggagcaattcgttgctgcgc

SEQ ID NO: 5217582 - DNA, 25 bp, Homo sapien
cccgggttcatggttctggcctgag

SEQ ID NO: 5217583 - DNA, 25 bp, Homo sapien
tttccgattccgagctgcggcagca

SEQ ID NO: 5217584 - DNA, 25 bp, Homo sapien
ggttctatggacaaagggcgccaag

SEQ ID NO: 5217585 - DNA, 25 bp, Homo sapien
tctttcgagatcgtagccctcgtcg

SEQ ID NO: 5217586 - DNA, 25 bp, Homo sapien
gcagccacgagggaagaatcagtga

SEQ ID NO: 5217587 - DNA, 25 bp, Homo sapien
ggaccgacagctggctctttcgaga

SEQ ID NO: 5217588 - DNA, 25 bp, Homo sapien
cctctgagaaaccaaattatagaat

SEQ ID NO: 5217589 - DNA, 25 bp, Homo sapien
aagatgcgtgtcactccctgtctca

SEQ ID NO: 5217590 - DNA, 25 bp, Homo sapien
cctgtctcaaattccgcctcttgga

SEQ ID NO: 5217591 - DNA, 25 bp, Homo sapien
aataaatatacaagatgcgtgtcac

SEQ ID NO: 5217592 - DNA, 25 bp, Homo sapien
caaccagaccccagaatagtagata

SEQ ID NO: 5217593 - DNA, 25 bp, Homo sapien
actgtcctattggatttcggacctg

SEQ ID NO: 5217594 - DNA, 25 bp, Homo sapien
tagtagataaaccaacagcttgcac

SEQ ID NO: 5217595 - DNA, 25 bp, Homo sapien
cctattggatttcggacctgcatgg

SEQ ID NO: 5217596 - DNA, 25 bp, Homo sapien
attttctagactccagttttcccat

SEQ ID NO: 5217597 - DNA, 25 bp, Homo sapien
gataattctcaggatgacgagtcat

SEQ ID NO: 5217598 - DNA, 25 bp, Homo sapien
caaccattcgtagtatgagaaggac

SEQ ID NO: 5217599 - DNA, 25 bp, Homo sapien
aaaaactcatggcagactcatcaga

SEQ ID NO: 5217600 - DNA, 25 bp, Homo sapien
gaaggactggatctacagttagatg

SEQ ID NO: 5217601 - DNA, 25 bp, Homo sapien
tggataaaaactcatggcagactca

SEQ ID NO: 5217602 - DNA, 25 bp, Homo sapien
ggctagtcacctgcataccaagatc

SEQ ID NO: 5217603 - DNA, 25 bp, Homo sapien
tcattggatcacgtacttggtaagg

SEQ ID NO: 5217604 - DNA, 25 bp, Homo sapien
ccctgaagtgattctctatggaagg

SEQ ID NO: 5217605 - DNA, 25 bp, Homo sapien
catgagtgtgaacgataattcctgt

SEQ ID NO: 5217606 - DNA, 25 bp, Homo sapien
caaaaggcagggtgcagttattcca

SEQ ID NO: 5217607 - DNA, 25 bp, Homo sapien
gatagaaaacagcatcgtacctttg

SEQ ID NO: 5217608 - DNA, 25 bp, Homo sapien
gcattcacatactggatagacaacc

SEQ ID NO: 5217609 - DNA, 25 bp, Homo sapien
tatctaggtcaagaaaaacgggcag

SEQ ID NO: 5217610 - DNA, 25 bp, Homo sapien
catccttttgaacagcagctatgtg

SEQ ID NO: 5217611 - DNA, 25 bp, Homo sapien
gaactaacatagattggcagtcacc

SEQ ID NO: 5217612 - DNA, 25 bp, Homo sapien
gcatacaagccacaagtttttgggt

SEQ ID NO: 5217613 - DNA, 25 bp, Homo sapien
tagtaaggcggcttttctatcacct

SEQ ID NO: 5217614 - DNA, 25 bp, Homo sapien
tctctaaggatgcacgagaaaccag

SEQ ID NO: 5217615 - DNA, 25 bp, Homo sapien
aaaatactatatgcaccgaggtggg

SEQ ID NO: 5217616 - DNA, 25 bp, Homo sapien
caactaggtgggctgcttagaatct

SEQ ID NO: 5217617 - DNA, 25 bp, Homo sapien
gataattatgcctccaagaagaggt

SEQ ID NO: 5217618 - DNA, 25 bp, Homo sapien
ctatgggtgatagaaaccgggattc

SEQ ID NO: 5217619 - DNA, 25 bp, Homo sapien
aaaatttctcactgcactgcttgct

SEQ ID NO: 5217620 - DNA, 25 bp, Homo sapien
accgggattcgttgtgaccagtaat

SEQ ID NO: 5217621 - DNA, 25 bp, Homo sapien
ttgtctgggttcacatagctatggg

SEQ ID NO: 5217622 - DNA, 25 bp, Homo sapien
ccagcaagagaattgatacaaagta

SEQ ID NO: 5217623 - DNA, 25 bp, Homo sapien
acatttatctatgaagcttattttc

SEQ ID NO: 5217624 - DNA, 25 bp, Homo sapien
aacagattacagtttgtgcactgaa

SEQ ID NO: 5217625 - DNA, 25 bp, Homo sapien
acagtttgtgcactgaatagtcatc

SEQ ID NO: 5217626 - DNA, 25 bp, Homo sapien
cgctttagagccgaagttccgaaga

SEQ ID NO: 5217627 - DNA, 25 bp, Homo sapien
gcaaagtggacctgttgctgcagcc

SEQ ID NO: 5217628 - DNA, 25 bp, Homo sapien
cctcagcggtgtcggagaaagagac

SEQ ID NO: 5217629 - DNA, 25 bp, Homo sapien
cctgccggtgctgtatggaaaggaa

SEQ ID NO: 5217630 - DNA, 25 bp, Homo sapien
gccccgcagggcagcgaccgagagt

SEQ ID NO: 5217631 - DNA, 25 bp, Homo sapien
cacagcaggagtccggagtcggacg

SEQ ID NO: 5217632 - DNA, 25 bp, Homo sapien
ggcagcgaccgagagtgcaggaact

SEQ ID NO: 5217633 - DNA, 25 bp, Homo sapien
ggtagcaaacgagcggccagcgcca

SEQ ID NO: 5217634 - DNA, 25 bp, Homo sapien
aagtagcaaagtgtggccgacggca

SEQ ID NO: 5217635 - DNA, 25 bp, Homo sapien
gaactctttgtcgaaataggcccag

SEQ ID NO: 5217636 - DNA, 25 bp, Homo sapien
ttcgagtcctaacccagttgatggg

SEQ ID NO: 5217637 - DNA, 25 bp, Homo sapien
tagcgcttcgtggaaataacgccgc

SEQ ID NO: 5217638 - DNA, 25 bp, Homo sapien
aatttacactgtgacagcaacttgg

SEQ ID NO: 5217639 - DNA, 25 bp, Homo sapien
gttcttccaacagatcaaatttaca

SEQ ID NO: 5217640 - DNA, 25 bp, Homo sapien
tgtgacagcaacttggatacatgag

SEQ ID NO: 5217641 - DNA, 25 bp, Homo sapien
gcaacttggatacatgagcaaaagc

SEQ ID NO: 5217642 - DNA, 25 bp, Homo sapien
tcatctatgttagcagcaagggcat

SEQ ID NO: 5217643 - DNA, 25 bp, Homo sapien
tctcatcatagtaaatggagatgtc

SEQ ID NO: 5217644 - DNA, 25 bp, Homo sapien
taaatggagatgtctcctgttgatg

SEQ ID NO: 5217645 - DNA, 25 bp, Homo sapien
caagggcatttttatggttgtcagg

SEQ ID NO: 5217646 - DNA, 25 bp, Homo sapien
tacacacatacgaatacaaatcaaa

SEQ ID NO: 5217647 - DNA, 25 bp, Homo sapien
tcagaaattggcagcagttatacag

SEQ ID NO: 5217648 - DNA, 25 bp, Homo sapien
taactgagcacgtactttactaagt

SEQ ID NO: 5217649 - DNA, 25 bp, Homo sapien
cttagggtttatggcatacttgccc

SEQ ID NO: 5217650 - DNA, 25 bp, Homo sapien
cacatcaggatgttaacaaacttcc

SEQ ID NO: 5217651 - DNA, 25 bp, Homo sapien
gggatgttggcactggttagatacc

SEQ ID NO: 5217652 - DNA, 25 bp, Homo sapien
ttaacctggaatacactggctcctc

SEQ ID NO: 5217653 - DNA, 25 bp, Homo sapien
tggctcctcttaaagtttcactggg

SEQ ID NO: 5217654 - DNA, 25 bp, Homo sapien
tcttacatcagtccaagtatgtgtt

SEQ ID NO: 5217655 - DNA, 25 bp, Homo sapien
catcagtccaagtatgtgttagata

SEQ ID NO: 5217656 - DNA, 25 bp, Homo sapien
ccaagtatgtgttagataactatgt

SEQ ID NO: 5217657 - DNA, 25 bp, Homo sapien
tgtaaatcttacatcagtccaagta

SEQ ID NO: 5217658 - DNA, 25 bp, Homo sapien
gtccagtcaggctttactccttgtg

SEQ ID NO: 5217659 - DNA, 25 bp, Homo sapien
caggctttactccttgtgtgaactc

SEQ ID NO: 5217660 - DNA, 25 bp, Homo sapien
ctaataattttgagtgttcaatccg

SEQ ID NO: 5217661 - DNA, 25 bp, Homo sapien
tcaatccgtgcaatggtccagtcag

SEQ ID NO: 5217662 - DNA, 25 bp, Homo sapien
tatgtagcattggaaatgttattga

SEQ ID NO: 5217663 - DNA, 25 bp, Homo sapien
ccaatatactgcaaggagtatttca

SEQ ID NO: 5217664 - DNA, 25 bp, Homo sapien
aggtgataacaatctgtggaaaatg

SEQ ID NO: 5217665 - DNA, 25 bp, Homo sapien
aatgcttttactgtatcatgccaat

SEQ ID NO: 5217666 - DNA, 25 bp, Homo sapien
cgaggttcatttctcatatgaatat

SEQ ID NO: 5217667 - DNA, 25 bp, Homo sapien
tgatgtaaaagtcgaggttcatttc

SEQ ID NO: 5217668 - DNA, 25 bp, Homo sapien
atgtgatgtaaaagtcgaggttcat

SEQ ID NO: 5217669 - DNA, 25 bp, Homo sapien
taaaagtcgaggttcatttctcata

SEQ ID NO: 5217670 - DNA, 25 bp, Homo sapien
gaagagaaacgaacaaggcagatcc

SEQ ID NO: 5217671 - DNA, 25 bp, Homo sapien
caaacactggacagtaggaagcaca

SEQ ID NO: 5217672 - DNA, 25 bp, Homo sapien
tgaaactactgtgctcaaacactgg

SEQ ID NO: 5217673 - DNA, 25 bp, Homo sapien
ggcagatcctatgataacccagatt

SEQ ID NO: 5217674 - DNA, 25 bp, Homo sapien
taggaggtccgcaaatcacttatat

SEQ ID NO: 5217675 - DNA, 25 bp, Homo sapien
aatgcaacgggtaaaccttgactgg

SEQ ID NO: 5217676 - DNA, 25 bp, Homo sapien
cttccagcttacagaaatgatgcca

SEQ ID NO: 5217677 - DNA, 25 bp, Homo sapien
caagatatgggacatgctgtgtgtc

SEQ ID NO: 5217678 - DNA, 25 bp, Homo sapien
gggctatttccagaccgcagttaga

SEQ ID NO: 5217679 - DNA, 25 bp, Homo sapien
tagaaggagcctagatctctgagga

SEQ ID NO: 5217680 - DNA, 25 bp, Homo sapien
caagtctgtcagctatttggcaggg

SEQ ID NO: 5217681 - DNA, 25 bp, Homo sapien
gaagccaccatggtctgtcagtgaa

SEQ ID NO: 5217682 - DNA, 25 bp, Homo sapien
tgtccccatagggtggtcccacttc

SEQ ID NO: 5217683 - DNA, 25 bp, Homo sapien
gaatggagtgattttataaggatgg

SEQ ID NO: 5217684 - DNA, 25 bp, Homo sapien
gattttataaggatggacacctgtt

SEQ ID NO: 5217685 - DNA, 25 bp, Homo sapien
aggaatggagtgattttataaggat

SEQ ID NO: 5217686 - DNA, 25 bp, Homo sapien
gagtgattttataaggatggacacc

SEQ ID NO: 5217687 - DNA, 25 bp, Homo sapien
acgggcatgtggaatatggcagtac

SEQ ID NO: 5217688 - DNA, 25 bp, Homo sapien
cccaggacctacacaccacgtgagg

SEQ ID NO: 5217689 - DNA, 25 bp, Homo sapien
tccataagtgtttaacatccccagg

SEQ ID NO: 5217690 - DNA, 25 bp, Homo sapien
cacaccacgtgagggaacgggcatg

SEQ ID NO: 5217691 - DNA, 25 bp, Homo sapien
cgtaacagctgtctgatgcagagca

SEQ ID NO: 5217692 - DNA, 25 bp, Homo sapien
gcagagcagggtttgtgaatatgtc

SEQ ID NO: 5217693 - DNA, 25 bp, Homo sapien
gaagaagacagatgctgcgaaggct

SEQ ID NO: 5217694 - DNA, 25 bp, Homo sapien
gtctgaaattatcagcggcaacagc

SEQ ID NO: 5217695 - DNA, 25 bp, Homo sapien
acccactcctccgatgccgtcggag

SEQ ID NO: 5217696 - DNA, 25 bp, Homo sapien
ctccgacggcatcggaggagtgggt

SEQ ID NO: 5217697 - DNA, 25 bp, Homo sapien
tatctagatgctgggtgacagtcac

SEQ ID NO: 5217698 - DNA, 25 bp, Homo sapien
tatgcccggaaaggctgtgaagttc

SEQ ID NO: 5217699 - DNA, 25 bp, Homo sapien
tagctgtagccgttattatgcccgg

SEQ ID NO: 5217700 - DNA, 25 bp, Homo sapien
gaagttccatggatcagcagttttg

SEQ ID NO: 5217701 - DNA, 25 bp, Homo sapien
tagaacttagatacatgaccacacc

SEQ ID NO: 5217702 - DNA, 25 bp, Homo sapien
acagttcctgaattgggcagactcc

SEQ ID NO: 5217703 - DNA, 25 bp, Homo sapien
ggaacttagggacaattatctggct

SEQ ID NO: 5217704 - DNA, 25 bp, Homo sapien
ggaggcacccttaggctaaccttga

SEQ ID NO: 5217705 - DNA, 25 bp, Homo sapien
ctcataatccagcaattccacactt

SEQ ID NO: 5217706 - DNA, 25 bp, Homo sapien
ataatccagcaattccacacttaga

SEQ ID NO: 5217707 - DNA, 25 bp, Homo sapien
agcaattccacacttagatatttac

SEQ ID NO: 5217708 - DNA, 25 bp, Homo sapien
tccagcaattccacacttagatatt

SEQ ID NO: 5217709 - DNA, 25 bp, Homo sapien
gactgacgactataaaacattggtg

SEQ ID NO: 5217710 - DNA, 25 bp, Homo sapien
tacagctcggtagatcagggagtca

SEQ ID NO: 5217711 - DNA, 25 bp, Homo sapien
tctaggtctcacaagcgaagtcagc

SEQ ID NO: 5217712 - DNA, 25 bp, Homo sapien
gatacacgtttgctagactgacgac

SEQ ID NO: 5217713 - DNA, 25 bp, Homo sapien
cactagtgaggccactttgactaac

SEQ ID NO: 5217714 - DNA, 25 bp, Homo sapien
gtcagcgaagccactagtgaggcca

SEQ ID NO: 5217715 - DNA, 25 bp, Homo sapien
ctggtcagcgaagccactagtgagg

SEQ ID NO: 5217716 - DNA, 25 bp, Homo sapien
ggccactttgactaacactgagggt

SEQ ID NO: 5217717 - DNA, 25 bp, Homo sapien
tagcttttgcatctcctagaggagc

SEQ ID NO: 5217718 - DNA, 25 bp, Homo sapien
tcatcaccctgatactcatgaggca

SEQ ID NO: 5217719 - DNA, 25 bp, Homo sapien
tcagtctctgttgagagtaagagct

SEQ ID NO: 5217720 - DNA, 25 bp, Homo sapien
gaggagcttttgctccagtccctag

SEQ ID NO: 5217721 - DNA, 25 bp, Homo sapien
tcagtagttgggcttaataataagc

SEQ ID NO: 5217722 - DNA, 25 bp, Homo sapien
tttgctcagtagttgggcttaataa

SEQ ID NO: 5217723 - DNA, 25 bp, Homo sapien
ctttctttgctcagtagttgggctt

SEQ ID NO: 5217724 - DNA, 25 bp, Homo sapien
tagttgggcttaataataagcacca

SEQ ID NO: 5217725 - DNA, 25 bp, Homo sapien
agaaaacaaaggattcttgaggcca

SEQ ID NO: 5217726 - DNA, 25 bp, Homo sapien
tgtactgctttgaacgaacctgtga

SEQ ID NO: 5217727 - DNA, 25 bp, Homo sapien
taagttggatcatataggacaggca

SEQ ID NO: 5217728 - DNA, 25 bp, Homo sapien
ctgaaggaagttatcagtccaggat

SEQ ID NO: 5217729 - DNA, 25 bp, Homo sapien
ccaggatttggagagaaagcttctg

SEQ ID NO: 5217730 - DNA, 25 bp, Homo sapien
gaagctccattatgggtgcataaac

SEQ ID NO: 5217731 - DNA, 25 bp, Homo sapien
tacatatcaattaagtcaggctggc

SEQ ID NO: 5217732 - DNA, 25 bp, Homo sapien
tattctgctgttggtggcatgttct

SEQ ID NO: 5217733 - DNA, 25 bp, Homo sapien
taacatagtgggagccagtctccac

SEQ ID NO: 5217734 - DNA, 25 bp, Homo sapien
ttctggcctcatagcgggagaagga

SEQ ID NO: 5217735 - DNA, 25 bp, Homo sapien
ctggcctcatagcgggagaaggaaa

SEQ ID NO: 5217736 - DNA, 25 bp, Homo sapien
attctggcctcatagcgggagaagg

SEQ ID NO: 5217737 - DNA, 25 bp, Homo sapien
tctggcctcatagcgggagaaggaa

SEQ ID NO: 5217738 - DNA, 25 bp, Homo sapien
actggcctagtgctgatcactagtc

SEQ ID NO: 5217739 - DNA, 25 bp, Homo sapien
taaatcgatgtaaatggaatgtgac

SEQ ID NO: 5217740 - DNA, 25 bp, Homo sapien
acacaattgcctctttgatggctca

SEQ ID NO: 5217741 - DNA, 25 bp, Homo sapien
tagtccggaaagtgcgaaggcttct

SEQ ID NO: 5217742 - DNA, 25 bp, Homo sapien
tcctttcagcgattaggcaaactcc

SEQ ID NO: 5217743 - DNA, 25 bp, Homo sapien
gctgagcatattgccacactgaata

SEQ ID NO: 5217744 - DNA, 25 bp, Homo sapien
ttacctctcactagtcaaaacgtag

SEQ ID NO: 5217745 - DNA, 25 bp, Homo sapien
gccatcatgttaataaggacaagag

SEQ ID NO: 5217746 - DNA, 25 bp, Homo sapien
gtgggacctgtgtcacgactgaaaa

SEQ ID NO: 5217747 - DNA, 25 bp, Homo sapien
attcataagggtatttaccactcat

SEQ ID NO: 5217748 - DNA, 25 bp, Homo sapien
tgggacctgtgtcacgactgaaaac

SEQ ID NO: 5217749 - DNA, 25 bp, Homo sapien
acaattcataagggtatttaccact

SEQ ID NO: 5217750 - DNA, 25 bp, Homo sapien
tctagctctctagggggctcaacat

SEQ ID NO: 5217751 - DNA, 25 bp, Homo sapien
cagtgcacagtcaatattgcagatg

SEQ ID NO: 5217752 - DNA, 25 bp, Homo sapien
ctctcagagacacttcctggcttcc

SEQ ID NO: 5217753 - DNA, 25 bp, Homo sapien
ttgcagatgggccatccccaggtgg

SEQ ID NO: 5217754 - DNA, 25 bp, Homo sapien
tcttgctgtcccatgtgatgtgact

SEQ ID NO: 5217755 - DNA, 25 bp, Homo sapien
cttgctgtcccatgtgatgtgactg

SEQ ID NO: 5217756 - DNA, 25 bp, Homo sapien
ttcttgctgtcccatgtgatgtgac

SEQ ID NO: 5217757 - DNA, 25 bp, Homo sapien
ccctttgtccatggtcaaggtgata

SEQ ID NO: 5217758 - DNA, 25 bp, Homo sapien
tgataaggttgcttgcatcattgac

SEQ ID NO: 5217759 - DNA, 25 bp, Homo sapien
tgcagtttcaatggccctggaaaac

SEQ ID NO: 5217760 - DNA, 25 bp, Homo sapien
gaagctgtcctgcagtttcaatggc

SEQ ID NO: 5217761 - DNA, 25 bp, Homo sapien
gtgacttaatgggaacaccacacca

SEQ ID NO: 5217762 - DNA, 25 bp, Homo sapien
ccatgtagtcattggcatgatagcc

SEQ ID NO: 5217763 - DNA, 25 bp, Homo sapien
ttcttgtgacttaatgggaacacca

SEQ ID NO: 5217764 - DNA, 25 bp, Homo sapien
catgatagcctttgccagtgttatc

SEQ ID NO: 5217765 - DNA, 25 bp, Homo sapien
gtgcaaaggttgagaatttcctcct

SEQ ID NO: 5217766 - DNA, 25 bp, Homo sapien
gagccttgcactcccacagcagggt

SEQ ID NO: 5217767 - DNA, 25 bp, Homo sapien
ccttgccacagtcttcagagccttg

SEQ ID NO: 5217768 - DNA, 25 bp, Homo sapien
gtgctggaaatctgagtgcaaaggt

SEQ ID NO: 5217769 - DNA, 25 bp, Homo sapien
aactgtgggaactaaatagtagtat

SEQ ID NO: 5217770 - DNA, 25 bp, Homo sapien
gctaccttttgactaagtgcaggaa

SEQ ID NO: 5217771 - DNA, 25 bp, Homo sapien
tgatggtgcagctggctaccttttg

SEQ ID NO: 5217772 - DNA, 25 bp, Homo sapien
attattgatgggctggatactgtca

SEQ ID NO: 5217773 - DNA, 25 bp, Homo sapien
cttgttccaaagtgatggtgattga

SEQ ID NO: 5217774 - DNA, 25 bp, Homo sapien
tgttccaaagtgatggtgattgaga

SEQ ID NO: 5217775 - DNA, 25 bp, Homo sapien
caaagtgatggtgattgagaaatgc

SEQ ID NO: 5217776 - DNA, 25 bp, Homo sapien
agtgatggtgattgagaaatgcctg

SEQ ID NO: 5217777 - DNA, 25 bp, Homo sapien
ctgtggagcttggtaccttcagggc

SEQ ID NO: 5217778 - DNA, 25 bp, Homo sapien
gaagcttctttctatgcacatatga

SEQ ID NO: 5217779 - DNA, 25 bp, Homo sapien
ccttcagggctttggtacattggct

SEQ ID NO: 5217780 - DNA, 25 bp, Homo sapien
acaatggaggaggaaccctgcaaaa

SEQ ID NO: 5217781 - DNA, 25 bp, Homo sapien
gagcaagaatggatccagagagcca

SEQ ID NO: 5217782 - DNA, 25 bp, Homo sapien
ttcaagtggatgcttgtgaggctct

SEQ ID NO: 5217783 - DNA, 25 bp, Homo sapien
taaagggtgagttcactaaccctgc

SEQ ID NO: 5217784 - DNA, 25 bp, Homo sapien
ccagggacattctagtgttgtggct

SEQ ID NO: 5217785 - DNA, 25 bp, Homo sapien
cttccttcatgaaagcttccttcat

SEQ ID NO: 5217786 - DNA, 25 bp, Homo sapien
catgcagtttttgtgtgatctttct

SEQ ID NO: 5217787 - DNA, 25 bp, Homo sapien
ctgcttccttcatgaaagcttcctt

SEQ ID NO: 5217788 - DNA, 25 bp, Homo sapien
ttctgcttccttcatgaaagcttcc

SEQ ID NO: 5217789 - DNA, 25 bp, Homo sapien
cccactcaggcttttctgactcact

SEQ ID NO: 5217790 - DNA, 25 bp, Homo sapien
ttcttcccactcaggcttttctgac

SEQ ID NO: 5217791 - DNA, 25 bp, Homo sapien
tcttcccactcaggcttttctgact

SEQ ID NO: 5217792 - DNA, 25 bp, Homo sapien
actcaggcttttctgactcactggc

SEQ ID NO: 5217793 - DNA, 25 bp, Homo sapien
tttttggcatatggtgcagggagct

SEQ ID NO: 5217794 - DNA, 25 bp, Homo sapien
gggaaatcagtgcaaacaaccctcg

SEQ ID NO: 5217795 - DNA, 25 bp, Homo sapien
ccaggggagcccagacagttgtctt

SEQ ID NO: 5217796 - DNA, 25 bp, Homo sapien
gttcccaggcaagaacctccagcag

SEQ ID NO: 5217797 - DNA, 25 bp, Homo sapien
gaagagctcaggataccatgcaaag

SEQ ID NO: 5217798 - DNA, 25 bp, Homo sapien
caagtactcagatcttggaatagcc

SEQ ID NO: 5217799 - DNA, 25 bp, Homo sapien
gagtccctgccagtgacccgggctg

SEQ ID NO: 5217800 - DNA, 25 bp, Homo sapien
gctgagttccctggattggtcccaa

SEQ ID NO: 5217801 - DNA, 25 bp, Homo sapien
ttcttttgaatattggtgaacagac

SEQ ID NO: 5217802 - DNA, 25 bp, Homo sapien
ttgaatattggtgaacagacaccat

SEQ ID NO: 5217803 - DNA, 25 bp, Homo sapien
ttttgaatattggtgaacagacacc

SEQ ID NO: 5217804 - DNA, 25 bp, Homo sapien
cttttgaatattggtgaacagacac

SEQ ID NO: 5217805 - DNA, 25 bp, Homo sapien
tccaggaaattcttctgttgaagtc

SEQ ID NO: 5217806 - DNA, 25 bp, Homo sapien
gagtccaggaaattcttctgttgaa

SEQ ID NO: 5217807 - DNA, 25 bp, Homo sapien
ctctcctcctttcagagtccaggaa

SEQ ID NO: 5217808 - DNA, 25 bp, Homo sapien
cctttcagagtccaggaaattcttc

SEQ ID NO: 5217809 - DNA, 25 bp, Homo sapien
tttctgaagagagttctgggtcagc

SEQ ID NO: 5217810 - DNA, 25 bp, Homo sapien
ttaggatagaccaaagcctcagagg

SEQ ID NO: 5217811 - DNA, 25 bp, Homo sapien
tcttttgaaactttgtgaggtggaa

SEQ ID NO: 5217812 - DNA, 25 bp, Homo sapien
gaaaaaggagagttaggatagacca

SEQ ID NO: 5217813 - DNA, 25 bp, Homo sapien
cccatgagctttccttcttagtatc

SEQ ID NO: 5217814 - DNA, 25 bp, Homo sapien
ttctgtggtgatatcttgcttggct

SEQ ID NO: 5217815 - DNA, 25 bp, Homo sapien
ctccaggtttgtgtatcctgcttgg

SEQ ID NO: 5217816 - DNA, 25 bp, Homo sapien
cttagtatctttcgattctgtggtg

SEQ ID NO: 5217817 - DNA, 25 bp, Homo sapien
tactcatcatggctttcctgctctc

SEQ ID NO: 5217818 - DNA, 25 bp, Homo sapien
ctactcatcatggctttcctgctct

SEQ ID NO: 5217819 - DNA, 25 bp, Homo sapien
ctcatcatggctttcctgctctctg

SEQ ID NO: 5217820 - DNA, 25 bp, Homo sapien
actcatcatggctttcctgctctct

SEQ ID NO: 5217821 - DNA, 25 bp, Homo sapien
ttttccacatggaaaatacggtatc

SEQ ID NO: 5217822 - DNA, 25 bp, Homo sapien
gatgacttttccacatggaaaatac

SEQ ID NO: 5217823 - DNA, 25 bp, Homo sapien
tgacttttccacatggaaaatacgg

SEQ ID NO: 5217824 - DNA, 25 bp, Homo sapien
cttttccacatggaaaatacggtat

SEQ ID NO: 5217825 - DNA, 25 bp, Homo sapien
gctgctttggatgtggagcgctgga

SEQ ID NO: 5217826 - DNA, 25 bp, Homo sapien
cggcatctgtcttcagccctggcga

SEQ ID NO: 5217827 - DNA, 25 bp, Homo sapien
gagcgctggaggtgtgtgcgtggct

SEQ ID NO: 5217828 - DNA, 25 bp, Homo sapien
tcttgagacatccaccggcatctgt

SEQ ID NO: 5217829 - DNA, 25 bp, Homo sapien
tctctgcccttatatagaagaggag

SEQ ID NO: 5217830 - DNA, 25 bp, Homo sapien
cccttatatagaagaggaggacggt

SEQ ID NO: 5217831 - DNA, 25 bp, Homo sapien
tcagggtctctctgcccttatatag

SEQ ID NO: 5217832 - DNA, 25 bp, Homo sapien
gacggtgaggtaagactggtttaga

SEQ ID NO: 5217833 - DNA, 25 bp, Homo sapien
cttggagggaaaccgtctgcagtgc

SEQ ID NO: 5217834 - DNA, 25 bp, Homo sapien
tccattcttgagagcataatctggg

SEQ ID NO: 5217835 - DNA, 25 bp, Homo sapien
gcagtgctcggttggatctcaaggc

SEQ ID NO: 5217836 - DNA, 25 bp, Homo sapien
agcatggcttcgtctccgggaacgt

SEQ ID NO: 5217837 - DNA, 25 bp, Homo sapien
agcttcatgcgtttctcatctgcca

SEQ ID NO: 5217838 - DNA, 25 bp, Homo sapien
ccatttggataaagcttcatgcgtt

SEQ ID NO: 5217839 - DNA, 25 bp, Homo sapien
caggaaaattctgttcgttggagca

SEQ ID NO: 5217840 - DNA, 25 bp, Homo sapien
taccaagaatgactgggttttccat

SEQ ID NO: 5217841 - DNA, 25 bp, Homo sapien
caagggctcagatcctttacggatg

SEQ ID NO: 5217842 - DNA, 25 bp, Homo sapien
tggcaagtgggtaagttcagcaact

SEQ ID NO: 5217843 - DNA, 25 bp, Homo sapien
tcagatcctttacggatggtctgca

SEQ ID NO: 5217844 - DNA, 25 bp, Homo sapien
ggcaagtgggtaagttcagcaactc

SEQ ID NO: 5217845 - DNA, 25 bp, Homo sapien
tcgtatgcagctcctaatttggtga

SEQ ID NO: 5217846 - DNA, 25 bp, Homo sapien
gcagattaacatggcctcagataca

SEQ ID NO: 5217847 - DNA, 25 bp, Homo sapien
tggcctctttgctacggcagattaa

SEQ ID NO: 5217848 - DNA, 25 bp, Homo sapien
gaagtcaccagtcttgtgccggaag

SEQ ID NO: 5217849 - DNA, 25 bp, Homo sapien
catccttgatactgcccgaaagtgg

SEQ ID NO: 5217850 - DNA, 25 bp, Homo sapien
gatactgcccgaaagtggcagagat

SEQ ID NO: 5217851 - DNA, 25 bp, Homo sapien
gccctcagcaacatccttgatactg

SEQ ID NO: 5217852 - DNA, 25 bp, Homo sapien
tcagcaacatccttgatactgcccg

SEQ ID NO: 5217853 - DNA, 25 bp, Homo sapien
catatagttctgacttttataagtc

SEQ ID NO: 5217854 - DNA, 25 bp, Homo sapien
tagttctgacttttataagtcatat

SEQ ID NO: 5217855 - DNA, 25 bp, Homo sapien
gccatatagttctgacttttataag

SEQ ID NO: 5217856 - DNA, 25 bp, Homo sapien
ctgccatatagttctgacttttata

SEQ ID NO: 5217857 - DNA, 25 bp, Homo sapien
tatttgccaggcactcaaaggaagc

SEQ ID NO: 5217858 - DNA, 25 bp, Homo sapien
gatcctcactgatggtgccttggca

SEQ ID NO: 5217859 - DNA, 25 bp, Homo sapien
cattggagtctccttgaaggtcccc

SEQ ID NO: 5217860 - DNA, 25 bp, Homo sapien
gaccccagttggtgtctcatggtga

SEQ ID NO: 5217861 - DNA, 25 bp, Homo sapien
cctctaaaaccttgttggcaaacat

SEQ ID NO: 5217862 - DNA, 25 bp, Homo sapien
tggcaaacatagatatctgcctgct

SEQ ID NO: 5217863 - DNA, 25 bp, Homo sapien
cgtgtgcttgacaatccctctaaaa

SEQ ID NO: 5217864 - DNA, 25 bp, Homo sapien
tcagtcagttaaaattccagggcaa

SEQ ID NO: 5217865 - DNA, 25 bp, Homo sapien
tcttttcccaataagccacaggcag

SEQ ID NO: 5217866 - DNA, 25 bp, Homo sapien
agagagctactcaaatccaaatcca

SEQ ID NO: 5217867 - DNA, 25 bp, Homo sapien
taagatggctgtaagggccatctca

SEQ ID NO: 5217868 - DNA, 25 bp, Homo sapien
aaagagcgaatgaactgcatctgca

SEQ ID NO: 5217869 - DNA, 25 bp, Homo sapien
ctctacattccagggtctcttcgct

SEQ ID NO: 5217870 - DNA, 25 bp, Homo sapien
tacattccagggtctcttcgctgct

SEQ ID NO: 5217871 - DNA, 25 bp, Homo sapien
attccagggtctcttcgctgctcct

SEQ ID NO: 5217872 - DNA, 25 bp, Homo sapien
agggtctcttcgctgctcctttccg

SEQ ID NO: 5217873 - DNA, 25 bp, Homo sapien
ctgtgtctgcttgttgaacacccac

SEQ ID NO: 5217874 - DNA, 25 bp, Homo sapien
gcttgttgaacacccacagttgtta

SEQ ID NO: 5217875 - DNA, 25 bp, Homo sapien
tgtctgcttgttgaacacccacagt

SEQ ID NO: 5217876 - DNA, 25 bp, Homo sapien
ttatctgaacacccacaattgttat

SEQ ID NO: 5217877 - DNA, 25 bp, Homo sapien
agtgctggagctcgggtcagccctt

SEQ ID NO: 5217878 - DNA, 25 bp, Homo sapien
aatcaggcgcggaaaaagtgctgga

SEQ ID NO: 5217879 - DNA, 25 bp, Homo sapien
ctgaaaaatcaggcgcggaaaaagt

SEQ ID NO: 5217880 - DNA, 25 bp, Homo sapien
aaaaatcaggcgcggaaaaagtgct

SEQ ID NO: 5217881 - DNA, 25 bp, Homo sapien
atgtaagcaaagatagcccattcga

SEQ ID NO: 5217882 - DNA, 25 bp, Homo sapien
gcaaagatagcccattcgaaaatga

SEQ ID NO: 5217883 - DNA, 25 bp, Homo sapien
caaagatagcccattcgaaaatgac

SEQ ID NO: 5217884 - DNA, 25 bp, Homo sapien
taagcaaagatagcccattcgaaaa

SEQ ID NO: 5217885 - DNA, 25 bp, Homo sapien
cactgtctgcaaatacgagatgttt

SEQ ID NO: 5217886 - DNA, 25 bp, Homo sapien
tgtctgcaaatacgagatgtttttc

SEQ ID NO: 5217887 - DNA, 25 bp, Homo sapien
cagcactgtctgcaaatacgagatg

SEQ ID NO: 5217888 - DNA, 25 bp, Homo sapien
tctgcaaatacgagatgtttttcct

SEQ ID NO: 5217889 - DNA, 25 bp, Homo sapien
ttgcaagagaatcatcttctcctac

SEQ ID NO: 5217890 - DNA, 25 bp, Homo sapien
gttgcaagagaatcatcttctccta

SEQ ID NO: 5217891 - DNA, 25 bp, Homo sapien
gtgttgcaagagaatcatcttctcc

SEQ ID NO: 5217892 - DNA, 25 bp, Homo sapien
tgttgcaagagaatcatcttctcct

SEQ ID NO: 5217893 - DNA, 25 bp, Homo sapien
tgctcacgcctctctcgggttttgt

SEQ ID NO: 5217894 - DNA, 25 bp, Homo sapien
tagaagaatcccagtacagcttccg

SEQ ID NO: 5217895 - DNA, 25 bp, Homo sapien
cgggttttgtatccgctcacacgca

SEQ ID NO: 5217896 - DNA, 25 bp, Homo sapien
tttgcttgcttgctccagaccgact

SEQ ID NO: 5217897 - DNA, 25 bp, Homo sapien
gctgccggcgcttgcagcggagggc

SEQ ID NO: 5217898 - DNA, 25 bp, Homo sapien
gattccttcactgacacaactccgg

SEQ ID NO: 5217899 - DNA, 25 bp, Homo sapien
ctgcggctcggagggcgggccgagc

SEQ ID NO: 5217900 - DNA, 25 bp, Homo sapien
ccgccttcccctcggtgtcactcac

SEQ ID NO: 5217901 - DNA, 25 bp, Homo sapien
agggcggggtggtcgcggctgacgt

SEQ ID NO: 5217902 - DNA, 25 bp, Homo sapien
gacgtgggctttgcggctccgggcc

SEQ ID NO: 5217903 - DNA, 25 bp, Homo sapien
cccactcccgctgggcgccaggggc

SEQ ID NO: 5217904 - DNA, 25 bp, Homo sapien
gtggtcgcggctgacgtgggctttg

SEQ ID NO: 5217905 - DNA, 25 bp, Homo sapien
cgtccagcgcgagcgcatcctacga

SEQ ID NO: 5217906 - DNA, 25 bp, Homo sapien
tcagccccgcgtgtgcggcagcatg

SEQ ID NO: 5217907 - DNA, 25 bp, Homo sapien
catgatattcagagtgcgccggcgt

SEQ ID NO: 5217908 - DNA, 25 bp, Homo sapien
aaatgcggcggcgcgaccgcttcgt

SEQ ID NO: 5217909 - DNA, 25 bp, Homo sapien
tatgagttaggctctgaggacccaa

SEQ ID NO: 5217910 - DNA, 25 bp, Homo sapien
ggccagggccggtagacagaataaa

SEQ ID NO: 5217911 - DNA, 25 bp, Homo sapien
gatggtctagaggaacgatgcaaac

SEQ ID NO: 5217912 - DNA, 25 bp, Homo sapien
cagcgtaagaaaggatgtgatggtc

SEQ ID NO: 5217913 - DNA, 25 bp, Homo sapien
catagtcagttcagcacttggcacc

SEQ ID NO: 5217914 - DNA, 25 bp, Homo sapien
tcaactcggctaggtgcactgtgca

SEQ ID NO: 5217915 - DNA, 25 bp, Homo sapien
tgcagtgtcccacagatggctggct

SEQ ID NO: 5217916 - DNA, 25 bp, Homo sapien
tgaatctctaggaactgggtgctga

SEQ ID NO: 5217917 - DNA, 25 bp, Homo sapien
tcattagaggagactgacacacacc

SEQ ID NO: 5217918 - DNA, 25 bp, Homo sapien
cctttagtggagatgctacgggcag

SEQ ID NO: 5217919 - DNA, 25 bp, Homo sapien
taatcattcaaaaagctcgtgggct

SEQ ID NO: 5217920 - DNA, 25 bp, Homo sapien
aaagaagctttcgtgccatgccagg

SEQ ID NO: 5217921 - DNA, 25 bp, Homo sapien
ccccttcctgatccaacctggtaag

SEQ ID NO: 5217922 - DNA, 25 bp, Homo sapien
cccttcctgatccaacctggtaaga

SEQ ID NO: 5217923 - DNA, 25 bp, Homo sapien
tccccttcctgatccaacctggtaa

SEQ ID NO: 5217924 - DNA, 25 bp, Homo sapien
ttcctgatccaacctggtaagatct

SEQ ID NO: 5217925 - DNA, 25 bp, Homo sapien
gggaatccacagcaatgttcctgaa

SEQ ID NO: 5217926 - DNA, 25 bp, Homo sapien
tgggaatccacagcaatgttcctga

SEQ ID NO: 5217927 - DNA, 25 bp, Homo sapien
ctgggaatccacagcaatgttcctg

SEQ ID NO: 5217928 - DNA, 25 bp, Homo sapien
gagagggaaggaccatctctactca

SEQ ID NO: 5217929 - DNA, 25 bp, Homo sapien
gcggccaaaggctgtgacaaggctc

SEQ ID NO: 5217930 - DNA, 25 bp, Homo sapien
ggcggccaaaggctgtgacaaggct

SEQ ID NO: 5217931 - DNA, 25 bp, Homo sapien
aggcggccaaaggctgtgacaaggc

SEQ ID NO: 5217932 - DNA, 25 bp, Homo sapien
aagagaactctggtgttgagccctg

SEQ ID NO: 5217933 - DNA, 25 bp, Homo sapien
tatgcatgaaactactctaaagatc

SEQ ID NO: 5217934 - DNA, 25 bp, Homo sapien
tggcactgacttacatccaccagac

SEQ ID NO: 5217935 - DNA, 25 bp, Homo sapien
gatccacagacgtggcaaggcaggt

SEQ ID NO: 5217936 - DNA, 25 bp, Homo sapien
cactgccctatcaggaataacttca

SEQ ID NO: 5217937 - DNA, 25 bp, Homo sapien
gcatgagctaacaaacccaggccat

SEQ ID NO: 5217938 - DNA, 25 bp, Homo sapien
tagtattctagcatatgattacacc

SEQ ID NO: 5217939 - DNA, 25 bp, Homo sapien
aactaactcttatgaagctatgaag

SEQ ID NO: 5217940 - DNA, 25 bp, Homo sapien
acacacaggcagctaacttagtttt

SEQ ID NO: 5217941 - DNA, 25 bp, Homo sapien
gataacacttctgacccacagtcag

SEQ ID NO: 5217942 - DNA, 25 bp, Homo sapien
ggtttcctatgcgactgacagtgca

SEQ ID NO: 5217943 - DNA, 25 bp, Homo sapien
gactgacatcgttcggcatgcctgg

SEQ ID NO: 5217944 - DNA, 25 bp, Homo sapien
ctaaggaacggctttctgactgaca

SEQ ID NO: 5217945 - DNA, 25 bp, Homo sapien
ttcagaggaccataacagaggccac

SEQ ID NO: 5217946 - DNA, 25 bp, Homo sapien
tgcgagcacagcatacttcagagga

SEQ ID NO: 5217947 - DNA, 25 bp, Homo sapien
gaggccacccaataccaaggatgag

SEQ ID NO: 5217948 - DNA, 25 bp, Homo sapien
gaaggaacagacatacccagcagga

SEQ ID NO: 5217949 - DNA, 25 bp, Homo sapien
catccggacaatgtggcacttctct

SEQ ID NO: 5217950 - DNA, 25 bp, Homo sapien
cctccatccggacaatgtggcactt

SEQ ID NO: 5217951 - DNA, 25 bp, Homo sapien
gtcaggtcctccatccggacaatgt

SEQ ID NO: 5217952 - DNA, 25 bp, Homo sapien
ggagtctgtttcccatggtcaggtc

SEQ ID NO: 5217953 - DNA, 25 bp, Homo sapien
taagcttgtctttctcagcgtcctc

SEQ ID NO: 5217954 - DNA, 25 bp, Homo sapien
caaccagtctcctgttaagcttgtc

SEQ ID NO: 5217955 - DNA, 25 bp, Homo sapien
cagctctggtctcctgtcccacatt

SEQ ID NO: 5217956 - DNA, 25 bp, Homo sapien
gcagctgcaagagaacaaccagtct

SEQ ID NO: 5217957 - DNA, 25 bp, Homo sapien
taacctttgttgctggaataactgg

SEQ ID NO: 5217958 - DNA, 25 bp, Homo sapien
ccagagctggcctaataaattgagt

SEQ ID NO: 5217959 - DNA, 25 bp, Homo sapien
cttcattttgcagggcagtctagga

SEQ ID NO: 5217960 - DNA, 25 bp, Homo sapien
cagaagatcgaaactggaccacttt

SEQ ID NO: 5217961 - DNA, 25 bp, Homo sapien
ttcaaaggagcaaaagatcaaggat

SEQ ID NO: 5217962 - DNA, 25 bp, Homo sapien
tgagcagctctcagctatgtaaccc

SEQ ID NO: 5217963 - DNA, 25 bp, Homo sapien
aactgcttcccacctacggctgaag

SEQ ID NO: 5217964 - DNA, 25 bp, Homo sapien
tatgtaaccctcaccataagcgctc

SEQ ID NO: 5217965 - DNA, 25 bp, Homo sapien
cttcgctgttcaccagcccatgagg

SEQ ID NO: 5217966 - DNA, 25 bp, Homo sapien
taagtttcaccaaatatatccgtca

SEQ ID NO: 5217967 - DNA, 25 bp, Homo sapien
tatccagggaccacatccatttgct

SEQ ID NO: 5217968 - DNA, 25 bp, Homo sapien
tattttcataacaggcagtgaggaa

SEQ ID NO: 5217969 - DNA, 25 bp, Homo sapien
ctggcccttgattagcagacaggaa

SEQ ID NO: 5217970 - DNA, 25 bp, Homo sapien
gacatccatgatccctaaagcgtta

SEQ ID NO: 5217971 - DNA, 25 bp, Homo sapien
caaacttctgccaatgtaagggagg

SEQ ID NO: 5217972 - DNA, 25 bp, Homo sapien
gcttttaatgacactatgggcttgg

SEQ ID NO: 5217973 - DNA, 25 bp, Homo sapien
tagtaaccgatcctacagaagcagt

SEQ ID NO: 5217974 - DNA, 25 bp, Homo sapien
gaagagtcaaagtggcaggttacct

SEQ ID NO: 5217975 - DNA, 25 bp, Homo sapien
tgacttgagcgccaatatattgcag

SEQ ID NO: 5217976 - DNA, 25 bp, Homo sapien
tcacacaaatgggatagaagttggc

SEQ ID NO: 5217977 - DNA, 25 bp, Homo sapien
gaatggccaggatttacagagctag

SEQ ID NO: 5217978 - DNA, 25 bp, Homo sapien
ccaaggctttaagctttgaccacag

SEQ ID NO: 5217979 - DNA, 25 bp, Homo sapien
gcaggtggagactgatccaaggctt

SEQ ID NO: 5217980 - DNA, 25 bp, Homo sapien
gagactgatccaaggctttaagctt

SEQ ID NO: 5217981 - DNA, 25 bp, Homo sapien
gatccaaggctttaagctttgacca

SEQ ID NO: 5217982 - DNA, 25 bp, Homo sapien
gaaaaccaggctttgaaacatggcc

SEQ ID NO: 5217983 - DNA, 25 bp, Homo sapien
gaagtcctgtgtaggcaaccagcca

SEQ ID NO: 5217984 - DNA, 25 bp, Homo sapien
cacagtggtcatattgctgtcccag

SEQ ID NO: 5217985 - DNA, 25 bp, Homo sapien
taagctgggccctgaagtagctagg

SEQ ID NO: 5217986 - DNA, 25 bp, Homo sapien
cagagtctccggctatagaactata

SEQ ID NO: 5217987 - DNA, 25 bp, Homo sapien
tgggtatcagctatgtgccaagact

SEQ ID NO: 5217988 - DNA, 25 bp, Homo sapien
taggagtacctagaaagagccctaa

SEQ ID NO: 5217989 - DNA, 25 bp, Homo sapien
tatggactgttagacttggagtaca

SEQ ID NO: 5217990 - DNA, 25 bp, Homo sapien
tgcacaaaactcgacatcactagga

SEQ ID NO: 5217991 - DNA, 25 bp, Homo sapien
cacttttctgatgggattctgtctc

SEQ ID NO: 5217992 - DNA, 25 bp, Homo sapien
taaatggtcttttatggcccctgcc

SEQ ID NO: 5217993 - DNA, 25 bp, Homo sapien
tatacttactatccagctcaccctg

SEQ ID NO: 5217994 - DNA, 25 bp, Homo sapien
gggacctctgccttataactccaga

SEQ ID NO: 5217995 - DNA, 25 bp, Homo sapien
agtcttttcccgagtttcccatgag

SEQ ID NO: 5217996 - DNA, 25 bp, Homo sapien
ttcccatgaggcaactagagtggtc

SEQ ID NO: 5217997 - DNA, 25 bp, Homo sapien
attccaaagggagaaacaatgttgt

SEQ ID NO: 5217998 - DNA, 25 bp, Homo sapien
tttagcacttagtgggcacctgctc

SEQ ID NO: 5217999 - DNA, 25 bp, Homo sapien
gccaggtaccatcctaggtgctggg

SEQ ID NO: 5218000 - DNA, 25 bp, Homo sapien
cctctttaggcaccacactggatga

SEQ ID NO: 5218001 - DNA, 25 bp, Homo sapien
tttgaagaatcctaaagccatgctg

SEQ ID NO: 5218002 - DNA, 25 bp, Homo sapien
cagggggattatatgccaactttag

SEQ ID NO: 5218003 - DNA, 25 bp, Homo sapien
cacagggggattatatgccaacttt

SEQ ID NO: 5218004 - DNA, 25 bp, Homo sapien
ttagcacagggggattatatgccaa

SEQ ID NO: 5218005 - DNA, 25 bp, Homo sapien
caaatttagcacagggggattatat

SEQ ID NO: 5218006 - DNA, 25 bp, Homo sapien
ttaaggtttcctcgtgctccaaatc

SEQ ID NO: 5218007 - DNA, 25 bp, Homo sapien
gtttccagcgactggctttctcagg

SEQ ID NO: 5218008 - DNA, 25 bp, Homo sapien
ttcctcgtgctccaaatcagggctc

SEQ ID NO: 5218009 - DNA, 25 bp, Homo sapien
gaggcacataagctctgttccccca

SEQ ID NO: 5218010 - DNA, 25 bp, Homo sapien
tatcaaatcgctttctgacttgctt

SEQ ID NO: 5218011 - DNA, 25 bp, Homo sapien
ctatcaaatcgctttctgacttgct

SEQ ID NO: 5218012 - DNA, 25 bp, Homo sapien
tataatggaagacagatcttaagac

SEQ ID NO: 5218013 - DNA, 25 bp, Homo sapien
tgtccaatctctttgtaaagtggcc

SEQ ID NO: 5218014 - DNA, 25 bp, Homo sapien
gcctttggtgtccaatctctttgta

SEQ ID NO: 5218015 - DNA, 25 bp, Homo sapien
tatcatgagcaacattccagattga

SEQ ID NO: 5218016 - DNA, 25 bp, Homo sapien
tggtgtccaatctctttgtaaagtg

SEQ ID NO: 5218017 - DNA, 25 bp, Homo sapien
tccaagaggaggtgaccaccatatc

SEQ ID NO: 5218018 - DNA, 25 bp, Homo sapien
ccaccatatctaaagctgccacctc

SEQ ID NO: 5218019 - DNA, 25 bp, Homo sapien
tagcttgagttatcacctcctccaa

SEQ ID NO: 5218020 - DNA, 25 bp, Homo sapien
tctttatcttagcttgagttatcac

SEQ ID NO: 5218021 - DNA, 25 bp, Homo sapien
gacattcacatgagtattgagttca

SEQ ID NO: 5218022 - DNA, 25 bp, Homo sapien
attcacatgagtattgagttcagcc

SEQ ID NO: 5218023 - DNA, 25 bp, Homo sapien
tgacattcacatgagtattgagttc

SEQ ID NO: 5218024 - DNA, 25 bp, Homo sapien
cattcacatgagtattgagttcagc

SEQ ID NO: 5218025 - DNA, 25 bp, Homo sapien
ttctgtgagccaacgtataacttga

SEQ ID NO: 5218026 - DNA, 25 bp, Homo sapien
tggagtttctgtgagccaacgtata

SEQ ID NO: 5218027 - DNA, 25 bp, Homo sapien
gaactgcattacctagtttggagtt

SEQ ID NO: 5218028 - DNA, 25 bp, Homo sapien
gagccaacgtataacttgatcttac

SEQ ID NO: 5218029 - DNA, 25 bp, Homo sapien
gctcttagatgtaacccagcctggg

SEQ ID NO: 5218030 - DNA, 25 bp, Homo sapien
tatgaacggtggaatggcacactgc

SEQ ID NO: 5218031 - DNA, 25 bp, Homo sapien
gattctaaccgcgatcccttggaga

SEQ ID NO: 5218032 - DNA, 25 bp, Homo sapien
tggagatccacggacctgggtagac

SEQ ID NO: 5218033 - DNA, 25 bp, Homo sapien
tccatggtccaactttaggagctgt

SEQ ID NO: 5218034 - DNA, 25 bp, Homo sapien
caccagccatgttttgcagggatca

SEQ ID NO: 5218035 - DNA, 25 bp, Homo sapien
tgccaatcctcgatcagcaccatgg

SEQ ID NO: 5218036 - DNA, 25 bp, Homo sapien
cagggatcaattgctatgagtctga

SEQ ID NO: 5218037 - DNA, 25 bp, Homo sapien
tatttcatgcagcaggatatgaccg

SEQ ID NO: 5218038 - DNA, 25 bp, Homo sapien
cacagccttaccttgttggagatca

SEQ ID NO: 5218039 - DNA, 25 bp, Homo sapien
gatatgaccggttactcagcaaagg

SEQ ID NO: 5218040 - DNA, 25 bp, Homo sapien
taagtggcttatttcagggtgctca

SEQ ID NO: 5218041 - DNA, 25 bp, Homo sapien
cagcagttctgtacataagcattag

SEQ ID NO: 5218042 - DNA, 25 bp, Homo sapien
tcttatcccctgaaactgaggctga

SEQ ID NO: 5218043 - DNA, 25 bp, Homo sapien
tgtgaattccgatcatgtagcctgg

SEQ ID NO: 5218044 - DNA, 25 bp, Homo sapien
tagcctggaaaaagcaatgcgatgc

SEQ ID NO: 5218045 - DNA, 25 bp, Homo sapien
tcagctgcagtgcacaggggctacc

SEQ ID NO: 5218046 - DNA, 25 bp, Homo sapien
ctgcagtgcacaggggctaccagga

SEQ ID NO: 5218047 - DNA, 25 bp, Homo sapien
agtgcacaggggctaccaggaaaga

SEQ ID NO: 5218048 - DNA, 25 bp, Homo sapien
agctgcagtgcacaggggctaccag

SEQ ID NO: 5218049 - DNA, 25 bp, Homo sapien
aataaatcaaaagtccactaggagc

SEQ ID NO: 5218050 - DNA, 25 bp, Homo sapien
cacagggtttcattttcgacatgct

SEQ ID NO: 5218051 - DNA, 25 bp, Homo sapien
tccgaacagatttccagtgtacaag

SEQ ID NO: 5218052 - DNA, 25 bp, Homo sapien
ggcatctgtctcttggatgactcaa

SEQ ID NO: 5218053 - DNA, 25 bp, Homo sapien
aaacatagctaaacctgagccccac

SEQ ID NO: 5218054 - DNA, 25 bp, Homo sapien
tttcaaaacatagctaaacctgagc

SEQ ID NO: 5218055 - DNA, 25 bp, Homo sapien
cagggactctaatatccatccagaa

SEQ ID NO: 5218056 - DNA, 25 bp, Homo sapien
ggactctaatatccatccagaattg

SEQ ID NO: 5218057 - DNA, 25 bp, Homo sapien
gatgaattggaacactagagaaagg

SEQ ID NO: 5218058 - DNA, 25 bp, Homo sapien
ggatgaattggaacactagagaaag

SEQ ID NO: 5218059 - DNA, 25 bp, Homo sapien
gggaggatgaattggaacactagag

SEQ ID NO: 5218060 - DNA, 25 bp, Homo sapien
gaggatgaattggaacactagagaa

SEQ ID NO: 5218061 - DNA, 25 bp, Homo sapien
agatctgttacggtgccgatcggca

SEQ ID NO: 5218062 - DNA, 25 bp, Homo sapien
tggactgcacagatctgttacggtg

SEQ ID NO: 5218063 - DNA, 25 bp, Homo sapien
tacggtgccgatcggcatggctttc

SEQ ID NO: 5218064 - DNA, 25 bp, Homo sapien
tgccgatcggcatggctttccccag

SEQ ID NO: 5218065 - DNA, 25 bp, Homo sapien
taaataactagcacatcattctggt

SEQ ID NO: 5218066 - DNA, 25 bp, Homo sapien
tggtaacaacgttctctctgaatct

SEQ ID NO: 5218067 - DNA, 25 bp, Homo sapien
ttgcacaattaatctccccaaagtg

SEQ ID NO: 5218068 - DNA, 25 bp, Homo sapien
tggaaaaggcctcctaatgggattc

SEQ ID NO: 5218069 - DNA, 25 bp, Homo sapien
tcacacaatctttgcatccaacgag

SEQ ID NO: 5218070 - DNA, 25 bp, Homo sapien
ttataaggagatgtctttccctatc

SEQ ID NO: 5218071 - DNA, 25 bp, Homo sapien
aatataccttccagatggcaaccct

SEQ ID NO: 5218072 - DNA, 25 bp, Homo sapien
aaaaaatataccttccagatggcaa

SEQ ID NO: 5218073 - DNA, 25 bp, Homo sapien
tgggggaattctagccattcactca

SEQ ID NO: 5218074 - DNA, 25 bp, Homo sapien
tctactgacagggagcatatcttta

SEQ ID NO: 5218075 - DNA, 25 bp, Homo sapien
cattagaatgtacatgacagctggg

SEQ ID NO: 5218076 - DNA, 25 bp, Homo sapien
taaataatcccgattggcaaaggtg

SEQ ID NO: 5218077 - DNA, 25 bp, Homo sapien
tatatccacagggtctagaacaatg

SEQ ID NO: 5218078 - DNA, 25 bp, Homo sapien
tatgaccttgggtgaaccacttaaa

SEQ ID NO: 5218079 - DNA, 25 bp, Homo sapien
ggcactgcactagaggctggataca

SEQ ID NO: 5218080 - DNA, 25 bp, Homo sapien
gaaacttggttctgtagctgtaaaa

SEQ ID NO: 5218081 - DNA, 25 bp, Homo sapien
cccttctctatggtgtaactggtac

SEQ ID NO: 5218082 - DNA, 25 bp, Homo sapien
ttccctatctgactccgcaggctct

SEQ ID NO: 5218083 - DNA, 25 bp, Homo sapien
tccctatctgactccgcaggctctg

SEQ ID NO: 5218084 - DNA, 25 bp, Homo sapien
tttagtcatgatcctctcctctctc

SEQ ID NO: 5218085 - DNA, 25 bp, Homo sapien
tgttttagtcatgatcctctcctct

SEQ ID NO: 5218086 - DNA, 25 bp, Homo sapien
ttcactctggtttggcaaagtccat

SEQ ID NO: 5218087 - DNA, 25 bp, Homo sapien
taatgtgatgctattgaccagaaca

SEQ ID NO: 5218088 - DNA, 25 bp, Homo sapien
gaatactagagtactgcatggtgca

SEQ ID NO: 5218089 - DNA, 25 bp, Homo sapien
tatcacagggattactgcagctgct

SEQ ID NO: 5218090 - DNA, 25 bp, Homo sapien
tgatcattaaagcactgtacggtct

SEQ ID NO: 5218091 - DNA, 25 bp, Homo sapien
tctctatctgcacagtggaaacagt

SEQ ID NO: 5218092 - DNA, 25 bp, Homo sapien
ttctctatctgcacagtggaaacag

SEQ ID NO: 5218093 - DNA, 25 bp, Homo sapien
tgtacagaaatagcctcatgcctca

SEQ ID NO: 5218094 - DNA, 25 bp, Homo sapien
aaatgtacagaaatagcctcatgcc

SEQ ID NO: 5218095 - DNA, 25 bp, Homo sapien
gggaacaactgatctaactgcatag

SEQ ID NO: 5218096 - DNA, 25 bp, Homo sapien
ttgggaacaactgatctaactgcat

SEQ ID NO: 5218097 - DNA, 25 bp, Homo sapien
caaaggcttgcacggctttatccac

SEQ ID NO: 5218098 - DNA, 25 bp, Homo sapien
catccacaaaggcttgcacggcttt

SEQ ID NO: 5218099 - DNA, 25 bp, Homo sapien
tcagctgcagggtacaggtatacct

SEQ ID NO: 5218100 - DNA, 25 bp, Homo sapien
tctggaatatttaagtctaacatct

SEQ ID NO: 5218101 - DNA, 25 bp, Homo sapien
caatcatgtgaaacctcgcacattt

SEQ ID NO: 5218102 - DNA, 25 bp, Homo sapien
tgagacctaaagtacacataatgaa

SEQ ID NO: 5218103 - DNA, 25 bp, Homo sapien
tccattcttttagaacttgaattgc

SEQ ID NO: 5218104 - DNA, 25 bp, Homo sapien
atattccattcttttagaacttgaa

SEQ ID NO: 5218105 - DNA, 25 bp, Homo sapien
ttttttcctgtcatattccattctt

SEQ ID NO: 5218106 - DNA, 25 bp, Homo sapien
tcttttagaacttgaattgcactgc

SEQ ID NO: 5218107 - DNA, 25 bp, Homo sapien
gttctcaaagagcagtacgccagtg

SEQ ID NO: 5218108 - DNA, 25 bp, Homo sapien
aattcggccaaaaagcatctcaggg

SEQ ID NO: 5218109 - DNA, 25 bp, Homo sapien
gaaatccgaaacacaaggccttgct

SEQ ID NO: 5218110 - DNA, 25 bp, Homo sapien
gactggcgtactatatcctgggaaa

SEQ ID NO: 5218111 - DNA, 25 bp, Homo sapien
acataatattcaactcagactcttg

SEQ ID NO: 5218112 - DNA, 25 bp, Homo sapien
cataatattcaactcagactcttga

SEQ ID NO: 5218113 - DNA, 25 bp, Homo sapien
ggttcctggctcttcttatagactg

SEQ ID NO: 5218114 - DNA, 25 bp, Homo sapien
tttggttcctggctcttcttataga

SEQ ID NO: 5218115 - DNA, 25 bp, Homo sapien
tgccttgatgctgcttggacttgct

SEQ ID NO: 5218116 - DNA, 25 bp, Homo sapien
gccttgatgctgcttggacttgctt

SEQ ID NO: 5218117 - DNA, 25 bp, Homo sapien
tgatgctgcttggacttgcttcttt

SEQ ID NO: 5218118 - DNA, 25 bp, Homo sapien
cttgatgctgcttggacttgcttct

SEQ ID NO: 5218119 - DNA, 25 bp, Homo sapien
tttctcacgagggataagggctggt

SEQ ID NO: 5218120 - DNA, 25 bp, Homo sapien
tgtgaccccacgaagtgcctttgaa

SEQ ID NO: 5218121 - DNA, 25 bp, Homo sapien
tgtccttctcgcagccattcatggg

SEQ ID NO: 5218122 - DNA, 25 bp, Homo sapien
agcagaatctgtggacgagctgtcc

SEQ ID NO: 5218123 - DNA, 25 bp, Homo sapien
gaatcgtacacactgcagaaaaaca

SEQ ID NO: 5218124 - DNA, 25 bp, Homo sapien
ggaaggctgaatcgtacacactgca

SEQ ID NO: 5218125 - DNA, 25 bp, Homo sapien
aaaatcctctgacttggtgtagagc

SEQ ID NO: 5218126 - DNA, 25 bp, Homo sapien
gtagagctagattgagcatttattc

SEQ ID NO: 5218127 - DNA, 25 bp, Homo sapien
atttttggccatgtggaaaaccaca

SEQ ID NO: 5218128 - DNA, 25 bp, Homo sapien
gctagatgacttgcaatcctgggaa

SEQ ID NO: 5218129 - DNA, 25 bp, Homo sapien
tgagtctagacagttttactacgga

SEQ ID NO: 5218130 - DNA, 25 bp, Homo sapien
cctgggaatgtcatacacaacaaag

SEQ ID NO: 5218131 - DNA, 25 bp, Homo sapien
tcttccaaggaaaagggcagattac

SEQ ID NO: 5218132 - DNA, 25 bp, Homo sapien
gctgctaacgaaattaagggccaat

SEQ ID NO: 5218133 - DNA, 25 bp, Homo sapien
acagtgtacgtgatttcaggcatcc

SEQ ID NO: 5218134 - DNA, 25 bp, Homo sapien
aagggagaatgggatcactgtgcaa

SEQ ID NO: 5218135 - DNA, 25 bp, Homo sapien
taaacttctaaacgatctgctgaca

SEQ ID NO: 5218136 - DNA, 25 bp, Homo sapien
cactgtgcccgctcggcaaaaataa

SEQ ID NO: 5218137 - DNA, 25 bp, Homo sapien
gagccacctgcatatatcttaaagc

SEQ ID NO: 5218138 - DNA, 25 bp, Homo sapien
gtaggaagtcacactaacacccctg

SEQ ID NO: 5218139 - DNA, 25 bp, Homo sapien
tcaaatttcctcaattagtgtaaag

SEQ ID NO: 5218140 - DNA, 25 bp, Homo sapien
aatttcctcaattagtgtaaagtct

SEQ ID NO: 5218141 - DNA, 25 bp, Homo sapien
atttcctcaattagtgtaaagtctt

SEQ ID NO: 5218142 - DNA, 25 bp, Homo sapien
caaatttcctcaattagtgtaaagt

SEQ ID NO: 5218143 - DNA, 25 bp, Homo sapien
taattacacctatgtgagactgcct

SEQ ID NO: 5218144 - DNA, 25 bp, Homo sapien
tgaaatgacccttggatatgaggct

SEQ ID NO: 5218145 - DNA, 25 bp, Homo sapien
tctggaatcattagatgcacataca

SEQ ID NO: 5218146 - DNA, 25 bp, Homo sapien
gatactgttccttaagtcactgagg

SEQ ID NO: 5218147 - DNA, 25 bp, Homo sapien
gaaactgtttaagattgcaattaca

SEQ ID NO: 5218148 - DNA, 25 bp, Homo sapien
tgaatttccttggtaagcatagtgt

SEQ ID NO: 5218149 - DNA, 25 bp, Homo sapien
tactgtgttcagacaccatactctt

SEQ ID NO: 5218150 - DNA, 25 bp, Homo sapien
attcactaaggaagtcatctgggcc

SEQ ID NO: 5218151 - DNA, 25 bp, Homo sapien
gctgaccactgtaggccatctgacc

SEQ ID NO: 5218152 - DNA, 25 bp, Homo sapien
ggttcccatctaaggatagtttctg

SEQ ID NO: 5218153 - DNA, 25 bp, Homo sapien
gggtattggacttaacaggagatgt

SEQ ID NO: 5218154 - DNA, 25 bp, Homo sapien
tgcttgggttacaaggctgctcagc

SEQ ID NO: 5218155 - DNA, 25 bp, Homo sapien
caagacctttgattacatgggagga

SEQ ID NO: 5218156 - DNA, 25 bp, Homo sapien
catgcctacaacaagaatggtctca

SEQ ID NO: 5218157 - DNA, 25 bp, Homo sapien
cgtatcaagtatatccaagctcaga

SEQ ID NO: 5218158 - DNA, 25 bp, Homo sapien
caagcaattgtgtatcagggaaaca

SEQ ID NO: 5218159 - DNA, 25 bp, Homo sapien
ctcgcctgatttcctgcaactgtca

SEQ ID NO: 5218160 - DNA, 25 bp, Homo sapien
cctgatttcctgcaactgtcaccag

SEQ ID NO: 5218161 - DNA, 25 bp, Homo sapien
tgatttcctgcaactgtcaccaggg

SEQ ID NO: 5218162 - DNA, 25 bp, Homo sapien
gcctgatttcctgcaactgtcacca

SEQ ID NO: 5218163 - DNA, 25 bp, Homo sapien
cagcattgaaagcagctctatgggt

SEQ ID NO: 5218164 - DNA, 25 bp, Homo sapien
ctgtaattagagcagcagcattgaa

SEQ ID NO: 5218165 - DNA, 25 bp, Homo sapien
attgaaagcagctctatgggtgccc

SEQ ID NO: 5218166 - DNA, 25 bp, Homo sapien
tgaaagcagctctatgggtgcccat

SEQ ID NO: 5218167 - DNA, 25 bp, Homo sapien
cctgcactctttggaaggaggctgt

SEQ ID NO: 5218168 - DNA, 25 bp, Homo sapien
cactttgcgtggttaaaagccagca

SEQ ID NO: 5218169 - DNA, 25 bp, Homo sapien
ggcatcaatgccaggtacgctggca

SEQ ID NO: 5218170 - DNA, 25 bp, Homo sapien
tgatacgtctaaagaccatttgtgc

SEQ ID NO: 5218171 - DNA, 25 bp, Homo sapien
aaaagggactcatcttttgtctagt

SEQ ID NO: 5218172 - DNA, 25 bp, Homo sapien
agcaattagcccaccagaaaaaggg

SEQ ID NO: 5218173 - DNA, 25 bp, Homo sapien
gagaatgtttgtaacccagtgtggg

SEQ ID NO: 5218174 - DNA, 25 bp, Homo sapien
acttgagcatttaatcctttgtttg

SEQ ID NO: 5218175 - DNA, 25 bp, Homo sapien
tgcagcgttgcaaatccttcactga

SEQ ID NO: 5218176 - DNA, 25 bp, Homo sapien
tatctagttagagaaacggtgcagc

SEQ ID NO: 5218177 - DNA, 25 bp, Homo sapien
tcttccttaatcatgacgcgatatc

SEQ ID NO: 5218178 - DNA, 25 bp, Homo sapien
tcttcttcacggaactatccacttc

SEQ ID NO: 5218179 - DNA, 25 bp, Homo sapien
gcatggtggatatgtgccagccttt

SEQ ID NO: 5218180 - DNA, 25 bp, Homo sapien
gattatgtaatctggcagctgtgag

SEQ ID NO: 5218181 - DNA, 25 bp, Homo sapien
tctcagatcatcagagggctaagga

SEQ ID NO: 5218182 - DNA, 25 bp, Homo sapien
caaattctagaatcacgggaggcca

SEQ ID NO: 5218183 - DNA, 25 bp, Homo sapien
gccccacgctttcagctcttgagga

SEQ ID NO: 5218184 - DNA, 25 bp, Homo sapien
aagatgtctcatgacccatgtgatg

SEQ ID NO: 5218185 - DNA, 25 bp, Homo sapien
tctcaagatgtctcatgacccatgt

SEQ ID NO: 5218186 - DNA, 25 bp, Homo sapien
tggccccacgctttcagctcttgag

SEQ ID NO: 5218187 - DNA, 25 bp, Homo sapien
cactttgagagggaggatacatggt

SEQ ID NO: 5218188 - DNA, 25 bp, Homo sapien
aggaggttcaccctgtctgttggga

SEQ ID NO: 5218189 - DNA, 25 bp, Homo sapien
ggagagagtctcaacagagcatttg

SEQ ID NO: 5218190 - DNA, 25 bp, Homo sapien
gaaaagggatatggagacaccacta

SEQ ID NO: 5218191 - DNA, 25 bp, Homo sapien
tagttggatatatgccagatatgcc

SEQ ID NO: 5218192 - DNA, 25 bp, Homo sapien
atatgccagatatgccagaaacacc

SEQ ID NO: 5218193 - DNA, 25 bp, Homo sapien
ctgggtatgtcactggcatcagagt

SEQ ID NO: 5218194 - DNA, 25 bp, Homo sapien
agaaacaccaagtaatattgctccc

SEQ ID NO: 5218195 - DNA, 25 bp, Homo sapien
aggccctggggaaacatctattgca

SEQ ID NO: 5218196 - DNA, 25 bp, Homo sapien
ccttcatgtcaactgattcattcag

SEQ ID NO: 5218197 - DNA, 25 bp, Homo sapien
tttttgtatttatcaacctgctctt

SEQ ID NO: 5218198 - DNA, 25 bp, Homo sapien
ggaaacatctattgcagaggaaaac

SEQ ID NO: 5218199 - DNA, 25 bp, Homo sapien
gtttacatctgcagccactagtgca

SEQ ID NO: 5218200 - DNA, 25 bp, Homo sapien
gaacctttcctaatgagccaggtag

SEQ ID NO: 5218201 - DNA, 25 bp, Homo sapien
caaaggtcacctctgcaatggaacc

SEQ ID NO: 5218202 - DNA, 25 bp, Homo sapien
gaagaagggtacttctccctgagca

SEQ ID NO: 5218203 - DNA, 25 bp, Homo sapien
taatgaaacttctttgtcaatgatg

SEQ ID NO: 5218204 - DNA, 25 bp, Homo sapien
tggcttcttctttaactttatccat

SEQ ID NO: 5218205 - DNA, 25 bp, Homo sapien
gtatttgacgaagttcatgaacaga

SEQ ID NO: 5218206 - DNA, 25 bp, Homo sapien
gaatttggtacattaagcaatctga

SEQ ID NO: 5218207 - DNA, 25 bp, Homo sapien
gatcaagataatttgagcgtgttca

SEQ ID NO: 5218208 - DNA, 25 bp, Homo sapien
cggttttaagttggcaggtgtcagt

SEQ ID NO: 5218209 - DNA, 25 bp, Homo sapien
ggagcttctgttataattgaggaaa

SEQ ID NO: 5218210 - DNA, 25 bp, Homo sapien
tctcagcactgggttaggtgccatg

SEQ ID NO: 5218211 - DNA, 25 bp, Homo sapien
ctgcagtcttctcagcactgggtta

SEQ ID NO: 5218212 - DNA, 25 bp, Homo sapien
aatatgatttataatgtctacagga

SEQ ID NO: 5218213 - DNA, 25 bp, Homo sapien
gctttcttctgacgagcagtcagga

SEQ ID NO: 5218214 - DNA, 25 bp, Homo sapien
tcttctgacgagcagtcaggatttc

SEQ ID NO: 5218215 - DNA, 25 bp, Homo sapien
gccctgagttcggccagctgcatct

SEQ ID NO: 5218216 - DNA, 25 bp, Homo sapien
tgccctgagttcggccagctgcatc

SEQ ID NO: 5218217 - DNA, 25 bp, Homo sapien
gactgacaaaatagcttgtacctct

SEQ ID NO: 5218218 - DNA, 25 bp, Homo sapien
ggtgtacatgttagatcctcagaga

SEQ ID NO: 5218219 - DNA, 25 bp, Homo sapien
cacagtgattatgtgggtcttcccc

SEQ ID NO: 5218220 - DNA, 25 bp, Homo sapien
catcccagctataattcatggcctg

SEQ ID NO: 5218221 - DNA, 25 bp, Homo sapien
ggaaggagatatactggggaaacca

SEQ ID NO: 5218222 - DNA, 25 bp, Homo sapien
gaacatatattgaagtccagctgtg

SEQ ID NO: 5218223 - DNA, 25 bp, Homo sapien
ggagtttacgtctggtcttagtgga

SEQ ID NO: 5218224 - DNA, 25 bp, Homo sapien
gatgttctaacaagctgggattttt

SEQ ID NO: 5218225 - DNA, 25 bp, Homo sapien
gattacagaaatgaccaaggcaccc

SEQ ID NO: 5218226 - DNA, 25 bp, Homo sapien
tgtccactgcagtgctgacctggtg

SEQ ID NO: 5218227 - DNA, 25 bp, Homo sapien
gagatgaaaagcaggaaccccatga

SEQ ID NO: 5218228 - DNA, 25 bp, Homo sapien
gatgcgttcactctgctcttccggt

SEQ ID NO: 5218229 - DNA, 25 bp, Homo sapien
ccttcagctgttcgatgtcacagga

SEQ ID NO: 5218230 - DNA, 25 bp, Homo sapien
catatttacgctcgctgacaaagtg

SEQ ID NO: 5218231 - DNA, 25 bp, Homo sapien
tttctccgcagagcatgatttgggc

SEQ ID NO: 5218232 - DNA, 25 bp, Homo sapien
gtcacaggaaaaccgggcagctttc

SEQ ID NO: 5218233 - DNA, 25 bp, Homo sapien
ggaccaactggtactgcagacacag

SEQ ID NO: 5218234 - DNA, 25 bp, Homo sapien
tgtgcaccacttccaaggttacagg

SEQ ID NO: 5218235 - DNA, 25 bp, Homo sapien
tacactgaatcagaactggagggaa

SEQ ID NO: 5218236 - DNA, 25 bp, Homo sapien
gaattctgttactctgggtcatgca

SEQ ID NO: 5218237 - DNA, 25 bp, Homo sapien
agtgttacgagctgcacctccaaca

SEQ ID NO: 5218238 - DNA, 25 bp, Homo sapien
aacccattaggaagcgctagaagat

SEQ ID NO: 5218239 - DNA, 25 bp, Homo sapien
ttaggaagcgctagaagatgaagaa

SEQ ID NO: 5218240 - DNA, 25 bp, Homo sapien
tgctcagtgttacgagctgcacctc

SEQ ID NO: 5218241 - DNA, 25 bp, Homo sapien
gggagttcttgaggaatagttgttc

SEQ ID NO: 5218242 - DNA, 25 bp, Homo sapien
agaggttgctgcgtgcgcattcagc

SEQ ID NO: 5218243 - DNA, 25 bp, Homo sapien
tgccgctttgccttcagagggctta

SEQ ID NO: 5218244 - DNA, 25 bp, Homo sapien
tgtgagtggatgattttcgggaaaa

SEQ ID NO: 5218245 - DNA, 25 bp, Homo sapien
gaaagatttctgaactcctcaaggt

SEQ ID NO: 5218246 - DNA, 25 bp, Homo sapien
taaatggatgagcagtaaggacgca

SEQ ID NO: 5218247 - DNA, 25 bp, Homo sapien
tcaaggtcagtaatagccaacactc

SEQ ID NO: 5218248 - DNA, 25 bp, Homo sapien
cactgaccaggaacgtaaatggatg

SEQ ID NO: 5218249 - DNA, 25 bp, Homo sapien
tctgagacattctgtagagactgag

SEQ ID NO: 5218250 - DNA, 25 bp, Homo sapien
tctgagtcggagagcagcagcttga

SEQ ID NO: 5218251 - DNA, 25 bp, Homo sapien
agaagcagctgcacgtcggagactg

SEQ ID NO: 5218252 - DNA, 25 bp, Homo sapien
actttagcgggactgcttgatggca

SEQ ID NO: 5218253 - DNA, 25 bp, Homo sapien
tgcgacttggcaggcccatttagcc

SEQ ID NO: 5218254 - DNA, 25 bp, Homo sapien
tttcccagtggctcggcttcattcc

SEQ ID NO: 5218255 - DNA, 25 bp, Homo sapien
gagattgcactgtgaaaccctaccg

SEQ ID NO: 5218256 - DNA, 25 bp, Homo sapien
ctggcctccgaggtgtctgcagcgt

SEQ ID NO: 5218257 - DNA, 25 bp, Homo sapien
gctgcaaagtcttgatgagagaaag

SEQ ID NO: 5218258 - DNA, 25 bp, Homo sapien
tttggcagcgaattgggtcagcacc

SEQ ID NO: 5218259 - DNA, 25 bp, Homo sapien
gaggatgacacaaccatacgggatt

SEQ ID NO: 5218260 - DNA, 25 bp, Homo sapien
gagagaaagcatcaacagatcaagc

SEQ ID NO: 5218261 - DNA, 25 bp, Homo sapien
agacaatcaatggactgacatcact

SEQ ID NO: 5218262 - DNA, 25 bp, Homo sapien
taaattctacaaaagcgcatgtgtc

SEQ ID NO: 5218263 - DNA, 25 bp, Homo sapien
acacaggttgctaactgagcctctg

SEQ ID NO: 5218264 - DNA, 25 bp, Homo sapien
tttgtaacattaactctctaaagac

SEQ ID NO: 5218265 - DNA, 25 bp, Homo sapien
gcatattttaatttgtttcaaataa

SEQ ID NO: 5218266 - DNA, 25 bp, Homo sapien
taatttgtttcaaataaagcaatat

SEQ ID NO: 5218267 - DNA, 25 bp, Homo sapien
ttaatttgtttcaaataaagcaata

SEQ ID NO: 5218268 - DNA, 25 bp, Homo sapien
aaatgcagcatattttaatttgttt

SEQ ID NO: 5218269 - DNA, 25 bp, Homo sapien
cctgaaagagtacttgtctcaacag

SEQ ID NO: 5218270 - DNA, 25 bp, Homo sapien
cattcaataactaggtgggtatcaa

SEQ ID NO: 5218271 - DNA, 25 bp, Homo sapien
tggaccaactggacttttcactcac

SEQ ID NO: 5218272 - DNA, 25 bp, Homo sapien
gagatgggagctgaaatcctgatca

SEQ ID NO: 5218273 - DNA, 25 bp, Homo sapien
tgtggaaaatagacttgagtcttaa

SEQ ID NO: 5218274 - DNA, 25 bp, Homo sapien
aatgcaatgtcaacccaaggaggaa

SEQ ID NO: 5218275 - DNA, 25 bp, Homo sapien
tctgaatgcaatgtcaacccaagga

SEQ ID NO: 5218276 - DNA, 25 bp, Homo sapien
gcatggtggccctttgccacaattc

SEQ ID NO: 5218277 - DNA, 25 bp, Homo sapien
ttgggccattgggtatccattttcc

SEQ ID NO: 5218278 - DNA, 25 bp, Homo sapien
aagagacaggcctaccagcaatggt

SEQ ID NO: 5218279 - DNA, 25 bp, Homo sapien
ggactgccctgtagtcaaagttagg

SEQ ID NO: 5218280 - DNA, 25 bp, Homo sapien
cagcaatggtatgcaagacctttgc

SEQ ID NO: 5218281 - DNA, 25 bp, Homo sapien
atgttaatgttgagttgagaataag

SEQ ID NO: 5218282 - DNA, 25 bp, Homo sapien
tgttaatgttgagttgagaataagc

SEQ ID NO: 5218283 - DNA, 25 bp, Homo sapien
taaatgcttacatgcccagggtcta

SEQ ID NO: 5218284 - DNA, 25 bp, Homo sapien
gggttcaactctgacaaaggcaggt

SEQ ID NO: 5218285 - DNA, 25 bp, Homo sapien
taaacagggcctacagtgccgaaca

SEQ ID NO: 5218286 - DNA, 25 bp, Homo sapien
taatacagtgtttaagcggcctgac

SEQ ID NO: 5218287 - DNA, 25 bp, Homo sapien
gaatcactgggactttgcaactctt

SEQ ID NO: 5218288 - DNA, 25 bp, Homo sapien
taccatctgtagacacatgagggcg

SEQ ID NO: 5218289 - DNA, 25 bp, Homo sapien
tatctggttgcggacctgtgcctgc

SEQ ID NO: 5218290 - DNA, 25 bp, Homo sapien
tttaggaaaagaactgcgcaggccc

SEQ ID NO: 5218291 - DNA, 25 bp, Homo sapien
cctatgaaactggaacttagtggca

SEQ ID NO: 5218292 - DNA, 25 bp, Homo sapien
tatttctcagatagactagattcag

SEQ ID NO: 5218293 - DNA, 25 bp, Homo sapien
aatgagattaaacactggcttggcc

SEQ ID NO: 5218294 - DNA, 25 bp, Homo sapien
tagattcagaccagagtgcctttgc

SEQ ID NO: 5218295 - DNA, 25 bp, Homo sapien
gagctgcctaactgctagcagaagg

SEQ ID NO: 5218296 - DNA, 25 bp, Homo sapien
gtgatactagagctggaccctgcaa

SEQ ID NO: 5218297 - DNA, 25 bp, Homo sapien
gagcttgttactcccattcccagag

SEQ ID NO: 5218298 - DNA, 25 bp, Homo sapien
caacgctaggtctgctcttatagga

SEQ ID NO: 5218299 - DNA, 25 bp, Homo sapien
ggaaacatgtcctggctcatctact

SEQ ID NO: 5218300 - DNA, 25 bp, Homo sapien
acagtctggagttggtcaccgaggc

SEQ ID NO: 5218301 - DNA, 25 bp, Homo sapien
tgccccagtcgtgacaatcagaaat

SEQ ID NO: 5218302 - DNA, 25 bp, Homo sapien
gagaaccattgctctaactgggtga

SEQ ID NO: 5218303 - DNA, 25 bp, Homo sapien
tgagaaggcgttcacttccgcgtcc

SEQ ID NO: 5218304 - DNA, 25 bp, Homo sapien
atggaagacccacccgactccgagg

SEQ ID NO: 5218305 - DNA, 25 bp, Homo sapien
tgctcccgagttgccgagcagctga

SEQ ID NO: 5218306 - DNA, 25 bp, Homo sapien
gctctgctcccgagttgccgagcag

SEQ ID NO: 5218307 - DNA, 25 bp, Homo sapien
cccacgtctccagagttatttccat

SEQ ID NO: 5218308 - DNA, 25 bp, Homo sapien
tcacagttacatgtaccacgctgct

SEQ ID NO: 5218309 - DNA, 25 bp, Homo sapien
tggtcctgaagcccacgtctccaga

SEQ ID NO: 5218310 - DNA, 25 bp, Homo sapien
ggctttaccagtggactcacagtta

SEQ ID NO: 5218311 - DNA, 25 bp, Homo sapien
caggaaggggcgtgcccaggcgagc

SEQ ID NO: 5218312 - DNA, 25 bp, Homo sapien
gaaagggcgggacgccgctgctagg

SEQ ID NO: 5218313 - DNA, 25 bp, Homo sapien
gggcggcacagtctgcgtgacaggg

SEQ ID NO: 5218314 - DNA, 25 bp, Homo sapien
tgctcttccgccctgtgttggtggc

SEQ ID NO: 5218315 - DNA, 25 bp, Homo sapien
gctgcggcttgggtttaaacgccac

SEQ ID NO: 5218316 - DNA, 25 bp, Homo sapien
tgcggcttgggtttaaacgccacag

SEQ ID NO: 5218317 - DNA, 25 bp, Homo sapien
aacgccacagccgttggcggttgcc

SEQ ID NO: 5218318 - DNA, 25 bp, Homo sapien
ggttgccccatcagccaatcgggtc

SEQ ID NO: 5218319 - DNA, 25 bp, Homo sapien
ctctttcagcgtggggcacccccac

SEQ ID NO: 5218320 - DNA, 25 bp, Homo sapien
tctctttcagcgtggggcaccccca

SEQ ID NO: 5218321 - DNA, 25 bp, Homo sapien
ctagagaaccgactcaagaacgaca

SEQ ID NO: 5218322 - DNA, 25 bp, Homo sapien
acaccgatcccgacagggagagggc

SEQ ID NO: 5218323 - DNA, 25 bp, Homo sapien
agagggcggtcacgtcaactgccgc

SEQ ID NO: 5218324 - DNA, 25 bp, Homo sapien
tcaactgccgcaggccactaactta

SEQ ID NO: 5218325 - DNA, 25 bp, Homo sapien
ggcggaagacgagccggagaccgag

SEQ ID NO: 5218326 - DNA, 25 bp, Homo sapien
agccggagaccgaggcggacagcgc

SEQ ID NO: 5218327 - DNA, 25 bp, Homo sapien
ggacagagggcggaagacgagccgg

SEQ ID NO: 5218328 - DNA, 25 bp, Homo sapien
gccgtcccggatcccggaggacaga

SEQ ID NO: 5218329 - DNA, 25 bp, Homo sapien
gccaaaacaggactccgtcaacgaa

SEQ ID NO: 5218330 - DNA, 25 bp, Homo sapien
agccaaaacaggactccgtcaacga

SEQ ID NO: 5218331 - DNA, 25 bp, Homo sapien
agaggcagcgactcaaagccaaaac

SEQ ID NO: 5218332 - DNA, 25 bp, Homo sapien
agaaacaagaggcagcgactcaaag

SEQ ID NO: 5218333 - DNA, 25 bp, Homo sapien
tggctctccccgctcgccctgccgg

SEQ ID NO: 5218334 - DNA, 25 bp, Homo sapien
gtggctctccccgctcgccctgccg

SEQ ID NO: 5218335 - DNA, 25 bp, Homo sapien
tggtggctctccccgctcgccctgc

SEQ ID NO: 5218336 - DNA, 25 bp, Homo sapien
gctctccccgctcgccctgccggac

SEQ ID NO: 5218337 - DNA, 25 bp, Homo sapien
gtaaaaagtgagccagtttccatca

SEQ ID NO: 5218338 - DNA, 25 bp, Homo sapien
cagtttccatcactgggcactccat

SEQ ID NO: 5218339 - DNA, 25 bp, Homo sapien
tttggcacagagagagtagttttgg

SEQ ID NO: 5218340 - DNA, 25 bp, Homo sapien
acagagagagtagttttggatagcc

SEQ ID NO: 5218341 - DNA, 25 bp, Homo sapien
cagagagagtagttttggatagcca

SEQ ID NO: 5218342 - DNA, 25 bp, Homo sapien
ggcacagagagagtagttttggata

SEQ ID NO: 5218343 - DNA, 25 bp, Homo sapien
cagttgtaattcttcgagaattctc

SEQ ID NO: 5218344 - DNA, 25 bp, Homo sapien
actaagagcctgagctaatgccctg

SEQ ID NO: 5218345 - DNA, 25 bp, Homo sapien
taatgccctgttgttgtgctttaaa

SEQ ID NO: 5218346 - DNA, 25 bp, Homo sapien
tagctttaggcgaagaaatgtgttc

SEQ ID NO: 5218347 - DNA, 25 bp, Homo sapien
gtactttgacatagacttacatggt

SEQ ID NO: 5218348 - DNA, 25 bp, Homo sapien
taatttttcactattggagatttga

SEQ ID NO: 5218349 - DNA, 25 bp, Homo sapien
tacatggtatactgactttcaataa

SEQ ID NO: 5218350 - DNA, 25 bp, Homo sapien
aagcttctataataatgcagctaaa

SEQ ID NO: 5218351 - DNA, 25 bp, Homo sapien
gaaagactgctcatttcaattgcag

SEQ ID NO: 5218352 - DNA, 25 bp, Homo sapien
gagagcttctatgtctataagcttc

SEQ ID NO: 5218353 - DNA, 25 bp, Homo sapien
gctcatttcaattgcagttatcaag

SEQ ID NO: 5218354 - DNA, 25 bp, Homo sapien
tatcaagttattgttcatgagagct

SEQ ID NO: 5218355 - DNA, 25 bp, Homo sapien
caagaggtacagcaggccatgcaga

SEQ ID NO: 5218356 - DNA, 25 bp, Homo sapien
gggacgatcaaagcagaggaccatt

SEQ ID NO: 5218357 - DNA, 25 bp, Homo sapien
tggttgcctagtacctgaccctggg

SEQ ID NO: 5218358 - DNA, 25 bp, Homo sapien
ggaccattgcctcctgagatataaa

SEQ ID NO: 5218359 - DNA, 25 bp, Homo sapien
acagtagaaaggaactctgatggaa

SEQ ID NO: 5218360 - DNA, 25 bp, Homo sapien
gacagtagaaaggaactctgatgga

SEQ ID NO: 5218361 - DNA, 25 bp, Homo sapien
tggaagacgcatcaacttgcactgt

SEQ ID NO: 5218362 - DNA, 25 bp, Homo sapien
cgcatcaacttgcactgtttactaa

SEQ ID NO: 5218363 - DNA, 25 bp, Homo sapien
gcactgtttactaattcgtttcttc

SEQ ID NO: 5218364 - DNA, 25 bp, Homo sapien
ttgcaaatggaagacgcatcaactt

SEQ ID NO: 5218365 - DNA, 25 bp, Homo sapien
ctctgggaggtacatcaactataga

SEQ ID NO: 5218366 - DNA, 25 bp, Homo sapien
taaaggttgtgttgttgatcctgaa

SEQ ID NO: 5218367 - DNA, 25 bp, Homo sapien
cacttccgaattatcctgagttgat

SEQ ID NO: 5218368 - DNA, 25 bp, Homo sapien
gagggaatatcaggtaatgtctttg

SEQ ID NO: 5218369 - DNA, 25 bp, Homo sapien
taatacaaatactcaaaatgaattt

SEQ ID NO: 5218370 - DNA, 25 bp, Homo sapien
tacaaatactcaaaatgaattttta

SEQ ID NO: 5218371 - DNA, 25 bp, Homo sapien
aatacaaatactcaaaatgaatttt

SEQ ID NO: 5218372 - DNA, 25 bp, Homo sapien
ctaatacaaatactcaaaatgaatt

SEQ ID NO: 5218373 - DNA, 25 bp, Homo sapien
taaatatttcttccagagtaacagt

SEQ ID NO: 5218374 - DNA, 25 bp, Homo sapien
gtaacagtattaggccactgtgggt

SEQ ID NO: 5218375 - DNA, 25 bp, Homo sapien
ttaaatggcagaagttagcaaatcg

SEQ ID NO: 5218376 - DNA, 25 bp, Homo sapien
tagcaaatcggtaacataagagagc

SEQ ID NO: 5218377 - DNA, 25 bp, Homo sapien
cactcattagagaagtcttagaact

SEQ ID NO: 5218378 - DNA, 25 bp, Homo sapien
ctgcggccaatagactgggcgtttc

SEQ ID NO: 5218379 - DNA, 25 bp, Homo sapien
catctcactcattagagaagtctta

SEQ ID NO: 5218380 - DNA, 25 bp, Homo sapien
gactgggcgtttctcatctcactca

SEQ ID NO: 5218381 - DNA, 25 bp, Homo sapien
aactgttgcacagggagtgtctgca

SEQ ID NO: 5218382 - DNA, 25 bp, Homo sapien
tgcactctgcattaggttctctggc

SEQ ID NO: 5218383 - DNA, 25 bp, Homo sapien
tctctggcagactcagaagataagc

SEQ ID NO: 5218384 - DNA, 25 bp, Homo sapien
cactagcagttaaatccatgtcagc

SEQ ID NO: 5218385 - DNA, 25 bp, Homo sapien
caaatccaatatattgtgggtccca

SEQ ID NO: 5218386 - DNA, 25 bp, Homo sapien
tattacaagttagggaattctgacc

SEQ ID NO: 5218387 - DNA, 25 bp, Homo sapien
gaatcacaaatgtctgtctagaagc

SEQ ID NO: 5218388 - DNA, 25 bp, Homo sapien
tactctcctggtgaaatttacctga

SEQ ID NO: 5218389 - DNA, 25 bp, Homo sapien
catcatcacttacttgaaaggctgg

SEQ ID NO: 5218390 - DNA, 25 bp, Homo sapien
aacacattctgggtcctatagtcac

SEQ ID NO: 5218391 - DNA, 25 bp, Homo sapien
aagcaggttgcatatcatggccatg

SEQ ID NO: 5218392 - DNA, 25 bp, Homo sapien
acatagttcaactgggtttcctgga

SEQ ID NO: 5218393 - DNA, 25 bp, Homo sapien
catttcataatggttattaacctac

SEQ ID NO: 5218394 - DNA, 25 bp, Homo sapien
tcatttcataatggttattaaccta

SEQ ID NO: 5218395 - DNA, 25 bp, Homo sapien
gcttgtccgttctgaagatagatct

SEQ ID NO: 5218396 - DNA, 25 bp, Homo sapien
gacaagtcctgtaatggtctatcac

SEQ ID NO: 5218397 - DNA, 25 bp, Homo sapien
gattcagcagtgttatttgaaacaa

SEQ ID NO: 5218398 - DNA, 25 bp, Homo sapien
ctgaggcttggctctttaaaataga

SEQ ID NO: 5218399 - DNA, 25 bp, Homo sapien
tatcagaatcaagatacattgaaag

SEQ ID NO: 5218400 - DNA, 25 bp, Homo sapien
tagagtgagcgtctccctgtgttgc

SEQ ID NO: 5218401 - DNA, 25 bp, Homo sapien
agatacattgaaagcactgatcaga

SEQ ID NO: 5218402 - DNA, 25 bp, Homo sapien
ttttgtagagtgagcgtctccctgt

SEQ ID NO: 5218403 - DNA, 25 bp, Homo sapien
taaccttagtacaaaacagatcact

SEQ ID NO: 5218404 - DNA, 25 bp, Homo sapien
taagcaatcacagcacagttataaa

SEQ ID NO: 5218405 - DNA, 25 bp, Homo sapien
taaatgctgatcctatagtaggtca

SEQ ID NO: 5218406 - DNA, 25 bp, Homo sapien
caaactttagaccttgattatggag

SEQ ID NO: 5218407 - DNA, 25 bp, Homo sapien
tacaagattaggtggaaaggtctct

SEQ ID NO: 5218408 - DNA, 25 bp, Homo sapien
ctcttcagagccagtgtgataccac

SEQ ID NO: 5218409 - DNA, 25 bp, Homo sapien
catagacatggtcccaaatttaaaa

SEQ ID NO: 5218410 - DNA, 25 bp, Homo sapien
aggtctctttcactccttcgtactc

SEQ ID NO: 5218411 - DNA, 25 bp, Homo sapien
ccaatatgcccctttctgatcacaa

SEQ ID NO: 5218412 - DNA, 25 bp, Homo sapien
gaaacaaaatattaccacacctcca

SEQ ID NO: 5218413 - DNA, 25 bp, Homo sapien
taagcgtttgtgtattgctctccca

SEQ ID NO: 5218414 - DNA, 25 bp, Homo sapien
taaatggaatcgtactgtaggtgtt

SEQ ID NO: 5218415 - DNA, 25 bp, Homo sapien
tatatgatgaccaaaatgactcaaa

SEQ ID NO: 5218416 - DNA, 25 bp, Homo sapien
aaacaggaaggtaagttatatgatg

SEQ ID NO: 5218417 - DNA, 25 bp, Homo sapien
ttaaacccttttggatgtccacata

SEQ ID NO: 5218418 - DNA, 25 bp, Homo sapien
gctgacattcaacatgtatttctga

SEQ ID NO: 5218419 - DNA, 25 bp, Homo sapien
tactacttattactggaagagtaag

SEQ ID NO: 5218420 - DNA, 25 bp, Homo sapien
tggatgtccacatatattgaatggg

SEQ ID NO: 5218421 - DNA, 25 bp, Homo sapien
tatttgcatgtggtctcatcagtct

SEQ ID NO: 5218422 - DNA, 25 bp, Homo sapien
cactgagctttaacaatggtcaacg

SEQ ID NO: 5218423 - DNA, 25 bp, Homo sapien
tacacatccttttagtcagccgcaa

SEQ ID NO: 5218424 - DNA, 25 bp, Homo sapien
gaagagtgcaattggcatctacctg

SEQ ID NO: 5218425 - DNA, 25 bp, Homo sapien
aaatcatccggcgaagatgaagacg

SEQ ID NO: 5218426 - DNA, 25 bp, Homo sapien
tctatgtgggcggaaatcatccggc

SEQ ID NO: 5218427 - DNA, 25 bp, Homo sapien
tgtgtgggcgtcactggcgccctct

SEQ ID NO: 5218428 - DNA, 25 bp, Homo sapien
ggcgaagatgaagacgaccccttca

SEQ ID NO: 5218429 - DNA, 25 bp, Homo sapien
gaaagccttgattaagatccaacgt

SEQ ID NO: 5218430 - DNA, 25 bp, Homo sapien
gccttgattaagatccaacgttcct

SEQ ID NO: 5218431 - DNA, 25 bp, Homo sapien
taagatccaacgttcctgagctctt

SEQ ID NO: 5218432 - DNA, 25 bp, Homo sapien
gattaagatccaacgttcctgagct

SEQ ID NO: 5218433 - DNA, 25 bp, Homo sapien
gcgctggttcgagggcccggagcgg

SEQ ID NO: 5218434 - DNA, 25 bp, Homo sapien
aggcggaggttctgggaagtagcgg

SEQ ID NO: 5218435 - DNA, 25 bp, Homo sapien
gtggtgtccgcgctggttcgagggc

SEQ ID NO: 5218436 - DNA, 25 bp, Homo sapien
tgtccgcgctggttcgagggcccgg

SEQ ID NO: 5218437 - DNA, 25 bp, Homo sapien
ttgcggccgttcacgtagaagagca

SEQ ID NO: 5218438 - DNA, 25 bp, Homo sapien
agagcagctcggacgcccggtccat

SEQ ID NO: 5218439 - DNA, 25 bp, Homo sapien
acgtagaagagcagctcggacgccc

SEQ ID NO: 5218440 - DNA, 25 bp, Homo sapien
cttgcggccgttcacgtagaagagc

SEQ ID NO: 5218441 - DNA, 25 bp, Homo sapien
ggacagtccctgaaaacgcagcctt

SEQ ID NO: 5218442 - DNA, 25 bp, Homo sapien
tagggagggcgtgtggttggaaatc

SEQ ID NO: 5218443 - DNA, 25 bp, Homo sapien
aaatcagcttgtgagccttggaagg

SEQ ID NO: 5218444 - DNA, 25 bp, Homo sapien
gggtgggaatgcgaaggcaaagccg

SEQ ID NO: 5218445 - DNA, 25 bp, Homo sapien
caacagcattgtttcaggatcgaca

SEQ ID NO: 5218446 - DNA, 25 bp, Homo sapien
aacagcattgtttcaggatcgacat

SEQ ID NO: 5218447 - DNA, 25 bp, Homo sapien
cagcattgtttcaggatcgacattt

SEQ ID NO: 5218448 - DNA, 25 bp, Homo sapien
gcattgtttcaggatcgacattttt

SEQ ID NO: 5218449 - DNA, 25 bp, Homo sapien
cacagtcaaagtaaagaaaaggata

SEQ ID NO: 5218450 - DNA, 25 bp, Homo sapien
tacacagtcaaagtaaagaaaagga

SEQ ID NO: 5218451 - DNA, 25 bp, Homo sapien
acatacacagtcaaagtaaagaaaa

SEQ ID NO: 5218452 - DNA, 25 bp, Homo sapien
catacacagtcaaagtaaagaaaag

SEQ ID NO: 5218453 - DNA, 25 bp, Homo sapien
cttctatcttgtttaccatgaggtg

SEQ ID NO: 5218454 - DNA, 25 bp, Homo sapien
ctccacagccatacttagttcctgt

SEQ ID NO: 5218455 - DNA, 25 bp, Homo sapien
cagccatacttagttcctgtgagtc

SEQ ID NO: 5218456 - DNA, 25 bp, Homo sapien
ccatacttagttcctgtgagtcgaa

SEQ ID NO: 5218457 - DNA, 25 bp, Homo sapien
gggttgtatcgtgatatcatcactg

SEQ ID NO: 5218458 - DNA, 25 bp, Homo sapien
tcctatgccttctactgtggtgacg

SEQ ID NO: 5218459 - DNA, 25 bp, Homo sapien
aatcagacaggcattggctgggtga

SEQ ID NO: 5218460 - DNA, 25 bp, Homo sapien
gatgaattctggtgtgggtgcttcc

SEQ ID NO: 5218461 - DNA, 25 bp, Homo sapien
gacggcagcaccatacagagaacag

SEQ ID NO: 5218462 - DNA, 25 bp, Homo sapien
ccaagggcatcagttaactgatcca

SEQ ID NO: 5218463 - DNA, 25 bp, Homo sapien
agggcatcagttaactgatccagag

SEQ ID NO: 5218464 - DNA, 25 bp, Homo sapien
gatggacatcaccatcccaggtgtg

SEQ ID NO: 5218465 - DNA, 25 bp, Homo sapien
gcagcgtgtagatggacatcaccat

SEQ ID NO: 5218466 - DNA, 25 bp, Homo sapien
tttctcccacagtgcgatccggtgt

SEQ ID NO: 5218467 - DNA, 25 bp, Homo sapien
taataaatcatcaggccagcgtttc

SEQ ID NO: 5218468 - DNA, 25 bp, Homo sapien
tattactgagtcaaactctctaggg

SEQ ID NO: 5218469 - DNA, 25 bp, Homo sapien
tccacccctaaatctgaagtcttat

SEQ ID NO: 5218470 - DNA, 25 bp, Homo sapien
gcatgcatcaattatgggcctgtat

SEQ ID NO: 5218471 - DNA, 25 bp, Homo sapien
gcctgtatccagtgcaacggcacag

SEQ ID NO: 5218472 - DNA, 25 bp, Homo sapien
caattatgggcctgtatccagtgca

SEQ ID NO: 5218473 - DNA, 25 bp, Homo sapien
tatccagtgcaacggcacaggttac

SEQ ID NO: 5218474 - DNA, 25 bp, Homo sapien
tctggcaatccattgattccttgat

SEQ ID NO: 5218475 - DNA, 25 bp, Homo sapien
tgattccttgatccaaacagcaaac

SEQ ID NO: 5218476 - DNA, 25 bp, Homo sapien
attccttgatccaaacagcaaaccc

SEQ ID NO: 5218477 - DNA, 25 bp, Homo sapien
tggcaatccattgattccttgatcc

SEQ ID NO: 5218478 - DNA, 25 bp, Homo sapien
tctttggagtctggggacagtagaa

SEQ ID NO: 5218479 - DNA, 25 bp, Homo sapien
tctctttggagtctggggacagtag

SEQ ID NO: 5218480 - DNA, 25 bp, Homo sapien
cttctctttggagtctggggacagt

SEQ ID NO: 5218481 - DNA, 25 bp, Homo sapien
gtctggggacagtagaagaggaggc

SEQ ID NO: 5218482 - DNA, 25 bp, Homo sapien
gttggatccaatggcagaaactcct

SEQ ID NO: 5218483 - DNA, 25 bp, Homo sapien
ctcttctgcgaagagttttggactt

SEQ ID NO: 5218484 - DNA, 25 bp, Homo sapien
cctgggttggatccaatggcagaaa

SEQ ID NO: 5218485 - DNA, 25 bp, Homo sapien
gcagaaactcctcttctgcgaagag

SEQ ID NO: 5218486 - DNA, 25 bp, Homo sapien
gggaaaaccacatcattctctcact

SEQ ID NO: 5218487 - DNA, 25 bp, Homo sapien
gtcacgggggaaaaccacatcattc

SEQ ID NO: 5218488 - DNA, 25 bp, Homo sapien
ggtcctttgcgactgtttctcagcc

SEQ ID NO: 5218489 - DNA, 25 bp, Homo sapien
taacaggagcctggggatacttgaa

SEQ ID NO: 5218490 - DNA, 25 bp, Homo sapien
tatcaggagaaattataactgggtg

SEQ ID NO: 5218491 - DNA, 25 bp, Homo sapien
agttcttcaattctatcaggagaaa

SEQ ID NO: 5218492 - DNA, 25 bp, Homo sapien
tataactgggtgaaagacgccttta

SEQ ID NO: 5218493 - DNA, 25 bp, Homo sapien
aattataactgggtgaaagacgcct

SEQ ID NO: 5218494 - DNA, 25 bp, Homo sapien
gctgagaccagcaccaagggtgagt

SEQ ID NO: 5218495 - DNA, 25 bp, Homo sapien
ctaggctgagaccagcaccaagggt

SEQ ID NO: 5218496 - DNA, 25 bp, Homo sapien
ctgagaccagcaccaagggtgagtc

SEQ ID NO: 5218497 - DNA, 25 bp, Homo sapien
aggctgagaccagcaccaagggtga

SEQ ID NO: 5218498 - DNA, 25 bp, Homo sapien
gaagcttctggactacatcagccaa

SEQ ID NO: 5218499 - DNA, 25 bp, Homo sapien
agttcccaaatgcttcaggagagca

SEQ ID NO: 5218500 - DNA, 25 bp, Homo sapien
ttctggactacatcagccaaaatgt

SEQ ID NO: 5218501 - DNA, 25 bp, Homo sapien
tggaagcttctggactacatcagcc

SEQ ID NO: 5218502 - DNA, 25 bp, Homo sapien
ttcagatctgaatctggatgcctgc

SEQ ID NO: 5218503 - DNA, 25 bp, Homo sapien
caagttgagggtacagttacccaca

SEQ ID NO: 5218504 - DNA, 25 bp, Homo sapien
cttttgatagcaagttgagggtaca

SEQ ID NO: 5218505 - DNA, 25 bp, Homo sapien
ggatgcctgctaatgatgtgtcccc

SEQ ID NO: 5218506 - DNA, 25 bp, Homo sapien
aatgacactttccctgggatctgtt

SEQ ID NO: 5218507 - DNA, 25 bp, Homo sapien
agaaatgacactttccctgggatct

SEQ ID NO: 5218508 - DNA, 25 bp, Homo sapien
ctgtggaaagaaatgacactttccc

SEQ ID NO: 5218509 - DNA, 25 bp, Homo sapien
gacactttccctgggatctgtttgg

SEQ ID NO: 5218510 - DNA, 25 bp, Homo sapien
gttcactgagaccaagatttcttga

SEQ ID NO: 5218511 - DNA, 25 bp, Homo sapien
tagggcacttgctgaggaattgctc

SEQ ID NO: 5218512 - DNA, 25 bp, Homo sapien
ccttgagtaggggatgttcactgag

SEQ ID NO: 5218513 - DNA, 25 bp, Homo sapien
tgaggcttaagatctgcattagggc

SEQ ID NO: 5218514 - DNA, 25 bp, Homo sapien
gtgtcacctacacaccaggtagtgt

SEQ ID NO: 5218515 - DNA, 25 bp, Homo sapien
tcacctacacaccaggtagtgtgtg

SEQ ID NO: 5218516 - DNA, 25 bp, Homo sapien
tgtgtgtgttgagtgtcacctacac

SEQ ID NO: 5218517 - DNA, 25 bp, Homo sapien
ttgagtgtcacctacacaccaggta

SEQ ID NO: 5218518 - DNA, 25 bp, Homo sapien
acagttaagtggcacatgtagaaac

SEQ ID NO: 5218519 - DNA, 25 bp, Homo sapien
tgaaagaaacagttaagtggcacat

SEQ ID NO: 5218520 - DNA, 25 bp, Homo sapien
gaaacagttaagtggcacatgtaga

SEQ ID NO: 5218521 - DNA, 25 bp, Homo sapien
ctgaaagaaacagttaagtggcaca

SEQ ID NO: 5218522 - DNA, 25 bp, Homo sapien
gatgcataactctctaataatgcca

SEQ ID NO: 5218523 - DNA, 25 bp, Homo sapien
caacgcctccatatgagatgcataa

SEQ ID NO: 5218524 - DNA, 25 bp, Homo sapien
agatggtggctggaccaacgcctcc

SEQ ID NO: 5218525 - DNA, 25 bp, Homo sapien
cattcctgaattgactatcgctagc

SEQ ID NO: 5218526 - DNA, 25 bp, Homo sapien
ttctcaaggtggctagcctgggtct

SEQ ID NO: 5218527 - DNA, 25 bp, Homo sapien
ggaatattagaacccaactcacaga

SEQ ID NO: 5218528 - DNA, 25 bp, Homo sapien
tcaggcagcccgagttcaaattggc

SEQ ID NO: 5218529 - DNA, 25 bp, Homo sapien
agagtacaagctctggatcaggcag

SEQ ID NO: 5218530 - DNA, 25 bp, Homo sapien
cgccgagcccaaaagggagacttca

SEQ ID NO: 5218531 - DNA, 25 bp, Homo sapien
tcattcagaataagcctgcaggcta

SEQ ID NO: 5218532 - DNA, 25 bp, Homo sapien
acctggcgccgagcccaaaagggag

SEQ ID NO: 5218533 - DNA, 25 bp, Homo sapien
gatgagagtcctcttgaactccact

SEQ ID NO: 5218534 - DNA, 25 bp, Homo sapien
gctcccagtactggggaagttaatg

SEQ ID NO: 5218535 - DNA, 25 bp, Homo sapien
tagctcccagtactggggaagttaa

SEQ ID NO: 5218536 - DNA, 25 bp, Homo sapien
cccagtactggggaagttaatgtgt

SEQ ID NO: 5218537 - DNA, 25 bp, Homo sapien
tactggggaagttaatgtgtaaaca

SEQ ID NO: 5218538 - DNA, 25 bp, Homo sapien
tttggtagggagtcattgcctctac

SEQ ID NO: 5218539 - DNA, 25 bp, Homo sapien
tatttggtagggagtcattgcctct

SEQ ID NO: 5218540 - DNA, 25 bp, Homo sapien
agctatttggtagggagtcattgcc

SEQ ID NO: 5218541 - DNA, 25 bp, Homo sapien
ctatttggtagggagtcattgcctc

SEQ ID NO: 5218542 - DNA, 25 bp, Homo sapien
aactgatccaacaagaagatagaag

SEQ ID NO: 5218543 - DNA, 25 bp, Homo sapien
aaactgatccaacaagaagatagaa

SEQ ID NO: 5218544 - DNA, 25 bp, Homo sapien
tgcagtgatgtttggaatgaagatc

SEQ ID NO: 5218545 - DNA, 25 bp, Homo sapien
caaggctaggatagtgaactggatc

SEQ ID NO: 5218546 - DNA, 25 bp, Homo sapien
ggaatgaagatcttctaaagcactt

SEQ ID NO: 5218547 - DNA, 25 bp, Homo sapien
agcactttcatacttgtctgcaagg

SEQ ID NO: 5218548 - DNA, 25 bp, Homo sapien
caacattgcactcggtactgggact

SEQ ID NO: 5218549 - DNA, 25 bp, Homo sapien
cattgcactcggtactgggactgag

SEQ ID NO: 5218550 - DNA, 25 bp, Homo sapien
tgtgtcaacattgcactcggtactg

SEQ ID NO: 5218551 - DNA, 25 bp, Homo sapien
tgcactcggtactgggactgaggcc

SEQ ID NO: 5218552 - DNA, 25 bp, Homo sapien
agctcttgaactagtcacaaaagtc

SEQ ID NO: 5218553 - DNA, 25 bp, Homo sapien
ggccaattgggtcttcaggatgctg

SEQ ID NO: 5218554 - DNA, 25 bp, Homo sapien
ctcccccgtggcatgcttcacacca

SEQ ID NO: 5218555 - DNA, 25 bp, Homo sapien
acaatcttagcatgagctcttgaac

SEQ ID NO: 5218556 - DNA, 25 bp, Homo sapien
tgacgtcactaagatgttctgctgt

SEQ ID NO: 5218557 - DNA, 25 bp, Homo sapien
aaaaagcagaaggagttgacgtcac

SEQ ID NO: 5218558 - DNA, 25 bp, Homo sapien
accacaccgggcatgctgagagctt

SEQ ID NO: 5218559 - DNA, 25 bp, Homo sapien
ttatctgtcgccagaaatttctcag

SEQ ID NO: 5218560 - DNA, 25 bp, Homo sapien
gaacctcagaatcggcaagcacagc

SEQ ID NO: 5218561 - DNA, 25 bp, Homo sapien
cctgaacctcagaatcggcaagcac

SEQ ID NO: 5218562 - DNA, 25 bp, Homo sapien
cagacaagctgacccacacagaaca

SEQ ID NO: 5218563 - DNA, 25 bp, Homo sapien
acagacaagctgacccacacagaac

SEQ ID NO: 5218564 - DNA, 25 bp, Homo sapien
cagcggctccaagtcttgatagaca

SEQ ID NO: 5218565 - DNA, 25 bp, Homo sapien
tagtatcagcggctccaagtcttga

SEQ ID NO: 5218566 - DNA, 25 bp, Homo sapien
ctcaattgttagtatcagcggctcc

SEQ ID NO: 5218567 - DNA, 25 bp, Homo sapien
ccaagtcttgatagacaatcttcac

SEQ ID NO: 5218568 - DNA, 25 bp, Homo sapien
gaatttgatcaaccactttaaatgc

SEQ ID NO: 5218569 - DNA, 25 bp, Homo sapien
aaccactttaaatgcttcgtcaaca

SEQ ID NO: 5218570 - DNA, 25 bp, Homo sapien
gaaggaggagttgtgttgtatactt

SEQ ID NO: 5218571 - DNA, 25 bp, Homo sapien
tgcttcgtcaacatttccatattcc

SEQ ID NO: 5218572 - DNA, 25 bp, Homo sapien
tgctcatgccgggaacgctctatga

SEQ ID NO: 5218573 - DNA, 25 bp, Homo sapien
ttggaacttaagaagctgggctgac

SEQ ID NO: 5218574 - DNA, 25 bp, Homo sapien
tggtgacatattacacagctctggc

SEQ ID NO: 5218575 - DNA, 25 bp, Homo sapien
gcacagggatctctaggtctcataa

SEQ ID NO: 5218576 - DNA, 25 bp, Homo sapien
gacgatcatgttaatggaaggcaga

SEQ ID NO: 5218577 - DNA, 25 bp, Homo sapien
tgatttgcaaattgaggattccctc

SEQ ID NO: 5218578 - DNA, 25 bp, Homo sapien
tgtgtaaactatctagagctaccac

SEQ ID NO: 5218579 - DNA, 25 bp, Homo sapien
gggaggtaaagcttctacacttgac

SEQ ID NO: 5218580 - DNA, 25 bp, Homo sapien
tatcccgttatgcagaaattccact

SEQ ID NO: 5218581 - DNA, 25 bp, Homo sapien
ccccaggtattatcccgttatgcag

SEQ ID NO: 5218582 - DNA, 25 bp, Homo sapien
agcagtcagaagcaacaggtagcgt

SEQ ID NO: 5218583 - DNA, 25 bp, Homo sapien
gtcagaagcaacaggtagcgtcccc

SEQ ID NO: 5218584 - DNA, 25 bp, Homo sapien
aaaaatgttcttgacctcccatatg

SEQ ID NO: 5218585 - DNA, 25 bp, Homo sapien
tgggaaactgtgtggacacgtagac

SEQ ID NO: 5218586 - DNA, 25 bp, Homo sapien
gatcctctcccttgggaacgacaag

SEQ ID NO: 5218587 - DNA, 25 bp, Homo sapien
ggacacgtagacatccatttcttga

SEQ ID NO: 5218588 - DNA, 25 bp, Homo sapien
gatccatcttcagcaaggacttaat

SEQ ID NO: 5218589 - DNA, 25 bp, Homo sapien
tctgattaatctgatccatcttcag

SEQ ID NO: 5218590 - DNA, 25 bp, Homo sapien
gcaaggacttaattgtgactgtcat

SEQ ID NO: 5218591 - DNA, 25 bp, Homo sapien
tgaacaataatagttctgattaatc

SEQ ID NO: 5218592 - DNA, 25 bp, Homo sapien
catgaccttgttagctgggagcttc

SEQ ID NO: 5218593 - DNA, 25 bp, Homo sapien
tgggagcttcaaggttgaggcaaca

SEQ ID NO: 5218594 - DNA, 25 bp, Homo sapien
tgtttgcggcaaatgcagtgacggc

SEQ ID NO: 5218595 - DNA, 25 bp, Homo sapien
cagtgacggctgcaatgattccggt

SEQ ID NO: 5218596 - DNA, 25 bp, Homo sapien
ggtaacctcttttacctagcaggca

SEQ ID NO: 5218597 - DNA, 25 bp, Homo sapien
ttttacctagcaggcattctctggg

SEQ ID NO: 5218598 - DNA, 25 bp, Homo sapien
cctcttttacctagcaggcattctc

SEQ ID NO: 5218599 - DNA, 25 bp, Homo sapien
gtgaggtaacctcttttacctagca

SEQ ID NO: 5218600 - DNA, 25 bp, Homo sapien
ttccagaacacagcgaactgcacgg

SEQ ID NO: 5218601 - DNA, 25 bp, Homo sapien
tattaacatgtcttctcctcgttcc

SEQ ID NO: 5218602 - DNA, 25 bp, Homo sapien
tggcggcctccagttattaacatgt

SEQ ID NO: 5218603 - DNA, 25 bp, Homo sapien
tttccaaggtaaggatggcggcctc

SEQ ID NO: 5218604 - DNA, 25 bp, Homo sapien
ttctgccatcgttcatgaatccagc

SEQ ID NO: 5218605 - DNA, 25 bp, Homo sapien
tgattcatccaaggaggcgcctgca

SEQ ID NO: 5218606 - DNA, 25 bp, Homo sapien
catgtccagggccaagattctgcca

SEQ ID NO: 5218607 - DNA, 25 bp, Homo sapien
ttcatccaaggaggcgcctgcattg

SEQ ID NO: 5218608 - DNA, 25 bp, Homo sapien
caaacccacgaaaagctgtgttgga

SEQ ID NO: 5218609 - DNA, 25 bp, Homo sapien
catttggctgcaacttccgtgatac

SEQ ID NO: 5218610 - DNA, 25 bp, Homo sapien
gatggaaggttggttctgcatgccc

SEQ ID NO: 5218611 - DNA, 25 bp, Homo sapien
tacaagattcggtgatcagcgctgc

SEQ ID NO: 5218612 - DNA, 25 bp, Homo sapien
gatagaccgttaggaagattaagaa

SEQ ID NO: 5218613 - DNA, 25 bp, Homo sapien
tcaaaaagactgacagtgcacagac

SEQ ID NO: 5218614 - DNA, 25 bp, Homo sapien
caataatgacacaacctgtcaaaat

SEQ ID NO: 5218615 - DNA, 25 bp, Homo sapien
taatgacacaacctgtcaaaatctc

SEQ ID NO: 5218616 - DNA, 25 bp, Homo sapien
ccttgtacatgtttatgattcgcac

SEQ ID NO: 5218617 - DNA, 25 bp, Homo sapien
tccacagcaactttcctcaaggagt

SEQ ID NO: 5218618 - DNA, 25 bp, Homo sapien
caacactggattaggttcttggcat

SEQ ID NO: 5218619 - DNA, 25 bp, Homo sapien
cagcacgtgagccaaggccaacagg

SEQ ID NO: 5218620 - DNA, 25 bp, Homo sapien
caccgaattgcggacactggaagag

SEQ ID NO: 5218621 - DNA, 25 bp, Homo sapien
gaatgtttttgaccaaccatgggca

SEQ ID NO: 5218622 - DNA, 25 bp, Homo sapien
tatttcatggtccagcgacaccgaa

SEQ ID NO: 5218623 - DNA, 25 bp, Homo sapien
gagtcttggaggtcatcagtcccac

SEQ ID NO: 5218624 - DNA, 25 bp, Homo sapien
tgttcctattttgtgatcgctcagc

SEQ ID NO: 5218625 - DNA, 25 bp, Homo sapien
attttgtgatcgctcagcacagctg

SEQ ID NO: 5218626 - DNA, 25 bp, Homo sapien
gttcctattttgtgatcgctcagca

SEQ ID NO: 5218627 - DNA, 25 bp, Homo sapien
ttcctattttgtgatcgctcagcac

SEQ ID NO: 5218628 - DNA, 25 bp, Homo sapien
agaaaagacgaaaactgtttctgtg

SEQ ID NO: 5218629 - DNA, 25 bp, Homo sapien
ttccaccgtgagtgaccagcacaga

SEQ ID NO: 5218630 - DNA, 25 bp, Homo sapien
gcacagagccatcaagataaatgtg

SEQ ID NO: 5218631 - DNA, 25 bp, Homo sapien
tcaagataaatgtgaaccaaggcag

SEQ ID NO: 5218632 - DNA, 25 bp, Homo sapien
catttcaattccaccgtgagtgacc

SEQ ID NO: 5218633 - DNA, 25 bp, Homo sapien
ccaactcaatcgagttatttgcatt

SEQ ID NO: 5218634 - DNA, 25 bp, Homo sapien
caactcaatcgagttatttgcattc

SEQ ID NO: 5218635 - DNA, 25 bp, Homo sapien
aactcaatcgagttatttgcattct

SEQ ID NO: 5218636 - DNA, 25 bp, Homo sapien
tgtgcttgttccacgcaggtggaca

SEQ ID NO: 5218637 - DNA, 25 bp, Homo sapien
tactgccaaaccgttgagatctgcc

SEQ ID NO: 5218638 - DNA, 25 bp, Homo sapien
gccaccacagaacctccagagatat

SEQ ID NO: 5218639 - DNA, 25 bp, Homo sapien
cgacattggcattcttaattcacgg

SEQ ID NO: 5218640 - DNA, 25 bp, Homo sapien
tgatttggacgccactgcagtgact

SEQ ID NO: 5218641 - DNA, 25 bp, Homo sapien
taatgatttggacgccactgcagtg

SEQ ID NO: 5218642 - DNA, 25 bp, Homo sapien
gagttaatgatttggacgccactgc

SEQ ID NO: 5218643 - DNA, 25 bp, Homo sapien
ctgagggagttaatgatttggacgc

SEQ ID NO: 5218644 - DNA, 25 bp, Homo sapien
atgatgggttcgaggcgttttagaa

SEQ ID NO: 5218645 - DNA, 25 bp, Homo sapien
ctgatgatgggttcgaggcgtttta

SEQ ID NO: 5218646 - DNA, 25 bp, Homo sapien
ttccaagttcctttaggattcttgc

SEQ ID NO: 5218647 - DNA, 25 bp, Homo sapien
ctttaggattcttgctgatgatggg

SEQ ID NO: 5218648 - DNA, 25 bp, Homo sapien
ccaacagctgaaaggttaatgcttt

SEQ ID NO: 5218649 - DNA, 25 bp, Homo sapien
gagtgttgttaagtgatcacgtccc

SEQ ID NO: 5218650 - DNA, 25 bp, Homo sapien
cagtgagtgttgttaagtgatcacg

SEQ ID NO: 5218651 - DNA, 25 bp, Homo sapien
gtgagtgttgttaagtgatcacgtc

SEQ ID NO: 5218652 - DNA, 25 bp, Homo sapien
acagtgagtgttgttaagtgatcac

SEQ ID NO: 5218653 - DNA, 25 bp, Homo sapien
tattcgaagggctggccttcgcctt

SEQ ID NO: 5218654 - DNA, 25 bp, Homo sapien
tatgatcccccgtcaggcagtctat

SEQ ID NO: 5218655 - DNA, 25 bp, Homo sapien
ccttcgcctttctcccagttcatgt

SEQ ID NO: 5218656 - DNA, 25 bp, Homo sapien
gctccataaacaaagtattcgaagg

SEQ ID NO: 5218657 - DNA, 25 bp, Homo sapien
tgcagccaacatccatgacaatgtc

SEQ ID NO: 5218658 - DNA, 25 bp, Homo sapien
gctggatttatactgcagccaacat

SEQ ID NO: 5218659 - DNA, 25 bp, Homo sapien
acatccatgacaatgtctgttctga

SEQ ID NO: 5218660 - DNA, 25 bp, Homo sapien
ctatgtcaatggctggatttatact

SEQ ID NO: 5218661 - DNA, 25 bp, Homo sapien
gaaagtgagacacatcagttacacg

SEQ ID NO: 5218662 - DNA, 25 bp, Homo sapien
aagtgagacacatcagttacacgta

SEQ ID NO: 5218663 - DNA, 25 bp, Homo sapien
agtgagacacatcagttacacgtac

SEQ ID NO: 5218664 - DNA, 25 bp, Homo sapien
aaagtgagacacatcagttacacgt

SEQ ID NO: 5218665 - DNA, 25 bp, Homo sapien
gagttttgagaaggaggcaacaaag

SEQ ID NO: 5218666 - DNA, 25 bp, Homo sapien
tattgtataaagtcccatgccttga

SEQ ID NO: 5218667 - DNA, 25 bp, Homo sapien
tggtctggaccacgagtgtgcagaa

SEQ ID NO: 5218668 - DNA, 25 bp, Homo sapien
aactccgtgggcatgtcacagatgg

SEQ ID NO: 5218669 - DNA, 25 bp, Homo sapien
tcagtggactattaagggtcaaggg

SEQ ID NO: 5218670 - DNA, 25 bp, Homo sapien
tggatagcgaaaaacacggaacacc

SEQ ID NO: 5218671 - DNA, 25 bp, Homo sapien
tattaagggtcaagggtccatgcag

SEQ ID NO: 5218672 - DNA, 25 bp, Homo sapien
tcctgtcgtgctgcactcactgcgt

SEQ ID NO: 5218673 - DNA, 25 bp, Homo sapien
atgggtacattccaaggaacgtagg

SEQ ID NO: 5218674 - DNA, 25 bp, Homo sapien
ccaaggaacgtaggatccaggttca

SEQ ID NO: 5218675 - DNA, 25 bp, Homo sapien
cattccaaggaacgtaggatccagg

SEQ ID NO: 5218676 - DNA, 25 bp, Homo sapien
ggtacattccaaggaacgtaggatc

SEQ ID NO: 5218677 - DNA, 25 bp, Homo sapien
tagaagccaagtaggagtcacatgc

SEQ ID NO: 5218678 - DNA, 25 bp, Homo sapien
taatgacggatatcaccctagagga

SEQ ID NO: 5218679 - DNA, 25 bp, Homo sapien
ttctgacaagaggaaggtgatagca

SEQ ID NO: 5218680 - DNA, 25 bp, Homo sapien
taatttctgttggtggatagaagcc

SEQ ID NO: 5218681 - DNA, 25 bp, Homo sapien
ctggaagaggatgaatagtggatga

SEQ ID NO: 5218682 - DNA, 25 bp, Homo sapien
tgacattatgccaccagcattggct

SEQ ID NO: 5218683 - DNA, 25 bp, Homo sapien
aagcacctgttcctgtgtccgcctg

SEQ ID NO: 5218684 - DNA, 25 bp, Homo sapien
catctgacgccttggaatgtgacat

SEQ ID NO: 5218685 - DNA, 25 bp, Homo sapien
cttgtgaagttgtatcaaaagcacc

SEQ ID NO: 5218686 - DNA, 25 bp, Homo sapien
accttctctggtggtgacggcagct

SEQ ID NO: 5218687 - DNA, 25 bp, Homo sapien
tgaatcctgggttaggtgtttccta

SEQ ID NO: 5218688 - DNA, 25 bp, Homo sapien
ctgaactgggtgaatcctgggttag

SEQ ID NO: 5218689 - DNA, 25 bp, Homo sapien
aggtgtttcctacaccttctctggt

SEQ ID NO: 5218690 - DNA, 25 bp, Homo sapien
ctgggggctgtgggctttagcaatt

SEQ ID NO: 5218691 - DNA, 25 bp, Homo sapien
tgggggctgtgggctttagcaattc

SEQ ID NO: 5218692 - DNA, 25 bp, Homo sapien
gtgtagatggtcatcaccatttcca

SEQ ID NO: 5218693 - DNA, 25 bp, Homo sapien
ctcctcaggacagtgtagatggtca

SEQ ID NO: 5218694 - DNA, 25 bp, Homo sapien
cactcaagatttccattaattgctc

SEQ ID NO: 5218695 - DNA, 25 bp, Homo sapien
ttaattgctctgtggagagttctgg

SEQ ID NO: 5218696 - DNA, 25 bp, Homo sapien
gggtctctgtccagtacagcagcat

SEQ ID NO: 5218697 - DNA, 25 bp, Homo sapien
tgtccagtacagcagcataaattac

SEQ ID NO: 5218698 - DNA, 25 bp, Homo sapien
tcccactatccacaatgggtctctg

SEQ ID NO: 5218699 - DNA, 25 bp, Homo sapien
aaacttttcccactatccacaatgg

SEQ ID NO: 5218700 - DNA, 25 bp, Homo sapien
tccagaactgttggctctgcagcta

SEQ ID NO: 5218701 - DNA, 25 bp, Homo sapien
ccagaactgttggctctgcagctat

SEQ ID NO: 5218702 - DNA, 25 bp, Homo sapien
cagaactgttggctctgcagctatc

SEQ ID NO: 5218703 - DNA, 25 bp, Homo sapien
atccagaactgttggctctgcagct

SEQ ID NO: 5218704 - DNA, 25 bp, Homo sapien
tccccattcatttggcagcaaaatg

SEQ ID NO: 5218705 - DNA, 25 bp, Homo sapien
cttccccattcatttggcagcaaaa

SEQ ID NO: 5218706 - DNA, 25 bp, Homo sapien
ccccattcatttggcagcaaaatga

SEQ ID NO: 5218707 - DNA, 25 bp, Homo sapien
cattcatttggcagcaaaatgaact

SEQ ID NO: 5218708 - DNA, 25 bp, Homo sapien
acagaatcagatgggaagctgttcc

SEQ ID NO: 5218709 - DNA, 25 bp, Homo sapien
agggaatggaaccagcacagaatca

SEQ ID NO: 5218710 - DNA, 25 bp, Homo sapien
gaatggaaccagcacagaatcagat

SEQ ID NO: 5218711 - DNA, 25 bp, Homo sapien
ggaatggaaccagcacagaatcaga

SEQ ID NO: 5218712 - DNA, 25 bp, Homo sapien
ggtattgcccttagaccctgggtca

SEQ ID NO: 5218713 - DNA, 25 bp, Homo sapien
cctggtattgcccttagaccctggg

SEQ ID NO: 5218714 - DNA, 25 bp, Homo sapien
tattgcccttagaccctgggtcact

SEQ ID NO: 5218715 - DNA, 25 bp, Homo sapien
ctggtattgcccttagaccctgggt

SEQ ID NO: 5218716 - DNA, 25 bp, Homo sapien
tcagaagcatccagcgttgcttcaa

SEQ ID NO: 5218717 - DNA, 25 bp, Homo sapien
agcatccagcgttgcttcaaggagg

SEQ ID NO: 5218718 - DNA, 25 bp, Homo sapien
cagaagcatccagcgttgcttcaag

SEQ ID NO: 5218719 - DNA, 25 bp, Homo sapien
gaagcatccagcgttgcttcaagga

SEQ ID NO: 5218720 - DNA, 25 bp, Homo sapien
tgacagttgtacaaaggcctccttg

SEQ ID NO: 5218721 - DNA, 25 bp, Homo sapien
ataagggaaaaggtgcgtccacctg

SEQ ID NO: 5218722 - DNA, 25 bp, Homo sapien
aaaatgcttttcataggttcctgag

SEQ ID NO: 5218723 - DNA, 25 bp, Homo sapien
tccatgaggtgaaatataagggaaa

SEQ ID NO: 5218724 - DNA, 25 bp, Homo sapien
agaatggactgtgcgaaggtcctgc

SEQ ID NO: 5218725 - DNA, 25 bp, Homo sapien
cataaaggtgcttgtgtggcagaat

SEQ ID NO: 5218726 - DNA, 25 bp, Homo sapien
actcatcacgcgcatcctggctttt

SEQ ID NO: 5218727 - DNA, 25 bp, Homo sapien
tgtgtggcagaatggactgtgcgaa

SEQ ID NO: 5218728 - DNA, 25 bp, Homo sapien
ccccattgaagtgtggagtaaggct

SEQ ID NO: 5218729 - DNA, 25 bp, Homo sapien
gaggagtctcacagctacagttgaa

SEQ ID NO: 5218730 - DNA, 25 bp, Homo sapien
catggcctggccactaagtagctag

SEQ ID NO: 5218731 - DNA, 25 bp, Homo sapien
gaaagtgcttttggctctcagaggc

SEQ ID NO: 5218732 - DNA, 25 bp, Homo sapien
aaaatccttgcaagatggataataa

SEQ ID NO: 5218733 - DNA, 25 bp, Homo sapien
ccttgcaagatggataataattgga

SEQ ID NO: 5218734 - DNA, 25 bp, Homo sapien
aatccttgcaagatggataataatt

SEQ ID NO: 5218735 - DNA, 25 bp, Homo sapien
ttcttgtatgttaatcactataaat

SEQ ID NO: 5218736 - DNA, 25 bp, Homo sapien
tcagaagttgaaattctgctaacag

SEQ ID NO: 5218737 - DNA, 25 bp, Homo sapien
tgaaattctgctaacagttgacttc

SEQ ID NO: 5218738 - DNA, 25 bp, Homo sapien
gttttgaagcaaggttgagtacgca

SEQ ID NO: 5218739 - DNA, 25 bp, Homo sapien
gtacgcaattgcctacacccaaagc

SEQ ID NO: 5218740 - DNA, 25 bp, Homo sapien
cttctgagggaattcagtagctcac

SEQ ID NO: 5218741 - DNA, 25 bp, Homo sapien
atcagcacttctgagggaattcagt

SEQ ID NO: 5218742 - DNA, 25 bp, Homo sapien
cacttctgagggaattcagtagctc

SEQ ID NO: 5218743 - DNA, 25 bp, Homo sapien
agcacttctgagggaattcagtagc

SEQ ID NO: 5218744 - DNA, 25 bp, Homo sapien
gacttgttctggtttaaggcttgca

SEQ ID NO: 5218745 - DNA, 25 bp, Homo sapien
taaggcttgcattggttgctcctgc

SEQ ID NO: 5218746 - DNA, 25 bp, Homo sapien
tgctcctgcaagaaaatgaccattt

SEQ ID NO: 5218747 - DNA, 25 bp, Homo sapien
catttagaggaatttgctgtatttc

SEQ ID NO: 5218748 - DNA, 25 bp, Homo sapien
ttttgctgatgtgaggcctgtcgga

SEQ ID NO: 5218749 - DNA, 25 bp, Homo sapien
cattttgctgatgtgaggcctgtcg

SEQ ID NO: 5218750 - DNA, 25 bp, Homo sapien
ttgctgatgtgaggcctgtcggaaa

SEQ ID NO: 5218751 - DNA, 25 bp, Homo sapien
aaccgccagggcattttgctgatgt

SEQ ID NO: 5218752 - DNA, 25 bp, Homo sapien
accaactgtagtagggccacctcct

SEQ ID NO: 5218753 - DNA, 25 bp, Homo sapien
tatttgcaccaactgtagtagggcc

SEQ ID NO: 5218754 - DNA, 25 bp, Homo sapien
tcctccatatagacactgaagtcca

SEQ ID NO: 5218755 - DNA, 25 bp, Homo sapien
cagtggtgtttgtgccgtctttgaa

SEQ ID NO: 5218756 - DNA, 25 bp, Homo sapien
aggcaagcccttgactgatggaaat

SEQ ID NO: 5218757 - DNA, 25 bp, Homo sapien
aaagctgaggacctcttagtgggag

SEQ ID NO: 5218758 - DNA, 25 bp, Homo sapien
cttagtgggagctgaggacatgtgc

SEQ ID NO: 5218759 - DNA, 25 bp, Homo sapien
ccttgactgatggaaattggagtct

SEQ ID NO: 5218760 - DNA, 25 bp, Homo sapien
ccctgaacactgatctggataagca

SEQ ID NO: 5218761 - DNA, 25 bp, Homo sapien
ctgcatccacaggacatagagagaa

SEQ ID NO: 5218762 - DNA, 25 bp, Homo sapien
tgcatccacaggacatagagagaaa

SEQ ID NO: 5218763 - DNA, 25 bp, Homo sapien
gagaaaggtgctccctgaacactga

SEQ ID NO: 5218764 - DNA, 25 bp, Homo sapien
tttcccctattggcaagtggaagtc

SEQ ID NO: 5218765 - DNA, 25 bp, Homo sapien
agtttcccctattggcaagtggaag

SEQ ID NO: 5218766 - DNA, 25 bp, Homo sapien
tcccctattggcaagtggaagtcca

SEQ ID NO: 5218767 - DNA, 25 bp, Homo sapien
cccctattggcaagtggaagtccat

SEQ ID NO: 5218768 - DNA, 25 bp, Homo sapien
gaatgttcacaattataggctccac

SEQ ID NO: 5218769 - DNA, 25 bp, Homo sapien
tcttcaccacttttgtggcctgctt

SEQ ID NO: 5218770 - DNA, 25 bp, Homo sapien
tccacgtcttggtacacaatcttca

SEQ ID NO: 5218771 - DNA, 25 bp, Homo sapien
tgtggcctgcttggcatgatcatgt

SEQ ID NO: 5218772 - DNA, 25 bp, Homo sapien
aagactgagcagatgttgacattac

SEQ ID NO: 5218773 - DNA, 25 bp, Homo sapien
aaagactgagcagatgttgacatta

SEQ ID NO: 5218774 - DNA, 25 bp, Homo sapien
cagttatcaacatgttgtccccatg

SEQ ID NO: 5218775 - DNA, 25 bp, Homo sapien
gggtgccatcctccagttatcaaca

SEQ ID NO: 5218776 - DNA, 25 bp, Homo sapien
tctagaataaaatggattgggcagc

SEQ ID NO: 5218777 - DNA, 25 bp, Homo sapien
ttatatgtcccaggtagtgggtgcc

SEQ ID NO: 5218778 - DNA, 25 bp, Homo sapien
cagtgaatggctctactccctcttt

SEQ ID NO: 5218779 - DNA, 25 bp, Homo sapien
cagagcagtgaatggctctactccc

SEQ ID NO: 5218780 - DNA, 25 bp, Homo sapien
catcagagcagtgaatggctctact

SEQ ID NO: 5218781 - DNA, 25 bp, Homo sapien
ctcccatcagagcagtgaatggctc

SEQ ID NO: 5218782 - DNA, 25 bp, Homo sapien
ttaataccttgtcccaattcagctc

SEQ ID NO: 5218783 - DNA, 25 bp, Homo sapien
gaccaactaatacagacccatctgt

SEQ ID NO: 5218784 - DNA, 25 bp, Homo sapien
gtgttaataccttgtcccaattcag

SEQ ID NO: 5218785 - DNA, 25 bp, Homo sapien
cagctctgccatgaccaactaatac

SEQ ID NO: 5218786 - DNA, 25 bp, Homo sapien
tcaagttcagctgaccaaaccaggg

SEQ ID NO: 5218787 - DNA, 25 bp, Homo sapien
tgaggcatgacccatacagcacttg

SEQ ID NO: 5218788 - DNA, 25 bp, Homo sapien
caaaatgagatgttgcgcttgccct

SEQ ID NO: 5218789 - DNA, 25 bp, Homo sapien
tgaacaagttgtctggcaccaggaa

SEQ ID NO: 5218790 - DNA, 25 bp, Homo sapien
ccagtgccaaggtggggctttttca

SEQ ID NO: 5218791 - DNA, 25 bp, Homo sapien
ccatgtggcttgtctccacctctgg

SEQ ID NO: 5218792 - DNA, 25 bp, Homo sapien
ttttccctgtggaaccagtgccaag

SEQ ID NO: 5218793 - DNA, 25 bp, Homo sapien
ggctgactctggttttccctgtgga

SEQ ID NO: 5218794 - DNA, 25 bp, Homo sapien
aacaatcaccatccttcctgcatcc

SEQ ID NO: 5218795 - DNA, 25 bp, Homo sapien
catccttcctgcatcctgcagatac

SEQ ID NO: 5218796 - DNA, 25 bp, Homo sapien
accatccttcctgcatcctgcagat

SEQ ID NO: 5218797 - DNA, 25 bp, Homo sapien
cctgcaacaatcaccatccttcctg

SEQ ID NO: 5218798 - DNA, 25 bp, Homo sapien
aaaaggacagaagactggcagataa

SEQ ID NO: 5218799 - DNA, 25 bp, Homo sapien
tttcaaactcaactgtgtttctcac

SEQ ID NO: 5218800 - DNA, 25 bp, Homo sapien
gaaacatttcaaactcaactgtgtt

SEQ ID NO: 5218801 - DNA, 25 bp, Homo sapien
ggcagataattaaatggggaaacat

SEQ ID NO: 5218802 - DNA, 25 bp, Homo sapien
attccacgagggtccggcaggtatt

SEQ ID NO: 5218803 - DNA, 25 bp, Homo sapien
caggtgccactagtactccatctga

SEQ ID NO: 5218804 - DNA, 25 bp, Homo sapien
tactccatctgataataggttcaag

SEQ ID NO: 5218805 - DNA, 25 bp, Homo sapien
gataataggttcaaggcattccacg

SEQ ID NO: 5218806 - DNA, 25 bp, Homo sapien
ggcttcagccacacctgatactcac

SEQ ID NO: 5218807 - DNA, 25 bp, Homo sapien
gcaggcttcagccacacctgatact

SEQ ID NO: 5218808 - DNA, 25 bp, Homo sapien
tgcaggcttcagccacacctgatac

SEQ ID NO: 5218809 - DNA, 25 bp, Homo sapien
aggcttcagccacacctgatactca

SEQ ID NO: 5218810 - DNA, 25 bp, Homo sapien
ccagtggcagacaaactagtgcttt

SEQ ID NO: 5218811 - DNA, 25 bp, Homo sapien
atccagtggcagacaaactagtgct

SEQ ID NO: 5218812 - DNA, 25 bp, Homo sapien
tccagtggcagacaaactagtgctt

SEQ ID NO: 5218813 - DNA, 25 bp, Homo sapien
taaccaatcccccattagacaagag

SEQ ID NO: 5218814 - DNA, 25 bp, Homo sapien
aagagaagagggtcacaagaggcag

SEQ ID NO: 5218815 - DNA, 25 bp, Homo sapien
gagggtcacaagaggcaggatataa

SEQ ID NO: 5218816 - DNA, 25 bp, Homo sapien
caagaggcaggatataaggcaagat

SEQ ID NO: 5218817 - DNA, 25 bp, Homo sapien
gctcaacttcccatgctatttgtat

SEQ ID NO: 5218818 - DNA, 25 bp, Homo sapien
gttttggtcatccctggtttgactc

SEQ ID NO: 5218819 - DNA, 25 bp, Homo sapien
tttggtcatccctggtttgactcac

SEQ ID NO: 5218820 - DNA, 25 bp, Homo sapien
cttgctcaacttcccatgctatttg

SEQ ID NO: 5218821 - DNA, 25 bp, Homo sapien
ccagtgagatctccctgttccttat

SEQ ID NO: 5218822 - DNA, 25 bp, Homo sapien
taagtctagccactgagcctctgct

SEQ ID NO: 5218823 - DNA, 25 bp, Homo sapien
cactgggtggtccatacggccttgg

SEQ ID NO: 5218824 - DNA, 25 bp, Homo sapien
tatactggacggaggactcttgggt

SEQ ID NO: 5218825 - DNA, 25 bp, Homo sapien
tacttgtgtgccaggatagctttcc

SEQ ID NO: 5218826 - DNA, 25 bp, Homo sapien
ctgcagccagcgcctattgtcagtc

SEQ ID NO: 5218827 - DNA, 25 bp, Homo sapien
gctgcagccagcgcctattgtcagt

SEQ ID NO: 5218828 - DNA, 25 bp, Homo sapien
ccatattccggatctgctggcctgc

SEQ ID NO: 5218829 - DNA, 25 bp, Homo sapien
agactcctcaggtgcttcaggaggg

SEQ ID NO: 5218830 - DNA, 25 bp, Homo sapien
cgccatattccggatctgctggcct

SEQ ID NO: 5218831 - DNA, 25 bp, Homo sapien
atattccggatctgctggcctgcca

SEQ ID NO: 5218832 - DNA, 25 bp, Homo sapien
ccagtgtgttccacgcgctgtctaa

SEQ ID NO: 5218833 - DNA, 25 bp, Homo sapien
cacacagttggacagagaattgcct

SEQ ID NO: 5218834 - DNA, 25 bp, Homo sapien
ttggtgcaaagggtctcagcctcat

SEQ ID NO: 5218835 - DNA, 25 bp, Homo sapien
aagaggactcgagggtgcctagcac

SEQ ID NO: 5218836 - DNA, 25 bp, Homo sapien
ccgaatagcaatgccggcttctcac

SEQ ID NO: 5218837 - DNA, 25 bp, Homo sapien
ctgctgaaatcagattgagggtagc

SEQ ID NO: 5218838 - DNA, 25 bp, Homo sapien
cattgcccacagcaagaattggatt

SEQ ID NO: 5218839 - DNA, 25 bp, Homo sapien
ttggattcaggtccgaatagcaatg

SEQ ID NO: 5218840 - DNA, 25 bp, Homo sapien
gagtgcgggatatgcacagattcca

SEQ ID NO: 5218841 - DNA, 25 bp, Homo sapien
ggcttaaggtctgcacttgccaacc

SEQ ID NO: 5218842 - DNA, 25 bp, Homo sapien
catttagaggaatccgccgcgtacc

SEQ ID NO: 5218843 - DNA, 25 bp, Homo sapien
tgcacttgccaacccagcaagaaaa

SEQ ID NO: 5218844 - DNA, 25 bp, Homo sapien
ctcaaaagcaaccagcggaattctg

SEQ ID NO: 5218845 - DNA, 25 bp, Homo sapien
cctcaaaagcaaccagcggaattct

SEQ ID NO: 5218846 - DNA, 25 bp, Homo sapien
tttgacagcccgagagcttgaactc

SEQ ID NO: 5218847 - DNA, 25 bp, Homo sapien
ccctgcagctagaacaacagcccca

SEQ ID NO: 5218848 - DNA, 25 bp, Homo sapien
cagcccgagagcttgaactcatggc

SEQ ID NO: 5218849 - DNA, 25 bp, Homo sapien
gacactccatttgacagcccgagag

SEQ ID NO: 5218850 - DNA, 25 bp, Homo sapien
ttgagtgggcttgtttttccgtctg

SEQ ID NO: 5218851 - DNA, 25 bp, Homo sapien
gggcttgtttttccgtctgctgcct

SEQ ID NO: 5218852 - DNA, 25 bp, Homo sapien
gagtgggcttgtttttccgtctgct

SEQ ID NO: 5218853 - DNA, 25 bp, Homo sapien
gtgggcttgtttttccgtctgctgc

SEQ ID NO: 5218854 - DNA, 25 bp, Homo sapien
ggagccgagcaaagctttccagcag

SEQ ID NO: 5218855 - DNA, 25 bp, Homo sapien
cccatgaggttggaggagccctcct

SEQ ID NO: 5218856 - DNA, 25 bp, Homo sapien
aaaggagacccaccacattgcttgg

SEQ ID NO: 5218857 - DNA, 25 bp, Homo sapien
tctgtgccgccacgaagggtgcaca

SEQ ID NO: 5218858 - DNA, 25 bp, Homo sapien
tggggcaaggcattctgctggcatt

SEQ ID NO: 5218859 - DNA, 25 bp, Homo sapien
ccataggcgatgctcaggtcctcaa

SEQ ID NO: 5218860 - DNA, 25 bp, Homo sapien
ccggcattcacgtggggcaaggcat

SEQ ID NO: 5218861 - DNA, 25 bp, Homo sapien
ttgagaaggactcgcatgccggcat

SEQ ID NO: 5218862 - DNA, 25 bp, Homo sapien
gagttgctagcaggatctgtgtgca

SEQ ID NO: 5218863 - DNA, 25 bp, Homo sapien
cccaaggagttgctagcaggatctg

SEQ ID NO: 5218864 - DNA, 25 bp, Homo sapien
ctcccaaggagttgctagcaggatc

SEQ ID NO: 5218865 - DNA, 25 bp, Homo sapien
aaggagttgctagcaggatctgtgt

SEQ ID NO: 5218866 - DNA, 25 bp, Homo sapien
aagaggaagctgacgactagggtcc

SEQ ID NO: 5218867 - DNA, 25 bp, Homo sapien
ggagcgagacttcatccagaagcag

SEQ ID NO: 5218868 - DNA, 25 bp, Homo sapien
aagcctcatccagcaacagctcatt

SEQ ID NO: 5218869 - DNA, 25 bp, Homo sapien
tcatcctcttgaattccacccggcc

SEQ ID NO: 5218870 - DNA, 25 bp, Homo sapien
ccacataatgaggacctggactgac

SEQ ID NO: 5218871 - DNA, 25 bp, Homo sapien
tggactgactgcttggaatctgatc

SEQ ID NO: 5218872 - DNA, 25 bp, Homo sapien
tatccagcatagtgtgcataaccag

SEQ ID NO: 5218873 - DNA, 25 bp, Homo sapien
ataaccaggatccatactgcctgcc

SEQ ID NO: 5218874 - DNA, 25 bp, Homo sapien
cgagagcgcttaggaattggtctga

SEQ ID NO: 5218875 - DNA, 25 bp, Homo sapien
tgactgggaaatcttcgagagcgct

SEQ ID NO: 5218876 - DNA, 25 bp, Homo sapien
cgcttaggaattggtctgaaatttc

SEQ ID NO: 5218877 - DNA, 25 bp, Homo sapien
tttggactccctggggtattgtgac

SEQ ID NO: 5218878 - DNA, 25 bp, Homo sapien
ccccagatccagaataaggtgtcct

SEQ ID NO: 5218879 - DNA, 25 bp, Homo sapien
cagatccagaataaggtgtcctggc

SEQ ID NO: 5218880 - DNA, 25 bp, Homo sapien
gtccccccagatccagaataaggtg

SEQ ID NO: 5218881 - DNA, 25 bp, Homo sapien
tccccccagatccagaataaggtgt

SEQ ID NO: 5218882 - DNA, 25 bp, Homo sapien
aaatccaagcccgaagcccaagtat

SEQ ID NO: 5218883 - DNA, 25 bp, Homo sapien
cccaaggtgggatgccaaaatccaa

SEQ ID NO: 5218884 - DNA, 25 bp, Homo sapien
taaagtgatacagttcccaaggtgg

SEQ ID NO: 5218885 - DNA, 25 bp, Homo sapien
tttccaatgatcagtctgtccacgg

SEQ ID NO: 5218886 - DNA, 25 bp, Homo sapien
ttccccagtggcatgtttaagagct

SEQ ID NO: 5218887 - DNA, 25 bp, Homo sapien
tgcatgagccctgctactggtcacc

SEQ ID NO: 5218888 - DNA, 25 bp, Homo sapien
catgatagggtgtccaactgggtct

SEQ ID NO: 5218889 - DNA, 25 bp, Homo sapien
ggtcaccaaagccatgaaaagttct

SEQ ID NO: 5218890 - DNA, 25 bp, Homo sapien
cacttcgggtagttcaagggccttg

SEQ ID NO: 5218891 - DNA, 25 bp, Homo sapien
tatctacagccagcaatttgtcacc

SEQ ID NO: 5218892 - DNA, 25 bp, Homo sapien
accttcagcgccattggtgcctgga

SEQ ID NO: 5218893 - DNA, 25 bp, Homo sapien
tgttatcacatcaaccacttcgggt

SEQ ID NO: 5218894 - DNA, 25 bp, Homo sapien
gtacacacatgaagcagatacaaaa

SEQ ID NO: 5218895 - DNA, 25 bp, Homo sapien
gctcgttttgcctgtacgtctgttt

SEQ ID NO: 5218896 - DNA, 25 bp, Homo sapien
ggttccagatcttcataggtgagct

SEQ ID NO: 5218897 - DNA, 25 bp, Homo sapien
ttatcttttcagctgctcgttttgc

SEQ ID NO: 5218898 - DNA, 25 bp, Homo sapien
cagatcttcataggtgagctttatc

SEQ ID NO: 5218899 - DNA, 25 bp, Homo sapien
tcactccgttatcttccccgaaata

SEQ ID NO: 5218900 - DNA, 25 bp, Homo sapien
tgtctgtcctcactccgttatcttc

SEQ ID NO: 5218901 - DNA, 25 bp, Homo sapien
aattgtctgtcctcactccgttatc

SEQ ID NO: 5218902 - DNA, 25 bp, Homo sapien
ctgaattgtctgtcctcactccgtt

SEQ ID NO: 5218903 - DNA, 25 bp, Homo sapien
taggtagctcaggtacaagaacctc

SEQ ID NO: 5218904 - DNA, 25 bp, Homo sapien
gaaaaatgcttgtgttagactactt

SEQ ID NO: 5218905 - DNA, 25 bp, Homo sapien
aaatgcttgtgttagactacttagg

SEQ ID NO: 5218906 - DNA, 25 bp, Homo sapien
gactacttaggtagctcaggtacaa

SEQ ID NO: 5218907 - DNA, 25 bp, Homo sapien
tcaacaatttggtcgactttttcaa

SEQ ID NO: 5218908 - DNA, 25 bp, Homo sapien
acagaacaactcctaaggtgtgtgc

SEQ ID NO: 5218909 - DNA, 25 bp, Homo sapien
taagcacagaacaactcctaaggtg

SEQ ID NO: 5218910 - DNA, 25 bp, Homo sapien
gttaagcataagcacagaacaactc

SEQ ID NO: 5218911 - DNA, 25 bp, Homo sapien
caactcctaaggtgtgtgctggtgg

SEQ ID NO: 5218912 - DNA, 25 bp, Homo sapien
gtcctgtgtggacacataaatgtcc

SEQ ID NO: 5218913 - DNA, 25 bp, Homo sapien
gaataacaagcactctttgtgtttc

SEQ ID NO: 5218914 - DNA, 25 bp, Homo sapien
tcctgtgtggacacataaatgtcca

SEQ ID NO: 5218915 - DNA, 25 bp, Homo sapien
ctgtctttggaataacaagcactct

SEQ ID NO: 5218916 - DNA, 25 bp, Homo sapien
acagctgcaatagccccgaatacag

SEQ ID NO: 5218917 - DNA, 25 bp, Homo sapien
ccacccactcgttttacatgacagg

SEQ ID NO: 5218918 - DNA, 25 bp, Homo sapien
atagccccgaatacagctggctttc

SEQ ID NO: 5218919 - DNA, 25 bp, Homo sapien
gatcctgttgatggggatgtttaaa

SEQ ID NO: 5218920 - DNA, 25 bp, Homo sapien
ccttcctccagttattagcatatca

SEQ ID NO: 5218921 - DNA, 25 bp, Homo sapien
ttccaaataatggatgccttcctcc

SEQ ID NO: 5218922 - DNA, 25 bp, Homo sapien
tagcatatcatcttcacgatcaagg

SEQ ID NO: 5218923 - DNA, 25 bp, Homo sapien
cacgatcaaggatgagacgaatggg

SEQ ID NO: 5218924 - DNA, 25 bp, Homo sapien
tagagctttgatccgcccgttgttc

SEQ ID NO: 5218925 - DNA, 25 bp, Homo sapien
cagcgtgcatcctccgttaatgtag

SEQ ID NO: 5218926 - DNA, 25 bp, Homo sapien
ctcagagtcatccagcgtgcatcct

SEQ ID NO: 5218927 - DNA, 25 bp, Homo sapien
taatgtagcactcaatgtctagagc

SEQ ID NO: 5218928 - DNA, 25 bp, Homo sapien
gccaaatccacgaaaggccgtattg

SEQ ID NO: 5218929 - DNA, 25 bp, Homo sapien
taaatttgtcatgcatgcacggccc

SEQ ID NO: 5218930 - DNA, 25 bp, Homo sapien
gccacagctgtgatgcaagattctg

SEQ ID NO: 5218931 - DNA, 25 bp, Homo sapien
ggctccttgtgggaagccaaatcca

SEQ ID NO: 5218932 - DNA, 25 bp, Homo sapien
tggaattcctgttgaatttagggac

SEQ ID NO: 5218933 - DNA, 25 bp, Homo sapien
tttgtaggaagtaccccgacaatca

SEQ ID NO: 5218934 - DNA, 25 bp, Homo sapien
taggaagtaccccgacaatcacaaa

SEQ ID NO: 5218935 - DNA, 25 bp, Homo sapien
tgtaggaagtaccccgacaatcaca

SEQ ID NO: 5218936 - DNA, 25 bp, Homo sapien
taggataactactgccttccttgta

SEQ ID NO: 5218937 - DNA, 25 bp, Homo sapien
ggcagaaactgatggccaaatagag

SEQ ID NO: 5218938 - DNA, 25 bp, Homo sapien
gccaaatagagacttgaaaaacctc

SEQ ID NO: 5218939 - DNA, 25 bp, Homo sapien
tagttatggtaaggcagaaactgat

SEQ ID NO: 5218940 - DNA, 25 bp, Homo sapien
aattcagtagttatggtaaggcaga

SEQ ID NO: 5218941 - DNA, 25 bp, Homo sapien
tgtagatggttttatctacatatct

SEQ ID NO: 5218942 - DNA, 25 bp, Homo sapien
ttgtagatggttttatctacatatc

SEQ ID NO: 5218943 - DNA, 25 bp, Homo sapien
tctgctgtgaaaggaagacttgtct

SEQ ID NO: 5218944 - DNA, 25 bp, Homo sapien
cttattgaactcttcgacttgcatt

SEQ ID NO: 5218945 - DNA, 25 bp, Homo sapien
aactcttcgacttgcattcttctgc

SEQ ID NO: 5218946 - DNA, 25 bp, Homo sapien
gacactcattccaacatcttatcag

SEQ ID NO: 5218947 - DNA, 25 bp, Homo sapien
taccttgtcccagttcattgcttcc

SEQ ID NO: 5218948 - DNA, 25 bp, Homo sapien
aataccttgtcccagttcattgctt

SEQ ID NO: 5218949 - DNA, 25 bp, Homo sapien
cttgtcccagttcattgcttccatg

SEQ ID NO: 5218950 - DNA, 25 bp, Homo sapien
gtgaataccttgtcccagttcattg

SEQ ID NO: 5218951 - DNA, 25 bp, Homo sapien
tcacagatgtgcatataggacatgg

SEQ ID NO: 5218952 - DNA, 25 bp, Homo sapien
tgctgtagcaattgtattgggcact

SEQ ID NO: 5218953 - DNA, 25 bp, Homo sapien
taggacatgggtatttttagctcat

SEQ ID NO: 5218954 - DNA, 25 bp, Homo sapien
tgcaccgatagacgctgctgtagca

SEQ ID NO: 5218955 - DNA, 25 bp, Homo sapien
tcactgattaggtcagcaagtgcta

SEQ ID NO: 5218956 - DNA, 25 bp, Homo sapien
gaatccacattagagaagagcccag

SEQ ID NO: 5218957 - DNA, 25 bp, Homo sapien
tctggtggttaccatttgtgtgaac

SEQ ID NO: 5218958 - DNA, 25 bp, Homo sapien
gcaagtgctatggagtgcgtgatcc

SEQ ID NO: 5218959 - DNA, 25 bp, Homo sapien
caaggcgtttcagaaggatctgaca

SEQ ID NO: 5218960 - DNA, 25 bp, Homo sapien
atgatgggctcaaggcgtttcagaa

SEQ ID NO: 5218961 - DNA, 25 bp, Homo sapien
ttaccttccggatgtttcttaatga

SEQ ID NO: 5218962 - DNA, 25 bp, Homo sapien
accttccggatgtttcttaatgatg

SEQ ID NO: 5218963 - DNA, 25 bp, Homo sapien
gagagactgattctttgttcaaatg

SEQ ID NO: 5218964 - DNA, 25 bp, Homo sapien
agagactgattctttgttcaaatgc

SEQ ID NO: 5218965 - DNA, 25 bp, Homo sapien
tgagagactgattctttgttcaaat

SEQ ID NO: 5218966 - DNA, 25 bp, Homo sapien
gtctcccattatcataaattatgca

SEQ ID NO: 5218967 - DNA, 25 bp, Homo sapien
aagataagcctcactctaggaaaac

SEQ ID NO: 5218968 - DNA, 25 bp, Homo sapien
taggtaagataagcctcactctagg

SEQ ID NO: 5218969 - DNA, 25 bp, Homo sapien
aaaataggtaagataagcctcactc

SEQ ID NO: 5218970 - DNA, 25 bp, Homo sapien
gaagaaataaagccttttagcttga

SEQ ID NO: 5218971 - DNA, 25 bp, Homo sapien
aagaaataaagccttttagcttgag

SEQ ID NO: 5218972 - DNA, 25 bp, Homo sapien
agctctgcagacatagtaaggaaat

SEQ ID NO: 5218973 - DNA, 25 bp, Homo sapien
cagacatagtaaggaaatgggtccc

SEQ ID NO: 5218974 - DNA, 25 bp, Homo sapien
cttgtgagcacctgtcaggcagtca

SEQ ID NO: 5218975 - DNA, 25 bp, Homo sapien
tgagcacctgtcaggcagtcaattt

SEQ ID NO: 5218976 - DNA, 25 bp, Homo sapien
caacatgcatccatgatgatgtccg

SEQ ID NO: 5218977 - DNA, 25 bp, Homo sapien
gctggatttaggctgcaacatgcat

SEQ ID NO: 5218978 - DNA, 25 bp, Homo sapien
ctgcccaatatcaatggctggattt

SEQ ID NO: 5218979 - DNA, 25 bp, Homo sapien
gcatccatgatgatgtccgttctga

SEQ ID NO: 5218980 - DNA, 25 bp, Homo sapien
gacatcagtgatggttggaattttg

SEQ ID NO: 5218981 - DNA, 25 bp, Homo sapien
ccgagagtacaggacaccttctggg

SEQ ID NO: 5218982 - DNA, 25 bp, Homo sapien
gaattttgtactcatctgggctccg

SEQ ID NO: 5218983 - DNA, 25 bp, Homo sapien
cttagacgaatagatggttagtggg

SEQ ID NO: 5218984 - DNA, 25 bp, Homo sapien
ttcgaacccattctggcgttgctgg

SEQ ID NO: 5218985 - DNA, 25 bp, Homo sapien
actgcggccacagcgtcagcaatgg

SEQ ID NO: 5218986 - DNA, 25 bp, Homo sapien
tgaatcgatctgcacaggccattcg

SEQ ID NO: 5218987 - DNA, 25 bp, Homo sapien
gcgttgctgggctcttcaccgtgaa

SEQ ID NO: 5218988 - DNA, 25 bp, Homo sapien
ctctaggccaagatccgcacagagg

SEQ ID NO: 5218989 - DNA, 25 bp, Homo sapien
ggtgctggtttcccggccctgccca

SEQ ID NO: 5218990 - DNA, 25 bp, Homo sapien
gtgctggtttcccggccctgcccat

SEQ ID NO: 5218991 - DNA, 25 bp, Homo sapien
ctaggccaagatccgcacagaggag

SEQ ID NO: 5218992 - DNA, 25 bp, Homo sapien
cattttctaggagccagaccattgg

SEQ ID NO: 5218993 - DNA, 25 bp, Homo sapien
tcattttctaggagccagaccattg

SEQ ID NO: 5218994 - DNA, 25 bp, Homo sapien
ttttaggtgttctccctatctctcc

SEQ ID NO: 5218995 - DNA, 25 bp, Homo sapien
cttttaggtgttctccctatctctc

SEQ ID NO: 5218996 - DNA, 25 bp, Homo sapien
ccttttaggtgttctccctatctct

SEQ ID NO: 5218997 - DNA, 25 bp, Homo sapien
cttttagggaatgatagcagtgtta

SEQ ID NO: 5218998 - DNA, 25 bp, Homo sapien
gcagtgttatgctatagggatagac

SEQ ID NO: 5218999 - DNA, 25 bp, Homo sapien
aatgtctcagggtcatctcttggga

SEQ ID NO: 5219000 - DNA, 25 bp, Homo sapien
atagggatagaccaaggtttaaatg

SEQ ID NO: 5219001 - DNA, 25 bp, Homo sapien
tgcagaactctcttgtggctactga

SEQ ID NO: 5219002 - DNA, 25 bp, Homo sapien
tgtgcatgagggaaataccactcct

SEQ ID NO: 5219003 - DNA, 25 bp, Homo sapien
taaacttgcttactgtggatacagc

SEQ ID NO: 5219004 - DNA, 25 bp, Homo sapien
tatgttctcacttcaatctatggga

SEQ ID NO: 5219005 - DNA, 25 bp, Homo sapien
tccagcaccggaagtcgaagcccga

SEQ ID NO: 5219006 - DNA, 25 bp, Homo sapien
cagcaccggaagtcgaagcccgagg

SEQ ID NO: 5219007 - DNA, 25 bp, Homo sapien
cccgccggtctcgaagttggacgcg

SEQ ID NO: 5219008 - DNA, 25 bp, Homo sapien
tctcgaagttggacgcgtcctcctg

SEQ ID NO: 5219009 - DNA, 25 bp, Homo sapien
cgcctggacacttgtcctagactag

SEQ ID NO: 5219010 - DNA, 25 bp, Homo sapien
ccgctgcgtcgtccgccctcttcac

SEQ ID NO: 5219011 - DNA, 25 bp, Homo sapien
tgggttccacgtcgcctggacactt

SEQ ID NO: 5219012 - DNA, 25 bp, Homo sapien
cacgtcgcctggacacttgtcctag

SEQ ID NO: 5219013 - DNA, 25 bp, Homo sapien
ctattgcgcgcggattagggtgagg

SEQ ID NO: 5219014 - DNA, 25 bp, Homo sapien
tattgcgcgcggattagggtgaggg

SEQ ID NO: 5219015 - DNA, 25 bp, Homo sapien
gcgcgcggattagggtgagggactg

SEQ ID NO: 5219016 - DNA, 25 bp, Homo sapien
ttgcgcgcggattagggtgagggac

SEQ ID NO: 5219017 - DNA, 25 bp, Homo sapien
ggaccgctctcctatcgcgagattt

SEQ ID NO: 5219018 - DNA, 25 bp, Homo sapien
tcctatcgcgagatttcttcccctt

SEQ ID NO: 5219019 - DNA, 25 bp, Homo sapien
gcccggaccgctctcctatcgcgag

SEQ ID NO: 5219020 - DNA, 25 bp, Homo sapien
tatcgcgagatttcttccccttgcc

SEQ ID NO: 5219021 - DNA, 25 bp, Homo sapien
cgaatttaaggcgaagaggaaagag

SEQ ID NO: 5219022 - DNA, 25 bp, Homo sapien
aaagagccagaaatccccgatgtac

SEQ ID NO: 5219023 - DNA, 25 bp, Homo sapien
gaggaaagagccagaaatccccgat

SEQ ID NO: 5219024 - DNA, 25 bp, Homo sapien
gaatttaaggcgaagaggaaagagc

SEQ ID NO: 5219025 - DNA, 25 bp, Homo sapien
cgcccgccctccagcgaaagcagcg

SEQ ID NO: 5219026 - DNA, 25 bp, Homo sapien
caggcgccccgtacatccgcccgcc

SEQ ID NO: 5219027 - DNA, 25 bp, Homo sapien
cccgccctccagcgaaagcagcggc

SEQ ID NO: 5219028 - DNA, 25 bp, Homo sapien
gccccaggcgccccgtacatccgcc

SEQ ID NO: 5219029 - DNA, 25 bp, Homo sapien
aacgagcggaccacagtcactgagg

SEQ ID NO: 5219030 - DNA, 25 bp, Homo sapien
ggtggcggccgccgcaacgagcgga

SEQ ID NO: 5219031 - DNA, 25 bp, Homo sapien
gccgccgcaacgagcggaccacagt

SEQ ID NO: 5219032 - DNA, 25 bp, Homo sapien
cgcaacgagcggaccacagtcactg

SEQ ID NO: 5219033 - DNA, 25 bp, Homo sapien
ccaggaccccatcggccacagcggg

SEQ ID NO: 5219034 - DNA, 25 bp, Homo sapien
ttcccgcccaggaccccatcggcca

SEQ ID NO: 5219035 - DNA, 25 bp, Homo sapien
gcccaggaccccatcggccacagcg

SEQ ID NO: 5219036 - DNA, 25 bp, Homo sapien
ccgcttcccgcccaggaccccatcg

SEQ ID NO: 5219037 - DNA, 25 bp, Homo sapien
catgcctcccgcccgagccacagat

SEQ ID NO: 5219038 - DNA, 25 bp, Homo sapien
tgcctcccgcccgagccacagatca

SEQ ID NO: 5219039 - DNA, 25 bp, Homo sapien
atgcctcccgcccgagccacagatc

SEQ ID NO: 5219040 - DNA, 25 bp, Homo sapien
gcctcccgcccgagccacagatcac

SEQ ID NO: 5219041 - DNA, 25 bp, Homo sapien
ttaaaacgctggcctgatagcgttg

SEQ ID NO: 5219042 - DNA, 25 bp, Homo sapien
tttaaaacgctggcctgatagcgtt

SEQ ID NO: 5219043 - DNA, 25 bp, Homo sapien
ctgagtagggtcaaacctctctttt

SEQ ID NO: 5219044 - DNA, 25 bp, Homo sapien
tttgctccagaagcatcaagaaact

SEQ ID NO: 5219045 - DNA, 25 bp, Homo sapien
agccttgaataatacagtcttgaaa

SEQ ID NO: 5219046 - DNA, 25 bp, Homo sapien
gactctccataatctccatatatta

SEQ ID NO: 5219047 - DNA, 25 bp, Homo sapien
tagttcatattctagactctccata

SEQ ID NO: 5219048 - DNA, 25 bp, Homo sapien
ttaagcccacaaaccacagacactt

SEQ ID NO: 5219049 - DNA, 25 bp, Homo sapien
gccaaatagttcatattctagactc

SEQ ID NO: 5219050 - DNA, 25 bp, Homo sapien
caaacacgcagacatctgtacgcat

SEQ ID NO: 5219051 - DNA, 25 bp, Homo sapien
cttcttgggctgcaaacacgcagac

SEQ ID NO: 5219052 - DNA, 25 bp, Homo sapien
gcaaacacgcagacatctgtacgca

SEQ ID NO: 5219053 - DNA, 25 bp, Homo sapien
cacatggatagtagccaactgaaaa

SEQ ID NO: 5219054 - DNA, 25 bp, Homo sapien
ggatagtagccaactgaaaacaatt

SEQ ID NO: 5219055 - DNA, 25 bp, Homo sapien
atggatagtagccaactgaaaacaa

SEQ ID NO: 5219056 - DNA, 25 bp, Homo sapien
tagtagccaactgaaaacaattatg

SEQ ID NO: 5219057 - DNA, 25 bp, Homo sapien
cctttctccaggtatttgtagcgcc

SEQ ID NO: 5219058 - DNA, 25 bp, Homo sapien
tgtagcgcctgattaacttgttaaa

SEQ ID NO: 5219059 - DNA, 25 bp, Homo sapien
tccaggtatttgtagcgcctgatta

SEQ ID NO: 5219060 - DNA, 25 bp, Homo sapien
tatttgtagcgcctgattaacttgt

SEQ ID NO: 5219061 - DNA, 25 bp, Homo sapien
agcatgttatactggctacctgttc

SEQ ID NO: 5219062 - DNA, 25 bp, Homo sapien
cagcaactgcattacaataagagaa

SEQ ID NO: 5219063 - DNA, 25 bp, Homo sapien
caattaagggttaaaacagcaactg

SEQ ID NO: 5219064 - DNA, 25 bp, Homo sapien
gcagtaaagcatgttatactggcta

SEQ ID NO: 5219065 - DNA, 25 bp, Homo sapien
ccagtcaacatagctagcttgttcc

SEQ ID NO: 5219066 - DNA, 25 bp, Homo sapien
cagtcaacatagctagcttgttcct

SEQ ID NO: 5219067 - DNA, 25 bp, Homo sapien
accagtcaacatagctagcttgttc

SEQ ID NO: 5219068 - DNA, 25 bp, Homo sapien
cttgttcctctccgactctgaaaaa

SEQ ID NO: 5219069 - DNA, 25 bp, Homo sapien
ccaaagtataaattgagggcaacag

SEQ ID NO: 5219070 - DNA, 25 bp, Homo sapien
tctgggtatctgttgtatgcctaaa

SEQ ID NO: 5219071 - DNA, 25 bp, Homo sapien
taatccgacaattggagccaaacag

SEQ ID NO: 5219072 - DNA, 25 bp, Homo sapien
tctgagtcaactgaagaccatcctt

SEQ ID NO: 5219073 - DNA, 25 bp, Homo sapien
gaagacttgcagctactgcattgat

SEQ ID NO: 5219074 - DNA, 25 bp, Homo sapien
gacttgcagctactgcattgatatc

SEQ ID NO: 5219075 - DNA, 25 bp, Homo sapien
tccgaagacttgcagctactgcatt

SEQ ID NO: 5219076 - DNA, 25 bp, Homo sapien
tttccgaagacttgcagctactgca

SEQ ID NO: 5219077 - DNA, 25 bp, Homo sapien
ctttgcttattggcaggaaagagtt

SEQ ID NO: 5219078 - DNA, 25 bp, Homo sapien
tttgcttattggcaggaaagagttc

SEQ ID NO: 5219079 - DNA, 25 bp, Homo sapien
gagctccttacgagctccgatggtt

SEQ ID NO: 5219080 - DNA, 25 bp, Homo sapien
ggagctccttacgagctccgatggt

SEQ ID NO: 5219081 - DNA, 25 bp, Homo sapien
tggagctccttacgagctccgatgg

SEQ ID NO: 5219082 - DNA, 25 bp, Homo sapien
catctcctccttgacatataaaatt

SEQ ID NO: 5219083 - DNA, 25 bp, Homo sapien
ttttttcatctcctccttgacatat

SEQ ID NO: 5219084 - DNA, 25 bp, Homo sapien
gttttttttcatctcctccttgaca

SEQ ID NO: 5219085 - DNA, 25 bp, Homo sapien
tttcatctcctccttgacatataaa

SEQ ID NO: 5219086 - DNA, 25 bp, Homo sapien
tgctcattacacttgaccagactat

SEQ ID NO: 5219087 - DNA, 25 bp, Homo sapien
atggcttgctctgctacaagctcct

SEQ ID NO: 5219088 - DNA, 25 bp, Homo sapien
tgaccagactattccgatgacaact

SEQ ID NO: 5219089 - DNA, 25 bp, Homo sapien
tattccgatgacaactggctctggg

SEQ ID NO: 5219090 - DNA, 25 bp, Homo sapien
ttgagtagtaaaggcagcaagtaga

SEQ ID NO: 5219091 - DNA, 25 bp, Homo sapien
cttgagtagtaaaggcagcaagtag

SEQ ID NO: 5219092 - DNA, 25 bp, Homo sapien
tgagtagtaaaggcagcaagtagag

SEQ ID NO: 5219093 - DNA, 25 bp, Homo sapien
agtagtaaaggcagcaagtagaggg

SEQ ID NO: 5219094 - DNA, 25 bp, Homo sapien
tcatagcaatactcctgaatcttca

SEQ ID NO: 5219095 - DNA, 25 bp, Homo sapien
gttgtcatagcaatactcctgaatc

SEQ ID NO: 5219096 - DNA, 25 bp, Homo sapien
tgaatcttcagtaacagagtcagct

SEQ ID NO: 5219097 - DNA, 25 bp, Homo sapien
tcttcagtaacagagtcagctcaga

SEQ ID NO: 5219098 - DNA, 25 bp, Homo sapien
tctggaaggctttcatgaaatgaat

SEQ ID NO: 5219099 - DNA, 25 bp, Homo sapien
aaaaagcaccactattttctggaag

SEQ ID NO: 5219100 - DNA, 25 bp, Homo sapien
aaagcaccactattttctggaaggc

SEQ ID NO: 5219101 - DNA, 25 bp, Homo sapien
accactattttctggaaggctttca

SEQ ID NO: 5219102 - DNA, 25 bp, Homo sapien
caagtttgaggacgcataatgatgg

SEQ ID NO: 5219103 - DNA, 25 bp, Homo sapien
gtatcagtgcactaaaaagcaccca

SEQ ID NO: 5219104 - DNA, 25 bp, Homo sapien
cccaatttaatcagaggtgactcat

SEQ ID NO: 5219105 - DNA, 25 bp, Homo sapien
tacctggttaagagtataggaggca

SEQ ID NO: 5219106 - DNA, 25 bp, Homo sapien
gaagcactctgaactggtcttgaag

SEQ ID NO: 5219107 - DNA, 25 bp, Homo sapien
gcaatggattttctcccaacagagg

SEQ ID NO: 5219108 - DNA, 25 bp, Homo sapien
actacggaaagtcaacactgggtgg

SEQ ID NO: 5219109 - DNA, 25 bp, Homo sapien
actcaacgggatcaagactggtctg

SEQ ID NO: 5219110 - DNA, 25 bp, Homo sapien
tcttcccctttgcaacatgtgcatc

SEQ ID NO: 5219111 - DNA, 25 bp, Homo sapien
catttgctcaaggaaaacactcttc

SEQ ID NO: 5219112 - DNA, 25 bp, Homo sapien
aaaatgggctcctcgctcaggactt

SEQ ID NO: 5219113 - DNA, 25 bp, Homo sapien
tgtgcatctttataccacttcaaaa

SEQ ID NO: 5219114 - DNA, 25 bp, Homo sapien
gaaccaggacacatgagacatgaca

SEQ ID NO: 5219115 - DNA, 25 bp, Homo sapien
tccagcaaccatagaaacagttaaa

SEQ ID NO: 5219116 - DNA, 25 bp, Homo sapien
tatcatgcttgatacagggaggtag

SEQ ID NO: 5219117 - DNA, 25 bp, Homo sapien
ggtaggaagatgtaagaaccaggac

SEQ ID NO: 5219118 - DNA, 25 bp, Homo sapien
acaattgagctttaggatatctgga

SEQ ID NO: 5219119 - DNA, 25 bp, Homo sapien
tggtccacgtactcaagattcatgt

SEQ ID NO: 5219120 - DNA, 25 bp, Homo sapien
ggcatgccatattatctcacaaatc

SEQ ID NO: 5219121 - DNA, 25 bp, Homo sapien
atgagcagggctccgggcatgccat

SEQ ID NO: 5219122 - DNA, 25 bp, Homo sapien
gaaagatagaaactaaatgcagaag

SEQ ID NO: 5219123 - DNA, 25 bp, Homo sapien
ctggaaagatagaaactaaatgcag

SEQ ID NO: 5219124 - DNA, 25 bp, Homo sapien
actaaatgcagaagtttctcaaggg

SEQ ID NO: 5219125 - DNA, 25 bp, Homo sapien
tgcagaagtttctcaaggggaaaaa

SEQ ID NO: 5219126 - DNA, 25 bp, Homo sapien
ctcagtctctggtggcattattcca

SEQ ID NO: 5219127 - DNA, 25 bp, Homo sapien
tccaggctagtttcaccagttaaaa

SEQ ID NO: 5219128 - DNA, 25 bp, Homo sapien
ttaagagaacgaagccagtccagta

SEQ ID NO: 5219129 - DNA, 25 bp, Homo sapien
acttttggctcataagaatggcacc

SEQ ID NO: 5219130 - DNA, 25 bp, Homo sapien
atcactacgtagaaatctagtgaat

SEQ ID NO: 5219131 - DNA, 25 bp, Homo sapien
tcacaacaatcagttataatgttct

SEQ ID NO: 5219132 - DNA, 25 bp, Homo sapien
tttaacaaattcaccccattcacaa

SEQ ID NO: 5219133 - DNA, 25 bp, Homo sapien
ccccattcacaacaatcagttataa

SEQ ID NO: 5219134 - DNA, 25 bp, Homo sapien
cagaattctgtgtaggtggtttaca

SEQ ID NO: 5219135 - DNA, 25 bp, Homo sapien
tagttttagctacaccagaattctg

SEQ ID NO: 5219136 - DNA, 25 bp, Homo sapien
ttctactaagtaaacactacagtgt

SEQ ID NO: 5219137 - DNA, 25 bp, Homo sapien
cacacaacatacaataccactaggt

SEQ ID NO: 5219138 - DNA, 25 bp, Homo sapien
ggagacagccttagaaactgacagt

SEQ ID NO: 5219139 - DNA, 25 bp, Homo sapien
aacatctataactcacagagtaagg

SEQ ID NO: 5219140 - DNA, 25 bp, Homo sapien
gtcacatgcatttcccctaactaaa

SEQ ID NO: 5219141 - DNA, 25 bp, Homo sapien
ggctaagaaacttacaaccagctct

SEQ ID NO: 5219142 - DNA, 25 bp, Homo sapien
tccattctgtgtgccgtcctgggcg

SEQ ID NO: 5219143 - DNA, 25 bp, Homo sapien
tatttgattaacgttgtagcacccc

SEQ ID NO: 5219144 - DNA, 25 bp, Homo sapien
aaagacatgcctgccaatgcaaagg

SEQ ID NO: 5219145 - DNA, 25 bp, Homo sapien
taattgcctctagttaagctgggag

SEQ ID NO: 5219146 - DNA, 25 bp, Homo sapien
ggtaccaattcttcctagtcaggag

SEQ ID NO: 5219147 - DNA, 25 bp, Homo sapien
ctggcaaaaaactcagcagtgcatt

SEQ ID NO: 5219148 - DNA, 25 bp, Homo sapien
gaagatgcagtgaccatctctatgg

SEQ ID NO: 5219149 - DNA, 25 bp, Homo sapien
cacgtactggagaactagaagggca

SEQ ID NO: 5219150 - DNA, 25 bp, Homo sapien
tgattaattatacggtattccacac

SEQ ID NO: 5219151 - DNA, 25 bp, Homo sapien
atttgattaattatacggtattcca

SEQ ID NO: 5219152 - DNA, 25 bp, Homo sapien
cattaagtgtgtcattgataatttg

SEQ ID NO: 5219153 - DNA, 25 bp, Homo sapien
aattatacggtattccacaccatga

SEQ ID NO: 5219154 - DNA, 25 bp, Homo sapien
tcttctttccataggtgctcttgtg

SEQ ID NO: 5219155 - DNA, 25 bp, Homo sapien
agtcatcattactgcagtaatggcc

SEQ ID NO: 5219156 - DNA, 25 bp, Homo sapien
gtcatcattactgcagtaatggcca

SEQ ID NO: 5219157 - DNA, 25 bp, Homo sapien
cataggtgctcttgtgtacttggat

SEQ ID NO: 5219158 - DNA, 25 bp, Homo sapien
ttttccactcatgtatataccaatt

SEQ ID NO: 5219159 - DNA, 25 bp, Homo sapien
tcctgcttgtgctctattctgtatc

SEQ ID NO: 5219160 - DNA, 25 bp, Homo sapien
tgtgctctattctgtatctattaac

SEQ ID NO: 5219161 - DNA, 25 bp, Homo sapien
ccattttttaagatcctgcttgtgc

SEQ ID NO: 5219162 - DNA, 25 bp, Homo sapien
acctcgtagtagtcaccatccgtga

SEQ ID NO: 5219163 - DNA, 25 bp, Homo sapien
ctcctcagcgtgctgggtctcgcgg

SEQ ID NO: 5219164 - DNA, 25 bp, Homo sapien
tggactttggccttgtataggccct

SEQ ID NO: 5219165 - DNA, 25 bp, Homo sapien
atgcctgctgcgcagtgccctgagc

SEQ ID NO: 5219166 - DNA, 25 bp, Homo sapien
ctgggtaggaggatggaggagttgc

SEQ ID NO: 5219167 - DNA, 25 bp, Homo sapien
gctggtgcagctggccccgtcctgg

SEQ ID NO: 5219168 - DNA, 25 bp, Homo sapien
gtaggaggatggaggagttgcccat

SEQ ID NO: 5219169 - DNA, 25 bp, Homo sapien
ggggctggtgcagctggccccgtcc

SEQ ID NO: 5219170 - DNA, 25 bp, Homo sapien
agagcctccttgaacttgtccgtgg

SEQ ID NO: 5219171 - DNA, 25 bp, Homo sapien
cttgaggatctttttcacgagagcc

SEQ ID NO: 5219172 - DNA, 25 bp, Homo sapien
caagtggtagatattcatgggctcc

SEQ ID NO: 5219173 - DNA, 25 bp, Homo sapien
tccattatgtggttcacagctgcct

SEQ ID NO: 5219174 - DNA, 25 bp, Homo sapien
tgcccttcagcttggagagggccac

SEQ ID NO: 5219175 - DNA, 25 bp, Homo sapien
ttgcccttcagcttggagagggcca

SEQ ID NO: 5219176 - DNA, 25 bp, Homo sapien
tggtgcacagtgaggagaaggtggc

SEQ ID NO: 5219177 - DNA, 25 bp, Homo sapien
aaggtggccacgtcctcctcagagg

SEQ ID NO: 5219178 - DNA, 25 bp, Homo sapien
ccacgtcctcctcagaggcgagcac

SEQ ID NO: 5219179 - DNA, 25 bp, Homo sapien
gtggccacgtcctcctcagaggcga

SEQ ID NO: 5219180 - DNA, 25 bp, Homo sapien
tctgcaggatgaccatgcacagcag

SEQ ID NO: 5219181 - DNA, 25 bp, Homo sapien
aggtctgtgtggtccagcttgagca

SEQ ID NO: 5219182 - DNA, 25 bp, Homo sapien
caggatgaccatgcacagcagtgag

SEQ ID NO: 5219183 - DNA, 25 bp, Homo sapien
cagcagtgagttcagtgccttctca

SEQ ID NO: 5219184 - DNA, 25 bp, Homo sapien
ttggccctgtcactggcgcaggtgc

SEQ ID NO: 5219185 - DNA, 25 bp, Homo sapien
ggcataacataagcttggggtggcc

SEQ ID NO: 5219186 - DNA, 25 bp, Homo sapien
cataacataagcttggggtggccag

SEQ ID NO: 5219187 - DNA, 25 bp, Homo sapien
taacataagcttggggtggccagct

SEQ ID NO: 5219188 - DNA, 25 bp, Homo sapien
gaaaatgttggagtatgatccagcc

SEQ ID NO: 5219189 - DNA, 25 bp, Homo sapien
tagtcaatggtagtggaaaaggctg

SEQ ID NO: 5219190 - DNA, 25 bp, Homo sapien
gagcgtctctttgacctcattcaga

SEQ ID NO: 5219191 - DNA, 25 bp, Homo sapien
tgtaattggacagctctctcgaaga

SEQ ID NO: 5219192 - DNA, 25 bp, Homo sapien
tagtaacttcgaatgctgggtaaaa

SEQ ID NO: 5219193 - DNA, 25 bp, Homo sapien
tctgatgcgcaaaaatagtaacttc

SEQ ID NO: 5219194 - DNA, 25 bp, Homo sapien
cattcagcaagtaggatatccacca

SEQ ID NO: 5219195 - DNA, 25 bp, Homo sapien
caggctgttgatccagcagtgtaca

SEQ ID NO: 5219196 - DNA, 25 bp, Homo sapien
tggtaaggacatgagagctagagct

SEQ ID NO: 5219197 - DNA, 25 bp, Homo sapien
ccactgtatcctaactcttttggca

SEQ ID NO: 5219198 - DNA, 25 bp, Homo sapien
actgctcccggtcctagagctcttt

SEQ ID NO: 5219199 - DNA, 25 bp, Homo sapien
tattgattggtaaggacatgagagc

SEQ ID NO: 5219200 - DNA, 25 bp, Homo sapien
tcttcctcttcctgaatggcaaagc

SEQ ID NO: 5219201 - DNA, 25 bp, Homo sapien
cctgaatggcaaagcatttttgagg

SEQ ID NO: 5219202 - DNA, 25 bp, Homo sapien
cctcttcctgaatggcaaagcattt

SEQ ID NO: 5219203 - DNA, 25 bp, Homo sapien
ctgaatggcaaagcatttttgaggg

SEQ ID NO: 5219204 - DNA, 25 bp, Homo sapien
aatgtaatgtttgttatatagaact

SEQ ID NO: 5219205 - DNA, 25 bp, Homo sapien
ctaagtgcaagatgtatagaatatt

SEQ ID NO: 5219206 - DNA, 25 bp, Homo sapien
ctatatatagattaagctttcaggg

SEQ ID NO: 5219207 - DNA, 25 bp, Homo sapien
tattaacttttcagataacataatc

SEQ ID NO: 5219208 - DNA, 25 bp, Homo sapien
aattgctcctgccaaccgtttgtgg

SEQ ID NO: 5219209 - DNA, 25 bp, Homo sapien
gaatgcctgaatatctccccgctga

SEQ ID NO: 5219210 - DNA, 25 bp, Homo sapien
tgtggcctggcgtgtatctgaatgc

SEQ ID NO: 5219211 - DNA, 25 bp, Homo sapien
tgccgcccacttgacgtttccagaa

SEQ ID NO: 5219212 - DNA, 25 bp, Homo sapien
taggattaggtatgcttctttgttc

SEQ ID NO: 5219213 - DNA, 25 bp, Homo sapien
gccgtagtgttattcttgtatgcca

SEQ ID NO: 5219214 - DNA, 25 bp, Homo sapien
ggagatcagctcagatgacattaaa

SEQ ID NO: 5219215 - DNA, 25 bp, Homo sapien
ttttgtggtacttcaagaaacctga

SEQ ID NO: 5219216 - DNA, 25 bp, Homo sapien
tttatattctgatgccaccgttgcc

SEQ ID NO: 5219217 - DNA, 25 bp, Homo sapien
tgaaaagaaggtggctcctaccatt

SEQ ID NO: 5219218 - DNA, 25 bp, Homo sapien
caccgttgccttcgtgtgtgattaa

SEQ ID NO: 5219219 - DNA, 25 bp, Homo sapien
tatactcaggctggtccaatggtag

SEQ ID NO: 5219220 - DNA, 25 bp, Homo sapien
cacaactagccctgctgtgtgttgt

SEQ ID NO: 5219221 - DNA, 25 bp, Homo sapien
tattacatggtgcaattttaaagca

SEQ ID NO: 5219222 - DNA, 25 bp, Homo sapien
tgcccccacccacaactagccctgc

SEQ ID NO: 5219223 - DNA, 25 bp, Homo sapien
gcatagtattacatggtgcaatttt

SEQ ID NO: 5219224 - DNA, 25 bp, Homo sapien
agagtagttggaggcgcctgccacc

SEQ ID NO: 5219225 - DNA, 25 bp, Homo sapien
ccagagtagttggaggcgcctgcca

SEQ ID NO: 5219226 - DNA, 25 bp, Homo sapien
cagagtagttggaggcgcctgccac

SEQ ID NO: 5219227 - DNA, 25 bp, Homo sapien
tccagagtagttggaggcgcctgcc

SEQ ID NO: 5219228 - DNA, 25 bp, Homo sapien
tccgctggcccaaagaaactataat

SEQ ID NO: 5219229 - DNA, 25 bp, Homo sapien
ttgaggttgcccaggtagtttcgcc

SEQ ID NO: 5219230 - DNA, 25 bp, Homo sapien
ttttgaaccaacagacctctgctgg

SEQ ID NO: 5219231 - DNA, 25 bp, Homo sapien
ccagtgcaattattagtagagctcc

SEQ ID NO: 5219232 - DNA, 25 bp, Homo sapien
cttggctccccgtagcgggagagct

SEQ ID NO: 5219233 - DNA, 25 bp, Homo sapien
gaagtggtcctttccgtttggcagc

SEQ ID NO: 5219234 - DNA, 25 bp, Homo sapien
tcggcgctccggatgctgtggcact

SEQ ID NO: 5219235 - DNA, 25 bp, Homo sapien
cgtttggcagccgagtgtaaagcat

SEQ ID NO: 5219236 - DNA, 25 bp, Homo sapien
aggtcacaactacactcgcgggttt

SEQ ID NO: 5219237 - DNA, 25 bp, Homo sapien
tcacaactacactcgcgggttttta

SEQ ID NO: 5219238 - DNA, 25 bp, Homo sapien
aaggtcacaactacactcgcgggtt

SEQ ID NO: 5219239 - DNA, 25 bp, Homo sapien
agataacaatcacagccggccccaa

SEQ ID NO: 5219240 - DNA, 25 bp, Homo sapien
accaagataacaatcacagccggcc

SEQ ID NO: 5219241 - DNA, 25 bp, Homo sapien
caagataacaatcacagccggcccc

SEQ ID NO: 5219242 - DNA, 25 bp, Homo sapien
gcaccaagataacaatcacagccgg

SEQ ID NO: 5219243 - DNA, 25 bp, Homo sapien
gctctggtgcggcagggcagttttc

SEQ ID NO: 5219244 - DNA, 25 bp, Homo sapien
gaaaaaccacgagacacagccagtt

SEQ ID NO: 5219245 - DNA, 25 bp, Homo sapien
catctatgcctcatttcagtgccac

SEQ ID NO: 5219246 - DNA, 25 bp, Homo sapien
ctcatctatgcctcatttcagtgcc

SEQ ID NO: 5219247 - DNA, 25 bp, Homo sapien
tttccaggacagtgaaaaaccacga

SEQ ID NO: 5219248 - DNA, 25 bp, Homo sapien
agtgcccaggccacaatatcgcgag

SEQ ID NO: 5219249 - DNA, 25 bp, Homo sapien
gctgtgcaacagcaggtaaatgact

SEQ ID NO: 5219250 - DNA, 25 bp, Homo sapien
cccgtcctagagtaagcactgttta

SEQ ID NO: 5219251 - DNA, 25 bp, Homo sapien
cctccttaatggaaatagtgcccag

SEQ ID NO: 5219252 - DNA, 25 bp, Homo sapien
gcgtccggccttgaaagatcttcta

SEQ ID NO: 5219253 - DNA, 25 bp, Homo sapien
actgcgtccggccttgaaagatctt

SEQ ID NO: 5219254 - DNA, 25 bp, Homo sapien
tgcgtccggccttgaaagatcttct

SEQ ID NO: 5219255 - DNA, 25 bp, Homo sapien
tatttaatgagatgaagatgcttgt

SEQ ID NO: 5219256 - DNA, 25 bp, Homo sapien
tgatacagggtctccaaaaaccact

SEQ ID NO: 5219257 - DNA, 25 bp, Homo sapien
tccataagtcaattattccaaaagc

SEQ ID NO: 5219258 - DNA, 25 bp, Homo sapien
atttgaagtgatacagggtctccaa

SEQ ID NO: 5219259 - DNA, 25 bp, Homo sapien
catttcatagtatgcacaataagaa

SEQ ID NO: 5219260 - DNA, 25 bp, Homo sapien
tatgcacaataagaaagcatagcca

SEQ ID NO: 5219261 - DNA, 25 bp, Homo sapien
tagtatgcacaataagaaagcatag

SEQ ID NO: 5219262 - DNA, 25 bp, Homo sapien
tcatagtatgcacaataagaaagca

SEQ ID NO: 5219263 - DNA, 25 bp, Homo sapien
cactctataaatgggcagggtcaag

SEQ ID NO: 5219264 - DNA, 25 bp, Homo sapien
tactgcatagaatgacactgcccgc

SEQ ID NO: 5219265 - DNA, 25 bp, Homo sapien
tttgctacacaaaggccaggctcaa

SEQ ID NO: 5219266 - DNA, 25 bp, Homo sapien
aaatcaaggaatacataggcaggtc

SEQ ID NO: 5219267 - DNA, 25 bp, Homo sapien
cagcacactgtaacttaggtaagcc

SEQ ID NO: 5219268 - DNA, 25 bp, Homo sapien
catatgggcaaaagagctgtcgtca

SEQ ID NO: 5219269 - DNA, 25 bp, Homo sapien
gctgtcgtcatagagatctgggttc

SEQ ID NO: 5219270 - DNA, 25 bp, Homo sapien
tttgaggcatcaaaacatatgggca

SEQ ID NO: 5219271 - DNA, 25 bp, Homo sapien
acagaaatcaggtaaagttcaagtt

SEQ ID NO: 5219272 - DNA, 25 bp, Homo sapien
cagaaatcaggtaaagttcaagttt

SEQ ID NO: 5219273 - DNA, 25 bp, Homo sapien
ctgggcgtacgcaagatgacaacat

SEQ ID NO: 5219274 - DNA, 25 bp, Homo sapien
tctacaaaccggactgtcgtgggga

SEQ ID NO: 5219275 - DNA, 25 bp, Homo sapien
aatctacaaaccggactgtcgtggg

SEQ ID NO: 5219276 - DNA, 25 bp, Homo sapien
ggaatctacaaaccggactgtcgtg

SEQ ID NO: 5219277 - DNA, 25 bp, Homo sapien
gaatctacaaaccggactgtcgtgg

SEQ ID NO: 5219278 - DNA, 25 bp, Homo sapien
gtagataccgactctgttctccaga

SEQ ID NO: 5219279 - DNA, 25 bp, Homo sapien
cattggtcaggaagagtgtatttac

SEQ ID NO: 5219280 - DNA, 25 bp, Homo sapien
caggcgctccttccatgtgttccag

SEQ ID NO: 5219281 - DNA, 25 bp, Homo sapien
caggttatgcgcttcatgggtcgga

SEQ ID NO: 5219282 - DNA, 25 bp, Homo sapien
ccatcattcaggttgcaaatgctca

SEQ ID NO: 5219283 - DNA, 25 bp, Homo sapien
gatatcatcataaaagctttagccc

SEQ ID NO: 5219284 - DNA, 25 bp, Homo sapien
cacagaatggtctactgcttggtaa

SEQ ID NO: 5219285 - DNA, 25 bp, Homo sapien
ctagggctttggcatggacatacaa

SEQ ID NO: 5219286 - DNA, 25 bp, Homo sapien
ctttggaaggatgtatgggcctgga

SEQ ID NO: 5219287 - DNA, 25 bp, Homo sapien
tctgtagggtagttgggagctttgg

SEQ ID NO: 5219288 - DNA, 25 bp, Homo sapien
caccgtcaattcctttcactgcaga

SEQ ID NO: 5219289 - DNA, 25 bp, Homo sapien
agttaacgttgaattctactcggtg

SEQ ID NO: 5219290 - DNA, 25 bp, Homo sapien
cagattaatccgtgtttgttcctca

SEQ ID NO: 5219291 - DNA, 25 bp, Homo sapien
tgcatcaaagccttctgagtacaat

SEQ ID NO: 5219292 - DNA, 25 bp, Homo sapien
cgggaaagaaaatctaccacctgca

SEQ ID NO: 5219293 - DNA, 25 bp, Homo sapien
tgagtacaattcagattaatccgtg

SEQ ID NO: 5219294 - DNA, 25 bp, Homo sapien
tctccagtgacagaatttccgtctt

SEQ ID NO: 5219295 - DNA, 25 bp, Homo sapien
cttctccagtgacagaatttccgtc

SEQ ID NO: 5219296 - DNA, 25 bp, Homo sapien
ttctccagtgacagaatttccgtct

SEQ ID NO: 5219297 - DNA, 25 bp, Homo sapien
taggtgctcggtgagactactctca

SEQ ID NO: 5219298 - DNA, 25 bp, Homo sapien
ggcccaggctgtagcagatcattaa

SEQ ID NO: 5219299 - DNA, 25 bp, Homo sapien
gagagtttcaactactgtggtggca

SEQ ID NO: 5219300 - DNA, 25 bp, Homo sapien
cctggactgcctcctaggtgctcgg

SEQ ID NO: 5219301 - DNA, 25 bp, Homo sapien
tggcaggacagaggtacgatgagat

SEQ ID NO: 5219302 - DNA, 25 bp, Homo sapien
ttggaggaaggacttaggtcttaga

SEQ ID NO: 5219303 - DNA, 25 bp, Homo sapien
aatacaaggtaggtgctacagttgc

SEQ ID NO: 5219304 - DNA, 25 bp, Homo sapien
ttaaaaaggggtgatgtcaagtgca

SEQ ID NO: 5219305 - DNA, 25 bp, Homo sapien
gggagacagattcatccagtgtgca

SEQ ID NO: 5219306 - DNA, 25 bp, Homo sapien
cccattccagtatgtagaagcaaag

SEQ ID NO: 5219307 - DNA, 25 bp, Homo sapien
tattcgatcaatcatggttgccagg

SEQ ID NO: 5219308 - DNA, 25 bp, Homo sapien
tgtgcataaccgtcccattccagta

SEQ ID NO: 5219309 - DNA, 25 bp, Homo sapien
caccccaagggctaagcgaatatga

SEQ ID NO: 5219310 - DNA, 25 bp, Homo sapien
ccaccccaagggctaagcgaatatg

SEQ ID NO: 5219311 - DNA, 25 bp, Homo sapien
ccccaagggctaagcgaatatgaga

SEQ ID NO: 5219312 - DNA, 25 bp, Homo sapien
cccaccccaagggctaagcgaatat

SEQ ID NO: 5219313 - DNA, 25 bp, Homo sapien
agcaactttcgagccaaaatccaag

SEQ ID NO: 5219314 - DNA, 25 bp, Homo sapien
gcaagtactatctctattctcaggt

SEQ ID NO: 5219315 - DNA, 25 bp, Homo sapien
gacactccagttcagcagcagggta

SEQ ID NO: 5219316 - DNA, 25 bp, Homo sapien
ctcaggtgaggaagctaaggaacta

SEQ ID NO: 5219317 - DNA, 25 bp, Homo sapien
aatgcacaaatttgcgtgtaatctt

SEQ ID NO: 5219318 - DNA, 25 bp, Homo sapien
gaacaatgcacaaatttgcgtgtaa

SEQ ID NO: 5219319 - DNA, 25 bp, Homo sapien
acggaacaatgcacaaatttgcgtg

SEQ ID NO: 5219320 - DNA, 25 bp, Homo sapien
caatgcacaaatttgcgtgtaatct

SEQ ID NO: 5219321 - DNA, 25 bp, Homo sapien
agcctcaacaccctgcagaacgctg

SEQ ID NO: 5219322 - DNA, 25 bp, Homo sapien
cagggccacgactttgacttgagac

SEQ ID NO: 5219323 - DNA, 25 bp, Homo sapien
aacaccctgcagaacgctgctccca

SEQ ID NO: 5219324 - DNA, 25 bp, Homo sapien
gcacacagggccacgactttgactt

SEQ ID NO: 5219325 - DNA, 25 bp, Homo sapien
gtaattctttaactcattctctcct

SEQ ID NO: 5219326 - DNA, 25 bp, Homo sapien
gcctagagcctggtcctcaaagtgg

SEQ ID NO: 5219327 - DNA, 25 bp, Homo sapien
ctaagagcctagagcctggtcctca

SEQ ID NO: 5219328 - DNA, 25 bp, Homo sapien
aaagtaattctttaactcattctct

SEQ ID NO: 5219329 - DNA, 25 bp, Homo sapien
cctcggtacttcaggatgtgacaat

SEQ ID NO: 5219330 - DNA, 25 bp, Homo sapien
gagtgcagcagcctttgtaagagag

SEQ ID NO: 5219331 - DNA, 25 bp, Homo sapien
gaagtagccaaaggaatggccagag

SEQ ID NO: 5219332 - DNA, 25 bp, Homo sapien
gagtgtgctatataacaaagtgtgg

SEQ ID NO: 5219333 - DNA, 25 bp, Homo sapien
tgggaagcagcatccaaagtatcat

SEQ ID NO: 5219334 - DNA, 25 bp, Homo sapien
tccaaagtatcatgatgggacatct

SEQ ID NO: 5219335 - DNA, 25 bp, Homo sapien
gcagcatccaaagtatcatgatggg

SEQ ID NO: 5219336 - DNA, 25 bp, Homo sapien
aaagtatcatgatgggacatctcac

SEQ ID NO: 5219337 - DNA, 25 bp, Homo sapien
gcatatctcgaaggtcagaaagaaa

SEQ ID NO: 5219338 - DNA, 25 bp, Homo sapien
gaaagaaagcctcgttcagtgttgc

SEQ ID NO: 5219339 - DNA, 25 bp, Homo sapien
caagtgagaatccagcatatctcga

SEQ ID NO: 5219340 - DNA, 25 bp, Homo sapien
ggtccctgtcagtctctgataggat

SEQ ID NO: 5219341 - DNA, 25 bp, Homo sapien
tttgtagaatgtgttatcctgatgt

SEQ ID NO: 5219342 - DNA, 25 bp, Homo sapien
cagctgatttgtagaatgtgttatc

SEQ ID NO: 5219343 - DNA, 25 bp, Homo sapien
gttacaaatttaagttggcatccag

SEQ ID NO: 5219344 - DNA, 25 bp, Homo sapien
tttaagttggcatccagctgatttg

SEQ ID NO: 5219345 - DNA, 25 bp, Homo sapien
cgatagaacatttggtgaataagat

SEQ ID NO: 5219346 - DNA, 25 bp, Homo sapien
tatattacagttttaccttacgagc

SEQ ID NO: 5219347 - DNA, 25 bp, Homo sapien
taccttacgagcgatagaacatttg

SEQ ID NO: 5219348 - DNA, 25 bp, Homo sapien
tacagttttaccttacgagcgatag

SEQ ID NO: 5219349 - DNA, 25 bp, Homo sapien
cacctgtgagggaatgtgcatgtcc

SEQ ID NO: 5219350 - DNA, 25 bp, Homo sapien
catccacatggataaaaggcccaga

SEQ ID NO: 5219351 - DNA, 25 bp, Homo sapien
tgccggacacaaaggaccacatgtt

SEQ ID NO: 5219352 - DNA, 25 bp, Homo sapien
agaaaggtgtatctgccctgcccaa

SEQ ID NO: 5219353 - DNA, 25 bp, Homo sapien
catgtgggcatccaaggcgaccttt

SEQ ID NO: 5219354 - DNA, 25 bp, Homo sapien
ggcatccaaggcgaccttttaagtc

SEQ ID NO: 5219355 - DNA, 25 bp, Homo sapien
atggatgcacaacaaaggtggtgac

SEQ ID NO: 5219356 - DNA, 25 bp, Homo sapien
aaggtggtgacactattccctacaa

SEQ ID NO: 5219357 - DNA, 25 bp, Homo sapien
ctaggcagtgtagcaaaacccggtc

SEQ ID NO: 5219358 - DNA, 25 bp, Homo sapien
tttatatttatcactggccccaggc

SEQ ID NO: 5219359 - DNA, 25 bp, Homo sapien
tatggagcaccctctaatacatgtg

SEQ ID NO: 5219360 - DNA, 25 bp, Homo sapien
cctgatctagattggtatggagcac

SEQ ID NO: 5219361 - DNA, 25 bp, Homo sapien
tctagtttataatgacctaatgtgc

SEQ ID NO: 5219362 - DNA, 25 bp, Homo sapien
tattcttccagatatcgtctatgca

SEQ ID NO: 5219363 - DNA, 25 bp, Homo sapien
cctggccaagggcttagtcttaaat

SEQ ID NO: 5219364 - DNA, 25 bp, Homo sapien
agtcttaaatataacctctagtcaa

SEQ ID NO: 5219365 - DNA, 25 bp, Homo sapien
tgattcctctgtcaagtagacctaa

SEQ ID NO: 5219366 - DNA, 25 bp, Homo sapien
aaggctcaccttggctactgttgtc

SEQ ID NO: 5219367 - DNA, 25 bp, Homo sapien
aacctcctgaatatttgcgcgagac

SEQ ID NO: 5219368 - DNA, 25 bp, Homo sapien
aaagtgatgatttcaaacctcctga

SEQ ID NO: 5219369 - DNA, 25 bp, Homo sapien
tatataggttctagacttagactgc

SEQ ID NO: 5219370 - DNA, 25 bp, Homo sapien
tagttgcaacacttagcaccatgtc

SEQ ID NO: 5219371 - DNA, 25 bp, Homo sapien
gtgaatttctgtcaacagcacctcg

SEQ ID NO: 5219372 - DNA, 25 bp, Homo sapien
cagcacctcgtagtctaagaaaaag

SEQ ID NO: 5219373 - DNA, 25 bp, Homo sapien
tccatttggagaattagcatgctca

SEQ ID NO: 5219374 - DNA, 25 bp, Homo sapien
cacaggagtaatcaagtagtagttc

SEQ ID NO: 5219375 - DNA, 25 bp, Homo sapien
aaatgaaaccctaggacaatggtgc

SEQ ID NO: 5219376 - DNA, 25 bp, Homo sapien
gactgaatcctgtataggagcactg

SEQ ID NO: 5219377 - DNA, 25 bp, Homo sapien
tatgaacctcatagagttgtgcaga

SEQ ID NO: 5219378 - DNA, 25 bp, Homo sapien
tgttctcagtatctagggcttccta

SEQ ID NO: 5219379 - DNA, 25 bp, Homo sapien
tatggagtactcaaaactgtctagc

SEQ ID NO: 5219380 - DNA, 25 bp, Homo sapien
caatgtaagtgctcaaattttgtcc

SEQ ID NO: 5219381 - DNA, 25 bp, Homo sapien
tgtaacgacagtggtaaagtgccct

SEQ ID NO: 5219382 - DNA, 25 bp, Homo sapien
tgaagaggaagagatcgcgtcccag

SEQ ID NO: 5219383 - DNA, 25 bp, Homo sapien
tctggttggaaaaggagaactgtga

SEQ ID NO: 5219384 - DNA, 25 bp, Homo sapien
gaaccactgtagctagaacctttga

SEQ ID NO: 5219385 - DNA, 25 bp, Homo sapien
ctcagcggggtgtcgttcggccggc

SEQ ID NO: 5219386 - DNA, 25 bp, Homo sapien
tgacgcagccggatcggcgccagac

SEQ ID NO: 5219387 - DNA, 25 bp, Homo sapien
aggtaccttccctgcggcggcgact

SEQ ID NO: 5219388 - DNA, 25 bp, Homo sapien
tggtcgggcgcgaattactggaaat

SEQ ID NO: 5219389 - DNA, 25 bp, Homo sapien
ggcccacaactcagggcccaagaat

SEQ ID NO: 5219390 - DNA, 25 bp, Homo sapien
tcagccagctactgtgcaaacttcc

SEQ ID NO: 5219391 - DNA, 25 bp, Homo sapien
cttggccgactcctcttcctattgg

SEQ ID NO: 5219392 - DNA, 25 bp, Homo sapien
ccgactggacggcagagccgtcgct

SEQ ID NO: 5219393 - DNA, 25 bp, Homo sapien
taaatcctgtgtctccattctgaag

SEQ ID NO: 5219394 - DNA, 25 bp, Homo sapien
gcctctgtggtctgtagaagccttt

SEQ ID NO: 5219395 - DNA, 25 bp, Homo sapien
ggagttgccattttatggtcccctc

SEQ ID NO: 5219396 - DNA, 25 bp, Homo sapien
gccctgcgcaaaatttccgtgaata

SEQ ID NO: 5219397 - DNA, 25 bp, Homo sapien
tggattccagctaaccaacttatgt

SEQ ID NO: 5219398 - DNA, 25 bp, Homo sapien
aaggaataggcttcttactggcttc

SEQ ID NO: 5219399 - DNA, 25 bp, Homo sapien
catgctgcttttaacgtattcctga

SEQ ID NO: 5219400 - DNA, 25 bp, Homo sapien
tattcctgagactaccacctggagt

SEQ ID NO: 5219401 - DNA, 25 bp, Homo sapien
tctggttgcttaatctagatctctc

SEQ ID NO: 5219402 - DNA, 25 bp, Homo sapien
ttttcacgatactggcaaagacaaa

SEQ ID NO: 5219403 - DNA, 25 bp, Homo sapien
ggcattatgcccctggttgaggtag

SEQ ID NO: 5219404 - DNA, 25 bp, Homo sapien
ggagcaatagcatcaatatgaagct

SEQ ID NO: 5219405 - DNA, 25 bp, Homo sapien
cagagctgaagaaaaaaccgtgaat

SEQ ID NO: 5219406 - DNA, 25 bp, Homo sapien
tgaccttgtaaatatctgccagaga

SEQ ID NO: 5219407 - DNA, 25 bp, Homo sapien
tattggtgcatgtaagccattatcc

SEQ ID NO: 5219408 - DNA, 25 bp, Homo sapien
tgagtgatgtcctttcaacctagga

SEQ ID NO: 5219409 - DNA, 25 bp, Homo sapien
catactaaaacaggcagtttcaggt

SEQ ID NO: 5219410 - DNA, 25 bp, Homo sapien
tgccaaagtccagggtaaagctaaa

SEQ ID NO: 5219411 - DNA, 25 bp, Homo sapien
tatacttacctagaaagtgagatct

SEQ ID NO: 5219412 - DNA, 25 bp, Homo sapien
ctagaacctgaactagtatctacaa

SEQ ID NO: 5219413 - DNA, 25 bp, Homo sapien
tatgtcagactataagagaaaccct

SEQ ID NO: 5219414 - DNA, 25 bp, Homo sapien
tatatcagggacagacaattggctg

SEQ ID NO: 5219415 - DNA, 25 bp, Homo sapien
tgatatcatgccagtaagctagatg

SEQ ID NO: 5219416 - DNA, 25 bp, Homo sapien
cagctgctttctagatgtacctaaa

SEQ ID NO: 5219417 - DNA, 25 bp, Homo sapien
tgacaacctatagcgaacattgccc

SEQ ID NO: 5219418 - DNA, 25 bp, Homo sapien
tgatagtagggccattgacaaccta

SEQ ID NO: 5219419 - DNA, 25 bp, Homo sapien
taaggtcagtgttgttattcacagc

SEQ ID NO: 5219420 - DNA, 25 bp, Homo sapien
aacattgcccaagagataaggtcag

SEQ ID NO: 5219421 - DNA, 25 bp, Homo sapien
gctctatcgtagctcagaggttcga

SEQ ID NO: 5219422 - DNA, 25 bp, Homo sapien
tacagttagccgagacagacagagt

SEQ ID NO: 5219423 - DNA, 25 bp, Homo sapien
gccatcagctgtttgagctctatcg

SEQ ID NO: 5219424 - DNA, 25 bp, Homo sapien
gacttaagaggttcacactgcagtt

SEQ ID NO: 5219425 - DNA, 25 bp, Homo sapien
tagagacaatgacatcaatacaatg

SEQ ID NO: 5219426 - DNA, 25 bp, Homo sapien
aaatagtttgcctcacttgtatgta

SEQ ID NO: 5219427 - DNA, 25 bp, Homo sapien
gtattgcaaaatcccttcttctact

SEQ ID NO: 5219428 - DNA, 25 bp, Homo sapien
aaatattagctagaattttggatgc

SEQ ID NO: 5219429 - DNA, 25 bp, Homo sapien
tgttgagaaatttgtgagtcttact

SEQ ID NO: 5219430 - DNA, 25 bp, Homo sapien
gtgagtcttactgttttttgaagag

SEQ ID NO: 5219431 - DNA, 25 bp, Homo sapien
gcatagtattctagattagcagtta

SEQ ID NO: 5219432 - DNA, 25 bp, Homo sapien
ttgctgggcatagtattctagatta

SEQ ID NO: 5219433 - DNA, 25 bp, Homo sapien
gacggcagggtgaagagagacttta

SEQ ID NO: 5219434 - DNA, 25 bp, Homo sapien
cggcagggtgaagagagactttaac

SEQ ID NO: 5219435 - DNA, 25 bp, Homo sapien
agagactttaacgatgcttcttcgg

SEQ ID NO: 5219436 - DNA, 25 bp, Homo sapien
ggtgaagagagactttaacgatgct

SEQ ID NO: 5219437 - DNA, 25 bp, Homo sapien
cagtctgtgagcgttccccgttgct

SEQ ID NO: 5219438 - DNA, 25 bp, Homo sapien
cattcatagctgcctccacctcctt

SEQ ID NO: 5219439 - DNA, 25 bp, Homo sapien
tctgtgagcgttccccgttgctcaa

SEQ ID NO: 5219440 - DNA, 25 bp, Homo sapien
acacagtctgtgagcgttccccgtt

SEQ ID NO: 5219441 - DNA, 25 bp, Homo sapien
tatctttttcacagttaagtgggca

SEQ ID NO: 5219442 - DNA, 25 bp, Homo sapien
atctttttcacagttaagtgggcac

SEQ ID NO: 5219443 - DNA, 25 bp, Homo sapien
atatctttttcacagttaagtgggc

SEQ ID NO: 5219444 - DNA, 25 bp, Homo sapien
aaatatctttttcacagttaagtgg

SEQ ID NO: 5219445 - DNA, 25 bp, Homo sapien
ttcccactgcctcggtcagtcatga

SEQ ID NO: 5219446 - DNA, 25 bp, Homo sapien
tttcttcccactgcctcggtcagtc

SEQ ID NO: 5219447 - DNA, 25 bp, Homo sapien
atcttatccacggagtcatggtcat

SEQ ID NO: 5219448 - DNA, 25 bp, Homo sapien
tcttcccactgcctcggtcagtcat

SEQ ID NO: 5219449 - DNA, 25 bp, Homo sapien
ctcttgctttgacagggcttttcta

SEQ ID NO: 5219450 - DNA, 25 bp, Homo sapien
tcttgctttgacagggcttttctaa

SEQ ID NO: 5219451 - DNA, 25 bp, Homo sapien
cttgctttgacagggcttttctaac

SEQ ID NO: 5219452 - DNA, 25 bp, Homo sapien
ctctttggctagatgaagcactagt

SEQ ID NO: 5219453 - DNA, 25 bp, Homo sapien
tctttggctagatgaagcactagtc

SEQ ID NO: 5219454 - DNA, 25 bp, Homo sapien
ctttggctagatgaagcactagtca

SEQ ID NO: 5219455 - DNA, 25 bp, Homo sapien
tttggctagatgaagcactagtcat

SEQ ID NO: 5219456 - DNA, 25 bp, Homo sapien
agtttcgtggttttgcaaagtattg

SEQ ID NO: 5219457 - DNA, 25 bp, Homo sapien
atgaccactgaagtttcttccatga

SEQ ID NO: 5219458 - DNA, 25 bp, Homo sapien
ccatgaccactgaagtttcttccat

SEQ ID NO: 5219459 - DNA, 25 bp, Homo sapien
gccaccatgaccactgaagtttctt

SEQ ID NO: 5219460 - DNA, 25 bp, Homo sapien
gctactgctggaaccgccatagcca

SEQ ID NO: 5219461 - DNA, 25 bp, Homo sapien
tactgctactgctggaaccgccata

SEQ ID NO: 5219462 - DNA, 25 bp, Homo sapien
catagctactgctactgctggaacc

SEQ ID NO: 5219463 - DNA, 25 bp, Homo sapien
tagctactgctactgctggaaccgc

SEQ ID NO: 5219464 - DNA, 25 bp, Homo sapien
tcagcgtcacgatcagactattaca

SEQ ID NO: 5219465 - DNA, 25 bp, Homo sapien
aaagacatttattcagcgtcacgat

SEQ ID NO: 5219466 - DNA, 25 bp, Homo sapien
gacatttattcagcgtcacgatcag

SEQ ID NO: 5219467 - DNA, 25 bp, Homo sapien
tttattcagcgtcacgatcagacta

SEQ ID NO: 5219468 - DNA, 25 bp, Homo sapien
ttccgaagacaatagcttctccacc

SEQ ID NO: 5219469 - DNA, 25 bp, Homo sapien
accaaggtttccgaagacaatagct

SEQ ID NO: 5219470 - DNA, 25 bp, Homo sapien
ataaccaataattccatgattttgc

SEQ ID NO: 5219471 - DNA, 25 bp, Homo sapien
tcacttttataaccaataattccat

SEQ ID NO: 5219472 - DNA, 25 bp, Homo sapien
ttgggtatctggctgccatggagac

SEQ ID NO: 5219473 - DNA, 25 bp, Homo sapien
atctttgtgaattctagactttctg

SEQ ID NO: 5219474 - DNA, 25 bp, Homo sapien
tgtttgggtatctggctgccatgga

SEQ ID NO: 5219475 - DNA, 25 bp, Homo sapien
ctttctgtttgggtatctggctgcc

SEQ ID NO: 5219476 - DNA, 25 bp, Homo sapien
gcaaggcggtgtcgtgagggctgaa

SEQ ID NO: 5219477 - DNA, 25 bp, Homo sapien
taagagaaatcccagtgattgcttc

SEQ ID NO: 5219478 - DNA, 25 bp, Homo sapien
cggcattgaagacagttaagagaaa

SEQ ID NO: 5219479 - DNA, 25 bp, Homo sapien
cacaaagccccaggcgagaaaagga

SEQ ID NO: 5219480 - DNA, 25 bp, Homo sapien
tgtgttggtggtcccggaacctctc

SEQ ID NO: 5219481 - DNA, 25 bp, Homo sapien
ggaacctctcgtaaaccaggtagca

SEQ ID NO: 5219482 - DNA, 25 bp, Homo sapien
ccgcggaaactacagacgggagctg

SEQ ID NO: 5219483 - DNA, 25 bp, Homo sapien
tctggaaaggcggtagccggtgtgt

SEQ ID NO: 5219484 - DNA, 25 bp, Homo sapien
agggtgacaggtaggcggcggtgct

SEQ ID NO: 5219485 - DNA, 25 bp, Homo sapien
tgcgctgcagttggcaggctgctgc

SEQ ID NO: 5219486 - DNA, 25 bp, Homo sapien
cggcggtaggaagccggagacagca

SEQ ID NO: 5219487 - DNA, 25 bp, Homo sapien
ccaatgagagggttggttgttgcgc

SEQ ID NO: 5219488 - DNA, 25 bp, Homo sapien
gacgctggaagtcgattattttccc

SEQ ID NO: 5219489 - DNA, 25 bp, Homo sapien
cagatactgtagaaaagagaagggc

SEQ ID NO: 5219490 - DNA, 25 bp, Homo sapien
tagagactacatgagggacgctgga

SEQ ID NO: 5219491 - DNA, 25 bp, Homo sapien
gggacggaatccttagacaccgcac

SEQ ID NO: 5219492 - DNA, 25 bp, Homo sapien
gcggagaagccgcttaacgttccga

SEQ ID NO: 5219493 - DNA, 25 bp, Homo sapien
cgttccgatactgggttagagattc

SEQ ID NO: 5219494 - DNA, 25 bp, Homo sapien
ctcgagtttctcacggcaggaaagc

SEQ ID NO: 5219495 - DNA, 25 bp, Homo sapien
cggaaacggaggttgtcacctcgag

SEQ ID NO: 5219496 - DNA, 25 bp, Homo sapien
aacaaagacaattttgcgtgtggca

SEQ ID NO: 5219497 - DNA, 25 bp, Homo sapien
aaagacaattttgcgtgtggcagaa

SEQ ID NO: 5219498 - DNA, 25 bp, Homo sapien
cctttgcgatccaaaggcaaacaaa

SEQ ID NO: 5219499 - DNA, 25 bp, Homo sapien
ttcttctgcctttgcgatccaaagg

SEQ ID NO: 5219500 - DNA, 25 bp, Homo sapien
taaaagctatctatgtctgaagtga

SEQ ID NO: 5219501 - DNA, 25 bp, Homo sapien
tctaaaagtctcatgaagatcaacc

SEQ ID NO: 5219502 - DNA, 25 bp, Homo sapien
gacttaaattgtgctgaggactgaa

SEQ ID NO: 5219503 - DNA, 25 bp, Homo sapien
atggtggttatttccgtttcagagc

SEQ ID NO: 5219504 - DNA, 25 bp, Homo sapien
tgtccctgtaaggaacctttctaga

SEQ ID NO: 5219505 - DNA, 25 bp, Homo sapien
gagatggaatcacagaaacatactg

SEQ ID NO: 5219506 - DNA, 25 bp, Homo sapien
gccatgaaaatttaacactacatat

SEQ ID NO: 5219507 - DNA, 25 bp, Homo sapien
tactgggagattctaaggcagtgtt

SEQ ID NO: 5219508 - DNA, 25 bp, Homo sapien
tatgatgtccatgctcatgtccatg

SEQ ID NO: 5219509 - DNA, 25 bp, Homo sapien
tttatgatgtccatgctcatgtcca

SEQ ID NO: 5219510 - DNA, 25 bp, Homo sapien
gtccatgctcatgtccatgttcatg

SEQ ID NO: 5219511 - DNA, 25 bp, Homo sapien
tgatgtccatgctcatgtccatgtt

SEQ ID NO: 5219512 - DNA, 25 bp, Homo sapien
gcttcttctggatagtttctaatgg

SEQ ID NO: 5219513 - DNA, 25 bp, Homo sapien
tatcttccattgtctataatctgga

SEQ ID NO: 5219514 - DNA, 25 bp, Homo sapien
gatcccttagcccttttgcagccag

SEQ ID NO: 5219515 - DNA, 25 bp, Homo sapien
gatagtttctaatggtgtcccttct

SEQ ID NO: 5219516 - DNA, 25 bp, Homo sapien
tgcacagggccatactaacttctct

SEQ ID NO: 5219517 - DNA, 25 bp, Homo sapien
aaaattgttttaaatccttgcacag

SEQ ID NO: 5219518 - DNA, 25 bp, Homo sapien
tactaacttctctgtattacaattt

SEQ ID NO: 5219519 - DNA, 25 bp, Homo sapien
attgttttaaatccttgcacagggc

SEQ ID NO: 5219520 - DNA, 25 bp, Homo sapien
taaatgctaccctacagaagatcat

SEQ ID NO: 5219521 - DNA, 25 bp, Homo sapien
tgtgtgtatatacgttgaagacatt

SEQ ID NO: 5219522 - DNA, 25 bp, Homo sapien
attataatcatacacaacgtgtgtg

SEQ ID NO: 5219523 - DNA, 25 bp, Homo sapien
tcatttaagtgaatcgcaataggaa

SEQ ID NO: 5219524 - DNA, 25 bp, Homo sapien
atgcttcttatctttattcagggac

SEQ ID NO: 5219525 - DNA, 25 bp, Homo sapien
gatgcttcttatctttattcaggga

SEQ ID NO: 5219526 - DNA, 25 bp, Homo sapien
cagtgatgcttcttatctttattca

SEQ ID NO: 5219527 - DNA, 25 bp, Homo sapien
gtgatgcttcttatctttattcagg

SEQ ID NO: 5219528 - DNA, 25 bp, Homo sapien
taatattctgtaagggataaaccag

SEQ ID NO: 5219529 - DNA, 25 bp, Homo sapien
tgtaagggataaaccagacaagtag

SEQ ID NO: 5219530 - DNA, 25 bp, Homo sapien
aagaaaccactatgatgcttccagg

SEQ ID NO: 5219531 - DNA, 25 bp, Homo sapien
gagaagaaatcttattttggagagt

SEQ ID NO: 5219532 - DNA, 25 bp, Homo sapien
gctaatcacaagcagatcccactac

SEQ ID NO: 5219533 - DNA, 25 bp, Homo sapien
cagtggctaatcacaagcagatccc

SEQ ID NO: 5219534 - DNA, 25 bp, Homo sapien
ccaggttcatccctccttggtcaac

SEQ ID NO: 5219535 - DNA, 25 bp, Homo sapien
cgctccccggaggtcaccaatgttt

SEQ ID NO: 5219536 - DNA, 25 bp, Homo sapien
tctcagctgtcactggacaaaagtc

SEQ ID NO: 5219537 - DNA, 25 bp, Homo sapien
tagacgccgggaaggcgcacccaag

SEQ ID NO: 5219538 - DNA, 25 bp, Homo sapien
ccaatagccggcactcactgtgtga

SEQ ID NO: 5219539 - DNA, 25 bp, Homo sapien
gcgatcgctgttcgcggcgcttctc

SEQ ID NO: 5219540 - DNA, 25 bp, Homo sapien
tggcccaggtcgcccctttctggga

SEQ ID NO: 5219541 - DNA, 25 bp, Homo sapien
gccaagggttacttccggtctctca

SEQ ID NO: 5219542 - DNA, 25 bp, Homo sapien
ccgccactgaagctcgcgggtgggc

SEQ ID NO: 5219543 - DNA, 25 bp, Homo sapien
gtgcagcttgtaccgctgtggccca

SEQ ID NO: 5219544 - DNA, 25 bp, Homo sapien
caactttcgaaaggaaaaatgccag

SEQ ID NO: 5219545 - DNA, 25 bp, Homo sapien
tacacaattgttgggaaagtccacg

SEQ ID NO: 5219546 - DNA, 25 bp, Homo sapien
tcccactgagtgagatcgagcgcat

SEQ ID NO: 5219547 - DNA, 25 bp, Homo sapien
gatcttctcaacagttcaccccaag

SEQ ID NO: 5219548 - DNA, 25 bp, Homo sapien
gagcccgctgtctgttgtagattat

SEQ ID NO: 5219549 - DNA, 25 bp, Homo sapien
aaatattcgcaagacctctggcgtc

SEQ ID NO: 5219550 - DNA, 25 bp, Homo sapien
tgcccgtggagccaaaaactgattc

SEQ ID NO: 5219551 - DNA, 25 bp, Homo sapien
tacatttcccagtcgttttgaggcg

SEQ ID NO: 5219552 - DNA, 25 bp, Homo sapien
gttgaaacttgcacagggccactcg

SEQ ID NO: 5219553 - DNA, 25 bp, Homo sapien
aattctccatgcgtggtcaaacggc

SEQ ID NO: 5219554 - DNA, 25 bp, Homo sapien
tgctgctccgcaaaaccagaattgg

SEQ ID NO: 5219555 - DNA, 25 bp, Homo sapien
catagctcaggaccgttacgtgcga

SEQ ID NO: 5219556 - DNA, 25 bp, Homo sapien
ttctgccagtatcgggggacagtgc

SEQ ID NO: 5219557 - DNA, 25 bp, Homo sapien
ctagggccaaaagcgaggactcaat

SEQ ID NO: 5219558 - DNA, 25 bp, Homo sapien
ggacagtgccccgacgtcccaggag

SEQ ID NO: 5219559 - DNA, 25 bp, Homo sapien
cgggcaggattctcggtctactcac

SEQ ID NO: 5219560 - DNA, 25 bp, Homo sapien
catgccccggagtgttgtgagtcct

SEQ ID NO: 5219561 - DNA, 25 bp, Homo sapien
attcctggtatttgaaagagcaaca

SEQ ID NO: 5219562 - DNA, 25 bp, Homo sapien
taatcagacttcaagggtgccccat

SEQ ID NO: 5219563 - DNA, 25 bp, Homo sapien
cattccccagagtccattcctggta

SEQ ID NO: 5219564 - DNA, 25 bp, Homo sapien
tccataaacacgagtttaattagcc

SEQ ID NO: 5219565 - DNA, 25 bp, Homo sapien
caggagcaagggagctaaatcagtt

SEQ ID NO: 5219566 - DNA, 25 bp, Homo sapien
ttcaaggcaccagattggaagcggg

SEQ ID NO: 5219567 - DNA, 25 bp, Homo sapien
gaggtgatcattccctggaggcgcc

SEQ ID NO: 5219568 - DNA, 25 bp, Homo sapien
tcccctccgtagaatgcagtgttca

SEQ ID NO: 5219569 - DNA, 25 bp, Homo sapien
ccagtgagccacagcgtgaatgcaa

SEQ ID NO: 5219570 - DNA, 25 bp, Homo sapien
tgaagcaaggtcatcgtatggcatg

SEQ ID NO: 5219571 - DNA, 25 bp, Homo sapien
ccctaaccaggtgtcagcaaatgtg

SEQ ID NO: 5219572 - DNA, 25 bp, Homo sapien
aaagcaatgtcatgtccagtgagcc

SEQ ID NO: 5219573 - DNA, 25 bp, Homo sapien
gaatgtaaagcatgttcagggaaaa

SEQ ID NO: 5219574 - DNA, 25 bp, Homo sapien
aaatgaaacaacagatgaactcatc

SEQ ID NO: 5219575 - DNA, 25 bp, Homo sapien
tgaactcatctgcaaggaaacccca

SEQ ID NO: 5219576 - DNA, 25 bp, Homo sapien
aagaagtacgtagtagaaggaagtg

SEQ ID NO: 5219577 - DNA, 25 bp, Homo sapien
gaaagggatccttggtagacagaac

SEQ ID NO: 5219578 - DNA, 25 bp, Homo sapien
gaaagggatctatagaagtctaaag

SEQ ID NO: 5219579 - DNA, 25 bp, Homo sapien
cagaaccaaaaacagactaatccaa

SEQ ID NO: 5219580 - DNA, 25 bp, Homo sapien
tgcctaagattgaaagtatgggctc

SEQ ID NO: 5219581 - DNA, 25 bp, Homo sapien
tagggaagctcacaagggtcttgca

SEQ ID NO: 5219582 - DNA, 25 bp, Homo sapien
ttgcagtacagctccgggccagtca

SEQ ID NO: 5219583 - DNA, 25 bp, Homo sapien
cctactcttagactagggaagctca

SEQ ID NO: 5219584 - DNA, 25 bp, Homo sapien
agctccgggccagtcaacagaaagc

SEQ ID NO: 5219585 - DNA, 25 bp, Homo sapien
tcaaatcgcctcactctgtagagca

SEQ ID NO: 5219586 - DNA, 25 bp, Homo sapien
ggtggaaccacatctatagcaacat

SEQ ID NO: 5219587 - DNA, 25 bp, Homo sapien
agaaggtccctgacattaggtggaa

SEQ ID NO: 5219588 - DNA, 25 bp, Homo sapien
tccgaaacaaggtgagggttcctga

SEQ ID NO: 5219589 - DNA, 25 bp, Homo sapien
tttccccaggaagtcagtctctcag

SEQ ID NO: 5219590 - DNA, 25 bp, Homo sapien
gcttgtgggaactaaagcagactcc

SEQ ID NO: 5219591 - DNA, 25 bp, Homo sapien
gaaagcatgtttcagctggaggcaa

SEQ ID NO: 5219592 - DNA, 25 bp, Homo sapien
gaggaaggagcaacccaaagcttgt

SEQ ID NO: 5219593 - DNA, 25 bp, Homo sapien
agcaagcctagatcaccccaggaag

SEQ ID NO: 5219594 - DNA, 25 bp, Homo sapien
tcagtcctaagacaactccaagtgc

SEQ ID NO: 5219595 - DNA, 25 bp, Homo sapien
tgaactcaaagggtacaggcatctg

SEQ ID NO: 5219596 - DNA, 25 bp, Homo sapien
caggaagagatcttaagggacctca

SEQ ID NO: 5219597 - DNA, 25 bp, Homo sapien
cttctccttgcttatcttgcctcgg

SEQ ID NO: 5219598 - DNA, 25 bp, Homo sapien
ggcccatgtaatccttcatgaggaa

SEQ ID NO: 5219599 - DNA, 25 bp, Homo sapien
cttcatgaggaaaattaatgaggac

SEQ ID NO: 5219600 - DNA, 25 bp, Homo sapien
gcttatcttgcctcggcccatgtaa

SEQ ID NO: 5219601 - DNA, 25 bp, Homo sapien
tgcaatagcacaatcttggcttact

SEQ ID NO: 5219602 - DNA, 25 bp, Homo sapien
gatggagtctggctctatagcccag

SEQ ID NO: 5219603 - DNA, 25 bp, Homo sapien
tgggttctagcaattctcctgcctc

SEQ ID NO: 5219604 - DNA, 25 bp, Homo sapien
gcaacctctgcctcctgggttctag

SEQ ID NO: 5219605 - DNA, 25 bp, Homo sapien
ctattctgtggatgttctttaggca

SEQ ID NO: 5219606 - DNA, 25 bp, Homo sapien
cagatttagtttctccaactcaacc

SEQ ID NO: 5219607 - DNA, 25 bp, Homo sapien
tgatctggggcaaccagatttagtt

SEQ ID NO: 5219608 - DNA, 25 bp, Homo sapien
tctccaactcaaccacaaggtccaa

SEQ ID NO: 5219609 - DNA, 25 bp, Homo sapien
tagaccactgagaggccaaaattct

SEQ ID NO: 5219610 - DNA, 25 bp, Homo sapien
accactgagaggccaaaattcttac

SEQ ID NO: 5219611 - DNA, 25 bp, Homo sapien
agaccactgagaggccaaaattctt

SEQ ID NO: 5219612 - DNA, 25 bp, Homo sapien
ctagaccactgagaggccaaaattc

SEQ ID NO: 5219613 - DNA, 25 bp, Homo sapien
ctatccaacaaatgaatatttatca

SEQ ID NO: 5219614 - DNA, 25 bp, Homo sapien
ccacccccatgcacagagtacttcc

SEQ ID NO: 5219615 - DNA, 25 bp, Homo sapien
atttatcagtcatgatgcccacccc

SEQ ID NO: 5219616 - DNA, 25 bp, Homo sapien
cacccccatgcacagagtacttccc

SEQ ID NO: 5219617 - DNA, 25 bp, Homo sapien
taaagggacgcgatttctagccaca

SEQ ID NO: 5219618 - DNA, 25 bp, Homo sapien
agagcaaggcagtagggttcagcat

SEQ ID NO: 5219619 - DNA, 25 bp, Homo sapien
tatgagacccaagtgacatcacccg

SEQ ID NO: 5219620 - DNA, 25 bp, Homo sapien
tacagggcaatggagttggcagatc

SEQ ID NO: 5219621 - DNA, 25 bp, Homo sapien
tcttctcagacggaatgcagctcaa

SEQ ID NO: 5219622 - DNA, 25 bp, Homo sapien
cagatttgcactatgggttccccag

SEQ ID NO: 5219623 - DNA, 25 bp, Homo sapien
ggtggccaagcatacccagaacttt

SEQ ID NO: 5219624 - DNA, 25 bp, Homo sapien
gaagttcgtgccctacctcatagtg

SEQ ID NO: 5219625 - DNA, 25 bp, Homo sapien
ttgaaccgggctttatcacacaccc

SEQ ID NO: 5219626 - DNA, 25 bp, Homo sapien
ctttatcacacaccccgtggtgctg

SEQ ID NO: 5219627 - DNA, 25 bp, Homo sapien
gcatccccatcactgagacgggtac

SEQ ID NO: 5219628 - DNA, 25 bp, Homo sapien
gaagtttgaaccgggctttatcaca

SEQ ID NO: 5219629 - DNA, 25 bp, Homo sapien
tggacactgtgacagaggccgacct

SEQ ID NO: 5219630 - DNA, 25 bp, Homo sapien
tctgaagacgccgctgatctcctcc

SEQ ID NO: 5219631 - DNA, 25 bp, Homo sapien
gacactgtgacagaggccgacctgg

SEQ ID NO: 5219632 - DNA, 25 bp, Homo sapien
cactgtgacagaggccgacctggcc

SEQ ID NO: 5219633 - DNA, 25 bp, Homo sapien
ggattcatagacttcatagctgatg

SEQ ID NO: 5219634 - DNA, 25 bp, Homo sapien
tagacttcatagctgatgaggtgga

SEQ ID NO: 5219635 - DNA, 25 bp, Homo sapien
ctacaacgacttcttgattctccca

SEQ ID NO: 5219636 - DNA, 25 bp, Homo sapien
atgaggtggacctgacctcagccct

SEQ ID NO: 5219637 - DNA, 25 bp, Homo sapien
agctcttcgccagtgaccagggact

SEQ ID NO: 5219638 - DNA, 25 bp, Homo sapien
tcttcgccagtgaccagggactcac

SEQ ID NO: 5219639 - DNA, 25 bp, Homo sapien
gcagctcttcgccagtgaccaggga

SEQ ID NO: 5219640 - DNA, 25 bp, Homo sapien
ctcttcgccagtgaccagggactca

SEQ ID NO: 5219641 - DNA, 25 bp, Homo sapien
cggaggatcccgccggcctcttagt

SEQ ID NO: 5219642 - DNA, 25 bp, Homo sapien
tgcatcaagaacaaggtaaagaatt

SEQ ID NO: 5219643 - DNA, 25 bp, Homo sapien
gacttaaagagcagtagtgctgccc

SEQ ID NO: 5219644 - DNA, 25 bp, Homo sapien
tctctgcatcaagaacaaggtaaag

SEQ ID NO: 5219645 - DNA, 25 bp, Homo sapien
gcagaagggaggtactgagttaaaa

SEQ ID NO: 5219646 - DNA, 25 bp, Homo sapien
tctagccaccttactgaattcaaaa

SEQ ID NO: 5219647 - DNA, 25 bp, Homo sapien
gtccaaggtcaatcaccatctttca

SEQ ID NO: 5219648 - DNA, 25 bp, Homo sapien
taaatcttcaatagtggttcagtcc

SEQ ID NO: 5219649 - DNA, 25 bp, Homo sapien
aaggatccttgagactcttttggat

SEQ ID NO: 5219650 - DNA, 25 bp, Homo sapien
cctgtaacttgtccctgctccttga

SEQ ID NO: 5219651 - DNA, 25 bp, Homo sapien
gagactcttttggattgctgcttgg

SEQ ID NO: 5219652 - DNA, 25 bp, Homo sapien
tcttttggattgctgcttggagaac

SEQ ID NO: 5219653 - DNA, 25 bp, Homo sapien
taaagtacatgctgtgagaatatgc

SEQ ID NO: 5219654 - DNA, 25 bp, Homo sapien
tgcaaacccacataaaaaagagtct

SEQ ID NO: 5219655 - DNA, 25 bp, Homo sapien
ttattagaactctgaaacggtttca

SEQ ID NO: 5219656 - DNA, 25 bp, Homo sapien
cagaatgaactagttcacaacagct

SEQ ID NO: 5219657 - DNA, 25 bp, Homo sapien
aggacaatgggcatagggtgttatc

SEQ ID NO: 5219658 - DNA, 25 bp, Homo sapien
tttccaagaattttcagatcaggac

SEQ ID NO: 5219659 - DNA, 25 bp, Homo sapien
ttccaagaattttcagatcaggaca

SEQ ID NO: 5219660 - DNA, 25 bp, Homo sapien
gacaatgggcatagggtgttatcat

SEQ ID NO: 5219661 - DNA, 25 bp, Homo sapien
gaaaatgaaacgatttaatcattca

SEQ ID NO: 5219662 - DNA, 25 bp, Homo sapien
gaaacgatttaatcattcagaatga

SEQ ID NO: 5219663 - DNA, 25 bp, Homo sapien
gggctaaacacattataacacattt

SEQ ID NO: 5219664 - DNA, 25 bp, Homo sapien
aaaagattggaaagcatctaaacat

SEQ ID NO: 5219665 - DNA, 25 bp, Homo sapien
tgaacatgaggataagattacacca

SEQ ID NO: 5219666 - DNA, 25 bp, Homo sapien
tactaagtactaggaacacaacaac

SEQ ID NO: 5219667 - DNA, 25 bp, Homo sapien
gatacacttatgctcatgaacaccc

SEQ ID NO: 5219668 - DNA, 25 bp, Homo sapien
ccatgaaattgtacccggctctaag

SEQ ID NO: 5219669 - DNA, 25 bp, Homo sapien
caagctgttccttaagtctttgttc

SEQ ID NO: 5219670 - DNA, 25 bp, Homo sapien
agcgccaagctgttccttaagtctt

SEQ ID NO: 5219671 - DNA, 25 bp, Homo sapien
gttgagcgccaagctgttccttaag

SEQ ID NO: 5219672 - DNA, 25 bp, Homo sapien
tgagcgccaagctgttccttaagtc

SEQ ID NO: 5219673 - DNA, 25 bp, Homo sapien
attaagcccaagttattagaaagct

SEQ ID NO: 5219674 - DNA, 25 bp, Homo sapien
taatctatgtgatatatctatctca

SEQ ID NO: 5219675 - DNA, 25 bp, Homo sapien
tgatggctgaacagttcaaatctat

SEQ ID NO: 5219676 - DNA, 25 bp, Homo sapien
tgcctggccgagtattttaaacttc

SEQ ID NO: 5219677 - DNA, 25 bp, Homo sapien
aaaagcttctgattcctgaatggat

SEQ ID NO: 5219678 - DNA, 25 bp, Homo sapien
tgaggcaaaaaagcttctgattcct

SEQ ID NO: 5219679 - DNA, 25 bp, Homo sapien
ctgaggcaaaaaagcttctgattcc

SEQ ID NO: 5219680 - DNA, 25 bp, Homo sapien
caaaaaagcttctgattcctgaatg

SEQ ID NO: 5219681 - DNA, 25 bp, Homo sapien
ggcaggtgagtcactcaacagacac

SEQ ID NO: 5219682 - DNA, 25 bp, Homo sapien
gcaggtgagtcactcaacagacaca

SEQ ID NO: 5219683 - DNA, 25 bp, Homo sapien
tgccaatgcaatcgattatcaggca

SEQ ID NO: 5219684 - DNA, 25 bp, Homo sapien
tcgattatcaggcagattcctaggg

SEQ ID NO: 5219685 - DNA, 25 bp, Homo sapien
caatgcaatcgattatcaggcagat

SEQ ID NO: 5219686 - DNA, 25 bp, Homo sapien
tgcaatcgattatcaggcagattcc

SEQ ID NO: 5219687 - DNA, 25 bp, Homo sapien
gcctgtgccatgatctcaatctggg

SEQ ID NO: 5219688 - DNA, 25 bp, Homo sapien
gatcactccaatgaatacagcttgc

SEQ ID NO: 5219689 - DNA, 25 bp, Homo sapien
actggtttgtcacggcagttggtgc

SEQ ID NO: 5219690 - DNA, 25 bp, Homo sapien
ccgcacccaggatgaagcacagatt

SEQ ID NO: 5219691 - DNA, 25 bp, Homo sapien
tgagtcagacatccaacaacaactg

SEQ ID NO: 5219692 - DNA, 25 bp, Homo sapien
tggtgacgcgcagatagaagagact

SEQ ID NO: 5219693 - DNA, 25 bp, Homo sapien
ctgaggccaacgaccaaagcaaagg

SEQ ID NO: 5219694 - DNA, 25 bp, Homo sapien
tctcagatccaagcaatggtgacgc

SEQ ID NO: 5219695 - DNA, 25 bp, Homo sapien
tgagaagctctaaaactggaaatac

SEQ ID NO: 5219696 - DNA, 25 bp, Homo sapien
taagtgagcctgaaagatagttctg

SEQ ID NO: 5219697 - DNA, 25 bp, Homo sapien
caaaaataggacacgaccaagcagg

SEQ ID NO: 5219698 - DNA, 25 bp, Homo sapien
ccaagcaggatcgtatctgaaatcc

SEQ ID NO: 5219699 - DNA, 25 bp, Homo sapien
gccaaaagcatgatgccccaggctc

SEQ ID NO: 5219700 - DNA, 25 bp, Homo sapien
ctgcctccaattctaccatcttctt

SEQ ID NO: 5219701 - DNA, 25 bp, Homo sapien
ccaaaagcatgatgccccaggctct

SEQ ID NO: 5219702 - DNA, 25 bp, Homo sapien
gatggcaaagttaaccagacagagg

SEQ ID NO: 5219703 - DNA, 25 bp, Homo sapien
ggagaggagactgtgcctttccact

SEQ ID NO: 5219704 - DNA, 25 bp, Homo sapien
aacaaccattttcaaccaaggcagg

SEQ ID NO: 5219705 - DNA, 25 bp, Homo sapien
tcagtgacaaattaccaggagagga

SEQ ID NO: 5219706 - DNA, 25 bp, Homo sapien
gaatcccagctcaatcagtactaga

SEQ ID NO: 5219707 - DNA, 25 bp, Homo sapien
taggagtgtagttcactgctcagct

SEQ ID NO: 5219708 - DNA, 25 bp, Homo sapien
cataggttttggagtccagcttttg

SEQ ID NO: 5219709 - DNA, 25 bp, Homo sapien
aactccctcaccttcatggaaatta

SEQ ID NO: 5219710 - DNA, 25 bp, Homo sapien
ctgggatataccatgcatactgaga

SEQ ID NO: 5219711 - DNA, 25 bp, Homo sapien
tactgagatgcaagaatttctggac

SEQ ID NO: 5219712 - DNA, 25 bp, Homo sapien
gggatataccatgcatactgagatg

SEQ ID NO: 5219713 - DNA, 25 bp, Homo sapien
gcatactgagatgcaagaatttctg

SEQ ID NO: 5219714 - DNA, 25 bp, Homo sapien
gcttccctgctagataagggcatga

SEQ ID NO: 5219715 - DNA, 25 bp, Homo sapien
gagccctgagtgagtctgatccaca

SEQ ID NO: 5219716 - DNA, 25 bp, Homo sapien
tgatccacaccatacacactctggg

SEQ ID NO: 5219717 - DNA, 25 bp, Homo sapien
acacacaaagctgtcgtagtctcgg

SEQ ID NO: 5219718 - DNA, 25 bp, Homo sapien
gctggccctctgacaccacatagtt

SEQ ID NO: 5219719 - DNA, 25 bp, Homo sapien
cttctcggtgaactgtgcacagccc

SEQ ID NO: 5219720 - DNA, 25 bp, Homo sapien
tgaactgtgcacagccctcgcttct

SEQ ID NO: 5219721 - DNA, 25 bp, Homo sapien
atcgctggcccatccacctccaaga

SEQ ID NO: 5219722 - DNA, 25 bp, Homo sapien
gcagggacatgtccgcagtacacag

SEQ ID NO: 5219723 - DNA, 25 bp, Homo sapien
ctccagcagggacatgtccgcagta

SEQ ID NO: 5219724 - DNA, 25 bp, Homo sapien
acatgtccgcagtacacaggctcca

SEQ ID NO: 5219725 - DNA, 25 bp, Homo sapien
gggacatgtccgcagtacacaggct

SEQ ID NO: 5219726 - DNA, 25 bp, Homo sapien
tatactgtagtcctagggcaagccc

SEQ ID NO: 5219727 - DNA, 25 bp, Homo sapien
aataagcaggtggtccggaactgac

SEQ ID NO: 5219728 - DNA, 25 bp, Homo sapien
caaatgtggcacagtggtaattccc

SEQ ID NO: 5219729 - DNA, 25 bp, Homo sapien
gcagttgggactataagcgcacacc

SEQ ID NO: 5219730 - DNA, 25 bp, Homo sapien
gttataaagtgatggcaggctgtga

SEQ ID NO: 5219731 - DNA, 25 bp, Homo sapien
gcctcatcgccatgccttgcaaaat

SEQ ID NO: 5219732 - DNA, 25 bp, Homo sapien
ctttcaagttcaatgcagcagatac

SEQ ID NO: 5219733 - DNA, 25 bp, Homo sapien
gatgatgattccatctgggcttaca

SEQ ID NO: 5219734 - DNA, 25 bp, Homo sapien
gcatccgaggcttgaaaaatgcatg

SEQ ID NO: 5219735 - DNA, 25 bp, Homo sapien
ctataggacatctagtaagatgcat

SEQ ID NO: 5219736 - DNA, 25 bp, Homo sapien
gacatctagtaagatgcatccgagg

SEQ ID NO: 5219737 - DNA, 25 bp, Homo sapien
taagatgcatccgaggcttgaaaaa

SEQ ID NO: 5219738 - DNA, 25 bp, Homo sapien
tcaaaaggccagtaataccaccggc

SEQ ID NO: 5219739 - DNA, 25 bp, Homo sapien
taagagcatgcagtgtcagggagaa

SEQ ID NO: 5219740 - DNA, 25 bp, Homo sapien
catggagtatctatcttggaaggct

SEQ ID NO: 5219741 - DNA, 25 bp, Homo sapien
ttagagtgcaactgaaaaaggccag

SEQ ID NO: 5219742 - DNA, 25 bp, Homo sapien
tagggcgaaatgagccaacagatgt

SEQ ID NO: 5219743 - DNA, 25 bp, Homo sapien
ggcaccacaagctgcttagcaaatg

SEQ ID NO: 5219744 - DNA, 25 bp, Homo sapien
ccacaagctgcttagcaaatgatcc

SEQ ID NO: 5219745 - DNA, 25 bp, Homo sapien
tgtcattagggcgaaatgagccaac

SEQ ID NO: 5219746 - DNA, 25 bp, Homo sapien
tgagttcaatgtgaagatccaggag

SEQ ID NO: 5219747 - DNA, 25 bp, Homo sapien
gccattgagttcaatgtgaagatcc

SEQ ID NO: 5219748 - DNA, 25 bp, Homo sapien
atgtagccattgagttcaatgtgaa

SEQ ID NO: 5219749 - DNA, 25 bp, Homo sapien
cattgagttcaatgtgaagatccag

SEQ ID NO: 5219750 - DNA, 25 bp, Homo sapien
gtgctgcagccagacataatatttc

SEQ ID NO: 5219751 - DNA, 25 bp, Homo sapien
agaaactctgctgttccaatcatac

SEQ ID NO: 5219752 - DNA, 25 bp, Homo sapien
gcagaaactctgctgttccaatcat

SEQ ID NO: 5219753 - DNA, 25 bp, Homo sapien
gtgtgctgcagccagacataatatt

SEQ ID NO: 5219754 - DNA, 25 bp, Homo sapien
tatgtgtaggagaggataagtttct

SEQ ID NO: 5219755 - DNA, 25 bp, Homo sapien
gtgtaggagaggataagtttctttc

SEQ ID NO: 5219756 - DNA, 25 bp, Homo sapien
ttatgtgtaggagaggataagtttc

SEQ ID NO: 5219757 - DNA, 25 bp, Homo sapien
tgtgtaggagaggataagtttcttt

SEQ ID NO: 5219758 - DNA, 25 bp, Homo sapien
gagccactacgcccagccttttggt

SEQ ID NO: 5219759 - DNA, 25 bp, Homo sapien
agccactacgcccagccttttggtt

SEQ ID NO: 5219760 - DNA, 25 bp, Homo sapien
tgagtaagatagttcctgtcctttt

SEQ ID NO: 5219761 - DNA, 25 bp, Homo sapien
gggacctaaccctgtgatcatgtga

SEQ ID NO: 5219762 - DNA, 25 bp, Homo sapien
ttggtatgcagtggctattcgtagg

SEQ ID NO: 5219763 - DNA, 25 bp, Homo sapien
caatcacagcatgctatgaccctga

SEQ ID NO: 5219764 - DNA, 25 bp, Homo sapien
cagtatccccaaagtgacagtatca

SEQ ID NO: 5219765 - DNA, 25 bp, Homo sapien
aagtgttcccgggtacatctgtgag

SEQ ID NO: 5219766 - DNA, 25 bp, Homo sapien
gacaccagatatgctaccacttaga

SEQ ID NO: 5219767 - DNA, 25 bp, Homo sapien
tctggtaagatctggaagcatgcct

SEQ ID NO: 5219768 - DNA, 25 bp, Homo sapien
tgatctcagctggctacggcctccg

SEQ ID NO: 5219769 - DNA, 25 bp, Homo sapien
ccgcgtgcctgccattgcgggcgcc

SEQ ID NO: 5219770 - DNA, 25 bp, Homo sapien
ggattgcgggcagagtctcgtccac

SEQ ID NO: 5219771 - DNA, 25 bp, Homo sapien
ccccagggtgccgagattacagctt

SEQ ID NO: 5219772 - DNA, 25 bp, Homo sapien
agaggtacccctgttcagcaatttt

SEQ ID NO: 5219773 - DNA, 25 bp, Homo sapien
catacagatacacatcagttaaaac

SEQ ID NO: 5219774 - DNA, 25 bp, Homo sapien
acatacagatacacatcagttaaaa

SEQ ID NO: 5219775 - DNA, 25 bp, Homo sapien
gaggtacccctgttcagcaatttta

SEQ ID NO: 5219776 - DNA, 25 bp, Homo sapien
ggaataattgcttgttgttcctgaa

SEQ ID NO: 5219777 - DNA, 25 bp, Homo sapien
taacttggaaagtaggaataattgc

SEQ ID NO: 5219778 - DNA, 25 bp, Homo sapien
aaaactgtctcttcgacacttttca

SEQ ID NO: 5219779 - DNA, 25 bp, Homo sapien
aactgtctcttcgacacttttcaga

SEQ ID NO: 5219780 - DNA, 25 bp, Homo sapien
caaaagctgtaatggctgcactgca

SEQ ID NO: 5219781 - DNA, 25 bp, Homo sapien
taaatgcaaagataccctcaggagt

SEQ ID NO: 5219782 - DNA, 25 bp, Homo sapien
cgtgtggcccgtatcttcatggttc

SEQ ID NO: 5219783 - DNA, 25 bp, Homo sapien
cagggttttagctcatgaggccaag

SEQ ID NO: 5219784 - DNA, 25 bp, Homo sapien
tggcagctcactggtatggagtttc

SEQ ID NO: 5219785 - DNA, 25 bp, Homo sapien
gatgagaattctgcacttgagctac

SEQ ID NO: 5219786 - DNA, 25 bp, Homo sapien
tgaggaaacctaggatatgtcacaa

SEQ ID NO: 5219787 - DNA, 25 bp, Homo sapien
ggagattcacacgaaatagtactgt

SEQ ID NO: 5219788 - DNA, 25 bp, Homo sapien
tgtatagtatccagaaagtgagaag

SEQ ID NO: 5219789 - DNA, 25 bp, Homo sapien
agacaatggttttttaggtatgaca

SEQ ID NO: 5219790 - DNA, 25 bp, Homo sapien
gattgtacctgataagaaactagta

SEQ ID NO: 5219791 - DNA, 25 bp, Homo sapien
gggtaacacctcataggcaattgat

SEQ ID NO: 5219792 - DNA, 25 bp, Homo sapien
catgagtccctactacaatccacag

SEQ ID NO: 5219793 - DNA, 25 bp, Homo sapien
tgagtccctactacaatccacagga

SEQ ID NO: 5219794 - DNA, 25 bp, Homo sapien
gaagaggcaccatgagtccctacta

SEQ ID NO: 5219795 - DNA, 25 bp, Homo sapien
ggcaccatgagtccctactacaatc

SEQ ID NO: 5219796 - DNA, 25 bp, Homo sapien
cttgaagtagcaagtcttctagatt

SEQ ID NO: 5219797 - DNA, 25 bp, Homo sapien
gtcctcagaaggtcttgaagtagca

SEQ ID NO: 5219798 - DNA, 25 bp, Homo sapien
gcaagtcttctagatttgacacccc

SEQ ID NO: 5219799 - DNA, 25 bp, Homo sapien
cctcagaaggtcttgaagtagcaag

SEQ ID NO: 5219800 - DNA, 25 bp, Homo sapien
gggaccaccttctttgcctgttctg

SEQ ID NO: 5219801 - DNA, 25 bp, Homo sapien
tgttctgttgggaccaggctagtca

SEQ ID NO: 5219802 - DNA, 25 bp, Homo sapien
tgtagggaccaccttctttgcctgt

SEQ ID NO: 5219803 - DNA, 25 bp, Homo sapien
gcctgttctgttgggaccaggctag

SEQ ID NO: 5219804 - DNA, 25 bp, Homo sapien
aaaagctcatgaaatagttgtcggc

SEQ ID NO: 5219805 - DNA, 25 bp, Homo sapien
gccaaaaagctcatgaaatagttgt

SEQ ID NO: 5219806 - DNA, 25 bp, Homo sapien
taaagccaaaaagctcatgaaatag

SEQ ID NO: 5219807 - DNA, 25 bp, Homo sapien
aagctcatgaaatagttgtcggcca

SEQ ID NO: 5219808 - DNA, 25 bp, Homo sapien
cagggaaattgcctgaaaacaaagt

SEQ ID NO: 5219809 - DNA, 25 bp, Homo sapien
tctggaagtaaacggttctcaggga

SEQ ID NO: 5219810 - DNA, 25 bp, Homo sapien
gaagagacttcaagacttgctggtt

SEQ ID NO: 5219811 - DNA, 25 bp, Homo sapien
gctccaccaatcttctggaagtaaa

SEQ ID NO: 5219812 - DNA, 25 bp, Homo sapien
tctttggtacagttgaggtgctgca

SEQ ID NO: 5219813 - DNA, 25 bp, Homo sapien
gggaccaatcctatgcagagaaact

SEQ ID NO: 5219814 - DNA, 25 bp, Homo sapien
ccgtatgatatagaggagttctgcc

SEQ ID NO: 5219815 - DNA, 25 bp, Homo sapien
gaaaccctttgtcgggtgggcagca

SEQ ID NO: 5219816 - DNA, 25 bp, Homo sapien
gttttgggaagcgagtctttcagaa

SEQ ID NO: 5219817 - DNA, 25 bp, Homo sapien
tttgggaagcgagtctttcagaagg

SEQ ID NO: 5219818 - DNA, 25 bp, Homo sapien
ttctgacagttcgtagagcaggttt

SEQ ID NO: 5219819 - DNA, 25 bp, Homo sapien
tcagttttgggaagcgagtctttca

SEQ ID NO: 5219820 - DNA, 25 bp, Homo sapien
accattgtatgatactgtctcccat

SEQ ID NO: 5219821 - DNA, 25 bp, Homo sapien
agacccattctgtatgacccactca

SEQ ID NO: 5219822 - DNA, 25 bp, Homo sapien
tatgatactgtctcccataaaaaat

SEQ ID NO: 5219823 - DNA, 25 bp, Homo sapien
ctaatcattgattaagacagtgctc

SEQ ID NO: 5219824 - DNA, 25 bp, Homo sapien
aggtacaactgttttgcagaggtcc

SEQ ID NO: 5219825 - DNA, 25 bp, Homo sapien
tagaaatgccaggaaacttagggag

SEQ ID NO: 5219826 - DNA, 25 bp, Homo sapien
gtttctctagaaatgccaggaaact

SEQ ID NO: 5219827 - DNA, 25 bp, Homo sapien
aactgttttgcagaggtcctccagg

SEQ ID NO: 5219828 - DNA, 25 bp, Homo sapien
caagttagcaatcacaagctactta

SEQ ID NO: 5219829 - DNA, 25 bp, Homo sapien
gaatttccatggtctggtccaagtt

SEQ ID NO: 5219830 - DNA, 25 bp, Homo sapien
aacatcatgcatggccaattggttt

SEQ ID NO: 5219831 - DNA, 25 bp, Homo sapien
gccaattggtttaagaatttccatg

SEQ ID NO: 5219832 - DNA, 25 bp, Homo sapien
tccttgatacgactcggcttccttg

SEQ ID NO: 5219833 - DNA, 25 bp, Homo sapien
gtcttaacatctgtttgggaaacta

SEQ ID NO: 5219834 - DNA, 25 bp, Homo sapien
agaatgtcttaacatctgtttggga

SEQ ID NO: 5219835 - DNA, 25 bp, Homo sapien
tcctctccttgatacgactcggctt

SEQ ID NO: 5219836 - DNA, 25 bp, Homo sapien
gagccggttgttaagcattgaccag

SEQ ID NO: 5219837 - DNA, 25 bp, Homo sapien
gccggttgttaagcattgaccagca

SEQ ID NO: 5219838 - DNA, 25 bp, Homo sapien
gtggagccggttgttaagcattgac

SEQ ID NO: 5219839 - DNA, 25 bp, Homo sapien
agggtggagccggttgttaagcatt

SEQ ID NO: 5219840 - DNA, 25 bp, Homo sapien
catagtaaatgctggatcacacaag

SEQ ID NO: 5219841 - DNA, 25 bp, Homo sapien
tgtcatgtcctgattgcctgcatag

SEQ ID NO: 5219842 - DNA, 25 bp, Homo sapien
caggagctacaggtcatctggcgag

SEQ ID NO: 5219843 - DNA, 25 bp, Homo sapien
tgctgagagccaacttacgaatgtg

SEQ ID NO: 5219844 - DNA, 25 bp, Homo sapien
ctgcatgcttattttgccaggactc

SEQ ID NO: 5219845 - DNA, 25 bp, Homo sapien
actccatagaggacacgcacccaga

SEQ ID NO: 5219846 - DNA, 25 bp, Homo sapien
gcacccagactgcacattctgctgt

SEQ ID NO: 5219847 - DNA, 25 bp, Homo sapien
aacatctggaaccactccatagagg

SEQ ID NO: 5219848 - DNA, 25 bp, Homo sapien
gctgtcactactggcctgaaggctt

SEQ ID NO: 5219849 - DNA, 25 bp, Homo sapien
ttcataagcagtttaacctgatggc

SEQ ID NO: 5219850 - DNA, 25 bp, Homo sapien
tgttcataagcagtttaacctgatg

SEQ ID NO: 5219851 - DNA, 25 bp, Homo sapien
cacagaaagacttcgccaaagcctg

SEQ ID NO: 5219852 - DNA, 25 bp, Homo sapien
cataagcagtttaacctgatggcag

SEQ ID NO: 5219853 - DNA, 25 bp, Homo sapien
tggaaccgcagaattgtaaagctga

SEQ ID NO: 5219854 - DNA, 25 bp, Homo sapien
tccacgggaagtcacgtctaaatgt

SEQ ID NO: 5219855 - DNA, 25 bp, Homo sapien
tgagagaaggtaatgctccacggga

SEQ ID NO: 5219856 - DNA, 25 bp, Homo sapien
cacgtctaaatgttggaaccgcaga

SEQ ID NO: 5219857 - DNA, 25 bp, Homo sapien
gagaccaggcttggtgcaccatttg

SEQ ID NO: 5219858 - DNA, 25 bp, Homo sapien
gatgctccttgcatccccctggaga

SEQ ID NO: 5219859 - DNA, 25 bp, Homo sapien
gctggtttcagagtttagagtgtta

SEQ ID NO: 5219860 - DNA, 25 bp, Homo sapien
gtttagagtgttagcagatgctcct

SEQ ID NO: 5219861 - DNA, 25 bp, Homo sapien
ggttccgattcatcctgtacacagc

SEQ ID NO: 5219862 - DNA, 25 bp, Homo sapien
cagaggcctctgtggttccgattca

SEQ ID NO: 5219863 - DNA, 25 bp, Homo sapien
ccttcagggaggtaaagctgtggtt

SEQ ID NO: 5219864 - DNA, 25 bp, Homo sapien
tgtccttcagggaggtaaagctgtg

SEQ ID NO: 5219865 - DNA, 25 bp, Homo sapien
ctgtgaacccaagccactggaacac

SEQ ID NO: 5219866 - DNA, 25 bp, Homo sapien
aacccaagccactggaacacatgac

SEQ ID NO: 5219867 - DNA, 25 bp, Homo sapien
cactggaacacatgactcaggatct

SEQ ID NO: 5219868 - DNA, 25 bp, Homo sapien
agccactggaacacatgactcagga

SEQ ID NO: 5219869 - DNA, 25 bp, Homo sapien
cactttcgtcacattattgtgtata

SEQ ID NO: 5219870 - DNA, 25 bp, Homo sapien
ttccactttcgtcacattattgtgt

SEQ ID NO: 5219871 - DNA, 25 bp, Homo sapien
tttcgtcacattattgtgtatatgc

SEQ ID NO: 5219872 - DNA, 25 bp, Homo sapien
tccactttcgtcacattattgtgta

SEQ ID NO: 5219873 - DNA, 25 bp, Homo sapien
tctcccgaatgggaatgagggcctc

SEQ ID NO: 5219874 - DNA, 25 bp, Homo sapien
catgccgaaaggatacatagcctgg

SEQ ID NO: 5219875 - DNA, 25 bp, Homo sapien
tcagaatacagaacacgaagcagtc

SEQ ID NO: 5219876 - DNA, 25 bp, Homo sapien
tcggcatgggctggattgcacttct

SEQ ID NO: 5219877 - DNA, 25 bp, Homo sapien
gtttgtccactcttcgactcacatc

SEQ ID NO: 5219878 - DNA, 25 bp, Homo sapien
tataatgaaagtgcatccaggggca

SEQ ID NO: 5219879 - DNA, 25 bp, Homo sapien
cagtgaggatggataagatgtcttc

SEQ ID NO: 5219880 - DNA, 25 bp, Homo sapien
cgactcacatcatcgttgacagcag

SEQ ID NO: 5219881 - DNA, 25 bp, Homo sapien
tcgtttgaggtctaagaaccaacaa

SEQ ID NO: 5219882 - DNA, 25 bp, Homo sapien
gctggaggttatagccaatgattcg

SEQ ID NO: 5219883 - DNA, 25 bp, Homo sapien
acaggtggagaccaccgattcctgt

SEQ ID NO: 5219884 - DNA, 25 bp, Homo sapien
aattgactgtgtcagaaaacacggt

SEQ ID NO: 5219885 - DNA, 25 bp, Homo sapien
acaaaccaaagccaattactctgtc

SEQ ID NO: 5219886 - DNA, 25 bp, Homo sapien
gcacaaaccaaagccaattactctg

SEQ ID NO: 5219887 - DNA, 25 bp, Homo sapien
aaccaaagccaattactctgtcttc

SEQ ID NO: 5219888 - DNA, 25 bp, Homo sapien
caaaccaaagccaattactctgtct

SEQ ID NO: 5219889 - DNA, 25 bp, Homo sapien
gacatccggccaagagaaaggtgct

SEQ ID NO: 5219890 - DNA, 25 bp, Homo sapien
taaatgaaggcgttaaccacaggac

SEQ ID NO: 5219891 - DNA, 25 bp, Homo sapien
tgggcctggcatagaccaaattttc

SEQ ID NO: 5219892 - DNA, 25 bp, Homo sapien
tgctggcctgtagattgagtcctga

SEQ ID NO: 5219893 - DNA, 25 bp, Homo sapien
agttaggtcagagcccactcactta

SEQ ID NO: 5219894 - DNA, 25 bp, Homo sapien
ttattaaggctcattgttttcctgg

SEQ ID NO: 5219895 - DNA, 25 bp, Homo sapien
tggaacccattgtatgaaggcaaag

SEQ ID NO: 5219896 - DNA, 25 bp, Homo sapien
gttgtgtgtccgttcccatacaata

SEQ ID NO: 5219897 - DNA, 25 bp, Homo sapien
tctgccaactggacaaggactgtga

SEQ ID NO: 5219898 - DNA, 25 bp, Homo sapien
taatgctagtgctgagttgccgcta

SEQ ID NO: 5219899 - DNA, 25 bp, Homo sapien
taaagtcagctggaattacgcacaa

SEQ ID NO: 5219900 - DNA, 25 bp, Homo sapien
cacggttttgggagatcatcctgac

SEQ ID NO: 5219901 - DNA, 25 bp, Homo sapien
tatatgttttacaccgcctgggcat

SEQ ID NO: 5219902 - DNA, 25 bp, Homo sapien
caacctgcccaacaccattgtgaat

SEQ ID NO: 5219903 - DNA, 25 bp, Homo sapien
ggccagtaggtgctatgactctaat

SEQ ID NO: 5219904 - DNA, 25 bp, Homo sapien
gccttgctaagggtaagccccatga

SEQ ID NO: 5219905 - DNA, 25 bp, Homo sapien
gtttgcattgccaaataagtaaatc

SEQ ID NO: 5219906 - DNA, 25 bp, Homo sapien
tttgcaaaagttatgttaggaaata

SEQ ID NO: 5219907 - DNA, 25 bp, Homo sapien
acacagaatttcctctagtgctttt

SEQ ID NO: 5219908 - DNA, 25 bp, Homo sapien
tgcaaaagttatgttaggaaataaa

SEQ ID NO: 5219909 - DNA, 25 bp, Homo sapien
gaaatacctgtctgaaatatgtatg

SEQ ID NO: 5219910 - DNA, 25 bp, Homo sapien
ccaagaaatacctgtctgaaatatg

SEQ ID NO: 5219911 - DNA, 25 bp, Homo sapien
ttcttccaagaaatacctgtctgaa

SEQ ID NO: 5219912 - DNA, 25 bp, Homo sapien
agtttcacagcatatgttctttctt

SEQ ID NO: 5219913 - DNA, 25 bp, Homo sapien
aaacgctgctccacctgcgcatggg

SEQ ID NO: 5219914 - DNA, 25 bp, Homo sapien
tgtctgcgcagagatggccgtgggc

SEQ ID NO: 5219915 - DNA, 25 bp, Homo sapien
gctgagatctgtttagcaccccaca

SEQ ID NO: 5219916 - DNA, 25 bp, Homo sapien
tcctgcccctgatttccattgtctt

SEQ ID NO: 5219917 - DNA, 25 bp, Homo sapien
ccgtcttgctgtagggcgttgtcaa

SEQ ID NO: 5219918 - DNA, 25 bp, Homo sapien
gaagtctcaactttgtggctgcaga

SEQ ID NO: 5219919 - DNA, 25 bp, Homo sapien
cgttgtcaatctcaggcgatgtggc

SEQ ID NO: 5219920 - DNA, 25 bp, Homo sapien
caggtacacgtgaaacagtaaggga

SEQ ID NO: 5219921 - DNA, 25 bp, Homo sapien
ctggcagattgtacatgttatacat

SEQ ID NO: 5219922 - DNA, 25 bp, Homo sapien
gacttctggcttttacatcttgtgt

SEQ ID NO: 5219923 - DNA, 25 bp, Homo sapien
catttttgtgctggtatgcatggtc

SEQ ID NO: 5219924 - DNA, 25 bp, Homo sapien
gatgtgtaaccaccactcatcgcca

SEQ ID NO: 5219925 - DNA, 25 bp, Homo sapien
tctgaggtgggcttctaactttact

SEQ ID NO: 5219926 - DNA, 25 bp, Homo sapien
ctccaaacctttgctccaaccactg

SEQ ID NO: 5219927 - DNA, 25 bp, Homo sapien
ttcctggcactgtgagttgtcgttt

SEQ ID NO: 5219928 - DNA, 25 bp, Homo sapien
attctccaccgtttatcacacactt

SEQ ID NO: 5219929 - DNA, 25 bp, Homo sapien
cactgcggagagtgctcccattctc

SEQ ID NO: 5219930 - DNA, 25 bp, Homo sapien
tctgaagctgttggcggggtacagg

SEQ ID NO: 5219931 - DNA, 25 bp, Homo sapien
ccagctcagacacaaggtgaaacag

SEQ ID NO: 5219932 - DNA, 25 bp, Homo sapien
cagaccagctcagacacaaggtgaa

SEQ ID NO: 5219933 - DNA, 25 bp, Homo sapien
ggaagctcagtctgaacaaccagcc

SEQ ID NO: 5219934 - DNA, 25 bp, Homo sapien
actggtattcctcaggcagccacca

SEQ ID NO: 5219935 - DNA, 25 bp, Homo sapien
ccactggtattcctcaggcagccac

SEQ ID NO: 5219936 - DNA, 25 bp, Homo sapien
cccactggtattcctcaggcagcca

SEQ ID NO: 5219937 - DNA, 25 bp, Homo sapien
gcccactggtattcctcaggcagcc

SEQ ID NO: 5219938 - DNA, 25 bp, Homo sapien
aaagtggacgcacccaggggctgct

SEQ ID NO: 5219939 - DNA, 25 bp, Homo sapien
ccagaaagtggacgcacccaggggc

SEQ ID NO: 5219940 - DNA, 25 bp, Homo sapien
gtgcccagaaagtggacgcacccag

SEQ ID NO: 5219941 - DNA, 25 bp, Homo sapien
gcccagaaagtggacgcacccaggg

SEQ ID NO: 5219942 - DNA, 25 bp, Homo sapien
ctcaagggctcaggcggccaaggcc

SEQ ID NO: 5219943 - DNA, 25 bp, Homo sapien
tgaccaactcaagggctcaggcggc

SEQ ID NO: 5219944 - DNA, 25 bp, Homo sapien
agtgaccaactcaagggctcaggcg

SEQ ID NO: 5219945 - DNA, 25 bp, Homo sapien
ccaactcaagggctcaggcggccaa

SEQ ID NO: 5219946 - DNA, 25 bp, Homo sapien
tcatagttctgctcttctaaagggc

SEQ ID NO: 5219947 - DNA, 25 bp, Homo sapien
catccctgacaggaggcatcatagt

SEQ ID NO: 5219948 - DNA, 25 bp, Homo sapien
tccttgaggcacgaagttagactat

SEQ ID NO: 5219949 - DNA, 25 bp, Homo sapien
gccactcagtcaggatgtacgatca

SEQ ID NO: 5219950 - DNA, 25 bp, Homo sapien
ccattgggatgttaatagagatcac

SEQ ID NO: 5219951 - DNA, 25 bp, Homo sapien
tagcaggctgaatggactaaggcac

SEQ ID NO: 5219952 - DNA, 25 bp, Homo sapien
gagaagatggccatttatgaaccaa

SEQ ID NO: 5219953 - DNA, 25 bp, Homo sapien
aaggtagagcacttatgaatgggac

SEQ ID NO: 5219954 - DNA, 25 bp, Homo sapien
caaaacagggtggaacaatacatta

SEQ ID NO: 5219955 - DNA, 25 bp, Homo sapien
tcctgtatgcctcgggacagccatg

SEQ ID NO: 5219956 - DNA, 25 bp, Homo sapien
cagccatgctgttatgcgtattaaa

SEQ ID NO: 5219957 - DNA, 25 bp, Homo sapien
cgttcctgagtttaatgagaagcac

SEQ ID NO: 5219958 - DNA, 25 bp, Homo sapien
gtgggaatctaaccttccttctctc

SEQ ID NO: 5219959 - DNA, 25 bp, Homo sapien
gctacccttacccatgtcacagtgg

SEQ ID NO: 5219960 - DNA, 25 bp, Homo sapien
aacgtgagcgcctatgaacccatga

SEQ ID NO: 5219961 - DNA, 25 bp, Homo sapien
cctccctggaggatagtcggaagat

SEQ ID NO: 5219962 - DNA, 25 bp, Homo sapien
caattgaaggacagggttaagtgac

SEQ ID NO: 5219963 - DNA, 25 bp, Homo sapien
tatcgcctccaagcagcagggatga

SEQ ID NO: 5219964 - DNA, 25 bp, Homo sapien
gggcagtcatcatttgcgctgcata

SEQ ID NO: 5219965 - DNA, 25 bp, Homo sapien
gggtcccagtgtggcattcctcaaa

SEQ ID NO: 5219966 - DNA, 25 bp, Homo sapien
tcatctggacggacattcactcggt

SEQ ID NO: 5219967 - DNA, 25 bp, Homo sapien
caaggtggatgctcatcaaagcccc

SEQ ID NO: 5219968 - DNA, 25 bp, Homo sapien
ggatagtccattacagtcgcctcca

SEQ ID NO: 5219969 - DNA, 25 bp, Homo sapien
ttcactcggtacacaaggtggatgc

SEQ ID NO: 5219970 - DNA, 25 bp, Homo sapien
aagagcggccactagaaattacaca

SEQ ID NO: 5219971 - DNA, 25 bp, Homo sapien
acacaaaaagtgctgaccataaggg

SEQ ID NO: 5219972 - DNA, 25 bp, Homo sapien
gagagcaatctccaacatgtgttgg

SEQ ID NO: 5219973 - DNA, 25 bp, Homo sapien
cagataacggacaaaaagagcggcc

SEQ ID NO: 5219974 - DNA, 25 bp, Homo sapien
aagcatatgaataagctgggactac

SEQ ID NO: 5219975 - DNA, 25 bp, Homo sapien
ttagcctcccgaagccaatctgatt

SEQ ID NO: 5219976 - DNA, 25 bp, Homo sapien
tgggcaagaggtctgaacagacacc

SEQ ID NO: 5219977 - DNA, 25 bp, Homo sapien
gattaagctaatctgttaagactca

SEQ ID NO: 5219978 - DNA, 25 bp, Homo sapien
gaagtgtgaataggttcagcacagg

SEQ ID NO: 5219979 - DNA, 25 bp, Homo sapien
catggaagagccttaattgaatgtt

SEQ ID NO: 5219980 - DNA, 25 bp, Homo sapien
ggcaatctggagaggctacatactg

SEQ ID NO: 5219981 - DNA, 25 bp, Homo sapien
gagctatcaaaccacgcaaaggcat

SEQ ID NO: 5219982 - DNA, 25 bp, Homo sapien
aaggcagaatctggtctccgagaga

SEQ ID NO: 5219983 - DNA, 25 bp, Homo sapien
gcagtctccgagtcccctaacctgc

SEQ ID NO: 5219984 - DNA, 25 bp, Homo sapien
ctccatggcctcacttcctgttgag

SEQ ID NO: 5219985 - DNA, 25 bp, Homo sapien
tttcctggcaccatcgcagtctccg

SEQ ID NO: 5219986 - DNA, 25 bp, Homo sapien
tgttgagttgactagcaaattcagc

SEQ ID NO: 5219987 - DNA, 25 bp, Homo sapien
cccctgagtgagcagagtgccttct

SEQ ID NO: 5219988 - DNA, 25 bp, Homo sapien
ctcctgagtcacaaacactagaggg

SEQ ID NO: 5219989 - DNA, 25 bp, Homo sapien
tgtttcgaaactcctgagtcacaaa

SEQ ID NO: 5219990 - DNA, 25 bp, Homo sapien
aaactcctgagtcacaaacactaga

SEQ ID NO: 5219991 - DNA, 25 bp, Homo sapien
ctacttcctgtttcgaaactcctga

SEQ ID NO: 5219992 - DNA, 25 bp, Homo sapien
catctaagacaagagcaaacgtcta

SEQ ID NO: 5219993 - DNA, 25 bp, Homo sapien
tactctcacgatggtagcaccttcg

SEQ ID NO: 5219994 - DNA, 25 bp, Homo sapien
caaacgtctaatgaaggacggaagg

SEQ ID NO: 5219995 - DNA, 25 bp, Homo sapien
tccactaccatctgagcatctaaga

SEQ ID NO: 5219996 - DNA, 25 bp, Homo sapien
tgtgcgtttatgttggcaagtgtgt

SEQ ID NO: 5219997 - DNA, 25 bp, Homo sapien
tgtgtgtgcgtttatgttggcaagt

SEQ ID NO: 5219998 - DNA, 25 bp, Homo sapien
tgtgtgcgtttatgttggcaagtgt

SEQ ID NO: 5219999 - DNA, 25 bp, Homo sapien
gtgtgtgtgcgtttatgttggcaag

SEQ ID NO: 5220000 - DNA, 25 bp, Homo sapien
gacgtcattctacttgcagctggaa

SEQ ID NO: 5220001 - DNA, 25 bp, Homo sapien
agagccacagccagatttaagtgtc

SEQ ID NO: 5220002 - DNA, 25 bp, Homo sapien
gatcacaaagatttagacgtcattc

SEQ ID NO: 5220003 - DNA, 25 bp, Homo sapien
tcaagggcttcagtgacagatcaca

SEQ ID NO: 5220004 - DNA, 25 bp, Homo sapien
gagtctctggaataacatcaaggca

SEQ ID NO: 5220005 - DNA, 25 bp, Homo sapien
tcaggaacttgagggaggccagatc

SEQ ID NO: 5220006 - DNA, 25 bp, Homo sapien
tctattaattcggaagagcagctcc

SEQ ID NO: 5220007 - DNA, 25 bp, Homo sapien
tcctttgcggaatgtagtccaggct

SEQ ID NO: 5220008 - DNA, 25 bp, Homo sapien
gaaaggtacagactgtgtctggcac

SEQ ID NO: 5220009 - DNA, 25 bp, Homo sapien
gaccctccgccagaaaggtacagac

SEQ ID NO: 5220010 - DNA, 25 bp, Homo sapien
atgatcgaccctccgccagaaaggt

SEQ ID NO: 5220011 - DNA, 25 bp, Homo sapien
cttattaatagatgatcgaccctcc

SEQ ID NO: 5220012 - DNA, 25 bp, Homo sapien
catgtcatcatccagtttgcatttg

SEQ ID NO: 5220013 - DNA, 25 bp, Homo sapien
tctgatctgctcacttcttctgaaa

SEQ ID NO: 5220014 - DNA, 25 bp, Homo sapien
ctgatctgctcacttcttctgaaat

SEQ ID NO: 5220015 - DNA, 25 bp, Homo sapien
cttcatagtcgttgattatcttcag

SEQ ID NO: 5220016 - DNA, 25 bp, Homo sapien
tcttcatagtcgttgattatcttca

SEQ ID NO: 5220017 - DNA, 25 bp, Homo sapien
tcaggatgtccaactttccttctcc

SEQ ID NO: 5220018 - DNA, 25 bp, Homo sapien
tgatttgggcacagactcttttcag

SEQ ID NO: 5220019 - DNA, 25 bp, Homo sapien
ttgattagaaacaactgtgatatgg

SEQ ID NO: 5220020 - DNA, 25 bp, Homo sapien
ttcccggctgtcaggttgtttctac

SEQ ID NO: 5220021 - DNA, 25 bp, Homo sapien
gatatggagcgatttgtcagtttca

SEQ ID NO: 5220022 - DNA, 25 bp, Homo sapien
taggttttgccgattcccggctgtc

SEQ ID NO: 5220023 - DNA, 25 bp, Homo sapien
gaaaattcatcaggacttccttcaa

SEQ ID NO: 5220024 - DNA, 25 bp, Homo sapien
ggacttccttcaaggctgctgcttc

SEQ ID NO: 5220025 - DNA, 25 bp, Homo sapien
catttgaaaattcatcaggacttcc

SEQ ID NO: 5220026 - DNA, 25 bp, Homo sapien
tttgaaaattcatcaggacttcctt

SEQ ID NO: 5220027 - DNA, 25 bp, Homo sapien
tgtgattcactatcctgttctcttg

SEQ ID NO: 5220028 - DNA, 25 bp, Homo sapien
gagtccgagattgtcattaccccac

SEQ ID NO: 5220029 - DNA, 25 bp, Homo sapien
tctcttggagagtccgagattgtca

SEQ ID NO: 5220030 - DNA, 25 bp, Homo sapien
cctgttctcttggagagtccgagat

SEQ ID NO: 5220031 - DNA, 25 bp, Homo sapien
aggagctgactctgtgggtcaaaca

SEQ ID NO: 5220032 - DNA, 25 bp, Homo sapien
caacccaggagctgactctgtgggt

SEQ ID NO: 5220033 - DNA, 25 bp, Homo sapien
acccaggagctgactctgtgggtca

SEQ ID NO: 5220034 - DNA, 25 bp, Homo sapien
ccaggagctgactctgtgggtcaaa

SEQ ID NO: 5220035 - DNA, 25 bp, Homo sapien
atcagacagtatccccgaggtttgc

SEQ ID NO: 5220036 - DNA, 25 bp, Homo sapien
gatgatcagacagtatccccgaggt

SEQ ID NO: 5220037 - DNA, 25 bp, Homo sapien
gaagtttgggcactttctcccgtgc

SEQ ID NO: 5220038 - DNA, 25 bp, Homo sapien
cagtatccccgaggtttgcttttca

SEQ ID NO: 5220039 - DNA, 25 bp, Homo sapien
tgcatccaagtgtgttccattcctg

SEQ ID NO: 5220040 - DNA, 25 bp, Homo sapien
ctgcatccaagtgtgttccattcct

SEQ ID NO: 5220041 - DNA, 25 bp, Homo sapien
gaaacatggcccttttggtatagct

SEQ ID NO: 5220042 - DNA, 25 bp, Homo sapien
aatccattttcttgaaacatggccc

SEQ ID NO: 5220043 - DNA, 25 bp, Homo sapien
ctccacagggaaatatgtttaaatc

SEQ ID NO: 5220044 - DNA, 25 bp, Homo sapien
ccacagggaaatatgtttaaatcca

SEQ ID NO: 5220045 - DNA, 25 bp, Homo sapien
gatgtaatcaatggacttaatctct

SEQ ID NO: 5220046 - DNA, 25 bp, Homo sapien
tgacgaatgatgtaatcaatggact

SEQ ID NO: 5220047 - DNA, 25 bp, Homo sapien
tttcaataccaagcgcatagtgacg

SEQ ID NO: 5220048 - DNA, 25 bp, Homo sapien
taaaagaatacaaatcaagggtcca

SEQ ID NO: 5220049 - DNA, 25 bp, Homo sapien
ccacctccggcccatagtaatattt

SEQ ID NO: 5220050 - DNA, 25 bp, Homo sapien
tcctggaacttgtaattgtattatt

SEQ ID NO: 5220051 - DNA, 25 bp, Homo sapien
ctttcctggaacttgtaattgtatt

SEQ ID NO: 5220052 - DNA, 25 bp, Homo sapien
tgtaaacataatgttctttcattat

SEQ ID NO: 5220053 - DNA, 25 bp, Homo sapien
taggcttactactgaaccaatttta

SEQ ID NO: 5220054 - DNA, 25 bp, Homo sapien
agctatcatttaggcttactactga

SEQ ID NO: 5220055 - DNA, 25 bp, Homo sapien
tttacaagatgggtaagctatcatt

SEQ ID NO: 5220056 - DNA, 25 bp, Homo sapien
aaaggagagagtgttattgttggtc

SEQ ID NO: 5220057 - DNA, 25 bp, Homo sapien
ctatattcgtagctggattctgcag

SEQ ID NO: 5220058 - DNA, 25 bp, Homo sapien
agagcaaaaccctctatattcgtag

SEQ ID NO: 5220059 - DNA, 25 bp, Homo sapien
accctctatattcgtagctggattc

SEQ ID NO: 5220060 - DNA, 25 bp, Homo sapien
caaaaccctctatattcgtagctgg

SEQ ID NO: 5220061 - DNA, 25 bp, Homo sapien
acagtgggcataacattgatagata

SEQ ID NO: 5220062 - DNA, 25 bp, Homo sapien
aatttgaacagtcacgttataccac

SEQ ID NO: 5220063 - DNA, 25 bp, Homo sapien
tgggcataacattgatagataagaa

SEQ ID NO: 5220064 - DNA, 25 bp, Homo sapien
gaacagtcacgttataccacagtaa

SEQ ID NO: 5220065 - DNA, 25 bp, Homo sapien
tcttcaaaggtcgtggtcaaagccc

SEQ ID NO: 5220066 - DNA, 25 bp, Homo sapien
aaatagggttgctcctctgaatcag

SEQ ID NO: 5220067 - DNA, 25 bp, Homo sapien
tctccatgggagaggatacagcaga

SEQ ID NO: 5220068 - DNA, 25 bp, Homo sapien
gaaagtcagcctcatccgggatata

SEQ ID NO: 5220069 - DNA, 25 bp, Homo sapien
gaaatacatcacataatattgtgac

SEQ ID NO: 5220070 - DNA, 25 bp, Homo sapien
atacatcacataatattgtgactgt

SEQ ID NO: 5220071 - DNA, 25 bp, Homo sapien
ctgaaatacatcacataatattgtg

SEQ ID NO: 5220072 - DNA, 25 bp, Homo sapien
aatacatcacataatattgtgactg

SEQ ID NO: 5220073 - DNA, 25 bp, Homo sapien
tcaggatggtgagaatatcatcgcc

SEQ ID NO: 5220074 - DNA, 25 bp, Homo sapien
caggatggtgagaatatcatcgcct

SEQ ID NO: 5220075 - DNA, 25 bp, Homo sapien
catagttcacttcagtcaggatggt

SEQ ID NO: 5220076 - DNA, 25 bp, Homo sapien
ttcatagttcacttcagtcaggatg

SEQ ID NO: 5220077 - DNA, 25 bp, Homo sapien
aaagtaggctgaggcatctgtttcc

SEQ ID NO: 5220078 - DNA, 25 bp, Homo sapien
ttcttagtgtgaaagtaggctgagg

SEQ ID NO: 5220079 - DNA, 25 bp, Homo sapien
tcttagtgtgaaagtaggctgaggc

SEQ ID NO: 5220080 - DNA, 25 bp, Homo sapien
ctaaatagtaccatcggccaggcgc

SEQ ID NO: 5220081 - DNA, 25 bp, Homo sapien
catagctggattttgtacgtgtctg

SEQ ID NO: 5220082 - DNA, 25 bp, Homo sapien
tacgtgtctggtatttattgccacc

SEQ ID NO: 5220083 - DNA, 25 bp, Homo sapien
gataacaatctgaatcataagccct

SEQ ID NO: 5220084 - DNA, 25 bp, Homo sapien
aaaaagcaaatatagttagccaagc

SEQ ID NO: 5220085 - DNA, 25 bp, Homo sapien
ccagagcattgttagcaaaaagcaa

SEQ ID NO: 5220086 - DNA, 25 bp, Homo sapien
tttaaaataatccaagcagagatga

SEQ ID NO: 5220087 - DNA, 25 bp, Homo sapien
aaatgcataaaaagaccccagagca

SEQ ID NO: 5220088 - DNA, 25 bp, Homo sapien
ttcaatttcagcaagagcctcctga

SEQ ID NO: 5220089 - DNA, 25 bp, Homo sapien
cctctgatgtgtgaattggctccat

SEQ ID NO: 5220090 - DNA, 25 bp, Homo sapien
taatctaccagttccaagtcctgca

SEQ ID NO: 5220091 - DNA, 25 bp, Homo sapien
tctgggacctctgatgtgtgaattg

SEQ ID NO: 5220092 - DNA, 25 bp, Homo sapien
aatatcatcaggtaatctaccagtt

SEQ ID NO: 5220093 - DNA, 25 bp, Homo sapien
acaggactcacagcacgagcctcta

SEQ ID NO: 5220094 - DNA, 25 bp, Homo sapien
gactcacagcacgagcctctaaaga

SEQ ID NO: 5220095 - DNA, 25 bp, Homo sapien
tttctgccgactcctctgctgactg

SEQ ID NO: 5220096 - DNA, 25 bp, Homo sapien
cagcacgagcctctaaagatttgta

SEQ ID NO: 5220097 - DNA, 25 bp, Homo sapien
tcttcccacctgggcactcgatccc

SEQ ID NO: 5220098 - DNA, 25 bp, Homo sapien
ccacctgggcactcgatcccatctg

SEQ ID NO: 5220099 - DNA, 25 bp, Homo sapien
ttcccacctgggcactcgatcccat

SEQ ID NO: 5220100 - DNA, 25 bp, Homo sapien
ctgggcactcgatcccatctgcttc

SEQ ID NO: 5220101 - DNA, 25 bp, Homo sapien
ttcctctgtatctctgtttttagcc

SEQ ID NO: 5220102 - DNA, 25 bp, Homo sapien
tcctctgtatctctgtttttagcca

SEQ ID NO: 5220103 - DNA, 25 bp, Homo sapien
cctctgtatctctgtttttagccat

SEQ ID NO: 5220104 - DNA, 25 bp, Homo sapien
cacaaatagcgctccacagatggaa

SEQ ID NO: 5220105 - DNA, 25 bp, Homo sapien
agagccacaaatagcgctccacaga

SEQ ID NO: 5220106 - DNA, 25 bp, Homo sapien
aaagcctccgaatgctcccagctga

SEQ ID NO: 5220107 - DNA, 25 bp, Homo sapien
cagatggaaagcctccgaatgctcc

SEQ ID NO: 5220108 - DNA, 25 bp, Homo sapien
tgtgataactgagcggtcgcatggc

SEQ ID NO: 5220109 - DNA, 25 bp, Homo sapien
gaatactattgttcgatacctggga

SEQ ID NO: 5220110 - DNA, 25 bp, Homo sapien
caacttgtgacatctagaactaggg

SEQ ID NO: 5220111 - DNA, 25 bp, Homo sapien
ggagaaatatcttcccgagctcaga

SEQ ID NO: 5220112 - DNA, 25 bp, Homo sapien
gcattcagcagttgacacaggctaa

SEQ ID NO: 5220113 - DNA, 25 bp, Homo sapien
ctcatcagatgacgtggctttgtct

SEQ ID NO: 5220114 - DNA, 25 bp, Homo sapien
tttgtctagacagcacgcagttcag

SEQ ID NO: 5220115 - DNA, 25 bp, Homo sapien
tgttgctgagcaaagtctgcttctc

SEQ ID NO: 5220116 - DNA, 25 bp, Homo sapien
actttttccaaagtgcgctatgcat

SEQ ID NO: 5220117 - DNA, 25 bp, Homo sapien
atttcgtctgaataagtacagtagc

SEQ ID NO: 5220118 - DNA, 25 bp, Homo sapien
caatcaataggaattagggaatgtt

SEQ ID NO: 5220119 - DNA, 25 bp, Homo sapien
ggttaagccagaagtgcaatcaata

SEQ ID NO: 5220120 - DNA, 25 bp, Homo sapien
cacatgtttcaggtcaaggttgaga

SEQ ID NO: 5220121 - DNA, 25 bp, Homo sapien
tcatcctatggatatttttatacca

SEQ ID NO: 5220122 - DNA, 25 bp, Homo sapien
agtattactgaatagttgtcgaagc

SEQ ID NO: 5220123 - DNA, 25 bp, Homo sapien
gaatagttgtcgaagctattagtta

SEQ ID NO: 5220124 - DNA, 25 bp, Homo sapien
ctgcaagatttacagggccagtcct

SEQ ID NO: 5220125 - DNA, 25 bp, Homo sapien
tgactggtcctagggcagacaacta

SEQ ID NO: 5220126 - DNA, 25 bp, Homo sapien
gagaattctacacgtgtccttagga

SEQ ID NO: 5220127 - DNA, 25 bp, Homo sapien
catagggcagagtcttggagaattc

SEQ ID NO: 5220128 - DNA, 25 bp, Homo sapien
gaccctcaggagatagtgatttggc

SEQ ID NO: 5220129 - DNA, 25 bp, Homo sapien
gatttggctacagcactgcatcgcc

SEQ ID NO: 5220130 - DNA, 25 bp, Homo sapien
cagtgaacgcgattttcctatagga

SEQ ID NO: 5220131 - DNA, 25 bp, Homo sapien
catcgccttagcttgcgtcgacaaa

SEQ ID NO: 5220132 - DNA, 25 bp, Homo sapien
taactctggtcagtcatgtcatgtg

SEQ ID NO: 5220133 - DNA, 25 bp, Homo sapien
gggaatcttctgcatactaccagcg

SEQ ID NO: 5220134 - DNA, 25 bp, Homo sapien
aagtctgcttcccttatcactgtgg

SEQ ID NO: 5220135 - DNA, 25 bp, Homo sapien
aaatcggaatctggacttaagagcc

SEQ ID NO: 5220136 - DNA, 25 bp, Homo sapien
tgagggactatataccaactttaat

SEQ ID NO: 5220137 - DNA, 25 bp, Homo sapien
atttagcagtgagggactatatacc

SEQ ID NO: 5220138 - DNA, 25 bp, Homo sapien
gcagtgagggactatataccaactt

SEQ ID NO: 5220139 - DNA, 25 bp, Homo sapien
ataacccactgccatcgaaccagct

SEQ ID NO: 5220140 - DNA, 25 bp, Homo sapien
tgaggcttggcagcttctcatagcg

SEQ ID NO: 5220141 - DNA, 25 bp, Homo sapien
atgtcctttttagtagcagcccaaa

SEQ ID NO: 5220142 - DNA, 25 bp, Homo sapien
tgcaattgattttgagccagatgcc

SEQ ID NO: 5220143 - DNA, 25 bp, Homo sapien
ctttctgggtcaaatagagttgggc

SEQ ID NO: 5220144 - DNA, 25 bp, Homo sapien
agaggatgccgaaccactccagtga

SEQ ID NO: 5220145 - DNA, 25 bp, Homo sapien
taggcgctggcgtcggtattcagcc

SEQ ID NO: 5220146 - DNA, 25 bp, Homo sapien
tgatgatgttgtgaagtcgcccgcc

SEQ ID NO: 5220147 - DNA, 25 bp, Homo sapien
cagtgagtaagctgtccgcgcagaa

SEQ ID NO: 5220148 - DNA, 25 bp, Homo sapien
ctgggaacgcattcgccccacccgc

SEQ ID NO: 5220149 - DNA, 25 bp, Homo sapien
tgggaacgcattcgccccacccgcg

SEQ ID NO: 5220150 - DNA, 25 bp, Homo sapien
aggctacccgctgggaacgcattcg

SEQ ID NO: 5220151 - DNA, 25 bp, Homo sapien
agtcccaggctacccgctgggaacg

SEQ ID NO: 5220152 - DNA, 25 bp, Homo sapien
tgggctagcgcgttctggcctctgg

SEQ ID NO: 5220153 - DNA, 25 bp, Homo sapien
tgctcgggctggaggtgggctagcg

SEQ ID NO: 5220154 - DNA, 25 bp, Homo sapien
ggcgtgcgcggaccaaggctcactc

SEQ ID NO: 5220155 - DNA, 25 bp, Homo sapien
tgagcccgagctgcactggcgcagt

SEQ ID NO: 5220156 - DNA, 25 bp, Homo sapien
gacactcgagtatttaattttgtaa

SEQ ID NO: 5220157 - DNA, 25 bp, Homo sapien
ccaagcccgagagcgcggccaaagg

SEQ ID NO: 5220158 - DNA, 25 bp, Homo sapien
tgcagcgaacttgcagaaggcggca

SEQ ID NO: 5220159 - DNA, 25 bp, Homo sapien
ctgagggtgtcttcgatatggcaac

SEQ ID NO: 5220160 - DNA, 25 bp, Homo sapien
gacacccgctggtaatcagggcaga

SEQ ID NO: 5220161 - DNA, 25 bp, Homo sapien
caagcagaagggttatggatgtcat

SEQ ID NO: 5220162 - DNA, 25 bp, Homo sapien
gagatttttgccttagatacaccag

SEQ ID NO: 5220163 - DNA, 25 bp, Homo sapien
gatacaccagactattaagagataa

SEQ ID NO: 5220164 - DNA, 25 bp, Homo sapien
tgaatcactttagttcacacagaaa

SEQ ID NO: 5220165 - DNA, 25 bp, Homo sapien
gaatcactttagttcacacagaaag

SEQ ID NO: 5220166 - DNA, 25 bp, Homo sapien
agactgtttttcaggtctgagtgat

SEQ ID NO: 5220167 - DNA, 25 bp, Homo sapien
tgatggatactggtttcagactgtt

SEQ ID NO: 5220168 - DNA, 25 bp, Homo sapien
ttcaggtctgagtgattcaacttgt

SEQ ID NO: 5220169 - DNA, 25 bp, Homo sapien
gtgttcttgaagtgcagaagcaatc

SEQ ID NO: 5220170 - DNA, 25 bp, Homo sapien
aggccgtgtgaggataactctaaag

SEQ ID NO: 5220171 - DNA, 25 bp, Homo sapien
cagtgctcatgtgaagtaggggata

SEQ ID NO: 5220172 - DNA, 25 bp, Homo sapien
ggatagaccccagggcatttcagag

SEQ ID NO: 5220173 - DNA, 25 bp, Homo sapien
gccgtgtgaggataactctaaagtt

SEQ ID NO: 5220174 - DNA, 25 bp, Homo sapien
ttggtagcattactgaacactgaac

SEQ ID NO: 5220175 - DNA, 25 bp, Homo sapien
tattggtagcattactgaacactga

SEQ ID NO: 5220176 - DNA, 25 bp, Homo sapien
ggtagcattactgaacactgaacag

SEQ ID NO: 5220177 - DNA, 25 bp, Homo sapien
gtattggtagcattactgaacactg

SEQ ID NO: 5220178 - DNA, 25 bp, Homo sapien
gctcatagtgagaaacgttggtgga

SEQ ID NO: 5220179 - DNA, 25 bp, Homo sapien
ctggctctagtggatggacgtgacc

SEQ ID NO: 5220180 - DNA, 25 bp, Homo sapien
accaggaaagggttggctcatcaac

SEQ ID NO: 5220181 - DNA, 25 bp, Homo sapien
gaacatagtacttcactggctctag

SEQ ID NO: 5220182 - DNA, 25 bp, Homo sapien
taaagtaccctccagtgcataaaac

SEQ ID NO: 5220183 - DNA, 25 bp, Homo sapien
cctccagtgcataaaacgaagctat

SEQ ID NO: 5220184 - DNA, 25 bp, Homo sapien
cataaaacgaagctatattgtgtct

SEQ ID NO: 5220185 - DNA, 25 bp, Homo sapien
ctctactaaagtaccctccagtgca

SEQ ID NO: 5220186 - DNA, 25 bp, Homo sapien
aagctttcaggcgttcttcattgca

SEQ ID NO: 5220187 - DNA, 25 bp, Homo sapien
agctttcaggcgttcttcattgcag

SEQ ID NO: 5220188 - DNA, 25 bp, Homo sapien
gctttcaggcgttcttcattgcagt

SEQ ID NO: 5220189 - DNA, 25 bp, Homo sapien
tgccggaaaaagtgggatagaatca

SEQ ID NO: 5220190 - DNA, 25 bp, Homo sapien
taagttgtaatattgggatgccgga

SEQ ID NO: 5220191 - DNA, 25 bp, Homo sapien
atgccggaaaaagtgggatagaatc

SEQ ID NO: 5220192 - DNA, 25 bp, Homo sapien
tgtaatattgggatgccggaaaaag

SEQ ID NO: 5220193 - DNA, 25 bp, Homo sapien
tggtgcagatagttcaaccctctca

SEQ ID NO: 5220194 - DNA, 25 bp, Homo sapien
cagccattttggtgcagatagttca

SEQ ID NO: 5220195 - DNA, 25 bp, Homo sapien
cagatagttcaaccctctcacggct

SEQ ID NO: 5220196 - DNA, 25 bp, Homo sapien
tgtgaatacagccattttggtgcag

SEQ ID NO: 5220197 - DNA, 25 bp, Homo sapien
ctcattagattgagactgtgagctc

SEQ ID NO: 5220198 - DNA, 25 bp, Homo sapien
caatcccaataactgcttggcacag

SEQ ID NO: 5220199 - DNA, 25 bp, Homo sapien
tctgaacatgtttggcgaatggaca

SEQ ID NO: 5220200 - DNA, 25 bp, Homo sapien
aatgtaagcaatccactgcacctaa

SEQ ID NO: 5220201 - DNA, 25 bp, Homo sapien
cagataaattataagagccttgttt

SEQ ID NO: 5220202 - DNA, 25 bp, Homo sapien
gctgttacaaaacacctaataagct

SEQ ID NO: 5220203 - DNA, 25 bp, Homo sapien
tactatccaataagtctctcataca

SEQ ID NO: 5220204 - DNA, 25 bp, Homo sapien
tataaggttataaagctaaatgtaa

SEQ ID NO: 5220205 - DNA, 25 bp, Homo sapien
gcttaaccaaactatgcagatggga

SEQ ID NO: 5220206 - DNA, 25 bp, Homo sapien
tgtccatgcttaaccaaactatgca

SEQ ID NO: 5220207 - DNA, 25 bp, Homo sapien
agagagggtcactaggccatcacca

SEQ ID NO: 5220208 - DNA, 25 bp, Homo sapien
tgggaaatcatacacagccctatgc

SEQ ID NO: 5220209 - DNA, 25 bp, Homo sapien
tatctgacttcacattatacccatg

SEQ ID NO: 5220210 - DNA, 25 bp, Homo sapien
gacttcacattatacccatgtaaat

SEQ ID NO: 5220211 - DNA, 25 bp, Homo sapien
tctgacttcacattatacccatgta

SEQ ID NO: 5220212 - DNA, 25 bp, Homo sapien
ctgacttcacattatacccatgtaa

SEQ ID NO: 5220213 - DNA, 25 bp, Homo sapien
ggatggtgtgtgtaatcggtcacta

SEQ ID NO: 5220214 - DNA, 25 bp, Homo sapien
gggaaaatactgatatccaatgggc

SEQ ID NO: 5220215 - DNA, 25 bp, Homo sapien
tgtgtgagttccactggagacaagc

SEQ ID NO: 5220216 - DNA, 25 bp, Homo sapien
tactgatatccaatgggctataagg

SEQ ID NO: 5220217 - DNA, 25 bp, Homo sapien
ggatcttgttgcaaacagagctgta

SEQ ID NO: 5220218 - DNA, 25 bp, Homo sapien
tcttgttgcaaacagagctgtacca

SEQ ID NO: 5220219 - DNA, 25 bp, Homo sapien
gatcttgttgcaaacagagctgtac

SEQ ID NO: 5220220 - DNA, 25 bp, Homo sapien
tcaggatcttgttgcaaacagagct

SEQ ID NO: 5220221 - DNA, 25 bp, Homo sapien
cagtaacttagtagggtagcagcaa

SEQ ID NO: 5220222 - DNA, 25 bp, Homo sapien
tagtgctataaaacccaatacgaaa

SEQ ID NO: 5220223 - DNA, 25 bp, Homo sapien
tgtcagaagcccaattcttagctac

SEQ ID NO: 5220224 - DNA, 25 bp, Homo sapien
tagctacaaccttgactaaaggaaa

SEQ ID NO: 5220225 - DNA, 25 bp, Homo sapien
ggacaataaactgcttgctgatggc

SEQ ID NO: 5220226 - DNA, 25 bp, Homo sapien
aaacatgggacaataaactgcttgc

SEQ ID NO: 5220227 - DNA, 25 bp, Homo sapien
catgggacaataaactgcttgctga

SEQ ID NO: 5220228 - DNA, 25 bp, Homo sapien
aaaacatgggacaataaactgcttg

SEQ ID NO: 5220229 - DNA, 25 bp, Homo sapien
ccaaaatatctcatcaagccaacaa

SEQ ID NO: 5220230 - DNA, 25 bp, Homo sapien
tcgagacaacggatgatagatcagc

SEQ ID NO: 5220231 - DNA, 25 bp, Homo sapien
gaaagtctataattgaactaccaaa

SEQ ID NO: 5220232 - DNA, 25 bp, Homo sapien
tagtaattaaaaacatcgagacaac

SEQ ID NO: 5220233 - DNA, 25 bp, Homo sapien
tattgatggcttgttataagcagga

SEQ ID NO: 5220234 - DNA, 25 bp, Homo sapien
cattctggctcagtccaaggtaaca

SEQ ID NO: 5220235 - DNA, 25 bp, Homo sapien
tggcttgttataagcaggaggcaac

SEQ ID NO: 5220236 - DNA, 25 bp, Homo sapien
cacattctggctcagtccaaggtaa

SEQ ID NO: 5220237 - DNA, 25 bp, Homo sapien
agaaagtgtcaagtatataggacat

SEQ ID NO: 5220238 - DNA, 25 bp, Homo sapien
gagaaagtgtcaagtatataggaca

SEQ ID NO: 5220239 - DNA, 25 bp, Homo sapien
ctacaaactggtgcccctttgaaca

SEQ ID NO: 5220240 - DNA, 25 bp, Homo sapien
gtttccttgtcatagtactctgtgc

SEQ ID NO: 5220241 - DNA, 25 bp, Homo sapien
tggtgcccctttgaacagagtggtt

SEQ ID NO: 5220242 - DNA, 25 bp, Homo sapien
tagattctccagtgcaccaactgta

SEQ ID NO: 5220243 - DNA, 25 bp, Homo sapien
gatgtaagataaactagcctgttgg

SEQ ID NO: 5220244 - DNA, 25 bp, Homo sapien
aaaaagagttagtcacagcttagaa

SEQ ID NO: 5220245 - DNA, 25 bp, Homo sapien
gagtgaggctcagttaggtgttacc

SEQ ID NO: 5220246 - DNA, 25 bp, Homo sapien
gatgtacttggaagcactgtcctct

SEQ ID NO: 5220247 - DNA, 25 bp, Homo sapien
atttaggatctataatttacataag

SEQ ID NO: 5220248 - DNA, 25 bp, Homo sapien
aatttaggatctataatttacataa

SEQ ID NO: 5220249 - DNA, 25 bp, Homo sapien
gattgttcagataaatttgaggatt

SEQ ID NO: 5220250 - DNA, 25 bp, Homo sapien
taaatttgaggatttacatgacatg

SEQ ID NO: 5220251 - DNA, 25 bp, Homo sapien
cctaatttgagggtaactactagat

SEQ ID NO: 5220252 - DNA, 25 bp, Homo sapien
taaagcatggttgctagcatagtat

SEQ ID NO: 5220253 - DNA, 25 bp, Homo sapien
caaagtattatgagatgagctgctc

SEQ ID NO: 5220254 - DNA, 25 bp, Homo sapien
gcattgcttaggagtctgacccctg

SEQ ID NO: 5220255 - DNA, 25 bp, Homo sapien
tgtctacacactcggaaaaaaggta

SEQ ID NO: 5220256 - DNA, 25 bp, Homo sapien
gagaaattgagtcgtaggagcacct

SEQ ID NO: 5220257 - DNA, 25 bp, Homo sapien
tatcctaagagcaggcaagggagat

SEQ ID NO: 5220258 - DNA, 25 bp, Homo sapien
cctagaaaagtgaccagtggcctgg

SEQ ID NO: 5220259 - DNA, 25 bp, Homo sapien
cgtatccaagaattcctaatgccag

SEQ ID NO: 5220260 - DNA, 25 bp, Homo sapien
tgaagtcccttgatagaaaggagca

SEQ ID NO: 5220261 - DNA, 25 bp, Homo sapien
agagattcaagacccatatagttgg

SEQ ID NO: 5220262 - DNA, 25 bp, Homo sapien
catgtattcacgcagcttcctcaag

SEQ ID NO: 5220263 - DNA, 25 bp, Homo sapien
gactgagtacccaatgaaaactttg

SEQ ID NO: 5220264 - DNA, 25 bp, Homo sapien
tgggacaagaaacttcagcttcaga

SEQ ID NO: 5220265 - DNA, 25 bp, Homo sapien
ggatttaagctactagtcatctggg

SEQ ID NO: 5220266 - DNA, 25 bp, Homo sapien
tctgtgatcctgtaattgttcccac

SEQ ID NO: 5220267 - DNA, 25 bp, Homo sapien
gaaaatgaaacctgttcacctagaa

SEQ ID NO: 5220268 - DNA, 25 bp, Homo sapien
gactatgaaaggcagaagactatgg

SEQ ID NO: 5220269 - DNA, 25 bp, Homo sapien
tatatgtccgttctaagctggctgg

SEQ ID NO: 5220270 - DNA, 25 bp, Homo sapien
tgagcagcagaagcctagttcccaa

SEQ ID NO: 5220271 - DNA, 25 bp, Homo sapien
attttgaggcaaacttctggagtac

SEQ ID NO: 5220272 - DNA, 25 bp, Homo sapien
tctctttcaactcatagctgattca

SEQ ID NO: 5220273 - DNA, 25 bp, Homo sapien
tctggagtactaaatctgaattgga

SEQ ID NO: 5220274 - DNA, 25 bp, Homo sapien
aattggaaaggactgataacatctc

SEQ ID NO: 5220275 - DNA, 25 bp, Homo sapien
ttccagatggctcaataaaaaaatt

SEQ ID NO: 5220276 - DNA, 25 bp, Homo sapien
cagaatcctaggaggacaaagggaa

SEQ ID NO: 5220277 - DNA, 25 bp, Homo sapien
cttccagatggctcaataaaaaaat

SEQ ID NO: 5220278 - DNA, 25 bp, Homo sapien
taggaggacaaagggaaaccatggc

SEQ ID NO: 5220279 - DNA, 25 bp, Homo sapien
gacttatctaggagcttgattaggc

SEQ ID NO: 5220280 - DNA, 25 bp, Homo sapien
tgattaggctggaacactcatgatc

SEQ ID NO: 5220281 - DNA, 25 bp, Homo sapien
ggttgacttgcttgttgggcagttc

SEQ ID NO: 5220282 - DNA, 25 bp, Homo sapien
ccttgaatagctgttagggctgggc

SEQ ID NO: 5220283 - DNA, 25 bp, Homo sapien
gttatgtaacatttttactagtatc

SEQ ID NO: 5220284 - DNA, 25 bp, Homo sapien
agttatgtaacatttttactagtat

SEQ ID NO: 5220285 - DNA, 25 bp, Homo sapien
ttgacaaagttatgtaacattttta

SEQ ID NO: 5220286 - DNA, 25 bp, Homo sapien
atgtaacatttttactagtatcttg

SEQ ID NO: 5220287 - DNA, 25 bp, Homo sapien
taaaaggttaatgccacttagcttc

SEQ ID NO: 5220288 - DNA, 25 bp, Homo sapien
aaaggttaatgccacttagcttcac

SEQ ID NO: 5220289 - DNA, 25 bp, Homo sapien
ggttaatgccacttagcttcacgat

SEQ ID NO: 5220290 - DNA, 25 bp, Homo sapien
aggttaatgccacttagcttcacga

SEQ ID NO: 5220291 - DNA, 25 bp, Homo sapien
agcttctattgttttatttataatc

SEQ ID NO: 5220292 - DNA, 25 bp, Homo sapien
aagcttctattgttttatttataat

SEQ ID NO: 5220293 - DNA, 25 bp, Homo sapien
gcttctattgttttatttataatct

SEQ ID NO: 5220294 - DNA, 25 bp, Homo sapien
tgaagttgcatcatttttttggtcc

SEQ ID NO: 5220295 - DNA, 25 bp, Homo sapien
atggattacttgtatcctttaaaag

SEQ ID NO: 5220296 - DNA, 25 bp, Homo sapien
tgcatcatttttttggtccctaaaa

SEQ ID NO: 5220297 - DNA, 25 bp, Homo sapien
cctaaaaccaatggattacttgtat

SEQ ID NO: 5220298 - DNA, 25 bp, Homo sapien
taagaacagagtgagctgctggaca

SEQ ID NO: 5220299 - DNA, 25 bp, Homo sapien
tgcataacatgaaccctaagaacag

SEQ ID NO: 5220300 - DNA, 25 bp, Homo sapien
tgttttccagagttggcggtaccat

SEQ ID NO: 5220301 - DNA, 25 bp, Homo sapien
ttttgaagagtccaagctagttgct

SEQ ID NO: 5220302 - DNA, 25 bp, Homo sapien
tttaactcattgacctattgaagga

SEQ ID NO: 5220303 - DNA, 25 bp, Homo sapien
ttgtttggtttaactcattgaccta

SEQ ID NO: 5220304 - DNA, 25 bp, Homo sapien
tttggtttaactcattgacctattg

SEQ ID NO: 5220305 - DNA, 25 bp, Homo sapien
tggtttaactcattgacctattgaa

SEQ ID NO: 5220306 - DNA, 25 bp, Homo sapien
aactagaaaccagcaagtgaaagtg

SEQ ID NO: 5220307 - DNA, 25 bp, Homo sapien
ctccccttactgaataaattgaaat

SEQ ID NO: 5220308 - DNA, 25 bp, Homo sapien
gcattatcatcttaatgacaaaggg

SEQ ID NO: 5220309 - DNA, 25 bp, Homo sapien
aatttagcgaatatggtagaaggga

SEQ ID NO: 5220310 - DNA, 25 bp, Homo sapien
cgtagcatccaaaagtagtcttttt

SEQ ID NO: 5220311 - DNA, 25 bp, Homo sapien
cacgtagcatccaaaagtagtcttt

SEQ ID NO: 5220312 - DNA, 25 bp, Homo sapien
tagcatccaaaagtagtcttttttg

SEQ ID NO: 5220313 - DNA, 25 bp, Homo sapien
gcatccaaaagtagtcttttttgag

SEQ ID NO: 5220314 - DNA, 25 bp, Homo sapien
tacttgactaactcagcaagaaagg

SEQ ID NO: 5220315 - DNA, 25 bp, Homo sapien
tcaaaacctacaagaaactgcactg

SEQ ID NO: 5220316 - DNA, 25 bp, Homo sapien
tagaaactgtactctatgaaacgtg

SEQ ID NO: 5220317 - DNA, 25 bp, Homo sapien
gcaatagttaactttagaaactgta

SEQ ID NO: 5220318 - DNA, 25 bp, Homo sapien
tagtgatatacttttcccagctttg

SEQ ID NO: 5220319 - DNA, 25 bp, Homo sapien
ggatgacatactgtggatagtgata

SEQ ID NO: 5220320 - DNA, 25 bp, Homo sapien
taatttagaaggatatgtttatacc

SEQ ID NO: 5220321 - DNA, 25 bp, Homo sapien
tctttatctcagtaatacatttcta

SEQ ID NO: 5220322 - DNA, 25 bp, Homo sapien
gaatgattcactaaatatttgtatg

SEQ ID NO: 5220323 - DNA, 25 bp, Homo sapien
tatgtcatgcttgtacaagggccat

SEQ ID NO: 5220324 - DNA, 25 bp, Homo sapien
gttttagtctgtgtgctaccaaagc

SEQ ID NO: 5220325 - DNA, 25 bp, Homo sapien
tttcagttttagtctgtgtgctacc

SEQ ID NO: 5220326 - DNA, 25 bp, Homo sapien
tctattgttgtaaaaaacactcatc

SEQ ID NO: 5220327 - DNA, 25 bp, Homo sapien
ctagaggagtcagaacacgtaggtt

SEQ ID NO: 5220328 - DNA, 25 bp, Homo sapien
ctccaaaagcttttcttatgagtaa

SEQ ID NO: 5220329 - DNA, 25 bp, Homo sapien
cggttgggtattaatgcatctggtc

SEQ ID NO: 5220330 - DNA, 25 bp, Homo sapien
ctgggtgacagaggggactgcatct

SEQ ID NO: 5220331 - DNA, 25 bp, Homo sapien
tgggtgacagaggggactgcatctc

SEQ ID NO: 5220332 - DNA, 25 bp, Homo sapien
tggaattcagacaccgactctgagc

SEQ ID NO: 5220333 - DNA, 25 bp, Homo sapien
ccgtggtgagcatacagagtgtcct

SEQ ID NO: 5220334 - DNA, 25 bp, Homo sapien
tgtgcaaacgctgtattccaaggcc

SEQ ID NO: 5220335 - DNA, 25 bp, Homo sapien
ttttcgagcaggactaacaactggg

SEQ ID NO: 5220336 - DNA, 25 bp, Homo sapien
gagtcccttccagtcatgtgtgcat

SEQ ID NO: 5220337 - DNA, 25 bp, Homo sapien
ccagattcagcgtgagaagcttaac

SEQ ID NO: 5220338 - DNA, 25 bp, Homo sapien
gatcgtacttgaaactatagtggcc

SEQ ID NO: 5220339 - DNA, 25 bp, Homo sapien
cagttaccccgatccgtttgcaaga

SEQ ID NO: 5220340 - DNA, 25 bp, Homo sapien
gtacacctcattgaggatctaatgg

SEQ ID NO: 5220341 - DNA, 25 bp, Homo sapien
ggatctaatggacccctatcttcag

SEQ ID NO: 5220342 - DNA, 25 bp, Homo sapien
aatttaggctctgaggtacacctca

SEQ ID NO: 5220343 - DNA, 25 bp, Homo sapien
gggtataatgttcaccaccttgaag

SEQ ID NO: 5220344 - DNA, 25 bp, Homo sapien
tgaggagatctctcagagtgtcctg

SEQ ID NO: 5220345 - DNA, 25 bp, Homo sapien
aaacttaaggtcatccagcagactt

SEQ ID NO: 5220346 - DNA, 25 bp, Homo sapien
tttcttatatgtggtgctacgggcc

SEQ ID NO: 5220347 - DNA, 25 bp, Homo sapien
agtgtcctggcgtcactccacgaag

SEQ ID NO: 5220348 - DNA, 25 bp, Homo sapien
cctcagcagtagaatgtctgcagca

SEQ ID NO: 5220349 - DNA, 25 bp, Homo sapien
ccttgtcaatccttggagagagtaa

SEQ ID NO: 5220350 - DNA, 25 bp, Homo sapien
ttttggccagcaaccttgtcaatcc

SEQ ID NO: 5220351 - DNA, 25 bp, Homo sapien
agcaaccttgtcaatccttggagag

SEQ ID NO: 5220352 - DNA, 25 bp, Homo sapien
gtcaatccttggagagagtaaaaag

SEQ ID NO: 5220353 - DNA, 25 bp, Homo sapien
gaatgtgtccttcgactaaataagc

SEQ ID NO: 5220354 - DNA, 25 bp, Homo sapien
tacccaccgctgtttatgctttatg

SEQ ID NO: 5220355 - DNA, 25 bp, Homo sapien
tgatcgcgaggaagacatttactgg

SEQ ID NO: 5220356 - DNA, 25 bp, Homo sapien
taaataagcagccagatattgctct

SEQ ID NO: 5220357 - DNA, 25 bp, Homo sapien
ctctgccaaccgaaaggaagtcttt

SEQ ID NO: 5220358 - DNA, 25 bp, Homo sapien
tgctcctctgccaaccgaaaggaag

SEQ ID NO: 5220359 - DNA, 25 bp, Homo sapien
gcactgggaagtcagattcccgatc

SEQ ID NO: 5220360 - DNA, 25 bp, Homo sapien
tcccgatctgaatcaccagagccag

SEQ ID NO: 5220361 - DNA, 25 bp, Homo sapien
aatgacatacgtgggcgtaggagcc

SEQ ID NO: 5220362 - DNA, 25 bp, Homo sapien
tatcttaagcgaattttccagctgg

SEQ ID NO: 5220363 - DNA, 25 bp, Homo sapien
caggcttgtggagacactggttgca

SEQ ID NO: 5220364 - DNA, 25 bp, Homo sapien
cgcaggttattgcaggaggctgtaa

SEQ ID NO: 5220365 - DNA, 25 bp, Homo sapien
cattccacagcatgttggtgccttc

SEQ ID NO: 5220366 - DNA, 25 bp, Homo sapien
tccagaaatactgagtcgttcacag

SEQ ID NO: 5220367 - DNA, 25 bp, Homo sapien
gttcacagactcagacactagagag

SEQ ID NO: 5220368 - DNA, 25 bp, Homo sapien
ctagagagtttggaattcattccac

SEQ ID NO: 5220369 - DNA, 25 bp, Homo sapien
agcatgggacaatattgctgtggcc

SEQ ID NO: 5220370 - DNA, 25 bp, Homo sapien
accagtcggcgccagcacagagaca

SEQ ID NO: 5220371 - DNA, 25 bp, Homo sapien
aagtggaaagcggtgtttgacgaat

SEQ ID NO: 5220372 - DNA, 25 bp, Homo sapien
aatgttggcgccaactgggctgtga

SEQ ID NO: 5220373 - DNA, 25 bp, Homo sapien
gaacactgactatgccaaatggaga

SEQ ID NO: 5220374 - DNA, 25 bp, Homo sapien
ctggaacctacttcaaacctagtct

SEQ ID NO: 5220375 - DNA, 25 bp, Homo sapien
cctagtctatatgagagtgataaag

SEQ ID NO: 5220376 - DNA, 25 bp, Homo sapien
gaatggggatctgggataaaaatca

SEQ ID NO: 5220377 - DNA, 25 bp, Homo sapien
ttgctttccgaagatgatactatct

SEQ ID NO: 5220378 - DNA, 25 bp, Homo sapien
tttccgaagatgatactatctatga

SEQ ID NO: 5220379 - DNA, 25 bp, Homo sapien
tatgaaggagaattttcagatgact

SEQ ID NO: 5220380 - DNA, 25 bp, Homo sapien
ctatgaaggagaattttcagatgac

SEQ ID NO: 5220381 - DNA, 25 bp, Homo sapien
tggttacccagtttggattatacta

SEQ ID NO: 5220382 - DNA, 25 bp, Homo sapien
aatgtggcaagatgatgtgtgtcaa

SEQ ID NO: 5220383 - DNA, 25 bp, Homo sapien
gattatactacgagggcaactttca

SEQ ID NO: 5220384 - DNA, 25 bp, Homo sapien
ggaaaagtatatgggaatgtggcaa

SEQ ID NO: 5220385 - DNA, 25 bp, Homo sapien
tacgaagtgggaaattgacgtcctc

SEQ ID NO: 5220386 - DNA, 25 bp, Homo sapien
cttctggtgaagtatttgagggctg

SEQ ID NO: 5220387 - DNA, 25 bp, Homo sapien
gataatatgcgtcatggtcatggtc

SEQ ID NO: 5220388 - DNA, 25 bp, Homo sapien
cctagtatgttcattggccagtggg

SEQ ID NO: 5220389 - DNA, 25 bp, Homo sapien
caaagaagaccattatgtgggccat

SEQ ID NO: 5220390 - DNA, 25 bp, Homo sapien
gaagaccattatgtgggccattgga

SEQ ID NO: 5220391 - DNA, 25 bp, Homo sapien
aaaaatgtgcggtcaaggagtctac

SEQ ID NO: 5220392 - DNA, 25 bp, Homo sapien
gaaaaatgtgcggtcaaggagtcta

SEQ ID NO: 5220393 - DNA, 25 bp, Homo sapien
ctggcatgttcaggaatggcttgga

SEQ ID NO: 5220394 - DNA, 25 bp, Homo sapien
tgatggaaagatgtattctggcatg

SEQ ID NO: 5220395 - DNA, 25 bp, Homo sapien
aaagatgtattctggcatgttcagg

SEQ ID NO: 5220396 - DNA, 25 bp, Homo sapien
gggttttgaagtggcctgatggaaa

SEQ ID NO: 5220397 - DNA, 25 bp, Homo sapien
agagacaggaaccacccatttcacg

SEQ ID NO: 5220398 - DNA, 25 bp, Homo sapien
tatactttctacaaggatcctcgcc

SEQ ID NO: 5220399 - DNA, 25 bp, Homo sapien
gctataagccaagccgtagatcagg

SEQ ID NO: 5220400 - DNA, 25 bp, Homo sapien
ggatgccacctatgatggacgctgg

SEQ ID NO: 5220401 - DNA, 25 bp, Homo sapien
atggcttaaagataactacacctga

SEQ ID NO: 5220402 - DNA, 25 bp, Homo sapien
taactacacctgaggagcagttcac

SEQ ID NO: 5220403 - DNA, 25 bp, Homo sapien
gaggagcagttcactctcatttcat

SEQ ID NO: 5220404 - DNA, 25 bp, Homo sapien
ttaaagataactacacctgaggagc

SEQ ID NO: 5220405 - DNA, 25 bp, Homo sapien
tttccctctggccacgctgtgggca

SEQ ID NO: 5220406 - DNA, 25 bp, Homo sapien
ttctccacgcaccatgttttccctc

SEQ ID NO: 5220407 - DNA, 25 bp, Homo sapien
tggccacgctgtgggcagagccact

SEQ ID NO: 5220408 - DNA, 25 bp, Homo sapien
tccacgcaccatgttttccctctgg

SEQ ID NO: 5220409 - DNA, 25 bp, Homo sapien
gagtagtaaccgagccctgtctctg

SEQ ID NO: 5220410 - DNA, 25 bp, Homo sapien
gaagccagagcgtcgactgctgtgt

SEQ ID NO: 5220411 - DNA, 25 bp, Homo sapien
tgctgggaggttttccgtgaattgg

SEQ ID NO: 5220412 - DNA, 25 bp, Homo sapien
ctgctgtgtgagagtagtaaccgag

SEQ ID NO: 5220413 - DNA, 25 bp, Homo sapien
ccagttcttgttatgagtgtcttgc

SEQ ID NO: 5220414 - DNA, 25 bp, Homo sapien
aagcagaatacacactgggcttctg

SEQ ID NO: 5220415 - DNA, 25 bp, Homo sapien
tgctctccatctcggcaggaaaagg

SEQ ID NO: 5220416 - DNA, 25 bp, Homo sapien
aggaaggaagcagaatacacactgg

SEQ ID NO: 5220417 - DNA, 25 bp, Homo sapien
aaaacactcagttgatggaaatact

SEQ ID NO: 5220418 - DNA, 25 bp, Homo sapien
tcagaagtgaatgacgaaaacactc

SEQ ID NO: 5220419 - DNA, 25 bp, Homo sapien
caatcagacgacttcataattacgc

SEQ ID NO: 5220420 - DNA, 25 bp, Homo sapien
caagagctgttgcaagatttgtcag

SEQ ID NO: 5220421 - DNA, 25 bp, Homo sapien
atttcctggttatgggaggattcca

SEQ ID NO: 5220422 - DNA, 25 bp, Homo sapien
cctggttatgggaggattccagctt

SEQ ID NO: 5220423 - DNA, 25 bp, Homo sapien
tttcctggttatgggaggattccag

SEQ ID NO: 5220424 - DNA, 25 bp, Homo sapien
tcctggttatgggaggattccagct

SEQ ID NO: 5220425 - DNA, 25 bp, Homo sapien
actgcccaagcctccatggaagtca

SEQ ID NO: 5220426 - DNA, 25 bp, Homo sapien
tgctggccagtgcgcgtctgcttct

SEQ ID NO: 5220427 - DNA, 25 bp, Homo sapien
gctggccagtgcgcgtctgcttctg

SEQ ID NO: 5220428 - DNA, 25 bp, Homo sapien
aaacacctggaatctggtgtgctgg

SEQ ID NO: 5220429 - DNA, 25 bp, Homo sapien
cacctggaatctggtgtgctggcca

SEQ ID NO: 5220430 - DNA, 25 bp, Homo sapien
cagcttcttgggcactagggctaag

SEQ ID NO: 5220431 - DNA, 25 bp, Homo sapien
gcactagggctaagagaatgccagt

SEQ ID NO: 5220432 - DNA, 25 bp, Homo sapien
gactgcgtggtgcttgctgatcttg

SEQ ID NO: 5220433 - DNA, 25 bp, Homo sapien
caccttgcaagggactgcgtggtgc

SEQ ID NO: 5220434 - DNA, 25 bp, Homo sapien
tcataggtggccttggtgaagttgg

SEQ ID NO: 5220435 - DNA, 25 bp, Homo sapien
aggtcttggagatggcatcataggt

SEQ ID NO: 5220436 - DNA, 25 bp, Homo sapien
tcttggagatggcatcataggtggc

SEQ ID NO: 5220437 - DNA, 25 bp, Homo sapien
cataggtggccttggtgaagttggc

SEQ ID NO: 5220438 - DNA, 25 bp, Homo sapien
gaggtggtaacaaacgactgctgct

SEQ ID NO: 5220439 - DNA, 25 bp, Homo sapien
ggagaagcgaccactgttagggtac

SEQ ID NO: 5220440 - DNA, 25 bp, Homo sapien
tacttccggcccttgcagtttgagg

SEQ ID NO: 5220441 - DNA, 25 bp, Homo sapien
ttagggtactgtccataaaggcaat

SEQ ID NO: 5220442 - DNA, 25 bp, Homo sapien
tggcacaatgcctagcagcagaagg

SEQ ID NO: 5220443 - DNA, 25 bp, Homo sapien
cagaaggtttgcacccactgtgcga

SEQ ID NO: 5220444 - DNA, 25 bp, Homo sapien
taaatgtgactgtcttaggctcagc

SEQ ID NO: 5220445 - DNA, 25 bp, Homo sapien
tgcgtagtcgcacgtggaagtcccg

SEQ ID NO: 5220446 - DNA, 25 bp, Homo sapien
gtggcatttaacaccataatcatgc

SEQ ID NO: 5220447 - DNA, 25 bp, Homo sapien
ttgctttactctttggtggcattta

SEQ ID NO: 5220448 - DNA, 25 bp, Homo sapien
tgctttactctttggtggcatttaa

SEQ ID NO: 5220449 - DNA, 25 bp, Homo sapien
ttggtggcatttaacaccataatca

SEQ ID NO: 5220450 - DNA, 25 bp, Homo sapien
gctgaaccttcacgtgtttctcatc

SEQ ID NO: 5220451 - DNA, 25 bp, Homo sapien
atctggctgaaccttcacgtgtttc

SEQ ID NO: 5220452 - DNA, 25 bp, Homo sapien
gaaccttcacgtgtttctcatctga

SEQ ID NO: 5220453 - DNA, 25 bp, Homo sapien
tggctgaaccttcacgtgtttctca

SEQ ID NO: 5220454 - DNA, 25 bp, Homo sapien
gttcacaggagccacaccagcagct

SEQ ID NO: 5220455 - DNA, 25 bp, Homo sapien
cacaggagccacaccagcagctcct

SEQ ID NO: 5220456 - DNA, 25 bp, Homo sapien
ccagcagctcctctttctaaccaac

SEQ ID NO: 5220457 - DNA, 25 bp, Homo sapien
ctgtgttcacaggagccacaccagc

SEQ ID NO: 5220458 - DNA, 25 bp, Homo sapien
caactccatggtttccgtggatctc

SEQ ID NO: 5220459 - DNA, 25 bp, Homo sapien
caaccccttcttcgctgtgccccac

SEQ ID NO: 5220460 - DNA, 25 bp, Homo sapien
ccacaactccatggtttccgtggat

SEQ ID NO: 5220461 - DNA, 25 bp, Homo sapien
cttcttcgctgtgccccacaactcc

SEQ ID NO: 5220462 - DNA, 25 bp, Homo sapien
gctttgggctcccatatggctgggc

SEQ ID NO: 5220463 - DNA, 25 bp, Homo sapien
tgctttgggctcccatatggctggg

SEQ ID NO: 5220464 - DNA, 25 bp, Homo sapien
ctgctttgggctcccatatggctgg

SEQ ID NO: 5220465 - DNA, 25 bp, Homo sapien
gtacaacttgttaattcctgtgaag

SEQ ID NO: 5220466 - DNA, 25 bp, Homo sapien
tcctgtgaagtacactgaaacgctc

SEQ ID NO: 5220467 - DNA, 25 bp, Homo sapien
tcagaataaagtggtctggcctgga

SEQ ID NO: 5220468 - DNA, 25 bp, Homo sapien
ctaaagaatgatgatatctttgtac

SEQ ID NO: 5220469 - DNA, 25 bp, Homo sapien
ctggtcgccatcatagcaacagagg

SEQ ID NO: 5220470 - DNA, 25 bp, Homo sapien
cagcctggtcgccatcatagcaaca

SEQ ID NO: 5220471 - DNA, 25 bp, Homo sapien
tagcagcctggtcgccatcatagca

SEQ ID NO: 5220472 - DNA, 25 bp, Homo sapien
cctttagcagcctggtcgccatcat

SEQ ID NO: 5220473 - DNA, 25 bp, Homo sapien
tgcaccgcgtacctgtctagaactc

SEQ ID NO: 5220474 - DNA, 25 bp, Homo sapien
caggtgtgtgcaagcacactggctt

SEQ ID NO: 5220475 - DNA, 25 bp, Homo sapien
ttatagtcttgtttaaagccaagga

SEQ ID NO: 5220476 - DNA, 25 bp, Homo sapien
gcctatagcctgattattaaaggtg

SEQ ID NO: 5220477 - DNA, 25 bp, Homo sapien
tattgaatagaataaaatttggcac

SEQ ID NO: 5220478 - DNA, 25 bp, Homo sapien
aatagaataaaatttggcacagtta

SEQ ID NO: 5220479 - DNA, 25 bp, Homo sapien
gttattgaatagaataaaatttggc

SEQ ID NO: 5220480 - DNA, 25 bp, Homo sapien
tgaatagaataaaatttggcacagt

SEQ ID NO: 5220481 - DNA, 25 bp, Homo sapien
gatgtgcacaactgaaaacgaggca

SEQ ID NO: 5220482 - DNA, 25 bp, Homo sapien
cttatcagtgcaagaaactccacat

SEQ ID NO: 5220483 - DNA, 25 bp, Homo sapien
tcagatgtgcacaactgaaaacgag

SEQ ID NO: 5220484 - DNA, 25 bp, Homo sapien
catcagacagggattgcttgcattc

SEQ ID NO: 5220485 - DNA, 25 bp, Homo sapien
ggagcagcctcacaacttcagcagt

SEQ ID NO: 5220486 - DNA, 25 bp, Homo sapien
atgatggctctgcctggagcagcct

SEQ ID NO: 5220487 - DNA, 25 bp, Homo sapien
gcagcctcacaacttcagcagtttt

SEQ ID NO: 5220488 - DNA, 25 bp, Homo sapien
ctggagcagcctcacaacttcagca

SEQ ID NO: 5220489 - DNA, 25 bp, Homo sapien
gcagcgtggagctttcatatgactc

SEQ ID NO: 5220490 - DNA, 25 bp, Homo sapien
tcagcagcgtggagctttcatatga

SEQ ID NO: 5220491 - DNA, 25 bp, Homo sapien
cagcagcgtggagctttcatatgac

SEQ ID NO: 5220492 - DNA, 25 bp, Homo sapien
cagcgtggagctttcatatgactca

SEQ ID NO: 5220493 - DNA, 25 bp, Homo sapien
tgactcctccgacagctgtgtgcct

SEQ ID NO: 5220494 - DNA, 25 bp, Homo sapien
gcctccctctgaacaatggtagcag

SEQ ID NO: 5220495 - DNA, 25 bp, Homo sapien
tgtaggttcaaggagaaaacccgca

SEQ ID NO: 5220496 - DNA, 25 bp, Homo sapien
cttgaacgcagcctccgtggtctca

SEQ ID NO: 5220497 - DNA, 25 bp, Homo sapien
ggaacatgatgcttcttttaggtct

SEQ ID NO: 5220498 - DNA, 25 bp, Homo sapien
aacatgatgcttcttttaggtctgt

SEQ ID NO: 5220499 - DNA, 25 bp, Homo sapien
atgatgcttcttttaggtctgttag

SEQ ID NO: 5220500 - DNA, 25 bp, Homo sapien
catgatgcttcttttaggtctgtta

SEQ ID NO: 5220501 - DNA, 25 bp, Homo sapien
caatcactgttactccgtggccttt

SEQ ID NO: 5220502 - DNA, 25 bp, Homo sapien
cactgaaaaccctgcctcagatcct

SEQ ID NO: 5220503 - DNA, 25 bp, Homo sapien
ctgttactccgtggccttttactct

SEQ ID NO: 5220504 - DNA, 25 bp, Homo sapien
aaacaatcactgttactccgtggcc

SEQ ID NO: 5220505 - DNA, 25 bp, Homo sapien
ttcttgatcaacatcagctgctcac

SEQ ID NO: 5220506 - DNA, 25 bp, Homo sapien
tgtaaactgtcgcataagagccttc

SEQ ID NO: 5220507 - DNA, 25 bp, Homo sapien
taaactgtcgcataagagccttcac

SEQ ID NO: 5220508 - DNA, 25 bp, Homo sapien
ccttgtaaactgtcgcataagagcc

SEQ ID NO: 5220509 - DNA, 25 bp, Homo sapien
actgtcgcataagagccttcaccca

SEQ ID NO: 5220510 - DNA, 25 bp, Homo sapien
aaacaccactgcactcggatcagct

SEQ ID NO: 5220511 - DNA, 25 bp, Homo sapien
ttaaagccactagttgtccatttat

SEQ ID NO: 5220512 - DNA, 25 bp, Homo sapien
taaagccactagttgtccatttatt

SEQ ID NO: 5220513 - DNA, 25 bp, Homo sapien
tttaaagccactagttgtccattta

SEQ ID NO: 5220514 - DNA, 25 bp, Homo sapien
cttctcggatagctgtaaatgggac

SEQ ID NO: 5220515 - DNA, 25 bp, Homo sapien
tttagtgaatctgtcgttttgccct

SEQ ID NO: 5220516 - DNA, 25 bp, Homo sapien
ttctagcgggggcacttctattttc

SEQ ID NO: 5220517 - DNA, 25 bp, Homo sapien
gaatctgtcgttttgccctcctgac

SEQ ID NO: 5220518 - DNA, 25 bp, Homo sapien
agtgaatctgtcgttttgccctcct

SEQ ID NO: 5220519 - DNA, 25 bp, Homo sapien
tattcaaaaacgaatgtcagtgtct

SEQ ID NO: 5220520 - DNA, 25 bp, Homo sapien
attatgtcatgcaggagcacaatat

SEQ ID NO: 5220521 - DNA, 25 bp, Homo sapien
gcaggagcacaatattggcatgttt

SEQ ID NO: 5220522 - DNA, 25 bp, Homo sapien
tgtttcaaacccttcaggagagaag

SEQ ID NO: 5220523 - DNA, 25 bp, Homo sapien
cattatgaggatgaagccctcctgg

SEQ ID NO: 5220524 - DNA, 25 bp, Homo sapien
ccctcctggatgctgagacatatac

SEQ ID NO: 5220525 - DNA, 25 bp, Homo sapien
tgagacatatactgggccaggtctg

SEQ ID NO: 5220526 - DNA, 25 bp, Homo sapien
tctgacattatgaggatgaagccct

SEQ ID NO: 5220527 - DNA, 25 bp, Homo sapien
attgcctgagcccatggtggctgcc

SEQ ID NO: 5220528 - DNA, 25 bp, Homo sapien
gctgccatcttgcattgctgttgct

SEQ ID NO: 5220529 - DNA, 25 bp, Homo sapien
tgccatcttgcattgctgttgcttg

SEQ ID NO: 5220530 - DNA, 25 bp, Homo sapien
atttggctttcataaattgcctgag

SEQ ID NO: 5220531 - DNA, 25 bp, Homo sapien
ttaggcgctgaagctcttgaaggat

SEQ ID NO: 5220532 - DNA, 25 bp, Homo sapien
gaaggataactttgatgatatatga

SEQ ID NO: 5220533 - DNA, 25 bp, Homo sapien
cgctgaagctcttgaaggataactt

SEQ ID NO: 5220534 - DNA, 25 bp, Homo sapien
ttcagatggctgagggtgtttcaca

SEQ ID NO: 5220535 - DNA, 25 bp, Homo sapien
ctgatgagtaagttctgaggtttca

SEQ ID NO: 5220536 - DNA, 25 bp, Homo sapien
cccaggtgactgatgagtaagttct

SEQ ID NO: 5220537 - DNA, 25 bp, Homo sapien
ttggtggtggatgtacgccaggccc

SEQ ID NO: 5220538 - DNA, 25 bp, Homo sapien
cagccagtttgagctctcccaggtg

SEQ ID NO: 5220539 - DNA, 25 bp, Homo sapien
cagcccagaatgagacccgaggggc

SEQ ID NO: 5220540 - DNA, 25 bp, Homo sapien
acagcccagaatgagacccgagggg

SEQ ID NO: 5220541 - DNA, 25 bp, Homo sapien
aaacccatcgttctggaccttggct

SEQ ID NO: 5220542 - DNA, 25 bp, Homo sapien
ataaaacccatcgttctggaccttg

SEQ ID NO: 5220543 - DNA, 25 bp, Homo sapien
gaaaagcataaaacccatcgttctg

SEQ ID NO: 5220544 - DNA, 25 bp, Homo sapien
aagcataaaacccatcgttctggac

SEQ ID NO: 5220545 - DNA, 25 bp, Homo sapien
cagcaaagcatcagggggccggtac

SEQ ID NO: 5220546 - DNA, 25 bp, Homo sapien
catatgtccagctcagaggaatatt

SEQ ID NO: 5220547 - DNA, 25 bp, Homo sapien
cagaggaatattcagtggctcccag

SEQ ID NO: 5220548 - DNA, 25 bp, Homo sapien
gccggtaccagagggtcacgacttc

SEQ ID NO: 5220549 - DNA, 25 bp, Homo sapien
ccttctcacttcccctcttatcact

SEQ ID NO: 5220550 - DNA, 25 bp, Homo sapien
gaaattcatatgcaggggagaaaag

SEQ ID NO: 5220551 - DNA, 25 bp, Homo sapien
gggaaattcatatgcaggggagaaa

SEQ ID NO: 5220552 - DNA, 25 bp, Homo sapien
agatacccgtggggcagcccgtgta

SEQ ID NO: 5220553 - DNA, 25 bp, Homo sapien
tggggcagcccgtgtagacgaaggg

SEQ ID NO: 5220554 - DNA, 25 bp, Homo sapien
ttgaccctggaacatttcaataaag

SEQ ID NO: 5220555 - DNA, 25 bp, Homo sapien
tctccagctgttcaaggatgttgga

SEQ ID NO: 5220556 - DNA, 25 bp, Homo sapien
tcaaggatgttggaaaccccaggaa

SEQ ID NO: 5220557 - DNA, 25 bp, Homo sapien
tggatggaagaggtatggagacatg

SEQ ID NO: 5220558 - DNA, 25 bp, Homo sapien
gaggtggatggaagaggtatggaga

SEQ ID NO: 5220559 - DNA, 25 bp, Homo sapien
ggtggatggaagaggtatggagaca

SEQ ID NO: 5220560 - DNA, 25 bp, Homo sapien
atgaggtggatggaagaggtatgga

SEQ ID NO: 5220561 - DNA, 25 bp, Homo sapien
gactcccggccaagtatcctctgta

SEQ ID NO: 5220562 - DNA, 25 bp, Homo sapien
tcccggccaagtatcctctgtaggg

SEQ ID NO: 5220563 - DNA, 25 bp, Homo sapien
gagactcccggccaagtatcctctg

SEQ ID NO: 5220564 - DNA, 25 bp, Homo sapien
cggccaagtatcctctgtagggact

SEQ ID NO: 5220565 - DNA, 25 bp, Homo sapien
gcctcaaatggaattgagagggatt

SEQ ID NO: 5220566 - DNA, 25 bp, Homo sapien
ccccagtatctagatgtaaacttgg

SEQ ID NO: 5220567 - DNA, 25 bp, Homo sapien
ggcaaatgcattgactaatgtcatg

SEQ ID NO: 5220568 - DNA, 25 bp, Homo sapien
cttggaaccattagtggagaaggat

SEQ ID NO: 5220569 - DNA, 25 bp, Homo sapien
gagacattcctagaacaaggctgca

SEQ ID NO: 5220570 - DNA, 25 bp, Homo sapien
tggtttcagacgcagtgaagctctc

SEQ ID NO: 5220571 - DNA, 25 bp, Homo sapien
tgctgcagtacgatgctgtccgatg

SEQ ID NO: 5220572 - DNA, 25 bp, Homo sapien
cccttggcctgtcgcttatggtaca

SEQ ID NO: 5220573 - DNA, 25 bp, Homo sapien
tgtcactgggtctgaaccatggcaa

SEQ ID NO: 5220574 - DNA, 25 bp, Homo sapien
ctgggtctgaaccatggcaagtcac

SEQ ID NO: 5220575 - DNA, 25 bp, Homo sapien
gaaccatggcaagtcactgagcagc

SEQ ID NO: 5220576 - DNA, 25 bp, Homo sapien
gtctgaaccatggcaagtcactgag

SEQ ID NO: 5220577 - DNA, 25 bp, Homo sapien
tagattcagtgaacgccagtggctt

SEQ ID NO: 5220578 - DNA, 25 bp, Homo sapien
gcccaatcgaggttcatagattcag

SEQ ID NO: 5220579 - DNA, 25 bp, Homo sapien
gagctttcagcagcgctccagaagt

SEQ ID NO: 5220580 - DNA, 25 bp, Homo sapien
gaagtgagacagtaatgagcccaat

SEQ ID NO: 5220581 - DNA, 25 bp, Homo sapien
cttcgaggcgtaggcagtgggaacc

SEQ ID NO: 5220582 - DNA, 25 bp, Homo sapien
ggcttcgaggcgtaggcagtgggaa

SEQ ID NO: 5220583 - DNA, 25 bp, Homo sapien
gcttcgaggcgtaggcagtgggaac

SEQ ID NO: 5220584 - DNA, 25 bp, Homo sapien
tcgaggcgtaggcagtgggaaccat

SEQ ID NO: 5220585 - DNA, 25 bp, Homo sapien
ttctctgacatttgagctcgtttcc

SEQ ID NO: 5220586 - DNA, 25 bp, Homo sapien
catttgagctcgtttcccctgtctc

SEQ ID NO: 5220587 - DNA, 25 bp, Homo sapien
tctgacatttgagctcgtttcccct

SEQ ID NO: 5220588 - DNA, 25 bp, Homo sapien
tgacatttgagctcgtttcccctgt

SEQ ID NO: 5220589 - DNA, 25 bp, Homo sapien
gcctggctctgagtataaaagtctc

SEQ ID NO: 5220590 - DNA, 25 bp, Homo sapien
caggacaggctggtcagtatgagct

SEQ ID NO: 5220591 - DNA, 25 bp, Homo sapien
cactgacctctgaggtgcaggacag

SEQ ID NO: 5220592 - DNA, 25 bp, Homo sapien
gcagttttgatttcctagcacagcc

SEQ ID NO: 5220593 - DNA, 25 bp, Homo sapien
agtaatcgccgccttgctatcgcac

SEQ ID NO: 5220594 - DNA, 25 bp, Homo sapien
ttcactggcagcactggtagcaaga

SEQ ID NO: 5220595 - DNA, 25 bp, Homo sapien
ccattaggatctgggcctttggcaa

SEQ ID NO: 5220596 - DNA, 25 bp, Homo sapien
cctttggcaagtgccccagtaatcg

SEQ ID NO: 5220597 - DNA, 25 bp, Homo sapien
tggacttgttccagtctcacagcct

SEQ ID NO: 5220598 - DNA, 25 bp, Homo sapien
ccacagggttgtttcagggcttctg

SEQ ID NO: 5220599 - DNA, 25 bp, Homo sapien
tcacagcctctgaactatgactgct

SEQ ID NO: 5220600 - DNA, 25 bp, Homo sapien
tctccttcgccggtagaggtggtca

SEQ ID NO: 5220601 - DNA, 25 bp, Homo sapien
tcttattagttaggaagctctcttg

SEQ ID NO: 5220602 - DNA, 25 bp, Homo sapien
cttattagttaggaagctctcttgg

SEQ ID NO: 5220603 - DNA, 25 bp, Homo sapien
gtcttattagttaggaagctctctt

SEQ ID NO: 5220604 - DNA, 25 bp, Homo sapien
tattagttaggaagctctcttggtt

SEQ ID NO: 5220605 - DNA, 25 bp, Homo sapien
cagctgagatggcagggcgctgaaa

SEQ ID NO: 5220606 - DNA, 25 bp, Homo sapien
cagggcgctgaaataatcatgaaca

SEQ ID NO: 5220607 - DNA, 25 bp, Homo sapien
caagtgcttcctgggcggagacgcg

SEQ ID NO: 5220608 - DNA, 25 bp, Homo sapien
cggagacgcggtctctgggaaagcc

SEQ ID NO: 5220609 - DNA, 25 bp, Homo sapien
ggacatatccgcttcacctatcatc

SEQ ID NO: 5220610 - DNA, 25 bp, Homo sapien
cagagacaacgtccatctcatccaa

SEQ ID NO: 5220611 - DNA, 25 bp, Homo sapien
ggagaagagtcttgttagaaacact

SEQ ID NO: 5220612 - DNA, 25 bp, Homo sapien
atcatcttactctccgcagaaaggg

SEQ ID NO: 5220613 - DNA, 25 bp, Homo sapien
gccctcctcagggatggagtttcta

SEQ ID NO: 5220614 - DNA, 25 bp, Homo sapien
atggagtttctatgtccctgcagat

SEQ ID NO: 5220615 - DNA, 25 bp, Homo sapien
cctgcagattgggaactgtgattac

SEQ ID NO: 5220616 - DNA, 25 bp, Homo sapien
gattgggaactgtgattacccactg

SEQ ID NO: 5220617 - DNA, 25 bp, Homo sapien
tctgagtgggaagagcgactccctg

SEQ ID NO: 5220618 - DNA, 25 bp, Homo sapien
gctgtgttttgagagggactaccaa

SEQ ID NO: 5220619 - DNA, 25 bp, Homo sapien
tcagccacgaggaccacaagtgtgg

SEQ ID NO: 5220620 - DNA, 25 bp, Homo sapien
aagtgtggccataagccggtgtctg

SEQ ID NO: 5220621 - DNA, 25 bp, Homo sapien
gctgggaaggcaaccggttaatcaa

SEQ ID NO: 5220622 - DNA, 25 bp, Homo sapien
aacgaaaaaagctgcagcgcggctc

SEQ ID NO: 5220623 - DNA, 25 bp, Homo sapien
cactatctggcagaacatgctggga

SEQ ID NO: 5220624 - DNA, 25 bp, Homo sapien
gggcattgcttttcccaggttcaca

SEQ ID NO: 5220625 - DNA, 25 bp, Homo sapien
cacatttctggctttagcctcactc

SEQ ID NO: 5220626 - DNA, 25 bp, Homo sapien
catttctggctttagcctcactcct

SEQ ID NO: 5220627 - DNA, 25 bp, Homo sapien
acatttctggctttagcctcactcc

SEQ ID NO: 5220628 - DNA, 25 bp, Homo sapien
atttctggctttagcctcactcctg

SEQ ID NO: 5220629 - DNA, 25 bp, Homo sapien
agcatttgctaaactgggctgggtg

SEQ ID NO: 5220630 - DNA, 25 bp, Homo sapien
atttgctaaactgggctgggtggtg

SEQ ID NO: 5220631 - DNA, 25 bp, Homo sapien
gcatttgctaaactgggctgggtgg

SEQ ID NO: 5220632 - DNA, 25 bp, Homo sapien
catttgctaaactgggctgggtggt

SEQ ID NO: 5220633 - DNA, 25 bp, Homo sapien
ctggaagaaccttggtgatctcgcc

SEQ ID NO: 5220634 - DNA, 25 bp, Homo sapien
ggaagaaccttggtgatctcgccct

SEQ ID NO: 5220635 - DNA, 25 bp, Homo sapien
accttggtgatctcgccctttcttt

SEQ ID NO: 5220636 - DNA, 25 bp, Homo sapien
aagaaccttggtgatctcgcccttt

SEQ ID NO: 5220637 - DNA, 25 bp, Homo sapien
ttcctctatcttgtttgctgtccca

SEQ ID NO: 5220638 - DNA, 25 bp, Homo sapien
cttgattcctctatcttgtttgctg

SEQ ID NO: 5220639 - DNA, 25 bp, Homo sapien
tatcttgtttgctgtcccatctacc

SEQ ID NO: 5220640 - DNA, 25 bp, Homo sapien
cctctatcttgtttgctgtcccatc

SEQ ID NO: 5220641 - DNA, 25 bp, Homo sapien
ctggcgcaggccacaagcttgacat

SEQ ID NO: 5220642 - DNA, 25 bp, Homo sapien
ttcttcaattgctggcgcaggccac

SEQ ID NO: 5220643 - DNA, 25 bp, Homo sapien
tcataggtgaggacataaagcccct

SEQ ID NO: 5220644 - DNA, 25 bp, Homo sapien
tgggaaatcaaccttctagcccagg

SEQ ID NO: 5220645 - DNA, 25 bp, Homo sapien
gccccttgttcagtatggagttaga

SEQ ID NO: 5220646 - DNA, 25 bp, Homo sapien
aggtctctgtaagcaccagctctgt

SEQ ID NO: 5220647 - DNA, 25 bp, Homo sapien
aaaccagcgcttagattccccatca

SEQ ID NO: 5220648 - DNA, 25 bp, Homo sapien
tcacagacaattaagattcagtagg

SEQ ID NO: 5220649 - DNA, 25 bp, Homo sapien
tggaactctgctcccaactacttat

SEQ ID NO: 5220650 - DNA, 25 bp, Homo sapien
taggaggagatagcctgaaattcat

SEQ ID NO: 5220651 - DNA, 25 bp, Homo sapien
tgaaccttgtagcacaccacggctg

SEQ ID NO: 5220652 - DNA, 25 bp, Homo sapien
gagatgatccctggacagaagcgat

SEQ ID NO: 5220653 - DNA, 25 bp, Homo sapien
aaaatcagatacttactcaggcagg

SEQ ID NO: 5220654 - DNA, 25 bp, Homo sapien
tccaaaggatatacagaggtctctg

SEQ ID NO: 5220655 - DNA, 25 bp, Homo sapien
gtagcatccctgagctttcgattgg

SEQ ID NO: 5220656 - DNA, 25 bp, Homo sapien
agagaggcagaggaatcccactact

SEQ ID NO: 5220657 - DNA, 25 bp, Homo sapien
ggtaaaactgctcaagaactcttgc

SEQ ID NO: 5220658 - DNA, 25 bp, Homo sapien
tcttgctgatgcgtcaacagtagca

SEQ ID NO: 5220659 - DNA, 25 bp, Homo sapien
tagacgggacattggaggtcagctc

SEQ ID NO: 5220660 - DNA, 25 bp, Homo sapien
cattcctgcagcaatagtatctaag

SEQ ID NO: 5220661 - DNA, 25 bp, Homo sapien
tcttctaacctccaacatgggaatc

SEQ ID NO: 5220662 - DNA, 25 bp, Homo sapien
gggaatccctcctatagctctcata

SEQ ID NO: 5220663 - DNA, 25 bp, Homo sapien
gcacaaattccaggaatgtttattt

SEQ ID NO: 5220664 - DNA, 25 bp, Homo sapien
atttgataaaattgagaaatgaaag

SEQ ID NO: 5220665 - DNA, 25 bp, Homo sapien
tgtttatttgataaaattgagaaat

SEQ ID NO: 5220666 - DNA, 25 bp, Homo sapien
ttatttgataaaattgagaaatgaa

SEQ ID NO: 5220667 - DNA, 25 bp, Homo sapien
ccattgtagtgggcgctgttcgtgt

SEQ ID NO: 5220668 - DNA, 25 bp, Homo sapien
tccagagatgcgtggcccattgcag

SEQ ID NO: 5220669 - DNA, 25 bp, Homo sapien
tgtcacatgacccaacttcggtctt

SEQ ID NO: 5220670 - DNA, 25 bp, Homo sapien
tgtttcctgcctcgaatccgctaga

SEQ ID NO: 5220671 - DNA, 25 bp, Homo sapien
tctgtcagttttgccggaaagatct

SEQ ID NO: 5220672 - DNA, 25 bp, Homo sapien
tagtaaggccctattgtcagagcta

SEQ ID NO: 5220673 - DNA, 25 bp, Homo sapien
taatgagaagagtccaaggttcccc

SEQ ID NO: 5220674 - DNA, 25 bp, Homo sapien
cagggctccatcactcctagagtaa

SEQ ID NO: 5220675 - DNA, 25 bp, Homo sapien
gcccaggggactaatgaagacatga

SEQ ID NO: 5220676 - DNA, 25 bp, Homo sapien
gggactaatgaagacatgattccag

SEQ ID NO: 5220677 - DNA, 25 bp, Homo sapien
cccaggggactaatgaagacatgat

SEQ ID NO: 5220678 - DNA, 25 bp, Homo sapien
caggggactaatgaagacatgattc

SEQ ID NO: 5220679 - DNA, 25 bp, Homo sapien
caccagccagtctgaggttttatag

SEQ ID NO: 5220680 - DNA, 25 bp, Homo sapien
cacaggaccagacgctgttaatggt

SEQ ID NO: 5220681 - DNA, 25 bp, Homo sapien
ttaatggtcctacatggctgtgagc

SEQ ID NO: 5220682 - DNA, 25 bp, Homo sapien
tatagcatccatcacgggacaccag

SEQ ID NO: 5220683 - DNA, 25 bp, Homo sapien
gcactgtgaatatgaagtatgttac

SEQ ID NO: 5220684 - DNA, 25 bp, Homo sapien
tgcactgtgaatatgaagtatgtta

SEQ ID NO: 5220685 - DNA, 25 bp, Homo sapien
ttgcactgtgaatatgaagtatgtt

SEQ ID NO: 5220686 - DNA, 25 bp, Homo sapien
tggatgagggcttttgcaagaattc

SEQ ID NO: 5220687 - DNA, 25 bp, Homo sapien
cctggatgagggcttttgcaagaat

SEQ ID NO: 5220688 - DNA, 25 bp, Homo sapien
cagacacctggatgagggcttttgc

SEQ ID NO: 5220689 - DNA, 25 bp, Homo sapien
acacctggatgagggcttttgcaag

SEQ ID NO: 5220690 - DNA, 25 bp, Homo sapien
ccctgtgtacaaacgcatcaggttt

SEQ ID NO: 5220691 - DNA, 25 bp, Homo sapien
caaacgcatcaggtttgtggacttc

SEQ ID NO: 5220692 - DNA, 25 bp, Homo sapien
tttgtggacttcaaagggcgttcca

SEQ ID NO: 5220693 - DNA, 25 bp, Homo sapien
cttcaaagggcgttccacatgaatg

SEQ ID NO: 5220694 - DNA, 25 bp, Homo sapien
cagaactatctaggcctttaccctt

SEQ ID NO: 5220695 - DNA, 25 bp, Homo sapien
tcagcacccccagaactatctaggc

SEQ ID NO: 5220696 - DNA, 25 bp, Homo sapien
tctctgtattgctgtgggagctcag

SEQ ID NO: 5220697 - DNA, 25 bp, Homo sapien
gtattgctgtgggagctcagcaccc

SEQ ID NO: 5220698 - DNA, 25 bp, Homo sapien
ggcacacagcaagggtttctgagct

SEQ ID NO: 5220699 - DNA, 25 bp, Homo sapien
tcttgatcagtaggatgtcgtagtt

SEQ ID NO: 5220700 - DNA, 25 bp, Homo sapien
gaagaaggagaaatcttgatcagta

SEQ ID NO: 5220701 - DNA, 25 bp, Homo sapien
agaaatcttgatcagtaggatgtcg

SEQ ID NO: 5220702 - DNA, 25 bp, Homo sapien
aatcttgatcagtaggatgtcgtag

SEQ ID NO: 5220703 - DNA, 25 bp, Homo sapien
cacatctctggtgcggggataaccc

SEQ ID NO: 5220704 - DNA, 25 bp, Homo sapien
ccaaggggcgctctctctgcacatt

SEQ ID NO: 5220705 - DNA, 25 bp, Homo sapien
gggataacccaaggggcgctctctc

SEQ ID NO: 5220706 - DNA, 25 bp, Homo sapien
cacacacgagagtccatgctccagc

SEQ ID NO: 5220707 - DNA, 25 bp, Homo sapien
caattgttttaagcacatgtgctgc

SEQ ID NO: 5220708 - DNA, 25 bp, Homo sapien
aattgttttaagcacatgtgctgct

SEQ ID NO: 5220709 - DNA, 25 bp, Homo sapien
attccaattgttttaagcacatgtg

SEQ ID NO: 5220710 - DNA, 25 bp, Homo sapien
tccaattgttttaagcacatgtgct

SEQ ID NO: 5220711 - DNA, 25 bp, Homo sapien
gaatgccaagatgccacgtactggg

SEQ ID NO: 5220712 - DNA, 25 bp, Homo sapien
ttctgcgaatgccaagatgccacgt

SEQ ID NO: 5220713 - DNA, 25 bp, Homo sapien
cacgtactgggggagtgtgtccaaa

SEQ ID NO: 5220714 - DNA, 25 bp, Homo sapien
tgctgtttctgcgaatgccaagatg

SEQ ID NO: 5220715 - DNA, 25 bp, Homo sapien
tggttttccactagtctgggattca

SEQ ID NO: 5220716 - DNA, 25 bp, Homo sapien
ggttttccactagtctgggattcag

SEQ ID NO: 5220717 - DNA, 25 bp, Homo sapien
ttggttttccactagtctgggattc

SEQ ID NO: 5220718 - DNA, 25 bp, Homo sapien
gtaggcactggttggcagagctgca

SEQ ID NO: 5220719 - DNA, 25 bp, Homo sapien
cagccaatgtctgtgctgactctgc

SEQ ID NO: 5220720 - DNA, 25 bp, Homo sapien
tgtggaggcactcagccaatgtctg

SEQ ID NO: 5220721 - DNA, 25 bp, Homo sapien
tctgtgctgactctgcaaactcaca

SEQ ID NO: 5220722 - DNA, 25 bp, Homo sapien
gtgctgactctgcaaactcacagtc

SEQ ID NO: 5220723 - DNA, 25 bp, Homo sapien
aaagtcagcttgggaagggtgtgcc

SEQ ID NO: 5220724 - DNA, 25 bp, Homo sapien
gcttctgtcagcatgagacttgaag

SEQ ID NO: 5220725 - DNA, 25 bp, Homo sapien
agtcagcttgggaagggtgtgcctc

SEQ ID NO: 5220726 - DNA, 25 bp, Homo sapien
tgcctctttggaccagcattccctt

SEQ ID NO: 5220727 - DNA, 25 bp, Homo sapien
cctttctctggcatggcttggggga

SEQ ID NO: 5220728 - DNA, 25 bp, Homo sapien
ctggcatggcttgggggagcaccta

SEQ ID NO: 5220729 - DNA, 25 bp, Homo sapien
tttctctggcatggcttgggggagc

SEQ ID NO: 5220730 - DNA, 25 bp, Homo sapien
tttcctttctctggcatggcttggg

SEQ ID NO: 5220731 - DNA, 25 bp, Homo sapien
agaccgacacgggtcacgtcctggg

SEQ ID NO: 5220732 - DNA, 25 bp, Homo sapien
acccagcgcggagaccgacacgggt

SEQ ID NO: 5220733 - DNA, 25 bp, Homo sapien
tgggaacccaactgctgccggcgcg

SEQ ID NO: 5220734 - DNA, 25 bp, Homo sapien
tcagattgctgccttgacttaggga

SEQ ID NO: 5220735 - DNA, 25 bp, Homo sapien
tcgccattaacacgaatctggagtc

SEQ ID NO: 5220736 - DNA, 25 bp, Homo sapien
ataattgttatggagccagcccagg

SEQ ID NO: 5220737 - DNA, 25 bp, Homo sapien
gagataattcttcgccattaacacg

SEQ ID NO: 5220738 - DNA, 25 bp, Homo sapien
gccgcttcagataggagattataat

SEQ ID NO: 5220739 - DNA, 25 bp, Homo sapien
caacagacaccgaaccttctgcaga

SEQ ID NO: 5220740 - DNA, 25 bp, Homo sapien
aattccaacagacaccgaaccttct

SEQ ID NO: 5220741 - DNA, 25 bp, Homo sapien
attccaacagacaccgaaccttctg

SEQ ID NO: 5220742 - DNA, 25 bp, Homo sapien
cagacaccgaaccttctgcagaaaa

SEQ ID NO: 5220743 - DNA, 25 bp, Homo sapien
cccaatctctgtctgcacacggatg

SEQ ID NO: 5220744 - DNA, 25 bp, Homo sapien
acttcagggtaatgaaagcattccc

SEQ ID NO: 5220745 - DNA, 25 bp, Homo sapien
tagtgggagctgatacaccgaggcc

SEQ ID NO: 5220746 - DNA, 25 bp, Homo sapien
caccgaggcccaagtatgtcagcgt

SEQ ID NO: 5220747 - DNA, 25 bp, Homo sapien
gaggtgcttttgtgcagtctggctc

SEQ ID NO: 5220748 - DNA, 25 bp, Homo sapien
cagtctggctcgatgagatgcctcc

SEQ ID NO: 5220749 - DNA, 25 bp, Homo sapien
gcttttgtgcagtctggctcgatga

SEQ ID NO: 5220750 - DNA, 25 bp, Homo sapien
ttgaggaggtgcttttgtgcagtct

SEQ ID NO: 5220751 - DNA, 25 bp, Homo sapien
tgatgagcggaaacaagccgccctg

SEQ ID NO: 5220752 - DNA, 25 bp, Homo sapien
tttgctgctgctctcggtgaaagct

SEQ ID NO: 5220753 - DNA, 25 bp, Homo sapien
aagctactggtgtttgatgagcgga

SEQ ID NO: 5220754 - DNA, 25 bp, Homo sapien
tgtttctgccaagagtgctgagcgt

SEQ ID NO: 5220755 - DNA, 25 bp, Homo sapien
ctgggtgtcaggtaagtccctgcca

SEQ ID NO: 5220756 - DNA, 25 bp, Homo sapien
ctgaccctctcaggttgtcccaggg

SEQ ID NO: 5220757 - DNA, 25 bp, Homo sapien
aactgaccctctcaggttgtcccag

SEQ ID NO: 5220758 - DNA, 25 bp, Homo sapien
tgtcaggtaagtccctgccacctgc

SEQ ID NO: 5220759 - DNA, 25 bp, Homo sapien
caagtgtggaacacacgaatcccgc

SEQ ID NO: 5220760 - DNA, 25 bp, Homo sapien
agagtgtggggctttatactcttca

SEQ ID NO: 5220761 - DNA, 25 bp, Homo sapien
gccttgcaaatagacacttccttct

SEQ ID NO: 5220762 - DNA, 25 bp, Homo sapien
gaacacacgaatcccgccttgcaaa

SEQ ID NO: 5220763 - DNA, 25 bp, Homo sapien
aggtggctcgggacagtagggtggg

SEQ ID NO: 5220764 - DNA, 25 bp, Homo sapien
gtgccccacagacgtcctggtggaa

SEQ ID NO: 5220765 - DNA, 25 bp, Homo sapien
ctgggttgggaacagtgtgggctcc

SEQ ID NO: 5220766 - DNA, 25 bp, Homo sapien
gctccctttccatccctccgcattc

SEQ ID NO: 5220767 - DNA, 25 bp, Homo sapien
tgagggggcctaatgcatccgtggt

SEQ ID NO: 5220768 - DNA, 25 bp, Homo sapien
ctgagggggcctaatgcatccgtgg

SEQ ID NO: 5220769 - DNA, 25 bp, Homo sapien
gagggggcctaatgcatccgtggtc

SEQ ID NO: 5220770 - DNA, 25 bp, Homo sapien
cattccgttccagagattgacaccg

SEQ ID NO: 5220771 - DNA, 25 bp, Homo sapien
tgcctggagacaccctgctggcagt

SEQ ID NO: 5220772 - DNA, 25 bp, Homo sapien
attgacaccgtctgctctgcaccgg

SEQ ID NO: 5220773 - DNA, 25 bp, Homo sapien
aaaagagggtcgcatgcacgggtct

SEQ ID NO: 5220774 - DNA, 25 bp, Homo sapien
tgagaaatagcgctcagaagacaga

SEQ ID NO: 5220775 - DNA, 25 bp, Homo sapien
gggcccttctgagaaatagcgctca

SEQ ID NO: 5220776 - DNA, 25 bp, Homo sapien
ctgggggcccttctgagaaatagcg

SEQ ID NO: 5220777 - DNA, 25 bp, Homo sapien
agcgctcagaagacagagatgctcc

SEQ ID NO: 5220778 - DNA, 25 bp, Homo sapien
gggggagatggaggcctgagcgtac

SEQ ID NO: 5220779 - DNA, 25 bp, Homo sapien
ctgtagcccatgtgcagagccccac

SEQ ID NO: 5220780 - DNA, 25 bp, Homo sapien
gcagagccccacaactgggggagat

SEQ ID NO: 5220781 - DNA, 25 bp, Homo sapien
ctgggggagatggaggcctgagcgt

SEQ ID NO: 5220782 - DNA, 25 bp, Homo sapien
aaaagcatggatgtgtgcccatgga

SEQ ID NO: 5220783 - DNA, 25 bp, Homo sapien
gcccatggaggtgactcatcaccct

SEQ ID NO: 5220784 - DNA, 25 bp, Homo sapien
cctccagaaatagctaccaggaggc

SEQ ID NO: 5220785 - DNA, 25 bp, Homo sapien
aggtgactcatcaccctcctggcag

SEQ ID NO: 5220786 - DNA, 25 bp, Homo sapien
aatggcccaacgtgggatgatcatc

SEQ ID NO: 5220787 - DNA, 25 bp, Homo sapien
tgctgttcaaataagcgatctgggt

SEQ ID NO: 5220788 - DNA, 25 bp, Homo sapien
caagtttctggtggtatgtggatgc

SEQ ID NO: 5220789 - DNA, 25 bp, Homo sapien
ggtgccatcagaacacaaccacgtg

SEQ ID NO: 5220790 - DNA, 25 bp, Homo sapien
ccagggggcatcagggaaccaatgt

SEQ ID NO: 5220791 - DNA, 25 bp, Homo sapien
gaaccaatgtggcttggcagttact

SEQ ID NO: 5220792 - DNA, 25 bp, Homo sapien
tctctgaattccagtctgttgggag

SEQ ID NO: 5220793 - DNA, 25 bp, Homo sapien
tgagcactgtgggaacatttctgtt

SEQ ID NO: 5220794 - DNA, 25 bp, Homo sapien
tgtggatgtagcaaagtctttagcc

SEQ ID NO: 5220795 - DNA, 25 bp, Homo sapien
tgtgacaacttatactccttaggag

SEQ ID NO: 5220796 - DNA, 25 bp, Homo sapien
tgacccaagtccgaaaagcccagat

SEQ ID NO: 5220797 - DNA, 25 bp, Homo sapien
gagtcttgatctagttgctattgtc

SEQ ID NO: 5220798 - DNA, 25 bp, Homo sapien
cctggttatatgtgctgaagtctct

SEQ ID NO: 5220799 - DNA, 25 bp, Homo sapien
ccgtgtcacgttgtacctggttata

SEQ ID NO: 5220800 - DNA, 25 bp, Homo sapien
acagtcaagctggtcacaaatcgga

SEQ ID NO: 5220801 - DNA, 25 bp, Homo sapien
aaatacaggtctgtgcggccccgtg

SEQ ID NO: 5220802 - DNA, 25 bp, Homo sapien
actgtctccttactgtgtccatata

SEQ ID NO: 5220803 - DNA, 25 bp, Homo sapien
ctgtgtccatataactgtggttctt

SEQ ID NO: 5220804 - DNA, 25 bp, Homo sapien
tgtccatataactgtggttctttca

SEQ ID NO: 5220805 - DNA, 25 bp, Homo sapien
ccttactgtgtccatataactgtgg

SEQ ID NO: 5220806 - DNA, 25 bp, Homo sapien
ggatgttcaaacacctgggacagag

SEQ ID NO: 5220807 - DNA, 25 bp, Homo sapien
tgggacagagggatgcgcagcattt

SEQ ID NO: 5220808 - DNA, 25 bp, Homo sapien
agagggatgcgcagcatttcagcag

SEQ ID NO: 5220809 - DNA, 25 bp, Homo sapien
tgggatgttcaaacacctgggacag

SEQ ID NO: 5220810 - DNA, 25 bp, Homo sapien
tattatatagcccttggacggcagg

SEQ ID NO: 5220811 - DNA, 25 bp, Homo sapien
ccccattaccacacttattatatag

SEQ ID NO: 5220812 - DNA, 25 bp, Homo sapien
cattaccacacttattatatagccc

SEQ ID NO: 5220813 - DNA, 25 bp, Homo sapien
gcccttggacggcaggatgaatcat

SEQ ID NO: 5220814 - DNA, 25 bp, Homo sapien
gcagggaagagtttagaagcgtggg

SEQ ID NO: 5220815 - DNA, 25 bp, Homo sapien
gcatttccctttaataagcttctca

SEQ ID NO: 5220816 - DNA, 25 bp, Homo sapien
aggcgaccccgttctgcaggcagct

SEQ ID NO: 5220817 - DNA, 25 bp, Homo sapien
tccccgcaaggcttgtgcgagggct

SEQ ID NO: 5220818 - DNA, 25 bp, Homo sapien
tggaagtgtgttgcagaaaccactg

SEQ ID NO: 5220819 - DNA, 25 bp, Homo sapien
gaagtgtgttgcagaaaccactgct

SEQ ID NO: 5220820 - DNA, 25 bp, Homo sapien
tgtgttgcagaaaccactgctggca

SEQ ID NO: 5220821 - DNA, 25 bp, Homo sapien
agtgtgttgcagaaaccactgctgg

SEQ ID NO: 5220822 - DNA, 25 bp, Homo sapien
gtggcccgtgactgggagacccaca

SEQ ID NO: 5220823 - DNA, 25 bp, Homo sapien
cttgtgtgagttccagagtgaagga

SEQ ID NO: 5220824 - DNA, 25 bp, Homo sapien
gatccaagtgactgaccagagtgag

SEQ ID NO: 5220825 - DNA, 25 bp, Homo sapien
cctggtgtccatagcctgagctgcc

SEQ ID NO: 5220826 - DNA, 25 bp, Homo sapien
cttccgttgtatggtgttaattttg

SEQ ID NO: 5220827 - DNA, 25 bp, Homo sapien
caacttttattagaatgctgcctat

SEQ ID NO: 5220828 - DNA, 25 bp, Homo sapien
atttggggccttccgttgtatggtg

SEQ ID NO: 5220829 - DNA, 25 bp, Homo sapien
ttgaaagtgtgaagccggttaaagc

SEQ ID NO: 5220830 - DNA, 25 bp, Homo sapien
attcagtgagaagggaacgagcaga

SEQ ID NO: 5220831 - DNA, 25 bp, Homo sapien
gagcagaaaccaggaagcagtagaa

SEQ ID NO: 5220832 - DNA, 25 bp, Homo sapien
agcagaaaccaggaagcagtagaag

SEQ ID NO: 5220833 - DNA, 25 bp, Homo sapien
aacgagcagaaaccaggaagcagta

SEQ ID NO: 5220834 - DNA, 25 bp, Homo sapien
cagttgtgcctgctggatacagaga

SEQ ID NO: 5220835 - DNA, 25 bp, Homo sapien
tgagacctcggtccaacagttgtgc

SEQ ID NO: 5220836 - DNA, 25 bp, Homo sapien
ggagtagacgatgtgacccagccat

SEQ ID NO: 5220837 - DNA, 25 bp, Homo sapien
tacagagaggccaactgatcggatg

SEQ ID NO: 5220838 - DNA, 25 bp, Homo sapien
gctgtaggaaccagactcaaggtag

SEQ ID NO: 5220839 - DNA, 25 bp, Homo sapien
tcaggctctcccagtaagataattt

SEQ ID NO: 5220840 - DNA, 25 bp, Homo sapien
tagggcaagtgggaaacttgttgta

SEQ ID NO: 5220841 - DNA, 25 bp, Homo sapien
ttgttgtatatcaggctctcccagt

SEQ ID NO: 5220842 - DNA, 25 bp, Homo sapien
tcagagcatatggaccatagtctgt

SEQ ID NO: 5220843 - DNA, 25 bp, Homo sapien
tctgggttatgatgtaaaaagcacc

SEQ ID NO: 5220844 - DNA, 25 bp, Homo sapien
aagcacctttggtaattgctaccca

SEQ ID NO: 5220845 - DNA, 25 bp, Homo sapien
tctgtagaaagcgacttcgggtatc

SEQ ID NO: 5220846 - DNA, 25 bp, Homo sapien
tattcctggcggagcccttctgcct

SEQ ID NO: 5220847 - DNA, 25 bp, Homo sapien
cctggcggagcccttctgcctcagt

SEQ ID NO: 5220848 - DNA, 25 bp, Homo sapien
tggcggagcccttctgcctcagtcc

SEQ ID NO: 5220849 - DNA, 25 bp, Homo sapien
acgttattcctggcggagcccttct

SEQ ID NO: 5220850 - DNA, 25 bp, Homo sapien
gaatatcaggaattcccatgcagga

SEQ ID NO: 5220851 - DNA, 25 bp, Homo sapien
cctctctccgggctgccaggaatat

SEQ ID NO: 5220852 - DNA, 25 bp, Homo sapien
gaattcccatgcaggaaagtgacat

SEQ ID NO: 5220853 - DNA, 25 bp, Homo sapien
ggctgccaggaatatcaggaattcc

SEQ ID NO: 5220854 - DNA, 25 bp, Homo sapien
tgcgtcttagaaaccaggctaatta

SEQ ID NO: 5220855 - DNA, 25 bp, Homo sapien
cctcgttctcgggtagcgttttctg

SEQ ID NO: 5220856 - DNA, 25 bp, Homo sapien
ctgcgtaggaatgttttaatgcgtc

SEQ ID NO: 5220857 - DNA, 25 bp, Homo sapien
aatcttcgtcttgagccaggcgctg

SEQ ID NO: 5220858 - DNA, 25 bp, Homo sapien
aattcgctcagggacgaaaacgcgc

SEQ ID NO: 5220859 - DNA, 25 bp, Homo sapien
tcttcctggtgcactcagatgcgca

SEQ ID NO: 5220860 - DNA, 25 bp, Homo sapien
gagtcgcgttaggactgcaaaggct

SEQ ID NO: 5220861 - DNA, 25 bp, Homo sapien
agagacgtgaccaggagtcgcgtta

SEQ ID NO: 5220862 - DNA, 25 bp, Homo sapien
tcgccagaagaagcgtcgggctcgc

SEQ ID NO: 5220863 - DNA, 25 bp, Homo sapien
cgcgctggtcgccagaagaagcgtc

SEQ ID NO: 5220864 - DNA, 25 bp, Homo sapien
cctcggagtcgcgctggtcgccaga

SEQ ID NO: 5220865 - DNA, 25 bp, Homo sapien
agtcgcgctggtcgccagaagaagc

SEQ ID NO: 5220866 - DNA, 25 bp, Homo sapien
agtcacactgcgtccgaaaccgcga

SEQ ID NO: 5220867 - DNA, 25 bp, Homo sapien
ccaaacggccggctcttgctgagtc

SEQ ID NO: 5220868 - DNA, 25 bp, Homo sapien
atctcggccccggagtcgggagcac

SEQ ID NO: 5220869 - DNA, 25 bp, Homo sapien
ggagcacggcgagttctttttggaa

SEQ ID NO: 5220870 - DNA, 25 bp, Homo sapien
ccaaaactcgtcagcctgggttggg

SEQ ID NO: 5220871 - DNA, 25 bp, Homo sapien
ttcaaagtttgcccaagactctgga

SEQ ID NO: 5220872 - DNA, 25 bp, Homo sapien
gaggagcaacaagcggctccggcac

SEQ ID NO: 5220873 - DNA, 25 bp, Homo sapien
gcctggtccggtccccgctaggaga

SEQ ID NO: 5220874 - DNA, 25 bp, Homo sapien
agcaaagggcgctgccgcctgggtg

SEQ ID NO: 5220875 - DNA, 25 bp, Homo sapien
cgcatgagagtcctcacggcgccgg

SEQ ID NO: 5220876 - DNA, 25 bp, Homo sapien
gccgccgcgcccgacgcatgagagt

SEQ ID NO: 5220877 - DNA, 25 bp, Homo sapien
gcggcgtggagcaaagggcgctgcc

SEQ ID NO: 5220878 - DNA, 25 bp, Homo sapien
gaggagtgcgacgaggcggttggga

SEQ ID NO: 5220879 - DNA, 25 bp, Homo sapien
cctgaggagtgcgacgaggcggttg

SEQ ID NO: 5220880 - DNA, 25 bp, Homo sapien
ggagtgcgacgaggcggttgggaga

SEQ ID NO: 5220881 - DNA, 25 bp, Homo sapien
tcagcctgaggagtgcgacgaggcg

SEQ ID NO: 5220882 - DNA, 25 bp, Homo sapien
tgcggtagccatcgtccgagaagcg

SEQ ID NO: 5220883 - DNA, 25 bp, Homo sapien
taaagtacatcaggccgttggcacg

SEQ ID NO: 5220884 - DNA, 25 bp, Homo sapien
tatgaagaggtagacgaacagaggc

SEQ ID NO: 5220885 - DNA, 25 bp, Homo sapien
cagaagccagtggtgatgccgacga

SEQ ID NO: 5220886 - DNA, 25 bp, Homo sapien
ggcgccacgactgcagggtcttgcc

SEQ ID NO: 5220887 - DNA, 25 bp, Homo sapien
gccacgactgcagggtcttgcccga

SEQ ID NO: 5220888 - DNA, 25 bp, Homo sapien
aagcggcgccacgactgcagggtct

SEQ ID NO: 5220889 - DNA, 25 bp, Homo sapien
tctgtggtagaagcggcgccacgac

SEQ ID NO: 5220890 - DNA, 25 bp, Homo sapien
gcaaagaacttctcacttccaggtc

SEQ ID NO: 5220891 - DNA, 25 bp, Homo sapien
ccaggtcacttctcagtagaggggg

SEQ ID NO: 5220892 - DNA, 25 bp, Homo sapien
cagttcttttccctaccgtgcctct

SEQ ID NO: 5220893 - DNA, 25 bp, Homo sapien
tttccctaccgtgcctctcctcttg

SEQ ID NO: 5220894 - DNA, 25 bp, Homo sapien
tcttcctgcaagtctttgcctgaaa

SEQ ID NO: 5220895 - DNA, 25 bp, Homo sapien
ctttgacgattcacatcgccgttat

SEQ ID NO: 5220896 - DNA, 25 bp, Homo sapien
atcttcctgcaagtctttgcctgaa

SEQ ID NO: 5220897 - DNA, 25 bp, Homo sapien
gacgattcacatcgccgttatcatc

SEQ ID NO: 5220898 - DNA, 25 bp, Homo sapien
gagaccgtaatgtctgaccctggaa

SEQ ID NO: 5220899 - DNA, 25 bp, Homo sapien
tgcttgacaagcacaccgcaggagg

SEQ ID NO: 5220900 - DNA, 25 bp, Homo sapien
acattaggattctagcaggcaggcc

SEQ ID NO: 5220901 - DNA, 25 bp, Homo sapien
tctattaggcacaagctggcccgta

SEQ ID NO: 5220902 - DNA, 25 bp, Homo sapien
caacgggaaacctcagatttgcgct

SEQ ID NO: 5220903 - DNA, 25 bp, Homo sapien
cctttagcgaagtcagaacctctgg

SEQ ID NO: 5220904 - DNA, 25 bp, Homo sapien
ttacctcaaaggatccaaatgggag

SEQ ID NO: 5220905 - DNA, 25 bp, Homo sapien
aagttgctttcgtcacagttatgcc

SEQ ID NO: 5220906 - DNA, 25 bp, Homo sapien
gataaaggttagctcccatgattct

SEQ ID NO: 5220907 - DNA, 25 bp, Homo sapien
ccatcatgcaaaagaatccgagttc

SEQ ID NO: 5220908 - DNA, 25 bp, Homo sapien
tacagtaccctctatgattggcatt

SEQ ID NO: 5220909 - DNA, 25 bp, Homo sapien
atggtatctgctgatcgcctcccaa

SEQ ID NO: 5220910 - DNA, 25 bp, Homo sapien
gaaggaactacaataactggctggc

SEQ ID NO: 5220911 - DNA, 25 bp, Homo sapien
caacatcaggaagagcgtggctgtc

SEQ ID NO: 5220912 - DNA, 25 bp, Homo sapien
ccaacagtgcggatgaggaggcttt

SEQ ID NO: 5220913 - DNA, 25 bp, Homo sapien
tgtcccctgaggcaagtcctgtaga

SEQ ID NO: 5220914 - DNA, 25 bp, Homo sapien
tggccccacatccttcgcctcaagg

SEQ ID NO: 5220915 - DNA, 25 bp, Homo sapien
gttttctattctggccaatggctct

SEQ ID NO: 5220916 - DNA, 25 bp, Homo sapien
tattctggccaatggctctccattt

SEQ ID NO: 5220917 - DNA, 25 bp, Homo sapien
gaacctgtgggccagatggagacat

SEQ ID NO: 5220918 - DNA, 25 bp, Homo sapien
gtggcattagtgttattgctgcttc

SEQ ID NO: 5220919 - DNA, 25 bp, Homo sapien
tttctgaggcccataagatggccat

SEQ ID NO: 5220920 - DNA, 25 bp, Homo sapien
ggacctgggtggcattagtgttatt

SEQ ID NO: 5220921 - DNA, 25 bp, Homo sapien
tgagttgcatctcaggaacagtagg

SEQ ID NO: 5220922 - DNA, 25 bp, Homo sapien
gaattgctcagaatagcagtgaaaa

SEQ ID NO: 5220923 - DNA, 25 bp, Homo sapien
aattgctcagaatagcagtgaaaag

SEQ ID NO: 5220924 - DNA, 25 bp, Homo sapien
cagaattgctcagaatagcagtgaa

SEQ ID NO: 5220925 - DNA, 25 bp, Homo sapien
agaattgctcagaatagcagtgaaa

SEQ ID NO: 5220926 - DNA, 25 bp, Homo sapien
ctgtttcctgggctaatctgtgata

SEQ ID NO: 5220927 - DNA, 25 bp, Homo sapien
gcctccatcagaacctgaggagtct

SEQ ID NO: 5220928 - DNA, 25 bp, Homo sapien
gcctctgtgattcatgactagctgt

SEQ ID NO: 5220929 - DNA, 25 bp, Homo sapien
tattgtggaaggcttgttcccagcc

SEQ ID NO: 5220930 - DNA, 25 bp, Homo sapien
tcccagagctggagttctttgttcg

SEQ ID NO: 5220931 - DNA, 25 bp, Homo sapien
gctggagttctttgttcggcagaga

SEQ ID NO: 5220932 - DNA, 25 bp, Homo sapien
cagagctggagttctttgttcggca

SEQ ID NO: 5220933 - DNA, 25 bp, Homo sapien
gagttctttgttcggcagagatcca

SEQ ID NO: 5220934 - DNA, 25 bp, Homo sapien
gcttcagccatgaagtggtgactgg

SEQ ID NO: 5220935 - DNA, 25 bp, Homo sapien
ccgcttcagccatgaagtggtgact

SEQ ID NO: 5220936 - DNA, 25 bp, Homo sapien
gccatgaagtggtgactgggccctg

SEQ ID NO: 5220937 - DNA, 25 bp, Homo sapien
atgaagtggtgactgggccctggac

SEQ ID NO: 5220938 - DNA, 25 bp, Homo sapien
gagctcttgttgtcccttggtcccg

SEQ ID NO: 5220939 - DNA, 25 bp, Homo sapien
cgtgtgcatctacagatctcggcca

SEQ ID NO: 5220940 - DNA, 25 bp, Homo sapien
tgctctgttaccagccgtgtgcatc

SEQ ID NO: 5220941 - DNA, 25 bp, Homo sapien
caccatccttcttgtctgagcggag

SEQ ID NO: 5220942 - DNA, 25 bp, Homo sapien
gcagcagcttcttagtaacaaccag

SEQ ID NO: 5220943 - DNA, 25 bp, Homo sapien
aaccagccacacagtttagacagtg

SEQ ID NO: 5220944 - DNA, 25 bp, Homo sapien
ggctgaaatctggtcacacctcaag

SEQ ID NO: 5220945 - DNA, 25 bp, Homo sapien
cctggattgtctactctctgggcga

SEQ ID NO: 5220946 - DNA, 25 bp, Homo sapien
cttctgtttgtcctggcccagcttc

SEQ ID NO: 5220947 - DNA, 25 bp, Homo sapien
tctggttcaaagtagacttctaact

SEQ ID NO: 5220948 - DNA, 25 bp, Homo sapien
tggttcaaagtagacttctaacttc

SEQ ID NO: 5220949 - DNA, 25 bp, Homo sapien
ctctggttcaaagtagacttctaac

SEQ ID NO: 5220950 - DNA, 25 bp, Homo sapien
tgccgaaatggcaaaaccttctgag

SEQ ID NO: 5220951 - DNA, 25 bp, Homo sapien
ggagtgctgactggcattgttctta

SEQ ID NO: 5220952 - DNA, 25 bp, Homo sapien
tgctgacaggaacatagtcttctgg

SEQ ID NO: 5220953 - DNA, 25 bp, Homo sapien
tctgagtacaggatcagggcaccct

SEQ ID NO: 5220954 - DNA, 25 bp, Homo sapien
ttgaagtgtgtgcagttcaagatcc

SEQ ID NO: 5220955 - DNA, 25 bp, Homo sapien
tgctgccttccatatgccaggatgg

SEQ ID NO: 5220956 - DNA, 25 bp, Homo sapien
gtgtgcagttcaagatccagcttcc

SEQ ID NO: 5220957 - DNA, 25 bp, Homo sapien
ccttccatatgccaggatggcttct

SEQ ID NO: 5220958 - DNA, 25 bp, Homo sapien
gtcatagtgggcctgtctgttgaga

SEQ ID NO: 5220959 - DNA, 25 bp, Homo sapien
tctttccagcgtctcccattggcaa

SEQ ID NO: 5220960 - DNA, 25 bp, Homo sapien
tcacagaggtaatgcagatgcttct

SEQ ID NO: 5220961 - DNA, 25 bp, Homo sapien
gggagaaatactgtggtcttcctct

SEQ ID NO: 5220962 - DNA, 25 bp, Homo sapien
gaagtatttagccttatagacaagc

SEQ ID NO: 5220963 - DNA, 25 bp, Homo sapien
ctgaagtatttagccttatagacaa

SEQ ID NO: 5220964 - DNA, 25 bp, Homo sapien
aagtatttagccttatagacaagca

SEQ ID NO: 5220965 - DNA, 25 bp, Homo sapien
agtatttagccttatagacaagcat

SEQ ID NO: 5220966 - DNA, 25 bp, Homo sapien
ccagccaagaacagatccttccgtg

SEQ ID NO: 5220967 - DNA, 25 bp, Homo sapien
tccgtgagcagcactattactctac

SEQ ID NO: 5220968 - DNA, 25 bp, Homo sapien
gagtcatgcaggtttcttgattcac

SEQ ID NO: 5220969 - DNA, 25 bp, Homo sapien
ctttggctctttgactttgagtgta

SEQ ID NO: 5220970 - DNA, 25 bp, Homo sapien
tgtgttgatgttgtaacgaggttca

SEQ ID NO: 5220971 - DNA, 25 bp, Homo sapien
gacaggtaatgtgttgatgttgtaa

SEQ ID NO: 5220972 - DNA, 25 bp, Homo sapien
taatgtgttgatgttgtaacgaggt

SEQ ID NO: 5220973 - DNA, 25 bp, Homo sapien
ttgatgttgtaacgaggttcagagg

SEQ ID NO: 5220974 - DNA, 25 bp, Homo sapien
tgctctagtgctggccactgaaggt

SEQ ID NO: 5220975 - DNA, 25 bp, Homo sapien
gctggccactgaaggttttcagagg

SEQ ID NO: 5220976 - DNA, 25 bp, Homo sapien
cagaggatagaaggagacggtaggg

SEQ ID NO: 5220977 - DNA, 25 bp, Homo sapien
gaaggagacggtagggcttgtgctc

SEQ ID NO: 5220978 - DNA, 25 bp, Homo sapien
tatgtggcaggtacttcaagtgcaa

SEQ ID NO: 5220979 - DNA, 25 bp, Homo sapien
ttaaagctgctacggattggaggga

SEQ ID NO: 5220980 - DNA, 25 bp, Homo sapien
gggatgggaaacaagcactggaaaa

SEQ ID NO: 5220981 - DNA, 25 bp, Homo sapien
aaagcgctctagatttagggccaga

SEQ ID NO: 5220982 - DNA, 25 bp, Homo sapien
gaggcctcggaggtatctcttggct

SEQ ID NO: 5220983 - DNA, 25 bp, Homo sapien
cctggctggatctgccgttgggcct

SEQ ID NO: 5220984 - DNA, 25 bp, Homo sapien
ctcttggctgaatgccctggctgga

SEQ ID NO: 5220985 - DNA, 25 bp, Homo sapien
gcaccagagcctatacatggcgtct

SEQ ID NO: 5220986 - DNA, 25 bp, Homo sapien
ttaagttgactgtcctggagtagca

SEQ ID NO: 5220987 - DNA, 25 bp, Homo sapien
agatggtattttgggggtacacctg

SEQ ID NO: 5220988 - DNA, 25 bp, Homo sapien
cttctttggtacattaagttgactg

SEQ ID NO: 5220989 - DNA, 25 bp, Homo sapien
agtagcacagaatccttgatgtatc

SEQ ID NO: 5220990 - DNA, 25 bp, Homo sapien
ctgcttcctgcgtggtggcaagcga

SEQ ID NO: 5220991 - DNA, 25 bp, Homo sapien
cctgactgccatggttcttggctag

SEQ ID NO: 5220992 - DNA, 25 bp, Homo sapien
gggccctggtccacgtgtccagcag

SEQ ID NO: 5220993 - DNA, 25 bp, Homo sapien
tggcaagcgagtcccctgactgcca

SEQ ID NO: 5220994 - DNA, 25 bp, Homo sapien
aaaggtgattctctattgacgtgtc

SEQ ID NO: 5220995 - DNA, 25 bp, Homo sapien
cttgggagccaagagtgatcgatgc

SEQ ID NO: 5220996 - DNA, 25 bp, Homo sapien
gaaggcgcctccacagaatgtaatg

SEQ ID NO: 5220997 - DNA, 25 bp, Homo sapien
cgatgcggccatgcccaaaggcctt

SEQ ID NO: 5220998 - DNA, 25 bp, Homo sapien
agcacctgtaacaagtggctgcttc

SEQ ID NO: 5220999 - DNA, 25 bp, Homo sapien
gaagcacctgtaacaagtggctgct

SEQ ID NO: 5221000 - DNA, 25 bp, Homo sapien
cagtggcagatgctacaggagggaa

SEQ ID NO: 5221001 - DNA, 25 bp, Homo sapien
ttccccaggggtgattattctggag

SEQ ID NO: 5221002 - DNA, 25 bp, Homo sapien
aatctccaccggtaagatgaagagc

SEQ ID NO: 5221003 - DNA, 25 bp, Homo sapien
gtggttcttctgagataggaggtaa

SEQ ID NO: 5221004 - DNA, 25 bp, Homo sapien
tcttctgagataggaggtaatttca

SEQ ID NO: 5221005 - DNA, 25 bp, Homo sapien
ttgtttggtgtggtaatgaatctcc

SEQ ID NO: 5221006 - DNA, 25 bp, Homo sapien
taactcccatggtgtttctaaggac

SEQ ID NO: 5221007 - DNA, 25 bp, Homo sapien
cacacaggtgtggattcttcgctgc

SEQ ID NO: 5221008 - DNA, 25 bp, Homo sapien
cactgggagatgcactgttaactcc

SEQ ID NO: 5221009 - DNA, 25 bp, Homo sapien
cttgaggtgagagtgtgtccctgct

SEQ ID NO: 5221010 - DNA, 25 bp, Homo sapien
tttccttggctgtggacccttgtgt

SEQ ID NO: 5221011 - DNA, 25 bp, Homo sapien
gcttcccttcagagtgaggttcccg

SEQ ID NO: 5221012 - DNA, 25 bp, Homo sapien
cttgcttcccttcagagtgaggttc

SEQ ID NO: 5221013 - DNA, 25 bp, Homo sapien
ggctgtggacccttgtgtgtcttgc

SEQ ID NO: 5221014 - DNA, 25 bp, Homo sapien
atgtccacgtcatggaaattggagt

SEQ ID NO: 5221015 - DNA, 25 bp, Homo sapien
gtccacgtcatggaaattggagtga

SEQ ID NO: 5221016 - DNA, 25 bp, Homo sapien
aatgtccacgtcatggaaattggag

SEQ ID NO: 5221017 - DNA, 25 bp, Homo sapien
tgtccacgtcatggaaattggagtg

SEQ ID NO: 5221018 - DNA, 25 bp, Homo sapien
cctcctgggcactctcatgttcggg

SEQ ID NO: 5221019 - DNA, 25 bp, Homo sapien
tagggctgtccacgcccttctggct

SEQ ID NO: 5221020 - DNA, 25 bp, Homo sapien
gtggtctgatgtcctagggctgtcc

SEQ ID NO: 5221021 - DNA, 25 bp, Homo sapien
cactctcatgttcgggagacttggg

SEQ ID NO: 5221022 - DNA, 25 bp, Homo sapien
taggcagtgtcagtaccgtgttggt

SEQ ID NO: 5221023 - DNA, 25 bp, Homo sapien
cacaagcataggcagtgtcagtacc

SEQ ID NO: 5221024 - DNA, 25 bp, Homo sapien
caagcataggcagtgtcagtaccgt

SEQ ID NO: 5221025 - DNA, 25 bp, Homo sapien
gcataggcagtgtcagtaccgtgtt

SEQ ID NO: 5221026 - DNA, 25 bp, Homo sapien
ggacccagcaagaagtgtcccagtg

SEQ ID NO: 5221027 - DNA, 25 bp, Homo sapien
aagaagtgtcccagtgtagggtcgc

SEQ ID NO: 5221028 - DNA, 25 bp, Homo sapien
ccagcaagaagtgtcccagtgtagg

SEQ ID NO: 5221029 - DNA, 25 bp, Homo sapien
caagaagtgtcccagtgtagggtcg

SEQ ID NO: 5221030 - DNA, 25 bp, Homo sapien
tacccgatggaagcgcctcggtttg

SEQ ID NO: 5221031 - DNA, 25 bp, Homo sapien
acccgatggaagcgcctcggtttgg

SEQ ID NO: 5221032 - DNA, 25 bp, Homo sapien
ctttacccgatggaagcgcctcggt

SEQ ID NO: 5221033 - DNA, 25 bp, Homo sapien
tggatcattgtctctgagctacaga

SEQ ID NO: 5221034 - DNA, 25 bp, Homo sapien
ggagaaactggctgacttgcgtctg

SEQ ID NO: 5221035 - DNA, 25 bp, Homo sapien
tcagcgtggcacattagacctcttc

SEQ ID NO: 5221036 - DNA, 25 bp, Homo sapien
gaagcacctctgtgtcggtgaaagg

SEQ ID NO: 5221037 - DNA, 25 bp, Homo sapien
tattaccacgaccaagtccaaggag

SEQ ID NO: 5221038 - DNA, 25 bp, Homo sapien
ggtcaaatcttggtcacatggccat

SEQ ID NO: 5221039 - DNA, 25 bp, Homo sapien
tccgtaaagttacctgagcaccctg

SEQ ID NO: 5221040 - DNA, 25 bp, Homo sapien
atacctagctgcaagtgagtctggg

SEQ ID NO: 5221041 - DNA, 25 bp, Homo sapien
attttgcagtagcctgagccctctg

SEQ ID NO: 5221042 - DNA, 25 bp, Homo sapien
gattttgcagtagcctgagccctct

SEQ ID NO: 5221043 - DNA, 25 bp, Homo sapien
taggaaatgctgactactaggccct

SEQ ID NO: 5221044 - DNA, 25 bp, Homo sapien
tttaggaaatgctgactactaggcc

SEQ ID NO: 5221045 - DNA, 25 bp, Homo sapien
aggaaatgctgactactaggccctt

SEQ ID NO: 5221046 - DNA, 25 bp, Homo sapien
ttaggaaatgctgactactaggccc

SEQ ID NO: 5221047 - DNA, 25 bp, Homo sapien
cttcccttggtctgaagcagcagca

SEQ ID NO: 5221048 - DNA, 25 bp, Homo sapien
catcatccttcccttggtctgaagc

SEQ ID NO: 5221049 - DNA, 25 bp, Homo sapien
ttttaggagagaaagtctccaggtc

SEQ ID NO: 5221050 - DNA, 25 bp, Homo sapien
gactatttttaggagagaaagtctc

SEQ ID NO: 5221051 - DNA, 25 bp, Homo sapien
tccaaatagagagatcagaggcttc

SEQ ID NO: 5221052 - DNA, 25 bp, Homo sapien
tctctgtaaggacgaacaacgccag

SEQ ID NO: 5221053 - DNA, 25 bp, Homo sapien
taaatgcgcccatcagcaatctgtg

SEQ ID NO: 5221054 - DNA, 25 bp, Homo sapien
tttcattcaattggctcaagggcac

SEQ ID NO: 5221055 - DNA, 25 bp, Homo sapien
tgtttgggtcaacggtgaggtttca

SEQ ID NO: 5221056 - DNA, 25 bp, Homo sapien
tcaaggtggtcagatctggatctca

SEQ ID NO: 5221057 - DNA, 25 bp, Homo sapien
gattggctctaggttcagtgtttgc

SEQ ID NO: 5221058 - DNA, 25 bp, Homo sapien
gaggtttcataaaggttcatgtgaa

SEQ ID NO: 5221059 - DNA, 25 bp, Homo sapien
cagatgaaagcaaacccgtttcttt

SEQ ID NO: 5221060 - DNA, 25 bp, Homo sapien
tgaaagcaaacccgtttctttatca

SEQ ID NO: 5221061 - DNA, 25 bp, Homo sapien
gggctgcttctaaaggaattgggac

SEQ ID NO: 5221062 - DNA, 25 bp, Homo sapien
gagagtttaagacccctcgctctgg

SEQ ID NO: 5221063 - DNA, 25 bp, Homo sapien
aattgggactactgcgacttggaca

SEQ ID NO: 5221064 - DNA, 25 bp, Homo sapien
taatgtgacatggttgagcccctct

SEQ ID NO: 5221065 - DNA, 25 bp, Homo sapien
taggtctgcgacttctcattagagg

SEQ ID NO: 5221066 - DNA, 25 bp, Homo sapien
tctcattagagggtggtaataccag

SEQ ID NO: 5221067 - DNA, 25 bp, Homo sapien
ggtaataccagaatatccacctttg

SEQ ID NO: 5221068 - DNA, 25 bp, Homo sapien
tttgacatgtcttcccctcgctcag

SEQ ID NO: 5221069 - DNA, 25 bp, Homo sapien
ctccgggaacctgcgggcaagctga

SEQ ID NO: 5221070 - DNA, 25 bp, Homo sapien
agaggctccgggaacctgcgggcaa

SEQ ID NO: 5221071 - DNA, 25 bp, Homo sapien
ttctgccggagaacaggctgccaag

SEQ ID NO: 5221072 - DNA, 25 bp, Homo sapien
aacttcattctgccggagaacaggc

SEQ ID NO: 5221073 - DNA, 25 bp, Homo sapien
tgattgctgaggcttgtgcagccat

SEQ ID NO: 5221074 - DNA, 25 bp, Homo sapien
atgattgctgaggcttgtgcagcca

SEQ ID NO: 5221075 - DNA, 25 bp, Homo sapien
ttctgtttgaacatatcagcgcttt

SEQ ID NO: 5221076 - DNA, 25 bp, Homo sapien
ttcaggaacggcgtcatgtcgatgt

SEQ ID NO: 5221077 - DNA, 25 bp, Homo sapien
catatcagcgctttatttatacaac

SEQ ID NO: 5221078 - DNA, 25 bp, Homo sapien
cgatgtgcagcttgcgcgtgtaaaa

SEQ ID NO: 5221079 - DNA, 25 bp, Homo sapien
tccactttgttatcaaagctgcatc

SEQ ID NO: 5221080 - DNA, 25 bp, Homo sapien
cctttccactttgttatcaaagctg

SEQ ID NO: 5221081 - DNA, 25 bp, Homo sapien
tcacctttccactttgttatcaaag

SEQ ID NO: 5221082 - DNA, 25 bp, Homo sapien
acagtcacctttccactttgttatc

SEQ ID NO: 5221083 - DNA, 25 bp, Homo sapien
gcttcatctcggtgctagagctgga

SEQ ID NO: 5221084 - DNA, 25 bp, Homo sapien
tcatctcggtgctagagctggaatc

SEQ ID NO: 5221085 - DNA, 25 bp, Homo sapien
ctgctcaacccacagcttcatctcg

SEQ ID NO: 5221086 - DNA, 25 bp, Homo sapien
cggtgctagagctggaatctggcat

SEQ ID NO: 5221087 - DNA, 25 bp, Homo sapien
tgatagtccagtgcatttccacttt

SEQ ID NO: 5221088 - DNA, 25 bp, Homo sapien
tcttcctgatagtccagtgcatttc

SEQ ID NO: 5221089 - DNA, 25 bp, Homo sapien
tgcttcttcctgatagtccagtgca

SEQ ID NO: 5221090 - DNA, 25 bp, Homo sapien
tcctgatagtccagtgcatttccac

SEQ ID NO: 5221091 - DNA, 25 bp, Homo sapien
ttctgggtctatggtgaaggtgcag

SEQ ID NO: 5221092 - DNA, 25 bp, Homo sapien
tagttacctgttgcctgttggctgc

SEQ ID NO: 5221093 - DNA, 25 bp, Homo sapien
cttccccatcagcattagttacctg

SEQ ID NO: 5221094 - DNA, 25 bp, Homo sapien
tggtgaaggtgcaggttctggctgg

SEQ ID NO: 5221095 - DNA, 25 bp, Homo sapien
ccggagcggcgctattgaagccata

SEQ ID NO: 5221096 - DNA, 25 bp, Homo sapien
ttgtaaggccgggacgacctcgcgc

SEQ ID NO: 5221097 - DNA, 25 bp, Homo sapien
aggcgctaggcagaagcctctccga

SEQ ID NO: 5221098 - DNA, 25 bp, Homo sapien
acctcgcgcagcagagaggcgctag

SEQ ID NO: 5221099 - DNA, 25 bp, Homo sapien
tgtagtcagcgaaaagccgtaccgc

SEQ ID NO: 5221100 - DNA, 25 bp, Homo sapien
ctgaatgtagtcagcgaaaagccgt

SEQ ID NO: 5221101 - DNA, 25 bp, Homo sapien
agtcagcgaaaagccgtaccgcgct

SEQ ID NO: 5221102 - DNA, 25 bp, Homo sapien
aatgtagtcagcgaaaagccgtacc

SEQ ID NO: 5221103 - DNA, 25 bp, Homo sapien
tattcaatccggacaagtttatcag

SEQ ID NO: 5221104 - DNA, 25 bp, Homo sapien
aatccggacaagtttatcagacggg

SEQ ID NO: 5221105 - DNA, 25 bp, Homo sapien
aagcatattcaatccggacaagttt

SEQ ID NO: 5221106 - DNA, 25 bp, Homo sapien
tcaatccggacaagtttatcagacg

SEQ ID NO: 5221107 - DNA, 25 bp, Homo sapien
gccgctttaattcccactgacaggg

SEQ ID NO: 5221108 - DNA, 25 bp, Homo sapien
atttgccgctttaattcccactgac

SEQ ID NO: 5221109 - DNA, 25 bp, Homo sapien
ttgccgctttaattcccactgacag

SEQ ID NO: 5221110 - DNA, 25 bp, Homo sapien
gctttaattcccactgacagggctc

SEQ ID NO: 5221111 - DNA, 25 bp, Homo sapien
actttgttatctgggcccacgccac

SEQ ID NO: 5221112 - DNA, 25 bp, Homo sapien
ctagtttcgagctgtgtgcacaagc

SEQ ID NO: 5221113 - DNA, 25 bp, Homo sapien
tcgagctgtgtgcacaagcactttg

SEQ ID NO: 5221114 - DNA, 25 bp, Homo sapien
tgcacaagcactttgttatctgggc

SEQ ID NO: 5221115 - DNA, 25 bp, Homo sapien
tgtgggaatgggcacttggtacaca

SEQ ID NO: 5221116 - DNA, 25 bp, Homo sapien
ttgcattacagaagctactctccgc

SEQ ID NO: 5221117 - DNA, 25 bp, Homo sapien
tcaagggaagtttccccattcacat

SEQ ID NO: 5221118 - DNA, 25 bp, Homo sapien
agaagctactctccgcactagctga

SEQ ID NO: 5221119 - DNA, 25 bp, Homo sapien
ttctcaagggaagtttccccattca

SEQ ID NO: 5221120 - DNA, 25 bp, Homo sapien
gtttaagtagatagattatctgaaa

SEQ ID NO: 5221121 - DNA, 25 bp, Homo sapien
atgtttaagtagatagattatctga

SEQ ID NO: 5221122 - DNA, 25 bp, Homo sapien
taagtagatagattatctgaaattc

SEQ ID NO: 5221123 - DNA, 25 bp, Homo sapien
gtagatagattatctgaaattctgg

SEQ ID NO: 5221124 - DNA, 25 bp, Homo sapien
tggatgtgctcagtccgggaagccc

SEQ ID NO: 5221125 - DNA, 25 bp, Homo sapien
cacaatatctgcttctggggtctgg

SEQ ID NO: 5221126 - DNA, 25 bp, Homo sapien
tttttgcacaatatctgcttctggg

SEQ ID NO: 5221127 - DNA, 25 bp, Homo sapien
tctggatgtgctcagtccgggaagc

SEQ ID NO: 5221128 - DNA, 25 bp, Homo sapien
tcccagaagtcctctgtgtaggtgg

SEQ ID NO: 5221129 - DNA, 25 bp, Homo sapien
tgtctcctggctaaacagtcttggt

SEQ ID NO: 5221130 - DNA, 25 bp, Homo sapien
tgtatacacagcactcaacctctcg

SEQ ID NO: 5221131 - DNA, 25 bp, Homo sapien
ggtggtgtacatcataatctctgcc

SEQ ID NO: 5221132 - DNA, 25 bp, Homo sapien
tggcctcgttaatcaaatccctctc

SEQ ID NO: 5221133 - DNA, 25 bp, Homo sapien
cttggcctcgttaatcaaatccctc

SEQ ID NO: 5221134 - DNA, 25 bp, Homo sapien
ttctctctcgcttttgggtcctttg

SEQ ID NO: 5221135 - DNA, 25 bp, Homo sapien
tgcttgcccgtagacctttccttct

SEQ ID NO: 5221136 - DNA, 25 bp, Homo sapien
cttccttcgcttcacctttggtagg

SEQ ID NO: 5221137 - DNA, 25 bp, Homo sapien
ggcttgaggttgcagctttgtaacc

SEQ ID NO: 5221138 - DNA, 25 bp, Homo sapien
tggtaggggcaccacaagtatttcc

SEQ ID NO: 5221139 - DNA, 25 bp, Homo sapien
caaagttcagccttccgtactctaa

SEQ ID NO: 5221140 - DNA, 25 bp, Homo sapien
gccaagggtcctctacaaaggagtc

SEQ ID NO: 5221141 - DNA, 25 bp, Homo sapien
ccagtgacagttgcaatctgagagg

SEQ ID NO: 5221142 - DNA, 25 bp, Homo sapien
gagtctgaggcaaaggaacctctat

SEQ ID NO: 5221143 - DNA, 25 bp, Homo sapien
tctgagagggtgatgatcttccatc

SEQ ID NO: 5221144 - DNA, 25 bp, Homo sapien
caataagaccattaggtggtcgagc

SEQ ID NO: 5221145 - DNA, 25 bp, Homo sapien
gcaatataattaggggcagctttcc

SEQ ID NO: 5221146 - DNA, 25 bp, Homo sapien
gataccaaagtagaacaataagacc

SEQ ID NO: 5221147 - DNA, 25 bp, Homo sapien
tcgagctgttttagtaagtgcaata

SEQ ID NO: 5221148 - DNA, 25 bp, Homo sapien
gatctcttctgtacgtctctgctgc

SEQ ID NO: 5221149 - DNA, 25 bp, Homo sapien
gcagtttcctccgaaactcctcttg

SEQ ID NO: 5221150 - DNA, 25 bp, Homo sapien
ctctgtagttctcgcagtttcctcc

SEQ ID NO: 5221151 - DNA, 25 bp, Homo sapien
tcctccgaaactcctcttgctgttg

SEQ ID NO: 5221152 - DNA, 25 bp, Homo sapien
ttgctgttgccgggctctctcctgg

SEQ ID NO: 5221153 - DNA, 25 bp, Homo sapien
cagccatttccatcaggtgtttttg

SEQ ID NO: 5221154 - DNA, 25 bp, Homo sapien
ggtactccagtcgttcctcttcagc

SEQ ID NO: 5221155 - DNA, 25 bp, Homo sapien
gtttccgccgctggtactccagtcg

SEQ ID NO: 5221156 - DNA, 25 bp, Homo sapien
ttctgcttcctgtttccgccgctgg

SEQ ID NO: 5221157 - DNA, 25 bp, Homo sapien
ggcaactgttgcccaaatatccagt

SEQ ID NO: 5221158 - DNA, 25 bp, Homo sapien
gcaactgttgcccaaatatccagta

SEQ ID NO: 5221159 - DNA, 25 bp, Homo sapien
caactgttgcccaaatatccagtac

SEQ ID NO: 5221160 - DNA, 25 bp, Homo sapien
caagacaggcagtgggttcgaaatc

SEQ ID NO: 5221161 - DNA, 25 bp, Homo sapien
ggcattgtccctaagtcactgtttg

SEQ ID NO: 5221162 - DNA, 25 bp, Homo sapien
cactggacagtgaagcccttgaacc

SEQ ID NO: 5221163 - DNA, 25 bp, Homo sapien
ttcttgtctaaaggcagtgcaaagc

SEQ ID NO: 5221164 - DNA, 25 bp, Homo sapien
caatagtttgcctgtggtctcaata

SEQ ID NO: 5221165 - DNA, 25 bp, Homo sapien
gatgaccgtcagttttcttctcgtg

SEQ ID NO: 5221166 - DNA, 25 bp, Homo sapien
tcttctcgtgtggaaagttggaact

SEQ ID NO: 5221167 - DNA, 25 bp, Homo sapien
ggttttctgctttcggctacttgga

SEQ ID NO: 5221168 - DNA, 25 bp, Homo sapien
gtaaacccatggtctggaaatgttc

SEQ ID NO: 5221169 - DNA, 25 bp, Homo sapien
taaacccatggtctggaaatgttct

SEQ ID NO: 5221170 - DNA, 25 bp, Homo sapien
gagtaaacccatggtctggaaatgt

SEQ ID NO: 5221171 - DNA, 25 bp, Homo sapien
aagagtaaacccatggtctggaaat

SEQ ID NO: 5221172 - DNA, 25 bp, Homo sapien
aaataagtatcaaatctaagcacat

SEQ ID NO: 5221173 - DNA, 25 bp, Homo sapien
cagttaagtatagagtagggccaaa

SEQ ID NO: 5221174 - DNA, 25 bp, Homo sapien
gcaatacagactacaaataggttgg

SEQ ID NO: 5221175 - DNA, 25 bp, Homo sapien
gttcagatgctctagatttaaataa

SEQ ID NO: 5221176 - DNA, 25 bp, Homo sapien
tatctggtgcttgactgcaacatcc

SEQ ID NO: 5221177 - DNA, 25 bp, Homo sapien
tatcagatttctgaagggaccttga

SEQ ID NO: 5221178 - DNA, 25 bp, Homo sapien
gaataacatttagggaagtcactct

SEQ ID NO: 5221179 - DNA, 25 bp, Homo sapien
gcttatctggttagcagtgctgata

SEQ ID NO: 5221180 - DNA, 25 bp, Homo sapien
gattagtttgttcctattagagggc

SEQ ID NO: 5221181 - DNA, 25 bp, Homo sapien
acatctatgcatacatacagtccag

SEQ ID NO: 5221182 - DNA, 25 bp, Homo sapien
tacagtccagtttcatgttatctca

SEQ ID NO: 5221183 - DNA, 25 bp, Homo sapien
tactcgggactgtgccactacgtct

SEQ ID NO: 5221184 - DNA, 25 bp, Homo sapien
tcttgtcagaagatcccagaaaagt

SEQ ID NO: 5221185 - DNA, 25 bp, Homo sapien
taagatcgaccaatgcaagtgttca

SEQ ID NO: 5221186 - DNA, 25 bp, Homo sapien
taaatggacattgtctgtaccagct

SEQ ID NO: 5221187 - DNA, 25 bp, Homo sapien
tccaattggccctgatgttctagca

SEQ ID NO: 5221188 - DNA, 25 bp, Homo sapien
gtctgaccaggtaccgggctgggag

SEQ ID NO: 5221189 - DNA, 25 bp, Homo sapien
tgggagccatccaacggcggtggcc

SEQ ID NO: 5221190 - DNA, 25 bp, Homo sapien
atgtctgaccaggtaccgggctggg

SEQ ID NO: 5221191 - DNA, 25 bp, Homo sapien
ggagccatccaacggcggtggccag

SEQ ID NO: 5221192 - DNA, 25 bp, Homo sapien
gctgctgtgcggagacccccgggtg

SEQ ID NO: 5221193 - DNA, 25 bp, Homo sapien
ccgctgctgtgcggagacccccggg

SEQ ID NO: 5221194 - DNA, 25 bp, Homo sapien
cgctgctgtgcggagacccccgggt

SEQ ID NO: 5221195 - DNA, 25 bp, Homo sapien
agtactgatgcgcaggacctggtcc

SEQ ID NO: 5221196 - DNA, 25 bp, Homo sapien
gaagttactgcagccgcggtgttgt

SEQ ID NO: 5221197 - DNA, 25 bp, Homo sapien
gggatggccctagtactgatgcgca

SEQ ID NO: 5221198 - DNA, 25 bp, Homo sapien
cggaagtgacgcgaggcgtagcgga

SEQ ID NO: 5221199 - DNA, 25 bp, Homo sapien
gcgaggagggcgcaaagggctgctg

SEQ ID NO: 5221200 - DNA, 25 bp, Homo sapien
caagcaggaattggagcatgatgtt

SEQ ID NO: 5221201 - DNA, 25 bp, Homo sapien
gcccaatgtaaatccaagcaggaat

SEQ ID NO: 5221202 - DNA, 25 bp, Homo sapien
tacattccaaccacgttgcccaatg

SEQ ID NO: 5221203 - DNA, 25 bp, Homo sapien
gcaccacaattcgtcttagaacctc

SEQ ID NO: 5221204 - DNA, 25 bp, Homo sapien
tctagcaccacaattcgtcttagaa

SEQ ID NO: 5221205 - DNA, 25 bp, Homo sapien
actaatctagcaccacaattcgtct

SEQ ID NO: 5221206 - DNA, 25 bp, Homo sapien
taatctagcaccacaattcgtctta

SEQ ID NO: 5221207 - DNA, 25 bp, Homo sapien
agcaggccatgtgtctactgagtca

SEQ ID NO: 5221208 - DNA, 25 bp, Homo sapien
gcaggccatgtgtctactgagtcat

SEQ ID NO: 5221209 - DNA, 25 bp, Homo sapien
ggcgggcaaagcacaaatgcgctcg

SEQ ID NO: 5221210 - DNA, 25 bp, Homo sapien
cagttcaaaaacaccgactacgcgg

SEQ ID NO: 5221211 - DNA, 25 bp, Homo sapien
cacggcctgccagaagctgtagagt

SEQ ID NO: 5221212 - DNA, 25 bp, Homo sapien
cacgctgtactggaactaggacgca

SEQ ID NO: 5221213 - DNA, 25 bp, Homo sapien
tggcgtaacccacagacgtttcaaa

SEQ ID NO: 5221214 - DNA, 25 bp, Homo sapien
taaagatggcgtaacccacagacgt

SEQ ID NO: 5221215 - DNA, 25 bp, Homo sapien
taacccacagacgtttcaaacagca

SEQ ID NO: 5221216 - DNA, 25 bp, Homo sapien
cagacgtttcaaacagcaccaacat

SEQ ID NO: 5221217 - DNA, 25 bp, Homo sapien
gtttcacttccacagacaatatgag

SEQ ID NO: 5221218 - DNA, 25 bp, Homo sapien
gcacccaacctctatgttttgtgta

SEQ ID NO: 5221219 - DNA, 25 bp, Homo sapien
aattatttgatgctaacttttaagt

SEQ ID NO: 5221220 - DNA, 25 bp, Homo sapien
attgattgcttgagactttgtgtgg

SEQ ID NO: 5221221 - DNA, 25 bp, Homo sapien
attgtaagacatcccaattttaggg

SEQ ID NO: 5221222 - DNA, 25 bp, Homo sapien
gtgccttttaggattgagcccatcc

SEQ ID NO: 5221223 - DNA, 25 bp, Homo sapien
tacactcccaattgacctgtcatca

SEQ ID NO: 5221224 - DNA, 25 bp, Homo sapien
tcctatctaatacttgggcagctga

SEQ ID NO: 5221225 - DNA, 25 bp, Homo sapien
atttaaatggtacaggtgaggcata

SEQ ID NO: 5221226 - DNA, 25 bp, Homo sapien
taagataatgaactagttttcttac

SEQ ID NO: 5221227 - DNA, 25 bp, Homo sapien
aggtgaggcatatacagctgcattc

SEQ ID NO: 5221228 - DNA, 25 bp, Homo sapien
taatgaactagttttcttaccctgc

SEQ ID NO: 5221229 - DNA, 25 bp, Homo sapien
ttctttccataaactatcaacctct

SEQ ID NO: 5221230 - DNA, 25 bp, Homo sapien
aattctttccataaactatcaacct

SEQ ID NO: 5221231 - DNA, 25 bp, Homo sapien
aactatcaacctcttgaagtttctt

SEQ ID NO: 5221232 - DNA, 25 bp, Homo sapien
actatcaacctcttgaagtttcttc

SEQ ID NO: 5221233 - DNA, 25 bp, Homo sapien
tatccgaggtttaaagtatccacag

SEQ ID NO: 5221234 - DNA, 25 bp, Homo sapien
caatcacatttggtactatccgagg

SEQ ID NO: 5221235 - DNA, 25 bp, Homo sapien
tacaacccctgtgtgcggtaagtgc

SEQ ID NO: 5221236 - DNA, 25 bp, Homo sapien
gacaaatgtgttcctactgacagca

SEQ ID NO: 5221237 - DNA, 25 bp, Homo sapien
caaatacgaagatttaggccaggtg

SEQ ID NO: 5221238 - DNA, 25 bp, Homo sapien
cttatctggtaagggaacatactag

SEQ ID NO: 5221239 - DNA, 25 bp, Homo sapien
tacatacaaatacgaagatttaggc

SEQ ID NO: 5221240 - DNA, 25 bp, Homo sapien
gaacatactagtgtggtcccttaaa

SEQ ID NO: 5221241 - DNA, 25 bp, Homo sapien
acccgccaccacacctggctaattt

SEQ ID NO: 5221242 - DNA, 25 bp, Homo sapien
cacccgccaccacacctggctaatt

SEQ ID NO: 5221243 - DNA, 25 bp, Homo sapien
cattctcctgcctcatgccattctc

SEQ ID NO: 5221244 - DNA, 25 bp, Homo sapien
attctcctgcctcatgccattctcc

SEQ ID NO: 5221245 - DNA, 25 bp, Homo sapien
cttctgctgtatcctgaaatttctc

SEQ ID NO: 5221246 - DNA, 25 bp, Homo sapien
ctgctaatgcttctgctgtatcctg

SEQ ID NO: 5221247 - DNA, 25 bp, Homo sapien
taatgcttctgctgtatcctgaaat

SEQ ID NO: 5221248 - DNA, 25 bp, Homo sapien
tgcttctgctgtatcctgaaatttc

SEQ ID NO: 5221249 - DNA, 25 bp, Homo sapien
aaaagctaactcaatgttgtctcag

SEQ ID NO: 5221250 - DNA, 25 bp, Homo sapien
tatggtgaaaaaagctaactcaatg

SEQ ID NO: 5221251 - DNA, 25 bp, Homo sapien
ggtagtgacgaatgagtcagatcac

SEQ ID NO: 5221252 - DNA, 25 bp, Homo sapien
caatgttgtctcagtggtagtgacg

SEQ ID NO: 5221253 - DNA, 25 bp, Homo sapien
tactgaattgtgcttcagcattatg

SEQ ID NO: 5221254 - DNA, 25 bp, Homo sapien
gcattatgttgctggtttccacagg

SEQ ID NO: 5221255 - DNA, 25 bp, Homo sapien
tttccacagggagatcaacttaacc

SEQ ID NO: 5221256 - DNA, 25 bp, Homo sapien
cagggagatcaacttaaccacttct

SEQ ID NO: 5221257 - DNA, 25 bp, Homo sapien
agaagctaggtaaatgaatctggaa

SEQ ID NO: 5221258 - DNA, 25 bp, Homo sapien
tggttctgtcatgtcaaaactgcct

SEQ ID NO: 5221259 - DNA, 25 bp, Homo sapien
gctgtatactttgctagcgtctagg

SEQ ID NO: 5221260 - DNA, 25 bp, Homo sapien
ggtctcatcaaactctaaggctatg

SEQ ID NO: 5221261 - DNA, 25 bp, Homo sapien
tgacagtacagaacagtctctgccc

SEQ ID NO: 5221262 - DNA, 25 bp, Homo sapien
atcagctactgccagcggttcatgg

SEQ ID NO: 5221263 - DNA, 25 bp, Homo sapien
cagctactgccagcggttcatgggc

SEQ ID NO: 5221264 - DNA, 25 bp, Homo sapien
ctttatgacccctcctagtttagca

SEQ ID NO: 5221265 - DNA, 25 bp, Homo sapien
cctcctagtttagcatcagctactg

SEQ ID NO: 5221266 - DNA, 25 bp, Homo sapien
acttatttgctcagttcagctgatg

SEQ ID NO: 5221267 - DNA, 25 bp, Homo sapien
tcttctagaacaaataggtattact

SEQ ID NO: 5221268 - DNA, 25 bp, Homo sapien
aaatgtggctagacaaaaatatggc

SEQ ID NO: 5221269 - DNA, 25 bp, Homo sapien
cattatatatgggtagcagatttgt

SEQ ID NO: 5221270 - DNA, 25 bp, Homo sapien
catttcacgtggttctaccccaggg

SEQ ID NO: 5221271 - DNA, 25 bp, Homo sapien
tccatccatttgtgaacgaattcct

SEQ ID NO: 5221272 - DNA, 25 bp, Homo sapien
taagttcattaacaacaggactatg

SEQ ID NO: 5221273 - DNA, 25 bp, Homo sapien
gactatggatacaactgagattcag

SEQ ID NO: 5221274 - DNA, 25 bp, Homo sapien
attcttagaacagatctatgttaag

SEQ ID NO: 5221275 - DNA, 25 bp, Homo sapien
ttagaacagatctatgttaagcgct

SEQ ID NO: 5221276 - DNA, 25 bp, Homo sapien
agaacagatctatgttaagcgctta

SEQ ID NO: 5221277 - DNA, 25 bp, Homo sapien
tgttaagcgcttatcaaataaaagt

SEQ ID NO: 5221278 - DNA, 25 bp, Homo sapien
taggaactttgcaggactcttaaca

SEQ ID NO: 5221279 - DNA, 25 bp, Homo sapien
ggacatctgattgcccttgataggg

SEQ ID NO: 5221280 - DNA, 25 bp, Homo sapien
cattataggacctttagcagtatcc

SEQ ID NO: 5221281 - DNA, 25 bp, Homo sapien
taattccttgttgtacaggctgccc

SEQ ID NO: 5221282 - DNA, 25 bp, Homo sapien
taaattagcaagatagcatctagga

SEQ ID NO: 5221283 - DNA, 25 bp, Homo sapien
gatagcatctaggaaaagcatttaa

SEQ ID NO: 5221284 - DNA, 25 bp, Homo sapien
tagcaagatagcatctaggaaaagc

SEQ ID NO: 5221285 - DNA, 25 bp, Homo sapien
aaaataaattagcaagatagcatct

SEQ ID NO: 5221286 - DNA, 25 bp, Homo sapien
aaattgcctgaacaatcattgtgtc

SEQ ID NO: 5221287 - DNA, 25 bp, Homo sapien
ttatcagcgctaaacttcaatctat

SEQ ID NO: 5221288 - DNA, 25 bp, Homo sapien
aaacttcaatctatatcgagacagg

SEQ ID NO: 5221289 - DNA, 25 bp, Homo sapien
cattgtgtctactttatcagcgcta

SEQ ID NO: 5221290 - DNA, 25 bp, Homo sapien
gtatgaaaacgcatgaaggacagag

SEQ ID NO: 5221291 - DNA, 25 bp, Homo sapien
aattctgtgattcatataatctcca

SEQ ID NO: 5221292 - DNA, 25 bp, Homo sapien
caaatcggactttgcatgtactata

SEQ ID NO: 5221293 - DNA, 25 bp, Homo sapien
taaaaaccatttaatgacacagcag

SEQ ID NO: 5221294 - DNA, 25 bp, Homo sapien
cacttgcagtatgttaaattatctg

SEQ ID NO: 5221295 - DNA, 25 bp, Homo sapien
gccataccattctctacatcgcata

SEQ ID NO: 5221296 - DNA, 25 bp, Homo sapien
catcgcataatgtagttgtttagtt

SEQ ID NO: 5221297 - DNA, 25 bp, Homo sapien
aattcagggaaatgccagccatacc

SEQ ID NO: 5221298 - DNA, 25 bp, Homo sapien
gaagaagtttgacctagtataacag

SEQ ID NO: 5221299 - DNA, 25 bp, Homo sapien
caagttcctctgtacgttaacgaca

SEQ ID NO: 5221300 - DNA, 25 bp, Homo sapien
cagacaattttatactgaagctggg

SEQ ID NO: 5221301 - DNA, 25 bp, Homo sapien
tgtatattaacagtacagacggcaa

SEQ ID NO: 5221302 - DNA, 25 bp, Homo sapien
aagcttggcagaggcatagttcttc

SEQ ID NO: 5221303 - DNA, 25 bp, Homo sapien
gcagaggcatagttcttcctatcgc

SEQ ID NO: 5221304 - DNA, 25 bp, Homo sapien
aacctctgttcccattgatatctct

SEQ ID NO: 5221305 - DNA, 25 bp, Homo sapien
tgaaacctctgttcccattgatatc

SEQ ID NO: 5221306 - DNA, 25 bp, Homo sapien
aatatcatatgagtaaaaacagtaa

SEQ ID NO: 5221307 - DNA, 25 bp, Homo sapien
acaaatatcatatgagtaaaaacag

SEQ ID NO: 5221308 - DNA, 25 bp, Homo sapien
tagtataaggaataaagttaagtca

SEQ ID NO: 5221309 - DNA, 25 bp, Homo sapien
taaagttaagtcacaaatatcatat

SEQ ID NO: 5221310 - DNA, 25 bp, Homo sapien
catagagctgggttcgatattcaga

SEQ ID NO: 5221311 - DNA, 25 bp, Homo sapien
ataagccgtgctccaactaattccc

SEQ ID NO: 5221312 - DNA, 25 bp, Homo sapien
cattgggtgcaatggccatcattcg

SEQ ID NO: 5221313 - DNA, 25 bp, Homo sapien
ccaaccatgactgtaacattgggtg

SEQ ID NO: 5221314 - DNA, 25 bp, Homo sapien
tcatcattgaacacttggcccttag

SEQ ID NO: 5221315 - DNA, 25 bp, Homo sapien
caatggaccacaagtgtctcagaag

SEQ ID NO: 5221316 - DNA, 25 bp, Homo sapien
tggcccttagtgatctcccacatat

SEQ ID NO: 5221317 - DNA, 25 bp, Homo sapien
gtctcagaagaggtagtgactaaag

SEQ ID NO: 5221318 - DNA, 25 bp, Homo sapien
gggtatcccgtctagatttgagggc

SEQ ID NO: 5221319 - DNA, 25 bp, Homo sapien
tgaagcatgataaatgagaccatac

SEQ ID NO: 5221320 - DNA, 25 bp, Homo sapien
tgtctggcccacgagtgaagcatga

SEQ ID NO: 5221321 - DNA, 25 bp, Homo sapien
agctccaagaatctgaacggtagaa

SEQ ID NO: 5221322 - DNA, 25 bp, Homo sapien
taaccttatccttcagtgtacacaa

SEQ ID NO: 5221323 - DNA, 25 bp, Homo sapien
tatttaaataactcaccattcccta

SEQ ID NO: 5221324 - DNA, 25 bp, Homo sapien
tggctttaatccaaccaataacagt

SEQ ID NO: 5221325 - DNA, 25 bp, Homo sapien
atactaacacaatggaagaaactgg

SEQ ID NO: 5221326 - DNA, 25 bp, Homo sapien
tcttaaatatgtgcgggttctggcc

SEQ ID NO: 5221327 - DNA, 25 bp, Homo sapien
cattagttctgtgctatgaggtcac

SEQ ID NO: 5221328 - DNA, 25 bp, Homo sapien
tgtcaaatattagctcaaactaggt

SEQ ID NO: 5221329 - DNA, 25 bp, Homo sapien
taatggccatatatcaccaccaaca

SEQ ID NO: 5221330 - DNA, 25 bp, Homo sapien
atcataacggatagccaaaacggtt

SEQ ID NO: 5221331 - DNA, 25 bp, Homo sapien
gccaaaacggttttggctgccagca

SEQ ID NO: 5221332 - DNA, 25 bp, Homo sapien
gaatcctcaccaaaagcatcataac

SEQ ID NO: 5221333 - DNA, 25 bp, Homo sapien
caaaagcatcataacggatagccaa

SEQ ID NO: 5221334 - DNA, 25 bp, Homo sapien
taatgcttttcctgttccacttatt

SEQ ID NO: 5221335 - DNA, 25 bp, Homo sapien
tttgctaatgcttttcctgttccac

SEQ ID NO: 5221336 - DNA, 25 bp, Homo sapien
tgctaatgcttttcctgttccactt

SEQ ID NO: 5221337 - DNA, 25 bp, Homo sapien
tttttgctaatgcttttcctgttcc

SEQ ID NO: 5221338 - DNA, 25 bp, Homo sapien
gcacaacatggttaactacagctaa

SEQ ID NO: 5221339 - DNA, 25 bp, Homo sapien
tgaaaaaactatgggcacatcaagg

SEQ ID NO: 5221340 - DNA, 25 bp, Homo sapien
taagtagattttaaggtgtcctcac

SEQ ID NO: 5221341 - DNA, 25 bp, Homo sapien
tgcggaaaactaaatggcatggaaa

SEQ ID NO: 5221342 - DNA, 25 bp, Homo sapien
gattccatagaacccaacatttgct

SEQ ID NO: 5221343 - DNA, 25 bp, Homo sapien
gaaaacgtcttcacacctaactaga

SEQ ID NO: 5221344 - DNA, 25 bp, Homo sapien
taagcagacctgtaagctgaatgac

SEQ ID NO: 5221345 - DNA, 25 bp, Homo sapien
caagtaggtcaatcacattcaagag

SEQ ID NO: 5221346 - DNA, 25 bp, Homo sapien
aaagaaaatgccattagataatact

SEQ ID NO: 5221347 - DNA, 25 bp, Homo sapien
gaaataattctcaagagataaagaa

SEQ ID NO: 5221348 - DNA, 25 bp, Homo sapien
ctggaattgaaataattctcaagag

SEQ ID NO: 5221349 - DNA, 25 bp, Homo sapien
gaaaatgccattagataatacttac

SEQ ID NO: 5221350 - DNA, 25 bp, Homo sapien
caccagaaggatcgtaagtcttcac

SEQ ID NO: 5221351 - DNA, 25 bp, Homo sapien
accagaaggatcgtaagtcttcact

SEQ ID NO: 5221352 - DNA, 25 bp, Homo sapien
gaagtgagtataagttgtgttaaaa

SEQ ID NO: 5221353 - DNA, 25 bp, Homo sapien
taaagaagtgagtataagttgtgtt

SEQ ID NO: 5221354 - DNA, 25 bp, Homo sapien
tacttttaagactcacaaaatccac

SEQ ID NO: 5221355 - DNA, 25 bp, Homo sapien
tggcatgtacttttaagactcacaa

SEQ ID NO: 5221356 - DNA, 25 bp, Homo sapien
agtccgctccgtgtaagagaaacaa

SEQ ID NO: 5221357 - DNA, 25 bp, Homo sapien
ggcaggctaccagtatgtattcctt

SEQ ID NO: 5221358 - DNA, 25 bp, Homo sapien
cttccagtccgctccgtgtaagaga

SEQ ID NO: 5221359 - DNA, 25 bp, Homo sapien
tatgacggcaggctaccagtatgta

SEQ ID NO: 5221360 - DNA, 25 bp, Homo sapien
ggacagagtttggtgcctcaaatgc

SEQ ID NO: 5221361 - DNA, 25 bp, Homo sapien
ttggatacacaattgaggatacaaa

SEQ ID NO: 5221362 - DNA, 25 bp, Homo sapien
gctactagtgggtttagggatctcc

SEQ ID NO: 5221363 - DNA, 25 bp, Homo sapien
aaaagtcaaggttgatggccaaagc

SEQ ID NO: 5221364 - DNA, 25 bp, Homo sapien
gctcagagcaatcttctcacgatca

SEQ ID NO: 5221365 - DNA, 25 bp, Homo sapien
ctgaatagggtaagtgtaaaggcac

SEQ ID NO: 5221366 - DNA, 25 bp, Homo sapien
gcctaccactaactttaacgaatga

SEQ ID NO: 5221367 - DNA, 25 bp, Homo sapien
gaatgatatagatagagctcagagc

SEQ ID NO: 5221368 - DNA, 25 bp, Homo sapien
tgccactttttcttcttcctcttct

SEQ ID NO: 5221369 - DNA, 25 bp, Homo sapien
cttctgccactttttcttcttcctc

SEQ ID NO: 5221370 - DNA, 25 bp, Homo sapien
cactttttcttcttcctcttcttca

SEQ ID NO: 5221371 - DNA, 25 bp, Homo sapien
tctgccactttttcttcttcctctt

SEQ ID NO: 5221372 - DNA, 25 bp, Homo sapien
cttcttcttcacagatgtttcttct

SEQ ID NO: 5221373 - DNA, 25 bp, Homo sapien
agcaattgctgtgctggtacatggt

SEQ ID NO: 5221374 - DNA, 25 bp, Homo sapien
tgctggtacatggttcttcctcaga

SEQ ID NO: 5221375 - DNA, 25 bp, Homo sapien
agaaagtggttcttccttaatgtgt

SEQ ID NO: 5221376 - DNA, 25 bp, Homo sapien
caacaaagccatttcacttttacct

SEQ ID NO: 5221377 - DNA, 25 bp, Homo sapien
gtatgggtgagtaatcacattgaaa

SEQ ID NO: 5221378 - DNA, 25 bp, Homo sapien
aagcttgagcaaatcatactcctcc

SEQ ID NO: 5221379 - DNA, 25 bp, Homo sapien
aagagctgaaattgtatgggtgagt

SEQ ID NO: 5221380 - DNA, 25 bp, Homo sapien
catgatgtgtgtccgggtgatataa

SEQ ID NO: 5221381 - DNA, 25 bp, Homo sapien
tgtgtgtccgggtgatataatcgta

SEQ ID NO: 5221382 - DNA, 25 bp, Homo sapien
ttaagcatgatgtgtgtccgggtga

SEQ ID NO: 5221383 - DNA, 25 bp, Homo sapien
atcttaagcatgatgtgtgtccggg

SEQ ID NO: 5221384 - DNA, 25 bp, Homo sapien
atgcaaatggatgtcttgaccagct

SEQ ID NO: 5221385 - DNA, 25 bp, Homo sapien
gacataggagttggtatgcaaatgg

SEQ ID NO: 5221386 - DNA, 25 bp, Homo sapien
gtcttgaccagctgaaatactaggg

SEQ ID NO: 5221387 - DNA, 25 bp, Homo sapien
atactaggggccctttgtctcaaca

SEQ ID NO: 5221388 - DNA, 25 bp, Homo sapien
ggctccagctagtcgcctgcagacg

SEQ ID NO: 5221389 - DNA, 25 bp, Homo sapien
tgggctccagctagtcgcctgcaga

SEQ ID NO: 5221390 - DNA, 25 bp, Homo sapien
gtgggctccagctagtcgcctgcag

SEQ ID NO: 5221391 - DNA, 25 bp, Homo sapien
ccgtgggctccagctagtcgcctgc

SEQ ID NO: 5221392 - DNA, 25 bp, Homo sapien
ttctagcactatctggacactccct

SEQ ID NO: 5221393 - DNA, 25 bp, Homo sapien
tcacatcagacttggccttgccttt

SEQ ID NO: 5221394 - DNA, 25 bp, Homo sapien
tatcccactttgcttcctgtccatt

SEQ ID NO: 5221395 - DNA, 25 bp, Homo sapien
ttttccccacttagcgactctctta

SEQ ID NO: 5221396 - DNA, 25 bp, Homo sapien
aaaaaatagcctgtgtgatgcatgc

SEQ ID NO: 5221397 - DNA, 25 bp, Homo sapien
acaaaacccatccatagataccgag

SEQ ID NO: 5221398 - DNA, 25 bp, Homo sapien
ctgactataaacatgagttcaggct

SEQ ID NO: 5221399 - DNA, 25 bp, Homo sapien
agagctgactataaacatgagttca

SEQ ID NO: 5221400 - DNA, 25 bp, Homo sapien
catccatagataccgagagctgact

SEQ ID NO: 5221401 - DNA, 25 bp, Homo sapien
gtttccaatctgtgttcaccactcc

SEQ ID NO: 5221402 - DNA, 25 bp, Homo sapien
ctctgtttccaatctgtgttcacca

SEQ ID NO: 5221403 - DNA, 25 bp, Homo sapien
tactacagtataaactcctaggctc

SEQ ID NO: 5221404 - DNA, 25 bp, Homo sapien
tagcatactacagtataaactccta

SEQ ID NO: 5221405 - DNA, 25 bp, Homo sapien
actgtgtttccggtgccaaggctct

SEQ ID NO: 5221406 - DNA, 25 bp, Homo sapien
tgctttccctaccagggactcgtag

SEQ ID NO: 5221407 - DNA, 25 bp, Homo sapien
ttccaggcttaagaccctgggctca

SEQ ID NO: 5221408 - DNA, 25 bp, Homo sapien
gactcgtaggaaggcataggagata

SEQ ID NO: 5221409 - DNA, 25 bp, Homo sapien
cacaatgcaggctataaggtaggca

SEQ ID NO: 5221410 - DNA, 25 bp, Homo sapien
caagcttggtttagttgctatggca

SEQ ID NO: 5221411 - DNA, 25 bp, Homo sapien
gaatttgcaaacctttacagtctgg

SEQ ID NO: 5221412 - DNA, 25 bp, Homo sapien
tacatcataagcagggatcattctt

SEQ ID NO: 5221413 - DNA, 25 bp, Homo sapien
aaacagtcttgatagcttgacaacc

SEQ ID NO: 5221414 - DNA, 25 bp, Homo sapien
atcacgtgttgaacaagtgccagcc

SEQ ID NO: 5221415 - DNA, 25 bp, Homo sapien
gatagcttgacaacctttgtttacc

SEQ ID NO: 5221416 - DNA, 25 bp, Homo sapien
taagattagtatccatgtcagtttc

SEQ ID NO: 5221417 - DNA, 25 bp, Homo sapien
aggtagttctttataagtagtgtga

SEQ ID NO: 5221418 - DNA, 25 bp, Homo sapien
tagactaatacactacataaatgta

SEQ ID NO: 5221419 - DNA, 25 bp, Homo sapien
tgcctggccagtttcaggtagttct

SEQ ID NO: 5221420 - DNA, 25 bp, Homo sapien
cataaatgtaaaatactattgttac

SEQ ID NO: 5221421 - DNA, 25 bp, Homo sapien
tagtacgaatacagaccgtgaaagc

SEQ ID NO: 5221422 - DNA, 25 bp, Homo sapien
gatgttgatttttagtacgaataca

SEQ ID NO: 5221423 - DNA, 25 bp, Homo sapien
gaggacagaaacctcccgtggagca

SEQ ID NO: 5221424 - DNA, 25 bp, Homo sapien
aaaagctcgcttgatgttgattttt

SEQ ID NO: 5221425 - DNA, 25 bp, Homo sapien
catgccctgctgcttaaagttcttt

SEQ ID NO: 5221426 - DNA, 25 bp, Homo sapien
aagtagagataatgggctgggcgca

SEQ ID NO: 5221427 - DNA, 25 bp, Homo sapien
atgccctgctgcttaaagttcttta

SEQ ID NO: 5221428 - DNA, 25 bp, Homo sapien
agagaaagaaaaattaatgaggttg

SEQ ID NO: 5221429 - DNA, 25 bp, Homo sapien
ctagagaaagaaaaattaatgaggt

SEQ ID NO: 5221430 - DNA, 25 bp, Homo sapien
gccaaagctggtctctatatcacaa

SEQ ID NO: 5221431 - DNA, 25 bp, Homo sapien
gaaacggataatcaatggtaaagaa

SEQ ID NO: 5221432 - DNA, 25 bp, Homo sapien
ggtaaagaatccattagagtgccaa

SEQ ID NO: 5221433 - DNA, 25 bp, Homo sapien
aaccacgatgatgaaacggataatc

SEQ ID NO: 5221434 - DNA, 25 bp, Homo sapien
gaggcatcaatcaatcctgcaggaa

SEQ ID NO: 5221435 - DNA, 25 bp, Homo sapien
ccttcagtggagtacatctagggaa

SEQ ID NO: 5221436 - DNA, 25 bp, Homo sapien
aatgctgccttggagtaggaaatcc

SEQ ID NO: 5221437 - DNA, 25 bp, Homo sapien
acctaatgatggcaagagcaacctc

SEQ ID NO: 5221438 - DNA, 25 bp, Homo sapien
gacaaatggctgatgagaggaccta

SEQ ID NO: 5221439 - DNA, 25 bp, Homo sapien
gagaaaacatatccagggtgcggag

SEQ ID NO: 5221440 - DNA, 25 bp, Homo sapien
cttgactggatcaaaaaaggtgcct

SEQ ID NO: 5221441 - DNA, 25 bp, Homo sapien
cgccttcgcagaacaaccgtgagag

SEQ ID NO: 5221442 - DNA, 25 bp, Homo sapien
atggtagccagggcacccgccaggg

SEQ ID NO: 5221443 - DNA, 25 bp, Homo sapien
cagcaggatggtccatggtagccag

SEQ ID NO: 5221444 - DNA, 25 bp, Homo sapien
gcaggatggtccatggtagccaggg

SEQ ID NO: 5221445 - DNA, 25 bp, Homo sapien
catggtagccagggcacccgccagg

SEQ ID NO: 5221446 - DNA, 25 bp, Homo sapien
ttcataaaccaagccagcacatctt

SEQ ID NO: 5221447 - DNA, 25 bp, Homo sapien
agaaaatgttctaagaattaggcgg

SEQ ID NO: 5221448 - DNA, 25 bp, Homo sapien
ttaaataatagctgtgttgtattct

SEQ ID NO: 5221449 - DNA, 25 bp, Homo sapien
taagaattcattcataaaccaagcc

SEQ ID NO: 5221450 - DNA, 25 bp, Homo sapien
attaaggtagtagcacagtggaggt

SEQ ID NO: 5221451 - DNA, 25 bp, Homo sapien
gatagtggcttttagattaaggtag

SEQ ID NO: 5221452 - DNA, 25 bp, Homo sapien
tcactcaggctactatgttgaaagg

SEQ ID NO: 5221453 - DNA, 25 bp, Homo sapien
ggtggtaagaagcaataagattcta

SEQ ID NO: 5221454 - DNA, 25 bp, Homo sapien
gacaggctggcacatgaggtcataa

SEQ ID NO: 5221455 - DNA, 25 bp, Homo sapien
cacagtaaatatgtaaggcccttag

SEQ ID NO: 5221456 - DNA, 25 bp, Homo sapien
gggcctgaccttgattcccaagtgt

SEQ ID NO: 5221457 - DNA, 25 bp, Homo sapien
caatgaaagttgagcaagacaggct

SEQ ID NO: 5221458 - DNA, 25 bp, Homo sapien
gtttttcttcacactagactggccc

SEQ ID NO: 5221459 - DNA, 25 bp, Homo sapien
tggacaattattctggcatgatcaa

SEQ ID NO: 5221460 - DNA, 25 bp, Homo sapien
tctaagacatagttcaatctggaca

SEQ ID NO: 5221461 - DNA, 25 bp, Homo sapien
caatacagtcgtttgtgaagtaact

SEQ ID NO: 5221462 - DNA, 25 bp, Homo sapien
tgcacccggcgtatcttgcttttaa

SEQ ID NO: 5221463 - DNA, 25 bp, Homo sapien
gccttagcaaggaatcagaataact

SEQ ID NO: 5221464 - DNA, 25 bp, Homo sapien
cctaagtatatggacaaacaatgtt

SEQ ID NO: 5221465 - DNA, 25 bp, Homo sapien
aatttcttacaaacctaagtatatg

SEQ ID NO: 5221466 - DNA, 25 bp, Homo sapien
accatcatcatcgtttaaaaaccct

SEQ ID NO: 5221467 - DNA, 25 bp, Homo sapien
catcatcatcgtttaaaaacccttt

SEQ ID NO: 5221468 - DNA, 25 bp, Homo sapien
caccatcatcatcgtttaaaaaccc

SEQ ID NO: 5221469 - DNA, 25 bp, Homo sapien
ccatcatcatcgtttaaaaaccctt

SEQ ID NO: 5221470 - DNA, 25 bp, Homo sapien
tgctaggcaccacataatcaaactg

SEQ ID NO: 5221471 - DNA, 25 bp, Homo sapien
taccacagaggcgatgctatgtcct

SEQ ID NO: 5221472 - DNA, 25 bp, Homo sapien
cacaaaacctgaatggagtcactcc

SEQ ID NO: 5221473 - DNA, 25 bp, Homo sapien
cctgccatggagatcgcctaatgat

SEQ ID NO: 5221474 - DNA, 25 bp, Homo sapien
aaaagaaaaatgtgctaggctgggc

SEQ ID NO: 5221475 - DNA, 25 bp, Homo sapien
aaaatgtgctaggctgggcgccacg

SEQ ID NO: 5221476 - DNA, 25 bp, Homo sapien
aaagaaaaatgtgctaggctgggcg

SEQ ID NO: 5221477 - DNA, 25 bp, Homo sapien
atgtgctaggctgggcgccacggct

SEQ ID NO: 5221478 - DNA, 25 bp, Homo sapien
ggtcaccaggcaagctctgatcatc

SEQ ID NO: 5221479 - DNA, 25 bp, Homo sapien
cactcagggcctaagtaaagtgtta

SEQ ID NO: 5221480 - DNA, 25 bp, Homo sapien
attgctaatgtaagaccatccaaaa

SEQ ID NO: 5221481 - DNA, 25 bp, Homo sapien
taaagtgttacttctggccacagca

SEQ ID NO: 5221482 - DNA, 25 bp, Homo sapien
aagcactgtttgcttactgtaaaaa

SEQ ID NO: 5221483 - DNA, 25 bp, Homo sapien
gcacacatcaccacttggcacacct

SEQ ID NO: 5221484 - DNA, 25 bp, Homo sapien
aaatacataacacatccaattgttc

SEQ ID NO: 5221485 - DNA, 25 bp, Homo sapien
acatccaattgttcactaaatccaa

SEQ ID NO: 5221486 - DNA, 25 bp, Homo sapien
ggatggggtcctaatccaaatgcat

SEQ ID NO: 5221487 - DNA, 25 bp, Homo sapien
catgacagtgagtgggttcacaaga

SEQ ID NO: 5221488 - DNA, 25 bp, Homo sapien
tttaagccacatattctacagtatt

SEQ ID NO: 5221489 - DNA, 25 bp, Homo sapien
cattgatggccttataagagagaga

SEQ ID NO: 5221490 - DNA, 25 bp, Homo sapien
gacccatccagttggcaagctaggc

SEQ ID NO: 5221491 - DNA, 25 bp, Homo sapien
tccagttggcaagctaggcaaaaag

SEQ ID NO: 5221492 - DNA, 25 bp, Homo sapien
gctttgaatgaaagtatatataacc

SEQ ID NO: 5221493 - DNA, 25 bp, Homo sapien
gttggcaagctaggcaaaaagaatg

SEQ ID NO: 5221494 - DNA, 25 bp, Homo sapien
ctgcaagcttcatctttaacactgt

SEQ ID NO: 5221495 - DNA, 25 bp, Homo sapien
gcttcatctttaacactgtcctgtc

SEQ ID NO: 5221496 - DNA, 25 bp, Homo sapien
ctgtgatgttcgctattgtttttgc

SEQ ID NO: 5221497 - DNA, 25 bp, Homo sapien
gcccccaatgagatgaaagtttgcc

SEQ ID NO: 5221498 - DNA, 25 bp, Homo sapien
ttatgccctgtcttcaggatatatt

SEQ ID NO: 5221499 - DNA, 25 bp, Homo sapien
ggatatattggtaaagacatgtttc

SEQ ID NO: 5221500 - DNA, 25 bp, Homo sapien
caaatcaggactatattgattttcc

SEQ ID NO: 5221501 - DNA, 25 bp, Homo sapien
ccctgtcttcaggatatattggtaa

SEQ ID NO: 5221502 - DNA, 25 bp, Homo sapien
gcgaagacctagtaaagaattctag

SEQ ID NO: 5221503 - DNA, 25 bp, Homo sapien
cgaagacctagtaaagaattctaga

SEQ ID NO: 5221504 - DNA, 25 bp, Homo sapien
aggagcgcctcttcccggcagccat

SEQ ID NO: 5221505 - DNA, 25 bp, Homo sapien
ctcttcccggcagccatcccgtcta

SEQ ID NO: 5221506 - DNA, 25 bp, Homo sapien
gcgcctcttcccggcagccatcccg

SEQ ID NO: 5221507 - DNA, 25 bp, Homo sapien
gagcgcctcttcccggcagccatcc

SEQ ID NO: 5221508 - DNA, 25 bp, Homo sapien
cacacagccattatattagtcagct

SEQ ID NO: 5221509 - DNA, 25 bp, Homo sapien
agatccaggtgctatccatcagttc

SEQ ID NO: 5221510 - DNA, 25 bp, Homo sapien
cctatctgagcagtccaagatccag

SEQ ID NO: 5221511 - DNA, 25 bp, Homo sapien
cacagactagatcgtataaacctat

SEQ ID NO: 5221512 - DNA, 25 bp, Homo sapien
tgcccggcagtattctaaaccagga

SEQ ID NO: 5221513 - DNA, 25 bp, Homo sapien
aaatgctgggaataagacagtgccc

SEQ ID NO: 5221514 - DNA, 25 bp, Homo sapien
acagtgcccacctacccttaaggtg

SEQ ID NO: 5221515 - DNA, 25 bp, Homo sapien
ccatgttgcaatgggtggccatcct

SEQ ID NO: 5221516 - DNA, 25 bp, Homo sapien
taatataaccacgtgtctctagtgc

SEQ ID NO: 5221517 - DNA, 25 bp, Homo sapien
aatgagtgctcaataacgtaacaag

SEQ ID NO: 5221518 - DNA, 25 bp, Homo sapien
gactcagagcaagtactataaatga

SEQ ID NO: 5221519 - DNA, 25 bp, Homo sapien
tgtggcagtccaagccaactaatat

SEQ ID NO: 5221520 - DNA, 25 bp, Homo sapien
gtaactaggtttcaaggacgtcatg

SEQ ID NO: 5221521 - DNA, 25 bp, Homo sapien
gaatagagcccttaccagggatcca

SEQ ID NO: 5221522 - DNA, 25 bp, Homo sapien
acgtcatgagataggattagtaccc

SEQ ID NO: 5221523 - DNA, 25 bp, Homo sapien
cctataggaacagacactgcagagc

SEQ ID NO: 5221524 - DNA, 25 bp, Homo sapien
cttttggcatcgtcatgaaaacttt

SEQ ID NO: 5221525 - DNA, 25 bp, Homo sapien
ctaatgaaatactaagcttaatacc

SEQ ID NO: 5221526 - DNA, 25 bp, Homo sapien
catcgtcatgaaaactttgcctgtt

SEQ ID NO: 5221527 - DNA, 25 bp, Homo sapien
tgaaatactaagcttaatacctggg

SEQ ID NO: 5221528 - DNA, 25 bp, Homo sapien
gaaggctgaataattctggaaattg

SEQ ID NO: 5221529 - DNA, 25 bp, Homo sapien
tagaaggctgaataattctggaaat

SEQ ID NO: 5221530 - DNA, 25 bp, Homo sapien
ctagaaggctgaataattctggaaa

SEQ ID NO: 5221531 - DNA, 25 bp, Homo sapien
ggctgaataattctggaaattgcat

SEQ ID NO: 5221532 - DNA, 25 bp, Homo sapien
taaacgcacatagccgttcttgatt

SEQ ID NO: 5221533 - DNA, 25 bp, Homo sapien
gctgatacggatctttaaacgcaca

SEQ ID NO: 5221534 - DNA, 25 bp, Homo sapien
gatctttaaacgcacatagccgttc

SEQ ID NO: 5221535 - DNA, 25 bp, Homo sapien
tatcccaaggtcttgctgatacgga

SEQ ID NO: 5221536 - DNA, 25 bp, Homo sapien
cccattttcatgagagattctactc

SEQ ID NO: 5221537 - DNA, 25 bp, Homo sapien
cattttcatgagagattctactctc

SEQ ID NO: 5221538 - DNA, 25 bp, Homo sapien
gcataatattgtcccattttcatga

SEQ ID NO: 5221539 - DNA, 25 bp, Homo sapien
ctttcgagcataatattgtcccatt

SEQ ID NO: 5221540 - DNA, 25 bp, Homo sapien
agatttatgtccccttttgatttct

SEQ ID NO: 5221541 - DNA, 25 bp, Homo sapien
atttctcccaaaggccatagcaggt

SEQ ID NO: 5221542 - DNA, 25 bp, Homo sapien
gatttatgtccccttttgatttctc

SEQ ID NO: 5221543 - DNA, 25 bp, Homo sapien
ttgatttctcccaaaggccatagca

SEQ ID NO: 5221544 - DNA, 25 bp, Homo sapien
tgcacccagctaatcgaagaattat

SEQ ID NO: 5221545 - DNA, 25 bp, Homo sapien
ggtgcctagttgtggtcctactgac

SEQ ID NO: 5221546 - DNA, 25 bp, Homo sapien
tcctactgacttggggggattgctt

SEQ ID NO: 5221547 - DNA, 25 bp, Homo sapien
cctgggcaacgcagccataccacat

SEQ ID NO: 5221548 - DNA, 25 bp, Homo sapien
gtggtagttactacacattcttcat

SEQ ID NO: 5221549 - DNA, 25 bp, Homo sapien
ttctcagtaaagttgacattacata

SEQ ID NO: 5221550 - DNA, 25 bp, Homo sapien
tccattctgaattgagggaggagtg

SEQ ID NO: 5221551 - DNA, 25 bp, Homo sapien
tgctacaacagcagaaacggtatgt

SEQ ID NO: 5221552 - DNA, 25 bp, Homo sapien
cgcctggcttcaaccttgaatgttt

SEQ ID NO: 5221553 - DNA, 25 bp, Homo sapien
acgcctggcttcaaccttgaatgtt

SEQ ID NO: 5221554 - DNA, 25 bp, Homo sapien
cacgcctggcttcaaccttgaatgt

SEQ ID NO: 5221555 - DNA, 25 bp, Homo sapien
cctggcttcaaccttgaatgttttt

SEQ ID NO: 5221556 - DNA, 25 bp, Homo sapien
aagtcctggtgcatcgctttcggat

SEQ ID NO: 5221557 - DNA, 25 bp, Homo sapien
gcatcgctttcggatttcaggtgtt

SEQ ID NO: 5221558 - DNA, 25 bp, Homo sapien
tcaggtgtttgccagatgtaatctt

SEQ ID NO: 5221559 - DNA, 25 bp, Homo sapien
tagtaatatattgatgccttggaag

SEQ ID NO: 5221560 - DNA, 25 bp, Homo sapien
gtactctagccagggtgacaaaagc

SEQ ID NO: 5221561 - DNA, 25 bp, Homo sapien
tagccagggtgacaaaagcaagatt

SEQ ID NO: 5221562 - DNA, 25 bp, Homo sapien
tgtactctagccagggtgacaaaag

SEQ ID NO: 5221563 - DNA, 25 bp, Homo sapien
ctctagccagggtgacaaaagcaag

SEQ ID NO: 5221564 - DNA, 25 bp, Homo sapien
tttatcttttgagacagcgtttcac

SEQ ID NO: 5221565 - DNA, 25 bp, Homo sapien
cgtttcactcttgctgcccaggctg

SEQ ID NO: 5221566 - DNA, 25 bp, Homo sapien
gcactcaaattgacccagatttagc

SEQ ID NO: 5221567 - DNA, 25 bp, Homo sapien
tgtgtccttatgacaagtctccatg

SEQ ID NO: 5221568 - DNA, 25 bp, Homo sapien
cagtggttcacagttcattaatgta

SEQ ID NO: 5221569 - DNA, 25 bp, Homo sapien
taatgtacttgtttagcactcaaat

SEQ ID NO: 5221570 - DNA, 25 bp, Homo sapien
cacagtattatcagcttcagcacat

SEQ ID NO: 5221571 - DNA, 25 bp, Homo sapien
tctcctaatagaagctaatggcctt

SEQ ID NO: 5221572 - DNA, 25 bp, Homo sapien
taatccaaaactgatgatcctagag

SEQ ID NO: 5221573 - DNA, 25 bp, Homo sapien
caatacacagtagaatcatggtcct

SEQ ID NO: 5221574 - DNA, 25 bp, Homo sapien
tacagctacgcaaaaataaaagaga

SEQ ID NO: 5221575 - DNA, 25 bp, Homo sapien
taataagtgacctttccagcaggcg

SEQ ID NO: 5221576 - DNA, 25 bp, Homo sapien
tattaacaatggttgtatatgggtg

SEQ ID NO: 5221577 - DNA, 25 bp, Homo sapien
tatgggtgtagagactattggagat

SEQ ID NO: 5221578 - DNA, 25 bp, Homo sapien
tagtctgcaaccaattctgtctagt

SEQ ID NO: 5221579 - DNA, 25 bp, Homo sapien
gcttgttactcaaatcatggctagt

SEQ ID NO: 5221580 - DNA, 25 bp, Homo sapien
gagggacacatggaattggaaatcc

SEQ ID NO: 5221581 - DNA, 25 bp, Homo sapien
tagtacgtctgtatctgaaaccact

SEQ ID NO: 5221582 - DNA, 25 bp, Homo sapien
taggaataaccatgaaagcactgtg

SEQ ID NO: 5221583 - DNA, 25 bp, Homo sapien
cacacacgtatttctcctgaaggtg

SEQ ID NO: 5221584 - DNA, 25 bp, Homo sapien
gagcatagccttcttcaacctaagc

SEQ ID NO: 5221585 - DNA, 25 bp, Homo sapien
taagctaggaacgtgcaccttgggt

SEQ ID NO: 5221586 - DNA, 25 bp, Homo sapien
tgcctggcccttcttagagcggtct

SEQ ID NO: 5221587 - DNA, 25 bp, Homo sapien
tgttgcccaagttactattgaaact

SEQ ID NO: 5221588 - DNA, 25 bp, Homo sapien
gcccttcttagagcggtcttgcttt

SEQ ID NO: 5221589 - DNA, 25 bp, Homo sapien
atgttgcccaagttactattgaaac

SEQ ID NO: 5221590 - DNA, 25 bp, Homo sapien
tgtcaagtggccctcttcaacagag

SEQ ID NO: 5221591 - DNA, 25 bp, Homo sapien
tattggcaagttagctgacctcagt

SEQ ID NO: 5221592 - DNA, 25 bp, Homo sapien
ctcaatagctgttggcagggttcac

SEQ ID NO: 5221593 - DNA, 25 bp, Homo sapien
ggctggtgccatagtcatctcaaga

SEQ ID NO: 5221594 - DNA, 25 bp, Homo sapien
aaaacacaacagcaaacctttgtga

SEQ ID NO: 5221595 - DNA, 25 bp, Homo sapien
aacacaacagcaaacctttgtgact

SEQ ID NO: 5221596 - DNA, 25 bp, Homo sapien
aaaaacacaacagcaaacctttgtg

SEQ ID NO: 5221597 - DNA, 25 bp, Homo sapien
aaacacaacagcaaacctttgtgac

SEQ ID NO: 5221598 - DNA, 25 bp, Homo sapien
tcacacccattaggacagcgactat

SEQ ID NO: 5221599 - DNA, 25 bp, Homo sapien
cgtagtggttcacgccgcactttgg

SEQ ID NO: 5221600 - DNA, 25 bp, Homo sapien
tgaagctgaatgttcacgaccagcc

SEQ ID NO: 5221601 - DNA, 25 bp, Homo sapien
tgaaacggcaagctatgggagaaaa

SEQ ID NO: 5221602 - DNA, 25 bp, Homo sapien
caagttccaataccaaataaagaat

SEQ ID NO: 5221603 - DNA, 25 bp, Homo sapien
cactgtacccggtcaaaagaacaca

SEQ ID NO: 5221604 - DNA, 25 bp, Homo sapien
cacattcctgagtaacaagttccaa

SEQ ID NO: 5221605 - DNA, 25 bp, Homo sapien
taaagaattacctcttgcaggcagc

SEQ ID NO: 5221606 - DNA, 25 bp, Homo sapien
aggccaatggcagttctttagagaa

SEQ ID NO: 5221607 - DNA, 25 bp, Homo sapien
taagccctcacttagcaattaagga

SEQ ID NO: 5221608 - DNA, 25 bp, Homo sapien
aatgcttgggatggtctggtacaac

SEQ ID NO: 5221609 - DNA, 25 bp, Homo sapien
catcctgcatatggtggttcctgaa

SEQ ID NO: 5221610 - DNA, 25 bp, Homo sapien
tatagcagtgttctggcgtttgcat

SEQ ID NO: 5221611 - DNA, 25 bp, Homo sapien
attcattagaagtgcccaacctggg

SEQ ID NO: 5221612 - DNA, 25 bp, Homo sapien
ttcttcgaggaaactgaacccagac

SEQ ID NO: 5221613 - DNA, 25 bp, Homo sapien
aacccttcagaatagaacacttgac

SEQ ID NO: 5221614 - DNA, 25 bp, Homo sapien
tggaagggtgaggcatgctaatcac

SEQ ID NO: 5221615 - DNA, 25 bp, Homo sapien
ggcttgcatgcatagtgtgtattca

SEQ ID NO: 5221616 - DNA, 25 bp, Homo sapien
ccgggtgttggtggtgcacccctat

SEQ ID NO: 5221617 - DNA, 25 bp, Homo sapien
gcgcagtggcatgcggaggctcacg

SEQ ID NO: 5221618 - DNA, 25 bp, Homo sapien
tatatttagtacaacctcgtgtgtg

SEQ ID NO: 5221619 - DNA, 25 bp, Homo sapien
gtggtactaaatgtataggttccaa

SEQ ID NO: 5221620 - DNA, 25 bp, Homo sapien
gtgtgtgtacataccttttgacttt

SEQ ID NO: 5221621 - DNA, 25 bp, Homo sapien
cttacatgcaaagaacttattttca

SEQ ID NO: 5221622 - DNA, 25 bp, Homo sapien
cattttcgtgtataatgtataagca

SEQ ID NO: 5221623 - DNA, 25 bp, Homo sapien
cagagcttggtgaatcatgatgaag

SEQ ID NO: 5221624 - DNA, 25 bp, Homo sapien
caatggcgggatctctgtttactgc

SEQ ID NO: 5221625 - DNA, 25 bp, Homo sapien
gtgagtcaccacttgtaaccgccca

SEQ ID NO: 5221626 - DNA, 25 bp, Homo sapien
gaattaatttgcagaccattgtaca

SEQ ID NO: 5221627 - DNA, 25 bp, Homo sapien
tatgtcactcaaagatccctcgtca

SEQ ID NO: 5221628 - DNA, 25 bp, Homo sapien
gaactaaaccaaagactatgtcact

SEQ ID NO: 5221629 - DNA, 25 bp, Homo sapien
taacctaattgagtaagaaatgtcc

SEQ ID NO: 5221630 - DNA, 25 bp, Homo sapien
cgtgtacgtgcaaaagaggccttta

SEQ ID NO: 5221631 - DNA, 25 bp, Homo sapien
gcacttaagaagtgagccacacccc

SEQ ID NO: 5221632 - DNA, 25 bp, Homo sapien
cacgcaccctgtcaggacaagggaa

SEQ ID NO: 5221633 - DNA, 25 bp, Homo sapien
ctatgttatacctgaattgtcttgt

SEQ ID NO: 5221634 - DNA, 25 bp, Homo sapien
agaaaggtgcgtccctgactagggc

SEQ ID NO: 5221635 - DNA, 25 bp, Homo sapien
gaacagtgtgccctccttaaatgac

SEQ ID NO: 5221636 - DNA, 25 bp, Homo sapien
cagacgtaaagaggagcacatcggc

SEQ ID NO: 5221637 - DNA, 25 bp, Homo sapien
gcagaagagcacaacgataggcacc

SEQ ID NO: 5221638 - DNA, 25 bp, Homo sapien
tgtataatgagtcttctcatacagt

SEQ ID NO: 5221639 - DNA, 25 bp, Homo sapien
actctgtataatgagtcttctcata

SEQ ID NO: 5221640 - DNA, 25 bp, Homo sapien
tctgtataatgagtcttctcataca

SEQ ID NO: 5221641 - DNA, 25 bp, Homo sapien
tataatgagtcttctcatacagttt

SEQ ID NO: 5221642 - DNA, 25 bp, Homo sapien
cgtttttaacgctgtctttttgctg

SEQ ID NO: 5221643 - DNA, 25 bp, Homo sapien
tttttgagttgtcctacattcaagc

SEQ ID NO: 5221644 - DNA, 25 bp, Homo sapien
tcatagagtaggttccatctgttca

SEQ ID NO: 5221645 - DNA, 25 bp, Homo sapien
gcattttaatcatagagtaggttcc

SEQ ID NO: 5221646 - DNA, 25 bp, Homo sapien
gacataaagcattaatgcgggtcaa

SEQ ID NO: 5221647 - DNA, 25 bp, Homo sapien
taatgcgggtcaaaacatttcagtg

SEQ ID NO: 5221648 - DNA, 25 bp, Homo sapien
tcaatataaatgtgggacataaagc

SEQ ID NO: 5221649 - DNA, 25 bp, Homo sapien
tcccaagcatctggtctcatgccac

SEQ ID NO: 5221650 - DNA, 25 bp, Homo sapien
aaatagctatctctttggttcagta

SEQ ID NO: 5221651 - DNA, 25 bp, Homo sapien
tagattggcacatctagagtacagc

SEQ ID NO: 5221652 - DNA, 25 bp, Homo sapien
gcctttttgaagacattaacctgta

SEQ ID NO: 5221653 - DNA, 25 bp, Homo sapien
tctttggttcagtaggcctatctgg

SEQ ID NO: 5221654 - DNA, 25 bp, Homo sapien
caaggctgctcttatcctaggtaaa

SEQ ID NO: 5221655 - DNA, 25 bp, Homo sapien
gaggacaccactgtacatgtgagga

SEQ ID NO: 5221656 - DNA, 25 bp, Homo sapien
caagatgctgtctcgaccaatgtga

SEQ ID NO: 5221657 - DNA, 25 bp, Homo sapien
tcttccaagagtgaagagacccaag

SEQ ID NO: 5221658 - DNA, 25 bp, Homo sapien
catttacataggtgacaactcccat

SEQ ID NO: 5221659 - DNA, 25 bp, Homo sapien
gctgagtggacattctgccagagtt

SEQ ID NO: 5221660 - DNA, 25 bp, Homo sapien
gccagagttaacaatcaagttcaca

SEQ ID NO: 5221661 - DNA, 25 bp, Homo sapien
caaatgcccatcactaagcgttagc

SEQ ID NO: 5221662 - DNA, 25 bp, Homo sapien
tcttgtacattgcaagtgggatatg

SEQ ID NO: 5221663 - DNA, 25 bp, Homo sapien
ttcacatacattggcatggctacaa

SEQ ID NO: 5221664 - DNA, 25 bp, Homo sapien
aagaaaataaaaagcgctggcaagg

SEQ ID NO: 5221665 - DNA, 25 bp, Homo sapien
tcaagttgatgtgcccactttggcc

SEQ ID NO: 5221666 - DNA, 25 bp, Homo sapien
caggatagtataatatcaagagtct

SEQ ID NO: 5221667 - DNA, 25 bp, Homo sapien
cccaagttagctgtaagatttagat

SEQ ID NO: 5221668 - DNA, 25 bp, Homo sapien
aaacaccaagtagatgtgctcctaa

SEQ ID NO: 5221669 - DNA, 25 bp, Homo sapien
tctaagtacttaacacaacgtcaag

SEQ ID NO: 5221670 - DNA, 25 bp, Homo sapien
taatacagagactgatgccaaagca

SEQ ID NO: 5221671 - DNA, 25 bp, Homo sapien
tatccaaagcataaggcaactatca

SEQ ID NO: 5221672 - DNA, 25 bp, Homo sapien
ctgtcaacattctgtatccaaagca

SEQ ID NO: 5221673 - DNA, 25 bp, Homo sapien
tgattattgtctcatctcggttaaa

SEQ ID NO: 5221674 - DNA, 25 bp, Homo sapien
ctgtgaagaccttgtttacggtctc

SEQ ID NO: 5221675 - DNA, 25 bp, Homo sapien
gttcatactgtgaagaccttgttta

SEQ ID NO: 5221676 - DNA, 25 bp, Homo sapien
catactgtgaagaccttgtttacgg

SEQ ID NO: 5221677 - DNA, 25 bp, Homo sapien
tactgtgaagaccttgtttacggtc

SEQ ID NO: 5221678 - DNA, 25 bp, Homo sapien
acagtttcagattatctagatcaag

SEQ ID NO: 5221679 - DNA, 25 bp, Homo sapien
tctagatcaagagagggttcggatg

SEQ ID NO: 5221680 - DNA, 25 bp, Homo sapien
atcaagagagggttcggatgctgct

SEQ ID NO: 5221681 - DNA, 25 bp, Homo sapien
ttatctagatcaagagagggttcgg

SEQ ID NO: 5221682 - DNA, 25 bp, Homo sapien
tattccatgcgtccatctgcagtga

SEQ ID NO: 5221683 - DNA, 25 bp, Homo sapien
ggaaaacacttttacagcaactgga

SEQ ID NO: 5221684 - DNA, 25 bp, Homo sapien
tctcatctccaactataaagcgggc

SEQ ID NO: 5221685 - DNA, 25 bp, Homo sapien
tatactgctccatatcgacctcggc

SEQ ID NO: 5221686 - DNA, 25 bp, Homo sapien
tataaagaatttgcaaataggctag

SEQ ID NO: 5221687 - DNA, 25 bp, Homo sapien
tgaagatctaatgaactactacatt

SEQ ID NO: 5221688 - DNA, 25 bp, Homo sapien
tcttgaaagagttagtatgacattt

SEQ ID NO: 5221689 - DNA, 25 bp, Homo sapien
catgaagagtaaattagcatcctta

SEQ ID NO: 5221690 - DNA, 25 bp, Homo sapien
ccagtcacttgtgtggagacttaaa

SEQ ID NO: 5221691 - DNA, 25 bp, Homo sapien
caagagcttacccagtcacttgtgt

SEQ ID NO: 5221692 - DNA, 25 bp, Homo sapien
acagaatgagcaagacggcaagagc

SEQ ID NO: 5221693 - DNA, 25 bp, Homo sapien
tggagacttaaatacttgcataaag

SEQ ID NO: 5221694 - DNA, 25 bp, Homo sapien
aattctgtgtgaagataagccagtc

SEQ ID NO: 5221695 - DNA, 25 bp, Homo sapien
attctgtgtgaagataagccagtcc

SEQ ID NO: 5221696 - DNA, 25 bp, Homo sapien
ttctgtgtgaagataagccagtcct

SEQ ID NO: 5221697 - DNA, 25 bp, Homo sapien
taattctgtgtgaagataagccagt

SEQ ID NO: 5221698 - DNA, 25 bp, Homo sapien
ctgggtcatgatagcctccaggtag

SEQ ID NO: 5221699 - DNA, 25 bp, Homo sapien
tgggtcatgatagcctccaggtagc

SEQ ID NO: 5221700 - DNA, 25 bp, Homo sapien
caggtagcccaggagttttactcag

SEQ ID NO: 5221701 - DNA, 25 bp, Homo sapien
cgcttgcagaggaaggctagatact

SEQ ID NO: 5221702 - DNA, 25 bp, Homo sapien
caggacatgaccactactttctctg

SEQ ID NO: 5221703 - DNA, 25 bp, Homo sapien
caggtggtctgccaaaagatgtggc

SEQ ID NO: 5221704 - DNA, 25 bp, Homo sapien
tgtggctggggacccataaatggta

SEQ ID NO: 5221705 - DNA, 25 bp, Homo sapien
caatattccaactgaagtagcaggt

SEQ ID NO: 5221706 - DNA, 25 bp, Homo sapien
tggttgcatatcttcctagcctaca

SEQ ID NO: 5221707 - DNA, 25 bp, Homo sapien
ccattcacaaggtagggaaactctt

SEQ ID NO: 5221708 - DNA, 25 bp, Homo sapien
tatctccagctttgtaagtcccagg

SEQ ID NO: 5221709 - DNA, 25 bp, Homo sapien
tgacagacaagtaggttgattccgt

SEQ ID NO: 5221710 - DNA, 25 bp, Homo sapien
ccactgacagacaagtaggttgatt

SEQ ID NO: 5221711 - DNA, 25 bp, Homo sapien
cactgacagacaagtaggttgattc

SEQ ID NO: 5221712 - DNA, 25 bp, Homo sapien
ccacgtccggccatttaacacattt

SEQ ID NO: 5221713 - DNA, 25 bp, Homo sapien
tctgggtttatagtatgatgctgag

SEQ ID NO: 5221714 - DNA, 25 bp, Homo sapien
ttaccctcctgagatgcatgctact

SEQ ID NO: 5221715 - DNA, 25 bp, Homo sapien
gtgcaagtttgttatctgggtttat

SEQ ID NO: 5221716 - DNA, 25 bp, Homo sapien
ccttaccctcctgagatgcatgcta

SEQ ID NO: 5221717 - DNA, 25 bp, Homo sapien
caggttccatcatttttcactagga

SEQ ID NO: 5221718 - DNA, 25 bp, Homo sapien
agtcagcctcatggacagtccaaag

SEQ ID NO: 5221719 - DNA, 25 bp, Homo sapien
tatggctgcattatcttcctcccct

SEQ ID NO: 5221720 - DNA, 25 bp, Homo sapien
tcccctgggcgcaccagtctatttc

SEQ ID NO: 5221721 - DNA, 25 bp, Homo sapien
ggtgccatatatctgatagtgccaa

SEQ ID NO: 5221722 - DNA, 25 bp, Homo sapien
tcacagctccttctagcacttctgg

SEQ ID NO: 5221723 - DNA, 25 bp, Homo sapien
tacatgtctacttgtttcaaagctg

SEQ ID NO: 5221724 - DNA, 25 bp, Homo sapien
ccaatagattagtccaagagcatac

SEQ ID NO: 5221725 - DNA, 25 bp, Homo sapien
ctgggaagaggtctgtacatctcat

SEQ ID NO: 5221726 - DNA, 25 bp, Homo sapien
tgggaagaggtctgtacatctcata

SEQ ID NO: 5221727 - DNA, 25 bp, Homo sapien
tttcgctgtgttggccaggccggtc

SEQ ID NO: 5221728 - DNA, 25 bp, Homo sapien
cccctaaccgcgagtgatccgccag

SEQ ID NO: 5221729 - DNA, 25 bp, Homo sapien
caggccggtctccagcccctaaccg

SEQ ID NO: 5221730 - DNA, 25 bp, Homo sapien
ctgactggttttggtggagacgggg

SEQ ID NO: 5221731 - DNA, 25 bp, Homo sapien
tccagttaaaggagtgcatcgactc

SEQ ID NO: 5221732 - DNA, 25 bp, Homo sapien
tagttgtctgtcaataccccatcga

SEQ ID NO: 5221733 - DNA, 25 bp, Homo sapien
tatgtagacaactcccaaataacca

SEQ ID NO: 5221734 - DNA, 25 bp, Homo sapien
catcgaacagtctccaggattaact

SEQ ID NO: 5221735 - DNA, 25 bp, Homo sapien
agaacctgcatatcctcaaaagtgg

SEQ ID NO: 5221736 - DNA, 25 bp, Homo sapien
tttttccctagacacgagaacctgc

SEQ ID NO: 5221737 - DNA, 25 bp, Homo sapien
ggcttctgggaacttgggtctctgt

SEQ ID NO: 5221738 - DNA, 25 bp, Homo sapien
tgaaaagccatctggtactctggta

SEQ ID NO: 5221739 - DNA, 25 bp, Homo sapien
cgattgtctccttgagtgacctcac

SEQ ID NO: 5221740 - DNA, 25 bp, Homo sapien
cctggtcccaacagtcttcgattgt

SEQ ID NO: 5221741 - DNA, 25 bp, Homo sapien
cattggattgactgttgggctcaca

SEQ ID NO: 5221742 - DNA, 25 bp, Homo sapien
agcacactgtgcagtaagccgagcc

SEQ ID NO: 5221743 - DNA, 25 bp, Homo sapien
gttagataggcaagttcatagttcc

SEQ ID NO: 5221744 - DNA, 25 bp, Homo sapien
tggaacaccctgtgcaagaacatct

SEQ ID NO: 5221745 - DNA, 25 bp, Homo sapien
gctctcgtctcagtaaaggctcatg

SEQ ID NO: 5221746 - DNA, 25 bp, Homo sapien
catcaggaatcaaacatgcttggcc

SEQ ID NO: 5221747 - DNA, 25 bp, Homo sapien
gaattaatattcagccgggtgtcct

SEQ ID NO: 5221748 - DNA, 25 bp, Homo sapien
tgccccgcctcaaatggatcattta

SEQ ID NO: 5221749 - DNA, 25 bp, Homo sapien
tgtgccccgcctcaaatggatcatt

SEQ ID NO: 5221750 - DNA, 25 bp, Homo sapien
cccgcctcaaatggatcatttacaa

SEQ ID NO: 5221751 - DNA, 25 bp, Homo sapien
actgtgccccgcctcaaatggatca

SEQ ID NO: 5221752 - DNA, 25 bp, Homo sapien
tagggagttttcacacgtttcttga

SEQ ID NO: 5221753 - DNA, 25 bp, Homo sapien
gggcgccaccgcttaagagaatagg

SEQ ID NO: 5221754 - DNA, 25 bp, Homo sapien
tcacagtccagcgattcagtggaga

SEQ ID NO: 5221755 - DNA, 25 bp, Homo sapien
gctggatttggaatgaactgccctg

SEQ ID NO: 5221756 - DNA, 25 bp, Homo sapien
cagacagttcattcctatatcttta

SEQ ID NO: 5221757 - DNA, 25 bp, Homo sapien
gacagttcattcctatatctttaga

SEQ ID NO: 5221758 - DNA, 25 bp, Homo sapien
cagttcattcctatatctttagaca

SEQ ID NO: 5221759 - DNA, 25 bp, Homo sapien
tcacagacagttcattcctatatct

SEQ ID NO: 5221760 - DNA, 25 bp, Homo sapien
tataactttagcgagactaaacaaa

SEQ ID NO: 5221761 - DNA, 25 bp, Homo sapien
ttgagaccacttttgatacacacac

SEQ ID NO: 5221762 - DNA, 25 bp, Homo sapien
gaaactggtccaaactgattatcag

SEQ ID NO: 5221763 - DNA, 25 bp, Homo sapien
gaagcataagctaaatttttctgca

SEQ ID NO: 5221764 - DNA, 25 bp, Homo sapien
cagtctttgcttgggaacagggtaa

SEQ ID NO: 5221765 - DNA, 25 bp, Homo sapien
ccttcatagggacttggcatgccac

SEQ ID NO: 5221766 - DNA, 25 bp, Homo sapien
caaaacgtggaaatcctgggcacta

SEQ ID NO: 5221767 - DNA, 25 bp, Homo sapien
gccctgttaggaagagagcttacaa

SEQ ID NO: 5221768 - DNA, 25 bp, Homo sapien
gcatcctcagaagtgaatactccgt

SEQ ID NO: 5221769 - DNA, 25 bp, Homo sapien
tcaaaagtggtctacaaaaatgtcc

SEQ ID NO: 5221770 - DNA, 25 bp, Homo sapien
aaatgactttcaggaggcacttaca

SEQ ID NO: 5221771 - DNA, 25 bp, Homo sapien
catcctgtcatatggcatgtaggca

SEQ ID NO: 5221772 - DNA, 25 bp, Homo sapien
ttacttacacttattcatagaaaac

SEQ ID NO: 5221773 - DNA, 25 bp, Homo sapien
cttaatgtcagctttcatagtggca

SEQ ID NO: 5221774 - DNA, 25 bp, Homo sapien
acttacacttattcatagaaaactc

SEQ ID NO: 5221775 - DNA, 25 bp, Homo sapien
gtcagctttcatagtggcatccata

SEQ ID NO: 5221776 - DNA, 25 bp, Homo sapien
gaataacgcaccattttacagcaag

SEQ ID NO: 5221777 - DNA, 25 bp, Homo sapien
aacggaataacgcaccattttacag

SEQ ID NO: 5221778 - DNA, 25 bp, Homo sapien
gaactgccttaaaatctccttctcc

SEQ ID NO: 5221779 - DNA, 25 bp, Homo sapien
cggaataacgcaccattttacagca

SEQ ID NO: 5221780 - DNA, 25 bp, Homo sapien
tcttttagacattggcctaagcaaa

SEQ ID NO: 5221781 - DNA, 25 bp, Homo sapien
ttttagacattggcctaagcaaaga

SEQ ID NO: 5221782 - DNA, 25 bp, Homo sapien
aatgcaacaaaaataaacgtagaca

SEQ ID NO: 5221783 - DNA, 25 bp, Homo sapien
aactcttttagacattggcctaagc

SEQ ID NO: 5221784 - DNA, 25 bp, Homo sapien
ctgtatactgggtcacaacacaact

SEQ ID NO: 5221785 - DNA, 25 bp, Homo sapien
attccctgtatactgggtcacaaca

SEQ ID NO: 5221786 - DNA, 25 bp, Homo sapien
tccctgtatactgggtcacaacaca

SEQ ID NO: 5221787 - DNA, 25 bp, Homo sapien
cctgtatactgggtcacaacacaac

SEQ ID NO: 5221788 - DNA, 25 bp, Homo sapien
taccgagagaacacattcttccttc

SEQ ID NO: 5221789 - DNA, 25 bp, Homo sapien
tctccttggatctctgatcctgagg

SEQ ID NO: 5221790 - DNA, 25 bp, Homo sapien
ccttcctttaccgagagaacacatt

SEQ ID NO: 5221791 - DNA, 25 bp, Homo sapien
catctgctatagcaaagtcagcaac

SEQ ID NO: 5221792 - DNA, 25 bp, Homo sapien
taacctataaattcgctctgacaaa

SEQ ID NO: 5221793 - DNA, 25 bp, Homo sapien
aaattcgctctgacaaagttatgta

SEQ ID NO: 5221794 - DNA, 25 bp, Homo sapien
taaattcgctctgacaaagttatgt

SEQ ID NO: 5221795 - DNA, 25 bp, Homo sapien
tttaacctataaattcgctctgaca

SEQ ID NO: 5221796 - DNA, 25 bp, Homo sapien
cacacagtttcgatttcttgagcat

SEQ ID NO: 5221797 - DNA, 25 bp, Homo sapien
tcacacagtttcgatttcttgagca

SEQ ID NO: 5221798 - DNA, 25 bp, Homo sapien
acacagtttcgatttcttgagcatc

SEQ ID NO: 5221799 - DNA, 25 bp, Homo sapien
cacagtttcgatttcttgagcatct

SEQ ID NO: 5221800 - DNA, 25 bp, Homo sapien
aagtctgctgttggaatcatataag

SEQ ID NO: 5221801 - DNA, 25 bp, Homo sapien
taagtctgctgttggaatcatataa

SEQ ID NO: 5221802 - DNA, 25 bp, Homo sapien
aataggtgcagatcccctccatctt

SEQ ID NO: 5221803 - DNA, 25 bp, Homo sapien
aggtgcagatcccctccatctttaa

SEQ ID NO: 5221804 - DNA, 25 bp, Homo sapien
ataggtgcagatcccctccatcttt

SEQ ID NO: 5221805 - DNA, 25 bp, Homo sapien
aaataggtgcagatcccctccatct

SEQ ID NO: 5221806 - DNA, 25 bp, Homo sapien
tactctcttttggatattatggaaa

SEQ ID NO: 5221807 - DNA, 25 bp, Homo sapien
ggaaactaattgattggaagtcaat

SEQ ID NO: 5221808 - DNA, 25 bp, Homo sapien
ctctcttttggatattatggaaact

SEQ ID NO: 5221809 - DNA, 25 bp, Homo sapien
ctcttttggatattatggaaactaa

SEQ ID NO: 5221810 - DNA, 25 bp, Homo sapien
ttggtaaatatggtctaccataatc

SEQ ID NO: 5221811 - DNA, 25 bp, Homo sapien
ggtaaatatggtctaccataatcta

SEQ ID NO: 5221812 - DNA, 25 bp, Homo sapien
taaatatggtctaccataatctaat

SEQ ID NO: 5221813 - DNA, 25 bp, Homo sapien
atggtctaccataatctaatgagtc

SEQ ID NO: 5221814 - DNA, 25 bp, Homo sapien
tacagtctaatgcttgctcagccat

SEQ ID NO: 5221815 - DNA, 25 bp, Homo sapien
gaggccttaacctctgtctttagat

SEQ ID NO: 5221816 - DNA, 25 bp, Homo sapien
aagaggccttaacctctgtctttag

SEQ ID NO: 5221817 - DNA, 25 bp, Homo sapien
taatgcttgctcagccattttaccc

SEQ ID NO: 5221818 - DNA, 25 bp, Homo sapien
caggattgaagctgcaccttcgaat

SEQ ID NO: 5221819 - DNA, 25 bp, Homo sapien
tgcaattcaacatgaaaaatctcct

SEQ ID NO: 5221820 - DNA, 25 bp, Homo sapien
ccagcaggattgaagctgcaccttc

SEQ ID NO: 5221821 - DNA, 25 bp, Homo sapien
tcaacatgaaaaatctcctcagggc

SEQ ID NO: 5221822 - DNA, 25 bp, Homo sapien
ctcgttcgggcttttattcttaatg

SEQ ID NO: 5221823 - DNA, 25 bp, Homo sapien
taatgtttttgttctgccctaattc

SEQ ID NO: 5221824 - DNA, 25 bp, Homo sapien
agttcccagggatggtctgaagcct

SEQ ID NO: 5221825 - DNA, 25 bp, Homo sapien
gccttttccgcataactcatttcct

SEQ ID NO: 5221826 - DNA, 25 bp, Homo sapien
gcgtgggggacccattgcgcctcac

SEQ ID NO: 5221827 - DNA, 25 bp, Homo sapien
ctcatgggctgcaagcggctcccgg

SEQ ID NO: 5221828 - DNA, 25 bp, Homo sapien
ccggcgtgggggacccattgcgcct

SEQ ID NO: 5221829 - DNA, 25 bp, Homo sapien
tggccaccgcaccacccccaaggga

SEQ ID NO: 5221830 - DNA, 25 bp, Homo sapien
caccgtggggctggtgcgcgcggcc

SEQ ID NO: 5221831 - DNA, 25 bp, Homo sapien
gggctcccgcgagctccaggcgcgg

SEQ ID NO: 5221832 - DNA, 25 bp, Homo sapien
acgcgcccgtctgcgtggccaccgt

SEQ ID NO: 5221833 - DNA, 25 bp, Homo sapien
gggctggtgcctcgcgtggacgtcg

SEQ ID NO: 5221834 - DNA, 25 bp, Homo sapien
acgacacggtgcccagcagcggcgg

SEQ ID NO: 5221835 - DNA, 25 bp, Homo sapien
gggcgacgacacggtgcccagcagc

SEQ ID NO: 5221836 - DNA, 25 bp, Homo sapien
ggcgacgacacggtgcccagcagcg

SEQ ID NO: 5221837 - DNA, 25 bp, Homo sapien
cgacgacacggtgcccagcagcggc

SEQ ID NO: 5221838 - DNA, 25 bp, Homo sapien
ggtccacaggtgggtgggcgacgag

SEQ ID NO: 5221839 - DNA, 25 bp, Homo sapien
gccggtccacaggtgggtgggcgac

SEQ ID NO: 5221840 - DNA, 25 bp, Homo sapien
cggtccacaggtgggtgggcgacga

SEQ ID NO: 5221841 - DNA, 25 bp, Homo sapien
ctcgccggtccacaggtgggtgggc

SEQ ID NO: 5221842 - DNA, 25 bp, Homo sapien
agacctcctccgatgccggacgcgg

SEQ ID NO: 5221843 - DNA, 25 bp, Homo sapien
tcttctccggcgagcttcggctctg

SEQ ID NO: 5221844 - DNA, 25 bp, Homo sapien
agcttcggctctgctccggagacct

SEQ ID NO: 5221845 - DNA, 25 bp, Homo sapien
ctgctttgcaaaccggggcgctggg

SEQ ID NO: 5221846 - DNA, 25 bp, Homo sapien
cacagctgcaaactggtggtagcct

SEQ ID NO: 5221847 - DNA, 25 bp, Homo sapien
cagctgcaaactggtggtagcctcc

SEQ ID NO: 5221848 - DNA, 25 bp, Homo sapien
acagctgcaaactggtggtagcctc

SEQ ID NO: 5221849 - DNA, 25 bp, Homo sapien
catttataatttttatcatgtgcac

SEQ ID NO: 5221850 - DNA, 25 bp, Homo sapien
atttataatttttatcatgtgcaca

SEQ ID NO: 5221851 - DNA, 25 bp, Homo sapien
gatcgacaaaactacaaccttcctg

SEQ ID NO: 5221852 - DNA, 25 bp, Homo sapien
gcaagagagcctgggagttattccc

SEQ ID NO: 5221853 - DNA, 25 bp, Homo sapien
agtaaatgtcttatccctcaatggg

SEQ ID NO: 5221854 - DNA, 25 bp, Homo sapien
ctatgtaatctagcagagggagttc

SEQ ID NO: 5221855 - DNA, 25 bp, Homo sapien
aaaaaactcttagattgtggagtgt

SEQ ID NO: 5221856 - DNA, 25 bp, Homo sapien
aactcttagattgtggagtgtcagc

SEQ ID NO: 5221857 - DNA, 25 bp, Homo sapien
cttagattgtggagtgtcagcttgg

SEQ ID NO: 5221858 - DNA, 25 bp, Homo sapien
ttgtggagtgtcagcttgggtctct

SEQ ID NO: 5221859 - DNA, 25 bp, Homo sapien
tctccatgatttttcccatccacat

SEQ ID NO: 5221860 - DNA, 25 bp, Homo sapien
ctccatgatttttcccatccacatg

SEQ ID NO: 5221861 - DNA, 25 bp, Homo sapien
gcactagtggagcatcccaaaccat

SEQ ID NO: 5221862 - DNA, 25 bp, Homo sapien
tttcagctgcactagtggagcatcc

SEQ ID NO: 5221863 - DNA, 25 bp, Homo sapien
ttcaactggttcctgggtaatttca

SEQ ID NO: 5221864 - DNA, 25 bp, Homo sapien
ctgttcaactggttcctgggtaatt

SEQ ID NO: 5221865 - DNA, 25 bp, Homo sapien
cattattaactgtgacaagtgaaac

SEQ ID NO: 5221866 - DNA, 25 bp, Homo sapien
tgtgacaagtgaaacgcaataaata

SEQ ID NO: 5221867 - DNA, 25 bp, Homo sapien
tattaactgtgacaagtgaaacgca

SEQ ID NO: 5221868 - DNA, 25 bp, Homo sapien
ttaactgtgacaagtgaaacgcaat

SEQ ID NO: 5221869 - DNA, 25 bp, Homo sapien
gcttgaagaaggctgtcgtgttttg

SEQ ID NO: 5221870 - DNA, 25 bp, Homo sapien
ttgaagaaggctgtcgtgttttgtc

SEQ ID NO: 5221871 - DNA, 25 bp, Homo sapien
gaagaaggctgtcgtgttttgtcac

SEQ ID NO: 5221872 - DNA, 25 bp, Homo sapien
gggcttgaagaaggctgtcgtgttt

SEQ ID NO: 5221873 - DNA, 25 bp, Homo sapien
ccagggaggaagtgcgtcggataat

SEQ ID NO: 5221874 - DNA, 25 bp, Homo sapien
cagcttgcccatggctatcccgagg

SEQ ID NO: 5221875 - DNA, 25 bp, Homo sapien
agtgtccagcaagatacggtgcagc

SEQ ID NO: 5221876 - DNA, 25 bp, Homo sapien
catggctatcccgaggccagtgtcc

SEQ ID NO: 5221877 - DNA, 25 bp, Homo sapien
acttttgatgagtacagagtctaca

SEQ ID NO: 5221878 - DNA, 25 bp, Homo sapien
aactgagcccactaagaatacctgg

SEQ ID NO: 5221879 - DNA, 25 bp, Homo sapien
tgtctgccctaacagtaggattccg

SEQ ID NO: 5221880 - DNA, 25 bp, Homo sapien
taatccaaatcccaattgtctgccc

SEQ ID NO: 5221881 - DNA, 25 bp, Homo sapien
cagagtattcttcagcccatgcact

SEQ ID NO: 5221882 - DNA, 25 bp, Homo sapien
tgctgagcgcttgtgagaccctttc

SEQ ID NO: 5221883 - DNA, 25 bp, Homo sapien
taagttgatctgtactgccccaaga

SEQ ID NO: 5221884 - DNA, 25 bp, Homo sapien
ctccttaagttgatctgtactgccc

SEQ ID NO: 5221885 - DNA, 25 bp, Homo sapien
gaaaacgacaaatccttgctgccca

SEQ ID NO: 5221886 - DNA, 25 bp, Homo sapien
aaaaggatcatatttccacacccac

SEQ ID NO: 5221887 - DNA, 25 bp, Homo sapien
gctgcccataatatcaaggaaatag

SEQ ID NO: 5221888 - DNA, 25 bp, Homo sapien
cacccactatcttagaaccattttt

SEQ ID NO: 5221889 - DNA, 25 bp, Homo sapien
tatctcgatgatgccgactgctgtg

SEQ ID NO: 5221890 - DNA, 25 bp, Homo sapien
actggttaatagctgcatggttgcc

SEQ ID NO: 5221891 - DNA, 25 bp, Homo sapien
tctttctttatctcgatgatgccga

SEQ ID NO: 5221892 - DNA, 25 bp, Homo sapien
tctgcaactgctggcgtaattttgc

SEQ ID NO: 5221893 - DNA, 25 bp, Homo sapien
tctggattttgtggtattggtactc

SEQ ID NO: 5221894 - DNA, 25 bp, Homo sapien
gattttgtggtattggtactcttac

SEQ ID NO: 5221895 - DNA, 25 bp, Homo sapien
tttctggattttgtggtattggtac

SEQ ID NO: 5221896 - DNA, 25 bp, Homo sapien
ctggattttgtggtattggtactct

SEQ ID NO: 5221897 - DNA, 25 bp, Homo sapien
gcaagtaggatggagaaaggtctat

SEQ ID NO: 5221898 - DNA, 25 bp, Homo sapien
aaaggtctatacaggaattcaacag

SEQ ID NO: 5221899 - DNA, 25 bp, Homo sapien
aatgagccagaaaccctaatacaac

SEQ ID NO: 5221900 - DNA, 25 bp, Homo sapien
tgatggactaaagcagggtctccct

SEQ ID NO: 5221901 - DNA, 25 bp, Homo sapien
aaagttaggtgtacctgttatagat

SEQ ID NO: 5221902 - DNA, 25 bp, Homo sapien
attttaatgctaaaagccaacaact

SEQ ID NO: 5221903 - DNA, 25 bp, Homo sapien
tgtcttttagagttgctgtttttga

SEQ ID NO: 5221904 - DNA, 25 bp, Homo sapien
gaagtcaactgactagcccagtcag

SEQ ID NO: 5221905 - DNA, 25 bp, Homo sapien
cagctggttaagatgcaaaaatggc

SEQ ID NO: 5221906 - DNA, 25 bp, Homo sapien
tatgacttccatgtacaacttcccc

SEQ ID NO: 5221907 - DNA, 25 bp, Homo sapien
tagctacagaccatctaaaggttag

SEQ ID NO: 5221908 - DNA, 25 bp, Homo sapien
caagctatgaaattcactgcaaggt

SEQ ID NO: 5221909 - DNA, 25 bp, Homo sapien
tgacatctggtaacgctagctgccc

SEQ ID NO: 5221910 - DNA, 25 bp, Homo sapien
tttataaatggctacgacttgtccc

SEQ ID NO: 5221911 - DNA, 25 bp, Homo sapien
gacttgtcccagtgctagtaattca

SEQ ID NO: 5221912 - DNA, 25 bp, Homo sapien
gatttgagatgcctttaccatacag

SEQ ID NO: 5221913 - DNA, 25 bp, Homo sapien
gagtttctcagcagcttaagctgga

SEQ ID NO: 5221914 - DNA, 25 bp, Homo sapien
ttaagctggagttgtcagtgaaggc

SEQ ID NO: 5221915 - DNA, 25 bp, Homo sapien
cagacaagcaccagtattggtgggt

SEQ ID NO: 5221916 - DNA, 25 bp, Homo sapien
tttgcagggtacaggaatactagcc

SEQ ID NO: 5221917 - DNA, 25 bp, Homo sapien
ttttgactggattgtttcaaaagac

SEQ ID NO: 5221918 - DNA, 25 bp, Homo sapien
catatctcttgtaagactgagggag

SEQ ID NO: 5221919 - DNA, 25 bp, Homo sapien
caataggttttcgatgcctttgacc

SEQ ID NO: 5221920 - DNA, 25 bp, Homo sapien
gcttgttgcttcctatatgtcacag

SEQ ID NO: 5221921 - DNA, 25 bp, Homo sapien
cgctattccggaaccgggagcctgt

SEQ ID NO: 5221922 - DNA, 25 bp, Homo sapien
attcaatccttccacgctattccgg

SEQ ID NO: 5221923 - DNA, 25 bp, Homo sapien
tatttcaatctcctgattcaatcct

SEQ ID NO: 5221924 - DNA, 25 bp, Homo sapien
ttggtgatgggaattacaggaataa

SEQ ID NO: 5221925 - DNA, 25 bp, Homo sapien
gatggccatctggaatatcttgcgg

SEQ ID NO: 5221926 - DNA, 25 bp, Homo sapien
cacgatggccatctggaatatcttg

SEQ ID NO: 5221927 - DNA, 25 bp, Homo sapien
gagcacgatggccatctggaatatc

SEQ ID NO: 5221928 - DNA, 25 bp, Homo sapien
gggtggagcacgatggccatctgga

SEQ ID NO: 5221929 - DNA, 25 bp, Homo sapien
ggactctcctcgctaccttcattgg

SEQ ID NO: 5221930 - DNA, 25 bp, Homo sapien
tgtgtgtcaatgctgcgcgtgctgc

SEQ ID NO: 5221931 - DNA, 25 bp, Homo sapien
tctgccccaccaggcgtctgtgtgt

SEQ ID NO: 5221932 - DNA, 25 bp, Homo sapien
tatctctgggatcaacaagcaggtc

SEQ ID NO: 5221933 - DNA, 25 bp, Homo sapien
ttcccttttgaacatataactgttg

SEQ ID NO: 5221934 - DNA, 25 bp, Homo sapien
ttttggtgaggttgcatatttgggc

SEQ ID NO: 5221935 - DNA, 25 bp, Homo sapien
gggcaaaggagaattgttcccattc

SEQ ID NO: 5221936 - DNA, 25 bp, Homo sapien
aagactttgaccctttcacagccct

SEQ ID NO: 5221937 - DNA, 25 bp, Homo sapien
ccattaccatgcaggtggctcagcc

SEQ ID NO: 5221938 - DNA, 25 bp, Homo sapien
tcagcccgatgagcactgcatgtca

SEQ ID NO: 5221939 - DNA, 25 bp, Homo sapien
taaaggaccaaagtgctatctgaca

SEQ ID NO: 5221940 - DNA, 25 bp, Homo sapien
gactaaaactatggtaggcctggct

SEQ ID NO: 5221941 - DNA, 25 bp, Homo sapien
ctagacatagaacagacaacccaat

SEQ ID NO: 5221942 - DNA, 25 bp, Homo sapien
gaaagcagatccacttttaggaatg

SEQ ID NO: 5221943 - DNA, 25 bp, Homo sapien
gtcaggacaataaaaggctgggatt

SEQ ID NO: 5221944 - DNA, 25 bp, Homo sapien
agcagatccacttttaggaatgaaa

SEQ ID NO: 5221945 - DNA, 25 bp, Homo sapien
tgtcaggacaataaaaggctgggat

SEQ ID NO: 5221946 - DNA, 25 bp, Homo sapien
tgtacttgttcctcgagagactcgg

SEQ ID NO: 5221947 - DNA, 25 bp, Homo sapien
gcagcagagtggttgtcatgccagt

SEQ ID NO: 5221948 - DNA, 25 bp, Homo sapien
ctctgtgtttgtagacagggaggcc

SEQ ID NO: 5221949 - DNA, 25 bp, Homo sapien
cagagcccttgagtgtaagatccgg

SEQ ID NO: 5221950 - DNA, 25 bp, Homo sapien
aaatgtcagtcacaggattctgcgg

SEQ ID NO: 5221951 - DNA, 25 bp, Homo sapien
tccagtgatctgaggaggttcccaa

SEQ ID NO: 5221952 - DNA, 25 bp, Homo sapien
cacatgtcactggaaagctggagca

SEQ ID NO: 5221953 - DNA, 25 bp, Homo sapien
gaacggaagtgcaaggccaagaaca

SEQ ID NO: 5221954 - DNA, 25 bp, Homo sapien
ggtaagctatcaagaggcattatca

SEQ ID NO: 5221955 - DNA, 25 bp, Homo sapien
cactggctcccctatggaatgaata

SEQ ID NO: 5221956 - DNA, 25 bp, Homo sapien
caaactgtggccctaaatctaggac

SEQ ID NO: 5221957 - DNA, 25 bp, Homo sapien
taaacattacgcatcagagccagaa

SEQ ID NO: 5221958 - DNA, 25 bp, Homo sapien
ccgaaatggagacatacaagggact

SEQ ID NO: 5221959 - DNA, 25 bp, Homo sapien
caaggaagtccctgttatcgaatac

SEQ ID NO: 5221960 - DNA, 25 bp, Homo sapien
gagcaacattaacttccttagcaag

SEQ ID NO: 5221961 - DNA, 25 bp, Homo sapien
caagtccaaccactgtttttgaaga

SEQ ID NO: 5221962 - DNA, 25 bp, Homo sapien
cgcctcagcctcacaaagtgctgga

SEQ ID NO: 5221963 - DNA, 25 bp, Homo sapien
ctatatttttagtagagatggggtt

SEQ ID NO: 5221964 - DNA, 25 bp, Homo sapien
cctcagcctcacaaagtgctggaat

SEQ ID NO: 5221965 - DNA, 25 bp, Homo sapien
tgcccggctaatttgttctatattt

SEQ ID NO: 5221966 - DNA, 25 bp, Homo sapien
tctctgattcactccaagccgtagg

SEQ ID NO: 5221967 - DNA, 25 bp, Homo sapien
taaatgaagccatacaaaaggtagt

SEQ ID NO: 5221968 - DNA, 25 bp, Homo sapien
gtctctctctatagaaatcagtctg

SEQ ID NO: 5221969 - DNA, 25 bp, Homo sapien
ctatgaaaacatctaggtctaatgc

SEQ ID NO: 5221970 - DNA, 25 bp, Homo sapien
tttttcagtatctatgtcagcaatt

SEQ ID NO: 5221971 - DNA, 25 bp, Homo sapien
tactagttctggaaactgctcaacc

SEQ ID NO: 5221972 - DNA, 25 bp, Homo sapien
tctggccgtttttaggatatgctct

SEQ ID NO: 5221973 - DNA, 25 bp, Homo sapien
gtctcctcttgcatctaatctactg

SEQ ID NO: 5221974 - DNA, 25 bp, Homo sapien
aactctaataagcttatggtgaacc

SEQ ID NO: 5221975 - DNA, 25 bp, Homo sapien
ttttcatcccctcagtaagctctct

SEQ ID NO: 5221976 - DNA, 25 bp, Homo sapien
tatgcccatttgcaataatccctgt

SEQ ID NO: 5221977 - DNA, 25 bp, Homo sapien
tagctaaccactactgtactttttg

SEQ ID NO: 5221978 - DNA, 25 bp, Homo sapien
taatttattactgagtggcactacc

SEQ ID NO: 5221979 - DNA, 25 bp, Homo sapien
taagggcagcgcattcccttctggc

SEQ ID NO: 5221980 - DNA, 25 bp, Homo sapien
aaagcaatccgccttcggaaggatt

SEQ ID NO: 5221981 - DNA, 25 bp, Homo sapien
gccctgggtatgtctaaaaatgtga

SEQ ID NO: 5221982 - DNA, 25 bp, Homo sapien
cctggccgaggtattttcaagtaca

SEQ ID NO: 5221983 - DNA, 25 bp, Homo sapien
gctgtagtagaataatggccttcca

SEQ ID NO: 5221984 - DNA, 25 bp, Homo sapien
gagtgaaaactgatagaggctgtag

SEQ ID NO: 5221985 - DNA, 25 bp, Homo sapien
tactttctgttgcaagagactgtgt

SEQ ID NO: 5221986 - DNA, 25 bp, Homo sapien
ccgggcctcaagtatcttttatgaa

SEQ ID NO: 5221987 - DNA, 25 bp, Homo sapien
ttggcacctctgttagtccattttg

SEQ ID NO: 5221988 - DNA, 25 bp, Homo sapien
catcaccaagccattcaggaggaat

SEQ ID NO: 5221989 - DNA, 25 bp, Homo sapien
tctgatgaggggttcaagtttcttc

SEQ ID NO: 5221990 - DNA, 25 bp, Homo sapien
gggccgaactctgttaaacagccag

SEQ ID NO: 5221991 - DNA, 25 bp, Homo sapien
aggaggcggaagagcggcgccggta

SEQ ID NO: 5221992 - DNA, 25 bp, Homo sapien
agagcggcgccggtaagcttctgct

SEQ ID NO: 5221993 - DNA, 25 bp, Homo sapien
tattccccctcaggcggcggtcagg

SEQ ID NO: 5221994 - DNA, 25 bp, Homo sapien
tgccgggacggatcaccgtacggcc

SEQ ID NO: 5221995 - DNA, 25 bp, Homo sapien
gaatttgaacttggacttatcttgg

SEQ ID NO: 5221996 - DNA, 25 bp, Homo sapien
tatcttggacaagctcttaactggt

SEQ ID NO: 5221997 - DNA, 25 bp, Homo sapien
gtcttcacttgcctaacagaaaggt

SEQ ID NO: 5221998 - DNA, 25 bp, Homo sapien
aagtttttgaacagtcacacaggca

SEQ ID NO: 5221999 - DNA, 25 bp, Homo sapien
taatatatcagaatgcttcctagta

SEQ ID NO: 5222000 - DNA, 25 bp, Homo sapien
ggaactgttgtcaacaatgcataat

SEQ ID NO: 5222001 - DNA, 25 bp, Homo sapien
taccattttggaactgttgtcaaca

SEQ ID NO: 5222002 - DNA, 25 bp, Homo sapien
gcttttctatgagaagatgatcaat

SEQ ID NO: 5222003 - DNA, 25 bp, Homo sapien
tggagaccagcataatgcgcaggcg

SEQ ID NO: 5222004 - DNA, 25 bp, Homo sapien
cgccatggagaccagcataatgcgc

SEQ ID NO: 5222005 - DNA, 25 bp, Homo sapien
gagcagtcccacgacagtaggacca

SEQ ID NO: 5222006 - DNA, 25 bp, Homo sapien
cgcgcagagcagtcccacgacagta

SEQ ID NO: 5222007 - DNA, 25 bp, Homo sapien
gaaaattcaaaacgagtctactcaa

SEQ ID NO: 5222008 - DNA, 25 bp, Homo sapien
agaaaattcaaaacgagtctactca

SEQ ID NO: 5222009 - DNA, 25 bp, Homo sapien
gagaaaattcaaaacgagtctactc

SEQ ID NO: 5222010 - DNA, 25 bp, Homo sapien
cggaggccggcagttgctcggagct

SEQ ID NO: 5222011 - DNA, 25 bp, Homo sapien
gagctccggcgggtcaggaggtgac

SEQ ID NO: 5222012 - DNA, 25 bp, Homo sapien
ggaaggcgccgccagtgaccggctg

SEQ ID NO: 5222013 - DNA, 25 bp, Homo sapien
tagcgtccggtaggtctgcgcagac

SEQ ID NO: 5222014 - DNA, 25 bp, Homo sapien
gagggaccacacattgggcgctccg

SEQ ID NO: 5222015 - DNA, 25 bp, Homo sapien
agcaaggtgcgggacggcgtgaggg

SEQ ID NO: 5222016 - DNA, 25 bp, Homo sapien
gggacggcgtgagggaccacacatt

SEQ ID NO: 5222017 - DNA, 25 bp, Homo sapien
acacattgggcgctccgcccaaggg

SEQ ID NO: 5222018 - DNA, 25 bp, Homo sapien
cggtctgcccataaattttgcaatc

SEQ ID NO: 5222019 - DNA, 25 bp, Homo sapien
tgggatcaggatagttatctccatc

SEQ ID NO: 5222020 - DNA, 25 bp, Homo sapien
tcttgaagcgaatgccttaaaaagt

SEQ ID NO: 5222021 - DNA, 25 bp, Homo sapien
ctgcctgattctaaactgcttgtct

SEQ ID NO: 5222022 - DNA, 25 bp, Homo sapien
ggaaagctttgtcttcacctgcaca

SEQ ID NO: 5222023 - DNA, 25 bp, Homo sapien
aaggaaagctttgtcttcacctgca

SEQ ID NO: 5222024 - DNA, 25 bp, Homo sapien
aaaaggaaagctttgtcttcacctg

SEQ ID NO: 5222025 - DNA, 25 bp, Homo sapien
aagctttgtcttcacctgcacacat

SEQ ID NO: 5222026 - DNA, 25 bp, Homo sapien
taactaaaggtctccgtcaaatgaa

SEQ ID NO: 5222027 - DNA, 25 bp, Homo sapien
aaagcatcagctatcctaggtactg

SEQ ID NO: 5222028 - DNA, 25 bp, Homo sapien
tggaggcaacaccaaacacgacaca

SEQ ID NO: 5222029 - DNA, 25 bp, Homo sapien
ccatgaggaccatatagtaaataca

SEQ ID NO: 5222030 - DNA, 25 bp, Homo sapien
cacagagtgcattaggcttggatcc

SEQ ID NO: 5222031 - DNA, 25 bp, Homo sapien
gcttggatccataatcaaattggaa

SEQ ID NO: 5222032 - DNA, 25 bp, Homo sapien
aaactggaactgtcaagaaacttgc

SEQ ID NO: 5222033 - DNA, 25 bp, Homo sapien
tctttgtatcctatcacactgtggc

SEQ ID NO: 5222034 - DNA, 25 bp, Homo sapien
tcaagcattctactacccccagaaa

SEQ ID NO: 5222035 - DNA, 25 bp, Homo sapien
cttttgggggcactaaatcatgata

SEQ ID NO: 5222036 - DNA, 25 bp, Homo sapien
cttcagatagtggctcaggtttaaa

SEQ ID NO: 5222037 - DNA, 25 bp, Homo sapien
gatagctgtagcttcatttatgtga

SEQ ID NO: 5222038 - DNA, 25 bp, Homo sapien
aatctttgtacccttggacttggca

SEQ ID NO: 5222039 - DNA, 25 bp, Homo sapien
tctttgtacccttggacttggcaaa

SEQ ID NO: 5222040 - DNA, 25 bp, Homo sapien
tgtacccttggacttggcaaagata

SEQ ID NO: 5222041 - DNA, 25 bp, Homo sapien
tttgtacccttggacttggcaaaga

SEQ ID NO: 5222042 - DNA, 25 bp, Homo sapien
aatggatcacagactatcaaatgat

SEQ ID NO: 5222043 - DNA, 25 bp, Homo sapien
cagatagcaaatcaacttgaaatgg

SEQ ID NO: 5222044 - DNA, 25 bp, Homo sapien
ctcacaccagatagcaaatcaactt

SEQ ID NO: 5222045 - DNA, 25 bp, Homo sapien
ggatcacagactatcaaatgataaa

SEQ ID NO: 5222046 - DNA, 25 bp, Homo sapien
ccattcttgtataagcagctgccaa

SEQ ID NO: 5222047 - DNA, 25 bp, Homo sapien
ctggcccattcttgtataagcagct

SEQ ID NO: 5222048 - DNA, 25 bp, Homo sapien
tgtataagcagctgccaaggaggcc

SEQ ID NO: 5222049 - DNA, 25 bp, Homo sapien
attcttgtataagcagctgccaagg

SEQ ID NO: 5222050 - DNA, 25 bp, Homo sapien
tccaggagaagttctaggagttaat

SEQ ID NO: 5222051 - DNA, 25 bp, Homo sapien
ggagaagttctaggagttaatgcag

SEQ ID NO: 5222052 - DNA, 25 bp, Homo sapien
caggagaagttctaggagttaatgc

SEQ ID NO: 5222053 - DNA, 25 bp, Homo sapien
ccatccaggagaagttctaggagtt

SEQ ID NO: 5222054 - DNA, 25 bp, Homo sapien
ctcctccataccaccagacctggca

SEQ ID NO: 5222055 - DNA, 25 bp, Homo sapien
gatgctcctccataccaccagacct

SEQ ID NO: 5222056 - DNA, 25 bp, Homo sapien
tgctcctccataccaccagacctgg

SEQ ID NO: 5222057 - DNA, 25 bp, Homo sapien
atgctcctccataccaccagacctg

SEQ ID NO: 5222058 - DNA, 25 bp, Homo sapien
cagtgtgtccagttgctgctttagg

SEQ ID NO: 5222059 - DNA, 25 bp, Homo sapien
ttgctgctttaggttgttgatgtag

SEQ ID NO: 5222060 - DNA, 25 bp, Homo sapien
tttctccggggtgcatacagcctgg

SEQ ID NO: 5222061 - DNA, 25 bp, Homo sapien
ggtcttgatctgcaatttctccggg

SEQ ID NO: 5222062 - DNA, 25 bp, Homo sapien
aacttcacacttttgatagtcctcc

SEQ ID NO: 5222063 - DNA, 25 bp, Homo sapien
taaacttcacacttttgatagtcct

SEQ ID NO: 5222064 - DNA, 25 bp, Homo sapien
ttaaacttcacacttttgatagtcc

SEQ ID NO: 5222065 - DNA, 25 bp, Homo sapien
aaacttcacacttttgatagtcctc

SEQ ID NO: 5222066 - DNA, 25 bp, Homo sapien
gttcatgtaagctacattcatatcc

SEQ ID NO: 5222067 - DNA, 25 bp, Homo sapien
catgtaagctacattcatatccttc

SEQ ID NO: 5222068 - DNA, 25 bp, Homo sapien
tcatgtaagctacattcatatcctt

SEQ ID NO: 5222069 - DNA, 25 bp, Homo sapien
ttgttcatgtaagctacattcatat

SEQ ID NO: 5222070 - DNA, 25 bp, Homo sapien
atttaaatcgagggagtggctgttg

SEQ ID NO: 5222071 - DNA, 25 bp, Homo sapien
catttaaatcgagggagtggctgtt

SEQ ID NO: 5222072 - DNA, 25 bp, Homo sapien
ccatttaaatcgagggagtggctgt

SEQ ID NO: 5222073 - DNA, 25 bp, Homo sapien
tgccatttaaatcgagggagtggct

SEQ ID NO: 5222074 - DNA, 25 bp, Homo sapien
gcagcttcttgtaagtggagatctt

SEQ ID NO: 5222075 - DNA, 25 bp, Homo sapien
cagcttcttgtaagtggagatcttg

SEQ ID NO: 5222076 - DNA, 25 bp, Homo sapien
actagcttcccattgtggatctcga

SEQ ID NO: 5222077 - DNA, 25 bp, Homo sapien
tcagatactagcttcccattgtgga

SEQ ID NO: 5222078 - DNA, 25 bp, Homo sapien
caggacatcaaaggactcagatact

SEQ ID NO: 5222079 - DNA, 25 bp, Homo sapien
caaaggactcagatactagcttccc

SEQ ID NO: 5222080 - DNA, 25 bp, Homo sapien
caattccattttcttctattattta

SEQ ID NO: 5222081 - DNA, 25 bp, Homo sapien
tattcaattccattttcttctatta

SEQ ID NO: 5222082 - DNA, 25 bp, Homo sapien
tccattttcttctattatttaatag

SEQ ID NO: 5222083 - DNA, 25 bp, Homo sapien
catattcaattccattttcttctat

SEQ ID NO: 5222084 - DNA, 25 bp, Homo sapien
tatggttgactcttaatgaatcatt

SEQ ID NO: 5222085 - DNA, 25 bp, Homo sapien
gactcttcaccgtcattatggttga

SEQ ID NO: 5222086 - DNA, 25 bp, Homo sapien
caccgtcattatggttgactcttaa

SEQ ID NO: 5222087 - DNA, 25 bp, Homo sapien
ttttgactcttcaccgtcattatgg

SEQ ID NO: 5222088 - DNA, 25 bp, Homo sapien
aaaaaggttcccagctgaatccata

SEQ ID NO: 5222089 - DNA, 25 bp, Homo sapien
gaaaaaggttcccagctgaatccat

SEQ ID NO: 5222090 - DNA, 25 bp, Homo sapien
ttatttgcttcacgagtagtgatgg

SEQ ID NO: 5222091 - DNA, 25 bp, Homo sapien
cacgagtagtgatgggcaaaactgt

SEQ ID NO: 5222092 - DNA, 25 bp, Homo sapien
gtgatatgagtgaattatttgcttc

SEQ ID NO: 5222093 - DNA, 25 bp, Homo sapien
gcttcacgagtagtgatgggcaaaa

SEQ ID NO: 5222094 - DNA, 25 bp, Homo sapien
ttggtccactagatggaattgctct

SEQ ID NO: 5222095 - DNA, 25 bp, Homo sapien
tggattcccccaatgactgaagttc

SEQ ID NO: 5222096 - DNA, 25 bp, Homo sapien
tgcagaaagagtctgtgtctgagtc

SEQ ID NO: 5222097 - DNA, 25 bp, Homo sapien
gaagttcatattgaatagcctgccc

SEQ ID NO: 5222098 - DNA, 25 bp, Homo sapien
cttgtgccattcctgtctgggtagg

SEQ ID NO: 5222099 - DNA, 25 bp, Homo sapien
cccgaggactattcacatccacaag

SEQ ID NO: 5222100 - DNA, 25 bp, Homo sapien
cacaagttgcccctgaggtataatc

SEQ ID NO: 5222101 - DNA, 25 bp, Homo sapien
ggaattacacgaagtacctgtccat

SEQ ID NO: 5222102 - DNA, 25 bp, Homo sapien
aagcaggagtcaatcagcttcatag

SEQ ID NO: 5222103 - DNA, 25 bp, Homo sapien
gaggaagcaggagtcaatcagcttc

SEQ ID NO: 5222104 - DNA, 25 bp, Homo sapien
gcaggagtcaatcagcttcatagaa

SEQ ID NO: 5222105 - DNA, 25 bp, Homo sapien
ggaagcaggagtcaatcagcttcat

SEQ ID NO: 5222106 - DNA, 25 bp, Homo sapien
tctgctagagtatccactcttacag

SEQ ID NO: 5222107 - DNA, 25 bp, Homo sapien
ttctgttactgggtttctcttcagg

SEQ ID NO: 5222108 - DNA, 25 bp, Homo sapien
cactgactttttgggcaatgggaag

SEQ ID NO: 5222109 - DNA, 25 bp, Homo sapien
gaagaatgtaattgctggtattgtc

SEQ ID NO: 5222110 - DNA, 25 bp, Homo sapien
agacggcaggcccatataggtgtat

SEQ ID NO: 5222111 - DNA, 25 bp, Homo sapien
ctgaagaggccccagaaggggttct

SEQ ID NO: 5222112 - DNA, 25 bp, Homo sapien
ctcacagctcctaagacggcaggcc

SEQ ID NO: 5222113 - DNA, 25 bp, Homo sapien
cctaagacggcaggcccatataggt

SEQ ID NO: 5222114 - DNA, 25 bp, Homo sapien
gatttccacatcaagcgtgtagcag

SEQ ID NO: 5222115 - DNA, 25 bp, Homo sapien
aacactctgtgtttgctgcttgtga

SEQ ID NO: 5222116 - DNA, 25 bp, Homo sapien
tcatatggaacatactgggatttcc

SEQ ID NO: 5222117 - DNA, 25 bp, Homo sapien
cagtagccacggtatgaatctccaa

SEQ ID NO: 5222118 - DNA, 25 bp, Homo sapien
acaatggactatggctgctgctgaa

SEQ ID NO: 5222119 - DNA, 25 bp, Homo sapien
caatggactatggctgctgctgaac

SEQ ID NO: 5222120 - DNA, 25 bp, Homo sapien
aatggactatggctgctgctgaacc

SEQ ID NO: 5222121 - DNA, 25 bp, Homo sapien
tatgaaagaagtcttatttattcat

SEQ ID NO: 5222122 - DNA, 25 bp, Homo sapien
taatatgcattttaatcaattagca

SEQ ID NO: 5222123 - DNA, 25 bp, Homo sapien
atatgaaagaagtcttatttattca

SEQ ID NO: 5222124 - DNA, 25 bp, Homo sapien
tatatctcattaacctcagaggtcc

SEQ ID NO: 5222125 - DNA, 25 bp, Homo sapien
gaggtccaggatgaaactgcaactc

SEQ ID NO: 5222126 - DNA, 25 bp, Homo sapien
gaaatgggcataattcacaaccagc

SEQ ID NO: 5222127 - DNA, 25 bp, Homo sapien
gcatgagcctccacgtttaaaataa

SEQ ID NO: 5222128 - DNA, 25 bp, Homo sapien
gacaagattgaccatatactgatag

SEQ ID NO: 5222129 - DNA, 25 bp, Homo sapien
tggtacaagctatcaaacccttatg

SEQ ID NO: 5222130 - DNA, 25 bp, Homo sapien
gactcacttggctgcgaaaccaggc

SEQ ID NO: 5222131 - DNA, 25 bp, Homo sapien
tgctaagtcatgaagtaaaagtggg

SEQ ID NO: 5222132 - DNA, 25 bp, Homo sapien
tggctttgtagagctgacaagacct

SEQ ID NO: 5222133 - DNA, 25 bp, Homo sapien
acaagtggctttgtagagctgacaa

SEQ ID NO: 5222134 - DNA, 25 bp, Homo sapien
ttcttggcccatactgacactccat

SEQ ID NO: 5222135 - DNA, 25 bp, Homo sapien
gacactccattaccacagctctact

SEQ ID NO: 5222136 - DNA, 25 bp, Homo sapien
tcttgtcaattttggggtctgtagg

SEQ ID NO: 5222137 - DNA, 25 bp, Homo sapien
ggaactctatattcaggaaacttct

SEQ ID NO: 5222138 - DNA, 25 bp, Homo sapien
tctcctgctccattctgataatttt

SEQ ID NO: 5222139 - DNA, 25 bp, Homo sapien
caccaccagcatctaccaagttctt

SEQ ID NO: 5222140 - DNA, 25 bp, Homo sapien
gagtctctaattcatgatactgatg

SEQ ID NO: 5222141 - DNA, 25 bp, Homo sapien
tatgtgctacttgaggatgtaaacg

SEQ ID NO: 5222142 - DNA, 25 bp, Homo sapien
taaacgtgagggtaatgcacaattc

SEQ ID NO: 5222143 - DNA, 25 bp, Homo sapien
agcttgctgtgtaggtaactgtaca

SEQ ID NO: 5222144 - DNA, 25 bp, Homo sapien
attatgtctttcaggtacctcatcg

SEQ ID NO: 5222145 - DNA, 25 bp, Homo sapien
tacctcatcgggtttgaacagttcc

SEQ ID NO: 5222146 - DNA, 25 bp, Homo sapien
tctctgagttatataccgtatctcc

SEQ ID NO: 5222147 - DNA, 25 bp, Homo sapien
caaggatttctgtacctcatggatg

SEQ ID NO: 5222148 - DNA, 25 bp, Homo sapien
gagaatattcccactgtctgtagtc

SEQ ID NO: 5222149 - DNA, 25 bp, Homo sapien
tcccactgtctgtagtccattgaag

SEQ ID NO: 5222150 - DNA, 25 bp, Homo sapien
tgtaactgtcatggtctctttgaga

SEQ ID NO: 5222151 - DNA, 25 bp, Homo sapien
tattcccactgtctgtagtccattg

SEQ ID NO: 5222152 - DNA, 25 bp, Homo sapien
gacaaagaacccctggtctgatttg

SEQ ID NO: 5222153 - DNA, 25 bp, Homo sapien
gagcaagtgggttggctcaggagac

SEQ ID NO: 5222154 - DNA, 25 bp, Homo sapien
ttgtttccactttggtggtaattga

SEQ ID NO: 5222155 - DNA, 25 bp, Homo sapien
ccactttggtggtaattgattctcc

SEQ ID NO: 5222156 - DNA, 25 bp, Homo sapien
attattattcattacagcacttcct

SEQ ID NO: 5222157 - DNA, 25 bp, Homo sapien
aagtcctgaaggactagaggacggc

SEQ ID NO: 5222158 - DNA, 25 bp, Homo sapien
ttatttactgataccacagctggtg

SEQ ID NO: 5222159 - DNA, 25 bp, Homo sapien
tgttttgggttaagcatgtatctct

SEQ ID NO: 5222160 - DNA, 25 bp, Homo sapien
gaatccgatgaacagttccttccag

SEQ ID NO: 5222161 - DNA, 25 bp, Homo sapien
tctgtattggaatagtctgcacatc

SEQ ID NO: 5222162 - DNA, 25 bp, Homo sapien
tgcacatctcccaacagaatccgat

SEQ ID NO: 5222163 - DNA, 25 bp, Homo sapien
aacttctaccagctcgtccattgca

SEQ ID NO: 5222164 - DNA, 25 bp, Homo sapien
catagacaatgctggttctttgggt

SEQ ID NO: 5222165 - DNA, 25 bp, Homo sapien
tttttgcttccatagacaatgctgg

SEQ ID NO: 5222166 - DNA, 25 bp, Homo sapien
cagataatttcttatagtccacagt

SEQ ID NO: 5222167 - DNA, 25 bp, Homo sapien
ttggctcacagaaatggtactttct

SEQ ID NO: 5222168 - DNA, 25 bp, Homo sapien
ccagtgctggatcttcattacaaaa

SEQ ID NO: 5222169 - DNA, 25 bp, Homo sapien
caattcagtaagagctctggcatag

SEQ ID NO: 5222170 - DNA, 25 bp, Homo sapien
taaaagcttctcatcaaactggtct

SEQ ID NO: 5222171 - DNA, 25 bp, Homo sapien
tgtccagcctagtaccaatctttag

SEQ ID NO: 5222172 - DNA, 25 bp, Homo sapien
gaatattacctatagtgcaacacta

SEQ ID NO: 5222173 - DNA, 25 bp, Homo sapien
gatacatgtcatgtacctgaaacca

SEQ ID NO: 5222174 - DNA, 25 bp, Homo sapien
aatgggaggctggacttagaaaagc

SEQ ID NO: 5222175 - DNA, 25 bp, Homo sapien
gaaaccaagtcaattaagaatggga

SEQ ID NO: 5222176 - DNA, 25 bp, Homo sapien
tgtttgtgggaaagttgctctgtaa

SEQ ID NO: 5222177 - DNA, 25 bp, Homo sapien
aaaaacagtatcagaagagacattc

SEQ ID NO: 5222178 - DNA, 25 bp, Homo sapien
gacattcacacagaatcaagtgaga

SEQ ID NO: 5222179 - DNA, 25 bp, Homo sapien
catcctcacaggtaactgactagag

SEQ ID NO: 5222180 - DNA, 25 bp, Homo sapien
aaaatattgatagctccagtttcta

SEQ ID NO: 5222181 - DNA, 25 bp, Homo sapien
aaatattgatagctccagtttctac

SEQ ID NO: 5222182 - DNA, 25 bp, Homo sapien
aacatgtcaaactttgctgtagagc

SEQ ID NO: 5222183 - DNA, 25 bp, Homo sapien
tagaatgtccaactcactcctacag

SEQ ID NO: 5222184 - DNA, 25 bp, Homo sapien
gagaaagccaatatagatactgaaa

SEQ ID NO: 5222185 - DNA, 25 bp, Homo sapien
gctgtagagctgttagagaaagcca

SEQ ID NO: 5222186 - DNA, 25 bp, Homo sapien
caaggacactatacatcaagttgct

SEQ ID NO: 5222187 - DNA, 25 bp, Homo sapien
gctggtgggtctcagaattagaaac

SEQ ID NO: 5222188 - DNA, 25 bp, Homo sapien
ggaccagatcccaaaagctatgttt

SEQ ID NO: 5222189 - DNA, 25 bp, Homo sapien
tagaaactctaatgcaggaccagat

SEQ ID NO: 5222190 - DNA, 25 bp, Homo sapien
caggttccaaattggacataaatct

SEQ ID NO: 5222191 - DNA, 25 bp, Homo sapien
aattctcgggtattcaagtgtttat

SEQ ID NO: 5222192 - DNA, 25 bp, Homo sapien
tctctggccaaaattctcgggtatt

SEQ ID NO: 5222193 - DNA, 25 bp, Homo sapien
ggttccaaattggacataaatctct

SEQ ID NO: 5222194 - DNA, 25 bp, Homo sapien
tcctggtacatgattcacaccctgt

SEQ ID NO: 5222195 - DNA, 25 bp, Homo sapien
tggcaaaaatatactaaggctttgt

SEQ ID NO: 5222196 - DNA, 25 bp, Homo sapien
cacaccctgtactctggttttagta

SEQ ID NO: 5222197 - DNA, 25 bp, Homo sapien
gatgtttgatgtctaagccagctga

SEQ ID NO: 5222198 - DNA, 25 bp, Homo sapien
gatcacaaagaggtactatgaaact

SEQ ID NO: 5222199 - DNA, 25 bp, Homo sapien
gctgatgatttcatggctgtatgca

SEQ ID NO: 5222200 - DNA, 25 bp, Homo sapien
ttgtagcaaactgatcataaagaaa

SEQ ID NO: 5222201 - DNA, 25 bp, Homo sapien
aaaatgcagttctactcagcagcag

SEQ ID NO: 5222202 - DNA, 25 bp, Homo sapien
tcttgtattttagagccaggatctt

SEQ ID NO: 5222203 - DNA, 25 bp, Homo sapien
atcacacctcactgccatcacaccc

SEQ ID NO: 5222204 - DNA, 25 bp, Homo sapien
tctgaacaaagttacatattttatt

SEQ ID NO: 5222205 - DNA, 25 bp, Homo sapien
tttcttgtattttagagccaggatc

SEQ ID NO: 5222206 - DNA, 25 bp, Homo sapien
ggctgtaactatgactcagggcttt

SEQ ID NO: 5222207 - DNA, 25 bp, Homo sapien
taaggcggtcaacagtgattaaaat

SEQ ID NO: 5222208 - DNA, 25 bp, Homo sapien
tacgagatttagaatttctgtggca

SEQ ID NO: 5222209 - DNA, 25 bp, Homo sapien
gatctgagatctagtagttcctact

SEQ ID NO: 5222210 - DNA, 25 bp, Homo sapien
ggcactgaaacgagccttccctcag

SEQ ID NO: 5222211 - DNA, 25 bp, Homo sapien
tctggctgcccatcccttggcgggc

SEQ ID NO: 5222212 - DNA, 25 bp, Homo sapien
ccccgcttttcgctgatggcgtcat

SEQ ID NO: 5222213 - DNA, 25 bp, Homo sapien
gctgacgtgctgacgtctacgcccg

SEQ ID NO: 5222214 - DNA, 25 bp, Homo sapien
gatgggcggggtgacctgaagcccc

SEQ ID NO: 5222215 - DNA, 25 bp, Homo sapien
atgggcggggtgacctgaagccccg

SEQ ID NO: 5222216 - DNA, 25 bp, Homo sapien
tgggcggggtgacctgaagccccgc

SEQ ID NO: 5222217 - DNA, 25 bp, Homo sapien
gggatgggcggggtgacctgaagcc

SEQ ID NO: 5222218 - DNA, 25 bp, Homo sapien
cggcagctgttcaatggtcgcgtag

SEQ ID NO: 5222219 - DNA, 25 bp, Homo sapien
tgaggatttacccagccgttgggcg

SEQ ID NO: 5222220 - DNA, 25 bp, Homo sapien
tcatttcggccgctgaggatttacc

SEQ ID NO: 5222221 - DNA, 25 bp, Homo sapien
tacccagccgttgggcggcagctgt

SEQ ID NO: 5222222 - DNA, 25 bp, Homo sapien
ccggcagccgtctaactgcttccct

SEQ ID NO: 5222223 - DNA, 25 bp, Homo sapien
cgcccggcagccgtctaactgcttc

SEQ ID NO: 5222224 - DNA, 25 bp, Homo sapien
agccgtctaactgcttccctcgacc

SEQ ID NO: 5222225 - DNA, 25 bp, Homo sapien
ggcagccgtctaactgcttccctcg

SEQ ID NO: 5222226 - DNA, 25 bp, Homo sapien
ggcctctccacctttccatccaaga

SEQ ID NO: 5222227 - DNA, 25 bp, Homo sapien
gcaaacttaaggtgtgccgagctgc

SEQ ID NO: 5222228 - DNA, 25 bp, Homo sapien
aagagaagtgggcacgcacacaccg

SEQ ID NO: 5222229 - DNA, 25 bp, Homo sapien
atcccaagacaacccaaacagaggc

SEQ ID NO: 5222230 - DNA, 25 bp, Homo sapien
gatacaaggaaaaggcccacatctc

SEQ ID NO: 5222231 - DNA, 25 bp, Homo sapien
acagatacaaggaaaaggcccacat

SEQ ID NO: 5222232 - DNA, 25 bp, Homo sapien
cagatacaaggaaaaggcccacatc

SEQ ID NO: 5222233 - DNA, 25 bp, Homo sapien
acaaggaaaaggcccacatctcaga

SEQ ID NO: 5222234 - DNA, 25 bp, Homo sapien
cttcatcagtggtagttgggcaatt

SEQ ID NO: 5222235 - DNA, 25 bp, Homo sapien
tcatcagtggtagttgggcaattaa

SEQ ID NO: 5222236 - DNA, 25 bp, Homo sapien
catcagtggtagttgggcaattaaa

SEQ ID NO: 5222237 - DNA, 25 bp, Homo sapien
atcttcatcagtggtagttgggcaa

SEQ ID NO: 5222238 - DNA, 25 bp, Homo sapien
taaagcatccaaagttcaaagagcc

SEQ ID NO: 5222239 - DNA, 25 bp, Homo sapien
cattctggctttcactctggcactt

SEQ ID NO: 5222240 - DNA, 25 bp, Homo sapien
tccaagtttttcagccgttcagtaa

SEQ ID NO: 5222241 - DNA, 25 bp, Homo sapien
tatgttcaagactacagcatgtcca

SEQ ID NO: 5222242 - DNA, 25 bp, Homo sapien
aaaaagtcagctggtttgagaggct

SEQ ID NO: 5222243 - DNA, 25 bp, Homo sapien
gctacctgattcaaggtgtctgcag

SEQ ID NO: 5222244 - DNA, 25 bp, Homo sapien
tcctgtccaagaagagataggcttc

SEQ ID NO: 5222245 - DNA, 25 bp, Homo sapien
gcagaagagaatgttgtctacctta

SEQ ID NO: 5222246 - DNA, 25 bp, Homo sapien
ctgtagactgaaactcccgagctca

SEQ ID NO: 5222247 - DNA, 25 bp, Homo sapien
catggaaaagtcagcatgcttacct

SEQ ID NO: 5222248 - DNA, 25 bp, Homo sapien
tctttatttccagcacagacctctc

SEQ ID NO: 5222249 - DNA, 25 bp, Homo sapien
cctgaaaacctagttagtgatcttg

SEQ ID NO: 5222250 - DNA, 25 bp, Homo sapien
cagcagggtctgtataaaatatatt

SEQ ID NO: 5222251 - DNA, 25 bp, Homo sapien
cattaatgaaaacaaagtggcacat

SEQ ID NO: 5222252 - DNA, 25 bp, Homo sapien
tctgggtagataccactaccagcct

SEQ ID NO: 5222253 - DNA, 25 bp, Homo sapien
gcctgaaggtaagtcacaaaacatc

SEQ ID NO: 5222254 - DNA, 25 bp, Homo sapien
tcacacagctagtaatggataatgc

SEQ ID NO: 5222255 - DNA, 25 bp, Homo sapien
gaaaagaggagcttcgtcaggatca

SEQ ID NO: 5222256 - DNA, 25 bp, Homo sapien
ctttattgaaacaccagcgtctggc

SEQ ID NO: 5222257 - DNA, 25 bp, Homo sapien
tgctgtttccactacactacaatgg

SEQ ID NO: 5222258 - DNA, 25 bp, Homo sapien
cggttctctccaccggtaaactcat

SEQ ID NO: 5222259 - DNA, 25 bp, Homo sapien
ttcaggcgaagtcttacaacggttc

SEQ ID NO: 5222260 - DNA, 25 bp, Homo sapien
ccaccggtaaactcatgccattaat

SEQ ID NO: 5222261 - DNA, 25 bp, Homo sapien
ttccaagtgagttcccgcacagact

SEQ ID NO: 5222262 - DNA, 25 bp, Homo sapien
tacttccctgggaaggcaatttcat

SEQ ID NO: 5222263 - DNA, 25 bp, Homo sapien
tatgagatctcctggaaatacttcc

SEQ ID NO: 5222264 - DNA, 25 bp, Homo sapien
atgaggtcttccaagcaaatgtcac

SEQ ID NO: 5222265 - DNA, 25 bp, Homo sapien
aatgaggtcttccaagcaaatgtca

SEQ ID NO: 5222266 - DNA, 25 bp, Homo sapien
ctgaaataacaaaaccattataata

SEQ ID NO: 5222267 - DNA, 25 bp, Homo sapien
aaaaccattataatattaagtatgc

SEQ ID NO: 5222268 - DNA, 25 bp, Homo sapien
tgaaataacaaaaccattataatat

SEQ ID NO: 5222269 - DNA, 25 bp, Homo sapien
ataacaaaaccattataatattaag

SEQ ID NO: 5222270 - DNA, 25 bp, Homo sapien
ctaaaaattgttcatagctagaaac

SEQ ID NO: 5222271 - DNA, 25 bp, Homo sapien
tcatagctagaaacaaaagtgtcca

SEQ ID NO: 5222272 - DNA, 25 bp, Homo sapien
aagtcaacgtctaaaaattgttcat

SEQ ID NO: 5222273 - DNA, 25 bp, Homo sapien
tgttcatagctagaaacaaaagtgt

SEQ ID NO: 5222274 - DNA, 25 bp, Homo sapien
actgcatccgacctatatgtctact

SEQ ID NO: 5222275 - DNA, 25 bp, Homo sapien
tatatgtctactttttaaggaatgg

SEQ ID NO: 5222276 - DNA, 25 bp, Homo sapien
cgacctatatgtctactttttaagg

SEQ ID NO: 5222277 - DNA, 25 bp, Homo sapien
gcatccgacctatatgtctactttt

SEQ ID NO: 5222278 - DNA, 25 bp, Homo sapien
agcaaaattgacaaggcttgctgtt

SEQ ID NO: 5222279 - DNA, 25 bp, Homo sapien
gatattcctggaggcatatcatcta

SEQ ID NO: 5222280 - DNA, 25 bp, Homo sapien
ttgacaaggcttgctgttgttcctc

SEQ ID NO: 5222281 - DNA, 25 bp, Homo sapien
tattcctggaggcatatcatctacc

SEQ ID NO: 5222282 - DNA, 25 bp, Homo sapien
ttattgatcaatcattccataattc

SEQ ID NO: 5222283 - DNA, 25 bp, Homo sapien
cataattaatgtacgagcaagtccc

SEQ ID NO: 5222284 - DNA, 25 bp, Homo sapien
ggtgatgacataattaatgtacgag

SEQ ID NO: 5222285 - DNA, 25 bp, Homo sapien
gtacgagcaagtcccaatttcttcc

SEQ ID NO: 5222286 - DNA, 25 bp, Homo sapien
gctgaatatagagtgttgtcatggt

SEQ ID NO: 5222287 - DNA, 25 bp, Homo sapien
gatatggatcatataagctttcaca

SEQ ID NO: 5222288 - DNA, 25 bp, Homo sapien
tatgtctccaattccgatatggatc

SEQ ID NO: 5222289 - DNA, 25 bp, Homo sapien
gaaattctatgtctccaattccgat

SEQ ID NO: 5222290 - DNA, 25 bp, Homo sapien
ccaatgcgtggatcacaaattcttc

SEQ ID NO: 5222291 - DNA, 25 bp, Homo sapien
ctcagtgacttttgaggatgtggct

SEQ ID NO: 5222292 - DNA, 25 bp, Homo sapien
gaagctggaacatggactcagtgac

SEQ ID NO: 5222293 - DNA, 25 bp, Homo sapien
gctgtaaccttcacccctcaggagt

SEQ ID NO: 5222294 - DNA, 25 bp, Homo sapien
ccagaagaaactcttatagagatgt

SEQ ID NO: 5222295 - DNA, 25 bp, Homo sapien
aaattacatatatcatggtccttcc

SEQ ID NO: 5222296 - DNA, 25 bp, Homo sapien
ctctcttaatattttagtgaatatt

SEQ ID NO: 5222297 - DNA, 25 bp, Homo sapien
aaagctaggatcataggtgcaagcc

SEQ ID NO: 5222298 - DNA, 25 bp, Homo sapien
gaatatttactaatagggatatagt

SEQ ID NO: 5222299 - DNA, 25 bp, Homo sapien
gttgacataggagataccattttgt

SEQ ID NO: 5222300 - DNA, 25 bp, Homo sapien
aaagaagttgacataggagatacca

SEQ ID NO: 5222301 - DNA, 25 bp, Homo sapien
tggtaggtgaagtgtgcctctgccc

SEQ ID NO: 5222302 - DNA, 25 bp, Homo sapien
tctggtaggtgaagtgtgcctctgc

SEQ ID NO: 5222303 - DNA, 25 bp, Homo sapien
aaaattcaatcatgtggtagaaaaa

SEQ ID NO: 5222304 - DNA, 25 bp, Homo sapien
gaaagggacgaattccactgtgaga

SEQ ID NO: 5222305 - DNA, 25 bp, Homo sapien
agaaagggacgaattccactgtgag

SEQ ID NO: 5222306 - DNA, 25 bp, Homo sapien
aagaaagggacgaattccactgtga

SEQ ID NO: 5222307 - DNA, 25 bp, Homo sapien
tgcgtcaagcctggacattactaca

SEQ ID NO: 5222308 - DNA, 25 bp, Homo sapien
gaatacccttttgcacatgtcatta

SEQ ID NO: 5222309 - DNA, 25 bp, Homo sapien
tcattacacactgggacaagactgt

SEQ ID NO: 5222310 - DNA, 25 bp, Homo sapien
gagggcatacaccactacaatgtgt

SEQ ID NO: 5222311 - DNA, 25 bp, Homo sapien
gagatgcaataagcaacatttaaga

SEQ ID NO: 5222312 - DNA, 25 bp, Homo sapien
ctacaatggctccaaagagatgcaa

SEQ ID NO: 5222313 - DNA, 25 bp, Homo sapien
agactttccttgagatgttcacttt

SEQ ID NO: 5222314 - DNA, 25 bp, Homo sapien
tgcccaccggctacaatggctccaa

SEQ ID NO: 5222315 - DNA, 25 bp, Homo sapien
ggtttccacttgacgctgatcagag

SEQ ID NO: 5222316 - DNA, 25 bp, Homo sapien
tcgcataagaacttccatagtggct

SEQ ID NO: 5222317 - DNA, 25 bp, Homo sapien
ataaatcggttttcccactgtctgg

SEQ ID NO: 5222318 - DNA, 25 bp, Homo sapien
aggatatgtaccacttctgtaaggc

SEQ ID NO: 5222319 - DNA, 25 bp, Homo sapien
cagttctgtagcagtcgtatgagat

SEQ ID NO: 5222320 - DNA, 25 bp, Homo sapien
gtagcagtcgtatgagatgttcaaa

SEQ ID NO: 5222321 - DNA, 25 bp, Homo sapien
gaacaggtctatctgtacaatctaa

SEQ ID NO: 5222322 - DNA, 25 bp, Homo sapien
aagaacaggtctatctgtacaatct

SEQ ID NO: 5222323 - DNA, 25 bp, Homo sapien
aatgttatttgaccctgaaagggca

SEQ ID NO: 5222324 - DNA, 25 bp, Homo sapien
taaactgaaactctcgctctgaaac

SEQ ID NO: 5222325 - DNA, 25 bp, Homo sapien
gctatcaagtagctggttgcttcaa

SEQ ID NO: 5222326 - DNA, 25 bp, Homo sapien
taaaaagctatgtctcggccaggca

SEQ ID NO: 5222327 - DNA, 25 bp, Homo sapien
cctcaagagagctgaactaacaaca

SEQ ID NO: 5222328 - DNA, 25 bp, Homo sapien
gaactgttccattttagatgtggca

SEQ ID NO: 5222329 - DNA, 25 bp, Homo sapien
ccattttagatgtggcaaatttgaa

SEQ ID NO: 5222330 - DNA, 25 bp, Homo sapien
taagcagctgtagggataagataag

SEQ ID NO: 5222331 - DNA, 25 bp, Homo sapien
accctattacctactggaccagatg

SEQ ID NO: 5222332 - DNA, 25 bp, Homo sapien
tcctgaaaacttgtctcctactctg

SEQ ID NO: 5222333 - DNA, 25 bp, Homo sapien
agtgaggatcttgaaccaccctttc

SEQ ID NO: 5222334 - DNA, 25 bp, Homo sapien
ccgcgtctggcctaaagtgaggatc

SEQ ID NO: 5222335 - DNA, 25 bp, Homo sapien
aatggacttagggtcagaaaacctg

SEQ ID NO: 5222336 - DNA, 25 bp, Homo sapien
gcagccgccagcttaaggttgtcca

SEQ ID NO: 5222337 - DNA, 25 bp, Homo sapien
caaaaagtaatcgtggacatctgtg

SEQ ID NO: 5222338 - DNA, 25 bp, Homo sapien
gacatctgtggcatcatgcggtata

SEQ ID NO: 5222339 - DNA, 25 bp, Homo sapien
cagcttactggctgtctgatttcaa

SEQ ID NO: 5222340 - DNA, 25 bp, Homo sapien
tatggtattatatgttatggaagag

SEQ ID NO: 5222341 - DNA, 25 bp, Homo sapien
tggaagagtatatgtaaggcttaac

SEQ ID NO: 5222342 - DNA, 25 bp, Homo sapien
tgatatatacactacaggccttgga

SEQ ID NO: 5222343 - DNA, 25 bp, Homo sapien
ctgccaccttattgttagcatttaa

SEQ ID NO: 5222344 - DNA, 25 bp, Homo sapien
gttggcaaggtctttctcgttcttg

SEQ ID NO: 5222345 - DNA, 25 bp, Homo sapien
tctgccaccttattgttagcattta

SEQ ID NO: 5222346 - DNA, 25 bp, Homo sapien
tgccaccttattgttagcatttaaa

SEQ ID NO: 5222347 - DNA, 25 bp, Homo sapien
tactgcggtcaaagcctgaatggtt

SEQ ID NO: 5222348 - DNA, 25 bp, Homo sapien
aatggttgatatggccaaacaatcc

SEQ ID NO: 5222349 - DNA, 25 bp, Homo sapien
tggccaaacaatccaattgtccctg

SEQ ID NO: 5222350 - DNA, 25 bp, Homo sapien
ggagatttgttcattactgcggtca

SEQ ID NO: 5222351 - DNA, 25 bp, Homo sapien
tggctgacccagggattttaatact

SEQ ID NO: 5222352 - DNA, 25 bp, Homo sapien
tacttcaagcatatgtgtataacca

SEQ ID NO: 5222353 - DNA, 25 bp, Homo sapien
taatacttcaagcatatgtgtataa

SEQ ID NO: 5222354 - DNA, 25 bp, Homo sapien
gattttaatacttcaagcatatgtg

SEQ ID NO: 5222355 - DNA, 25 bp, Homo sapien
tgtcaggattgctcgagtcacggga

SEQ ID NO: 5222356 - DNA, 25 bp, Homo sapien
tcagcaatctcagtagtcgacggat

SEQ ID NO: 5222357 - DNA, 25 bp, Homo sapien
tgactgactccccaaggaaccatgg

SEQ ID NO: 5222358 - DNA, 25 bp, Homo sapien
gaagccactggataagaagcaagag

SEQ ID NO: 5222359 - DNA, 25 bp, Homo sapien
cctggccatttctgtatgggaggca

SEQ ID NO: 5222360 - DNA, 25 bp, Homo sapien
caagagtcaactgatcctggtctaa

SEQ ID NO: 5222361 - DNA, 25 bp, Homo sapien
cctttgttagcaatgccaagagtca

SEQ ID NO: 5222362 - DNA, 25 bp, Homo sapien
ttctgtatgggaggcacagaaattc

SEQ ID NO: 5222363 - DNA, 25 bp, Homo sapien
taaaggcttcaaaacccatgccact

SEQ ID NO: 5222364 - DNA, 25 bp, Homo sapien
gaagcataaccgttgcatattctct

SEQ ID NO: 5222365 - DNA, 25 bp, Homo sapien
actgtggtcaggaagcataaccgtt

SEQ ID NO: 5222366 - DNA, 25 bp, Homo sapien
caggaagcataaccgttgcatattc

SEQ ID NO: 5222367 - DNA, 25 bp, Homo sapien
tggtcaggaagcataaccgttgcat

SEQ ID NO: 5222368 - DNA, 25 bp, Homo sapien
cattcatggcaggaaatctgagagg

SEQ ID NO: 5222369 - DNA, 25 bp, Homo sapien
tccaggcatgtggacaacagttatg

SEQ ID NO: 5222370 - DNA, 25 bp, Homo sapien
tgtcatagatatagacgaagctctg

SEQ ID NO: 5222371 - DNA, 25 bp, Homo sapien
agaaaccttctgttgtccattgtca

SEQ ID NO: 5222372 - DNA, 25 bp, Homo sapien
taaaagatgataacagatcctagct

SEQ ID NO: 5222373 - DNA, 25 bp, Homo sapien
agctgaccctccagagatgtgggac

SEQ ID NO: 5222374 - DNA, 25 bp, Homo sapien
ggttgtagtggttcataaaagatga

SEQ ID NO: 5222375 - DNA, 25 bp, Homo sapien
tccaccaaatgatgtccgatgaggg

SEQ ID NO: 5222376 - DNA, 25 bp, Homo sapien
caaacaacacagctgaaactcatta

SEQ ID NO: 5222377 - DNA, 25 bp, Homo sapien
tagtattaacaaactattatcagcc

SEQ ID NO: 5222378 - DNA, 25 bp, Homo sapien
tatcagccaggtacagcctgtaatc

SEQ ID NO: 5222379 - DNA, 25 bp, Homo sapien
aatatatatggtctccttggttctg

SEQ ID NO: 5222380 - DNA, 25 bp, Homo sapien
gtaaagaaggatgttaccaggcagg

SEQ ID NO: 5222381 - DNA, 25 bp, Homo sapien
aggcaggtcggccatgtcagactct

SEQ ID NO: 5222382 - DNA, 25 bp, Homo sapien
catgtcagactcttgacacttccaa

SEQ ID NO: 5222383 - DNA, 25 bp, Homo sapien
aaggatgttaccaggcaggtcggcc

SEQ ID NO: 5222384 - DNA, 25 bp, Homo sapien
agttataactagatggacagttcac

SEQ ID NO: 5222385 - DNA, 25 bp, Homo sapien
ttttgatggcaattcaaacccctcc

SEQ ID NO: 5222386 - DNA, 25 bp, Homo sapien
atgataatatttggaccctcgtgga

SEQ ID NO: 5222387 - DNA, 25 bp, Homo sapien
cctcgtggaggaggtataccttaat

SEQ ID NO: 5222388 - DNA, 25 bp, Homo sapien
ctacaaattttagcgcacatgatgt

SEQ ID NO: 5222389 - DNA, 25 bp, Homo sapien
caaattttagcgcacatgatgtagt

SEQ ID NO: 5222390 - DNA, 25 bp, Homo sapien
ttagcgcacatgatgtagttactgc

SEQ ID NO: 5222391 - DNA, 25 bp, Homo sapien
attttagcgcacatgatgtagttac

SEQ ID NO: 5222392 - DNA, 25 bp, Homo sapien
tccttgaatctaatctaatccccat

SEQ ID NO: 5222393 - DNA, 25 bp, Homo sapien
tattcaatccgaattttcaggtaat

SEQ ID NO: 5222394 - DNA, 25 bp, Homo sapien
atctaatccccattccaaaagaaag

SEQ ID NO: 5222395 - DNA, 25 bp, Homo sapien
atgcagcatccttgaatctaatcta

SEQ ID NO: 5222396 - DNA, 25 bp, Homo sapien
aatcaagacagattgaatttttgca

SEQ ID NO: 5222397 - DNA, 25 bp, Homo sapien
catgcaaacaattagtagataaatc

SEQ ID NO: 5222398 - DNA, 25 bp, Homo sapien
cttccatgcaaacaattagtagata

SEQ ID NO: 5222399 - DNA, 25 bp, Homo sapien
tcaagacagattgaatttttgcagg

SEQ ID NO: 5222400 - DNA, 25 bp, Homo sapien
catacgagccaatctccttcaacag

SEQ ID NO: 5222401 - DNA, 25 bp, Homo sapien
aacaggtgttactgattcaggaact

SEQ ID NO: 5222402 - DNA, 25 bp, Homo sapien
acccacctatgcagtttatgatatc

SEQ ID NO: 5222403 - DNA, 25 bp, Homo sapien
gaatctgtccttcactaaagtggct

SEQ ID NO: 5222404 - DNA, 25 bp, Homo sapien
ccctggttgataggatgtctctgaa

SEQ ID NO: 5222405 - DNA, 25 bp, Homo sapien
ctccatgggagtgaataagattgcc

SEQ ID NO: 5222406 - DNA, 25 bp, Homo sapien
aaatgttgcaactaggtttctctct

SEQ ID NO: 5222407 - DNA, 25 bp, Homo sapien
aagcaccaagagttgcaactccatg

SEQ ID NO: 5222408 - DNA, 25 bp, Homo sapien
tcaacacattaacatccatcaaggt

SEQ ID NO: 5222409 - DNA, 25 bp, Homo sapien
aatattgatacatttgttgcaggag

SEQ ID NO: 5222410 - DNA, 25 bp, Homo sapien
tccacggttccaaatacgaaagtca

SEQ ID NO: 5222411 - DNA, 25 bp, Homo sapien
cgattcgaaagggaaaatctccacg

SEQ ID NO: 5222412 - DNA, 25 bp, Homo sapien
aaaagttcaatggtaagtaattcag

SEQ ID NO: 5222413 - DNA, 25 bp, Homo sapien
tgtctttaatgatggttgaaagata

SEQ ID NO: 5222414 - DNA, 25 bp, Homo sapien
tgctgtctttaatgatggttgaaag

SEQ ID NO: 5222415 - DNA, 25 bp, Homo sapien
tctttaatgatggttgaaagatact

SEQ ID NO: 5222416 - DNA, 25 bp, Homo sapien
gtctttaatgatggttgaaagatac

SEQ ID NO: 5222417 - DNA, 25 bp, Homo sapien
tgtatctaggagaaactgcacacca

SEQ ID NO: 5222418 - DNA, 25 bp, Homo sapien
cctaagtgtatctaggagaaactgc

SEQ ID NO: 5222419 - DNA, 25 bp, Homo sapien
tatctaggagaaactgcacaccata

SEQ ID NO: 5222420 - DNA, 25 bp, Homo sapien
taaatcctaagtgtatctaggagaa

SEQ ID NO: 5222421 - DNA, 25 bp, Homo sapien
tgttcgaatatcatctagagatagt

SEQ ID NO: 5222422 - DNA, 25 bp, Homo sapien
tgttcttcttcattagtagcagcta

SEQ ID NO: 5222423 - DNA, 25 bp, Homo sapien
gctatgtaccccataatactttgta

SEQ ID NO: 5222424 - DNA, 25 bp, Homo sapien
catgagatccacctttgcacagaaa

SEQ ID NO: 5222425 - DNA, 25 bp, Homo sapien
aagatgatgtagcaactcaaatgtt

SEQ ID NO: 5222426 - DNA, 25 bp, Homo sapien
gatgatgtagcaactcaaatgttaa

SEQ ID NO: 5222427 - DNA, 25 bp, Homo sapien
ggaaaagtagatgtatcttaggcat

SEQ ID NO: 5222428 - DNA, 25 bp, Homo sapien
aaagtagatgtatcttaggcataat

SEQ ID NO: 5222429 - DNA, 25 bp, Homo sapien
gagcaatgcgtacagtatgtcagca

SEQ ID NO: 5222430 - DNA, 25 bp, Homo sapien
tgaagagcacgtccaaaattccaaa

SEQ ID NO: 5222431 - DNA, 25 bp, Homo sapien
tctgtcagagtacttctgatttaag

SEQ ID NO: 5222432 - DNA, 25 bp, Homo sapien
tgacctctggttgggctggtacgta

SEQ ID NO: 5222433 - DNA, 25 bp, Homo sapien
gagtagccaacttctctgagtcgaa

SEQ ID NO: 5222434 - DNA, 25 bp, Homo sapien
tactacgctcataaacgttcgtgca

SEQ ID NO: 5222435 - DNA, 25 bp, Homo sapien
caagtgcttcattaagaaggagtcc

SEQ ID NO: 5222436 - DNA, 25 bp, Homo sapien
gagtcgaatatgttgtttactacgc

SEQ ID NO: 5222437 - DNA, 25 bp, Homo sapien
tctgcagatggccactctaacattt

SEQ ID NO: 5222438 - DNA, 25 bp, Homo sapien
gtgagatatatataccacagatagt

SEQ ID NO: 5222439 - DNA, 25 bp, Homo sapien
acatttatatgtgctctgtgagata

SEQ ID NO: 5222440 - DNA, 25 bp, Homo sapien
tatatataccacagatagtagatct

SEQ ID NO: 5222441 - DNA, 25 bp, Homo sapien
tgttcagtatgtctacactaaagtc

SEQ ID NO: 5222442 - DNA, 25 bp, Homo sapien
cagtgacatgagaatacgtatgatc

SEQ ID NO: 5222443 - DNA, 25 bp, Homo sapien
taaagtctacattgcttagtaagtc

SEQ ID NO: 5222444 - DNA, 25 bp, Homo sapien
gccactgcttagctagaatagtaaa

SEQ ID NO: 5222445 - DNA, 25 bp, Homo sapien
taactaaggtgtcttgccaacccac

SEQ ID NO: 5222446 - DNA, 25 bp, Homo sapien
gcctaactaaggtgtcttgccaacc

SEQ ID NO: 5222447 - DNA, 25 bp, Homo sapien
aaagcctaactaaggtgtcttgcca

SEQ ID NO: 5222448 - DNA, 25 bp, Homo sapien
ctaaggtgtcttgccaacccacttg

SEQ ID NO: 5222449 - DNA, 25 bp, Homo sapien
aaaacagctctactgtgcttatgaa

SEQ ID NO: 5222450 - DNA, 25 bp, Homo sapien
tatgaagagtatttccgttttcaaa

SEQ ID NO: 5222451 - DNA, 25 bp, Homo sapien
actgtgcttatgaagagtatttccg

SEQ ID NO: 5222452 - DNA, 25 bp, Homo sapien
aacagctctactgtgcttatgaaga

SEQ ID NO: 5222453 - DNA, 25 bp, Homo sapien
caaatgtgaagggttactatgccag

SEQ ID NO: 5222454 - DNA, 25 bp, Homo sapien
tgatccgaagacacattagctgagg

SEQ ID NO: 5222455 - DNA, 25 bp, Homo sapien
gagaagtcatcactaaagcccatat

SEQ ID NO: 5222456 - DNA, 25 bp, Homo sapien
ttcacatgagtcaattccactgagg

SEQ ID NO: 5222457 - DNA, 25 bp, Homo sapien
tggatattcctggtttacttagtgc

SEQ ID NO: 5222458 - DNA, 25 bp, Homo sapien
cgttcaatccaagtatcatcatcag

SEQ ID NO: 5222459 - DNA, 25 bp, Homo sapien
gaaaacacttgtcctcgttcaatcc

SEQ ID NO: 5222460 - DNA, 25 bp, Homo sapien
tcatctgatggtcgaagtagttcac

SEQ ID NO: 5222461 - DNA, 25 bp, Homo sapien
taagacttaaacctcctcatactgg

SEQ ID NO: 5222462 - DNA, 25 bp, Homo sapien
catactggaatgagtttgggattcc

SEQ ID NO: 5222463 - DNA, 25 bp, Homo sapien
cctgctgtcaccaaaaggaggatgg

SEQ ID NO: 5222464 - DNA, 25 bp, Homo sapien
tagatcctactaatacggcaaaaga

SEQ ID NO: 5222465 - DNA, 25 bp, Homo sapien
ggtgtactaccattacagagtccta

SEQ ID NO: 5222466 - DNA, 25 bp, Homo sapien
taaagctggaaattggcaaggttag

SEQ ID NO: 5222467 - DNA, 25 bp, Homo sapien
ttaacaacaatggagaaacgttgaa

SEQ ID NO: 5222468 - DNA, 25 bp, Homo sapien
gatgtaatacttccccggtgtacta

SEQ ID NO: 5222469 - DNA, 25 bp, Homo sapien
taactagtccctctgactgaagaaa

SEQ ID NO: 5222470 - DNA, 25 bp, Homo sapien
cttctcggtccacatgtttgaatta

SEQ ID NO: 5222471 - DNA, 25 bp, Homo sapien
tctgttttctgagattgcccattct

SEQ ID NO: 5222472 - DNA, 25 bp, Homo sapien
tatgatcagcactagtcggaaggcg

SEQ ID NO: 5222473 - DNA, 25 bp, Homo sapien
tgcaaattaccccttccaatgaatc

SEQ ID NO: 5222474 - DNA, 25 bp, Homo sapien
tcctagaagcaactggatctgaatt

SEQ ID NO: 5222475 - DNA, 25 bp, Homo sapien
tcagaatagcagactgacagacagt

SEQ ID NO: 5222476 - DNA, 25 bp, Homo sapien
tgagagagttttacccatactggac

SEQ ID NO: 5222477 - DNA, 25 bp, Homo sapien
ccgggcagcaaacttgtctgatttt

SEQ ID NO: 5222478 - DNA, 25 bp, Homo sapien
ttttataccgggcagcaaacttgtc

SEQ ID NO: 5222479 - DNA, 25 bp, Homo sapien
cccaaatcttttataccgggcagca

SEQ ID NO: 5222480 - DNA, 25 bp, Homo sapien
caaatcttttataccgggcagcaaa

SEQ ID NO: 5222481 - DNA, 25 bp, Homo sapien
gcaagttcatgaagagaagctcata

SEQ ID NO: 5222482 - DNA, 25 bp, Homo sapien
tatttagcttagctgatgccattgc

SEQ ID NO: 5222483 - DNA, 25 bp, Homo sapien
caaaaaatgaggagctaccattggt

SEQ ID NO: 5222484 - DNA, 25 bp, Homo sapien
ccagcttccctaaaatgtaacatgc

SEQ ID NO: 5222485 - DNA, 25 bp, Homo sapien
catgaccatcgtaaaatgtatgagc

SEQ ID NO: 5222486 - DNA, 25 bp, Homo sapien
tcatactgcttcatataaggtacaa

SEQ ID NO: 5222487 - DNA, 25 bp, Homo sapien
aatgtatgagcttcatactgcttca

SEQ ID NO: 5222488 - DNA, 25 bp, Homo sapien
gccatgttctcatgaccatcgtaaa

SEQ ID NO: 5222489 - DNA, 25 bp, Homo sapien
cccggtctcgtttatgcatatttac

SEQ ID NO: 5222490 - DNA, 25 bp, Homo sapien
tgtattgctttccagcgtctaagag

SEQ ID NO: 5222491 - DNA, 25 bp, Homo sapien
catgtaagatagagctgtattgctt

SEQ ID NO: 5222492 - DNA, 25 bp, Homo sapien
gagtggctaactgttgactgctaag

SEQ ID NO: 5222493 - DNA, 25 bp, Homo sapien
tatacctcaggttctcttggcgtgc

SEQ ID NO: 5222494 - DNA, 25 bp, Homo sapien
aaatgcctatcaactgctgactaga

SEQ ID NO: 5222495 - DNA, 25 bp, Homo sapien
aacacagaattatcacacgacccag

SEQ ID NO: 5222496 - DNA, 25 bp, Homo sapien
tatgaatatactcagtgccagtgaa

SEQ ID NO: 5222497 - DNA, 25 bp, Homo sapien
tccattcatagtctatactcaagag

SEQ ID NO: 5222498 - DNA, 25 bp, Homo sapien
gcgggaataattctctacattagct

SEQ ID NO: 5222499 - DNA, 25 bp, Homo sapien
cagcttaagtctcatgcgggaataa

SEQ ID NO: 5222500 - DNA, 25 bp, Homo sapien
gaaattataattcggtaccagctta

SEQ ID NO: 5222501 - DNA, 25 bp, Homo sapien
cactagcttcctcatgggttttgaa

SEQ ID NO: 5222502 - DNA, 25 bp, Homo sapien
tagtgtttatatcatggacagggcc

SEQ ID NO: 5222503 - DNA, 25 bp, Homo sapien
caactgagactaagaagggacataa

SEQ ID NO: 5222504 - DNA, 25 bp, Homo sapien
gaaaaagctatacacaactggctat

SEQ ID NO: 5222505 - DNA, 25 bp, Homo sapien
taatatggaacactatgccttaagt

SEQ ID NO: 5222506 - DNA, 25 bp, Homo sapien
accacgcccggctcacttggagtaa

SEQ ID NO: 5222507 - DNA, 25 bp, Homo sapien
ccacgcccggctcacttggagtaaa

SEQ ID NO: 5222508 - DNA, 25 bp, Homo sapien
tcactacttccaaaagcaatgtatc

SEQ ID NO: 5222509 - DNA, 25 bp, Homo sapien
tgtttcactacttccaaaagcaatg

SEQ ID NO: 5222510 - DNA, 25 bp, Homo sapien
ccaaaagcaatgtatcactggaagg

SEQ ID NO: 5222511 - DNA, 25 bp, Homo sapien
tacttccaaaagcaatgtatcactg

SEQ ID NO: 5222512 - DNA, 25 bp, Homo sapien
cttcaggaaggtctaatttatcctc

SEQ ID NO: 5222513 - DNA, 25 bp, Homo sapien
caggaaggtctaatttatcctccac

SEQ ID NO: 5222514 - DNA, 25 bp, Homo sapien
tcaggaaggtctaatttatcctcca

SEQ ID NO: 5222515 - DNA, 25 bp, Homo sapien
tcttcaggaaggtctaatttatcct

SEQ ID NO: 5222516 - DNA, 25 bp, Homo sapien
gtgataaatagagccatgagtaacc

SEQ ID NO: 5222517 - DNA, 25 bp, Homo sapien
ctgccaggaattacatcaattattg

SEQ ID NO: 5222518 - DNA, 25 bp, Homo sapien
tattgtaatgagttcacagtcttcc

SEQ ID NO: 5222519 - DNA, 25 bp, Homo sapien
gtagtgatttctaatctgccaggaa

SEQ ID NO: 5222520 - DNA, 25 bp, Homo sapien
catagaagtaaatgtgttgagtagt

SEQ ID NO: 5222521 - DNA, 25 bp, Homo sapien
taacgccggagatgaatctctcgaa

SEQ ID NO: 5222522 - DNA, 25 bp, Homo sapien
gagatgaatctctcgaatttgagaa

SEQ ID NO: 5222523 - DNA, 25 bp, Homo sapien
tctcgaatttgagaatgaggccact

SEQ ID NO: 5222524 - DNA, 25 bp, Homo sapien
gatcttcttaaattgtaacgccgga

SEQ ID NO: 5222525 - DNA, 25 bp, Homo sapien
tgaaattgagaaagtagttggattg

SEQ ID NO: 5222526 - DNA, 25 bp, Homo sapien
tgagaaagtagttggattggtcaac

SEQ ID NO: 5222527 - DNA, 25 bp, Homo sapien
ttttgaaattgagaaagtagttgga

SEQ ID NO: 5222528 - DNA, 25 bp, Homo sapien
gaaattgagaaagtagttggattgg

SEQ ID NO: 5222529 - DNA, 25 bp, Homo sapien
aatcctgatgctttgaataactcct

SEQ ID NO: 5222530 - DNA, 25 bp, Homo sapien
tgaagtgacaacagtcggctatata

SEQ ID NO: 5222531 - DNA, 25 bp, Homo sapien
tcctgtggtgatctgcttccataat

SEQ ID NO: 5222532 - DNA, 25 bp, Homo sapien
gacaacagtcggctatatattttgt

SEQ ID NO: 5222533 - DNA, 25 bp, Homo sapien
cacagtctaggtcttgataaaaatt

SEQ ID NO: 5222534 - DNA, 25 bp, Homo sapien
aggtcattataggttcgtcctgcca

SEQ ID NO: 5222535 - DNA, 25 bp, Homo sapien
cacaggatactgtgcaaggtcatta

SEQ ID NO: 5222536 - DNA, 25 bp, Homo sapien
aatttgatatctctctgtttaccca

SEQ ID NO: 5222537 - DNA, 25 bp, Homo sapien
caaaatttgatatctctctgtttac

SEQ ID NO: 5222538 - DNA, 25 bp, Homo sapien
ttggaaagatctcgaaatacagcag

SEQ ID NO: 5222539 - DNA, 25 bp, Homo sapien
tacagcagggttattaaggtccaac

SEQ ID NO: 5222540 - DNA, 25 bp, Homo sapien
gaagtataatcttgtaaaatccagg

SEQ ID NO: 5222541 - DNA, 25 bp, Homo sapien
ttttctctcatagctttggcgtttt

SEQ ID NO: 5222542 - DNA, 25 bp, Homo sapien
tatgagtgtttccttagaacactgt

SEQ ID NO: 5222543 - DNA, 25 bp, Homo sapien
tgtatctatgcaaaaatgtaccact

SEQ ID NO: 5222544 - DNA, 25 bp, Homo sapien
aagtttgactaatggcagtgatggt

SEQ ID NO: 5222545 - DNA, 25 bp, Homo sapien
tttcaggtcaaagccatttgtatct

SEQ ID NO: 5222546 - DNA, 25 bp, Homo sapien
cattataccatactagaaaacgaaa

SEQ ID NO: 5222547 - DNA, 25 bp, Homo sapien
cataagggggcataagtttgtattt

SEQ ID NO: 5222548 - DNA, 25 bp, Homo sapien
taataaagtacataagggggcataa

SEQ ID NO: 5222549 - DNA, 25 bp, Homo sapien
aactctgtattcatatcattatacc

SEQ ID NO: 5222550 - DNA, 25 bp, Homo sapien
tggtgaacggttctacacgaatgag

SEQ ID NO: 5222551 - DNA, 25 bp, Homo sapien
caatagttcccataggatcctcaaa

SEQ ID NO: 5222552 - DNA, 25 bp, Homo sapien
tccactctgaagttggatgtggagg

SEQ ID NO: 5222553 - DNA, 25 bp, Homo sapien
cccgcagaatttgaatagtgagtac

SEQ ID NO: 5222554 - DNA, 25 bp, Homo sapien
aatatttacatagctctggtttggg

SEQ ID NO: 5222555 - DNA, 25 bp, Homo sapien
aagccaaggcttattgtacataaac

SEQ ID NO: 5222556 - DNA, 25 bp, Homo sapien
gatgtttagtgatctgagggccaga

SEQ ID NO: 5222557 - DNA, 25 bp, Homo sapien
taaacagtaaggcaacatggagaca

SEQ ID NO: 5222558 - DNA, 25 bp, Homo sapien
ggcataagccaacatgtttggccag

SEQ ID NO: 5222559 - DNA, 25 bp, Homo sapien
cataagccaacatgtttggccagtt

SEQ ID NO: 5222560 - DNA, 25 bp, Homo sapien
aaaggcataagccaacatgtttggc

SEQ ID NO: 5222561 - DNA, 25 bp, Homo sapien
taagccaacatgtttggccagtttt

SEQ ID NO: 5222562 - DNA, 25 bp, Homo sapien
gagcttgccaggtagcaggaataga

SEQ ID NO: 5222563 - DNA, 25 bp, Homo sapien
ggaatagaatggaactgtcgatctg

SEQ ID NO: 5222564 - DNA, 25 bp, Homo sapien
atagaatggaactgtcgatctgcac

SEQ ID NO: 5222565 - DNA, 25 bp, Homo sapien
ccataagagcttgccaggtagcagg

SEQ ID NO: 5222566 - DNA, 25 bp, Homo sapien
gaatgactatcaggtgggcaacgaa

SEQ ID NO: 5222567 - DNA, 25 bp, Homo sapien
gatagtttagcatcatcagcgccaa

SEQ ID NO: 5222568 - DNA, 25 bp, Homo sapien
cagtatcgcagaaataagtgaggct

SEQ ID NO: 5222569 - DNA, 25 bp, Homo sapien
cataggcagatccaacagtatcgca

SEQ ID NO: 5222570 - DNA, 25 bp, Homo sapien
tttactattagagggactgtgtccc

SEQ ID NO: 5222571 - DNA, 25 bp, Homo sapien
gcagggcatcacagtaaggcagtca

SEQ ID NO: 5222572 - DNA, 25 bp, Homo sapien
cagatgttattcgttgcccacctga

SEQ ID NO: 5222573 - DNA, 25 bp, Homo sapien
tgagaggaactagccaaagccaaaa

SEQ ID NO: 5222574 - DNA, 25 bp, Homo sapien
taccagtgtatcacaagttggagag

SEQ ID NO: 5222575 - DNA, 25 bp, Homo sapien
caatgtatagctagaagtggaggcc

SEQ ID NO: 5222576 - DNA, 25 bp, Homo sapien
tgactgccttactgtgatgccctgc

SEQ ID NO: 5222577 - DNA, 25 bp, Homo sapien
tgtggaacctccctaaagaacacca

SEQ ID NO: 5222578 - DNA, 25 bp, Homo sapien
ggtcgtctacagatttccaaagaat

SEQ ID NO: 5222579 - DNA, 25 bp, Homo sapien
aatgatgtcattctcccgaaatggg

SEQ ID NO: 5222580 - DNA, 25 bp, Homo sapien
cccgaaatgggctaaatcagctgaa

SEQ ID NO: 5222581 - DNA, 25 bp, Homo sapien
taacttgggtcgtctacagatttcc

SEQ ID NO: 5222582 - DNA, 25 bp, Homo sapien
gaagatttcatctataaacatagga

SEQ ID NO: 5222583 - DNA, 25 bp, Homo sapien
ggctaaatcagctgaagatttcatc

SEQ ID NO: 5222584 - DNA, 25 bp, Homo sapien
aattctttggaaatctgtagacgac

SEQ ID NO: 5222585 - DNA, 25 bp, Homo sapien
tcagctgatttagcccatttcggga

SEQ ID NO: 5222586 - DNA, 25 bp, Homo sapien
gaaatctgtagacgacccaagttaa

SEQ ID NO: 5222587 - DNA, 25 bp, Homo sapien
gaaatcttcagctgatttagcccat

SEQ ID NO: 5222588 - DNA, 25 bp, Homo sapien
tgtttatagatgaaatcttcagctg

SEQ ID NO: 5222589 - DNA, 25 bp, Homo sapien
cccatttcgggagaatgacatcatt

SEQ ID NO: 5222590 - DNA, 25 bp, Homo sapien
ccagctgcagtagaggcactcaacg

SEQ ID NO: 5222591 - DNA, 25 bp, Homo sapien
tcttcatgaatggatagatctgatc

SEQ ID NO: 5222592 - DNA, 25 bp, Homo sapien
cagtagaggcactcaacgttttcta

SEQ ID NO: 5222593 - DNA, 25 bp, Homo sapien
gaatatgtttcagctcatcttcatg

SEQ ID NO: 5222594 - DNA, 25 bp, Homo sapien
gatagatctgatctttggctataaa

SEQ ID NO: 5222595 - DNA, 25 bp, Homo sapien
ctttggctataaacagaggggacca

SEQ ID NO: 5222596 - DNA, 25 bp, Homo sapien
tggtcccctctgtttatagccaaag

SEQ ID NO: 5222597 - DNA, 25 bp, Homo sapien
catgaagatgagctgaaacatattc

SEQ ID NO: 5222598 - DNA, 25 bp, Homo sapien
cgttgagtgcctctactgcagctgg

SEQ ID NO: 5222599 - DNA, 25 bp, Homo sapien
gatcagatctatccattcatgaaga

SEQ ID NO: 5222600 - DNA, 25 bp, Homo sapien
tttatagccaaagatcagatctatc

SEQ ID NO: 5222601 - DNA, 25 bp, Homo sapien
tagaaaacgttgagtgcctctactg

SEQ ID NO: 5222602 - DNA, 25 bp, Homo sapien
acactttttctcttgctttaccttg

SEQ ID NO: 5222603 - DNA, 25 bp, Homo sapien
ataaatctatacactttttctcttg

SEQ ID NO: 5222604 - DNA, 25 bp, Homo sapien
cactttttctcttgctttaccttga

SEQ ID NO: 5222605 - DNA, 25 bp, Homo sapien
tataaatctatacactttttctctt

SEQ ID NO: 5222606 - DNA, 25 bp, Homo sapien
taaatctatacactttttctcttgc

SEQ ID NO: 5222607 - DNA, 25 bp, Homo sapien
gtataaatctatacactttttctct

SEQ ID NO: 5222608 - DNA, 25 bp, Homo sapien
agagaaaaagtgtatagatttatac

SEQ ID NO: 5222609 - DNA, 25 bp, Homo sapien
aagagaaaaagtgtatagatttata

SEQ ID NO: 5222610 - DNA, 25 bp, Homo sapien
caagagaaaaagtgtatagatttat

SEQ ID NO: 5222611 - DNA, 25 bp, Homo sapien
gcaagagaaaaagtgtatagattta

SEQ ID NO: 5222612 - DNA, 25 bp, Homo sapien
caaggtaaagcaagagaaaaagtgt

SEQ ID NO: 5222613 - DNA, 25 bp, Homo sapien
tcaaggtaaagcaagagaaaaagtg

SEQ ID NO: 5222614 - DNA, 25 bp, Homo sapien
gggcaaacaccctgtcaattattaa

SEQ ID NO: 5222615 - DNA, 25 bp, Homo sapien
tggatgccttaacagatgagaaaga

SEQ ID NO: 5222616 - DNA, 25 bp, Homo sapien
ggatctggatgccttaacagatgag

SEQ ID NO: 5222617 - DNA, 25 bp, Homo sapien
tgattaataattttgggcaaacacc

SEQ ID NO: 5222618 - DNA, 25 bp, Homo sapien
gcaaacaccctgtcaattattaaag

SEQ ID NO: 5222619 - DNA, 25 bp, Homo sapien
taattttgggcaaacaccctgtcaa

SEQ ID NO: 5222620 - DNA, 25 bp, Homo sapien
ctcatctgttaaggcatccagatcc

SEQ ID NO: 5222621 - DNA, 25 bp, Homo sapien
tctttctcatctgttaaggcatcca

SEQ ID NO: 5222622 - DNA, 25 bp, Homo sapien
taattgacagggtgtttgcccaaaa

SEQ ID NO: 5222623 - DNA, 25 bp, Homo sapien
gtttgcccaaaattattaatcatcc

SEQ ID NO: 5222624 - DNA, 25 bp, Homo sapien
ctttaataattgacagggtgtttgc

SEQ ID NO: 5222625 - DNA, 25 bp, Homo sapien
taataattgacagggtgtttgccca

SEQ ID NO: 5222626 - DNA, 25 bp, Homo sapien
gaatcaaattgctctcggctttcgg

SEQ ID NO: 5222627 - DNA, 25 bp, Homo sapien
ccaaacccagtcttaagaatcaaat

SEQ ID NO: 5222628 - DNA, 25 bp, Homo sapien
atagctaacatctgcccaaaaaggc

SEQ ID NO: 5222629 - DNA, 25 bp, Homo sapien
tagggtatgccattaaaactgtcct

SEQ ID NO: 5222630 - DNA, 25 bp, Homo sapien
catgtatatagccagttactctcag

SEQ ID NO: 5222631 - DNA, 25 bp, Homo sapien
aactgagtacctattagggtatgcc

SEQ ID NO: 5222632 - DNA, 25 bp, Homo sapien
aatataagactttctgagcaaacag

SEQ ID NO: 5222633 - DNA, 25 bp, Homo sapien
gactgagagtaactggctatataca

SEQ ID NO: 5222634 - DNA, 25 bp, Homo sapien
gccgaaagccgagagcaatttgatt

SEQ ID NO: 5222635 - DNA, 25 bp, Homo sapien
ggcataccctaataggtactcagtt

SEQ ID NO: 5222636 - DNA, 25 bp, Homo sapien
ggacagttttaatggcataccctaa

SEQ ID NO: 5222637 - DNA, 25 bp, Homo sapien
gcctttttgggcagatgttagctat

SEQ ID NO: 5222638 - DNA, 25 bp, Homo sapien
aggccaaggtgcaactttcttcggt

SEQ ID NO: 5222639 - DNA, 25 bp, Homo sapien
gaggccaaggtgcaactttcttcgg

SEQ ID NO: 5222640 - DNA, 25 bp, Homo sapien
tgcaactttcttcggtcgtcccgaa

SEQ ID NO: 5222641 - DNA, 25 bp, Homo sapien
ggccaaggtgcaactttcttcggtc

SEQ ID NO: 5222642 - DNA, 25 bp, Homo sapien
gccaaggtgcaactttcttcggtcg

SEQ ID NO: 5222643 - DNA, 25 bp, Homo sapien
ccaaggtgcaactttcttcggtcgt

SEQ ID NO: 5222644 - DNA, 25 bp, Homo sapien
ttcgggacgaccgaagaaagttgca

SEQ ID NO: 5222645 - DNA, 25 bp, Homo sapien
gaccgaagaaagttgcaccttggcc

SEQ ID NO: 5222646 - DNA, 25 bp, Homo sapien
acgaccgaagaaagttgcaccttgg

SEQ ID NO: 5222647 - DNA, 25 bp, Homo sapien
tcgggacgaccgaagaaagttgcac

SEQ ID NO: 5222648 - DNA, 25 bp, Homo sapien
cgaccgaagaaagttgcaccttggc

SEQ ID NO: 5222649 - DNA, 25 bp, Homo sapien
gacgaccgaagaaagttgcaccttg

SEQ ID NO: 5222650 - DNA, 25 bp, Homo sapien
ggtgaagtcggtgccacttctgccc

SEQ ID NO: 5222651 - DNA, 25 bp, Homo sapien
caccggaggtgaagtcggtgccact

SEQ ID NO: 5222652 - DNA, 25 bp, Homo sapien
cggaggtgaagtcggtgccacttct

SEQ ID NO: 5222653 - DNA, 25 bp, Homo sapien
ccggaggtgaagtcggtgccacttc

SEQ ID NO: 5222654 - DNA, 25 bp, Homo sapien
tcgaccccaacgagatcaaagtcgt

SEQ ID NO: 5222655 - DNA, 25 bp, Homo sapien
tgaggtgcaccggaggtgaagtcgg

SEQ ID NO: 5222656 - DNA, 25 bp, Homo sapien
aagtggcaccgacttcacctccggt

SEQ ID NO: 5222657 - DNA, 25 bp, Homo sapien
agaagtggcaccgacttcacctccg

SEQ ID NO: 5222658 - DNA, 25 bp, Homo sapien
tacgactttgatctcgttggggtcg

SEQ ID NO: 5222659 - DNA, 25 bp, Homo sapien
gggcagaagtggcaccgacttcacc

SEQ ID NO: 5222660 - DNA, 25 bp, Homo sapien
gaagtggcaccgacttcacctccgg

SEQ ID NO: 5222661 - DNA, 25 bp, Homo sapien
agtggcaccgacttcacctccggtg

SEQ ID NO: 5222662 - DNA, 25 bp, Homo sapien
cgggtgactggaagggcctgaggat

SEQ ID NO: 5222663 - DNA, 25 bp, Homo sapien
acgggtgactggaagggcctgagga

SEQ ID NO: 5222664 - DNA, 25 bp, Homo sapien
gcaacgggtgactggaagggcctga

SEQ ID NO: 5222665 - DNA, 25 bp, Homo sapien
gatgacattgccaaggcaacgggtg

SEQ ID NO: 5222666 - DNA, 25 bp, Homo sapien
caacgggtgactggaagggcctgag

SEQ ID NO: 5222667 - DNA, 25 bp, Homo sapien
aacgggtgactggaagggcctgagg

SEQ ID NO: 5222668 - DNA, 25 bp, Homo sapien
cctcaggcccttccagtcacccgtt

SEQ ID NO: 5222669 - DNA, 25 bp, Homo sapien
tcacccgttgccttggcaatgtcat

SEQ ID NO: 5222670 - DNA, 25 bp, Homo sapien
atcctcaggcccttccagtcacccg

SEQ ID NO: 5222671 - DNA, 25 bp, Homo sapien
tcctcaggcccttccagtcacccgt

SEQ ID NO: 5222672 - DNA, 25 bp, Homo sapien
ctcaggcccttccagtcacccgttg

SEQ ID NO: 5222673 - DNA, 25 bp, Homo sapien
tcaggcccttccagtcacccgttgc

SEQ ID NO: 5222674 - DNA, 25 bp, Homo sapien
ggtggtgccttctgcctctgccctg

SEQ ID NO: 5222675 - DNA, 25 bp, Homo sapien
gccctgatcatcaaagccctcaagg

SEQ ID NO: 5222676 - DNA, 25 bp, Homo sapien
tgccctgatcatcaaagccctcaag

SEQ ID NO: 5222677 - DNA, 25 bp, Homo sapien
gattgaggtggtgccttctgcctct

SEQ ID NO: 5222678 - DNA, 25 bp, Homo sapien
ccctcaaggaaccaccaagagacag

SEQ ID NO: 5222679 - DNA, 25 bp, Homo sapien
gccctcaaggaaccaccaagagaca

SEQ ID NO: 5222680 - DNA, 25 bp, Homo sapien
tgtctcttggtggttccttgagggc

SEQ ID NO: 5222681 - DNA, 25 bp, Homo sapien
agaggcagaaggcaccacctcaatc

SEQ ID NO: 5222682 - DNA, 25 bp, Homo sapien
ccttgagggctttgatgatcagggc

SEQ ID NO: 5222683 - DNA, 25 bp, Homo sapien
ctgtctcttggtggttccttgaggg

SEQ ID NO: 5222684 - DNA, 25 bp, Homo sapien
tcagggcagaggcagaaggcaccac

SEQ ID NO: 5222685 - DNA, 25 bp, Homo sapien
cttgagggctttgatgatcagggca

SEQ ID NO: 5222686 - DNA, 25 bp, Homo sapien
aaaacattaaacacagtgggaatat

SEQ ID NO: 5222687 - DNA, 25 bp, Homo sapien
aacagaaaaacattaaacacagtgg

SEQ ID NO: 5222688 - DNA, 25 bp, Homo sapien
acagaaaaacattaaacacagtggg

SEQ ID NO: 5222689 - DNA, 25 bp, Homo sapien
agaaacagaaaaacattaaacacag

SEQ ID NO: 5222690 - DNA, 25 bp, Homo sapien
cagaaaaacattaaacacagtggga

SEQ ID NO: 5222691 - DNA, 25 bp, Homo sapien
aaacagaaaaacattaaacacagtg

SEQ ID NO: 5222692 - DNA, 25 bp, Homo sapien
tgatattcccactgtgtttaatgtt

SEQ ID NO: 5222693 - DNA, 25 bp, Homo sapien
tcccactgtgtttaatgtttttctg

SEQ ID NO: 5222694 - DNA, 25 bp, Homo sapien
gatattcccactgtgtttaatgttt

SEQ ID NO: 5222695 - DNA, 25 bp, Homo sapien
gccatcctcatgacatcatcgatga

SEQ ID NO: 5222696 - DNA, 25 bp, Homo sapien
acattgttcgacagatgcggcaccg

SEQ ID NO: 5222697 - DNA, 25 bp, Homo sapien
aacattgttcgacagatgcggcacc

SEQ ID NO: 5222698 - DNA, 25 bp, Homo sapien
cattgttcgacagatgcggcaccga

SEQ ID NO: 5222699 - DNA, 25 bp, Homo sapien
ttgttcgacagatgcggcaccgatc

SEQ ID NO: 5222700 - DNA, 25 bp, Homo sapien
tgttcgacagatgcggcaccgatcc

SEQ ID NO: 5222701 - DNA, 25 bp, Homo sapien
gatcggtgccgcatctgtcgaacaa

SEQ ID NO: 5222702 - DNA, 25 bp, Homo sapien
ggtgccgcatctgtcgaacaatgtt

SEQ ID NO: 5222703 - DNA, 25 bp, Homo sapien
tcatcgatgatgtcatgaggatggc

SEQ ID NO: 5222704 - DNA, 25 bp, Homo sapien
ggatcggtgccgcatctgtcgaaca

SEQ ID NO: 5222705 - DNA, 25 bp, Homo sapien
tcggtgccgcatctgtcgaacaatg

SEQ ID NO: 5222706 - DNA, 25 bp, Homo sapien
cggtgccgcatctgtcgaacaatgt

SEQ ID NO: 5222707 - DNA, 25 bp, Homo sapien
gcacaaaggaaaatatttcaataaa

SEQ ID NO: 5222708 - DNA, 25 bp, Homo sapien
cacaaaggaaaatatttcaataaag

SEQ ID NO: 5222709 - DNA, 25 bp, Homo sapien
aggaaaatatttcaataaaggatca

SEQ ID NO: 5222710 - DNA, 25 bp, Homo sapien
ggaaaatatttcaataaaggatcat

SEQ ID NO: 5222711 - DNA, 25 bp, Homo sapien
gaaaatatttcaataaaggatcatt

SEQ ID NO: 5222712 - DNA, 25 bp, Homo sapien
atgatcctttattgaaatattttcc

SEQ ID NO: 5222713 - DNA, 25 bp, Homo sapien
tttattgaaatattttcctttgtgc

SEQ ID NO: 5222714 - DNA, 25 bp, Homo sapien
tgatcctttattgaaatattttcct

SEQ ID NO: 5222715 - DNA, 25 bp, Homo sapien
ctttattgaaatattttcctttgtg

SEQ ID NO: 5222716 - DNA, 25 bp, Homo sapien
aatgatcctttattgaaatattttc

SEQ ID NO: 5222717 - DNA, 25 bp, Homo sapien
tgacttgagttcaggaaggtgttga

SEQ ID NO: 5222718 - DNA, 25 bp, Homo sapien
gacttgagttcaggaaggtgttgaa

SEQ ID NO: 5222719 - DNA, 25 bp, Homo sapien
atgacttgagttcaggaaggtgttg

SEQ ID NO: 5222720 - DNA, 25 bp, Homo sapien
cataaaagaacgatactgatttttg

SEQ ID NO: 5222721 - DNA, 25 bp, Homo sapien
atagtggaataccatcactaatccc

SEQ ID NO: 5222722 - DNA, 25 bp, Homo sapien
gagacataaaagaacgatactgatt

SEQ ID NO: 5222723 - DNA, 25 bp, Homo sapien
gtggcctttaatagtggaataccat

SEQ ID NO: 5222724 - DNA, 25 bp, Homo sapien
cacagtttgatccttgatgaatgta

SEQ ID NO: 5222725 - DNA, 25 bp, Homo sapien
gtttgatccttgatgaatgtaaagt

SEQ ID NO: 5222726 - DNA, 25 bp, Homo sapien
gatccttgatgaatgtaaagtaatt

SEQ ID NO: 5222727 - DNA, 25 bp, Homo sapien
gatttgtcacagtttgatccttgat

SEQ ID NO: 5222728 - DNA, 25 bp, Homo sapien
gagcaactttgcatcatgtgatact

SEQ ID NO: 5222729 - DNA, 25 bp, Homo sapien
gaatgctattatcccagtatccagc

SEQ ID NO: 5222730 - DNA, 25 bp, Homo sapien
tagaagtgatctctagcccgggagc

SEQ ID NO: 5222731 - DNA, 25 bp, Homo sapien
ccatatgccggatgatgtgtgagat

SEQ ID NO: 5222732 - DNA, 25 bp, Homo sapien
tgtagtatctctggaaccagaaatc

SEQ ID NO: 5222733 - DNA, 25 bp, Homo sapien
tgtgttatttgccatatcatacatg

SEQ ID NO: 5222734 - DNA, 25 bp, Homo sapien
tcaaatgtattccacagtaatctgt

SEQ ID NO: 5222735 - DNA, 25 bp, Homo sapien
tctgtagctaagcaagtcacaatat

SEQ ID NO: 5222736 - DNA, 25 bp, Homo sapien
aaaggtttagatgctaagcccacag

SEQ ID NO: 5222737 - DNA, 25 bp, Homo sapien
tcgttggtgtgtccataaagaatct

SEQ ID NO: 5222738 - DNA, 25 bp, Homo sapien
tctagctcagtgctgatgccgacac

SEQ ID NO: 5222739 - DNA, 25 bp, Homo sapien
gatgccgacactcagtacctcgttg

SEQ ID NO: 5222740 - DNA, 25 bp, Homo sapien
agaactctcacaaggtggtcgtaaa

SEQ ID NO: 5222741 - DNA, 25 bp, Homo sapien
cgtaaagtcctcatgtactgacctt

SEQ ID NO: 5222742 - DNA, 25 bp, Homo sapien
cacaaggtggtcgtaaagtcctcat

SEQ ID NO: 5222743 - DNA, 25 bp, Homo sapien
tcatgtactgacctttctgaatggt

SEQ ID NO: 5222744 - DNA, 25 bp, Homo sapien
gagtagacaacaatatgtccttccc

SEQ ID NO: 5222745 - DNA, 25 bp, Homo sapien
caatatgtccttcccaagatatagc

SEQ ID NO: 5222746 - DNA, 25 bp, Homo sapien
tgctggagtagacaacaatatgtcc

SEQ ID NO: 5222747 - DNA, 25 bp, Homo sapien
cttcccaagatatagccaaattagg

SEQ ID NO: 5222748 - DNA, 25 bp, Homo sapien
aaaacagatgtaatgcattcttatc

SEQ ID NO: 5222749 - DNA, 25 bp, Homo sapien
gagaccctagatacttgccatttat

SEQ ID NO: 5222750 - DNA, 25 bp, Homo sapien
caggatttgagaccctagatacttg

SEQ ID NO: 5222751 - DNA, 25 bp, Homo sapien
ttccttcaggatttgagaccctaga

SEQ ID NO: 5222752 - DNA, 25 bp, Homo sapien
ctgtggagatctcttatagacagga

SEQ ID NO: 5222753 - DNA, 25 bp, Homo sapien
gatctcttatagacaggaatccttg

SEQ ID NO: 5222754 - DNA, 25 bp, Homo sapien
tagacaggaatccttgtatgctgcc

SEQ ID NO: 5222755 - DNA, 25 bp, Homo sapien
ggaatccttgtatgctgcctgtgac

SEQ ID NO: 5222756 - DNA, 25 bp, Homo sapien
taggcagtcgcatggctaatgggtt

SEQ ID NO: 5222757 - DNA, 25 bp, Homo sapien
tctaaacctacaagaatatggctgt

SEQ ID NO: 5222758 - DNA, 25 bp, Homo sapien
gctaatgggttgatgctgagattca

SEQ ID NO: 5222759 - DNA, 25 bp, Homo sapien
tgacacaaacacaatggataggcag

SEQ ID NO: 5222760 - DNA, 25 bp, Homo sapien
atttgtttatccctaatggtgactt

SEQ ID NO: 5222761 - DNA, 25 bp, Homo sapien
gaaccaaagtaatccccaacagcat

SEQ ID NO: 5222762 - DNA, 25 bp, Homo sapien
tgtttatccctaatggtgacttctc

SEQ ID NO: 5222763 - DNA, 25 bp, Homo sapien
tgaaggagaaccaaagtaatcccca

SEQ ID NO: 5222764 - DNA, 25 bp, Homo sapien
gaactgtcttattcctatagagtgg

SEQ ID NO: 5222765 - DNA, 25 bp, Homo sapien
tctaagttgtggtcttgaatctaga

SEQ ID NO: 5222766 - DNA, 25 bp, Homo sapien
tgcaaaggctcttatgtattgaaaa

SEQ ID NO: 5222767 - DNA, 25 bp, Homo sapien
tatagagtggtagatagaattgcca

SEQ ID NO: 5222768 - DNA, 25 bp, Homo sapien
caggaacataccatcatgcttagct

SEQ ID NO: 5222769 - DNA, 25 bp, Homo sapien
gaacataccatcatgcttagctaat

SEQ ID NO: 5222770 - DNA, 25 bp, Homo sapien
ggaacataccatcatgcttagctaa

SEQ ID NO: 5222771 - DNA, 25 bp, Homo sapien
tacaggaacataccatcatgcttag

SEQ ID NO: 5222772 - DNA, 25 bp, Homo sapien
tagaatttgcagtactgttaatgcc

SEQ ID NO: 5222773 - DNA, 25 bp, Homo sapien
tgccaatcataaggataagaagaaa

SEQ ID NO: 5222774 - DNA, 25 bp, Homo sapien
aacacacctggctcaaaattattct

SEQ ID NO: 5222775 - DNA, 25 bp, Homo sapien
ctaacaagacatacaggtttggaga

SEQ ID NO: 5222776 - DNA, 25 bp, Homo sapien
gagccgcttgctcgatccccaaaat

SEQ ID NO: 5222777 - DNA, 25 bp, Homo sapien
gctcgatccccaaaattttcgagaa

SEQ ID NO: 5222778 - DNA, 25 bp, Homo sapien
tggaatcttgagtattatattcagt

SEQ ID NO: 5222779 - DNA, 25 bp, Homo sapien
gaaatctggctgagccgcttgctcg

SEQ ID NO: 5222780 - DNA, 25 bp, Homo sapien
aaaagggcactggatactgtggtca

SEQ ID NO: 5222781 - DNA, 25 bp, Homo sapien
tacaatgacctttaggaatgggcca

SEQ ID NO: 5222782 - DNA, 25 bp, Homo sapien
gcacaatttcagagggattcacaag

SEQ ID NO: 5222783 - DNA, 25 bp, Homo sapien
aatcaatcatgttagttctgccgac

SEQ ID NO: 5222784 - DNA, 25 bp, Homo sapien
tgattttcaatacaagtactctgaa

SEQ ID NO: 5222785 - DNA, 25 bp, Homo sapien
attttcaatacaagtactctgaagg

SEQ ID NO: 5222786 - DNA, 25 bp, Homo sapien
tcaaccgtcaaatctgaattctaat

SEQ ID NO: 5222787 - DNA, 25 bp, Homo sapien
gattttcaatacaagtactctgaag

SEQ ID NO: 5222788 - DNA, 25 bp, Homo sapien
aggcgcttgccagcacacaaggcta

SEQ ID NO: 5222789 - DNA, 25 bp, Homo sapien
cactatattgttgcctaaggtcatc

SEQ ID NO: 5222790 - DNA, 25 bp, Homo sapien
taatatccattaagaaccactggcc

SEQ ID NO: 5222791 - DNA, 25 bp, Homo sapien
gaaaactctatagaacaatgctctg

SEQ ID NO: 5222792 - DNA, 25 bp, Homo sapien
gctgtacctgcaaaagtcattggaa

SEQ ID NO: 5222793 - DNA, 25 bp, Homo sapien
tcaccaaacgaaggagatgtgtctg

SEQ ID NO: 5222794 - DNA, 25 bp, Homo sapien
tacgctctgaattgactatgtgcat

SEQ ID NO: 5222795 - DNA, 25 bp, Homo sapien
tccaagggcctaaaataagtgcaaa

SEQ ID NO: 5222796 - DNA, 25 bp, Homo sapien
tcatctctgttgttttgttattctg

SEQ ID NO: 5222797 - DNA, 25 bp, Homo sapien
tctctgttgttttgttattctggat

SEQ ID NO: 5222798 - DNA, 25 bp, Homo sapien
atctctgttgttttgttattctgga

SEQ ID NO: 5222799 - DNA, 25 bp, Homo sapien
catctctgttgttttgttattctgg

SEQ ID NO: 5222800 - DNA, 25 bp, Homo sapien
taatgaagcacgtaactaacatggc

SEQ ID NO: 5222801 - DNA, 25 bp, Homo sapien
gatgaattaacgcaggaagtttcca

SEQ ID NO: 5222802 - DNA, 25 bp, Homo sapien
aaaagcaaggcagtcttaatgaagc

SEQ ID NO: 5222803 - DNA, 25 bp, Homo sapien
tggctttgattgtccagtgactgag

SEQ ID NO: 5222804 - DNA, 25 bp, Homo sapien
ggatttcggtgcacacgatttcaga

SEQ ID NO: 5222805 - DNA, 25 bp, Homo sapien
tcggaccgggttgctggcgaaagca

SEQ ID NO: 5222806 - DNA, 25 bp, Homo sapien
aatatgcccgcgacttcggaccggg

SEQ ID NO: 5222807 - DNA, 25 bp, Homo sapien
ttgctggcgaaagcagagcccagct

SEQ ID NO: 5222808 - DNA, 25 bp, Homo sapien
ggagccacgtctcggatcggccgct

SEQ ID NO: 5222809 - DNA, 25 bp, Homo sapien
gggcgtgaccgaggcctgcggccgg

SEQ ID NO: 5222810 - DNA, 25 bp, Homo sapien
aaagagcaatggatcgccgaggagc

SEQ ID NO: 5222811 - DNA, 25 bp, Homo sapien
caatttaaggcatagcgtgtgggcg

SEQ ID NO: 5222812 - DNA, 25 bp, Homo sapien
gcaagaaggtaacggcgaagatcgc

SEQ ID NO: 5222813 - DNA, 25 bp, Homo sapien
tcccaccaacgccagcaagaaggta

SEQ ID NO: 5222814 - DNA, 25 bp, Homo sapien
gaggtagagcacggctcccaccaac

SEQ ID NO: 5222815 - DNA, 25 bp, Homo sapien
taacggcgaagatcgcgaagtccaa

SEQ ID NO: 5222816 - DNA, 25 bp, Homo sapien
taatccctggaattcctgcagcttg

SEQ ID NO: 5222817 - DNA, 25 bp, Homo sapien
tggagtaatccctggaattcctgca

SEQ ID NO: 5222818 - DNA, 25 bp, Homo sapien
ttttcttcagttggagtaatccctg

SEQ ID NO: 5222819 - DNA, 25 bp, Homo sapien
tccctggaattcctgcagcttgtct

SEQ ID NO: 5222820 - DNA, 25 bp, Homo sapien
atgcaaacttccactattcacaata

SEQ ID NO: 5222821 - DNA, 25 bp, Homo sapien
tctctcatgcaaattaaccaggaac

SEQ ID NO: 5222822 - DNA, 25 bp, Homo sapien
aaactaaccacgaggcgcctgccaa

SEQ ID NO: 5222823 - DNA, 25 bp, Homo sapien
gattgatatgctgcttcagtacatc

SEQ ID NO: 5222824 - DNA, 25 bp, Homo sapien
aatatttctgtatcaaaataatcac

SEQ ID NO: 5222825 - DNA, 25 bp, Homo sapien
gaaacagacaaattaaatatttctg

SEQ ID NO: 5222826 - DNA, 25 bp, Homo sapien
tgaaacagacaaattaaatatttct

SEQ ID NO: 5222827 - DNA, 25 bp, Homo sapien
atttctgtatcaaaataatcactca

SEQ ID NO: 5222828 - DNA, 25 bp, Homo sapien
ctcatgtggttttcactcacactgc

SEQ ID NO: 5222829 - DNA, 25 bp, Homo sapien
taggaggagggcaaagttactcttc

SEQ ID NO: 5222830 - DNA, 25 bp, Homo sapien
gattgataccttaataatgacttca

SEQ ID NO: 5222831 - DNA, 25 bp, Homo sapien
gagaatcagtcacaccattttcata

SEQ ID NO: 5222832 - DNA, 25 bp, Homo sapien
ggaaatatagtgtgaccgcatctct

SEQ ID NO: 5222833 - DNA, 25 bp, Homo sapien
cacaggcacaattatcactcacaat

SEQ ID NO: 5222834 - DNA, 25 bp, Homo sapien
aggattttaagagtagcataggaaa

SEQ ID NO: 5222835 - DNA, 25 bp, Homo sapien
taaaagtggatactgtaaaggcctg

SEQ ID NO: 5222836 - DNA, 25 bp, Homo sapien
tctgtgtaacagacttcatagcaaa

SEQ ID NO: 5222837 - DNA, 25 bp, Homo sapien
aaaccaagcatatgctggctgaggg

SEQ ID NO: 5222838 - DNA, 25 bp, Homo sapien
tcaaatgtactacccattaccatct

SEQ ID NO: 5222839 - DNA, 25 bp, Homo sapien
catgattcttctggaagcgaatgac

SEQ ID NO: 5222840 - DNA, 25 bp, Homo sapien
cgggtttgggtggttctctgcctca

SEQ ID NO: 5222841 - DNA, 25 bp, Homo sapien
ctccatcacccagagctgaagtgca

SEQ ID NO: 5222842 - DNA, 25 bp, Homo sapien
ttttttggagtgagacaagagtctc

SEQ ID NO: 5222843 - DNA, 25 bp, Homo sapien
cacgcccggccaagatctttctttt

SEQ ID NO: 5222844 - DNA, 25 bp, Homo sapien
ttttccgagtcatgtttttatcaag

SEQ ID NO: 5222845 - DNA, 25 bp, Homo sapien
ttttatcaagtgacccatctagaaa

SEQ ID NO: 5222846 - DNA, 25 bp, Homo sapien
tttttccgagtcatgtttttatcaa

SEQ ID NO: 5222847 - DNA, 25 bp, Homo sapien
tgtttttatcaagtgacccatctag

SEQ ID NO: 5222848 - DNA, 25 bp, Homo sapien
ggaggcggaggttgctgtggccgag

SEQ ID NO: 5222849 - DNA, 25 bp, Homo sapien
tccagcctggcaacagagcgagact

SEQ ID NO: 5222850 - DNA, 25 bp, Homo sapien
actccagcctggcaacagagcgaga

SEQ ID NO: 5222851 - DNA, 25 bp, Homo sapien
aggttgctgtggccgagatcgcacc

SEQ ID NO: 5222852 - DNA, 25 bp, Homo sapien
aaaacagactccagttgcatgaggg

SEQ ID NO: 5222853 - DNA, 25 bp, Homo sapien
ttaaaacagactccagttgcatgag

SEQ ID NO: 5222854 - DNA, 25 bp, Homo sapien
taaaacagactccagttgcatgagg

SEQ ID NO: 5222855 - DNA, 25 bp, Homo sapien
cttccttttcgttcttttatgatgt

SEQ ID NO: 5222856 - DNA, 25 bp, Homo sapien
ccttccttttcgttcttttatgatg

SEQ ID NO: 5222857 - DNA, 25 bp, Homo sapien
tccttttcgttcttttatgatgttc

SEQ ID NO: 5222858 - DNA, 25 bp, Homo sapien
ctgataaacatttaacaattatatc

SEQ ID NO: 5222859 - DNA, 25 bp, Homo sapien
tgataaacatttaacaattatatca

SEQ ID NO: 5222860 - DNA, 25 bp, Homo sapien
gataaacatttaacaattatatcac

SEQ ID NO: 5222861 - DNA, 25 bp, Homo sapien
ggcagtattgtcaacaagccacact

SEQ ID NO: 5222862 - DNA, 25 bp, Homo sapien
ggtatgttggcagtattgtcaacaa

SEQ ID NO: 5222863 - DNA, 25 bp, Homo sapien
tgttggcagtattgtcaacaagcca

SEQ ID NO: 5222864 - DNA, 25 bp, Homo sapien
tattgtcaacaagccacactgccac

SEQ ID NO: 5222865 - DNA, 25 bp, Homo sapien
ggccagagaaaatatcatactgtct

SEQ ID NO: 5222866 - DNA, 25 bp, Homo sapien
tattatgcaactggccagagaaaat

SEQ ID NO: 5222867 - DNA, 25 bp, Homo sapien
ccagagaaaatatcatactgtcttc

SEQ ID NO: 5222868 - DNA, 25 bp, Homo sapien
ttttgcagttattatgcaactggcc

SEQ ID NO: 5222869 - DNA, 25 bp, Homo sapien
cctctgaaaaagaaatcaatttata

SEQ ID NO: 5222870 - DNA, 25 bp, Homo sapien
tctgaaaaagaaatcaatttatact

SEQ ID NO: 5222871 - DNA, 25 bp, Homo sapien
agtaattcctctgaaaaagaaatca

SEQ ID NO: 5222872 - DNA, 25 bp, Homo sapien
tgaaaaagaaatcaatttatactta

SEQ ID NO: 5222873 - DNA, 25 bp, Homo sapien
taaaaaacagattgcccaggtacac

SEQ ID NO: 5222874 - DNA, 25 bp, Homo sapien
ttaaaaaacagattgcccaggtaca

SEQ ID NO: 5222875 - DNA, 25 bp, Homo sapien
aaaaaacagattgcccaggtacaca

SEQ ID NO: 5222876 - DNA, 25 bp, Homo sapien
ctggagtaacaggaccatttccaaa

SEQ ID NO: 5222877 - DNA, 25 bp, Homo sapien
tggagtaacaggaccatttccaaaa

SEQ ID NO: 5222878 - DNA, 25 bp, Homo sapien
ctgggcagaaactggagtcagtttg

SEQ ID NO: 5222879 - DNA, 25 bp, Homo sapien
cagaaactggagtcagtttggcagt

SEQ ID NO: 5222880 - DNA, 25 bp, Homo sapien
gtttggcagttcgaacagtttcaca

SEQ ID NO: 5222881 - DNA, 25 bp, Homo sapien
ttggcagttcgaacagtttcacaaa

SEQ ID NO: 5222882 - DNA, 25 bp, Homo sapien
caaatttaaaatacacaccaggctg

SEQ ID NO: 5222883 - DNA, 25 bp, Homo sapien
atttaaaatacacaccaggctgggt

SEQ ID NO: 5222884 - DNA, 25 bp, Homo sapien
caagagcaaacctctgtctaaaata

SEQ ID NO: 5222885 - DNA, 25 bp, Homo sapien
aagagcaaacctctgtctaaaatat

SEQ ID NO: 5222886 - DNA, 25 bp, Homo sapien
ttgtgtggagatggccaagtattag

SEQ ID NO: 5222887 - DNA, 25 bp, Homo sapien
ggatcctgaagtaccacaccaaggg

SEQ ID NO: 5222888 - DNA, 25 bp, Homo sapien
tgaagtaccacaccaagggcataaa

SEQ ID NO: 5222889 - DNA, 25 bp, Homo sapien
gccaagtattaggatcctgaagtac

SEQ ID NO: 5222890 - DNA, 25 bp, Homo sapien
tcaacagttaggaaaggaatgcaaa

SEQ ID NO: 5222891 - DNA, 25 bp, Homo sapien
ctactcaacagttaggaaaggaatg

SEQ ID NO: 5222892 - DNA, 25 bp, Homo sapien
gttaggaaaggaatgcaaaacgtgc

SEQ ID NO: 5222893 - DNA, 25 bp, Homo sapien
aggaatgcaaaacgtgcaaacacaa

SEQ ID NO: 5222894 - DNA, 25 bp, Homo sapien
cttacatgttgacactaaaagaaca

SEQ ID NO: 5222895 - DNA, 25 bp, Homo sapien
tagctccactggcatcttacatgtt

SEQ ID NO: 5222896 - DNA, 25 bp, Homo sapien
gaacacaagtatgtaacaaagttaa

SEQ ID NO: 5222897 - DNA, 25 bp, Homo sapien
gaaaatttgaggttaatcacaatat

SEQ ID NO: 5222898 - DNA, 25 bp, Homo sapien
tcctgtgtgcctgagaatccaagtg

SEQ ID NO: 5222899 - DNA, 25 bp, Homo sapien
catcatcaaaccgatctggatcaaa

SEQ ID NO: 5222900 - DNA, 25 bp, Homo sapien
agttttcattactaattcatcatca

SEQ ID NO: 5222901 - DNA, 25 bp, Homo sapien
ctgtgtgcctgagaatccaagtgag

SEQ ID NO: 5222902 - DNA, 25 bp, Homo sapien
gtttcaataacctgtccctccacag

SEQ ID NO: 5222903 - DNA, 25 bp, Homo sapien
ttcaccaatacactaagaagtactg

SEQ ID NO: 5222904 - DNA, 25 bp, Homo sapien
tgagacagtgatccaagcttcttcc

SEQ ID NO: 5222905 - DNA, 25 bp, Homo sapien
gatgatgttaccagttcatactttg

SEQ ID NO: 5222906 - DNA, 25 bp, Homo sapien
aatgatcaatatactgtgcagtaag

SEQ ID NO: 5222907 - DNA, 25 bp, Homo sapien
tcaatatactgtgcagtaagtcaaa

SEQ ID NO: 5222908 - DNA, 25 bp, Homo sapien
attaaaatgatcaatatactgtgca

SEQ ID NO: 5222909 - DNA, 25 bp, Homo sapien
cagtaagtcaaatgtgtacaatgaa

SEQ ID NO: 5222910 - DNA, 25 bp, Homo sapien
caagaacattgattttagagctcac

SEQ ID NO: 5222911 - DNA, 25 bp, Homo sapien
aagaacattgattttagagctcaca

SEQ ID NO: 5222912 - DNA, 25 bp, Homo sapien
tcaagaacattgattttagagctca

SEQ ID NO: 5222913 - DNA, 25 bp, Homo sapien
cgcacgccagcatgtccagataatt

SEQ ID NO: 5222914 - DNA, 25 bp, Homo sapien
ttatcactcaggtttggctgagggc

SEQ ID NO: 5222915 - DNA, 25 bp, Homo sapien
ttggcatatttcctacagtggctgt

SEQ ID NO: 5222916 - DNA, 25 bp, Homo sapien
gagaatgagtttcactcgacaccca

SEQ ID NO: 5222917 - DNA, 25 bp, Homo sapien
catctgatctgacacttggtttaca

SEQ ID NO: 5222918 - DNA, 25 bp, Homo sapien
gccagtttccaacccattcgaggta

SEQ ID NO: 5222919 - DNA, 25 bp, Homo sapien
caattggctactctaaccttctacc

SEQ ID NO: 5222920 - DNA, 25 bp, Homo sapien
caaaggaagatgctctatacacaca

SEQ ID NO: 5222921 - DNA, 25 bp, Homo sapien
gagtcacttgataagtacaaagaac

SEQ ID NO: 5222922 - DNA, 25 bp, Homo sapien
catttgttagtcatgtaactatgga

SEQ ID NO: 5222923 - DNA, 25 bp, Homo sapien
tgcccggccatgcttatgtttttta

SEQ ID NO: 5222924 - DNA, 25 bp, Homo sapien
gatagttcaataacttgagtcctgc

SEQ ID NO: 5222925 - DNA, 25 bp, Homo sapien
ggctcaccacaaccttcccctactg

SEQ ID NO: 5222926 - DNA, 25 bp, Homo sapien
ttcaggtgatctgcccgcctcagcc

SEQ ID NO: 5222927 - DNA, 25 bp, Homo sapien
cttcaggtgatctgcccgcctcagc

SEQ ID NO: 5222928 - DNA, 25 bp, Homo sapien
ctcaccacaaccttcccctactggg

SEQ ID NO: 5222929 - DNA, 25 bp, Homo sapien
tgttagcacaagtttgagagagctc

SEQ ID NO: 5222930 - DNA, 25 bp, Homo sapien
cacatgcacagaattaatattgcct

SEQ ID NO: 5222931 - DNA, 25 bp, Homo sapien
actatgactgttaactgagtttgac

SEQ ID NO: 5222932 - DNA, 25 bp, Homo sapien
ttttgtgggccaaataagcactatg

SEQ ID NO: 5222933 - DNA, 25 bp, Homo sapien
atctgtgcctacattcagagtgaca

SEQ ID NO: 5222934 - DNA, 25 bp, Homo sapien
cagagtgacaagaatactaatgttc

SEQ ID NO: 5222935 - DNA, 25 bp, Homo sapien
ttatagaaacaagcttttgccacgt

SEQ ID NO: 5222936 - DNA, 25 bp, Homo sapien
gtagaaaagactattggttcagaat

SEQ ID NO: 5222937 - DNA, 25 bp, Homo sapien
aagaaagggaccgagcgcggtggct

SEQ ID NO: 5222938 - DNA, 25 bp, Homo sapien
aaataactaaatacactactggcca

SEQ ID NO: 5222939 - DNA, 25 bp, Homo sapien
ggcatgtgccccaaaggccagttaa

SEQ ID NO: 5222940 - DNA, 25 bp, Homo sapien
tggttgagacggattttcgctcgtc

SEQ ID NO: 5222941 - DNA, 25 bp, Homo sapien
tttcttggttgagacggattttcgc

SEQ ID NO: 5222942 - DNA, 25 bp, Homo sapien
atgtgccccaaaggccagttaagtt

SEQ ID NO: 5222943 - DNA, 25 bp, Homo sapien
taaatattagtggtatattattctc

SEQ ID NO: 5222944 - DNA, 25 bp, Homo sapien
aaatattagtggtatattattctct

SEQ ID NO: 5222945 - DNA, 25 bp, Homo sapien
aatattagtggtatattattctctc

SEQ ID NO: 5222946 - DNA, 25 bp, Homo sapien
gccacggcaccagccaaaaatttct

SEQ ID NO: 5222947 - DNA, 25 bp, Homo sapien
ttcgcccgcctccacacccactaat

SEQ ID NO: 5222948 - DNA, 25 bp, Homo sapien
attcgcccgcctccacacccactaa

SEQ ID NO: 5222949 - DNA, 25 bp, Homo sapien
acattcgcccgcctccacacccact

SEQ ID NO: 5222950 - DNA, 25 bp, Homo sapien
tcgcccgcctccacacccactaatt

SEQ ID NO: 5222951 - DNA, 25 bp, Homo sapien
ttaagtgaaaagtaactcatgctgc

SEQ ID NO: 5222952 - DNA, 25 bp, Homo sapien
aactcatgctgcaatgaacgtacta

SEQ ID NO: 5222953 - DNA, 25 bp, Homo sapien
tgaacgtactatgtaaaaatgtatg

SEQ ID NO: 5222954 - DNA, 25 bp, Homo sapien
tcatgctgcaatgaacgtactatgt

SEQ ID NO: 5222955 - DNA, 25 bp, Homo sapien
ggtggttggcgtgcgactgtagtcc

SEQ ID NO: 5222956 - DNA, 25 bp, Homo sapien
gtaggtagattatgagcacaagaga

SEQ ID NO: 5222957 - DNA, 25 bp, Homo sapien
tagattatgagcacaagagatcgag

SEQ ID NO: 5222958 - DNA, 25 bp, Homo sapien
agctgggggtggttggcgtgcgact

SEQ ID NO: 5222959 - DNA, 25 bp, Homo sapien
aaagcaagccaacgggccgggcgca

SEQ ID NO: 5222960 - DNA, 25 bp, Homo sapien
tatctagaaagcaagccaacgggcc

SEQ ID NO: 5222961 - DNA, 25 bp, Homo sapien
tagaaagcaagccaacgggccgggc

SEQ ID NO: 5222962 - DNA, 25 bp, Homo sapien
aacaagatctattcccagtatctag

SEQ ID NO: 5222963 - DNA, 25 bp, Homo sapien
tattctatgtgcacagaacaccggc

SEQ ID NO: 5222964 - DNA, 25 bp, Homo sapien
tgtgcacagaacaccggcaataaag

SEQ ID NO: 5222965 - DNA, 25 bp, Homo sapien
atttcatttcataccatcaagtgtt

SEQ ID NO: 5222966 - DNA, 25 bp, Homo sapien
gggacaggtactttatgactttatg

SEQ ID NO: 5222967 - DNA, 25 bp, Homo sapien
aaagtagctttatggatagcttggc

SEQ ID NO: 5222968 - DNA, 25 bp, Homo sapien
tataaatctatgttcacatctaaca

SEQ ID NO: 5222969 - DNA, 25 bp, Homo sapien
atggagtattcagcacatcacaaag

SEQ ID NO: 5222970 - DNA, 25 bp, Homo sapien
tctaacacaggcatgagtggaaggc

SEQ ID NO: 5222971 - DNA, 25 bp, Homo sapien
tattcaggtggttcacttttaaggc

SEQ ID NO: 5222972 - DNA, 25 bp, Homo sapien
aatttgtctctagatcatgtcaggc

SEQ ID NO: 5222973 - DNA, 25 bp, Homo sapien
cataagatctggcacacatggtcaa

SEQ ID NO: 5222974 - DNA, 25 bp, Homo sapien
tatccccagtgtgtagcataagatc

SEQ ID NO: 5222975 - DNA, 25 bp, Homo sapien
caaaataaagaggctcattggactt

SEQ ID NO: 5222976 - DNA, 25 bp, Homo sapien
aaagaggctcattggacttacaatt

SEQ ID NO: 5222977 - DNA, 25 bp, Homo sapien
aaataaagaggctcattggacttac

SEQ ID NO: 5222978 - DNA, 25 bp, Homo sapien
aaaataaagaggctcattggactta

SEQ ID NO: 5222979 - DNA, 25 bp, Homo sapien
gcaagtacctctgcttatgagcctg

SEQ ID NO: 5222980 - DNA, 25 bp, Homo sapien
caagtacctctgcttatgagcctgt

SEQ ID NO: 5222981 - DNA, 25 bp, Homo sapien
tgccctctaaagtcagacatgtccg

SEQ ID NO: 5222982 - DNA, 25 bp, Homo sapien
tacaaccaagaaggatagccctcag

SEQ ID NO: 5222983 - DNA, 25 bp, Homo sapien
catagttgctcaaattccacttctc

SEQ ID NO: 5222984 - DNA, 25 bp, Homo sapien
tcagaaaccaccgagtcacaagtac

SEQ ID NO: 5222985 - DNA, 25 bp, Homo sapien
aatgtctacccatatgactaagtga

SEQ ID NO: 5222986 - DNA, 25 bp, Homo sapien
gaataagggtattcttggccaccaa

SEQ ID NO: 5222987 - DNA, 25 bp, Homo sapien
catgtatcctcttggaaggaaagga

SEQ ID NO: 5222988 - DNA, 25 bp, Homo sapien
tggccaccaattgctattttcatga

SEQ ID NO: 5222989 - DNA, 25 bp, Homo sapien
tcgtgcctggagtcctacctactca

SEQ ID NO: 5222990 - DNA, 25 bp, Homo sapien
tggctcgtgcctggagtcctaccta

SEQ ID NO: 5222991 - DNA, 25 bp, Homo sapien
gtatggggcaacatagacttttgtc

SEQ ID NO: 5222992 - DNA, 25 bp, Homo sapien
tatggggcaacatagacttttgtct

SEQ ID NO: 5222993 - DNA, 25 bp, Homo sapien
caaagttgattccaggcagtaccat

SEQ ID NO: 5222994 - DNA, 25 bp, Homo sapien
aaatcactttaggacgggcgcggtg

SEQ ID NO: 5222995 - DNA, 25 bp, Homo sapien
tgtgtagttagaacaagatccattg

SEQ ID NO: 5222996 - DNA, 25 bp, Homo sapien
taatctggtgatctcttggccctcc

SEQ ID NO: 5222997 - DNA, 25 bp, Homo sapien
gccatttctatgattcgcttcctca

SEQ ID NO: 5222998 - DNA, 25 bp, Homo sapien
tctaatgctatcaacttcgctgtcc

SEQ ID NO: 5222999 - DNA, 25 bp, Homo sapien
cagctttttatgtttgccatttcta

SEQ ID NO: 5223000 - DNA, 25 bp, Homo sapien
aaacgattttgctagtagtaattgc

SEQ ID NO: 5223001 - DNA, 25 bp, Homo sapien
agccgacggactccgaggacggtca

SEQ ID NO: 5223002 - DNA, 25 bp, Homo sapien
ctcggaaggagcgagaaacagcccc

SEQ ID NO: 5223003 - DNA, 25 bp, Homo sapien
actccgaggacggtcaccgcggcga

SEQ ID NO: 5223004 - DNA, 25 bp, Homo sapien
cctcatacaggtcgcagagggagcg

SEQ ID NO: 5223005 - DNA, 25 bp, Homo sapien
ccgttccagatttgtgtagctgtcg

SEQ ID NO: 5223006 - DNA, 25 bp, Homo sapien
gatttgtgtagctgtcgaagagggc

SEQ ID NO: 5223007 - DNA, 25 bp, Homo sapien
tccagatttgtgtagctgtcgaaga

SEQ ID NO: 5223008 - DNA, 25 bp, Homo sapien
cgttccagatttgtgtagctgtcga

SEQ ID NO: 5223009 - DNA, 25 bp, Homo sapien
agttgttctcgcagtaatcggccac

SEQ ID NO: 5223010 - DNA, 25 bp, Homo sapien
tgtagttgttctcgcagtaatcggc

SEQ ID NO: 5223011 - DNA, 25 bp, Homo sapien
tatgtagttgttctcgcagtaatcg

SEQ ID NO: 5223012 - DNA, 25 bp, Homo sapien
ctgtatgtagttgttctcgcagtaa

SEQ ID NO: 5223013 - DNA, 25 bp, Homo sapien
gcaagataaccccttaaaaatcatc

SEQ ID NO: 5223014 - DNA, 25 bp, Homo sapien
ctgcagcaagataaccccttaaaaa

SEQ ID NO: 5223015 - DNA, 25 bp, Homo sapien
aatcatccagaatttgggggatgga

SEQ ID NO: 5223016 - DNA, 25 bp, Homo sapien
aagcctgaagcacttcactctgcag

SEQ ID NO: 5223017 - DNA, 25 bp, Homo sapien
tttcctagtagccatagtcaactgc

SEQ ID NO: 5223018 - DNA, 25 bp, Homo sapien
ggttcgggtcattctcaaatacaaa

SEQ ID NO: 5223019 - DNA, 25 bp, Homo sapien
ttcgaaggaacaggtttatacagtg

SEQ ID NO: 5223020 - DNA, 25 bp, Homo sapien
tatacagtggttcgggtcattctca

SEQ ID NO: 5223021 - DNA, 25 bp, Homo sapien
ttctcacgtgaaccaagcaagaact

SEQ ID NO: 5223022 - DNA, 25 bp, Homo sapien
agtgctggcacgtacttctggtgag

SEQ ID NO: 5223023 - DNA, 25 bp, Homo sapien
catctgacccataccaaagagtttt

SEQ ID NO: 5223024 - DNA, 25 bp, Homo sapien
ctcacttatcactaaagggatggtg

SEQ ID NO: 5223025 - DNA, 25 bp, Homo sapien
gatagccaccctaacaagtgtgagg

SEQ ID NO: 5223026 - DNA, 25 bp, Homo sapien
tcttttgatagccaccctaacaagt

SEQ ID NO: 5223027 - DNA, 25 bp, Homo sapien
gtgaggtgacagctcctttttgttt

SEQ ID NO: 5223028 - DNA, 25 bp, Homo sapien
ctgcttgccaacacttatctctctt

SEQ ID NO: 5223029 - DNA, 25 bp, Homo sapien
gctcttctataacgactagtagcga

SEQ ID NO: 5223030 - DNA, 25 bp, Homo sapien
tgactgtacgagactgaaacactga

SEQ ID NO: 5223031 - DNA, 25 bp, Homo sapien
gctacaacattaggacggctaccat

SEQ ID NO: 5223032 - DNA, 25 bp, Homo sapien
gagacacagacgtattagcctaacc

SEQ ID NO: 5223033 - DNA, 25 bp, Homo sapien
gcatttgaatacctaaacatagaga

SEQ ID NO: 5223034 - DNA, 25 bp, Homo sapien
gagagttttaacataatggtaagca

SEQ ID NO: 5223035 - DNA, 25 bp, Homo sapien
cttacaggactagaacatgtctggg

SEQ ID NO: 5223036 - DNA, 25 bp, Homo sapien
acttaccatcaacgcagcttacagg

SEQ ID NO: 5223037 - DNA, 25 bp, Homo sapien
ggaagcaccagaggatatgcactgt

SEQ ID NO: 5223038 - DNA, 25 bp, Homo sapien
gcaccagaggatatgcactgtcaaa

SEQ ID NO: 5223039 - DNA, 25 bp, Homo sapien
tcaggaagcaccagaggatatgcac

SEQ ID NO: 5223040 - DNA, 25 bp, Homo sapien
aagcaccagaggatatgcactgtca

SEQ ID NO: 5223041 - DNA, 25 bp, Homo sapien
tgcctcaactgttctatcccaaacc

SEQ ID NO: 5223042 - DNA, 25 bp, Homo sapien
ccaccaaatttgtttcccttcatca

SEQ ID NO: 5223043 - DNA, 25 bp, Homo sapien
ctcaactgttctatcccaaaccacc

SEQ ID NO: 5223044 - DNA, 25 bp, Homo sapien
caactgttctatcccaaaccaccaa

SEQ ID NO: 5223045 - DNA, 25 bp, Homo sapien
ggtcattcctggtatctaaattctc

SEQ ID NO: 5223046 - DNA, 25 bp, Homo sapien
ttcctggtatctaaattctccattt

SEQ ID NO: 5223047 - DNA, 25 bp, Homo sapien
aggtcattcctggtatctaaattct

SEQ ID NO: 5223048 - DNA, 25 bp, Homo sapien
tcattcctggtatctaaattctcca

SEQ ID NO: 5223049 - DNA, 25 bp, Homo sapien
tatagtacaatcactcaaaatttcg

SEQ ID NO: 5223050 - DNA, 25 bp, Homo sapien
acagacacagctttgagaaagggta

SEQ ID NO: 5223051 - DNA, 25 bp, Homo sapien
aagggtacctcgctcaataaatgac

SEQ ID NO: 5223052 - DNA, 25 bp, Homo sapien
cactcaaaatttcgattcctgcaaa

SEQ ID NO: 5223053 - DNA, 25 bp, Homo sapien
caacacttgctaaggattgggtggt

SEQ ID NO: 5223054 - DNA, 25 bp, Homo sapien
tggccaaggtgtttatcagataggc

SEQ ID NO: 5223055 - DNA, 25 bp, Homo sapien
ccaaggtgtttatcagataggcaac

SEQ ID NO: 5223056 - DNA, 25 bp, Homo sapien
tatcagataggcaacacttgctaag

SEQ ID NO: 5223057 - DNA, 25 bp, Homo sapien
ttcgtagctgggatgcctggatatc

SEQ ID NO: 5223058 - DNA, 25 bp, Homo sapien
tggatatccagcatctgcaggacat

SEQ ID NO: 5223059 - DNA, 25 bp, Homo sapien
cgtagctgggatgcctggatatcca

SEQ ID NO: 5223060 - DNA, 25 bp, Homo sapien
ccttcgtagctgggatgcctggata

SEQ ID NO: 5223061 - DNA, 25 bp, Homo sapien
aaatatgattgattgaagattccat

SEQ ID NO: 5223062 - DNA, 25 bp, Homo sapien
gtgaaatatgattgattgaagattc

SEQ ID NO: 5223063 - DNA, 25 bp, Homo sapien
gaaatatgattgattgaagattcca

SEQ ID NO: 5223064 - DNA, 25 bp, Homo sapien
ttgtgaaatatgattgattgaagat

SEQ ID NO: 5223065 - DNA, 25 bp, Homo sapien
tcattatagggctgattatgttacc

SEQ ID NO: 5223066 - DNA, 25 bp, Homo sapien
tccaaatcgtacatgtgagttaact

SEQ ID NO: 5223067 - DNA, 25 bp, Homo sapien
gctgccagcattacagatagcctgt

SEQ ID NO: 5223068 - DNA, 25 bp, Homo sapien
gggttcctcataggcaaataggaaa

SEQ ID NO: 5223069 - DNA, 25 bp, Homo sapien
tatactcaaaatctagggtggctga

SEQ ID NO: 5223070 - DNA, 25 bp, Homo sapien
gaattgcagatctattacccctcca

SEQ ID NO: 5223071 - DNA, 25 bp, Homo sapien
gaaggttcgacgtattcctgacagc

SEQ ID NO: 5223072 - DNA, 25 bp, Homo sapien
tcctgacagctttgactgaggcctc

SEQ ID NO: 5223073 - DNA, 25 bp, Homo sapien
acctcaggtgatccggccaccctta

SEQ ID NO: 5223074 - DNA, 25 bp, Homo sapien
ctcaggtgatccggccacccttagc

SEQ ID NO: 5223075 - DNA, 25 bp, Homo sapien
cctcaggtgatccggccacccttag

SEQ ID NO: 5223076 - DNA, 25 bp, Homo sapien
caatctcaaactgcaattgtttcca

SEQ ID NO: 5223077 - DNA, 25 bp, Homo sapien
gactcaagatcaacgcctctaattt

SEQ ID NO: 5223078 - DNA, 25 bp, Homo sapien
tggtcacaaaagtcgactcaagatc

SEQ ID NO: 5223079 - DNA, 25 bp, Homo sapien
cattcaatctcaaactgcaattgtt

SEQ ID NO: 5223080 - DNA, 25 bp, Homo sapien
tctaatataacgaactggtcgttca

SEQ ID NO: 5223081 - DNA, 25 bp, Homo sapien
tctagaattgtatagtcaataggtt

SEQ ID NO: 5223082 - DNA, 25 bp, Homo sapien
tcgttcaaggttggctggagcaata

SEQ ID NO: 5223083 - DNA, 25 bp, Homo sapien
tactccatgtccaatatcatctaga

SEQ ID NO: 5223084 - DNA, 25 bp, Homo sapien
tacttgagataaggtaaacactttc

SEQ ID NO: 5223085 - DNA, 25 bp, Homo sapien
acctatcacttttacctaacactat

SEQ ID NO: 5223086 - DNA, 25 bp, Homo sapien
gaaaaattcaaagtacatgtctatt

SEQ ID NO: 5223087 - DNA, 25 bp, Homo sapien
aatagctacacactcaaaagcagtg

SEQ ID NO: 5223088 - DNA, 25 bp, Homo sapien
tatgcctgggctcttccaatcaaat

SEQ ID NO: 5223089 - DNA, 25 bp, Homo sapien
caaaggttgatgttactacaaaggt

SEQ ID NO: 5223090 - DNA, 25 bp, Homo sapien
tcaaaggttgatgttactacaaagg

SEQ ID NO: 5223091 - DNA, 25 bp, Homo sapien
tccaggtgctgtgtcggataaattt

SEQ ID NO: 5223092 - DNA, 25 bp, Homo sapien
gctgtgtcggataaatttttaagag

SEQ ID NO: 5223093 - DNA, 25 bp, Homo sapien
gaaagccctggctatctcaaaaagc

SEQ ID NO: 5223094 - DNA, 25 bp, Homo sapien
taagtcagagctggaccgtaactcc

SEQ ID NO: 5223095 - DNA, 25 bp, Homo sapien
taatctgggaataatggaggtcacc

SEQ ID NO: 5223096 - DNA, 25 bp, Homo sapien
gttagcacttatacagaaagccctg

SEQ ID NO: 5223097 - DNA, 25 bp, Homo sapien
ggaaaactcaacttgtatgcagtga

SEQ ID NO: 5223098 - DNA, 25 bp, Homo sapien
tatttgccattaggccatcacacca

SEQ ID NO: 5223099 - DNA, 25 bp, Homo sapien
tacagttgtactcaaaggactcttc

SEQ ID NO: 5223100 - DNA, 25 bp, Homo sapien
cacaccaacagatcactggttagat

SEQ ID NO: 5223101 - DNA, 25 bp, Homo sapien
tggaggtgttgtacgcggcagccca

SEQ ID NO: 5223102 - DNA, 25 bp, Homo sapien
ctttccctgacatagggggactagg

SEQ ID NO: 5223103 - DNA, 25 bp, Homo sapien
gagttggaggtgttgtacgcggcag

SEQ ID NO: 5223104 - DNA, 25 bp, Homo sapien
ggaggtgttgtacgcggcagcccac

SEQ ID NO: 5223105 - DNA, 25 bp, Homo sapien
tttacaataaactatgaacttgggc

SEQ ID NO: 5223106 - DNA, 25 bp, Homo sapien
tacacagcttaaaaaggatagttgg

SEQ ID NO: 5223107 - DNA, 25 bp, Homo sapien
cctggcctgaagctcaatattctta

SEQ ID NO: 5223108 - DNA, 25 bp, Homo sapien
gaacttgggctaggattttacctca

SEQ ID NO: 5223109 - DNA, 25 bp, Homo sapien
tttggtaccactggaggacgcactg

SEQ ID NO: 5223110 - DNA, 25 bp, Homo sapien
catattacgggttgggctaggtacg

SEQ ID NO: 5223111 - DNA, 25 bp, Homo sapien
gacgcactggctccagtgtgcgata

SEQ ID NO: 5223112 - DNA, 25 bp, Homo sapien
gctctgctgcgagggagccatatta

SEQ ID NO: 5223113 - DNA, 25 bp, Homo sapien
tactatgaccatcacattttgcact

SEQ ID NO: 5223114 - DNA, 25 bp, Homo sapien
ctgaacagattatggtactatgacc

SEQ ID NO: 5223115 - DNA, 25 bp, Homo sapien
tggtactatgaccatcacattttgc

SEQ ID NO: 5223116 - DNA, 25 bp, Homo sapien
cagattatggtactatgaccatcac

SEQ ID NO: 5223117 - DNA, 25 bp, Homo sapien
tctcgactgctgctccgactacttg

SEQ ID NO: 5223118 - DNA, 25 bp, Homo sapien
actgttctctcgactgctgctccga

SEQ ID NO: 5223119 - DNA, 25 bp, Homo sapien
gactacttgggtggctccctccact

SEQ ID NO: 5223120 - DNA, 25 bp, Homo sapien
gagtaggaacagcaataggaacccc

SEQ ID NO: 5223121 - DNA, 25 bp, Homo sapien
gaaacctcaaagcagcaactgagcc

SEQ ID NO: 5223122 - DNA, 25 bp, Homo sapien
taagtgtgtatctcctcgaatcaaa

SEQ ID NO: 5223123 - DNA, 25 bp, Homo sapien
gactgcactgtcataacactagctg

SEQ ID NO: 5223124 - DNA, 25 bp, Homo sapien
gagccacatcaccaaaggcataaag

SEQ ID NO: 5223125 - DNA, 25 bp, Homo sapien
acagtagcaggaacaagaggagcag

SEQ ID NO: 5223126 - DNA, 25 bp, Homo sapien
aaggggaggagtgccagcagagcca

SEQ ID NO: 5223127 - DNA, 25 bp, Homo sapien
ggcagtggaggaagggacagtagca

SEQ ID NO: 5223128 - DNA, 25 bp, Homo sapien
atgcagaagtagcaggaaggggagg

SEQ ID NO: 5223129 - DNA, 25 bp, Homo sapien
gagaagtgaagccatcagcaagggt

SEQ ID NO: 5223130 - DNA, 25 bp, Homo sapien
aaaactgtatagaaggtagctccat

SEQ ID NO: 5223131 - DNA, 25 bp, Homo sapien
caggaaatgctaatctttggtcaca

SEQ ID NO: 5223132 - DNA, 25 bp, Homo sapien
caagaacctgttactagccagcatc

SEQ ID NO: 5223133 - DNA, 25 bp, Homo sapien
taaaaatagacttacagaggctttc

SEQ ID NO: 5223134 - DNA, 25 bp, Homo sapien
aagtaatggaaggagggcgtctata

SEQ ID NO: 5223135 - DNA, 25 bp, Homo sapien
tatagggcaacgagccccctattgt

SEQ ID NO: 5223136 - DNA, 25 bp, Homo sapien
ggcaggcctattcatgctgtagaac

SEQ ID NO: 5223137 - DNA, 25 bp, Homo sapien
gaaggcttgtttgtgaagtaatgga

SEQ ID NO: 5223138 - DNA, 25 bp, Homo sapien
ccacaatagccatggtgtctaatat

SEQ ID NO: 5223139 - DNA, 25 bp, Homo sapien
catgtccacaatagccatggtgtct

SEQ ID NO: 5223140 - DNA, 25 bp, Homo sapien
tgtctaatatttgttcttgccctct

SEQ ID NO: 5223141 - DNA, 25 bp, Homo sapien
ggtgtctaatatttgttcttgccct

SEQ ID NO: 5223142 - DNA, 25 bp, Homo sapien
aataaggtggtcgaaattaattcag

SEQ ID NO: 5223143 - DNA, 25 bp, Homo sapien
gccagaatatactgtctttcttgga

SEQ ID NO: 5223144 - DNA, 25 bp, Homo sapien
gacaagaacgtctgtgagccagaat

SEQ ID NO: 5223145 - DNA, 25 bp, Homo sapien
tcttttcggaccttgtaagatttca

SEQ ID NO: 5223146 - DNA, 25 bp, Homo sapien
gatggagggaggaggaggagcaaga

SEQ ID NO: 5223147 - DNA, 25 bp, Homo sapien
ctgtaggatggagggaggaggagga

SEQ ID NO: 5223148 - DNA, 25 bp, Homo sapien
gagggaggaggaggagcaagagata

SEQ ID NO: 5223149 - DNA, 25 bp, Homo sapien
tggagggaggaggaggagcaagaga

SEQ ID NO: 5223150 - DNA, 25 bp, Homo sapien
ggactctggccacaaatcccattaa

SEQ ID NO: 5223151 - DNA, 25 bp, Homo sapien
atcccattaaaggtaactgaggagt

SEQ ID NO: 5223152 - DNA, 25 bp, Homo sapien
acaaatcccattaaaggtaactgag

SEQ ID NO: 5223153 - DNA, 25 bp, Homo sapien
tggactctggccacaaatcccatta

SEQ ID NO: 5223154 - DNA, 25 bp, Homo sapien
ggttcttccacaggtggcggtggag

SEQ ID NO: 5223155 - DNA, 25 bp, Homo sapien
aggtgggggagactcatcaaagact

SEQ ID NO: 5223156 - DNA, 25 bp, Homo sapien
tggttcttccacaggtggcggtgga

SEQ ID NO: 5223157 - DNA, 25 bp, Homo sapien
gggagactcatcaaagactggttct

SEQ ID NO: 5223158 - DNA, 25 bp, Homo sapien
aaggatcactatactcaaccacagc

SEQ ID NO: 5223159 - DNA, 25 bp, Homo sapien
gcataaggatcactatactcaacca

SEQ ID NO: 5223160 - DNA, 25 bp, Homo sapien
ttcagcataaggatcactatactca

SEQ ID NO: 5223161 - DNA, 25 bp, Homo sapien
taaggatcactatactcaaccacag

SEQ ID NO: 5223162 - DNA, 25 bp, Homo sapien
cagaacgagaccctgataagtaatt

SEQ ID NO: 5223163 - DNA, 25 bp, Homo sapien
cagtagtttacttcactccagggaa

SEQ ID NO: 5223164 - DNA, 25 bp, Homo sapien
ccagggaaagatatacaccagcagt

SEQ ID NO: 5223165 - DNA, 25 bp, Homo sapien
tcaaagtaactctaaagcggtgtaa

SEQ ID NO: 5223166 - DNA, 25 bp, Homo sapien
aatgtagaaattgccagcctaagca

SEQ ID NO: 5223167 - DNA, 25 bp, Homo sapien
gaatatgaagcctgttgtaacagag

SEQ ID NO: 5223168 - DNA, 25 bp, Homo sapien
aaataagccgtgattttcccactgc

SEQ ID NO: 5223169 - DNA, 25 bp, Homo sapien
gcaaacccatgaaaagtaattcaga

SEQ ID NO: 5223170 - DNA, 25 bp, Homo sapien
ccattatagtgatattgtaggaaca

SEQ ID NO: 5223171 - DNA, 25 bp, Homo sapien
tccattatagtgatattgtaggaac

SEQ ID NO: 5223172 - DNA, 25 bp, Homo sapien
cgtcattcttcttgatgacataaat

SEQ ID NO: 5223173 - DNA, 25 bp, Homo sapien
gtcttttgtatagtcataaattgcc

SEQ ID NO: 5223174 - DNA, 25 bp, Homo sapien
tttgtatagtcataaattgccacaa

SEQ ID NO: 5223175 - DNA, 25 bp, Homo sapien
catcgtcattcttcttgatgacata

SEQ ID NO: 5223176 - DNA, 25 bp, Homo sapien
tagactcaacgtaattcccaggaaa

SEQ ID NO: 5223177 - DNA, 25 bp, Homo sapien
agaataatgcatgatagactcaacg

SEQ ID NO: 5223178 - DNA, 25 bp, Homo sapien
gcatgatagactcaacgtaattccc

SEQ ID NO: 5223179 - DNA, 25 bp, Homo sapien
taatgcatgatagactcaacgtaat

SEQ ID NO: 5223180 - DNA, 25 bp, Homo sapien
gaagacctgactattcctgtgaggc

SEQ ID NO: 5223181 - DNA, 25 bp, Homo sapien
cagggccttcagataatctgggaag

SEQ ID NO: 5223182 - DNA, 25 bp, Homo sapien
actggagtggaatccccagggcctt

SEQ ID NO: 5223183 - DNA, 25 bp, Homo sapien
ccttcattctactttactggagtgg

SEQ ID NO: 5223184 - DNA, 25 bp, Homo sapien
tggcagaaagatccatttgttcaga

SEQ ID NO: 5223185 - DNA, 25 bp, Homo sapien
cagcattgtacaaatgatggcagaa

SEQ ID NO: 5223186 - DNA, 25 bp, Homo sapien
tttatttcaatccagacagctcagc

SEQ ID NO: 5223187 - DNA, 25 bp, Homo sapien
tccatttgttcagactcagcttgct

SEQ ID NO: 5223188 - DNA, 25 bp, Homo sapien
gaggttaaccccttagcacaggcaa

SEQ ID NO: 5223189 - DNA, 25 bp, Homo sapien
cattcagggccattacactgcagga

SEQ ID NO: 5223190 - DNA, 25 bp, Homo sapien
tacagtgtcacagaggaaaaaagcc

SEQ ID NO: 5223191 - DNA, 25 bp, Homo sapien
tagaacccacgttagcagctctgga

SEQ ID NO: 5223192 - DNA, 25 bp, Homo sapien
tattggatttcaaaacaccctctgc

SEQ ID NO: 5223193 - DNA, 25 bp, Homo sapien
ccagcctgtgggaactatttattgg

SEQ ID NO: 5223194 - DNA, 25 bp, Homo sapien
cacccagcctgtgggaactatttat

SEQ ID NO: 5223195 - DNA, 25 bp, Homo sapien
ttattggatttcaaaacaccctctg

SEQ ID NO: 5223196 - DNA, 25 bp, Homo sapien
tgctgaccgccactaactctgtttt

SEQ ID NO: 5223197 - DNA, 25 bp, Homo sapien
tccaattactgtgtgcctgacccat

SEQ ID NO: 5223198 - DNA, 25 bp, Homo sapien
ccctgcttctgtagtggtgagctgt

SEQ ID NO: 5223199 - DNA, 25 bp, Homo sapien
tcttcagtataaaggacttcaccag

SEQ ID NO: 5223200 - DNA, 25 bp, Homo sapien
ttccaaatgggaggctgaatctctc

SEQ ID NO: 5223201 - DNA, 25 bp, Homo sapien
catagcaaaattagcaggccactgt

SEQ ID NO: 5223202 - DNA, 25 bp, Homo sapien
caggtacggtccagacatcacggta

SEQ ID NO: 5223203 - DNA, 25 bp, Homo sapien
tggacacacaaacttcaggagggaa

SEQ ID NO: 5223204 - DNA, 25 bp, Homo sapien
taaaggtaatgagctcaatgcctcc

SEQ ID NO: 5223205 - DNA, 25 bp, Homo sapien
tcccggccaaaaagaccagaagtga

SEQ ID NO: 5223206 - DNA, 25 bp, Homo sapien
ttaacaccaatcaggagttcccggc

SEQ ID NO: 5223207 - DNA, 25 bp, Homo sapien
ggagctaaaagtacaactggccaga

SEQ ID NO: 5223208 - DNA, 25 bp, Homo sapien
caagttcttagtacacggcaacaat

SEQ ID NO: 5223209 - DNA, 25 bp, Homo sapien
tcaagttcttagtacacggcaacaa

SEQ ID NO: 5223210 - DNA, 25 bp, Homo sapien
agttcttagtacacggcaacaattc

SEQ ID NO: 5223211 - DNA, 25 bp, Homo sapien
aagttcttagtacacggcaacaatt

SEQ ID NO: 5223212 - DNA, 25 bp, Homo sapien
taatggcttagcacactagtcgtac

SEQ ID NO: 5223213 - DNA, 25 bp, Homo sapien
tcaaaggattatgcacagctcagtg

SEQ ID NO: 5223214 - DNA, 25 bp, Homo sapien
ggagctttgccataggtagatacaa

SEQ ID NO: 5223215 - DNA, 25 bp, Homo sapien
aaggctcacaccaacttgtaggctg

SEQ ID NO: 5223216 - DNA, 25 bp, Homo sapien
tcatggatggctactaataccaagc

SEQ ID NO: 5223217 - DNA, 25 bp, Homo sapien
taccaagctcatgattgttgcagcc

SEQ ID NO: 5223218 - DNA, 25 bp, Homo sapien
caagagacatcactacccacgtggg

SEQ ID NO: 5223219 - DNA, 25 bp, Homo sapien
cagtaaaacttgtctgcagcactaa

SEQ ID NO: 5223220 - DNA, 25 bp, Homo sapien
cagcaagcaaactttgaggtgctaa

SEQ ID NO: 5223221 - DNA, 25 bp, Homo sapien
aaacaagtgctcagttcttaccgtg

SEQ ID NO: 5223222 - DNA, 25 bp, Homo sapien
taaccctgtagaaatgtatgacctc

SEQ ID NO: 5223223 - DNA, 25 bp, Homo sapien
tcttaccgtgcccttgcaaggtcta

SEQ ID NO: 5223224 - DNA, 25 bp, Homo sapien
caaaggcatatcctgcaaagggctg

SEQ ID NO: 5223225 - DNA, 25 bp, Homo sapien
catcaaggttattaggagctgtaca

SEQ ID NO: 5223226 - DNA, 25 bp, Homo sapien
caagtgacaactctgacatcaaggt

SEQ ID NO: 5223227 - DNA, 25 bp, Homo sapien
tgtggattggcctgctttgactctc

SEQ ID NO: 5223228 - DNA, 25 bp, Homo sapien
taggatgtgctgacagataagctct

SEQ ID NO: 5223229 - DNA, 25 bp, Homo sapien
catagaacgggtaactagtgcagga

SEQ ID NO: 5223230 - DNA, 25 bp, Homo sapien
ccagtatgtctttgggtcaccagtt

SEQ ID NO: 5223231 - DNA, 25 bp, Homo sapien
taagctctttgcctacaatacatgg

SEQ ID NO: 5223232 - DNA, 25 bp, Homo sapien
tagtgtccagctatatgtgtatgtg

SEQ ID NO: 5223233 - DNA, 25 bp, Homo sapien
gagcctcctggtatgatgttattca

SEQ ID NO: 5223234 - DNA, 25 bp, Homo sapien
tgtagcctattcgtgcatgttgtgt

SEQ ID NO: 5223235 - DNA, 25 bp, Homo sapien
tctatatcatgtggattggaccaaa

SEQ ID NO: 5223236 - DNA, 25 bp, Homo sapien
acaaggtctggctattttgcctggg

SEQ ID NO: 5223237 - DNA, 25 bp, Homo sapien
gagccaccatattcagtccagttat

SEQ ID NO: 5223238 - DNA, 25 bp, Homo sapien
tctttattggttaatttattcagac

SEQ ID NO: 5223239 - DNA, 25 bp, Homo sapien
aatttattcagactcattccttacc

SEQ ID NO: 5223240 - DNA, 25 bp, Homo sapien
ggtgtcctggatcagaaaaggcaca

SEQ ID NO: 5223241 - DNA, 25 bp, Homo sapien
ggagcgtagttaatagtagcaggac

SEQ ID NO: 5223242 - DNA, 25 bp, Homo sapien
ctaaatgggtaaactggatgccggg

SEQ ID NO: 5223243 - DNA, 25 bp, Homo sapien
tgccgggtatgtaggaattctgtgc

SEQ ID NO: 5223244 - DNA, 25 bp, Homo sapien
gaatctttgtactcagaaaccatga

SEQ ID NO: 5223245 - DNA, 25 bp, Homo sapien
ctagaagcagtgataccccaggaac

SEQ ID NO: 5223246 - DNA, 25 bp, Homo sapien
gacactgttaatgcataatttggga

SEQ ID NO: 5223247 - DNA, 25 bp, Homo sapien
cctttaaacaagtgcatgctatgat

SEQ ID NO: 5223248 - DNA, 25 bp, Homo sapien
tctgcagaagtacttgtacagagcc

SEQ ID NO: 5223249 - DNA, 25 bp, Homo sapien
tatcggaagcaattttgagcgctgt

SEQ ID NO: 5223250 - DNA, 25 bp, Homo sapien
taaaagcatgcactctgggatgaga

SEQ ID NO: 5223251 - DNA, 25 bp, Homo sapien
tacagagcctggatgaccataagga

SEQ ID NO: 5223252 - DNA, 25 bp, Homo sapien
cagtccctaagaccatgatgtcaaa

SEQ ID NO: 5223253 - DNA, 25 bp, Homo sapien
tcagtacaaagtagcttaattcagc

SEQ ID NO: 5223254 - DNA, 25 bp, Homo sapien
cgacttctcaggctccagcgatatt

SEQ ID NO: 5223255 - DNA, 25 bp, Homo sapien
gctcctggccataatggtaaccttt

SEQ ID NO: 5223256 - DNA, 25 bp, Homo sapien
tataggcactgaacgacttgatatt

SEQ ID NO: 5223257 - DNA, 25 bp, Homo sapien
gctatcacttcggtgcttattggca

SEQ ID NO: 5223258 - DNA, 25 bp, Homo sapien
tcctatgagcatatattgttgcccc

SEQ ID NO: 5223259 - DNA, 25 bp, Homo sapien
ttcttctgctaagggccaccctggt

SEQ ID NO: 5223260 - DNA, 25 bp, Homo sapien
aacccaggtggtatagtctactcca

SEQ ID NO: 5223261 - DNA, 25 bp, Homo sapien
taaaacacgctagctttggatgcag

SEQ ID NO: 5223262 - DNA, 25 bp, Homo sapien
tcattaagcacttgttgggccagca

SEQ ID NO: 5223263 - DNA, 25 bp, Homo sapien
attttccttaagtcggcagtagtag

SEQ ID NO: 5223264 - DNA, 25 bp, Homo sapien
aatgcttagcttgatgctttgtagg

SEQ ID NO: 5223265 - DNA, 25 bp, Homo sapien
cagagtattttcgaaggtttggatc

SEQ ID NO: 5223266 - DNA, 25 bp, Homo sapien
taaataacagcacttcattcacagc

SEQ ID NO: 5223267 - DNA, 25 bp, Homo sapien
tgagggtcactaatctacagaggaa

SEQ ID NO: 5223268 - DNA, 25 bp, Homo sapien
tcagagaccgtcaggtcagccccct

SEQ ID NO: 5223269 - DNA, 25 bp, Homo sapien
atgtcagagaccgtcaggtcagccc

SEQ ID NO: 5223270 - DNA, 25 bp, Homo sapien
ccatgtcagagaccgtcaggtcagc

SEQ ID NO: 5223271 - DNA, 25 bp, Homo sapien
gccatgtcagagaccgtcaggtcag

SEQ ID NO: 5223272 - DNA, 25 bp, Homo sapien
tattcacagattcttggttacacat

SEQ ID NO: 5223273 - DNA, 25 bp, Homo sapien
tagattggcatcgtggataactgtc

SEQ ID NO: 5223274 - DNA, 25 bp, Homo sapien
cactattcacagattcttggttaca

SEQ ID NO: 5223275 - DNA, 25 bp, Homo sapien
tggataactgtcacactattcacag

SEQ ID NO: 5223276 - DNA, 25 bp, Homo sapien
gagctgctggcagtcgctgcgtctc

SEQ ID NO: 5223277 - DNA, 25 bp, Homo sapien
tgctggcagtcgctgcgtctctggc

SEQ ID NO: 5223278 - DNA, 25 bp, Homo sapien
agcgcgagcggcggtttccttgccc

SEQ ID NO: 5223279 - DNA, 25 bp, Homo sapien
tctctggcgagggagcgccgcgcct

SEQ ID NO: 5223280 - DNA, 25 bp, Homo sapien
tcacagatctcaacgacaatggtcc

SEQ ID NO: 5223281 - DNA, 25 bp, Homo sapien
ccaaccccggatgcgtttctggagt

SEQ ID NO: 5223282 - DNA, 25 bp, Homo sapien
tctggagtctctgaatacacggaca

SEQ ID NO: 5223283 - DNA, 25 bp, Homo sapien
tataaaggtggatgcgtacagctcc

SEQ ID NO: 5223284 - DNA, 25 bp, Homo sapien
aaaactctgttccaatacgaattct

SEQ ID NO: 5223285 - DNA, 25 bp, Homo sapien
agcacactggtgaacggacagaggc

SEQ ID NO: 5223286 - DNA, 25 bp, Homo sapien
tgttccaatacgaattctgtacttg

SEQ ID NO: 5223287 - DNA, 25 bp, Homo sapien
gcacactggtgaacggacagaggca

SEQ ID NO: 5223288 - DNA, 25 bp, Homo sapien
atttgtcggtcttttagtctgtact

SEQ ID NO: 5223289 - DNA, 25 bp, Homo sapien
acctgccagcttgaaaccagctatt

SEQ ID NO: 5223290 - DNA, 25 bp, Homo sapien
tctgtacttaacacctgccagcttg

SEQ ID NO: 5223291 - DNA, 25 bp, Homo sapien
gaaaccagctattttaatggtaatg

SEQ ID NO: 5223292 - DNA, 25 bp, Homo sapien
tgcctgtggaacctacgagtgctga

SEQ ID NO: 5223293 - DNA, 25 bp, Homo sapien
ggacctgtgcagactggctcagata

SEQ ID NO: 5223294 - DNA, 25 bp, Homo sapien
gataaccaccagtagaactggccat

SEQ ID NO: 5223295 - DNA, 25 bp, Homo sapien
gattcatagcaatcagggacctgtg

SEQ ID NO: 5223296 - DNA, 25 bp, Homo sapien
ccaactgttggtagaaaccagtatt

SEQ ID NO: 5223297 - DNA, 25 bp, Homo sapien
tacattccaggtcaggtcttactgg

SEQ ID NO: 5223298 - DNA, 25 bp, Homo sapien
aatatccaaacttcactctttcttc

SEQ ID NO: 5223299 - DNA, 25 bp, Homo sapien
tcttacattccaggtcaggtcttac

SEQ ID NO: 5223300 - DNA, 25 bp, Homo sapien
cattccaggtcaggtcttactgggt

SEQ ID NO: 5223301 - DNA, 25 bp, Homo sapien
tgcattgacttcatctctgttgaac

SEQ ID NO: 5223302 - DNA, 25 bp, Homo sapien
ccttcctgaacctgtttaatgttag

SEQ ID NO: 5223303 - DNA, 25 bp, Homo sapien
tgattgctatcagctcataatcaag

SEQ ID NO: 5223304 - DNA, 25 bp, Homo sapien
taatcaaggaacagaggactatttc

SEQ ID NO: 5223305 - DNA, 25 bp, Homo sapien
gcaaggctagcagcagttccaggcc

SEQ ID NO: 5223306 - DNA, 25 bp, Homo sapien
tgagcaaggctagcagcagttccag

SEQ ID NO: 5223307 - DNA, 25 bp, Homo sapien
agcaaggctagcagcagttccaggc

SEQ ID NO: 5223308 - DNA, 25 bp, Homo sapien
gagcaaggctagcagcagttccagg

SEQ ID NO: 5223309 - DNA, 25 bp, Homo sapien
cccctcctcaggctgagaattggcc

SEQ ID NO: 5223310 - DNA, 25 bp, Homo sapien
gcatcccctcctcaggctgagaatt

SEQ ID NO: 5223311 - DNA, 25 bp, Homo sapien
cagtttcttggtcaagctgagcatg

SEQ ID NO: 5223312 - DNA, 25 bp, Homo sapien
tgagcatgaagcaacaggctctgga

SEQ ID NO: 5223313 - DNA, 25 bp, Homo sapien
ataaaggaaatccgcaggctagtat

SEQ ID NO: 5223314 - DNA, 25 bp, Homo sapien
tactccataaaggaaatccgcaggc

SEQ ID NO: 5223315 - DNA, 25 bp, Homo sapien
tccataaaggaaatccgcaggctag

SEQ ID NO: 5223316 - DNA, 25 bp, Homo sapien
ccataaaggaaatccgcaggctagt

SEQ ID NO: 5223317 - DNA, 25 bp, Homo sapien
taccaggaactattggacgttgatt

SEQ ID NO: 5223318 - DNA, 25 bp, Homo sapien
tatgtggaataataaagcaggagct

SEQ ID NO: 5223319 - DNA, 25 bp, Homo sapien
tgcaatttatactgtgtggcttcgt

SEQ ID NO: 5223320 - DNA, 25 bp, Homo sapien
taaggcttcattgtgactttaacaa

SEQ ID NO: 5223321 - DNA, 25 bp, Homo sapien
ggaccaggaataccacctctgatgc

SEQ ID NO: 5223322 - DNA, 25 bp, Homo sapien
ctggaccaggaataccacctctgat

SEQ ID NO: 5223323 - DNA, 25 bp, Homo sapien
accaggaataccacctctgatgcct

SEQ ID NO: 5223324 - DNA, 25 bp, Homo sapien
tggaccaggaataccacctctgatg

SEQ ID NO: 5223325 - DNA, 25 bp, Homo sapien
tgatgccaatgggtggaatatacca

SEQ ID NO: 5223326 - DNA, 25 bp, Homo sapien
ttttcggtgaaaacataatgatgcc

SEQ ID NO: 5223327 - DNA, 25 bp, Homo sapien
tacgatgacgacgactctgcaggct

SEQ ID NO: 5223328 - DNA, 25 bp, Homo sapien
ggaatgccaccagttatgccagcca

SEQ ID NO: 5223329 - DNA, 25 bp, Homo sapien
tgtgaaagatagacacggtcctgac

SEQ ID NO: 5223330 - DNA, 25 bp, Homo sapien
ttttgatcacttagacagacaggcc

SEQ ID NO: 5223331 - DNA, 25 bp, Homo sapien
gatcctgaccagaccatgaatttgt

SEQ ID NO: 5223332 - DNA, 25 bp, Homo sapien
tatcatttattagaggcatcctgcc

SEQ ID NO: 5223333 - DNA, 25 bp, Homo sapien
caggatataacgttgttttgatgac

SEQ ID NO: 5223334 - DNA, 25 bp, Homo sapien
tttcacacaggatataacgttgttt

SEQ ID NO: 5223335 - DNA, 25 bp, Homo sapien
aaccacaaggcatcctgactgcagc

SEQ ID NO: 5223336 - DNA, 25 bp, Homo sapien
caaaccacaaggcatcctgactgca

SEQ ID NO: 5223337 - DNA, 25 bp, Homo sapien
tgagagtctccgtcatccacggcca

SEQ ID NO: 5223338 - DNA, 25 bp, Homo sapien
gccaaggcctgagagtctccgtcat

SEQ ID NO: 5223339 - DNA, 25 bp, Homo sapien
gcctgagagtctccgtcatccacgg

SEQ ID NO: 5223340 - DNA, 25 bp, Homo sapien
aggcctgagagtctccgtcatccac

SEQ ID NO: 5223341 - DNA, 25 bp, Homo sapien
cctgacgatgggctagggttccagc

SEQ ID NO: 5223342 - DNA, 25 bp, Homo sapien
ctgacgatgggctagggttccagcc

SEQ ID NO: 5223343 - DNA, 25 bp, Homo sapien
acgatgggctagggttccagcccct

SEQ ID NO: 5223344 - DNA, 25 bp, Homo sapien
tgacgatgggctagggttccagccc

SEQ ID NO: 5223345 - DNA, 25 bp, Homo sapien
attgaagggaataagttgagagcca

SEQ ID NO: 5223346 - DNA, 25 bp, Homo sapien
aattgaagggaataagttgagagcc

SEQ ID NO: 5223347 - DNA, 25 bp, Homo sapien
agttgagagccaagagcagcctgag

SEQ ID NO: 5223348 - DNA, 25 bp, Homo sapien
tgaattgaagggaataagttgagag

SEQ ID NO: 5223349 - DNA, 25 bp, Homo sapien
ctgaagagccaaataaaatcagatt

SEQ ID NO: 5223350 - DNA, 25 bp, Homo sapien
aagagccaaataaaatcagattcat

SEQ ID NO: 5223351 - DNA, 25 bp, Homo sapien
tgaagagccaaataaaatcagattc

SEQ ID NO: 5223352 - DNA, 25 bp, Homo sapien
gaagagccaaataaaatcagattca

SEQ ID NO: 5223353 - DNA, 25 bp, Homo sapien
tttgaagcaacatcccgtataccca

SEQ ID NO: 5223354 - DNA, 25 bp, Homo sapien
ttgaagcaacatcccgtatacccac

SEQ ID NO: 5223355 - DNA, 25 bp, Homo sapien
gtttatttgaagcaacatcccgtat

SEQ ID NO: 5223356 - DNA, 25 bp, Homo sapien
tatttgaagcaacatcccgtatacc

SEQ ID NO: 5223357 - DNA, 25 bp, Homo sapien
agctaaggttgaccgcattgtcgta

SEQ ID NO: 5223358 - DNA, 25 bp, Homo sapien
tacgctacaagcatgggcgactgct

SEQ ID NO: 5223359 - DNA, 25 bp, Homo sapien
ggcgactgcttcaccaaaatcttgt

SEQ ID NO: 5223360 - DNA, 25 bp, Homo sapien
tgaccgcattgtcgtacgctacaag

SEQ ID NO: 5223361 - DNA, 25 bp, Homo sapien
gcccggaactcccttgagaagagat

SEQ ID NO: 5223362 - DNA, 25 bp, Homo sapien
cctttgtgaagggatgcccggaact

SEQ ID NO: 5223363 - DNA, 25 bp, Homo sapien
catcacagttgaaccccgtttttga

SEQ ID NO: 5223364 - DNA, 25 bp, Homo sapien
gaagctgctgggagtaattcccata

SEQ ID NO: 5223365 - DNA, 25 bp, Homo sapien
taatggttccattgctcttctcatt

SEQ ID NO: 5223366 - DNA, 25 bp, Homo sapien
tcacatggataatggttccattgct

SEQ ID NO: 5223367 - DNA, 25 bp, Homo sapien
atggttccattgctcttctcattgt

SEQ ID NO: 5223368 - DNA, 25 bp, Homo sapien
ctttcacatggataatggttccatt

SEQ ID NO: 5223369 - DNA, 25 bp, Homo sapien
tcccacatgcggtaacttcatcact

SEQ ID NO: 5223370 - DNA, 25 bp, Homo sapien
cacaacccagttttcaggactgcat

SEQ ID NO: 5223371 - DNA, 25 bp, Homo sapien
cattactttagggtggtacactggt

SEQ ID NO: 5223372 - DNA, 25 bp, Homo sapien
tcttttctgccatgatccactggaa

SEQ ID NO: 5223373 - DNA, 25 bp, Homo sapien
ttcctgagtcttaacccattagacc

SEQ ID NO: 5223374 - DNA, 25 bp, Homo sapien
gtgagtcttcctgagtcttaaccca

SEQ ID NO: 5223375 - DNA, 25 bp, Homo sapien
tcctgagtcttaacccattagaccc

SEQ ID NO: 5223376 - DNA, 25 bp, Homo sapien
tgagtcttcctgagtcttaacccat

SEQ ID NO: 5223377 - DNA, 25 bp, Homo sapien
accattcattggcattatgctagga

SEQ ID NO: 5223378 - DNA, 25 bp, Homo sapien
gaaaagctatgatatatccacaaag

SEQ ID NO: 5223379 - DNA, 25 bp, Homo sapien
tatgctaggattcagtacaaaactg

SEQ ID NO: 5223380 - DNA, 25 bp, Homo sapien
taattgtctctattttgccagaaca

SEQ ID NO: 5223381 - DNA, 25 bp, Homo sapien
tgcacaataaattatccgagaaagt

SEQ ID NO: 5223382 - DNA, 25 bp, Homo sapien
caggatcattggtgtccttctcagt

SEQ ID NO: 5223383 - DNA, 25 bp, Homo sapien
tactatcctaaagtagcatgccttt

SEQ ID NO: 5223384 - DNA, 25 bp, Homo sapien
aatatttcactcttagctacaagca

SEQ ID NO: 5223385 - DNA, 25 bp, Homo sapien
aaaggccactgttactagcaagcta

SEQ ID NO: 5223386 - DNA, 25 bp, Homo sapien
caagctatagcaagccaggactcca

SEQ ID NO: 5223387 - DNA, 25 bp, Homo sapien
ggccactgttactagcaagctatag

SEQ ID NO: 5223388 - DNA, 25 bp, Homo sapien
tactagcaagctatagcaagccagg

SEQ ID NO: 5223389 - DNA, 25 bp, Homo sapien
tgttcatgtagtcactgtgcaggag

SEQ ID NO: 5223390 - DNA, 25 bp, Homo sapien
tcatgtagtcactgtgcaggagcct

SEQ ID NO: 5223391 - DNA, 25 bp, Homo sapien
ggcggcggggagtcatgttcatgta

SEQ ID NO: 5223392 - DNA, 25 bp, Homo sapien
gctggtaatgcttgcgggtgggccc

SEQ ID NO: 5223393 - DNA, 25 bp, Homo sapien
tcaggagcgataggctgcgaagtcg

SEQ ID NO: 5223394 - DNA, 25 bp, Homo sapien
gataggctgcgaagtcgcgtggtgg

SEQ ID NO: 5223395 - DNA, 25 bp, Homo sapien
gcgataggctgcgaagtcgcgtggt

SEQ ID NO: 5223396 - DNA, 25 bp, Homo sapien
gagcgataggctgcgaagtcgcgtg

SEQ ID NO: 5223397 - DNA, 25 bp, Homo sapien
tctagtcactcgagaaaaattggca

SEQ ID NO: 5223398 - DNA, 25 bp, Homo sapien
caactaaaatgtctgtggataccac

SEQ ID NO: 5223399 - DNA, 25 bp, Homo sapien
ggcggtcatttcctatccagagcag

SEQ ID NO: 5223400 - DNA, 25 bp, Homo sapien
gataccacactttgcttgactgaga

SEQ ID NO: 5223401 - DNA, 25 bp, Homo sapien
atattgctttgagggaatccctcat

SEQ ID NO: 5223402 - DNA, 25 bp, Homo sapien
ggtcaaaatgactaaatatgatcag

SEQ ID NO: 5223403 - DNA, 25 bp, Homo sapien
cagcattaaataggaactacgtggc

SEQ ID NO: 5223404 - DNA, 25 bp, Homo sapien
gaggaaagcaacttggtttacctga

SEQ ID NO: 5223405 - DNA, 25 bp, Homo sapien
gcatgaacaaatggtgagggccact

SEQ ID NO: 5223406 - DNA, 25 bp, Homo sapien
cgtgccagggtaaatccaacagttc

SEQ ID NO: 5223407 - DNA, 25 bp, Homo sapien
tccatggtcatttcagggtcaggcc

SEQ ID NO: 5223408 - DNA, 25 bp, Homo sapien
taaagagaccaactgtgcaaccctg

SEQ ID NO: 5223409 - DNA, 25 bp, Homo sapien
gagtaaacaggacatgtaaaggccc

SEQ ID NO: 5223410 - DNA, 25 bp, Homo sapien
ggttctgggtcctttattggcacca

SEQ ID NO: 5223411 - DNA, 25 bp, Homo sapien
tagcaatcaagatcctggttctggg

SEQ ID NO: 5223412 - DNA, 25 bp, Homo sapien
acctgaagggtgacgaggcaagcca

SEQ ID NO: 5223413 - DNA, 25 bp, Homo sapien
aaaagtcaagagttaggcctcagtt

SEQ ID NO: 5223414 - DNA, 25 bp, Homo sapien
taggtccccattacaatgaatccag

SEQ ID NO: 5223415 - DNA, 25 bp, Homo sapien
tctctgataccgacaagatgggaga

SEQ ID NO: 5223416 - DNA, 25 bp, Homo sapien
gcatagtgtgatggttaggtcccca

SEQ ID NO: 5223417 - DNA, 25 bp, Homo sapien
ccatttgggaagctaagtgtgtgcc

SEQ ID NO: 5223418 - DNA, 25 bp, Homo sapien
tggaggtaatatctgtgctgcacac

SEQ ID NO: 5223419 - DNA, 25 bp, Homo sapien
gggcaggtgcccattaactagttct

SEQ ID NO: 5223420 - DNA, 25 bp, Homo sapien
tcatgaaataaacagcgccacttgt

SEQ ID NO: 5223421 - DNA, 25 bp, Homo sapien
ctacagtggcaaaacttattatcta

SEQ ID NO: 5223422 - DNA, 25 bp, Homo sapien
taaggttgcagcttagatctaagtc

SEQ ID NO: 5223423 - DNA, 25 bp, Homo sapien
aaccgtagcccataagccatgtcca

SEQ ID NO: 5223424 - DNA, 25 bp, Homo sapien
aaatgtagaaggtggctggaactca

SEQ ID NO: 5223425 - DNA, 25 bp, Homo sapien
agtcaaggatcagcaaaccgtagcc

SEQ ID NO: 5223426 - DNA, 25 bp, Homo sapien
gatggcgaggacttcaattttggtg

SEQ ID NO: 5223427 - DNA, 25 bp, Homo sapien
gaagatggcgaggacttcaattttg

SEQ ID NO: 5223428 - DNA, 25 bp, Homo sapien
cgaggacttcaattttggtgatgct

SEQ ID NO: 5223429 - DNA, 25 bp, Homo sapien
ggcgaggacttcaattttggtgatg

SEQ ID NO: 5223430 - DNA, 25 bp, Homo sapien
cctttgcttggtatggaatgttatg

SEQ ID NO: 5223431 - DNA, 25 bp, Homo sapien
tattagtagacagtgcttagtagct

SEQ ID NO: 5223432 - DNA, 25 bp, Homo sapien
tagtagacagtgcttagtagctgtg

SEQ ID NO: 5223433 - DNA, 25 bp, Homo sapien
catattagtagacagtgcttagtag

SEQ ID NO: 5223434 - DNA, 25 bp, Homo sapien
ttagtagacagtgcttagtagctgt

SEQ ID NO: 5223435 - DNA, 25 bp, Homo sapien
atcattccaatgttaatatatgtgc

SEQ ID NO: 5223436 - DNA, 25 bp, Homo sapien
atatatgtgcttctgaagtgagtac

SEQ ID NO: 5223437 - DNA, 25 bp, Homo sapien
cattccaatgttaatatatgtgctt

SEQ ID NO: 5223438 - DNA, 25 bp, Homo sapien
gtatcattccaatgttaatatatgt

SEQ ID NO: 5223439 - DNA, 25 bp, Homo sapien
cctctggagtagcagggacttcagg

SEQ ID NO: 5223440 - DNA, 25 bp, Homo sapien
tcaggtgcccgccaccacgcctggc

SEQ ID NO: 5223441 - DNA, 25 bp, Homo sapien
tctggagtagcagggacttcaggtg

SEQ ID NO: 5223442 - DNA, 25 bp, Homo sapien
tggagtagcagggacttcaggtgcc

SEQ ID NO: 5223443 - DNA, 25 bp, Homo sapien
gatcagttccaacgttggcttcaac

SEQ ID NO: 5223444 - DNA, 25 bp, Homo sapien
gcccctctagatcagttccaacgtt

SEQ ID NO: 5223445 - DNA, 25 bp, Homo sapien
cagttccaacgttggcttcaacaac

SEQ ID NO: 5223446 - DNA, 25 bp, Homo sapien
tctagatcagttccaacgttggctt

SEQ ID NO: 5223447 - DNA, 25 bp, Homo sapien
tggataagggggatgcaggcacagt

SEQ ID NO: 5223448 - DNA, 25 bp, Homo sapien
aaggctgatgttggacacggaatct

SEQ ID NO: 5223449 - DNA, 25 bp, Homo sapien
tgatgttggacacggaatctgagct

SEQ ID NO: 5223450 - DNA, 25 bp, Homo sapien
cacagtgccgtacttgcaatagaaa

SEQ ID NO: 5223451 - DNA, 25 bp, Homo sapien
gagcaggccttttattcgtagagca

SEQ ID NO: 5223452 - DNA, 25 bp, Homo sapien
ggcagagactcaaacaaacctttgg

SEQ ID NO: 5223453 - DNA, 25 bp, Homo sapien
tactttaagcataagccctgcccgt

SEQ ID NO: 5223454 - DNA, 25 bp, Homo sapien
caactcaatagctccagtgccggga

SEQ ID NO: 5223455 - DNA, 25 bp, Homo sapien
caacatttacacgtgaggcaactca

SEQ ID NO: 5223456 - DNA, 25 bp, Homo sapien
gaatgctccaactgaacctaagcag

SEQ ID NO: 5223457 - DNA, 25 bp, Homo sapien
ggcacaatttgtcccctctgtctga

SEQ ID NO: 5223458 - DNA, 25 bp, Homo sapien
gattcatccaagttatgcgcatcag

SEQ ID NO: 5223459 - DNA, 25 bp, Homo sapien
cctcaatcctagttattggcttggc

SEQ ID NO: 5223460 - DNA, 25 bp, Homo sapien
gcagattctgaagtggcacctctta

SEQ ID NO: 5223461 - DNA, 25 bp, Homo sapien
cctcttacaggggtgagatttctat

SEQ ID NO: 5223462 - DNA, 25 bp, Homo sapien
atgacctcaatcctagttattggct

SEQ ID NO: 5223463 - DNA, 25 bp, Homo sapien
ccaatcatcgtgatgttgtcaatgt

SEQ ID NO: 5223464 - DNA, 25 bp, Homo sapien
tcttgctcaacttgtccaatcatcg

SEQ ID NO: 5223465 - DNA, 25 bp, Homo sapien
tcaacttgtccaatcatcgtgatgt

SEQ ID NO: 5223466 - DNA, 25 bp, Homo sapien
atgtaatagatcagagtgatgttct

SEQ ID NO: 5223467 - DNA, 25 bp, Homo sapien
aggactgcagccgagtatcaggccc

SEQ ID NO: 5223468 - DNA, 25 bp, Homo sapien
ggactgcagccgagtatcaggcccc

SEQ ID NO: 5223469 - DNA, 25 bp, Homo sapien
atcaggcccccctgggggatcagag

SEQ ID NO: 5223470 - DNA, 25 bp, Homo sapien
tgcaggactgcagccgagtatcagg

SEQ ID NO: 5223471 - DNA, 25 bp, Homo sapien
atccacgttccacttctttccaagt

SEQ ID NO: 5223472 - DNA, 25 bp, Homo sapien
aatccacgttccacttctttccaag

SEQ ID NO: 5223473 - DNA, 25 bp, Homo sapien
tattgacagattctataggcattca

SEQ ID NO: 5223474 - DNA, 25 bp, Homo sapien
tcaccgtctcagaaagcacaccatt

SEQ ID NO: 5223475 - DNA, 25 bp, Homo sapien
cacacacgcaaaaatacggtcatat

SEQ ID NO: 5223476 - DNA, 25 bp, Homo sapien
cgcaaaaatacggtcatattgacag

SEQ ID NO: 5223477 - DNA, 25 bp, Homo sapien
ggcctgataggtactaatgagccca

SEQ ID NO: 5223478 - DNA, 25 bp, Homo sapien
tcactaaggacacaatcataggcct

SEQ ID NO: 5223479 - DNA, 25 bp, Homo sapien
gcagcttctggatatgtgatcttgg

SEQ ID NO: 5223480 - DNA, 25 bp, Homo sapien
tgagcccagcagagtgattaaaagc

SEQ ID NO: 5223481 - DNA, 25 bp, Homo sapien
gagcaaaacctttcaggatcctgaa

SEQ ID NO: 5223482 - DNA, 25 bp, Homo sapien
gactttatatagatagctttgatcc

SEQ ID NO: 5223483 - DNA, 25 bp, Homo sapien
ttgaacccacacagaatcaaggact

SEQ ID NO: 5223484 - DNA, 25 bp, Homo sapien
tatgggagcggtgttcaggtcttca

SEQ ID NO: 5223485 - DNA, 25 bp, Homo sapien
gctgagccttgtgccgctgaaatcc

SEQ ID NO: 5223486 - DNA, 25 bp, Homo sapien
agccttgtgccgctgaaatccaagg

SEQ ID NO: 5223487 - DNA, 25 bp, Homo sapien
cagctgagccttgtgccgctgaaat

SEQ ID NO: 5223488 - DNA, 25 bp, Homo sapien
aggttcagctgagccttgtgccgct

SEQ ID NO: 5223489 - DNA, 25 bp, Homo sapien
gggtacatgagctccaccttgcaga

SEQ ID NO: 5223490 - DNA, 25 bp, Homo sapien
ggaatcatctaggaaggtcaactca

SEQ ID NO: 5223491 - DNA, 25 bp, Homo sapien
ccttgcagatgtagagtcccgtgtc

SEQ ID NO: 5223492 - DNA, 25 bp, Homo sapien
taggttgccgcacagacttcagtca

SEQ ID NO: 5223493 - DNA, 25 bp, Homo sapien
ctgtgaggagaaagctataaaaaaa

SEQ ID NO: 5223494 - DNA, 25 bp, Homo sapien
aggaagtcagaatctgggcacggtt

SEQ ID NO: 5223495 - DNA, 25 bp, Homo sapien
tcagaatctgggcacggttctggat

SEQ ID NO: 5223496 - DNA, 25 bp, Homo sapien
gaactaactgctgcaaggatccaga

SEQ ID NO: 5223497 - DNA, 25 bp, Homo sapien
tagacccctgttgtaagagggcttc

SEQ ID NO: 5223498 - DNA, 25 bp, Homo sapien
tcacatagacccctgttgtaagagg

SEQ ID NO: 5223499 - DNA, 25 bp, Homo sapien
gggcattttcacatagacccctgtt

SEQ ID NO: 5223500 - DNA, 25 bp, Homo sapien
cctgttgtaagagggcttcttttct

SEQ ID NO: 5223501 - DNA, 25 bp, Homo sapien
tacacgtaatttgggttccgcatcc

SEQ ID NO: 5223502 - DNA, 25 bp, Homo sapien
tgacctcatccagtttccaagctag

SEQ ID NO: 5223503 - DNA, 25 bp, Homo sapien
tcaactcagataccaccagctgtgg

SEQ ID NO: 5223504 - DNA, 25 bp, Homo sapien
tacctggtgtattagtgtcctgagc

SEQ ID NO: 5223505 - DNA, 25 bp, Homo sapien
caagcagtgttaattttcagaaacc

SEQ ID NO: 5223506 - DNA, 25 bp, Homo sapien
aagaattgggcccatcgaactggag

SEQ ID NO: 5223507 - DNA, 25 bp, Homo sapien
ccttcttctgtccatggcattaacc

SEQ ID NO: 5223508 - DNA, 25 bp, Homo sapien
acatgttgttgcattttcatggaaa

SEQ ID NO: 5223509 - DNA, 25 bp, Homo sapien
cacgacttccagtggcaataggagc

SEQ ID NO: 5223510 - DNA, 25 bp, Homo sapien
gctttgtgttgtccgcctgcagcat

SEQ ID NO: 5223511 - DNA, 25 bp, Homo sapien
aaagagcatgtatcatctcaatggg

SEQ ID NO: 5223512 - DNA, 25 bp, Homo sapien
tctcagtgtactgccggctttgctg

SEQ ID NO: 5223513 - DNA, 25 bp, Homo sapien
cccacagctgtgcaaatgcttttgt

SEQ ID NO: 5223514 - DNA, 25 bp, Homo sapien
gctgaatcatacttaattccccaaa

SEQ ID NO: 5223515 - DNA, 25 bp, Homo sapien
gagagggtactgctgaatcatactt

SEQ ID NO: 5223516 - DNA, 25 bp, Homo sapien
acccacagctgtgcaaatgcttttg

SEQ ID NO: 5223517 - DNA, 25 bp, Homo sapien
aaacgtcagtcgcaagcacaaggtg

SEQ ID NO: 5223518 - DNA, 25 bp, Homo sapien
tgattggtcagacgtactacgccca

SEQ ID NO: 5223519 - DNA, 25 bp, Homo sapien
cccaaagttagaggccggcagtgtg

SEQ ID NO: 5223520 - DNA, 25 bp, Homo sapien
cattgtcaaagaaaccgtgaaggga

SEQ ID NO: 5223521 - DNA, 25 bp, Homo sapien
tttgtggcacaagttttctgagtgg

SEQ ID NO: 5223522 - DNA, 25 bp, Homo sapien
tgtggtggtagtgaggttttgtggc

SEQ ID NO: 5223523 - DNA, 25 bp, Homo sapien
cacaagttttctgagtgggttttgc

SEQ ID NO: 5223524 - DNA, 25 bp, Homo sapien
gtagtgaggttttgtggcacaagtt

SEQ ID NO: 5223525 - DNA, 25 bp, Homo sapien
aatggacttgtaatgcccatgtgaa

SEQ ID NO: 5223526 - DNA, 25 bp, Homo sapien
tgcccatgtgaatcaaagggtggcc

SEQ ID NO: 5223527 - DNA, 25 bp, Homo sapien
ggtggcctgtctggtaaacagctcc

SEQ ID NO: 5223528 - DNA, 25 bp, Homo sapien
gttgcctacgccattcaaacaaaca

SEQ ID NO: 5223529 - DNA, 25 bp, Homo sapien
ggatctctttgaagccgtagcctga

SEQ ID NO: 5223530 - DNA, 25 bp, Homo sapien
tgctcactaaggtttagtctattca

SEQ ID NO: 5223531 - DNA, 25 bp, Homo sapien
tttagtctattcagtttgttgttgg

SEQ ID NO: 5223532 - DNA, 25 bp, Homo sapien
ctctttgaagccgtagcctgaccta

SEQ ID NO: 5223533 - DNA, 25 bp, Homo sapien
aatccatcaatagctgccatcagat

SEQ ID NO: 5223534 - DNA, 25 bp, Homo sapien
ccaatccatcaatagctgccatcag

SEQ ID NO: 5223535 - DNA, 25 bp, Homo sapien
ctaccaatccatcaatagctgccat

SEQ ID NO: 5223536 - DNA, 25 bp, Homo sapien
ccatcaatagctgccatcagatgca

SEQ ID NO: 5223537 - DNA, 25 bp, Homo sapien
gccatgaccattgttagaggctgcc

SEQ ID NO: 5223538 - DNA, 25 bp, Homo sapien
tgccatgaccattgttagaggctgc

SEQ ID NO: 5223539 - DNA, 25 bp, Homo sapien
gcaacatttgtctgagtagaggagc

SEQ ID NO: 5223540 - DNA, 25 bp, Homo sapien
aaagcaacatttgtctgagtagagg

SEQ ID NO: 5223541 - DNA, 25 bp, Homo sapien
acatttgtctgagtagaggagctca

SEQ ID NO: 5223542 - DNA, 25 bp, Homo sapien
tgaaagcaacatttgtctgagtaga

SEQ ID NO: 5223543 - DNA, 25 bp, Homo sapien
agccactaggaatgccagaccacag

SEQ ID NO: 5223544 - DNA, 25 bp, Homo sapien
ccaaggtgtgagtccaaaaggtcca

SEQ ID NO: 5223545 - DNA, 25 bp, Homo sapien
gtttggggctttaggccagccacta

SEQ ID NO: 5223546 - DNA, 25 bp, Homo sapien
gtgagtccaaaaggtccaggctctg

SEQ ID NO: 5223547 - DNA, 25 bp, Homo sapien
cagtgaattcaggctctcggttgtt

SEQ ID NO: 5223548 - DNA, 25 bp, Homo sapien
gtgaattcaggctctcggttgtttt

SEQ ID NO: 5223549 - DNA, 25 bp, Homo sapien
agtgaattcaggctctcggttgttt

SEQ ID NO: 5223550 - DNA, 25 bp, Homo sapien
tgaattcaggctctcggttgttttc

SEQ ID NO: 5223551 - DNA, 25 bp, Homo sapien
ccagaaacagttaacagtcctcgcg

SEQ ID NO: 5223552 - DNA, 25 bp, Homo sapien
gccagaaacagttaacagtcctcgc

SEQ ID NO: 5223553 - DNA, 25 bp, Homo sapien
cagaaacagttaacagtcctcgcgt

SEQ ID NO: 5223554 - DNA, 25 bp, Homo sapien
actttaatgcgcaagcagaagagaa

SEQ ID NO: 5223555 - DNA, 25 bp, Homo sapien
agaaataccagaggcctgacttcat

SEQ ID NO: 5223556 - DNA, 25 bp, Homo sapien
ctgttaaaactttaatgcgcaagca

SEQ ID NO: 5223557 - DNA, 25 bp, Homo sapien
gaagagaaagaaataccagaggcct

SEQ ID NO: 5223558 - DNA, 25 bp, Homo sapien
tgttccttccatggtatggaacgtt

SEQ ID NO: 5223559 - DNA, 25 bp, Homo sapien
gttccttccatggtatggaacgttc

SEQ ID NO: 5223560 - DNA, 25 bp, Homo sapien
acttgttccttccatggtatggaac

SEQ ID NO: 5223561 - DNA, 25 bp, Homo sapien
cttgttccttccatggtatggaacg

SEQ ID NO: 5223562 - DNA, 25 bp, Homo sapien
ctctctcttcttgttctttcttcct

SEQ ID NO: 5223563 - DNA, 25 bp, Homo sapien
ctctcttcttgttctttcttccttt

SEQ ID NO: 5223564 - DNA, 25 bp, Homo sapien
atctctctcttcttgttctttcttc

SEQ ID NO: 5223565 - DNA, 25 bp, Homo sapien
caatctctctcttcttgttctttct

SEQ ID NO: 5223566 - DNA, 25 bp, Homo sapien
tgtatacacagacatagacgcattg

SEQ ID NO: 5223567 - DNA, 25 bp, Homo sapien
taaaatcagtggacgggttctcagt

SEQ ID NO: 5223568 - DNA, 25 bp, Homo sapien
gagccaaagcgtctgtggtcaccat

SEQ ID NO: 5223569 - DNA, 25 bp, Homo sapien
tcccagagactttagaatggcagca

SEQ ID NO: 5223570 - DNA, 25 bp, Homo sapien
taatagttggcatgagaatggtcca

SEQ ID NO: 5223571 - DNA, 25 bp, Homo sapien
gcataaaatttgtacacctccgttg

SEQ ID NO: 5223572 - DNA, 25 bp, Homo sapien
tgagaatggcagaatttcagactct

SEQ ID NO: 5223573 - DNA, 25 bp, Homo sapien
tagtgagatcgcagagtatttgccc

SEQ ID NO: 5223574 - DNA, 25 bp, Homo sapien
tatgggtaaccagaacttcagctgg

SEQ ID NO: 5223575 - DNA, 25 bp, Homo sapien
caaaatgcagactacaacaaaggct

SEQ ID NO: 5223576 - DNA, 25 bp, Homo sapien
caaataagtatgcatcccaaaatgc

SEQ ID NO: 5223577 - DNA, 25 bp, Homo sapien
tacaacaaaggctgcacatcctatg

SEQ ID NO: 5223578 - DNA, 25 bp, Homo sapien
ctgtgagtctagattttttggctgt

SEQ ID NO: 5223579 - DNA, 25 bp, Homo sapien
tggctgtgttcactgctctcatgaa

SEQ ID NO: 5223580 - DNA, 25 bp, Homo sapien
gggtcgtgcacactggatgaatact

SEQ ID NO: 5223581 - DNA, 25 bp, Homo sapien
gaacatgtattcaccgttagggtcg

SEQ ID NO: 5223582 - DNA, 25 bp, Homo sapien
tactgtgaagaaacctcttcccttc

SEQ ID NO: 5223583 - DNA, 25 bp, Homo sapien
tgtgaagaaacctcttcccttccca

SEQ ID NO: 5223584 - DNA, 25 bp, Homo sapien
aaagccagtcaggttgtccaagtca

SEQ ID NO: 5223585 - DNA, 25 bp, Homo sapien
tctgggagcaagaatacctagtggc

SEQ ID NO: 5223586 - DNA, 25 bp, Homo sapien
gcaccatgggtatagtctgacagca

SEQ ID NO: 5223587 - DNA, 25 bp, Homo sapien
ttaagtcagactctccgtggtcccg

SEQ ID NO: 5223588 - DNA, 25 bp, Homo sapien
tatccaaggcccatgcatccaatgt

SEQ ID NO: 5223589 - DNA, 25 bp, Homo sapien
gcaagattctaagttatatccaagg

SEQ ID NO: 5223590 - DNA, 25 bp, Homo sapien
tatcgcctcgcaagattctaagtta

SEQ ID NO: 5223591 - DNA, 25 bp, Homo sapien
gctggtggtctttttatcgcctcgc

SEQ ID NO: 5223592 - DNA, 25 bp, Homo sapien
ctccctctctggaagattcactcat

SEQ ID NO: 5223593 - DNA, 25 bp, Homo sapien
tgtgcacctccatctatgacattta

SEQ ID NO: 5223594 - DNA, 25 bp, Homo sapien
ctatgacatttaggtacacatattt

SEQ ID NO: 5223595 - DNA, 25 bp, Homo sapien
gtgcacctccatctatgacatttag

SEQ ID NO: 5223596 - DNA, 25 bp, Homo sapien
gctcacactcaagagacaccagctg

SEQ ID NO: 5223597 - DNA, 25 bp, Homo sapien
ctagctcacactcaagagacaccag

SEQ ID NO: 5223598 - DNA, 25 bp, Homo sapien
agagacaccagctgtagtacaactg

SEQ ID NO: 5223599 - DNA, 25 bp, Homo sapien
agctgtagtacaactggctccttgc

SEQ ID NO: 5223600 - DNA, 25 bp, Homo sapien
ctgtattgccaacacattaatgtaa

SEQ ID NO: 5223601 - DNA, 25 bp, Homo sapien
ttcactgggcgaggaataagagcag

SEQ ID NO: 5223602 - DNA, 25 bp, Homo sapien
atgtaatacacacggagaaaaggaa

SEQ ID NO: 5223603 - DNA, 25 bp, Homo sapien
gcagtaccatgtatgaaaaatggaa

SEQ ID NO: 5223604 - DNA, 25 bp, Homo sapien
tgatctaatccagatggaaaatttt

SEQ ID NO: 5223605 - DNA, 25 bp, Homo sapien
cttccatttgaagttgatctaatcc

SEQ ID NO: 5223606 - DNA, 25 bp, Homo sapien
tttcataggcattataaagtactcc

SEQ ID NO: 5223607 - DNA, 25 bp, Homo sapien
tcataggcattataaagtactccat

SEQ ID NO: 5223608 - DNA, 25 bp, Homo sapien
tgagaccaagcttgtgttgtttttg

SEQ ID NO: 5223609 - DNA, 25 bp, Homo sapien
ttattcattgcactagctctccctg

SEQ ID NO: 5223610 - DNA, 25 bp, Homo sapien
ctgttgcccaatttatgagaccaag

SEQ ID NO: 5223611 - DNA, 25 bp, Homo sapien
tatcctgacgatccccgtggaaaca

SEQ ID NO: 5223612 - DNA, 25 bp, Homo sapien
tggtaaaataaatggctcttcatca

SEQ ID NO: 5223613 - DNA, 25 bp, Homo sapien
caatcttgttcacccttcaggcctg

SEQ ID NO: 5223614 - DNA, 25 bp, Homo sapien
aaataaatggctcttcatcacctct

SEQ ID NO: 5223615 - DNA, 25 bp, Homo sapien
ccccaatcttgttcacccttcaggc

SEQ ID NO: 5223616 - DNA, 25 bp, Homo sapien
tggcatgtagacttaatttccagac

SEQ ID NO: 5223617 - DNA, 25 bp, Homo sapien
ttggcatgtagacttaatttccaga

SEQ ID NO: 5223618 - DNA, 25 bp, Homo sapien
aaatacatctcccatctgaccactt

SEQ ID NO: 5223619 - DNA, 25 bp, Homo sapien
tcctattggatcagccttacaaata

SEQ ID NO: 5223620 - DNA, 25 bp, Homo sapien
tacagtaacctcccatatggtccct

SEQ ID NO: 5223621 - DNA, 25 bp, Homo sapien
aaacactcctatgtccaccacccta

SEQ ID NO: 5223622 - DNA, 25 bp, Homo sapien
ggcacagatacagactatcacattc

SEQ ID NO: 5223623 - DNA, 25 bp, Homo sapien
gacggactgttcgtgatggcacaga

SEQ ID NO: 5223624 - DNA, 25 bp, Homo sapien
aaaagatgacggactgttcgtgatg

SEQ ID NO: 5223625 - DNA, 25 bp, Homo sapien
tcgtgatggcacagatacagactat

SEQ ID NO: 5223626 - DNA, 25 bp, Homo sapien
gtttgttaagatgtagacagatgcc

SEQ ID NO: 5223627 - DNA, 25 bp, Homo sapien
tttgttaagatgtagacagatgccc

SEQ ID NO: 5223628 - DNA, 25 bp, Homo sapien
gccggcatttgacagagccctgctg

SEQ ID NO: 5223629 - DNA, 25 bp, Homo sapien
cagccggcatttgacagagccctgc

SEQ ID NO: 5223630 - DNA, 25 bp, Homo sapien
agccggcatttgacagagccctgct

SEQ ID NO: 5223631 - DNA, 25 bp, Homo sapien
ccggcatttgacagagccctgctga

SEQ ID NO: 5223632 - DNA, 25 bp, Homo sapien
tgttctgtgctgaattttaatgaca

SEQ ID NO: 5223633 - DNA, 25 bp, Homo sapien
tttccacatacacttttataggctt

SEQ ID NO: 5223634 - DNA, 25 bp, Homo sapien
gatgctatctacatatggcttctca

SEQ ID NO: 5223635 - DNA, 25 bp, Homo sapien
gggttctcttcagcacactaaggtt

SEQ ID NO: 5223636 - DNA, 25 bp, Homo sapien
aatgatagagtttgtgtgcaggtga

SEQ ID NO: 5223637 - DNA, 25 bp, Homo sapien
tacaatgatagagtttgtgtgcagg

SEQ ID NO: 5223638 - DNA, 25 bp, Homo sapien
acaatgatagagtttgtgtgcaggt

SEQ ID NO: 5223639 - DNA, 25 bp, Homo sapien
caatgatagagtttgtgtgcaggtg

SEQ ID NO: 5223640 - DNA, 25 bp, Homo sapien
tctgacatttgccctaaaagatcgg

SEQ ID NO: 5223641 - DNA, 25 bp, Homo sapien
ctgacatttgccctaaaagatcggg

SEQ ID NO: 5223642 - DNA, 25 bp, Homo sapien
aaagatcggggcaacagtaggcttc

SEQ ID NO: 5223643 - DNA, 25 bp, Homo sapien
ggcaacagtaggcttcccagcattc

SEQ ID NO: 5223644 - DNA, 25 bp, Homo sapien
ggctatcctgcctatgtctgaatgc

SEQ ID NO: 5223645 - DNA, 25 bp, Homo sapien
tttctctgacaaccatgtttctcca

SEQ ID NO: 5223646 - DNA, 25 bp, Homo sapien
cgatgcaagcctaattcttctgttc

SEQ ID NO: 5223647 - DNA, 25 bp, Homo sapien
ccatatgctcccgatgcaagcctaa

SEQ ID NO: 5223648 - DNA, 25 bp, Homo sapien
cagataaatgatgaccattgagcca

SEQ ID NO: 5223649 - DNA, 25 bp, Homo sapien
gaattcttcaaacagattgctgctt

SEQ ID NO: 5223650 - DNA, 25 bp, Homo sapien
tgagctccaagactgcattgcaatt

SEQ ID NO: 5223651 - DNA, 25 bp, Homo sapien
tcttgatactttaggaccaaatgct

SEQ ID NO: 5223652 - DNA, 25 bp, Homo sapien
ctgggaccagagacactgattgtct

SEQ ID NO: 5223653 - DNA, 25 bp, Homo sapien
gtaatgaaaaatcagcagtggcagc

SEQ ID NO: 5223654 - DNA, 25 bp, Homo sapien
cccaaatggcaaaaagacatttcca

SEQ ID NO: 5223655 - DNA, 25 bp, Homo sapien
aaagacatttccattccaatcccag

SEQ ID NO: 5223656 - DNA, 25 bp, Homo sapien
tccattcagaacgacattgacaagt

SEQ ID NO: 5223657 - DNA, 25 bp, Homo sapien
gaatctctgccaactaccgtcttgt

SEQ ID NO: 5223658 - DNA, 25 bp, Homo sapien
aacacaaagtttgatgacgatggct

SEQ ID NO: 5223659 - DNA, 25 bp, Homo sapien
aagtggcccacactgaattcaccag

SEQ ID NO: 5223660 - DNA, 25 bp, Homo sapien
aaaaatagccatgagtattccaggg

SEQ ID NO: 5223661 - DNA, 25 bp, Homo sapien
aaaatagccatgagtattccaggga

SEQ ID NO: 5223662 - DNA, 25 bp, Homo sapien
cagggaagaaattaccaatatttgg

SEQ ID NO: 5223663 - DNA, 25 bp, Homo sapien
ctaaaaatagccatgagtattccag

SEQ ID NO: 5223664 - DNA, 25 bp, Homo sapien
gtgtcgcagtatgtcttggcttgtg

SEQ ID NO: 5223665 - DNA, 25 bp, Homo sapien
ttgtgtgtcgcagtatgtcttggct

SEQ ID NO: 5223666 - DNA, 25 bp, Homo sapien
tgtgtcgcagtatgtcttggcttgt

SEQ ID NO: 5223667 - DNA, 25 bp, Homo sapien
tgtgtgtcgcagtatgtcttggctt

SEQ ID NO: 5223668 - DNA, 25 bp, Homo sapien
actttccatagtcggcgtcggcatc

SEQ ID NO: 5223669 - DNA, 25 bp, Homo sapien
tagttttgagtcagtacgaccacac

SEQ ID NO: 5223670 - DNA, 25 bp, Homo sapien
gaagagccttccgtgactttccata

SEQ ID NO: 5223671 - DNA, 25 bp, Homo sapien
ttccgcaaattggattggaacgctg

SEQ ID NO: 5223672 - DNA, 25 bp, Homo sapien
gacgcagcgcgtgatgaaatacaaa

SEQ ID NO: 5223673 - DNA, 25 bp, Homo sapien
caaaattctccgttgctgatagcag

SEQ ID NO: 5223674 - DNA, 25 bp, Homo sapien
taaatcagacccgaaaactaggcta

SEQ ID NO: 5223675 - DNA, 25 bp, Homo sapien
tcagatctgtgtccctaggaggacg

SEQ ID NO: 5223676 - DNA, 25 bp, Homo sapien
tggacttttgtgaagccaattgaga

SEQ ID NO: 5223677 - DNA, 25 bp, Homo sapien
tattggacttttgtgaagccaattg

SEQ ID NO: 5223678 - DNA, 25 bp, Homo sapien
cttttgtgaagccaattgagagagc

SEQ ID NO: 5223679 - DNA, 25 bp, Homo sapien
ttgtgaagccaattgagagagcagg

SEQ ID NO: 5223680 - DNA, 25 bp, Homo sapien
agcaggcagcccgagggaggagttt

SEQ ID NO: 5223681 - DNA, 25 bp, Homo sapien
ggcagcccgagggaggagtttcctc

SEQ ID NO: 5223682 - DNA, 25 bp, Homo sapien
tcctcacctttaaggtcttggttca

SEQ ID NO: 5223683 - DNA, 25 bp, Homo sapien
taaggtcttggttcagggatgtcat

SEQ ID NO: 5223684 - DNA, 25 bp, Homo sapien
ttcaggagtggttgaggatgcaagg

SEQ ID NO: 5223685 - DNA, 25 bp, Homo sapien
ggcactctggccctgaaagtctcca

SEQ ID NO: 5223686 - DNA, 25 bp, Homo sapien
gggcactctggccctgaaagtctcc

SEQ ID NO: 5223687 - DNA, 25 bp, Homo sapien
tgggcactctggccctgaaagtctc

SEQ ID NO: 5223688 - DNA, 25 bp, Homo sapien
tcaaccataaggatatgccccttct

SEQ ID NO: 5223689 - DNA, 25 bp, Homo sapien
tattacagcagattcctcactcgac

SEQ ID NO: 5223690 - DNA, 25 bp, Homo sapien
ctgaactgttgaggagagagtctga

SEQ ID NO: 5223691 - DNA, 25 bp, Homo sapien
tatactccttgtgtaagtcaaattc

SEQ ID NO: 5223692 - DNA, 25 bp, Homo sapien
ggcccctcactataagtggatcctt

SEQ ID NO: 5223693 - DNA, 25 bp, Homo sapien
cccctcactataagtggatccttct

SEQ ID NO: 5223694 - DNA, 25 bp, Homo sapien
cctcactataagtggatccttcttt

SEQ ID NO: 5223695 - DNA, 25 bp, Homo sapien
gcccctcactataagtggatccttc

SEQ ID NO: 5223696 - DNA, 25 bp, Homo sapien
atgtggatcttgtctcctttaagcc

SEQ ID NO: 5223697 - DNA, 25 bp, Homo sapien
catgtggatcttgtctcctttaagc

SEQ ID NO: 5223698 - DNA, 25 bp, Homo sapien
tgtggatcttgtctcctttaagccc

SEQ ID NO: 5223699 - DNA, 25 bp, Homo sapien
gctggatgtgagtgcactttcactg

SEQ ID NO: 5223700 - DNA, 25 bp, Homo sapien
gatgtgagtgcactttcactgaaac

SEQ ID NO: 5223701 - DNA, 25 bp, Homo sapien
ggatgtgagtgcactttcactgaaa

SEQ ID NO: 5223702 - DNA, 25 bp, Homo sapien
tggatgtgagtgcactttcactgaa

SEQ ID NO: 5223703 - DNA, 25 bp, Homo sapien
gagtctcaatagagtccctggaagg

SEQ ID NO: 5223704 - DNA, 25 bp, Homo sapien
cagttgcctcagtcctcggtagtga

SEQ ID NO: 5223705 - DNA, 25 bp, Homo sapien
gaaaacaggtaggacatcaagaggt

SEQ ID NO: 5223706 - DNA, 25 bp, Homo sapien
caatagaagggagttctcgaagctc

SEQ ID NO: 5223707 - DNA, 25 bp, Homo sapien
ttaattctgttccaaagtagagtcc

SEQ ID NO: 5223708 - DNA, 25 bp, Homo sapien
tcatcactaccaccggggctgaagt

SEQ ID NO: 5223709 - DNA, 25 bp, Homo sapien
ccaccggggctgaagtcagagtcag

SEQ ID NO: 5223710 - DNA, 25 bp, Homo sapien
ccttgttaagtcattcttcatcact

SEQ ID NO: 5223711 - DNA, 25 bp, Homo sapien
aatctacattttgttggcgtcagac

SEQ ID NO: 5223712 - DNA, 25 bp, Homo sapien
tatgcctcgggtttacaaagcagcc

SEQ ID NO: 5223713 - DNA, 25 bp, Homo sapien
tggctttgatctgccgctgtggcct

SEQ ID NO: 5223714 - DNA, 25 bp, Homo sapien
gaagagggtctagacaccagagaga

SEQ ID NO: 5223715 - DNA, 25 bp, Homo sapien
gaggcagaatcaatccaaggtagaa

SEQ ID NO: 5223716 - DNA, 25 bp, Homo sapien
gctatttgtagctgccgttgccttg

SEQ ID NO: 5223717 - DNA, 25 bp, Homo sapien
cgttgccttggtacatgtctgccag

SEQ ID NO: 5223718 - DNA, 25 bp, Homo sapien
cagcgtgcccggacttaaatccctg

SEQ ID NO: 5223719 - DNA, 25 bp, Homo sapien
tttcttcattgaattgtgctcgata

SEQ ID NO: 5223720 - DNA, 25 bp, Homo sapien
ttatctggcgactgctcacattctt

SEQ ID NO: 5223721 - DNA, 25 bp, Homo sapien
tgctcgatatttgggtgaatgaaaa

SEQ ID NO: 5223722 - DNA, 25 bp, Homo sapien
aattatattatctggcgactgctca

SEQ ID NO: 5223723 - DNA, 25 bp, Homo sapien
ccactgtctttaggcacaatactaa

SEQ ID NO: 5223724 - DNA, 25 bp, Homo sapien
ttcctttgaggctgagatctttacc

SEQ ID NO: 5223725 - DNA, 25 bp, Homo sapien
tcctttgaggctgagatctttacca

SEQ ID NO: 5223726 - DNA, 25 bp, Homo sapien
ctttaccactgtctttaggcacaat

SEQ ID NO: 5223727 - DNA, 25 bp, Homo sapien
ggagaatgtcttgttcacttgtgcc

SEQ ID NO: 5223728 - DNA, 25 bp, Homo sapien
ccttcttccatggtcctgtgttgtt

SEQ ID NO: 5223729 - DNA, 25 bp, Homo sapien
gttgttggtaatagctattggccag

SEQ ID NO: 5223730 - DNA, 25 bp, Homo sapien
atagctattggccagtcagtcctgc

SEQ ID NO: 5223731 - DNA, 25 bp, Homo sapien
tcattttgtctgtcccatgtctctt

SEQ ID NO: 5223732 - DNA, 25 bp, Homo sapien
catcattttgtctgtcccatgtctc

SEQ ID NO: 5223733 - DNA, 25 bp, Homo sapien
gaacacatcattttgtctgtcccat

SEQ ID NO: 5223734 - DNA, 25 bp, Homo sapien
cacatcattttgtctgtcccatgtc

SEQ ID NO: 5223735 - DNA, 25 bp, Homo sapien
cttctttgccatagctgaattcttc

SEQ ID NO: 5223736 - DNA, 25 bp, Homo sapien
tctttgccatagctgaattcttcat

SEQ ID NO: 5223737 - DNA, 25 bp, Homo sapien
ttgccatagctgaattcttcatctg

SEQ ID NO: 5223738 - DNA, 25 bp, Homo sapien
tctgtaaaggcccggttgttcctgc

SEQ ID NO: 5223739 - DNA, 25 bp, Homo sapien
ttgaagcctactccaacggcttcaa

SEQ ID NO: 5223740 - DNA, 25 bp, Homo sapien
cctactccaacggcttcaaaatcat

SEQ ID NO: 5223741 - DNA, 25 bp, Homo sapien
aagcctactccaacggcttcaaaat

SEQ ID NO: 5223742 - DNA, 25 bp, Homo sapien
gaagcctactccaacggcttcaaaa

SEQ ID NO: 5223743 - DNA, 25 bp, Homo sapien
tagtaaagttaattgatgaaggctc

SEQ ID NO: 5223744 - DNA, 25 bp, Homo sapien
gaaggctcagtctgagtcaggctac

SEQ ID NO: 5223745 - DNA, 25 bp, Homo sapien
aattgatgaaggctcagtctgagtc

SEQ ID NO: 5223746 - DNA, 25 bp, Homo sapien
gctcagtctgagtcaggctactcac

SEQ ID NO: 5223747 - DNA, 25 bp, Homo sapien
tgtaaagggaacgtatcagcactta

SEQ ID NO: 5223748 - DNA, 25 bp, Homo sapien
tattgtaaagggaacgtatcagcac

SEQ ID NO: 5223749 - DNA, 25 bp, Homo sapien
tttgtattgtaaagggaacgtatca

SEQ ID NO: 5223750 - DNA, 25 bp, Homo sapien
aagggaacgtatcagcacttaataa

SEQ ID NO: 5223751 - DNA, 25 bp, Homo sapien
catggacctatgagtcacacaaaca

SEQ ID NO: 5223752 - DNA, 25 bp, Homo sapien
tctggattgagttcatggacctatg

SEQ ID NO: 5223753 - DNA, 25 bp, Homo sapien
aaacacatgtttcttgatctttgag

SEQ ID NO: 5223754 - DNA, 25 bp, Homo sapien
gagttcatggacctatgagtcacac

SEQ ID NO: 5223755 - DNA, 25 bp, Homo sapien
gaatcaagtaagatctggttatgcg

SEQ ID NO: 5223756 - DNA, 25 bp, Homo sapien
gaacattggacatagaatctggatg

SEQ ID NO: 5223757 - DNA, 25 bp, Homo sapien
ttggaaagcaactgtcaccaaagag

SEQ ID NO: 5223758 - DNA, 25 bp, Homo sapien
caccaaagagatgatcgagttgact

SEQ ID NO: 5223759 - DNA, 25 bp, Homo sapien
ttatttggattagctcattagtggg

SEQ ID NO: 5223760 - DNA, 25 bp, Homo sapien
cagactggatcgtcttaaatctgat

SEQ ID NO: 5223761 - DNA, 25 bp, Homo sapien
ggatttgagcattatttggattagc

SEQ ID NO: 5223762 - DNA, 25 bp, Homo sapien
gggcaccattctgacaagccactaa

SEQ ID NO: 5223763 - DNA, 25 bp, Homo sapien
aaattggctccgtttgtgtgtcaaa

SEQ ID NO: 5223764 - DNA, 25 bp, Homo sapien
cagcaacgtgaaaggctgtgaagct

SEQ ID NO: 5223765 - DNA, 25 bp, Homo sapien
gccatgttctttcggctttatacag

SEQ ID NO: 5223766 - DNA, 25 bp, Homo sapien
tctttcggctttatacagcagcaac

SEQ ID NO: 5223767 - DNA, 25 bp, Homo sapien
catgcaccaggccataaaatcttat

SEQ ID NO: 5223768 - DNA, 25 bp, Homo sapien
gccataaaatcttattttcagccac

SEQ ID NO: 5223769 - DNA, 25 bp, Homo sapien
tgcaccaggccataaaatcttattt

SEQ ID NO: 5223770 - DNA, 25 bp, Homo sapien
aggccataaaatcttattttcagcc

SEQ ID NO: 5223771 - DNA, 25 bp, Homo sapien
tagtgcctcttgttagggcagttgc

SEQ ID NO: 5223772 - DNA, 25 bp, Homo sapien
gacgcatatgccaccggtttgccga

SEQ ID NO: 5223773 - DNA, 25 bp, Homo sapien
caaaaaggtgcttaatgggcccctg

SEQ ID NO: 5223774 - DNA, 25 bp, Homo sapien
tccaaggcagccagtgaatagtgcc

SEQ ID NO: 5223775 - DNA, 25 bp, Homo sapien
gaagacactgagtaattggaaaggc

SEQ ID NO: 5223776 - DNA, 25 bp, Homo sapien
gagtgctgagtgatcagtggcactg

SEQ ID NO: 5223777 - DNA, 25 bp, Homo sapien
tggaaaggcacgtgacgggttccca

SEQ ID NO: 5223778 - DNA, 25 bp, Homo sapien
ccactgaagacactgagtaattgga

SEQ ID NO: 5223779 - DNA, 25 bp, Homo sapien
tgagcaaatgaagccgaggcttctg

SEQ ID NO: 5223780 - DNA, 25 bp, Homo sapien
gcctgctagagatataatttgttta

SEQ ID NO: 5223781 - DNA, 25 bp, Homo sapien
aatctatagcctttgcattagcaga

SEQ ID NO: 5223782 - DNA, 25 bp, Homo sapien
gaaccattagtaagttgggctctga

SEQ ID NO: 5223783 - DNA, 25 bp, Homo sapien
cttcctagtggacgtgacccaggct

SEQ ID NO: 5223784 - DNA, 25 bp, Homo sapien
cctagtggacgtgacccaggctgtg

SEQ ID NO: 5223785 - DNA, 25 bp, Homo sapien
actgcttcctagtggacgtgaccca

SEQ ID NO: 5223786 - DNA, 25 bp, Homo sapien
catggcgccatactgcttcctagtg

SEQ ID NO: 5223787 - DNA, 25 bp, Homo sapien
gagtctcctgcatggaatttcatta

SEQ ID NO: 5223788 - DNA, 25 bp, Homo sapien
ggtcatttcccatggaagtcattac

SEQ ID NO: 5223789 - DNA, 25 bp, Homo sapien
ttcttcaggtcatttcccatggaag

SEQ ID NO: 5223790 - DNA, 25 bp, Homo sapien
tcccctcccagggttgtgagcagca

SEQ ID NO: 5223791 - DNA, 25 bp, Homo sapien
gatcaaatgcatctaccagacttgg

SEQ ID NO: 5223792 - DNA, 25 bp, Homo sapien
catttgctaatctggcgaggtccag

SEQ ID NO: 5223793 - DNA, 25 bp, Homo sapien
gaggtccagggatactaaatcacaa

SEQ ID NO: 5223794 - DNA, 25 bp, Homo sapien
aattcttctaacacccataggtttg

SEQ ID NO: 5223795 - DNA, 25 bp, Homo sapien
aggcattgcaaagatgccctcctgg

SEQ ID NO: 5223796 - DNA, 25 bp, Homo sapien
acagtccttgaaggctaaggtcttc

SEQ ID NO: 5223797 - DNA, 25 bp, Homo sapien
tgttgaagccttgcgttcgacagtc

SEQ ID NO: 5223798 - DNA, 25 bp, Homo sapien
ggatcatatagttactgttgaagcc

SEQ ID NO: 5223799 - DNA, 25 bp, Homo sapien
gcatctttgagattaacatattgga

SEQ ID NO: 5223800 - DNA, 25 bp, Homo sapien
tctttatcataagtccaagagttga

SEQ ID NO: 5223801 - DNA, 25 bp, Homo sapien
gagtttgcaaaactcctccaggtga

SEQ ID NO: 5223802 - DNA, 25 bp, Homo sapien
gctaccagtgcacattccagttgga

SEQ ID NO: 5223803 - DNA, 25 bp, Homo sapien
tgaaatctttgagggccatggagag

SEQ ID NO: 5223804 - DNA, 25 bp, Homo sapien
tttgcaccgacatcccagtgtttgg

SEQ ID NO: 5223805 - DNA, 25 bp, Homo sapien
ggttccctgctgaggttagggccaa

SEQ ID NO: 5223806 - DNA, 25 bp, Homo sapien
catggaggctaagacataggcatcg

SEQ ID NO: 5223807 - DNA, 25 bp, Homo sapien
gaaggtgacgaacagtcacttgggt

SEQ ID NO: 5223808 - DNA, 25 bp, Homo sapien
aaagctgactcagagcatgtaaagg

SEQ ID NO: 5223809 - DNA, 25 bp, Homo sapien
tattcagtaactcaaggagcctgtt

SEQ ID NO: 5223810 - DNA, 25 bp, Homo sapien
tggtcggaaggcttagctgcctgtt

SEQ ID NO: 5223811 - DNA, 25 bp, Homo sapien
gctttggcgctattaacacatctgg

SEQ ID NO: 5223812 - DNA, 25 bp, Homo sapien
cagcaaagcccaggttaaggaggtg

SEQ ID NO: 5223813 - DNA, 25 bp, Homo sapien
tcctcagcctcaaaggactgctggc

SEQ ID NO: 5223814 - DNA, 25 bp, Homo sapien
aaggactgctggctttcagcaaagc

SEQ ID NO: 5223815 - DNA, 25 bp, Homo sapien
ggtgggtctcttccagcccacatct

SEQ ID NO: 5223816 - DNA, 25 bp, Homo sapien
tttcccagcttcgtgcaacttttca

SEQ ID NO: 5223817 - DNA, 25 bp, Homo sapien
tcatgaacatagaaaaagagccacc

SEQ ID NO: 5223818 - DNA, 25 bp, Homo sapien
cacctaatacctttgggatggcatt

SEQ ID NO: 5223819 - DNA, 25 bp, Homo sapien
ggtgaaagtcatcccctgccaggtt

SEQ ID NO: 5223820 - DNA, 25 bp, Homo sapien
agcaccgggcaaacacacagaagat

SEQ ID NO: 5223821 - DNA, 25 bp, Homo sapien
tctttccttccctcgacacgcaggg

SEQ ID NO: 5223822 - DNA, 25 bp, Homo sapien
tcgacacgcagggacacgcagccct

SEQ ID NO: 5223823 - DNA, 25 bp, Homo sapien
gggagactcagctctgactgcgaag

SEQ ID NO: 5223824 - DNA, 25 bp, Homo sapien
acagctctgtgggtagcagcgaaga

SEQ ID NO: 5223825 - DNA, 25 bp, Homo sapien
tattcaggtgccagaaacagctctg

SEQ ID NO: 5223826 - DNA, 25 bp, Homo sapien
caacacagtatctggctgaaagcca

SEQ ID NO: 5223827 - DNA, 25 bp, Homo sapien
gaaagccagttattcaggtgccaga

SEQ ID NO: 5223828 - DNA, 25 bp, Homo sapien
gcccgattgagatcttctggcccat

SEQ ID NO: 5223829 - DNA, 25 bp, Homo sapien
caatacaagcccgattgagatcttc

SEQ ID NO: 5223830 - DNA, 25 bp, Homo sapien
cttttcagcaatacaagcccgattg

SEQ ID NO: 5223831 - DNA, 25 bp, Homo sapien
acaagcccgattgagatcttctggc

SEQ ID NO: 5223832 - DNA, 25 bp, Homo sapien
caaactagcggtcgtcccagtttct

SEQ ID NO: 5223833 - DNA, 25 bp, Homo sapien
tcgcacggcacactgccctttggag

SEQ ID NO: 5223834 - DNA, 25 bp, Homo sapien
ctttggaggaatggcacgttaccaa

SEQ ID NO: 5223835 - DNA, 25 bp, Homo sapien
gttggcaaccgggatgcctgccagc

SEQ ID NO: 5223836 - DNA, 25 bp, Homo sapien
gaacaaatggccctgtaacgctcca

SEQ ID NO: 5223837 - DNA, 25 bp, Homo sapien
gcatgtgcggaggaattaactgcac

SEQ ID NO: 5223838 - DNA, 25 bp, Homo sapien
gtggagaagccatgcagaacaaatg

SEQ ID NO: 5223839 - DNA, 25 bp, Homo sapien
ccccagtgggaagactttgcgatca

SEQ ID NO: 5223840 - DNA, 25 bp, Homo sapien
ctcatcctggactttaccccttgcc

SEQ ID NO: 5223841 - DNA, 25 bp, Homo sapien
gcctcatcctggactttaccccttg

SEQ ID NO: 5223842 - DNA, 25 bp, Homo sapien
cctcatcctggactttaccccttgc

SEQ ID NO: 5223843 - DNA, 25 bp, Homo sapien
tcatcctggactttaccccttgcct

SEQ ID NO: 5223844 - DNA, 25 bp, Homo sapien
tgggcaagacaagcggctctctcct

SEQ ID NO: 5223845 - DNA, 25 bp, Homo sapien
ggcaagacaagcggctctctcctcg

SEQ ID NO: 5223846 - DNA, 25 bp, Homo sapien
tgtgggcaagacaagcggctctctc

SEQ ID NO: 5223847 - DNA, 25 bp, Homo sapien
caagacaagcggctctctcctcgtt

SEQ ID NO: 5223848 - DNA, 25 bp, Homo sapien
gaacctggacagtaggcttttccta

SEQ ID NO: 5223849 - DNA, 25 bp, Homo sapien
ttttcctaatatgagcttctccagc

SEQ ID NO: 5223850 - DNA, 25 bp, Homo sapien
cctggacagtaggcttttcctaata

SEQ ID NO: 5223851 - DNA, 25 bp, Homo sapien
ttgaacctggacagtaggcttttcc

SEQ ID NO: 5223852 - DNA, 25 bp, Homo sapien
ttgacccagatgaggcttccttcgg

SEQ ID NO: 5223853 - DNA, 25 bp, Homo sapien
gcttccttcggagtcagaagatgta

SEQ ID NO: 5223854 - DNA, 25 bp, Homo sapien
gatgaggcttccttcggagtcagaa

SEQ ID NO: 5223855 - DNA, 25 bp, Homo sapien
cagaagatgtagcaggtttccgtgg

SEQ ID NO: 5223856 - DNA, 25 bp, Homo sapien
tagggtaggggcaaaacaggcttca

SEQ ID NO: 5223857 - DNA, 25 bp, Homo sapien
gggagatttgagcatgcagcgtgta

SEQ ID NO: 5223858 - DNA, 25 bp, Homo sapien
tttgggaactcaagagtaagggtga

SEQ ID NO: 5223859 - DNA, 25 bp, Homo sapien
cagcgtgtagggtaggggcaaaaca

SEQ ID NO: 5223860 - DNA, 25 bp, Homo sapien
cgggcaagatcgttctcatctgaga

SEQ ID NO: 5223861 - DNA, 25 bp, Homo sapien
taagcacatagtcaaggactcccag

SEQ ID NO: 5223862 - DNA, 25 bp, Homo sapien
gggcctccctcccttaatatagaca

SEQ ID NO: 5223863 - DNA, 25 bp, Homo sapien
gacacattcatggtgtgccctgcct

SEQ ID NO: 5223864 - DNA, 25 bp, Homo sapien
cagaaacatccctgtcgagcaatat

SEQ ID NO: 5223865 - DNA, 25 bp, Homo sapien
tgtcgagcaatatagccctgaataa

SEQ ID NO: 5223866 - DNA, 25 bp, Homo sapien
ctattgtgagtccccagactggtaa

SEQ ID NO: 5223867 - DNA, 25 bp, Homo sapien
tcctgtatgtgacatctacttcacc

SEQ ID NO: 5223868 - DNA, 25 bp, Homo sapien
acaacattgcaagctaggtcacagg

SEQ ID NO: 5223869 - DNA, 25 bp, Homo sapien
tctgcagagccgaccaaaggtagct

SEQ ID NO: 5223870 - DNA, 25 bp, Homo sapien
taaggacatgaatcactatcagggc

SEQ ID NO: 5223871 - DNA, 25 bp, Homo sapien
tggaggccccgcctaagctatgaag

SEQ ID NO: 5223872 - DNA, 25 bp, Homo sapien
gagccctgtgcctacactgaatccc

SEQ ID NO: 5223873 - DNA, 25 bp, Homo sapien
ttaccctctaattgaccataggcac

SEQ ID NO: 5223874 - DNA, 25 bp, Homo sapien
tgcctacactgaatcccactgaatc

SEQ ID NO: 5223875 - DNA, 25 bp, Homo sapien
tgtgagtcttttaccctctaattga

SEQ ID NO: 5223876 - DNA, 25 bp, Homo sapien
aagggtttgatcatggctttgtgaa

SEQ ID NO: 5223877 - DNA, 25 bp, Homo sapien
gctttgtgaaagaaacttagcagga

SEQ ID NO: 5223878 - DNA, 25 bp, Homo sapien
agaaacttagcaggaaatattgatg

SEQ ID NO: 5223879 - DNA, 25 bp, Homo sapien
gatgagaattcctctagggtcttca

SEQ ID NO: 5223880 - DNA, 25 bp, Homo sapien
agcatgaggacaagagccatgaaca

SEQ ID NO: 5223881 - DNA, 25 bp, Homo sapien
aaagcatgaggacaagagccatgaa

SEQ ID NO: 5223882 - DNA, 25 bp, Homo sapien
gaatgtagaccttgggtctctgaca

SEQ ID NO: 5223883 - DNA, 25 bp, Homo sapien
gatgacagagcaggaatgtagacct

SEQ ID NO: 5223884 - DNA, 25 bp, Homo sapien
cttctttgtacacctggagatgctg

SEQ ID NO: 5223885 - DNA, 25 bp, Homo sapien
ttctttgtacacctggagatgctgc

SEQ ID NO: 5223886 - DNA, 25 bp, Homo sapien
ctccagaattcacgtgaatcagcat

SEQ ID NO: 5223887 - DNA, 25 bp, Homo sapien
actccagaattcacgtgaatcagca

SEQ ID NO: 5223888 - DNA, 25 bp, Homo sapien
aactccagaattcacgtgaatcagc

SEQ ID NO: 5223889 - DNA, 25 bp, Homo sapien
cacgtcaaagacaggctttatcttc

SEQ ID NO: 5223890 - DNA, 25 bp, Homo sapien
gggacgtgctcatagacacgtcaaa

SEQ ID NO: 5223891 - DNA, 25 bp, Homo sapien
aggaaacgagattttgactctccgg

SEQ ID NO: 5223892 - DNA, 25 bp, Homo sapien
tctacccaaggaaacgagattttga

SEQ ID NO: 5223893 - DNA, 25 bp, Homo sapien
ggttgagtcaccatttcttgacagt

SEQ ID NO: 5223894 - DNA, 25 bp, Homo sapien
tatgcccctcatctacattgctctg

SEQ ID NO: 5223895 - DNA, 25 bp, Homo sapien
gtcagagctcctgtggaccccacga

SEQ ID NO: 5223896 - DNA, 25 bp, Homo sapien
agagctcctgtggaccccacgaagg

SEQ ID NO: 5223897 - DNA, 25 bp, Homo sapien
tcagtccatcatgagcttctcgtgc

SEQ ID NO: 5223898 - DNA, 25 bp, Homo sapien
gggcattcagtccatcatgagcttc

SEQ ID NO: 5223899 - DNA, 25 bp, Homo sapien
cattgactccatgggcattcagtcc

SEQ ID NO: 5223900 - DNA, 25 bp, Homo sapien
tgagcttctcgtgcttgtgtgttgt

SEQ ID NO: 5223901 - DNA, 25 bp, Homo sapien
gctcgtgtgctattaacatgaagac

SEQ ID NO: 5223902 - DNA, 25 bp, Homo sapien
cacaataggctcgtgtgctattaac

SEQ ID NO: 5223903 - DNA, 25 bp, Homo sapien
gttgattcacaataggctcgtgtgc

SEQ ID NO: 5223904 - DNA, 25 bp, Homo sapien
cttgcaggttcctgcagaagatgct

SEQ ID NO: 5223905 - DNA, 25 bp, Homo sapien
cttgacttcctgtctttgactgtac

SEQ ID NO: 5223906 - DNA, 25 bp, Homo sapien
tcaacttccctcttgacttcctgtc

SEQ ID NO: 5223907 - DNA, 25 bp, Homo sapien
ccctcttgacttcctgtctttgact

SEQ ID NO: 5223908 - DNA, 25 bp, Homo sapien
aacttccctcttgacttcctgtctt

SEQ ID NO: 5223909 - DNA, 25 bp, Homo sapien
ccatagattctaggttgagaaggca

SEQ ID NO: 5223910 - DNA, 25 bp, Homo sapien
aactctgccacctctaagccattga

SEQ ID NO: 5223911 - DNA, 25 bp, Homo sapien
cattgaatggttcctgcagtttgga

SEQ ID NO: 5223912 - DNA, 25 bp, Homo sapien
ctgaggagtgtaggctgaatgtggc

SEQ ID NO: 5223913 - DNA, 25 bp, Homo sapien
cataacagccaggaagatgtcatcc

SEQ ID NO: 5223914 - DNA, 25 bp, Homo sapien
taacagccaggaagatgtcatccat

SEQ ID NO: 5223915 - DNA, 25 bp, Homo sapien
acatctggaacattttaggtccttc

SEQ ID NO: 5223916 - DNA, 25 bp, Homo sapien
ataacagccaggaagatgtcatcca

SEQ ID NO: 5223917 - DNA, 25 bp, Homo sapien
agatctagcagcaaattgaacttta

SEQ ID NO: 5223918 - DNA, 25 bp, Homo sapien
agcaaattgaactttagaaatgatc

SEQ ID NO: 5223919 - DNA, 25 bp, Homo sapien
gaagtccagcacctttgctcgtgtc

SEQ ID NO: 5223920 - DNA, 25 bp, Homo sapien
cctgtgaagtccagcacctttgctc

SEQ ID NO: 5223921 - DNA, 25 bp, Homo sapien
ctagctcgaacaaggacaggtctcc

SEQ ID NO: 5223922 - DNA, 25 bp, Homo sapien
acaggtctccctggttgagttcttc

SEQ ID NO: 5223923 - DNA, 25 bp, Homo sapien
tcatagcccttgtgcgatggctcca

SEQ ID NO: 5223924 - DNA, 25 bp, Homo sapien
cccacgatgcatatcatagcccttg

SEQ ID NO: 5223925 - DNA, 25 bp, Homo sapien
tacaatatttgtcacgaagatgaat

SEQ ID NO: 5223926 - DNA, 25 bp, Homo sapien
gaattaatgttgtgccatcttccat

SEQ ID NO: 5223927 - DNA, 25 bp, Homo sapien
cattctcattacaatcttggtctgg

SEQ ID NO: 5223928 - DNA, 25 bp, Homo sapien
tagcttgcatacttcctttctcatt

SEQ ID NO: 5223929 - DNA, 25 bp, Homo sapien
tcttccgttttatactctgctgggt

SEQ ID NO: 5223930 - DNA, 25 bp, Homo sapien
gaaccaattaatgtgacattccagc

SEQ ID NO: 5223931 - DNA, 25 bp, Homo sapien
catatgactttctattccaaagagc

SEQ ID NO: 5223932 - DNA, 25 bp, Homo sapien
tccttatgaactgtatctttaccca

SEQ ID NO: 5223933 - DNA, 25 bp, Homo sapien
cttagagagattgagcagggctgcc

SEQ ID NO: 5223934 - DNA, 25 bp, Homo sapien
tgccaagggcattcttctttgtcaa

SEQ ID NO: 5223935 - DNA, 25 bp, Homo sapien
catgcttgcttcagacgcaggttca

SEQ ID NO: 5223936 - DNA, 25 bp, Homo sapien
cacttattgagtttgtacccaggga

SEQ ID NO: 5223937 - DNA, 25 bp, Homo sapien
aaaacaggtggctcccaacttccag

SEQ ID NO: 5223938 - DNA, 25 bp, Homo sapien
gatttaaagttcaagcactacctag

SEQ ID NO: 5223939 - DNA, 25 bp, Homo sapien
cgtcagaccgtcatgaaaaacaggt

SEQ ID NO: 5223940 - DNA, 25 bp, Homo sapien
gatcttgtgatgactttgcacaccc

SEQ ID NO: 5223941 - DNA, 25 bp, Homo sapien
cttagtggctgggacttcaggcgca

SEQ ID NO: 5223942 - DNA, 25 bp, Homo sapien
ctccttagtggctgggacttcaggc

SEQ ID NO: 5223943 - DNA, 25 bp, Homo sapien
ttagtggctgggacttcaggcgcaa

SEQ ID NO: 5223944 - DNA, 25 bp, Homo sapien
tccttagtggctgggacttcaggcg

SEQ ID NO: 5223945 - DNA, 25 bp, Homo sapien
cttctcaccctgcatagtgatcttc

SEQ ID NO: 5223946 - DNA, 25 bp, Homo sapien
tctcaccctgcatagtgatcttcag

SEQ ID NO: 5223947 - DNA, 25 bp, Homo sapien
ttctcaccctgcatagtgatcttca

SEQ ID NO: 5223948 - DNA, 25 bp, Homo sapien
tcttctcaccctgcatagtgatctt

SEQ ID NO: 5223949 - DNA, 25 bp, Homo sapien
agccagttctaggaggcccctggtg

SEQ ID NO: 5223950 - DNA, 25 bp, Homo sapien
actggagccttggtctacatcacga

SEQ ID NO: 5223951 - DNA, 25 bp, Homo sapien
gaagtgactgcgtgacttctaagca

SEQ ID NO: 5223952 - DNA, 25 bp, Homo sapien
agcacatggatggtgtcgcagcttc

SEQ ID NO: 5223953 - DNA, 25 bp, Homo sapien
ctttgcctgtcatgggaggaagcca

SEQ ID NO: 5223954 - DNA, 25 bp, Homo sapien
gaaatataatctgctgcattatttg

SEQ ID NO: 5223955 - DNA, 25 bp, Homo sapien
tgatcctctaatgggtgcattgaaa

SEQ ID NO: 5223956 - DNA, 25 bp, Homo sapien
cttttaacactgcttgggtgcctgt

SEQ ID NO: 5223957 - DNA, 25 bp, Homo sapien
tggtgtctcatgctgatcctctaat

SEQ ID NO: 5223958 - DNA, 25 bp, Homo sapien
gccctggcggcgttggcagggccgg

SEQ ID NO: 5223959 - DNA, 25 bp, Homo sapien
ccagagttgggaggaaacttttgcg

SEQ ID NO: 5223960 - DNA, 25 bp, Homo sapien
gaggaaacttttgcgccggctccca

SEQ ID NO: 5223961 - DNA, 25 bp, Homo sapien
accaaagcgaaactgccggccctgc

SEQ ID NO: 5223962 - DNA, 25 bp, Homo sapien
gggcgcagcccccactctcggagga

SEQ ID NO: 5223963 - DNA, 25 bp, Homo sapien
gaggcccggaggctcgcggcagcgc

SEQ ID NO: 5223964 - DNA, 25 bp, Homo sapien
cggaacaccctgaggcccggaggct

SEQ ID NO: 5223965 - DNA, 25 bp, Homo sapien
cgccgctccccggaacaccctgagg

SEQ ID NO: 5223966 - DNA, 25 bp, Homo sapien
cacgccgggccgggccgaacaggtg

SEQ ID NO: 5223967 - DNA, 25 bp, Homo sapien
gcccgtcctgccgaagcacacggtc

SEQ ID NO: 5223968 - DNA, 25 bp, Homo sapien
gcagggcaccacgatgcccgtcctg

SEQ ID NO: 5223969 - DNA, 25 bp, Homo sapien
agctcgccgacgcgcagctggccct

SEQ ID NO: 5223970 - DNA, 25 bp, Homo sapien
tccttgcagggcaccacgatgcccg

SEQ ID NO: 5223971 - DNA, 25 bp, Homo sapien
ccccactcctccgcgccgcgctcac

SEQ ID NO: 5223972 - DNA, 25 bp, Homo sapien
tagcaatagacaacagctgcagcta

SEQ ID NO: 5223973 - DNA, 25 bp, Homo sapien
tttctgcatcccctgagtgtcgcca

SEQ ID NO: 5223974 - DNA, 25 bp, Homo sapien
ccataatcccctgggttttctgcat

SEQ ID NO: 5223975 - DNA, 25 bp, Homo sapien
gctacaggcagtgccccataatccc

SEQ ID NO: 5223976 - DNA, 25 bp, Homo sapien
ggttacttctcagacgctgtccacg

SEQ ID NO: 5223977 - DNA, 25 bp, Homo sapien
cacctggatgtctaagatcttgccc

SEQ ID NO: 5223978 - DNA, 25 bp, Homo sapien
gttctttatagcactcgccacctgg

SEQ ID NO: 5223979 - DNA, 25 bp, Homo sapien
ttcaggatcgcatcaacctctggcc

SEQ ID NO: 5223980 - DNA, 25 bp, Homo sapien
aaacgagagttcagcaacaggaggc

SEQ ID NO: 5223981 - DNA, 25 bp, Homo sapien
gaggcaggctcaatttagtagctcc

SEQ ID NO: 5223982 - DNA, 25 bp, Homo sapien
taaccggcctgtcttgatatcctgc

SEQ ID NO: 5223983 - DNA, 25 bp, Homo sapien
accacattgcaatccaaaaaacgag

SEQ ID NO: 5223984 - DNA, 25 bp, Homo sapien
ggtcttctaagaaaatatgagggca

SEQ ID NO: 5223985 - DNA, 25 bp, Homo sapien
tgcttgtacttccatcatctctgcc

SEQ ID NO: 5223986 - DNA, 25 bp, Homo sapien
gggtgttaggatcaacaaattaaga

SEQ ID NO: 5223987 - DNA, 25 bp, Homo sapien
gatataacgcacatgaaacgttccc

SEQ ID NO: 5223988 - DNA, 25 bp, Homo sapien
ccacctatggaaagagtttcatgag

SEQ ID NO: 5223989 - DNA, 25 bp, Homo sapien
tgtcatttcacagatttacaatagt

SEQ ID NO: 5223990 - DNA, 25 bp, Homo sapien
caggtatggtctacaaacccctagg

SEQ ID NO: 5223991 - DNA, 25 bp, Homo sapien
tcatgagaagctgagaccatgtttc

SEQ ID NO: 5223992 - DNA, 25 bp, Homo sapien
aggtgtcagccaccgaaaccagcct

SEQ ID NO: 5223993 - DNA, 25 bp, Homo sapien
gtcagccaccgaaaccagcctgtaa

SEQ ID NO: 5223994 - DNA, 25 bp, Homo sapien
cgagtagtcgggattaaaggcacac

SEQ ID NO: 5223995 - DNA, 25 bp, Homo sapien
gagtagtcgggattaaaggcacaca

SEQ ID NO: 5223996 - DNA, 25 bp, Homo sapien
gaacttgggcaagcaggccctcact

SEQ ID NO: 5223997 - DNA, 25 bp, Homo sapien
tgggcaagcaggccctcactggcag

SEQ ID NO: 5223998 - DNA, 25 bp, Homo sapien
caggaacttgggcaagcaggccctc

SEQ ID NO: 5223999 - DNA, 25 bp, Homo sapien
tcaccaggaacttgggcaagcaggc

SEQ ID NO: 5224000 - DNA, 25 bp, Homo sapien
cattatctagcattccactattcca

SEQ ID NO: 5224001 - DNA, 25 bp, Homo sapien
gtctgaaggatctggttttgtgcca

SEQ ID NO: 5224002 - DNA, 25 bp, Homo sapien
atctggttttgtgccattatctagc

SEQ ID NO: 5224003 - DNA, 25 bp, Homo sapien
tccacaagaagaaatcattagattt

SEQ ID NO: 5224004 - DNA, 25 bp, Homo sapien
aatccatggccattaataaacattc

SEQ ID NO: 5224005 - DNA, 25 bp, Homo sapien
caataaaagacaatcagctcctctc

SEQ ID NO: 5224006 - DNA, 25 bp, Homo sapien
ccacaataaaagacaatcagctcct

SEQ ID NO: 5224007 - DNA, 25 bp, Homo sapien
caaatccatggccattaataaacat

SEQ ID NO: 5224008 - DNA, 25 bp, Homo sapien
accatacctaaatgatagctgtcca

SEQ ID NO: 5224009 - DNA, 25 bp, Homo sapien
cctaaatgatagctgtccaccttga

SEQ ID NO: 5224010 - DNA, 25 bp, Homo sapien
tacctaaatgatagctgtccacctt

SEQ ID NO: 5224011 - DNA, 25 bp, Homo sapien
tgcaaccatacctaaatgatagctg

SEQ ID NO: 5224012 - DNA, 25 bp, Homo sapien
cagccatctcctacaaaggtcactg

SEQ ID NO: 5224013 - DNA, 25 bp, Homo sapien
tccagccatctcctacaaaggtcac

SEQ ID NO: 5224014 - DNA, 25 bp, Homo sapien
cctccagccatctcctacaaaggtc

SEQ ID NO: 5224015 - DNA, 25 bp, Homo sapien
agccatctcctacaaaggtcactga

SEQ ID NO: 5224016 - DNA, 25 bp, Homo sapien
accttgctgaacagccacaaaccca

SEQ ID NO: 5224017 - DNA, 25 bp, Homo sapien
gcaaccttgctgaacagccacaaac

SEQ ID NO: 5224018 - DNA, 25 bp, Homo sapien
caaccttgctgaacagccacaaacc

SEQ ID NO: 5224019 - DNA, 25 bp, Homo sapien
aaccttgctgaacagccacaaaccc

SEQ ID NO: 5224020 - DNA, 25 bp, Homo sapien
tatgtcacatgcaccactcagggaa

SEQ ID NO: 5224021 - DNA, 25 bp, Homo sapien
cccagacacagaggtgattctccta

SEQ ID NO: 5224022 - DNA, 25 bp, Homo sapien
tcagggaatacatcaccaagccttt

SEQ ID NO: 5224023 - DNA, 25 bp, Homo sapien
tctgcaggagattgggcatcccact

SEQ ID NO: 5224024 - DNA, 25 bp, Homo sapien
gctgaattaccaacctttcctgcaa

SEQ ID NO: 5224025 - DNA, 25 bp, Homo sapien
tatggatgtcctatgccaccatgga

SEQ ID NO: 5224026 - DNA, 25 bp, Homo sapien
tggtaaaagcctacccaagcacagt

SEQ ID NO: 5224027 - DNA, 25 bp, Homo sapien
gaaatgtccctagcatcatgaaacc

SEQ ID NO: 5224028 - DNA, 25 bp, Homo sapien
ttgacccaggtccccaagaagcagc

SEQ ID NO: 5224029 - DNA, 25 bp, Homo sapien
ctctgttcgtcttgcctggacatct

SEQ ID NO: 5224030 - DNA, 25 bp, Homo sapien
gttcgtcttgcctggacatctgagg

SEQ ID NO: 5224031 - DNA, 25 bp, Homo sapien
tctgtaggggtgttttcctctgagg

SEQ ID NO: 5224032 - DNA, 25 bp, Homo sapien
aggttgaggtgaattatctgtaggg

SEQ ID NO: 5224033 - DNA, 25 bp, Homo sapien
tctgccattgggagtgggaccacag

SEQ ID NO: 5224034 - DNA, 25 bp, Homo sapien
tagtccttttaacaggagccaaaca

SEQ ID NO: 5224035 - DNA, 25 bp, Homo sapien
tggcagagcccttctagtcctttta

SEQ ID NO: 5224036 - DNA, 25 bp, Homo sapien
agaaaatctgccattgggagtggga

SEQ ID NO: 5224037 - DNA, 25 bp, Homo sapien
gctgatgacgtaactaaaaaacata

SEQ ID NO: 5224038 - DNA, 25 bp, Homo sapien
catatcttcggaaacttttagtgtt

SEQ ID NO: 5224039 - DNA, 25 bp, Homo sapien
ttagaagtccaatcttcaggaaacg

SEQ ID NO: 5224040 - DNA, 25 bp, Homo sapien
caatcttcaggaaacgttgagtcaa

SEQ ID NO: 5224041 - DNA, 25 bp, Homo sapien
gaatgctgcagagggatcacaggta

SEQ ID NO: 5224042 - DNA, 25 bp, Homo sapien
ttagctgcgtttctctaacaacttc

SEQ ID NO: 5224043 - DNA, 25 bp, Homo sapien
ttctctaacaacttcattcctccag

SEQ ID NO: 5224044 - DNA, 25 bp, Homo sapien
cagaatgctgcagagggatcacagg

SEQ ID NO: 5224045 - DNA, 25 bp, Homo sapien
aactagcctatgagaatgaattgca

SEQ ID NO: 5224046 - DNA, 25 bp, Homo sapien
ccttcactatgggtagatgacatga

SEQ ID NO: 5224047 - DNA, 25 bp, Homo sapien
tctggttcatactgtcactgggaaa

SEQ ID NO: 5224048 - DNA, 25 bp, Homo sapien
tactaatagcaccaaaagaccttca

SEQ ID NO: 5224049 - DNA, 25 bp, Homo sapien
taaagtacaccttcctgcctagagg

SEQ ID NO: 5224050 - DNA, 25 bp, Homo sapien
cagattttatcacctacgatggagg

SEQ ID NO: 5224051 - DNA, 25 bp, Homo sapien
gaaaactatgtaatggccactggac

SEQ ID NO: 5224052 - DNA, 25 bp, Homo sapien
aaatctacccaggacttctgacgga

SEQ ID NO: 5224053 - DNA, 25 bp, Homo sapien
tgagatatgcaatgatgcacagagc

SEQ ID NO: 5224054 - DNA, 25 bp, Homo sapien
ctgagatatgcaatgatgcacagag

SEQ ID NO: 5224055 - DNA, 25 bp, Homo sapien
tctgagatatgcaatgatgcacaga

SEQ ID NO: 5224056 - DNA, 25 bp, Homo sapien
gagatatgcaatgatgcacagagca

SEQ ID NO: 5224057 - DNA, 25 bp, Homo sapien
ccaggattcctccatctgtatattc

SEQ ID NO: 5224058 - DNA, 25 bp, Homo sapien
ccatctgtatattctaagtgatgaa

SEQ ID NO: 5224059 - DNA, 25 bp, Homo sapien
tctaagtgatgaatcttcacccagt

SEQ ID NO: 5224060 - DNA, 25 bp, Homo sapien
gatccaggattcctccatctgtata

SEQ ID NO: 5224061 - DNA, 25 bp, Homo sapien
tctttatcttcaacaacatctgcca

SEQ ID NO: 5224062 - DNA, 25 bp, Homo sapien
ttatcttcaacaacatctgccaaga

SEQ ID NO: 5224063 - DNA, 25 bp, Homo sapien
tgtctttatcttcaacaacatctgc

SEQ ID NO: 5224064 - DNA, 25 bp, Homo sapien
atcttcaacaacatctgccaagaca

SEQ ID NO: 5224065 - DNA, 25 bp, Homo sapien
agaggaaaacaaagaggcacatttt

SEQ ID NO: 5224066 - DNA, 25 bp, Homo sapien
aaacaaagaggcacatttttagagt

SEQ ID NO: 5224067 - DNA, 25 bp, Homo sapien
aaaacaaagaggcacatttttagag

SEQ ID NO: 5224068 - DNA, 25 bp, Homo sapien
ctgtagaggaaaacaaagaggcaca

SEQ ID NO: 5224069 - DNA, 25 bp, Homo sapien
ttgacacatgagtttgttaaggatt

SEQ ID NO: 5224070 - DNA, 25 bp, Homo sapien
tttaataataattgacacatgagtt

SEQ ID NO: 5224071 - DNA, 25 bp, Homo sapien
ttttaataataattgacacatgagt

SEQ ID NO: 5224072 - DNA, 25 bp, Homo sapien
tgtctgctaattaggccaacacaaa

SEQ ID NO: 5224073 - DNA, 25 bp, Homo sapien
agtgtctgctaattaggccaacaca

SEQ ID NO: 5224074 - DNA, 25 bp, Homo sapien
gaagtgtctgctaattaggccaaca

SEQ ID NO: 5224075 - DNA, 25 bp, Homo sapien
atgaagtgtctgctaattaggccaa

SEQ ID NO: 5224076 - DNA, 25 bp, Homo sapien
atatgaaactaatttattaagacat

SEQ ID NO: 5224077 - DNA, 25 bp, Homo sapien
acatatgaaactaatttattaagac

SEQ ID NO: 5224078 - DNA, 25 bp, Homo sapien
catatgaaactaatttattaagaca

SEQ ID NO: 5224079 - DNA, 25 bp, Homo sapien
tatgaaactaatttattaagacata

SEQ ID NO: 5224080 - DNA, 25 bp, Homo sapien
gccaggaataaactacagagccagc

SEQ ID NO: 5224081 - DNA, 25 bp, Homo sapien
tttgaaacacattcacgcctcaggc

SEQ ID NO: 5224082 - DNA, 25 bp, Homo sapien
ggcagaacacgctcaaactttttgg

SEQ ID NO: 5224083 - DNA, 25 bp, Homo sapien
cagagccagcaacgacaatgatgat

SEQ ID NO: 5224084 - DNA, 25 bp, Homo sapien
actttgaaagctagatctctctgac

SEQ ID NO: 5224085 - DNA, 25 bp, Homo sapien
tataaattagccttgtacaaacagc

SEQ ID NO: 5224086 - DNA, 25 bp, Homo sapien
cagcactaaagatgtataatagaag

SEQ ID NO: 5224087 - DNA, 25 bp, Homo sapien
tctctctgacagagttcggttttgg

SEQ ID NO: 5224088 - DNA, 25 bp, Homo sapien
tgttaaagccgaacccaagcagtac

SEQ ID NO: 5224089 - DNA, 25 bp, Homo sapien
ggacaaattatctccctgggcactg

SEQ ID NO: 5224090 - DNA, 25 bp, Homo sapien
tgggcactgttcatggacttatcct

SEQ ID NO: 5224091 - DNA, 25 bp, Homo sapien
tatttagtaatggtggtagagtccc

SEQ ID NO: 5224092 - DNA, 25 bp, Homo sapien
caataaactgaggatcatttgtgat

SEQ ID NO: 5224093 - DNA, 25 bp, Homo sapien
taaactgaggatcatttgtgatgga

SEQ ID NO: 5224094 - DNA, 25 bp, Homo sapien
aataaactgaggatcatttgtgatg

SEQ ID NO: 5224095 - DNA, 25 bp, Homo sapien
ccaataaactgaggatcatttgtga

SEQ ID NO: 5224096 - DNA, 25 bp, Homo sapien
gaataccagatatcacatgtgatcc

SEQ ID NO: 5224097 - DNA, 25 bp, Homo sapien
ccctaggataggcaaaatttagtca

SEQ ID NO: 5224098 - DNA, 25 bp, Homo sapien
ttgcccaaggactgataactaatag

SEQ ID NO: 5224099 - DNA, 25 bp, Homo sapien
tgatccagtgggcaattcacttgga

SEQ ID NO: 5224100 - DNA, 25 bp, Homo sapien
ccagcaaacaggtaggcgggaagaa

SEQ ID NO: 5224101 - DNA, 25 bp, Homo sapien
taactgtggacccactagagggcaa

SEQ ID NO: 5224102 - DNA, 25 bp, Homo sapien
ggtcactagttcatgcagcattgcg

SEQ ID NO: 5224103 - DNA, 25 bp, Homo sapien
aaagagcctggctttaggtcactag

SEQ ID NO: 5224104 - DNA, 25 bp, Homo sapien
ggaagccaacttcaaactgagtagt

SEQ ID NO: 5224105 - DNA, 25 bp, Homo sapien
aagccaacttcaaactgagtagttt

SEQ ID NO: 5224106 - DNA, 25 bp, Homo sapien
gaagccaacttcaaactgagtagtt

SEQ ID NO: 5224107 - DNA, 25 bp, Homo sapien
tcaattacagtaaccttggcctgaa

SEQ ID NO: 5224108 - DNA, 25 bp, Homo sapien
aaacaaggatgtcaatggaagaagc

SEQ ID NO: 5224109 - DNA, 25 bp, Homo sapien
gagaaggtgctcctaaccaacaaaa

SEQ ID NO: 5224110 - DNA, 25 bp, Homo sapien
aactgcaagttcaagtctgggagac

SEQ ID NO: 5224111 - DNA, 25 bp, Homo sapien
tttagttccacttatccatgatgaa

SEQ ID NO: 5224112 - DNA, 25 bp, Homo sapien
aacaattgatgacttactacaggcc

SEQ ID NO: 5224113 - DNA, 25 bp, Homo sapien
aggccaggtgctctcctgaacactt

SEQ ID NO: 5224114 - DNA, 25 bp, Homo sapien
gaacacttcgtgttaacttacataa

SEQ ID NO: 5224115 - DNA, 25 bp, Homo sapien
gtaacaagagctacagtttcaacgt

SEQ ID NO: 5224116 - DNA, 25 bp, Homo sapien
gaagtaacaagagctacagtttcaa

SEQ ID NO: 5224117 - DNA, 25 bp, Homo sapien
ctgaagtaacaagagctacagtttc

SEQ ID NO: 5224118 - DNA, 25 bp, Homo sapien
caagagctacagtttcaacgttcat

SEQ ID NO: 5224119 - DNA, 25 bp, Homo sapien
tctgcagcaattagtactctggtga

SEQ ID NO: 5224120 - DNA, 25 bp, Homo sapien
tacataatgcctcgctccagttctc

SEQ ID NO: 5224121 - DNA, 25 bp, Homo sapien
tcttaccaagcatgaaatgaaccaa

SEQ ID NO: 5224122 - DNA, 25 bp, Homo sapien
gatgaaatgtgcctctaggttcaaa

SEQ ID NO: 5224123 - DNA, 25 bp, Homo sapien
tacccttcctgtactatatttgatg

SEQ ID NO: 5224124 - DNA, 25 bp, Homo sapien
aagtaggtgcacagttttcaattaa

SEQ ID NO: 5224125 - DNA, 25 bp, Homo sapien
gtgtcagtgaaagtaggtgcacagt

SEQ ID NO: 5224126 - DNA, 25 bp, Homo sapien
ttctacccttcctgtactatatttg

SEQ ID NO: 5224127 - DNA, 25 bp, Homo sapien
gtggtctggatttccattcaggttg

SEQ ID NO: 5224128 - DNA, 25 bp, Homo sapien
taataaatttgcagtcccactcggg

SEQ ID NO: 5224129 - DNA, 25 bp, Homo sapien
tcctgacaatagtaccaccaccata

SEQ ID NO: 5224130 - DNA, 25 bp, Homo sapien
ttcctgacaatagtaccaccaccat

SEQ ID NO: 5224131 - DNA, 25 bp, Homo sapien
ccaccaccataataaatttgcagtc

SEQ ID NO: 5224132 - DNA, 25 bp, Homo sapien
tatcactattaggtctggtttcaac

SEQ ID NO: 5224133 - DNA, 25 bp, Homo sapien
caatatcactattaggtctggtttc

SEQ ID NO: 5224134 - DNA, 25 bp, Homo sapien
cactattaggtctggtttcaacatc

SEQ ID NO: 5224135 - DNA, 25 bp, Homo sapien
tcaatatcactattaggtctggttt

SEQ ID NO: 5224136 - DNA, 25 bp, Homo sapien
tgtgcatattctcgctgtatctggt

SEQ ID NO: 5224137 - DNA, 25 bp, Homo sapien
taatctggagtacttatgtgcatat

SEQ ID NO: 5224138 - DNA, 25 bp, Homo sapien
ccttaaggcagaagatgttcctcct

SEQ ID NO: 5224139 - DNA, 25 bp, Homo sapien
tagaataaggtgttctcaaataatc

SEQ ID NO: 5224140 - DNA, 25 bp, Homo sapien
tttactctcttaagctccacacagc

SEQ ID NO: 5224141 - DNA, 25 bp, Homo sapien
ccagctggcccattacacatgaact

SEQ ID NO: 5224142 - DNA, 25 bp, Homo sapien
catgaacttgtgtaggatttcttct

SEQ ID NO: 5224143 - DNA, 25 bp, Homo sapien
tgtcattgagcatgatccacaccat

SEQ ID NO: 5224144 - DNA, 25 bp, Homo sapien
tctcctttacatttcatactgtcta

SEQ ID NO: 5224145 - DNA, 25 bp, Homo sapien
tacatttcatactgtctacacttac

SEQ ID NO: 5224146 - DNA, 25 bp, Homo sapien
cattccaacaaatctccaccttctc

SEQ ID NO: 5224147 - DNA, 25 bp, Homo sapien
ttccaacaaatctccaccttctcct

SEQ ID NO: 5224148 - DNA, 25 bp, Homo sapien
tagtatacagtctctggtgtctggc

SEQ ID NO: 5224149 - DNA, 25 bp, Homo sapien
gtgtgaccatcaccacgatgaagat

SEQ ID NO: 5224150 - DNA, 25 bp, Homo sapien
catctgcttaccaggtgacggatat

SEQ ID NO: 5224151 - DNA, 25 bp, Homo sapien
tttcccctcaaataccactatggtc

SEQ ID NO: 5224152 - DNA, 25 bp, Homo sapien
ggaggtatcacatgactggactttg

SEQ ID NO: 5224153 - DNA, 25 bp, Homo sapien
aggtatcacatgactggactttgaa

SEQ ID NO: 5224154 - DNA, 25 bp, Homo sapien
tatgtaatgcgggaggtaaaagatc

SEQ ID NO: 5224155 - DNA, 25 bp, Homo sapien
agaacatatgtaatgcgggaggtaa

SEQ ID NO: 5224156 - DNA, 25 bp, Homo sapien
cacatttcaatacatagatactggg

SEQ ID NO: 5224157 - DNA, 25 bp, Homo sapien
aataaatagacagatgccatggcac

SEQ ID NO: 5224158 - DNA, 25 bp, Homo sapien
gaatgagtagatcccaaggcacaga

SEQ ID NO: 5224159 - DNA, 25 bp, Homo sapien
tggaaaggctgagtgaaccaacaca

SEQ ID NO: 5224160 - DNA, 25 bp, Homo sapien
gaagccttggccattctagctgagg

SEQ ID NO: 5224161 - DNA, 25 bp, Homo sapien
tagataactgaagcatgctagcaat

SEQ ID NO: 5224162 - DNA, 25 bp, Homo sapien
ttttatactactgcggctaagctgg

SEQ ID NO: 5224163 - DNA, 25 bp, Homo sapien
tttgagtctccctggctattgaagc

SEQ ID NO: 5224164 - DNA, 25 bp, Homo sapien
tccaaaagttgttagctctctacaa

SEQ ID NO: 5224165 - DNA, 25 bp, Homo sapien
actatgcgttattcaaattgatgcc

SEQ ID NO: 5224166 - DNA, 25 bp, Homo sapien
ttctctagagataaaaccataactt

SEQ ID NO: 5224167 - DNA, 25 bp, Homo sapien
taacagttcattagtgatacaggaa

SEQ ID NO: 5224168 - DNA, 25 bp, Homo sapien
tggttttcttcatttctatctcaaa

SEQ ID NO: 5224169 - DNA, 25 bp, Homo sapien
gttttcttcatttctatctcaaaat

SEQ ID NO: 5224170 - DNA, 25 bp, Homo sapien
ggttttcttcatttctatctcaaaa

SEQ ID NO: 5224171 - DNA, 25 bp, Homo sapien
atggttttcttcatttctatctcaa

SEQ ID NO: 5224172 - DNA, 25 bp, Homo sapien
tgaaatgtcagcatccactggctga

SEQ ID NO: 5224173 - DNA, 25 bp, Homo sapien
cacacttcccttctgaaatgtcagc

SEQ ID NO: 5224174 - DNA, 25 bp, Homo sapien
tcagcatccactggctgagtagcat

SEQ ID NO: 5224175 - DNA, 25 bp, Homo sapien
tagcattagggggatgaaacttggc

SEQ ID NO: 5224176 - DNA, 25 bp, Homo sapien
aagaacatagagctttccacacctt

SEQ ID NO: 5224177 - DNA, 25 bp, Homo sapien
ccactctcaaaaattggcaaggtat

SEQ ID NO: 5224178 - DNA, 25 bp, Homo sapien
caaatgtggcagctattaagatgct

SEQ ID NO: 5224179 - DNA, 25 bp, Homo sapien
taaaatgtctagtgcaaatactggc

SEQ ID NO: 5224180 - DNA, 25 bp, Homo sapien
tagctaggcaagttcgatgggctcg

SEQ ID NO: 5224181 - DNA, 25 bp, Homo sapien
ccatttgtgggctatactaactgca

SEQ ID NO: 5224182 - DNA, 25 bp, Homo sapien
caatagttaccatgggtggtgggca

SEQ ID NO: 5224183 - DNA, 25 bp, Homo sapien
ggtattgaccagataaagcaggaga

SEQ ID NO: 5224184 - DNA, 25 bp, Homo sapien
cgcatcatgcatcgcagatctgcca

SEQ ID NO: 5224185 - DNA, 25 bp, Homo sapien
ctctcaaaatatcgcatcatgcatc

SEQ ID NO: 5224186 - DNA, 25 bp, Homo sapien
tgcatcgcagatctgccaaaaatat

SEQ ID NO: 5224187 - DNA, 25 bp, Homo sapien
aaaatatcgcatcatgcatcgcaga

SEQ ID NO: 5224188 - DNA, 25 bp, Homo sapien
tcttactggaaggattcggcacact

SEQ ID NO: 5224189 - DNA, 25 bp, Homo sapien
cccattctgaggatgtacattggca

SEQ ID NO: 5224190 - DNA, 25 bp, Homo sapien
tactcccaagtgtgaataactgaag

SEQ ID NO: 5224191 - DNA, 25 bp, Homo sapien
taagcggaaagagttgctgatctgt

SEQ ID NO: 5224192 - DNA, 25 bp, Homo sapien
aaggggaagtagacagcctcttcac

SEQ ID NO: 5224193 - DNA, 25 bp, Homo sapien
aagatactacccaagattggataat

SEQ ID NO: 5224194 - DNA, 25 bp, Homo sapien
gctgaaggggaagtagacagcctct

SEQ ID NO: 5224195 - DNA, 25 bp, Homo sapien
tataaagatactacccaagattgga

SEQ ID NO: 5224196 - DNA, 25 bp, Homo sapien
tttccatattgatggtcacccccat

SEQ ID NO: 5224197 - DNA, 25 bp, Homo sapien
gttctctgaatgatgtgatatgcaa

SEQ ID NO: 5224198 - DNA, 25 bp, Homo sapien
ctgttctctgaatgatgtgatatgc

SEQ ID NO: 5224199 - DNA, 25 bp, Homo sapien
attttccatattgatggtcaccccc

SEQ ID NO: 5224200 - DNA, 25 bp, Homo sapien
gcatatgcagtgtggcagacagtta

SEQ ID NO: 5224201 - DNA, 25 bp, Homo sapien
tcatgcatatgcagtgtggcagaca

SEQ ID NO: 5224202 - DNA, 25 bp, Homo sapien
cagctgtagcatgccagagaaccag

SEQ ID NO: 5224203 - DNA, 25 bp, Homo sapien
gaaagtcacagctgtagcatgccag

SEQ ID NO: 5224204 - DNA, 25 bp, Homo sapien
cccctggtaatcctgcagtgcagga

SEQ ID NO: 5224205 - DNA, 25 bp, Homo sapien
gtcaattcaggccactgtgtggact

SEQ ID NO: 5224206 - DNA, 25 bp, Homo sapien
taagcttattgccatccgatgagat

SEQ ID NO: 5224207 - DNA, 25 bp, Homo sapien
gagatggcagtcaattcaggccact

SEQ ID NO: 5224208 - DNA, 25 bp, Homo sapien
caggtactttcacggatgagtgcca

SEQ ID NO: 5224209 - DNA, 25 bp, Homo sapien
tgacagaagttgaggggtctctaac

SEQ ID NO: 5224210 - DNA, 25 bp, Homo sapien
acggatgagtgccaaggtagccctg

SEQ ID NO: 5224211 - DNA, 25 bp, Homo sapien
tactttcacggatgagtgccaaggt

SEQ ID NO: 5224212 - DNA, 25 bp, Homo sapien
ctccagtggcaatggtgctgagact

SEQ ID NO: 5224213 - DNA, 25 bp, Homo sapien
aagtatgactagataaaactctgag

SEQ ID NO: 5224214 - DNA, 25 bp, Homo sapien
caacataatttctcaactgggctgg

SEQ ID NO: 5224215 - DNA, 25 bp, Homo sapien
ctaagaggtgagatcaagtatgact

SEQ ID NO: 5224216 - DNA, 25 bp, Homo sapien
gcctaacaggaacaagtgataaaaa

SEQ ID NO: 5224217 - DNA, 25 bp, Homo sapien
tagaacatgacaactgcctaacagg

SEQ ID NO: 5224218 - DNA, 25 bp, Homo sapien
gagagaggccctgactataaaataa

SEQ ID NO: 5224219 - DNA, 25 bp, Homo sapien
gcagtagaggaaatgctctacatca

SEQ ID NO: 5224220 - DNA, 25 bp, Homo sapien
acaaatccaaggtaatctccaaggc

SEQ ID NO: 5224221 - DNA, 25 bp, Homo sapien
attgagattacacaaatccaaggta

SEQ ID NO: 5224222 - DNA, 25 bp, Homo sapien
gagattacacaaatccaaggtaatc

SEQ ID NO: 5224223 - DNA, 25 bp, Homo sapien
caaatccaaggtaatctccaaggcc

SEQ ID NO: 5224224 - DNA, 25 bp, Homo sapien
tcccctcgcatcaaataaattcctt

SEQ ID NO: 5224225 - DNA, 25 bp, Homo sapien
atctcccctcgcatcaaataaattc

SEQ ID NO: 5224226 - DNA, 25 bp, Homo sapien
aaagcctatttcaatctcccctcgc

SEQ ID NO: 5224227 - DNA, 25 bp, Homo sapien
tttcaatctcccctcgcatcaaata

SEQ ID NO: 5224228 - DNA, 25 bp, Homo sapien
tataagacaaccaacaatactcacc

SEQ ID NO: 5224229 - DNA, 25 bp, Homo sapien
cagtaactacacacagcaattggga

SEQ ID NO: 5224230 - DNA, 25 bp, Homo sapien
gaaaggagagggaacagtaactaca

SEQ ID NO: 5224231 - DNA, 25 bp, Homo sapien
caccagcacggcatatattatatca

SEQ ID NO: 5224232 - DNA, 25 bp, Homo sapien
ccatgtattggaggactgcgagctt

SEQ ID NO: 5224233 - DNA, 25 bp, Homo sapien
tctaaatttagcatagccagaggca

SEQ ID NO: 5224234 - DNA, 25 bp, Homo sapien
caacgacgtaagtatgctgaccaca

SEQ ID NO: 5224235 - DNA, 25 bp, Homo sapien
gaaggactatcactcttttgccaga

SEQ ID NO: 5224236 - DNA, 25 bp, Homo sapien
caggagtgatggcaagcgctccctt

SEQ ID NO: 5224237 - DNA, 25 bp, Homo sapien
ggaatggaggcctcaagactgccca

SEQ ID NO: 5224238 - DNA, 25 bp, Homo sapien
tctcccctagagctgtgagttgtgc

SEQ ID NO: 5224239 - DNA, 25 bp, Homo sapien
tctggtgcctccgtaggtggcctgc

SEQ ID NO: 5224240 - DNA, 25 bp, Homo sapien
aatgcgctgggctacacctgaagct

SEQ ID NO: 5224241 - DNA, 25 bp, Homo sapien
cgtctggcccatagcaggtccaaaa

SEQ ID NO: 5224242 - DNA, 25 bp, Homo sapien
ggcccatggcaagtactaactggct

SEQ ID NO: 5224243 - DNA, 25 bp, Homo sapien
tgaagctagcatgcctctgagtctc

SEQ ID NO: 5224244 - DNA, 25 bp, Homo sapien
gtgaatgttcactcacggcccaagg

SEQ ID NO: 5224245 - DNA, 25 bp, Homo sapien
gaaacccagagaggcttgtgtcccc

SEQ ID NO: 5224246 - DNA, 25 bp, Homo sapien
tccccgtcagggtaatgaggtcttc

SEQ ID NO: 5224247 - DNA, 25 bp, Homo sapien
gataacatgagcacacctgtggcca

SEQ ID NO: 5224248 - DNA, 25 bp, Homo sapien
ccccagacatatagaactgtgagtt

SEQ ID NO: 5224249 - DNA, 25 bp, Homo sapien
ttatacattctggttcttaatcctg

SEQ ID NO: 5224250 - DNA, 25 bp, Homo sapien
cttcgccttctgcaataattgtgaa

SEQ ID NO: 5224251 - DNA, 25 bp, Homo sapien
ttattcccataaaattgtttgagct

SEQ ID NO: 5224252 - DNA, 25 bp, Homo sapien
gggtgttagcatccaggctttgcta

SEQ ID NO: 5224253 - DNA, 25 bp, Homo sapien
ccattagaacttctggacgacaaag

SEQ ID NO: 5224254 - DNA, 25 bp, Homo sapien
gacgacaaagtgcattgtcaatgaa

SEQ ID NO: 5224255 - DNA, 25 bp, Homo sapien
tagaaacggtaaatgagcagtggct

SEQ ID NO: 5224256 - DNA, 25 bp, Homo sapien
ttgaccctgcagacaatggagagcc

SEQ ID NO: 5224257 - DNA, 25 bp, Homo sapien
tcatgcagaaggctggaatgcacag

SEQ ID NO: 5224258 - DNA, 25 bp, Homo sapien
ggtatgacactaatcagcagagacg

SEQ ID NO: 5224259 - DNA, 25 bp, Homo sapien
tttgagacacaaacaattccccgga

SEQ ID NO: 5224260 - DNA, 25 bp, Homo sapien
tcagcatcagccctatgagcaaggt

SEQ ID NO: 5224261 - DNA, 25 bp, Homo sapien
caattacgtgtaatggccacctagg

SEQ ID NO: 5224262 - DNA, 25 bp, Homo sapien
tgaaagctgatttttggccaacggc

SEQ ID NO: 5224263 - DNA, 25 bp, Homo sapien
gaaagttcctccaagctggacagct

SEQ ID NO: 5224264 - DNA, 25 bp, Homo sapien
cacacaagcctgagactatttttat

SEQ ID NO: 5224265 - DNA, 25 bp, Homo sapien
gactacatcgaaacatgcatccttc

SEQ ID NO: 5224266 - DNA, 25 bp, Homo sapien
tcagacaaagttgcccacgaagcta

SEQ ID NO: 5224267 - DNA, 25 bp, Homo sapien
gaatgaatccacaagttatatctcc

SEQ ID NO: 5224268 - DNA, 25 bp, Homo sapien
ttcatacaagcaaatccacatgcac

SEQ ID NO: 5224269 - DNA, 25 bp, Homo sapien
tacaagcaaatccacatgcacactc

SEQ ID NO: 5224270 - DNA, 25 bp, Homo sapien
ctgtagaggccttgcatttcaaaag

SEQ ID NO: 5224271 - DNA, 25 bp, Homo sapien
ccacaatcctacctctcagaaataa

SEQ ID NO: 5224272 - DNA, 25 bp, Homo sapien
ctagaatgtatgttgcaagataata

SEQ ID NO: 5224273 - DNA, 25 bp, Homo sapien
cacgtgaaagtatgacacatcaggg

SEQ ID NO: 5224274 - DNA, 25 bp, Homo sapien
gggtccaatcataccccactggatg

SEQ ID NO: 5224275 - DNA, 25 bp, Homo sapien
taacgtcattgttattactagaatg

SEQ ID NO: 5224276 - DNA, 25 bp, Homo sapien
caaaacctgattcaaccttgacctt

SEQ ID NO: 5224277 - DNA, 25 bp, Homo sapien
ttactggtttcatagctctttgttg

SEQ ID NO: 5224278 - DNA, 25 bp, Homo sapien
tcctcttgctcagcacaaagtcagt

SEQ ID NO: 5224279 - DNA, 25 bp, Homo sapien
tcttactggtttcatagctctttgt

SEQ ID NO: 5224280 - DNA, 25 bp, Homo sapien
agcttccatgcactagtaacctctc

SEQ ID NO: 5224281 - DNA, 25 bp, Homo sapien
ttccatgcactagtaacctctccgg

SEQ ID NO: 5224282 - DNA, 25 bp, Homo sapien
tggagcttccatgcactagtaacct

SEQ ID NO: 5224283 - DNA, 25 bp, Homo sapien
tgcactagtaacctctccggcagca

SEQ ID NO: 5224284 - DNA, 25 bp, Homo sapien
cgttttctgtatacaagctggcagc

SEQ ID NO: 5224285 - DNA, 25 bp, Homo sapien
gagagcaagcaaaccaacacctttt

SEQ ID NO: 5224286 - DNA, 25 bp, Homo sapien
caaacactctcctctagctgactgg

SEQ ID NO: 5224287 - DNA, 25 bp, Homo sapien
tcaaatggctgtctcaccagaagag

SEQ ID NO: 5224288 - DNA, 25 bp, Homo sapien
gcatttgcagggaaaactctacatt

SEQ ID NO: 5224289 - DNA, 25 bp, Homo sapien
tattagccaaacctgacttcactgt

SEQ ID NO: 5224290 - DNA, 25 bp, Homo sapien
ttaggtagcaataggtgaaaaagct

SEQ ID NO: 5224291 - DNA, 25 bp, Homo sapien
cttcactgtacattattttagccca

SEQ ID NO: 5224292 - DNA, 25 bp, Homo sapien
ttgagtaatttttatgggatccttc

SEQ ID NO: 5224293 - DNA, 25 bp, Homo sapien
tttatgggatccttcttatctgaac

SEQ ID NO: 5224294 - DNA, 25 bp, Homo sapien
taatttttatgggatccttcttatc

SEQ ID NO: 5224295 - DNA, 25 bp, Homo sapien
ggatccttcttatctgaacctgtct

SEQ ID NO: 5224296 - DNA, 25 bp, Homo sapien
tggtgacaagaacagatgtgagtgt

SEQ ID NO: 5224297 - DNA, 25 bp, Homo sapien
tgacaagaacagatgtgagtgtcct

SEQ ID NO: 5224298 - DNA, 25 bp, Homo sapien
caagaacagatgtgagtgtcctagt

SEQ ID NO: 5224299 - DNA, 25 bp, Homo sapien
gggaaagttctgcaacagtagaggg

SEQ ID NO: 5224300 - DNA, 25 bp, Homo sapien
aagattaagcaacaagagcacaggt

SEQ ID NO: 5224301 - DNA, 25 bp, Homo sapien
ggtccatgtagcttataaatggtga

SEQ ID NO: 5224302 - DNA, 25 bp, Homo sapien
caagccctcagtgaaggtacacaat

SEQ ID NO: 5224303 - DNA, 25 bp, Homo sapien
cataaccaaggttcaaagattaagc

SEQ ID NO: 5224304 - DNA, 25 bp, Homo sapien
agctcacagagaataagtaaccaga

SEQ ID NO: 5224305 - DNA, 25 bp, Homo sapien
ccctggacctatttgtctgttagca

SEQ ID NO: 5224306 - DNA, 25 bp, Homo sapien
gaacagggctggcacctaataagta

SEQ ID NO: 5224307 - DNA, 25 bp, Homo sapien
aatggattttgagctccctggacct

SEQ ID NO: 5224308 - DNA, 25 bp, Homo sapien
ggatctagagtgtgtggcgattcct

SEQ ID NO: 5224309 - DNA, 25 bp, Homo sapien
catatgtgccattgaggaagattcc

SEQ ID NO: 5224310 - DNA, 25 bp, Homo sapien
cctcagggatctagagtactgtatt

SEQ ID NO: 5224311 - DNA, 25 bp, Homo sapien
gtgcatatgtgccattgaggaagat

SEQ ID NO: 5224312 - DNA, 25 bp, Homo sapien
actaagacccaatgcgctggcaggc

SEQ ID NO: 5224313 - DNA, 25 bp, Homo sapien
acactggtgctagggcaatggtgac

SEQ ID NO: 5224314 - DNA, 25 bp, Homo sapien
caaatgcttatgctatgatggatgg

SEQ ID NO: 5224315 - DNA, 25 bp, Homo sapien
aggtagcccaaactgaaccaaatcg

SEQ ID NO: 5224316 - DNA, 25 bp, Homo sapien
tctggtctaagctaatgagtgccca

SEQ ID NO: 5224317 - DNA, 25 bp, Homo sapien
gaatataagcgtcatgaagcactca

SEQ ID NO: 5224318 - DNA, 25 bp, Homo sapien
ccactggttgccatgtacaaagaca

SEQ ID NO: 5224319 - DNA, 25 bp, Homo sapien
cctgctggaagagcctaagcacact

SEQ ID NO: 5224320 - DNA, 25 bp, Homo sapien
gagatttaacatattccagccctgg

SEQ ID NO: 5224321 - DNA, 25 bp, Homo sapien
gcccaggagtgatcttcaagcattt

SEQ ID NO: 5224322 - DNA, 25 bp, Homo sapien
gatgtttgacttgcccatgacagga

SEQ ID NO: 5224323 - DNA, 25 bp, Homo sapien
taagctccatttcagagaatcacag

SEQ ID NO: 5224324 - DNA, 25 bp, Homo sapien
tcacaggaaacagctcctctactcc

SEQ ID NO: 5224325 - DNA, 25 bp, Homo sapien
ctctactcccttcattggagattgc

SEQ ID NO: 5224326 - DNA, 25 bp, Homo sapien
caggaaacagctcctctactccctt

SEQ ID NO: 5224327 - DNA, 25 bp, Homo sapien
ctcctctactcccttcattggagat

SEQ ID NO: 5224328 - DNA, 25 bp, Homo sapien
taacagcggaacaattttctctgtc

SEQ ID NO: 5224329 - DNA, 25 bp, Homo sapien
aacagcggaacaattttctctgtcc

SEQ ID NO: 5224330 - DNA, 25 bp, Homo sapien
ttaacagcggaacaattttctctgt

SEQ ID NO: 5224331 - DNA, 25 bp, Homo sapien
taaaataaggacctctctcacatgc

SEQ ID NO: 5224332 - DNA, 25 bp, Homo sapien
tgacacaggcttgctccaacaataa

SEQ ID NO: 5224333 - DNA, 25 bp, Homo sapien
cacagtaccctgttccatgcagaaa

SEQ ID NO: 5224334 - DNA, 25 bp, Homo sapien
gctggtcttctcacttaaaaggcat

SEQ ID NO: 5224335 - DNA, 25 bp, Homo sapien
catttttaggatataaattgaacag

SEQ ID NO: 5224336 - DNA, 25 bp, Homo sapien
ttagatttcacctactttagggaga

SEQ ID NO: 5224337 - DNA, 25 bp, Homo sapien
taacaatcatatggagaaaggatac

SEQ ID NO: 5224338 - DNA, 25 bp, Homo sapien
tgcaacttggtcatatgcaaaatac

SEQ ID NO: 5224339 - DNA, 25 bp, Homo sapien
ctatgcgatctttccagtcaccgtc

SEQ ID NO: 5224340 - DNA, 25 bp, Homo sapien
taggtcataggaagatcctcgtgac

SEQ ID NO: 5224341 - DNA, 25 bp, Homo sapien
tttctcatcataggtcataggaaga

SEQ ID NO: 5224342 - DNA, 25 bp, Homo sapien
ggaagatcctcgtgacctatgcgat

SEQ ID NO: 5224343 - DNA, 25 bp, Homo sapien
gtttgaaggctccaggaccctatga

SEQ ID NO: 5224344 - DNA, 25 bp, Homo sapien
ttatagtttgaaggctccaggaccc

SEQ ID NO: 5224345 - DNA, 25 bp, Homo sapien
aaggctccaggaccctatgaaaagc

SEQ ID NO: 5224346 - DNA, 25 bp, Homo sapien
atttatagtttgaaggctccaggac

SEQ ID NO: 5224347 - DNA, 25 bp, Homo sapien
atgatgggcaagtagtaaaacaatg

SEQ ID NO: 5224348 - DNA, 25 bp, Homo sapien
ttttatgatgggcaagtagtaaaac

SEQ ID NO: 5224349 - DNA, 25 bp, Homo sapien
ttatgatgggcaagtagtaaaacaa

SEQ ID NO: 5224350 - DNA, 25 bp, Homo sapien
tattttatgatgggcaagtagtaaa

SEQ ID NO: 5224351 - DNA, 25 bp, Homo sapien
ctatttgaagcaagtatatccaaca

SEQ ID NO: 5224352 - DNA, 25 bp, Homo sapien
tctatttgaagcaagtatatccaac

SEQ ID NO: 5224353 - DNA, 25 bp, Homo sapien
ttctatttgaagcaagtatatccaa

SEQ ID NO: 5224354 - DNA, 25 bp, Homo sapien
atcttcatcagaggcaagcatcagc

SEQ ID NO: 5224355 - DNA, 25 bp, Homo sapien
ttcatcagaggcaagcatcagctcc

SEQ ID NO: 5224356 - DNA, 25 bp, Homo sapien
attagcatcttcatcagaggcaagc

SEQ ID NO: 5224357 - DNA, 25 bp, Homo sapien
cagaggcaagcatcagctccagcat

SEQ ID NO: 5224358 - DNA, 25 bp, Homo sapien
atttttataatctgatgctattatc

SEQ ID NO: 5224359 - DNA, 25 bp, Homo sapien
ataatctgatgctattatctttagc

SEQ ID NO: 5224360 - DNA, 25 bp, Homo sapien
tttataatctgatgctattatcttt

SEQ ID NO: 5224361 - DNA, 25 bp, Homo sapien
tataatctgatgctattatctttag

SEQ ID NO: 5224362 - DNA, 25 bp, Homo sapien
gtaccaagatcaaacacaaccaata

SEQ ID NO: 5224363 - DNA, 25 bp, Homo sapien
aaagtaccaagatcaaacacaacca

SEQ ID NO: 5224364 - DNA, 25 bp, Homo sapien
aagtaccaagatcaaacacaaccaa

SEQ ID NO: 5224365 - DNA, 25 bp, Homo sapien
caaaaagtaccaagatcaaacacaa

SEQ ID NO: 5224366 - DNA, 25 bp, Homo sapien
cttgacttgtttatccgtattttgc

SEQ ID NO: 5224367 - DNA, 25 bp, Homo sapien
actgagtcccacttgacttgtttat

SEQ ID NO: 5224368 - DNA, 25 bp, Homo sapien
gactgagtcccacttgacttgttta

SEQ ID NO: 5224369 - DNA, 25 bp, Homo sapien
ggctctgccgatctgcagggtttcc

SEQ ID NO: 5224370 - DNA, 25 bp, Homo sapien
ggccacttctgtctcaaaagcatct

SEQ ID NO: 5224371 - DNA, 25 bp, Homo sapien
ggctctcaatcttgtggagtggttc

SEQ ID NO: 5224372 - DNA, 25 bp, Homo sapien
cttaaatgcggccagttgggcggcc

SEQ ID NO: 5224373 - DNA, 25 bp, Homo sapien
tcaggtgaaaagaatatcataaaca

SEQ ID NO: 5224374 - DNA, 25 bp, Homo sapien
agaatatcataaacattacacatac

SEQ ID NO: 5224375 - DNA, 25 bp, Homo sapien
ggtgaaaagaatatcataaacatta

SEQ ID NO: 5224376 - DNA, 25 bp, Homo sapien
aagaatatcataaacattacacata

SEQ ID NO: 5224377 - DNA, 25 bp, Homo sapien
ctagctcggttccaaaagatacagg

SEQ ID NO: 5224378 - DNA, 25 bp, Homo sapien
ccctgacaaagctcataagagagag

SEQ ID NO: 5224379 - DNA, 25 bp, Homo sapien
gaaaacaaattctccggcacagaag

SEQ ID NO: 5224380 - DNA, 25 bp, Homo sapien
cagaagtactctgaggttcggccat

SEQ ID NO: 5224381 - DNA, 25 bp, Homo sapien
gtgccatcaatactgcctctactgc

SEQ ID NO: 5224382 - DNA, 25 bp, Homo sapien
tggaggtgcacagcctatggccaca

SEQ ID NO: 5224383 - DNA, 25 bp, Homo sapien
ctaagcaggctttcagggtggacca

SEQ ID NO: 5224384 - DNA, 25 bp, Homo sapien
tctactgccaaccacatctctccat

SEQ ID NO: 5224385 - DNA, 25 bp, Homo sapien
tcaacaggaatctatagctacacag

SEQ ID NO: 5224386 - DNA, 25 bp, Homo sapien
ttcctgaagatcagcgccataaagg

SEQ ID NO: 5224387 - DNA, 25 bp, Homo sapien
agaaaaatgttcccatatgtttcct

SEQ ID NO: 5224388 - DNA, 25 bp, Homo sapien
aagatcagcgccataaagggatttg

SEQ ID NO: 5224389 - DNA, 25 bp, Homo sapien
gaaagagagctatcagaatcagtgt

SEQ ID NO: 5224390 - DNA, 25 bp, Homo sapien
gtggccaagcccctgtacttgtgtg

SEQ ID NO: 5224391 - DNA, 25 bp, Homo sapien
tgctctgagctggtctaggccacac

SEQ ID NO: 5224392 - DNA, 25 bp, Homo sapien
catgcctgatccacagaacttggtc

SEQ ID NO: 5224393 - DNA, 25 bp, Homo sapien
gtacacggggcttcatcaattgtct

SEQ ID NO: 5224394 - DNA, 25 bp, Homo sapien
agatcttccccccatatgaaaccag

SEQ ID NO: 5224395 - DNA, 25 bp, Homo sapien
cacatataacaactgtggctgaggt

SEQ ID NO: 5224396 - DNA, 25 bp, Homo sapien
aaccagcttggtacacggggcttca

SEQ ID NO: 5224397 - DNA, 25 bp, Homo sapien
gaaaacaatgagtgcataggaggct

SEQ ID NO: 5224398 - DNA, 25 bp, Homo sapien
ctgggatgttatacaaaagagagcc

SEQ ID NO: 5224399 - DNA, 25 bp, Homo sapien
tagatgagcatgagaaccctggctg

SEQ ID NO: 5224400 - DNA, 25 bp, Homo sapien
gaggataggaccatttcattcaggc

SEQ ID NO: 5224401 - DNA, 25 bp, Homo sapien
gtgtaattgtaaccttgggtcaaga

SEQ ID NO: 5224402 - DNA, 25 bp, Homo sapien
aacgaggctctcctgatgaggcaaa

SEQ ID NO: 5224403 - DNA, 25 bp, Homo sapien
gctatagtcatagggctactaagtg

SEQ ID NO: 5224404 - DNA, 25 bp, Homo sapien
aggttcagaagggttgctatagtca

SEQ ID NO: 5224405 - DNA, 25 bp, Homo sapien
aagttagcatggtctggaatccgga

SEQ ID NO: 5224406 - DNA, 25 bp, Homo sapien
aaaacactggcttgaagttagcatg

SEQ ID NO: 5224407 - DNA, 25 bp, Homo sapien
cactggcttgaagttagcatggtct

SEQ ID NO: 5224408 - DNA, 25 bp, Homo sapien
gtctggaatccggattttctcttca

SEQ ID NO: 5224409 - DNA, 25 bp, Homo sapien
catctaacggttgctgtgaatcacc

SEQ ID NO: 5224410 - DNA, 25 bp, Homo sapien
cagaaactcctgactaatagccgtg

SEQ ID NO: 5224411 - DNA, 25 bp, Homo sapien
tcacacggtcagatctgtaggagaa

SEQ ID NO: 5224412 - DNA, 25 bp, Homo sapien
gcctttgctatctaagtgccgcaga

SEQ ID NO: 5224413 - DNA, 25 bp, Homo sapien
aaggtgaacagggtgtcagcagtca

SEQ ID NO: 5224414 - DNA, 25 bp, Homo sapien
ttctcctgagcataaccagaaggcc

SEQ ID NO: 5224415 - DNA, 25 bp, Homo sapien
catttcatcctagggtgactgacac

SEQ ID NO: 5224416 - DNA, 25 bp, Homo sapien
tagaggacctcacgcacagagaggc

SEQ ID NO: 5224417 - DNA, 25 bp, Homo sapien
tacgtggcttattggagaacacaca

SEQ ID NO: 5224418 - DNA, 25 bp, Homo sapien
tatgtagctgctggtgactatgtcc

SEQ ID NO: 5224419 - DNA, 25 bp, Homo sapien
cagaggctagatcaagtccccattt

SEQ ID NO: 5224420 - DNA, 25 bp, Homo sapien
tgcccttatgcatcaggacagggag

SEQ ID NO: 5224421 - DNA, 25 bp, Homo sapien
ctggccaccagggtgtgaagcgctt

SEQ ID NO: 5224422 - DNA, 25 bp, Homo sapien
tgggcctggcactgggtcactgctt

SEQ ID NO: 5224423 - DNA, 25 bp, Homo sapien
tggaacaaccagtttcagactctgg

SEQ ID NO: 5224424 - DNA, 25 bp, Homo sapien
tgcttctcctcaccagcagtggagt

SEQ ID NO: 5224425 - DNA, 25 bp, Homo sapien
gatttagcaggaagatcccacagtc

SEQ ID NO: 5224426 - DNA, 25 bp, Homo sapien
tcattagaactacaagcagcaggat

SEQ ID NO: 5224427 - DNA, 25 bp, Homo sapien
tatccttggacattacgaaactgga

SEQ ID NO: 5224428 - DNA, 25 bp, Homo sapien
tcacatggtatggttttgcaaagca

SEQ ID NO: 5224429 - DNA, 25 bp, Homo sapien
tctctgtaacgaggttgtaagtttc

SEQ ID NO: 5224430 - DNA, 25 bp, Homo sapien
ctttagatgtgttctctgtaacgag

SEQ ID NO: 5224431 - DNA, 25 bp, Homo sapien
ctgctttagatgtgttctctgtaac

SEQ ID NO: 5224432 - DNA, 25 bp, Homo sapien
tgtaacgaggttgtaagtttcttga

SEQ ID NO: 5224433 - DNA, 25 bp, Homo sapien
tgaggatgctatatgtttccacaag

SEQ ID NO: 5224434 - DNA, 25 bp, Homo sapien
tcaaaagctgtatggtgacaggctc

SEQ ID NO: 5224435 - DNA, 25 bp, Homo sapien
gcttcggattctccagtgcttcaca

SEQ ID NO: 5224436 - DNA, 25 bp, Homo sapien
tccacaagcgtaaaacactcacagt

SEQ ID NO: 5224437 - DNA, 25 bp, Homo sapien
taagcatctggttttcaattgccat

SEQ ID NO: 5224438 - DNA, 25 bp, Homo sapien
gaacctcttgctcgatattcctctc

SEQ ID NO: 5224439 - DNA, 25 bp, Homo sapien
ctgttttgaacctcttgctcgatat

SEQ ID NO: 5224440 - DNA, 25 bp, Homo sapien
atcgtgggtcaaggtagaaacaact

SEQ ID NO: 5224441 - DNA, 25 bp, Homo sapien
tctttagacttaatcgtgggtcaag

SEQ ID NO: 5224442 - DNA, 25 bp, Homo sapien
tcttggcgaagttagtagttctgtc

SEQ ID NO: 5224443 - DNA, 25 bp, Homo sapien
tgtcttccaagttctgcgtggaatc

SEQ ID NO: 5224444 - DNA, 25 bp, Homo sapien
gtgtccttagttcttggcgaagtta

SEQ ID NO: 5224445 - DNA, 25 bp, Homo sapien
tctgtctgtacaccattcaaaactt

SEQ ID NO: 5224446 - DNA, 25 bp, Homo sapien
cagagatgaaaagaagggcactaca

SEQ ID NO: 5224447 - DNA, 25 bp, Homo sapien
tgaaaagaagggcactacatgtatt

SEQ ID NO: 5224448 - DNA, 25 bp, Homo sapien
aaagaagggcactacatgtattccc

SEQ ID NO: 5224449 - DNA, 25 bp, Homo sapien
tacatgtattcccaatgggcctcct

SEQ ID NO: 5224450 - DNA, 25 bp, Homo sapien
gcaaaggttttgtctacgagatcca

SEQ ID NO: 5224451 - DNA, 25 bp, Homo sapien
ttcgtgaaatagtccctcccgcttg

SEQ ID NO: 5224452 - DNA, 25 bp, Homo sapien
tgttgtcttcaatgcctcggatgaa

SEQ ID NO: 5224453 - DNA, 25 bp, Homo sapien
tcccgcttggacctgctgttgtctt

SEQ ID NO: 5224454 - DNA, 25 bp, Homo sapien
cattgcctggcggaagacatcttga

SEQ ID NO: 5224455 - DNA, 25 bp, Homo sapien
ccaaatcccatgagaggcgagagtg

SEQ ID NO: 5224456 - DNA, 25 bp, Homo sapien
ttccatggacaggaggcggcacttt

SEQ ID NO: 5224457 - DNA, 25 bp, Homo sapien
cacgtggaggagcacacttggagat

SEQ ID NO: 5224458 - DNA, 25 bp, Homo sapien
tccaaaattctgtcccctgattgta

SEQ ID NO: 5224459 - DNA, 25 bp, Homo sapien
tgtaggcggccatcttttattgctg

SEQ ID NO: 5224460 - DNA, 25 bp, Homo sapien
tattgctgctccctttggtaaaatg

SEQ ID NO: 5224461 - DNA, 25 bp, Homo sapien
tctgtcccctgattgtaggcggcca

SEQ ID NO: 5224462 - DNA, 25 bp, Homo sapien
gcaatgaccagcgatgctgtctccc

SEQ ID NO: 5224463 - DNA, 25 bp, Homo sapien
cttcttggcgggcaatgaccagcga

SEQ ID NO: 5224464 - DNA, 25 bp, Homo sapien
tgctcctgagcatggccacaagctc

SEQ ID NO: 5224465 - DNA, 25 bp, Homo sapien
ttcctgggttcgtccggtgacatct

SEQ ID NO: 5224466 - DNA, 25 bp, Homo sapien
cagtgagactgagatctgaacatta

SEQ ID NO: 5224467 - DNA, 25 bp, Homo sapien
agtgagactgagatctgaacattac

SEQ ID NO: 5224468 - DNA, 25 bp, Homo sapien
tcagtgagactgagatctgaacatt

SEQ ID NO: 5224469 - DNA, 25 bp, Homo sapien
cttgagtgagcaccagaattatctg

SEQ ID NO: 5224470 - DNA, 25 bp, Homo sapien
tgcatgcttaccaaatccccaagtg

SEQ ID NO: 5224471 - DNA, 25 bp, Homo sapien
gtcagcaatagccactaagttatcc

SEQ ID NO: 5224472 - DNA, 25 bp, Homo sapien
aggcacaactcaactgggcttaaaa

SEQ ID NO: 5224473 - DNA, 25 bp, Homo sapien
tgttggcaatctgttagctctacat

SEQ ID NO: 5224474 - DNA, 25 bp, Homo sapien
tgcctactactatggcaacaagcgt

SEQ ID NO: 5224475 - DNA, 25 bp, Homo sapien
ggaagggctccatctgtgcctacta

SEQ ID NO: 5224476 - DNA, 25 bp, Homo sapien
aatctctaggtcaaatgttccccag

SEQ ID NO: 5224477 - DNA, 25 bp, Homo sapien
ctgcatttgtttaacacagcgaggg

SEQ ID NO: 5224478 - DNA, 25 bp, Homo sapien
ctttcactacctgcccggtggcctt

SEQ ID NO: 5224479 - DNA, 25 bp, Homo sapien
ctgtgtgcttctgataagagatgcc

SEQ ID NO: 5224480 - DNA, 25 bp, Homo sapien
ggccttggccattactccgccctgg

SEQ ID NO: 5224481 - DNA, 25 bp, Homo sapien
ccttagaggacccagtgaatgtatt

SEQ ID NO: 5224482 - DNA, 25 bp, Homo sapien
ttcactttaaggctcagggagtaac

SEQ ID NO: 5224483 - DNA, 25 bp, Homo sapien
tttaaaggcagggattacatctcaa

SEQ ID NO: 5224484 - DNA, 25 bp, Homo sapien
tagtaacaatactaccacagcctcg

SEQ ID NO: 5224485 - DNA, 25 bp, Homo sapien
aaggtctgagagatgccacagagct

SEQ ID NO: 5224486 - DNA, 25 bp, Homo sapien
gagctgcatgattaaaccttccagt

SEQ ID NO: 5224487 - DNA, 25 bp, Homo sapien
gcatgattaaaccttccagttccat

SEQ ID NO: 5224488 - DNA, 25 bp, Homo sapien
cacagagctgcatgattaaaccttc

SEQ ID NO: 5224489 - DNA, 25 bp, Homo sapien
agtccacagggccaacatccaattt

SEQ ID NO: 5224490 - DNA, 25 bp, Homo sapien
gggaatccaccagtccacagggcca

SEQ ID NO: 5224491 - DNA, 25 bp, Homo sapien
ccagctcagacctgaaagcatccat

SEQ ID NO: 5224492 - DNA, 25 bp, Homo sapien
tcacgcatgcaagtggtaataaccc

SEQ ID NO: 5224493 - DNA, 25 bp, Homo sapien
tggcagtttttactgtgagggatgc

SEQ ID NO: 5224494 - DNA, 25 bp, Homo sapien
tgttcatatgtttccaagtcccagg

SEQ ID NO: 5224495 - DNA, 25 bp, Homo sapien
gcattgctgcctgttcatatgtttc

SEQ ID NO: 5224496 - DNA, 25 bp, Homo sapien
ttactgtgagggatgccagatatct

SEQ ID NO: 5224497 - DNA, 25 bp, Homo sapien
gggtttagctctccacaaggagcca

SEQ ID NO: 5224498 - DNA, 25 bp, Homo sapien
gtttagctctccacaaggagccaca

SEQ ID NO: 5224499 - DNA, 25 bp, Homo sapien
agctgtaatcggctcctggcaggca

SEQ ID NO: 5224500 - DNA, 25 bp, Homo sapien
ctgggtttagctctccacaaggagc

SEQ ID NO: 5224501 - DNA, 25 bp, Homo sapien
ccttttaagctcaccccgaggccag

SEQ ID NO: 5224502 - DNA, 25 bp, Homo sapien
gcagaacctgaatcattcaggggga

SEQ ID NO: 5224503 - DNA, 25 bp, Homo sapien
atcattcagggggatctcaaaggtg

SEQ ID NO: 5224504 - DNA, 25 bp, Homo sapien
taagctcaccccgaggccagcagaa

SEQ ID NO: 5224505 - DNA, 25 bp, Homo sapien
tgttgagtgtaacggggccttcttg

SEQ ID NO: 5224506 - DNA, 25 bp, Homo sapien
tgctctgttgagtgtaacggggcct

SEQ ID NO: 5224507 - DNA, 25 bp, Homo sapien
tctgttgagtgtaacggggccttct

SEQ ID NO: 5224508 - DNA, 25 bp, Homo sapien
aggggtgctctgttgagtgtaacgg

SEQ ID NO: 5224509 - DNA, 25 bp, Homo sapien
tcagtgcagcataacgcaggttctg

SEQ ID NO: 5224510 - DNA, 25 bp, Homo sapien
taatggtgtgattgtctgactcagc

SEQ ID NO: 5224511 - DNA, 25 bp, Homo sapien
tgctctctaggaacatgaatggatc

SEQ ID NO: 5224512 - DNA, 25 bp, Homo sapien
tcaaacctagatggcttggctaagg

SEQ ID NO: 5224513 - DNA, 25 bp, Homo sapien
tcccatcagactcctaagcaaaaat

SEQ ID NO: 5224514 - DNA, 25 bp, Homo sapien
actcccatcagactcctaagcaaaa

SEQ ID NO: 5224515 - DNA, 25 bp, Homo sapien
ctggcatccccccataaccaactcc

SEQ ID NO: 5224516 - DNA, 25 bp, Homo sapien
aatacttcaattatgttccccgctt

SEQ ID NO: 5224517 - DNA, 25 bp, Homo sapien
tccatggacattgaccgcctaagtg

SEQ ID NO: 5224518 - DNA, 25 bp, Homo sapien
gaatcaccaactggatcatccctcg

SEQ ID NO: 5224519 - DNA, 25 bp, Homo sapien
catagcttcgtggttggactttccc

SEQ ID NO: 5224520 - DNA, 25 bp, Homo sapien
tcagctggtcattcattcgcagacg

SEQ ID NO: 5224521 - DNA, 25 bp, Homo sapien
tctagctgccatactaggaatggaa

SEQ ID NO: 5224522 - DNA, 25 bp, Homo sapien
ttctggtggcaatttgggcaactgg

SEQ ID NO: 5224523 - DNA, 25 bp, Homo sapien
ttttctcgatatgaatctagctgcc

SEQ ID NO: 5224524 - DNA, 25 bp, Homo sapien
tggaagtctgcatattctggtggca

SEQ ID NO: 5224525 - DNA, 25 bp, Homo sapien
gctgatagccaacacaaaagaggat

SEQ ID NO: 5224526 - DNA, 25 bp, Homo sapien
tcaagagtctattacacttaagtcc

SEQ ID NO: 5224527 - DNA, 25 bp, Homo sapien
tccaacttggtcagttgaagcaaag

SEQ ID NO: 5224528 - DNA, 25 bp, Homo sapien
gaaactcaaaatggccctatcagtg

SEQ ID NO: 5224529 - DNA, 25 bp, Homo sapien
tggttacagcattttgacagttctc

SEQ ID NO: 5224530 - DNA, 25 bp, Homo sapien
catttcgcctagaggtggttacagc

SEQ ID NO: 5224531 - DNA, 25 bp, Homo sapien
tttctgtttgtcttgtggactgcaa

SEQ ID NO: 5224532 - DNA, 25 bp, Homo sapien
tggactgcaagtgccaagtggatgc

SEQ ID NO: 5224533 - DNA, 25 bp, Homo sapien
ttctcactccatttgcagtggataa

SEQ ID NO: 5224534 - DNA, 25 bp, Homo sapien
tctcactccatttgcagtggataaa

SEQ ID NO: 5224535 - DNA, 25 bp, Homo sapien
cattatccactttgagtctgcaggc

SEQ ID NO: 5224536 - DNA, 25 bp, Homo sapien
caatataagtcagacccatgctgtg

SEQ ID NO: 5224537 - DNA, 25 bp, Homo sapien
tttggaagacaaactgaggacaggg

SEQ ID NO: 5224538 - DNA, 25 bp, Homo sapien
taaagtcagcttctaatgggcattc

SEQ ID NO: 5224539 - DNA, 25 bp, Homo sapien
tgttggagaaggtggaacttcactc

SEQ ID NO: 5224540 - DNA, 25 bp, Homo sapien
ccatccgtcattgggcagcaataga

SEQ ID NO: 5224541 - DNA, 25 bp, Homo sapien
tgtaatcttcgaggcccaatcccag

SEQ ID NO: 5224542 - DNA, 25 bp, Homo sapien
aaggtggaacttcactctcggccca

SEQ ID NO: 5224543 - DNA, 25 bp, Homo sapien
taggcaacgcagcagcttgcaggat

SEQ ID NO: 5224544 - DNA, 25 bp, Homo sapien
ggagcagcctccttgtctatggcgg

SEQ ID NO: 5224545 - DNA, 25 bp, Homo sapien
ttctcttgctagtcccaagtcggag

SEQ ID NO: 5224546 - DNA, 25 bp, Homo sapien
tgcaggtcacacgatcctaggaggg

SEQ ID NO: 5224547 - DNA, 25 bp, Homo sapien
cactagcctggcctaatagcaatac

SEQ ID NO: 5224548 - DNA, 25 bp, Homo sapien
ttgtgaacaaaaatcctggacccac

SEQ ID NO: 5224549 - DNA, 25 bp, Homo sapien
ggtgtctgggtacattctcaataca

SEQ ID NO: 5224550 - DNA, 25 bp, Homo sapien
tacacgaagccattgatatataaag

SEQ ID NO: 5224551 - DNA, 25 bp, Homo sapien
aaggtccatgctcttcgaggctttc

SEQ ID NO: 5224552 - DNA, 25 bp, Homo sapien
gcctggccggtgtcacagatctgaa

SEQ ID NO: 5224553 - DNA, 25 bp, Homo sapien
catgctcttcgaggctttcaaatta

SEQ ID NO: 5224554 - DNA, 25 bp, Homo sapien
tcaggctgcctggccggtgtcacag

SEQ ID NO: 5224555 - DNA, 25 bp, Homo sapien
tattgaaacactagcctttccagtc

SEQ ID NO: 5224556 - DNA, 25 bp, Homo sapien
aaccaagtgggtattgaaacactag

SEQ ID NO: 5224557 - DNA, 25 bp, Homo sapien
tttcttatgaacactagaaaccaag

SEQ ID NO: 5224558 - DNA, 25 bp, Homo sapien
cttttcttatgaacactagaaacca

SEQ ID NO: 5224559 - DNA, 25 bp, Homo sapien
tacaaactgggtcatgcgaacgtag

SEQ ID NO: 5224560 - DNA, 25 bp, Homo sapien
tcttagcatatgaggtgacagtaaa

SEQ ID NO: 5224561 - DNA, 25 bp, Homo sapien
gtcatgcgaacgtagggccttttaa

SEQ ID NO: 5224562 - DNA, 25 bp, Homo sapien
gattgtacttgcattattaagctct

SEQ ID NO: 5224563 - DNA, 25 bp, Homo sapien
taatagtccagaatgcggtatgtcc

SEQ ID NO: 5224564 - DNA, 25 bp, Homo sapien
taggccctaaggactgcaattactg

SEQ ID NO: 5224565 - DNA, 25 bp, Homo sapien
tccactcccctgaagaagacacatg

SEQ ID NO: 5224566 - DNA, 25 bp, Homo sapien
gctgtggcgcccatattggagagca

SEQ ID NO: 5224567 - DNA, 25 bp, Homo sapien
gagtgaaccttgctttcatctggca

SEQ ID NO: 5224568 - DNA, 25 bp, Homo sapien
tttgtccagccaatgagtgaacctt

SEQ ID NO: 5224569 - DNA, 25 bp, Homo sapien
atgagtgaaccttgctttcatctgg

SEQ ID NO: 5224570 - DNA, 25 bp, Homo sapien
ccgatttttgtccagccaatgagtg

SEQ ID NO: 5224571 - DNA, 25 bp, Homo sapien
gatacacaacacctgcacgtgtgcc

SEQ ID NO: 5224572 - DNA, 25 bp, Homo sapien
taacttgcatactaaactcttggcc

SEQ ID NO: 5224573 - DNA, 25 bp, Homo sapien
tcagctggctgaggttacacaacgc

SEQ ID NO: 5224574 - DNA, 25 bp, Homo sapien
gaacaaaatgtaaggcctgctgaag

SEQ ID NO: 5224575 - DNA, 25 bp, Homo sapien
gatcctgctatggaagcatatcctt

SEQ ID NO: 5224576 - DNA, 25 bp, Homo sapien
tttctgtatcgccagtttctatttt

SEQ ID NO: 5224577 - DNA, 25 bp, Homo sapien
tatcctttctgaaacgtgacagcca

SEQ ID NO: 5224578 - DNA, 25 bp, Homo sapien
tctgtatcgccagtttctattttgc

SEQ ID NO: 5224579 - DNA, 25 bp, Homo sapien
gaataaaactctgcacatgacctca

SEQ ID NO: 5224580 - DNA, 25 bp, Homo sapien
gactctagacttctgcttccaataa

SEQ ID NO: 5224581 - DNA, 25 bp, Homo sapien
ggcttcatgtgtgctctaatctgca

SEQ ID NO: 5224582 - DNA, 25 bp, Homo sapien
cattctgcaaagacacaatggtggt

SEQ ID NO: 5224583 - DNA, 25 bp, Homo sapien
tttagtccgcaaataacatcactgg

SEQ ID NO: 5224584 - DNA, 25 bp, Homo sapien
ccgcctcctaatactagtggcatta

SEQ ID NO: 5224585 - DNA, 25 bp, Homo sapien
tccacctttattctagccagcatca

SEQ ID NO: 5224586 - DNA, 25 bp, Homo sapien
gaagtctcttctgtcaaattggcac

SEQ ID NO: 5224587 - DNA, 25 bp, Homo sapien
taaaagcaatatgggagcatcagtg

SEQ ID NO: 5224588 - DNA, 25 bp, Homo sapien
gaggatagtggtttccaacctggat

SEQ ID NO: 5224589 - DNA, 25 bp, Homo sapien
cctggattcccaatccacatttggg

SEQ ID NO: 5224590 - DNA, 25 bp, Homo sapien
gccgagcatctttcactaatcttgg

SEQ ID NO: 5224591 - DNA, 25 bp, Homo sapien
ctggattcatggtcaagattgagaa

SEQ ID NO: 5224592 - DNA, 25 bp, Homo sapien
ttgctcctttagatagctgcctgca

SEQ ID NO: 5224593 - DNA, 25 bp, Homo sapien
catgctttatacttttgctgaagga

SEQ ID NO: 5224594 - DNA, 25 bp, Homo sapien
ggtcaagattgagaagtctggctcc

SEQ ID NO: 5224595 - DNA, 25 bp, Homo sapien
tctgacaccagcttatagacaggca

SEQ ID NO: 5224596 - DNA, 25 bp, Homo sapien
tcaggtcggacacttgagtaacagg

SEQ ID NO: 5224597 - DNA, 25 bp, Homo sapien
accagttgtttctgctcaggtcgga

SEQ ID NO: 5224598 - DNA, 25 bp, Homo sapien
gtacagagctaaccacaccagtgag

SEQ ID NO: 5224599 - DNA, 25 bp, Homo sapien
tacaaatcagacaaggtcatggact

SEQ ID NO: 5224600 - DNA, 25 bp, Homo sapien
gcaggtatctctgcaaaccacgtac

SEQ ID NO: 5224601 - DNA, 25 bp, Homo sapien
tcctgagaataaccatgccagggac

SEQ ID NO: 5224602 - DNA, 25 bp, Homo sapien
aaccacgtaccaagaatgctgacat

SEQ ID NO: 5224603 - DNA, 25 bp, Homo sapien
gatttatctggattcatatttccaa

SEQ ID NO: 5224604 - DNA, 25 bp, Homo sapien
gattcatatttccaatggtagccat

SEQ ID NO: 5224605 - DNA, 25 bp, Homo sapien
ctggatttatctggattcatatttc

SEQ ID NO: 5224606 - DNA, 25 bp, Homo sapien
ggattcatatttccaatggtagcca

SEQ ID NO: 5224607 - DNA, 25 bp, Homo sapien
ctgggagggaacaggagtttggaga

SEQ ID NO: 5224608 - DNA, 25 bp, Homo sapien
aatgagttgttctctgcgggtcttt

SEQ ID NO: 5224609 - DNA, 25 bp, Homo sapien
gttctctgcgggtctttgcttgcct

SEQ ID NO: 5224610 - DNA, 25 bp, Homo sapien
gagttgttctctgcgggtctttgct

SEQ ID NO: 5224611 - DNA, 25 bp, Homo sapien
acagtgtgcccttgagggactgtgt

SEQ ID NO: 5224612 - DNA, 25 bp, Homo sapien
tgacagtgtgcccttgagggactgt

SEQ ID NO: 5224613 - DNA, 25 bp, Homo sapien
caatgacagtgtgcccttgagggac

SEQ ID NO: 5224614 - DNA, 25 bp, Homo sapien
tcaatgacagtgtgcccttgaggga

SEQ ID NO: 5224615 - DNA, 25 bp, Homo sapien
ttcccaagttatgttatctgtgttc

SEQ ID NO: 5224616 - DNA, 25 bp, Homo sapien
aaattctccataatatccaaatgta

SEQ ID NO: 5224617 - DNA, 25 bp, Homo sapien
tgatatcattgcaaatccattagcc

SEQ ID NO: 5224618 - DNA, 25 bp, Homo sapien
taatgggcctaattaccttcttgcc

SEQ ID NO: 5224619 - DNA, 25 bp, Homo sapien
tcaggtccatcgtaggatttgtcaa

SEQ ID NO: 5224620 - DNA, 25 bp, Homo sapien
gcctgtgaaagggaaggtcattctt

SEQ ID NO: 5224621 - DNA, 25 bp, Homo sapien
gtcaatggctgctctaaagctctca

SEQ ID NO: 5224622 - DNA, 25 bp, Homo sapien
tcaaacccagagttggaccaaaatc

SEQ ID NO: 5224623 - DNA, 25 bp, Homo sapien
ttgatcagctcagaaagcctgcatg

SEQ ID NO: 5224624 - DNA, 25 bp, Homo sapien
cttgatcagctcagaaagcctgcat

SEQ ID NO: 5224625 - DNA, 25 bp, Homo sapien
tcaagcactaatctctctgaaagct

SEQ ID NO: 5224626 - DNA, 25 bp, Homo sapien
tctctctgaaagctgccttgttaac

SEQ ID NO: 5224627 - DNA, 25 bp, Homo sapien
aatctctctgaaagctgccttgtta

SEQ ID NO: 5224628 - DNA, 25 bp, Homo sapien
aagcactaatctctctgaaagctgc

SEQ ID NO: 5224629 - DNA, 25 bp, Homo sapien
tcagagctccttggccagagtgaga

SEQ ID NO: 5224630 - DNA, 25 bp, Homo sapien
gagctccttggccagagtgagagct

SEQ ID NO: 5224631 - DNA, 25 bp, Homo sapien
gctccttggccagagtgagagctct

SEQ ID NO: 5224632 - DNA, 25 bp, Homo sapien
tccttggccagagtgagagctctta

SEQ ID NO: 5224633 - DNA, 25 bp, Homo sapien
tcagcatggcgccgaagcccttctt

SEQ ID NO: 5224634 - DNA, 25 bp, Homo sapien
ctctagctccgaattcccctgaggg

SEQ ID NO: 5224635 - DNA, 25 bp, Homo sapien
catggcgccgaagcccttcttcttt

SEQ ID NO: 5224636 - DNA, 25 bp, Homo sapien
ctccttgactttcaatttgcccttt

SEQ ID NO: 5224637 - DNA, 25 bp, Homo sapien
gccgtatgcatttggctgaagacga

SEQ ID NO: 5224638 - DNA, 25 bp, Homo sapien
gaagacgaggaaaagcgtgcgcttt

SEQ ID NO: 5224639 - DNA, 25 bp, Homo sapien
acagaattgagagccgtatgcattt

SEQ ID NO: 5224640 - DNA, 25 bp, Homo sapien
gtcctgtcatcactgtaactttccc

SEQ ID NO: 5224641 - DNA, 25 bp, Homo sapien
gaaatgtaacgggaaggctcactgc

SEQ ID NO: 5224642 - DNA, 25 bp, Homo sapien
cccaagattttgagcatgaggaacc

SEQ ID NO: 5224643 - DNA, 25 bp, Homo sapien
ggtgatagcaggaccgcagcaagtc

SEQ ID NO: 5224644 - DNA, 25 bp, Homo sapien
aagtcttgtcataacacatccaggg

SEQ ID NO: 5224645 - DNA, 25 bp, Homo sapien
ggttgctgtgtgtcaagtgcctaga

SEQ ID NO: 5224646 - DNA, 25 bp, Homo sapien
taatcaaatgatatgggcaaacaca

SEQ ID NO: 5224647 - DNA, 25 bp, Homo sapien
tatcaaacctttccattcagtgtcc

SEQ ID NO: 5224648 - DNA, 25 bp, Homo sapien
tattggcagcgtttgtacttggttc

SEQ ID NO: 5224649 - DNA, 25 bp, Homo sapien
ttcaagccaagtcgcataaatgttg

SEQ ID NO: 5224650 - DNA, 25 bp, Homo sapien
caagccaagtcgcataaatgttgcc

SEQ ID NO: 5224651 - DNA, 25 bp, Homo sapien
aattcaagccaagtcgcataaatgt

SEQ ID NO: 5224652 - DNA, 25 bp, Homo sapien
aagccaagtcgcataaatgttgccc

SEQ ID NO: 5224653 - DNA, 25 bp, Homo sapien
aaaagtagaacactgatttggtaat

SEQ ID NO: 5224654 - DNA, 25 bp, Homo sapien
gccagcattttgttatttgaagaaa

SEQ ID NO: 5224655 - DNA, 25 bp, Homo sapien
cccggccagcattttgttatttgaa

SEQ ID NO: 5224656 - DNA, 25 bp, Homo sapien
agaaaaaagtagaacactgatttgg

SEQ ID NO: 5224657 - DNA, 25 bp, Homo sapien
gagtagggtgcttactcccagtaaa

SEQ ID NO: 5224658 - DNA, 25 bp, Homo sapien
tactgctattgccagaactagatag

SEQ ID NO: 5224659 - DNA, 25 bp, Homo sapien
taaaacatccataagcacatattgg

SEQ ID NO: 5224660 - DNA, 25 bp, Homo sapien
taaagaatgggaacagatgacaaag

SEQ ID NO: 5224661 - DNA, 25 bp, Homo sapien
catgttattggctatcaacacaaag

SEQ ID NO: 5224662 - DNA, 25 bp, Homo sapien
taactccactctatggctggctttc

SEQ ID NO: 5224663 - DNA, 25 bp, Homo sapien
ggctttctaagagtcacaccatttt

SEQ ID NO: 5224664 - DNA, 25 bp, Homo sapien
atttttatctccttcatgctcggag

SEQ ID NO: 5224665 - DNA, 25 bp, Homo sapien
aaccagaggccttatgtcagccaaa

SEQ ID NO: 5224666 - DNA, 25 bp, Homo sapien
cacctgtgactttgcctcggctatt

SEQ ID NO: 5224667 - DNA, 25 bp, Homo sapien
cacagatgtgcaaaccaaggagatg

SEQ ID NO: 5224668 - DNA, 25 bp, Homo sapien
tagaaatgatttagtgaaggccacc

SEQ ID NO: 5224669 - DNA, 25 bp, Homo sapien
aacgggggcagtggcggtgagagtg

SEQ ID NO: 5224670 - DNA, 25 bp, Homo sapien
ctgaccggtaactgaacgggggcag

SEQ ID NO: 5224671 - DNA, 25 bp, Homo sapien
gaacgggggcagtggcggtgagagt

SEQ ID NO: 5224672 - DNA, 25 bp, Homo sapien
cgggggcagtggcggtgagagtgcc

SEQ ID NO: 5224673 - DNA, 25 bp, Homo sapien
tgtgatactctgacttctgtttgat

SEQ ID NO: 5224674 - DNA, 25 bp, Homo sapien
caattctggaagttttgtgatactc

SEQ ID NO: 5224675 - DNA, 25 bp, Homo sapien
tccctggttcttagtctctggggcc

SEQ ID NO: 5224676 - DNA, 25 bp, Homo sapien
ggcttcctatccaggcatcccactg

SEQ ID NO: 5224677 - DNA, 25 bp, Homo sapien
cagatactgccttcgcatttgtgcg

SEQ ID NO: 5224678 - DNA, 25 bp, Homo sapien
tcagtcaatagccagatactgcctt

SEQ ID NO: 5224679 - DNA, 25 bp, Homo sapien
tcaatagccagatactgccttcgca

SEQ ID NO: 5224680 - DNA, 25 bp, Homo sapien
tgccttcgcatttgtgcgcccacaa

SEQ ID NO: 5224681 - DNA, 25 bp, Homo sapien
cttctctcaggccaccatgtttcag

SEQ ID NO: 5224682 - DNA, 25 bp, Homo sapien
tcaggccaccatgtttcagagtacc

SEQ ID NO: 5224683 - DNA, 25 bp, Homo sapien
tctcaggccaccatgtttcagagta

SEQ ID NO: 5224684 - DNA, 25 bp, Homo sapien
tctctcaggccaccatgtttcagag

SEQ ID NO: 5224685 - DNA, 25 bp, Homo sapien
caatggtgtatgcactaccataaac

SEQ ID NO: 5224686 - DNA, 25 bp, Homo sapien
aatgccatgacaagttcaataatta

SEQ ID NO: 5224687 - DNA, 25 bp, Homo sapien
tcaggtaacaatggtgtatgcacta

SEQ ID NO: 5224688 - DNA, 25 bp, Homo sapien
gcactaccataaaccaatgccatga

SEQ ID NO: 5224689 - DNA, 25 bp, Homo sapien
catggcattaggatgtaggtgtttc

SEQ ID NO: 5224690 - DNA, 25 bp, Homo sapien
ccatctctggtctatagaaatacag

SEQ ID NO: 5224691 - DNA, 25 bp, Homo sapien
aagttttgttggtgaccgcaagcat

SEQ ID NO: 5224692 - DNA, 25 bp, Homo sapien
ggctcataaaaaatgctggcatggc

SEQ ID NO: 5224693 - DNA, 25 bp, Homo sapien
ttttggttcgaatctcttggccgca

SEQ ID NO: 5224694 - DNA, 25 bp, Homo sapien
cttggccgcaaatctttcgaaaata

SEQ ID NO: 5224695 - DNA, 25 bp, Homo sapien
gaccaggtgtgttacggttaattga

SEQ ID NO: 5224696 - DNA, 25 bp, Homo sapien
tataacctggattggccagaatgct

SEQ ID NO: 5224697 - DNA, 25 bp, Homo sapien
ataatacaagggaagtatcccagaa

SEQ ID NO: 5224698 - DNA, 25 bp, Homo sapien
aatacaagggaagtatcccagaaga

SEQ ID NO: 5224699 - DNA, 25 bp, Homo sapien
taatacaagggaagtatcccagaag

SEQ ID NO: 5224700 - DNA, 25 bp, Homo sapien
gcaaactgcgtttgaattgtttaaa

SEQ ID NO: 5224701 - DNA, 25 bp, Homo sapien
ttcctctatgggaacattgctgctt

SEQ ID NO: 5224702 - DNA, 25 bp, Homo sapien
tttcctctatgggaacattgctgct

SEQ ID NO: 5224703 - DNA, 25 bp, Homo sapien
ttctgagcaaactgcgtttgaattg

SEQ ID NO: 5224704 - DNA, 25 bp, Homo sapien
ctgggaactcaacctgttaaaatat

SEQ ID NO: 5224705 - DNA, 25 bp, Homo sapien
cactgggaactcaacctgttaaaat

SEQ ID NO: 5224706 - DNA, 25 bp, Homo sapien
tatatttttgcatacggcaacttga

SEQ ID NO: 5224707 - DNA, 25 bp, Homo sapien
ttttgcatacggcaacttgaatttc

SEQ ID NO: 5224708 - DNA, 25 bp, Homo sapien
tatttttgcatacggcaacttgaat

SEQ ID NO: 5224709 - DNA, 25 bp, Homo sapien
ttgcatacggcaacttgaatttcca

SEQ ID NO: 5224710 - DNA, 25 bp, Homo sapien
acagtacaggtagcaaagatgtatg

SEQ ID NO: 5224711 - DNA, 25 bp, Homo sapien
aaaatacagtacaggtagcaaagat

SEQ ID NO: 5224712 - DNA, 25 bp, Homo sapien
tacagtacaggtagcaaagatgtat

SEQ ID NO: 5224713 - DNA, 25 bp, Homo sapien
aatacagtacaggtagcaaagatgt

SEQ ID NO: 5224714 - DNA, 25 bp, Homo sapien
tcatacactgatccaattgcaccag

SEQ ID NO: 5224715 - DNA, 25 bp, Homo sapien
agtggttcactctggcataattggg

SEQ ID NO: 5224716 - DNA, 25 bp, Homo sapien
catttgctgatgtgcatggttcccg

SEQ ID NO: 5224717 - DNA, 25 bp, Homo sapien
gatggccatcccgagggtaaccaaa

SEQ ID NO: 5224718 - DNA, 25 bp, Homo sapien
ccagtggatggtatggcttgttgac

SEQ ID NO: 5224719 - DNA, 25 bp, Homo sapien
gaaccagtggatggtatggcttgtt

SEQ ID NO: 5224720 - DNA, 25 bp, Homo sapien
accagtggatggtatggcttgttga

SEQ ID NO: 5224721 - DNA, 25 bp, Homo sapien
ggaaccagtggatggtatggcttgt

SEQ ID NO: 5224722 - DNA, 25 bp, Homo sapien
ttacacctacttggaagctatcatc

SEQ ID NO: 5224723 - DNA, 25 bp, Homo sapien
cttcaattacacctacttggaagct

SEQ ID NO: 5224724 - DNA, 25 bp, Homo sapien
caattacacctacttggaagctatc

SEQ ID NO: 5224725 - DNA, 25 bp, Homo sapien
ttcccacttcaattacacctacttg

SEQ ID NO: 5224726 - DNA, 25 bp, Homo sapien
acttgactagcacattccattggcc

SEQ ID NO: 5224727 - DNA, 25 bp, Homo sapien
actggggaatcttttcaaagggatg

SEQ ID NO: 5224728 - DNA, 25 bp, Homo sapien
tttcaaagggatgaacttgactagc

SEQ ID NO: 5224729 - DNA, 25 bp, Homo sapien
tgaacttgactagcacattccattg

SEQ ID NO: 5224730 - DNA, 25 bp, Homo sapien
tttcttcctttaagccctgcctgag

SEQ ID NO: 5224731 - DNA, 25 bp, Homo sapien
ggccattgtcacacttactcataaa

SEQ ID NO: 5224732 - DNA, 25 bp, Homo sapien
tctctttcagttaaggaactgatga

SEQ ID NO: 5224733 - DNA, 25 bp, Homo sapien
ggaactgatgatgactattaaactg

SEQ ID NO: 5224734 - DNA, 25 bp, Homo sapien
gaaactcgtggacgtgttcctcacc

SEQ ID NO: 5224735 - DNA, 25 bp, Homo sapien
aggccatggctactctggatgccca

SEQ ID NO: 5224736 - DNA, 25 bp, Homo sapien
ttcagtggttgaccccaattaggtg

SEQ ID NO: 5224737 - DNA, 25 bp, Homo sapien
tgccacctttggaagggccgcaagg

SEQ ID NO: 5224738 - DNA, 25 bp, Homo sapien
ataccttgcccagtggtgagaacca

SEQ ID NO: 5224739 - DNA, 25 bp, Homo sapien
tactttagtaggaagtgcttcctcc

SEQ ID NO: 5224740 - DNA, 25 bp, Homo sapien
gccctggagaagtccttcatctaag

SEQ ID NO: 5224741 - DNA, 25 bp, Homo sapien
catctaaggatactttagtaggaag

SEQ ID NO: 5224742 - DNA, 25 bp, Homo sapien
tcagactgcaagaattgattctccc

SEQ ID NO: 5224743 - DNA, 25 bp, Homo sapien
caacaaacttcaacatggatccact

SEQ ID NO: 5224744 - DNA, 25 bp, Homo sapien
taaagggtatgaacgaggtcacaac

SEQ ID NO: 5224745 - DNA, 25 bp, Homo sapien
cttaaaaagacacagctgaccaaca

SEQ ID NO: 5224746 - DNA, 25 bp, Homo sapien
acttgacagcgactgtgatcacaag

SEQ ID NO: 5224747 - DNA, 25 bp, Homo sapien
aattttgtactcctagagcatttaa

SEQ ID NO: 5224748 - DNA, 25 bp, Homo sapien
gagcatttaataaatctgacactgt

SEQ ID NO: 5224749 - DNA, 25 bp, Homo sapien
tgaccacttgacagcgactgtgatc

SEQ ID NO: 5224750 - DNA, 25 bp, Homo sapien
gggcgataagcaagatattgtttct

SEQ ID NO: 5224751 - DNA, 25 bp, Homo sapien
ctctcacagttggacaatggtaatt

SEQ ID NO: 5224752 - DNA, 25 bp, Homo sapien
ttctcatactgtagggctgactcta

SEQ ID NO: 5224753 - DNA, 25 bp, Homo sapien
gctgactctatactgaaatcttggg

SEQ ID NO: 5224754 - DNA, 25 bp, Homo sapien
cagttggttgtaatgatgagcctct

SEQ ID NO: 5224755 - DNA, 25 bp, Homo sapien
gatgagcctctagcactgtggcctc

SEQ ID NO: 5224756 - DNA, 25 bp, Homo sapien
taatgatgagcctctagcactgtgg

SEQ ID NO: 5224757 - DNA, 25 bp, Homo sapien
tggttgtaatgatgagcctctagca

SEQ ID NO: 5224758 - DNA, 25 bp, Homo sapien
tgaagtctgtagcttccaggggcct

SEQ ID NO: 5224759 - DNA, 25 bp, Homo sapien
ctgtagcttccaggggccttttgtc

SEQ ID NO: 5224760 - DNA, 25 bp, Homo sapien
ttaattcagtattaggactttcact

SEQ ID NO: 5224761 - DNA, 25 bp, Homo sapien
ttcagtattaggactttcactggca

SEQ ID NO: 5224762 - DNA, 25 bp, Homo sapien
gagtatctgccatggagcaatttgc

SEQ ID NO: 5224763 - DNA, 25 bp, Homo sapien
gccattgccccattcaggcgaggta

SEQ ID NO: 5224764 - DNA, 25 bp, Homo sapien
cttgatctgaacagtgaatgagttg

SEQ ID NO: 5224765 - DNA, 25 bp, Homo sapien
gaaggaaaattaggcactctgctgc

SEQ ID NO: 5224766 - DNA, 25 bp, Homo sapien
ttaaaggatatacattctccaaatg

SEQ ID NO: 5224767 - DNA, 25 bp, Homo sapien
tgatcacatatggtgttaaatcgtg

SEQ ID NO: 5224768 - DNA, 25 bp, Homo sapien
agggatgcttgggtcacataggtaa

SEQ ID NO: 5224769 - DNA, 25 bp, Homo sapien
catgaggccaatcttaatgatcaca

SEQ ID NO: 5224770 - DNA, 25 bp, Homo sapien
aaacatcgcatacataatctattag

SEQ ID NO: 5224771 - DNA, 25 bp, Homo sapien
gtgcaaacatcgcatacataatcta

SEQ ID NO: 5224772 - DNA, 25 bp, Homo sapien
gcatacataatctattagtttaccc

SEQ ID NO: 5224773 - DNA, 25 bp, Homo sapien
cataatctattagtttaccccaaag

SEQ ID NO: 5224774 - DNA, 25 bp, Homo sapien
gtcagtgcttccacccgtaggacgg

SEQ ID NO: 5224775 - DNA, 25 bp, Homo sapien
ttccgcaacttctggatacggtcag

SEQ ID NO: 5224776 - DNA, 25 bp, Homo sapien
tccttcgtcgtcttcatataaaggg

SEQ ID NO: 5224777 - DNA, 25 bp, Homo sapien
gagcctgataatactctttccgcaa

SEQ ID NO: 5224778 - DNA, 25 bp, Homo sapien
tgaattcaacgattgaaatcatgca

SEQ ID NO: 5224779 - DNA, 25 bp, Homo sapien
ttcaacgattgaaatcatgcatgcg

SEQ ID NO: 5224780 - DNA, 25 bp, Homo sapien
cgattgaaatcatgcatgcgcttac

SEQ ID NO: 5224781 - DNA, 25 bp, Homo sapien
aagatgaattcaacgattgaaatca

SEQ ID NO: 5224782 - DNA, 25 bp, Homo sapien
atgggcaccggggataacagagtcc

SEQ ID NO: 5224783 - DNA, 25 bp, Homo sapien
gataacagagtcccctacctggttc

SEQ ID NO: 5224784 - DNA, 25 bp, Homo sapien
tcaaaggagccggtgtctttcatgg

SEQ ID NO: 5224785 - DNA, 25 bp, Homo sapien
aaaggagccggtgtctttcatgggc

SEQ ID NO: 5224786 - DNA, 25 bp, Homo sapien
taacaagtagctcacatctcttgtc

SEQ ID NO: 5224787 - DNA, 25 bp, Homo sapien
tcgatctcgatcaagtttgaaactg

SEQ ID NO: 5224788 - DNA, 25 bp, Homo sapien
gagtgaattgttatctaatctgtta

SEQ ID NO: 5224789 - DNA, 25 bp, Homo sapien
tcttgtcagaggcagtaaatcgatc

SEQ ID NO: 5224790 - DNA, 25 bp, Homo sapien
cgagtagttgttaggtaacttatct

SEQ ID NO: 5224791 - DNA, 25 bp, Homo sapien
gttccccagtatagaatgactccag

SEQ ID NO: 5224792 - DNA, 25 bp, Homo sapien
ttctccatagttcagaagttcccca

SEQ ID NO: 5224793 - DNA, 25 bp, Homo sapien
tgactccagaaaacactcatcgggc

SEQ ID NO: 5224794 - DNA, 25 bp, Homo sapien
caactgagaagggattgcccatcgt

SEQ ID NO: 5224795 - DNA, 25 bp, Homo sapien
gaaccattgggatagagctcaagaa

SEQ ID NO: 5224796 - DNA, 25 bp, Homo sapien
gatttgtccccagagtattgctgag

SEQ ID NO: 5224797 - DNA, 25 bp, Homo sapien
ccaactgcaggagtctatggacaca

SEQ ID NO: 5224798 - DNA, 25 bp, Homo sapien
ggactgggtacacaacgtggaccca

SEQ ID NO: 5224799 - DNA, 25 bp, Homo sapien
tacacaacgtggacccataggcaga

SEQ ID NO: 5224800 - DNA, 25 bp, Homo sapien
tgggtacacaacgtggacccatagg

SEQ ID NO: 5224801 - DNA, 25 bp, Homo sapien
acgtggacccataggcagaatccaa

SEQ ID NO: 5224802 - DNA, 25 bp, Homo sapien
cagaccctgcgagaagcaagggcag

SEQ ID NO: 5224803 - DNA, 25 bp, Homo sapien
cagtggaagtctgatactgataagg

SEQ ID NO: 5224804 - DNA, 25 bp, Homo sapien
taagactggttcgattctaagatga

SEQ ID NO: 5224805 - DNA, 25 bp, Homo sapien
taatcctagtgttctgggggtactg

SEQ ID NO: 5224806 - DNA, 25 bp, Homo sapien
tcaaaagcagccaatccatctatcc

SEQ ID NO: 5224807 - DNA, 25 bp, Homo sapien
cttctcaaaagcagccaatccatct

SEQ ID NO: 5224808 - DNA, 25 bp, Homo sapien
gtaacttctcaaaagcagccaatcc

SEQ ID NO: 5224809 - DNA, 25 bp, Homo sapien
gatggaccatgagtaacttctcaaa

SEQ ID NO: 5224810 - DNA, 25 bp, Homo sapien
gactgtggatgagtaagaatcctga

SEQ ID NO: 5224811 - DNA, 25 bp, Homo sapien
tgtggatgagtaagaatcctgatgc

SEQ ID NO: 5224812 - DNA, 25 bp, Homo sapien
tgactataatagctggctgtttgca

SEQ ID NO: 5224813 - DNA, 25 bp, Homo sapien
gggactgtggatgagtaagaatcct

SEQ ID NO: 5224814 - DNA, 25 bp, Homo sapien
aggaagaccaatgggatgctgtcta

SEQ ID NO: 5224815 - DNA, 25 bp, Homo sapien
gaagaccaatgggatgctgtctaac

SEQ ID NO: 5224816 - DNA, 25 bp, Homo sapien
ggaagaccaatgggatgctgtctaa

SEQ ID NO: 5224817 - DNA, 25 bp, Homo sapien
gcaaatctctggcagttgtagtaat

SEQ ID NO: 5224818 - DNA, 25 bp, Homo sapien
gttgtagtaatagattctgaaccct

SEQ ID NO: 5224819 - DNA, 25 bp, Homo sapien
tgtactaaccagagcacgctgtatt

SEQ ID NO: 5224820 - DNA, 25 bp, Homo sapien
gaacccttagctattgtactaacca

SEQ ID NO: 5224821 - DNA, 25 bp, Homo sapien
tctgtgatgtacatgattagtggct

SEQ ID NO: 5224822 - DNA, 25 bp, Homo sapien
cacaaggacggagtgtgtgttaaag

SEQ ID NO: 5224823 - DNA, 25 bp, Homo sapien
tctaaggcacagctgcacaaggacg

SEQ ID NO: 5224824 - DNA, 25 bp, Homo sapien
ggaaagaccgggcttagatgtctgt

SEQ ID NO: 5224825 - DNA, 25 bp, Homo sapien
gggcccaattactgaaaatcttcca

SEQ ID NO: 5224826 - DNA, 25 bp, Homo sapien
ggaaaatagcaccaacattaatcca

SEQ ID NO: 5224827 - DNA, 25 bp, Homo sapien
gagatgtttcagatccaaagggccc

SEQ ID NO: 5224828 - DNA, 25 bp, Homo sapien
tcttgtaattgggttttggtatgga

SEQ ID NO: 5224829 - DNA, 25 bp, Homo sapien
tgagtcacatctaaccgtacttggc

SEQ ID NO: 5224830 - DNA, 25 bp, Homo sapien
tagtggagatctgaggatgccactt

SEQ ID NO: 5224831 - DNA, 25 bp, Homo sapien
gaacacgtttgctctgtgcaatgac

SEQ ID NO: 5224832 - DNA, 25 bp, Homo sapien
gatgccacttgagcagaacacgttt

SEQ ID NO: 5224833 - DNA, 25 bp, Homo sapien
tgctggctgaacacaaacccatgga

SEQ ID NO: 5224834 - DNA, 25 bp, Homo sapien
ttgccaactgccagatatgactgct

SEQ ID NO: 5224835 - DNA, 25 bp, Homo sapien
tgctgctcaagtaccatttccatcg

SEQ ID NO: 5224836 - DNA, 25 bp, Homo sapien
cccatggaagattgttgaagaataa

SEQ ID NO: 5224837 - DNA, 25 bp, Homo sapien
ggagagttgaagacagcgtcatacg

SEQ ID NO: 5224838 - DNA, 25 bp, Homo sapien
atctcaaacctgaatatggatgagg

SEQ ID NO: 5224839 - DNA, 25 bp, Homo sapien
tgtaggagtagtaggataagccatt

SEQ ID NO: 5224840 - DNA, 25 bp, Homo sapien
tacgggtgttgaagcgtcatctcaa

SEQ ID NO: 5224841 - DNA, 25 bp, Homo sapien
tgtgtgcattcccatctggacccct

SEQ ID NO: 5224842 - DNA, 25 bp, Homo sapien
cccttcaaagcggaggttgtgtgca

SEQ ID NO: 5224843 - DNA, 25 bp, Homo sapien
ctgggtaaggatgcgtactgcctct

SEQ ID NO: 5224844 - DNA, 25 bp, Homo sapien
taaggatgcgtactgcctctccatc

SEQ ID NO: 5224845 - DNA, 25 bp, Homo sapien
tactaggtgatcaccagatacaagg

SEQ ID NO: 5224846 - DNA, 25 bp, Homo sapien
cattggttgtactactgtaaaaggc

SEQ ID NO: 5224847 - DNA, 25 bp, Homo sapien
gtaaaaggctgatttgcttgactcc

SEQ ID NO: 5224848 - DNA, 25 bp, Homo sapien
gcttgactcctttgctaacagtaga

SEQ ID NO: 5224849 - DNA, 25 bp, Homo sapien
gactccacacttgattctaagtccg

SEQ ID NO: 5224850 - DNA, 25 bp, Homo sapien
atatcatgcgccgatgcacagagcc

SEQ ID NO: 5224851 - DNA, 25 bp, Homo sapien
gagcaatatcatgcgccgatgcaca

SEQ ID NO: 5224852 - DNA, 25 bp, Homo sapien
ctaagtccggaagagcaatatcatg

SEQ ID NO: 5224853 - DNA, 25 bp, Homo sapien
ttagctcagcttatcactcagatca

SEQ ID NO: 5224854 - DNA, 25 bp, Homo sapien
gatcacagtagattgctatgttctc

SEQ ID NO: 5224855 - DNA, 25 bp, Homo sapien
cagaccactggtctttcctgagtcg

SEQ ID NO: 5224856 - DNA, 25 bp, Homo sapien
tcctgagtcggcgaatccttcagct

SEQ ID NO: 5224857 - DNA, 25 bp, Homo sapien
tggccttgtcgcacagagaagtact

SEQ ID NO: 5224858 - DNA, 25 bp, Homo sapien
gcagaacttgaatgtcaccgccagt

SEQ ID NO: 5224859 - DNA, 25 bp, Homo sapien
caccgccagtgacttagtgagcaca

SEQ ID NO: 5224860 - DNA, 25 bp, Homo sapien
gaacacaatcgtacccaatgcggaa

SEQ ID NO: 5224861 - DNA, 25 bp, Homo sapien
tacagacatagaaggcacgcaatag

SEQ ID NO: 5224862 - DNA, 25 bp, Homo sapien
catcatatgactcctagccagctgg

SEQ ID NO: 5224863 - DNA, 25 bp, Homo sapien
ggccttggaaaccagagagtcctgg

SEQ ID NO: 5224864 - DNA, 25 bp, Homo sapien
caaggcatgcaaaacgtacagacat

SEQ ID NO: 5224865 - DNA, 25 bp, Homo sapien
tagttctgtgtgcaatcttagccac

SEQ ID NO: 5224866 - DNA, 25 bp, Homo sapien
gacaccttgatgctgcagaaagccc

SEQ ID NO: 5224867 - DNA, 25 bp, Homo sapien
tcccaacaggaacagggtaattgta

SEQ ID NO: 5224868 - DNA, 25 bp, Homo sapien
gcacaatacgggctcaacaaatgtt

SEQ ID NO: 5224869 - DNA, 25 bp, Homo sapien
cacagatgggctcgggtggcaccac

SEQ ID NO: 5224870 - DNA, 25 bp, Homo sapien
cagttgtctggcatttgcgtctcag

SEQ ID NO: 5224871 - DNA, 25 bp, Homo sapien
gaagcgatgcttccgcagttgtctg

SEQ ID NO: 5224872 - DNA, 25 bp, Homo sapien
caccatagtaactgactgccaaagc

SEQ ID NO: 5224873 - DNA, 25 bp, Homo sapien
tcttggcagaatgatcgaggtcgtg

SEQ ID NO: 5224874 - DNA, 25 bp, Homo sapien
gctggaccaaggtgtttcttggcag

SEQ ID NO: 5224875 - DNA, 25 bp, Homo sapien
ttcttggcagaatgatcgaggtcgt

SEQ ID NO: 5224876 - DNA, 25 bp, Homo sapien
gaccaaggtgtttcttggcagaatg

SEQ ID NO: 5224877 - DNA, 25 bp, Homo sapien
gaatagaagcaggaacacgttctgg

SEQ ID NO: 5224878 - DNA, 25 bp, Homo sapien
gcaggaacacgttctggaggctgct

SEQ ID NO: 5224879 - DNA, 25 bp, Homo sapien
gacttggaatagaagcaggaacacg

SEQ ID NO: 5224880 - DNA, 25 bp, Homo sapien
tgagagacttggaatagaagcagga

SEQ ID NO: 5224881 - DNA, 25 bp, Homo sapien
tcaaaggcaccgacatatcaatgga

SEQ ID NO: 5224882 - DNA, 25 bp, Homo sapien
taaaacccgggctgtcagacactat

SEQ ID NO: 5224883 - DNA, 25 bp, Homo sapien
tgtctataaccgacccacagaaggc

SEQ ID NO: 5224884 - DNA, 25 bp, Homo sapien
gggcttatcacgctatcctcagggc

SEQ ID NO: 5224885 - DNA, 25 bp, Homo sapien
tttggctgtgatgaaggttgttgtc

SEQ ID NO: 5224886 - DNA, 25 bp, Homo sapien
gttgtctgcttattctcacgagtgc

SEQ ID NO: 5224887 - DNA, 25 bp, Homo sapien
tgcttattctcacgagtgcctcctc

SEQ ID NO: 5224888 - DNA, 25 bp, Homo sapien
gaaggttgttgtctgcttattctca

SEQ ID NO: 5224889 - DNA, 25 bp, Homo sapien
tggcatagttcatggccatctacct

SEQ ID NO: 5224890 - DNA, 25 bp, Homo sapien
cgtagcatagatggcatagttcatg

SEQ ID NO: 5224891 - DNA, 25 bp, Homo sapien
acacagatggcgtagcatagatggc

SEQ ID NO: 5224892 - DNA, 25 bp, Homo sapien
cagatggcgtagcatagatggcata

SEQ ID NO: 5224893 - DNA, 25 bp, Homo sapien
tatcagtggaagagtagttgctcag

SEQ ID NO: 5224894 - DNA, 25 bp, Homo sapien
cactcgtaacactgtcaatgtaaag

SEQ ID NO: 5224895 - DNA, 25 bp, Homo sapien
ggccaatgagcagggcccttgtgaa

SEQ ID NO: 5224896 - DNA, 25 bp, Homo sapien
tccctggtgagagacaggctacaag

SEQ ID NO: 5224897 - DNA, 25 bp, Homo sapien
tgctggttcataaccgcagctgcct

SEQ ID NO: 5224898 - DNA, 25 bp, Homo sapien
actgatactggaaaggtacctctgg

SEQ ID NO: 5224899 - DNA, 25 bp, Homo sapien
ttagaattctcaaactgatactgga

SEQ ID NO: 5224900 - DNA, 25 bp, Homo sapien
tagcttgccggcctctggtgtgtgc

SEQ ID NO: 5224901 - DNA, 25 bp, Homo sapien
tactgctggctggataccacgtctg

SEQ ID NO: 5224902 - DNA, 25 bp, Homo sapien
caaaatgggacgagtgcagtaaacc

SEQ ID NO: 5224903 - DNA, 25 bp, Homo sapien
caaaattggtttgaagtactgctgg

SEQ ID NO: 5224904 - DNA, 25 bp, Homo sapien
taaatcaggcaaggttggcctccaa

SEQ ID NO: 5224905 - DNA, 25 bp, Homo sapien
gatgctgtgcgtcatacttgaaaaa

SEQ ID NO: 5224906 - DNA, 25 bp, Homo sapien
taccgatgtcaaggaagagaccgga

SEQ ID NO: 5224907 - DNA, 25 bp, Homo sapien
gatagcgagagattggaccttccag

SEQ ID NO: 5224908 - DNA, 25 bp, Homo sapien
ggagaagcccgttttattataagca

SEQ ID NO: 5224909 - DNA, 25 bp, Homo sapien
gcctgaaaattggagttatgcctac

SEQ ID NO: 5224910 - DNA, 25 bp, Homo sapien
tccacaaacgttgccacagaggcaa

SEQ ID NO: 5224911 - DNA, 25 bp, Homo sapien
cagaggcaataaccttcatgtgcct

SEQ ID NO: 5224912 - DNA, 25 bp, Homo sapien
ccaagggaaccaagctgctgccagg

SEQ ID NO: 5224913 - DNA, 25 bp, Homo sapien
tacttttatcggaggcaatgccact

SEQ ID NO: 5224914 - DNA, 25 bp, Homo sapien
taagtgtcactaataaactcctcag

SEQ ID NO: 5224915 - DNA, 25 bp, Homo sapien
ggccacttccctataagtgtcacta

SEQ ID NO: 5224916 - DNA, 25 bp, Homo sapien
gcaagggaattgagcaggccacttc

SEQ ID NO: 5224917 - DNA, 25 bp, Homo sapien
ttccctgctactctgagaatggcca

SEQ ID NO: 5224918 - DNA, 25 bp, Homo sapien
gagaatggccagttcaatgaccgag

SEQ ID NO: 5224919 - DNA, 25 bp, Homo sapien
gtcacagggaactgtaggctcagat

SEQ ID NO: 5224920 - DNA, 25 bp, Homo sapien
gagctgtcctgaattcggtgccctt

SEQ ID NO: 5224921 - DNA, 25 bp, Homo sapien
gcagggcctaagtgtcccccacatt

SEQ ID NO: 5224922 - DNA, 25 bp, Homo sapien
aaagccctaaaacctgaagaggcag

SEQ ID NO: 5224923 - DNA, 25 bp, Homo sapien
cctttggacattgaaatctgtgtaa

SEQ ID NO: 5224924 - DNA, 25 bp, Homo sapien
gagcccacaaagctaccgaaatcca

SEQ ID NO: 5224925 - DNA, 25 bp, Homo sapien
taagatgtgggttcccgtgaccacc

SEQ ID NO: 5224926 - DNA, 25 bp, Homo sapien
gctcagaaaccaatgcctggactgt

SEQ ID NO: 5224927 - DNA, 25 bp, Homo sapien
tatcatccacagtgctgacaaggct

SEQ ID NO: 5224928 - DNA, 25 bp, Homo sapien
ggccggagggtggatacttatcatc

SEQ ID NO: 5224929 - DNA, 25 bp, Homo sapien
aagctgttgtgttttgaatttcctc

SEQ ID NO: 5224930 - DNA, 25 bp, Homo sapien
tcaagctgttgtgttttgaatttcc

SEQ ID NO: 5224931 - DNA, 25 bp, Homo sapien
caagctgttgtgttttgaatttcct

SEQ ID NO: 5224932 - DNA, 25 bp, Homo sapien
gctgttgtgttttgaatttcctcac

SEQ ID NO: 5224933 - DNA, 25 bp, Homo sapien
tctctgggatagatacaaagtattg

SEQ ID NO: 5224934 - DNA, 25 bp, Homo sapien
tctacagaagatatgcacacgcaca

SEQ ID NO: 5224935 - DNA, 25 bp, Homo sapien
tctggaaaaactccaatcactcatg

SEQ ID NO: 5224936 - DNA, 25 bp, Homo sapien
ctagcatcaaggttacgggtgactc

SEQ ID NO: 5224937 - DNA, 25 bp, Homo sapien
caatgagcatcaaaatatgagacat

SEQ ID NO: 5224938 - DNA, 25 bp, Homo sapien
cttgcaatgagcatcaaaatatgag

SEQ ID NO: 5224939 - DNA, 25 bp, Homo sapien
gcaatgagcatcaaaatatgagaca

SEQ ID NO: 5224940 - DNA, 25 bp, Homo sapien
tgcaatgagcatcaaaatatgagac

SEQ ID NO: 5224941 - DNA, 25 bp, Homo sapien
tgaaccaccagaccttctcttttta

SEQ ID NO: 5224942 - DNA, 25 bp, Homo sapien
tccttttcttcagtgacctgaacca

SEQ ID NO: 5224943 - DNA, 25 bp, Homo sapien
tgtgtttaggttccagccaaccttg

SEQ ID NO: 5224944 - DNA, 25 bp, Homo sapien
agtgacctgaaccaccagaccttct

SEQ ID NO: 5224945 - DNA, 25 bp, Homo sapien
ccattaaatgagatcctagccttga

SEQ ID NO: 5224946 - DNA, 25 bp, Homo sapien
ggtgtcttcgttccctgctggacca

SEQ ID NO: 5224947 - DNA, 25 bp, Homo sapien
gatactaagcaagctcctaggcctg

SEQ ID NO: 5224948 - DNA, 25 bp, Homo sapien
tggaccatcctgatgccaacagaac

SEQ ID NO: 5224949 - DNA, 25 bp, Homo sapien
catttgtcagggataggcaatcaga

SEQ ID NO: 5224950 - DNA, 25 bp, Homo sapien
gatgcccctcctatgagctaactga

SEQ ID NO: 5224951 - DNA, 25 bp, Homo sapien
tatccaggttgcacctagctgggca

SEQ ID NO: 5224952 - DNA, 25 bp, Homo sapien
ttctggtgtctccaacgaactgtga

SEQ ID NO: 5224953 - DNA, 25 bp, Homo sapien
ataataacatggacaatcaaggtgg

SEQ ID NO: 5224954 - DNA, 25 bp, Homo sapien
taaatttacttgttgttctctagta

SEQ ID NO: 5224955 - DNA, 25 bp, Homo sapien
acaataataacatggacaatcaagg

SEQ ID NO: 5224956 - DNA, 25 bp, Homo sapien
taataacatggacaatcaaggtggg

SEQ ID NO: 5224957 - DNA, 25 bp, Homo sapien
tcgccaccgtaatactggacctcag

SEQ ID NO: 5224958 - DNA, 25 bp, Homo sapien
taattgcgtcccacttcagaaaagg

SEQ ID NO: 5224959 - DNA, 25 bp, Homo sapien
tatccttcactaacatcccattggg

SEQ ID NO: 5224960 - DNA, 25 bp, Homo sapien
taattgtggcactcactcagttggg

SEQ ID NO: 5224961 - DNA, 25 bp, Homo sapien
ggacatcacactctcggatgaaagc

SEQ ID NO: 5224962 - DNA, 25 bp, Homo sapien
acatcacactctcggatgaaagcat

SEQ ID NO: 5224963 - DNA, 25 bp, Homo sapien
gacatcacactctcggatgaaagca

SEQ ID NO: 5224964 - DNA, 25 bp, Homo sapien
gatgtaaactacctatgatcattag

SEQ ID NO: 5224965 - DNA, 25 bp, Homo sapien
ccctcccattaatttctaaagcctg

SEQ ID NO: 5224966 - DNA, 25 bp, Homo sapien
tattagaatccctcttcaccaaggg

SEQ ID NO: 5224967 - DNA, 25 bp, Homo sapien
accaagggcaaggagtacaacgaag

SEQ ID NO: 5224968 - DNA, 25 bp, Homo sapien
gcttgagggctgatgaacacgaacc

SEQ ID NO: 5224969 - DNA, 25 bp, Homo sapien
cccgaggtcaaggtggtgtcctgtt

SEQ ID NO: 5224970 - DNA, 25 bp, Homo sapien
gatgaacacgaacccgaggtcaagg

SEQ ID NO: 5224971 - DNA, 25 bp, Homo sapien
cacgaacccgaggtcaaggtggtgt

SEQ ID NO: 5224972 - DNA, 25 bp, Homo sapien
gacacatgttagcagctcctaagct

SEQ ID NO: 5224973 - DNA, 25 bp, Homo sapien
ctggccgtccggctggagaacatgt

SEQ ID NO: 5224974 - DNA, 25 bp, Homo sapien
cctgtgcagtttggtgtggccaccg

SEQ ID NO: 5224975 - DNA, 25 bp, Homo sapien
gccaccgcataggtctggccaatgg

SEQ ID NO: 5224976 - DNA, 25 bp, Homo sapien
tagtgctgaggataccggagatctg

SEQ ID NO: 5224977 - DNA, 25 bp, Homo sapien
tgctgctggcagatagtctacagga

SEQ ID NO: 5224978 - DNA, 25 bp, Homo sapien
tcttctgccgggaatcctgggttcg

SEQ ID NO: 5224979 - DNA, 25 bp, Homo sapien
ccctggataatagggaagctccctt

SEQ ID NO: 5224980 - DNA, 25 bp, Homo sapien
tagcagtcatgcgttacaatgtcag

SEQ ID NO: 5224981 - DNA, 25 bp, Homo sapien
tggagaattcctaacaccaaggagg

SEQ ID NO: 5224982 - DNA, 25 bp, Homo sapien
ggatccccagagtagagttccataa

SEQ ID NO: 5224983 - DNA, 25 bp, Homo sapien
tgaaagcgtttcaactatcaggtag

SEQ ID NO: 5224984 - DNA, 25 bp, Homo sapien
gatgtccacgtgtctgcacatcagc

SEQ ID NO: 5224985 - DNA, 25 bp, Homo sapien
gagcgggtaatgctgcctggcagag

SEQ ID NO: 5224986 - DNA, 25 bp, Homo sapien
ctcagagggggatgtccacgtgtct

SEQ ID NO: 5224987 - DNA, 25 bp, Homo sapien
agagactgcctctggaccgccagtc

SEQ ID NO: 5224988 - DNA, 25 bp, Homo sapien
tcctcccgggactaatactgcattt

SEQ ID NO: 5224989 - DNA, 25 bp, Homo sapien
aactacattttagccctcaagtggg

SEQ ID NO: 5224990 - DNA, 25 bp, Homo sapien
tgctggtcatcagaggccatggtca

SEQ ID NO: 5224991 - DNA, 25 bp, Homo sapien
tgtccccgagtgcagatggttactg

SEQ ID NO: 5224992 - DNA, 25 bp, Homo sapien
tgttctgagctacaaggagacaccg

SEQ ID NO: 5224993 - DNA, 25 bp, Homo sapien
tgcagatggatttagccttagcgcc

SEQ ID NO: 5224994 - DNA, 25 bp, Homo sapien
cacgggtgacagtcggtctcagaac

SEQ ID NO: 5224995 - DNA, 25 bp, Homo sapien
tttaggttccagtagtaagcagccc

SEQ ID NO: 5224996 - DNA, 25 bp, Homo sapien
gaaagttgctaccttcagtgataag

SEQ ID NO: 5224997 - DNA, 25 bp, Homo sapien
actgagcctcttctagcaagttgaa

SEQ ID NO: 5224998 - DNA, 25 bp, Homo sapien
caggctctaggcagtgtttccagga

SEQ ID NO: 5224999 - DNA, 25 bp, Homo sapien
gagctggcccactgagaaagttgct

SEQ ID NO: 5225000 - DNA, 25 bp, Homo sapien
tgggtgtgtgtggccacacctctca

SEQ ID NO: 5225001 - DNA, 25 bp, Homo sapien
gtgtgtgtggccacacctctcagag

SEQ ID NO: 5225002 - DNA, 25 bp, Homo sapien
agcttgatattgcagatactcaaag

SEQ ID NO: 5225003 - DNA, 25 bp, Homo sapien
ctgtagcttgatattgcagatactc

SEQ ID NO: 5225004 - DNA, 25 bp, Homo sapien
agccacccacggcttggggggtgag

SEQ ID NO: 5225005 - DNA, 25 bp, Homo sapien
agagtaagaaaagggcctatgggca

SEQ ID NO: 5225006 - DNA, 25 bp, Homo sapien
ttttccaggagaatcagccagtgct

SEQ ID NO: 5225007 - DNA, 25 bp, Homo sapien
tgcagcctggtttgtctctggcttt

SEQ ID NO: 5225008 - DNA, 25 bp, Homo sapien
ttcttctcaataaggagtggttcat

SEQ ID NO: 5225009 - DNA, 25 bp, Homo sapien
tttcttctcaataaggagtggttca

SEQ ID NO: 5225010 - DNA, 25 bp, Homo sapien
gatggccagtacattggggagcttt

SEQ ID NO: 5225011 - DNA, 25 bp, Homo sapien
ggccagtacattggggagctttctt

SEQ ID NO: 5225012 - DNA, 25 bp, Homo sapien
ggaggtcactggaggaagtcggctg

SEQ ID NO: 5225013 - DNA, 25 bp, Homo sapien
gaggtcactggaggaagtcggctgt

SEQ ID NO: 5225014 - DNA, 25 bp, Homo sapien
aggtcactggaggaagtcggctgtc

SEQ ID NO: 5225015 - DNA, 25 bp, Homo sapien
tgtggtttccgtgtggtcagaagca

SEQ ID NO: 5225016 - DNA, 25 bp, Homo sapien
gtgaggcccgtgtggtttccgtgtg

SEQ ID NO: 5225017 - DNA, 25 bp, Homo sapien
ttccgtgtggtcagaagcattagtt

SEQ ID NO: 5225018 - DNA, 25 bp, Homo sapien
gcattagttagggtcttgtccacat

SEQ ID NO: 5225019 - DNA, 25 bp, Homo sapien
tccttgctgtgtctaagctctcctg

SEQ ID NO: 5225020 - DNA, 25 bp, Homo sapien
agacagctcacgtccgttcccatag

SEQ ID NO: 5225021 - DNA, 25 bp, Homo sapien
tgatgacgtccactctcaactagtt

SEQ ID NO: 5225022 - DNA, 25 bp, Homo sapien
ccatggctcaggtccgtatagcttc

SEQ ID NO: 5225023 - DNA, 25 bp, Homo sapien
caggaaaggtgattgccgtgtttca

SEQ ID NO: 5225024 - DNA, 25 bp, Homo sapien
tgtgcactacctgagattccccagg

SEQ ID NO: 5225025 - DNA, 25 bp, Homo sapien
caactgctacatgcgtgtgcactac

SEQ ID NO: 5225026 - DNA, 25 bp, Homo sapien
tgatgaaggctctagtttggctgca

SEQ ID NO: 5225027 - DNA, 25 bp, Homo sapien
ctgtaggagcaaaggccttggtgct

SEQ ID NO: 5225028 - DNA, 25 bp, Homo sapien
aaaggccttggtgcttctcattatc

SEQ ID NO: 5225029 - DNA, 25 bp, Homo sapien
gcttctcattatccatgaaatccat

SEQ ID NO: 5225030 - DNA, 25 bp, Homo sapien
ggagcaaaggccttggtgcttctca

SEQ ID NO: 5225031 - DNA, 25 bp, Homo sapien
aaagcgagcttggccctggtctttg

SEQ ID NO: 5225032 - DNA, 25 bp, Homo sapien
tctttgaagcctcttcccgtttgag

SEQ ID NO: 5225033 - DNA, 25 bp, Homo sapien
ctttgaagcctcttcccgtttgagg

SEQ ID NO: 5225034 - DNA, 25 bp, Homo sapien
gagcttggccctggtctttgaagcc

SEQ ID NO: 5225035 - DNA, 25 bp, Homo sapien
tgtaaatactctccgacttgctagc

SEQ ID NO: 5225036 - DNA, 25 bp, Homo sapien
ttttatactatgtgggtgactcgca

SEQ ID NO: 5225037 - DNA, 25 bp, Homo sapien
gactcgcatgcagtgtataccgcca

SEQ ID NO: 5225038 - DNA, 25 bp, Homo sapien
tataccgccaggctttgacacattc

SEQ ID NO: 5225039 - DNA, 25 bp, Homo sapien
aagaaattcagagcgagagcaaatg

SEQ ID NO: 5225040 - DNA, 25 bp, Homo sapien
aattcagagcgagagcaaatgaaag

SEQ ID NO: 5225041 - DNA, 25 bp, Homo sapien
gaagaaattcagagcgagagcaaat

SEQ ID NO: 5225042 - DNA, 25 bp, Homo sapien
taaactcttttagtgtgagatgtct

SEQ ID NO: 5225043 - DNA, 25 bp, Homo sapien
tgtgagatgtctgatttatgttaaa

SEQ ID NO: 5225044 - DNA, 25 bp, Homo sapien
aaactcttttagtgtgagatgtctg

SEQ ID NO: 5225045 - DNA, 25 bp, Homo sapien
gatttatgttaaatatgtgatcata

SEQ ID NO: 5225046 - DNA, 25 bp, Homo sapien
ggaaaccaagacaactgcataccta

SEQ ID NO: 5225047 - DNA, 25 bp, Homo sapien
taaatggcactagggtcttgaactg

SEQ ID NO: 5225048 - DNA, 25 bp, Homo sapien
tgaactgggccagtggtaaggtccc

SEQ ID NO: 5225049 - DNA, 25 bp, Homo sapien
ggagctccttgtctgatccatcaga

SEQ ID NO: 5225050 - DNA, 25 bp, Homo sapien
gggcctcaactccactcgtcagtgg

SEQ ID NO: 5225051 - DNA, 25 bp, Homo sapien
ggagtcagggtctttatgatgctct

SEQ ID NO: 5225052 - DNA, 25 bp, Homo sapien
atgatgctctcccagcttcgggcct

SEQ ID NO: 5225053 - DNA, 25 bp, Homo sapien
tcagtggagaccaccgcggagaagc

SEQ ID NO: 5225054 - DNA, 25 bp, Homo sapien
cagagagccaatttgaaaacaccaa

SEQ ID NO: 5225055 - DNA, 25 bp, Homo sapien
agagccaatttgaaaacaccaaaag

SEQ ID NO: 5225056 - DNA, 25 bp, Homo sapien
gcagagagccaatttgaaaacacca

SEQ ID NO: 5225057 - DNA, 25 bp, Homo sapien
ctgcagagagccaatttgaaaacac

SEQ ID NO: 5225058 - DNA, 25 bp, Homo sapien
ccagaggtatagtggtaaagagcta

SEQ ID NO: 5225059 - DNA, 25 bp, Homo sapien
aaagagctaggtaggcaccgtgctt

SEQ ID NO: 5225060 - DNA, 25 bp, Homo sapien
gactgcagttggtctggtttccacc

SEQ ID NO: 5225061 - DNA, 25 bp, Homo sapien
agtcttgtttccctctagactggga

SEQ ID NO: 5225062 - DNA, 25 bp, Homo sapien
agacttcccactccccttgagtgaa

SEQ ID NO: 5225063 - DNA, 25 bp, Homo sapien
ctgtttgtgagaataatgtagccag

SEQ ID NO: 5225064 - DNA, 25 bp, Homo sapien
gtagccagggtttaggtgaagggca

SEQ ID NO: 5225065 - DNA, 25 bp, Homo sapien
gaataatgtagccagggtttaggtg

SEQ ID NO: 5225066 - DNA, 25 bp, Homo sapien
ataatgtagccagggtttaggtgaa

SEQ ID NO: 5225067 - DNA, 25 bp, Homo sapien
atttttgccagtgcccaatgtggga

SEQ ID NO: 5225068 - DNA, 25 bp, Homo sapien
ggcatgccaaaccatttttgccagt

SEQ ID NO: 5225069 - DNA, 25 bp, Homo sapien
tgccagtgcccaatgtgggagactc

SEQ ID NO: 5225070 - DNA, 25 bp, Homo sapien
caggcatgccaaaccatttttgcca

SEQ ID NO: 5225071 - DNA, 25 bp, Homo sapien
ctactcagatcctttgttatgtccc

SEQ ID NO: 5225072 - DNA, 25 bp, Homo sapien
gtttactactcagatcctttgttat

SEQ ID NO: 5225073 - DNA, 25 bp, Homo sapien
actcagatcctttgttatgtcccaa

SEQ ID NO: 5225074 - DNA, 25 bp, Homo sapien
tactactcagatcctttgttatgtc

SEQ ID NO: 5225075 - DNA, 25 bp, Homo sapien
caagaggagttgggtggcgtacggt

SEQ ID NO: 5225076 - DNA, 25 bp, Homo sapien
taaattccacgactccgatgccaca

SEQ ID NO: 5225077 - DNA, 25 bp, Homo sapien
aacacaatgccacgcgcgatggcgt

SEQ ID NO: 5225078 - DNA, 25 bp, Homo sapien
agggcgcgccgccttggccgtgtcg

SEQ ID NO: 5225079 - DNA, 25 bp, Homo sapien
caggccgagcagcatgtggatgtca

SEQ ID NO: 5225080 - DNA, 25 bp, Homo sapien
actgccttttcaggccgagcagcat

SEQ ID NO: 5225081 - DNA, 25 bp, Homo sapien
gctggtgcctcgctcgcgatctctg

SEQ ID NO: 5225082 - DNA, 25 bp, Homo sapien
gcaggctggtgcctcgctcgcgatc

SEQ ID NO: 5225083 - DNA, 25 bp, Homo sapien
cctctccgagttcgctggcgcccgc

SEQ ID NO: 5225084 - DNA, 25 bp, Homo sapien
ggatcgcctgggagtgagcgagccc

SEQ ID NO: 5225085 - DNA, 25 bp, Homo sapien
ggctgggatcgcctgggagtgagcg

SEQ ID NO: 5225086 - DNA, 25 bp, Homo sapien
cccctctccgagttcgctggcgccc

SEQ ID NO: 5225087 - DNA, 25 bp, Homo sapien
acacccgcttggccagcctctcgag

SEQ ID NO: 5225088 - DNA, 25 bp, Homo sapien
acccgcttggccagcctctcgaggg

SEQ ID NO: 5225089 - DNA, 25 bp, Homo sapien
gcttggccagcctctcgaggggagt

SEQ ID NO: 5225090 - DNA, 25 bp, Homo sapien
ttggccagcctctcgaggggagtct

SEQ ID NO: 5225091 - DNA, 25 bp, Homo sapien
acccttgacggacacacgggcggag

SEQ ID NO: 5225092 - DNA, 25 bp, Homo sapien
gctgtgtgatctcagaggcgtaaac

SEQ ID NO: 5225093 - DNA, 25 bp, Homo sapien
gcgtaaactgacacacatcccgcgg

SEQ ID NO: 5225094 - DNA, 25 bp, Homo sapien
gccctgctcttgtcctcgccgggtt

SEQ ID NO: 5225095 - DNA, 25 bp, Homo sapien
acaaaacgcatatatgttctctcca

SEQ ID NO: 5225096 - DNA, 25 bp, Homo sapien
ctccagttcctcaaagtgtcatttc

SEQ ID NO: 5225097 - DNA, 25 bp, Homo sapien
aatatcacgagtatttcccgaaagc

SEQ ID NO: 5225098 - DNA, 25 bp, Homo sapien
gaaatcagcaaagagggaacaagcc

SEQ ID NO: 5225099 - DNA, 25 bp, Homo sapien
tccttacaacgtcttatgcagaggt

SEQ ID NO: 5225100 - DNA, 25 bp, Homo sapien
tccagagctgggttcgtaggtttct

SEQ ID NO: 5225101 - DNA, 25 bp, Homo sapien
gaggtttctaatggtcagcgtttcc

SEQ ID NO: 5225102 - DNA, 25 bp, Homo sapien
tggtggcttgtcttcacctctattc

SEQ ID NO: 5225103 - DNA, 25 bp, Homo sapien
ctggttggcctctcacttggtgtct

SEQ ID NO: 5225104 - DNA, 25 bp, Homo sapien
tctcacttggtgtcttgaaaagtag

SEQ ID NO: 5225105 - DNA, 25 bp, Homo sapien
tcttgaaaagtagagggctaagaaa

SEQ ID NO: 5225106 - DNA, 25 bp, Homo sapien
cccaggtgagaggaaacatatccat

SEQ ID NO: 5225107 - DNA, 25 bp, Homo sapien
taaccacttcacaagagtgagagac

SEQ ID NO: 5225108 - DNA, 25 bp, Homo sapien
cacacaccctttttggcagtggttg

SEQ ID NO: 5225109 - DNA, 25 bp, Homo sapien
tgttctgggcctcgaaatgcttatc

SEQ ID NO: 5225110 - DNA, 25 bp, Homo sapien
tgagagaccttcgagggcctgcaat

SEQ ID NO: 5225111 - DNA, 25 bp, Homo sapien
gatctgggtggcaaaggcattcctg

SEQ ID NO: 5225112 - DNA, 25 bp, Homo sapien
taccagatgcaaggctaggatccac

SEQ ID NO: 5225113 - DNA, 25 bp, Homo sapien
aaagagctgcaaacgtgcggatctg

SEQ ID NO: 5225114 - DNA, 25 bp, Homo sapien
ccacttatggcaaagaaagagctgc

SEQ ID NO: 5225115 - DNA, 25 bp, Homo sapien
gcctgagcagctcacggcttgagat

SEQ ID NO: 5225116 - DNA, 25 bp, Homo sapien
ccagaattggttctcgtcgccggcg

SEQ ID NO: 5225117 - DNA, 25 bp, Homo sapien
ctcccagggtgccagtgctttgctc

SEQ ID NO: 5225118 - DNA, 25 bp, Homo sapien
gctttgctccgcctgaaagcctgag

SEQ ID NO: 5225119 - DNA, 25 bp, Homo sapien
gcgcgccgcgaccgccgtgttattt

SEQ ID NO: 5225120 - DNA, 25 bp, Homo sapien
cagccacgcgccagcccaaggtgcc

SEQ ID NO: 5225121 - DNA, 25 bp, Homo sapien
gcgaccgccgtgttatttgctcagt

SEQ ID NO: 5225122 - DNA, 25 bp, Homo sapien
gccgcgaccgccgtgttatttgctc

SEQ ID NO: 5225123 - DNA, 25 bp, Homo sapien
ggccagcgcttggattcccaagcca

SEQ ID NO: 5225124 - DNA, 25 bp, Homo sapien
tgggccagcgcttggattcccaagc

SEQ ID NO: 5225125 - DNA, 25 bp, Homo sapien
ctagttgggccagcgcttggattcc

SEQ ID NO: 5225126 - DNA, 25 bp, Homo sapien
gttgggccagcgcttggattcccaa

SEQ ID NO: 5225127 - DNA, 25 bp, Homo sapien
cttctccagagaccagcgctgcagc

SEQ ID NO: 5225128 - DNA, 25 bp, Homo sapien
ctgcagccgagacctaactttccgg

SEQ ID NO: 5225129 - DNA, 25 bp, Homo sapien
ggcagcgttgaagaaatgccgcagg

SEQ ID NO: 5225130 - DNA, 25 bp, Homo sapien
gaaaagcaaagagcgaggcggctgg

SEQ ID NO: 5225131 - DNA, 25 bp, Homo sapien
gacgttcgtagtgggcgctgatcgg

SEQ ID NO: 5225132 - DNA, 25 bp, Homo sapien
tctagcaaaggggacgttcgtagtg

SEQ ID NO: 5225133 - DNA, 25 bp, Homo sapien
gcagatcatgattaactctagcaaa

SEQ ID NO: 5225134 - DNA, 25 bp, Homo sapien
cgctgatcgggaatggctagcgcca

SEQ ID NO: 5225135 - DNA, 25 bp, Homo sapien
ccccaagcgatgtgtcccggaggtg

SEQ ID NO: 5225136 - DNA, 25 bp, Homo sapien
ggacattaggcctgggagttgccac

SEQ ID NO: 5225137 - DNA, 25 bp, Homo sapien
tcaaagctctccagacgaggagggg

SEQ ID NO: 5225138 - DNA, 25 bp, Homo sapien
tctgggttcttttggccccaagcga

SEQ ID NO: 5225139 - DNA, 25 bp, Homo sapien
tagcacagctggtctgccaaaggtc

SEQ ID NO: 5225140 - DNA, 25 bp, Homo sapien
ggagctcagccttatctaaacttga

SEQ ID NO: 5225141 - DNA, 25 bp, Homo sapien
caaggtcccagaggatcggagctca

SEQ ID NO: 5225142 - DNA, 25 bp, Homo sapien
tggagggccagccatgatacaaggc

SEQ ID NO: 5225143 - DNA, 25 bp, Homo sapien
tttgaaaccctctaaatggggcatc

SEQ ID NO: 5225144 - DNA, 25 bp, Homo sapien
caaagaacataaaagggagctcttc

SEQ ID NO: 5225145 - DNA, 25 bp, Homo sapien
gcttctctgcaagtccactggggct

SEQ ID NO: 5225146 - DNA, 25 bp, Homo sapien
gggcatctccattccctgttacttt

SEQ ID NO: 5225147 - DNA, 25 bp, Homo sapien
caatacccataggctttccaggtgc

SEQ ID NO: 5225148 - DNA, 25 bp, Homo sapien
aatacccataggctttccaggtgcc

SEQ ID NO: 5225149 - DNA, 25 bp, Homo sapien
ttcttctgcgctgtctgcccactgt

SEQ ID NO: 5225150 - DNA, 25 bp, Homo sapien
aaaggtgctttgtgttgaatgaaca

SEQ ID NO: 5225151 - DNA, 25 bp, Homo sapien
gctttgtccagccataactggccgt

SEQ ID NO: 5225152 - DNA, 25 bp, Homo sapien
tggctctagccttggaatttcgaca

SEQ ID NO: 5225153 - DNA, 25 bp, Homo sapien
ggaaaaatctgtattagagaatcta

SEQ ID NO: 5225154 - DNA, 25 bp, Homo sapien
gaaaaatctgtattagagaatctac

SEQ ID NO: 5225155 - DNA, 25 bp, Homo sapien
ttcggtggaagagattattccggct

SEQ ID NO: 5225156 - DNA, 25 bp, Homo sapien
ggtggaagagattattccggctcat

SEQ ID NO: 5225157 - DNA, 25 bp, Homo sapien
tcattcggtggaagagattattccg

SEQ ID NO: 5225158 - DNA, 25 bp, Homo sapien
cggtggaagagattattccggctca

SEQ ID NO: 5225159 - DNA, 25 bp, Homo sapien
attcaaacgacctccgcacggtggg

SEQ ID NO: 5225160 - DNA, 25 bp, Homo sapien
ggtgatatagccagcatctttggaa

SEQ ID NO: 5225161 - DNA, 25 bp, Homo sapien
gtaaccgggagaggtgatatagcca

SEQ ID NO: 5225162 - DNA, 25 bp, Homo sapien
tctttggaattcaaacgacctccgc

SEQ ID NO: 5225163 - DNA, 25 bp, Homo sapien
aggacaatcttctggttgggttcgg

SEQ ID NO: 5225164 - DNA, 25 bp, Homo sapien
cgtgcttctcgatttcaaagtgagg

SEQ ID NO: 5225165 - DNA, 25 bp, Homo sapien
gagggttgaagttgaggacaatctt

SEQ ID NO: 5225166 - DNA, 25 bp, Homo sapien
gggcgtaaacaatccactcgcagtt

SEQ ID NO: 5225167 - DNA, 25 bp, Homo sapien
gggcagggcgtgtgcatctcatgga

SEQ ID NO: 5225168 - DNA, 25 bp, Homo sapien
gggccaggatccaccactggttagc

SEQ ID NO: 5225169 - DNA, 25 bp, Homo sapien
caggatccaccactggttagcagca

SEQ ID NO: 5225170 - DNA, 25 bp, Homo sapien
catggatgggatacacagtgggaca

SEQ ID NO: 5225171 - DNA, 25 bp, Homo sapien
tatataaggtaacaggctgatcctg

SEQ ID NO: 5225172 - DNA, 25 bp, Homo sapien
agaaaaccagttaccgctatataag

SEQ ID NO: 5225173 - DNA, 25 bp, Homo sapien
tagagttttgtagtccagcccctgc

SEQ ID NO: 5225174 - DNA, 25 bp, Homo sapien
tgcaaggtaacccaaagtcaagagt

SEQ ID NO: 5225175 - DNA, 25 bp, Homo sapien
gaaaaccattatgtaggtgcaaatt

SEQ ID NO: 5225176 - DNA, 25 bp, Homo sapien
ctcttgttaggagaaaaccattatg

SEQ ID NO: 5225177 - DNA, 25 bp, Homo sapien
tgttaggagaaaaccattatgtagg

SEQ ID NO: 5225178 - DNA, 25 bp, Homo sapien
taggagaaaaccattatgtaggtgc

SEQ ID NO: 5225179 - DNA, 25 bp, Homo sapien
gtcataagcataacagaatttggcc

SEQ ID NO: 5225180 - DNA, 25 bp, Homo sapien
ctgtcataagcataacagaatttgg

SEQ ID NO: 5225181 - DNA, 25 bp, Homo sapien
tgtcataagcataacagaatttggc

SEQ ID NO: 5225182 - DNA, 25 bp, Homo sapien
tccctctgccactatgaatacaaca

SEQ ID NO: 5225183 - DNA, 25 bp, Homo sapien
catctctgggactgagtcctgtcca

SEQ ID NO: 5225184 - DNA, 25 bp, Homo sapien
tggcctttcgtccttcccaacatgt

SEQ ID NO: 5225185 - DNA, 25 bp, Homo sapien
taagccatgcttactagctcctaag

SEQ ID NO: 5225186 - DNA, 25 bp, Homo sapien
tgtgctctgtgatcggaagaccagc

SEQ ID NO: 5225187 - DNA, 25 bp, Homo sapien
aaagcaggctaatttccttggagag

SEQ ID NO: 5225188 - DNA, 25 bp, Homo sapien
gggaagtatccaccttatgggcctg

SEQ ID NO: 5225189 - DNA, 25 bp, Homo sapien
aaatccaatttgaagcatgcaccca

SEQ ID NO: 5225190 - DNA, 25 bp, Homo sapien
agctgcggcttgtgagtgaaatttt

SEQ ID NO: 5225191 - DNA, 25 bp, Homo sapien
gctgcggcttgtgagtgaaattttc

SEQ ID NO: 5225192 - DNA, 25 bp, Homo sapien
gtttgagaactcctgaacaagctgt

SEQ ID NO: 5225193 - DNA, 25 bp, Homo sapien
tgtttgcccagacggcccgtagtct

SEQ ID NO: 5225194 - DNA, 25 bp, Homo sapien
taccagtgcttaaaaggacccagcc

SEQ ID NO: 5225195 - DNA, 25 bp, Homo sapien
gatgactcaagcgaaaggcctctgt

SEQ ID NO: 5225196 - DNA, 25 bp, Homo sapien
tagaattcgtataggcgtcacctcc

SEQ ID NO: 5225197 - DNA, 25 bp, Homo sapien
cacttatgggagtagaaccttgggc

SEQ ID NO: 5225198 - DNA, 25 bp, Homo sapien
tgtgggcccacgtaacaggtccata

SEQ ID NO: 5225199 - DNA, 25 bp, Homo sapien
caggcacctcttcaccgggaaaagg

SEQ ID NO: 5225200 - DNA, 25 bp, Homo sapien
aggcattccactggcggcggggtgg

SEQ ID NO: 5225201 - DNA, 25 bp, Homo sapien
gggtgggggaggtcgctggacatag

SEQ ID NO: 5225202 - DNA, 25 bp, Homo sapien
gctggacatagggtatgaggctgca

SEQ ID NO: 5225203 - DNA, 25 bp, Homo sapien
gggaggtcgctggacatagggtatg

SEQ ID NO: 5225204 - DNA, 25 bp, Homo sapien
tcgtgagtgatcaagccaacggcct

SEQ ID NO: 5225205 - DNA, 25 bp, Homo sapien
ttttcagacttcaacggagaccagc

SEQ ID NO: 5225206 - DNA, 25 bp, Homo sapien
tgcccaaagtaattccagctgcgtt

SEQ ID NO: 5225207 - DNA, 25 bp, Homo sapien
gatgagttgtgaggcacgatgtccc

SEQ ID NO: 5225208 - DNA, 25 bp, Homo sapien
gacactctattactggccctcacat

SEQ ID NO: 5225209 - DNA, 25 bp, Homo sapien
gactctggttcagctccattgacac

SEQ ID NO: 5225210 - DNA, 25 bp, Homo sapien
tctctcggtgtgaggaatcaattac

SEQ ID NO: 5225211 - DNA, 25 bp, Homo sapien
taaaggcaggcgaattctctcggtg

SEQ ID NO: 5225212 - DNA, 25 bp, Homo sapien
tccggtgtgtctggcttcgtcctga

SEQ ID NO: 5225213 - DNA, 25 bp, Homo sapien
gctcggccacggactgtttacatgt

SEQ ID NO: 5225214 - DNA, 25 bp, Homo sapien
tggcttcgtcctgacagctcggcca

SEQ ID NO: 5225215 - DNA, 25 bp, Homo sapien
gttcactctccggtgtgtctggctt

SEQ ID NO: 5225216 - DNA, 25 bp, Homo sapien
tccaataaaacaattatttgttcca

SEQ ID NO: 5225217 - DNA, 25 bp, Homo sapien
cacgtgtgtataaaggcccaggcag

SEQ ID NO: 5225218 - DNA, 25 bp, Homo sapien
cttgtatctgcttggacctcagttt

SEQ ID NO: 5225219 - DNA, 25 bp, Homo sapien
tgccggggatgagcttcaagagcca

SEQ ID NO: 5225220 - DNA, 25 bp, Homo sapien
gccctgaggcttggactaaatcttg

SEQ ID NO: 5225221 - DNA, 25 bp, Homo sapien
ggctgtttgttttgcgcacagagct

SEQ ID NO: 5225222 - DNA, 25 bp, Homo sapien
tggccacaatattgtagcgaccagt

SEQ ID NO: 5225223 - DNA, 25 bp, Homo sapien
aatattgtagcgaccagtggaggcc

SEQ ID NO: 5225224 - DNA, 25 bp, Homo sapien
agagcttctggctggttggccacaa

SEQ ID NO: 5225225 - DNA, 25 bp, Homo sapien
tgaacagttccctccggaataggtg

SEQ ID NO: 5225226 - DNA, 25 bp, Homo sapien
actaaattttcctacgctggcctgg

SEQ ID NO: 5225227 - DNA, 25 bp, Homo sapien
gatcaatcatgcttgtgtgcctcag

SEQ ID NO: 5225228 - DNA, 25 bp, Homo sapien
tgtaaaggtgaatcccagcagggcc

SEQ ID NO: 5225229 - DNA, 25 bp, Homo sapien
ctgcagtcaacttaaagggcccctt

SEQ ID NO: 5225230 - DNA, 25 bp, Homo sapien
tctgcagtcaacttaaagggcccct

SEQ ID NO: 5225231 - DNA, 25 bp, Homo sapien
tgcagtcaacttaaagggccccttg

SEQ ID NO: 5225232 - DNA, 25 bp, Homo sapien
cctctgcagtcaacttaaagggccc

SEQ ID NO: 5225233 - DNA, 25 bp, Homo sapien
catgagtgttgggtctttcgttggt

SEQ ID NO: 5225234 - DNA, 25 bp, Homo sapien
agtgttgggtctttcgttggtctgc

SEQ ID NO: 5225235 - DNA, 25 bp, Homo sapien
cagcatgagtgttgggtctttcgtt

SEQ ID NO: 5225236 - DNA, 25 bp, Homo sapien
tgggtctttcgttggtctgctctgt

SEQ ID NO: 5225237 - DNA, 25 bp, Homo sapien
ccagcaaggcgcattcctgaggccg

SEQ ID NO: 5225238 - DNA, 25 bp, Homo sapien
gtgtggtcacgggtctgctctgctt

SEQ ID NO: 5225239 - DNA, 25 bp, Homo sapien
gctggccagcaaggcgcattcctga

SEQ ID NO: 5225240 - DNA, 25 bp, Homo sapien
gccgtgtggtcacgggtctgctctg

SEQ ID NO: 5225241 - DNA, 25 bp, Homo sapien
ggacaaatgttacctccacagagaa

SEQ ID NO: 5225242 - DNA, 25 bp, Homo sapien
caccctatttcagatggcatgccct

SEQ ID NO: 5225243 - DNA, 25 bp, Homo sapien
tgaatttacgacacttccctggtgc

SEQ ID NO: 5225244 - DNA, 25 bp, Homo sapien
catcttacttctttcatagctatga

SEQ ID NO: 5225245 - DNA, 25 bp, Homo sapien
tatttgtctcctcacagattctgaa

SEQ ID NO: 5225246 - DNA, 25 bp, Homo sapien
tacatttgggccatgggaaattttg

SEQ ID NO: 5225247 - DNA, 25 bp, Homo sapien
gattctgaagtctgcatggtgagca

SEQ ID NO: 5225248 - DNA, 25 bp, Homo sapien
taattttaagagtccacgggagaga

SEQ ID NO: 5225249 - DNA, 25 bp, Homo sapien
gatgttcccacagtgtttgcccagg

SEQ ID NO: 5225250 - DNA, 25 bp, Homo sapien
tgtcttgaagatctcgtagcgcaga

SEQ ID NO: 5225251 - DNA, 25 bp, Homo sapien
tgaacctgatgtagagcatggagcc

SEQ ID NO: 5225252 - DNA, 25 bp, Homo sapien
gtccccatcccgaatctcgataaag

SEQ ID NO: 5225253 - DNA, 25 bp, Homo sapien
cccttaagctggtggataatctgag

SEQ ID NO: 5225254 - DNA, 25 bp, Homo sapien
actgggtgctgtccctccttcttct

SEQ ID NO: 5225255 - DNA, 25 bp, Homo sapien
tctgagctggctcttcttctcatga

SEQ ID NO: 5225256 - DNA, 25 bp, Homo sapien
catgctcaagctggatgacactgtc

SEQ ID NO: 5225257 - DNA, 25 bp, Homo sapien
taatttaaaagctatggtgtgaccc

SEQ ID NO: 5225258 - DNA, 25 bp, Homo sapien
taaagcaagtgcagtgccctctgac

SEQ ID NO: 5225259 - DNA, 25 bp, Homo sapien
tcccttagcctcgagataacaagct

SEQ ID NO: 5225260 - DNA, 25 bp, Homo sapien
cagaggtggtaacatggactgccaa

SEQ ID NO: 5225261 - DNA, 25 bp, Homo sapien
ccatccacgagttgtaaaacttggg

SEQ ID NO: 5225262 - DNA, 25 bp, Homo sapien
atgacaaggctgacaacctcccctc

SEQ ID NO: 5225263 - DNA, 25 bp, Homo sapien
actgaactcaacaggcgccggtctt

SEQ ID NO: 5225264 - DNA, 25 bp, Homo sapien
ccagactccatccacgagttgtaaa

SEQ ID NO: 5225265 - DNA, 25 bp, Homo sapien
gagaaaccttcttgggacctgtgcc

SEQ ID NO: 5225266 - DNA, 25 bp, Homo sapien
tgttctcgggcagacaaatccgaca

SEQ ID NO: 5225267 - DNA, 25 bp, Homo sapien
tggacacacagattgtcagcccctg

SEQ ID NO: 5225268 - DNA, 25 bp, Homo sapien
gggctgccactcttgcatgacacag

SEQ ID NO: 5225269 - DNA, 25 bp, Homo sapien
ggaatatggatcaagctattcaggg

SEQ ID NO: 5225270 - DNA, 25 bp, Homo sapien
gactcaggggaatatggatcaagct

SEQ ID NO: 5225271 - DNA, 25 bp, Homo sapien
tcaagctattcaggggcctcacaac

SEQ ID NO: 5225272 - DNA, 25 bp, Homo sapien
tgaattttgcacaagactcagggga

SEQ ID NO: 5225273 - DNA, 25 bp, Homo sapien
tgcctctccaacccgaagagagcaa

SEQ ID NO: 5225274 - DNA, 25 bp, Homo sapien
tccccactgctcggcagcagaggat

SEQ ID NO: 5225275 - DNA, 25 bp, Homo sapien
cactgctcggcagcagaggatgctc

SEQ ID NO: 5225276 - DNA, 25 bp, Homo sapien
tccaacccgaagagagcaagcatcc

SEQ ID NO: 5225277 - DNA, 25 bp, Homo sapien
tgttacgtgcaaagggtttgcacac

SEQ ID NO: 5225278 - DNA, 25 bp, Homo sapien
gaatctgttacgtgcaaagggtttg

SEQ ID NO: 5225279 - DNA, 25 bp, Homo sapien
aacatcacctgcgaatctgttacgt

SEQ ID NO: 5225280 - DNA, 25 bp, Homo sapien
cacctgcgaatctgttacgtgcaaa

SEQ ID NO: 5225281 - DNA, 25 bp, Homo sapien
atctcttcactaggcaaccccaatc

SEQ ID NO: 5225282 - DNA, 25 bp, Homo sapien
agcaggtgggtatgacggcaggtac

SEQ ID NO: 5225283 - DNA, 25 bp, Homo sapien
ccctgagaagtctatgggctctcat

SEQ ID NO: 5225284 - DNA, 25 bp, Homo sapien
tatgacggcaggtacgagtggccct

SEQ ID NO: 5225285 - DNA, 25 bp, Homo sapien
ttttgaattttgctcccttgcacat

SEQ ID NO: 5225286 - DNA, 25 bp, Homo sapien
gttttgaattttgctcccttgcaca

SEQ ID NO: 5225287 - DNA, 25 bp, Homo sapien
tttgaattttgctcccttgcacatt

SEQ ID NO: 5225288 - DNA, 25 bp, Homo sapien
gaaatgtgggtataggacaaggcac

SEQ ID NO: 5225289 - DNA, 25 bp, Homo sapien
caatggaaatgtgggtataggacaa

SEQ ID NO: 5225290 - DNA, 25 bp, Homo sapien
aacaatggaaatgtgggtataggac

SEQ ID NO: 5225291 - DNA, 25 bp, Homo sapien
atgtgggtataggacaaggcacctg

SEQ ID NO: 5225292 - DNA, 25 bp, Homo sapien
gatgacgtaaactttgtatattttc

SEQ ID NO: 5225293 - DNA, 25 bp, Homo sapien
tggatgacgtaaactttgtatattt

SEQ ID NO: 5225294 - DNA, 25 bp, Homo sapien
atgacgtaaactttgtatattttct

SEQ ID NO: 5225295 - DNA, 25 bp, Homo sapien
gctatttgcgtatctgtgtttacag

SEQ ID NO: 5225296 - DNA, 25 bp, Homo sapien
ccctctgtatggctatttgcgtatc

SEQ ID NO: 5225297 - DNA, 25 bp, Homo sapien
tatgaatccgactagcaaacatagc

SEQ ID NO: 5225298 - DNA, 25 bp, Homo sapien
catcgaaggcttctagagccctctg

SEQ ID NO: 5225299 - DNA, 25 bp, Homo sapien
agaaaacctaatcttgaacttatgg

SEQ ID NO: 5225300 - DNA, 25 bp, Homo sapien
cagtttctgaagtgtcacaggcaaa

SEQ ID NO: 5225301 - DNA, 25 bp, Homo sapien
tgtgaatgaccccaaaaatgtcagt

SEQ ID NO: 5225302 - DNA, 25 bp, Homo sapien
cttgaacttatggttaaaggagctt

SEQ ID NO: 5225303 - DNA, 25 bp, Homo sapien
gagctagaaagagcatcctgacatg

SEQ ID NO: 5225304 - DNA, 25 bp, Homo sapien
ccgagttttcaatgggcagctagtc

SEQ ID NO: 5225305 - DNA, 25 bp, Homo sapien
agcattcttcatgcgggccactcag

SEQ ID NO: 5225306 - DNA, 25 bp, Homo sapien
tatgattgggcttcggactcctgag

SEQ ID NO: 5225307 - DNA, 25 bp, Homo sapien
gaggctctaagcagcgaatctcaga

SEQ ID NO: 5225308 - DNA, 25 bp, Homo sapien
tgtggaggctctaagcagcgaatct

SEQ ID NO: 5225309 - DNA, 25 bp, Homo sapien
gttctgtggaggctctaagcagcga

SEQ ID NO: 5225310 - DNA, 25 bp, Homo sapien
ctctaagcagcgaatctcagaggct

SEQ ID NO: 5225311 - DNA, 25 bp, Homo sapien
ctaggaacacacgagggcaagggct

SEQ ID NO: 5225312 - DNA, 25 bp, Homo sapien
tgatgtcaatacactgatctgagcc

SEQ ID NO: 5225313 - DNA, 25 bp, Homo sapien
tctgatttggaagaagtgccatgca

SEQ ID NO: 5225314 - DNA, 25 bp, Homo sapien
taaatgcggatggaggagttgcaac

SEQ ID NO: 5225315 - DNA, 25 bp, Homo sapien
ttttagctggtggatcacagcaggc

SEQ ID NO: 5225316 - DNA, 25 bp, Homo sapien
aggccgctccggcaacaagtttgga

SEQ ID NO: 5225317 - DNA, 25 bp, Homo sapien
tttcttgggacgcatggaggcatcc

SEQ ID NO: 5225318 - DNA, 25 bp, Homo sapien
agtgcattgacatttggaaggcttc

SEQ ID NO: 5225319 - DNA, 25 bp, Homo sapien
ccaggagattcgatggtcccgttgg

SEQ ID NO: 5225320 - DNA, 25 bp, Homo sapien
gtgaagttttttgagcaatcttcag

SEQ ID NO: 5225321 - DNA, 25 bp, Homo sapien
tgtggatacttctcaggaaacccag

SEQ ID NO: 5225322 - DNA, 25 bp, Homo sapien
aggaaacccaggagattcgatggtc

SEQ ID NO: 5225323 - DNA, 25 bp, Homo sapien
gtccagccaatcgtacttgcagtcc

SEQ ID NO: 5225324 - DNA, 25 bp, Homo sapien
gtggaatgccatcccagatgtccag

SEQ ID NO: 5225325 - DNA, 25 bp, Homo sapien
catcccagatgtccagccaatcgta

SEQ ID NO: 5225326 - DNA, 25 bp, Homo sapien
tctcccacctgcaaagggtcatgct

SEQ ID NO: 5225327 - DNA, 25 bp, Homo sapien
tttgcttagtcatcaagtctccttt

SEQ ID NO: 5225328 - DNA, 25 bp, Homo sapien
taattagacccaagatccatgttgg

SEQ ID NO: 5225329 - DNA, 25 bp, Homo sapien
atgttggtcttcacctgcgaagtac

SEQ ID NO: 5225330 - DNA, 25 bp, Homo sapien
tgttcctctccaatactaattagac

SEQ ID NO: 5225331 - DNA, 25 bp, Homo sapien
cgccatgtccgtgtgaaaggtcagg

SEQ ID NO: 5225332 - DNA, 25 bp, Homo sapien
gagaggatccccgtcgatgaacgaa

SEQ ID NO: 5225333 - DNA, 25 bp, Homo sapien
gtagtaacgcgcagagaagccatcc

SEQ ID NO: 5225334 - DNA, 25 bp, Homo sapien
gttcagagggtgttttggtcccaca

SEQ ID NO: 5225335 - DNA, 25 bp, Homo sapien
acagccctgacggaaggacaggaca

SEQ ID NO: 5225336 - DNA, 25 bp, Homo sapien
agaggttcccaatcggccaactcac

SEQ ID NO: 5225337 - DNA, 25 bp, Homo sapien
ggacaggacagaggttcccaatcgg

SEQ ID NO: 5225338 - DNA, 25 bp, Homo sapien
cctcacagccctgacggaaggacag

SEQ ID NO: 5225339 - DNA, 25 bp, Homo sapien
aacactgatcgatatgtgtgtgtgc

SEQ ID NO: 5225340 - DNA, 25 bp, Homo sapien
tcaacactgatcgatatgtgtgtgt

SEQ ID NO: 5225341 - DNA, 25 bp, Homo sapien
ttcattagcaatccggccagactcc

SEQ ID NO: 5225342 - DNA, 25 bp, Homo sapien
ctggagatactccttgttggaatcc

SEQ ID NO: 5225343 - DNA, 25 bp, Homo sapien
cctcccatcagagtaggtagatgag

SEQ ID NO: 5225344 - DNA, 25 bp, Homo sapien
cactgatctgttcattagcaatccg

SEQ ID NO: 5225345 - DNA, 25 bp, Homo sapien
cctggagtttctaagtggtgtttct

SEQ ID NO: 5225346 - DNA, 25 bp, Homo sapien
ctgctttgcaatatccttcttagag

SEQ ID NO: 5225347 - DNA, 25 bp, Homo sapien
tgttagaacctctgtggactccctg

SEQ ID NO: 5225348 - DNA, 25 bp, Homo sapien
tttgcaatatccttcttagagcaga

SEQ ID NO: 5225349 - DNA, 25 bp, Homo sapien
tgtttccctggaaatcgctccctgt

SEQ ID NO: 5225350 - DNA, 25 bp, Homo sapien
ggtttttgccatgccggtacaccat

SEQ ID NO: 5225351 - DNA, 25 bp, Homo sapien
gctccctgtgttgcgatggccgtga

SEQ ID NO: 5225352 - DNA, 25 bp, Homo sapien
gccgtgagcatggttaaaaagcgca

SEQ ID NO: 5225353 - DNA, 25 bp, Homo sapien
ttctcataggcgacctcatgatgac

SEQ ID NO: 5225354 - DNA, 25 bp, Homo sapien
taaccaggctgcgtttgccaggagg

SEQ ID NO: 5225355 - DNA, 25 bp, Homo sapien
gaggaggcttgcaatgccccagcaa

SEQ ID NO: 5225356 - DNA, 25 bp, Homo sapien
gtgtgactgaccactttctcatagg

SEQ ID NO: 5225357 - DNA, 25 bp, Homo sapien
aagccaatttccctcaagatgaaga

SEQ ID NO: 5225358 - DNA, 25 bp, Homo sapien
gcctagggcggattgtggagagcgc

SEQ ID NO: 5225359 - DNA, 25 bp, Homo sapien
gatgaagagtaaggcctagggcgga

SEQ ID NO: 5225360 - DNA, 25 bp, Homo sapien
cttggactgaacatgtaggaagcca

SEQ ID NO: 5225361 - DNA, 25 bp, Homo sapien
gagatgtttccaagatcacacggtg

SEQ ID NO: 5225362 - DNA, 25 bp, Homo sapien
agatgtttccaagatcacacggtgc

SEQ ID NO: 5225363 - DNA, 25 bp, Homo sapien
cagccgcagcgccattccatttgga

SEQ ID NO: 5225364 - DNA, 25 bp, Homo sapien
ggtgctttgccgatagcagccgcag

SEQ ID NO: 5225365 - DNA, 25 bp, Homo sapien
cattaattatatccgcggagagcct

SEQ ID NO: 5225366 - DNA, 25 bp, Homo sapien
gagctttgtgggtctactccattaa

SEQ ID NO: 5225367 - DNA, 25 bp, Homo sapien
catcctcctttactttcgggctgtt

SEQ ID NO: 5225368 - DNA, 25 bp, Homo sapien
gtttttgtcatcaggcagctttcct

SEQ ID NO: 5225369 - DNA, 25 bp, Homo sapien
ggggcggggatgtgcgcatccccat

SEQ ID NO: 5225370 - DNA, 25 bp, Homo sapien
gcagctttcctacatgaaggaggag

SEQ ID NO: 5225371 - DNA, 25 bp, Homo sapien
tccaaggcttgcatagcacccagga

SEQ ID NO: 5225372 - DNA, 25 bp, Homo sapien
taaagtcgataataggcttgcagat

SEQ ID NO: 5225373 - DNA, 25 bp, Homo sapien
caaatgttagcgtgtaagccaggtc

SEQ ID NO: 5225374 - DNA, 25 bp, Homo sapien
gatagacacttaagtttactggccc

SEQ ID NO: 5225375 - DNA, 25 bp, Homo sapien
tcgtactgaaaaagggctccacagc

SEQ ID NO: 5225376 - DNA, 25 bp, Homo sapien
ccacagctctcaggaaagggatggg

SEQ ID NO: 5225377 - DNA, 25 bp, Homo sapien
tccttcgtactgaaaaagggctcca

SEQ ID NO: 5225378 - DNA, 25 bp, Homo sapien
gctccacagctctcaggaaagggat

SEQ ID NO: 5225379 - DNA, 25 bp, Homo sapien
cttttgcaagtaaatgaagggaagt

SEQ ID NO: 5225380 - DNA, 25 bp, Homo sapien
gaagcagattttcgctggtccacca

SEQ ID NO: 5225381 - DNA, 25 bp, Homo sapien
cagggaagcagattttcgctggtcc

SEQ ID NO: 5225382 - DNA, 25 bp, Homo sapien
ttttgcaagtaaatgaagggaagtg

SEQ ID NO: 5225383 - DNA, 25 bp, Homo sapien
gccctgtgtcaatcaacactttctt

SEQ ID NO: 5225384 - DNA, 25 bp, Homo sapien
tgtgtcaatcaacactttcttggtt

SEQ ID NO: 5225385 - DNA, 25 bp, Homo sapien
cctgtgtcaatcaacactttcttgg

SEQ ID NO: 5225386 - DNA, 25 bp, Homo sapien
ccctgtgtcaatcaacactttcttg

SEQ ID NO: 5225387 - DNA, 25 bp, Homo sapien
ggcgatacctgagtgccaggtctga

SEQ ID NO: 5225388 - DNA, 25 bp, Homo sapien
gttcagaaccacctcagttgcatcg

SEQ ID NO: 5225389 - DNA, 25 bp, Homo sapien
gggcggattctaacaaaccttgtca

SEQ ID NO: 5225390 - DNA, 25 bp, Homo sapien
tggagcgtggagcttgttcagaacc

SEQ ID NO: 5225391 - DNA, 25 bp, Homo sapien
tctgggagtctgcaatgaggcctga

SEQ ID NO: 5225392 - DNA, 25 bp, Homo sapien
ccttgccgtttaggctgtaggagac

SEQ ID NO: 5225393 - DNA, 25 bp, Homo sapien
gaacttgcgcacaaatgctctggct

SEQ ID NO: 5225394 - DNA, 25 bp, Homo sapien
tgggtgttcccagatctacctgaag

SEQ ID NO: 5225395 - DNA, 25 bp, Homo sapien
ttacagaggcctccaagaacagcct

SEQ ID NO: 5225396 - DNA, 25 bp, Homo sapien
tgttttattggatttcaggagttgg

SEQ ID NO: 5225397 - DNA, 25 bp, Homo sapien
tttagatgggacatcatcagtctca

SEQ ID NO: 5225398 - DNA, 25 bp, Homo sapien
gatttcaggagttggatgacgactg

SEQ ID NO: 5225399 - DNA, 25 bp, Homo sapien
tggatgacgactgtttagatgggac

SEQ ID NO: 5225400 - DNA, 25 bp, Homo sapien
aaggttccagttaccaagccctgag

SEQ ID NO: 5225401 - DNA, 25 bp, Homo sapien
ttgcttagcaaaggtggccccgaga

SEQ ID NO: 5225402 - DNA, 25 bp, Homo sapien
tctgctccatcgatgcaaggttcca

SEQ ID NO: 5225403 - DNA, 25 bp, Homo sapien
tctgagaggccggaaagatctaagc

SEQ ID NO: 5225404 - DNA, 25 bp, Homo sapien
tctccgggtatacccgcacatactg

SEQ ID NO: 5225405 - DNA, 25 bp, Homo sapien
cccgcacatactgtgccggaatggg

SEQ ID NO: 5225406 - DNA, 25 bp, Homo sapien
tggggtcaaaccttcggatgtcagg

SEQ ID NO: 5225407 - DNA, 25 bp, Homo sapien
ggtgtcatagtgcatgttcccttcg

SEQ ID NO: 5225408 - DNA, 25 bp, Homo sapien
ataaatgaagccagcttgtatcggg

SEQ ID NO: 5225409 - DNA, 25 bp, Homo sapien
ctggatcccctacagcgctgagccc

SEQ ID NO: 5225410 - DNA, 25 bp, Homo sapien
cataaatgaagccagcttgtatcgg

SEQ ID NO: 5225411 - DNA, 25 bp, Homo sapien
ctacagcgctgagcccctgattcca

SEQ ID NO: 5225412 - DNA, 25 bp, Homo sapien
tgtgttgcaacccagcaggaggaag

SEQ ID NO: 5225413 - DNA, 25 bp, Homo sapien
gataagagaatgctgtagcagcctg

SEQ ID NO: 5225414 - DNA, 25 bp, Homo sapien
ctgtgtaagggcaaaggaagataag

SEQ ID NO: 5225415 - DNA, 25 bp, Homo sapien
gcagcctgtgttgcaacccagcagg

SEQ ID NO: 5225416 - DNA, 25 bp, Homo sapien
agcgtctctaccgtgggcttggagt

SEQ ID NO: 5225417 - DNA, 25 bp, Homo sapien
tcccagcgtctctaccgtgggcttg

SEQ ID NO: 5225418 - DNA, 25 bp, Homo sapien
ccagcgtctctaccgtgggcttgga

SEQ ID NO: 5225419 - DNA, 25 bp, Homo sapien
gggtcccagcgtctctaccgtgggc

SEQ ID NO: 5225420 - DNA, 25 bp, Homo sapien
ggggaccactaggtccctgtccagc

SEQ ID NO: 5225421 - DNA, 25 bp, Homo sapien
atcccctggatctctgatctggggg

SEQ ID NO: 5225422 - DNA, 25 bp, Homo sapien
accactaggtccctgtccagccaca

SEQ ID NO: 5225423 - DNA, 25 bp, Homo sapien
tgatctgggggaccactaggtccct

SEQ ID NO: 5225424 - DNA, 25 bp, Homo sapien
ttaactcatcttggcgatcgctggc

SEQ ID NO: 5225425 - DNA, 25 bp, Homo sapien
tccacctcggagagcagacaaatgt

SEQ ID NO: 5225426 - DNA, 25 bp, Homo sapien
ggttcagagaacagccacagtggta

SEQ ID NO: 5225427 - DNA, 25 bp, Homo sapien
cagtggttcccatagtaagcaatta

SEQ ID NO: 5225428 - DNA, 25 bp, Homo sapien
gctcctcgaggaaatcgaagttgca

SEQ ID NO: 5225429 - DNA, 25 bp, Homo sapien
ggtcatacatccaaccacagggctc

SEQ ID NO: 5225430 - DNA, 25 bp, Homo sapien
cgaagttgcaattgaatcccgaagg

SEQ ID NO: 5225431 - DNA, 25 bp, Homo sapien
ccggagccacttggcatggtcatac

SEQ ID NO: 5225432 - DNA, 25 bp, Homo sapien
tatggcacacgctcgtgaagagtgg

SEQ ID NO: 5225433 - DNA, 25 bp, Homo sapien
ctcgtgaagagtgggacggtcccct

SEQ ID NO: 5225434 - DNA, 25 bp, Homo sapien
gaagcatatggcacacgctcgtgaa

SEQ ID NO: 5225435 - DNA, 25 bp, Homo sapien
catcaggggatgaagcatatggcac

SEQ ID NO: 5225436 - DNA, 25 bp, Homo sapien
agcttgatcctcctggctatcacaa

SEQ ID NO: 5225437 - DNA, 25 bp, Homo sapien
acaccatctgtccaacacgcacatc

SEQ ID NO: 5225438 - DNA, 25 bp, Homo sapien
tgatcctcctggctatcacaaagcc

SEQ ID NO: 5225439 - DNA, 25 bp, Homo sapien
aaacacaccatctgtccaacacgca

SEQ ID NO: 5225440 - DNA, 25 bp, Homo sapien
cttgatatttcacctggcgatttac

SEQ ID NO: 5225441 - DNA, 25 bp, Homo sapien
gatttacggccgcatctggcttcag

SEQ ID NO: 5225442 - DNA, 25 bp, Homo sapien
cctggcgatttacggccgcatctgg

SEQ ID NO: 5225443 - DNA, 25 bp, Homo sapien
tttcacctggcgatttacggccgca

SEQ ID NO: 5225444 - DNA, 25 bp, Homo sapien
tagctgatggctatgatgccggcaa

SEQ ID NO: 5225445 - DNA, 25 bp, Homo sapien
caatggaaaggaaatatgttccatt

SEQ ID NO: 5225446 - DNA, 25 bp, Homo sapien
tatgatgccggcaatggacagcttc

SEQ ID NO: 5225447 - DNA, 25 bp, Homo sapien
tgttcttgtagctgatggctatgat

SEQ ID NO: 5225448 - DNA, 25 bp, Homo sapien
gccaaaggtttcacagtctgcccct

SEQ ID NO: 5225449 - DNA, 25 bp, Homo sapien
ccatctccctctcacgataaaatga

SEQ ID NO: 5225450 - DNA, 25 bp, Homo sapien
agccaggccaaaggtttcacagtct

SEQ ID NO: 5225451 - DNA, 25 bp, Homo sapien
cacgataaaatgacaatctctatgc

SEQ ID NO: 5225452 - DNA, 25 bp, Homo sapien
gcagagatactgtcacttgtgtgaa

SEQ ID NO: 5225453 - DNA, 25 bp, Homo sapien
aattgtttggcagagatactgtcac

SEQ ID NO: 5225454 - DNA, 25 bp, Homo sapien
gatactgtcacttgtgtgaatttac

SEQ ID NO: 5225455 - DNA, 25 bp, Homo sapien
tgctgcctgaaaattgtttggcaga

SEQ ID NO: 5225456 - DNA, 25 bp, Homo sapien
gcacagataactaaaaggcagctgt

SEQ ID NO: 5225457 - DNA, 25 bp, Homo sapien
aaggtgtgacctctgcaaggccaaa

SEQ ID NO: 5225458 - DNA, 25 bp, Homo sapien
agcacagataactaaaaggcagctg

SEQ ID NO: 5225459 - DNA, 25 bp, Homo sapien
taggctgaatacttctgcaagatgg

SEQ ID NO: 5225460 - DNA, 25 bp, Homo sapien
tccaacttgtacaggaccattctgg

SEQ ID NO: 5225461 - DNA, 25 bp, Homo sapien
cagcatggaatgtgggcacgtcaga

SEQ ID NO: 5225462 - DNA, 25 bp, Homo sapien
ggcagggccacttttctaccacata

SEQ ID NO: 5225463 - DNA, 25 bp, Homo sapien
gtgccttgcagaacacaggtgtgac

SEQ ID NO: 5225464 - DNA, 25 bp, Homo sapien
tcttggctggttgtgtgcgtgccct

SEQ ID NO: 5225465 - DNA, 25 bp, Homo sapien
tctctttcacatggagcacccggca

SEQ ID NO: 5225466 - DNA, 25 bp, Homo sapien
taaacactcgggaaagacaccagtg

SEQ ID NO: 5225467 - DNA, 25 bp, Homo sapien
gagtctctaagtcaaatcggtccct

SEQ ID NO: 5225468 - DNA, 25 bp, Homo sapien
ctgcagccgcaagaaattcctgtca

SEQ ID NO: 5225469 - DNA, 25 bp, Homo sapien
tgcagccgcaagaaattcctgtcat

SEQ ID NO: 5225470 - DNA, 25 bp, Homo sapien
tactccatgtcgtagctgggcagga

SEQ ID NO: 5225471 - DNA, 25 bp, Homo sapien
tgggcaggatgatccgcccgtgctt

SEQ ID NO: 5225472 - DNA, 25 bp, Homo sapien
gtactggaactccatgcacaccggg

SEQ ID NO: 5225473 - DNA, 25 bp, Homo sapien
gatgagccgggcatactggccctct

SEQ ID NO: 5225474 - DNA, 25 bp, Homo sapien
ttgccatggcaacgtgagaaacaca

SEQ ID NO: 5225475 - DNA, 25 bp, Homo sapien
agagataggcatattctgaataaca

SEQ ID NO: 5225476 - DNA, 25 bp, Homo sapien
aaacatttgttggagaagatttcag

SEQ ID NO: 5225477 - DNA, 25 bp, Homo sapien
gaacaaagaaccaagtctgggtgta

SEQ ID NO: 5225478 - DNA, 25 bp, Homo sapien
gctgcaccagccatctgttgctgct

SEQ ID NO: 5225479 - DNA, 25 bp, Homo sapien
ctagcacatgtcctctggcaagctg

SEQ ID NO: 5225480 - DNA, 25 bp, Homo sapien
agttggctgctgcaccagccatctg

SEQ ID NO: 5225481 - DNA, 25 bp, Homo sapien
tagcacatgtcctctggcaagctgg

SEQ ID NO: 5225482 - DNA, 25 bp, Homo sapien
gtcctttccctatcactccctcgaa

SEQ ID NO: 5225483 - DNA, 25 bp, Homo sapien
tgggacatcagtgcttatccgaatg

SEQ ID NO: 5225484 - DNA, 25 bp, Homo sapien
gcttatccgaatgtcatcaatggca

SEQ ID NO: 5225485 - DNA, 25 bp, Homo sapien
aatggcaatctctccggaacgtcct

SEQ ID NO: 5225486 - DNA, 25 bp, Homo sapien
taaatccatcaaacctttccagcat

SEQ ID NO: 5225487 - DNA, 25 bp, Homo sapien
catataattttgactggcagttgct

SEQ ID NO: 5225488 - DNA, 25 bp, Homo sapien
ggcagttgctctcgtcctctagcat

SEQ ID NO: 5225489 - DNA, 25 bp, Homo sapien
gtgaaggcttccattaaatccatca

SEQ ID NO: 5225490 - DNA, 25 bp, Homo sapien
ccttcccgcatctacaggtgttgct

SEQ ID NO: 5225491 - DNA, 25 bp, Homo sapien
ttaaacaagagacagtgaggctctc

SEQ ID NO: 5225492 - DNA, 25 bp, Homo sapien
gcaggaaggtgtggcgtctcttttc

SEQ ID NO: 5225493 - DNA, 25 bp, Homo sapien
tagtgccatctagcggcaggaaggt

SEQ ID NO: 5225494 - DNA, 25 bp, Homo sapien
ttttcagcctcattgctccccgttg

SEQ ID NO: 5225495 - DNA, 25 bp, Homo sapien
ggctgaaaggtttatctgtaaccta

SEQ ID NO: 5225496 - DNA, 25 bp, Homo sapien
tgcaaggctgaaaggtttatctgta

SEQ ID NO: 5225497 - DNA, 25 bp, Homo sapien
tgctccccgttggacaatgcaaggc

SEQ ID NO: 5225498 - DNA, 25 bp, Homo sapien
tattctatgtcggtctgtcattccc

SEQ ID NO: 5225499 - DNA, 25 bp, Homo sapien
cataagcattaccttgggtcctgaa

SEQ ID NO: 5225500 - DNA, 25 bp, Homo sapien
gagagtcaggcgaaacaacatccac

SEQ ID NO: 5225501 - DNA, 25 bp, Homo sapien
gagagcaccagtgtatgcacatgaa

SEQ ID NO: 5225502 - DNA, 25 bp, Homo sapien
tatacacacggtttttcatttgtta

SEQ ID NO: 5225503 - DNA, 25 bp, Homo sapien
gacggcaccatgtttatagccactg

SEQ ID NO: 5225504 - DNA, 25 bp, Homo sapien
gaatgcacacccaggctacattgtt

SEQ ID NO: 5225505 - DNA, 25 bp, Homo sapien
agaggaaataatccatcaccttaat

SEQ ID NO: 5225506 - DNA, 25 bp, Homo sapien
aatgcagagattggccagttggcac

SEQ ID NO: 5225507 - DNA, 25 bp, Homo sapien
gcaaggaggaggattcacacactac

SEQ ID NO: 5225508 - DNA, 25 bp, Homo sapien
tcatcagacggttatgtgcaaaagc

SEQ ID NO: 5225509 - DNA, 25 bp, Homo sapien
ctctatgcccaagagacagctgtgg

SEQ ID NO: 5225510 - DNA, 25 bp, Homo sapien
gacgtgtcaggcctctgtagcagga

SEQ ID NO: 5225511 - DNA, 25 bp, Homo sapien
ggacgcttcacactctttggtggca

SEQ ID NO: 5225512 - DNA, 25 bp, Homo sapien
agaggtggcatgctccagcgaacct

SEQ ID NO: 5225513 - DNA, 25 bp, Homo sapien
gcaacacctagccttaatctggcag

SEQ ID NO: 5225514 - DNA, 25 bp, Homo sapien
aaatgcctccgaattcagatctctg

SEQ ID NO: 5225515 - DNA, 25 bp, Homo sapien
ttaaatgcctccgaattcagatctc

SEQ ID NO: 5225516 - DNA, 25 bp, Homo sapien
taaatgcctccgaattcagatctct

SEQ ID NO: 5225517 - DNA, 25 bp, Homo sapien
tagtagaagaatgtggtcacgccct

SEQ ID NO: 5225518 - DNA, 25 bp, Homo sapien
tggattgctcccacatctagaggca

SEQ ID NO: 5225519 - DNA, 25 bp, Homo sapien
tcagtaagttggcagaaaccatgtg

SEQ ID NO: 5225520 - DNA, 25 bp, Homo sapien
aggcgccgggatgttttcagtaagt

SEQ ID NO: 5225521 - DNA, 25 bp, Homo sapien
ctggtggagagacacagaagagtgt

SEQ ID NO: 5225522 - DNA, 25 bp, Homo sapien
tggtggagagacacagaagagtgtt

SEQ ID NO: 5225523 - DNA, 25 bp, Homo sapien
ggtggagagacacagaagagtgttg

SEQ ID NO: 5225524 - DNA, 25 bp, Homo sapien
taataccagtaggctgggatgggct

SEQ ID NO: 5225525 - DNA, 25 bp, Homo sapien
gtaataccagtaggctgggatgggc

SEQ ID NO: 5225526 - DNA, 25 bp, Homo sapien
tacgtaataccagtaggctgggatg

SEQ ID NO: 5225527 - DNA, 25 bp, Homo sapien
acgtaataccagtaggctgggatgg

SEQ ID NO: 5225528 - DNA, 25 bp, Homo sapien
taatggttagggtgggctccaccgc

SEQ ID NO: 5225529 - DNA, 25 bp, Homo sapien
cagtgcgagccacggtcttgctcta

SEQ ID NO: 5225530 - DNA, 25 bp, Homo sapien
tcttggccgcatagcggaaccggtg

SEQ ID NO: 5225531 - DNA, 25 bp, Homo sapien
aggtgatggagtgatcggtcttctt

SEQ ID NO: 5225532 - DNA, 25 bp, Homo sapien
gttccgcagacacccagtggctgtt

SEQ ID NO: 5225533 - DNA, 25 bp, Homo sapien
tgagagttcacacagaaactaggcg

SEQ ID NO: 5225534 - DNA, 25 bp, Homo sapien
tcggatagtccaagatgcagcatta

SEQ ID NO: 5225535 - DNA, 25 bp, Homo sapien
taccccaggagaagtaacataagag

SEQ ID NO: 5225536 - DNA, 25 bp, Homo sapien
tattttgacacacaggcaactgagc

SEQ ID NO: 5225537 - DNA, 25 bp, Homo sapien
tgtggacagccgaggtaaaagccct

SEQ ID NO: 5225538 - DNA, 25 bp, Homo sapien
gagagcaccgttctttcgggaggat

SEQ ID NO: 5225539 - DNA, 25 bp, Homo sapien
tcaatcatttcgcaggcatgcctgg

SEQ ID NO: 5225540 - DNA, 25 bp, Homo sapien
acacgagttccgctttcaacctttg

SEQ ID NO: 5225541 - DNA, 25 bp, Homo sapien
gagttccgctttcaacctttgtgct

SEQ ID NO: 5225542 - DNA, 25 bp, Homo sapien
gttccgctttcaacctttgtgctcc

SEQ ID NO: 5225543 - DNA, 25 bp, Homo sapien
cacccacacgagttccgctttcaac

SEQ ID NO: 5225544 - DNA, 25 bp, Homo sapien
gagaacattttatcacaggagatca

SEQ ID NO: 5225545 - DNA, 25 bp, Homo sapien
aaaaagggtaaaatgatgctaatga

SEQ ID NO: 5225546 - DNA, 25 bp, Homo sapien
ttgagaacattttatcacaggagat

SEQ ID NO: 5225547 - DNA, 25 bp, Homo sapien
tgatgctaatgattttgagaacatt

SEQ ID NO: 5225548 - DNA, 25 bp, Homo sapien
actggctggaaaggggtgaatgtgg

SEQ ID NO: 5225549 - DNA, 25 bp, Homo sapien
tggaaaggggtgaatgtggcattga

SEQ ID NO: 5225550 - DNA, 25 bp, Homo sapien
catagatcactggctggaaaggggt

SEQ ID NO: 5225551 - DNA, 25 bp, Homo sapien
ggctggaaaggggtgaatgtggcat

SEQ ID NO: 5225552 - DNA, 25 bp, Homo sapien
cttggaggctagaatgccatcttgc

SEQ ID NO: 5225553 - DNA, 25 bp, Homo sapien
gccaaggatgtgatgaattcttgga

SEQ ID NO: 5225554 - DNA, 25 bp, Homo sapien
cttgcttttagggatcttgtttctg

SEQ ID NO: 5225555 - DNA, 25 bp, Homo sapien
gacttctgggccaaatcctatgctt

SEQ ID NO: 5225556 - DNA, 25 bp, Homo sapien
cagaacactggataagaatatgtga

SEQ ID NO: 5225557 - DNA, 25 bp, Homo sapien
tttccaacaattaattggtttgatg

SEQ ID NO: 5225558 - DNA, 25 bp, Homo sapien
tcttcaccagtaaaagaggcagaac

SEQ ID NO: 5225559 - DNA, 25 bp, Homo sapien
gatgggctgctcatatgtcttaaca

SEQ ID NO: 5225560 - DNA, 25 bp, Homo sapien
tgccaagaccccacttaaaagattg

SEQ ID NO: 5225561 - DNA, 25 bp, Homo sapien
cagggatcaaatcgagcttgtgaaa

SEQ ID NO: 5225562 - DNA, 25 bp, Homo sapien
catgtttaaagcacagcaagtggca

SEQ ID NO: 5225563 - DNA, 25 bp, Homo sapien
taagggatgcacaaaacaacttgcc

SEQ ID NO: 5225564 - DNA, 25 bp, Homo sapien
tgaactgagcattgatccatcactg

SEQ ID NO: 5225565 - DNA, 25 bp, Homo sapien
catgatctgaactgagcattgatcc

SEQ ID NO: 5225566 - DNA, 25 bp, Homo sapien
gagcattgatccatcactgtcacat

SEQ ID NO: 5225567 - DNA, 25 bp, Homo sapien
ccatcactgtcacatttgaaattca

SEQ ID NO: 5225568 - DNA, 25 bp, Homo sapien
tcataggcacgcatctcagtgggca

SEQ ID NO: 5225569 - DNA, 25 bp, Homo sapien
ggcagggaggcaatctttacgagaa

SEQ ID NO: 5225570 - DNA, 25 bp, Homo sapien
tcaagacagccccagtgaatgtgta

SEQ ID NO: 5225571 - DNA, 25 bp, Homo sapien
tggcaggcagctagagaatcacctc

SEQ ID NO: 5225572 - DNA, 25 bp, Homo sapien
tctctcatgtatttctgggatgtcc

SEQ ID NO: 5225573 - DNA, 25 bp, Homo sapien
ctctcatgtatttctgggatgtcca

SEQ ID NO: 5225574 - DNA, 25 bp, Homo sapien
tctctctcatgtatttctgggatgt

SEQ ID NO: 5225575 - DNA, 25 bp, Homo sapien
ctctctcatgtatttctgggatgtc

SEQ ID NO: 5225576 - DNA, 25 bp, Homo sapien
tagagctcgaagttgtagttctcca

SEQ ID NO: 5225577 - DNA, 25 bp, Homo sapien
cccgagtaggaacaggtgcagtaga

SEQ ID NO: 5225578 - DNA, 25 bp, Homo sapien
tgcttaaggccatcgtagagctcga

SEQ ID NO: 5225579 - DNA, 25 bp, Homo sapien
ggaggacgcccagtgagctcatggc

SEQ ID NO: 5225580 - DNA, 25 bp, Homo sapien
tctagggctatgactaccactcggg

SEQ ID NO: 5225581 - DNA, 25 bp, Homo sapien
gacaaatgaaatcgtgggtgaccac

SEQ ID NO: 5225582 - DNA, 25 bp, Homo sapien
caccgcggtcctaggagggtaatca

SEQ ID NO: 5225583 - DNA, 25 bp, Homo sapien
tgccgagtgccaagatcagctgtga

SEQ ID NO: 5225584 - DNA, 25 bp, Homo sapien
tgcttctactgtgggccgaactcag

SEQ ID NO: 5225585 - DNA, 25 bp, Homo sapien
gaaacagggctagactttggagaac

SEQ ID NO: 5225586 - DNA, 25 bp, Homo sapien
tgaacactgcgcatcatgggagggt

SEQ ID NO: 5225587 - DNA, 25 bp, Homo sapien
tcaggaggagccctaaagctaagcc

SEQ ID NO: 5225588 - DNA, 25 bp, Homo sapien
ttcccaaagggaatgactcaaggag

SEQ ID NO: 5225589 - DNA, 25 bp, Homo sapien
cctggccaagtcaaaattgggccca

SEQ ID NO: 5225590 - DNA, 25 bp, Homo sapien
tcagctagcctacccacagataaag

SEQ ID NO: 5225591 - DNA, 25 bp, Homo sapien
taaagataacaaacacaccaaggtg

SEQ ID NO: 5225592 - DNA, 25 bp, Homo sapien
ttattccttggaccctcatccctgt

SEQ ID NO: 5225593 - DNA, 25 bp, Homo sapien
cttattccttggaccctcatccctg

SEQ ID NO: 5225594 - DNA, 25 bp, Homo sapien
gcttattccttggaccctcatccct

SEQ ID NO: 5225595 - DNA, 25 bp, Homo sapien
tcatccctgtcaactcccctgcccc

SEQ ID NO: 5225596 - DNA, 25 bp, Homo sapien
tgaatggtcgaatacctctaactgc

SEQ ID NO: 5225597 - DNA, 25 bp, Homo sapien
aatggtcgaatacctctaactgcaa

SEQ ID NO: 5225598 - DNA, 25 bp, Homo sapien
ggtcgaatacctctaactgcaaacc

SEQ ID NO: 5225599 - DNA, 25 bp, Homo sapien
cagtgaatggtcgaatacctctaac

SEQ ID NO: 5225600 - DNA, 25 bp, Homo sapien
aagctctcaagttcccgtgatctgg

SEQ ID NO: 5225601 - DNA, 25 bp, Homo sapien
aaagctctcaagttcccgtgatctg

SEQ ID NO: 5225602 - DNA, 25 bp, Homo sapien
agctctcaagttcccgtgatctggc

SEQ ID NO: 5225603 - DNA, 25 bp, Homo sapien
tccagcccttctcctttgttgatca

SEQ ID NO: 5225604 - DNA, 25 bp, Homo sapien
catctccagcccttctcctttgttg

SEQ ID NO: 5225605 - DNA, 25 bp, Homo sapien
ccagcccttctcctttgttgatcat

SEQ ID NO: 5225606 - DNA, 25 bp, Homo sapien
tctccagcccttctcctttgttgat

SEQ ID NO: 5225607 - DNA, 25 bp, Homo sapien
ctgcatccagatgggtcctgttttc

SEQ ID NO: 5225608 - DNA, 25 bp, Homo sapien
catccagatgggtcctgttttcttc

SEQ ID NO: 5225609 - DNA, 25 bp, Homo sapien
acaccaccaacgtcacaggggcaaa

SEQ ID NO: 5225610 - DNA, 25 bp, Homo sapien
cccatcaacaccaccaacgtcacag

SEQ ID NO: 5225611 - DNA, 25 bp, Homo sapien
cagggcctcaggtcagggtttgaac

SEQ ID NO: 5225612 - DNA, 25 bp, Homo sapien
tccactggtgaagggcgttctgcag

SEQ ID NO: 5225613 - DNA, 25 bp, Homo sapien
cagtgtgcacgtgagcctgacaggg

SEQ ID NO: 5225614 - DNA, 25 bp, Homo sapien
ggcctaggcacctcagtgtgcacgt

SEQ ID NO: 5225615 - DNA, 25 bp, Homo sapien
gggtccatgcctgaacacagctgcc

SEQ ID NO: 5225616 - DNA, 25 bp, Homo sapien
tcaagggtaaagaagggtccatgcc

SEQ ID NO: 5225617 - DNA, 25 bp, Homo sapien
cagactgaacggcactgtttctggg

SEQ ID NO: 5225618 - DNA, 25 bp, Homo sapien
gaggctgttagagtctcaagggtaa

SEQ ID NO: 5225619 - DNA, 25 bp, Homo sapien
cagacagttctgagaagcctgaggg

SEQ ID NO: 5225620 - DNA, 25 bp, Homo sapien
tcctggccctgcagacagttctgag

SEQ ID NO: 5225621 - DNA, 25 bp, Homo sapien
aattagtggggctatgctccaaacc

SEQ ID NO: 5225622 - DNA, 25 bp, Homo sapien
tccaaaccacggcatcctggccctg

SEQ ID NO: 5225623 - DNA, 25 bp, Homo sapien
cacgtggtcaatcgtaagaaggggt

SEQ ID NO: 5225624 - DNA, 25 bp, Homo sapien
ctagccacgtggtcaatcgtaagaa

SEQ ID NO: 5225625 - DNA, 25 bp, Homo sapien
gccacgtggtcaatcgtaagaaggg

SEQ ID NO: 5225626 - DNA, 25 bp, Homo sapien
tagccacgtggtcaatcgtaagaag

SEQ ID NO: 5225627 - DNA, 25 bp, Homo sapien
tcgtctgagtcgcacgcatgagcat

SEQ ID NO: 5225628 - DNA, 25 bp, Homo sapien
aaggctatcgtctgagtcgcacgca

SEQ ID NO: 5225629 - DNA, 25 bp, Homo sapien
gctatcgtctgagtcgcacgcatga

SEQ ID NO: 5225630 - DNA, 25 bp, Homo sapien
gggacaaggctatcgtctgagtcgc

SEQ ID NO: 5225631 - DNA, 25 bp, Homo sapien
aatgctggtacaattaggcatctgg

SEQ ID NO: 5225632 - DNA, 25 bp, Homo sapien
tgggtgcaaatgctggtacaattag

SEQ ID NO: 5225633 - DNA, 25 bp, Homo sapien
gcaaatgctggtacaattaggcatc

SEQ ID NO: 5225634 - DNA, 25 bp, Homo sapien
ctggtacaattaggcatctgggcac

SEQ ID NO: 5225635 - DNA, 25 bp, Homo sapien
tgtttcgtgctgcacaatgagctgt

SEQ ID NO: 5225636 - DNA, 25 bp, Homo sapien
cacaatgagctgttcaggcggtttc

SEQ ID NO: 5225637 - DNA, 25 bp, Homo sapien
gcacctgttgtttcgtgctgcacaa

SEQ ID NO: 5225638 - DNA, 25 bp, Homo sapien
tgttgtttcgtgctgcacaatgagc

SEQ ID NO: 5225639 - DNA, 25 bp, Homo sapien
gcaacaactaggttccccgtcagtg

SEQ ID NO: 5225640 - DNA, 25 bp, Homo sapien
cagtctctagcacagcttccatgct

SEQ ID NO: 5225641 - DNA, 25 bp, Homo sapien
tagcacagcttccatgctggcaaca

SEQ ID NO: 5225642 - DNA, 25 bp, Homo sapien
caacaactaggttccccgtcagtgt

SEQ ID NO: 5225643 - DNA, 25 bp, Homo sapien
cgggcctctcagtggcgagaggtgg

SEQ ID NO: 5225644 - DNA, 25 bp, Homo sapien
acactgagtgttttgggctccttag

SEQ ID NO: 5225645 - DNA, 25 bp, Homo sapien
cctggccgtgcatttgactttaaaa

SEQ ID NO: 5225646 - DNA, 25 bp, Homo sapien
gctccttaggaaggcacctgtccag

SEQ ID NO: 5225647 - DNA, 25 bp, Homo sapien
aacaaatgcatcaggcccctgcatc

SEQ ID NO: 5225648 - DNA, 25 bp, Homo sapien
caaatgcatcaggcccctgcatcat

SEQ ID NO: 5225649 - DNA, 25 bp, Homo sapien
gaaacaaatgcatcaggcccctgca

SEQ ID NO: 5225650 - DNA, 25 bp, Homo sapien
agaaacaaatgcatcaggcccctgc

SEQ ID NO: 5225651 - DNA, 25 bp, Homo sapien
tttacatggagtgtggcaggttctc

SEQ ID NO: 5225652 - DNA, 25 bp, Homo sapien
tgcccttcctgtaatagaccatggt

SEQ ID NO: 5225653 - DNA, 25 bp, Homo sapien
catgggctcccataaggtgctttac

SEQ ID NO: 5225654 - DNA, 25 bp, Homo sapien
caaatggactcccataacatgggct

SEQ ID NO: 5225655 - DNA, 25 bp, Homo sapien
tctcttctgtttctggtctgccgca

SEQ ID NO: 5225656 - DNA, 25 bp, Homo sapien
cttctgtttctggtctgccgcaaac

SEQ ID NO: 5225657 - DNA, 25 bp, Homo sapien
gtgtctcttctgtttctggtctgcc

SEQ ID NO: 5225658 - DNA, 25 bp, Homo sapien
tcttctgtttctggtctgccgcaaa

SEQ ID NO: 5225659 - DNA, 25 bp, Homo sapien
tagaaaataacaacagatttgtaat

SEQ ID NO: 5225660 - DNA, 25 bp, Homo sapien
gaaaataacaacagatttgtaatta

SEQ ID NO: 5225661 - DNA, 25 bp, Homo sapien
agaaaataacaacagatttgtaatt

SEQ ID NO: 5225662 - DNA, 25 bp, Homo sapien
ggtgagcctagcaggtgttcgaatc

SEQ ID NO: 5225663 - DNA, 25 bp, Homo sapien
tgttcgaatcacatccgcggattgg

SEQ ID NO: 5225664 - DNA, 25 bp, Homo sapien
aggtgtgagtcagatagatcctgga

SEQ ID NO: 5225665 - DNA, 25 bp, Homo sapien
tgctgttccccttaaggtgtgagtc

SEQ ID NO: 5225666 - DNA, 25 bp, Homo sapien
aggtgtgggagcagttctttccgtt

SEQ ID NO: 5225667 - DNA, 25 bp, Homo sapien
tctatagccttcttgactgtttctc

SEQ ID NO: 5225668 - DNA, 25 bp, Homo sapien
ccatctgggcttaagtttggacagc

SEQ ID NO: 5225669 - DNA, 25 bp, Homo sapien
tgggagcagttctttccgttgggac

SEQ ID NO: 5225670 - DNA, 25 bp, Homo sapien
tctagctcggattccaggcattgga

SEQ ID NO: 5225671 - DNA, 25 bp, Homo sapien
ttgttcctactggtgttgtccctgt

SEQ ID NO: 5225672 - DNA, 25 bp, Homo sapien
cactgctttgatctgaattttgttc

SEQ ID NO: 5225673 - DNA, 25 bp, Homo sapien
agttctggtgtaggcttccactgct

SEQ ID NO: 5225674 - DNA, 25 bp, Homo sapien
gcagtgaagcgggatctgcagacac

SEQ ID NO: 5225675 - DNA, 25 bp, Homo sapien
gaagcgggatctgcagacacacttc

SEQ ID NO: 5225676 - DNA, 25 bp, Homo sapien
gtgaagcgggatctgcagacacact

SEQ ID NO: 5225677 - DNA, 25 bp, Homo sapien
tggagttggcagtgaagcgggatct

SEQ ID NO: 5225678 - DNA, 25 bp, Homo sapien
ccctggcataaggtaatctggctat

SEQ ID NO: 5225679 - DNA, 25 bp, Homo sapien
aataagtaaatagaaggacgtctgg

SEQ ID NO: 5225680 - DNA, 25 bp, Homo sapien
gtggctccctggcataaggtaatct

SEQ ID NO: 5225681 - DNA, 25 bp, Homo sapien
aagtaaatagaaggacgtctggctc

SEQ ID NO: 5225682 - DNA, 25 bp, Homo sapien
tgtaaacttggattttgcagaaagc

SEQ ID NO: 5225683 - DNA, 25 bp, Homo sapien
gaagggttgcaaatgtatgattagt

SEQ ID NO: 5225684 - DNA, 25 bp, Homo sapien
gcccatcatgctagctgtgggcaca

SEQ ID NO: 5225685 - DNA, 25 bp, Homo sapien
gccctaaacttgtggaatctgcata

SEQ ID NO: 5225686 - DNA, 25 bp, Homo sapien
ggggcttcttgtatccttctactgc

SEQ ID NO: 5225687 - DNA, 25 bp, Homo sapien
tccttctactgcacatcagcgccat

SEQ ID NO: 5225688 - DNA, 25 bp, Homo sapien
cttcttgtatccttctactgcacat

SEQ ID NO: 5225689 - DNA, 25 bp, Homo sapien
tcacaggggcttcttgtatccttct

SEQ ID NO: 5225690 - DNA, 25 bp, Homo sapien
tgtaagtcttctgtccagaccttgg

SEQ ID NO: 5225691 - DNA, 25 bp, Homo sapien
tgaatttttggacctgtaagtcttc

SEQ ID NO: 5225692 - DNA, 25 bp, Homo sapien
ctgtccagaccttggaccgtgaaaa

SEQ ID NO: 5225693 - DNA, 25 bp, Homo sapien
aatgccacttttgaatgtctcttgg

SEQ ID NO: 5225694 - DNA, 25 bp, Homo sapien
agcagctctgggttacaaccttgaa

SEQ ID NO: 5225695 - DNA, 25 bp, Homo sapien
accttgaatgagagaactgcaggca

SEQ ID NO: 5225696 - DNA, 25 bp, Homo sapien
tcagtgtgtacttgctgccagcagc

SEQ ID NO: 5225697 - DNA, 25 bp, Homo sapien
actgcaggcatcttgctgggtcggc

SEQ ID NO: 5225698 - DNA, 25 bp, Homo sapien
attattcccaggttgacaatctcag

SEQ ID NO: 5225699 - DNA, 25 bp, Homo sapien
tattcccaggttgacaatctcagag

SEQ ID NO: 5225700 - DNA, 25 bp, Homo sapien
ttcccaggttgacaatctcagagct

SEQ ID NO: 5225701 - DNA, 25 bp, Homo sapien
tcccaggttgacaatctcagagctg

SEQ ID NO: 5225702 - DNA, 25 bp, Homo sapien
tgatgactgggatggctcacatggc

SEQ ID NO: 5225703 - DNA, 25 bp, Homo sapien
tacgcttaagattttgcaggtcagg

SEQ ID NO: 5225704 - DNA, 25 bp, Homo sapien
gtcattgttctccttccacaaggca

SEQ ID NO: 5225705 - DNA, 25 bp, Homo sapien
ctggtgccttggttgcaacagctgg

SEQ ID NO: 5225706 - DNA, 25 bp, Homo sapien
ctttcggatgccacagtcagctctg

SEQ ID NO: 5225707 - DNA, 25 bp, Homo sapien
tctttcggatgccacagtcagctct

SEQ ID NO: 5225708 - DNA, 25 bp, Homo sapien
ttgcgtatctttcggatgccacagt

SEQ ID NO: 5225709 - DNA, 25 bp, Homo sapien
gcttttccttgcgtatctttcggat

SEQ ID NO: 5225710 - DNA, 25 bp, Homo sapien
ttagggcatcgctcaaatgctggca

SEQ ID NO: 5225711 - DNA, 25 bp, Homo sapien
gcttcgagagagtctgcctggctca

SEQ ID NO: 5225712 - DNA, 25 bp, Homo sapien
gatcctggatgcgaggagtcctttg

SEQ ID NO: 5225713 - DNA, 25 bp, Homo sapien
tgttccttcagctgaacctcccaag

SEQ ID NO: 5225714 - DNA, 25 bp, Homo sapien
tttagaacagtacgcgaaggaagag

SEQ ID NO: 5225715 - DNA, 25 bp, Homo sapien
cagtacgcgaaggaagagattttct

SEQ ID NO: 5225716 - DNA, 25 bp, Homo sapien
cccactgagtttagaacagtacgcg

SEQ ID NO: 5225717 - DNA, 25 bp, Homo sapien
ctgcaaagagaacccactgagttta

SEQ ID NO: 5225718 - DNA, 25 bp, Homo sapien
cctagtaagacttgggactgaaaga

SEQ ID NO: 5225719 - DNA, 25 bp, Homo sapien
tgggaaccgatccaagactgaagct

SEQ ID NO: 5225720 - DNA, 25 bp, Homo sapien
gttcattatacctcccaggccgcag

SEQ ID NO: 5225721 - DNA, 25 bp, Homo sapien
taaagaagcgtcaaacctagtaaga

SEQ ID NO: 5225722 - DNA, 25 bp, Homo sapien
ggaatgaaactcgacagcctctcag

SEQ ID NO: 5225723 - DNA, 25 bp, Homo sapien
gaaaccacatttcggcatctgttac

SEQ ID NO: 5225724 - DNA, 25 bp, Homo sapien
catctgttacccaccaatgccggaa

SEQ ID NO: 5225725 - DNA, 25 bp, Homo sapien
gcccatttgtcaagcgccagcaggt

SEQ ID NO: 5225726 - DNA, 25 bp, Homo sapien
ggctcaggagggcatacccacctag

SEQ ID NO: 5225727 - DNA, 25 bp, Homo sapien
tcaggagggcatacccacctagcca

SEQ ID NO: 5225728 - DNA, 25 bp, Homo sapien
agcttcactacccaacattttcctg

SEQ ID NO: 5225729 - DNA, 25 bp, Homo sapien
cccttgaccaaatattggccttcta

SEQ ID NO: 5225730 - DNA, 25 bp, Homo sapien
tctctaggcaaatattgagctgggt

SEQ ID NO: 5225731 - DNA, 25 bp, Homo sapien
cagtttgggtcggtgttgagattta

SEQ ID NO: 5225732 - DNA, 25 bp, Homo sapien
gctgggtgaagtttcggtcagttac

SEQ ID NO: 5225733 - DNA, 25 bp, Homo sapien
ggtcagttacatccttctcagtcaa

SEQ ID NO: 5225734 - DNA, 25 bp, Homo sapien
ttcttctctataagagagttgtggt

SEQ ID NO: 5225735 - DNA, 25 bp, Homo sapien
aaaactttcttctctataagagagt

SEQ ID NO: 5225736 - DNA, 25 bp, Homo sapien
taagagagttgtggttcccagtgat

SEQ ID NO: 5225737 - DNA, 25 bp, Homo sapien
tctctataagagagttgtggttccc

SEQ ID NO: 5225738 - DNA, 25 bp, Homo sapien
cagagcattccccagagtgtctttc

SEQ ID NO: 5225739 - DNA, 25 bp, Homo sapien
cacagttataggagtctcatgtgac

SEQ ID NO: 5225740 - DNA, 25 bp, Homo sapien
tcatacacagttggtggtctcagaa

SEQ ID NO: 5225741 - DNA, 25 bp, Homo sapien
agagcattccctggttgagtacttt

SEQ ID NO: 5225742 - DNA, 25 bp, Homo sapien
ctcttctgtcgttgtgtccatcacg

SEQ ID NO: 5225743 - DNA, 25 bp, Homo sapien
gccgtggcctcgctgtgttttccct

SEQ ID NO: 5225744 - DNA, 25 bp, Homo sapien
cattgtaactttcctagccgtggcc

SEQ ID NO: 5225745 - DNA, 25 bp, Homo sapien
ctccgaggtcttcctggcacacagt

SEQ ID NO: 5225746 - DNA, 25 bp, Homo sapien
ttccagggtctctcggacagaagca

SEQ ID NO: 5225747 - DNA, 25 bp, Homo sapien
ggaaaacctttcagatcatcggaac

SEQ ID NO: 5225748 - DNA, 25 bp, Homo sapien
cgcacaacttgagaatgttccaggg

SEQ ID NO: 5225749 - DNA, 25 bp, Homo sapien
tggccacactagactgaagatttga

SEQ ID NO: 5225750 - DNA, 25 bp, Homo sapien
ttgtaagagttttccatgcagacac

SEQ ID NO: 5225751 - DNA, 25 bp, Homo sapien
aagagttttccatgcagacactgtg

SEQ ID NO: 5225752 - DNA, 25 bp, Homo sapien
gtaagagttttccatgcagacactg

SEQ ID NO: 5225753 - DNA, 25 bp, Homo sapien
acttgtaagagttttccatgcagac

SEQ ID NO: 5225754 - DNA, 25 bp, Homo sapien
tctagctcccgatgaggcataaaat

SEQ ID NO: 5225755 - DNA, 25 bp, Homo sapien
gaacttgtagcatgggagagagaaa

SEQ ID NO: 5225756 - DNA, 25 bp, Homo sapien
tgaacttgtagcatgggagagagaa

SEQ ID NO: 5225757 - DNA, 25 bp, Homo sapien
aagggtttcatttctagctcccgat

SEQ ID NO: 5225758 - DNA, 25 bp, Homo sapien
ggcagggatgtctttatagttagca

SEQ ID NO: 5225759 - DNA, 25 bp, Homo sapien
tagttagcataatagatctgattag

SEQ ID NO: 5225760 - DNA, 25 bp, Homo sapien
acagggaatccattaggcttggcaa

SEQ ID NO: 5225761 - DNA, 25 bp, Homo sapien
ttaggcttggcaatttgatttcaac

SEQ ID NO: 5225762 - DNA, 25 bp, Homo sapien
ctgaaaaagtacgtttcttctgcat

SEQ ID NO: 5225763 - DNA, 25 bp, Homo sapien
ggatgggattgcaaagctgagctca

SEQ ID NO: 5225764 - DNA, 25 bp, Homo sapien
tgtgtcaagtgtgtcaaaccgtctc

SEQ ID NO: 5225765 - DNA, 25 bp, Homo sapien
gctgagctcaaaggcatcaatgtgc

SEQ ID NO: 5225766 - DNA, 25 bp, Homo sapien
gatgccgtttttcactcccagaatg

SEQ ID NO: 5225767 - DNA, 25 bp, Homo sapien
tgacgtgcagtcacgaaagctggtg

SEQ ID NO: 5225768 - DNA, 25 bp, Homo sapien
ggggaacccgctctcctagaatgtg

SEQ ID NO: 5225769 - DNA, 25 bp, Homo sapien
gacacctaagcacccagcgctgagt

SEQ ID NO: 5225770 - DNA, 25 bp, Homo sapien
gagttctccccagcttgcatgtctg

SEQ ID NO: 5225771 - DNA, 25 bp, Homo sapien
caggctggatgtagagtgcgacatc

SEQ ID NO: 5225772 - DNA, 25 bp, Homo sapien
cactctgcaggctggatgtagagtg

SEQ ID NO: 5225773 - DNA, 25 bp, Homo sapien
actctgcaggctggatgtagagtgc

SEQ ID NO: 5225774 - DNA, 25 bp, Homo sapien
tggatgtagagtgcgacatccactc

SEQ ID NO: 5225775 - DNA, 25 bp, Homo sapien
actcagggtgagtgacaagcgtggc

SEQ ID NO: 5225776 - DNA, 25 bp, Homo sapien
tcagggtgagtgacaagcgtggcag

SEQ ID NO: 5225777 - DNA, 25 bp, Homo sapien
tcactcagggtgagtgacaagcgtg

SEQ ID NO: 5225778 - DNA, 25 bp, Homo sapien
ctcagggtgagtgacaagcgtggca

SEQ ID NO: 5225779 - DNA, 25 bp, Homo sapien
ttctaggaaagaacagggcggccag

SEQ ID NO: 5225780 - DNA, 25 bp, Homo sapien
ctgtgtcagtgtggtttgagtctgg

SEQ ID NO: 5225781 - DNA, 25 bp, Homo sapien
gggaggaatcggcatgtaagaagtc

SEQ ID NO: 5225782 - DNA, 25 bp, Homo sapien
aggcatgccactgagcatgttattc

SEQ ID NO: 5225783 - DNA, 25 bp, Homo sapien
ctcctgccatgtcctctcttaacat

SEQ ID NO: 5225784 - DNA, 25 bp, Homo sapien
actgcggttcattaggtgctctgtg

SEQ ID NO: 5225785 - DNA, 25 bp, Homo sapien
tgtggaaattctagcacactgcggt

SEQ ID NO: 5225786 - DNA, 25 bp, Homo sapien
attaggtgctctgtgatagcggctg

SEQ ID NO: 5225787 - DNA, 25 bp, Homo sapien
ttctagcacactgcggttcattagg

SEQ ID NO: 5225788 - DNA, 25 bp, Homo sapien
agagcacggtcgtgcttcgtgcttg

SEQ ID NO: 5225789 - DNA, 25 bp, Homo sapien
cggtcgtgcttcgtgcttgggtttt

SEQ ID NO: 5225790 - DNA, 25 bp, Homo sapien
cgctgacacaggagtagccgaagcc

SEQ ID NO: 5225791 - DNA, 25 bp, Homo sapien
tctctgtggtgggtttatgttgcgc

SEQ ID NO: 5225792 - DNA, 25 bp, Homo sapien
cacacgatggggttgatcatggctg

SEQ ID NO: 5225793 - DNA, 25 bp, Homo sapien
caagggcttgccgttgacaatgatg

SEQ ID NO: 5225794 - DNA, 25 bp, Homo sapien
ccgttgacaatgatgttgaaacaca

SEQ ID NO: 5225795 - DNA, 25 bp, Homo sapien
caatgatgttgaaacacacgatggg

SEQ ID NO: 5225796 - DNA, 25 bp, Homo sapien
ctctatgcctcaggatgaagttttc

SEQ ID NO: 5225797 - DNA, 25 bp, Homo sapien
gaactctatgcctcaggatgaagtt

SEQ ID NO: 5225798 - DNA, 25 bp, Homo sapien
caggaactctatgcctcaggatgaa

SEQ ID NO: 5225799 - DNA, 25 bp, Homo sapien
gccaggaactctatgcctcaggatg

SEQ ID NO: 5225800 - DNA, 25 bp, Homo sapien
gctggtcccgccgttcctggaccca

SEQ ID NO: 5225801 - DNA, 25 bp, Homo sapien
cagagcatccacagatgggcggtgt

SEQ ID NO: 5225802 - DNA, 25 bp, Homo sapien
tgagtagagtgatctgaacagagca

SEQ ID NO: 5225803 - DNA, 25 bp, Homo sapien
gcggtgtttggacattcagaaatgg

SEQ ID NO: 5225804 - DNA, 25 bp, Homo sapien
ccctccctgagtagagtgatctgaa

SEQ ID NO: 5225805 - DNA, 25 bp, Homo sapien
ggcattgctgggaggaccacgtctt

SEQ ID NO: 5225806 - DNA, 25 bp, Homo sapien
catacttgtggcattgggtgcggca

SEQ ID NO: 5225807 - DNA, 25 bp, Homo sapien
tctaacaaagaaactgcacggtagc

SEQ ID NO: 5225808 - DNA, 25 bp, Homo sapien
cacggtagcaaggactagcggttct

SEQ ID NO: 5225809 - DNA, 25 bp, Homo sapien
ggtttgagccattttactgagtagc

SEQ ID NO: 5225810 - DNA, 25 bp, Homo sapien
gagttggcagcagattacatctcaa

SEQ ID NO: 5225811 - DNA, 25 bp, Homo sapien
tagcttagctggaacctgatatcag

SEQ ID NO: 5225812 - DNA, 25 bp, Homo sapien
tcctgaagactaaaatagagaggct

SEQ ID NO: 5225813 - DNA, 25 bp, Homo sapien
accttctactggtcagtctttcatc

SEQ ID NO: 5225814 - DNA, 25 bp, Homo sapien
caccaccttctactggtcagtcttt

SEQ ID NO: 5225815 - DNA, 25 bp, Homo sapien
tatagtgaagatctaggaaagctct

SEQ ID NO: 5225816 - DNA, 25 bp, Homo sapien
aagaagggagtttgtactggtgcca

SEQ ID NO: 5225817 - DNA, 25 bp, Homo sapien
ggtgaaaacagacccttatgtgtat

SEQ ID NO: 5225818 - DNA, 25 bp, Homo sapien
tactggagtatctggtggtctgaaa

SEQ ID NO: 5225819 - DNA, 25 bp, Homo sapien
gccgtgtcaaggtgtatagctatcc

SEQ ID NO: 5225820 - DNA, 25 bp, Homo sapien
atagctatcctttgctaccttgcag

SEQ ID NO: 5225821 - DNA, 25 bp, Homo sapien
gctagaagcttagttacagggtaca

SEQ ID NO: 5225822 - DNA, 25 bp, Homo sapien
gtaaaactccaactactgtagctgg

SEQ ID NO: 5225823 - DNA, 25 bp, Homo sapien
tagtaaatgccgtgtggtcagtccg

SEQ ID NO: 5225824 - DNA, 25 bp, Homo sapien
tggtcagtgggcatcatcggtcagc

SEQ ID NO: 5225825 - DNA, 25 bp, Homo sapien
tcggtcagcagtgcacgtgtaaggc

SEQ ID NO: 5225826 - DNA, 25 bp, Homo sapien
gaggtgccctgtccatacggttttc

SEQ ID NO: 5225827 - DNA, 25 bp, Homo sapien
tatcaggaatgttgctagttacagc

SEQ ID NO: 5225828 - DNA, 25 bp, Homo sapien
taaatacattttcgtttggatgccc

SEQ ID NO: 5225829 - DNA, 25 bp, Homo sapien
tctctgctttctagtaaggaggcat

SEQ ID NO: 5225830 - DNA, 25 bp, Homo sapien
tggatgcccatgatgaaagctgagg

SEQ ID NO: 5225831 - DNA, 25 bp, Homo sapien
tgtaaaaccactgcatatggaccag

SEQ ID NO: 5225832 - DNA, 25 bp, Homo sapien
gtaaaaccactgcatatggaccagc

SEQ ID NO: 5225833 - DNA, 25 bp, Homo sapien
cttaatatgtatgcctctttctgat

SEQ ID NO: 5225834 - DNA, 25 bp, Homo sapien
cccattttgacagcaaccaccgagg

SEQ ID NO: 5225835 - DNA, 25 bp, Homo sapien
tgttcagccagaatactgctggcca

SEQ ID NO: 5225836 - DNA, 25 bp, Homo sapien
gttcagccagaatactgctggccag

SEQ ID NO: 5225837 - DNA, 25 bp, Homo sapien
gtgttcagccagaatactgctggcc

SEQ ID NO: 5225838 - DNA, 25 bp, Homo sapien
gatatccacagagtgcactgtaggc

SEQ ID NO: 5225839 - DNA, 25 bp, Homo sapien
caaccacgagagcttggatgtaggg

SEQ ID NO: 5225840 - DNA, 25 bp, Homo sapien
cccattgggacttgtgtttaagagc

SEQ ID NO: 5225841 - DNA, 25 bp, Homo sapien
gatagcgatcaattccaaccacgag

SEQ ID NO: 5225842 - DNA, 25 bp, Homo sapien
tctcataaggtgaaaagagaaagct

SEQ ID NO: 5225843 - DNA, 25 bp, Homo sapien
gatatccagtttcttagcacctaaa

SEQ ID NO: 5225844 - DNA, 25 bp, Homo sapien
cagatcttaactcataaaccctttc

SEQ ID NO: 5225845 - DNA, 25 bp, Homo sapien
cgtgcccaccctgtacttttcagat

SEQ ID NO: 5225846 - DNA, 25 bp, Homo sapien
gcccagccccaatgaggatttttta

SEQ ID NO: 5225847 - DNA, 25 bp, Homo sapien
ttagacaggttggagtgtaacggtg

SEQ ID NO: 5225848 - DNA, 25 bp, Homo sapien
gacaggttggagtgtaacggtgtga

SEQ ID NO: 5225849 - DNA, 25 bp, Homo sapien
atgcccagccccaatgaggattttt

SEQ ID NO: 5225850 - DNA, 25 bp, Homo sapien
aatgatagatatccggtcatttagc

SEQ ID NO: 5225851 - DNA, 25 bp, Homo sapien
gtctgcctaagatcaaactctgttt

SEQ ID NO: 5225852 - DNA, 25 bp, Homo sapien
tcagtgctgacttccgtgaggcttc

SEQ ID NO: 5225853 - DNA, 25 bp, Homo sapien
gaggcttcgaaatgagactcatgtg

SEQ ID NO: 5225854 - DNA, 25 bp, Homo sapien
tgggcagggcagctcccgaaacaag

SEQ ID NO: 5225855 - DNA, 25 bp, Homo sapien
ggcagggcagctcccgaaacaaggt

SEQ ID NO: 5225856 - DNA, 25 bp, Homo sapien
aagtgggcagggcagctcccgaaac

SEQ ID NO: 5225857 - DNA, 25 bp, Homo sapien
gtgggcagggcagctcccgaaacaa

SEQ ID NO: 5225858 - DNA, 25 bp, Homo sapien
gacgtggttgtcagatggcttggaa

SEQ ID NO: 5225859 - DNA, 25 bp, Homo sapien
aaccaacaccggaacagatcccaag

SEQ ID NO: 5225860 - DNA, 25 bp, Homo sapien
cagatgtaggagtttcccctccttt

SEQ ID NO: 5225861 - DNA, 25 bp, Homo sapien
tggtcactgtccggtaaaaccaaca

SEQ ID NO: 5225862 - DNA, 25 bp, Homo sapien
tctggacagctccggcggagaggaa

SEQ ID NO: 5225863 - DNA, 25 bp, Homo sapien
agctccggcggagaggaagatgtag

SEQ ID NO: 5225864 - DNA, 25 bp, Homo sapien
cttctggacagctccggcggagagg

SEQ ID NO: 5225865 - DNA, 25 bp, Homo sapien
tccggcggagaggaagatgtaggga

SEQ ID NO: 5225866 - DNA, 25 bp, Homo sapien
caccaactgggggtgttattttcag

SEQ ID NO: 5225867 - DNA, 25 bp, Homo sapien
tgttattttcagcttgagtacccac

SEQ ID NO: 5225868 - DNA, 25 bp, Homo sapien
caactgggggtgttattttcagctt

SEQ ID NO: 5225869 - DNA, 25 bp, Homo sapien
gggtgttattttcagcttgagtacc

SEQ ID NO: 5225870 - DNA, 25 bp, Homo sapien
gctgctgggccgaatcccgcgccgg

SEQ ID NO: 5225871 - DNA, 25 bp, Homo sapien
ctgctgggccgaatcccgcgccggc

SEQ ID NO: 5225872 - DNA, 25 bp, Homo sapien
ctgggccgaatcccgcgccggcccg

SEQ ID NO: 5225873 - DNA, 25 bp, Homo sapien
cacatccccgggctcccgtagggcg

SEQ ID NO: 5225874 - DNA, 25 bp, Homo sapien
cccgggcggagaatgaaagggtgag

SEQ ID NO: 5225875 - DNA, 25 bp, Homo sapien
cagcccagccgagggaacagggggg

SEQ ID NO: 5225876 - DNA, 25 bp, Homo sapien
gcggcgagcgcgcttacgtgaggcc

SEQ ID NO: 5225877 - DNA, 25 bp, Homo sapien
cattgccagcgcctctcactctgat

SEQ ID NO: 5225878 - DNA, 25 bp, Homo sapien
cggcagccgagcttcctagtccatt

SEQ ID NO: 5225879 - DNA, 25 bp, Homo sapien
tgcttgacagggaaaggctctcgcc

SEQ ID NO: 5225880 - DNA, 25 bp, Homo sapien
gagcttcctagtccattgccagcgc

SEQ ID NO: 5225881 - DNA, 25 bp, Homo sapien
ctggagagtatattcagggatttcc

SEQ ID NO: 5225882 - DNA, 25 bp, Homo sapien
aataatcaccgaccctgggagcact

SEQ ID NO: 5225883 - DNA, 25 bp, Homo sapien
ccttaataatcaccgaccctgggag

SEQ ID NO: 5225884 - DNA, 25 bp, Homo sapien
tggagagtatattcagggatttccc

SEQ ID NO: 5225885 - DNA, 25 bp, Homo sapien
aaagttgtcgtttcggagggcagag

SEQ ID NO: 5225886 - DNA, 25 bp, Homo sapien
gcagctctctggtgttatgtcctcg

SEQ ID NO: 5225887 - DNA, 25 bp, Homo sapien
tcgcagtgcctgtagtggtgctgta

SEQ ID NO: 5225888 - DNA, 25 bp, Homo sapien
cctccaagatggtaggaaagttgtc

SEQ ID NO: 5225889 - DNA, 25 bp, Homo sapien
cgcgggtgtagacggccggtgtgga

SEQ ID NO: 5225890 - DNA, 25 bp, Homo sapien
tgctttctcccccaggcgcgggtgt

SEQ ID NO: 5225891 - DNA, 25 bp, Homo sapien
gccggtgtggacttttttccagaga

SEQ ID NO: 5225892 - DNA, 25 bp, Homo sapien
aatgaaaacgtttctcatgcacccc

SEQ ID NO: 5225893 - DNA, 25 bp, Homo sapien
gacagtccataggttttatttacat

SEQ ID NO: 5225894 - DNA, 25 bp, Homo sapien
tttgagaaacagacgaaagacatgt

SEQ ID NO: 5225895 - DNA, 25 bp, Homo sapien
tacaattgtcttacagcaatctgtt

SEQ ID NO: 5225896 - DNA, 25 bp, Homo sapien
tctgagagtaacatgtaacacaaat

SEQ ID NO: 5225897 - DNA, 25 bp, Homo sapien
ctgtggaaaatgacacactgtatca

SEQ ID NO: 5225898 - DNA, 25 bp, Homo sapien
tatgggcagcataacagaatttcca

SEQ ID NO: 5225899 - DNA, 25 bp, Homo sapien
tcctttctgtatgggcagcataaca

SEQ ID NO: 5225900 - DNA, 25 bp, Homo sapien
gtatcctttctgtatgggcagcata

SEQ ID NO: 5225901 - DNA, 25 bp, Homo sapien
ttttaaatccccagtgatagctgcc

SEQ ID NO: 5225902 - DNA, 25 bp, Homo sapien
attcttaataagctattttacctca

SEQ ID NO: 5225903 - DNA, 25 bp, Homo sapien
taataagctattttacctcaagaaa

SEQ ID NO: 5225904 - DNA, 25 bp, Homo sapien
tacctcaagaaaaatctaaggctgt

SEQ ID NO: 5225905 - DNA, 25 bp, Homo sapien
cctcaagaaaaatctaaggctgtct

SEQ ID NO: 5225906 - DNA, 25 bp, Homo sapien
tggaatcgatgtaaatgggtaccct

SEQ ID NO: 5225907 - DNA, 25 bp, Homo sapien
gatagcaacatgtgtaatgcaccaa

SEQ ID NO: 5225908 - DNA, 25 bp, Homo sapien
ccatttatctagtaagctttgctca

SEQ ID NO: 5225909 - DNA, 25 bp, Homo sapien
tcatcatccccagtagaacatacaa

SEQ ID NO: 5225910 - DNA, 25 bp, Homo sapien
tttgggccgagaaggtacatgatcc

SEQ ID NO: 5225911 - DNA, 25 bp, Homo sapien
tagagcacgaacctagcacttcaag

SEQ ID NO: 5225912 - DNA, 25 bp, Homo sapien
tttttggcaaagagcatagagcacg

SEQ ID NO: 5225913 - DNA, 25 bp, Homo sapien
gacaggcaccttggacactctaaac

SEQ ID NO: 5225914 - DNA, 25 bp, Homo sapien
atggtgaaactatgtctccatagtt

SEQ ID NO: 5225915 - DNA, 25 bp, Homo sapien
gaaactatgtctccatagtttcacc

SEQ ID NO: 5225916 - DNA, 25 bp, Homo sapien
agtaagtatataggctggggtggct

SEQ ID NO: 5225917 - DNA, 25 bp, Homo sapien
gcctgtgtccaactattctggagac

SEQ ID NO: 5225918 - DNA, 25 bp, Homo sapien
ccaggaagaccatgatcaggtgcca

SEQ ID NO: 5225919 - DNA, 25 bp, Homo sapien
gggcaagggagagctaacatgctcc

SEQ ID NO: 5225920 - DNA, 25 bp, Homo sapien
ccaacacatgaattgtggagacaac

SEQ ID NO: 5225921 - DNA, 25 bp, Homo sapien
tatatagtgaagcaacagctgtaca

SEQ ID NO: 5225922 - DNA, 25 bp, Homo sapien
agaaatttacttctgcccacaccgc

SEQ ID NO: 5225923 - DNA, 25 bp, Homo sapien
gatgggcgccgtctggttactgtaa

SEQ ID NO: 5225924 - DNA, 25 bp, Homo sapien
tctcgttatgaagatggttggctga

SEQ ID NO: 5225925 - DNA, 25 bp, Homo sapien
taaccgaaattaatgaagctcttgc

SEQ ID NO: 5225926 - DNA, 25 bp, Homo sapien
gacttacctattgctgatactcaaa

SEQ ID NO: 5225927 - DNA, 25 bp, Homo sapien
gatctgagactggtgattaatttac

SEQ ID NO: 5225928 - DNA, 25 bp, Homo sapien
tatagtctgagactggtgattagac

SEQ ID NO: 5225929 - DNA, 25 bp, Homo sapien
tattggcacctaaagagatactgag

SEQ ID NO: 5225930 - DNA, 25 bp, Homo sapien
ctaataagattctggctctgttacc

SEQ ID NO: 5225931 - DNA, 25 bp, Homo sapien
ttccctaataagattctggctctgt

SEQ ID NO: 5225932 - DNA, 25 bp, Homo sapien
cctaataagattctggctctgttac

SEQ ID NO: 5225933 - DNA, 25 bp, Homo sapien
tccctaataagattctggctctgtt

SEQ ID NO: 5225934 - DNA, 25 bp, Homo sapien
cctgtaccagcttttagaactgttt

SEQ ID NO: 5225935 - DNA, 25 bp, Homo sapien
aatgcccagttacctgaaattgtat

SEQ ID NO: 5225936 - DNA, 25 bp, Homo sapien
tatcctcctcagtgatacatcatga

SEQ ID NO: 5225937 - DNA, 25 bp, Homo sapien
tgtgtgctttgcctaaaatgcccag

SEQ ID NO: 5225938 - DNA, 25 bp, Homo sapien
gcccgcccctgcacccagcttattt

SEQ ID NO: 5225939 - DNA, 25 bp, Homo sapien
cccgcccctgcacccagcttatttt

SEQ ID NO: 5225940 - DNA, 25 bp, Homo sapien
gcgcccgcccctgcacccagcttat

SEQ ID NO: 5225941 - DNA, 25 bp, Homo sapien
aggcgcccgcccctgcacccagctt

SEQ ID NO: 5225942 - DNA, 25 bp, Homo sapien
gtccattgaccacgttggacagcat

SEQ ID NO: 5225943 - DNA, 25 bp, Homo sapien
tggtccattgaccacgttggacagc

SEQ ID NO: 5225944 - DNA, 25 bp, Homo sapien
tttggtccattgaccacgttggaca

SEQ ID NO: 5225945 - DNA, 25 bp, Homo sapien
tgtttggtccattgaccacgttgga

SEQ ID NO: 5225946 - DNA, 25 bp, Homo sapien
tccagacagtttagcagaacagcct

SEQ ID NO: 5225947 - DNA, 25 bp, Homo sapien
cgtggtccagacagtttagcagaac

SEQ ID NO: 5225948 - DNA, 25 bp, Homo sapien
gggtcgtcgtggtccagacagttta

SEQ ID NO: 5225949 - DNA, 25 bp, Homo sapien
acagtttagcagaacagcctccgcg

SEQ ID NO: 5225950 - DNA, 25 bp, Homo sapien
ccggctgacagagttagccgaggcc

SEQ ID NO: 5225951 - DNA, 25 bp, Homo sapien
catattgaataagcgacccggcctc

SEQ ID NO: 5225952 - DNA, 25 bp, Homo sapien
tgtcgaatgcaaggattctagtccc

SEQ ID NO: 5225953 - DNA, 25 bp, Homo sapien
ctctggtcggctgacggaaattgcc

SEQ ID NO: 5225954 - DNA, 25 bp, Homo sapien
ctgcgggtccaagttgtccttcccg

SEQ ID NO: 5225955 - DNA, 25 bp, Homo sapien
ccggagatgaccgaagacgcccggc

SEQ ID NO: 5225956 - DNA, 25 bp, Homo sapien
ctagaagcgccggagatgaccgaag

SEQ ID NO: 5225957 - DNA, 25 bp, Homo sapien
aagcgccggagatgaccgaagacgc

SEQ ID NO: 5225958 - DNA, 25 bp, Homo sapien
ggagatgaccgaagacgcccggcct

SEQ ID NO: 5225959 - DNA, 25 bp, Homo sapien
ggctcccgaagatgacgggaaccag

SEQ ID NO: 5225960 - DNA, 25 bp, Homo sapien
cacggctcccgaagatgacgggaac

SEQ ID NO: 5225961 - DNA, 25 bp, Homo sapien
ctcccgaagatgacgggaaccagcc

SEQ ID NO: 5225962 - DNA, 25 bp, Homo sapien
tccacggctcccgaagatgacggga

SEQ ID NO: 5225963 - DNA, 25 bp, Homo sapien
tatatagagacggaggcgtttccct

SEQ ID NO: 5225964 - DNA, 25 bp, Homo sapien
taaatggcccacaaattgtccatgg

SEQ ID NO: 5225965 - DNA, 25 bp, Homo sapien
catggacctttcgttgcgtttggaa

SEQ ID NO: 5225966 - DNA, 25 bp, Homo sapien
tcccacttctccacgtacgaattgg

SEQ ID NO: 5225967 - DNA, 25 bp, Homo sapien
gagcgcgcaaattgtgggcgcccca

SEQ ID NO: 5225968 - DNA, 25 bp, Homo sapien
gcgcgcaaattgtgggcgccccacg

SEQ ID NO: 5225969 - DNA, 25 bp, Homo sapien
agcgcgcaaattgtgggcgccccac

SEQ ID NO: 5225970 - DNA, 25 bp, Homo sapien
cctcgatgtagctcttgtccgccag

SEQ ID NO: 5225971 - DNA, 25 bp, Homo sapien
ggccggcagggcttttcaggtctcc

SEQ ID NO: 5225972 - DNA, 25 bp, Homo sapien
cgatgtagctcttgtccgccaggta

SEQ ID NO: 5225973 - DNA, 25 bp, Homo sapien
ccgccaggtaatcgttgagcacctg

SEQ ID NO: 5225974 - DNA, 25 bp, Homo sapien
gtcggcaggcggtgggctggacacg

SEQ ID NO: 5225975 - DNA, 25 bp, Homo sapien
ggcaggcggtgggctggacacggct

SEQ ID NO: 5225976 - DNA, 25 bp, Homo sapien
cggtgggctggacacggcttcaaat

SEQ ID NO: 5225977 - DNA, 25 bp, Homo sapien
gctggacacggcttcaaatactgcc

SEQ ID NO: 5225978 - DNA, 25 bp, Homo sapien
cagctctatacaaagatgattttac

SEQ ID NO: 5225979 - DNA, 25 bp, Homo sapien
acatcctgataaacttcgagagcag

SEQ ID NO: 5225980 - DNA, 25 bp, Homo sapien
aaatttagcttacaatatcccaaca

SEQ ID NO: 5225981 - DNA, 25 bp, Homo sapien
gcagtcttattcttcagctctatac

SEQ ID NO: 5225982 - DNA, 25 bp, Homo sapien
ccattcttagtgaactggagtccac

SEQ ID NO: 5225983 - DNA, 25 bp, Homo sapien
cagtttcagaagaatggccaaggac

SEQ ID NO: 5225984 - DNA, 25 bp, Homo sapien
caggtcaaggtcgaggcacattggc

SEQ ID NO: 5225985 - DNA, 25 bp, Homo sapien
ttccacccttgttggcagtttcaga

SEQ ID NO: 5225986 - DNA, 25 bp, Homo sapien
tatgttcaactcctcacccgacaag

SEQ ID NO: 5225987 - DNA, 25 bp, Homo sapien
tttaccctttcacatgcgcccaggt

SEQ ID NO: 5225988 - DNA, 25 bp, Homo sapien
cccgacaagcattagtaccatgtga

SEQ ID NO: 5225989 - DNA, 25 bp, Homo sapien
taaattcaaccactattgagctagt

SEQ ID NO: 5225990 - DNA, 25 bp, Homo sapien
tcatcagatccaaagaggtcaatgt

SEQ ID NO: 5225991 - DNA, 25 bp, Homo sapien
ttccacatcggcaggaccatatttg

SEQ ID NO: 5225992 - DNA, 25 bp, Homo sapien
ggcaggaccatatttgcccaaagct

SEQ ID NO: 5225993 - DNA, 25 bp, Homo sapien
cctcatcatcagatccaaagaggtc

SEQ ID NO: 5225994 - DNA, 25 bp, Homo sapien
gatatgttctttatagaagacgcca

SEQ ID NO: 5225995 - DNA, 25 bp, Homo sapien
atgttctttatagaagacgccatac

SEQ ID NO: 5225996 - DNA, 25 bp, Homo sapien
ccgatatgttctttatagaagacgc

SEQ ID NO: 5225997 - DNA, 25 bp, Homo sapien
ctggccgatatgttctttatagaag

SEQ ID NO: 5225998 - DNA, 25 bp, Homo sapien
gtcagaatttgaaaaaggcatataa

SEQ ID NO: 5225999 - DNA, 25 bp, Homo sapien
cagaatttgaaaaaggcatataaat

SEQ ID NO: 5226000 - DNA, 25 bp, Homo sapien
agtcagaatttgaaaaaggcatata

SEQ ID NO: 5226001 - DNA, 25 bp, Homo sapien
gaatttgaaaaaggcatataaatta

SEQ ID NO: 5226002 - DNA, 25 bp, Homo sapien
aaaagcaaatccatcacgaactcag

SEQ ID NO: 5226003 - DNA, 25 bp, Homo sapien
atcacgaactcagccgaaagatggt

SEQ ID NO: 5226004 - DNA, 25 bp, Homo sapien
aactcagccgaaagatggtgatttg

SEQ ID NO: 5226005 - DNA, 25 bp, Homo sapien
aatccatcacgaactcagccgaaag

SEQ ID NO: 5226006 - DNA, 25 bp, Homo sapien
aagctagtggggtcatcacaaaaaa

SEQ ID NO: 5226007 - DNA, 25 bp, Homo sapien
aaattaatccacttcagaaagctgg

SEQ ID NO: 5226008 - DNA, 25 bp, Homo sapien
gtggggtcatcacaaaaaagactgg

SEQ ID NO: 5226009 - DNA, 25 bp, Homo sapien
aattaatccacttcagaaagctggt

SEQ ID NO: 5226010 - DNA, 25 bp, Homo sapien
gtgcaagacgttcttcccttagcct

SEQ ID NO: 5226011 - DNA, 25 bp, Homo sapien
ttgattcatattgtgcaagacgttc

SEQ ID NO: 5226012 - DNA, 25 bp, Homo sapien
tttgattcatattgtgcaagacgtt

SEQ ID NO: 5226013 - DNA, 25 bp, Homo sapien
gacgttcttcccttagcctctttgc

SEQ ID NO: 5226014 - DNA, 25 bp, Homo sapien
cttacattaacatgaaatgaagtta

SEQ ID NO: 5226015 - DNA, 25 bp, Homo sapien
tgtggaggaaattacttcaaggtca

SEQ ID NO: 5226016 - DNA, 25 bp, Homo sapien
atattgacctattcaaggaatgtgg

SEQ ID NO: 5226017 - DNA, 25 bp, Homo sapien
gattacttacattaacatgaaatga

SEQ ID NO: 5226018 - DNA, 25 bp, Homo sapien
ataagaacagctgcagaccagtagc

SEQ ID NO: 5226019 - DNA, 25 bp, Homo sapien
agaggtgtttgtgttaacagtttct

SEQ ID NO: 5226020 - DNA, 25 bp, Homo sapien
agaacagctgcagaccagtagctgt

SEQ ID NO: 5226021 - DNA, 25 bp, Homo sapien
aacagctgcagaccagtagctgtgg

SEQ ID NO: 5226022 - DNA, 25 bp, Homo sapien
accctactccaagacacaaacaaat

SEQ ID NO: 5226023 - DNA, 25 bp, Homo sapien
tcaccctactccaagacacaaacaa

SEQ ID NO: 5226024 - DNA, 25 bp, Homo sapien
ttttttcaccctactccaagacaca

SEQ ID NO: 5226025 - DNA, 25 bp, Homo sapien
ttttcaccctactccaagacacaaa

SEQ ID NO: 5226026 - DNA, 25 bp, Homo sapien
tgaatgcttctgacgcactcctcta

SEQ ID NO: 5226027 - DNA, 25 bp, Homo sapien
tcacatctagtaagatggaagactt

SEQ ID NO: 5226028 - DNA, 25 bp, Homo sapien
caaggtttcacatctagtaagatgg

SEQ ID NO: 5226029 - DNA, 25 bp, Homo sapien
taatttcgccatatctgtctcatca

SEQ ID NO: 5226030 - DNA, 25 bp, Homo sapien
ccatggactgcacatagtcctcaaa

SEQ ID NO: 5226031 - DNA, 25 bp, Homo sapien
tcaactacacactgtatttgaagtt

SEQ ID NO: 5226032 - DNA, 25 bp, Homo sapien
catcttcaactacacactgtatttg

SEQ ID NO: 5226033 - DNA, 25 bp, Homo sapien
atagtcctcaaaagcagtgatctgc

SEQ ID NO: 5226034 - DNA, 25 bp, Homo sapien
ttatttaaatgccatgatccaggat

SEQ ID NO: 5226035 - DNA, 25 bp, Homo sapien
tttaaatgccatgatccaggatgga

SEQ ID NO: 5226036 - DNA, 25 bp, Homo sapien
tatttaaatgccatgatccaggatg

SEQ ID NO: 5226037 - DNA, 25 bp, Homo sapien
taaatgccatgatccaggatggatt

SEQ ID NO: 5226038 - DNA, 25 bp, Homo sapien
tgtgcacttcgagagggatgcacat

SEQ ID NO: 5226039 - DNA, 25 bp, Homo sapien
ctgcataacaaacttgggagcttat

SEQ ID NO: 5226040 - DNA, 25 bp, Homo sapien
aacaaacttgggagcttatttggag

SEQ ID NO: 5226041 - DNA, 25 bp, Homo sapien
tcttccaccaagtgtgcacttcgag

SEQ ID NO: 5226042 - DNA, 25 bp, Homo sapien
gccttggagcagttcccgccagaaa

SEQ ID NO: 5226043 - DNA, 25 bp, Homo sapien
gagtcaatgaagagcctcctgagag

SEQ ID NO: 5226044 - DNA, 25 bp, Homo sapien
tgcatgagtcaatgaagagcctcct

SEQ ID NO: 5226045 - DNA, 25 bp, Homo sapien
gccagaaatctgtttgcatgagtca

SEQ ID NO: 5226046 - DNA, 25 bp, Homo sapien
agctacatctgtccacttctgctct

SEQ ID NO: 5226047 - DNA, 25 bp, Homo sapien
gagctacatctgtccacttctgctc

SEQ ID NO: 5226048 - DNA, 25 bp, Homo sapien
ttgagctacatctgtccacttctgc

SEQ ID NO: 5226049 - DNA, 25 bp, Homo sapien
tgagctacatctgtccacttctgct

SEQ ID NO: 5226050 - DNA, 25 bp, Homo sapien
gcaacgctggcattactggttttaa

SEQ ID NO: 5226051 - DNA, 25 bp, Homo sapien
cctacacgtagatcagcaacgctgg

SEQ ID NO: 5226052 - DNA, 25 bp, Homo sapien
tgaacacagttgtatttatctggcc

SEQ ID NO: 5226053 - DNA, 25 bp, Homo sapien
tatctggcctggttaaattctgaaa

SEQ ID NO: 5226054 - DNA, 25 bp, Homo sapien
tctgtgcactttcctatgtggcttg

SEQ ID NO: 5226055 - DNA, 25 bp, Homo sapien
acctagagacagcatagaacctctg

SEQ ID NO: 5226056 - DNA, 25 bp, Homo sapien
actttcctatgtggcttgtcctatg

SEQ ID NO: 5226057 - DNA, 25 bp, Homo sapien
gagacagcatagaacctctgtgcac

SEQ ID NO: 5226058 - DNA, 25 bp, Homo sapien
ggccaaagtagctgccccagaaagt

SEQ ID NO: 5226059 - DNA, 25 bp, Homo sapien
aagatgccctagagcaagttccccg

SEQ ID NO: 5226060 - DNA, 25 bp, Homo sapien
ctttttccaagtggccaggcagcac

SEQ ID NO: 5226061 - DNA, 25 bp, Homo sapien
ttttgtaaacgcacaagtagctctg

SEQ ID NO: 5226062 - DNA, 25 bp, Homo sapien
cacgatggtcccaatactggccggg

SEQ ID NO: 5226063 - DNA, 25 bp, Homo sapien
ttagaattcattccctgacccctgg

SEQ ID NO: 5226064 - DNA, 25 bp, Homo sapien
tctccgcggcagaagtttactgaag

SEQ ID NO: 5226065 - DNA, 25 bp, Homo sapien
tcacaggaacttctcagtcaaccga

SEQ ID NO: 5226066 - DNA, 25 bp, Homo sapien
tcttgttagtcaggctgatctcaca

SEQ ID NO: 5226067 - DNA, 25 bp, Homo sapien
ttagtcaggctgatctcacactccg

SEQ ID NO: 5226068 - DNA, 25 bp, Homo sapien
tttcatcttgttagtcaggctgatc

SEQ ID NO: 5226069 - DNA, 25 bp, Homo sapien
tagtcaggctgatctcacactccgg

SEQ ID NO: 5226070 - DNA, 25 bp, Homo sapien
tatccagtggagaatcggacttcac

SEQ ID NO: 5226071 - DNA, 25 bp, Homo sapien
tttgggtatccagtggagaatcgga

SEQ ID NO: 5226072 - DNA, 25 bp, Homo sapien
ggagaatcggacttcacatccagtg

SEQ ID NO: 5226073 - DNA, 25 bp, Homo sapien
cttcacatccagtgtctgaacaagc

SEQ ID NO: 5226074 - DNA, 25 bp, Homo sapien
tcaatggcctgaaagacactgcttc

SEQ ID NO: 5226075 - DNA, 25 bp, Homo sapien
tacacacgtccaagaggttcagaag

SEQ ID NO: 5226076 - DNA, 25 bp, Homo sapien
caatggtctggtaggcaactcgggt

SEQ ID NO: 5226077 - DNA, 25 bp, Homo sapien
ggcatgaatagcttccaacgtggca

SEQ ID NO: 5226078 - DNA, 25 bp, Homo sapien
cccgcggagccagaaataggcgact

SEQ ID NO: 5226079 - DNA, 25 bp, Homo sapien
ctgcggtccggaggcgagaagcggc

SEQ ID NO: 5226080 - DNA, 25 bp, Homo sapien
gcgcgggagcgcgtctctcaggacg

SEQ ID NO: 5226081 - DNA, 25 bp, Homo sapien
tcacgcaggcatccaaggcaacgtg

SEQ ID NO: 5226082 - DNA, 25 bp, Homo sapien
tccgggccgcggtggagaccgagga

SEQ ID NO: 5226083 - DNA, 25 bp, Homo sapien
atcccagaccgtccgagcgccacgg

SEQ ID NO: 5226084 - DNA, 25 bp, Homo sapien
gctgcccggattccttccgggccgc

SEQ ID NO: 5226085 - DNA, 25 bp, Homo sapien
gagccgggcgctctcccttcttatt

SEQ ID NO: 5226086 - DNA, 25 bp, Homo sapien
tgccttctaggctttaggttcaaac

SEQ ID NO: 5226087 - DNA, 25 bp, Homo sapien
ttaatttcaccattcacgaaccggc

SEQ ID NO: 5226088 - DNA, 25 bp, Homo sapien
gatactttatcaactctctaacgag

SEQ ID NO: 5226089 - DNA, 25 bp, Homo sapien
tcaaacgatagagaaaaggtcttcc

SEQ ID NO: 5226090 - DNA, 25 bp, Homo sapien
ttatcctagacacctctattcagtc

SEQ ID NO: 5226091 - DNA, 25 bp, Homo sapien
tttctggattatccacgctatgctg

SEQ ID NO: 5226092 - DNA, 25 bp, Homo sapien
tcctctggtgacaagcattatccta

SEQ ID NO: 5226093 - DNA, 25 bp, Homo sapien
ccacgctatgctggctttcctctgg

SEQ ID NO: 5226094 - DNA, 25 bp, Homo sapien
cagctgcagaggtaaacatggataa

SEQ ID NO: 5226095 - DNA, 25 bp, Homo sapien
gattagctagagtttcgagacatgt

SEQ ID NO: 5226096 - DNA, 25 bp, Homo sapien
gcataaacctatcccaggcagtgaa

SEQ ID NO: 5226097 - DNA, 25 bp, Homo sapien
catacccagttaagtactttgcaaa

SEQ ID NO: 5226098 - DNA, 25 bp, Homo sapien
cagctgtattagttctggcaagtat

SEQ ID NO: 5226099 - DNA, 25 bp, Homo sapien
gtatttcatcagctgtattagttct

SEQ ID NO: 5226100 - DNA, 25 bp, Homo sapien
tttcatcagctgtattagttctggc

SEQ ID NO: 5226101 - DNA, 25 bp, Homo sapien
catcagctgtattagttctggcaag

SEQ ID NO: 5226102 - DNA, 25 bp, Homo sapien
tataatccttcaacattacatactg

SEQ ID NO: 5226103 - DNA, 25 bp, Homo sapien
aaagtataatccttcaacattacat

SEQ ID NO: 5226104 - DNA, 25 bp, Homo sapien
ctaaaagtataatccttcaacatta

SEQ ID NO: 5226105 - DNA, 25 bp, Homo sapien
agtataatccttcaacattacatac

SEQ ID NO: 5226106 - DNA, 25 bp, Homo sapien
taaataactgaagtcagatggctac

SEQ ID NO: 5226107 - DNA, 25 bp, Homo sapien
gtcagatggctactgtctttgaata

SEQ ID NO: 5226108 - DNA, 25 bp, Homo sapien
taactgaagtcagatggctactgtc

SEQ ID NO: 5226109 - DNA, 25 bp, Homo sapien
gaagtcagatggctactgtctttga

SEQ ID NO: 5226110 - DNA, 25 bp, Homo sapien
cacggcaataactgcaatatccttg

SEQ ID NO: 5226111 - DNA, 25 bp, Homo sapien
tactgcacacggcaataactgcaat

SEQ ID NO: 5226112 - DNA, 25 bp, Homo sapien
ctgttccaggttattatactgcaca

SEQ ID NO: 5226113 - DNA, 25 bp, Homo sapien
caggttattatactgcacacggcaa

SEQ ID NO: 5226114 - DNA, 25 bp, Homo sapien
agcttccatcgggaatcattttcct

SEQ ID NO: 5226115 - DNA, 25 bp, Homo sapien
tctctgagcttccatcgggaatcat

SEQ ID NO: 5226116 - DNA, 25 bp, Homo sapien
cctgtatctctgagcttccatcggg

SEQ ID NO: 5226117 - DNA, 25 bp, Homo sapien
ttccactgttcttcattacttcctg

SEQ ID NO: 5226118 - DNA, 25 bp, Homo sapien
cagtacatcctgtaagaaacgttcc

SEQ ID NO: 5226119 - DNA, 25 bp, Homo sapien
tgctctcttgacaatgatatgggtg

SEQ ID NO: 5226120 - DNA, 25 bp, Homo sapien
gaaacgttccatcaaactactggta

SEQ ID NO: 5226121 - DNA, 25 bp, Homo sapien
atatgggtggtgctgcagtacatcc

SEQ ID NO: 5226122 - DNA, 25 bp, Homo sapien
caccagtttttctgttgctaacctt

SEQ ID NO: 5226123 - DNA, 25 bp, Homo sapien
ttgtcaccagtttttctgttgctaa

SEQ ID NO: 5226124 - DNA, 25 bp, Homo sapien
tgctattgtcaccagtttttctgtt

SEQ ID NO: 5226125 - DNA, 25 bp, Homo sapien
gtcaccagtttttctgttgctaacc

SEQ ID NO: 5226126 - DNA, 25 bp, Homo sapien
tacttcaggtttgtgagtcgctgcc

SEQ ID NO: 5226127 - DNA, 25 bp, Homo sapien
tatttcggctacttgagactggtca

SEQ ID NO: 5226128 - DNA, 25 bp, Homo sapien
taaggagcccttagtacccatgcgt

SEQ ID NO: 5226129 - DNA, 25 bp, Homo sapien
gaactcagagaagaacggctagact

SEQ ID NO: 5226130 - DNA, 25 bp, Homo sapien
caactgaggtgggtcagtcactaac

SEQ ID NO: 5226131 - DNA, 25 bp, Homo sapien
taatcactatcaccgggcaccagat

SEQ ID NO: 5226132 - DNA, 25 bp, Homo sapien
gcaaggcttcaagaactggttcatc

SEQ ID NO: 5226133 - DNA, 25 bp, Homo sapien
ttttatcagcccttcgatggagcgc

SEQ ID NO: 5226134 - DNA, 25 bp, Homo sapien
gactaaggctttgggttgcataggc

SEQ ID NO: 5226135 - DNA, 25 bp, Homo sapien
taaatccatatcttgccggcactgc

SEQ ID NO: 5226136 - DNA, 25 bp, Homo sapien
cacagcttgagttggtgcagtgtcc

SEQ ID NO: 5226137 - DNA, 25 bp, Homo sapien
ctctgctggaggatgacgatggcat

SEQ ID NO: 5226138 - DNA, 25 bp, Homo sapien
agattttgacaacatcatgatttaa

SEQ ID NO: 5226139 - DNA, 25 bp, Homo sapien
agcgctcctggactgatatctatga

SEQ ID NO: 5226140 - DNA, 25 bp, Homo sapien
gataccttccaagaaaagcgctcct

SEQ ID NO: 5226141 - DNA, 25 bp, Homo sapien
gtttggtccgaatccaaattgactg

SEQ ID NO: 5226142 - DNA, 25 bp, Homo sapien
taatgatatcacttggtttggtccg

SEQ ID NO: 5226143 - DNA, 25 bp, Homo sapien
ggaggatttgccatagcgcttgaca

SEQ ID NO: 5226144 - DNA, 25 bp, Homo sapien
gaagcccgcacaggtcgctttggag

SEQ ID NO: 5226145 - DNA, 25 bp, Homo sapien
cagtttgtttgctagccgagtcatc

SEQ ID NO: 5226146 - DNA, 25 bp, Homo sapien
gatcatatgctctcacaggtgtaga

SEQ ID NO: 5226147 - DNA, 25 bp, Homo sapien
gctgtgtgcacaaagtaccaaatat

SEQ ID NO: 5226148 - DNA, 25 bp, Homo sapien
gggaatgcctaaacacatgggcaaa

SEQ ID NO: 5226149 - DNA, 25 bp, Homo sapien
caggaggagtttgtgctatgcataa

SEQ ID NO: 5226150 - DNA, 25 bp, Homo sapien
aatgagaattaatggcctgcccaaa

SEQ ID NO: 5226151 - DNA, 25 bp, Homo sapien
cctagtcagtaggacaaagctttgt

SEQ ID NO: 5226152 - DNA, 25 bp, Homo sapien
aaaaaagtgttactcacagccctag

SEQ ID NO: 5226153 - DNA, 25 bp, Homo sapien
cagtgtccctgaataaaggttctgg

SEQ ID NO: 5226154 - DNA, 25 bp, Homo sapien
caggatcttggcttaacacgaatga

SEQ ID NO: 5226155 - DNA, 25 bp, Homo sapien
taacatggacttgtgattgctagga

SEQ ID NO: 5226156 - DNA, 25 bp, Homo sapien
gggtatagctgcacattgcaatatt

SEQ ID NO: 5226157 - DNA, 25 bp, Homo sapien
aatgatacgtgaaagaaactgggcc

SEQ ID NO: 5226158 - DNA, 25 bp, Homo sapien
tatttatctgtcgagatggaatctc

SEQ ID NO: 5226159 - DNA, 25 bp, Homo sapien
ttaacaaagagaaaagaagaagaca

SEQ ID NO: 5226160 - DNA, 25 bp, Homo sapien
taacaaagagaaaagaagaagacat

SEQ ID NO: 5226161 - DNA, 25 bp, Homo sapien
ttcccggctcgcctagcctcgcagc

SEQ ID NO: 5226162 - DNA, 25 bp, Homo sapien
ttggagcctccccagcggctactcc

SEQ ID NO: 5226163 - DNA, 25 bp, Homo sapien
ggccgcttcagcgactgcgggggct

SEQ ID NO: 5226164 - DNA, 25 bp, Homo sapien
gctcggcgcgcatggtgccgcggcg

SEQ ID NO: 5226165 - DNA, 25 bp, Homo sapien
ggctcatagctcccgggcgccgctc

SEQ ID NO: 5226166 - DNA, 25 bp, Homo sapien
ccgtgtggccggcgagagcgccggg

SEQ ID NO: 5226167 - DNA, 25 bp, Homo sapien
gccgctccgtgtggccggcgagagc

SEQ ID NO: 5226168 - DNA, 25 bp, Homo sapien
gggcgccgctccgtgtggccggcga

SEQ ID NO: 5226169 - DNA, 25 bp, Homo sapien
aggaagcgccggcaaggctgcagcc

SEQ ID NO: 5226170 - DNA, 25 bp, Homo sapien
cgccggcaaggctgcagcccgccag

SEQ ID NO: 5226171 - DNA, 25 bp, Homo sapien
gggccgcaggaagcgccggcaaggc

SEQ ID NO: 5226172 - DNA, 25 bp, Homo sapien
cgttgggggccgcaggaagcgccgg

SEQ ID NO: 5226173 - DNA, 25 bp, Homo sapien
aggcggcagggcggcgtgcgggccg

SEQ ID NO: 5226174 - DNA, 25 bp, Homo sapien
caggcggcagggcggcgtgcgggcc

SEQ ID NO: 5226175 - DNA, 25 bp, Homo sapien
gctttccgagtcttggttgatgtaa

SEQ ID NO: 5226176 - DNA, 25 bp, Homo sapien
tattctgttgcaatgtattgtcttc

SEQ ID NO: 5226177 - DNA, 25 bp, Homo sapien
aactgatattactgctgctattctg

SEQ ID NO: 5226178 - DNA, 25 bp, Homo sapien
tcaagaacgtgataagggctttccg

SEQ ID NO: 5226179 - DNA, 25 bp, Homo sapien
taactactgttcagtgcccaatgta

SEQ ID NO: 5226180 - DNA, 25 bp, Homo sapien
ttaactactgttcagtgcccaatgt

SEQ ID NO: 5226181 - DNA, 25 bp, Homo sapien
aactactgttcagtgcccaatgtac

SEQ ID NO: 5226182 - DNA, 25 bp, Homo sapien
aatatcagttccactttctgaacta

SEQ ID NO: 5226183 - DNA, 25 bp, Homo sapien
taaatatcagttccactttctgaac

SEQ ID NO: 5226184 - DNA, 25 bp, Homo sapien
tatcagttccactttctgaactaac

SEQ ID NO: 5226185 - DNA, 25 bp, Homo sapien
cttggtaaatatcagttccactttc

SEQ ID NO: 5226186 - DNA, 25 bp, Homo sapien
gtcaagaaatgtggaaccagtccta

SEQ ID NO: 5226187 - DNA, 25 bp, Homo sapien
aagtcaagaaatgtggaaccagtcc

SEQ ID NO: 5226188 - DNA, 25 bp, Homo sapien
caagaaatgtggaaccagtcctatc

SEQ ID NO: 5226189 - DNA, 25 bp, Homo sapien
tcaagaaatgtggaaccagtcctat

SEQ ID NO: 5226190 - DNA, 25 bp, Homo sapien
gtctcacaattacccttaaatctcc

SEQ ID NO: 5226191 - DNA, 25 bp, Homo sapien
gagaatcacccctcgccacaactgt

SEQ ID NO: 5226192 - DNA, 25 bp, Homo sapien
gccatacaaccagaaagaccctgag

SEQ ID NO: 5226193 - DNA, 25 bp, Homo sapien
cacaactgtctcacaattaccctta

SEQ ID NO: 5226194 - DNA, 25 bp, Homo sapien
gcagcctctgagacatcatgtgcat

SEQ ID NO: 5226195 - DNA, 25 bp, Homo sapien
tacgtctgaggtagaccaatcaagc

SEQ ID NO: 5226196 - DNA, 25 bp, Homo sapien
tcatgtgcatcccaatgtagtctct

SEQ ID NO: 5226197 - DNA, 25 bp, Homo sapien
tacagtacaactgcctcaatgtggt

SEQ ID NO: 5226198 - DNA, 25 bp, Homo sapien
aattcactggaagctattgtgcgga

SEQ ID NO: 5226199 - DNA, 25 bp, Homo sapien
tacccaagtggagttgtgaataggc

SEQ ID NO: 5226200 - DNA, 25 bp, Homo sapien
tatgcactaaagtggtcagagggca

SEQ ID NO: 5226201 - DNA, 25 bp, Homo sapien
tcatgaggatttgatcaagaggacg

SEQ ID NO: 5226202 - DNA, 25 bp, Homo sapien
ccagccgaagtactcttaaatatgc

SEQ ID NO: 5226203 - DNA, 25 bp, Homo sapien
tgattatttagcaaccctggaggac

SEQ ID NO: 5226204 - DNA, 25 bp, Homo sapien
tccttggacatgtatatgaaacgtc

SEQ ID NO: 5226205 - DNA, 25 bp, Homo sapien
ttaaatatgcaaaagatggacgctg

SEQ ID NO: 5226206 - DNA, 25 bp, Homo sapien
caatctggaagcttgcctgggccag

SEQ ID NO: 5226207 - DNA, 25 bp, Homo sapien
ggagccgaaggcttcaatctggaag

SEQ ID NO: 5226208 - DNA, 25 bp, Homo sapien
tttggagccgaaggcttcaatctgg

SEQ ID NO: 5226209 - DNA, 25 bp, Homo sapien
gtcaagaatgaatttggagccgaag

SEQ ID NO: 5226210 - DNA, 25 bp, Homo sapien
actgggccctgccactatgcccttg

SEQ ID NO: 5226211 - DNA, 25 bp, Homo sapien
gcattcacttccacacactgaaggc

SEQ ID NO: 5226212 - DNA, 25 bp, Homo sapien
tgaaggcagctgactggaactgcct

SEQ ID NO: 5226213 - DNA, 25 bp, Homo sapien
tgccactatgcccttggcattcact

SEQ ID NO: 5226214 - DNA, 25 bp, Homo sapien
atcacccattcaaacccaacataca

SEQ ID NO: 5226215 - DNA, 25 bp, Homo sapien
aaatcacccattcaaacccaacata

SEQ ID NO: 5226216 - DNA, 25 bp, Homo sapien
agaaatcacccattcaaacccaaca

SEQ ID NO: 5226217 - DNA, 25 bp, Homo sapien
gaaatcacccattcaaacccaacat

SEQ ID NO: 5226218 - DNA, 25 bp, Homo sapien
acatactgcacctcaattagccctt

SEQ ID NO: 5226219 - DNA, 25 bp, Homo sapien
tagcccttccatcaatctcagtttt

SEQ ID NO: 5226220 - DNA, 25 bp, Homo sapien
aaatgcctattatacatgccagtcc

SEQ ID NO: 5226221 - DNA, 25 bp, Homo sapien
aatgaaacacccgttaaatgcctat

SEQ ID NO: 5226222 - DNA, 25 bp, Homo sapien
aagcaaaacctttgtaagattccag

SEQ ID NO: 5226223 - DNA, 25 bp, Homo sapien
cattttcgtagtgaatctccacata

SEQ ID NO: 5226224 - DNA, 25 bp, Homo sapien
ttcccattttcgtagtgaatctcca

SEQ ID NO: 5226225 - DNA, 25 bp, Homo sapien
ctgtggtttcccattttcgtagtga

SEQ ID NO: 5226226 - DNA, 25 bp, Homo sapien
cttagagtactgtggtttcccattt

SEQ ID NO: 5226227 - DNA, 25 bp, Homo sapien
tacgggaaaggtgctacttttatgc

SEQ ID NO: 5226228 - DNA, 25 bp, Homo sapien
caagtccacatacgggaaaggtgct

SEQ ID NO: 5226229 - DNA, 25 bp, Homo sapien
acttttatgctgacatgtgttagca

SEQ ID NO: 5226230 - DNA, 25 bp, Homo sapien
ggtgctacttttatgctgacatgtg

SEQ ID NO: 5226231 - DNA, 25 bp, Homo sapien
acagaaacaaagtgcaaaaggctct

SEQ ID NO: 5226232 - DNA, 25 bp, Homo sapien
cagaaacaaagtgcaaaaggctctt

SEQ ID NO: 5226233 - DNA, 25 bp, Homo sapien
gactttggacagtcagctccagggg

SEQ ID NO: 5226234 - DNA, 25 bp, Homo sapien
tttggacagtcagctccaggggtgc

SEQ ID NO: 5226235 - DNA, 25 bp, Homo sapien
cagagccaccttggagtctttgacg

SEQ ID NO: 5226236 - DNA, 25 bp, Homo sapien
ctctgatgcttccatggtagtaaca

SEQ ID NO: 5226237 - DNA, 25 bp, Homo sapien
accttggagtctttgacgcctctga

SEQ ID NO: 5226238 - DNA, 25 bp, Homo sapien
gtctttgacgcctctgatgcttcca

SEQ ID NO: 5226239 - DNA, 25 bp, Homo sapien
tcatcatgaaccagctctagtggct

SEQ ID NO: 5226240 - DNA, 25 bp, Homo sapien
tggctctatcatatacacgaaggta

SEQ ID NO: 5226241 - DNA, 25 bp, Homo sapien
gaaccagctctagtggctctatcat

SEQ ID NO: 5226242 - DNA, 25 bp, Homo sapien
tacacgaaggtatcatcttcaaaca

SEQ ID NO: 5226243 - DNA, 25 bp, Homo sapien
tcttcatttgcttagaatactgtcc

SEQ ID NO: 5226244 - DNA, 25 bp, Homo sapien
catttgcttagaatactgtcctgcc

SEQ ID NO: 5226245 - DNA, 25 bp, Homo sapien
tgtcctgccaaggttttctggatta

SEQ ID NO: 5226246 - DNA, 25 bp, Homo sapien
gattatatgtggtcgacctgtgctt

SEQ ID NO: 5226247 - DNA, 25 bp, Homo sapien
ctgctctcttccttcttttcaacca

SEQ ID NO: 5226248 - DNA, 25 bp, Homo sapien
tcactgctctcttccttcttttcaa

SEQ ID NO: 5226249 - DNA, 25 bp, Homo sapien
cactgctctcttccttcttttcaac

SEQ ID NO: 5226250 - DNA, 25 bp, Homo sapien
attcactgctctcttccttcttttc

SEQ ID NO: 5226251 - DNA, 25 bp, Homo sapien
ttaacaatcataagttccaaatatt

SEQ ID NO: 5226252 - DNA, 25 bp, Homo sapien
gatcattaacaatcataagttccaa

SEQ ID NO: 5226253 - DNA, 25 bp, Homo sapien
tgtgatcattaacaatcataagttc

SEQ ID NO: 5226254 - DNA, 25 bp, Homo sapien
tttgtgatcattaacaatcataagt

SEQ ID NO: 5226255 - DNA, 25 bp, Homo sapien
agaatccacaaggttgaccacggac

SEQ ID NO: 5226256 - DNA, 25 bp, Homo sapien
gtatgtgcatgagaagagcgatgct

SEQ ID NO: 5226257 - DNA, 25 bp, Homo sapien
ctttgcaaagttgttggtatgtgca

SEQ ID NO: 5226258 - DNA, 25 bp, Homo sapien
catgagaagagcgatgcttcttata

SEQ ID NO: 5226259 - DNA, 25 bp, Homo sapien
aggaggaaaacactgggtcaaacat

SEQ ID NO: 5226260 - DNA, 25 bp, Homo sapien
aggacaggtgcaggaggaaaacact

SEQ ID NO: 5226261 - DNA, 25 bp, Homo sapien
aggtgcaggaggaaaacactgggtc

SEQ ID NO: 5226262 - DNA, 25 bp, Homo sapien
ctgagggtatacaacaggacaggtg

SEQ ID NO: 5226263 - DNA, 25 bp, Homo sapien
catgctgcttaatgcgctgccggta

SEQ ID NO: 5226264 - DNA, 25 bp, Homo sapien
gaggtgcacagcatcagcatgctgc

SEQ ID NO: 5226265 - DNA, 25 bp, Homo sapien
agtccaggtctctacagccaccagg

SEQ ID NO: 5226266 - DNA, 25 bp, Homo sapien
gttggtggtgatgtcaatctgatcc

SEQ ID NO: 5226267 - DNA, 25 bp, Homo sapien
cacaccaactcctcttgtgcgagaa

SEQ ID NO: 5226268 - DNA, 25 bp, Homo sapien
caccaactcctcttgtgcgagaaca

SEQ ID NO: 5226269 - DNA, 25 bp, Homo sapien
ctcctcttgtgcgagaacagacacc

SEQ ID NO: 5226270 - DNA, 25 bp, Homo sapien
actcctcttgtgcgagaacagacac

SEQ ID NO: 5226271 - DNA, 25 bp, Homo sapien
ctgctagaaggttcccattggattc

SEQ ID NO: 5226272 - DNA, 25 bp, Homo sapien
ggctttctgctagaaggttcccatt

SEQ ID NO: 5226273 - DNA, 25 bp, Homo sapien
ctgcgataatacttgtgccactgcc

SEQ ID NO: 5226274 - DNA, 25 bp, Homo sapien
tttctgctagaaggttcccattgga

SEQ ID NO: 5226275 - DNA, 25 bp, Homo sapien
tgtctatctcccagagtggttgtgg

SEQ ID NO: 5226276 - DNA, 25 bp, Homo sapien
gaagttttctaacagagaatgctcg

SEQ ID NO: 5226277 - DNA, 25 bp, Homo sapien
cagtgtttctacctctaaatgggaa

SEQ ID NO: 5226278 - DNA, 25 bp, Homo sapien
gacggtgtacctatgtgctgtgaat

SEQ ID NO: 5226279 - DNA, 25 bp, Homo sapien
accccaggattctgtgcagtcacat

SEQ ID NO: 5226280 - DNA, 25 bp, Homo sapien
ccccaggattctgtgcagtcacatt

SEQ ID NO: 5226281 - DNA, 25 bp, Homo sapien
caccccaggattctgtgcagtcaca

SEQ ID NO: 5226282 - DNA, 25 bp, Homo sapien
tctatactccaaaatgctgcacttt

SEQ ID NO: 5226283 - DNA, 25 bp, Homo sapien
ctgtaaaaagtctctatactccaaa

SEQ ID NO: 5226284 - DNA, 25 bp, Homo sapien
cactttgaaaattttcgagaatggg

SEQ ID NO: 5226285 - DNA, 25 bp, Homo sapien
tgaaaattttcgagaatgggacacc

SEQ ID NO: 5226286 - DNA, 25 bp, Homo sapien
tctgtgttattttgatcaggaggca

SEQ ID NO: 5226287 - DNA, 25 bp, Homo sapien
gaaggcaaaactattacgaaaagca

SEQ ID NO: 5226288 - DNA, 25 bp, Homo sapien
cccctgtggaaaagtcctatgagca

SEQ ID NO: 5226289 - DNA, 25 bp, Homo sapien
tccaggctacttgggtgggactccc

SEQ ID NO: 5226290 - DNA, 25 bp, Homo sapien
taatcagctatcatgtgatattctt

SEQ ID NO: 5226291 - DNA, 25 bp, Homo sapien
tcagctatcatgtgatattcttctt

SEQ ID NO: 5226292 - DNA, 25 bp, Homo sapien
cttctttgatctgttgttgtggcat

SEQ ID NO: 5226293 - DNA, 25 bp, Homo sapien
aatcagctatcatgtgatattcttc

SEQ ID NO: 5226294 - DNA, 25 bp, Homo sapien
ttccacattccgtgggctcaaatag

SEQ ID NO: 5226295 - DNA, 25 bp, Homo sapien
cagcttccacgtatccatttccaca

SEQ ID NO: 5226296 - DNA, 25 bp, Homo sapien
ccatttccacattccgtgggctcaa

SEQ ID NO: 5226297 - DNA, 25 bp, Homo sapien
ctccccagcttccacgtatccattt

SEQ ID NO: 5226298 - DNA, 25 bp, Homo sapien
catttatacaacagtaagcaaatat

SEQ ID NO: 5226299 - DNA, 25 bp, Homo sapien
atttatacaacagtaagcaaatatt

SEQ ID NO: 5226300 - DNA, 25 bp, Homo sapien
catattctctccacacgtggcatgc

SEQ ID NO: 5226301 - DNA, 25 bp, Homo sapien
atattctctccacacgtggcatgca

SEQ ID NO: 5226302 - DNA, 25 bp, Homo sapien
agcagggcccgtcgctgcagtgagc

SEQ ID NO: 5226303 - DNA, 25 bp, Homo sapien
gagagggaacatttcttacagcata

SEQ ID NO: 5226304 - DNA, 25 bp, Homo sapien
tcttacagcataatccatagcattc

SEQ ID NO: 5226305 - DNA, 25 bp, Homo sapien
tcgctgcagtgagccccgttggaga

SEQ ID NO: 5226306 - DNA, 25 bp, Homo sapien
agcatcccggcattcataccctcgt

SEQ ID NO: 5226307 - DNA, 25 bp, Homo sapien
gtctccagtacaatattcagtaata

SEQ ID NO: 5226308 - DNA, 25 bp, Homo sapien
taatatcacactcgttcacagcatc

SEQ ID NO: 5226309 - DNA, 25 bp, Homo sapien
ggcattcataccctcgtggctgaaa

SEQ ID NO: 5226310 - DNA, 25 bp, Homo sapien
gctttctgagggttcaatggttcaa

SEQ ID NO: 5226311 - DNA, 25 bp, Homo sapien
aacaaccactgattgtccacatggg

SEQ ID NO: 5226312 - DNA, 25 bp, Homo sapien
tagcatacagattcagagtcaggaa

SEQ ID NO: 5226313 - DNA, 25 bp, Homo sapien
tgtatatgaaacatccatgactttc

SEQ ID NO: 5226314 - DNA, 25 bp, Homo sapien
caggtgtgcaagtactgtgagctca

SEQ ID NO: 5226315 - DNA, 25 bp, Homo sapien
gactcaataaccagatacgactatg

SEQ ID NO: 5226316 - DNA, 25 bp, Homo sapien
tacctacaacaacaccaggcatgtg

SEQ ID NO: 5226317 - DNA, 25 bp, Homo sapien
gagccatttatcaagttcaccacag

SEQ ID NO: 5226318 - DNA, 25 bp, Homo sapien
gcatgcatatccgtcttgcttatga

SEQ ID NO: 5226319 - DNA, 25 bp, Homo sapien
ttgattgcatgcatatccgtcttgc

SEQ ID NO: 5226320 - DNA, 25 bp, Homo sapien
tgcatatccgtcttgcttatgaaga

SEQ ID NO: 5226321 - DNA, 25 bp, Homo sapien
ctgattttgattgcatgcatatccg

SEQ ID NO: 5226322 - DNA, 25 bp, Homo sapien
ctggttgtctctggtcttgcactcg

SEQ ID NO: 5226323 - DNA, 25 bp, Homo sapien
tggtcttgcactcgccattgtagca

SEQ ID NO: 5226324 - DNA, 25 bp, Homo sapien
gtctctggtcttgcactcgccattg

SEQ ID NO: 5226325 - DNA, 25 bp, Homo sapien
ttgttccccagatgtactgacactg

SEQ ID NO: 5226326 - DNA, 25 bp, Homo sapien
gtctccatccttcccgcagtttccc

SEQ ID NO: 5226327 - DNA, 25 bp, Homo sapien
tcatagcagaacttgtcagaccctg

SEQ ID NO: 5226328 - DNA, 25 bp, Homo sapien
tttgctgcactgaatccaccggtct

SEQ ID NO: 5226329 - DNA, 25 bp, Homo sapien
tcagcttttcatagcagaacttgtc

SEQ ID NO: 5226330 - DNA, 25 bp, Homo sapien
ggaatgatctcaccctgaagttgac

SEQ ID NO: 5226331 - DNA, 25 bp, Homo sapien
caatcacccggccttgatggtagaa

SEQ ID NO: 5226332 - DNA, 25 bp, Homo sapien
gaagttgaccaatacgtggagctcg

SEQ ID NO: 5226333 - DNA, 25 bp, Homo sapien
tacagagtaagaatccacagaacac

SEQ ID NO: 5226334 - DNA, 25 bp, Homo sapien
ccttggaatcgagtggacagctgct

SEQ ID NO: 5226335 - DNA, 25 bp, Homo sapien
gaatttgtaggcacttccgatctaa

SEQ ID NO: 5226336 - DNA, 25 bp, Homo sapien
gggccacatggcgttccatcttcta

SEQ ID NO: 5226337 - DNA, 25 bp, Homo sapien
aaacacatcatagacgggccacatg

SEQ ID NO: 5226338 - DNA, 25 bp, Homo sapien
ggagacataaatcaccagtgccttg

SEQ ID NO: 5226339 - DNA, 25 bp, Homo sapien
tgggctcaaaagcactgctggagat

SEQ ID NO: 5226340 - DNA, 25 bp, Homo sapien
tgtatgacctcaccgttaccacgtc

SEQ ID NO: 5226341 - DNA, 25 bp, Homo sapien
tggtcttgatcactagacacaaggt

SEQ ID NO: 5226342 - DNA, 25 bp, Homo sapien
cacaaatgcaggtggcttcattact

SEQ ID NO: 5226343 - DNA, 25 bp, Homo sapien
ggatactgcaatctgtccctgccca

SEQ ID NO: 5226344 - DNA, 25 bp, Homo sapien
tccctgcccaggtgaaatcacaaat

SEQ ID NO: 5226345 - DNA, 25 bp, Homo sapien
tgaaggttcctaactggatcccgga

SEQ ID NO: 5226346 - DNA, 25 bp, Homo sapien
cagtgtcaacgaattcagtattcca

SEQ ID NO: 5226347 - DNA, 25 bp, Homo sapien
tcaattagaatgttatactggtgca

SEQ ID NO: 5226348 - DNA, 25 bp, Homo sapien
tactggtgcattggaacagtgtcaa

SEQ ID NO: 5226349 - DNA, 25 bp, Homo sapien
tatatcagaatccttaatttggcag

SEQ ID NO: 5226350 - DNA, 25 bp, Homo sapien
tttagctctgctcatccgttgaggc

SEQ ID NO: 5226351 - DNA, 25 bp, Homo sapien
gcatctttatacatcacttgaggaa

SEQ ID NO: 5226352 - DNA, 25 bp, Homo sapien
ctctaaatctaacttcagaaggtgg

SEQ ID NO: 5226353 - DNA, 25 bp, Homo sapien
aaggcagctgtgagtactctttctc

SEQ ID NO: 5226354 - DNA, 25 bp, Homo sapien
tatggatatgattggccactgtggg

SEQ ID NO: 5226355 - DNA, 25 bp, Homo sapien
cagaaaaccttcatctatggatatg

SEQ ID NO: 5226356 - DNA, 25 bp, Homo sapien
tgggtggtgcccattataaatggca

SEQ ID NO: 5226357 - DNA, 25 bp, Homo sapien
tgtgctcaatcaggcaggtgccaac

SEQ ID NO: 5226358 - DNA, 25 bp, Homo sapien
tgtattctatagtaagcaccttgag

SEQ ID NO: 5226359 - DNA, 25 bp, Homo sapien
gaatatctgcccatacatatcactg

SEQ ID NO: 5226360 - DNA, 25 bp, Homo sapien
caccttgagaatgtgtctacataca

SEQ ID NO: 5226361 - DNA, 25 bp, Homo sapien
aaaggtctgaccaaagcttcccagg

SEQ ID NO: 5226362 - DNA, 25 bp, Homo sapien
aaagcatttggctcaagataaggtg

SEQ ID NO: 5226363 - DNA, 25 bp, Homo sapien
tctgcctcatgggattaggtgatcc

SEQ ID NO: 5226364 - DNA, 25 bp, Homo sapien
aaaacaggagtatggaataacagaa

SEQ ID NO: 5226365 - DNA, 25 bp, Homo sapien
acaggagtatggaataacagaaaaa

SEQ ID NO: 5226366 - DNA, 25 bp, Homo sapien
tggacaaatgtctaaaaggatgcaa

SEQ ID NO: 5226367 - DNA, 25 bp, Homo sapien
tatccttgggttattgataaggcca

SEQ ID NO: 5226368 - DNA, 25 bp, Homo sapien
tccactaccattcaagacaagaaaa

SEQ ID NO: 5226369 - DNA, 25 bp, Homo sapien
cattatacatacaatcagatctcct

SEQ ID NO: 5226370 - DNA, 25 bp, Homo sapien
cctggagatggaacgcttaaagctt

SEQ ID NO: 5226371 - DNA, 25 bp, Homo sapien
ttaactgagtagctcacgggtgggt

SEQ ID NO: 5226372 - DNA, 25 bp, Homo sapien
ggcaagtaggaacttgtgcatcacc

SEQ ID NO: 5226373 - DNA, 25 bp, Homo sapien
cagtcttggtccctgctacctaggt

SEQ ID NO: 5226374 - DNA, 25 bp, Homo sapien
gtttcaggcattggttctcagagct

SEQ ID NO: 5226375 - DNA, 25 bp, Homo sapien
taagtactcttaacgctaaagcaag

SEQ ID NO: 5226376 - DNA, 25 bp, Homo sapien
tctcagagctgcaatacatgacagt

SEQ ID NO: 5226377 - DNA, 25 bp, Homo sapien
tacaaccggaggacgagacatttct

SEQ ID NO: 5226378 - DNA, 25 bp, Homo sapien
ttatcattgactaagcacaacctgg

SEQ ID NO: 5226379 - DNA, 25 bp, Homo sapien
caaacactgggactgaaaggtattc

SEQ ID NO: 5226380 - DNA, 25 bp, Homo sapien
ggtggcagcaatgtttccccactat

SEQ ID NO: 5226381 - DNA, 25 bp, Homo sapien
gaaggctaagggaagaagaccaaca

SEQ ID NO: 5226382 - DNA, 25 bp, Homo sapien
tctataggaatcaaaaggactggct

SEQ ID NO: 5226383 - DNA, 25 bp, Homo sapien
taaggcttacaattgggctcactga

SEQ ID NO: 5226384 - DNA, 25 bp, Homo sapien
aaacagagattagcttcaacaaggc

SEQ ID NO: 5226385 - DNA, 25 bp, Homo sapien
ccaccaagtggtagatgactatcag

SEQ ID NO: 5226386 - DNA, 25 bp, Homo sapien
cagggccagaatggtgccggccacg

SEQ ID NO: 5226387 - DNA, 25 bp, Homo sapien
cacggcccctattagcctgcttgtg

SEQ ID NO: 5226388 - DNA, 25 bp, Homo sapien
tggtgccggccacggcccctattag

SEQ ID NO: 5226389 - DNA, 25 bp, Homo sapien
tgtgcctccaaaaatcacccccagg

SEQ ID NO: 5226390 - DNA, 25 bp, Homo sapien
tcaacaggacgagacatggagtcag

SEQ ID NO: 5226391 - DNA, 25 bp, Homo sapien
gatgtggatcaagtacagagcaccc

SEQ ID NO: 5226392 - DNA, 25 bp, Homo sapien
cagaaacactctgaaactggcaagg

SEQ ID NO: 5226393 - DNA, 25 bp, Homo sapien
tgtgacagcttaatgggcaagtggc

SEQ ID NO: 5226394 - DNA, 25 bp, Homo sapien
aaagactgtgtaaagggttatgtct

SEQ ID NO: 5226395 - DNA, 25 bp, Homo sapien
attttaatctacagattagcaatct

SEQ ID NO: 5226396 - DNA, 25 bp, Homo sapien
aaagggttatgtctgccattcttaa

SEQ ID NO: 5226397 - DNA, 25 bp, Homo sapien
tgtgcccccaaggacaatagctgct

SEQ ID NO: 5226398 - DNA, 25 bp, Homo sapien
caaggacaatagctgctaccaggat

SEQ ID NO: 5226399 - DNA, 25 bp, Homo sapien
gatggagcctattatgagattggtg

SEQ ID NO: 5226400 - DNA, 25 bp, Homo sapien
ctaccaggatggcaccagcgatgga

SEQ ID NO: 5226401 - DNA, 25 bp, Homo sapien
aacattcttgaaagcgggcactgct

SEQ ID NO: 5226402 - DNA, 25 bp, Homo sapien
gaaagggcaaaccaagctagcactg

SEQ ID NO: 5226403 - DNA, 25 bp, Homo sapien
aatgaccctgaaggacaagaggccc

SEQ ID NO: 5226404 - DNA, 25 bp, Homo sapien
gtgtgactcattggcctagcaggta

SEQ ID NO: 5226405 - DNA, 25 bp, Homo sapien
gtgagtcaaaagaagatgcaagcag

SEQ ID NO: 5226406 - DNA, 25 bp, Homo sapien
agtgagtcaaaagaagatgcaagca

SEQ ID NO: 5226407 - DNA, 25 bp, Homo sapien
tgagtcaaaagaagatgcaagcaga

SEQ ID NO: 5226408 - DNA, 25 bp, Homo sapien
ccttgctgagtaggatcgaaccttc

SEQ ID NO: 5226409 - DNA, 25 bp, Homo sapien
tgagtaggatcgaaccttctcttct

SEQ ID NO: 5226410 - DNA, 25 bp, Homo sapien
gggccttgctgagtaggatcgaacc

SEQ ID NO: 5226411 - DNA, 25 bp, Homo sapien
ggatcgaaccttctcttcttgacat

SEQ ID NO: 5226412 - DNA, 25 bp, Homo sapien
taatagttccagtaacactgctgcg

SEQ ID NO: 5226413 - DNA, 25 bp, Homo sapien
tgtcaccccaactttagctccgtag

SEQ ID NO: 5226414 - DNA, 25 bp, Homo sapien
cccgtttactgacaggtggtgaaag

SEQ ID NO: 5226415 - DNA, 25 bp, Homo sapien
tccaacagtgcaaggcggtgtccat

SEQ ID NO: 5226416 - DNA, 25 bp, Homo sapien
catgtttaagtgaagaggcccaggc

SEQ ID NO: 5226417 - DNA, 25 bp, Homo sapien
gaaaattagatcttcatgccactgg

SEQ ID NO: 5226418 - DNA, 25 bp, Homo sapien
gatattaagtgccagcaggctgagg

SEQ ID NO: 5226419 - DNA, 25 bp, Homo sapien
gaatcaacaagagcaaggtccgtgg

SEQ ID NO: 5226420 - DNA, 25 bp, Homo sapien
gaaactcagagggacttggaaagcc

SEQ ID NO: 5226421 - DNA, 25 bp, Homo sapien
tgcggatacaaaggtaactgctcct

SEQ ID NO: 5226422 - DNA, 25 bp, Homo sapien
cattataatccagtgcaacggtcca

SEQ ID NO: 5226423 - DNA, 25 bp, Homo sapien
ggtccactgatcagtaaaatgccag

SEQ ID NO: 5226424 - DNA, 25 bp, Homo sapien
gagtaggacccagcaacaaggaaac

SEQ ID NO: 5226425 - DNA, 25 bp, Homo sapien
catgaatcttgctgaaaagggacca

SEQ ID NO: 5226426 - DNA, 25 bp, Homo sapien
gccaatgactagagggatgctacct

SEQ ID NO: 5226427 - DNA, 25 bp, Homo sapien
gcttcctccgagctgaaagagccat

SEQ ID NO: 5226428 - DNA, 25 bp, Homo sapien
acaaaaagttacactgacatttgcc

SEQ ID NO: 5226429 - DNA, 25 bp, Homo sapien
gtgtaacaaaaagttacactgacat

SEQ ID NO: 5226430 - DNA, 25 bp, Homo sapien
caaaaagttacactgacatttgcca

SEQ ID NO: 5226431 - DNA, 25 bp, Homo sapien
taacaaaaagttacactgacatttg

SEQ ID NO: 5226432 - DNA, 25 bp, Homo sapien
acattggagcataggttcgattacc

SEQ ID NO: 5226433 - DNA, 25 bp, Homo sapien
gcaatgaagttagcgcacgtctcct

SEQ ID NO: 5226434 - DNA, 25 bp, Homo sapien
cagttatctagtaggagcagctcta

SEQ ID NO: 5226435 - DNA, 25 bp, Homo sapien
cataggcagccaacaagatacgaat

SEQ ID NO: 5226436 - DNA, 25 bp, Homo sapien
cagtaagcctttggatccatgctaa

SEQ ID NO: 5226437 - DNA, 25 bp, Homo sapien
tgcttaaattttcagtaagcctttg

SEQ ID NO: 5226438 - DNA, 25 bp, Homo sapien
ttggatccatgctaaaactctgatg

SEQ ID NO: 5226439 - DNA, 25 bp, Homo sapien
gcctttggatccatgctaaaactct

SEQ ID NO: 5226440 - DNA, 25 bp, Homo sapien
tcctgtgccttgaatacgtttccca

SEQ ID NO: 5226441 - DNA, 25 bp, Homo sapien
taaattgtgagcaactttaagccaa

SEQ ID NO: 5226442 - DNA, 25 bp, Homo sapien
agctttgtttactcatcaccttggg

SEQ ID NO: 5226443 - DNA, 25 bp, Homo sapien
ttttactcccagcacaagagtagct

SEQ ID NO: 5226444 - DNA, 25 bp, Homo sapien
ttctctctgaggatctactgctcct

SEQ ID NO: 5226445 - DNA, 25 bp, Homo sapien
taaataatggttccagcagcactcc

SEQ ID NO: 5226446 - DNA, 25 bp, Homo sapien
gatctcctggtggtgacaataaata

SEQ ID NO: 5226447 - DNA, 25 bp, Homo sapien
tacatttagagagttaaggctttcc

SEQ ID NO: 5226448 - DNA, 25 bp, Homo sapien
gggctctgagctattcctcctgctc

SEQ ID NO: 5226449 - DNA, 25 bp, Homo sapien
gtagtaagatttgccgaagccacag

SEQ ID NO: 5226450 - DNA, 25 bp, Homo sapien
cattaaataggaggtctgaagagga

SEQ ID NO: 5226451 - DNA, 25 bp, Homo sapien
cttccgaggggcacaaggctttgta

SEQ ID NO: 5226452 - DNA, 25 bp, Homo sapien
tttgtgccagctcaatagtatccat

SEQ ID NO: 5226453 - DNA, 25 bp, Homo sapien
gtagtctccactaactgaaggcttt

SEQ ID NO: 5226454 - DNA, 25 bp, Homo sapien
cacttgtagtctccactaactgaag

SEQ ID NO: 5226455 - DNA, 25 bp, Homo sapien
ttttgtgccagctcaatagtatcca

SEQ ID NO: 5226456 - DNA, 25 bp, Homo sapien
cacgggcctcgtccgagaataaagg

SEQ ID NO: 5226457 - DNA, 25 bp, Homo sapien
tgcctctcgacactcagcaagggct

SEQ ID NO: 5226458 - DNA, 25 bp, Homo sapien
gacatgagctgcctctcgacactca

SEQ ID NO: 5226459 - DNA, 25 bp, Homo sapien
gctcagaggaaataaggcgcctcct

SEQ ID NO: 5226460 - DNA, 25 bp, Homo sapien
aggctgctcccgagcgagtggctgt

SEQ ID NO: 5226461 - DNA, 25 bp, Homo sapien
gagagttccctcgagtacgcggaga

SEQ ID NO: 5226462 - DNA, 25 bp, Homo sapien
ggagaggaaacgctcaggctgctcc

SEQ ID NO: 5226463 - DNA, 25 bp, Homo sapien
tccctcgaacgcgtggagagagttc

SEQ ID NO: 5226464 - DNA, 25 bp, Homo sapien
cacagcacattcccacaatgagcag

SEQ ID NO: 5226465 - DNA, 25 bp, Homo sapien
caaggggcggtggatccctcctctg

SEQ ID NO: 5226466 - DNA, 25 bp, Homo sapien
caggtgaagctcaaggggcggtgga

SEQ ID NO: 5226467 - DNA, 25 bp, Homo sapien
acagcacattcccacaatgagcagg

SEQ ID NO: 5226468 - DNA, 25 bp, Homo sapien
tgaggatcagcttggctaagagcca

SEQ ID NO: 5226469 - DNA, 25 bp, Homo sapien
tcctaagccatggttcctagagagc

SEQ ID NO: 5226470 - DNA, 25 bp, Homo sapien
gatcccaaaacagtgctccatgctt

SEQ ID NO: 5226471 - DNA, 25 bp, Homo sapien
tagagagcacacagtccacatagat

SEQ ID NO: 5226472 - DNA, 25 bp, Homo sapien
tcatacttgattgaccctttcaaaa

SEQ ID NO: 5226473 - DNA, 25 bp, Homo sapien
gcacattcatacttgattgaccctt

SEQ ID NO: 5226474 - DNA, 25 bp, Homo sapien
catacttgattgaccctttcaaaag

SEQ ID NO: 5226475 - DNA, 25 bp, Homo sapien
ttcagcacattcatacttgattgac

SEQ ID NO: 5226476 - DNA, 25 bp, Homo sapien
cacatgcatgcttatcaaatcttca

SEQ ID NO: 5226477 - DNA, 25 bp, Homo sapien
aaggaggtccttaggagctgagaat

SEQ ID NO: 5226478 - DNA, 25 bp, Homo sapien
cactcctacgcacatgcatgcttat

SEQ ID NO: 5226479 - DNA, 25 bp, Homo sapien
ttaggaaggaggtccttaggagctg

SEQ ID NO: 5226480 - DNA, 25 bp, Homo sapien
tatgtatatttaattccaaggcatg

SEQ ID NO: 5226481 - DNA, 25 bp, Homo sapien
ttccaaggcatgaattagctccgag

SEQ ID NO: 5226482 - DNA, 25 bp, Homo sapien
atgtatatttaattccaaggcatga

SEQ ID NO: 5226483 - DNA, 25 bp, Homo sapien
gagaatttgggttcatatttatctc

SEQ ID NO: 5226484 - DNA, 25 bp, Homo sapien
tagtatactgagagaatttgggttc

SEQ ID NO: 5226485 - DNA, 25 bp, Homo sapien
gaaacatgctagcagcctaaaataa

SEQ ID NO: 5226486 - DNA, 25 bp, Homo sapien
taaataatagaaggcagctttaaat

SEQ ID NO: 5226487 - DNA, 25 bp, Homo sapien
ggataccacagagcttataagggcg

SEQ ID NO: 5226488 - DNA, 25 bp, Homo sapien
tgctgggcgccagactttgtagtgc

SEQ ID NO: 5226489 - DNA, 25 bp, Homo sapien
gtgtatcgcaacgtaacccattcag

SEQ ID NO: 5226490 - DNA, 25 bp, Homo sapien
tgagtctctctcgaccatggccaaa

SEQ ID NO: 5226491 - DNA, 25 bp, Homo sapien
gtgactacgtacaggagcagccatg

SEQ ID NO: 5226492 - DNA, 25 bp, Homo sapien
caaaaagcatatgttcgcggctgta

SEQ ID NO: 5226493 - DNA, 25 bp, Homo sapien
cgcggctgtagctgaaggacttact

SEQ ID NO: 5226494 - DNA, 25 bp, Homo sapien
gagatcttacggattccctcaaagg

SEQ ID NO: 5226495 - DNA, 25 bp, Homo sapien
ttccaggacaactcgtgagactctt

SEQ ID NO: 5226496 - DNA, 25 bp, Homo sapien
ctcttctcctcgaagtaaaaagtct

SEQ ID NO: 5226497 - DNA, 25 bp, Homo sapien
gggctgccgctaagcccaagctcgt

SEQ ID NO: 5226498 - DNA, 25 bp, Homo sapien
aaaaagtctaggatgtgatacgggc

SEQ ID NO: 5226499 - DNA, 25 bp, Homo sapien
gaaaccaacgtcacttctactagtg

SEQ ID NO: 5226500 - DNA, 25 bp, Homo sapien
caacgtcacttctactagtgaaaaa

SEQ ID NO: 5226501 - DNA, 25 bp, Homo sapien
tcacttctactagtgaaaaagaaca

SEQ ID NO: 5226502 - DNA, 25 bp, Homo sapien
aaccaacgtcacttctactagtgaa

SEQ ID NO: 5226503 - DNA, 25 bp, Homo sapien
taagggctgttagagtgcttatgcc

SEQ ID NO: 5226504 - DNA, 25 bp, Homo sapien
tcagatttatcaacagggacaagag

SEQ ID NO: 5226505 - DNA, 25 bp, Homo sapien
ggagcccgctttgttattcattttg

SEQ ID NO: 5226506 - DNA, 25 bp, Homo sapien
ttgcaaagtcccaaacaacatagcc

SEQ ID NO: 5226507 - DNA, 25 bp, Homo sapien
agttgctactaggaaatgtgggcgc

SEQ ID NO: 5226508 - DNA, 25 bp, Homo sapien
tgcatctaacacatcactcagggaa

SEQ ID NO: 5226509 - DNA, 25 bp, Homo sapien
gagggattccaagcttcactatggc

SEQ ID NO: 5226510 - DNA, 25 bp, Homo sapien
tcactatggcgtgaagactgaacag

SEQ ID NO: 5226511 - DNA, 25 bp, Homo sapien
tgatcgccatgtacaaaacttgttc

SEQ ID NO: 5226512 - DNA, 25 bp, Homo sapien
taaacaggacactgacattcttgct

SEQ ID NO: 5226513 - DNA, 25 bp, Homo sapien
aatacaaatttgagcacgtcaaccc

SEQ ID NO: 5226514 - DNA, 25 bp, Homo sapien
tactccttagctagccgtaagaggc

SEQ ID NO: 5226515 - DNA, 25 bp, Homo sapien
tgtcatcccgatgcaaatatctgtc

SEQ ID NO: 5226516 - DNA, 25 bp, Homo sapien
cagatgtcatcccgatgcaaatatc

SEQ ID NO: 5226517 - DNA, 25 bp, Homo sapien
gatgtcatcccgatgcaaatatctg

SEQ ID NO: 5226518 - DNA, 25 bp, Homo sapien
cacagatgtcatcccgatgcaaata

SEQ ID NO: 5226519 - DNA, 25 bp, Homo sapien
tgcctctaaaacagttgacaaaact

SEQ ID NO: 5226520 - DNA, 25 bp, Homo sapien
ttcgtagaacatgaacattcttgca

SEQ ID NO: 5226521 - DNA, 25 bp, Homo sapien
tgaaaggcatatctcatcacactca

SEQ ID NO: 5226522 - DNA, 25 bp, Homo sapien
cattcttgcatggttccattgcctc

SEQ ID NO: 5226523 - DNA, 25 bp, Homo sapien
gactgtaactaccaacaaagcctcc

SEQ ID NO: 5226524 - DNA, 25 bp, Homo sapien
catctttgttattatggaccctaag

SEQ ID NO: 5226525 - DNA, 25 bp, Homo sapien
aagagaagtatttccagcctatgtc

SEQ ID NO: 5226526 - DNA, 25 bp, Homo sapien
gcttaataaggtatgaaagactgta

SEQ ID NO: 5226527 - DNA, 25 bp, Homo sapien
ttttccaatacacttcatcacaact

SEQ ID NO: 5226528 - DNA, 25 bp, Homo sapien
cctcttaagagcaatcggtgcatct

SEQ ID NO: 5226529 - DNA, 25 bp, Homo sapien
cacaacttgtaatgtgaagacatct

SEQ ID NO: 5226530 - DNA, 25 bp, Homo sapien
gtttcctcttaagagcaatcggtgc

SEQ ID NO: 5226531 - DNA, 25 bp, Homo sapien
ccagcaatgtcctcctagaaaattg

SEQ ID NO: 5226532 - DNA, 25 bp, Homo sapien
gctaaacctaaaagcccagcaatgt

SEQ ID NO: 5226533 - DNA, 25 bp, Homo sapien
gacttcaggcagtgatagcaggtta

SEQ ID NO: 5226534 - DNA, 25 bp, Homo sapien
gatgaagtttgggtaatatgaccca

SEQ ID NO: 5226535 - DNA, 25 bp, Homo sapien
gatcggtgattcatggcagctagta

SEQ ID NO: 5226536 - DNA, 25 bp, Homo sapien
tccaggagtataagagatcggtgat

SEQ ID NO: 5226537 - DNA, 25 bp, Homo sapien
aatctgtctaattccctcaaggctt

SEQ ID NO: 5226538 - DNA, 25 bp, Homo sapien
ggaccaccttactgcattcatccag

SEQ ID NO: 5226539 - DNA, 25 bp, Homo sapien
tattcttaaaggacacccatggata

SEQ ID NO: 5226540 - DNA, 25 bp, Homo sapien
tgatcattattcttaaaggacaccc

SEQ ID NO: 5226541 - DNA, 25 bp, Homo sapien
attattcttaaaggacacccatgga

SEQ ID NO: 5226542 - DNA, 25 bp, Homo sapien
cttaaaggacacccatggatattat

SEQ ID NO: 5226543 - DNA, 25 bp, Homo sapien
tgcagccacataatctgcaagtccc

SEQ ID NO: 5226544 - DNA, 25 bp, Homo sapien
agagatccaaattatggtactggag

SEQ ID NO: 5226545 - DNA, 25 bp, Homo sapien
tgcaagtcccttgaagagatccaaa

SEQ ID NO: 5226546 - DNA, 25 bp, Homo sapien
ccagatgtcgaaagttgcagccaca

SEQ ID NO: 5226547 - DNA, 25 bp, Homo sapien
ttaagtcaagccatcctaagttggg

SEQ ID NO: 5226548 - DNA, 25 bp, Homo sapien
gtttaccctcatgattgcacagctg

SEQ ID NO: 5226549 - DNA, 25 bp, Homo sapien
tgattgggagctgcgacttgctgcc

SEQ ID NO: 5226550 - DNA, 25 bp, Homo sapien
cagattgtccttgacttacggtggg

SEQ ID NO: 5226551 - DNA, 25 bp, Homo sapien
tactattctcttcataaacaggtcc

SEQ ID NO: 5226552 - DNA, 25 bp, Homo sapien
tctggcatttgtagacatgattgag

SEQ ID NO: 5226553 - DNA, 25 bp, Homo sapien
gaagagtaagtatgaagaatagata

SEQ ID NO: 5226554 - DNA, 25 bp, Homo sapien
acaggtccattaaaccaacaggtcg

SEQ ID NO: 5226555 - DNA, 25 bp, Homo sapien
ttttagttggcctgacaccacttaa

SEQ ID NO: 5226556 - DNA, 25 bp, Homo sapien
tccattcagtggacagtacagtggg

SEQ ID NO: 5226557 - DNA, 25 bp, Homo sapien
agcacagggactctgacggtgacaa

SEQ ID NO: 5226558 - DNA, 25 bp, Homo sapien
tgcagtatgagctgagtctgtccat

SEQ ID NO: 5226559 - DNA, 25 bp, Homo sapien
tacaacagagttgttctcataaatg

SEQ ID NO: 5226560 - DNA, 25 bp, Homo sapien
gatatacaacagagttgttctcata

SEQ ID NO: 5226561 - DNA, 25 bp, Homo sapien
caacagagttgttctcataaatggt

SEQ ID NO: 5226562 - DNA, 25 bp, Homo sapien
tatacaacagagttgttctcataaa

SEQ ID NO: 5226563 - DNA, 25 bp, Homo sapien
catatacgcaatagcaaggcagcac

SEQ ID NO: 5226564 - DNA, 25 bp, Homo sapien
gattttctataacgcctggaccacc

SEQ ID NO: 5226565 - DNA, 25 bp, Homo sapien
tgaaatcaactgagaggtccatggg

SEQ ID NO: 5226566 - DNA, 25 bp, Homo sapien
tccaggtcttgcatatagagggcct

SEQ ID NO: 5226567 - DNA, 25 bp, Homo sapien
agataaccagtcagagcactagcca

SEQ ID NO: 5226568 - DNA, 25 bp, Homo sapien
agaaatagtgtgaagataaccagtc

SEQ ID NO: 5226569 - DNA, 25 bp, Homo sapien
tgcagaagctgattaaaaggagcca

SEQ ID NO: 5226570 - DNA, 25 bp, Homo sapien
tgatgtctttttgcagaagctgatt

SEQ ID NO: 5226571 - DNA, 25 bp, Homo sapien
gactctctacaactcaactttggga

SEQ ID NO: 5226572 - DNA, 25 bp, Homo sapien
aacaggtgttccctcatcacaggcc

SEQ ID NO: 5226573 - DNA, 25 bp, Homo sapien
taagaccccattcagagtcatatgg

SEQ ID NO: 5226574 - DNA, 25 bp, Homo sapien
caggagtgaccaagtgtttacagct

SEQ ID NO: 5226575 - DNA, 25 bp, Homo sapien
ctgtgggagtgacaaggctatgtcc

SEQ ID NO: 5226576 - DNA, 25 bp, Homo sapien
tcatcaagttttagacaagtatcca

SEQ ID NO: 5226577 - DNA, 25 bp, Homo sapien
tatccaaagtatgcagcttgtaagc

SEQ ID NO: 5226578 - DNA, 25 bp, Homo sapien
tgtccctcagatagacagtatcatc

SEQ ID NO: 5226579 - DNA, 25 bp, Homo sapien
cctttgcatttgtatgtgacgatgg

SEQ ID NO: 5226580 - DNA, 25 bp, Homo sapien
tttgtatgtgacgatggcagctccc

SEQ ID NO: 5226581 - DNA, 25 bp, Homo sapien
tgcatttgtatgtgacgatggcagc

SEQ ID NO: 5226582 - DNA, 25 bp, Homo sapien
tgccacctttgcatttgtatgtgac

SEQ ID NO: 5226583 - DNA, 25 bp, Homo sapien
taattgtgtggcaagtgcacatcct

SEQ ID NO: 5226584 - DNA, 25 bp, Homo sapien
tatgataattgtgtggcaagtgcac

SEQ ID NO: 5226585 - DNA, 25 bp, Homo sapien
caatatgataattgtgtggcaagtg

SEQ ID NO: 5226586 - DNA, 25 bp, Homo sapien
gtggcaagtgcacatcctttgagaa

SEQ ID NO: 5226587 - DNA, 25 bp, Homo sapien
caagaatcaggccagttccagaggc

SEQ ID NO: 5226588 - DNA, 25 bp, Homo sapien
tattgagagctaaccatgtgtcaga

SEQ ID NO: 5226589 - DNA, 25 bp, Homo sapien
tttaccccaccctgttgagtagctg

SEQ ID NO: 5226590 - DNA, 25 bp, Homo sapien
tccagaggcaatgctgcactacact

SEQ ID NO: 5226591 - DNA, 25 bp, Homo sapien
gtatccacatcagaaagtggtagca

SEQ ID NO: 5226592 - DNA, 25 bp, Homo sapien
gttagtgtccattctgatttcaaaa

SEQ ID NO: 5226593 - DNA, 25 bp, Homo sapien
cctgttagtgtccattctgatttca

SEQ ID NO: 5226594 - DNA, 25 bp, Homo sapien
gaaagtggtagcacttgattcctgt

SEQ ID NO: 5226595 - DNA, 25 bp, Homo sapien
agaaagcccagcaaatgaaatatat

SEQ ID NO: 5226596 - DNA, 25 bp, Homo sapien
aaagcccagcaaatgaaatatatgt

SEQ ID NO: 5226597 - DNA, 25 bp, Homo sapien
ttaattcagaaagcccagcaaatga

SEQ ID NO: 5226598 - DNA, 25 bp, Homo sapien
aattcagaaagcccagcaaatgaaa

SEQ ID NO: 5226599 - DNA, 25 bp, Homo sapien
ggtcaggatccatgtagcagagctt

SEQ ID NO: 5226600 - DNA, 25 bp, Homo sapien
gataagagcttggatccctacagat

SEQ ID NO: 5226601 - DNA, 25 bp, Homo sapien
tatgccagaatagcggagtacccga

SEQ ID NO: 5226602 - DNA, 25 bp, Homo sapien
cactaataggaaagacagcggttga

SEQ ID NO: 5226603 - DNA, 25 bp, Homo sapien
aaacaataagcagatctggaaacac

SEQ ID NO: 5226604 - DNA, 25 bp, Homo sapien
caaacaataagcagatctggaaaca

SEQ ID NO: 5226605 - DNA, 25 bp, Homo sapien
ccaaacaataagcagatctggaaac

SEQ ID NO: 5226606 - DNA, 25 bp, Homo sapien
ccgcattttcatagcaaggaatcct

SEQ ID NO: 5226607 - DNA, 25 bp, Homo sapien
cattgcattcaaatgccgcattttc

SEQ ID NO: 5226608 - DNA, 25 bp, Homo sapien
tcaaatgccgcattttcatagcaag

SEQ ID NO: 5226609 - DNA, 25 bp, Homo sapien
cccattgcattcaaatgccgcattt

SEQ ID NO: 5226610 - DNA, 25 bp, Homo sapien
ggtcctctaaatggtgcaaaaactg

SEQ ID NO: 5226611 - DNA, 25 bp, Homo sapien
tcagctgagcagaacccaaatcgtg

SEQ ID NO: 5226612 - DNA, 25 bp, Homo sapien
caaaagagctagtttagagatccaa

SEQ ID NO: 5226613 - DNA, 25 bp, Homo sapien
catcttacattatgcgcaggaccaa

SEQ ID NO: 5226614 - DNA, 25 bp, Homo sapien
gcatcttccatctctagtttgtcca

SEQ ID NO: 5226615 - DNA, 25 bp, Homo sapien
agcaacaggaagagcttctactgaa

SEQ ID NO: 5226616 - DNA, 25 bp, Homo sapien
tgcatcttccatctctagtttgtcc

SEQ ID NO: 5226617 - DNA, 25 bp, Homo sapien
gcttctactgaatagattttagtct

SEQ ID NO: 5226618 - DNA, 25 bp, Homo sapien
ttaatttttacaaatgcatgtctcc

SEQ ID NO: 5226619 - DNA, 25 bp, Homo sapien
tgacaactgacttgtcatctttatt

SEQ ID NO: 5226620 - DNA, 25 bp, Homo sapien
ttattaatttttacaaatgcatgtc

SEQ ID NO: 5226621 - DNA, 25 bp, Homo sapien
ttgacaactgacttgtcatctttat

SEQ ID NO: 5226622 - DNA, 25 bp, Homo sapien
ttttaatagtgaactgaggtaacat

SEQ ID NO: 5226623 - DNA, 25 bp, Homo sapien
attttaatagtgaactgaggtaaca

SEQ ID NO: 5226624 - DNA, 25 bp, Homo sapien
gctgtaagttccacaagagaccatg

SEQ ID NO: 5226625 - DNA, 25 bp, Homo sapien
ccagcgagccaaatactaggtagac

SEQ ID NO: 5226626 - DNA, 25 bp, Homo sapien
agtgcccggcacatactaagatgtc

SEQ ID NO: 5226627 - DNA, 25 bp, Homo sapien
taatagcagctacacctcaaagggt

SEQ ID NO: 5226628 - DNA, 25 bp, Homo sapien
tacaagtcagcgcaaaacagggtgg

SEQ ID NO: 5226629 - DNA, 25 bp, Homo sapien
tgctgtgtgaagacaaggctgtgcc

SEQ ID NO: 5226630 - DNA, 25 bp, Homo sapien
taggtagttccaagtagatgcccca

SEQ ID NO: 5226631 - DNA, 25 bp, Homo sapien
tccaagccagttgcagggtgactac

SEQ ID NO: 5226632 - DNA, 25 bp, Homo sapien
aacagcacaggagtagtggctgtcg

SEQ ID NO: 5226633 - DNA, 25 bp, Homo sapien
cagcacaggagtagtggctgtcggg

SEQ ID NO: 5226634 - DNA, 25 bp, Homo sapien
tgcaacagcacaggagtagtggctg

SEQ ID NO: 5226635 - DNA, 25 bp, Homo sapien
caacagcacaggagtagtggctgtc

SEQ ID NO: 5226636 - DNA, 25 bp, Homo sapien
tggatgacgtggaacccccgttaca

SEQ ID NO: 5226637 - DNA, 25 bp, Homo sapien
catcctgtcttaaggcactgtgatc

SEQ ID NO: 5226638 - DNA, 25 bp, Homo sapien
tcatcctgtcttaaggcactgtgat

SEQ ID NO: 5226639 - DNA, 25 bp, Homo sapien
tctgtattctcaaacaatgtgaccg

SEQ ID NO: 5226640 - DNA, 25 bp, Homo sapien
aatgtgaccgcactgccttagttgc

SEQ ID NO: 5226641 - DNA, 25 bp, Homo sapien
tggagcactctaaggaaaacactga

SEQ ID NO: 5226642 - DNA, 25 bp, Homo sapien
gaggctatgactggaaaacctgttc

SEQ ID NO: 5226643 - DNA, 25 bp, Homo sapien
tgcgatcatggctcgctacagcttc

SEQ ID NO: 5226644 - DNA, 25 bp, Homo sapien
ttacagatgtatgccaccaagtcca

SEQ ID NO: 5226645 - DNA, 25 bp, Homo sapien
agatgtatgccaccaagtccagcta

SEQ ID NO: 5226646 - DNA, 25 bp, Homo sapien
ttcaacctcccagcctcgagcaatc

SEQ ID NO: 5226647 - DNA, 25 bp, Homo sapien
gtctaaatagacactttcactgaat

SEQ ID NO: 5226648 - DNA, 25 bp, Homo sapien
tcagccaccaaaaaggactggacaa

SEQ ID NO: 5226649 - DNA, 25 bp, Homo sapien
ttcactgaataagtaaaggcctttc

SEQ ID NO: 5226650 - DNA, 25 bp, Homo sapien
tacagtctgataacagatgagcctt

SEQ ID NO: 5226651 - DNA, 25 bp, Homo sapien
aaagactggaacgtgtaagtgtggt

SEQ ID NO: 5226652 - DNA, 25 bp, Homo sapien
ctctgccttcgcaaacactgtttct

SEQ ID NO: 5226653 - DNA, 25 bp, Homo sapien
gcacttacagttccctcaaatagaa

SEQ ID NO: 5226654 - DNA, 25 bp, Homo sapien
cctgacctctgacacgatgttctgt

SEQ ID NO: 5226655 - DNA, 25 bp, Homo sapien
cttctgggttgggtgatatatccat

SEQ ID NO: 5226656 - DNA, 25 bp, Homo sapien
ggtacatataatcaagatattgaat

SEQ ID NO: 5226657 - DNA, 25 bp, Homo sapien
taaagatgtattattcttcacaaca

SEQ ID NO: 5226658 - DNA, 25 bp, Homo sapien
cccatttggcttttaatcagcaaca

SEQ ID NO: 5226659 - DNA, 25 bp, Homo sapien
cagcatcataactagatcctaatta

SEQ ID NO: 5226660 - DNA, 25 bp, Homo sapien
ttgtactgagtgctacaaagcaggg

SEQ ID NO: 5226661 - DNA, 25 bp, Homo sapien
gctcatcaggtacctttgaagccac

SEQ ID NO: 5226662 - DNA, 25 bp, Homo sapien
cactgtgtggtgagcaatgaataga

SEQ ID NO: 5226663 - DNA, 25 bp, Homo sapien
gcatgccagttagtagtatgacact

SEQ ID NO: 5226664 - DNA, 25 bp, Homo sapien
gttgcgcctccactaggaaaacatt

SEQ ID NO: 5226665 - DNA, 25 bp, Homo sapien
agtctttcttcatgttgcgcctcca

SEQ ID NO: 5226666 - DNA, 25 bp, Homo sapien
ttcatgttgcgcctccactaggaaa

SEQ ID NO: 5226667 - DNA, 25 bp, Homo sapien
gcgcctccactaggaaaacatttct

SEQ ID NO: 5226668 - DNA, 25 bp, Homo sapien
tctctttgtcctccacactcacagg

SEQ ID NO: 5226669 - DNA, 25 bp, Homo sapien
tccacactcacaggaatgtcacaga

SEQ ID NO: 5226670 - DNA, 25 bp, Homo sapien
tgtcctccacactcacaggaatgtc

SEQ ID NO: 5226671 - DNA, 25 bp, Homo sapien
gaatgtcacagactctcaggacccc

SEQ ID NO: 5226672 - DNA, 25 bp, Homo sapien
aggtcctgtgccgcgggcccagact

SEQ ID NO: 5226673 - DNA, 25 bp, Homo sapien
actcaggcagcgcagttacgggagc

SEQ ID NO: 5226674 - DNA, 25 bp, Homo sapien
agcatcatctgccagcacgaggcac

SEQ ID NO: 5226675 - DNA, 25 bp, Homo sapien
tcctgctttaccataaaccaacagc

SEQ ID NO: 5226676 - DNA, 25 bp, Homo sapien
gcttctgagagtgaagacacaaacg

SEQ ID NO: 5226677 - DNA, 25 bp, Homo sapien
ccatgcttctgagagtgaagacaca

SEQ ID NO: 5226678 - DNA, 25 bp, Homo sapien
ttagccatgcttctgagagtgaaga

SEQ ID NO: 5226679 - DNA, 25 bp, Homo sapien
tctgagagtgaagacacaaacgaac

SEQ ID NO: 5226680 - DNA, 25 bp, Homo sapien
gagaagaagagcaacgaagtgaaag

SEQ ID NO: 5226681 - DNA, 25 bp, Homo sapien
gaaggaacaataagaggcctggagt

SEQ ID NO: 5226682 - DNA, 25 bp, Homo sapien
tgaaaggaggagaacgtgcaagggc

SEQ ID NO: 5226683 - DNA, 25 bp, Homo sapien
aagaagagcaacgaagtgaaaggag

SEQ ID NO: 5226684 - DNA, 25 bp, Homo sapien
atttgctaaactataaatgggctcg

SEQ ID NO: 5226685 - DNA, 25 bp, Homo sapien
catgagctcagtgcatgatttttcc

SEQ ID NO: 5226686 - DNA, 25 bp, Homo sapien
caaccattgtggactgatagtgtgg

SEQ ID NO: 5226687 - DNA, 25 bp, Homo sapien
aaagggcatcacatattaaggaggc

SEQ ID NO: 5226688 - DNA, 25 bp, Homo sapien
tgtgtgcagccacccttctcctcca

SEQ ID NO: 5226689 - DNA, 25 bp, Homo sapien
cctcctgcagctgctctctctctcc

SEQ ID NO: 5226690 - DNA, 25 bp, Homo sapien
ctgctgtgtgcagccacccttctcc

SEQ ID NO: 5226691 - DNA, 25 bp, Homo sapien
gctgtgtgcagccacccttctcctc

SEQ ID NO: 5226692 - DNA, 25 bp, Homo sapien
gatcactgacacagcgagagggcag

SEQ ID NO: 5226693 - DNA, 25 bp, Homo sapien
cagggaggacgagtcatttgtcttt

SEQ ID NO: 5226694 - DNA, 25 bp, Homo sapien
gattgtctatgatcagctgagcggc

SEQ ID NO: 5226695 - DNA, 25 bp, Homo sapien
tgaaaagcagcagattagctagagc

SEQ ID NO: 5226696 - DNA, 25 bp, Homo sapien
aaacgatcttgtccgttctggcata

SEQ ID NO: 5226697 - DNA, 25 bp, Homo sapien
tctcaaacgatcttgtccgttctgg

SEQ ID NO: 5226698 - DNA, 25 bp, Homo sapien
cttgtccgttctggcatatcatgtg

SEQ ID NO: 5226699 - DNA, 25 bp, Homo sapien
tcctcttctcaaacgatcttgtccg

SEQ ID NO: 5226700 - DNA, 25 bp, Homo sapien
tactcttcatctaccggactctgct

SEQ ID NO: 5226701 - DNA, 25 bp, Homo sapien
gaattttcattggactcaggctgac

SEQ ID NO: 5226702 - DNA, 25 bp, Homo sapien
ggcacattctcccactacagtaaga

SEQ ID NO: 5226703 - DNA, 25 bp, Homo sapien
cagtgtttcaactggccagaccgag

SEQ ID NO: 5226704 - DNA, 25 bp, Homo sapien
ccatagcagtagaataatgagcagc

SEQ ID NO: 5226705 - DNA, 25 bp, Homo sapien
ttaaaaagatcatggttcaccctct

SEQ ID NO: 5226706 - DNA, 25 bp, Homo sapien
gaaaactgctatatgtgcctgacgc

SEQ ID NO: 5226707 - DNA, 25 bp, Homo sapien
cacacatgctgaactctaaagtcca

SEQ ID NO: 5226708 - DNA, 25 bp, Homo sapien
ccagctgaacactcgcatggttacc

SEQ ID NO: 5226709 - DNA, 25 bp, Homo sapien
cagctgaacactcgcatggttacca

SEQ ID NO: 5226710 - DNA, 25 bp, Homo sapien
agctgaacactcgcatggttaccat

SEQ ID NO: 5226711 - DNA, 25 bp, Homo sapien
tggacatccatcaataggtgtggtg

SEQ ID NO: 5226712 - DNA, 25 bp, Homo sapien
ttgcagaatttgtgctggcagactc

SEQ ID NO: 5226713 - DNA, 25 bp, Homo sapien
tgtggtgtggtaccctcaattagcc

SEQ ID NO: 5226714 - DNA, 25 bp, Homo sapien
ggtaccctcaattagcctcacaaaa

SEQ ID NO: 5226715 - DNA, 25 bp, Homo sapien
aattccagcccaattcagctgcttt

SEQ ID NO: 5226716 - DNA, 25 bp, Homo sapien
agtcgcccttgttgggtgaagctgc

SEQ ID NO: 5226717 - DNA, 25 bp, Homo sapien
tcatgctgctctaagtcgcccttgt

SEQ ID NO: 5226718 - DNA, 25 bp, Homo sapien
tgccactctgatatgcaattccagc

SEQ ID NO: 5226719 - DNA, 25 bp, Homo sapien
caacccatggattcatgtgccaaat

SEQ ID NO: 5226720 - DNA, 25 bp, Homo sapien
gcacagatcagaaggatcactgagt

SEQ ID NO: 5226721 - DNA, 25 bp, Homo sapien
aaatgcttgtcgtttaaaccatgac

SEQ ID NO: 5226722 - DNA, 25 bp, Homo sapien
tcactgagtccaacccatggattca

SEQ ID NO: 5226723 - DNA, 25 bp, Homo sapien
ctccatcatgtcattctctaaactg

SEQ ID NO: 5226724 - DNA, 25 bp, Homo sapien
gcaaaatctgttattactcactttc

SEQ ID NO: 5226725 - DNA, 25 bp, Homo sapien
ccatcatgtcattctctaaactggt

SEQ ID NO: 5226726 - DNA, 25 bp, Homo sapien
agcaaaatctgttattactcacttt

SEQ ID NO: 5226727 - DNA, 25 bp, Homo sapien
ctgaaaaacttgatcaagagggtta

SEQ ID NO: 5226728 - DNA, 25 bp, Homo sapien
tcctgaaaaacttgatcaagagggt

SEQ ID NO: 5226729 - DNA, 25 bp, Homo sapien
aaaaacttgatcaagagggttatca

SEQ ID NO: 5226730 - DNA, 25 bp, Homo sapien
catcctgaaaaacttgatcaagagg

SEQ ID NO: 5226731 - DNA, 25 bp, Homo sapien
agggtcctcagcctttccgtgaaga

SEQ ID NO: 5226732 - DNA, 25 bp, Homo sapien
ctttcccacgtgctgatgtattttc

SEQ ID NO: 5226733 - DNA, 25 bp, Homo sapien
tccgtgaagacgatcaacgttgctc

SEQ ID NO: 5226734 - DNA, 25 bp, Homo sapien
ctggccaacatgtggtaggcgcagg

SEQ ID NO: 5226735 - DNA, 25 bp, Homo sapien
aaaagtgttttctctttcactgctt

SEQ ID NO: 5226736 - DNA, 25 bp, Homo sapien
aaaaagtgttttctctttcactgct

SEQ ID NO: 5226737 - DNA, 25 bp, Homo sapien
agtgttttctctttcactgcttgct

SEQ ID NO: 5226738 - DNA, 25 bp, Homo sapien
gttttctctttcactgcttgctcac

SEQ ID NO: 5226739 - DNA, 25 bp, Homo sapien
ggactataacatgaattatgaccca

SEQ ID NO: 5226740 - DNA, 25 bp, Homo sapien
aaagggactataacatgaattatga

SEQ ID NO: 5226741 - DNA, 25 bp, Homo sapien
agggactataacatgaattatgacc

SEQ ID NO: 5226742 - DNA, 25 bp, Homo sapien
gactataacatgaattatgacccac

SEQ ID NO: 5226743 - DNA, 25 bp, Homo sapien
tgcttgtcagttgctctcattgacc

SEQ ID NO: 5226744 - DNA, 25 bp, Homo sapien
tgaccctgaacccaaggacattgca

SEQ ID NO: 5226745 - DNA, 25 bp, Homo sapien
ttgcttggtgtgcattgtttgtgcc

SEQ ID NO: 5226746 - DNA, 25 bp, Homo sapien
cttggtgtgcattgtttgtgcctgg

SEQ ID NO: 5226747 - DNA, 25 bp, Homo sapien
tgaaatattattaccaaaagccagg

SEQ ID NO: 5226748 - DNA, 25 bp, Homo sapien
cagggtcatgttgaaggtgaacagc

SEQ ID NO: 5226749 - DNA, 25 bp, Homo sapien
ccaaaagccagggtcatgttgaagg

SEQ ID NO: 5226750 - DNA, 25 bp, Homo sapien
ctatgaaatattattaccaaaagcc

SEQ ID NO: 5226751 - DNA, 25 bp, Homo sapien
cagcatccccaaaagataaagggtt

SEQ ID NO: 5226752 - DNA, 25 bp, Homo sapien
aaccagcatccccaaaagataaagg

SEQ ID NO: 5226753 - DNA, 25 bp, Homo sapien
aaaagataaagggtttcaagcagag

SEQ ID NO: 5226754 - DNA, 25 bp, Homo sapien
ccaaaagataaagggtttcaagcag

SEQ ID NO: 5226755 - DNA, 25 bp, Homo sapien
gataaggaacaagctgaggtcacac

SEQ ID NO: 5226756 - DNA, 25 bp, Homo sapien
ccagaggcaggaacactaggccaaa

SEQ ID NO: 5226757 - DNA, 25 bp, Homo sapien
taaataaagttgtatcccagagctg

SEQ ID NO: 5226758 - DNA, 25 bp, Homo sapien
tatttcctcagtatagatgtccaga

SEQ ID NO: 5226759 - DNA, 25 bp, Homo sapien
aatctcttgtctgtgttgggctaag

SEQ ID NO: 5226760 - DNA, 25 bp, Homo sapien
ttgtccacaatctcttgtctgtgtt

SEQ ID NO: 5226761 - DNA, 25 bp, Homo sapien
ctcttgtctgtgttgggctaaggat

SEQ ID NO: 5226762 - DNA, 25 bp, Homo sapien
cacaatctcttgtctgtgttgggct

SEQ ID NO: 5226763 - DNA, 25 bp, Homo sapien
ctcccatggggtggtatatgttata

SEQ ID NO: 5226764 - DNA, 25 bp, Homo sapien
ccatggggtggtatatgttatagga

SEQ ID NO: 5226765 - DNA, 25 bp, Homo sapien
ctctcccatggggtggtatatgtta

SEQ ID NO: 5226766 - DNA, 25 bp, Homo sapien
tcccatggggtggtatatgttatag

SEQ ID NO: 5226767 - DNA, 25 bp, Homo sapien
tgggtctcataggtcactcctagga

SEQ ID NO: 5226768 - DNA, 25 bp, Homo sapien
ggtgggtctcataggtcactcctag

SEQ ID NO: 5226769 - DNA, 25 bp, Homo sapien
gggtctcataggtcactcctaggaa

SEQ ID NO: 5226770 - DNA, 25 bp, Homo sapien
ggtctcataggtcactcctaggaaa

SEQ ID NO: 5226771 - DNA, 25 bp, Homo sapien
ttctttgacgaaccattggcaaaaa

SEQ ID NO: 5226772 - DNA, 25 bp, Homo sapien
gcaatccattctctggcgtgaattc

SEQ ID NO: 5226773 - DNA, 25 bp, Homo sapien
ctttgacgaaccattggcaaaaagc

SEQ ID NO: 5226774 - DNA, 25 bp, Homo sapien
gaattccacagtccatccaaatgat

SEQ ID NO: 5226775 - DNA, 25 bp, Homo sapien
gtatgagaaagctaaagacacttac

SEQ ID NO: 5226776 - DNA, 25 bp, Homo sapien
cagtatgagaaagctaaagacactt

SEQ ID NO: 5226777 - DNA, 25 bp, Homo sapien
agtatgagaaagctaaagacactta

SEQ ID NO: 5226778 - DNA, 25 bp, Homo sapien
aaccatctatgttaagaactggaag

SEQ ID NO: 5226779 - DNA, 25 bp, Homo sapien
caggttcctaaggagcttgcgtata

SEQ ID NO: 5226780 - DNA, 25 bp, Homo sapien
tgtagatataaccatctatgttaag

SEQ ID NO: 5226781 - DNA, 25 bp, Homo sapien
tacttgagttgtctttatggttttg

SEQ ID NO: 5226782 - DNA, 25 bp, Homo sapien
gaacttccctttaacattaggcagc

SEQ ID NO: 5226783 - DNA, 25 bp, Homo sapien
agaacttccctttaacattaggcag

SEQ ID NO: 5226784 - DNA, 25 bp, Homo sapien
aacttccctttaacattaggcagct

SEQ ID NO: 5226785 - DNA, 25 bp, Homo sapien
cttccctttaacattaggcagcttg

SEQ ID NO: 5226786 - DNA, 25 bp, Homo sapien
aatcacagtgttagtgatgataggt

SEQ ID NO: 5226787 - DNA, 25 bp, Homo sapien
ctgtagcagaggaacatacggatgt

SEQ ID NO: 5226788 - DNA, 25 bp, Homo sapien
tagtgatgataggtggtccttgaac

SEQ ID NO: 5226789 - DNA, 25 bp, Homo sapien
cggatgttgctgttctaaggtttca

SEQ ID NO: 5226790 - DNA, 25 bp, Homo sapien
gagatccgtcccaaaacatgtgcca

SEQ ID NO: 5226791 - DNA, 25 bp, Homo sapien
gaaatttcgattgagatccgtccca

SEQ ID NO: 5226792 - DNA, 25 bp, Homo sapien
tacaccaagatgcattgaaatttcg

SEQ ID NO: 5226793 - DNA, 25 bp, Homo sapien
cccaaaacatgtgccattattatgg

SEQ ID NO: 5226794 - DNA, 25 bp, Homo sapien
tgcccataagagtgcatggtcagga

SEQ ID NO: 5226795 - DNA, 25 bp, Homo sapien
ggtgtgagaattaactgcccataag

SEQ ID NO: 5226796 - DNA, 25 bp, Homo sapien
gctggcaacagctttagtctctggt

SEQ ID NO: 5226797 - DNA, 25 bp, Homo sapien
gatcttggcagtttctagaggcacc

SEQ ID NO: 5226798 - DNA, 25 bp, Homo sapien
cttccaacaaaggtctacagtggtt

SEQ ID NO: 5226799 - DNA, 25 bp, Homo sapien
gaacagagcaagcttagccccactt

SEQ ID NO: 5226800 - DNA, 25 bp, Homo sapien
ggagatgtgcaaaaggtataaccta

SEQ ID NO: 5226801 - DNA, 25 bp, Homo sapien
catatagtgcaagtgttcctggacc

SEQ ID NO: 5226802 - DNA, 25 bp, Homo sapien
ggtggaactcctgattgtacttctc

SEQ ID NO: 5226803 - DNA, 25 bp, Homo sapien
tgcctttcctcgaatcctggctgtg

SEQ ID NO: 5226804 - DNA, 25 bp, Homo sapien
gatcctcagcttagcaatttgggca

SEQ ID NO: 5226805 - DNA, 25 bp, Homo sapien
catgaggaattactatgcggaagca

SEQ ID NO: 5226806 - DNA, 25 bp, Homo sapien
taaaatatctgcactcgatccaact

SEQ ID NO: 5226807 - DNA, 25 bp, Homo sapien
tctataattggttccatactttgct

SEQ ID NO: 5226808 - DNA, 25 bp, Homo sapien
cgatccaactctataattggttcca

SEQ ID NO: 5226809 - DNA, 25 bp, Homo sapien
gctttcaatgcatttgctgccttct

SEQ ID NO: 5226810 - DNA, 25 bp, Homo sapien
tcctgttaactcttgtgccttctag

SEQ ID NO: 5226811 - DNA, 25 bp, Homo sapien
ttcctgttaactcttgtgccttcta

SEQ ID NO: 5226812 - DNA, 25 bp, Homo sapien
gtgccttctagcttgccagctcttt

SEQ ID NO: 5226813 - DNA, 25 bp, Homo sapien
gggaatcccaatgtctcgggcccaa

SEQ ID NO: 5226814 - DNA, 25 bp, Homo sapien
tcaaacgtatatgagaagggaatcc

SEQ ID NO: 5226815 - DNA, 25 bp, Homo sapien
ccagcactgtccgagtgccagtgtt

SEQ ID NO: 5226816 - DNA, 25 bp, Homo sapien
tgtttcgcatacacatcatccagga

SEQ ID NO: 5226817 - DNA, 25 bp, Homo sapien
agcaggcccagcagcatagtggcag

SEQ ID NO: 5226818 - DNA, 25 bp, Homo sapien
agaagagacatgcaggacaccagca

SEQ ID NO: 5226819 - DNA, 25 bp, Homo sapien
aggcccagcagcatagtggcagatg

SEQ ID NO: 5226820 - DNA, 25 bp, Homo sapien
ccagcagcatagtggcagatgtcac

SEQ ID NO: 5226821 - DNA, 25 bp, Homo sapien
taggggatgctgaatcgtctgttcc

SEQ ID NO: 5226822 - DNA, 25 bp, Homo sapien
ccaggatgctttatgaagggttata

SEQ ID NO: 5226823 - DNA, 25 bp, Homo sapien
caggccaggatgctttatgaagggt

SEQ ID NO: 5226824 - DNA, 25 bp, Homo sapien
tgctgaatcgtctgttccagctttt

SEQ ID NO: 5226825 - DNA, 25 bp, Homo sapien
gctcttttatgtgtagtgaagtgaa

SEQ ID NO: 5226826 - DNA, 25 bp, Homo sapien
tttcagtactttgacatgacacctg

SEQ ID NO: 5226827 - DNA, 25 bp, Homo sapien
gaggtaagacctagaacttctaagc

SEQ ID NO: 5226828 - DNA, 25 bp, Homo sapien
gaactgattttcctaaggttgtaga

SEQ ID NO: 5226829 - DNA, 25 bp, Homo sapien
gataggatctgattcgccagctacc

SEQ ID NO: 5226830 - DNA, 25 bp, Homo sapien
gaagtgaatatcatccgctgtgctc

SEQ ID NO: 5226831 - DNA, 25 bp, Homo sapien
cataccgggagttgtgaagcctgga

SEQ ID NO: 5226832 - DNA, 25 bp, Homo sapien
cattagtgttctcagggccaaaaag

SEQ ID NO: 5226833 - DNA, 25 bp, Homo sapien
gctaaccagtttgtgccctctgaca

SEQ ID NO: 5226834 - DNA, 25 bp, Homo sapien
tctgacactcgtataacagtcctga

SEQ ID NO: 5226835 - DNA, 25 bp, Homo sapien
aatacctgaaccaagtgctaaccag

SEQ ID NO: 5226836 - DNA, 25 bp, Homo sapien
tcctgtgaagtaggaatgaacgtta

SEQ ID NO: 5226837 - DNA, 25 bp, Homo sapien
gttgctcagatgctgaagatatctg

SEQ ID NO: 5226838 - DNA, 25 bp, Homo sapien
tgctcagatgctgaagatatctgtc

SEQ ID NO: 5226839 - DNA, 25 bp, Homo sapien
ccctccaaagtctttattgatttca

SEQ ID NO: 5226840 - DNA, 25 bp, Homo sapien
ttgatttcattgttgctcagatgct

SEQ ID NO: 5226841 - DNA, 25 bp, Homo sapien
gttttggcagctttgtggtcaaaac

SEQ ID NO: 5226842 - DNA, 25 bp, Homo sapien
aatgttttggcagctttgtggtcaa

SEQ ID NO: 5226843 - DNA, 25 bp, Homo sapien
ttgtaatgttttggcagctttgtgg

SEQ ID NO: 5226844 - DNA, 25 bp, Homo sapien
atttgtaatgttttggcagctttgt

SEQ ID NO: 5226845 - DNA, 25 bp, Homo sapien
tgaaccatcacctctaatgctaagg

SEQ ID NO: 5226846 - DNA, 25 bp, Homo sapien
catctcgtctagaggtgaaccatca

SEQ ID NO: 5226847 - DNA, 25 bp, Homo sapien
tgctaaggcgggtcccaatcacatt

SEQ ID NO: 5226848 - DNA, 25 bp, Homo sapien
gaaccagttctagtgtttgccccat

SEQ ID NO: 5226849 - DNA, 25 bp, Homo sapien
tataatccaagaaatctaacagtgg

SEQ ID NO: 5226850 - DNA, 25 bp, Homo sapien
atccaagaaatctaacagtggatgt

SEQ ID NO: 5226851 - DNA, 25 bp, Homo sapien
gaaggtgtataatccaagaaatcta

SEQ ID NO: 5226852 - DNA, 25 bp, Homo sapien
cacctgaaggtgtataatccaagaa

SEQ ID NO: 5226853 - DNA, 25 bp, Homo sapien
tcctactccctgctgttaggcgttc

SEQ ID NO: 5226854 - DNA, 25 bp, Homo sapien
atttattttcctactccctgctgtt

SEQ ID NO: 5226855 - DNA, 25 bp, Homo sapien
gctgttaggcgttctattaatacca

SEQ ID NO: 5226856 - DNA, 25 bp, Homo sapien
tccctgctgttaggcgttctattaa

SEQ ID NO: 5226857 - DNA, 25 bp, Homo sapien
ggacagccacgatggctggtgagtg

SEQ ID NO: 5226858 - DNA, 25 bp, Homo sapien
ctaaggacagccacgatggctggtg

SEQ ID NO: 5226859 - DNA, 25 bp, Homo sapien
ccacgatggctggtgagtgaagcca

SEQ ID NO: 5226860 - DNA, 25 bp, Homo sapien
cgatggctggtgagtgaagccatcc

SEQ ID NO: 5226861 - DNA, 25 bp, Homo sapien
gacaggaaagccaacggccatatct

SEQ ID NO: 5226862 - DNA, 25 bp, Homo sapien
ggagcccaagcctctctagattctc

SEQ ID NO: 5226863 - DNA, 25 bp, Homo sapien
cagaagaggtggcaataatactgtg

SEQ ID NO: 5226864 - DNA, 25 bp, Homo sapien
gccatatctaaggtagtccaggaga

SEQ ID NO: 5226865 - DNA, 25 bp, Homo sapien
cttgccccaggatttgggacgccag

SEQ ID NO: 5226866 - DNA, 25 bp, Homo sapien
cttcagtgtccaccattttggtttc

SEQ ID NO: 5226867 - DNA, 25 bp, Homo sapien
ccaggatttgggacgccagtttctg

SEQ ID NO: 5226868 - DNA, 25 bp, Homo sapien
tttggtttcctcagaccactcctct

SEQ ID NO: 5226869 - DNA, 25 bp, Homo sapien
ggaagagtgcccctagggcaagacc

SEQ ID NO: 5226870 - DNA, 25 bp, Homo sapien
ttttgggaagagtgcccctagggca

SEQ ID NO: 5226871 - DNA, 25 bp, Homo sapien
gtgcccctagggcaagacccacagt

SEQ ID NO: 5226872 - DNA, 25 bp, Homo sapien
gggaggagcaggaccatttgactcc

SEQ ID NO: 5226873 - DNA, 25 bp, Homo sapien
ggagtctgcggcatgtcaacaaatg

SEQ ID NO: 5226874 - DNA, 25 bp, Homo sapien
gcacagctgtaccagtgtcctctgt

SEQ ID NO: 5226875 - DNA, 25 bp, Homo sapien
ggcatgtcaacaaatgctcagtctt

SEQ ID NO: 5226876 - DNA, 25 bp, Homo sapien
cgtcccgcaggagtctgcggcatgt

SEQ ID NO: 5226877 - DNA, 25 bp, Homo sapien
tataagcagcatctgtgtcctgtac

SEQ ID NO: 5226878 - DNA, 25 bp, Homo sapien
ttataagcagcatctgtgtcctgta

SEQ ID NO: 5226879 - DNA, 25 bp, Homo sapien
ctttaatgccaatttaagggatcac

SEQ ID NO: 5226880 - DNA, 25 bp, Homo sapien
tatgaaaaaccacttggatggtccc

SEQ ID NO: 5226881 - DNA, 25 bp, Homo sapien
gggatcacatctgtgtcactaataa

SEQ ID NO: 5226882 - DNA, 25 bp, Homo sapien
taaaagaagggattcttgtcatctg

SEQ ID NO: 5226883 - DNA, 25 bp, Homo sapien
cattattaaatccctttgatgcttt

SEQ ID NO: 5226884 - DNA, 25 bp, Homo sapien
ccattattaaatccctttgatgctt

SEQ ID NO: 5226885 - DNA, 25 bp, Homo sapien
attattaaatccctttgatgctttc

SEQ ID NO: 5226886 - DNA, 25 bp, Homo sapien
cctgtgagtggagtgaacgcacata

SEQ ID NO: 5226887 - DNA, 25 bp, Homo sapien
tccctcaggtacaggcgctttcggt

SEQ ID NO: 5226888 - DNA, 25 bp, Homo sapien
ggagccctgagcattagatcttgac

SEQ ID NO: 5226889 - DNA, 25 bp, Homo sapien
gaaactaatgcatgctgtgaggcac

SEQ ID NO: 5226890 - DNA, 25 bp, Homo sapien
cgaaaccacactgggagttccacat

SEQ ID NO: 5226891 - DNA, 25 bp, Homo sapien
taattgccagtatatcgaaaccaca

SEQ ID NO: 5226892 - DNA, 25 bp, Homo sapien
ggaggagtagccaccagtgcctaat

SEQ ID NO: 5226893 - DNA, 25 bp, Homo sapien
gaaaacaggctactgacgtttcgga

SEQ ID NO: 5226894 - DNA, 25 bp, Homo sapien
cataaaagtcctcgggaaacaggtg

SEQ ID NO: 5226895 - DNA, 25 bp, Homo sapien
gatggaccccacgtcagcataatga

SEQ ID NO: 5226896 - DNA, 25 bp, Homo sapien
gagagagaaatcctgggccatcact

SEQ ID NO: 5226897 - DNA, 25 bp, Homo sapien
tatatgctcgcacctagacatgcgc

SEQ ID NO: 5226898 - DNA, 25 bp, Homo sapien
tttgaaaactagagggcctatcctg

SEQ ID NO: 5226899 - DNA, 25 bp, Homo sapien
ccacgacgaactgcctgaggcttca

SEQ ID NO: 5226900 - DNA, 25 bp, Homo sapien
attttcgggaagtggccacctgcca

SEQ ID NO: 5226901 - DNA, 25 bp, Homo sapien
ttttgaaatcttaagagggccagca

SEQ ID NO: 5226902 - DNA, 25 bp, Homo sapien
ttttcgaactgaccaatgcaaggct

SEQ ID NO: 5226903 - DNA, 25 bp, Homo sapien
cagagatggttactaagagccgcta

SEQ ID NO: 5226904 - DNA, 25 bp, Homo sapien
aaaacgtccatcacctctgcagtgg

SEQ ID NO: 5226905 - DNA, 25 bp, Homo sapien
tctttagccgagttgacacctgtga

SEQ ID NO: 5226906 - DNA, 25 bp, Homo sapien
aagtggccaagagaataaagtcctt

SEQ ID NO: 5226907 - DNA, 25 bp, Homo sapien
taaatcacagtatatcccttgagcc

SEQ ID NO: 5226908 - DNA, 25 bp, Homo sapien
gaagcagccagtcagatgggacatc

SEQ ID NO: 5226909 - DNA, 25 bp, Homo sapien
ggatgtccagctctcgaagcagcca

SEQ ID NO: 5226910 - DNA, 25 bp, Homo sapien
gttaacatgcactgagatcctacga

SEQ ID NO: 5226911 - DNA, 25 bp, Homo sapien
taagtaccttgcatagatcatctca

SEQ ID NO: 5226912 - DNA, 25 bp, Homo sapien
tgtgccagtccgtattctaagtacc

SEQ ID NO: 5226913 - DNA, 25 bp, Homo sapien
gcctgtaagtagtatcacaagcagt

SEQ ID NO: 5226914 - DNA, 25 bp, Homo sapien
tagtcccgtgtatttccatggctgt

SEQ ID NO: 5226915 - DNA, 25 bp, Homo sapien
gaaactactagaagactgcatacat

SEQ ID NO: 5226916 - DNA, 25 bp, Homo sapien
tgtttgttggctaaacctcactcag

SEQ ID NO: 5226917 - DNA, 25 bp, Homo sapien
ccttgggttatgagaaacatggtac

SEQ ID NO: 5226918 - DNA, 25 bp, Homo sapien
ctccctcaaagctgtgtgctctctg

SEQ ID NO: 5226919 - DNA, 25 bp, Homo sapien
tgattatctttttcttagtaccacc

SEQ ID NO: 5226920 - DNA, 25 bp, Homo sapien
cttggctatactcactaggagttgt

SEQ ID NO: 5226921 - DNA, 25 bp, Homo sapien
caccttttgccaacctctggaattg

SEQ ID NO: 5226922 - DNA, 25 bp, Homo sapien
gtatgattcacgcttcttgcagggg

SEQ ID NO: 5226923 - DNA, 25 bp, Homo sapien
ttcttgacttggcaaaatcttgagg

SEQ ID NO: 5226924 - DNA, 25 bp, Homo sapien
cagcatgcacgagttccaaagtccc

SEQ ID NO: 5226925 - DNA, 25 bp, Homo sapien
atcttgaggcacttcttctgggagc

SEQ ID NO: 5226926 - DNA, 25 bp, Homo sapien
atgcacgagttccaaagtccccaga

SEQ ID NO: 5226927 - DNA, 25 bp, Homo sapien
tgtgagctggtatggttccttgccc

SEQ ID NO: 5226928 - DNA, 25 bp, Homo sapien
gacacggtttgagaggtcacctgct

SEQ ID NO: 5226929 - DNA, 25 bp, Homo sapien
gatttagacagcgaacccactgaag

SEQ ID NO: 5226930 - DNA, 25 bp, Homo sapien
ttgcccaccgcagcacaaagaagag

SEQ ID NO: 5226931 - DNA, 25 bp, Homo sapien
cgtgtcatccccagatacaatggac

SEQ ID NO: 5226932 - DNA, 25 bp, Homo sapien
tatgcattggccctttcagctacat

SEQ ID NO: 5226933 - DNA, 25 bp, Homo sapien
ccttgctgtttggagataatactgc

SEQ ID NO: 5226934 - DNA, 25 bp, Homo sapien
tcagctacattcacgtgcatagaaa

SEQ ID NO: 5226935 - DNA, 25 bp, Homo sapien
tcagtgcatacttccgaggcttcct

SEQ ID NO: 5226936 - DNA, 25 bp, Homo sapien
ggcttcctctcatcgtactcttctt

SEQ ID NO: 5226937 - DNA, 25 bp, Homo sapien
ctcatcgtactcttcttggagagca

SEQ ID NO: 5226938 - DNA, 25 bp, Homo sapien
aaatgaacatcagtgcatacttccg

SEQ ID NO: 5226939 - DNA, 25 bp, Homo sapien
agaaacagtaattagggcaaatagt

SEQ ID NO: 5226940 - DNA, 25 bp, Homo sapien
gaaacagtaattagggcaaatagta

SEQ ID NO: 5226941 - DNA, 25 bp, Homo sapien
gttgtttagtgtctcaaggcttaca

SEQ ID NO: 5226942 - DNA, 25 bp, Homo sapien
caaggcttacaactaaactgaattt

SEQ ID NO: 5226943 - DNA, 25 bp, Homo sapien
tgaaactaaatactgtcattacaga

SEQ ID NO: 5226944 - DNA, 25 bp, Homo sapien
ctgaatttgaaactaaatactgtca

SEQ ID NO: 5226945 - DNA, 25 bp, Homo sapien
atcatcatccttcagatccagatct

SEQ ID NO: 5226946 - DNA, 25 bp, Homo sapien
cttcctcgccagaagcatcatcctt

SEQ ID NO: 5226947 - DNA, 25 bp, Homo sapien
accaaagtctgtcccttcctcgcca

SEQ ID NO: 5226948 - DNA, 25 bp, Homo sapien
attctttctgggaaccaaagtctgt

SEQ ID NO: 5226949 - DNA, 25 bp, Homo sapien
tcgccagaagcatcatccttctcac

SEQ ID NO: 5226950 - DNA, 25 bp, Homo sapien
tatattaattaacccaactgagaag

SEQ ID NO: 5226951 - DNA, 25 bp, Homo sapien
ggtatattaattaacccaactgaga

SEQ ID NO: 5226952 - DNA, 25 bp, Homo sapien
tgtgctttggagtacaagaagtaat

SEQ ID NO: 5226953 - DNA, 25 bp, Homo sapien
caagaagtaatcgtatgtgtctgtg

SEQ ID NO: 5226954 - DNA, 25 bp, Homo sapien
tgatgagtacgaagcagcaagtgcc

SEQ ID NO: 5226955 - DNA, 25 bp, Homo sapien
gagtacgaagcagcaagtgccttct

SEQ ID NO: 5226956 - DNA, 25 bp, Homo sapien
gcttctgtctgatgagtacgaagca

SEQ ID NO: 5226957 - DNA, 25 bp, Homo sapien
tgtctgatgagtacgaagcagcaag

SEQ ID NO: 5226958 - DNA, 25 bp, Homo sapien
gggctgctaatgtcagggaatgaat

SEQ ID NO: 5226959 - DNA, 25 bp, Homo sapien
tcatgtaaggactgatagaagtggg

SEQ ID NO: 5226960 - DNA, 25 bp, Homo sapien
gaccctcaagtgcttcagagactgg

SEQ ID NO: 5226961 - DNA, 25 bp, Homo sapien
ggaatgaattcctgtgaccctcaag

SEQ ID NO: 5226962 - DNA, 25 bp, Homo sapien
caaatcctgatagtgtaggcgccat

SEQ ID NO: 5226963 - DNA, 25 bp, Homo sapien
tgttagcaaatcctgatagtgtagg

SEQ ID NO: 5226964 - DNA, 25 bp, Homo sapien
tagttgttagcaaatcctgatagtg

SEQ ID NO: 5226965 - DNA, 25 bp, Homo sapien
cattcacatagttgttagcaaatcc

SEQ ID NO: 5226966 - DNA, 25 bp, Homo sapien
taagtatcgataagcattttcagat

SEQ ID NO: 5226967 - DNA, 25 bp, Homo sapien
gattaccagataagtatcgataagc

SEQ ID NO: 5226968 - DNA, 25 bp, Homo sapien
tccaaggttacaagattaccagata

SEQ ID NO: 5226969 - DNA, 25 bp, Homo sapien
ttacaagattaccagataagtatcg

SEQ ID NO: 5226970 - DNA, 25 bp, Homo sapien
ggagaatgtggtcataaatgcatgt

SEQ ID NO: 5226971 - DNA, 25 bp, Homo sapien
gcgttgaatctgagtagtagccaca

SEQ ID NO: 5226972 - DNA, 25 bp, Homo sapien
ccaaaggtcaaatgtgcctgcacat

SEQ ID NO: 5226973 - DNA, 25 bp, Homo sapien
tccttaatgagtgagccttgccctg

SEQ ID NO: 5226974 - DNA, 25 bp, Homo sapien
ttgaatctggaagcttcagaccagg

SEQ ID NO: 5226975 - DNA, 25 bp, Homo sapien
atgggccccaagctaggaagtgtgc

SEQ ID NO: 5226976 - DNA, 25 bp, Homo sapien
tgttgcgcttacacaagcagttgcc

SEQ ID NO: 5226977 - DNA, 25 bp, Homo sapien
taatgaagcatgctttcccctggag

SEQ ID NO: 5226978 - DNA, 25 bp, Homo sapien
tctacattgcgttcatctgttgcgc

SEQ ID NO: 5226979 - DNA, 25 bp, Homo sapien
gcaggatgaccgaaagaccagcaca

SEQ ID NO: 5226980 - DNA, 25 bp, Homo sapien
ggggaagactgagccaccctgtgtt

SEQ ID NO: 5226981 - DNA, 25 bp, Homo sapien
gcttggggatagtggcaggatgacc

SEQ ID NO: 5226982 - DNA, 25 bp, Homo sapien
cctgtgttcattgggtatcatggga

SEQ ID NO: 5226983 - DNA, 25 bp, Homo sapien
cagagatttcttggactactaacag

SEQ ID NO: 5226984 - DNA, 25 bp, Homo sapien
tcagccgggatggatcatcagagat

SEQ ID NO: 5226985 - DNA, 25 bp, Homo sapien
caggagtgccttatcaacagtggac

SEQ ID NO: 5226986 - DNA, 25 bp, Homo sapien
gcaccaccgctgagcagagtgtgag

SEQ ID NO: 5226987 - DNA, 25 bp, Homo sapien
gggtcagaatgacagagcagtatgt

SEQ ID NO: 5226988 - DNA, 25 bp, Homo sapien
ctatatgtctacgtccatggaagcc

SEQ ID NO: 5226989 - DNA, 25 bp, Homo sapien
gcctcctagtttatggcacactggg

SEQ ID NO: 5226990 - DNA, 25 bp, Homo sapien
gacagagcagtatgttgctcttgga

SEQ ID NO: 5226991 - DNA, 25 bp, Homo sapien
gagccagaattaggcatatataaca

SEQ ID NO: 5226992 - DNA, 25 bp, Homo sapien
taacataatacagtgccggttacta

SEQ ID NO: 5226993 - DNA, 25 bp, Homo sapien
tatcttatgtttttctagcatgcag

SEQ ID NO: 5226994 - DNA, 25 bp, Homo sapien
cagtgccggttactacacctgccat

SEQ ID NO: 5226995 - DNA, 25 bp, Homo sapien
cttactgaccaaccacagtgtttgg

SEQ ID NO: 5226996 - DNA, 25 bp, Homo sapien
tactgaccaaccacagtgtttggaa

SEQ ID NO: 5226997 - DNA, 25 bp, Homo sapien
ttactgaccaaccacagtgtttgga

SEQ ID NO: 5226998 - DNA, 25 bp, Homo sapien
cctgctccatggtttgaaagggctg

SEQ ID NO: 5226999 - DNA, 25 bp, Homo sapien
ctcagcctgctccatggtttgaaag

SEQ ID NO: 5227000 - DNA, 25 bp, Homo sapien
gaggcattaggtagcagctctccat

SEQ ID NO: 5227001 - DNA, 25 bp, Homo sapien
gatgcatgcatgtacatctgttgga

SEQ ID NO: 5227002 - DNA, 25 bp, Homo sapien
tctcggggtatttggtgtgacccta

SEQ ID NO: 5227003 - DNA, 25 bp, Homo sapien
cttggtcccgtttaaacgactcatg

SEQ ID NO: 5227004 - DNA, 25 bp, Homo sapien
tcccgtttaaacgactcatgtccat

SEQ ID NO: 5227005 - DNA, 25 bp, Homo sapien
tggtgtgaccctaagaacttggtcc

SEQ ID NO: 5227006 - DNA, 25 bp, Homo sapien
cagtctacctgtttgcagtttggta

SEQ ID NO: 5227007 - DNA, 25 bp, Homo sapien
aaatgaaagcacatgtgactgcaat

SEQ ID NO: 5227008 - DNA, 25 bp, Homo sapien
ctgcaatcaatcacacacttagcct

SEQ ID NO: 5227009 - DNA, 25 bp, Homo sapien
taaagtgggcaaacattataatgca

SEQ ID NO: 5227010 - DNA, 25 bp, Homo sapien
tgagggcctttggtataaggaatct

SEQ ID NO: 5227011 - DNA, 25 bp, Homo sapien
tactgtaaggactaaagtgtcccca

SEQ ID NO: 5227012 - DNA, 25 bp, Homo sapien
cactttttatgagggcctttggtat

SEQ ID NO: 5227013 - DNA, 25 bp, Homo sapien
actaatggcatacttggctactgta

SEQ ID NO: 5227014 - DNA, 25 bp, Homo sapien
ctgaaaataatcgttgctggtataa

SEQ ID NO: 5227015 - DNA, 25 bp, Homo sapien
tgccttagccacatagctccaagtc

SEQ ID NO: 5227016 - DNA, 25 bp, Homo sapien
cacggagatcctcgttttgacattg

SEQ ID NO: 5227017 - DNA, 25 bp, Homo sapien
ttggattttctggcaatgatgcctt

SEQ ID NO: 5227018 - DNA, 25 bp, Homo sapien
gctagcagatgcttgactctgtctc

SEQ ID NO: 5227019 - DNA, 25 bp, Homo sapien
tgcattcttgtccaaggacgctagc

SEQ ID NO: 5227020 - DNA, 25 bp, Homo sapien
tagttcacttctggtcagaggctgt

SEQ ID NO: 5227021 - DNA, 25 bp, Homo sapien
caggtattggcgtctggtgtctctg

SEQ ID NO: 5227022 - DNA, 25 bp, Homo sapien
gatgtaacagtctctgctttagcaa

SEQ ID NO: 5227023 - DNA, 25 bp, Homo sapien
cctctgccgggatccaaagcaggat

SEQ ID NO: 5227024 - DNA, 25 bp, Homo sapien
taatgaacggctgaatttcctctgc

SEQ ID NO: 5227025 - DNA, 25 bp, Homo sapien
gccgagtggcaaggcggatccttta

SEQ ID NO: 5227026 - DNA, 25 bp, Homo sapien
tatattccaggagctacaacttgtc

SEQ ID NO: 5227027 - DNA, 25 bp, Homo sapien
ctagttatagtatattccaggagct

SEQ ID NO: 5227028 - DNA, 25 bp, Homo sapien
aacttgtccacgacaccggctactt

SEQ ID NO: 5227029 - DNA, 25 bp, Homo sapien
tacttgtgtaaatcgtgtggtggcg

SEQ ID NO: 5227030 - DNA, 25 bp, Homo sapien
actgacaaacaaacagccccaactg

SEQ ID NO: 5227031 - DNA, 25 bp, Homo sapien
agactgacaaacaaacagccccaac

SEQ ID NO: 5227032 - DNA, 25 bp, Homo sapien
gactgacaaacaaacagccccaact

SEQ ID NO: 5227033 - DNA, 25 bp, Homo sapien
ggtcctcagtgacttcatgagcccc

SEQ ID NO: 5227034 - DNA, 25 bp, Homo sapien
tggtcctcagtgacttcatgagccc

SEQ ID NO: 5227035 - DNA, 25 bp, Homo sapien
cagggagatccgcagcgtgccaatc

SEQ ID NO: 5227036 - DNA, 25 bp, Homo sapien
gggagatccgcagcgtgccaatccg

SEQ ID NO: 5227037 - DNA, 25 bp, Homo sapien
gcagcgtgccaatccgcgcccgccg

SEQ ID NO: 5227038 - DNA, 25 bp, Homo sapien
gagatccgcagcgtgccaatccgcg

SEQ ID NO: 5227039 - DNA, 25 bp, Homo sapien
gccctggatgccttttctgcttgtt

SEQ ID NO: 5227040 - DNA, 25 bp, Homo sapien
tgttctctcccattgtgtggcactt

SEQ ID NO: 5227041 - DNA, 25 bp, Homo sapien
gcttgtttttgagtacgtgaggacc

SEQ ID NO: 5227042 - DNA, 25 bp, Homo sapien
gccaggcatctagtggagggtcgga

SEQ ID NO: 5227043 - DNA, 25 bp, Homo sapien
tccattactggtagaacgaagtttc

SEQ ID NO: 5227044 - DNA, 25 bp, Homo sapien
tatcgagtcctacatagtcaaaggg

SEQ ID NO: 5227045 - DNA, 25 bp, Homo sapien
ccaaccctaacgtgaattgtgcagg

SEQ ID NO: 5227046 - DNA, 25 bp, Homo sapien
tttaaggtcaagcaaacaattggcc

SEQ ID NO: 5227047 - DNA, 25 bp, Homo sapien
ctggaaacttaacaaggcctgtttg

SEQ ID NO: 5227048 - DNA, 25 bp, Homo sapien
gattggataaaaaggaggtatggcc

SEQ ID NO: 5227049 - DNA, 25 bp, Homo sapien
gggataaaggatgaacagtcgtgtt

SEQ ID NO: 5227050 - DNA, 25 bp, Homo sapien
tatggcctaaagttaataaactgga

SEQ ID NO: 5227051 - DNA, 25 bp, Homo sapien
gacactcacattttctacgacacaa

SEQ ID NO: 5227052 - DNA, 25 bp, Homo sapien
cacattttctacgacacaacccaag

SEQ ID NO: 5227053 - DNA, 25 bp, Homo sapien
ttctacgacacaacccaagttcaca

SEQ ID NO: 5227054 - DNA, 25 bp, Homo sapien
ctctctgacactcacattttctacg

SEQ ID NO: 5227055 - DNA, 25 bp, Homo sapien
gtgaccaggctcctgtggttgtaac

SEQ ID NO: 5227056 - DNA, 25 bp, Homo sapien
actgccgcggtgaccaggctcctgt

SEQ ID NO: 5227057 - DNA, 25 bp, Homo sapien
caatagcaatagtactgccgcggtg

SEQ ID NO: 5227058 - DNA, 25 bp, Homo sapien
tagcaatagtactgccgcggtgacc

SEQ ID NO: 5227059 - DNA, 25 bp, Homo sapien
tcaaatcaatcttattctcccattg

SEQ ID NO: 5227060 - DNA, 25 bp, Homo sapien
aaaggaatggtcattgtcagcaaag

SEQ ID NO: 5227061 - DNA, 25 bp, Homo sapien
cagcaaagtttgcagtacagagact

SEQ ID NO: 5227062 - DNA, 25 bp, Homo sapien
gatgcattctgctgttaaatcccat

SEQ ID NO: 5227063 - DNA, 25 bp, Homo sapien
taagatgatctagcagcacatggtg

SEQ ID NO: 5227064 - DNA, 25 bp, Homo sapien
gaatgtgcgtcctccaattatccaa

SEQ ID NO: 5227065 - DNA, 25 bp, Homo sapien
tggagttgagcagtagccatcacct

SEQ ID NO: 5227066 - DNA, 25 bp, Homo sapien
tgtgattcacatgccggtctctagg

SEQ ID NO: 5227067 - DNA, 25 bp, Homo sapien
tttcacactcgcaatacctggagac

SEQ ID NO: 5227068 - DNA, 25 bp, Homo sapien
cattggcaggatatcttgccccgtc

SEQ ID NO: 5227069 - DNA, 25 bp, Homo sapien
atatcttgccccgtccccaatggtt

SEQ ID NO: 5227070 - DNA, 25 bp, Homo sapien
caatggtttctttcacactcgcaat

SEQ ID NO: 5227071 - DNA, 25 bp, Homo sapien
gagccttcgtggctccacagacaca

SEQ ID NO: 5227072 - DNA, 25 bp, Homo sapien
cacagcagatattgtcagcgacagt

SEQ ID NO: 5227073 - DNA, 25 bp, Homo sapien
cagcgacagtgaaggaacaataata

SEQ ID NO: 5227074 - DNA, 25 bp, Homo sapien
gatatgctgcttgctacttcgagcc

SEQ ID NO: 5227075 - DNA, 25 bp, Homo sapien
gattgacagcctcgattgaagacca

SEQ ID NO: 5227076 - DNA, 25 bp, Homo sapien
attgttcaaagaatggccaccattc

SEQ ID NO: 5227077 - DNA, 25 bp, Homo sapien
gaccagtaagttaaaggcagattgt

SEQ ID NO: 5227078 - DNA, 25 bp, Homo sapien
tcttgttccaacaatgattgacagc

SEQ ID NO: 5227079 - DNA, 25 bp, Homo sapien
agatagatgcttggtggtcctctga

SEQ ID NO: 5227080 - DNA, 25 bp, Homo sapien
tgaactgcattctgacatagcctgc

SEQ ID NO: 5227081 - DNA, 25 bp, Homo sapien
tagcctgcattctacagctgtatag

SEQ ID NO: 5227082 - DNA, 25 bp, Homo sapien
tacagctgtatagcctgagactttt

SEQ ID NO: 5227083 - DNA, 25 bp, Homo sapien
ttcatactgtcatctgagttttgta

SEQ ID NO: 5227084 - DNA, 25 bp, Homo sapien
ctgagttttgtattgcgcttccatg

SEQ ID NO: 5227085 - DNA, 25 bp, Homo sapien
ttttgtattgcgcttccatgatccc

SEQ ID NO: 5227086 - DNA, 25 bp, Homo sapien
ttgtattgcgcttccatgatccctg

SEQ ID NO: 5227087 - DNA, 25 bp, Homo sapien
tattagaggtccgtgggttactgcc

SEQ ID NO: 5227088 - DNA, 25 bp, Homo sapien
ggtaatgcctccacgggaactgtta

SEQ ID NO: 5227089 - DNA, 25 bp, Homo sapien
tcccatcggtgaattctattagagg

SEQ ID NO: 5227090 - DNA, 25 bp, Homo sapien
tattaactcggtcaaagggatggtg

SEQ ID NO: 5227091 - DNA, 25 bp, Homo sapien
aaagccgcctgcatgacggtcactg

SEQ ID NO: 5227092 - DNA, 25 bp, Homo sapien
tggtgtagaaagtgaacagccagca

SEQ ID NO: 5227093 - DNA, 25 bp, Homo sapien
acacacgctgtgaaaagccgcctgc

SEQ ID NO: 5227094 - DNA, 25 bp, Homo sapien
ccattggtgtagaaagtgaacagcc

SEQ ID NO: 5227095 - DNA, 25 bp, Homo sapien
aacagagcgaggcattgttccaaca

SEQ ID NO: 5227096 - DNA, 25 bp, Homo sapien
agcgaggcattgttccaacactgca

SEQ ID NO: 5227097 - DNA, 25 bp, Homo sapien
aacagggaacagagcgaggcattgt

SEQ ID NO: 5227098 - DNA, 25 bp, Homo sapien
ctaaacagggaacagagcgaggcat

SEQ ID NO: 5227099 - DNA, 25 bp, Homo sapien
tctttgaagctcatgaggtcggggt

SEQ ID NO: 5227100 - DNA, 25 bp, Homo sapien
ggtgcctcagaaccgggaactgcag

SEQ ID NO: 5227101 - DNA, 25 bp, Homo sapien
tttgagagtttggatgagagtggtc

SEQ ID NO: 5227102 - DNA, 25 bp, Homo sapien
aagctcatgaggtcggggtgttctt

SEQ ID NO: 5227103 - DNA, 25 bp, Homo sapien
tcatagcatgagaaatcccttggtg

SEQ ID NO: 5227104 - DNA, 25 bp, Homo sapien
tggtgctaccagacccatagggggt

SEQ ID NO: 5227105 - DNA, 25 bp, Homo sapien
tcacaggagcctttgtgaaggccca

SEQ ID NO: 5227106 - DNA, 25 bp, Homo sapien
catagggggtagaagtctcacagga

SEQ ID NO: 5227107 - DNA, 25 bp, Homo sapien
tgaccaggtcccagacaggcaaaat

SEQ ID NO: 5227108 - DNA, 25 bp, Homo sapien
aactgatggtccctttgactgcccg

SEQ ID NO: 5227109 - DNA, 25 bp, Homo sapien
tccaggtgccctagaaagggacatc

SEQ ID NO: 5227110 - DNA, 25 bp, Homo sapien
gatgtccattcgcaagccaaaagag

SEQ ID NO: 5227111 - DNA, 25 bp, Homo sapien
cagggtttcctgtgaatcagctggg

SEQ ID NO: 5227112 - DNA, 25 bp, Homo sapien
gtgcataagcaactcaaaacccagg

SEQ ID NO: 5227113 - DNA, 25 bp, Homo sapien
taacagtagcaacgttttggctgat

SEQ ID NO: 5227114 - DNA, 25 bp, Homo sapien
gcatagcagtgagcaagtggcatta

SEQ ID NO: 5227115 - DNA, 25 bp, Homo sapien
catgtgtgaaaggacgtgtttggct

SEQ ID NO: 5227116 - DNA, 25 bp, Homo sapien
cactctggagctggaacggattttc

SEQ ID NO: 5227117 - DNA, 25 bp, Homo sapien
tgttggactgtgatgcagcatggca

SEQ ID NO: 5227118 - DNA, 25 bp, Homo sapien
taagtcaatgcaggattccctcagg

SEQ ID NO: 5227119 - DNA, 25 bp, Homo sapien
tgtagacagtaaccgcaaaaattgc

SEQ ID NO: 5227120 - DNA, 25 bp, Homo sapien
cactattagaaatcggctgactcca

SEQ ID NO: 5227121 - DNA, 25 bp, Homo sapien
tgagctctgttggaagcctctggga

SEQ ID NO: 5227122 - DNA, 25 bp, Homo sapien
gctgtgctagacatgtgacaagcca

SEQ ID NO: 5227123 - DNA, 25 bp, Homo sapien
ccattttggcagttccactggcctt

SEQ ID NO: 5227124 - DNA, 25 bp, Homo sapien
tccattttggcagttccactggcct

SEQ ID NO: 5227125 - DNA, 25 bp, Homo sapien
aaggagcacactaaggaccaacacc

SEQ ID NO: 5227126 - DNA, 25 bp, Homo sapien
gagaaggagcacactaaggaccaac

SEQ ID NO: 5227127 - DNA, 25 bp, Homo sapien
gactctaaagaagttggccaaaaga

SEQ ID NO: 5227128 - DNA, 25 bp, Homo sapien
cttgcccaaacaggactctaaagaa

SEQ ID NO: 5227129 - DNA, 25 bp, Homo sapien
tttcagtccaactgagactttagca

SEQ ID NO: 5227130 - DNA, 25 bp, Homo sapien
caccggggttggctgagtcagaata

SEQ ID NO: 5227131 - DNA, 25 bp, Homo sapien
gagtcagaataccagccatgtggca

SEQ ID NO: 5227132 - DNA, 25 bp, Homo sapien
actgtgttcacagggccaccggggt

SEQ ID NO: 5227133 - DNA, 25 bp, Homo sapien
caggcaaatgcgtttgacttgagca

SEQ ID NO: 5227134 - DNA, 25 bp, Homo sapien
gagcatattgatttcaggcaggtga

SEQ ID NO: 5227135 - DNA, 25 bp, Homo sapien
tggaaaagaactccggtgtcctggc

SEQ ID NO: 5227136 - DNA, 25 bp, Homo sapien
tgatatctccactgggagccctgtc

SEQ ID NO: 5227137 - DNA, 25 bp, Homo sapien
ggtgtttagcagttattcgcacagc

SEQ ID NO: 5227138 - DNA, 25 bp, Homo sapien
cagttattcgcacagctttccaaag

SEQ ID NO: 5227139 - DNA, 25 bp, Homo sapien
tgtttagcagttattcgcacagctt

SEQ ID NO: 5227140 - DNA, 25 bp, Homo sapien
ttagcagttattcgcacagctttcc

SEQ ID NO: 5227141 - DNA, 25 bp, Homo sapien
aggaagctccatataaggtgaagaa

SEQ ID NO: 5227142 - DNA, 25 bp, Homo sapien
ctgttaaggaagctccatataaggt

SEQ ID NO: 5227143 - DNA, 25 bp, Homo sapien
ctgcacacggtagtgcattcactgc

SEQ ID NO: 5227144 - DNA, 25 bp, Homo sapien
cttctgcacacggtagtgcattcac

SEQ ID NO: 5227145 - DNA, 25 bp, Homo sapien
tagcaccagatggctcccattttgc

SEQ ID NO: 5227146 - DNA, 25 bp, Homo sapien
ttttagcaccagatggctcccattt

SEQ ID NO: 5227147 - DNA, 25 bp, Homo sapien
ttagcaccagatggctcccattttg

SEQ ID NO: 5227148 - DNA, 25 bp, Homo sapien
tcttttagcaccagatggctcccat

SEQ ID NO: 5227149 - DNA, 25 bp, Homo sapien
gtgtgcatggtggggcctaacacag

SEQ ID NO: 5227150 - DNA, 25 bp, Homo sapien
ggtggggcctaacacaggtgctaat

SEQ ID NO: 5227151 - DNA, 25 bp, Homo sapien
tggggcctaacacaggtgctaatac

SEQ ID NO: 5227152 - DNA, 25 bp, Homo sapien
gagccagcacataactgaacatatg

SEQ ID NO: 5227153 - DNA, 25 bp, Homo sapien
cagcccacaagtgagatatctacag

SEQ ID NO: 5227154 - DNA, 25 bp, Homo sapien
gcccacaagtgagatatctacagct

SEQ ID NO: 5227155 - DNA, 25 bp, Homo sapien
gatctggccctagccatagccatag

SEQ ID NO: 5227156 - DNA, 25 bp, Homo sapien
aagtcagctgcagtccggggatctg

SEQ ID NO: 5227157 - DNA, 25 bp, Homo sapien
tattctgctggaaccagcaccagga

SEQ ID NO: 5227158 - DNA, 25 bp, Homo sapien
ttctgctggaaccagcaccaggaac

SEQ ID NO: 5227159 - DNA, 25 bp, Homo sapien
ctattctgctggaaccagcaccagg

SEQ ID NO: 5227160 - DNA, 25 bp, Homo sapien
attctgctggaaccagcaccaggaa

SEQ ID NO: 5227161 - DNA, 25 bp, Homo sapien
taatcacttggaatgtatgctgccc

SEQ ID NO: 5227162 - DNA, 25 bp, Homo sapien
tgggagttaggccatgcatctctgt

SEQ ID NO: 5227163 - DNA, 25 bp, Homo sapien
acagctaacacttctggcagatggg

SEQ ID NO: 5227164 - DNA, 25 bp, Homo sapien
aattcaggcaagatgggtacaacct

SEQ ID NO: 5227165 - DNA, 25 bp, Homo sapien
atttgcttacaggtgactgggggca

SEQ ID NO: 5227166 - DNA, 25 bp, Homo sapien
gctgtgttcactttgggatcctaga

SEQ ID NO: 5227167 - DNA, 25 bp, Homo sapien
cttgattagatgtaaagatggcagg

SEQ ID NO: 5227168 - DNA, 25 bp, Homo sapien
caggccacagactgcagtggagatt

SEQ ID NO: 5227169 - DNA, 25 bp, Homo sapien
gactgatccaatagctcataagctg

SEQ ID NO: 5227170 - DNA, 25 bp, Homo sapien
gaactgaagttgtacctgatctccg

SEQ ID NO: 5227171 - DNA, 25 bp, Homo sapien
tccacagtagatggcatgttcagag

SEQ ID NO: 5227172 - DNA, 25 bp, Homo sapien
tagacttaatcttcctgtaacagga

SEQ ID NO: 5227173 - DNA, 25 bp, Homo sapien
ctattgctcctttgtaataacactt

SEQ ID NO: 5227174 - DNA, 25 bp, Homo sapien
atttgtgaaaactctattgctcctt

SEQ ID NO: 5227175 - DNA, 25 bp, Homo sapien
tccacactgtatcccactgaaaggt

SEQ ID NO: 5227176 - DNA, 25 bp, Homo sapien
aagcacacattagcataggtctaca

SEQ ID NO: 5227177 - DNA, 25 bp, Homo sapien
cagcatgtagccatacccgattgga

SEQ ID NO: 5227178 - DNA, 25 bp, Homo sapien
gcatcactcgcagcagctgtcctgg

SEQ ID NO: 5227179 - DNA, 25 bp, Homo sapien
cctgcatggtcgggggctgttcatt

SEQ ID NO: 5227180 - DNA, 25 bp, Homo sapien
tgtgactcagcatgtagccataccc

SEQ ID NO: 5227181 - DNA, 25 bp, Homo sapien
tcctatgtatttctccagggttgtg

SEQ ID NO: 5227182 - DNA, 25 bp, Homo sapien
cctttctcccctcctatgtatttct

SEQ ID NO: 5227183 - DNA, 25 bp, Homo sapien
cctcctatgtatttctccagggttg

SEQ ID NO: 5227184 - DNA, 25 bp, Homo sapien
tcccctcctatgtatttctccaggg

SEQ ID NO: 5227185 - DNA, 25 bp, Homo sapien
gaaacgccatggaattatttgatag

SEQ ID NO: 5227186 - DNA, 25 bp, Homo sapien
agcaggaataagttttcaatggtac

SEQ ID NO: 5227187 - DNA, 25 bp, Homo sapien
tttgggaatcaggaagtgacctgct

SEQ ID NO: 5227188 - DNA, 25 bp, Homo sapien
gaatcaggaagtgacctgctcctcc

SEQ ID NO: 5227189 - DNA, 25 bp, Homo sapien
ggaataagttttcaatggtacaggc

SEQ ID NO: 5227190 - DNA, 25 bp, Homo sapien
tctcttctgcccattccttggacaa

SEQ ID NO: 5227191 - DNA, 25 bp, Homo sapien
ttggacaatgggaaaattgctccat

SEQ ID NO: 5227192 - DNA, 25 bp, Homo sapien
tcttctgcccattccttggacaatg

SEQ ID NO: 5227193 - DNA, 25 bp, Homo sapien
ttctgcccattccttggacaatggg

SEQ ID NO: 5227194 - DNA, 25 bp, Homo sapien
tcaccggctgaccagtgagaatgcc

SEQ ID NO: 5227195 - DNA, 25 bp, Homo sapien
gatgggtattgggttttgcagcccc

SEQ ID NO: 5227196 - DNA, 25 bp, Homo sapien
aatgcgaagctgaaatggatgggta

SEQ ID NO: 5227197 - DNA, 25 bp, Homo sapien
aaattcaggagcatacgatgggccc

SEQ ID NO: 5227198 - DNA, 25 bp, Homo sapien
cctgaggagaggtataagcagcgac

SEQ ID NO: 5227199 - DNA, 25 bp, Homo sapien
taagcagcgacagataaaatagggc

SEQ ID NO: 5227200 - DNA, 25 bp, Homo sapien
catgaacctgaggagaggtataagc

SEQ ID NO: 5227201 - DNA, 25 bp, Homo sapien
gaggtataagcagcgacagataaaa

SEQ ID NO: 5227202 - DNA, 25 bp, Homo sapien
tggatttgtctaatgggcctttccc

SEQ ID NO: 5227203 - DNA, 25 bp, Homo sapien
gatttgtctaatgggcctttccctg

SEQ ID NO: 5227204 - DNA, 25 bp, Homo sapien
tgaaagtgacgggaactgacaaact

SEQ ID NO: 5227205 - DNA, 25 bp, Homo sapien
ctgaaagtgacgggaactgacaaac

SEQ ID NO: 5227206 - DNA, 25 bp, Homo sapien
gctgtttttacccatcgtgtgtttc

SEQ ID NO: 5227207 - DNA, 25 bp, Homo sapien
gaagctgcctatcttgacaagtctg

SEQ ID NO: 5227208 - DNA, 25 bp, Homo sapien
ttccacaagaagctgcctatcttga

SEQ ID NO: 5227209 - DNA, 25 bp, Homo sapien
tctccattgagataaacttcttcca

SEQ ID NO: 5227210 - DNA, 25 bp, Homo sapien
tcaccggcagctcttttcagctcac

SEQ ID NO: 5227211 - DNA, 25 bp, Homo sapien
tattcaccggcagctcttttcagct

SEQ ID NO: 5227212 - DNA, 25 bp, Homo sapien
ttcaccggcagctcttttcagctca

SEQ ID NO: 5227213 - DNA, 25 bp, Homo sapien
ttattcaccggcagctcttttcagc

SEQ ID NO: 5227214 - DNA, 25 bp, Homo sapien
gaaggcagaggacaactctaggagt

SEQ ID NO: 5227215 - DNA, 25 bp, Homo sapien
gcttgtaagctgaagggaatggcca

SEQ ID NO: 5227216 - DNA, 25 bp, Homo sapien
tctaggagtgagtgcttgacaaggc

SEQ ID NO: 5227217 - DNA, 25 bp, Homo sapien
gttgatatcaggctctcactgagca

SEQ ID NO: 5227218 - DNA, 25 bp, Homo sapien
aaatgtatatgcaagtggctggtcc

SEQ ID NO: 5227219 - DNA, 25 bp, Homo sapien
gatgctagcacccatctcatccagg

SEQ ID NO: 5227220 - DNA, 25 bp, Homo sapien
tacttgccaggtagtggacattcaa

SEQ ID NO: 5227221 - DNA, 25 bp, Homo sapien
aatggacagcatcgctttttagacc

SEQ ID NO: 5227222 - DNA, 25 bp, Homo sapien
caactagtgctgaatactctcgcag

SEQ ID NO: 5227223 - DNA, 25 bp, Homo sapien
tctcgcagtgcttcccgtatgtctc

SEQ ID NO: 5227224 - DNA, 25 bp, Homo sapien
gtttagagccttgataaatcccagg

SEQ ID NO: 5227225 - DNA, 25 bp, Homo sapien
ggtgccagcatggtaagttcttgat

SEQ ID NO: 5227226 - DNA, 25 bp, Homo sapien
cacctggatgtattggtcagattgg

SEQ ID NO: 5227227 - DNA, 25 bp, Homo sapien
ttggtcagattggtcatttggcggt

SEQ ID NO: 5227228 - DNA, 25 bp, Homo sapien
tcatttggcggtaatcccatagaga

SEQ ID NO: 5227229 - DNA, 25 bp, Homo sapien
gattggtcatttggcggtaatccca

SEQ ID NO: 5227230 - DNA, 25 bp, Homo sapien
cagaagaatctacatgcacctggaa

SEQ ID NO: 5227231 - DNA, 25 bp, Homo sapien
gaagaatctacatgcacctggaagc

SEQ ID NO: 5227232 - DNA, 25 bp, Homo sapien
aagaatctacatgcacctggaagca

SEQ ID NO: 5227233 - DNA, 25 bp, Homo sapien
gccagaagaatctacatgcacctgg

SEQ ID NO: 5227234 - DNA, 25 bp, Homo sapien
tgtgtctgatcccattccggttctt

SEQ ID NO: 5227235 - DNA, 25 bp, Homo sapien
ctgtgtctgatcccattccggttct

SEQ ID NO: 5227236 - DNA, 25 bp, Homo sapien
gtgtctgatcccattccggttcttc

SEQ ID NO: 5227237 - DNA, 25 bp, Homo sapien
gaccagctcttgtgctaaatattca

SEQ ID NO: 5227238 - DNA, 25 bp, Homo sapien
caggcagaaaaatcccgatgacttc

SEQ ID NO: 5227239 - DNA, 25 bp, Homo sapien
cagcatcgagggtaaaggttacttt

SEQ ID NO: 5227240 - DNA, 25 bp, Homo sapien
ccagacagcatcgagggtaaaggtt

SEQ ID NO: 5227241 - DNA, 25 bp, Homo sapien
agacagcatcgagggtaaaggttac

SEQ ID NO: 5227242 - DNA, 25 bp, Homo sapien
ggcccagacagcatcgagggtaaag

SEQ ID NO: 5227243 - DNA, 25 bp, Homo sapien
cagccccgtggagccactttagtga

SEQ ID NO: 5227244 - DNA, 25 bp, Homo sapien
tggagccactttagtgaagtaaagc

SEQ ID NO: 5227245 - DNA, 25 bp, Homo sapien
cctgaatgcgtttctacctttcttc

SEQ ID NO: 5227246 - DNA, 25 bp, Homo sapien
gtgaagtaaagcttactcttagtcc

SEQ ID NO: 5227247 - DNA, 25 bp, Homo sapien
ttgctccttttctgcgctgacaacc

SEQ ID NO: 5227248 - DNA, 25 bp, Homo sapien
ttctgcgctgacaacccatctgaca

SEQ ID NO: 5227249 - DNA, 25 bp, Homo sapien
tgacaacccatctgacacccgacat

SEQ ID NO: 5227250 - DNA, 25 bp, Homo sapien
cttttctgcgctgacaacccatctg

SEQ ID NO: 5227251 - DNA, 25 bp, Homo sapien
tggcccggtgatcaacgcctgacgg

SEQ ID NO: 5227252 - DNA, 25 bp, Homo sapien
ccgttggcccggtgatcaacgcctg

SEQ ID NO: 5227253 - DNA, 25 bp, Homo sapien
gtgatcaacgcctgacgggccggcc

SEQ ID NO: 5227254 - DNA, 25 bp, Homo sapien
acactgtctcccgttggcccggtga

SEQ ID NO: 5227255 - DNA, 25 bp, Homo sapien
tgggcctccctggcttgtcagtggg

SEQ ID NO: 5227256 - DNA, 25 bp, Homo sapien
tccctggcttgtcagtgggctgcgt

SEQ ID NO: 5227257 - DNA, 25 bp, Homo sapien
gcttgtcagtgggctgcgtcagcat

SEQ ID NO: 5227258 - DNA, 25 bp, Homo sapien
cctggcttgtcagtgggctgcgtca

SEQ ID NO: 5227259 - DNA, 25 bp, Homo sapien
tgtgatgttgggactgctgagaatc

SEQ ID NO: 5227260 - DNA, 25 bp, Homo sapien
gtctgaatactccagtcgtcagaac

SEQ ID NO: 5227261 - DNA, 25 bp, Homo sapien
cagtcgtcagaacagcaacatctat

SEQ ID NO: 5227262 - DNA, 25 bp, Homo sapien
ccagtggttctcatcagtctgaata

SEQ ID NO: 5227263 - DNA, 25 bp, Homo sapien
taatcacacgtgtgaagactagcag

SEQ ID NO: 5227264 - DNA, 25 bp, Homo sapien
cctgtgcacatcaacgggctgtatt

SEQ ID NO: 5227265 - DNA, 25 bp, Homo sapien
agggtgaagtgcttgatgtctttag

SEQ ID NO: 5227266 - DNA, 25 bp, Homo sapien
tggcatatacatgaaagggtgaagt

SEQ ID NO: 5227267 - DNA, 25 bp, Homo sapien
agtaggatcctgatactggtaagga

SEQ ID NO: 5227268 - DNA, 25 bp, Homo sapien
tgatactggtaaggaggcttctgca

SEQ ID NO: 5227269 - DNA, 25 bp, Homo sapien
gtaaggaggcttctgcagtaatggt

SEQ ID NO: 5227270 - DNA, 25 bp, Homo sapien
ggatcctgatactggtaaggaggct

SEQ ID NO: 5227271 - DNA, 25 bp, Homo sapien
gctctgcaaatgcactgcggtggga

SEQ ID NO: 5227272 - DNA, 25 bp, Homo sapien
catagcatgccctgatattggtctc

SEQ ID NO: 5227273 - DNA, 25 bp, Homo sapien
taattcctgttgatccatagcatgc

SEQ ID NO: 5227274 - DNA, 25 bp, Homo sapien
cgttctcattaatgaaacgtcaaag

SEQ ID NO: 5227275 - DNA, 25 bp, Homo sapien
cacgtcattttcctcgtatttgcta

SEQ ID NO: 5227276 - DNA, 25 bp, Homo sapien
cgtcattttcctcgtatttgctaaa

SEQ ID NO: 5227277 - DNA, 25 bp, Homo sapien
gtcattttcctcgtatttgctaaat

SEQ ID NO: 5227278 - DNA, 25 bp, Homo sapien
ccacgtcattttcctcgtatttgct

SEQ ID NO: 5227279 - DNA, 25 bp, Homo sapien
cttttagcaaaaactctgtggccaa

SEQ ID NO: 5227280 - DNA, 25 bp, Homo sapien
tgcttttagcaaaaactctgtggcc

SEQ ID NO: 5227281 - DNA, 25 bp, Homo sapien
gctgcttttagcaaaaactctgtgg

SEQ ID NO: 5227282 - DNA, 25 bp, Homo sapien
gcttttagcaaaaactctgtggcca

SEQ ID NO: 5227283 - DNA, 25 bp, Homo sapien
gaatcccagacaagagtggccacag

SEQ ID NO: 5227284 - DNA, 25 bp, Homo sapien
tcaagaacacctcttgaggaaagaa

SEQ ID NO: 5227285 - DNA, 25 bp, Homo sapien
gccacagagagcctcggatgccttc

SEQ ID NO: 5227286 - DNA, 25 bp, Homo sapien
gagagcctcggatgccttcatttca

SEQ ID NO: 5227287 - DNA, 25 bp, Homo sapien
tgctggcactctggccgcgtgtatg

SEQ ID NO: 5227288 - DNA, 25 bp, Homo sapien
ttaaaaaatgagcagcgctttcctc

SEQ ID NO: 5227289 - DNA, 25 bp, Homo sapien
gtgtatgacctttcaacacgatatt

SEQ ID NO: 5227290 - DNA, 25 bp, Homo sapien
gtatgacctttcaacacgatatttt

SEQ ID NO: 5227291 - DNA, 25 bp, Homo sapien
gaactgctaacatcagtgtctatac

SEQ ID NO: 5227292 - DNA, 25 bp, Homo sapien
catggaactcgcattttaaaatgcc

SEQ ID NO: 5227293 - DNA, 25 bp, Homo sapien
taaaatgccacgctcaaaaatatcg

SEQ ID NO: 5227294 - DNA, 25 bp, Homo sapien
catgcctttgggcttaagactggga

SEQ ID NO: 5227295 - DNA, 25 bp, Homo sapien
gtaaggacaatggacatggcagttg

SEQ ID NO: 5227296 - DNA, 25 bp, Homo sapien
ggtaaggacaatggacatggcagtt

SEQ ID NO: 5227297 - DNA, 25 bp, Homo sapien
acatttcaggaccaaactttttgca

SEQ ID NO: 5227298 - DNA, 25 bp, Homo sapien
caaactttttgcacaagaaggtggt

SEQ ID NO: 5227299 - DNA, 25 bp, Homo sapien
tggacacattttccaaagttggccg

SEQ ID NO: 5227300 - DNA, 25 bp, Homo sapien
caagggttgcaggagtaggaatccc

SEQ ID NO: 5227301 - DNA, 25 bp, Homo sapien
ggttctccaggccttacaatctcct

SEQ ID NO: 5227302 - DNA, 25 bp, Homo sapien
tctaggtggttctccaggccttaca

SEQ ID NO: 5227303 - DNA, 25 bp, Homo sapien
ggtggttctccaggccttacaatct

SEQ ID NO: 5227304 - DNA, 25 bp, Homo sapien
tccctctaggtggttctccaggcct

SEQ ID NO: 5227305 - DNA, 25 bp, Homo sapien
catcttgcccgggaaaatctgaaaa

SEQ ID NO: 5227306 - DNA, 25 bp, Homo sapien
caagtgctgcatcagcaagaggtgc

SEQ ID NO: 5227307 - DNA, 25 bp, Homo sapien
tgggtgacggaacacccaccctgct

SEQ ID NO: 5227308 - DNA, 25 bp, Homo sapien
gagtatcatagttaatccatgggcc

SEQ ID NO: 5227309 - DNA, 25 bp, Homo sapien
gggaatgcgccagatgcctgctgga

SEQ ID NO: 5227310 - DNA, 25 bp, Homo sapien
tggtatcattcagcggaggctgcag

SEQ ID NO: 5227311 - DNA, 25 bp, Homo sapien
ccagaggggaatgcgccagatgcct

SEQ ID NO: 5227312 - DNA, 25 bp, Homo sapien
ccttagtagagcttgagcgctgtgt

SEQ ID NO: 5227313 - DNA, 25 bp, Homo sapien
ggtgcttccaatccgtggaagagaa

SEQ ID NO: 5227314 - DNA, 25 bp, Homo sapien
cagccagcttctttagcggtgcttc

SEQ ID NO: 5227315 - DNA, 25 bp, Homo sapien
tagcaaggtcctttctatacattgg

SEQ ID NO: 5227316 - DNA, 25 bp, Homo sapien
gaaagccttcctgtttaggctccag

SEQ ID NO: 5227317 - DNA, 25 bp, Homo sapien
gggaaatgggatacccgaagatgac

SEQ ID NO: 5227318 - DNA, 25 bp, Homo sapien
aatgggatacccgaagatgactccg

SEQ ID NO: 5227319 - DNA, 25 bp, Homo sapien
tgggatacccgaagatgactccggt

SEQ ID NO: 5227320 - DNA, 25 bp, Homo sapien
cccgaagatgactccggttttctct

SEQ ID NO: 5227321 - DNA, 25 bp, Homo sapien
ttatcagctaatgtgttgtgttgac

SEQ ID NO: 5227322 - DNA, 25 bp, Homo sapien
cttatcagctaatgtgttgtgttga

SEQ ID NO: 5227323 - DNA, 25 bp, Homo sapien
tcttattgtgctcgccatcctttcc

SEQ ID NO: 5227324 - DNA, 25 bp, Homo sapien
tgcctctcaatgtgctcatttgaga

SEQ ID NO: 5227325 - DNA, 25 bp, Homo sapien
acatgggttctgaagaccgttgcat

SEQ ID NO: 5227326 - DNA, 25 bp, Homo sapien
ttatgctcttattgtgctcgccatc

SEQ ID NO: 5227327 - DNA, 25 bp, Homo sapien
ttacagcagacttgagtgccattac

SEQ ID NO: 5227328 - DNA, 25 bp, Homo sapien
acagtgctgcgtaatcgaatttctc

SEQ ID NO: 5227329 - DNA, 25 bp, Homo sapien
tgcgtaatcgaatttctcccttttc

SEQ ID NO: 5227330 - DNA, 25 bp, Homo sapien
gcagacttgagtgccattacagtgc

SEQ ID NO: 5227331 - DNA, 25 bp, Homo sapien
atttattcaacaagccctggtggcg

SEQ ID NO: 5227332 - DNA, 25 bp, Homo sapien
gcaaaggtgcagatgttccaaacag

SEQ ID NO: 5227333 - DNA, 25 bp, Homo sapien
tccaccagaggtctagcgcagagtt

SEQ ID NO: 5227334 - DNA, 25 bp, Homo sapien
gttattgacacatcactgacccagg

SEQ ID NO: 5227335 - DNA, 25 bp, Homo sapien
tccctgggctctgttagagtttgga

SEQ ID NO: 5227336 - DNA, 25 bp, Homo sapien
tgtgtatgtaaagttttgatcccaa

SEQ ID NO: 5227337 - DNA, 25 bp, Homo sapien
gactgctattgagcatctatattac

SEQ ID NO: 5227338 - DNA, 25 bp, Homo sapien
agactgtcacagtatataaagactg

SEQ ID NO: 5227339 - DNA, 25 bp, Homo sapien
gggctaagtaactggagagcagcat

SEQ ID NO: 5227340 - DNA, 25 bp, Homo sapien
ccagctttgagttgccggaaagagc

SEQ ID NO: 5227341 - DNA, 25 bp, Homo sapien
aaataatcaggtgttgagagccagc

SEQ ID NO: 5227342 - DNA, 25 bp, Homo sapien
tgggagaatccgctctgatgcaccc

SEQ ID NO: 5227343 - DNA, 25 bp, Homo sapien
cagtgtcatgttaaagactgtgaac

SEQ ID NO: 5227344 - DNA, 25 bp, Homo sapien
aagactgtgaacttggcaggaatgg

SEQ ID NO: 5227345 - DNA, 25 bp, Homo sapien
aggaatggggcgcagacaccactgc

SEQ ID NO: 5227346 - DNA, 25 bp, Homo sapien
tctctgtcaagctcagtgtcatgtt

SEQ ID NO: 5227347 - DNA, 25 bp, Homo sapien
caattttcttctaaacgtgatgctg

SEQ ID NO: 5227348 - DNA, 25 bp, Homo sapien
tctgttgcaatgcagatacatactc

SEQ ID NO: 5227349 - DNA, 25 bp, Homo sapien
ttctaaacgtgatgctgacatctgt

SEQ ID NO: 5227350 - DNA, 25 bp, Homo sapien
gcaatgcagatacatactcgagtac

SEQ ID NO: 5227351 - DNA, 25 bp, Homo sapien
ttcacagcctgcagtccatgtagct

SEQ ID NO: 5227352 - DNA, 25 bp, Homo sapien
cttcacagcctgcagtccatgtagc

SEQ ID NO: 5227353 - DNA, 25 bp, Homo sapien
ccgaaagggcataaaagcccagcag

SEQ ID NO: 5227354 - DNA, 25 bp, Homo sapien
cagataaccgaaagggcataaaagc

SEQ ID NO: 5227355 - DNA, 25 bp, Homo sapien
gagatgagactgcagataaccgaaa

SEQ ID NO: 5227356 - DNA, 25 bp, Homo sapien
gactgcagataaccgaaagggcata

SEQ ID NO: 5227357 - DNA, 25 bp, Homo sapien
gaggttgccagcaggagtacgctca

SEQ ID NO: 5227358 - DNA, 25 bp, Homo sapien
tcgggagtgcggcatgcagtcttca

SEQ ID NO: 5227359 - DNA, 25 bp, Homo sapien
tagtacattgtgatggacggtcccc

SEQ ID NO: 5227360 - DNA, 25 bp, Homo sapien
gacggtccccaagcataaggtcaac

SEQ ID NO: 5227361 - DNA, 25 bp, Homo sapien
tcagcaccaaccctgggtaaaggtc

SEQ ID NO: 5227362 - DNA, 25 bp, Homo sapien
tctccaaatctggttaggacagcaa

SEQ ID NO: 5227363 - DNA, 25 bp, Homo sapien
tccagagttgcgagcaggtctccaa

SEQ ID NO: 5227364 - DNA, 25 bp, Homo sapien
aaattccatcatttgggtcagcacc

SEQ ID NO: 5227365 - DNA, 25 bp, Homo sapien
caacgttagcttttgacgcttttgc

SEQ ID NO: 5227366 - DNA, 25 bp, Homo sapien
taaagctggcagctgaaacgtgatc

SEQ ID NO: 5227367 - DNA, 25 bp, Homo sapien
gaagccaaaccttataggcactctg

SEQ ID NO: 5227368 - DNA, 25 bp, Homo sapien
tccatagcctggaaatatgcttggg

SEQ ID NO: 5227369 - DNA, 25 bp, Homo sapien
ccatgagtaggtcccattcacaatc

SEQ ID NO: 5227370 - DNA, 25 bp, Homo sapien
gtaggtcccattcacaatcttgttc

SEQ ID NO: 5227371 - DNA, 25 bp, Homo sapien
taatcccatgagtaggtcccattca

SEQ ID NO: 5227372 - DNA, 25 bp, Homo sapien
ccataatcccatgagtaggtcccat

SEQ ID NO: 5227373 - DNA, 25 bp, Homo sapien
tgacaggggcattatgggacactcc

SEQ ID NO: 5227374 - DNA, 25 bp, Homo sapien
gatttgtcagttaaattagatgccc

SEQ ID NO: 5227375 - DNA, 25 bp, Homo sapien
caaaggcaaaaccaactgacagggg

SEQ ID NO: 5227376 - DNA, 25 bp, Homo sapien
tcccatctgtgaagtcgctggggag

SEQ ID NO: 5227377 - DNA, 25 bp, Homo sapien
tcagtacagcgtgactctccgtgta

SEQ ID NO: 5227378 - DNA, 25 bp, Homo sapien
gtagacgtcagtgttctgagcctga

SEQ ID NO: 5227379 - DNA, 25 bp, Homo sapien
cacatggtgtttggtgtagtgccag

SEQ ID NO: 5227380 - DNA, 25 bp, Homo sapien
gctctctcggcactgtacacatggt

SEQ ID NO: 5227381 - DNA, 25 bp, Homo sapien
gacacacgtctgctgactgctgctc

SEQ ID NO: 5227382 - DNA, 25 bp, Homo sapien
cagtgttcctgtagtgctcttatca

SEQ ID NO: 5227383 - DNA, 25 bp, Homo sapien
ctgctcaggccagtgttcctgtagt

SEQ ID NO: 5227384 - DNA, 25 bp, Homo sapien
ctgcagttgacacacgtctgctgac

SEQ ID NO: 5227385 - DNA, 25 bp, Homo sapien
tggacaaaaagggtacgattgaatg

SEQ ID NO: 5227386 - DNA, 25 bp, Homo sapien
gattgaatgatagtagactgcaggg

SEQ ID NO: 5227387 - DNA, 25 bp, Homo sapien
gcaaagggagagaatgacctttcta

SEQ ID NO: 5227388 - DNA, 25 bp, Homo sapien
gatctatttgtatgcttatgtttga

SEQ ID NO: 5227389 - DNA, 25 bp, Homo sapien
gaaacctcttggtattcctcatggg

SEQ ID NO: 5227390 - DNA, 25 bp, Homo sapien
gccaggtcaagtccctcatcatgca

SEQ ID NO: 5227391 - DNA, 25 bp, Homo sapien
aatatgcttgccatttgttctgccg

SEQ ID NO: 5227392 - DNA, 25 bp, Homo sapien
tgttctgccgaaagccaggtcgttc

SEQ ID NO: 5227393 - DNA, 25 bp, Homo sapien
gctgccccttatccctcttcctgtt

SEQ ID NO: 5227394 - DNA, 25 bp, Homo sapien
aggcagctgccccttatccctcttc

SEQ ID NO: 5227395 - DNA, 25 bp, Homo sapien
cagctgccccttatccctcttcctg

SEQ ID NO: 5227396 - DNA, 25 bp, Homo sapien
cttaggcagctgccccttatccctc

SEQ ID NO: 5227397 - DNA, 25 bp, Homo sapien
catggattttcccacagcagcagtt

SEQ ID NO: 5227398 - DNA, 25 bp, Homo sapien
ttcccacagcagcagttaagcacat

SEQ ID NO: 5227399 - DNA, 25 bp, Homo sapien
gattttcccacagcagcagttaagc

SEQ ID NO: 5227400 - DNA, 25 bp, Homo sapien
ttttcccacagcagcagttaagcac

SEQ ID NO: 5227401 - DNA, 25 bp, Homo sapien
cagcgtccaaaccttgagtccctct

SEQ ID NO: 5227402 - DNA, 25 bp, Homo sapien
ggaagcctgggacctcgccacactt

SEQ ID NO: 5227403 - DNA, 25 bp, Homo sapien
tgggacctcgccacacttactggcg

SEQ ID NO: 5227404 - DNA, 25 bp, Homo sapien
tcgccacacttactggcggctgcag

SEQ ID NO: 5227405 - DNA, 25 bp, Homo sapien
tgtttcctgggtttcctcttgcaca

SEQ ID NO: 5227406 - DNA, 25 bp, Homo sapien
gtttcctgggtttcctcttgcacat

SEQ ID NO: 5227407 - DNA, 25 bp, Homo sapien
tctgtttcctgggtttcctcttgca

SEQ ID NO: 5227408 - DNA, 25 bp, Homo sapien
gtctgtttcctgggtttcctcttgc

SEQ ID NO: 5227409 - DNA, 25 bp, Homo sapien
ccagggcctcagcaatcgttccttc

SEQ ID NO: 5227410 - DNA, 25 bp, Homo sapien
tttccagggcctcagcaatcgttcc

SEQ ID NO: 5227411 - DNA, 25 bp, Homo sapien
agcaatcgttccttctagaacctga

SEQ ID NO: 5227412 - DNA, 25 bp, Homo sapien
ctttccagggcctcagcaatcgttc

SEQ ID NO: 5227413 - DNA, 25 bp, Homo sapien
tatgacaacagctgaagaagctggt

SEQ ID NO: 5227414 - DNA, 25 bp, Homo sapien
agttatgacaacagctgaagaagct

SEQ ID NO: 5227415 - DNA, 25 bp, Homo sapien
caacagctgaagaagctggtgataa

SEQ ID NO: 5227416 - DNA, 25 bp, Homo sapien
ctgaagaagctggtgataaaggcat

SEQ ID NO: 5227417 - DNA, 25 bp, Homo sapien
ccattgctttggtggtatgggctga

SEQ ID NO: 5227418 - DNA, 25 bp, Homo sapien
tatcacgtagagtgaagaagtggga

SEQ ID NO: 5227419 - DNA, 25 bp, Homo sapien
taactattgcggttctgcagaaggc

SEQ ID NO: 5227420 - DNA, 25 bp, Homo sapien
gttctcccagctgaagtgatttatc

SEQ ID NO: 5227421 - DNA, 25 bp, Homo sapien
tctctgggatctcttataagagcac

SEQ ID NO: 5227422 - DNA, 25 bp, Homo sapien
taatatcatcatattgtggatgagg

SEQ ID NO: 5227423 - DNA, 25 bp, Homo sapien
aaagctctaccctcctgatttaatc

SEQ ID NO: 5227424 - DNA, 25 bp, Homo sapien
tctctctgtgggtgaacacccactt

SEQ ID NO: 5227425 - DNA, 25 bp, Homo sapien
acctgcccggacccctggaaatatg

SEQ ID NO: 5227426 - DNA, 25 bp, Homo sapien
cggaccatggctgacgtcgacggcc

SEQ ID NO: 5227427 - DNA, 25 bp, Homo sapien
ccggacccctggaaatatgccccat

SEQ ID NO: 5227428 - DNA, 25 bp, Homo sapien
atggctgacgtcgacggccctcgga

SEQ ID NO: 5227429 - DNA, 25 bp, Homo sapien
gagtggtctaaactccaccgcggct

SEQ ID NO: 5227430 - DNA, 25 bp, Homo sapien
tttcgcatcggtaaagccggcagcg

SEQ ID NO: 5227431 - DNA, 25 bp, Homo sapien
ggaagaaggtctgctgcgcctctgc

SEQ ID NO: 5227432 - DNA, 25 bp, Homo sapien
tttcctttccgagactccgcggaga

SEQ ID NO: 5227433 - DNA, 25 bp, Homo sapien
cggatctcgctggagttttattctc

SEQ ID NO: 5227434 - DNA, 25 bp, Homo sapien
gttcacggcccggatctcgctggag

SEQ ID NO: 5227435 - DNA, 25 bp, Homo sapien
ggtacaagctcctccgtcactgctt

SEQ ID NO: 5227436 - DNA, 25 bp, Homo sapien
actgctttcgttcacggcccggatc

SEQ ID NO: 5227437 - DNA, 25 bp, Homo sapien
taggtcagacgttgcagctcttccc

SEQ ID NO: 5227438 - DNA, 25 bp, Homo sapien
cacgaataaaatacagcacgagagg

SEQ ID NO: 5227439 - DNA, 25 bp, Homo sapien
ttccccttgcgaagcgggcatggca

SEQ ID NO: 5227440 - DNA, 25 bp, Homo sapien
cttgggtttcgaactttattgcaca

SEQ ID NO: 5227441 - DNA, 25 bp, Homo sapien
taaagacaagcactttgtaggccag

SEQ ID NO: 5227442 - DNA, 25 bp, Homo sapien
atgtaaagacaagcactttgtaggc

SEQ ID NO: 5227443 - DNA, 25 bp, Homo sapien
agacaagcactttgtaggccaggcg

SEQ ID NO: 5227444 - DNA, 25 bp, Homo sapien
aagacaagcactttgtaggccaggc

SEQ ID NO: 5227445 - DNA, 25 bp, Homo sapien
tcttgagggtaggagccatatagtc

SEQ ID NO: 5227446 - DNA, 25 bp, Homo sapien
taaaaactctgtcatgtactctggc

SEQ ID NO: 5227447 - DNA, 25 bp, Homo sapien
gtatatctctgtctacactaaggag

SEQ ID NO: 5227448 - DNA, 25 bp, Homo sapien
tacatgaaactcaaagctccctgcc

SEQ ID NO: 5227449 - DNA, 25 bp, Homo sapien
ctgcctcttgggttctcctgccttg

SEQ ID NO: 5227450 - DNA, 25 bp, Homo sapien
ttgtattctctgtagagacaggatt

SEQ ID NO: 5227451 - DNA, 25 bp, Homo sapien
ctgccttggcctcgtgagtagcagg

SEQ ID NO: 5227452 - DNA, 25 bp, Homo sapien
cttggcctcgtgagtagcagggatt

SEQ ID NO: 5227453 - DNA, 25 bp, Homo sapien
aacctggtggtgatttctggtaagg

SEQ ID NO: 5227454 - DNA, 25 bp, Homo sapien
tggtggtgatttctggtaaggtcat

SEQ ID NO: 5227455 - DNA, 25 bp, Homo sapien
ccaacctggtggtgatttctggtaa

SEQ ID NO: 5227456 - DNA, 25 bp, Homo sapien
cctggtggtgatttctggtaaggtc

SEQ ID NO: 5227457 - DNA, 25 bp, Homo sapien
gggcttgaactgtcatttgttggtt

SEQ ID NO: 5227458 - DNA, 25 bp, Homo sapien
gctggttctcggctccagattccat

SEQ ID NO: 5227459 - DNA, 25 bp, Homo sapien
gctgggcttgaactgtcatttgttg

SEQ ID NO: 5227460 - DNA, 25 bp, Homo sapien
ctgggctaatgtggcaatctgtggc

SEQ ID NO: 5227461 - DNA, 25 bp, Homo sapien
aagcacagagtggagtagtggcaaa

SEQ ID NO: 5227462 - DNA, 25 bp, Homo sapien
ttcaagcacagagtggagtagtggc

SEQ ID NO: 5227463 - DNA, 25 bp, Homo sapien
gcacagagtggagtagtggcaaaag

SEQ ID NO: 5227464 - DNA, 25 bp, Homo sapien
caagcacagagtggagtagtggcaa

SEQ ID NO: 5227465 - DNA, 25 bp, Homo sapien
gttgcatgagctgctggcatagata

SEQ ID NO: 5227466 - DNA, 25 bp, Homo sapien
ttgcatgagctgctggcatagatac

SEQ ID NO: 5227467 - DNA, 25 bp, Homo sapien
tggctgggccgcctgaatgactcca

SEQ ID NO: 5227468 - DNA, 25 bp, Homo sapien
ttgggcagctgtactagagttacgg

SEQ ID NO: 5227469 - DNA, 25 bp, Homo sapien
ctgtactagagttacggtgggagca

SEQ ID NO: 5227470 - DNA, 25 bp, Homo sapien
gccgcctgaatgactccatggactt

SEQ ID NO: 5227471 - DNA, 25 bp, Homo sapien
acaggatctcactcactcaccgagg

SEQ ID NO: 5227472 - DNA, 25 bp, Homo sapien
caggatctcactcactcaccgaggc

SEQ ID NO: 5227473 - DNA, 25 bp, Homo sapien
atatatggtcctttggaaacttaag

SEQ ID NO: 5227474 - DNA, 25 bp, Homo sapien
tggtaatattcgatgtttcctaaac

SEQ ID NO: 5227475 - DNA, 25 bp, Homo sapien
cctaaacctatatatggtcctttgg

SEQ ID NO: 5227476 - DNA, 25 bp, Homo sapien
catactacctgtttatattggaaag

SEQ ID NO: 5227477 - DNA, 25 bp, Homo sapien
cactgactcctgtgaatcttcactt

SEQ ID NO: 5227478 - DNA, 25 bp, Homo sapien
tgggaatcagttacactatccactg

SEQ ID NO: 5227479 - DNA, 25 bp, Homo sapien
atttcccttcgcttttgggaatcag

SEQ ID NO: 5227480 - DNA, 25 bp, Homo sapien
atccactgactcctgtgaatcttca

SEQ ID NO: 5227481 - DNA, 25 bp, Homo sapien
ttctcttcttcaatccttggcactc

SEQ ID NO: 5227482 - DNA, 25 bp, Homo sapien
atccttggcactcctggtgcatcag

SEQ ID NO: 5227483 - DNA, 25 bp, Homo sapien
cactcctggtgcatcagaagataag

SEQ ID NO: 5227484 - DNA, 25 bp, Homo sapien
tcctggtgcatcagaagataagtca

SEQ ID NO: 5227485 - DNA, 25 bp, Homo sapien
tggcaccgttacagtggtgatggca

SEQ ID NO: 5227486 - DNA, 25 bp, Homo sapien
ttggagttggcaccgttacagtggt

SEQ ID NO: 5227487 - DNA, 25 bp, Homo sapien
taaattggagttggcaccgttacag

SEQ ID NO: 5227488 - DNA, 25 bp, Homo sapien
tggtaaattggagttggcaccgtta

SEQ ID NO: 5227489 - DNA, 25 bp, Homo sapien
tgactaagctaattgagcacagtgg

SEQ ID NO: 5227490 - DNA, 25 bp, Homo sapien
gacaggagtatgttgtatccctcag

SEQ ID NO: 5227491 - DNA, 25 bp, Homo sapien
gagcatgcttcctagttcaagtgag

SEQ ID NO: 5227492 - DNA, 25 bp, Homo sapien
taactaaaagcatctggtatgaggc

SEQ ID NO: 5227493 - DNA, 25 bp, Homo sapien
aatagaaatgcactctatgaactgc

SEQ ID NO: 5227494 - DNA, 25 bp, Homo sapien
taatctaggagaagttacagcaaat

SEQ ID NO: 5227495 - DNA, 25 bp, Homo sapien
caccaagaagggtctaatatattca

SEQ ID NO: 5227496 - DNA, 25 bp, Homo sapien
tattcaagtaacttgctcctcagga

SEQ ID NO: 5227497 - DNA, 25 bp, Homo sapien
ttgcaggccctgtaccccatcggta

SEQ ID NO: 5227498 - DNA, 25 bp, Homo sapien
gccagctgtattgctcctccctggg

SEQ ID NO: 5227499 - DNA, 25 bp, Homo sapien
tgtttgcaggccctgtaccccatcg

SEQ ID NO: 5227500 - DNA, 25 bp, Homo sapien
tgtattgctcctccctgggtaatgg

SEQ ID NO: 5227501 - DNA, 25 bp, Homo sapien
ttgctgggcactaagatctgctgtc

SEQ ID NO: 5227502 - DNA, 25 bp, Homo sapien
gggcactaagatctgctgtccatca

SEQ ID NO: 5227503 - DNA, 25 bp, Homo sapien
tctgtgcatactgtagaatggtagt

SEQ ID NO: 5227504 - DNA, 25 bp, Homo sapien
tactgtagaatggtagtacccggct

SEQ ID NO: 5227505 - DNA, 25 bp, Homo sapien
taaaaactgatgatctcagaagatt

SEQ ID NO: 5227506 - DNA, 25 bp, Homo sapien
aaactgatgatctcagaagatttaa

SEQ ID NO: 5227507 - DNA, 25 bp, Homo sapien
ctgatgatctcagaagatttaaatt

SEQ ID NO: 5227508 - DNA, 25 bp, Homo sapien
tgatgatctcagaagatttaaattt

SEQ ID NO: 5227509 - DNA, 25 bp, Homo sapien
gcaaatttctaacctggcattaact

SEQ ID NO: 5227510 - DNA, 25 bp, Homo sapien
tgtcattacctaacacaggcaaaat

SEQ ID NO: 5227511 - DNA, 25 bp, Homo sapien
gcatattggtataagatcctgtgga

SEQ ID NO: 5227512 - DNA, 25 bp, Homo sapien
aagttatgactctctccagttggtg

SEQ ID NO: 5227513 - DNA, 25 bp, Homo sapien
tgacgttcagaattcaaattcactg

SEQ ID NO: 5227514 - DNA, 25 bp, Homo sapien
aactgacgttcagaattcaaattca

SEQ ID NO: 5227515 - DNA, 25 bp, Homo sapien
tcaaactgacgttcagaattcaaat

SEQ ID NO: 5227516 - DNA, 25 bp, Homo sapien
catcttcaaactgacgttcagaatt

SEQ ID NO: 5227517 - DNA, 25 bp, Homo sapien
tagatagagtatagtcctcagtgtc

SEQ ID NO: 5227518 - DNA, 25 bp, Homo sapien
tctaaaaggtaagtggggcacagct

SEQ ID NO: 5227519 - DNA, 25 bp, Homo sapien
gcttggatgatcttcctagatagag

SEQ ID NO: 5227520 - DNA, 25 bp, Homo sapien
gggcacagcttggatgatcttccta

SEQ ID NO: 5227521 - DNA, 25 bp, Homo sapien
gtatgtttgtacgtctccagaggca

SEQ ID NO: 5227522 - DNA, 25 bp, Homo sapien
tgggtgctgtgcgaatctggtatgt

SEQ ID NO: 5227523 - DNA, 25 bp, Homo sapien
ggaggatgccataacaactccaggg

SEQ ID NO: 5227524 - DNA, 25 bp, Homo sapien
caatagtgctagtgggtgctgtgcg

SEQ ID NO: 5227525 - DNA, 25 bp, Homo sapien
cttcattagacggacctctctcttt

SEQ ID NO: 5227526 - DNA, 25 bp, Homo sapien
ggacctctctctttcgtgctgcttc

SEQ ID NO: 5227527 - DNA, 25 bp, Homo sapien
attagacggacctctctctttcgtg

SEQ ID NO: 5227528 - DNA, 25 bp, Homo sapien
gacggacctctctctttcgtgctgc

SEQ ID NO: 5227529 - DNA, 25 bp, Homo sapien
aaataacctggctaactggttggag

SEQ ID NO: 5227530 - DNA, 25 bp, Homo sapien
gcaaagatcctattaccagtagatg

SEQ ID NO: 5227531 - DNA, 25 bp, Homo sapien
agttgtgcattaaatctcctgtggg

SEQ ID NO: 5227532 - DNA, 25 bp, Homo sapien
tactccacgatcaaagattgaccca

SEQ ID NO: 5227533 - DNA, 25 bp, Homo sapien
tattgtttttgacggcaaaatcatt

SEQ ID NO: 5227534 - DNA, 25 bp, Homo sapien
gacggcaaaatcatttacagcaata

SEQ ID NO: 5227535 - DNA, 25 bp, Homo sapien
taagatttttgtccgtaacatggta

SEQ ID NO: 5227536 - DNA, 25 bp, Homo sapien
ccgtaacatggtattcttagaatta

SEQ ID NO: 5227537 - DNA, 25 bp, Homo sapien
gaaaggcacactatacctctgtgga

SEQ ID NO: 5227538 - DNA, 25 bp, Homo sapien
taaatgcgatatggtacccaaactg

SEQ ID NO: 5227539 - DNA, 25 bp, Homo sapien
ccagatgggcacatgaaggagagcc

SEQ ID NO: 5227540 - DNA, 25 bp, Homo sapien
gacgtgctgctctatctagcccagg

SEQ ID NO: 5227541 - DNA, 25 bp, Homo sapien
tatcttgatatctgtgcaactgctg

SEQ ID NO: 5227542 - DNA, 25 bp, Homo sapien
tctctcaagacatgggaggtcttca

SEQ ID NO: 5227543 - DNA, 25 bp, Homo sapien
tacatatgaccttcctgtatctgga

SEQ ID NO: 5227544 - DNA, 25 bp, Homo sapien
gaaaatagtgtgtcttagaaaggcc

SEQ ID NO: 5227545 - DNA, 25 bp, Homo sapien
caccgttttccgtaatggctgcatt

SEQ ID NO: 5227546 - DNA, 25 bp, Homo sapien
cacaaagagttagaaagagttcacc

SEQ ID NO: 5227547 - DNA, 25 bp, Homo sapien
actgagacaattctaacacaaagag

SEQ ID NO: 5227548 - DNA, 25 bp, Homo sapien
tgcatcctcatcagtttgttacttc

SEQ ID NO: 5227549 - DNA, 25 bp, Homo sapien
tacattaaagtgcaaaggaaccaga

SEQ ID NO: 5227550 - DNA, 25 bp, Homo sapien
gatatgtacaggatctatgtgctga

SEQ ID NO: 5227551 - DNA, 25 bp, Homo sapien
caacatggtattggctaaaggacag

SEQ ID NO: 5227552 - DNA, 25 bp, Homo sapien
actttccgtagacatcaacaagcgg

SEQ ID NO: 5227553 - DNA, 25 bp, Homo sapien
tatgaggcaaaagctaatagaactg

SEQ ID NO: 5227554 - DNA, 25 bp, Homo sapien
gaggtctatcctctaagaagacata

SEQ ID NO: 5227555 - DNA, 25 bp, Homo sapien
tacactctcctgtcagtgatgatag

SEQ ID NO: 5227556 - DNA, 25 bp, Homo sapien
gggatgaatgccttaatacactctc

SEQ ID NO: 5227557 - DNA, 25 bp, Homo sapien
tatatattaagcattggaaaagata

SEQ ID NO: 5227558 - DNA, 25 bp, Homo sapien
ttaagcattggaaaagatatacaga

SEQ ID NO: 5227559 - DNA, 25 bp, Homo sapien
attggaaaagatatacagaattact

SEQ ID NO: 5227560 - DNA, 25 bp, Homo sapien
gaaaagatatacagaattacttgga

SEQ ID NO: 5227561 - DNA, 25 bp, Homo sapien
atttgtggcagtaaaggtccttaag

SEQ ID NO: 5227562 - DNA, 25 bp, Homo sapien
ggtccttaagtgcttttagctcctc

SEQ ID NO: 5227563 - DNA, 25 bp, Homo sapien
ttgattttcaagcactgccactctg

SEQ ID NO: 5227564 - DNA, 25 bp, Homo sapien
ctttctacgacactctcgagctgct

SEQ ID NO: 5227565 - DNA, 25 bp, Homo sapien
caagccagtccattttccaccttaa

SEQ ID NO: 5227566 - DNA, 25 bp, Homo sapien
tctttcaggttgtggccaagccagt

SEQ ID NO: 5227567 - DNA, 25 bp, Homo sapien
tccattttccaccttaacaggtgaa

SEQ ID NO: 5227568 - DNA, 25 bp, Homo sapien
ttgtctttcaggttgtggccaagcc

SEQ ID NO: 5227569 - DNA, 25 bp, Homo sapien
aatgcaaaagcacaaatgaatgaaa

SEQ ID NO: 5227570 - DNA, 25 bp, Homo sapien
gcagttttgcgcatagaaaaaaaga

SEQ ID NO: 5227571 - DNA, 25 bp, Homo sapien
attctgtagttgctttcaggcagtt

SEQ ID NO: 5227572 - DNA, 25 bp, Homo sapien
taatgcaaaagcacaaatgaatgaa

SEQ ID NO: 5227573 - DNA, 25 bp, Homo sapien
tcttcatgattcctggcgttgaaaa

SEQ ID NO: 5227574 - DNA, 25 bp, Homo sapien
cctggcgttgaaaatttcttgaggg

SEQ ID NO: 5227575 - DNA, 25 bp, Homo sapien
agtctcttcatgattcctggcgttg

SEQ ID NO: 5227576 - DNA, 25 bp, Homo sapien
attcctggcgttgaaaatttcttga

SEQ ID NO: 5227577 - DNA, 25 bp, Homo sapien
gcccacacattacttcagctcaaga

SEQ ID NO: 5227578 - DNA, 25 bp, Homo sapien
gcatgcggcccacacattacttcag

SEQ ID NO: 5227579 - DNA, 25 bp, Homo sapien
cacattacttcagctcaagaggctg

SEQ ID NO: 5227580 - DNA, 25 bp, Homo sapien
cattacttcagctcaagaggctggg

SEQ ID NO: 5227581 - DNA, 25 bp, Homo sapien
ctgccctatggaagagctgtattag

SEQ ID NO: 5227582 - DNA, 25 bp, Homo sapien
tgaattaagaagcaacaactgccct

SEQ ID NO: 5227583 - DNA, 25 bp, Homo sapien
caacatgtcaatttggcaatcaaca

SEQ ID NO: 5227584 - DNA, 25 bp, Homo sapien
gggtatgtctcttaacaactttaca

SEQ ID NO: 5227585 - DNA, 25 bp, Homo sapien
tcaagggattggtttactgatcagc

SEQ ID NO: 5227586 - DNA, 25 bp, Homo sapien
gggattggtttactgatcagcattt

SEQ ID NO: 5227587 - DNA, 25 bp, Homo sapien
gaatttagtactaactaaaatatgc

SEQ ID NO: 5227588 - DNA, 25 bp, Homo sapien
tggtttactgatcagcattttacta

SEQ ID NO: 5227589 - DNA, 25 bp, Homo sapien
gcagtacagcagtcattcaaatatg

SEQ ID NO: 5227590 - DNA, 25 bp, Homo sapien
aggaatttccttcccaaatgagaca

SEQ ID NO: 5227591 - DNA, 25 bp, Homo sapien
tgacaaaggctatacagcatattgg

SEQ ID NO: 5227592 - DNA, 25 bp, Homo sapien
tggtatgtaagtgcaatgggcaaca

SEQ ID NO: 5227593 - DNA, 25 bp, Homo sapien
aaaaccagtgcaatcatcctcaagg

SEQ ID NO: 5227594 - DNA, 25 bp, Homo sapien
taactttccccattagctcagcagg

SEQ ID NO: 5227595 - DNA, 25 bp, Homo sapien
tcagggactaagaggaccaccaact

SEQ ID NO: 5227596 - DNA, 25 bp, Homo sapien
cctcaaggtatgaaggataaggtct

SEQ ID NO: 5227597 - DNA, 25 bp, Homo sapien
tgaggacacatacaaaggcttaagc

SEQ ID NO: 5227598 - DNA, 25 bp, Homo sapien
tcaagatgtatgtaagcctcccaac

SEQ ID NO: 5227599 - DNA, 25 bp, Homo sapien
tgagacagatggaacttcagcaccc

SEQ ID NO: 5227600 - DNA, 25 bp, Homo sapien
tatagataaaagtgccacatggccc

SEQ ID NO: 5227601 - DNA, 25 bp, Homo sapien
ggacaactttacatggaaaactgct

SEQ ID NO: 5227602 - DNA, 25 bp, Homo sapien
tacatacacaaattggagtggcact

SEQ ID NO: 5227603 - DNA, 25 bp, Homo sapien
gggagttacaactgacatgtggaca

SEQ ID NO: 5227604 - DNA, 25 bp, Homo sapien
gagatgctcctcagacaaaagcttg

SEQ ID NO: 5227605 - DNA, 25 bp, Homo sapien
aaagagcattatgacagttgatacc

SEQ ID NO: 5227606 - DNA, 25 bp, Homo sapien
tgtttgtgtaaaaagagcattatga

SEQ ID NO: 5227607 - DNA, 25 bp, Homo sapien
cataaatgtttgtgtaaaaagagca

SEQ ID NO: 5227608 - DNA, 25 bp, Homo sapien
aagcatgtttatgtgactgcacata

SEQ ID NO: 5227609 - DNA, 25 bp, Homo sapien
tcaggcccgtgttagaattctcatc

SEQ ID NO: 5227610 - DNA, 25 bp, Homo sapien
tagcaggcttgaacacatcttggca

SEQ ID NO: 5227611 - DNA, 25 bp, Homo sapien
gagtctcacatgaaatacccggatg

SEQ ID NO: 5227612 - DNA, 25 bp, Homo sapien
tgaaggtccaagcacctgaacgtgg

SEQ ID NO: 5227613 - DNA, 25 bp, Homo sapien
gtctacttctatccacacagacccg

SEQ ID NO: 5227614 - DNA, 25 bp, Homo sapien
ggaccctgcggccttggccttccgc

SEQ ID NO: 5227615 - DNA, 25 bp, Homo sapien
ccctgcggccttggccttccgcagt

SEQ ID NO: 5227616 - DNA, 25 bp, Homo sapien
tatccacacagacccggcaaccatc

SEQ ID NO: 5227617 - DNA, 25 bp, Homo sapien
ctttctctgtttttggtatcttgtc

SEQ ID NO: 5227618 - DNA, 25 bp, Homo sapien
ctctgtttttggtatcttgtcatct

SEQ ID NO: 5227619 - DNA, 25 bp, Homo sapien
tcttccatgattcttttttaaactg

SEQ ID NO: 5227620 - DNA, 25 bp, Homo sapien
aaccttacaaaacagcctttctctg

SEQ ID NO: 5227621 - DNA, 25 bp, Homo sapien
gccagagcgtcacccaggattcttt

SEQ ID NO: 5227622 - DNA, 25 bp, Homo sapien
cggaatggccctcgtgccctatgag

SEQ ID NO: 5227623 - DNA, 25 bp, Homo sapien
aatctcactcagattcggaagagcc

SEQ ID NO: 5227624 - DNA, 25 bp, Homo sapien
tccgttgacacaaattccgagccaa

SEQ ID NO: 5227625 - DNA, 25 bp, Homo sapien
taggaattacatgcgaggcctgccc

SEQ ID NO: 5227626 - DNA, 25 bp, Homo sapien
agtgctggatgagtcaccttagcgt

SEQ ID NO: 5227627 - DNA, 25 bp, Homo sapien
tatgtgcggctcagtccagatcttt

SEQ ID NO: 5227628 - DNA, 25 bp, Homo sapien
tgctccttcatgctataggaattac

SEQ ID NO: 5227629 - DNA, 25 bp, Homo sapien
ttccatcagattgtttcccataaaa

SEQ ID NO: 5227630 - DNA, 25 bp, Homo sapien
tgttccatcagattgtttcccataa

SEQ ID NO: 5227631 - DNA, 25 bp, Homo sapien
ctggcctcctgttccatcagattgt

SEQ ID NO: 5227632 - DNA, 25 bp, Homo sapien
ggcctcctgttccatcagattgttt

SEQ ID NO: 5227633 - DNA, 25 bp, Homo sapien
gagcgagaaccgcggccaaattttc

SEQ ID NO: 5227634 - DNA, 25 bp, Homo sapien
cgagaaccgcggccaaattttcgcg

SEQ ID NO: 5227635 - DNA, 25 bp, Homo sapien
caagagcgagaaccgcggccaaatt

SEQ ID NO: 5227636 - DNA, 25 bp, Homo sapien
acaagagcgagaaccgcggccaaat

SEQ ID NO: 5227637 - DNA, 25 bp, Homo sapien
cctttccatacctgagaggaggcac

SEQ ID NO: 5227638 - DNA, 25 bp, Homo sapien
gagttcccaggcctgataggattcc

SEQ ID NO: 5227639 - DNA, 25 bp, Homo sapien
tgatgttggtgtgtaaggctaccgc

SEQ ID NO: 5227640 - DNA, 25 bp, Homo sapien
gctaccgctgggatctctagataaa

SEQ ID NO: 5227641 - DNA, 25 bp, Homo sapien
ccaggtaatctgcatcgttgatgtc

SEQ ID NO: 5227642 - DNA, 25 bp, Homo sapien
gggactgccaggtaatctgcatcgt

SEQ ID NO: 5227643 - DNA, 25 bp, Homo sapien
cagcacggggactgccaggtaatct

SEQ ID NO: 5227644 - DNA, 25 bp, Homo sapien
gactgccaggtaatctgcatcgttg

SEQ ID NO: 5227645 - DNA, 25 bp, Homo sapien
actgcatcctcaggagggaggaaca

SEQ ID NO: 5227646 - DNA, 25 bp, Homo sapien
cacagcagtagtcagaaagaacact

SEQ ID NO: 5227647 - DNA, 25 bp, Homo sapien
ggttttgaatgagaacacgcctcca

SEQ ID NO: 5227648 - DNA, 25 bp, Homo sapien
gcaggtggtgcaaaatagcggaaac

SEQ ID NO: 5227649 - DNA, 25 bp, Homo sapien
ttgagttgcccataagggccaggca

SEQ ID NO: 5227650 - DNA, 25 bp, Homo sapien
atcaggaaggaactaaaatacaagg

SEQ ID NO: 5227651 - DNA, 25 bp, Homo sapien
tcaggggggccagggggaatcagga

SEQ ID NO: 5227652 - DNA, 25 bp, Homo sapien
gccagggggaatcaggaaggaacta

SEQ ID NO: 5227653 - DNA, 25 bp, Homo sapien
ggaatcaggaaggaactaaaataca

SEQ ID NO: 5227654 - DNA, 25 bp, Homo sapien
ctgtgggctcctttagttttagcat

SEQ ID NO: 5227655 - DNA, 25 bp, Homo sapien
tctgtgggctcctttagttttagca

SEQ ID NO: 5227656 - DNA, 25 bp, Homo sapien
gatcacccagtcaatgttatagcag

SEQ ID NO: 5227657 - DNA, 25 bp, Homo sapien
gcaggcagatcacccagtcaatgtt

SEQ ID NO: 5227658 - DNA, 25 bp, Homo sapien
ggcagatcacccagtcaatgttata

SEQ ID NO: 5227659 - DNA, 25 bp, Homo sapien
acccagtcaatgttatagcagccca

SEQ ID NO: 5227660 - DNA, 25 bp, Homo sapien
ccgcgcggctccgcggcgagggcgg

SEQ ID NO: 5227661 - DNA, 25 bp, Homo sapien
agctcgccggctccgctccgcgcgg

SEQ ID NO: 5227662 - DNA, 25 bp, Homo sapien
ctcgccggctccgctccgcgcggct

SEQ ID NO: 5227663 - DNA, 25 bp, Homo sapien
ttagctcgccggctccgctccgcgc

SEQ ID NO: 5227664 - DNA, 25 bp, Homo sapien
ggccgtcggggccacgtgagcgcgt

SEQ ID NO: 5227665 - DNA, 25 bp, Homo sapien
acgtgagcgcgtcgggctcctccct

SEQ ID NO: 5227666 - DNA, 25 bp, Homo sapien
ggcagccaacgccacgcccctcgcg

SEQ ID NO: 5227667 - DNA, 25 bp, Homo sapien
gtccggggcagccaacgccacgccc

SEQ ID NO: 5227668 - DNA, 25 bp, Homo sapien
tagacgcgttgtcctgggccgccac

SEQ ID NO: 5227669 - DNA, 25 bp, Homo sapien
ctgaaagtagacgcgttgtcctggg

SEQ ID NO: 5227670 - DNA, 25 bp, Homo sapien
aagtagacgcgttgtcctgggccgc

SEQ ID NO: 5227671 - DNA, 25 bp, Homo sapien
gaaagtagacgcgttgtcctgggcc

SEQ ID NO: 5227672 - DNA, 25 bp, Homo sapien
cttgacggtgaccttcacttggcgc

SEQ ID NO: 5227673 - DNA, 25 bp, Homo sapien
ctcactgggccctcatcgtccgcgc

SEQ ID NO: 5227674 - DNA, 25 bp, Homo sapien
tgaccttcacttggcgcctcactgg

SEQ ID NO: 5227675 - DNA, 25 bp, Homo sapien
actgggccctcatcgtccgcgccgc

SEQ ID NO: 5227676 - DNA, 25 bp, Homo sapien
ccaggatccactcctctaggttaag

SEQ ID NO: 5227677 - DNA, 25 bp, Homo sapien
tcttcctggcagtcgtagaggcgcg

SEQ ID NO: 5227678 - DNA, 25 bp, Homo sapien
cctggcagtacgggcatcgtcactc

SEQ ID NO: 5227679 - DNA, 25 bp, Homo sapien
taggttaaggcgcttccgtagctcc

SEQ ID NO: 5227680 - DNA, 25 bp, Homo sapien
ccagcaggccagagatgaaggtctc

SEQ ID NO: 5227681 - DNA, 25 bp, Homo sapien
aggtctctgtgggtttgtaacaagt

SEQ ID NO: 5227682 - DNA, 25 bp, Homo sapien
ctctgtgggtttgtaacaagtcaac

SEQ ID NO: 5227683 - DNA, 25 bp, Homo sapien
tgtccagcaggccagagatgaaggt

SEQ ID NO: 5227684 - DNA, 25 bp, Homo sapien
gtcgaggggcagcaattgtcctgtg

SEQ ID NO: 5227685 - DNA, 25 bp, Homo sapien
ggtcgaggggcagcaattgtcctgt

SEQ ID NO: 5227686 - DNA, 25 bp, Homo sapien
ttggccgtaaccttctaagtcacag

SEQ ID NO: 5227687 - DNA, 25 bp, Homo sapien
tccagaaatgggtctacatgggctt

SEQ ID NO: 5227688 - DNA, 25 bp, Homo sapien
taagtcacagcagatgaaccagtgt

SEQ ID NO: 5227689 - DNA, 25 bp, Homo sapien
tgggctttcacatgagctaagtgca

SEQ ID NO: 5227690 - DNA, 25 bp, Homo sapien
tgatcatagttgtaaacacaactgc

SEQ ID NO: 5227691 - DNA, 25 bp, Homo sapien
aatctgtaactcgtggtgatcatag

SEQ ID NO: 5227692 - DNA, 25 bp, Homo sapien
aacacaactgcacacagactagcct

SEQ ID NO: 5227693 - DNA, 25 bp, Homo sapien
actcgtggtgatcatagttgtaaac

SEQ ID NO: 5227694 - DNA, 25 bp, Homo sapien
tggttgcatccaacccgactcttta

SEQ ID NO: 5227695 - DNA, 25 bp, Homo sapien
gcatccaacccgactctttattggg

SEQ ID NO: 5227696 - DNA, 25 bp, Homo sapien
caacccgactctttattgggcttgc

SEQ ID NO: 5227697 - DNA, 25 bp, Homo sapien
catgagtcctggttgcatccaaccc

SEQ ID NO: 5227698 - DNA, 25 bp, Homo sapien
ctctcttgacctctggaaggcccta

SEQ ID NO: 5227699 - DNA, 25 bp, Homo sapien
cttgacctctggaaggccctatgaa

SEQ ID NO: 5227700 - DNA, 25 bp, Homo sapien
tcttgacctctggaaggccctatga

SEQ ID NO: 5227701 - DNA, 25 bp, Homo sapien
tgacctctggaaggccctatgaaaa

SEQ ID NO: 5227702 - DNA, 25 bp, Homo sapien
gcagggacttccaggtttctcttct

SEQ ID NO: 5227703 - DNA, 25 bp, Homo sapien
taggcagggacttccaggtttctct

SEQ ID NO: 5227704 - DNA, 25 bp, Homo sapien
ggacttccaggtttctcttcttgta

SEQ ID NO: 5227705 - DNA, 25 bp, Homo sapien
agggacttccaggtttctcttcttg

SEQ ID NO: 5227706 - DNA, 25 bp, Homo sapien
aacaagcgctgtgaagcacagccac

SEQ ID NO: 5227707 - DNA, 25 bp, Homo sapien
ggaacccaacaagcgctgtgaagca

SEQ ID NO: 5227708 - DNA, 25 bp, Homo sapien
gtggggaacccaacaagcgctgtga

SEQ ID NO: 5227709 - DNA, 25 bp, Homo sapien
acccaacaagcgctgtgaagcacag

SEQ ID NO: 5227710 - DNA, 25 bp, Homo sapien
tcccttaagctgactcgtctgcgag

SEQ ID NO: 5227711 - DNA, 25 bp, Homo sapien
ttaagctgactcgtctgcgagggcg

SEQ ID NO: 5227712 - DNA, 25 bp, Homo sapien
cttaagctgactcgtctgcgagggc

SEQ ID NO: 5227713 - DNA, 25 bp, Homo sapien
tctgcgagggcggtgaccagcccgg

SEQ ID NO: 5227714 - DNA, 25 bp, Homo sapien
catgggaagcctccgctcctctctg

SEQ ID NO: 5227715 - DNA, 25 bp, Homo sapien
ctggggctgcaccgcgcaagcagac

SEQ ID NO: 5227716 - DNA, 25 bp, Homo sapien
ctctgccaccgccttcgctcgcccc

SEQ ID NO: 5227717 - DNA, 25 bp, Homo sapien
tgcaccgcgcaagcagacgccgcct

SEQ ID NO: 5227718 - DNA, 25 bp, Homo sapien
atgtcggacgcgcagtacagctccg

SEQ ID NO: 5227719 - DNA, 25 bp, Homo sapien
gccctctccgaaatccaactcggca

SEQ ID NO: 5227720 - DNA, 25 bp, Homo sapien
aatccaactcggcaggctccaccac

SEQ ID NO: 5227721 - DNA, 25 bp, Homo sapien
tgtcggacgcgcagtacagctccgc

SEQ ID NO: 5227722 - DNA, 25 bp, Homo sapien
catgcttaatgcctggtaccttacc

SEQ ID NO: 5227723 - DNA, 25 bp, Homo sapien
tgcattctcagcttcaattcacagt

SEQ ID NO: 5227724 - DNA, 25 bp, Homo sapien
taacatacaatggtaaattctgtgc

SEQ ID NO: 5227725 - DNA, 25 bp, Homo sapien
atgtatagacataagatggagccag

SEQ ID NO: 5227726 - DNA, 25 bp, Homo sapien
ccaaagaatgtattgtcaagttttt

SEQ ID NO: 5227727 - DNA, 25 bp, Homo sapien
agtttttggatcttctcccaacaga

SEQ ID NO: 5227728 - DNA, 25 bp, Homo sapien
aaatcacagcacagttttcgtttgt

SEQ ID NO: 5227729 - DNA, 25 bp, Homo sapien
aagctgtgtttaaggatcatctgca

SEQ ID NO: 5227730 - DNA, 25 bp, Homo sapien
tgaggtcacacagtaccagccaagc

SEQ ID NO: 5227731 - DNA, 25 bp, Homo sapien
tgatgggtcttgagctgccctgcct

SEQ ID NO: 5227732 - DNA, 25 bp, Homo sapien
gagctgccctgcctcatctgaggtc

SEQ ID NO: 5227733 - DNA, 25 bp, Homo sapien
aggtcacacagtaccagccaagctc

SEQ ID NO: 5227734 - DNA, 25 bp, Homo sapien
tcaggaaaattgtgcttgcccttgg

SEQ ID NO: 5227735 - DNA, 25 bp, Homo sapien
atggtcagaagggtttgactccaaa

SEQ ID NO: 5227736 - DNA, 25 bp, Homo sapien
ttggatggtcagaagggtttgactc

SEQ ID NO: 5227737 - DNA, 25 bp, Homo sapien
catccgtttgagatttgctcaggaa

SEQ ID NO: 5227738 - DNA, 25 bp, Homo sapien
aatccatgatactggccagatggct

SEQ ID NO: 5227739 - DNA, 25 bp, Homo sapien
taatagcttaaaagttctgagtagc

SEQ ID NO: 5227740 - DNA, 25 bp, Homo sapien
gataggctcatgtggttagagcatt

SEQ ID NO: 5227741 - DNA, 25 bp, Homo sapien
gattcaatccctgtatacgaactga

SEQ ID NO: 5227742 - DNA, 25 bp, Homo sapien
aagaaagaggagcatgggatagctc

SEQ ID NO: 5227743 - DNA, 25 bp, Homo sapien
tgagaagcctatggctctgaaagaa

SEQ ID NO: 5227744 - DNA, 25 bp, Homo sapien
ccacactctgtctgtgtgagaagcc

SEQ ID NO: 5227745 - DNA, 25 bp, Homo sapien
gcatgggatagctcttcttttactg

SEQ ID NO: 5227746 - DNA, 25 bp, Homo sapien
atggttcaaatggttgctcttcctc

SEQ ID NO: 5227747 - DNA, 25 bp, Homo sapien
gttcaaatggttgctcttcctcttt

SEQ ID NO: 5227748 - DNA, 25 bp, Homo sapien
tggttcaaatggttgctcttcctct

SEQ ID NO: 5227749 - DNA, 25 bp, Homo sapien
tcaaatggttgctcttcctcttttc

SEQ ID NO: 5227750 - DNA, 25 bp, Homo sapien
atactttttagtaagctgccctgga

SEQ ID NO: 5227751 - DNA, 25 bp, Homo sapien
tattgttgagcatgagctatacttt

SEQ ID NO: 5227752 - DNA, 25 bp, Homo sapien
actttttagtaagctgccctggaga

SEQ ID NO: 5227753 - DNA, 25 bp, Homo sapien
tagaaatattgttgagcatgagcta

SEQ ID NO: 5227754 - DNA, 25 bp, Homo sapien
tgttctttatgtggtaatatattgc

SEQ ID NO: 5227755 - DNA, 25 bp, Homo sapien
tatgtggtaatatattgctaaggtc

SEQ ID NO: 5227756 - DNA, 25 bp, Homo sapien
tttatgtggtaatatattgctaagg

SEQ ID NO: 5227757 - DNA, 25 bp, Homo sapien
gtggtaatatattgctaaggtcaca

SEQ ID NO: 5227758 - DNA, 25 bp, Homo sapien
attgtgagctaaacaagccattttt

SEQ ID NO: 5227759 - DNA, 25 bp, Homo sapien
taccgaggtagagttgtgttaagga

SEQ ID NO: 5227760 - DNA, 25 bp, Homo sapien
aagcacttgtgatttaattgtgagc

SEQ ID NO: 5227761 - DNA, 25 bp, Homo sapien
gcagaaagttcacataaagtaattc

SEQ ID NO: 5227762 - DNA, 25 bp, Homo sapien
tgtaagtggatgtgatctctcatca

SEQ ID NO: 5227763 - DNA, 25 bp, Homo sapien
aaaatatccagggatctatttgcat

SEQ ID NO: 5227764 - DNA, 25 bp, Homo sapien
aatatccagggatctatttgcatct

SEQ ID NO: 5227765 - DNA, 25 bp, Homo sapien
tggatgtgatctctcatcaaaaata

SEQ ID NO: 5227766 - DNA, 25 bp, Homo sapien
tcctgtaaccataaggctcaaaggc

SEQ ID NO: 5227767 - DNA, 25 bp, Homo sapien
tgtaaactacttgtaggctcgaaag

SEQ ID NO: 5227768 - DNA, 25 bp, Homo sapien
cacgagcggctatcatatacctgag

SEQ ID NO: 5227769 - DNA, 25 bp, Homo sapien
acaatagtcattagccacgagcggc

SEQ ID NO: 5227770 - DNA, 25 bp, Homo sapien
cacattcagctgttagctgtgcagc

SEQ ID NO: 5227771 - DNA, 25 bp, Homo sapien
tgcacattcagctgttagctgtgca

SEQ ID NO: 5227772 - DNA, 25 bp, Homo sapien
gtaaataaatttgtgctcaggatca

SEQ ID NO: 5227773 - DNA, 25 bp, Homo sapien
aaatttgtgctcaggatcatgctta

SEQ ID NO: 5227774 - DNA, 25 bp, Homo sapien
cagttggtgggacaaatgtcgattt

SEQ ID NO: 5227775 - DNA, 25 bp, Homo sapien
ccagttggtgggacaaatgtcgatt

SEQ ID NO: 5227776 - DNA, 25 bp, Homo sapien
gccctaagacctaatagtggccaaa

SEQ ID NO: 5227777 - DNA, 25 bp, Homo sapien
tacgtaacttctcaatagtccagag

SEQ ID NO: 5227778 - DNA, 25 bp, Homo sapien
tataccctactggtcacatgaaaag

SEQ ID NO: 5227779 - DNA, 25 bp, Homo sapien
atttcaaaggccagacatatgccct

SEQ ID NO: 5227780 - DNA, 25 bp, Homo sapien
cagggtcatattggtgccatctgtg

SEQ ID NO: 5227781 - DNA, 25 bp, Homo sapien
catattggtgccatctgtgaggaac

SEQ ID NO: 5227782 - DNA, 25 bp, Homo sapien
tgctgtttcagggtcatattggtgc

SEQ ID NO: 5227783 - DNA, 25 bp, Homo sapien
gcccttcccttcacggccgacacga

SEQ ID NO: 5227784 - DNA, 25 bp, Homo sapien
tgatcagatgaaaggaatgatgtat

SEQ ID NO: 5227785 - DNA, 25 bp, Homo sapien
aggccccactatagtgatcagatga

SEQ ID NO: 5227786 - DNA, 25 bp, Homo sapien
gccccactatagtgatcagatgaaa

SEQ ID NO: 5227787 - DNA, 25 bp, Homo sapien
ccactatagtgatcagatgaaagga

SEQ ID NO: 5227788 - DNA, 25 bp, Homo sapien
aggttgaaggttacggcctccgatg

SEQ ID NO: 5227789 - DNA, 25 bp, Homo sapien
ggttgaaggttacggcctccgatgc

SEQ ID NO: 5227790 - DNA, 25 bp, Homo sapien
ggcctccgatgcacttgtgctgctg

SEQ ID NO: 5227791 - DNA, 25 bp, Homo sapien
ccgatgcacttgtgctgctgactcg

SEQ ID NO: 5227792 - DNA, 25 bp, Homo sapien
cgaaggtcaaagtagtatttggcat

SEQ ID NO: 5227793 - DNA, 25 bp, Homo sapien
aacactggcaggaacattaatatta

SEQ ID NO: 5227794 - DNA, 25 bp, Homo sapien
gagcaaatagaaaattcaggttgtt

SEQ ID NO: 5227795 - DNA, 25 bp, Homo sapien
tcaggttgttgtcatctgctaagga

SEQ ID NO: 5227796 - DNA, 25 bp, Homo sapien
ccgcgcccggcctgtgtgtgtattt

SEQ ID NO: 5227797 - DNA, 25 bp, Homo sapien
ggacagggtttcaccatgttcgcca

SEQ ID NO: 5227798 - DNA, 25 bp, Homo sapien
gggacagggtttcaccatgttcgcc

SEQ ID NO: 5227799 - DNA, 25 bp, Homo sapien
cgcgcccggcctgtgtgtgtatttt

SEQ ID NO: 5227800 - DNA, 25 bp, Homo sapien
gaaagaccttctcatagcggctcta

SEQ ID NO: 5227801 - DNA, 25 bp, Homo sapien
tagcggctctacacaagtctttgtc

SEQ ID NO: 5227802 - DNA, 25 bp, Homo sapien
aataccaatgaagttatcagcactg

SEQ ID NO: 5227803 - DNA, 25 bp, Homo sapien
ccaatgaagttatcagcactgaaag

SEQ ID NO: 5227804 - DNA, 25 bp, Homo sapien
ccttcagtacctaacaacgctgctg

SEQ ID NO: 5227805 - DNA, 25 bp, Homo sapien
agtacctaacaacgctgctgtctgc

SEQ ID NO: 5227806 - DNA, 25 bp, Homo sapien
gagtataatccttgttgtccatgag

SEQ ID NO: 5227807 - DNA, 25 bp, Homo sapien
tcctctgtttatgaccccaaacatg

SEQ ID NO: 5227808 - DNA, 25 bp, Homo sapien
tggagggcccaaactatattcaagc

SEQ ID NO: 5227809 - DNA, 25 bp, Homo sapien
tagcatttatactcatgctgcagtg

SEQ ID NO: 5227810 - DNA, 25 bp, Homo sapien
tatattcaagcttaaaactgcttca

SEQ ID NO: 5227811 - DNA, 25 bp, Homo sapien
ttttctcatcgtcactgaaccacca

SEQ ID NO: 5227812 - DNA, 25 bp, Homo sapien
tgtttcagtcaatgtctgctatcaa

SEQ ID NO: 5227813 - DNA, 25 bp, Homo sapien
agtgagtgcacaatgattgcacctg

SEQ ID NO: 5227814 - DNA, 25 bp, Homo sapien
tgagtgcacaatgattgcacctgtg

SEQ ID NO: 5227815 - DNA, 25 bp, Homo sapien
tgtctgctatcaagagtgaccgaaa

SEQ ID NO: 5227816 - DNA, 25 bp, Homo sapien
gacttaatgggacacctacagcttg

SEQ ID NO: 5227817 - DNA, 25 bp, Homo sapien
cagctctgcgggtaactacttttaa

SEQ ID NO: 5227818 - DNA, 25 bp, Homo sapien
tcctttaaagaaactgcggtaatca

SEQ ID NO: 5227819 - DNA, 25 bp, Homo sapien
aaagcatatagagcacagctctgcg

SEQ ID NO: 5227820 - DNA, 25 bp, Homo sapien
tttattagcttttaatataaacatg

SEQ ID NO: 5227821 - DNA, 25 bp, Homo sapien
tagagtttattagcttttaatataa

SEQ ID NO: 5227822 - DNA, 25 bp, Homo sapien
ttattagcttttaatataaacatga

SEQ ID NO: 5227823 - DNA, 25 bp, Homo sapien
gcaactgtaccttacatgtccggga

SEQ ID NO: 5227824 - DNA, 25 bp, Homo sapien
caaggtgaacactaggaagtttatt

SEQ ID NO: 5227825 - DNA, 25 bp, Homo sapien
agttgagttgaatcctaagagaaga

SEQ ID NO: 5227826 - DNA, 25 bp, Homo sapien
cataaggtagttaggagaggcagac

SEQ ID NO: 5227827 - DNA, 25 bp, Homo sapien
gtgggatgaagtggatgaaagtgat

SEQ ID NO: 5227828 - DNA, 25 bp, Homo sapien
gatgaagtggatgaaagtgatttaa

SEQ ID NO: 5227829 - DNA, 25 bp, Homo sapien
gcacagtgtatccaaaagttgtggg

SEQ ID NO: 5227830 - DNA, 25 bp, Homo sapien
cagtgtatccaaaagttgtgggatg

SEQ ID NO: 5227831 - DNA, 25 bp, Homo sapien
tggacaatacttagcgacagttgct

SEQ ID NO: 5227832 - DNA, 25 bp, Homo sapien
cccacccttgaatgaagtgcttgaa

SEQ ID NO: 5227833 - DNA, 25 bp, Homo sapien
gctacctgtgaacaaacattggccc

SEQ ID NO: 5227834 - DNA, 25 bp, Homo sapien
agtataaacccactccctctggaca

SEQ ID NO: 5227835 - DNA, 25 bp, Homo sapien
ccctcccgcggcgacttggagagag

SEQ ID NO: 5227836 - DNA, 25 bp, Homo sapien
tactgccttctttatgggaaccctc

SEQ ID NO: 5227837 - DNA, 25 bp, Homo sapien
ggcccagctcacgtgtattctattt

SEQ ID NO: 5227838 - DNA, 25 bp, Homo sapien
tttaccttcatggtgctgttgcccc

SEQ ID NO: 5227839 - DNA, 25 bp, Homo sapien
tgcatggattacaaccgcagcgagg

SEQ ID NO: 5227840 - DNA, 25 bp, Homo sapien
ttctggccgctggtggagatccaat

SEQ ID NO: 5227841 - DNA, 25 bp, Homo sapien
gatccgtggaggtgagaaccttccc

SEQ ID NO: 5227842 - DNA, 25 bp, Homo sapien
tgccaggaaatcacggtgcccatgt

SEQ ID NO: 5227843 - DNA, 25 bp, Homo sapien
gccaggaagttacaggagcgagtcc

SEQ ID NO: 5227844 - DNA, 25 bp, Homo sapien
ttcacacagttccaagacagctcgg

SEQ ID NO: 5227845 - DNA, 25 bp, Homo sapien
ttcccggcgggcattagaagcaggt

SEQ ID NO: 5227846 - DNA, 25 bp, Homo sapien
taaggacgcttagctgcaggcagaa

SEQ ID NO: 5227847 - DNA, 25 bp, Homo sapien
aattgttgtaaggagtgagatcttg

SEQ ID NO: 5227848 - DNA, 25 bp, Homo sapien
tgagatcttgtcttaagatgtaaac

SEQ ID NO: 5227849 - DNA, 25 bp, Homo sapien
ggaagtacctgcctcagaattgttg

SEQ ID NO: 5227850 - DNA, 25 bp, Homo sapien
gagatcttgtcttaagatgtaaacg

SEQ ID NO: 5227851 - DNA, 25 bp, Homo sapien
aacttggaggctgggattaacacac

SEQ ID NO: 5227852 - DNA, 25 bp, Homo sapien
gagatggacagtaacccgcggttga

SEQ ID NO: 5227853 - DNA, 25 bp, Homo sapien
taattgcgcaactgaagagcgccgc

SEQ ID NO: 5227854 - DNA, 25 bp, Homo sapien
gaatacggaggtgaacttgcttgcc

SEQ ID NO: 5227855 - DNA, 25 bp, Homo sapien
aatatgaacacctgtagaattccag

SEQ ID NO: 5227856 - DNA, 25 bp, Homo sapien
aatacacacgttgcataaagagcac

SEQ ID NO: 5227857 - DNA, 25 bp, Homo sapien
gagcacagaatgagatgggcctccc

SEQ ID NO: 5227858 - DNA, 25 bp, Homo sapien
tgctcactgctatgcccacagcttt

SEQ ID NO: 5227859 - DNA, 25 bp, Homo sapien
taattaagttacaataagcagtgag

SEQ ID NO: 5227860 - DNA, 25 bp, Homo sapien
acagagcagcggcatgggccgccgg

SEQ ID NO: 5227861 - DNA, 25 bp, Homo sapien
tcctccccctcttagaccatacagg

SEQ ID NO: 5227862 - DNA, 25 bp, Homo sapien
aaactgctttggcattggtgggagt

SEQ ID NO: 5227863 - DNA, 25 bp, Homo sapien
gcttcgtgtggcagttgccttgtca

SEQ ID NO: 5227864 - DNA, 25 bp, Homo sapien
tgccttgtcacaggcagttgcagca

SEQ ID NO: 5227865 - DNA, 25 bp, Homo sapien
ggcagttgccttgtcacaggcagtt

SEQ ID NO: 5227866 - DNA, 25 bp, Homo sapien
catctggtcgccagcttcgtgtggc

SEQ ID NO: 5227867 - DNA, 25 bp, Homo sapien
tgataacctggtaatccccagctgt

SEQ ID NO: 5227868 - DNA, 25 bp, Homo sapien
tggctctatgccctttgcctgggct

SEQ ID NO: 5227869 - DNA, 25 bp, Homo sapien
cccagctgttcaccacttgtgccag

SEQ ID NO: 5227870 - DNA, 25 bp, Homo sapien
acttgtgccagcctcactcctggct

SEQ ID NO: 5227871 - DNA, 25 bp, Homo sapien
tatgctcacggatgctgcaaatcag

SEQ ID NO: 5227872 - DNA, 25 bp, Homo sapien
tgatcaccaactgggtcaggcaaaa

SEQ ID NO: 5227873 - DNA, 25 bp, Homo sapien
taggtctctgtgtgtaggtacccac

SEQ ID NO: 5227874 - DNA, 25 bp, Homo sapien
acttgaacgacagggagtggcttga

SEQ ID NO: 5227875 - DNA, 25 bp, Homo sapien
caaagagtgaggttgacaagctggc

SEQ ID NO: 5227876 - DNA, 25 bp, Homo sapien
gctgcagcagggtaaacaaagagtg

SEQ ID NO: 5227877 - DNA, 25 bp, Homo sapien
tcagcacaaaggttgcactttggcc

SEQ ID NO: 5227878 - DNA, 25 bp, Homo sapien
cacacaagtgtagcagaaatgggca

SEQ ID NO: 5227879 - DNA, 25 bp, Homo sapien
caacagggtagactgatattcacac

SEQ ID NO: 5227880 - DNA, 25 bp, Homo sapien
cctgggatatggtagaaacttcaac

SEQ ID NO: 5227881 - DNA, 25 bp, Homo sapien
tgaaagacctccacagatgggactc

SEQ ID NO: 5227882 - DNA, 25 bp, Homo sapien
gaaaccccaaatgccatagcctgag

SEQ ID NO: 5227883 - DNA, 25 bp, Homo sapien
cacaggaaagagttcgtgactgttc

SEQ ID NO: 5227884 - DNA, 25 bp, Homo sapien
caatcatgcttagaggcgaggatta

SEQ ID NO: 5227885 - DNA, 25 bp, Homo sapien
tcaaacagaaagttacttgctcccc

SEQ ID NO: 5227886 - DNA, 25 bp, Homo sapien
aagagtgtgcccttgagtgcacagg

SEQ ID NO: 5227887 - DNA, 25 bp, Homo sapien
ggagggcacgttcacttccttttca

SEQ ID NO: 5227888 - DNA, 25 bp, Homo sapien
cgcaaaaggggcacgtcctgattcc

SEQ ID NO: 5227889 - DNA, 25 bp, Homo sapien
aagtgaaaccttctgataatgaccc

SEQ ID NO: 5227890 - DNA, 25 bp, Homo sapien
ggcagacacctcattgcacaccggc

SEQ ID NO: 5227891 - DNA, 25 bp, Homo sapien
cccttctgctggaaaacacgacttc

SEQ ID NO: 5227892 - DNA, 25 bp, Homo sapien
tagagctcaaggtacagggaacgat

SEQ ID NO: 5227893 - DNA, 25 bp, Homo sapien
gtggcccctgcttgttagagctcaa

SEQ ID NO: 5227894 - DNA, 25 bp, Homo sapien
ccaagatccctacaacaatcagatg

SEQ ID NO: 5227895 - DNA, 25 bp, Homo sapien
ttaagatcccagtttaaatgagcga

SEQ ID NO: 5227896 - DNA, 25 bp, Homo sapien
agatcccagtttaaatgagcgattg

SEQ ID NO: 5227897 - DNA, 25 bp, Homo sapien
taagatcccagtttaaatgagcgat

SEQ ID NO: 5227898 - DNA, 25 bp, Homo sapien
atcccagtttaaatgagcgattgac

SEQ ID NO: 5227899 - DNA, 25 bp, Homo sapien
cacagcggcaataactggattatca

SEQ ID NO: 5227900 - DNA, 25 bp, Homo sapien
tgctgagcacatcaggtgcagccac

SEQ ID NO: 5227901 - DNA, 25 bp, Homo sapien
ctgagcacatcaggtgcagccacag

SEQ ID NO: 5227902 - DNA, 25 bp, Homo sapien
aatgctgagcacatcaggtgcagcc

SEQ ID NO: 5227903 - DNA, 25 bp, Homo sapien
tgtccactgagccatcaaattaggc

SEQ ID NO: 5227904 - DNA, 25 bp, Homo sapien
gaatcttactgttacgctgggcatg

SEQ ID NO: 5227905 - DNA, 25 bp, Homo sapien
ggttctagctttggtcacctatcag

SEQ ID NO: 5227906 - DNA, 25 bp, Homo sapien
gctgctggaggcctaggttctagct

SEQ ID NO: 5227907 - DNA, 25 bp, Homo sapien
ttgttcagcctggtgtgccttaacc

SEQ ID NO: 5227908 - DNA, 25 bp, Homo sapien
gtgtgccttaacctcaggagtaaag

SEQ ID NO: 5227909 - DNA, 25 bp, Homo sapien
tgttcagcctggtgtgccttaacct

SEQ ID NO: 5227910 - DNA, 25 bp, Homo sapien
cttgttcagcctggtgtgccttaac

SEQ ID NO: 5227911 - DNA, 25 bp, Homo sapien
gaaactcatgtgtgagatcgtccaa

SEQ ID NO: 5227912 - DNA, 25 bp, Homo sapien
aatgttggcatctaaccccgcagta

SEQ ID NO: 5227913 - DNA, 25 bp, Homo sapien
tggccaattaatctcctggagctgg

SEQ ID NO: 5227914 - DNA, 25 bp, Homo sapien
ggaaatccctcctaaaagtgccaga

SEQ ID NO: 5227915 - DNA, 25 bp, Homo sapien
ttttgccttcgctgtaattaatgta

SEQ ID NO: 5227916 - DNA, 25 bp, Homo sapien
tccgtgattccaactgtcagcgagg

SEQ ID NO: 5227917 - DNA, 25 bp, Homo sapien
tgtatccgtgattccaactgtcagc

SEQ ID NO: 5227918 - DNA, 25 bp, Homo sapien
attaatgtatccgtgattccaactg

SEQ ID NO: 5227919 - DNA, 25 bp, Homo sapien
cagtcactgtgaccaaaacggcagg

SEQ ID NO: 5227920 - DNA, 25 bp, Homo sapien
aaaacggcaggtaggacagccctgg

SEQ ID NO: 5227921 - DNA, 25 bp, Homo sapien
tttgctatttggcaggtagtgttct

SEQ ID NO: 5227922 - DNA, 25 bp, Homo sapien
gctatttggcaggtagtgttctcca

SEQ ID NO: 5227923 - DNA, 25 bp, Homo sapien
cctgcccgaggtgtgttcgccgaga

SEQ ID NO: 5227924 - DNA, 25 bp, Homo sapien
cagtcttgctcatcatatccatggt

SEQ ID NO: 5227925 - DNA, 25 bp, Homo sapien
tgtgaaagctgtggagccgttttcc

SEQ ID NO: 5227926 - DNA, 25 bp, Homo sapien
catggttgacttttgcaggtgtgaa

SEQ ID NO: 5227927 - DNA, 25 bp, Homo sapien
tgggtctgacctttatcctcactgg

SEQ ID NO: 5227928 - DNA, 25 bp, Homo sapien
aagaggaagatgctagaggtgaccc

SEQ ID NO: 5227929 - DNA, 25 bp, Homo sapien
tcaaggagacgggtactagagtcac

SEQ ID NO: 5227930 - DNA, 25 bp, Homo sapien
tgccatgtccaggatagcgcctgtg

SEQ ID NO: 5227931 - DNA, 25 bp, Homo sapien
ctttccttgtgccttaaaggatctt

SEQ ID NO: 5227932 - DNA, 25 bp, Homo sapien
ttaaaggatcttcatagagagacat

SEQ ID NO: 5227933 - DNA, 25 bp, Homo sapien
tggctttccttgtgccttaaaggat

SEQ ID NO: 5227934 - DNA, 25 bp, Homo sapien
ccttgtgccttaaaggatcttcata

SEQ ID NO: 5227935 - DNA, 25 bp, Homo sapien
ttagtcagggaagatctgttaaatt

SEQ ID NO: 5227936 - DNA, 25 bp, Homo sapien
tacgccaataaacccagagcaacag

SEQ ID NO: 5227937 - DNA, 25 bp, Homo sapien
aattcaaggccaacatacgccaata

SEQ ID NO: 5227938 - DNA, 25 bp, Homo sapien
caggatatataattgtctgagttag

SEQ ID NO: 5227939 - DNA, 25 bp, Homo sapien
tgtttgggctaacaacagagagccc

SEQ ID NO: 5227940 - DNA, 25 bp, Homo sapien
tttcctcctaaaacgggcagcacca

SEQ ID NO: 5227941 - DNA, 25 bp, Homo sapien
cagcaccagtcaggttatctggtga

SEQ ID NO: 5227942 - DNA, 25 bp, Homo sapien
taaaacgggcagcaccagtcaggtt

SEQ ID NO: 5227943 - DNA, 25 bp, Homo sapien
gaatttgcagtacattcttcccttg

SEQ ID NO: 5227944 - DNA, 25 bp, Homo sapien
tccttcccacctgcaattatagttt

SEQ ID NO: 5227945 - DNA, 25 bp, Homo sapien
gttttactagcttgtaaagcacaca

SEQ ID NO: 5227946 - DNA, 25 bp, Homo sapien
gaggccctgctgtgaatgtaattgg

SEQ ID NO: 5227947 - DNA, 25 bp, Homo sapien
gttggcagaaacaaagagacgccat

SEQ ID NO: 5227948 - DNA, 25 bp, Homo sapien
atgttggcagaaacaaagagacgcc

SEQ ID NO: 5227949 - DNA, 25 bp, Homo sapien
gactgaaatgttggcagaaacaaag

SEQ ID NO: 5227950 - DNA, 25 bp, Homo sapien
aaatgttggcagaaacaaagagacg

SEQ ID NO: 5227951 - DNA, 25 bp, Homo sapien
tgagtgctgttgttgttgttgggtt

SEQ ID NO: 5227952 - DNA, 25 bp, Homo sapien
ctgagtgctgttgttgttgttgggt

SEQ ID NO: 5227953 - DNA, 25 bp, Homo sapien
agtgctgttgttgttgttgggtttt

SEQ ID NO: 5227954 - DNA, 25 bp, Homo sapien
tgctgttgttgttgttgggtttttg

SEQ ID NO: 5227955 - DNA, 25 bp, Homo sapien
ttggatggtgtttagtcagtgctga

SEQ ID NO: 5227956 - DNA, 25 bp, Homo sapien
aatcactttcctgggagtcccttgg

SEQ ID NO: 5227957 - DNA, 25 bp, Homo sapien
gttggatggtgtttagtcagtgctg

SEQ ID NO: 5227958 - DNA, 25 bp, Homo sapien
tgaaatcactttcctgggagtccct

SEQ ID NO: 5227959 - DNA, 25 bp, Homo sapien
tgccttttgtggaagccagatcaga

SEQ ID NO: 5227960 - DNA, 25 bp, Homo sapien
acaacaataccggttgaggctgcag

SEQ ID NO: 5227961 - DNA, 25 bp, Homo sapien
tgtgcggcactaaggacaaagtcac

SEQ ID NO: 5227962 - DNA, 25 bp, Homo sapien
taaggattccaggagccaactcgag

SEQ ID NO: 5227963 - DNA, 25 bp, Homo sapien
ttatggcgtcctgggcctttttggc

SEQ ID NO: 5227964 - DNA, 25 bp, Homo sapien
tcttgtcagtttcaggcgttttaga

SEQ ID NO: 5227965 - DNA, 25 bp, Homo sapien
cagacctgtctgtcatatcgagtaa

SEQ ID NO: 5227966 - DNA, 25 bp, Homo sapien
cactgctaaaggtttctgtaaaagc

SEQ ID NO: 5227967 - DNA, 25 bp, Homo sapien
ttacatctcatggtccctccaggga

SEQ ID NO: 5227968 - DNA, 25 bp, Homo sapien
tgtgtcatgtgcttgtgttattgaa

SEQ ID NO: 5227969 - DNA, 25 bp, Homo sapien
ggaagaggtcccttgatcatttgtg

SEQ ID NO: 5227970 - DNA, 25 bp, Homo sapien
tgaaaatggaggttgattacatctc

SEQ ID NO: 5227971 - DNA, 25 bp, Homo sapien
taggtccatatttaccctgagtttc

SEQ ID NO: 5227972 - DNA, 25 bp, Homo sapien
cctgagcttggcttttaggtccata

SEQ ID NO: 5227973 - DNA, 25 bp, Homo sapien
cagaggaaagcccttggaatcaccc

SEQ ID NO: 5227974 - DNA, 25 bp, Homo sapien
tcaggcccacttgtaggacctcagc

SEQ ID NO: 5227975 - DNA, 25 bp, Homo sapien
acgtcagttaatgcacagaaggccc

SEQ ID NO: 5227976 - DNA, 25 bp, Homo sapien
agcagcctcttctgcaacaaggatc

SEQ ID NO: 5227977 - DNA, 25 bp, Homo sapien
ccctgcaatacagtgacgtcagtta

SEQ ID NO: 5227978 - DNA, 25 bp, Homo sapien
gacatgatgattaatagcccctgca

SEQ ID NO: 5227979 - DNA, 25 bp, Homo sapien
ctggctgtggattgcactctcctct

SEQ ID NO: 5227980 - DNA, 25 bp, Homo sapien
tgacaccttgacttcctgaggccct

SEQ ID NO: 5227981 - DNA, 25 bp, Homo sapien
ggctggctgtggattgcactctcct

SEQ ID NO: 5227982 - DNA, 25 bp, Homo sapien
caccttgacttcctgaggcccttgt

SEQ ID NO: 5227983 - DNA, 25 bp, Homo sapien
cttgaacccacactgcacatcttga

SEQ ID NO: 5227984 - DNA, 25 bp, Homo sapien
tattgttgttaaatgaacgccttgt

SEQ ID NO: 5227985 - DNA, 25 bp, Homo sapien
gaagtcatagtttgcttttaggcct

SEQ ID NO: 5227986 - DNA, 25 bp, Homo sapien
cattatgatggctgtccggtattca

SEQ ID NO: 5227987 - DNA, 25 bp, Homo sapien
ggagccagctttggccgtcgcctta

SEQ ID NO: 5227988 - DNA, 25 bp, Homo sapien
tactgtgccttatggccagaccacc

SEQ ID NO: 5227989 - DNA, 25 bp, Homo sapien
tccagcagtctggtggtttaccacc

SEQ ID NO: 5227990 - DNA, 25 bp, Homo sapien
gaaggtcctctcctcatatggatga

SEQ ID NO: 5227991 - DNA, 25 bp, Homo sapien
aagatcagggctttccttggaaggc

SEQ ID NO: 5227992 - DNA, 25 bp, Homo sapien
attttacggtggtaagattatagat

SEQ ID NO: 5227993 - DNA, 25 bp, Homo sapien
tcagtaatgggattatattactttt

SEQ ID NO: 5227994 - DNA, 25 bp, Homo sapien
tacggtggtaagattatagatattt

SEQ ID NO: 5227995 - DNA, 25 bp, Homo sapien
tttttcctctgttgatctttattct

SEQ ID NO: 5227996 - DNA, 25 bp, Homo sapien
agggcatgatgtcctcttaccacag

SEQ ID NO: 5227997 - DNA, 25 bp, Homo sapien
ctggagtcctgaagggcatgatgtc

SEQ ID NO: 5227998 - DNA, 25 bp, Homo sapien
gggcatgatgtcctcttaccacagc

SEQ ID NO: 5227999 - DNA, 25 bp, Homo sapien
cagctacttccaacactgacagcat

SEQ ID NO: 5228000 - DNA, 25 bp, Homo sapien
tcagctacttccaacactgacagca

SEQ ID NO: 5228001 - DNA, 25 bp, Homo sapien
gctacttccaacactgacagcatcc

SEQ ID NO: 5228002 - DNA, 25 bp, Homo sapien
tacttccaacactgacagcatccac

SEQ ID NO: 5228003 - DNA, 25 bp, Homo sapien
ccatcatggccagtggcttggagac

SEQ ID NO: 5228004 - DNA, 25 bp, Homo sapien
gccagtggcttggagaccattaaca

SEQ ID NO: 5228005 - DNA, 25 bp, Homo sapien
tggcttggagaccattaacatccct

SEQ ID NO: 5228006 - DNA, 25 bp, Homo sapien
accaagggtcaagccatcatggcca

SEQ ID NO: 5228007 - DNA, 25 bp, Homo sapien
ccctggaattagagtcggtggctag

SEQ ID NO: 5228008 - DNA, 25 bp, Homo sapien
tgtcaggatgctaaaaccagagggc

SEQ ID NO: 5228009 - DNA, 25 bp, Homo sapien
gagttccaggaagtcaatagcagtc

SEQ ID NO: 5228010 - DNA, 25 bp, Homo sapien
tttgctttagacagtgccacaaggg

SEQ ID NO: 5228011 - DNA, 25 bp, Homo sapien
gaaaaaccatggcagtatagtttct

SEQ ID NO: 5228012 - DNA, 25 bp, Homo sapien
cagtggtcaactgggcttttgtttc

SEQ ID NO: 5228013 - DNA, 25 bp, Homo sapien
ttcaggagaagatctcaagcagaga

SEQ ID NO: 5228014 - DNA, 25 bp, Homo sapien
tctttagggctagaaaaaccatggc

SEQ ID NO: 5228015 - DNA, 25 bp, Homo sapien
tcctgtagtaagtccaagggtcttc

SEQ ID NO: 5228016 - DNA, 25 bp, Homo sapien
caaaattgggctccggtataatgag

SEQ ID NO: 5228017 - DNA, 25 bp, Homo sapien
tgatgaataaccaggctcttgagcc

SEQ ID NO: 5228018 - DNA, 25 bp, Homo sapien
aggtagggcctctgcgtcttctgtc

SEQ ID NO: 5228019 - DNA, 25 bp, Homo sapien
ccaggagatagcgaatgtgagtaaa

SEQ ID NO: 5228020 - DNA, 25 bp, Homo sapien
tagtcatccaggagatagcgaatgt

SEQ ID NO: 5228021 - DNA, 25 bp, Homo sapien
tggcatgccaagtttttgacacctt

SEQ ID NO: 5228022 - DNA, 25 bp, Homo sapien
gtgagtaaatggcatgccaagtttt

SEQ ID NO: 5228023 - DNA, 25 bp, Homo sapien
gtttagggatggttgattcagcagc

SEQ ID NO: 5228024 - DNA, 25 bp, Homo sapien
gagcatagggtttagggatggttga

SEQ ID NO: 5228025 - DNA, 25 bp, Homo sapien
gtcttgggagcatagggtttaggga

SEQ ID NO: 5228026 - DNA, 25 bp, Homo sapien
atagggtttagggatggttgattca

SEQ ID NO: 5228027 - DNA, 25 bp, Homo sapien
cttattctgtcttatttgtactctc

SEQ ID NO: 5228028 - DNA, 25 bp, Homo sapien
tattctgtcttatttgtactctcat

SEQ ID NO: 5228029 - DNA, 25 bp, Homo sapien
ttattctgtcttatttgtactctca

SEQ ID NO: 5228030 - DNA, 25 bp, Homo sapien
ctcttattctgtcttatttgtactc

SEQ ID NO: 5228031 - DNA, 25 bp, Homo sapien
ggactataggcgctaccaggactgg

SEQ ID NO: 5228032 - DNA, 25 bp, Homo sapien
tgtccaactaccgaggacggcagta

SEQ ID NO: 5228033 - DNA, 25 bp, Homo sapien
tacagaggccagatgatagagttca

SEQ ID NO: 5228034 - DNA, 25 bp, Homo sapien
gaaatccactccctcaacgtgctgg

SEQ ID NO: 5228035 - DNA, 25 bp, Homo sapien
ataagatcaccggaaggcccatgtg

SEQ ID NO: 5228036 - DNA, 25 bp, Homo sapien
tcagataagatcaccggaaggccca

SEQ ID NO: 5228037 - DNA, 25 bp, Homo sapien
catagatgaaggatcagagagaggc

SEQ ID NO: 5228038 - DNA, 25 bp, Homo sapien
aagatcaccggaaggcccatgtgac

SEQ ID NO: 5228039 - DNA, 25 bp, Homo sapien
tgctctgctggagcggatacatcaa

SEQ ID NO: 5228040 - DNA, 25 bp, Homo sapien
tgtgagtgcaacagtgaccactgtg

SEQ ID NO: 5228041 - DNA, 25 bp, Homo sapien
tcctgcttcagctgcggcaacctgg

SEQ ID NO: 5228042 - DNA, 25 bp, Homo sapien
cctggtgtatacaggtggacagcaa

SEQ ID NO: 5228043 - DNA, 25 bp, Homo sapien
ctattggcatattccattgcaaatg

SEQ ID NO: 5228044 - DNA, 25 bp, Homo sapien
attggcatattccattgcaaatgac

SEQ ID NO: 5228045 - DNA, 25 bp, Homo sapien
tattggcatattccattgcaaatga

SEQ ID NO: 5228046 - DNA, 25 bp, Homo sapien
tcggataaaaggctccggcattgtc

SEQ ID NO: 5228047 - DNA, 25 bp, Homo sapien
tcagtattcaaatcctcggataaaa

SEQ ID NO: 5228048 - DNA, 25 bp, Homo sapien
caaatcctcggataaaaggctccgg

SEQ ID NO: 5228049 - DNA, 25 bp, Homo sapien
aaggctccggcattgtcttcactcc

SEQ ID NO: 5228050 - DNA, 25 bp, Homo sapien
cagcagggtcatgtcaatgatgcaa

SEQ ID NO: 5228051 - DNA, 25 bp, Homo sapien
cagacgtggcatagttcagcagggt

SEQ ID NO: 5228052 - DNA, 25 bp, Homo sapien
tgatgtactgatgaactcaggaggc

SEQ ID NO: 5228053 - DNA, 25 bp, Homo sapien
aaatgagtgctccaaagtttgctgc

SEQ ID NO: 5228054 - DNA, 25 bp, Homo sapien
agagcatggagttgggggtaaggtt

SEQ ID NO: 5228055 - DNA, 25 bp, Homo sapien
gcatggagttgggggtaaggttaca

SEQ ID NO: 5228056 - DNA, 25 bp, Homo sapien
gagcatggagttgggggtaaggtta

SEQ ID NO: 5228057 - DNA, 25 bp, Homo sapien
catggagttgggggtaaggttacag

SEQ ID NO: 5228058 - DNA, 25 bp, Homo sapien
ttcctaactccactgcgtccagagg

SEQ ID NO: 5228059 - DNA, 25 bp, Homo sapien
ccctccttgtgtgtctgctagagag

SEQ ID NO: 5228060 - DNA, 25 bp, Homo sapien
tgtgtgtctgctagagagccccatc

SEQ ID NO: 5228061 - DNA, 25 bp, Homo sapien
gctttgtgtcaggattcctaactcc

SEQ ID NO: 5228062 - DNA, 25 bp, Homo sapien
cagattgatgatggtcacttttcct

SEQ ID NO: 5228063 - DNA, 25 bp, Homo sapien
gattgatgatggtcacttttccttt

SEQ ID NO: 5228064 - DNA, 25 bp, Homo sapien
cttcagattgatgatggtcactttt

SEQ ID NO: 5228065 - DNA, 25 bp, Homo sapien
tcagattgatgatggtcacttttcc

SEQ ID NO: 5228066 - DNA, 25 bp, Homo sapien
ggttctaggagtgaagctaccagca

SEQ ID NO: 5228067 - DNA, 25 bp, Homo sapien
ggctcccatgacagcagcaaccttc

SEQ ID NO: 5228068 - DNA, 25 bp, Homo sapien
aaggttctaggagtgaagctaccag

SEQ ID NO: 5228069 - DNA, 25 bp, Homo sapien
aggttctaggagtgaagctaccagc

SEQ ID NO: 5228070 - DNA, 25 bp, Homo sapien
atcagcagacactcccaaaaggctg

SEQ ID NO: 5228071 - DNA, 25 bp, Homo sapien
cagcagacactcccaaaaggctgac

SEQ ID NO: 5228072 - DNA, 25 bp, Homo sapien
tcagcagacactcccaaaaggctga

SEQ ID NO: 5228073 - DNA, 25 bp, Homo sapien
catcagcagacactcccaaaaggct

SEQ ID NO: 5228074 - DNA, 25 bp, Homo sapien
ctcttgttgttgtatgggatggcca

SEQ ID NO: 5228075 - DNA, 25 bp, Homo sapien
tcttgttgttgtatgggatggccat

SEQ ID NO: 5228076 - DNA, 25 bp, Homo sapien
tgggagaaagtgctacgtgtgcaaa

SEQ ID NO: 5228077 - DNA, 25 bp, Homo sapien
gaaagtgctacgtgtgcaaagaaat

SEQ ID NO: 5228078 - DNA, 25 bp, Homo sapien
tcatgggagaaagtgctacgtgtgc

SEQ ID NO: 5228079 - DNA, 25 bp, Homo sapien
gagaaagtgctacgtgtgcaaagaa

SEQ ID NO: 5228080 - DNA, 25 bp, Homo sapien
cagtagcagcgaactcaggagttgg

SEQ ID NO: 5228081 - DNA, 25 bp, Homo sapien
gctcagtagcagcgaactcaggagt

SEQ ID NO: 5228082 - DNA, 25 bp, Homo sapien
acctgcgcaacttcaggccagtctg

SEQ ID NO: 5228083 - DNA, 25 bp, Homo sapien
ctgcgcaacttcaggccagtctgca

SEQ ID NO: 5228084 - DNA, 25 bp, Homo sapien
tcactggcctgagcacgggagctgc

SEQ ID NO: 5228085 - DNA, 25 bp, Homo sapien
ccagtttcagcggcaggctgagtgc

SEQ ID NO: 5228086 - DNA, 25 bp, Homo sapien
cactggcctgagcacgggagctgca

SEQ ID NO: 5228087 - DNA, 25 bp, Homo sapien
gctgcagaccagtttcagcggcagg

SEQ ID NO: 5228088 - DNA, 25 bp, Homo sapien
taaacttgcacatgactggaacgaa

SEQ ID NO: 5228089 - DNA, 25 bp, Homo sapien
taaatactgtttaggccgcaggaga

SEQ ID NO: 5228090 - DNA, 25 bp, Homo sapien
caaatgtgttgaagatactgcagtc

SEQ ID NO: 5228091 - DNA, 25 bp, Homo sapien
ctggaacgaagtaggagtgcaactc

SEQ ID NO: 5228092 - DNA, 25 bp, Homo sapien
caaatggctctgtctaagggttggc

SEQ ID NO: 5228093 - DNA, 25 bp, Homo sapien
gttggaaacctgtctgggacttctg

SEQ ID NO: 5228094 - DNA, 25 bp, Homo sapien
ggcttctcctctacagaaggtggtg

SEQ ID NO: 5228095 - DNA, 25 bp, Homo sapien
aagggttggcctttgtatctgagca

SEQ ID NO: 5228096 - DNA, 25 bp, Homo sapien
ggtacctaactctgcaagtatctga

SEQ ID NO: 5228097 - DNA, 25 bp, Homo sapien
tacacttatagatgtggccggcacc

SEQ ID NO: 5228098 - DNA, 25 bp, Homo sapien
gaatctctcatgctgaaatccagag

SEQ ID NO: 5228099 - DNA, 25 bp, Homo sapien
caaacctcaggttgattcatggact

SEQ ID NO: 5228100 - DNA, 25 bp, Homo sapien
gatggattcctttacttacccaata

SEQ ID NO: 5228101 - DNA, 25 bp, Homo sapien
ggcttgtttccagagcaaacacttg

SEQ ID NO: 5228102 - DNA, 25 bp, Homo sapien
tactctctggtatgtagaaaaccat

SEQ ID NO: 5228103 - DNA, 25 bp, Homo sapien
agaattacagaaggaattagctggg

SEQ ID NO: 5228104 - DNA, 25 bp, Homo sapien
tggaaacactctgtggtgctctaga

SEQ ID NO: 5228105 - DNA, 25 bp, Homo sapien
ttcgggactgaatctctgccgggcg

SEQ ID NO: 5228106 - DNA, 25 bp, Homo sapien
ctctgtggtgctctagattgttaca

SEQ ID NO: 5228107 - DNA, 25 bp, Homo sapien
catacaagtctcttcgctgtcggga

SEQ ID NO: 5228108 - DNA, 25 bp, Homo sapien
ctgtcccgttcgcttttgtgccgac

SEQ ID NO: 5228109 - DNA, 25 bp, Homo sapien
ctttgcattaggcagcgcggaaccc

SEQ ID NO: 5228110 - DNA, 25 bp, Homo sapien
tcttcagccaaaggtacgttccatt

SEQ ID NO: 5228111 - DNA, 25 bp, Homo sapien
cgcgctggccgggagcactctttct

SEQ ID NO: 5228112 - DNA, 25 bp, Homo sapien
tctctggaggagactaaaattcttt

SEQ ID NO: 5228113 - DNA, 25 bp, Homo sapien
taaggcttcacatctctagtccaac

SEQ ID NO: 5228114 - DNA, 25 bp, Homo sapien
caatccaccgttttctaaggcttca

SEQ ID NO: 5228115 - DNA, 25 bp, Homo sapien
tagtccaacttcattggatcacaga

SEQ ID NO: 5228116 - DNA, 25 bp, Homo sapien
ggcaggaagcgaagctgcttacatg

SEQ ID NO: 5228117 - DNA, 25 bp, Homo sapien
ccgcggacggttgcggcaggaagcg

SEQ ID NO: 5228118 - DNA, 25 bp, Homo sapien
agcctccgcttcaacggctcagccc

SEQ ID NO: 5228119 - DNA, 25 bp, Homo sapien
aagtcggcccccgagagcggcggtg

SEQ ID NO: 5228120 - DNA, 25 bp, Homo sapien
gggaaccccaagagtgatgacctga

SEQ ID NO: 5228121 - DNA, 25 bp, Homo sapien
gcaagatcccatacagccagtttgg

SEQ ID NO: 5228122 - DNA, 25 bp, Homo sapien
tttaacaaggatcagctggaggagt

SEQ ID NO: 5228123 - DNA, 25 bp, Homo sapien
ccagttgatctctccaaagtggtga

SEQ ID NO: 5228124 - DNA, 25 bp, Homo sapien
taaaagggggctcatcttgatcagg

SEQ ID NO: 5228125 - DNA, 25 bp, Homo sapien
tgtgagatgagaaggactagtagga

SEQ ID NO: 5228126 - DNA, 25 bp, Homo sapien
ggggacgtcttatcatctgtggcca

SEQ ID NO: 5228127 - DNA, 25 bp, Homo sapien
gaggcaaatcattagcagagtccag

SEQ ID NO: 5228128 - DNA, 25 bp, Homo sapien
taaatacaagcaggttctccctatg

SEQ ID NO: 5228129 - DNA, 25 bp, Homo sapien
caaaacagttcccagtacaaaggag

SEQ ID NO: 5228130 - DNA, 25 bp, Homo sapien
cacacccttggtatatatgatctcc

SEQ ID NO: 5228131 - DNA, 25 bp, Homo sapien
taatgtggtatgacaaatgggatcc

SEQ ID NO: 5228132 - DNA, 25 bp, Homo sapien
gccgctggagttcctcattaagctg

SEQ ID NO: 5228133 - DNA, 25 bp, Homo sapien
tgtgggtgacctaacagactgtgtc

SEQ ID NO: 5228134 - DNA, 25 bp, Homo sapien
ctaatgctgaagagcgccgctggag

SEQ ID NO: 5228135 - DNA, 25 bp, Homo sapien
tggtccaacttccactcaaaggctg

SEQ ID NO: 5228136 - DNA, 25 bp, Homo sapien
tgttctcctggggatgttgcaaact

SEQ ID NO: 5228137 - DNA, 25 bp, Homo sapien
tcctggggatgttgcaaactgttgt

SEQ ID NO: 5228138 - DNA, 25 bp, Homo sapien
tctcctggggatgttgcaaactgtt

SEQ ID NO: 5228139 - DNA, 25 bp, Homo sapien
ctggggatgttgcaaactgttgtct

SEQ ID NO: 5228140 - DNA, 25 bp, Homo sapien
caaaggtaggttctgctttccttct

SEQ ID NO: 5228141 - DNA, 25 bp, Homo sapien
gagggtcatgacctccaaaggtagg

SEQ ID NO: 5228142 - DNA, 25 bp, Homo sapien
tccttgaggcgttttaatactgtgc

SEQ ID NO: 5228143 - DNA, 25 bp, Homo sapien
ggcttcgaagctgaacagctgtacg

SEQ ID NO: 5228144 - DNA, 25 bp, Homo sapien
cacatagtcggcaatggtgtctgcg

SEQ ID NO: 5228145 - DNA, 25 bp, Homo sapien
tttacattggctatctggcatccag

SEQ ID NO: 5228146 - DNA, 25 bp, Homo sapien
tcttgattacagcaacgactgcaga

SEQ ID NO: 5228147 - DNA, 25 bp, Homo sapien
tgtatagcccataaattttccaggg

SEQ ID NO: 5228148 - DNA, 25 bp, Homo sapien
tacatgtgggaatggataatgaagg

SEQ ID NO: 5228149 - DNA, 25 bp, Homo sapien
gatcaagctgaatttactgacatgg

SEQ ID NO: 5228150 - DNA, 25 bp, Homo sapien
ggccctgaaaggtgagatacaaact

SEQ ID NO: 5228151 - DNA, 25 bp, Homo sapien
gatctactcctactactcctctttg

SEQ ID NO: 5228152 - DNA, 25 bp, Homo sapien
cctcatttgaggagattaacctggc

SEQ ID NO: 5228153 - DNA, 25 bp, Homo sapien
ggatgttaaacaccaaaattctgag

SEQ ID NO: 5228154 - DNA, 25 bp, Homo sapien
gaagtttgtctgctattaaagtgag

SEQ ID NO: 5228155 - DNA, 25 bp, Homo sapien
tatctcctgcaggttcagtgctaag

SEQ ID NO: 5228156 - DNA, 25 bp, Homo sapien
gcctatatggtgtgatgggaataca

SEQ ID NO: 5228157 - DNA, 25 bp, Homo sapien
agattgatgagatacagccctgcca

SEQ ID NO: 5228158 - DNA, 25 bp, Homo sapien
caagagcctattaagcgcatgccta

SEQ ID NO: 5228159 - DNA, 25 bp, Homo sapien
gccctgccatcaaaaaactcatagg

SEQ ID NO: 5228160 - DNA, 25 bp, Homo sapien
ttagaaaactgaagtgatacaaaat

SEQ ID NO: 5228161 - DNA, 25 bp, Homo sapien
catgttgtttaataattccacctaa

SEQ ID NO: 5228162 - DNA, 25 bp, Homo sapien
aacattgttttgagtgattctgtaa

SEQ ID NO: 5228163 - DNA, 25 bp, Homo sapien
tactattacacagtactcagtttta

SEQ ID NO: 5228164 - DNA, 25 bp, Homo sapien
aggtctttattgtgaagccctgaag

SEQ ID NO: 5228165 - DNA, 25 bp, Homo sapien
gcttacatgcagtataatatatgag

SEQ ID NO: 5228166 - DNA, 25 bp, Homo sapien
gaagagtaccctccaaagaatttca

SEQ ID NO: 5228167 - DNA, 25 bp, Homo sapien
tgggagactgagacggataaatcac

SEQ ID NO: 5228168 - DNA, 25 bp, Homo sapien
tttttctacaatatgtgcaagctcg

SEQ ID NO: 5228169 - DNA, 25 bp, Homo sapien
caatatgtgcaagctcggaggtctc

SEQ ID NO: 5228170 - DNA, 25 bp, Homo sapien
gagcataacttaaggctatttttct

SEQ ID NO: 5228171 - DNA, 25 bp, Homo sapien
gtggaatgagcataacttaaggcta

SEQ ID NO: 5228172 - DNA, 25 bp, Homo sapien
gagcattcaagtcttccccaataga

SEQ ID NO: 5228173 - DNA, 25 bp, Homo sapien
agcattcaagtcttccccaatagaa

SEQ ID NO: 5228174 - DNA, 25 bp, Homo sapien
ctttcctactcccaacaggtgttcg

SEQ ID NO: 5228175 - DNA, 25 bp, Homo sapien
tgttcggggttcacttggatcaagc

SEQ ID NO: 5228176 - DNA, 25 bp, Homo sapien
ctttgccaggccaaatcatcctcta

SEQ ID NO: 5228177 - DNA, 25 bp, Homo sapien
tcatcctctaaaaatatgttacggc

SEQ ID NO: 5228178 - DNA, 25 bp, Homo sapien
ctatttcgagcaggagatttcccag

SEQ ID NO: 5228179 - DNA, 25 bp, Homo sapien
aaagaggagtatttgaggaatctgg

SEQ ID NO: 5228180 - DNA, 25 bp, Homo sapien
tgcacagatacaagtcttgttgaaa

SEQ ID NO: 5228181 - DNA, 25 bp, Homo sapien
gatacaagtcttgttgaaagaggag

SEQ ID NO: 5228182 - DNA, 25 bp, Homo sapien
agtgtatttcctctcaggaatttgt

SEQ ID NO: 5228183 - DNA, 25 bp, Homo sapien
tatcataggattccttgttattcct

SEQ ID NO: 5228184 - DNA, 25 bp, Homo sapien
taattaactctaagactgctctact

SEQ ID NO: 5228185 - DNA, 25 bp, Homo sapien
aaatgacagagtccttataattaac

SEQ ID NO: 5228186 - DNA, 25 bp, Homo sapien
caccaattttgacgcccaaataagc

SEQ ID NO: 5228187 - DNA, 25 bp, Homo sapien
cattatgctattttgtcagtagaaa

SEQ ID NO: 5228188 - DNA, 25 bp, Homo sapien
gacttagaagtggaataccaatagc

SEQ ID NO: 5228189 - DNA, 25 bp, Homo sapien
tcaatctgatgaagggaacaccaat

SEQ ID NO: 5228190 - DNA, 25 bp, Homo sapien
cagaagaattttgcgttcatcctca

SEQ ID NO: 5228191 - DNA, 25 bp, Homo sapien
tatgaaggtaccataggagaaccag

SEQ ID NO: 5228192 - DNA, 25 bp, Homo sapien
ggagaaccagatctatccagtgaca

SEQ ID NO: 5228193 - DNA, 25 bp, Homo sapien
ccagtgacaggttagtaatgctggc

SEQ ID NO: 5228194 - DNA, 25 bp, Homo sapien
tgctatataccttttcagatgtttt

SEQ ID NO: 5228195 - DNA, 25 bp, Homo sapien
gtagttacccttgagaaaaatgcta

SEQ ID NO: 5228196 - DNA, 25 bp, Homo sapien
tcacattaacagcaagtagttaccc

SEQ ID NO: 5228197 - DNA, 25 bp, Homo sapien
aaaatgctatataccttttcagatg

SEQ ID NO: 5228198 - DNA, 25 bp, Homo sapien
aatatgcccatttcggattagccag

SEQ ID NO: 5228199 - DNA, 25 bp, Homo sapien
cagtagcggtgatcctgaaactcca

SEQ ID NO: 5228200 - DNA, 25 bp, Homo sapien
tgggatgcgttctcaaccagtagcg

SEQ ID NO: 5228201 - DNA, 25 bp, Homo sapien
tttccacaggtcttttaactgcaca

SEQ ID NO: 5228202 - DNA, 25 bp, Homo sapien
gtaattagcaccctaaaccatcaat

SEQ ID NO: 5228203 - DNA, 25 bp, Homo sapien
tctgttctctgctggttaaaactca

SEQ ID NO: 5228204 - DNA, 25 bp, Homo sapien
ttctctgctggttaaaactcagatt

SEQ ID NO: 5228205 - DNA, 25 bp, Homo sapien
taagtaattagcaccctaaaccatc

SEQ ID NO: 5228206 - DNA, 25 bp, Homo sapien
gtcagtcagaatagttaagtaccag

SEQ ID NO: 5228207 - DNA, 25 bp, Homo sapien
cgaaacgagagagttaaagcaaact

SEQ ID NO: 5228208 - DNA, 25 bp, Homo sapien
gagttagaatttcaaatggcccttg

SEQ ID NO: 5228209 - DNA, 25 bp, Homo sapien
tggcccttggataagtaaaggacga

SEQ ID NO: 5228210 - DNA, 25 bp, Homo sapien
gcttgtccaattgctatagcttgtg

SEQ ID NO: 5228211 - DNA, 25 bp, Homo sapien
gatgactaacacaatccagccaacg

SEQ ID NO: 5228212 - DNA, 25 bp, Homo sapien
ctgcagtggtctatacagcgcatac

SEQ ID NO: 5228213 - DNA, 25 bp, Homo sapien
aagctggtcgtgatgactaacacaa

SEQ ID NO: 5228214 - DNA, 25 bp, Homo sapien
tcactgctgcctaccaagtaaaaaa

SEQ ID NO: 5228215 - DNA, 25 bp, Homo sapien
gcttgctacattctaattggcagta

SEQ ID NO: 5228216 - DNA, 25 bp, Homo sapien
ttcatcactgctgcctaccaagtaa

SEQ ID NO: 5228217 - DNA, 25 bp, Homo sapien
aataagcttgctacattctaattgg

SEQ ID NO: 5228218 - DNA, 25 bp, Homo sapien
tcagagtgtccttccacggagttca

SEQ ID NO: 5228219 - DNA, 25 bp, Homo sapien
agtcactgtcgggagaaggcgtctc

SEQ ID NO: 5228220 - DNA, 25 bp, Homo sapien
tccacggagttcactgagtcactgt

SEQ ID NO: 5228221 - DNA, 25 bp, Homo sapien
ccaggatggctcagagtgtccttcc

SEQ ID NO: 5228222 - DNA, 25 bp, Homo sapien
tatcatacatacacagcaatgaccc

SEQ ID NO: 5228223 - DNA, 25 bp, Homo sapien
tagttggagccataaattataaagc

SEQ ID NO: 5228224 - DNA, 25 bp, Homo sapien
gctgctacaaactatagactatggt

SEQ ID NO: 5228225 - DNA, 25 bp, Homo sapien
tactgtatctaagacaaagactgct

SEQ ID NO: 5228226 - DNA, 25 bp, Homo sapien
tgggttttatcagggtattggagga

SEQ ID NO: 5228227 - DNA, 25 bp, Homo sapien
tttatcagggtattggaggaaagga

SEQ ID NO: 5228228 - DNA, 25 bp, Homo sapien
cttgatatggaagttcacgttgtcc

SEQ ID NO: 5228229 - DNA, 25 bp, Homo sapien
gaaactgctgactgatgtgcgcttg

SEQ ID NO: 5228230 - DNA, 25 bp, Homo sapien
ccacgttcaggctgatagaagcggc

SEQ ID NO: 5228231 - DNA, 25 bp, Homo sapien
tgatagaagcggctgagtcactgtc

SEQ ID NO: 5228232 - DNA, 25 bp, Homo sapien
aaagactacaagctttacactgggc

SEQ ID NO: 5228233 - DNA, 25 bp, Homo sapien
tgggtaacggcaaaggcaaataggc

SEQ ID NO: 5228234 - DNA, 25 bp, Homo sapien
gtccagcctgtgtttggattccaga

SEQ ID NO: 5228235 - DNA, 25 bp, Homo sapien
gcatgagatcctatggcccagctgt

SEQ ID NO: 5228236 - DNA, 25 bp, Homo sapien
tcttttgaatatggtcactattatt

SEQ ID NO: 5228237 - DNA, 25 bp, Homo sapien
tgaatatggtcactattatttttca

SEQ ID NO: 5228238 - DNA, 25 bp, Homo sapien
aatatggtcactattatttttcagc

SEQ ID NO: 5228239 - DNA, 25 bp, Homo sapien
aatatcttttgaatatggtcactat

SEQ ID NO: 5228240 - DNA, 25 bp, Homo sapien
tcataatatcctccaagtgaccacc

SEQ ID NO: 5228241 - DNA, 25 bp, Homo sapien
gctagtcaagtctcattaacacacc

SEQ ID NO: 5228242 - DNA, 25 bp, Homo sapien
tatacttcacattctgcttacagca

SEQ ID NO: 5228243 - DNA, 25 bp, Homo sapien
gattgccaacagatgtgtccagaga

SEQ ID NO: 5228244 - DNA, 25 bp, Homo sapien
ttttgccacattgcctaaactggtc

SEQ ID NO: 5228245 - DNA, 25 bp, Homo sapien
aggatttgaaatgatgaatatgttc

SEQ ID NO: 5228246 - DNA, 25 bp, Homo sapien
tgcaccctgccccaacaaaaaggat

SEQ ID NO: 5228247 - DNA, 25 bp, Homo sapien
taaacatatctatcatttcaaatcc

SEQ ID NO: 5228248 - DNA, 25 bp, Homo sapien
tatacacggaaaactacatctagag

SEQ ID NO: 5228249 - DNA, 25 bp, Homo sapien
tccaagaatagttcagaatcctgct

SEQ ID NO: 5228250 - DNA, 25 bp, Homo sapien
ttcacgtaactaccagtctccctgg

SEQ ID NO: 5228251 - DNA, 25 bp, Homo sapien
tctgtgcaatgtcccacattcggag

SEQ ID NO: 5228252 - DNA, 25 bp, Homo sapien
cttttttcaaatttcagaatataag

SEQ ID NO: 5228253 - DNA, 25 bp, Homo sapien
gttgtcctccagtgtcagaaatcaa

SEQ ID NO: 5228254 - DNA, 25 bp, Homo sapien
atgaaagcgtcacttattgagagct

SEQ ID NO: 5228255 - DNA, 25 bp, Homo sapien
gatgaaagcgtcacttattgagagc

SEQ ID NO: 5228256 - DNA, 25 bp, Homo sapien
gagctccaggttgttatgatgccag

SEQ ID NO: 5228257 - DNA, 25 bp, Homo sapien
tctactcggcgattaaataaggatt

SEQ ID NO: 5228258 - DNA, 25 bp, Homo sapien
ttttcctctactcggcgattaaata

SEQ ID NO: 5228259 - DNA, 25 bp, Homo sapien
aaaggtgtgaaaggcagctctttgg

SEQ ID NO: 5228260 - DNA, 25 bp, Homo sapien
gatgtggacaaactgacggatatcc

SEQ ID NO: 5228261 - DNA, 25 bp, Homo sapien
gagtcactatggagcaactgctgga

SEQ ID NO: 5228262 - DNA, 25 bp, Homo sapien
catcaggtcggactgtctgaacaac

SEQ ID NO: 5228263 - DNA, 25 bp, Homo sapien
cctggcagaccaatgacacgatgat

SEQ ID NO: 5228264 - DNA, 25 bp, Homo sapien
ctttttatgtgcaatgttcttggta

SEQ ID NO: 5228265 - DNA, 25 bp, Homo sapien
tcttggtacaaacaaagccattgac

SEQ ID NO: 5228266 - DNA, 25 bp, Homo sapien
gcaatgttcttggtacaaacaaagc

SEQ ID NO: 5228267 - DNA, 25 bp, Homo sapien
aacaaagccattgacaaccacagaa

SEQ ID NO: 5228268 - DNA, 25 bp, Homo sapien
taccctaatcgtgtgcttaaagcca

SEQ ID NO: 5228269 - DNA, 25 bp, Homo sapien
caaacaatcattaaggtggcaagct

SEQ ID NO: 5228270 - DNA, 25 bp, Homo sapien
cacggagggagcagtatttaatgac

SEQ ID NO: 5228271 - DNA, 25 bp, Homo sapien
tcaccagctgggaaactcaattcag

SEQ ID NO: 5228272 - DNA, 25 bp, Homo sapien
aagcacaataggatcaatgcaagta

SEQ ID NO: 5228273 - DNA, 25 bp, Homo sapien
gaagcacaataggatcaatgcaagt

SEQ ID NO: 5228274 - DNA, 25 bp, Homo sapien
ctgaagcacaataggatcaatgcaa

SEQ ID NO: 5228275 - DNA, 25 bp, Homo sapien
tgaagcacaataggatcaatgcaag

SEQ ID NO: 5228276 - DNA, 25 bp, Homo sapien
tctgcctgtgtagcagctgagctga

SEQ ID NO: 5228277 - DNA, 25 bp, Homo sapien
ggagagagccctgcaagcaaaagct

SEQ ID NO: 5228278 - DNA, 25 bp, Homo sapien
gaaaacagccccaggtcacagagtt

SEQ ID NO: 5228279 - DNA, 25 bp, Homo sapien
taacctaatgcagctattctgggcc

SEQ ID NO: 5228280 - DNA, 25 bp, Homo sapien
gaaccaaggtgggtcgaacatcaac

SEQ ID NO: 5228281 - DNA, 25 bp, Homo sapien
tgttttctcaacaagaaccaaggtg

SEQ ID NO: 5228282 - DNA, 25 bp, Homo sapien
gaacatcaactattcgctggacata

SEQ ID NO: 5228283 - DNA, 25 bp, Homo sapien
caataacatgtcctgggcaatccga

SEQ ID NO: 5228284 - DNA, 25 bp, Homo sapien
tatatgcccactgaaaccttactca

SEQ ID NO: 5228285 - DNA, 25 bp, Homo sapien
tagaattggcccctgttctgcacag

SEQ ID NO: 5228286 - DNA, 25 bp, Homo sapien
tgcacttaagcatcatggattacca

SEQ ID NO: 5228287 - DNA, 25 bp, Homo sapien
gagagaacgtcttctgcttgagcaa

SEQ ID NO: 5228288 - DNA, 25 bp, Homo sapien
gcccaggtgtggtttcgtaagcagc

SEQ ID NO: 5228289 - DNA, 25 bp, Homo sapien
actaaatcaccttgggtcattcgac

SEQ ID NO: 5228290 - DNA, 25 bp, Homo sapien
ttcgactgattcgttccaaaacttg

SEQ ID NO: 5228291 - DNA, 25 bp, Homo sapien
gcagctggtccattgacatcactaa

SEQ ID NO: 5228292 - DNA, 25 bp, Homo sapien
taggatctccttaactcgagccagc

SEQ ID NO: 5228293 - DNA, 25 bp, Homo sapien
taatctcgggtagagcatctcatcc

SEQ ID NO: 5228294 - DNA, 25 bp, Homo sapien
cacagggagtggcaacaatgattcc

SEQ ID NO: 5228295 - DNA, 25 bp, Homo sapien
ttccggtacaggtgcaaagaaagca

SEQ ID NO: 5228296 - DNA, 25 bp, Homo sapien
ttgtcagaaattttaagcagctcca

SEQ ID NO: 5228297 - DNA, 25 bp, Homo sapien
taaagtaacacataagccagcagac

SEQ ID NO: 5228298 - DNA, 25 bp, Homo sapien
tagcctgcctttgaggagtcattca

SEQ ID NO: 5228299 - DNA, 25 bp, Homo sapien
cacatccaagtcatgttgtcagaaa

SEQ ID NO: 5228300 - DNA, 25 bp, Homo sapien
actaggagcattgctggactgggca

SEQ ID NO: 5228301 - DNA, 25 bp, Homo sapien
ctgaagagcacacaaagtctctggt

SEQ ID NO: 5228302 - DNA, 25 bp, Homo sapien
caggcactaggagcattgctggact

SEQ ID NO: 5228303 - DNA, 25 bp, Homo sapien
gcactaggagcattgctggactggg

SEQ ID NO: 5228304 - DNA, 25 bp, Homo sapien
tattcctaatgtaagatcattcttt

SEQ ID NO: 5228305 - DNA, 25 bp, Homo sapien
atattcctaatgtaagatcattctt

SEQ ID NO: 5228306 - DNA, 25 bp, Homo sapien
ttcctaatgtaagatcattctttcc

SEQ ID NO: 5228307 - DNA, 25 bp, Homo sapien
attcctaatgtaagatcattctttc

SEQ ID NO: 5228308 - DNA, 25 bp, Homo sapien
tccttcaggattatctgcacacagc

SEQ ID NO: 5228309 - DNA, 25 bp, Homo sapien
caaagcgccgaatatgatgtaccat

SEQ ID NO: 5228310 - DNA, 25 bp, Homo sapien
agccttggccatgaacaaagcgccg

SEQ ID NO: 5228311 - DNA, 25 bp, Homo sapien
gctgatatccaggtactggagaatc

SEQ ID NO: 5228312 - DNA, 25 bp, Homo sapien
gctctataacaaataacgaatccag

SEQ ID NO: 5228313 - DNA, 25 bp, Homo sapien
caagatactttactgtatagggcac

SEQ ID NO: 5228314 - DNA, 25 bp, Homo sapien
gtaccatataggaaacctcctcagg

SEQ ID NO: 5228315 - DNA, 25 bp, Homo sapien
gaatactagattgaacatacagcac

SEQ ID NO: 5228316 - DNA, 25 bp, Homo sapien
tgacatagaccaggactcattggaa

SEQ ID NO: 5228317 - DNA, 25 bp, Homo sapien
tatactggtgcccataaaacctaag

SEQ ID NO: 5228318 - DNA, 25 bp, Homo sapien
accacagggctcagcgttggctctg

SEQ ID NO: 5228319 - DNA, 25 bp, Homo sapien
gacgccaccatctggttataggaga

SEQ ID NO: 5228320 - DNA, 25 bp, Homo sapien
gaatattttggggagtggaacacat

SEQ ID NO: 5228321 - DNA, 25 bp, Homo sapien
gggcctgacgcttaatgaatatttt

SEQ ID NO: 5228322 - DNA, 25 bp, Homo sapien
ttttggggagtggaacacatacttc

SEQ ID NO: 5228323 - DNA, 25 bp, Homo sapien
cacttttaatggggcctgacgctta

SEQ ID NO: 5228324 - DNA, 25 bp, Homo sapien
ttttcaaagatgcaagtctttcatc

SEQ ID NO: 5228325 - DNA, 25 bp, Homo sapien
tttcaaagatgcaagtctttcatca

SEQ ID NO: 5228326 - DNA, 25 bp, Homo sapien
gttttcaaagatgcaagtctttcat

SEQ ID NO: 5228327 - DNA, 25 bp, Homo sapien
tcaaagatgcaagtctttcatcaat

SEQ ID NO: 5228328 - DNA, 25 bp, Homo sapien
gaggaagacatgagccttgcttgca

SEQ ID NO: 5228329 - DNA, 25 bp, Homo sapien
gttattccaagcttgcagcacttca

SEQ ID NO: 5228330 - DNA, 25 bp, Homo sapien
gcatcttctcaatccagttcttgaa

SEQ ID NO: 5228331 - DNA, 25 bp, Homo sapien
gcaatgagtgactcaaagaccgact

SEQ ID NO: 5228332 - DNA, 25 bp, Homo sapien
cccttgtctcagtcttccaggactt

SEQ ID NO: 5228333 - DNA, 25 bp, Homo sapien
ggagaaatattccgtggagatgcat

SEQ ID NO: 5228334 - DNA, 25 bp, Homo sapien
gaaatattccgtggagatgcatcca

SEQ ID NO: 5228335 - DNA, 25 bp, Homo sapien
agaaatattccgtggagatgcatcc

SEQ ID NO: 5228336 - DNA, 25 bp, Homo sapien
aaatattccgtggagatgcatccat

SEQ ID NO: 5228337 - DNA, 25 bp, Homo sapien
gacatgacttcaggtggcgtaggca

SEQ ID NO: 5228338 - DNA, 25 bp, Homo sapien
taggcaattggagatgagtagaact

SEQ ID NO: 5228339 - DNA, 25 bp, Homo sapien
tggctgtatctagctcagggggccc

SEQ ID NO: 5228340 - DNA, 25 bp, Homo sapien
gggccctcccactgactgttcagac

SEQ ID NO: 5228341 - DNA, 25 bp, Homo sapien
atggaataggattatagctatttcc

SEQ ID NO: 5228342 - DNA, 25 bp, Homo sapien
cataagttaactaagtactctagag

SEQ ID NO: 5228343 - DNA, 25 bp, Homo sapien
gataacctgaatcattaggaaagaa

SEQ ID NO: 5228344 - DNA, 25 bp, Homo sapien
aattaagaaagccaaaatgtatgca

SEQ ID NO: 5228345 - DNA, 25 bp, Homo sapien
aatgtatgcagatatgataacctga

SEQ ID NO: 5228346 - DNA, 25 bp, Homo sapien
gttcatgttcatacattaagtagtg

SEQ ID NO: 5228347 - DNA, 25 bp, Homo sapien
tgggttccttctcgcagactgcaat

SEQ ID NO: 5228348 - DNA, 25 bp, Homo sapien
gcagactgcaatgggcactcgttca

SEQ ID NO: 5228349 - DNA, 25 bp, Homo sapien
ctgcaatgggcactcgttcatgttc

SEQ ID NO: 5228350 - DNA, 25 bp, Homo sapien
ttcggcactgttccactgagtcgct

SEQ ID NO: 5228351 - DNA, 25 bp, Homo sapien
gacaattcctctaaggcatttcggt

SEQ ID NO: 5228352 - DNA, 25 bp, Homo sapien
tatttgttggaagcccttcttcggc

SEQ ID NO: 5228353 - DNA, 25 bp, Homo sapien
cactgagtcgctttagacaattcct

SEQ ID NO: 5228354 - DNA, 25 bp, Homo sapien
atagggctgctactctttggtctgc

SEQ ID NO: 5228355 - DNA, 25 bp, Homo sapien
tgttgtacgatttgtctgtcctcca

SEQ ID NO: 5228356 - DNA, 25 bp, Homo sapien
tcatttcaggtaatctgatagggct

SEQ ID NO: 5228357 - DNA, 25 bp, Homo sapien
ggttctgtttctgttgtacgatttg

SEQ ID NO: 5228358 - DNA, 25 bp, Homo sapien
tctaattataaatattcctccatgt

SEQ ID NO: 5228359 - DNA, 25 bp, Homo sapien
atctaattataaatattcctccatg

SEQ ID NO: 5228360 - DNA, 25 bp, Homo sapien
aatattcctccatgtgtaatcttac

SEQ ID NO: 5228361 - DNA, 25 bp, Homo sapien
ataaatattcctccatgtgtaatct

SEQ ID NO: 5228362 - DNA, 25 bp, Homo sapien
tccctctgaagaaggacaacattcc

SEQ ID NO: 5228363 - DNA, 25 bp, Homo sapien
aacctggtagtaagcactatctgct

SEQ ID NO: 5228364 - DNA, 25 bp, Homo sapien
tgcccgtctgcccaacctggtagta

SEQ ID NO: 5228365 - DNA, 25 bp, Homo sapien
gctccacgtaaggtctctctcttct

SEQ ID NO: 5228366 - DNA, 25 bp, Homo sapien
gccactttacacgttatggaaacta

SEQ ID NO: 5228367 - DNA, 25 bp, Homo sapien
atctcacccagcattagacataatt

SEQ ID NO: 5228368 - DNA, 25 bp, Homo sapien
gctgcaactttacagggacttgaaa

SEQ ID NO: 5228369 - DNA, 25 bp, Homo sapien
ttgagggagtagtggaatgaaaaca

SEQ ID NO: 5228370 - DNA, 25 bp, Homo sapien
agttccacatgaggatttatgagtt

SEQ ID NO: 5228371 - DNA, 25 bp, Homo sapien
gaagttccacatgaggatttatgag

SEQ ID NO: 5228372 - DNA, 25 bp, Homo sapien
ccacatgaggatttatgagttgctt

SEQ ID NO: 5228373 - DNA, 25 bp, Homo sapien
ttccacatgaggatttatgagttgc

SEQ ID NO: 5228374 - DNA, 25 bp, Homo sapien
tagtagagccgacagtaaaacttgg

SEQ ID NO: 5228375 - DNA, 25 bp, Homo sapien
agctcctgatttgcctccccgggcc

SEQ ID NO: 5228376 - DNA, 25 bp, Homo sapien
atcttatgaaactctcccgcatagt

SEQ ID NO: 5228377 - DNA, 25 bp, Homo sapien
gacagtaaaacttggcattagcatc

SEQ ID NO: 5228378 - DNA, 25 bp, Homo sapien
agtaatgtggtgcaaagtcgaggaa

SEQ ID NO: 5228379 - DNA, 25 bp, Homo sapien
tgttgaacagcatttgtaatataat

SEQ ID NO: 5228380 - DNA, 25 bp, Homo sapien
gaaggactggacttccagacgaggc

SEQ ID NO: 5228381 - DNA, 25 bp, Homo sapien
tccagacgaggcatttgcttcaaaa

SEQ ID NO: 5228382 - DNA, 25 bp, Homo sapien
caagaattttggccaacgccgtggg

SEQ ID NO: 5228383 - DNA, 25 bp, Homo sapien
taaccaattctgtaaactccaagaa

SEQ ID NO: 5228384 - DNA, 25 bp, Homo sapien
catgacaaggagatctaacttcttc

SEQ ID NO: 5228385 - DNA, 25 bp, Homo sapien
gtgccatctttctcccgtagaaaag

SEQ ID NO: 5228386 - DNA, 25 bp, Homo sapien
catagactggaaacagttcaaggac

SEQ ID NO: 5228387 - DNA, 25 bp, Homo sapien
aaaagatgcgggaagtagatctgcc

SEQ ID NO: 5228388 - DNA, 25 bp, Homo sapien
ggttccagtagctaaatgcttcaca

SEQ ID NO: 5228389 - DNA, 25 bp, Homo sapien
tatgctgtattttaagaccactcca

SEQ ID NO: 5228390 - DNA, 25 bp, Homo sapien
tatggatcgaggttctcagcacagc

SEQ ID NO: 5228391 - DNA, 25 bp, Homo sapien
tacattccgattcctaagagagccc

SEQ ID NO: 5228392 - DNA, 25 bp, Homo sapien
gagattttcatctagcaggaccaca

SEQ ID NO: 5228393 - DNA, 25 bp, Homo sapien
ggttgtctcgaaccatctttaggag

SEQ ID NO: 5228394 - DNA, 25 bp, Homo sapien
cagcaatgactattactactacttc

SEQ ID NO: 5228395 - DNA, 25 bp, Homo sapien
atcaaatgacaacagcaatgactat

SEQ ID NO: 5228396 - DNA, 25 bp, Homo sapien
cctgttgatttcacaaccatctcaa

SEQ ID NO: 5228397 - DNA, 25 bp, Homo sapien
caaccatctcaagctttttgtccca

SEQ ID NO: 5228398 - DNA, 25 bp, Homo sapien
acctaaaattcctgttgatttcaca

SEQ ID NO: 5228399 - DNA, 25 bp, Homo sapien
gtcccatgtaaatgttcgaatataa

SEQ ID NO: 5228400 - DNA, 25 bp, Homo sapien
taacagtgcttagagaacttggaag

SEQ ID NO: 5228401 - DNA, 25 bp, Homo sapien
tgtttaaaaagactagctcctgcct

SEQ ID NO: 5228402 - DNA, 25 bp, Homo sapien
caatctcttattcagaacatctggc

SEQ ID NO: 5228403 - DNA, 25 bp, Homo sapien
gagatgagcgatgtctaagagcaca

SEQ ID NO: 5228404 - DNA, 25 bp, Homo sapien
tgtccagtggtctggtaccattagg

SEQ ID NO: 5228405 - DNA, 25 bp, Homo sapien
aactccggagacaccactgttggca

SEQ ID NO: 5228406 - DNA, 25 bp, Homo sapien
attcagacccaagcctgtccagtgg

SEQ ID NO: 5228407 - DNA, 25 bp, Homo sapien
aacctagtcctgtacaactccggag

SEQ ID NO: 5228408 - DNA, 25 bp, Homo sapien
aaagccttggcatacagtggtgaac

SEQ ID NO: 5228409 - DNA, 25 bp, Homo sapien
ttacggacagtctaaacagccacag

SEQ ID NO: 5228410 - DNA, 25 bp, Homo sapien
taaacaacatgacaggattcccagt

SEQ ID NO: 5228411 - DNA, 25 bp, Homo sapien
tatagatgccacctaaattgctggt

SEQ ID NO: 5228412 - DNA, 25 bp, Homo sapien
tgatagtggcctaaacaagagcagc

SEQ ID NO: 5228413 - DNA, 25 bp, Homo sapien
cacagttgttcaagtcatgggcaag

SEQ ID NO: 5228414 - DNA, 25 bp, Homo sapien
tacaagtctccaaaagttcaaggca

SEQ ID NO: 5228415 - DNA, 25 bp, Homo sapien
gagagattacctttgcaaggcagca

SEQ ID NO: 5228416 - DNA, 25 bp, Homo sapien
caatatgcagaactaatgaagacat

SEQ ID NO: 5228417 - DNA, 25 bp, Homo sapien
tgatgtagcagatggaggtcagcat

SEQ ID NO: 5228418 - DNA, 25 bp, Homo sapien
tgaagacatatacacaatgatgtag

SEQ ID NO: 5228419 - DNA, 25 bp, Homo sapien
tctcaccaatatgcagaactaatga

SEQ ID NO: 5228420 - DNA, 25 bp, Homo sapien
caaaggatctcatgtcgctgctgcc

SEQ ID NO: 5228421 - DNA, 25 bp, Homo sapien
aaggatctcatgtcgctgctgccgc

SEQ ID NO: 5228422 - DNA, 25 bp, Homo sapien
gggcaaaggatctcatgtcgctgct

SEQ ID NO: 5228423 - DNA, 25 bp, Homo sapien
ggcaaaggatctcatgtcgctgctg

SEQ ID NO: 5228424 - DNA, 25 bp, Homo sapien
gccccaggcggatccgggtgcgccc

SEQ ID NO: 5228425 - DNA, 25 bp, Homo sapien
caggcggatccgggtgcgccccgcg

SEQ ID NO: 5228426 - DNA, 25 bp, Homo sapien
cccaggcggatccgggtgcgccccg

SEQ ID NO: 5228427 - DNA, 25 bp, Homo sapien
ccgccccaggcggatccgggtgcgc

SEQ ID NO: 5228428 - DNA, 25 bp, Homo sapien
gtcttgtcgccggagccacgcgctt

SEQ ID NO: 5228429 - DNA, 25 bp, Homo sapien
cggcgcgaggttggtcttgtcttcc

SEQ ID NO: 5228430 - DNA, 25 bp, Homo sapien
acttgtggccagtaacgacgcgcag

SEQ ID NO: 5228431 - DNA, 25 bp, Homo sapien
ttccggagagactggcccgagtcct

SEQ ID NO: 5228432 - DNA, 25 bp, Homo sapien
ctgccgagcattagccaaccccaga

SEQ ID NO: 5228433 - DNA, 25 bp, Homo sapien
attagccaaccccagacgtggagcg

SEQ ID NO: 5228434 - DNA, 25 bp, Homo sapien
agccaaccccagacgtggagcgacg

SEQ ID NO: 5228435 - DNA, 25 bp, Homo sapien
cgagcattagccaaccccagacgtg

SEQ ID NO: 5228436 - DNA, 25 bp, Homo sapien
tggcctccgtgtcgctaaagctgag

SEQ ID NO: 5228437 - DNA, 25 bp, Homo sapien
gatgctggtctaaacagtgccggcc

SEQ ID NO: 5228438 - DNA, 25 bp, Homo sapien
gaggctccgcgaaaacaggtgtcgc

SEQ ID NO: 5228439 - DNA, 25 bp, Homo sapien
gaacatgaatgagctctcgcgcgca

SEQ ID NO: 5228440 - DNA, 25 bp, Homo sapien
tccgctgttcggaaatatcccctta

SEQ ID NO: 5228441 - DNA, 25 bp, Homo sapien
tccacgactccgctgttcggaaata

SEQ ID NO: 5228442 - DNA, 25 bp, Homo sapien
ttgatccacgactccgctgttcgga

SEQ ID NO: 5228443 - DNA, 25 bp, Homo sapien
actcttgatccacgactccgctgtt

SEQ ID NO: 5228444 - DNA, 25 bp, Homo sapien
agtgaacaaaatacaaacattttca

SEQ ID NO: 5228445 - DNA, 25 bp, Homo sapien
tagaagtgaacaaaatacaaacatt

SEQ ID NO: 5228446 - DNA, 25 bp, Homo sapien
ctgtagaagtgaacaaaatacaaac

SEQ ID NO: 5228447 - DNA, 25 bp, Homo sapien
gtgaacaaaatacaaacattttcat

SEQ ID NO: 5228448 - DNA, 25 bp, Homo sapien
tgtactttcgctttcagcacaagga

SEQ ID NO: 5228449 - DNA, 25 bp, Homo sapien
tatagtaatggtgccatcagaatcc

SEQ ID NO: 5228450 - DNA, 25 bp, Homo sapien
gacaatctgctcctctatagtaatg

SEQ ID NO: 5228451 - DNA, 25 bp, Homo sapien
gagttgagctgtgatgttgagttca

SEQ ID NO: 5228452 - DNA, 25 bp, Homo sapien
gaagtcataaatataaggagggcat

SEQ ID NO: 5228453 - DNA, 25 bp, Homo sapien
gttcctctgggccaacaaatgagtc

SEQ ID NO: 5228454 - DNA, 25 bp, Homo sapien
ggccaacaaatgagtccatcccatt

SEQ ID NO: 5228455 - DNA, 25 bp, Homo sapien
tggaacagccgatattttccccact

SEQ ID NO: 5228456 - DNA, 25 bp, Homo sapien
ctttcctatgctgatatctggctgc

SEQ ID NO: 5228457 - DNA, 25 bp, Homo sapien
tatctggctgcagaaagcgaaggca

SEQ ID NO: 5228458 - DNA, 25 bp, Homo sapien
gggttacagtgtcggaaagcaactc

SEQ ID NO: 5228459 - DNA, 25 bp, Homo sapien
gcgaaggcagtctgaataattggcc

SEQ ID NO: 5228460 - DNA, 25 bp, Homo sapien
accaaaagagatggagtagccaacg

SEQ ID NO: 5228461 - DNA, 25 bp, Homo sapien
tggagtagccaacggtatacattac

SEQ ID NO: 5228462 - DNA, 25 bp, Homo sapien
caatgatgagaatagccacagccaa

SEQ ID NO: 5228463 - DNA, 25 bp, Homo sapien
tatacattacatagaggcgttcaaa

SEQ ID NO: 5228464 - DNA, 25 bp, Homo sapien
gatgcttgtagctctcagcatgaaa

SEQ ID NO: 5228465 - DNA, 25 bp, Homo sapien
gaagttgcctcaatggaattttgtg

SEQ ID NO: 5228466 - DNA, 25 bp, Homo sapien
tgcatgtggatatagttcctagtgc

SEQ ID NO: 5228467 - DNA, 25 bp, Homo sapien
cctttactcctatgtgagcatggac

SEQ ID NO: 5228468 - DNA, 25 bp, Homo sapien
tccaccaggatccaataataatttg

SEQ ID NO: 5228469 - DNA, 25 bp, Homo sapien
tttggtgtccgaaaagaaagccaca

SEQ ID NO: 5228470 - DNA, 25 bp, Homo sapien
gagattatgcaggtagagaccttcc

SEQ ID NO: 5228471 - DNA, 25 bp, Homo sapien
taatttgtagccaggaagtaaataa

SEQ ID NO: 5228472 - DNA, 25 bp, Homo sapien
cacagcccatgctgcaacaaatgct

SEQ ID NO: 5228473 - DNA, 25 bp, Homo sapien
agagttgctcgtgccacagcccatg

SEQ ID NO: 5228474 - DNA, 25 bp, Homo sapien
tcagccagagttgctcgtgccacag

SEQ ID NO: 5228475 - DNA, 25 bp, Homo sapien
gcccatgctgcaacaaatgctgctg

SEQ ID NO: 5228476 - DNA, 25 bp, Homo sapien
atagctgctaagatcggtgcttgat

SEQ ID NO: 5228477 - DNA, 25 bp, Homo sapien
aatccacttgatgtctccagcacta

SEQ ID NO: 5228478 - DNA, 25 bp, Homo sapien
gatcggtgcttgataaatccacttg

SEQ ID NO: 5228479 - DNA, 25 bp, Homo sapien
tgtctccagcactaagttcccagca

SEQ ID NO: 5228480 - DNA, 25 bp, Homo sapien
gatttctcgattatgaagtaaagcc

SEQ ID NO: 5228481 - DNA, 25 bp, Homo sapien
caaaatgtaaatatcgatttctcga

SEQ ID NO: 5228482 - DNA, 25 bp, Homo sapien
gtgagagcttaataactttttcaaa

SEQ ID NO: 5228483 - DNA, 25 bp, Homo sapien
gaaaattacaaaagtgagagcttaa

SEQ ID NO: 5228484 - DNA, 25 bp, Homo sapien
gtccatgtgcatctcaaatgggctg

SEQ ID NO: 5228485 - DNA, 25 bp, Homo sapien
catgtactggtgtggcagagctttc

SEQ ID NO: 5228486 - DNA, 25 bp, Homo sapien
tgggctggacagacaaatcatgtac

SEQ ID NO: 5228487 - DNA, 25 bp, Homo sapien
catgtgcatctcaaatgggctggac

SEQ ID NO: 5228488 - DNA, 25 bp, Homo sapien
tagcagttataaatagacctgttaa

SEQ ID NO: 5228489 - DNA, 25 bp, Homo sapien
ttatagcagttataaatagacctgt

SEQ ID NO: 5228490 - DNA, 25 bp, Homo sapien
tatagcagttataaatagacctgtt

SEQ ID NO: 5228491 - DNA, 25 bp, Homo sapien
gcagttataaatagacctgttaaat

SEQ ID NO: 5228492 - DNA, 25 bp, Homo sapien
tgtgtgcaatccaggccaaatgtgt

SEQ ID NO: 5228493 - DNA, 25 bp, Homo sapien
gaaactgctaaggacttcaaaacag

SEQ ID NO: 5228494 - DNA, 25 bp, Homo sapien
aaaagtgacgtctatcaggttggcc

SEQ ID NO: 5228495 - DNA, 25 bp, Homo sapien
tcatggagaacttgcttgacaatcc

SEQ ID NO: 5228496 - DNA, 25 bp, Homo sapien
tgcctctttcctcttcccagttccc

SEQ ID NO: 5228497 - DNA, 25 bp, Homo sapien
tttgcctctttcctcttcccagttc

SEQ ID NO: 5228498 - DNA, 25 bp, Homo sapien
ttgcctctttcctcttcccagttcc

SEQ ID NO: 5228499 - DNA, 25 bp, Homo sapien
ctctttcctcttcccagttccccat

SEQ ID NO: 5228500 - DNA, 25 bp, Homo sapien
ttgatgtctcatcacaattttaagg

SEQ ID NO: 5228501 - DNA, 25 bp, Homo sapien
ttccaatgtgctttagcatgacatg

SEQ ID NO: 5228502 - DNA, 25 bp, Homo sapien
gacatgtgagtccactcccatcaaa

SEQ ID NO: 5228503 - DNA, 25 bp, Homo sapien
gctttagcatgacatgtgagtccac

SEQ ID NO: 5228504 - DNA, 25 bp, Homo sapien
tcccagattttggtagctagaactc

SEQ ID NO: 5228505 - DNA, 25 bp, Homo sapien
cttccttgtgtcatgcccaactgca

SEQ ID NO: 5228506 - DNA, 25 bp, Homo sapien
gctagaactctaaccgtattcagaa

SEQ ID NO: 5228507 - DNA, 25 bp, Homo sapien
ttgtgtcatgcccaactgcattggt

SEQ ID NO: 5228508 - DNA, 25 bp, Homo sapien
tgaggcaggcatacgaacacgatgt

SEQ ID NO: 5228509 - DNA, 25 bp, Homo sapien
agctcacagtgcatgcggatctccc

SEQ ID NO: 5228510 - DNA, 25 bp, Homo sapien
tccaaagactaggaccaggaccagt

SEQ ID NO: 5228511 - DNA, 25 bp, Homo sapien
caggaccagtgtcgatttggccagt

SEQ ID NO: 5228512 - DNA, 25 bp, Homo sapien
ccattgcagtagcagtagatgatag

SEQ ID NO: 5228513 - DNA, 25 bp, Homo sapien
tgcagtagcagtagatgatagacac

SEQ ID NO: 5228514 - DNA, 25 bp, Homo sapien
ctctccattgcagtagcagtagatg

SEQ ID NO: 5228515 - DNA, 25 bp, Homo sapien
cagtagcagtagatgatagacacaa

SEQ ID NO: 5228516 - DNA, 25 bp, Homo sapien
tgccagagataagcaccatgcgtgt

SEQ ID NO: 5228517 - DNA, 25 bp, Homo sapien
caggctgtctgctggcgatcttggc

SEQ ID NO: 5228518 - DNA, 25 bp, Homo sapien
gccacatggcggtgtccttttccag

SEQ ID NO: 5228519 - DNA, 25 bp, Homo sapien
ttccagtccacggagaggttccacc

SEQ ID NO: 5228520 - DNA, 25 bp, Homo sapien
tgtctgggttagattccataggcct

SEQ ID NO: 5228521 - DNA, 25 bp, Homo sapien
tcctcgtggaaagagtgtggcaggc

SEQ ID NO: 5228522 - DNA, 25 bp, Homo sapien
ttcagtgtctgggttagattccata

SEQ ID NO: 5228523 - DNA, 25 bp, Homo sapien
tccattagaatatcatctccctgcc

SEQ ID NO: 5228524 - DNA, 25 bp, Homo sapien
ttggaccagcccatgaaagtcagcc

SEQ ID NO: 5228525 - DNA, 25 bp, Homo sapien
tacaggagccaattcatggagccta

SEQ ID NO: 5228526 - DNA, 25 bp, Homo sapien
caagcataggagtatcagccaagcc

SEQ ID NO: 5228527 - DNA, 25 bp, Homo sapien
gatcctaattgctcctatgcacagg

SEQ ID NO: 5228528 - DNA, 25 bp, Homo sapien
gaagccaattttttagcctagcact

SEQ ID NO: 5228529 - DNA, 25 bp, Homo sapien
taatctgcaacaagtcatctagcct

SEQ ID NO: 5228530 - DNA, 25 bp, Homo sapien
tactgaacaattgattccctgtgtg

SEQ ID NO: 5228531 - DNA, 25 bp, Homo sapien
tattcctaaacaaccatagggaagc

SEQ ID NO: 5228532 - DNA, 25 bp, Homo sapien
ctagagatggataccatctgtgtca

SEQ ID NO: 5228533 - DNA, 25 bp, Homo sapien
caccagtgaccagaacatgcccatc

SEQ ID NO: 5228534 - DNA, 25 bp, Homo sapien
agagatggataccatctgtgtcatc

SEQ ID NO: 5228535 - DNA, 25 bp, Homo sapien
ccagtgaccagaacatgcccatcca

SEQ ID NO: 5228536 - DNA, 25 bp, Homo sapien
actgtagaaagtagggcaacagtct

SEQ ID NO: 5228537 - DNA, 25 bp, Homo sapien
gaggttgtagctggctatcagcagc

SEQ ID NO: 5228538 - DNA, 25 bp, Homo sapien
aacagtcttagccacaagttcccct

SEQ ID NO: 5228539 - DNA, 25 bp, Homo sapien
gaaagtagggcaacagtcttagcca

SEQ ID NO: 5228540 - DNA, 25 bp, Homo sapien
caccaggaagttcaaactgggcaga

SEQ ID NO: 5228541 - DNA, 25 bp, Homo sapien
gcagcagcccccgtcagggggttat

SEQ ID NO: 5228542 - DNA, 25 bp, Homo sapien
cagcccccgtcagggggttatagat

SEQ ID NO: 5228543 - DNA, 25 bp, Homo sapien
ccacagctcagcaaagccactgtag

SEQ ID NO: 5228544 - DNA, 25 bp, Homo sapien
tggtgttctttgataatctgaacag

SEQ ID NO: 5228545 - DNA, 25 bp, Homo sapien
ctgaagaatttgtcttaatactctt

SEQ ID NO: 5228546 - DNA, 25 bp, Homo sapien
ctggctgaagaatttgtcttaatac

SEQ ID NO: 5228547 - DNA, 25 bp, Homo sapien
ggctgaagaatttgtcttaatactc

SEQ ID NO: 5228548 - DNA, 25 bp, Homo sapien
gccagctcagctacaacaaagtagg

SEQ ID NO: 5228549 - DNA, 25 bp, Homo sapien
caaagtaggcagaagaaagtgagat

SEQ ID NO: 5228550 - DNA, 25 bp, Homo sapien
aaagtgagatgagctggcttgctga

SEQ ID NO: 5228551 - DNA, 25 bp, Homo sapien
tcaatgtgagtgtgcaccatccaac

SEQ ID NO: 5228552 - DNA, 25 bp, Homo sapien
agcagccagatatgggtggagcctc

SEQ ID NO: 5228553 - DNA, 25 bp, Homo sapien
agcctccggttcaggtggagctcga

SEQ ID NO: 5228554 - DNA, 25 bp, Homo sapien
ttcaggtggagctcgacagacagta

SEQ ID NO: 5228555 - DNA, 25 bp, Homo sapien
cagacagtagatgcaagaagttctc

SEQ ID NO: 5228556 - DNA, 25 bp, Homo sapien
ggttctagattatttcagtgcctca

SEQ ID NO: 5228557 - DNA, 25 bp, Homo sapien
ggctgtagcaggtatcttatccata

SEQ ID NO: 5228558 - DNA, 25 bp, Homo sapien
tcatggtgtcaagctggctgtagca

SEQ ID NO: 5228559 - DNA, 25 bp, Homo sapien
gtgcctcaactggatcagaatcctg

SEQ ID NO: 5228560 - DNA, 25 bp, Homo sapien
ataaaaatagcaatgtgtcctaaat

SEQ ID NO: 5228561 - DNA, 25 bp, Homo sapien
taaaaatagcaatgtgtcctaaata

SEQ ID NO: 5228562 - DNA, 25 bp, Homo sapien
attgtctaattctggtgaatgacta

SEQ ID NO: 5228563 - DNA, 25 bp, Homo sapien
gcaggcaacaaacagacattaggtc

SEQ ID NO: 5228564 - DNA, 25 bp, Homo sapien
tacactttaaattcgtcctgtcact

SEQ ID NO: 5228565 - DNA, 25 bp, Homo sapien
tctatttttgtactacgtcttgaaa

SEQ ID NO: 5228566 - DNA, 25 bp, Homo sapien
tgataacaacttaatacagattgca

SEQ ID NO: 5228567 - DNA, 25 bp, Homo sapien
gcttgattgtataaaacccacagat

SEQ ID NO: 5228568 - DNA, 25 bp, Homo sapien
tctcgagtatattattggccctacg

SEQ ID NO: 5228569 - DNA, 25 bp, Homo sapien
tccaagttgcatataagtctgagtc

SEQ ID NO: 5228570 - DNA, 25 bp, Homo sapien
tccactggactacaatggcagctct

SEQ ID NO: 5228571 - DNA, 25 bp, Homo sapien
tctcttgcttcactataccgttcac

SEQ ID NO: 5228572 - DNA, 25 bp, Homo sapien
cttgcttcactataccgttcaccat

SEQ ID NO: 5228573 - DNA, 25 bp, Homo sapien
tttctcttgcttcactataccgttc

SEQ ID NO: 5228574 - DNA, 25 bp, Homo sapien
tctttctcttgcttcactataccgt

SEQ ID NO: 5228575 - DNA, 25 bp, Homo sapien
ccatggtgctgacccttaaccaaac

SEQ ID NO: 5228576 - DNA, 25 bp, Homo sapien
taggttgcaaccttgtgcttttctc

SEQ ID NO: 5228577 - DNA, 25 bp, Homo sapien
ttagcagatcatataggttgcaacc

SEQ ID NO: 5228578 - DNA, 25 bp, Homo sapien
gatcatataggttgcaaccttgtgc

SEQ ID NO: 5228579 - DNA, 25 bp, Homo sapien
tctatgctctcaaatataactggac

SEQ ID NO: 5228580 - DNA, 25 bp, Homo sapien
tataatgattggctcttcacacctt

SEQ ID NO: 5228581 - DNA, 25 bp, Homo sapien
gagctttatccatcagggttcactg

SEQ ID NO: 5228582 - DNA, 25 bp, Homo sapien
caaagaaataggaaccccctctatg

SEQ ID NO: 5228583 - DNA, 25 bp, Homo sapien
aaattaactggtaagaggcaagctc

SEQ ID NO: 5228584 - DNA, 25 bp, Homo sapien
cattatctctgttggaaagccactg

SEQ ID NO: 5228585 - DNA, 25 bp, Homo sapien
tcactggctcatgggaaattcattc

SEQ ID NO: 5228586 - DNA, 25 bp, Homo sapien
gcaggagtctccattcttatgaaga

SEQ ID NO: 5228587 - DNA, 25 bp, Homo sapien
gcagcaagttgaggactagatgaaa

SEQ ID NO: 5228588 - DNA, 25 bp, Homo sapien
tcttcaaggtgtgaagtatatgcct

SEQ ID NO: 5228589 - DNA, 25 bp, Homo sapien
tgccttttgcctgacgtgtgtgtgc

SEQ ID NO: 5228590 - DNA, 25 bp, Homo sapien
tataagtagataaggccctgtcttc

SEQ ID NO: 5228591 - DNA, 25 bp, Homo sapien
atctgtttatccacccaccacctga

SEQ ID NO: 5228592 - DNA, 25 bp, Homo sapien
ctcttatcctagcaagtgggagcca

SEQ ID NO: 5228593 - DNA, 25 bp, Homo sapien
gaagagcaggtgaacaagcactgct

SEQ ID NO: 5228594 - DNA, 25 bp, Homo sapien
gctctgctcatctagacatctccag

SEQ ID NO: 5228595 - DNA, 25 bp, Homo sapien
tgagactgaatttgttatttccgta

SEQ ID NO: 5228596 - DNA, 25 bp, Homo sapien
tgttatttccgtacttgaaagactc

SEQ ID NO: 5228597 - DNA, 25 bp, Homo sapien
catttaattaaatcctaatagcata

SEQ ID NO: 5228598 - DNA, 25 bp, Homo sapien
gcaattaggagagcttcatggcatc

SEQ ID NO: 5228599 - DNA, 25 bp, Homo sapien
tgctagattgaacaatgtccacaag

SEQ ID NO: 5228600 - DNA, 25 bp, Homo sapien
ccattgtcccagtgctagattgaac

SEQ ID NO: 5228601 - DNA, 25 bp, Homo sapien
tttggaacgctcccaacccattgtc

SEQ ID NO: 5228602 - DNA, 25 bp, Homo sapien
tcctctctctgattttttggaacgc

SEQ ID NO: 5228603 - DNA, 25 bp, Homo sapien
gatgcacagaagaactaatgctaaa

SEQ ID NO: 5228604 - DNA, 25 bp, Homo sapien
taaaaggaatcagcaaaaggataga

SEQ ID NO: 5228605 - DNA, 25 bp, Homo sapien
tctcattaattctggcccctgtgtt

SEQ ID NO: 5228606 - DNA, 25 bp, Homo sapien
tctgcccttcacttggatgtataac

SEQ ID NO: 5228607 - DNA, 25 bp, Homo sapien
gctttgtatgcccaaccaaggtgct

SEQ ID NO: 5228608 - DNA, 25 bp, Homo sapien
ccaaggtgcttcctactggctgcca

SEQ ID NO: 5228609 - DNA, 25 bp, Homo sapien
ctttgttgactgttggacctggaca

SEQ ID NO: 5228610 - DNA, 25 bp, Homo sapien
tagaccctgcctattgtcacagagc

SEQ ID NO: 5228611 - DNA, 25 bp, Homo sapien
cagacatcctaaagaatgagagtaa

SEQ ID NO: 5228612 - DNA, 25 bp, Homo sapien
tgggcaaagaacgtgaatgcacact

SEQ ID NO: 5228613 - DNA, 25 bp, Homo sapien
acaattcaatgagcacaaacaggta

SEQ ID NO: 5228614 - DNA, 25 bp, Homo sapien
caaaaattggccagtgggacctagt

SEQ ID NO: 5228615 - DNA, 25 bp, Homo sapien
tcttgtatataggtaccaggtggca

SEQ ID NO: 5228616 - DNA, 25 bp, Homo sapien
tcatgagtttggacacacatgcaaa

SEQ ID NO: 5228617 - DNA, 25 bp, Homo sapien
gccagccagtccaattaagcaagaa

SEQ ID NO: 5228618 - DNA, 25 bp, Homo sapien
tctaggaaactctaaagatgccaca

SEQ ID NO: 5228619 - DNA, 25 bp, Homo sapien
cctttggacgtcgatgatggtgatg

SEQ ID NO: 5228620 - DNA, 25 bp, Homo sapien
agcttctttgcaaagggttcgtact

SEQ ID NO: 5228621 - DNA, 25 bp, Homo sapien
tagcttctttgcaaagggttcgtac

SEQ ID NO: 5228622 - DNA, 25 bp, Homo sapien
tgcacaaatagtaagaataaccctg

SEQ ID NO: 5228623 - DNA, 25 bp, Homo sapien
cacaaatagtaagaataaccctgag

SEQ ID NO: 5228624 - DNA, 25 bp, Homo sapien
aaatgcacaaatagtaagaataacc

SEQ ID NO: 5228625 - DNA, 25 bp, Homo sapien
caaatagtaagaataaccctgagtt

SEQ ID NO: 5228626 - DNA, 25 bp, Homo sapien
ttttgtcacctacacttgcattcaa

SEQ ID NO: 5228627 - DNA, 25 bp, Homo sapien
ctaccaggctcagatttttcagaga

SEQ ID NO: 5228628 - DNA, 25 bp, Homo sapien
tcttttttgtcacctacacttgcat

SEQ ID NO: 5228629 - DNA, 25 bp, Homo sapien
ttttttgtcacctacacttgcattc

SEQ ID NO: 5228630 - DNA, 25 bp, Homo sapien
attggagcatttattccatatccat

SEQ ID NO: 5228631 - DNA, 25 bp, Homo sapien
ttggagcatttattccatatccatt

SEQ ID NO: 5228632 - DNA, 25 bp, Homo sapien
tttgtgtctccactgtacaggtttc

SEQ ID NO: 5228633 - DNA, 25 bp, Homo sapien
ccctttgtgtctccactgtacaggt

SEQ ID NO: 5228634 - DNA, 25 bp, Homo sapien
tctctacacattatgtgacaatcat

SEQ ID NO: 5228635 - DNA, 25 bp, Homo sapien
tgtgtctccactgtacaggtttccc

SEQ ID NO: 5228636 - DNA, 25 bp, Homo sapien
agatatgtggcgttatttctgaggc

SEQ ID NO: 5228637 - DNA, 25 bp, Homo sapien
gatatgtggcgttatttctgaggcc

SEQ ID NO: 5228638 - DNA, 25 bp, Homo sapien
ggacatgaagtccttccctatgcct

SEQ ID NO: 5228639 - DNA, 25 bp, Homo sapien
gctatgataaagtaacttgtggtaa

SEQ ID NO: 5228640 - DNA, 25 bp, Homo sapien
tattaaaatgccactcaaagctatg

SEQ ID NO: 5228641 - DNA, 25 bp, Homo sapien
tgataaagtaacttgtggtaaatct

SEQ ID NO: 5228642 - DNA, 25 bp, Homo sapien
gccactcaaagctatgataaagtaa

SEQ ID NO: 5228643 - DNA, 25 bp, Homo sapien
catagaatgagaagcctaagtccat

SEQ ID NO: 5228644 - DNA, 25 bp, Homo sapien
tcatagaatgagaagcctaagtcca

SEQ ID NO: 5228645 - DNA, 25 bp, Homo sapien
ttctcatagaatgagaagcctaagt

SEQ ID NO: 5228646 - DNA, 25 bp, Homo sapien
ctcatagaatgagaagcctaagtcc

SEQ ID NO: 5228647 - DNA, 25 bp, Homo sapien
ttgagagtcgattgctagagaaaac

SEQ ID NO: 5228648 - DNA, 25 bp, Homo sapien
gagtcgattgctagagaaaaccagt

SEQ ID NO: 5228649 - DNA, 25 bp, Homo sapien
tcacttttggcctggtgattttcct

SEQ ID NO: 5228650 - DNA, 25 bp, Homo sapien
aaaaattgagagtcgattgctagag

SEQ ID NO: 5228651 - DNA, 25 bp, Homo sapien
cattatagacccaacagatatgaaa

SEQ ID NO: 5228652 - DNA, 25 bp, Homo sapien
gggtgaccatcattatagacccaac

SEQ ID NO: 5228653 - DNA, 25 bp, Homo sapien
gtggttggggtgaccatcattatag

SEQ ID NO: 5228654 - DNA, 25 bp, Homo sapien
catcattatagacccaacagatatg

SEQ ID NO: 5228655 - DNA, 25 bp, Homo sapien
gggcactaagatctccaaccagcag

SEQ ID NO: 5228656 - DNA, 25 bp, Homo sapien
ccttttgcaagcattcttccttggg

SEQ ID NO: 5228657 - DNA, 25 bp, Homo sapien
tcgccttttagctgcagactgtgac

SEQ ID NO: 5228658 - DNA, 25 bp, Homo sapien
tttcctgttcgccttttagctgcag

SEQ ID NO: 5228659 - DNA, 25 bp, Homo sapien
ttctgaagggtaacttcactaaata

SEQ ID NO: 5228660 - DNA, 25 bp, Homo sapien
tctgaagggtaacttcactaaataa

SEQ ID NO: 5228661 - DNA, 25 bp, Homo sapien
attcttatctagcttcattggttcc

SEQ ID NO: 5228662 - DNA, 25 bp, Homo sapien
tctagcttcattggttcctgatgtg

SEQ ID NO: 5228663 - DNA, 25 bp, Homo sapien
ctcattcattttcaaggtcaagtct

SEQ ID NO: 5228664 - DNA, 25 bp, Homo sapien
tataattccctgtaggctgacaaac

SEQ ID NO: 5228665 - DNA, 25 bp, Homo sapien
gaaattcacactggccatattataa

SEQ ID NO: 5228666 - DNA, 25 bp, Homo sapien
tgttctgatacaataggactgctgg

SEQ ID NO: 5228667 - DNA, 25 bp, Homo sapien
tttgacattcatataaccctccagg

SEQ ID NO: 5228668 - DNA, 25 bp, Homo sapien
gataattaatcctctgtttaaggaa

SEQ ID NO: 5228669 - DNA, 25 bp, Homo sapien
tttgcagaaagcatagagctgagtc

SEQ ID NO: 5228670 - DNA, 25 bp, Homo sapien
catttaaaatatacgctcctgatga

SEQ ID NO: 5228671 - DNA, 25 bp, Homo sapien
tagagtcaagacttcaaggtggatg

SEQ ID NO: 5228672 - DNA, 25 bp, Homo sapien
gaagaagcgtgtattctgagtcacc

SEQ ID NO: 5228673 - DNA, 25 bp, Homo sapien
tggatgaggtacctggatgagaatt

SEQ ID NO: 5228674 - DNA, 25 bp, Homo sapien
tcacttctttttgccgagagaattc

SEQ ID NO: 5228675 - DNA, 25 bp, Homo sapien
ggatacacataaactgactttcagt

SEQ ID NO: 5228676 - DNA, 25 bp, Homo sapien
gactttcagttagggcgatggcaga

SEQ ID NO: 5228677 - DNA, 25 bp, Homo sapien
ctgactttcagttagggcgatggca

SEQ ID NO: 5228678 - DNA, 25 bp, Homo sapien
atacacataaactgactttcagtta

SEQ ID NO: 5228679 - DNA, 25 bp, Homo sapien
ccaaatggggatttcacacacttag

SEQ ID NO: 5228680 - DNA, 25 bp, Homo sapien
tttgtaaggaattacagtgctgtcc

SEQ ID NO: 5228681 - DNA, 25 bp, Homo sapien
tgctgtccagcaagggttactgtga

SEQ ID NO: 5228682 - DNA, 25 bp, Homo sapien
gctgtccagcaagggttactgtgag

SEQ ID NO: 5228683 - DNA, 25 bp, Homo sapien
tttgaggccctttactgaagtactg

SEQ ID NO: 5228684 - DNA, 25 bp, Homo sapien
catcttccagtagtggctgcagcaa

SEQ ID NO: 5228685 - DNA, 25 bp, Homo sapien
aaagaagtcaggctgatgggaccag

SEQ ID NO: 5228686 - DNA, 25 bp, Homo sapien
tacgcttttcttcatggctcaggac

SEQ ID NO: 5228687 - DNA, 25 bp, Homo sapien
ttgttctgaatgcatcaaagttctg

SEQ ID NO: 5228688 - DNA, 25 bp, Homo sapien
ctttgttctgaatgcatcaaagttc

SEQ ID NO: 5228689 - DNA, 25 bp, Homo sapien
gttctgaatgcatcaaagttctgta

SEQ ID NO: 5228690 - DNA, 25 bp, Homo sapien
tgttctgaatgcatcaaagttctgt

SEQ ID NO: 5228691 - DNA, 25 bp, Homo sapien
cttgaattgggtcactgaaattaca

SEQ ID NO: 5228692 - DNA, 25 bp, Homo sapien
gatggttgaggcaatttccattcca

SEQ ID NO: 5228693 - DNA, 25 bp, Homo sapien
tacaagtgtcatcaagtggtgagat

SEQ ID NO: 5228694 - DNA, 25 bp, Homo sapien
tggtgagatggttgaggcaatttcc

SEQ ID NO: 5228695 - DNA, 25 bp, Homo sapien
tgctgcaaacatggaaaaactgagc

SEQ ID NO: 5228696 - DNA, 25 bp, Homo sapien
caagaatttaagagtactgctgcaa

SEQ ID NO: 5228697 - DNA, 25 bp, Homo sapien
gaatcaagaatttaagagtactgct

SEQ ID NO: 5228698 - DNA, 25 bp, Homo sapien
gaatttaagagtactgctgcaaaca

SEQ ID NO: 5228699 - DNA, 25 bp, Homo sapien
gagagtattacttgatgtttgattg

SEQ ID NO: 5228700 - DNA, 25 bp, Homo sapien
attacacatctttattgagagtatt

SEQ ID NO: 5228701 - DNA, 25 bp, Homo sapien
tacacatctttattgagagtattac

SEQ ID NO: 5228702 - DNA, 25 bp, Homo sapien
ttgagagtattacttgatgtttgat

SEQ ID NO: 5228703 - DNA, 25 bp, Homo sapien
gatacatccataacctctgaactga

SEQ ID NO: 5228704 - DNA, 25 bp, Homo sapien
catgatagatagacattcagtgaat

SEQ ID NO: 5228705 - DNA, 25 bp, Homo sapien
gaaatactgatgatagatacatcca

SEQ ID NO: 5228706 - DNA, 25 bp, Homo sapien
tgaaagacaggtgcctccaacagca

SEQ ID NO: 5228707 - DNA, 25 bp, Homo sapien
tgccacagcttcattaagtccctct

SEQ ID NO: 5228708 - DNA, 25 bp, Homo sapien
agcttcattaagtccctctgttccg

SEQ ID NO: 5228709 - DNA, 25 bp, Homo sapien
ctgccacagcttcattaagtccctc

SEQ ID NO: 5228710 - DNA, 25 bp, Homo sapien
tcattaagtccctctgttccgggtc

SEQ ID NO: 5228711 - DNA, 25 bp, Homo sapien
caccaggctggatatcctaatccta

SEQ ID NO: 5228712 - DNA, 25 bp, Homo sapien
aagatagggtttgagagcaaacaac

SEQ ID NO: 5228713 - DNA, 25 bp, Homo sapien
attcaccaggctggatatcctaatc

SEQ ID NO: 5228714 - DNA, 25 bp, Homo sapien
cagaagatagggtttgagagcaaac

SEQ ID NO: 5228715 - DNA, 25 bp, Homo sapien
aggacgactgcctacctggaactgg

SEQ ID NO: 5228716 - DNA, 25 bp, Homo sapien
tagtgtgtgctgctctcgtggaaag

SEQ ID NO: 5228717 - DNA, 25 bp, Homo sapien
tggcatggagatagaggagacccct

SEQ ID NO: 5228718 - DNA, 25 bp, Homo sapien
cacaagcagagtcgcaggagccttg

SEQ ID NO: 5228719 - DNA, 25 bp, Homo sapien
tacagttgtaattatcctagggtga

SEQ ID NO: 5228720 - DNA, 25 bp, Homo sapien
cattaggttgtaataaagcacccca

SEQ ID NO: 5228721 - DNA, 25 bp, Homo sapien
tagaagtctttcctggaactaagac

SEQ ID NO: 5228722 - DNA, 25 bp, Homo sapien
taacagtgccaagccacttacacgg

SEQ ID NO: 5228723 - DNA, 25 bp, Homo sapien
ggtttaattgatgcacaattcagca

SEQ ID NO: 5228724 - DNA, 25 bp, Homo sapien
taattgatgcacaattcagcatggc

SEQ ID NO: 5228725 - DNA, 25 bp, Homo sapien
tgatgcacaattcagcatggctgaa

SEQ ID NO: 5228726 - DNA, 25 bp, Homo sapien
ttgatgcacaattcagcatggctga

SEQ ID NO: 5228727 - DNA, 25 bp, Homo sapien
aaagagcattaatgatgcaggaccc

SEQ ID NO: 5228728 - DNA, 25 bp, Homo sapien
taaagagcattaatgatgcaggacc

SEQ ID NO: 5228729 - DNA, 25 bp, Homo sapien
agtgtctcctcatttttggaccaca

SEQ ID NO: 5228730 - DNA, 25 bp, Homo sapien
ttggctcagtattgaccagtttgaa

SEQ ID NO: 5228731 - DNA, 25 bp, Homo sapien
tcagtattgaccagtttgaattcca

SEQ ID NO: 5228732 - DNA, 25 bp, Homo sapien
gtctcctcatttttggaccacatca

SEQ ID NO: 5228733 - DNA, 25 bp, Homo sapien
ctggtatcagctgttccactgatgc

SEQ ID NO: 5228734 - DNA, 25 bp, Homo sapien
tatcagctgttccactgatgcacct

SEQ ID NO: 5228735 - DNA, 25 bp, Homo sapien
gctgttccactgatgcacctatacc

SEQ ID NO: 5228736 - DNA, 25 bp, Homo sapien
cagctgttccactgatgcacctata

SEQ ID NO: 5228737 - DNA, 25 bp, Homo sapien
ctgttacaaagagggttcccggatg

SEQ ID NO: 5228738 - DNA, 25 bp, Homo sapien
ggttcccggatgacttgcctctgca

SEQ ID NO: 5228739 - DNA, 25 bp, Homo sapien
cagagtggatatgcctcctttgctt

SEQ ID NO: 5228740 - DNA, 25 bp, Homo sapien
gctttaagtctacaacagagtggat

SEQ ID NO: 5228741 - DNA, 25 bp, Homo sapien
cttcttggctgcagacattcctgac

SEQ ID NO: 5228742 - DNA, 25 bp, Homo sapien
aaactttcctcccattgctattgct

SEQ ID NO: 5228743 - DNA, 25 bp, Homo sapien
cactgaatggctaaagtggtctcta

SEQ ID NO: 5228744 - DNA, 25 bp, Homo sapien
tcctgaccttgcttcagaaactttc

SEQ ID NO: 5228745 - DNA, 25 bp, Homo sapien
gcagctgctctatctcacttttcat

SEQ ID NO: 5228746 - DNA, 25 bp, Homo sapien
gaagatttcaagtggccactgcagc

SEQ ID NO: 5228747 - DNA, 25 bp, Homo sapien
ttcatgcttcagcacaagttgcttt

SEQ ID NO: 5228748 - DNA, 25 bp, Homo sapien
cacaagttgctttgaaaagtggaag

SEQ ID NO: 5228749 - DNA, 25 bp, Homo sapien
catagtgtgttgtctcccttggaga

SEQ ID NO: 5228750 - DNA, 25 bp, Homo sapien
catgagcctgctcgaaaaaatgcat

SEQ ID NO: 5228751 - DNA, 25 bp, Homo sapien
agggccatgtcctcctcgtgtgcca

SEQ ID NO: 5228752 - DNA, 25 bp, Homo sapien
atgtcctcctcgtgtgccacatact

SEQ ID NO: 5228753 - DNA, 25 bp, Homo sapien
ctatgatcaggtagggtttatcccc

SEQ ID NO: 5228754 - DNA, 25 bp, Homo sapien
tggttcaacatgcagatcagaagtg

SEQ ID NO: 5228755 - DNA, 25 bp, Homo sapien
tccacgtaactatctaaatagatgc

SEQ ID NO: 5228756 - DNA, 25 bp, Homo sapien
aacttcaagccaatatttttgatga

SEQ ID NO: 5228757 - DNA, 25 bp, Homo sapien
tgagctctttgtatcatgtcagaag

SEQ ID NO: 5228758 - DNA, 25 bp, Homo sapien
aaactaaagcagatatctgagctct

SEQ ID NO: 5228759 - DNA, 25 bp, Homo sapien
caatctatctggttgggctgccctg

SEQ ID NO: 5228760 - DNA, 25 bp, Homo sapien
agggcattctcgtacttcccatcca

SEQ ID NO: 5228761 - DNA, 25 bp, Homo sapien
ccagtctaggtcagagtcttctgca

SEQ ID NO: 5228762 - DNA, 25 bp, Homo sapien
cttctgcaatatgctgccagagact

SEQ ID NO: 5228763 - DNA, 25 bp, Homo sapien
gacagttctgtcctttacagcacta

SEQ ID NO: 5228764 - DNA, 25 bp, Homo sapien
gccctctgtgacatgccagtctagg

SEQ ID NO: 5228765 - DNA, 25 bp, Homo sapien
gctcacactccccttgttcatcacc

SEQ ID NO: 5228766 - DNA, 25 bp, Homo sapien
actccccttgttcatcacctttatt

SEQ ID NO: 5228767 - DNA, 25 bp, Homo sapien
agccaagctcacactccccttgttc

SEQ ID NO: 5228768 - DNA, 25 bp, Homo sapien
caagctcacactccccttgttcatc

SEQ ID NO: 5228769 - DNA, 25 bp, Homo sapien
ggtcatgacagcatccattgctgga

SEQ ID NO: 5228770 - DNA, 25 bp, Homo sapien
atctcatcactgatgggtgaggaaa

SEQ ID NO: 5228771 - DNA, 25 bp, Homo sapien
aaaaaggtgagtaaaggtcatgaca

SEQ ID NO: 5228772 - DNA, 25 bp, Homo sapien
tgagtaaaggtcatgacagcatcca

SEQ ID NO: 5228773 - DNA, 25 bp, Homo sapien
attctcttatctttgttctgggcat

SEQ ID NO: 5228774 - DNA, 25 bp, Homo sapien
agtgttctcatcataaactatctct

SEQ ID NO: 5228775 - DNA, 25 bp, Homo sapien
ctccctcactgttggtatttccaaa

SEQ ID NO: 5228776 - DNA, 25 bp, Homo sapien
ctttgccactccctcactgttggta

SEQ ID NO: 5228777 - DNA, 25 bp, Homo sapien
ggctggctggggctgagctggtggg

SEQ ID NO: 5228778 - DNA, 25 bp, Homo sapien
ctgccctggtctccggccccaccat

SEQ ID NO: 5228779 - DNA, 25 bp, Homo sapien
caccatgcaggaagctgccggggcc

SEQ ID NO: 5228780 - DNA, 25 bp, Homo sapien
ggtctccggccccaccatgcaggaa

SEQ ID NO: 5228781 - DNA, 25 bp, Homo sapien
ccatgcaggaagctgccggggccct

SEQ ID NO: 5228782 - DNA, 25 bp, Homo sapien
agttgcagcggctcaagtagggctg

SEQ ID NO: 5228783 - DNA, 25 bp, Homo sapien
gagttgcagcggctcaagtagggct

SEQ ID NO: 5228784 - DNA, 25 bp, Homo sapien
ccgagttgcagcggctcaagtaggg

SEQ ID NO: 5228785 - DNA, 25 bp, Homo sapien
agccccggtcctcgtagagggtgat

SEQ ID NO: 5228786 - DNA, 25 bp, Homo sapien
ggtcggcatagtcgcagcggcgcag

SEQ ID NO: 5228787 - DNA, 25 bp, Homo sapien
gtggtcggcatagtcgcagcggcgc

SEQ ID NO: 5228788 - DNA, 25 bp, Homo sapien
ctggtggtcggcatagtcgcagcgg

SEQ ID NO: 5228789 - DNA, 25 bp, Homo sapien
cggcatagtcgcagcggcgcaggaa

SEQ ID NO: 5228790 - DNA, 25 bp, Homo sapien
gaggcggcaggagcggaccgagtcg

SEQ ID NO: 5228791 - DNA, 25 bp, Homo sapien
cggcaggagcggaccgagtcgctga

SEQ ID NO: 5228792 - DNA, 25 bp, Homo sapien
ggcggcaggagcggaccgagtcgct

SEQ ID NO: 5228793 - DNA, 25 bp, Homo sapien
atgaggcggcaggagcggaccgagt

SEQ ID NO: 5228794 - DNA, 25 bp, Homo sapien
gctcatagatcctgagcctgtggga

SEQ ID NO: 5228795 - DNA, 25 bp, Homo sapien
tggaagcggtcgtgaagagaggagc

SEQ ID NO: 5228796 - DNA, 25 bp, Homo sapien
ctctcgctcatagatcctgagcctg

SEQ ID NO: 5228797 - DNA, 25 bp, Homo sapien
gagtggatctcactgaggtggaagc

SEQ ID NO: 5228798 - DNA, 25 bp, Homo sapien
ggagcaaaggatagagtacaaatat

SEQ ID NO: 5228799 - DNA, 25 bp, Homo sapien
ccagtcgaggtaatgcctgtagtcc

SEQ ID NO: 5228800 - DNA, 25 bp, Homo sapien
tcagtagccccccagtcgaggtaat

SEQ ID NO: 5228801 - DNA, 25 bp, Homo sapien
atggagcaaaggatagagtacaaat

SEQ ID NO: 5228802 - DNA, 25 bp, Homo sapien
gaatgggttagatacagcctctccc

SEQ ID NO: 5228803 - DNA, 25 bp, Homo sapien
tatcatgtagtatccattcttctcc

SEQ ID NO: 5228804 - DNA, 25 bp, Homo sapien
cctacactgtaggaaaggcctagac

SEQ ID NO: 5228805 - DNA, 25 bp, Homo sapien
gacaagactttaggttagattcata

SEQ ID NO: 5228806 - DNA, 25 bp, Homo sapien
gtgtcttccaggtagcttccctcaa

SEQ ID NO: 5228807 - DNA, 25 bp, Homo sapien
gcttccctcaaaagcatagatctgt

SEQ ID NO: 5228808 - DNA, 25 bp, Homo sapien
ctgagtgtcttccaggtagcttccc

SEQ ID NO: 5228809 - DNA, 25 bp, Homo sapien
tccaggtagcttccctcaaaagcat

SEQ ID NO: 5228810 - DNA, 25 bp, Homo sapien
taccgatcccagtcaggagtaatat

SEQ ID NO: 5228811 - DNA, 25 bp, Homo sapien
agataccgatcccagtcaggagtaa

SEQ ID NO: 5228812 - DNA, 25 bp, Homo sapien
cagtcaggagtaatattgccataca

SEQ ID NO: 5228813 - DNA, 25 bp, Homo sapien
gatcccagtcaggagtaatattgcc

SEQ ID NO: 5228814 - DNA, 25 bp, Homo sapien
cctcttttaaatgagctagtcctga

SEQ ID NO: 5228815 - DNA, 25 bp, Homo sapien
cttttaaatgagctagtcctgaact

SEQ ID NO: 5228816 - DNA, 25 bp, Homo sapien
tccctcttttaaatgagctagtcct

SEQ ID NO: 5228817 - DNA, 25 bp, Homo sapien
tggctccctcttttaaatgagctag

SEQ ID NO: 5228818 - DNA, 25 bp, Homo sapien
attagccggcactgcgtgctgaagc

SEQ ID NO: 5228819 - DNA, 25 bp, Homo sapien
atcattagccggcactgcgtgctga

SEQ ID NO: 5228820 - DNA, 25 bp, Homo sapien
gggatcttgtggtgccatcattagc

SEQ ID NO: 5228821 - DNA, 25 bp, Homo sapien
tggtgccatcattagccggcactgc

SEQ ID NO: 5228822 - DNA, 25 bp, Homo sapien
gcaactcaggatcacgccaggcaaa

SEQ ID NO: 5228823 - DNA, 25 bp, Homo sapien
tgacctcaggcaactcaggatcacg

SEQ ID NO: 5228824 - DNA, 25 bp, Homo sapien
atgtgaatgacctcaggcaactcag

SEQ ID NO: 5228825 - DNA, 25 bp, Homo sapien
ctcaggcaactcaggatcacgccag

SEQ ID NO: 5228826 - DNA, 25 bp, Homo sapien
aagagatttcgaagggcatcacaag

SEQ ID NO: 5228827 - DNA, 25 bp, Homo sapien
tgtagacttgccgaaaaagagattt

SEQ ID NO: 5228828 - DNA, 25 bp, Homo sapien
tgccgaaaaagagatttcgaagggc

SEQ ID NO: 5228829 - DNA, 25 bp, Homo sapien
ctctgtggcccaaaaggtaaaccag

SEQ ID NO: 5228830 - DNA, 25 bp, Homo sapien
tccttcattgttattttattttcac

SEQ ID NO: 5228831 - DNA, 25 bp, Homo sapien
catccttcattgttattttattttc

SEQ ID NO: 5228832 - DNA, 25 bp, Homo sapien
atccttcattgttattttattttca

SEQ ID NO: 5228833 - DNA, 25 bp, Homo sapien
caacatccttcattgttattttatt

SEQ ID NO: 5228834 - DNA, 25 bp, Homo sapien
agtcacaacaaggcagatatctcac

SEQ ID NO: 5228835 - DNA, 25 bp, Homo sapien
ctgcatcaatattgattttctcaac

SEQ ID NO: 5228836 - DNA, 25 bp, Homo sapien
aagttgagagaacatctcgaataat

SEQ ID NO: 5228837 - DNA, 25 bp, Homo sapien
agttgagagaacatctcgaataatt

SEQ ID NO: 5228838 - DNA, 25 bp, Homo sapien
attgtttgttaaagttgagagaaca

SEQ ID NO: 5228839 - DNA, 25 bp, Homo sapien
acattgtttgttaaagttgagagaa

SEQ ID NO: 5228840 - DNA, 25 bp, Homo sapien
ccacagagctgaggttcctcaggca

SEQ ID NO: 5228841 - DNA, 25 bp, Homo sapien
cacagagctgaggttcctcaggcaa

SEQ ID NO: 5228842 - DNA, 25 bp, Homo sapien
cccacagagctgaggttcctcaggc

SEQ ID NO: 5228843 - DNA, 25 bp, Homo sapien
acagagctgaggttcctcaggcaac

SEQ ID NO: 5228844 - DNA, 25 bp, Homo sapien
gttcatacacgtgtaggttacatgc

SEQ ID NO: 5228845 - DNA, 25 bp, Homo sapien
ttacatgcaacagcgagtccaccag

SEQ ID NO: 5228846 - DNA, 25 bp, Homo sapien
gtgttcatacacgtgtaggttacat

SEQ ID NO: 5228847 - DNA, 25 bp, Homo sapien
gtaggttacatgcaacagcgagtcc

SEQ ID NO: 5228848 - DNA, 25 bp, Homo sapien
agggtgcacacgcaattctccatct

SEQ ID NO: 5228849 - DNA, 25 bp, Homo sapien
tgcagctccagccaataggacaggt

SEQ ID NO: 5228850 - DNA, 25 bp, Homo sapien
tcagagtcttcgctgggaaactttt

SEQ ID NO: 5228851 - DNA, 25 bp, Homo sapien
gctccagccaataggacaggttcct

SEQ ID NO: 5228852 - DNA, 25 bp, Homo sapien
aagctggttgaccaggtcttgcatg

SEQ ID NO: 5228853 - DNA, 25 bp, Homo sapien
tcttgcatggtgtatttgcctatga

SEQ ID NO: 5228854 - DNA, 25 bp, Homo sapien
tgcatggactcatcagacaagatac

SEQ ID NO: 5228855 - DNA, 25 bp, Homo sapien
cactagtttctttatgcctcccgag

SEQ ID NO: 5228856 - DNA, 25 bp, Homo sapien
ttcatctcaatccaaacaaggttaa

SEQ ID NO: 5228857 - DNA, 25 bp, Homo sapien
gatttgatctacacatccccatttc

SEQ ID NO: 5228858 - DNA, 25 bp, Homo sapien
gttattttgttggagttatcttgac

SEQ ID NO: 5228859 - DNA, 25 bp, Homo sapien
gaaagagttcttctgttgggtgtct

SEQ ID NO: 5228860 - DNA, 25 bp, Homo sapien
aatgtacagttagcaacttcctggg

SEQ ID NO: 5228861 - DNA, 25 bp, Homo sapien
tcaatcctgtgtcggttttttattc

SEQ ID NO: 5228862 - DNA, 25 bp, Homo sapien
tctggagaatgtcactttccatccc

SEQ ID NO: 5228863 - DNA, 25 bp, Homo sapien
ttcttgatgcatatcacagatgaag

SEQ ID NO: 5228864 - DNA, 25 bp, Homo sapien
tgtactgagaatctgtgtttttcct

SEQ ID NO: 5228865 - DNA, 25 bp, Homo sapien
atctgtgtttttcctgtccagccat

SEQ ID NO: 5228866 - DNA, 25 bp, Homo sapien
agaatctgtgtttttcctgtccagc

SEQ ID NO: 5228867 - DNA, 25 bp, Homo sapien
ctgtactgagaatctgtgtttttcc

SEQ ID NO: 5228868 - DNA, 25 bp, Homo sapien
ctgcgttagcgaagcggcgcgcaca

SEQ ID NO: 5228869 - DNA, 25 bp, Homo sapien
tgcgttagcgaagcggcgcgcacac

SEQ ID NO: 5228870 - DNA, 25 bp, Homo sapien
cgaagcggcgcgcacacgaacacac

SEQ ID NO: 5228871 - DNA, 25 bp, Homo sapien
ttagcgaagcggcgcgcacacgaac

SEQ ID NO: 5228872 - DNA, 25 bp, Homo sapien
taggtgtcgctggatcttgcgcccc

SEQ ID NO: 5228873 - DNA, 25 bp, Homo sapien
gcccgccaaattggtgagtctggaa

SEQ ID NO: 5228874 - DNA, 25 bp, Homo sapien
tttcccagagcgtctggcgaggact

SEQ ID NO: 5228875 - DNA, 25 bp, Homo sapien
tgcgcctcgcttccggctacaagtt

SEQ ID NO: 5228876 - DNA, 25 bp, Homo sapien
gaactccagcggttcccctcagata

SEQ ID NO: 5228877 - DNA, 25 bp, Homo sapien
gcggttcccctcagatagtgggacc

SEQ ID NO: 5228878 - DNA, 25 bp, Homo sapien
ggttcccctcagatagtgggaccaa

SEQ ID NO: 5228879 - DNA, 25 bp, Homo sapien
ccagcggttcccctcagatagtggg

SEQ ID NO: 5228880 - DNA, 25 bp, Homo sapien
gcggtagcggcgtccgtgacctcca

SEQ ID NO: 5228881 - DNA, 25 bp, Homo sapien
gaggacccaggactctcctagagac

SEQ ID NO: 5228882 - DNA, 25 bp, Homo sapien
ctgagctgcgggacccggtgactcc

SEQ ID NO: 5228883 - DNA, 25 bp, Homo sapien
aagcagaggccttgcgagttggcgg

SEQ ID NO: 5228884 - DNA, 25 bp, Homo sapien
aaacacagtgatgtaaacaagatgc

SEQ ID NO: 5228885 - DNA, 25 bp, Homo sapien
ggaaaaacacagtgatgtaaacaag

SEQ ID NO: 5228886 - DNA, 25 bp, Homo sapien
ctggtaggaaaaacacagtgatgta

SEQ ID NO: 5228887 - DNA, 25 bp, Homo sapien
tgatgtaaacaagatgctcctgcat

SEQ ID NO: 5228888 - DNA, 25 bp, Homo sapien
tttggtcagtctacaagtcctggta

SEQ ID NO: 5228889 - DNA, 25 bp, Homo sapien
aatgtagatttgtccttgacatgac

SEQ ID NO: 5228890 - DNA, 25 bp, Homo sapien
gagaagggacctcagtcgagtgtcc

SEQ ID NO: 5228891 - DNA, 25 bp, Homo sapien
catgccctcgctagagtgtgcagag

SEQ ID NO: 5228892 - DNA, 25 bp, Homo sapien
tttcttgagctgatcggtccgagga

SEQ ID NO: 5228893 - DNA, 25 bp, Homo sapien
tgagctgatcggtccgaggacctga

SEQ ID NO: 5228894 - DNA, 25 bp, Homo sapien
atgtttcttgagctgatcggtccga

SEQ ID NO: 5228895 - DNA, 25 bp, Homo sapien
tcttgagctgatcggtccgaggacc

SEQ ID NO: 5228896 - DNA, 25 bp, Homo sapien
agagactgaagtgtggcaccaagac

SEQ ID NO: 5228897 - DNA, 25 bp, Homo sapien
catggataaaacatgtcccttttgt

SEQ ID NO: 5228898 - DNA, 25 bp, Homo sapien
agactgaagtgtggcaccaagactg

SEQ ID NO: 5228899 - DNA, 25 bp, Homo sapien
gggttcatggataaaacatgtccct

SEQ ID NO: 5228900 - DNA, 25 bp, Homo sapien
tggatacggttttgtatgaactgaa

SEQ ID NO: 5228901 - DNA, 25 bp, Homo sapien
ggacctaggacatctgattagagag

SEQ ID NO: 5228902 - DNA, 25 bp, Homo sapien
ggctgtaccttgtagcattccaagg

SEQ ID NO: 5228903 - DNA, 25 bp, Homo sapien
ccttgtagcattccaaggacaggcc

SEQ ID NO: 5228904 - DNA, 25 bp, Homo sapien
aggtcacaggggatgcgacggcttg

SEQ ID NO: 5228905 - DNA, 25 bp, Homo sapien
ggtcacaggggatgcgacggcttgg

SEQ ID NO: 5228906 - DNA, 25 bp, Homo sapien
gatgcgacggcttggcttggactca

SEQ ID NO: 5228907 - DNA, 25 bp, Homo sapien
ggggatgcgacggcttggcttggac

SEQ ID NO: 5228908 - DNA, 25 bp, Homo sapien
gtcagtaccagtgcctccttacttg

SEQ ID NO: 5228909 - DNA, 25 bp, Homo sapien
gggctgtttctcctgattggtcagt

SEQ ID NO: 5228910 - DNA, 25 bp, Homo sapien
taccagtgcctccttacttgttaaa

SEQ ID NO: 5228911 - DNA, 25 bp, Homo sapien
tctcctgattggtcagtaccagtgc

SEQ ID NO: 5228912 - DNA, 25 bp, Homo sapien
aagtctctgctaatctttatcctct

SEQ ID NO: 5228913 - DNA, 25 bp, Homo sapien
cagaagtctctgctaatctttatcc

SEQ ID NO: 5228914 - DNA, 25 bp, Homo sapien
tcagaagtctctgctaatctttatc

SEQ ID NO: 5228915 - DNA, 25 bp, Homo sapien
gaagtctctgctaatctttatcctc

SEQ ID NO: 5228916 - DNA, 25 bp, Homo sapien
gctgatacttcatgtccttcttttc

SEQ ID NO: 5228917 - DNA, 25 bp, Homo sapien
gccacaagattaggagcaactgaac

SEQ ID NO: 5228918 - DNA, 25 bp, Homo sapien
ctctgctgatacttcatgtccttct

SEQ ID NO: 5228919 - DNA, 25 bp, Homo sapien
ctctgtagttacttttatggagcca

SEQ ID NO: 5228920 - DNA, 25 bp, Homo sapien
ttcattatctgaccagcctcgggca

SEQ ID NO: 5228921 - DNA, 25 bp, Homo sapien
tgttctgcttcattatctgaccagc

SEQ ID NO: 5228922 - DNA, 25 bp, Homo sapien
cttgctgttctgcttcattatctga

SEQ ID NO: 5228923 - DNA, 25 bp, Homo sapien
gcagggtgctgggtataacgccatt

SEQ ID NO: 5228924 - DNA, 25 bp, Homo sapien
aactgtcaacagctggtcactctga

SEQ ID NO: 5228925 - DNA, 25 bp, Homo sapien
gatgatcaagtggtccacaaattgg

SEQ ID NO: 5228926 - DNA, 25 bp, Homo sapien
ttaactagttatccagagatgatca

SEQ ID NO: 5228927 - DNA, 25 bp, Homo sapien
ttccacggggcttcaactacaactg

SEQ ID NO: 5228928 - DNA, 25 bp, Homo sapien
aaactggatgcacccgcggtcgcga

SEQ ID NO: 5228929 - DNA, 25 bp, Homo sapien
actgccaccgctcacggacttagcg

SEQ ID NO: 5228930 - DNA, 25 bp, Homo sapien
ctgggcgcagaaactggatgcaccc

SEQ ID NO: 5228931 - DNA, 25 bp, Homo sapien
tagcgccctccggagaaaaaggaga

SEQ ID NO: 5228932 - DNA, 25 bp, Homo sapien
catgtccacattaagatagtgactc

SEQ ID NO: 5228933 - DNA, 25 bp, Homo sapien
tagaaaggttatcatatagtgccat

SEQ ID NO: 5228934 - DNA, 25 bp, Homo sapien
catctgtgtaccctaatcatgtcca

SEQ ID NO: 5228935 - DNA, 25 bp, Homo sapien
cagcccttttaagtcgttatgttgc

SEQ ID NO: 5228936 - DNA, 25 bp, Homo sapien
taggcatagctgacatagaccgtca

SEQ ID NO: 5228937 - DNA, 25 bp, Homo sapien
aaccacctatgttgttttcctctga

SEQ ID NO: 5228938 - DNA, 25 bp, Homo sapien
atccacgtcccaaagaaccagtttg

SEQ ID NO: 5228939 - DNA, 25 bp, Homo sapien
cttatgaaaccaatatccacgtccc

SEQ ID NO: 5228940 - DNA, 25 bp, Homo sapien
ttctcacaacacttattctcaaaat

SEQ ID NO: 5228941 - DNA, 25 bp, Homo sapien
aattgaaaagtccaaccatctgcca

SEQ ID NO: 5228942 - DNA, 25 bp, Homo sapien
ctgatcttgcccgataaggtctaat

SEQ ID NO: 5228943 - DNA, 25 bp, Homo sapien
tcttttctacatccaaacaccagtt

SEQ ID NO: 5228944 - DNA, 25 bp, Homo sapien
acttggttgccctgtgcctctgcct

SEQ ID NO: 5228945 - DNA, 25 bp, Homo sapien
cctgtgcctctgcctcctgtttcct

SEQ ID NO: 5228946 - DNA, 25 bp, Homo sapien
tacttggttgccctgtgcctctgcc

SEQ ID NO: 5228947 - DNA, 25 bp, Homo sapien
gtgcctctgcctcctgtttcctcac

SEQ ID NO: 5228948 - DNA, 25 bp, Homo sapien
tgtggtcctgatagtatcatcttgg

SEQ ID NO: 5228949 - DNA, 25 bp, Homo sapien
agccacagagaaatgttcccacatg

SEQ ID NO: 5228950 - DNA, 25 bp, Homo sapien
tcatcttggatgttatcctggaagc

SEQ ID NO: 5228951 - DNA, 25 bp, Homo sapien
ggcactggagcagtcccatcaacat

SEQ ID NO: 5228952 - DNA, 25 bp, Homo sapien
ttttcctgagattcacctgaccatg

SEQ ID NO: 5228953 - DNA, 25 bp, Homo sapien
gactgcaaggtctcgtttttcctga

SEQ ID NO: 5228954 - DNA, 25 bp, Homo sapien
ttacaactccaacataacccagggc

SEQ ID NO: 5228955 - DNA, 25 bp, Homo sapien
tcaatcttctggaaacgaatagcag

SEQ ID NO: 5228956 - DNA, 25 bp, Homo sapien
gggaagacgtcatcaaactctggac

SEQ ID NO: 5228957 - DNA, 25 bp, Homo sapien
ttgaatgttaaacctgctggcagcc

SEQ ID NO: 5228958 - DNA, 25 bp, Homo sapien
caatggcctgcaaggtggctctgtt

SEQ ID NO: 5228959 - DNA, 25 bp, Homo sapien
cagtatggtcttcgtcatgggtgcc

SEQ ID NO: 5228960 - DNA, 25 bp, Homo sapien
cacacatgtggctaaagcaatggaa

SEQ ID NO: 5228961 - DNA, 25 bp, Homo sapien
ttattgtgccctccactaaagacaa

SEQ ID NO: 5228962 - DNA, 25 bp, Homo sapien
tagtttaagattgacaagcagttac

SEQ ID NO: 5228963 - DNA, 25 bp, Homo sapien
gttttaggaatagcatgaacctttc

SEQ ID NO: 5228964 - DNA, 25 bp, Homo sapien
gattcaaatcaatcctctggaagtg

SEQ ID NO: 5228965 - DNA, 25 bp, Homo sapien
tactaagtcaacacaaatggccctc

SEQ ID NO: 5228966 - DNA, 25 bp, Homo sapien
gaagttcaatgagatacagctccca

SEQ ID NO: 5228967 - DNA, 25 bp, Homo sapien
ctgggtaaagctaaaggaactggca

SEQ ID NO: 5228968 - DNA, 25 bp, Homo sapien
aatctttggttatgggctatcctca

SEQ ID NO: 5228969 - DNA, 25 bp, Homo sapien
gcttcccaacgacaggtaatctttg

SEQ ID NO: 5228970 - DNA, 25 bp, Homo sapien
gattcatcagcgtgacacctgcttc

SEQ ID NO: 5228971 - DNA, 25 bp, Homo sapien
tatccagccacagattaatcacagg

SEQ ID NO: 5228972 - DNA, 25 bp, Homo sapien
ctgatctgaccaatttcatctttag

SEQ ID NO: 5228973 - DNA, 25 bp, Homo sapien
aatagaatgtttacagcctgactgt

SEQ ID NO: 5228974 - DNA, 25 bp, Homo sapien
tatttcaactgtactagtcaagagt

SEQ ID NO: 5228975 - DNA, 25 bp, Homo sapien
ggtgctgaacacctaaatagaatgt

SEQ ID NO: 5228976 - DNA, 25 bp, Homo sapien
gaaagtacacatcctcctaggccta

SEQ ID NO: 5228977 - DNA, 25 bp, Homo sapien
taaacatgtaggataaacctgaggc

SEQ ID NO: 5228978 - DNA, 25 bp, Homo sapien
gaatgtacagctataggcaatcctt

SEQ ID NO: 5228979 - DNA, 25 bp, Homo sapien
tgatgaatctgcaaaagcccctaag

SEQ ID NO: 5228980 - DNA, 25 bp, Homo sapien
ctggcagcaagtgtttcaagccagc

SEQ ID NO: 5228981 - DNA, 25 bp, Homo sapien
tggcagcaagtgtttcaagccagcg

SEQ ID NO: 5228982 - DNA, 25 bp, Homo sapien
cttccagtgttcctcctccccacaa

SEQ ID NO: 5228983 - DNA, 25 bp, Homo sapien
ttgtccctcttccagtgttcctcct

SEQ ID NO: 5228984 - DNA, 25 bp, Homo sapien
tcctccccacaactggaagccccat

SEQ ID NO: 5228985 - DNA, 25 bp, Homo sapien
agtgttcctcctccccacaactgga

SEQ ID NO: 5228986 - DNA, 25 bp, Homo sapien
attccagccagaagttataagatac

SEQ ID NO: 5228987 - DNA, 25 bp, Homo sapien
tctatttgcttcattcgatacagat

SEQ ID NO: 5228988 - DNA, 25 bp, Homo sapien
gcttcattcgatacagatttcgaag

SEQ ID NO: 5228989 - DNA, 25 bp, Homo sapien
ttcgatacagatttcgaagatagga

SEQ ID NO: 5228990 - DNA, 25 bp, Homo sapien
acagatttcgaagataggaaagcac

SEQ ID NO: 5228991 - DNA, 25 bp, Homo sapien
aaacacgtttccagtctaaattcag

SEQ ID NO: 5228992 - DNA, 25 bp, Homo sapien
gagacttactacatctaactgcttt

SEQ ID NO: 5228993 - DNA, 25 bp, Homo sapien
gacatacctcatttaccactaggaa

SEQ ID NO: 5228994 - DNA, 25 bp, Homo sapien
tatcggtagctttcttttatctggc

SEQ ID NO: 5228995 - DNA, 25 bp, Homo sapien
aagaggcagaatacagatccaaagt

SEQ ID NO: 5228996 - DNA, 25 bp, Homo sapien
tctcatgatgaactgggtttctgct

SEQ ID NO: 5228997 - DNA, 25 bp, Homo sapien
tgagtcctcattcccttatgcgtgc

SEQ ID NO: 5228998 - DNA, 25 bp, Homo sapien
tgtaactattctgtgtgcatgaaga

SEQ ID NO: 5228999 - DNA, 25 bp, Homo sapien
tgttattatctatgtgacctggagc

SEQ ID NO: 5229000 - DNA, 25 bp, Homo sapien
tatactgtttgtaacatggaggatc

SEQ ID NO: 5229001 - DNA, 25 bp, Homo sapien
cattttgcaacccaacagacatggg

SEQ ID NO: 5229002 - DNA, 25 bp, Homo sapien
tgagaagcaactaggaaacagaaca

SEQ ID NO: 5229003 - DNA, 25 bp, Homo sapien
gatgccctagttccttcagccagca

SEQ ID NO: 5229004 - DNA, 25 bp, Homo sapien
caagttggtctatgcttgaaggtgg

SEQ ID NO: 5229005 - DNA, 25 bp, Homo sapien
tgctggacggccctttgaagccagg

SEQ ID NO: 5229006 - DNA, 25 bp, Homo sapien
ttggtattttgcatagccctttggg

SEQ ID NO: 5229007 - DNA, 25 bp, Homo sapien
cagcttatggcacagatcaggttat

SEQ ID NO: 5229008 - DNA, 25 bp, Homo sapien
tgaaaacacctagtccagcttatgg

SEQ ID NO: 5229009 - DNA, 25 bp, Homo sapien
taggcactatactgatagctggaac

SEQ ID NO: 5229010 - DNA, 25 bp, Homo sapien
gtctcactctgagatagtgctgaaa

SEQ ID NO: 5229011 - DNA, 25 bp, Homo sapien
tgtgagctatccttacagtatgtac

SEQ ID NO: 5229012 - DNA, 25 bp, Homo sapien
ggaaacactggttcgatgcaaccca

SEQ ID NO: 5229013 - DNA, 25 bp, Homo sapien
gtatgcctgtatactcttgggccac

SEQ ID NO: 5229014 - DNA, 25 bp, Homo sapien
taaaacacatgtcccgccactgtga

SEQ ID NO: 5229015 - DNA, 25 bp, Homo sapien
acaacaaatttgcactattccatca

SEQ ID NO: 5229016 - DNA, 25 bp, Homo sapien
caaatgagtcttacatgagtttgtc

SEQ ID NO: 5229017 - DNA, 25 bp, Homo sapien
ccagcacgaaagtgacttttatgtg

SEQ ID NO: 5229018 - DNA, 25 bp, Homo sapien
aatgagcatctcagtgaaattggcc

SEQ ID NO: 5229019 - DNA, 25 bp, Homo sapien
catgaagggaagacacaaccaatgt

SEQ ID NO: 5229020 - DNA, 25 bp, Homo sapien
gactggattgctctgatctcataag

SEQ ID NO: 5229021 - DNA, 25 bp, Homo sapien
aaagagttgcgccttatgaatgagc

SEQ ID NO: 5229022 - DNA, 25 bp, Homo sapien
gacgttctgtggttgaaatgctatc

SEQ ID NO: 5229023 - DNA, 25 bp, Homo sapien
tacatgcgtggtatctaaagaaacc

SEQ ID NO: 5229024 - DNA, 25 bp, Homo sapien
cagagaagtacattgaaaggaaaac

SEQ ID NO: 5229025 - DNA, 25 bp, Homo sapien
ccaacatgttggtttaagacagcag

SEQ ID NO: 5229026 - DNA, 25 bp, Homo sapien
cagacatcatggatttatgacacaa

SEQ ID NO: 5229027 - DNA, 25 bp, Homo sapien
caatggtaccatgcttacatctgtc

SEQ ID NO: 5229028 - DNA, 25 bp, Homo sapien
ttaactcacaatggtaccatgctta

SEQ ID NO: 5229029 - DNA, 25 bp, Homo sapien
ggtaccatgcttacatctgtctgaa

SEQ ID NO: 5229030 - DNA, 25 bp, Homo sapien
cacaatggtaccatgcttacatctg

SEQ ID NO: 5229031 - DNA, 25 bp, Homo sapien
cagcagcctactgtggcagcatcca

SEQ ID NO: 5229032 - DNA, 25 bp, Homo sapien
agcagcctactgtggcagcatccat

SEQ ID NO: 5229033 - DNA, 25 bp, Homo sapien
tacctgctaccgaaatgaatctaaa

SEQ ID NO: 5229034 - DNA, 25 bp, Homo sapien
aattctgtggtaacagtttacctgc

SEQ ID NO: 5229035 - DNA, 25 bp, Homo sapien
tatataatatttatcagatagttac

SEQ ID NO: 5229036 - DNA, 25 bp, Homo sapien
caacatcccaggctctatcagtcct

SEQ ID NO: 5229037 - DNA, 25 bp, Homo sapien
cactgggcacccttttgctatcttc

SEQ ID NO: 5229038 - DNA, 25 bp, Homo sapien
tgagtgaatattcgctggcatctta

SEQ ID NO: 5229039 - DNA, 25 bp, Homo sapien
ataggattatgacgggcactgggca

SEQ ID NO: 5229040 - DNA, 25 bp, Homo sapien
aaacctccatagttgaattctaggc

SEQ ID NO: 5229041 - DNA, 25 bp, Homo sapien
tagcagattccaccgggaatgtgga

SEQ ID NO: 5229042 - DNA, 25 bp, Homo sapien
ctatagcagattccaccgggaatgt

SEQ ID NO: 5229043 - DNA, 25 bp, Homo sapien
agattccaccgggaatgtggaaaat

SEQ ID NO: 5229044 - DNA, 25 bp, Homo sapien
gcagattccaccgggaatgtggaaa

SEQ ID NO: 5229045 - DNA, 25 bp, Homo sapien
gaattctccataacacaaaattgtc

SEQ ID NO: 5229046 - DNA, 25 bp, Homo sapien
aaaattgtccaactctcggcctcca

SEQ ID NO: 5229047 - DNA, 25 bp, Homo sapien
tctcggcctccattaaaacagcttc

SEQ ID NO: 5229048 - DNA, 25 bp, Homo sapien
tatctccagtccagtcataagcctt

SEQ ID NO: 5229049 - DNA, 25 bp, Homo sapien
ttgaaaatgtatagataagcccctt

SEQ ID NO: 5229050 - DNA, 25 bp, Homo sapien
tgaatgatactacaaatctgagcta

SEQ ID NO: 5229051 - DNA, 25 bp, Homo sapien
ctttttggtacctctatgcctggca

SEQ ID NO: 5229052 - DNA, 25 bp, Homo sapien
tgcctggcacaatccaacaatttaa

SEQ ID NO: 5229053 - DNA, 25 bp, Homo sapien
ccttgatgagtcttccagtgatgcc

SEQ ID NO: 5229054 - DNA, 25 bp, Homo sapien
tgcttacactccataaccaagttgg

SEQ ID NO: 5229055 - DNA, 25 bp, Homo sapien
ccatttcaggatgccaaggactcat

SEQ ID NO: 5229056 - DNA, 25 bp, Homo sapien
gactattctggtacttgtaaaccca

SEQ ID NO: 5229057 - DNA, 25 bp, Homo sapien
taatcagaccttatgaggaatgtcc

SEQ ID NO: 5229058 - DNA, 25 bp, Homo sapien
tctttgccaagttcagatgccaaca

SEQ ID NO: 5229059 - DNA, 25 bp, Homo sapien
tttataggtgagcaggtcgagactc

SEQ ID NO: 5229060 - DNA, 25 bp, Homo sapien
tccaaggacaaactgctagaaactg

SEQ ID NO: 5229061 - DNA, 25 bp, Homo sapien
cttggaaagagtgaatgtcactctc

SEQ ID NO: 5229062 - DNA, 25 bp, Homo sapien
ctatcatgaggattatcttggaaag

SEQ ID NO: 5229063 - DNA, 25 bp, Homo sapien
gtcactctcaataggcctctggcct

SEQ ID NO: 5229064 - DNA, 25 bp, Homo sapien
tcactctcaataggcctctggcctg

SEQ ID NO: 5229065 - DNA, 25 bp, Homo sapien
cattatctttgttttgccttcccct

SEQ ID NO: 5229066 - DNA, 25 bp, Homo sapien
ttcttgagctaccacactcttgtgt

SEQ ID NO: 5229067 - DNA, 25 bp, Homo sapien
tttcttgagctaccacactcttgtg

SEQ ID NO: 5229068 - DNA, 25 bp, Homo sapien
ctttttcttgagctaccacactctt

SEQ ID NO: 5229069 - DNA, 25 bp, Homo sapien
gacaggcattttaattgcctccatc

SEQ ID NO: 5229070 - DNA, 25 bp, Homo sapien
tctggtaccaaatgcctgacaggca

SEQ ID NO: 5229071 - DNA, 25 bp, Homo sapien
gtgtccccaggagtcgagtctatca

SEQ ID NO: 5229072 - DNA, 25 bp, Homo sapien
tttaattgcctccatccaagtgtgt

SEQ ID NO: 5229073 - DNA, 25 bp, Homo sapien
cccgcagtggcgaacaggaaaataa

SEQ ID NO: 5229074 - DNA, 25 bp, Homo sapien
tgcagaatccttctccgggagcatt

SEQ ID NO: 5229075 - DNA, 25 bp, Homo sapien
gaagctgcaaattagaagtccccgc

SEQ ID NO: 5229076 - DNA, 25 bp, Homo sapien
cattcactgacaataggatgcagcc

SEQ ID NO: 5229077 - DNA, 25 bp, Homo sapien
tgcagtacttgaatatttaggaagc

SEQ ID NO: 5229078 - DNA, 25 bp, Homo sapien
gcacatcctatgaaaaacgaattga

SEQ ID NO: 5229079 - DNA, 25 bp, Homo sapien
tctgagattacataaagcacatcct

SEQ ID NO: 5229080 - DNA, 25 bp, Homo sapien
gcctggaggtctgtagcacaaaaaa

SEQ ID NO: 5229081 - DNA, 25 bp, Homo sapien
aatgcttcctcggttagagacaagc

SEQ ID NO: 5229082 - DNA, 25 bp, Homo sapien
gagtagctcccaatcaatgcttcct

SEQ ID NO: 5229083 - DNA, 25 bp, Homo sapien
atcaatgcttcctcggttagagaca

SEQ ID NO: 5229084 - DNA, 25 bp, Homo sapien
ttcctcggttagagacaagctgaag

SEQ ID NO: 5229085 - DNA, 25 bp, Homo sapien
ggattcaagtgcattcatggcaaga

SEQ ID NO: 5229086 - DNA, 25 bp, Homo sapien
tgtaaaatgcttcggactgacagtc

SEQ ID NO: 5229087 - DNA, 25 bp, Homo sapien
caacaatactgagtcattcctgggc

SEQ ID NO: 5229088 - DNA, 25 bp, Homo sapien
ggcccaggatcaagtggattcaagt

SEQ ID NO: 5229089 - DNA, 25 bp, Homo sapien
tagtttctaaggacattgctcatgc

SEQ ID NO: 5229090 - DNA, 25 bp, Homo sapien
gagagagaactagccccttaagcaa

SEQ ID NO: 5229091 - DNA, 25 bp, Homo sapien
gcttgatgatgcaaagaagaccagt

SEQ ID NO: 5229092 - DNA, 25 bp, Homo sapien
agaccagtgctgtccattatggaaa

SEQ ID NO: 5229093 - DNA, 25 bp, Homo sapien
cctaggatgcctgggtgaaggttct

SEQ ID NO: 5229094 - DNA, 25 bp, Homo sapien
cagaaagctgttcactgtaggaggt

SEQ ID NO: 5229095 - DNA, 25 bp, Homo sapien
taataatgaccatgaagaggaggac

SEQ ID NO: 5229096 - DNA, 25 bp, Homo sapien
gagatagaaaacgaacaacttgggc

SEQ ID NO: 5229097 - DNA, 25 bp, Homo sapien
aaggagctccagtcaaaccaaaagg

SEQ ID NO: 5229098 - DNA, 25 bp, Homo sapien
tgtaatggagcaaaactgcacacct

SEQ ID NO: 5229099 - DNA, 25 bp, Homo sapien
cactgggagacacgaatatagccta

SEQ ID NO: 5229100 - DNA, 25 bp, Homo sapien
cagaacagaggcgagaatagcaaca

SEQ ID NO: 5229101 - DNA, 25 bp, Homo sapien
aaacatgtgttgacaccaaaatcac

SEQ ID NO: 5229102 - DNA, 25 bp, Homo sapien
tccaaacatgtgttgacaccaaaat

SEQ ID NO: 5229103 - DNA, 25 bp, Homo sapien
ctttccaaacatgtgttgacaccaa

SEQ ID NO: 5229104 - DNA, 25 bp, Homo sapien
caaacatgtgttgacaccaaaatca

SEQ ID NO: 5229105 - DNA, 25 bp, Homo sapien
ctaaggaagattttggaggcacttt

SEQ ID NO: 5229106 - DNA, 25 bp, Homo sapien
atttcacctttagcaggggctttgg

SEQ ID NO: 5229107 - DNA, 25 bp, Homo sapien
gatttcacctttagcaggggctttg

SEQ ID NO: 5229108 - DNA, 25 bp, Homo sapien
tttcacctttagcaggggctttggc

SEQ ID NO: 5229109 - DNA, 25 bp, Homo sapien
agtgtagagctcttctccgctagcc

SEQ ID NO: 5229110 - DNA, 25 bp, Homo sapien
aattccaagacaccaagtgtagagc

SEQ ID NO: 5229111 - DNA, 25 bp, Homo sapien
tccccacggcaactagtgacttgca

SEQ ID NO: 5229112 - DNA, 25 bp, Homo sapien
tgagctccttgatccatccatctgg

SEQ ID NO: 5229113 - DNA, 25 bp, Homo sapien
ttaagggtgatctccagctgatttg

SEQ ID NO: 5229114 - DNA, 25 bp, Homo sapien
gagtttacaattaagggtgatctcc

SEQ ID NO: 5229115 - DNA, 25 bp, Homo sapien
tacaattaagggtgatctccagctg

SEQ ID NO: 5229116 - DNA, 25 bp, Homo sapien
tggagtcttgcggaagagtttacaa

SEQ ID NO: 5229117 - DNA, 25 bp, Homo sapien
agttcgttgtgtcgtgttctcaaag

SEQ ID NO: 5229118 - DNA, 25 bp, Homo sapien
aaaatataaagttcgttgtgtcgtg

SEQ ID NO: 5229119 - DNA, 25 bp, Homo sapien
ttgtgtcgtgttctcaaagggttga

SEQ ID NO: 5229120 - DNA, 25 bp, Homo sapien
tataaagttcgttgtgtcgtgttct

SEQ ID NO: 5229121 - DNA, 25 bp, Homo sapien
tcagagttgctaaccactgcactgt

SEQ ID NO: 5229122 - DNA, 25 bp, Homo sapien
gtgcccggccgaaaaatatgtgaat

SEQ ID NO: 5229123 - DNA, 25 bp, Homo sapien
taaggcatgataagatcctggacag

SEQ ID NO: 5229124 - DNA, 25 bp, Homo sapien
gattctgcataggagagtcatatca

SEQ ID NO: 5229125 - DNA, 25 bp, Homo sapien
gctggtaatacagctctgaacatca

SEQ ID NO: 5229126 - DNA, 25 bp, Homo sapien
gggctggtaatacagctctgaacat

SEQ ID NO: 5229127 - DNA, 25 bp, Homo sapien
ggtaatacagctctgaacatcatag

SEQ ID NO: 5229128 - DNA, 25 bp, Homo sapien
gttctaggggctggtaatacagctc

SEQ ID NO: 5229129 - DNA, 25 bp, Homo sapien
gatataaacactcatcaagtgcttc

SEQ ID NO: 5229130 - DNA, 25 bp, Homo sapien
tgaagtagtaatcagtgcaagtcaa

SEQ ID NO: 5229131 - DNA, 25 bp, Homo sapien
aatgttggggtattgtggttctact

SEQ ID NO: 5229132 - DNA, 25 bp, Homo sapien
caagtgcttctcctaggaatattat

SEQ ID NO: 5229133 - DNA, 25 bp, Homo sapien
caaagggtctatgtcttgtctctct

SEQ ID NO: 5229134 - DNA, 25 bp, Homo sapien
ccctgcaaagggtctatgtcttgtc

SEQ ID NO: 5229135 - DNA, 25 bp, Homo sapien
gggtctatgtcttgtctctctaggc

SEQ ID NO: 5229136 - DNA, 25 bp, Homo sapien
tgcaaagggtctatgtcttgtctct

SEQ ID NO: 5229137 - DNA, 25 bp, Homo sapien
gctttctggccaatgtgcagacaga

SEQ ID NO: 5229138 - DNA, 25 bp, Homo sapien
tgtccccagtttattgcctgcacag

SEQ ID NO: 5229139 - DNA, 25 bp, Homo sapien
tggagcaaagatggcccagcttctg

SEQ ID NO: 5229140 - DNA, 25 bp, Homo sapien
tcatgcccttctccggtgtggctgg

SEQ ID NO: 5229141 - DNA, 25 bp, Homo sapien
tatgaatctgagtggtgagctttga

SEQ ID NO: 5229142 - DNA, 25 bp, Homo sapien
tattgtgccaccagaaatgttagtt

SEQ ID NO: 5229143 - DNA, 25 bp, Homo sapien
aaacatctattgatatcagggtgag

SEQ ID NO: 5229144 - DNA, 25 bp, Homo sapien
cagggtgagatattacacttgactt

SEQ ID NO: 5229145 - DNA, 25 bp, Homo sapien
tcaatgccttgttatttctcctgca

SEQ ID NO: 5229146 - DNA, 25 bp, Homo sapien
ttcaatgccttgttatttctcctgc

SEQ ID NO: 5229147 - DNA, 25 bp, Homo sapien
caatgccttgttatttctcctgcaa

SEQ ID NO: 5229148 - DNA, 25 bp, Homo sapien
tcttcaatgccttgttatttctcct

SEQ ID NO: 5229149 - DNA, 25 bp, Homo sapien
gctccgccttgatccttaatctcag

SEQ ID NO: 5229150 - DNA, 25 bp, Homo sapien
tctgttagcggtgctgaggtccagt

SEQ ID NO: 5229151 - DNA, 25 bp, Homo sapien
tgcttcatctttccgttcatctgcc

SEQ ID NO: 5229152 - DNA, 25 bp, Homo sapien
tgggaatccattggcgcttcggaca

SEQ ID NO: 5229153 - DNA, 25 bp, Homo sapien
agctctccgttgatcccattctctt

SEQ ID NO: 5229154 - DNA, 25 bp, Homo sapien
aggtcagctctccgttgatcccatt

SEQ ID NO: 5229155 - DNA, 25 bp, Homo sapien
gaggtcagctctccgttgatcccat

SEQ ID NO: 5229156 - DNA, 25 bp, Homo sapien
tgcagatccacccttgaatgctaaa

SEQ ID NO: 5229157 - DNA, 25 bp, Homo sapien
tctagccccggatgcctaaccttta

SEQ ID NO: 5229158 - DNA, 25 bp, Homo sapien
ccagatgcttcgcagtgaggctgtg

SEQ ID NO: 5229159 - DNA, 25 bp, Homo sapien
ttctcactctttctagccccggatg

SEQ ID NO: 5229160 - DNA, 25 bp, Homo sapien
gattgaagctaatccccacaaccag

SEQ ID NO: 5229161 - DNA, 25 bp, Homo sapien
taaaatatcaaacgctgtggctggc

SEQ ID NO: 5229162 - DNA, 25 bp, Homo sapien
caaccagcttcacctagtagagaga

SEQ ID NO: 5229163 - DNA, 25 bp, Homo sapien
tagagagaccacataggacaaagca

SEQ ID NO: 5229164 - DNA, 25 bp, Homo sapien
tacttgaacgtgcaaaggttcacca

SEQ ID NO: 5229165 - DNA, 25 bp, Homo sapien
gattacttgaacgtgcaaaggttca

SEQ ID NO: 5229166 - DNA, 25 bp, Homo sapien
gctatgattacttgaacgtgcaaag

SEQ ID NO: 5229167 - DNA, 25 bp, Homo sapien
aacgtgcaaaggttcaccaattaga

SEQ ID NO: 5229168 - DNA, 25 bp, Homo sapien
agctgcagtctggtctttatgttga

SEQ ID NO: 5229169 - DNA, 25 bp, Homo sapien
cagtgactacttgaactatccttgc

SEQ ID NO: 5229170 - DNA, 25 bp, Homo sapien
ttcaggactgctacagcctcagcag

SEQ ID NO: 5229171 - DNA, 25 bp, Homo sapien
cagtctggtctttatgttgagcttc

SEQ ID NO: 5229172 - DNA, 25 bp, Homo sapien
gagaaggaggcagattagctgtttc

SEQ ID NO: 5229173 - DNA, 25 bp, Homo sapien
gactaagtcggagaaccagtaatgg

SEQ ID NO: 5229174 - DNA, 25 bp, Homo sapien
taaatttgctatgagtcaggccctg

SEQ ID NO: 5229175 - DNA, 25 bp, Homo sapien
taacaggtctcaacaggaaagagtc

SEQ ID NO: 5229176 - DNA, 25 bp, Homo sapien
gttgaaacaacaatggagccctagt

SEQ ID NO: 5229177 - DNA, 25 bp, Homo sapien
gacttgacctcaagccgacttttgg

SEQ ID NO: 5229178 - DNA, 25 bp, Homo sapien
tacaagggtcatgtcaggcttcccg

SEQ ID NO: 5229179 - DNA, 25 bp, Homo sapien
tgtcaacatcatatccctctctggg

SEQ ID NO: 5229180 - DNA, 25 bp, Homo sapien
aggcttcccgctgcattcagaatga

SEQ ID NO: 5229181 - DNA, 25 bp, Homo sapien
tctagaataagcacatatcctggga

SEQ ID NO: 5229182 - DNA, 25 bp, Homo sapien
taaagttgctttgagggtatcaagg

SEQ ID NO: 5229183 - DNA, 25 bp, Homo sapien
gaaacagtagtttgtctagaccaca

SEQ ID NO: 5229184 - DNA, 25 bp, Homo sapien
tctggaaagttgacacctaagttac

SEQ ID NO: 5229185 - DNA, 25 bp, Homo sapien
gatgcgcgatgattaggtcaccaca

SEQ ID NO: 5229186 - DNA, 25 bp, Homo sapien
aacaccaccctagaattctggagca

SEQ ID NO: 5229187 - DNA, 25 bp, Homo sapien
ccagcttttgactgaggacttctca

SEQ ID NO: 5229188 - DNA, 25 bp, Homo sapien
tgctgactgttactgctgccccaga

SEQ ID NO: 5229189 - DNA, 25 bp, Homo sapien
gatctggcctacaacactgactgaa

SEQ ID NO: 5229190 - DNA, 25 bp, Homo sapien
gcacgatttcgcagctgagcagata

SEQ ID NO: 5229191 - DNA, 25 bp, Homo sapien
gacgttacatctcaggcctatgtgg

SEQ ID NO: 5229192 - DNA, 25 bp, Homo sapien
ctgactgaatcatagccctggcttg

SEQ ID NO: 5229193 - DNA, 25 bp, Homo sapien
tacaattagctaaaaatttctgcag

SEQ ID NO: 5229194 - DNA, 25 bp, Homo sapien
tgaaggttaactctactcatgctta

SEQ ID NO: 5229195 - DNA, 25 bp, Homo sapien
taacgcctgtaagattatgaagaaa

SEQ ID NO: 5229196 - DNA, 25 bp, Homo sapien
taattatctaggatgcacaagtagt

SEQ ID NO: 5229197 - DNA, 25 bp, Homo sapien
tctactcatgcttagatcaatatgt

SEQ ID NO: 5229198 - DNA, 25 bp, Homo sapien
tatcccttaagcaagtttgccattg

SEQ ID NO: 5229199 - DNA, 25 bp, Homo sapien
tggacaacacagacacaagatcaga

SEQ ID NO: 5229200 - DNA, 25 bp, Homo sapien
gaattccacctatcccttaagcaag

SEQ ID NO: 5229201 - DNA, 25 bp, Homo sapien
aaacaaacacctacacaagggcagg

SEQ ID NO: 5229202 - DNA, 25 bp, Homo sapien
ctacaaacagacacacaggaagaaa

SEQ ID NO: 5229203 - DNA, 25 bp, Homo sapien
cacacaggaagaaactgcagggaga

SEQ ID NO: 5229204 - DNA, 25 bp, Homo sapien
acaaacagacacacaggaagaaact

SEQ ID NO: 5229205 - DNA, 25 bp, Homo sapien
gacacacaggaagaaactgcaggga

SEQ ID NO: 5229206 - DNA, 25 bp, Homo sapien
gcacactagaggtggtccgttctga

SEQ ID NO: 5229207 - DNA, 25 bp, Homo sapien
ctgcactctgcgctgtgacactggg

SEQ ID NO: 5229208 - DNA, 25 bp, Homo sapien
cctcatcggaattgtaagggtcatc

SEQ ID NO: 5229209 - DNA, 25 bp, Homo sapien
cgttctgagctgaacaaaggatgct

SEQ ID NO: 5229210 - DNA, 25 bp, Homo sapien
taaggcacacttaacatgatgtagg

SEQ ID NO: 5229211 - DNA, 25 bp, Homo sapien
gaagtgctcacatgcctctagtaag

SEQ ID NO: 5229212 - DNA, 25 bp, Homo sapien
cagctgattattggcagggagcaga

SEQ ID NO: 5229213 - DNA, 25 bp, Homo sapien
gcagaaagaagccatactttaatgg

SEQ ID NO: 5229214 - DNA, 25 bp, Homo sapien
caccaaggaaagataattgagtggc

SEQ ID NO: 5229215 - DNA, 25 bp, Homo sapien
tgagtggcaatcaaacggccaaaat

SEQ ID NO: 5229216 - DNA, 25 bp, Homo sapien
ccatttggtcacttaaggaattaga

SEQ ID NO: 5229217 - DNA, 25 bp, Homo sapien
taattgtgcattgtttaaacggccc

SEQ ID NO: 5229218 - DNA, 25 bp, Homo sapien
tgttttcgccaatgcaggaagcccc

SEQ ID NO: 5229219 - DNA, 25 bp, Homo sapien
tgattacccttattggaaacggcag

SEQ ID NO: 5229220 - DNA, 25 bp, Homo sapien
taagagatggtactgccggataaca

SEQ ID NO: 5229221 - DNA, 25 bp, Homo sapien
cctacataagaattcccggctgctt

SEQ ID NO: 5229222 - DNA, 25 bp, Homo sapien
ttggtctgaggacttagcagcccca

SEQ ID NO: 5229223 - DNA, 25 bp, Homo sapien
ttgggcctccgcactagactccatt

SEQ ID NO: 5229224 - DNA, 25 bp, Homo sapien
gggcactctcttcgggaactatttg

SEQ ID NO: 5229225 - DNA, 25 bp, Homo sapien
tcagccatccgactctctagcgttt

SEQ ID NO: 5229226 - DNA, 25 bp, Homo sapien
taagccactggagagatcatttgca

SEQ ID NO: 5229227 - DNA, 25 bp, Homo sapien
taagacccagcgatgaaatagcgaa

SEQ ID NO: 5229228 - DNA, 25 bp, Homo sapien
tcagcctggctgcaaagcgtattgt

SEQ ID NO: 5229229 - DNA, 25 bp, Homo sapien
caatccttggagcatgactaactgg

SEQ ID NO: 5229230 - DNA, 25 bp, Homo sapien
tcctgttgatcgtggaactccatct

SEQ ID NO: 5229231 - DNA, 25 bp, Homo sapien
ggtcaatgccaggtactacaaggct

SEQ ID NO: 5229232 - DNA, 25 bp, Homo sapien
ctaaggcagcatgtttaaggtcttc

SEQ ID NO: 5229233 - DNA, 25 bp, Homo sapien
ctcagctgtagagggagtcaattcc

SEQ ID NO: 5229234 - DNA, 25 bp, Homo sapien
gcatttcgatgaaccagtccttttg

SEQ ID NO: 5229235 - DNA, 25 bp, Homo sapien
catgacatctaaaggaagagtgaag

SEQ ID NO: 5229236 - DNA, 25 bp, Homo sapien
tttccctcatgggagtcagagggcc

SEQ ID NO: 5229237 - DNA, 25 bp, Homo sapien
gacttggcatgggagaatcaaactg

SEQ ID NO: 5229238 - DNA, 25 bp, Homo sapien
gtaagtataggttcctgtccactgg

SEQ ID NO: 5229239 - DNA, 25 bp, Homo sapien
agtagctgggccactggtttgttgc

SEQ ID NO: 5229240 - DNA, 25 bp, Homo sapien
gggcaaagggcgatgtttctgtaac

SEQ ID NO: 5229241 - DNA, 25 bp, Homo sapien
aaaactatctttggcagtagctggg

SEQ ID NO: 5229242 - DNA, 25 bp, Homo sapien
tctgtgcgagagtgctgtaccctgc

SEQ ID NO: 5229243 - DNA, 25 bp, Homo sapien
gaggagaaagatcatgtccccgacc

SEQ ID NO: 5229244 - DNA, 25 bp, Homo sapien
caatcttgaccttgtgcctgccaga

SEQ ID NO: 5229245 - DNA, 25 bp, Homo sapien
tcaccagagatatgcgcggatgctt

SEQ ID NO: 5229246 - DNA, 25 bp, Homo sapien
taacatctagttgaccctggacagc

SEQ ID NO: 5229247 - DNA, 25 bp, Homo sapien
ggtcatgtcctgtgtagcctcaagt

SEQ ID NO: 5229248 - DNA, 25 bp, Homo sapien
tctagggctgcaaaacgcacgctgt

SEQ ID NO: 5229249 - DNA, 25 bp, Homo sapien
tgtttagccctgaagccatctgtcc

SEQ ID NO: 5229250 - DNA, 25 bp, Homo sapien
atgatctccgagcttccttttcagc

SEQ ID NO: 5229251 - DNA, 25 bp, Homo sapien
cttttctatgtttctcaagagatga

SEQ ID NO: 5229252 - DNA, 25 bp, Homo sapien
tttctaactgttctgtcatgatgct

SEQ ID NO: 5229253 - DNA, 25 bp, Homo sapien
gagactgtgctaggttcctttttag

SEQ ID NO: 5229254 - DNA, 25 bp, Homo sapien
cactgttaggcagttctgcaaaaaa

SEQ ID NO: 5229255 - DNA, 25 bp, Homo sapien
gtaataatgaattacttcaaaaaca

SEQ ID NO: 5229256 - DNA, 25 bp, Homo sapien
tgttaggcagttctgcaaaaaagta

SEQ ID NO: 5229257 - DNA, 25 bp, Homo sapien
ttaaagaagtgattgttaaatgaac

SEQ ID NO: 5229258 - DNA, 25 bp, Homo sapien
tgtggttttccgcttaacacaggag

SEQ ID NO: 5229259 - DNA, 25 bp, Homo sapien
gagagtgggcctgaacttctgtttt

SEQ ID NO: 5229260 - DNA, 25 bp, Homo sapien
caggagagatgagttggtctagtat

SEQ ID NO: 5229261 - DNA, 25 bp, Homo sapien
ggagagtgggcctgaacttctgttt

SEQ ID NO: 5229262 - DNA, 25 bp, Homo sapien
tgtttgccagtcacattgcagaatt

SEQ ID NO: 5229263 - DNA, 25 bp, Homo sapien
tatgtttgccagtcacattgcagaa

SEQ ID NO: 5229264 - DNA, 25 bp, Homo sapien
ctatgtttgccagtcacattgcaga

SEQ ID NO: 5229265 - DNA, 25 bp, Homo sapien
ttgcctgtttaaatacactgggagc

SEQ ID NO: 5229266 - DNA, 25 bp, Homo sapien
tgtttaaatacactgggagccagag

SEQ ID NO: 5229267 - DNA, 25 bp, Homo sapien
cactgggagccagagctgattcccc

SEQ ID NO: 5229268 - DNA, 25 bp, Homo sapien
taaatacactgggagccagagctga

SEQ ID NO: 5229269 - DNA, 25 bp, Homo sapien
gcatcacgtaatatacccttgtaac

SEQ ID NO: 5229270 - DNA, 25 bp, Homo sapien
ctcagcatcacgtaatatacccttg

SEQ ID NO: 5229271 - DNA, 25 bp, Homo sapien
tcacgtaatatacccttgtaacaag

SEQ ID NO: 5229272 - DNA, 25 bp, Homo sapien
cagcatcacgtaatatacccttgta

SEQ ID NO: 5229273 - DNA, 25 bp, Homo sapien
caggaatctttgacaaggtagaatt

SEQ ID NO: 5229274 - DNA, 25 bp, Homo sapien
aaagcaggaatctttgacaaggtag

SEQ ID NO: 5229275 - DNA, 25 bp, Homo sapien
agcaggaatctttgacaaggtagaa

SEQ ID NO: 5229276 - DNA, 25 bp, Homo sapien
ctgtaaagcaggaatctttgacaag

SEQ ID NO: 5229277 - DNA, 25 bp, Homo sapien
tatggcaaacggtctgtggagcctg

SEQ ID NO: 5229278 - DNA, 25 bp, Homo sapien
gctgaggtgggctgtattaataaac

SEQ ID NO: 5229279 - DNA, 25 bp, Homo sapien
ttttagtcgtgctagggcaggctga

SEQ ID NO: 5229280 - DNA, 25 bp, Homo sapien
aactgtcagaaaatgtagccctttt

SEQ ID NO: 5229281 - DNA, 25 bp, Homo sapien
cattgggttcttgtaactctttaat

SEQ ID NO: 5229282 - DNA, 25 bp, Homo sapien
tataacttagaaagagtgcatattt

SEQ ID NO: 5229283 - DNA, 25 bp, Homo sapien
cctcctgtgctaataaatgaatttc

SEQ ID NO: 5229284 - DNA, 25 bp, Homo sapien
tatacgaagtgatattgattttgct

SEQ ID NO: 5229285 - DNA, 25 bp, Homo sapien
cgcttttctgggctcttggttactc

SEQ ID NO: 5229286 - DNA, 25 bp, Homo sapien
tttctgggctcttggttactccgtc

SEQ ID NO: 5229287 - DNA, 25 bp, Homo sapien
gtcttgggagagaagagcgcttttc

SEQ ID NO: 5229288 - DNA, 25 bp, Homo sapien
gagagaagagcgcttttctgggctc

SEQ ID NO: 5229289 - DNA, 25 bp, Homo sapien
agaagagatagaactgttgagagag

SEQ ID NO: 5229290 - DNA, 25 bp, Homo sapien
tggtggtccgccgtgctgaagaaga

SEQ ID NO: 5229291 - DNA, 25 bp, Homo sapien
ttgagagagaaggaattctcatctc

SEQ ID NO: 5229292 - DNA, 25 bp, Homo sapien
gagagaaggaattctcatctctgtc

SEQ ID NO: 5229293 - DNA, 25 bp, Homo sapien
tcactcggcaccaagatggcagact

SEQ ID NO: 5229294 - DNA, 25 bp, Homo sapien
tgatggcgaccttcttctcactcgg

SEQ ID NO: 5229295 - DNA, 25 bp, Homo sapien
taagccgaagctgcttgggagtcgc

SEQ ID NO: 5229296 - DNA, 25 bp, Homo sapien
cctggtgtgcgtgaagaataacttg

SEQ ID NO: 5229297 - DNA, 25 bp, Homo sapien
tcttcctaatgtaaagtccaaactc

SEQ ID NO: 5229298 - DNA, 25 bp, Homo sapien
gcaataaattgtaaccaagctcttt

SEQ ID NO: 5229299 - DNA, 25 bp, Homo sapien
ggcagcaaatatgtgttcatgcaat

SEQ ID NO: 5229300 - DNA, 25 bp, Homo sapien
cgttgtatttcagaggctatcttcc

SEQ ID NO: 5229301 - DNA, 25 bp, Homo sapien
tatcaacacgaatacctcccctttg

SEQ ID NO: 5229302 - DNA, 25 bp, Homo sapien
tccttattttggagtaaacatgagg

SEQ ID NO: 5229303 - DNA, 25 bp, Homo sapien
ccctttgcaacatttaggcaatagt

SEQ ID NO: 5229304 - DNA, 25 bp, Homo sapien
tagtagccagaattgaaactcggtg

SEQ ID NO: 5229305 - DNA, 25 bp, Homo sapien
aagtcatcattgctgaagtaggata

SEQ ID NO: 5229306 - DNA, 25 bp, Homo sapien
taggataattttgtagcaggttaac

SEQ ID NO: 5229307 - DNA, 25 bp, Homo sapien
ctcataactccactgttgtggattt

SEQ ID NO: 5229308 - DNA, 25 bp, Homo sapien
aattttgtagcaggttaacacttgc

SEQ ID NO: 5229309 - DNA, 25 bp, Homo sapien
taattagcatttaaagggcctacaa

SEQ ID NO: 5229310 - DNA, 25 bp, Homo sapien
ttgcctagattgcagagaccatgcc

SEQ ID NO: 5229311 - DNA, 25 bp, Homo sapien
gcctacaaataatccgagggtaaca

SEQ ID NO: 5229312 - DNA, 25 bp, Homo sapien
catgttaatagcacccagtagacct

SEQ ID NO: 5229313 - DNA, 25 bp, Homo sapien
cacacgtcagctcaacgtggtgaga

SEQ ID NO: 5229314 - DNA, 25 bp, Homo sapien
aaacagggttgctctaggaaaggat

SEQ ID NO: 5229315 - DNA, 25 bp, Homo sapien
ggcatccattaggtacgaacctagg

SEQ ID NO: 5229316 - DNA, 25 bp, Homo sapien
acctaggttgcaacaccgtttctct

SEQ ID NO: 5229317 - DNA, 25 bp, Homo sapien
ggccagactctgctatattctatac

SEQ ID NO: 5229318 - DNA, 25 bp, Homo sapien
agccagaggtctcagcaattctgat

SEQ ID NO: 5229319 - DNA, 25 bp, Homo sapien
tagggtgctctcattccaatttgag

SEQ ID NO: 5229320 - DNA, 25 bp, Homo sapien
tgttattatctctccctagggtgct

SEQ ID NO: 5229321 - DNA, 25 bp, Homo sapien
ttgtgttattgtcgttatttgttca

SEQ ID NO: 5229322 - DNA, 25 bp, Homo sapien
tactttggctacttctactctcttc

SEQ ID NO: 5229323 - DNA, 25 bp, Homo sapien
gacacataagcaatataagcatgga

SEQ ID NO: 5229324 - DNA, 25 bp, Homo sapien
cttttggaggacacataagcaatat

SEQ ID NO: 5229325 - DNA, 25 bp, Homo sapien
aactttgctaaaatcgatcttcttg

SEQ ID NO: 5229326 - DNA, 25 bp, Homo sapien
gctaaaatcgatcttcttgtttaaa

SEQ ID NO: 5229327 - DNA, 25 bp, Homo sapien
cccagccgaatgtttgatgttatcc

SEQ ID NO: 5229328 - DNA, 25 bp, Homo sapien
tggaaccacatctggactgaacttt

SEQ ID NO: 5229329 - DNA, 25 bp, Homo sapien
gaaattctagactcgacaccctgta

SEQ ID NO: 5229330 - DNA, 25 bp, Homo sapien
caagtagccaaagagttagtagaca

SEQ ID NO: 5229331 - DNA, 25 bp, Homo sapien
aatggagctagaaaaatatgtgccc

SEQ ID NO: 5229332 - DNA, 25 bp, Homo sapien
agtatatcagtctttgcctcatggg

SEQ ID NO: 5229333 - DNA, 25 bp, Homo sapien
aagcagattatgacacaggaggata

SEQ ID NO: 5229334 - DNA, 25 bp, Homo sapien
caagaagaccaacgttaagatacaa

SEQ ID NO: 5229335 - DNA, 25 bp, Homo sapien
tggtccattgtcatctgcacgagag

SEQ ID NO: 5229336 - DNA, 25 bp, Homo sapien
tgcacgagagtacttgggaattact

SEQ ID NO: 5229337 - DNA, 25 bp, Homo sapien
agagagccacatttggatgtcacat

SEQ ID NO: 5229338 - DNA, 25 bp, Homo sapien
gagagccacatttggatgtcacatg

SEQ ID NO: 5229339 - DNA, 25 bp, Homo sapien
cctgtggcggatgttcttcagagag

SEQ ID NO: 5229340 - DNA, 25 bp, Homo sapien
ctggcctgtggcggatgttcttcag

SEQ ID NO: 5229341 - DNA, 25 bp, Homo sapien
ttttccccaatgaagatgccttgaa

SEQ ID NO: 5229342 - DNA, 25 bp, Homo sapien
gactacgtatttcaaaggagctcca

SEQ ID NO: 5229343 - DNA, 25 bp, Homo sapien
ggagctccaataagcgtgttgagta

SEQ ID NO: 5229344 - DNA, 25 bp, Homo sapien
gagaaaatctcccagtaactatgaa

SEQ ID NO: 5229345 - DNA, 25 bp, Homo sapien
tttctgatgaagtccctctagaaat

SEQ ID NO: 5229346 - DNA, 25 bp, Homo sapien
aggaagcttaagaagtctatttctg

SEQ ID NO: 5229347 - DNA, 25 bp, Homo sapien
caggagcagtaattgtgaaagacta

SEQ ID NO: 5229348 - DNA, 25 bp, Homo sapien
gcaactgttagagaatccagatatc

SEQ ID NO: 5229349 - DNA, 25 bp, Homo sapien
cataaagtgcatcttgcttgggagt

SEQ ID NO: 5229350 - DNA, 25 bp, Homo sapien
tgcaattttggattcttgttgctca

SEQ ID NO: 5229351 - DNA, 25 bp, Homo sapien
ctgatggaccgtatggaaatatgaa

SEQ ID NO: 5229352 - DNA, 25 bp, Homo sapien
ttgaaaaaatgcctgatggaccgta

SEQ ID NO: 5229353 - DNA, 25 bp, Homo sapien
cacctccaggtacatgatgagcatt

SEQ ID NO: 5229354 - DNA, 25 bp, Homo sapien
tacactctcaattttcacacgtccg

SEQ ID NO: 5229355 - DNA, 25 bp, Homo sapien
ctagttttacactctcaattttcac

SEQ ID NO: 5229356 - DNA, 25 bp, Homo sapien
ggtacatgatgagcattatcaagag

SEQ ID NO: 5229357 - DNA, 25 bp, Homo sapien
tgcttccagacgaggagacattgct

SEQ ID NO: 5229358 - DNA, 25 bp, Homo sapien
tgtaatgatctcagccccatggtcc

SEQ ID NO: 5229359 - DNA, 25 bp, Homo sapien
cccatggtccacacgggctttagca

SEQ ID NO: 5229360 - DNA, 25 bp, Homo sapien
tcacaagccctgcttagcgagtgca

SEQ ID NO: 5229361 - DNA, 25 bp, Homo sapien
agagctcatgcctaaatattattat

SEQ ID NO: 5229362 - DNA, 25 bp, Homo sapien
gagctcatgcctaaatattattatt

SEQ ID NO: 5229363 - DNA, 25 bp, Homo sapien
aagagctcatgcctaaatattatta

SEQ ID NO: 5229364 - DNA, 25 bp, Homo sapien
caattgaacccatgtaaagccagtg

SEQ ID NO: 5229365 - DNA, 25 bp, Homo sapien
ctgttgcaaatggaaatcaggtcaa

SEQ ID NO: 5229366 - DNA, 25 bp, Homo sapien
cagaatagtgaaatgagcagcttgg

SEQ ID NO: 5229367 - DNA, 25 bp, Homo sapien
gaatgtagtggatagccttcaggca

SEQ ID NO: 5229368 - DNA, 25 bp, Homo sapien
cacgagtccatcctaatgaaagtgc

SEQ ID NO: 5229369 - DNA, 25 bp, Homo sapien
tcagacacgagtccatcctaatgaa

SEQ ID NO: 5229370 - DNA, 25 bp, Homo sapien
gacacgagtccatcctaatgaaagt

SEQ ID NO: 5229371 - DNA, 25 bp, Homo sapien
cgagtccatcctaatgaaagtgcat

SEQ ID NO: 5229372 - DNA, 25 bp, Homo sapien
tatctggcactaaaacagggttacg

SEQ ID NO: 5229373 - DNA, 25 bp, Homo sapien
gacacaaatctagctgatcaactga

SEQ ID NO: 5229374 - DNA, 25 bp, Homo sapien
tagcatcacgggagagacttgtatc

SEQ ID NO: 5229375 - DNA, 25 bp, Homo sapien
gaagtatcacaaatggccacagaga

SEQ ID NO: 5229376 - DNA, 25 bp, Homo sapien
tgaaggcaagataggttctacccct

SEQ ID NO: 5229377 - DNA, 25 bp, Homo sapien
caaagagatcatacgcctagtggac

SEQ ID NO: 5229378 - DNA, 25 bp, Homo sapien
aaaagtgtccatctagcctggtagc

SEQ ID NO: 5229379 - DNA, 25 bp, Homo sapien
tgggtcaccaaaaagcacctgtgtc

SEQ ID NO: 5229380 - DNA, 25 bp, Homo sapien
tagatctagaattgagaccacgaag

SEQ ID NO: 5229381 - DNA, 25 bp, Homo sapien
gccgtacctagctggtgttacacag

SEQ ID NO: 5229382 - DNA, 25 bp, Homo sapien
tggttgcaagtgacccagaggttga

SEQ ID NO: 5229383 - DNA, 25 bp, Homo sapien
tcctaaatgaacgtggcctttgaaa

SEQ ID NO: 5229384 - DNA, 25 bp, Homo sapien
gagagtcttggccttcacctacaca

SEQ ID NO: 5229385 - DNA, 25 bp, Homo sapien
cagtgtgttggaacctcggaatccc

SEQ ID NO: 5229386 - DNA, 25 bp, Homo sapien
tcggaatcccagcatacagagtata

SEQ ID NO: 5229387 - DNA, 25 bp, Homo sapien
ggctgattattccacgcttgctgta

SEQ ID NO: 5229388 - DNA, 25 bp, Homo sapien
actatgcagaggtggatacatccca

SEQ ID NO: 5229389 - DNA, 25 bp, Homo sapien
tcactcccactatgcagaggtggat

SEQ ID NO: 5229390 - DNA, 25 bp, Homo sapien
cccactatgcagaggtggatacatc

SEQ ID NO: 5229391 - DNA, 25 bp, Homo sapien
gggtcactcccactatgcagaggtg

SEQ ID NO: 5229392 - DNA, 25 bp, Homo sapien
cttgagccgcaggggtacggcccaa

SEQ ID NO: 5229393 - DNA, 25 bp, Homo sapien
tgagccgcaggggtacggcccaaga

SEQ ID NO: 5229394 - DNA, 25 bp, Homo sapien
agccgcaggggtacggcccaagaag

SEQ ID NO: 5229395 - DNA, 25 bp, Homo sapien
gcaggggtacggcccaagaagtcca

SEQ ID NO: 5229396 - DNA, 25 bp, Homo sapien
ctgcacggccggagaagcgaatccg

SEQ ID NO: 5229397 - DNA, 25 bp, Homo sapien
gcccgcgccgggctgcacggccgga

SEQ ID NO: 5229398 - DNA, 25 bp, Homo sapien
cgggctgcacggccggagaagcgaa

SEQ ID NO: 5229399 - DNA, 25 bp, Homo sapien
cgcgccgggctgcacggccggagaa

SEQ ID NO: 5229400 - DNA, 25 bp, Homo sapien
tcggagcagcggtccgcctcgccgc

SEQ ID NO: 5229401 - DNA, 25 bp, Homo sapien
ggggcgctcggagcagcggtccgcc

SEQ ID NO: 5229402 - DNA, 25 bp, Homo sapien
gagccgcggagcgaggaggggggcg

SEQ ID NO: 5229403 - DNA, 25 bp, Homo sapien
gctcggagcagcggtccgcctcgcc

SEQ ID NO: 5229404 - DNA, 25 bp, Homo sapien
gctctctccgccctgatcccccgtg

SEQ ID NO: 5229405 - DNA, 25 bp, Homo sapien
agccggctctctccgccctgatccc

SEQ ID NO: 5229406 - DNA, 25 bp, Homo sapien
gagccggctctctccgccctgatcc

SEQ ID NO: 5229407 - DNA, 25 bp, Homo sapien
ccggctctctccgccctgatccccc

SEQ ID NO: 5229408 - DNA, 25 bp, Homo sapien
cccgggagtcctactgcaggaccca

SEQ ID NO: 5229409 - DNA, 25 bp, Homo sapien
agctctgtctcctcgctagccgccg

SEQ ID NO: 5229410 - DNA, 25 bp, Homo sapien
gctcccgggagtcctactgcaggac

SEQ ID NO: 5229411 - DNA, 25 bp, Homo sapien
ggctcccgggagtcctactgcagga

SEQ ID NO: 5229412 - DNA, 25 bp, Homo sapien
tggtttgccgccacaggaaggtctg

SEQ ID NO: 5229413 - DNA, 25 bp, Homo sapien
ggtttgccgccacaggaaggtctgg

SEQ ID NO: 5229414 - DNA, 25 bp, Homo sapien
ctgctcctggccctcggagctcttc

SEQ ID NO: 5229415 - DNA, 25 bp, Homo sapien
tgctcctggccctcggagctcttcc

SEQ ID NO: 5229416 - DNA, 25 bp, Homo sapien
ttgcttccccagtttgggcctcaaa

SEQ ID NO: 5229417 - DNA, 25 bp, Homo sapien
cacaagaagcttcatattgcttccc

SEQ ID NO: 5229418 - DNA, 25 bp, Homo sapien
catattgcttccccagtttgggcct

SEQ ID NO: 5229419 - DNA, 25 bp, Homo sapien
tattgcttccccagtttgggcctca

SEQ ID NO: 5229420 - DNA, 25 bp, Homo sapien
cagttcccatctggaaatgctctgg

SEQ ID NO: 5229421 - DNA, 25 bp, Homo sapien
aagcagcttgcaccagttcccatct

SEQ ID NO: 5229422 - DNA, 25 bp, Homo sapien
tgtttcggtttgaaagcagggttgc

SEQ ID NO: 5229423 - DNA, 25 bp, Homo sapien
gaggccatgcagcttgttttctacc

SEQ ID NO: 5229424 - DNA, 25 bp, Homo sapien
ttttggacttccctactggccgcaa

SEQ ID NO: 5229425 - DNA, 25 bp, Homo sapien
ctgctagcagggctcattcttgctt

SEQ ID NO: 5229426 - DNA, 25 bp, Homo sapien
tactggccgcaatctctgcagaatg

SEQ ID NO: 5229427 - DNA, 25 bp, Homo sapien
gctagcagggctcattcttgctttt

SEQ ID NO: 5229428 - DNA, 25 bp, Homo sapien
agaaacacgaagagctccacagtag

SEQ ID NO: 5229429 - DNA, 25 bp, Homo sapien
gctgccctggagaaccctggttttc

SEQ ID NO: 5229430 - DNA, 25 bp, Homo sapien
aaaccgctcattgttgcagtcctgg

SEQ ID NO: 5229431 - DNA, 25 bp, Homo sapien
tcaacctggtggatgaaagcactgc

SEQ ID NO: 5229432 - DNA, 25 bp, Homo sapien
ggcttcaccagtgcggtaaagccag

SEQ ID NO: 5229433 - DNA, 25 bp, Homo sapien
tgtgttcccacatgggctgccatat

SEQ ID NO: 5229434 - DNA, 25 bp, Homo sapien
ccagacggaaggtgaggtcagattc

SEQ ID NO: 5229435 - DNA, 25 bp, Homo sapien
taatgatgttcctgatgggcttcac

SEQ ID NO: 5229436 - DNA, 25 bp, Homo sapien
tgactgttgataggagaacttctct

SEQ ID NO: 5229437 - DNA, 25 bp, Homo sapien
gcatcttgatttggtgattcacagg

SEQ ID NO: 5229438 - DNA, 25 bp, Homo sapien
caggtccggctttgactgttgatag

SEQ ID NO: 5229439 - DNA, 25 bp, Homo sapien
ggtgattcacaggtccggctttgac

SEQ ID NO: 5229440 - DNA, 25 bp, Homo sapien
taaaagttgcacattcagaaaggag

SEQ ID NO: 5229441 - DNA, 25 bp, Homo sapien
catacgactgataaaaaacctgaag

SEQ ID NO: 5229442 - DNA, 25 bp, Homo sapien
tcacactacactatgtccaaggact

SEQ ID NO: 5229443 - DNA, 25 bp, Homo sapien
ggctttgagcctggtagtgattcta

SEQ ID NO: 5229444 - DNA, 25 bp, Homo sapien
atactagtcgtatatggtcttattt

SEQ ID NO: 5229445 - DNA, 25 bp, Homo sapien
gataaaatactagtcgtatatggtc

SEQ ID NO: 5229446 - DNA, 25 bp, Homo sapien
caccgagataaaatactagtcgtat

SEQ ID NO: 5229447 - DNA, 25 bp, Homo sapien
ccgagataaaatactagtcgtatat

SEQ ID NO: 5229448 - DNA, 25 bp, Homo sapien
tagccattgagataaagcacaactc

SEQ ID NO: 5229449 - DNA, 25 bp, Homo sapien
aatctgggatgtaatgataactaac

SEQ ID NO: 5229450 - DNA, 25 bp, Homo sapien
acttattgagtgttacatgttagcc

SEQ ID NO: 5229451 - DNA, 25 bp, Homo sapien
gatatgttatttaatctgggatgta

SEQ ID NO: 5229452 - DNA, 25 bp, Homo sapien
cagaggtgaactgaatagaagcatg

SEQ ID NO: 5229453 - DNA, 25 bp, Homo sapien
aatagaagcaccaggttagtagtac

SEQ ID NO: 5229454 - DNA, 25 bp, Homo sapien
tacacatcaagaattcatcatacag

SEQ ID NO: 5229455 - DNA, 25 bp, Homo sapien
tccatacccagtatctataggagag

SEQ ID NO: 5229456 - DNA, 25 bp, Homo sapien
gaatgtttcacaaaccacctggagt

SEQ ID NO: 5229457 - DNA, 25 bp, Homo sapien
ggaatgtttcacaaaccacctggag

SEQ ID NO: 5229458 - DNA, 25 bp, Homo sapien
ctggaatgtttcacaaaccacctgg

SEQ ID NO: 5229459 - DNA, 25 bp, Homo sapien
atgtttcacaaaccacctggagtcc

SEQ ID NO: 5229460 - DNA, 25 bp, Homo sapien
aatgtgatgggcctctttcctggga

SEQ ID NO: 5229461 - DNA, 25 bp, Homo sapien
tgggaggacagacttccatcaaagg

SEQ ID NO: 5229462 - DNA, 25 bp, Homo sapien
atcaaaggagtttcctcggtgacag

SEQ ID NO: 5229463 - DNA, 25 bp, Homo sapien
tggccttgggtgagatggaatcaga

SEQ ID NO: 5229464 - DNA, 25 bp, Homo sapien
tcatggtgggaagtgaaaggtgctt

SEQ ID NO: 5229465 - DNA, 25 bp, Homo sapien
tcagcctggttttattgtctatgtc

SEQ ID NO: 5229466 - DNA, 25 bp, Homo sapien
gggcatgcaagtccaaagtccagca

SEQ ID NO: 5229467 - DNA, 25 bp, Homo sapien
gcagcactccattagggactctgtg

SEQ ID NO: 5229468 - DNA, 25 bp, Homo sapien
gcagttgggacccacggcaccaagt

SEQ ID NO: 5229469 - DNA, 25 bp, Homo sapien
gtagttgggcttccgatcagggtca

SEQ ID NO: 5229470 - DNA, 25 bp, Homo sapien
cgagtccggcagtttgctgtagttg

SEQ ID NO: 5229471 - DNA, 25 bp, Homo sapien
aaactctggattcgagtccggcagt

SEQ ID NO: 5229472 - DNA, 25 bp, Homo sapien
ctgtagttgggcttccgatcagggt

SEQ ID NO: 5229473 - DNA, 25 bp, Homo sapien
ttcccgcaggtttcgcaggcgaagg

SEQ ID NO: 5229474 - DNA, 25 bp, Homo sapien
cttggagcgccaggaaggcgtccca

SEQ ID NO: 5229475 - DNA, 25 bp, Homo sapien
gaggtcagttctgccgccttgaaac

SEQ ID NO: 5229476 - DNA, 25 bp, Homo sapien
gcattccttattgcagtattggcag

SEQ ID NO: 5229477 - DNA, 25 bp, Homo sapien
ggccattcgggagaaggttcgagcg

SEQ ID NO: 5229478 - DNA, 25 bp, Homo sapien
ccattcgggagaaggttcgagcgca

SEQ ID NO: 5229479 - DNA, 25 bp, Homo sapien
ctggtacttcttgacgtccaagtgg

SEQ ID NO: 5229480 - DNA, 25 bp, Homo sapien
acttcttgacgtccaagtgggtctg

SEQ ID NO: 5229481 - DNA, 25 bp, Homo sapien
ggcagggtgtctggtagggagagga

SEQ ID NO: 5229482 - DNA, 25 bp, Homo sapien
agggtgtctggtagggagaggaaga

SEQ ID NO: 5229483 - DNA, 25 bp, Homo sapien
gcgggggcagggtgtctggtaggga

SEQ ID NO: 5229484 - DNA, 25 bp, Homo sapien
cgggggcagggtgtctggtagggag

SEQ ID NO: 5229485 - DNA, 25 bp, Homo sapien
ccagttcaagaatgcccccaagctg

SEQ ID NO: 5229486 - DNA, 25 bp, Homo sapien
catccacagacatggccacgggaag

SEQ ID NO: 5229487 - DNA, 25 bp, Homo sapien
atggttttcatcaaagtcccgtgcg

SEQ ID NO: 5229488 - DNA, 25 bp, Homo sapien
aaagccagttcaagaatgcccccaa

SEQ ID NO: 5229489 - DNA, 25 bp, Homo sapien
ttaggctctgacacgtcctggtgtc

SEQ ID NO: 5229490 - DNA, 25 bp, Homo sapien
ctctgacacgtcctggtgtcagcca

SEQ ID NO: 5229491 - DNA, 25 bp, Homo sapien
ctggtgtcagccaccgccttcgaag

SEQ ID NO: 5229492 - DNA, 25 bp, Homo sapien
accgccttcgaaggccccatggctg

SEQ ID NO: 5229493 - DNA, 25 bp, Homo sapien
gaagctgaaatagctgctcaggccc

SEQ ID NO: 5229494 - DNA, 25 bp, Homo sapien
gatacattgggcagaccagagcacc

SEQ ID NO: 5229495 - DNA, 25 bp, Homo sapien
tgggaaacaggtgccaaccacacca

SEQ ID NO: 5229496 - DNA, 25 bp, Homo sapien
taggccaccgacaagtgacaaccat

SEQ ID NO: 5229497 - DNA, 25 bp, Homo sapien
agataattatactgacaatcaagct

SEQ ID NO: 5229498 - DNA, 25 bp, Homo sapien
attatactgacaatcaagctttcag

SEQ ID NO: 5229499 - DNA, 25 bp, Homo sapien
taattatactgacaatcaagctttc

SEQ ID NO: 5229500 - DNA, 25 bp, Homo sapien
atactgacaatcaagctttcagagg

SEQ ID NO: 5229501 - DNA, 25 bp, Homo sapien
ttggcacggaggtatcacaagagag

SEQ ID NO: 5229502 - DNA, 25 bp, Homo sapien
tttggcacggaggtatcacaagaga

SEQ ID NO: 5229503 - DNA, 25 bp, Homo sapien
tggcacggaggtatcacaagagagg

SEQ ID NO: 5229504 - DNA, 25 bp, Homo sapien
caacatgtgtcgcagcctttgtaga

SEQ ID NO: 5229505 - DNA, 25 bp, Homo sapien
gaacagcaacgtcaaagtaggtggc

SEQ ID NO: 5229506 - DNA, 25 bp, Homo sapien
agaggaatatctggctccggaggct

SEQ ID NO: 5229507 - DNA, 25 bp, Homo sapien
tgagtgccttcctcagaccaatggg

SEQ ID NO: 5229508 - DNA, 25 bp, Homo sapien
agagatttttcctcctcgttacact

SEQ ID NO: 5229509 - DNA, 25 bp, Homo sapien
gcagattggtcagtgaaaccttgga

SEQ ID NO: 5229510 - DNA, 25 bp, Homo sapien
gatttttcctcctcgttacacttca

SEQ ID NO: 5229511 - DNA, 25 bp, Homo sapien
ctgggactgcagatctacgcagatt

SEQ ID NO: 5229512 - DNA, 25 bp, Homo sapien
tttctcaattcctcgcctgtcttct

SEQ ID NO: 5229513 - DNA, 25 bp, Homo sapien
ctcggtcttctttgcggctcttgaa

SEQ ID NO: 5229514 - DNA, 25 bp, Homo sapien
gtcctcgtgaagcaggaagggcact

SEQ ID NO: 5229515 - DNA, 25 bp, Homo sapien
aatggagcctttcctctctcggtct

SEQ ID NO: 5229516 - DNA, 25 bp, Homo sapien
atgaataagagcaccccacaagagg

SEQ ID NO: 5229517 - DNA, 25 bp, Homo sapien
ctgggatgaataagagcaccccaca

SEQ ID NO: 5229518 - DNA, 25 bp, Homo sapien
tgaataagagcaccccacaagaggg

SEQ ID NO: 5229519 - DNA, 25 bp, Homo sapien
ggatgaataagagcaccccacaaga

SEQ ID NO: 5229520 - DNA, 25 bp, Homo sapien
gggagtgggaatgcctggcgctcag

SEQ ID NO: 5229521 - DNA, 25 bp, Homo sapien
tccggcaggtcgcttaccagggtgt

SEQ ID NO: 5229522 - DNA, 25 bp, Homo sapien
aatgcctggcgctcagactctccat

SEQ ID NO: 5229523 - DNA, 25 bp, Homo sapien
gtgggaatgcctggcgctcagactc

SEQ ID NO: 5229524 - DNA, 25 bp, Homo sapien
gtgatggtggagatctgagatcgca

SEQ ID NO: 5229525 - DNA, 25 bp, Homo sapien
tgtgatggtggagatctgagatcgc

SEQ ID NO: 5229526 - DNA, 25 bp, Homo sapien
ctgtgatggtggagatctgagatcg

SEQ ID NO: 5229527 - DNA, 25 bp, Homo sapien
tgcatagcctacgttgaatgacgcc

SEQ ID NO: 5229528 - DNA, 25 bp, Homo sapien
tacgttgaatgacgccaaagtggta

SEQ ID NO: 5229529 - DNA, 25 bp, Homo sapien
tgacgccaaagtggtattgaaggtc

SEQ ID NO: 5229530 - DNA, 25 bp, Homo sapien
cattgaaaaagtctgcatagcctac

SEQ ID NO: 5229531 - DNA, 25 bp, Homo sapien
taggttagcacatgccagaggttca

SEQ ID NO: 5229532 - DNA, 25 bp, Homo sapien
gtcaatatgttctgtgtcctctagg

SEQ ID NO: 5229533 - DNA, 25 bp, Homo sapien
gacaaagttattggtcccgtcaata

SEQ ID NO: 5229534 - DNA, 25 bp, Homo sapien
tcatgtggcatctccgggataggca

SEQ ID NO: 5229535 - DNA, 25 bp, Homo sapien
tgtttagcgccacgtcacagatacg

SEQ ID NO: 5229536 - DNA, 25 bp, Homo sapien
ggacaagataaacagccttcagaac

SEQ ID NO: 5229537 - DNA, 25 bp, Homo sapien
cacagatacgagagctgatgtcatg

SEQ ID NO: 5229538 - DNA, 25 bp, Homo sapien
gggcaccacaccaagttgaagcaag

SEQ ID NO: 5229539 - DNA, 25 bp, Homo sapien
agcagggcctccgaatccacaggtg

SEQ ID NO: 5229540 - DNA, 25 bp, Homo sapien
aggtggaacttccagatactccttt

SEQ ID NO: 5229541 - DNA, 25 bp, Homo sapien
gaatccacaggtggaacttccagat

SEQ ID NO: 5229542 - DNA, 25 bp, Homo sapien
gcctccgaatccacaggtggaactt

SEQ ID NO: 5229543 - DNA, 25 bp, Homo sapien
cttctcttggttcttatcattcttc

SEQ ID NO: 5229544 - DNA, 25 bp, Homo sapien
ctcttggttcttatcattcttctca

SEQ ID NO: 5229545 - DNA, 25 bp, Homo sapien
tcattcttctcataagggccgcctc

SEQ ID NO: 5229546 - DNA, 25 bp, Homo sapien
tatcattcttctcataagggccgcc

SEQ ID NO: 5229547 - DNA, 25 bp, Homo sapien
gaacaccctctgttgctagagaata

SEQ ID NO: 5229548 - DNA, 25 bp, Homo sapien
tataagtatagacttctctgttaga

SEQ ID NO: 5229549 - DNA, 25 bp, Homo sapien
tccttgactgctgttagacaaccac

SEQ ID NO: 5229550 - DNA, 25 bp, Homo sapien
ttatatccttgactgctgttagaca

SEQ ID NO: 5229551 - DNA, 25 bp, Homo sapien
cattgttagagcaagcctatggttg

SEQ ID NO: 5229552 - DNA, 25 bp, Homo sapien
gcctatggttgcttacaggtgtact

SEQ ID NO: 5229553 - DNA, 25 bp, Homo sapien
tagagcaagcctatggttgcttaca

SEQ ID NO: 5229554 - DNA, 25 bp, Homo sapien
ttgatgagcattgttagagcaagcc

SEQ ID NO: 5229555 - DNA, 25 bp, Homo sapien
tctcagacgatctccagagagccct

SEQ ID NO: 5229556 - DNA, 25 bp, Homo sapien
attctctcggaatacctggtgtctc

SEQ ID NO: 5229557 - DNA, 25 bp, Homo sapien
tacctggtgtctcagacgatctcca

SEQ ID NO: 5229558 - DNA, 25 bp, Homo sapien
ttcaccacaaccataggcacatccc

SEQ ID NO: 5229559 - DNA, 25 bp, Homo sapien
tgaccggctccatacaaaatcctag

SEQ ID NO: 5229560 - DNA, 25 bp, Homo sapien
tagcaaagcatgcaagaagtccact

SEQ ID NO: 5229561 - DNA, 25 bp, Homo sapien
catagtccctcatggtttgtcggaa

SEQ ID NO: 5229562 - DNA, 25 bp, Homo sapien
gagagtccttgttcacatagtccct

SEQ ID NO: 5229563 - DNA, 25 bp, Homo sapien
aagctcctaaataacccctcaatgg

SEQ ID NO: 5229564 - DNA, 25 bp, Homo sapien
tgccccaggtttaataatctctagg

SEQ ID NO: 5229565 - DNA, 25 bp, Homo sapien
taggagtaaggcagtacttggcacc

SEQ ID NO: 5229566 - DNA, 25 bp, Homo sapien
cagagcctttactgtgataaaacca

SEQ ID NO: 5229567 - DNA, 25 bp, Homo sapien
acatggcgctgacgataatgccttc

SEQ ID NO: 5229568 - DNA, 25 bp, Homo sapien
aattcatgtgtggttgaagcgcagc

SEQ ID NO: 5229569 - DNA, 25 bp, Homo sapien
tgtgatgagggatttaaacatggcg

SEQ ID NO: 5229570 - DNA, 25 bp, Homo sapien
ttctcagggctgtgcaattcatgtg

SEQ ID NO: 5229571 - DNA, 25 bp, Homo sapien
tgaactcgactacaaactgaaggtg

SEQ ID NO: 5229572 - DNA, 25 bp, Homo sapien
cattatgacttactggtgacaccgg

SEQ ID NO: 5229573 - DNA, 25 bp, Homo sapien
gaaagattccaaactcaccagagag

SEQ ID NO: 5229574 - DNA, 25 bp, Homo sapien
tattttacgagccaacaagctgtgc

SEQ ID NO: 5229575 - DNA, 25 bp, Homo sapien
tcggcactgtcaagcagagcgctga

SEQ ID NO: 5229576 - DNA, 25 bp, Homo sapien
tttccctggtgctaacttctcggca

SEQ ID NO: 5229577 - DNA, 25 bp, Homo sapien
agcgctgagggccactctcctgaag

SEQ ID NO: 5229578 - DNA, 25 bp, Homo sapien
tttactgcctgcaggcttagattcc

SEQ ID NO: 5229579 - DNA, 25 bp, Homo sapien
tgcagctacaccacaccagtgaaac

SEQ ID NO: 5229580 - DNA, 25 bp, Homo sapien
tactgaacaggatcatatggcatca

SEQ ID NO: 5229581 - DNA, 25 bp, Homo sapien
cagtgaaaccacttacgcaagataa

SEQ ID NO: 5229582 - DNA, 25 bp, Homo sapien
tcagcacaggaaccacacaaacagt

SEQ ID NO: 5229583 - DNA, 25 bp, Homo sapien
tcctcaggtgcagaggatacctggc

SEQ ID NO: 5229584 - DNA, 25 bp, Homo sapien
tctgtgaggggcgaccagacatgaa

SEQ ID NO: 5229585 - DNA, 25 bp, Homo sapien
atccacaatgcttcccgcctctgac

SEQ ID NO: 5229586 - DNA, 25 bp, Homo sapien
gacattcctcaggtgcagaggatac

SEQ ID NO: 5229587 - DNA, 25 bp, Homo sapien
ttctaggcctattgggatcatgaaa

SEQ ID NO: 5229588 - DNA, 25 bp, Homo sapien
tctaggcctattgggatcatgaaaa

SEQ ID NO: 5229589 - DNA, 25 bp, Homo sapien
cttctaggcctattgggatcatgaa

SEQ ID NO: 5229590 - DNA, 25 bp, Homo sapien
cttgaacatcttacgccagaaatct

SEQ ID NO: 5229591 - DNA, 25 bp, Homo sapien
cacgtcggtcagaggtggtccctga

SEQ ID NO: 5229592 - DNA, 25 bp, Homo sapien
tccctgagtgggcagtcgtgcattc

SEQ ID NO: 5229593 - DNA, 25 bp, Homo sapien
ccagaaatctttccgccccaagttg

SEQ ID NO: 5229594 - DNA, 25 bp, Homo sapien
gtcggtccacagagctaatgtccag

SEQ ID NO: 5229595 - DNA, 25 bp, Homo sapien
ccacagagctaatgtccaggaggtc

SEQ ID NO: 5229596 - DNA, 25 bp, Homo sapien
gatgaaagagagtcggtccacagag

SEQ ID NO: 5229597 - DNA, 25 bp, Homo sapien
agctttgcctgatgaaagagagtcg

SEQ ID NO: 5229598 - DNA, 25 bp, Homo sapien
agaaagcttcacagcactagtgaat

SEQ ID NO: 5229599 - DNA, 25 bp, Homo sapien
cttcagaaagcttcacagcactagt

SEQ ID NO: 5229600 - DNA, 25 bp, Homo sapien
gcttcacagcactagtgaatttgac

SEQ ID NO: 5229601 - DNA, 25 bp, Homo sapien
aagcttcacagcactagtgaatttg

SEQ ID NO: 5229602 - DNA, 25 bp, Homo sapien
cgcttgaagaaattctcctcttcat

SEQ ID NO: 5229603 - DNA, 25 bp, Homo sapien
gacgcttgaagaaattctcctcttc

SEQ ID NO: 5229604 - DNA, 25 bp, Homo sapien
ttccattttccatgccacttcctgg

SEQ ID NO: 5229605 - DNA, 25 bp, Homo sapien
caagacgcttgaagaaattctcctc

SEQ ID NO: 5229606 - DNA, 25 bp, Homo sapien
cagaaattggaagcgtttcatgcct

SEQ ID NO: 5229607 - DNA, 25 bp, Homo sapien
ggattgctccaagattcaccacgtt

SEQ ID NO: 5229608 - DNA, 25 bp, Homo sapien
catcaggaattgtccctggctcaca

SEQ ID NO: 5229609 - DNA, 25 bp, Homo sapien
tggctcacagcagtttaacagaaat

SEQ ID NO: 5229610 - DNA, 25 bp, Homo sapien
cacaatgggagagcgtccccgggaa

SEQ ID NO: 5229611 - DNA, 25 bp, Homo sapien
tcttggtgatgttcacgtggtgccc

SEQ ID NO: 5229612 - DNA, 25 bp, Homo sapien
tctccccattggtagaagagcttgg

SEQ ID NO: 5229613 - DNA, 25 bp, Homo sapien
ccagttgccacggttgcagcggtga

SEQ ID NO: 5229614 - DNA, 25 bp, Homo sapien
tctcttcatcgtaaatgagacccag

SEQ ID NO: 5229615 - DNA, 25 bp, Homo sapien
ttccccgtggcacagctcattcaat

SEQ ID NO: 5229616 - DNA, 25 bp, Homo sapien
gtaaatgagacccagcaggttggct

SEQ ID NO: 5229617 - DNA, 25 bp, Homo sapien
agctcattcaatcggacgccaattg

SEQ ID NO: 5229618 - DNA, 25 bp, Homo sapien
tcttgtagtaaagggagtctcctta

SEQ ID NO: 5229619 - DNA, 25 bp, Homo sapien
ttacacccatgcacagggaaaaggg

SEQ ID NO: 5229620 - DNA, 25 bp, Homo sapien
agagaagtattaagtgctcctaaag

SEQ ID NO: 5229621 - DNA, 25 bp, Homo sapien
caaaatctcttctaggacagtaaat

SEQ ID NO: 5229622 - DNA, 25 bp, Homo sapien
tttccacaactatagtgcctcagag

SEQ ID NO: 5229623 - DNA, 25 bp, Homo sapien
cagaggctcagtgcgaggtctgggc

SEQ ID NO: 5229624 - DNA, 25 bp, Homo sapien
caggcaagaaaaggtctctcgcagg

SEQ ID NO: 5229625 - DNA, 25 bp, Homo sapien
caggaaggtggtaatctccagaaga

SEQ ID NO: 5229626 - DNA, 25 bp, Homo sapien
tcttcaaggcaaaggggcaaccgca

SEQ ID NO: 5229627 - DNA, 25 bp, Homo sapien
tgagtcttcattttcgtccaggacc

SEQ ID NO: 5229628 - DNA, 25 bp, Homo sapien
tcctctcatatctgtgccggtccaa

SEQ ID NO: 5229629 - DNA, 25 bp, Homo sapien
cctgcatctgatttgagagtgtggc

SEQ ID NO: 5229630 - DNA, 25 bp, Homo sapien
gatccaaacgaagtctgcagctctc

SEQ ID NO: 5229631 - DNA, 25 bp, Homo sapien
actgcgggttcctttaatctggagc

SEQ ID NO: 5229632 - DNA, 25 bp, Homo sapien
gagtcctgccgtgataacttgctgc

SEQ ID NO: 5229633 - DNA, 25 bp, Homo sapien
acccggcgaatgctggacaaggaac

SEQ ID NO: 5229634 - DNA, 25 bp, Homo sapien
tgctgctctttaagctgccgacccg

SEQ ID NO: 5229635 - DNA, 25 bp, Homo sapien
gtccctgcacaccccactcctctat

SEQ ID NO: 5229636 - DNA, 25 bp, Homo sapien
ccctgcacaccccactcctctatgt

SEQ ID NO: 5229637 - DNA, 25 bp, Homo sapien
cctgcacaccccactcctctatgtt

SEQ ID NO: 5229638 - DNA, 25 bp, Homo sapien
tgcacaccccactcctctatgttac

SEQ ID NO: 5229639 - DNA, 25 bp, Homo sapien
tccgcgccggcattactcattccct

SEQ ID NO: 5229640 - DNA, 25 bp, Homo sapien
ttctgtggtaattctcctccgcgcc

SEQ ID NO: 5229641 - DNA, 25 bp, Homo sapien
cattccctctggctcaatgctgggc

SEQ ID NO: 5229642 - DNA, 25 bp, Homo sapien
gctgggctcgcttgcactccaagga

SEQ ID NO: 5229643 - DNA, 25 bp, Homo sapien
tgctcagctcaagtcttggactcca

SEQ ID NO: 5229644 - DNA, 25 bp, Homo sapien
gagtttccctgggatcacctcctgc

SEQ ID NO: 5229645 - DNA, 25 bp, Homo sapien
ccatcttagagtgtccttgccccag

SEQ ID NO: 5229646 - DNA, 25 bp, Homo sapien
ggctcaccctcggacatacgacatt

SEQ ID NO: 5229647 - DNA, 25 bp, Homo sapien
taatatcatcaaggatcactgatca

SEQ ID NO: 5229648 - DNA, 25 bp, Homo sapien
taagttcaacatcaatatgggtgtg

SEQ ID NO: 5229649 - DNA, 25 bp, Homo sapien
ggttgccacaaacctatagtctgta

SEQ ID NO: 5229650 - DNA, 25 bp, Homo sapien
gcgatatctccaaagcacagtagag

SEQ ID NO: 5229651 - DNA, 25 bp, Homo sapien
gacttgaaaacatttccacttcttc

SEQ ID NO: 5229652 - DNA, 25 bp, Homo sapien
tctcctctggccaatcatcttcaac

SEQ ID NO: 5229653 - DNA, 25 bp, Homo sapien
tagaacttgaaccttactgtacagt

SEQ ID NO: 5229654 - DNA, 25 bp, Homo sapien
gtgggacacctttaatgccagccca

SEQ ID NO: 5229655 - DNA, 25 bp, Homo sapien
cagtagtcaacgtgagtgcagatga

SEQ ID NO: 5229656 - DNA, 25 bp, Homo sapien
gatggcagtagtcaacgtgagtgca

SEQ ID NO: 5229657 - DNA, 25 bp, Homo sapien
cagatgaaactctgctgattgcaca

SEQ ID NO: 5229658 - DNA, 25 bp, Homo sapien
caacgtgagtgcagatgaaactctg

SEQ ID NO: 5229659 - DNA, 25 bp, Homo sapien
tctgtttcttgccccggagagccac

SEQ ID NO: 5229660 - DNA, 25 bp, Homo sapien
gctctgaccagtcgggcacaggagc

SEQ ID NO: 5229661 - DNA, 25 bp, Homo sapien
gagtagcttgatggctctgaccagt

SEQ ID NO: 5229662 - DNA, 25 bp, Homo sapien
gtccacactgtctccatagagtagc

SEQ ID NO: 5229663 - DNA, 25 bp, Homo sapien
tgaagtctgatgtacttcagcattc

SEQ ID NO: 5229664 - DNA, 25 bp, Homo sapien
tcttctttagagaaggtgtcctcag

SEQ ID NO: 5229665 - DNA, 25 bp, Homo sapien
tccagattggcatctgaaactctct

SEQ ID NO: 5229666 - DNA, 25 bp, Homo sapien
tctgatgtacttcagcattccggaa

SEQ ID NO: 5229667 - DNA, 25 bp, Homo sapien
ttagtaaataggctgtctggagtcc

SEQ ID NO: 5229668 - DNA, 25 bp, Homo sapien
catgaatccttctgatccaggtaac

SEQ ID NO: 5229669 - DNA, 25 bp, Homo sapien
ccaactgatgttgtatgtcccaaac

SEQ ID NO: 5229670 - DNA, 25 bp, Homo sapien
gggctttatgccaacactgtaccaa

SEQ ID NO: 5229671 - DNA, 25 bp, Homo sapien
tcagaattggtgctgccttgattaa

SEQ ID NO: 5229672 - DNA, 25 bp, Homo sapien
catctcctctgtcagaattggtgct

SEQ ID NO: 5229673 - DNA, 25 bp, Homo sapien
tcctctgtcagaattggtgctgcct

SEQ ID NO: 5229674 - DNA, 25 bp, Homo sapien
tctgtcagaattggtgctgccttga

SEQ ID NO: 5229675 - DNA, 25 bp, Homo sapien
cacagtctccgggtggtggaactct

SEQ ID NO: 5229676 - DNA, 25 bp, Homo sapien
tgtggaacttgaggacagcgttcag

SEQ ID NO: 5229677 - DNA, 25 bp, Homo sapien
ctgatagcgaaacctccagagcgtg

SEQ ID NO: 5229678 - DNA, 25 bp, Homo sapien
tccatccggggccagacctgatagc

SEQ ID NO: 5229679 - DNA, 25 bp, Homo sapien
gtaactcctctgtgagaagtatccc

SEQ ID NO: 5229680 - DNA, 25 bp, Homo sapien
aatgtaactcctctgtgagaagtat

SEQ ID NO: 5229681 - DNA, 25 bp, Homo sapien
tgggttgggtttgctaatgtaactc

SEQ ID NO: 5229682 - DNA, 25 bp, Homo sapien
tgtaactcctctgtgagaagtatcc

SEQ ID NO: 5229683 - DNA, 25 bp, Homo sapien
caaacattgggacggatggcattcc

SEQ ID NO: 5229684 - DNA, 25 bp, Homo sapien
gcattccaagcaccggcgagggaag

SEQ ID NO: 5229685 - DNA, 25 bp, Homo sapien
tgcactgaggaacccacggtgggtc

SEQ ID NO: 5229686 - DNA, 25 bp, Homo sapien
ttaatggggtcctggacactcccgc

SEQ ID NO: 5229687 - DNA, 25 bp, Homo sapien
accatggaacctggaagtgtctgtt

SEQ ID NO: 5229688 - DNA, 25 bp, Homo sapien
ccatggaacctggaagtgtctgtta

SEQ ID NO: 5229689 - DNA, 25 bp, Homo sapien
catggaacctggaagtgtctgttac

SEQ ID NO: 5229690 - DNA, 25 bp, Homo sapien
tattaattgttctcttttacacgta

SEQ ID NO: 5229691 - DNA, 25 bp, Homo sapien
cacaaatattaattgttctctttta

SEQ ID NO: 5229692 - DNA, 25 bp, Homo sapien
aatattaattgttctcttttacacg

SEQ ID NO: 5229693 - DNA, 25 bp, Homo sapien
caaatattaattgttctcttttaca

SEQ ID NO: 5229694 - DNA, 25 bp, Homo sapien
gaggctggcttctctaccaagtcgt

SEQ ID NO: 5229695 - DNA, 25 bp, Homo sapien
tcttccggttctgagttgggcgtgc

SEQ ID NO: 5229696 - DNA, 25 bp, Homo sapien
ccctttgatgggagcgggacacagc

SEQ ID NO: 5229697 - DNA, 25 bp, Homo sapien
tgcatgtgggctcatagcaagcctc

SEQ ID NO: 5229698 - DNA, 25 bp, Homo sapien
tgaccagactgacccgcggcggaag

SEQ ID NO: 5229699 - DNA, 25 bp, Homo sapien
gggatgccagattggtgacttcttc

SEQ ID NO: 5229700 - DNA, 25 bp, Homo sapien
cagcactgacggctgaacgcactga

SEQ ID NO: 5229701 - DNA, 25 bp, Homo sapien
ggatggactcacagacagtcgacgg

SEQ ID NO: 5229702 - DNA, 25 bp, Homo sapien
gatgcatgctgggaacactgcttgt

SEQ ID NO: 5229703 - DNA, 25 bp, Homo sapien
cgtgtgttcagtggtatgttcctca

SEQ ID NO: 5229704 - DNA, 25 bp, Homo sapien
gaagtactgctgcacagatgcatgc

SEQ ID NO: 5229705 - DNA, 25 bp, Homo sapien
cacatggtggttcggcgtgtgttca

SEQ ID NO: 5229706 - DNA, 25 bp, Homo sapien
aagttgaacatttgtctttaatgga

SEQ ID NO: 5229707 - DNA, 25 bp, Homo sapien
gaaagttgaacatttgtctttaatg

SEQ ID NO: 5229708 - DNA, 25 bp, Homo sapien
agaaagaaagttgaacatttgtctt

SEQ ID NO: 5229709 - DNA, 25 bp, Homo sapien
gttgaacatttgtctttaatggagt

SEQ ID NO: 5229710 - DNA, 25 bp, Homo sapien
tccagaaaatgtcgaagaaccgttg

SEQ ID NO: 5229711 - DNA, 25 bp, Homo sapien
caattagacagttccataagacttg

SEQ ID NO: 5229712 - DNA, 25 bp, Homo sapien
ttagacagttccataagacttgttg

SEQ ID NO: 5229713 - DNA, 25 bp, Homo sapien
ccgttgatggatcttcaattagaca

SEQ ID NO: 5229714 - DNA, 25 bp, Homo sapien
attcaagagaagtttgcgcagcatg

SEQ ID NO: 5229715 - DNA, 25 bp, Homo sapien
caagagaagtttgcgcagcatgtac

SEQ ID NO: 5229716 - DNA, 25 bp, Homo sapien
tgcgcagcatgtacattaactcatc

SEQ ID NO: 5229717 - DNA, 25 bp, Homo sapien
gaagtttgcgcagcatgtacattaa

SEQ ID NO: 5229718 - DNA, 25 bp, Homo sapien
taaatgctggacaccctaaggaggg

SEQ ID NO: 5229719 - DNA, 25 bp, Homo sapien
caacctacatgcctgtcagtgcagc

SEQ ID NO: 5229720 - DNA, 25 bp, Homo sapien
tagaaagtcctatgggttaaagtgc

SEQ ID NO: 5229721 - DNA, 25 bp, Homo sapien
gaaagaatcagtgtcgcaaacctaa

SEQ ID NO: 5229722 - DNA, 25 bp, Homo sapien
actcgcagggggtccgcacaaagta

SEQ ID NO: 5229723 - DNA, 25 bp, Homo sapien
ggcattgaagcggtcaccaggagct

SEQ ID NO: 5229724 - DNA, 25 bp, Homo sapien
tgtcagggtggctgaaatggcatcc

SEQ ID NO: 5229725 - DNA, 25 bp, Homo sapien
ttcttcatcgtctgcttgagatcct

SEQ ID NO: 5229726 - DNA, 25 bp, Homo sapien
tgtccatgaactaccaaggttttag

SEQ ID NO: 5229727 - DNA, 25 bp, Homo sapien
ggatatcgcactcattctgtccatg

SEQ ID NO: 5229728 - DNA, 25 bp, Homo sapien
aactgggttgggatatcgcactcat

SEQ ID NO: 5229729 - DNA, 25 bp, Homo sapien
cttcatggactggtaactgggttgg

SEQ ID NO: 5229730 - DNA, 25 bp, Homo sapien
gataaggttccatcgtttatccata

SEQ ID NO: 5229731 - DNA, 25 bp, Homo sapien
agtggataaggttccatcgtttatc

SEQ ID NO: 5229732 - DNA, 25 bp, Homo sapien
ggttccatcgtttatccataagaaa

SEQ ID NO: 5229733 - DNA, 25 bp, Homo sapien
cttattgtagtggataaggttccat

SEQ ID NO: 5229734 - DNA, 25 bp, Homo sapien
gctggggagatactgacctccggaa

SEQ ID NO: 5229735 - DNA, 25 bp, Homo sapien
aaggataaatatctcgaacataggt

SEQ ID NO: 5229736 - DNA, 25 bp, Homo sapien
ctggggagatactgacctccggaaa

SEQ ID NO: 5229737 - DNA, 25 bp, Homo sapien
ctgacctccggaaaggataaatatc

SEQ ID NO: 5229738 - DNA, 25 bp, Homo sapien
caatagcactacgagggaatgaggg

SEQ ID NO: 5229739 - DNA, 25 bp, Homo sapien
gcggaggaggtcttcctgaagcatg

SEQ ID NO: 5229740 - DNA, 25 bp, Homo sapien
atgagaaacaacacccgccctactt

SEQ ID NO: 5229741 - DNA, 25 bp, Homo sapien
gtgaaaactcagcatcaatagcact

SEQ ID NO: 5229742 - DNA, 25 bp, Homo sapien
gttctccgtttgttccagctccagg

SEQ ID NO: 5229743 - DNA, 25 bp, Homo sapien
ccacaccaatcctgtcagcatgaga

SEQ ID NO: 5229744 - DNA, 25 bp, Homo sapien
gagaggtgatcaaacccaaggcgct

SEQ ID NO: 5229745 - DNA, 25 bp, Homo sapien
gcgctgctgttctccgtttgttcca

SEQ ID NO: 5229746 - DNA, 25 bp, Homo sapien
gcatgatttcgtctccccatggaaa

SEQ ID NO: 5229747 - DNA, 25 bp, Homo sapien
ttctgaagagtgtcgaggccaaaca

SEQ ID NO: 5229748 - DNA, 25 bp, Homo sapien
cactggtagccgctgagagagaaga

SEQ ID NO: 5229749 - DNA, 25 bp, Homo sapien
tcttccgggtggaggatcagagccc

SEQ ID NO: 5229750 - DNA, 25 bp, Homo sapien
aaggaaaggactagacacatgtata

SEQ ID NO: 5229751 - DNA, 25 bp, Homo sapien
tgaagtatcaaagttgtactcgctt

SEQ ID NO: 5229752 - DNA, 25 bp, Homo sapien
atgcatacataagaaggcctgctgc

SEQ ID NO: 5229753 - DNA, 25 bp, Homo sapien
actcatggtcatgggaagcttggag

SEQ ID NO: 5229754 - DNA, 25 bp, Homo sapien
gattgctttcatagtcggagtacac

SEQ ID NO: 5229755 - DNA, 25 bp, Homo sapien
cacaaagggcttccggtgtagaata

SEQ ID NO: 5229756 - DNA, 25 bp, Homo sapien
gggccacactagcaaacagctggag

SEQ ID NO: 5229757 - DNA, 25 bp, Homo sapien
aattcgatggcttgacgcagctggg

SEQ ID NO: 5229758 - DNA, 25 bp, Homo sapien
ggactgcagcaagtcaaacaggcac

SEQ ID NO: 5229759 - DNA, 25 bp, Homo sapien
tggtctctccctctagggactgcag

SEQ ID NO: 5229760 - DNA, 25 bp, Homo sapien
gctctaagatgtctaatatgtcggt

SEQ ID NO: 5229761 - DNA, 25 bp, Homo sapien
tgacacacctttgctgggcccatta

SEQ ID NO: 5229762 - DNA, 25 bp, Homo sapien
tgatagaaaatgtcagatcttcgtt

SEQ ID NO: 5229763 - DNA, 25 bp, Homo sapien
gacacagagcttaatggcttcactg

SEQ ID NO: 5229764 - DNA, 25 bp, Homo sapien
agaaaatgtcagatcttcgtttcca

SEQ ID NO: 5229765 - DNA, 25 bp, Homo sapien
acagtgacacagagcttaatggctt

SEQ ID NO: 5229766 - DNA, 25 bp, Homo sapien
tctgaatgattcgggagcatacgcc

SEQ ID NO: 5229767 - DNA, 25 bp, Homo sapien
tgaatgattcgggagcatacgccac

SEQ ID NO: 5229768 - DNA, 25 bp, Homo sapien
cttctgaatgattcgggagcatacg

SEQ ID NO: 5229769 - DNA, 25 bp, Homo sapien
ttctgaatgattcgggagcatacgc

SEQ ID NO: 5229770 - DNA, 25 bp, Homo sapien
tggatagggcccacactcaatttag

SEQ ID NO: 5229771 - DNA, 25 bp, Homo sapien
tttagtattggggtgccagaaacac

SEQ ID NO: 5229772 - DNA, 25 bp, Homo sapien
gatagggcccacactcaatttagta

SEQ ID NO: 5229773 - DNA, 25 bp, Homo sapien
tcaatttagtattggggtgccagaa

SEQ ID NO: 5229774 - DNA, 25 bp, Homo sapien
tctcgggcagcaggtactgtctcca

SEQ ID NO: 5229775 - DNA, 25 bp, Homo sapien
ctgtagggacgtcgcaagagcagca

SEQ ID NO: 5229776 - DNA, 25 bp, Homo sapien
cctctacactgtacaaaagggcctg

SEQ ID NO: 5229777 - DNA, 25 bp, Homo sapien
tctttagcttttgtaggtaacatgg

SEQ ID NO: 5229778 - DNA, 25 bp, Homo sapien
cttatgaccttggtcacacctgctc

SEQ ID NO: 5229779 - DNA, 25 bp, Homo sapien
tggtgttcaccccagacgacatggt

SEQ ID NO: 5229780 - DNA, 25 bp, Homo sapien
cagacgacatggtgtgattggctgt

SEQ ID NO: 5229781 - DNA, 25 bp, Homo sapien
ggtggttcccttatgaccttggtca

SEQ ID NO: 5229782 - DNA, 25 bp, Homo sapien
tgataaagtgcagtttggctccttg

SEQ ID NO: 5229783 - DNA, 25 bp, Homo sapien
ctgataaagtgcagtttggctcctt

SEQ ID NO: 5229784 - DNA, 25 bp, Homo sapien
tgaaagattaactaggggtctgaaa

SEQ ID NO: 5229785 - DNA, 25 bp, Homo sapien
tgcccttcctccagtaaatgaaggt

SEQ ID NO: 5229786 - DNA, 25 bp, Homo sapien
ttcccgagcaattcgttcatccagt

SEQ ID NO: 5229787 - DNA, 25 bp, Homo sapien
gttccaaggcaatgacccgaggctc

SEQ ID NO: 5229788 - DNA, 25 bp, Homo sapien
cgtggcccacagtgcttatagaact

SEQ ID NO: 5229789 - DNA, 25 bp, Homo sapien
tccccagccagattttgcaagatct

SEQ ID NO: 5229790 - DNA, 25 bp, Homo sapien
ggggcagggaaagcgaggccagtac

SEQ ID NO: 5229791 - DNA, 25 bp, Homo sapien
tggggcagggaaagcgaggccagta

SEQ ID NO: 5229792 - DNA, 25 bp, Homo sapien
atggcatctctgtaggaagacgaaa

SEQ ID NO: 5229793 - DNA, 25 bp, Homo sapien
cacaaatacggcctttagcatgaat

SEQ ID NO: 5229794 - DNA, 25 bp, Homo sapien
tgaaacacaaatacggcctttagca

SEQ ID NO: 5229795 - DNA, 25 bp, Homo sapien
tacgagtgcacagggaagtaattct

SEQ ID NO: 5229796 - DNA, 25 bp, Homo sapien
tattggcctctagagggagcgccag

SEQ ID NO: 5229797 - DNA, 25 bp, Homo sapien
cctctagagggagcgccaggcctct

SEQ ID NO: 5229798 - DNA, 25 bp, Homo sapien
gagggagcgccaggcctctctgact

SEQ ID NO: 5229799 - DNA, 25 bp, Homo sapien
ttaataggtattggcctctagaggg

SEQ ID NO: 5229800 - DNA, 25 bp, Homo sapien
atgtagcgccgaagcccacgactct

SEQ ID NO: 5229801 - DNA, 25 bp, Homo sapien
agcatctccatgatgtagcgccgaa

SEQ ID NO: 5229802 - DNA, 25 bp, Homo sapien
tcagtaatgggtagcatctccatga

SEQ ID NO: 5229803 - DNA, 25 bp, Homo sapien
cctcagctgtccagtcagtaatggg

SEQ ID NO: 5229804 - DNA, 25 bp, Homo sapien
gcatcttatgaattttgttgaacat

SEQ ID NO: 5229805 - DNA, 25 bp, Homo sapien
aaaatgaggatgagggccggcctca

SEQ ID NO: 5229806 - DNA, 25 bp, Homo sapien
aaatgaggatgagggccggcctcac

SEQ ID NO: 5229807 - DNA, 25 bp, Homo sapien
tcttatgaattttgttgaacattct

SEQ ID NO: 5229808 - DNA, 25 bp, Homo sapien
tagcaacagctaactcggaggcatt

SEQ ID NO: 5229809 - DNA, 25 bp, Homo sapien
tattttgacgcacccttgtgagaca

SEQ ID NO: 5229810 - DNA, 25 bp, Homo sapien
tatgtgacatctccgacactgaagg

SEQ ID NO: 5229811 - DNA, 25 bp, Homo sapien
tactttcgggaagcataaatgggtc

SEQ ID NO: 5229812 - DNA, 25 bp, Homo sapien
tgaaaacgtagcagaggcaggcctg

SEQ ID NO: 5229813 - DNA, 25 bp, Homo sapien
gcaggcctgccccactcgactaaat

SEQ ID NO: 5229814 - DNA, 25 bp, Homo sapien
tactgaaaacgtagcagaggcaggc

SEQ ID NO: 5229815 - DNA, 25 bp, Homo sapien
aagatactgaaaacgtagcagaggc

SEQ ID NO: 5229816 - DNA, 25 bp, Homo sapien
tgatgccatctaagacaggatgtgt

SEQ ID NO: 5229817 - DNA, 25 bp, Homo sapien
tctaagacaggatgtgtctctggga

SEQ ID NO: 5229818 - DNA, 25 bp, Homo sapien
gtttacccatattgttccaaaagca

SEQ ID NO: 5229819 - DNA, 25 bp, Homo sapien
caagtgaatgagacagtgattctga

SEQ ID NO: 5229820 - DNA, 25 bp, Homo sapien
ggcgccattagcgtcttggctccct

SEQ ID NO: 5229821 - DNA, 25 bp, Homo sapien
caatataggcgccattagcgtcttg

SEQ ID NO: 5229822 - DNA, 25 bp, Homo sapien
gaatacaatataggcgccattagcg

SEQ ID NO: 5229823 - DNA, 25 bp, Homo sapien
tataggcgccattagcgtcttggct

SEQ ID NO: 5229824 - DNA, 25 bp, Homo sapien
caaacaaaccccttcaatcaaattg

SEQ ID NO: 5229825 - DNA, 25 bp, Homo sapien
cagattgacacagacattgatcagt

SEQ ID NO: 5229826 - DNA, 25 bp, Homo sapien
gattgacacagacattgatcagtga

SEQ ID NO: 5229827 - DNA, 25 bp, Homo sapien
agattgacacagacattgatcagtg

SEQ ID NO: 5229828 - DNA, 25 bp, Homo sapien
attgacacagacattgatcagtgac

SEQ ID NO: 5229829 - DNA, 25 bp, Homo sapien
tgagccgtctgttttcatgggcaga

SEQ ID NO: 5229830 - DNA, 25 bp, Homo sapien
tagactggccaactcatagtgtcat

SEQ ID NO: 5229831 - DNA, 25 bp, Homo sapien
caactctcagcgcaacttgaagagg

SEQ ID NO: 5229832 - DNA, 25 bp, Homo sapien
gggcacaaagtggttgacctgtaaa

SEQ ID NO: 5229833 - DNA, 25 bp, Homo sapien
gcaatgctacaagccggacaacagc

SEQ ID NO: 5229834 - DNA, 25 bp, Homo sapien
gaagaaggggtaatccatcagcaac

SEQ ID NO: 5229835 - DNA, 25 bp, Homo sapien
atcagcaacactggaaggtcctacc

SEQ ID NO: 5229836 - DNA, 25 bp, Homo sapien
tgtatctgcaatgctacaagccgga

SEQ ID NO: 5229837 - DNA, 25 bp, Homo sapien
cagtatgatggagacggtgactccc

SEQ ID NO: 5229838 - DNA, 25 bp, Homo sapien
aattgagagctatacacctaaaaag

SEQ ID NO: 5229839 - DNA, 25 bp, Homo sapien
gaaaagattaattgaccaccacacc

SEQ ID NO: 5229840 - DNA, 25 bp, Homo sapien
gagttcaattgttgtctgtacagca

SEQ ID NO: 5229841 - DNA, 25 bp, Homo sapien
gagcacaaatgggatgagcagattt

SEQ ID NO: 5229842 - DNA, 25 bp, Homo sapien
tccagatcctactgtgagcacaaat

SEQ ID NO: 5229843 - DNA, 25 bp, Homo sapien
cccctcccttcgctcttgattggtg

SEQ ID NO: 5229844 - DNA, 25 bp, Homo sapien
gggagatcacatggcttaaaggaaa

SEQ ID NO: 5229845 - DNA, 25 bp, Homo sapien
agaacacaacaacaatgataaattt

SEQ ID NO: 5229846 - DNA, 25 bp, Homo sapien
cacaacaacaatgataaatttcctt

SEQ ID NO: 5229847 - DNA, 25 bp, Homo sapien
atttaagagaacacaacaacaatga

SEQ ID NO: 5229848 - DNA, 25 bp, Homo sapien
aacacaacaacaatgataaatttcc

SEQ ID NO: 5229849 - DNA, 25 bp, Homo sapien
ttcagtgatagccttcatgggaaca

SEQ ID NO: 5229850 - DNA, 25 bp, Homo sapien
ttcctaagatgaccctatttaaatc

SEQ ID NO: 5229851 - DNA, 25 bp, Homo sapien
acttcagtgatagccttcatgggaa

SEQ ID NO: 5229852 - DNA, 25 bp, Homo sapien
cctaagatgaccctatttaaatcat

SEQ ID NO: 5229853 - DNA, 25 bp, Homo sapien
ttccctgcgcaagtctttccccgca

SEQ ID NO: 5229854 - DNA, 25 bp, Homo sapien
tgctcctggatgtgctgatgatccg

SEQ ID NO: 5229855 - DNA, 25 bp, Homo sapien
cctggatgtgctgatgatccgcggt

SEQ ID NO: 5229856 - DNA, 25 bp, Homo sapien
tgggaggagtacattgatgactgtc

SEQ ID NO: 5229857 - DNA, 25 bp, Homo sapien
agctagtaggggcatagcatattgc

SEQ ID NO: 5229858 - DNA, 25 bp, Homo sapien
gattaaagacatgttaagggaggaa

SEQ ID NO: 5229859 - DNA, 25 bp, Homo sapien
aaagagctagtaggggcatagcata

SEQ ID NO: 5229860 - DNA, 25 bp, Homo sapien
tgcaaggtcaccaaatcttgcagca

SEQ ID NO: 5229861 - DNA, 25 bp, Homo sapien
atgggagcaggactggactggcctc

SEQ ID NO: 5229862 - DNA, 25 bp, Homo sapien
tgggagcaggactggactggcctca

SEQ ID NO: 5229863 - DNA, 25 bp, Homo sapien
tatgggagcaggactggactggcct

SEQ ID NO: 5229864 - DNA, 25 bp, Homo sapien
ctatgggagcaggactggactggcc

SEQ ID NO: 5229865 - DNA, 25 bp, Homo sapien
tattctcagcgctatggcaagagtg

SEQ ID NO: 5229866 - DNA, 25 bp, Homo sapien
ccagttcattcagggccaaagagtg

SEQ ID NO: 5229867 - DNA, 25 bp, Homo sapien
tatgggttagtcctaggtacatgca

SEQ ID NO: 5229868 - DNA, 25 bp, Homo sapien
ggtcacgaccaggttaaaggcagca

SEQ ID NO: 5229869 - DNA, 25 bp, Homo sapien
cacaccgggaaaagagaaaaatgag

SEQ ID NO: 5229870 - DNA, 25 bp, Homo sapien
tcacaccgggaaaagagaaaaatga

SEQ ID NO: 5229871 - DNA, 25 bp, Homo sapien
cacaaagatgggtattcgggtccgc

SEQ ID NO: 5229872 - DNA, 25 bp, Homo sapien
cactggatgaaagggcgcaaaagca

SEQ ID NO: 5229873 - DNA, 25 bp, Homo sapien
aagcagacgagaatcaccttcagcg

SEQ ID NO: 5229874 - DNA, 25 bp, Homo sapien
tcgaggaaatcccaaagggccaggc

SEQ ID NO: 5229875 - DNA, 25 bp, Homo sapien
gccgggcggaaagctcttcatgatt

SEQ ID NO: 5229876 - DNA, 25 bp, Homo sapien
tgaactcagcaatgagcgagctctt

SEQ ID NO: 5229877 - DNA, 25 bp, Homo sapien
cacaaagggcgtggtatgaagcgcc

SEQ ID NO: 5229878 - DNA, 25 bp, Homo sapien
cgctccagctggtcggcaatatgtt

SEQ ID NO: 5229879 - DNA, 25 bp, Homo sapien
ggtgcccacggtactgatggatgtc

SEQ ID NO: 5229880 - DNA, 25 bp, Homo sapien
cccgtgcccgtgttagagcgggaca

SEQ ID NO: 5229881 - DNA, 25 bp, Homo sapien
tcatcagtccgactcagggtgtcct

SEQ ID NO: 5229882 - DNA, 25 bp, Homo sapien
tggccaagctcaggcggtaagcaga

SEQ ID NO: 5229883 - DNA, 25 bp, Homo sapien
tgctcgtatggccaggccatgtcta

SEQ ID NO: 5229884 - DNA, 25 bp, Homo sapien
ccctgctcgtatggccaggccatgt

SEQ ID NO: 5229885 - DNA, 25 bp, Homo sapien
gctcgtatggccaggccatgtctac

SEQ ID NO: 5229886 - DNA, 25 bp, Homo sapien
cctgctcgtatggccaggccatgtc

SEQ ID NO: 5229887 - DNA, 25 bp, Homo sapien
acgctgggcatgcttatagagtcat

SEQ ID NO: 5229888 - DNA, 25 bp, Homo sapien
cacgctgggcatgcttatagagtca

SEQ ID NO: 5229889 - DNA, 25 bp, Homo sapien
ctggagaatcgcctccttccaatgg

SEQ ID NO: 5229890 - DNA, 25 bp, Homo sapien
catggctggagaatcgcctccttcc

SEQ ID NO: 5229891 - DNA, 25 bp, Homo sapien
caggaggtaagcttcttgttcactt

SEQ ID NO: 5229892 - DNA, 25 bp, Homo sapien
tccttccaatggcactcaggaggta

SEQ ID NO: 5229893 - DNA, 25 bp, Homo sapien
tcttgccaagtacccatcattagct

SEQ ID NO: 5229894 - DNA, 25 bp, Homo sapien
tctgcttggttaagtgtcactacct

SEQ ID NO: 5229895 - DNA, 25 bp, Homo sapien
gttgcctgcaggaacctagttgaca

SEQ ID NO: 5229896 - DNA, 25 bp, Homo sapien
agttcacgaaccatttgcgaaagga

SEQ ID NO: 5229897 - DNA, 25 bp, Homo sapien
tgggagtcatcgaggacattaggtt

SEQ ID NO: 5229898 - DNA, 25 bp, Homo sapien
ggagtcatcgaggacattaggttca

SEQ ID NO: 5229899 - DNA, 25 bp, Homo sapien
gggagtcatcgaggacattaggttc

SEQ ID NO: 5229900 - DNA, 25 bp, Homo sapien
agcacagacaccaatagacaggtag

SEQ ID NO: 5229901 - DNA, 25 bp, Homo sapien
tagacaggtagcattgacactgtac

SEQ ID NO: 5229902 - DNA, 25 bp, Homo sapien
caatagacaggtagcattgacactg

SEQ ID NO: 5229903 - DNA, 25 bp, Homo sapien
cagcacagacaccaatagacaggta

SEQ ID NO: 5229904 - DNA, 25 bp, Homo sapien
gaaggagggtttgctacacctttga

SEQ ID NO: 5229905 - DNA, 25 bp, Homo sapien
aatgaaggagggtttgctacacctt

SEQ ID NO: 5229906 - DNA, 25 bp, Homo sapien
gggtttgctacacctttgacttcca

SEQ ID NO: 5229907 - DNA, 25 bp, Homo sapien
gagggtttgctacacctttgacttc

SEQ ID NO: 5229908 - DNA, 25 bp, Homo sapien
atttcatgcaagttttggagtcacc

SEQ ID NO: 5229909 - DNA, 25 bp, Homo sapien
gatatttcatgcaagttttggagtc

SEQ ID NO: 5229910 - DNA, 25 bp, Homo sapien
tctgatatttcatgcaagttttgga

SEQ ID NO: 5229911 - DNA, 25 bp, Homo sapien
aactgtttgtgtctgatatttcatg

SEQ ID NO: 5229912 - DNA, 25 bp, Homo sapien
tcagatctcttccaacaccgtgaat

SEQ ID NO: 5229913 - DNA, 25 bp, Homo sapien
aaagggaagccctcttgaggactgt

SEQ ID NO: 5229914 - DNA, 25 bp, Homo sapien
aagctcctgctaatggaattaagtc

SEQ ID NO: 5229915 - DNA, 25 bp, Homo sapien
tgctaatggaattaagtctgcattc

SEQ ID NO: 5229916 - DNA, 25 bp, Homo sapien
tcgtttaccctgagtgattgccttg

SEQ ID NO: 5229917 - DNA, 25 bp, Homo sapien
aagccagcacttcacgggagcgata

SEQ ID NO: 5229918 - DNA, 25 bp, Homo sapien
gagagcagggaaatacgcagtagac

SEQ ID NO: 5229919 - DNA, 25 bp, Homo sapien
tagaagcactaggtgagaccagcac

SEQ ID NO: 5229920 - DNA, 25 bp, Homo sapien
tatgtcagagtagtgggacaacttc

SEQ ID NO: 5229921 - DNA, 25 bp, Homo sapien
caactgaatcctttcagataagtga

SEQ ID NO: 5229922 - DNA, 25 bp, Homo sapien
tatttcatgctctgaaaagttgaga

SEQ ID NO: 5229923 - DNA, 25 bp, Homo sapien
gactatatgtcgagatatgtcagag

SEQ ID NO: 5229924 - DNA, 25 bp, Homo sapien
taagcacctctctatgttatgtcca

SEQ ID NO: 5229925 - DNA, 25 bp, Homo sapien
gggttttcactaagcacctctctat

SEQ ID NO: 5229926 - DNA, 25 bp, Homo sapien
tacgtactacaactgcagtaatcaa

SEQ ID NO: 5229927 - DNA, 25 bp, Homo sapien
tgaaacagtcccaccatagtcccta

SEQ ID NO: 5229928 - DNA, 25 bp, Homo sapien
tatatttggaatatcgaaggctggc

SEQ ID NO: 5229929 - DNA, 25 bp, Homo sapien
cagatgcgacctttccatgaagaca

SEQ ID NO: 5229930 - DNA, 25 bp, Homo sapien
ccaggagaggatcataagcatcgaa

SEQ ID NO: 5229931 - DNA, 25 bp, Homo sapien
cataaagagtaccaaaacaggtgct

SEQ ID NO: 5229932 - DNA, 25 bp, Homo sapien
gatcacacccctggtttggaagcca

SEQ ID NO: 5229933 - DNA, 25 bp, Homo sapien
taaatacccagctgcagtagtaagg

SEQ ID NO: 5229934 - DNA, 25 bp, Homo sapien
taagctatcattacaactcaggagc

SEQ ID NO: 5229935 - DNA, 25 bp, Homo sapien
gaaacggtggtgacaaacaaacaca

SEQ ID NO: 5229936 - DNA, 25 bp, Homo sapien
ctgttgaccaggttcactctgtata

SEQ ID NO: 5229937 - DNA, 25 bp, Homo sapien
tgttgaccaggttcactctgtatac

SEQ ID NO: 5229938 - DNA, 25 bp, Homo sapien
gttgaccaggttcactctgtatact

SEQ ID NO: 5229939 - DNA, 25 bp, Homo sapien
tctgggtaaggaacaaatagaatta

SEQ ID NO: 5229940 - DNA, 25 bp, Homo sapien
cctctatcaataagtttggctggta

SEQ ID NO: 5229941 - DNA, 25 bp, Homo sapien
gaagatcgaaacatttggcttgcct

SEQ ID NO: 5229942 - DNA, 25 bp, Homo sapien
ccacgttttaaagttgctctgtgct

SEQ ID NO: 5229943 - DNA, 25 bp, Homo sapien
tcctgcgagtggttgacagccgagc

SEQ ID NO: 5229944 - DNA, 25 bp, Homo sapien
ttttctgacgtgatagtagaggacg

SEQ ID NO: 5229945 - DNA, 25 bp, Homo sapien
acagccgagccccttggcgatttct

SEQ ID NO: 5229946 - DNA, 25 bp, Homo sapien
cagacggcttcgttttaggttgaat

SEQ ID NO: 5229947 - DNA, 25 bp, Homo sapien
tgtggagatccgcaacaactatggc

SEQ ID NO: 5229948 - DNA, 25 bp, Homo sapien
ggcctgttgcaggaagcgcatctgt

SEQ ID NO: 5229949 - DNA, 25 bp, Homo sapien
tacagccctgtagttggcctgttgc

SEQ ID NO: 5229950 - DNA, 25 bp, Homo sapien
gcctcaatgaaggtcacagatcgtt

SEQ ID NO: 5229951 - DNA, 25 bp, Homo sapien
tgtaggaggctggatgtctcgaggc

SEQ ID NO: 5229952 - DNA, 25 bp, Homo sapien
aggctggatgtctcgaggcctgtga

SEQ ID NO: 5229953 - DNA, 25 bp, Homo sapien
agagagttgggcagagagtggactg

SEQ ID NO: 5229954 - DNA, 25 bp, Homo sapien
tccttcttcagtggggaagttctca

SEQ ID NO: 5229955 - DNA, 25 bp, Homo sapien
tgagactcatctaatactgcatccg

SEQ ID NO: 5229956 - DNA, 25 bp, Homo sapien
aaaggtgaactgactagatagtagc

SEQ ID NO: 5229957 - DNA, 25 bp, Homo sapien
tagtagcgggttctccatgccattt

SEQ ID NO: 5229958 - DNA, 25 bp, Homo sapien
ccagctcagtgggagtaaaggtgaa

SEQ ID NO: 5229959 - DNA, 25 bp, Homo sapien
gcaggcttgttatttagtctcccca

SEQ ID NO: 5229960 - DNA, 25 bp, Homo sapien
tacctgcagagcttacaagatacag

SEQ ID NO: 5229961 - DNA, 25 bp, Homo sapien
caatgtgcagtgaaatggctctttc

SEQ ID NO: 5229962 - DNA, 25 bp, Homo sapien
cagggctaggaataggaataccatc

SEQ ID NO: 5229963 - DNA, 25 bp, Homo sapien
catgacttggtgtgatagcagcgaa

SEQ ID NO: 5229964 - DNA, 25 bp, Homo sapien
cacacatatatagagacgcgccaat

SEQ ID NO: 5229965 - DNA, 25 bp, Homo sapien
taagggcaccttaaatggaacagat

SEQ ID NO: 5229966 - DNA, 25 bp, Homo sapien
tgctgcagttgagacccactaaagt

SEQ ID NO: 5229967 - DNA, 25 bp, Homo sapien
ttctaccggaagcagccactctgcg

SEQ ID NO: 5229968 - DNA, 25 bp, Homo sapien
aggcttccggattctaccggaagca

SEQ ID NO: 5229969 - DNA, 25 bp, Homo sapien
gaagcagccactctgcggtgaggaa

SEQ ID NO: 5229970 - DNA, 25 bp, Homo sapien
actctgcggtgaggaagtcccgcct

SEQ ID NO: 5229971 - DNA, 25 bp, Homo sapien
gctagagcgtcaccccgattgggcg

SEQ ID NO: 5229972 - DNA, 25 bp, Homo sapien
cggcaaggctagagcgtcaccccga

SEQ ID NO: 5229973 - DNA, 25 bp, Homo sapien
accgctggctcccaaaagcaagtta

SEQ ID NO: 5229974 - DNA, 25 bp, Homo sapien
gctcccaaaagcaagttacccacga

SEQ ID NO: 5229975 - DNA, 25 bp, Homo sapien
ctaaattggccaggtcgctgttgag

SEQ ID NO: 5229976 - DNA, 25 bp, Homo sapien
aattggccaggtcgctgttgaggat

SEQ ID NO: 5229977 - DNA, 25 bp, Homo sapien
tcgctgttgaggatggacgggccaa

SEQ ID NO: 5229978 - DNA, 25 bp, Homo sapien
cgctgttgaggatggacgggccaat

SEQ ID NO: 5229979 - DNA, 25 bp, Homo sapien
cgtccattacgtccaggtgcagata

SEQ ID NO: 5229980 - DNA, 25 bp, Homo sapien
gtccattacgtccaggtgcagataa

SEQ ID NO: 5229981 - DNA, 25 bp, Homo sapien
ccgtccattacgtccaggtgcagat

SEQ ID NO: 5229982 - DNA, 25 bp, Homo sapien
gcaagtggcagaactcgggaaccta

SEQ ID NO: 5229983 - DNA, 25 bp, Homo sapien
tccaagatgcctaagcggtaggttc

SEQ ID NO: 5229984 - DNA, 25 bp, Homo sapien
tagagaacttaatatacgccaggca

SEQ ID NO: 5229985 - DNA, 25 bp, Homo sapien
ttgtccaaggtaacccagcaagtgg

SEQ ID NO: 5229986 - DNA, 25 bp, Homo sapien
gctctgttcccatggttaggatgaa

SEQ ID NO: 5229987 - DNA, 25 bp, Homo sapien
tgaacacattctagtcactgtcctg

SEQ ID NO: 5229988 - DNA, 25 bp, Homo sapien
tagaaacagctcttaactcagaaag

SEQ ID NO: 5229989 - DNA, 25 bp, Homo sapien
gaagggacattgtggctggccacat

SEQ ID NO: 5229990 - DNA, 25 bp, Homo sapien
caaaggtgatgttgggaacaaaatg

SEQ ID NO: 5229991 - DNA, 25 bp, Homo sapien
aaaggtgatgttgggaacaaaatgc

SEQ ID NO: 5229992 - DNA, 25 bp, Homo sapien
gtgaccaaaggtgatgttgggaaca

SEQ ID NO: 5229993 - DNA, 25 bp, Homo sapien
agggtgaccaaaggtgatgttggga

SEQ ID NO: 5229994 - DNA, 25 bp, Homo sapien
cctggcctagctgctttcgaaggct

SEQ ID NO: 5229995 - DNA, 25 bp, Homo sapien
agggtcctggcctagctgctttcga

SEQ ID NO: 5229996 - DNA, 25 bp, Homo sapien
gcctagctgctttcgaaggctttct

SEQ ID NO: 5229997 - DNA, 25 bp, Homo sapien
ggtcctggcctagctgctttcgaag

SEQ ID NO: 5229998 - DNA, 25 bp, Homo sapien
tgagacattgctaacttaacataaa

SEQ ID NO: 5229999 - DNA, 25 bp, Homo sapien
ggtgagacattgctaacttaacata

SEQ ID NO: 5230000 - DNA, 25 bp, Homo sapien
gtgagacattgctaacttaacataa

SEQ ID NO: 5230001 - DNA, 25 bp, Homo sapien
gctacatgtggcttatgactaccat

SEQ ID NO: 5230002 - DNA, 25 bp, Homo sapien
aagttctactaaattgtaagctacg

SEQ ID NO: 5230003 - DNA, 25 bp, Homo sapien
aaaaaactatttatggctaggctgg

SEQ ID NO: 5230004 - DNA, 25 bp, Homo sapien
cagagtccttcataaaactggtcag

SEQ ID NO: 5230005 - DNA, 25 bp, Homo sapien
tactgattggctcctgctacagcca

SEQ ID NO: 5230006 - DNA, 25 bp, Homo sapien
ggctcctgctacagccattggcttt

SEQ ID NO: 5230007 - DNA, 25 bp, Homo sapien
tagcctcgagatgaaaggtgtactg

SEQ ID NO: 5230008 - DNA, 25 bp, Homo sapien
tctcagtagcctcgagatgaaaggt

SEQ ID NO: 5230009 - DNA, 25 bp, Homo sapien
cttcagcctgggtgacagagcaaga

SEQ ID NO: 5230010 - DNA, 25 bp, Homo sapien
gcaatgggccctgactgtgccactg

SEQ ID NO: 5230011 - DNA, 25 bp, Homo sapien
ctgcaatgggccctgactgtgccac

SEQ ID NO: 5230012 - DNA, 25 bp, Homo sapien
cacttcagcctgggtgacagagcaa

SEQ ID NO: 5230013 - DNA, 25 bp, Homo sapien
ttcctggtttgatggcaaggccaac

SEQ ID NO: 5230014 - DNA, 25 bp, Homo sapien
ggttcctggtttgatggcaaggcca

SEQ ID NO: 5230015 - DNA, 25 bp, Homo sapien
aggttcctggtttgatggcaaggcc

SEQ ID NO: 5230016 - DNA, 25 bp, Homo sapien
tgaggttcctggtttgatggcaagg

SEQ ID NO: 5230017 - DNA, 25 bp, Homo sapien
catatctatctgattagcccatggt

SEQ ID NO: 5230018 - DNA, 25 bp, Homo sapien
aaggccatatctatctgattagccc

SEQ ID NO: 5230019 - DNA, 25 bp, Homo sapien
caaggccatatctatctgattagcc

SEQ ID NO: 5230020 - DNA, 25 bp, Homo sapien
gccatatctatctgattagcccatg

SEQ ID NO: 5230021 - DNA, 25 bp, Homo sapien
ctagatatatacatgaggaaataag

SEQ ID NO: 5230022 - DNA, 25 bp, Homo sapien
atatacatgaggaaataagtaactc

SEQ ID NO: 5230023 - DNA, 25 bp, Homo sapien
gatatatacatgaggaaataagtaa

SEQ ID NO: 5230024 - DNA, 25 bp, Homo sapien
tatatacatgaggaaataagtaact

SEQ ID NO: 5230025 - DNA, 25 bp, Homo sapien
tgcacatttatggacagtgtcagga

SEQ ID NO: 5230026 - DNA, 25 bp, Homo sapien
ctatatccaaagatgggaactgggt

SEQ ID NO: 5230027 - DNA, 25 bp, Homo sapien
ggaactgggtcctcaaccagtgaac

SEQ ID NO: 5230028 - DNA, 25 bp, Homo sapien
gtgtcaggacctactccaccatcga

SEQ ID NO: 5230029 - DNA, 25 bp, Homo sapien
tggaaaaatttctcacttccaaggc

SEQ ID NO: 5230030 - DNA, 25 bp, Homo sapien
gataggtatatatcaagcagaaacg

SEQ ID NO: 5230031 - DNA, 25 bp, Homo sapien
ttactactgtcaagcttttgatagg

SEQ ID NO: 5230032 - DNA, 25 bp, Homo sapien
caagaacctggaagtagatacatca

SEQ ID NO: 5230033 - DNA, 25 bp, Homo sapien
caagcagaaacgtgtggcagttata

SEQ ID NO: 5230034 - DNA, 25 bp, Homo sapien
caatctgttttgtgattcattgcta

SEQ ID NO: 5230035 - DNA, 25 bp, Homo sapien
gatggaaacccaatctgttttgtga

SEQ ID NO: 5230036 - DNA, 25 bp, Homo sapien
gaaacccaatctgttttgtgattca

SEQ ID NO: 5230037 - DNA, 25 bp, Homo sapien
aggatggaaacccaatctgttttgt

SEQ ID NO: 5230038 - DNA, 25 bp, Homo sapien
aaacatttcttaatagattgatcac

SEQ ID NO: 5230039 - DNA, 25 bp, Homo sapien
tagattgatcacagatctggggtct

SEQ ID NO: 5230040 - DNA, 25 bp, Homo sapien
tcttaatagattgatcacagatctg

SEQ ID NO: 5230041 - DNA, 25 bp, Homo sapien
ggtcttcactcctcataatagcact

SEQ ID NO: 5230042 - DNA, 25 bp, Homo sapien
cttcaattgcattgtgatttggtag

SEQ ID NO: 5230043 - DNA, 25 bp, Homo sapien
tcaattgcattgtgatttggtagtc

SEQ ID NO: 5230044 - DNA, 25 bp, Homo sapien
aattgcattgtgatttggtagtcaa

SEQ ID NO: 5230045 - DNA, 25 bp, Homo sapien
aaagcagtacggcttcaattgcatt

SEQ ID NO: 5230046 - DNA, 25 bp, Homo sapien
tgtttgtaaccctaatgcagccgta

SEQ ID NO: 5230047 - DNA, 25 bp, Homo sapien
cacacatcaagtgtaaggtgaaaag

SEQ ID NO: 5230048 - DNA, 25 bp, Homo sapien
gaaccaagaatatggtatgcacccc

SEQ ID NO: 5230049 - DNA, 25 bp, Homo sapien
tagaacccctgggtttcacacattg

SEQ ID NO: 5230050 - DNA, 25 bp, Homo sapien
ttcaacccaatattacctccaaaca

SEQ ID NO: 5230051 - DNA, 25 bp, Homo sapien
ggtgatttgttaaaggtccagctag

SEQ ID NO: 5230052 - DNA, 25 bp, Homo sapien
aacaccctgataaaatctatgcttg

SEQ ID NO: 5230053 - DNA, 25 bp, Homo sapien
aacctgctttgacaaaacaccctga

SEQ ID NO: 5230054 - DNA, 25 bp, Homo sapien
tatatagtgttagctcttaattctc

SEQ ID NO: 5230055 - DNA, 25 bp, Homo sapien
gctcttaattctcaacagaacccca

SEQ ID NO: 5230056 - DNA, 25 bp, Homo sapien
aattctgggactagtactggaaact

SEQ ID NO: 5230057 - DNA, 25 bp, Homo sapien
aatgctgtttactttgtgttgagca

SEQ ID NO: 5230058 - DNA, 25 bp, Homo sapien
cctgtcatcttttcgcctacctgat

SEQ ID NO: 5230059 - DNA, 25 bp, Homo sapien
cagggtaccaccctattaagcatta

SEQ ID NO: 5230060 - DNA, 25 bp, Homo sapien
ctcccaagggctccatttgtaaaag

SEQ ID NO: 5230061 - DNA, 25 bp, Homo sapien
gctacagcgtaaaattagactggaa

SEQ ID NO: 5230062 - DNA, 25 bp, Homo sapien
caaacccaagttgtccaggcaaata

SEQ ID NO: 5230063 - DNA, 25 bp, Homo sapien
tctcaaaacttatagtagcctcaag

SEQ ID NO: 5230064 - DNA, 25 bp, Homo sapien
gcgacgtattcatggcacaaagctt

SEQ ID NO: 5230065 - DNA, 25 bp, Homo sapien
taccttgtaatgcaggaagaaaccc

SEQ ID NO: 5230066 - DNA, 25 bp, Homo sapien
ctttgggactaaacacaggctactt

SEQ ID NO: 5230067 - DNA, 25 bp, Homo sapien
ggttactcaagttgtactacccaca

SEQ ID NO: 5230068 - DNA, 25 bp, Homo sapien
ggccatttggccttatctgtgagat

SEQ ID NO: 5230069 - DNA, 25 bp, Homo sapien
tgagccacaaacagtaaagccctat

SEQ ID NO: 5230070 - DNA, 25 bp, Homo sapien
taacatgtttaaccaacagaagtta

SEQ ID NO: 5230071 - DNA, 25 bp, Homo sapien
tcaggttgaaaggtcaagcacagct

SEQ ID NO: 5230072 - DNA, 25 bp, Homo sapien
gaatggccaccatccaaaaaagcag

SEQ ID NO: 5230073 - DNA, 25 bp, Homo sapien
cactgaagggtgaagacatggcagc

SEQ ID NO: 5230074 - DNA, 25 bp, Homo sapien
taccagtgtaccagagaatggccac

SEQ ID NO: 5230075 - DNA, 25 bp, Homo sapien
taagatttttacatgcctcaccaca

SEQ ID NO: 5230076 - DNA, 25 bp, Homo sapien
taaagggactgctttctaacactgc

SEQ ID NO: 5230077 - DNA, 25 bp, Homo sapien
tgattaatgaagaatagcacctgct

SEQ ID NO: 5230078 - DNA, 25 bp, Homo sapien
gcacctgctacatggccaaagttag

SEQ ID NO: 5230079 - DNA, 25 bp, Homo sapien
caaaaaggcaagattgtgtgaagtc

SEQ ID NO: 5230080 - DNA, 25 bp, Homo sapien
tcttgctagagcttacagtaaaaat

SEQ ID NO: 5230081 - DNA, 25 bp, Homo sapien
taacttgactcagtgataccttggg

SEQ ID NO: 5230082 - DNA, 25 bp, Homo sapien
cactttagttaaggagcatctttca

SEQ ID NO: 5230083 - DNA, 25 bp, Homo sapien
catcagctattgtgcaccagaagta

SEQ ID NO: 5230084 - DNA, 25 bp, Homo sapien
tgttgtcagcctcaggaatggattt

SEQ ID NO: 5230085 - DNA, 25 bp, Homo sapien
tattttcctctcttatgttgtcagc

SEQ ID NO: 5230086 - DNA, 25 bp, Homo sapien
ctttaataatggacctcacactggg

SEQ ID NO: 5230087 - DNA, 25 bp, Homo sapien
tacatagggatacgacaacaaaggc

SEQ ID NO: 5230088 - DNA, 25 bp, Homo sapien
tactggcagtaacgttagccaaact

SEQ ID NO: 5230089 - DNA, 25 bp, Homo sapien
ggaggtccctgaatgccatacacag

SEQ ID NO: 5230090 - DNA, 25 bp, Homo sapien
tgtgtaaggcttagccagatactgt

SEQ ID NO: 5230091 - DNA, 25 bp, Homo sapien
acataactgatgaaaggagggtatc

SEQ ID NO: 5230092 - DNA, 25 bp, Homo sapien
gattcccatgtcattagtagcccca

SEQ ID NO: 5230093 - DNA, 25 bp, Homo sapien
gaatactgcacgacggagattgaga

SEQ ID NO: 5230094 - DNA, 25 bp, Homo sapien
caaaaattatgtaacgtgtactgcc

SEQ ID NO: 5230095 - DNA, 25 bp, Homo sapien
ccaggaatgcataaatgaagagtat

SEQ ID NO: 5230096 - DNA, 25 bp, Homo sapien
gagtatactgaagggctgaccaaaa

SEQ ID NO: 5230097 - DNA, 25 bp, Homo sapien
aagagtatactgaagggctgaccaa

SEQ ID NO: 5230098 - DNA, 25 bp, Homo sapien
aatgaattccgaaactcaggaacca

SEQ ID NO: 5230099 - DNA, 25 bp, Homo sapien
ctgtcatctaattaggaaagtaatt

SEQ ID NO: 5230100 - DNA, 25 bp, Homo sapien
tgtcatctaattaggaaagtaattc

SEQ ID NO: 5230101 - DNA, 25 bp, Homo sapien
gtcatctaattaggaaagtaattct

SEQ ID NO: 5230102 - DNA, 25 bp, Homo sapien
tatttgtggactggtatctacccac

SEQ ID NO: 5230103 - DNA, 25 bp, Homo sapien
tatgagtctacaaacatgaaacagc

SEQ ID NO: 5230104 - DNA, 25 bp, Homo sapien
tggtccagcctgtcaaaagtcaatg

SEQ ID NO: 5230105 - DNA, 25 bp, Homo sapien
ttgtcttctaccaatcagtccctgg

SEQ ID NO: 5230106 - DNA, 25 bp, Homo sapien
ctatatgtaagcctcaaataaggtc

SEQ ID NO: 5230107 - DNA, 25 bp, Homo sapien
tatatgtaagcctcaaataaggtca

SEQ ID NO: 5230108 - DNA, 25 bp, Homo sapien
tccttgtcagctggtaggccatgcc

SEQ ID NO: 5230109 - DNA, 25 bp, Homo sapien
ggcatgtgcagtcaatatccagata

SEQ ID NO: 5230110 - DNA, 25 bp, Homo sapien
tagagcacctttagtggcgtcacac

SEQ ID NO: 5230111 - DNA, 25 bp, Homo sapien
gcgggacatttcaaagcagggcacc

SEQ ID NO: 5230112 - DNA, 25 bp, Homo sapien
cttgagatggttcttccacttgtgg

SEQ ID NO: 5230113 - DNA, 25 bp, Homo sapien
taaagagttgctaatctgtattcca

SEQ ID NO: 5230114 - DNA, 25 bp, Homo sapien
ttgaagctgtgatactcagttaaaa

SEQ ID NO: 5230115 - DNA, 25 bp, Homo sapien
tgtgttggtattcagatttttggag

SEQ ID NO: 5230116 - DNA, 25 bp, Homo sapien
gatataagaccttaatgagatctga

SEQ ID NO: 5230117 - DNA, 25 bp, Homo sapien
tggaagacagtggaactgtttcaga

SEQ ID NO: 5230118 - DNA, 25 bp, Homo sapien
aatgagatctgacaactgcaatgcc

SEQ ID NO: 5230119 - DNA, 25 bp, Homo sapien
ctgtttcagatataagaccttaatg

SEQ ID NO: 5230120 - DNA, 25 bp, Homo sapien
cgttattgactgaaagagtatgcaa

SEQ ID NO: 5230121 - DNA, 25 bp, Homo sapien
tagtgccaggcagactattaagtgc

SEQ ID NO: 5230122 - DNA, 25 bp, Homo sapien
taaggcagttaaacgtgttaggcac

SEQ ID NO: 5230123 - DNA, 25 bp, Homo sapien
taagtgctgaagaatcaaaggtgaa

SEQ ID NO: 5230124 - DNA, 25 bp, Homo sapien
tctgacttatagtggttttctccca

SEQ ID NO: 5230125 - DNA, 25 bp, Homo sapien
tttctcccaagacgttaaaagcatg

SEQ ID NO: 5230126 - DNA, 25 bp, Homo sapien
tgttgattaagtgcacctaaccagt

SEQ ID NO: 5230127 - DNA, 25 bp, Homo sapien
gatttagagtcagccagatttgggt

SEQ ID NO: 5230128 - DNA, 25 bp, Homo sapien
gtcccttggtacaaactccatgatg

SEQ ID NO: 5230129 - DNA, 25 bp, Homo sapien
ggcacatagaccgaacaaggacctt

SEQ ID NO: 5230130 - DNA, 25 bp, Homo sapien
tcacgtgcgggtattaagaaaggca

SEQ ID NO: 5230131 - DNA, 25 bp, Homo sapien
tacaaaagctgacaggtcacgtgcg

SEQ ID NO: 5230132 - DNA, 25 bp, Homo sapien
gataatcaaagactagaagaagcta

SEQ ID NO: 5230133 - DNA, 25 bp, Homo sapien
ccagcatggttggaactccctaaaa

SEQ ID NO: 5230134 - DNA, 25 bp, Homo sapien
cattcccagctagtatgtttagata

SEQ ID NO: 5230135 - DNA, 25 bp, Homo sapien
tattgaattggtgaacccatccagc

SEQ ID NO: 5230136 - DNA, 25 bp, Homo sapien
gaattaaataaacagcccactccta

SEQ ID NO: 5230137 - DNA, 25 bp, Homo sapien
tacatgactatttccacagccaaaa

SEQ ID NO: 5230138 - DNA, 25 bp, Homo sapien
taaagcttcgaagggaaaacagcta

SEQ ID NO: 5230139 - DNA, 25 bp, Homo sapien
tgataaggcccacaaacttttgagc

SEQ ID NO: 5230140 - DNA, 25 bp, Homo sapien
ctaggcattggagatactgtggtga

SEQ ID NO: 5230141 - DNA, 25 bp, Homo sapien
cacacagtgcctaggcattggagat

SEQ ID NO: 5230142 - DNA, 25 bp, Homo sapien
gtacctaccgtgtgccacacagtgc

SEQ ID NO: 5230143 - DNA, 25 bp, Homo sapien
cagaaagggttcctaccttcataga

SEQ ID NO: 5230144 - DNA, 25 bp, Homo sapien
tttctttctatgcagaagttatttg

SEQ ID NO: 5230145 - DNA, 25 bp, Homo sapien
catgaatctcggtttatttcccacg

SEQ ID NO: 5230146 - DNA, 25 bp, Homo sapien
gtttgtgttgacatgaatctcggtt

SEQ ID NO: 5230147 - DNA, 25 bp, Homo sapien
tctcggtttatttcccacgctagag

SEQ ID NO: 5230148 - DNA, 25 bp, Homo sapien
gggcatacacacagggattgaagaa

SEQ ID NO: 5230149 - DNA, 25 bp, Homo sapien
gccttggcgtctgctttgggacaca

SEQ ID NO: 5230150 - DNA, 25 bp, Homo sapien
cattctataggacaaagcaagtgac

SEQ ID NO: 5230151 - DNA, 25 bp, Homo sapien
cacacagggatggaatttacagcaa

SEQ ID NO: 5230152 - DNA, 25 bp, Homo sapien
atattgggcaaaattcacccccgat

SEQ ID NO: 5230153 - DNA, 25 bp, Homo sapien
gatattgggcaaaattcacccccga

SEQ ID NO: 5230154 - DNA, 25 bp, Homo sapien
ttggttggggcaactcagttctcat

SEQ ID NO: 5230155 - DNA, 25 bp, Homo sapien
ctggctgttggttggggcaactcag

SEQ ID NO: 5230156 - DNA, 25 bp, Homo sapien
ctgttggttggggcaactcagttct

SEQ ID NO: 5230157 - DNA, 25 bp, Homo sapien
ttgctcttctggcaggtggtgctgg

SEQ ID NO: 5230158 - DNA, 25 bp, Homo sapien
gcaggccacttttttgaacaaataa

SEQ ID NO: 5230159 - DNA, 25 bp, Homo sapien
taatccagtggtacgaattaaggta

SEQ ID NO: 5230160 - DNA, 25 bp, Homo sapien
taaactttatgtgaatgcaggccac

SEQ ID NO: 5230161 - DNA, 25 bp, Homo sapien
cagctgtagtgacctaacatgtata

SEQ ID NO: 5230162 - DNA, 25 bp, Homo sapien
tgtattcaatcacttagatcagagg

SEQ ID NO: 5230163 - DNA, 25 bp, Homo sapien
tattaatagttgcagcccttgagca

SEQ ID NO: 5230164 - DNA, 25 bp, Homo sapien
ccacccctctggtatctagtgatgt

SEQ ID NO: 5230165 - DNA, 25 bp, Homo sapien
tattagaaacatgaactgggcagaa

SEQ ID NO: 5230166 - DNA, 25 bp, Homo sapien
tatcttttgctgtctaagccacttt

SEQ ID NO: 5230167 - DNA, 25 bp, Homo sapien
ggtacactttagtttatgcttggag

SEQ ID NO: 5230168 - DNA, 25 bp, Homo sapien
taatgccgaatcttaacactacatc

SEQ ID NO: 5230169 - DNA, 25 bp, Homo sapien
aaacttcacgtagtttctaaggctg

SEQ ID NO: 5230170 - DNA, 25 bp, Homo sapien
tccaaagtctcattcgaaataaggc

SEQ ID NO: 5230171 - DNA, 25 bp, Homo sapien
gaacagcaagacttggccccgtgag

SEQ ID NO: 5230172 - DNA, 25 bp, Homo sapien
tcttaacgtagatggcagtaggcaa

SEQ ID NO: 5230173 - DNA, 25 bp, Homo sapien
cttggccccgtgagtcaattacctc

SEQ ID NO: 5230174 - DNA, 25 bp, Homo sapien
ttatgtgtcaggcatcattttaatt

SEQ ID NO: 5230175 - DNA, 25 bp, Homo sapien
gatgtttctagtcaacgaaggacca

SEQ ID NO: 5230176 - DNA, 25 bp, Homo sapien
tttcctctggtaatatgttagcccc

SEQ ID NO: 5230177 - DNA, 25 bp, Homo sapien
gtatactgtaatgcaccacataatg

SEQ ID NO: 5230178 - DNA, 25 bp, Homo sapien
gaatctaaggataatttgcctgcag

SEQ ID NO: 5230179 - DNA, 25 bp, Homo sapien
tgttgtaatctttctgattggatgg

SEQ ID NO: 5230180 - DNA, 25 bp, Homo sapien
ctttctgattggatggtaaatgcat

SEQ ID NO: 5230181 - DNA, 25 bp, Homo sapien
gcagtcatctatcatgttgtaatct

SEQ ID NO: 5230182 - DNA, 25 bp, Homo sapien
ccaaagcagtcatctatcatgttgt

SEQ ID NO: 5230183 - DNA, 25 bp, Homo sapien
tagtacatgtcttagattccaaatg

SEQ ID NO: 5230184 - DNA, 25 bp, Homo sapien
tgtgcttgacatcgagtgctgaatg

SEQ ID NO: 5230185 - DNA, 25 bp, Homo sapien
gctgaatgtagtttagtacatgtct

SEQ ID NO: 5230186 - DNA, 25 bp, Homo sapien
taaggatatggatctttcacactcc

SEQ ID NO: 5230187 - DNA, 25 bp, Homo sapien
ttcttgccttcaggcttcttctcct

SEQ ID NO: 5230188 - DNA, 25 bp, Homo sapien
ccactagtgtcagccttcttgcctt

SEQ ID NO: 5230189 - DNA, 25 bp, Homo sapien
ttgccactagtgtcagccttcttgc

SEQ ID NO: 5230190 - DNA, 25 bp, Homo sapien
tgccttcaggcttcttctccttagt

SEQ ID NO: 5230191 - DNA, 25 bp, Homo sapien
aattgacaggatttcggcctttgga

SEQ ID NO: 5230192 - DNA, 25 bp, Homo sapien
tcttctgacaattgacaggatttcg

SEQ ID NO: 5230193 - DNA, 25 bp, Homo sapien
tcaggcatatctgccaattcttctg

SEQ ID NO: 5230194 - DNA, 25 bp, Homo sapien
aggcatatctgccaattcttctgac

SEQ ID NO: 5230195 - DNA, 25 bp, Homo sapien
gtcaccgccaactgattttctaatg

SEQ ID NO: 5230196 - DNA, 25 bp, Homo sapien
ttgtcaccgccaactgattttctaa

SEQ ID NO: 5230197 - DNA, 25 bp, Homo sapien
actgttcttgtcaccgccaactgat

SEQ ID NO: 5230198 - DNA, 25 bp, Homo sapien
tgttcttgtcaccgccaactgattt

SEQ ID NO: 5230199 - DNA, 25 bp, Homo sapien
gatccagttacaggtaacaagccaa

SEQ ID NO: 5230200 - DNA, 25 bp, Homo sapien
tcgactgaggaccagagatccagtt

SEQ ID NO: 5230201 - DNA, 25 bp, Homo sapien
tgtttgaggatttcatattgctgag

SEQ ID NO: 5230202 - DNA, 25 bp, Homo sapien
taagcatcagtatgatgtttgagga

SEQ ID NO: 5230203 - DNA, 25 bp, Homo sapien
ggagtgtatgtagcttatatgcaca

SEQ ID NO: 5230204 - DNA, 25 bp, Homo sapien
taagggacttgaccatttccgcaga

SEQ ID NO: 5230205 - DNA, 25 bp, Homo sapien
aaaacttgtggctcagatggcttca

SEQ ID NO: 5230206 - DNA, 25 bp, Homo sapien
caaatgaccaaactgacacaatgag

SEQ ID NO: 5230207 - DNA, 25 bp, Homo sapien
gaagaagactaaatttgcccatccc

SEQ ID NO: 5230208 - DNA, 25 bp, Homo sapien
caacctcagatagtccttggacatc

SEQ ID NO: 5230209 - DNA, 25 bp, Homo sapien
ttccatacaagagaagaggcgtggt

SEQ ID NO: 5230210 - DNA, 25 bp, Homo sapien
tcagtttaggcagttgacactaggt

SEQ ID NO: 5230211 - DNA, 25 bp, Homo sapien
tgtactactcttttatcgtataggc

SEQ ID NO: 5230212 - DNA, 25 bp, Homo sapien
gactaaatattgagagcaaatgaca

SEQ ID NO: 5230213 - DNA, 25 bp, Homo sapien
gcaacatgagtattagtgtactact

SEQ ID NO: 5230214 - DNA, 25 bp, Homo sapien
tcttgtgggaaagactgtactcaac

SEQ ID NO: 5230215 - DNA, 25 bp, Homo sapien
tcttgaataggctgtggacaaggcc

SEQ ID NO: 5230216 - DNA, 25 bp, Homo sapien
cctaatctttgtttaagtgatctag

SEQ ID NO: 5230217 - DNA, 25 bp, Homo sapien
tactcaacttttctatctaggaaaa

SEQ ID NO: 5230218 - DNA, 25 bp, Homo sapien
gcatattttctattcttgaataggc

SEQ ID NO: 5230219 - DNA, 25 bp, Homo sapien
tctttagcggttatctgacactgtc

SEQ ID NO: 5230220 - DNA, 25 bp, Homo sapien
tctaggcaggagtaaatgcatattc

SEQ ID NO: 5230221 - DNA, 25 bp, Homo sapien
tgcagatacgtttagaggagacatt

SEQ ID NO: 5230222 - DNA, 25 bp, Homo sapien
cactgtctccgctattttctaggca

SEQ ID NO: 5230223 - DNA, 25 bp, Homo sapien
aaacttcaggacattcatgttctgg

SEQ ID NO: 5230224 - DNA, 25 bp, Homo sapien
tctggcgaggtttaggagacaaact

SEQ ID NO: 5230225 - DNA, 25 bp, Homo sapien
gcacattccgtttttgattccccaa

SEQ ID NO: 5230226 - DNA, 25 bp, Homo sapien
acaaacttccttcgtctttagccag

SEQ ID NO: 5230227 - DNA, 25 bp, Homo sapien
ggctggctttgcagtcgggagggca

SEQ ID NO: 5230228 - DNA, 25 bp, Homo sapien
gcaggcactggatggacgttcttgt

SEQ ID NO: 5230229 - DNA, 25 bp, Homo sapien
tggccgtttcagaaaccacaggaaa

SEQ ID NO: 5230230 - DNA, 25 bp, Homo sapien
caggcggtatcctggccgtttcaga

SEQ ID NO: 5230231 - DNA, 25 bp, Homo sapien
ttttgttttggctggcgcgtgcgca

SEQ ID NO: 5230232 - DNA, 25 bp, Homo sapien
tgcgcagaaggcagaacacgtggtt

SEQ ID NO: 5230233 - DNA, 25 bp, Homo sapien
gtggtttcctggacccgcctcttgc

SEQ ID NO: 5230234 - DNA, 25 bp, Homo sapien
catcggctgagcctcacccattggg

SEQ ID NO: 5230235 - DNA, 25 bp, Homo sapien
ttcgccccccgaatcctctgggctg

SEQ ID NO: 5230236 - DNA, 25 bp, Homo sapien
tggacttgcgggtcaggcgaccgac

SEQ ID NO: 5230237 - DNA, 25 bp, Homo sapien
ttccctcttggggacggcggcagcg

SEQ ID NO: 5230238 - DNA, 25 bp, Homo sapien
ctggactctggtctcggcacgggat

SEQ ID NO: 5230239 - DNA, 25 bp, Homo sapien
gccggaccgaaggtgcggcggcgga

SEQ ID NO: 5230240 - DNA, 25 bp, Homo sapien
cacggccggaccgaaggtgcggcgg

SEQ ID NO: 5230241 - DNA, 25 bp, Homo sapien
ccaccacggccggaccgaaggtgcg

SEQ ID NO: 5230242 - DNA, 25 bp, Homo sapien
cggaccgaaggtgcggcggcggagg

SEQ ID NO: 5230243 - DNA, 25 bp, Homo sapien
cggattacgctttgttatgactgca

SEQ ID NO: 5230244 - DNA, 25 bp, Homo sapien
tgtccccagggactaggacagtcct

SEQ ID NO: 5230245 - DNA, 25 bp, Homo sapien
ctagaagaaccaggaacgagtagct

SEQ ID NO: 5230246 - DNA, 25 bp, Homo sapien
cccatatcgaggtgcaattattcag

SEQ ID NO: 5230247 - DNA, 25 bp, Homo sapien
tacagatacagacacaggcagttat

SEQ ID NO: 5230248 - DNA, 25 bp, Homo sapien
gtaactagttttgagaccattgtcc

SEQ ID NO: 5230249 - DNA, 25 bp, Homo sapien
catttactaccaggtatcagaggaa

SEQ ID NO: 5230250 - DNA, 25 bp, Homo sapien
tagaaaggaccgtgtagtccatgac

SEQ ID NO: 5230251 - DNA, 25 bp, Homo sapien
tacagggcattcctaggtggtagca

SEQ ID NO: 5230252 - DNA, 25 bp, Homo sapien
taggcaccagggttaagacttggac

SEQ ID NO: 5230253 - DNA, 25 bp, Homo sapien
tcagggctcaagcagtggacataca

SEQ ID NO: 5230254 - DNA, 25 bp, Homo sapien
tggagaacccgtcgcattacacttg

SEQ ID NO: 5230255 - DNA, 25 bp, Homo sapien
ttttgtggcttttgcccagtagcat

SEQ ID NO: 5230256 - DNA, 25 bp, Homo sapien
tttttgtggcttttgcccagtagca

SEQ ID NO: 5230257 - DNA, 25 bp, Homo sapien
atttttgtggcttttgcccagtagc

SEQ ID NO: 5230258 - DNA, 25 bp, Homo sapien
aatttcagccctactcacatcattt

SEQ ID NO: 5230259 - DNA, 25 bp, Homo sapien
tcctgtaggcttctgctcaatttca

SEQ ID NO: 5230260 - DNA, 25 bp, Homo sapien
aaatgcaggagaaactttttatact

SEQ ID NO: 5230261 - DNA, 25 bp, Homo sapien
gtgctttaaccatcctctgtgcttc

SEQ ID NO: 5230262 - DNA, 25 bp, Homo sapien
ttaatgtccgacatcattgaaactt

SEQ ID NO: 5230263 - DNA, 25 bp, Homo sapien
gacatcattgaaactttgtagtcac

SEQ ID NO: 5230264 - DNA, 25 bp, Homo sapien
ttgaatttaatgtccgacatcattg

SEQ ID NO: 5230265 - DNA, 25 bp, Homo sapien
tgtccgacatcattgaaactttgta

SEQ ID NO: 5230266 - DNA, 25 bp, Homo sapien
aagtagtacttggttaacatccaca

SEQ ID NO: 5230267 - DNA, 25 bp, Homo sapien
cactcaatgtttagccttccttcga

SEQ ID NO: 5230268 - DNA, 25 bp, Homo sapien
tggaactgggcctgtatttacttaa

SEQ ID NO: 5230269 - DNA, 25 bp, Homo sapien
tgaatagaaacttgcaacctgctcc

SEQ ID NO: 5230270 - DNA, 25 bp, Homo sapien
catccttcctgccaatcatactgag

SEQ ID NO: 5230271 - DNA, 25 bp, Homo sapien
gtgcctttgcttggtggcacctgct

SEQ ID NO: 5230272 - DNA, 25 bp, Homo sapien
gagcacccatactgaaccaccatgt

SEQ ID NO: 5230273 - DNA, 25 bp, Homo sapien
tggatacccacaatttgccaatgtg

SEQ ID NO: 5230274 - DNA, 25 bp, Homo sapien
tctgcaggacttgctatgccattat

SEQ ID NO: 5230275 - DNA, 25 bp, Homo sapien
gccagcagcaataatccccagtctc

SEQ ID NO: 5230276 - DNA, 25 bp, Homo sapien
gcgagtatcccacaacctctgcagg

SEQ ID NO: 5230277 - DNA, 25 bp, Homo sapien
tcatgcacagcatggcgagtatccc

SEQ ID NO: 5230278 - DNA, 25 bp, Homo sapien
gagcagaacaaggaactggatcttt

SEQ ID NO: 5230279 - DNA, 25 bp, Homo sapien
gaactggatctttaactgactgtga

SEQ ID NO: 5230280 - DNA, 25 bp, Homo sapien
ggaactggatctttaactgactgtg

SEQ ID NO: 5230281 - DNA, 25 bp, Homo sapien
actggatctttaactgactgtgacc

SEQ ID NO: 5230282 - DNA, 25 bp, Homo sapien
gcacctggctgaaacctttaaatgt

SEQ ID NO: 5230283 - DNA, 25 bp, Homo sapien
gaataagatttaccttgtcagaaga

SEQ ID NO: 5230284 - DNA, 25 bp, Homo sapien
taataaagtcctatcatctcctggc

SEQ ID NO: 5230285 - DNA, 25 bp, Homo sapien
aatagactgtccagattttccatga

SEQ ID NO: 5230286 - DNA, 25 bp, Homo sapien
ttaattgatttatttgcgatagggt

SEQ ID NO: 5230287 - DNA, 25 bp, Homo sapien
catagcccactgcaagccttaacct

SEQ ID NO: 5230288 - DNA, 25 bp, Homo sapien
ctgcttcataaaacaagattccgga

SEQ ID NO: 5230289 - DNA, 25 bp, Homo sapien
gagcactggttccagcttggccctg

SEQ ID NO: 5230290 - DNA, 25 bp, Homo sapien
taaaacaagattccggagcactggt

SEQ ID NO: 5230291 - DNA, 25 bp, Homo sapien
acaagattccggagcactggttcca

SEQ ID NO: 5230292 - DNA, 25 bp, Homo sapien
gacatgaatactctcttgggcccga

SEQ ID NO: 5230293 - DNA, 25 bp, Homo sapien
gaggccgccagtctctcaagaatgc

SEQ ID NO: 5230294 - DNA, 25 bp, Homo sapien
aatgcctaacgtgccatagggtggc

SEQ ID NO: 5230295 - DNA, 25 bp, Homo sapien
tacagcagcataagagtgccctttg

SEQ ID NO: 5230296 - DNA, 25 bp, Homo sapien
ttcatttgaaagagtgcggtacaaa

SEQ ID NO: 5230297 - DNA, 25 bp, Homo sapien
tgatgagaatcaatatgtgtgcttg

SEQ ID NO: 5230298 - DNA, 25 bp, Homo sapien
cagggccgccaacgatttcacactt

SEQ ID NO: 5230299 - DNA, 25 bp, Homo sapien
agagtgcggtacaaatggtcccgtg

SEQ ID NO: 5230300 - DNA, 25 bp, Homo sapien
tgtggcaggagaagcaatgagacag

SEQ ID NO: 5230301 - DNA, 25 bp, Homo sapien
agcaatgagacaggtcaggagcatg

SEQ ID NO: 5230302 - DNA, 25 bp, Homo sapien
tggcaggagaagcaatgagacaggt

SEQ ID NO: 5230303 - DNA, 25 bp, Homo sapien
gaagcaatgagacaggtcaggagca

SEQ ID NO: 5230304 - DNA, 25 bp, Homo sapien
taaagaaccattgaggtaatgagta

SEQ ID NO: 5230305 - DNA, 25 bp, Homo sapien
gctaaagaaccattgaggtaatgag

SEQ ID NO: 5230306 - DNA, 25 bp, Homo sapien
caaatgctaaagaaccattgaggta

SEQ ID NO: 5230307 - DNA, 25 bp, Homo sapien
gcctctggggtatcagttcctgaat

SEQ ID NO: 5230308 - DNA, 25 bp, Homo sapien
gatgggcttttgcagatcttgtacg

SEQ ID NO: 5230309 - DNA, 25 bp, Homo sapien
tctttgggcagatgggcttttgcag

SEQ ID NO: 5230310 - DNA, 25 bp, Homo sapien
ctcagagaactctccaaggattctt

SEQ ID NO: 5230311 - DNA, 25 bp, Homo sapien
caaggattctttgggcagatgggct

SEQ ID NO: 5230312 - DNA, 25 bp, Homo sapien
gtaagaaatcgaatgggaaaggagc

SEQ ID NO: 5230313 - DNA, 25 bp, Homo sapien
agaaatcgaatgggaaaggagctaa

SEQ ID NO: 5230314 - DNA, 25 bp, Homo sapien
ataggtaagaaatcgaatgggaaag

SEQ ID NO: 5230315 - DNA, 25 bp, Homo sapien
gataggtaagaaatcgaatgggaaa

SEQ ID NO: 5230316 - DNA, 25 bp, Homo sapien
gctcaggccctttgaatccataggc

SEQ ID NO: 5230317 - DNA, 25 bp, Homo sapien
cataggctcctgcaaagcctgtagc

SEQ ID NO: 5230318 - DNA, 25 bp, Homo sapien
cagcagggactggtagtgtcttgcc

SEQ ID NO: 5230319 - DNA, 25 bp, Homo sapien
catttgggctcaggccctttgaatc

SEQ ID NO: 5230320 - DNA, 25 bp, Homo sapien
aagccttctcaagttggaagaatag

SEQ ID NO: 5230321 - DNA, 25 bp, Homo sapien
gaaagaggggagccagaatagtaat

SEQ ID NO: 5230322 - DNA, 25 bp, Homo sapien
ccttctcaagttggaagaataggaa

SEQ ID NO: 5230323 - DNA, 25 bp, Homo sapien
cccagaggaataacaagccttctca

SEQ ID NO: 5230324 - DNA, 25 bp, Homo sapien
tgagttcagcattcagggtttttgg

SEQ ID NO: 5230325 - DNA, 25 bp, Homo sapien
tgactgatttctgtcttaccccatg

SEQ ID NO: 5230326 - DNA, 25 bp, Homo sapien
gttcagcattcagggtttttggaag

SEQ ID NO: 5230327 - DNA, 25 bp, Homo sapien
ccccatgtatcatttggatgcttgg

SEQ ID NO: 5230328 - DNA, 25 bp, Homo sapien
taggtcggcctaggaccttgtgatg

SEQ ID NO: 5230329 - DNA, 25 bp, Homo sapien
tgtaggtcggcctaggaccttgtga

SEQ ID NO: 5230330 - DNA, 25 bp, Homo sapien
ctgtaggtcggcctaggaccttgtg

SEQ ID NO: 5230331 - DNA, 25 bp, Homo sapien
gctgtaggtcggcctaggaccttgt

SEQ ID NO: 5230332 - DNA, 25 bp, Homo sapien
cttgatgatgagcaaggtggaggga

SEQ ID NO: 5230333 - DNA, 25 bp, Homo sapien
gagcaaggtggagggaaatttgaag

SEQ ID NO: 5230334 - DNA, 25 bp, Homo sapien
tgatgagcaaggtggagggaaattt

SEQ ID NO: 5230335 - DNA, 25 bp, Homo sapien
tgaagacaaagagtcctttgccccc

SEQ ID NO: 5230336 - DNA, 25 bp, Homo sapien
ttgcattggaaaagatcttagcctt

SEQ ID NO: 5230337 - DNA, 25 bp, Homo sapien
tgcattggaaaagatcttagccttt

SEQ ID NO: 5230338 - DNA, 25 bp, Homo sapien
tttgcattggaaaagatcttagcct

SEQ ID NO: 5230339 - DNA, 25 bp, Homo sapien
tactcctgtttcctaggctttgctc

SEQ ID NO: 5230340 - DNA, 25 bp, Homo sapien
tcctgtttcctaggctttgctcctt

SEQ ID NO: 5230341 - DNA, 25 bp, Homo sapien
tatatactcctgtttcctaggcttt

SEQ ID NO: 5230342 - DNA, 25 bp, Homo sapien
ctgtttcctaggctttgctcctttt

SEQ ID NO: 5230343 - DNA, 25 bp, Homo sapien
caaaggttgtcaaaggtcatcaagc

SEQ ID NO: 5230344 - DNA, 25 bp, Homo sapien
ccatagataccatggacggcggtgt

SEQ ID NO: 5230345 - DNA, 25 bp, Homo sapien
tattgagctgtagacgaactgtttc

SEQ ID NO: 5230346 - DNA, 25 bp, Homo sapien
gcttccgctaagtaagagcacctca

SEQ ID NO: 5230347 - DNA, 25 bp, Homo sapien
tcacttgtgtaagttggcactacct

SEQ ID NO: 5230348 - DNA, 25 bp, Homo sapien
tatctcctgtttagcaccaaaagag

SEQ ID NO: 5230349 - DNA, 25 bp, Homo sapien
ggtagcagtctcctattatctcctg

SEQ ID NO: 5230350 - DNA, 25 bp, Homo sapien
gctctcttggtcacaaaaacatgct

SEQ ID NO: 5230351 - DNA, 25 bp, Homo sapien
tgctgtatcctgtccaggttttaga

SEQ ID NO: 5230352 - DNA, 25 bp, Homo sapien
tggtttggtgctacttcagattcct

SEQ ID NO: 5230353 - DNA, 25 bp, Homo sapien
ttcagagacctcaaatagctgctgt

SEQ ID NO: 5230354 - DNA, 25 bp, Homo sapien
cacaaggtgcagagcatgcttgctc

SEQ ID NO: 5230355 - DNA, 25 bp, Homo sapien
gaatggagttaatgccgtggttcaa

SEQ ID NO: 5230356 - DNA, 25 bp, Homo sapien
cttatggccccaacgttactgagct

SEQ ID NO: 5230357 - DNA, 25 bp, Homo sapien
ggtaatgtatgtcctaacatcagca

SEQ ID NO: 5230358 - DNA, 25 bp, Homo sapien
taagtcctagtaatcatcgaaccca

SEQ ID NO: 5230359 - DNA, 25 bp, Homo sapien
accaactctgggattcactgatttt

SEQ ID NO: 5230360 - DNA, 25 bp, Homo sapien
actatggcctgagagactgttagga

SEQ ID NO: 5230361 - DNA, 25 bp, Homo sapien
aaaaaaccaactctgggattcactg

SEQ ID NO: 5230362 - DNA, 25 bp, Homo sapien
cactttccgtgtagttgtgcagttc

SEQ ID NO: 5230363 - DNA, 25 bp, Homo sapien
cagtcagagaatactttcacttctt

SEQ ID NO: 5230364 - DNA, 25 bp, Homo sapien
tgcagtcagagaatactttcacttc

SEQ ID NO: 5230365 - DNA, 25 bp, Homo sapien
gtcagagaatactttcacttcttat

SEQ ID NO: 5230366 - DNA, 25 bp, Homo sapien
ttgcagtcagagaatactttcactt

SEQ ID NO: 5230367 - DNA, 25 bp, Homo sapien
gatatagaaagacaggtggtcatac

SEQ ID NO: 5230368 - DNA, 25 bp, Homo sapien
ctgatatagaaagacaggtggtcat

SEQ ID NO: 5230369 - DNA, 25 bp, Homo sapien
tgatatagaaagacaggtggtcata

SEQ ID NO: 5230370 - DNA, 25 bp, Homo sapien
gctgggcatatgtcctactcagtgg

SEQ ID NO: 5230371 - DNA, 25 bp, Homo sapien
tgctgtgcacagtaacaacagtgct

SEQ ID NO: 5230372 - DNA, 25 bp, Homo sapien
gaaatgcacatggtcaacattcagc

SEQ ID NO: 5230373 - DNA, 25 bp, Homo sapien
gagtatttgaaagccacggcccaca

SEQ ID NO: 5230374 - DNA, 25 bp, Homo sapien
tggccagaacatagtcacgtagtca

SEQ ID NO: 5230375 - DNA, 25 bp, Homo sapien
gccagaacatagtcacgtagtcact

SEQ ID NO: 5230376 - DNA, 25 bp, Homo sapien
gaacatagtcacgtagtcactcttg

SEQ ID NO: 5230377 - DNA, 25 bp, Homo sapien
tagtcacgtagtcactcttgttagc

SEQ ID NO: 5230378 - DNA, 25 bp, Homo sapien
tcaggatgttaataggaaccccagc

SEQ ID NO: 5230379 - DNA, 25 bp, Homo sapien
cagaaagagttggtcagtccaggcc

SEQ ID NO: 5230380 - DNA, 25 bp, Homo sapien
agtccaggcctgatagtgtagcttc

SEQ ID NO: 5230381 - DNA, 25 bp, Homo sapien
tacgtatgggctgatagctaacact

SEQ ID NO: 5230382 - DNA, 25 bp, Homo sapien
tagcaaagacatttcactccaaagt

SEQ ID NO: 5230383 - DNA, 25 bp, Homo sapien
gcacagcgcacagttgtcttgagtt

SEQ ID NO: 5230384 - DNA, 25 bp, Homo sapien
caagaaggaaggtataacagctgcc

SEQ ID NO: 5230385 - DNA, 25 bp, Homo sapien
tattgctagggctagttgagaaccc

SEQ ID NO: 5230386 - DNA, 25 bp, Homo sapien
tttgatgaggttaagaaagcaacta

SEQ ID NO: 5230387 - DNA, 25 bp, Homo sapien
atgaatttgatgaggttaagaaagc

SEQ ID NO: 5230388 - DNA, 25 bp, Homo sapien
aatttgatgaggttaagaaagcaac

SEQ ID NO: 5230389 - DNA, 25 bp, Homo sapien
tgatgaggttaagaaagcaactaca

SEQ ID NO: 5230390 - DNA, 25 bp, Homo sapien
cagaagtaaactccagataaagact

SEQ ID NO: 5230391 - DNA, 25 bp, Homo sapien
tttagacgcatgcttcacatcatct

SEQ ID NO: 5230392 - DNA, 25 bp, Homo sapien
cttccgtttagacgcatgcttcaca

SEQ ID NO: 5230393 - DNA, 25 bp, Homo sapien
gaagtaaactccagataaagactta

SEQ ID NO: 5230394 - DNA, 25 bp, Homo sapien
taccgacacacctatgaccagcatg

SEQ ID NO: 5230395 - DNA, 25 bp, Homo sapien
cagtagaacacgagggaagtgacaa

SEQ ID NO: 5230396 - DNA, 25 bp, Homo sapien
gaacacgagggaagtgacaaatccc

SEQ ID NO: 5230397 - DNA, 25 bp, Homo sapien
cttctcacaagctgcaataccgaca

SEQ ID NO: 5230398 - DNA, 25 bp, Homo sapien
cacccagcaggtacattgagagaaa

SEQ ID NO: 5230399 - DNA, 25 bp, Homo sapien
catagtgcgcttggtgtacatctgt

SEQ ID NO: 5230400 - DNA, 25 bp, Homo sapien
gaaaggctgccagtgccataagaaa

SEQ ID NO: 5230401 - DNA, 25 bp, Homo sapien
tgtgttccatataatagcagctctc

SEQ ID NO: 5230402 - DNA, 25 bp, Homo sapien
gagatcatggtacagcagggccctc

SEQ ID NO: 5230403 - DNA, 25 bp, Homo sapien
gccaggaccagcttggagacataga

SEQ ID NO: 5230404 - DNA, 25 bp, Homo sapien
ccttctctgggatcacggtgcagtg

SEQ ID NO: 5230405 - DNA, 25 bp, Homo sapien
tctttggcaatctggcaccgtggct

SEQ ID NO: 5230406 - DNA, 25 bp, Homo sapien
ctgtgtctagatgcaagcgaggctg

SEQ ID NO: 5230407 - DNA, 25 bp, Homo sapien
atactcataacgtgtcagtttctcc

SEQ ID NO: 5230408 - DNA, 25 bp, Homo sapien
ccatgtagggcaggaaatactcata

SEQ ID NO: 5230409 - DNA, 25 bp, Homo sapien
gcgaggctgggaattcaagttcaaa

SEQ ID NO: 5230410 - DNA, 25 bp, Homo sapien
tgttagcaacaaactactcactctg

SEQ ID NO: 5230411 - DNA, 25 bp, Homo sapien
ataaagtctgctggtttaaggcagc

SEQ ID NO: 5230412 - DNA, 25 bp, Homo sapien
taaagtctgctggtttaaggcagca

SEQ ID NO: 5230413 - DNA, 25 bp, Homo sapien
ccaaagttgttagcaacaaactact

SEQ ID NO: 5230414 - DNA, 25 bp, Homo sapien
gctgtaagttctttataatttcaaa

SEQ ID NO: 5230415 - DNA, 25 bp, Homo sapien
tataatttcaaagcctcatgcagga

SEQ ID NO: 5230416 - DNA, 25 bp, Homo sapien
tctttataatttcaaagcctcatgc

SEQ ID NO: 5230417 - DNA, 25 bp, Homo sapien
tttataatttcaaagcctcatgcag

SEQ ID NO: 5230418 - DNA, 25 bp, Homo sapien
tagcttgataataactgagattagt

SEQ ID NO: 5230419 - DNA, 25 bp, Homo sapien
tgtccactacccacattagcttgat

SEQ ID NO: 5230420 - DNA, 25 bp, Homo sapien
cacggtgttgtccactacccacatt

SEQ ID NO: 5230421 - DNA, 25 bp, Homo sapien
tgagattagttcttgcaggatcacc

SEQ ID NO: 5230422 - DNA, 25 bp, Homo sapien
tgcacagaaagtagccatgagttct

SEQ ID NO: 5230423 - DNA, 25 bp, Homo sapien
gagtctattttctgcacagaaagta

SEQ ID NO: 5230424 - DNA, 25 bp, Homo sapien
tcaggcagatgagcttaagaagcct

SEQ ID NO: 5230425 - DNA, 25 bp, Homo sapien
gaagcctcctagagtttcagagtct

SEQ ID NO: 5230426 - DNA, 25 bp, Homo sapien
gagcagctaagaaaagatgagccac

SEQ ID NO: 5230427 - DNA, 25 bp, Homo sapien
gcaaacaaacttctgaccgttagag

SEQ ID NO: 5230428 - DNA, 25 bp, Homo sapien
cagctaagaaaagatgagccacatc

SEQ ID NO: 5230429 - DNA, 25 bp, Homo sapien
tatacacaggatggctggaaacagg

SEQ ID NO: 5230430 - DNA, 25 bp, Homo sapien
aaagcccttttacatgccaagcatg

SEQ ID NO: 5230431 - DNA, 25 bp, Homo sapien
gaagttgacccacaccctaggaatc

SEQ ID NO: 5230432 - DNA, 25 bp, Homo sapien
taaatatcctctacgcatgtgacta

SEQ ID NO: 5230433 - DNA, 25 bp, Homo sapien
gccaatactggctaaaaggtctgat

SEQ ID NO: 5230434 - DNA, 25 bp, Homo sapien
agtccaaagcgtttcagtactccca

SEQ ID NO: 5230435 - DNA, 25 bp, Homo sapien
actcccaagctctgactactttttt

SEQ ID NO: 5230436 - DNA, 25 bp, Homo sapien
ggagtccaaagcgtttcagtactcc

SEQ ID NO: 5230437 - DNA, 25 bp, Homo sapien
gctggagtccaaagcgtttcagtac

SEQ ID NO: 5230438 - DNA, 25 bp, Homo sapien
tgagattgtgtgataagacttttta

SEQ ID NO: 5230439 - DNA, 25 bp, Homo sapien
tatgagattgtgtgataagactttt

SEQ ID NO: 5230440 - DNA, 25 bp, Homo sapien
gagattgtgtgataagactttttag

SEQ ID NO: 5230441 - DNA, 25 bp, Homo sapien
tttatgagattgtgtgataagactt

SEQ ID NO: 5230442 - DNA, 25 bp, Homo sapien
tttccatttttggtgtgcagtcaca

SEQ ID NO: 5230443 - DNA, 25 bp, Homo sapien
cagaaaggagcctgatgccaggtct

SEQ ID NO: 5230444 - DNA, 25 bp, Homo sapien
gtgtcctcaccactttgaaagctgt

SEQ ID NO: 5230445 - DNA, 25 bp, Homo sapien
cagtcacattggtaaagccaaaacc

SEQ ID NO: 5230446 - DNA, 25 bp, Homo sapien
tgtatttgccttgtaagggacacct

SEQ ID NO: 5230447 - DNA, 25 bp, Homo sapien
gcttcactgctaaactataccccat

SEQ ID NO: 5230448 - DNA, 25 bp, Homo sapien
tacttcagagctacattcaaaactg

SEQ ID NO: 5230449 - DNA, 25 bp, Homo sapien
catttgctaagtcagtaggttccac

SEQ ID NO: 5230450 - DNA, 25 bp, Homo sapien
taatgaacgtcttcataaagttgca

SEQ ID NO: 5230451 - DNA, 25 bp, Homo sapien
cgtcttcataaagttgcaggaagga

SEQ ID NO: 5230452 - DNA, 25 bp, Homo sapien
tctgataatgaacgtcttcataaag

SEQ ID NO: 5230453 - DNA, 25 bp, Homo sapien
cctacaggaatttcataattcaatg

SEQ ID NO: 5230454 - DNA, 25 bp, Homo sapien
tgtcaccatgagctagaactgcttt

SEQ ID NO: 5230455 - DNA, 25 bp, Homo sapien
aagtactcaatttcgcggtttctgg

SEQ ID NO: 5230456 - DNA, 25 bp, Homo sapien
gggtctgatgaagatgcacctatcc

SEQ ID NO: 5230457 - DNA, 25 bp, Homo sapien
gaaatgatggcttagtgctcctaca

SEQ ID NO: 5230458 - DNA, 25 bp, Homo sapien
ggaggaacctacatatcataagcta

SEQ ID NO: 5230459 - DNA, 25 bp, Homo sapien
tcagtctgcattatagaagaaactt

SEQ ID NO: 5230460 - DNA, 25 bp, Homo sapien
cataatgtagcaaccctattgattc

SEQ ID NO: 5230461 - DNA, 25 bp, Homo sapien
aattagtcagttacctccctatgaa

SEQ ID NO: 5230462 - DNA, 25 bp, Homo sapien
taatatggatatcaagaaaaatgcc

SEQ ID NO: 5230463 - DNA, 25 bp, Homo sapien
gagcctacacgtattgtgaatctgg

SEQ ID NO: 5230464 - DNA, 25 bp, Homo sapien
taaacatactccaaagaaataggcc

SEQ ID NO: 5230465 - DNA, 25 bp, Homo sapien
taaattactagtctctacggcctag

SEQ ID NO: 5230466 - DNA, 25 bp, Homo sapien
gctgtagagggctgcattgccccat

SEQ ID NO: 5230467 - DNA, 25 bp, Homo sapien
taatggaaaaacttgctgccctgct

SEQ ID NO: 5230468 - DNA, 25 bp, Homo sapien
tttgcactgatcctaggcccttgag

SEQ ID NO: 5230469 - DNA, 25 bp, Homo sapien
gctgtgatgaataaggagatccacc

SEQ ID NO: 5230470 - DNA, 25 bp, Homo sapien
gtcagtcctttgtgcataaatgtct

SEQ ID NO: 5230471 - DNA, 25 bp, Homo sapien
aatgtcttcctcgttgccttttaca

SEQ ID NO: 5230472 - DNA, 25 bp, Homo sapien
ctctgtcagtcctttgtgcataaat

SEQ ID NO: 5230473 - DNA, 25 bp, Homo sapien
tcctggtactgcttcctagtaccca

SEQ ID NO: 5230474 - DNA, 25 bp, Homo sapien
tccaggacaatgtgtgctgtctgtg

SEQ ID NO: 5230475 - DNA, 25 bp, Homo sapien
cttccaggacaatgtgtgctgtctg

SEQ ID NO: 5230476 - DNA, 25 bp, Homo sapien
ccaggacaatgtgtgctgtctgtgc

SEQ ID NO: 5230477 - DNA, 25 bp, Homo sapien
ttccaggacaatgtgtgctgtctgt

SEQ ID NO: 5230478 - DNA, 25 bp, Homo sapien
tggccaaaggagtaacctttcatct

SEQ ID NO: 5230479 - DNA, 25 bp, Homo sapien
aggatggatggccaaaggagtaacc

SEQ ID NO: 5230480 - DNA, 25 bp, Homo sapien
tggatggccaaaggagtaacctttc

SEQ ID NO: 5230481 - DNA, 25 bp, Homo sapien
caaaggagtaacctttcatcttagt

SEQ ID NO: 5230482 - DNA, 25 bp, Homo sapien
gttgtctttcatttacagtagcagg

SEQ ID NO: 5230483 - DNA, 25 bp, Homo sapien
gggaccaccagtgtgcccatgttgt

SEQ ID NO: 5230484 - DNA, 25 bp, Homo sapien
cagtagcaggaagttcatgtctaac

SEQ ID NO: 5230485 - DNA, 25 bp, Homo sapien
taacctgtgtcctcacaacctaagt

SEQ ID NO: 5230486 - DNA, 25 bp, Homo sapien
caccattcccaataatagggttggc

SEQ ID NO: 5230487 - DNA, 25 bp, Homo sapien
gggttggccattgtgagaatctgtc

SEQ ID NO: 5230488 - DNA, 25 bp, Homo sapien
taagtcccagttcatccagagcagt

SEQ ID NO: 5230489 - DNA, 25 bp, Homo sapien
catccagagcagtagtatcaggagc

SEQ ID NO: 5230490 - DNA, 25 bp, Homo sapien
caactcttgtgagtcaatttgcatt

SEQ ID NO: 5230491 - DNA, 25 bp, Homo sapien
taaatcctgagactaaactaggtcc

SEQ ID NO: 5230492 - DNA, 25 bp, Homo sapien
gttttatgatatccactgacatgag

SEQ ID NO: 5230493 - DNA, 25 bp, Homo sapien
gaggttatcacaagatattatccaa

SEQ ID NO: 5230494 - DNA, 25 bp, Homo sapien
gtagccagccagtggttgtagtctt

SEQ ID NO: 5230495 - DNA, 25 bp, Homo sapien
cttcctgtagccattgccctaaact

SEQ ID NO: 5230496 - DNA, 25 bp, Homo sapien
cattgccctaaactcttggtagcca

SEQ ID NO: 5230497 - DNA, 25 bp, Homo sapien
agtctttactataatccagcaccag

SEQ ID NO: 5230498 - DNA, 25 bp, Homo sapien
gcattcttgtgtccactccataaat

SEQ ID NO: 5230499 - DNA, 25 bp, Homo sapien
tgtccactccataaattgcaggaac

SEQ ID NO: 5230500 - DNA, 25 bp, Homo sapien
tattttagtcagcattcttgtgtcc

SEQ ID NO: 5230501 - DNA, 25 bp, Homo sapien
cttatcccgaattattttagtcagc

SEQ ID NO: 5230502 - DNA, 25 bp, Homo sapien
gaaacctcagcaatcaaattctgtt

SEQ ID NO: 5230503 - DNA, 25 bp, Homo sapien
tgaaacctcagcaatcaaattctgt

SEQ ID NO: 5230504 - DNA, 25 bp, Homo sapien
gttgaaacctcagcaatcaaattct

SEQ ID NO: 5230505 - DNA, 25 bp, Homo sapien
cacaggctgaccttcaaattcaatc

SEQ ID NO: 5230506 - DNA, 25 bp, Homo sapien
agtctacagctaccacttttgtggg

SEQ ID NO: 5230507 - DNA, 25 bp, Homo sapien
gtttttaatcccacagtctacagct

SEQ ID NO: 5230508 - DNA, 25 bp, Homo sapien
tactagcaggcggattacattgttt

SEQ ID NO: 5230509 - DNA, 25 bp, Homo sapien
gtttcctttgccgtacactttgaca

SEQ ID NO: 5230510 - DNA, 25 bp, Homo sapien
tttctttgccaaagtataattttgc

SEQ ID NO: 5230511 - DNA, 25 bp, Homo sapien
ggtcctcccgcgatcaaaatcccat

SEQ ID NO: 5230512 - DNA, 25 bp, Homo sapien
cccgcgatcaaaatcccatcatact

SEQ ID NO: 5230513 - DNA, 25 bp, Homo sapien
tactccatcttggtgaaatcatggt

SEQ ID NO: 5230514 - DNA, 25 bp, Homo sapien
ggttctgcaagagctgggttccccg

SEQ ID NO: 5230515 - DNA, 25 bp, Homo sapien
tatgggtcccaaggtcatgataagg

SEQ ID NO: 5230516 - DNA, 25 bp, Homo sapien
ctttgagggtatagagcggaagccc

SEQ ID NO: 5230517 - DNA, 25 bp, Homo sapien
aatacatttggccattggactccag

SEQ ID NO: 5230518 - DNA, 25 bp, Homo sapien
aaatgtatcacagccctttgagggt

SEQ ID NO: 5230519 - DNA, 25 bp, Homo sapien
ctgttggccatggacatcttgtagg

SEQ ID NO: 5230520 - DNA, 25 bp, Homo sapien
ggacatcttgtaggttttggcacca

SEQ ID NO: 5230521 - DNA, 25 bp, Homo sapien
caaacaatggctccttgcgatcact

SEQ ID NO: 5230522 - DNA, 25 bp, Homo sapien
gccaatcctgttattaagtttcctg

SEQ ID NO: 5230523 - DNA, 25 bp, Homo sapien
catttgtttgatcgttgacattcac

SEQ ID NO: 5230524 - DNA, 25 bp, Homo sapien
caaggcatagccatgattctgagca

SEQ ID NO: 5230525 - DNA, 25 bp, Homo sapien
cacaaaaagtggtttccagccagca

SEQ ID NO: 5230526 - DNA, 25 bp, Homo sapien
cagccagcagggagggtgttgtcca

SEQ ID NO: 5230527 - DNA, 25 bp, Homo sapien
caactgaacaggtttattgacatca

SEQ ID NO: 5230528 - DNA, 25 bp, Homo sapien
gaacaggtttattgacatcatttac

SEQ ID NO: 5230529 - DNA, 25 bp, Homo sapien
ctgaacaggtttattgacatcattt

SEQ ID NO: 5230530 - DNA, 25 bp, Homo sapien
aactgaacaggtttattgacatcat

SEQ ID NO: 5230531 - DNA, 25 bp, Homo sapien
aactgcacagcgaagaagggtttgc

SEQ ID NO: 5230532 - DNA, 25 bp, Homo sapien
tcagtgtctattggccccggggtga

SEQ ID NO: 5230533 - DNA, 25 bp, Homo sapien
cagcgaagaagggtttgctctcatg

SEQ ID NO: 5230534 - DNA, 25 bp, Homo sapien
tctgggtggaactgcacagcgaaga

SEQ ID NO: 5230535 - DNA, 25 bp, Homo sapien
ataataggcctcatctttttgacgt

SEQ ID NO: 5230536 - DNA, 25 bp, Homo sapien
taataggcctcatctttttgacgta

SEQ ID NO: 5230537 - DNA, 25 bp, Homo sapien
aataggcctcatctttttgacgtac

SEQ ID NO: 5230538 - DNA, 25 bp, Homo sapien
ttatttggaaagatgggtttgaaca

SEQ ID NO: 5230539 - DNA, 25 bp, Homo sapien
caatgaactaagagctcacacacaa

SEQ ID NO: 5230540 - DNA, 25 bp, Homo sapien
aatacaaaactcctctaagcattcc

SEQ ID NO: 5230541 - DNA, 25 bp, Homo sapien
gggaagtcacaatagacttcagatt

SEQ ID NO: 5230542 - DNA, 25 bp, Homo sapien
ctcaacccgagatgcaactagtgct

SEQ ID NO: 5230543 - DNA, 25 bp, Homo sapien
ctgatgtaatggtggtagcttttcc

SEQ ID NO: 5230544 - DNA, 25 bp, Homo sapien
gctggcttcggtaagactgatgtaa

SEQ ID NO: 5230545 - DNA, 25 bp, Homo sapien
ttcctttctttatcagtgagaaaaa

SEQ ID NO: 5230546 - DNA, 25 bp, Homo sapien
cttgagatcctgagtaatcaaattc

SEQ ID NO: 5230547 - DNA, 25 bp, Homo sapien
gagatcctgagtaatcaaattctcc

SEQ ID NO: 5230548 - DNA, 25 bp, Homo sapien
aatggacagacctcctgatcctaga

SEQ ID NO: 5230549 - DNA, 25 bp, Homo sapien
cctgatcctagaataaggactttgg

SEQ ID NO: 5230550 - DNA, 25 bp, Homo sapien
tggagtgttgatacctcccactatt

SEQ ID NO: 5230551 - DNA, 25 bp, Homo sapien
gaggcaatacgaaagctgcttataa

SEQ ID NO: 5230552 - DNA, 25 bp, Homo sapien
tggagagttcttacaaaggtctatc

SEQ ID NO: 5230553 - DNA, 25 bp, Homo sapien
ctgaaattaggattgtatccccttt

SEQ ID NO: 5230554 - DNA, 25 bp, Homo sapien
gatgacctctgtgacaaactgaggg

SEQ ID NO: 5230555 - DNA, 25 bp, Homo sapien
acagtatccgcttgctttaagccca

SEQ ID NO: 5230556 - DNA, 25 bp, Homo sapien
gttcagagctgtctggccacccatg

SEQ ID NO: 5230557 - DNA, 25 bp, Homo sapien
tgcccagaattaacccatctggctg

SEQ ID NO: 5230558 - DNA, 25 bp, Homo sapien
tgcctgtcttccgtagccataatgg

SEQ ID NO: 5230559 - DNA, 25 bp, Homo sapien
gcacacctctcttgaatagttccac

SEQ ID NO: 5230560 - DNA, 25 bp, Homo sapien
ccataatggactcaactgaagttcc

SEQ ID NO: 5230561 - DNA, 25 bp, Homo sapien
ggactttcacaccatattccttgag

SEQ ID NO: 5230562 - DNA, 25 bp, Homo sapien
aagagagtctggcaatcaggtaaac

SEQ ID NO: 5230563 - DNA, 25 bp, Homo sapien
gcagaacagaccacaccaagagagt

SEQ ID NO: 5230564 - DNA, 25 bp, Homo sapien
gaaatgttctattattccctcatct

SEQ ID NO: 5230565 - DNA, 25 bp, Homo sapien
aatcaggtaaaccaacttatgtggg

SEQ ID NO: 5230566 - DNA, 25 bp, Homo sapien
gaacggatcatcactgggtagccaa

SEQ ID NO: 5230567 - DNA, 25 bp, Homo sapien
gagcctaacccacccagtgcatagg

SEQ ID NO: 5230568 - DNA, 25 bp, Homo sapien
gctgaggtccatcaaagtctctctg

SEQ ID NO: 5230569 - DNA, 25 bp, Homo sapien
acccagtgcataggcggaacggatc

SEQ ID NO: 5230570 - DNA, 25 bp, Homo sapien
tgaagagttgcactgcatgctctcg

SEQ ID NO: 5230571 - DNA, 25 bp, Homo sapien
catcttttggaatacgcttttggag

SEQ ID NO: 5230572 - DNA, 25 bp, Homo sapien
catgctctcgcaaaagtgtcatctt

SEQ ID NO: 5230573 - DNA, 25 bp, Homo sapien
cactttctggatgtcacccatgcca

SEQ ID NO: 5230574 - DNA, 25 bp, Homo sapien
ggtcagcactgaactctcaaacccc

SEQ ID NO: 5230575 - DNA, 25 bp, Homo sapien
aaattggtgacaaaagatatcaaag

SEQ ID NO: 5230576 - DNA, 25 bp, Homo sapien
ctagaaattggtgacaaaagatatc

SEQ ID NO: 5230577 - DNA, 25 bp, Homo sapien
ggcaaaataccctggcataaatcct

SEQ ID NO: 5230578 - DNA, 25 bp, Homo sapien
acttctccaccagaatttggttggt

SEQ ID NO: 5230579 - DNA, 25 bp, Homo sapien
tgtgtgaacacccatggcatcaaca

SEQ ID NO: 5230580 - DNA, 25 bp, Homo sapien
ccaccagaatttggttggtcatagc

SEQ ID NO: 5230581 - DNA, 25 bp, Homo sapien
gcatctcgaaccacttcatattcta

SEQ ID NO: 5230582 - DNA, 25 bp, Homo sapien
ccagagcagagcttcgggacagtct

SEQ ID NO: 5230583 - DNA, 25 bp, Homo sapien
tgcccaagtggcgaacaacattgat

SEQ ID NO: 5230584 - DNA, 25 bp, Homo sapien
caacatctgaaactcggcattggag

SEQ ID NO: 5230585 - DNA, 25 bp, Homo sapien
tgggcaggagccacaacaactgagt

SEQ ID NO: 5230586 - DNA, 25 bp, Homo sapien
taccaattcggctagatgttccatg

SEQ ID NO: 5230587 - DNA, 25 bp, Homo sapien
caaaacaggctgatgtcttcccgga

SEQ ID NO: 5230588 - DNA, 25 bp, Homo sapien
taatccaggctaggttcaaaacagg

SEQ ID NO: 5230589 - DNA, 25 bp, Homo sapien
catgaaaacggtcaagatcccagcg

SEQ ID NO: 5230590 - DNA, 25 bp, Homo sapien
gaaaccttctatagatgggtggcac

SEQ ID NO: 5230591 - DNA, 25 bp, Homo sapien
ggtggcacatccgtaaagctttctg

SEQ ID NO: 5230592 - DNA, 25 bp, Homo sapien
tggcaatggcatagatacgcgtgct

SEQ ID NO: 5230593 - DNA, 25 bp, Homo sapien
tacgcgtgctgcttggttcagacaa

SEQ ID NO: 5230594 - DNA, 25 bp, Homo sapien
tacaaaaaccacttgtcaatgtatg

SEQ ID NO: 5230595 - DNA, 25 bp, Homo sapien
gtttaaaatatcacgcatcttatac

SEQ ID NO: 5230596 - DNA, 25 bp, Homo sapien
atatcacgcatcttatacaaaaacc

SEQ ID NO: 5230597 - DNA, 25 bp, Homo sapien
tgtcaatgtatgtgagcttctcaat

SEQ ID NO: 5230598 - DNA, 25 bp, Homo sapien
gagacaggtagctttagtggccatc

SEQ ID NO: 5230599 - DNA, 25 bp, Homo sapien
tgctaacgccgtggatcatctgtga

SEQ ID NO: 5230600 - DNA, 25 bp, Homo sapien
taccttgatgactaagcctccctgg

SEQ ID NO: 5230601 - DNA, 25 bp, Homo sapien
tcctaggcctacagctaaagacagc

SEQ ID NO: 5230602 - DNA, 25 bp, Homo sapien
aggactgcgcaccaatctctggctc

SEQ ID NO: 5230603 - DNA, 25 bp, Homo sapien
tccaatgcacaagggtggaaccaga

SEQ ID NO: 5230604 - DNA, 25 bp, Homo sapien
gaaccagaaaacccacgtctagcat

SEQ ID NO: 5230605 - DNA, 25 bp, Homo sapien
agaggtgatgtacgtctgattctac

SEQ ID NO: 5230606 - DNA, 25 bp, Homo sapien
ttcttgggccctcacaatatgtcag

SEQ ID NO: 5230607 - DNA, 25 bp, Homo sapien
cctttattacaacaagtagcatttt

SEQ ID NO: 5230608 - DNA, 25 bp, Homo sapien
taagaatagcatttgcatcgtagct

SEQ ID NO: 5230609 - DNA, 25 bp, Homo sapien
gcatcgtagctatcaattgcttcct

SEQ ID NO: 5230610 - DNA, 25 bp, Homo sapien
gatatgctcatcctctgctattaaa

SEQ ID NO: 5230611 - DNA, 25 bp, Homo sapien
tttgggactcaaattctgaacttca

SEQ ID NO: 5230612 - DNA, 25 bp, Homo sapien
ccctgtgtccatgcgtgggtatagt

SEQ ID NO: 5230613 - DNA, 25 bp, Homo sapien
tgtttatcggactttagaactcgag

SEQ ID NO: 5230614 - DNA, 25 bp, Homo sapien
gaaatggccaactttactgagctca

SEQ ID NO: 5230615 - DNA, 25 bp, Homo sapien
gaatgcccaagtggaactcaccagg

SEQ ID NO: 5230616 - DNA, 25 bp, Homo sapien
agggagtgttccagctaacgtgaca

SEQ ID NO: 5230617 - DNA, 25 bp, Homo sapien
gaaattggacccttgaaaagtgcac

SEQ ID NO: 5230618 - DNA, 25 bp, Homo sapien
tgcaaaaatttgaaaacgtgaataa

SEQ ID NO: 5230619 - DNA, 25 bp, Homo sapien
tcatatcccttcatatagttgaaaa

SEQ ID NO: 5230620 - DNA, 25 bp, Homo sapien
atagaaatgtactttaaggtcaccg

SEQ ID NO: 5230621 - DNA, 25 bp, Homo sapien
tatacagtagatgcctgtattttaa

SEQ ID NO: 5230622 - DNA, 25 bp, Homo sapien
gggcaaattcctcacaatgtctcct

SEQ ID NO: 5230623 - DNA, 25 bp, Homo sapien
caatgcaggtggctcacaacttgac

SEQ ID NO: 5230624 - DNA, 25 bp, Homo sapien
gtcatatctcgcaaaagaagctttt

SEQ ID NO: 5230625 - DNA, 25 bp, Homo sapien
gctaagcaggaactgatctccagct

SEQ ID NO: 5230626 - DNA, 25 bp, Homo sapien
ttatagtctttggatacgaagtgca

SEQ ID NO: 5230627 - DNA, 25 bp, Homo sapien
tatagtctttggatacgaagtgcat

SEQ ID NO: 5230628 - DNA, 25 bp, Homo sapien
gagagagtgctctcgggtatttact

SEQ ID NO: 5230629 - DNA, 25 bp, Homo sapien
tatttactccactgttaggaggcat

SEQ ID NO: 5230630 - DNA, 25 bp, Homo sapien
ctagagagagagtgctctcgggtat
